United States Patent Application Publication US 2014/0004565 A1 - sequence listing, part 15

SEQ ID NO: 248651 - RNA, 19 nt, Artificial Sequence
  Description of Artificial Sequence: Synthetic oligonucleotide
gacguuugggugguguuuu

SEQ ID NO: 248652 - RNA, 19 nt, Artificial Sequence
  Description of Artificial Sequence: Synthetic oligonucleotide
ccgacagaagagaguauga

SEQ ID NO: 248653 - RNA, 19 nt, Artificial Sequence
  Description of Artificial Sequence: Synthetic oligonucleotide
cugauuuuacacgcuuccu

SEQ ID NO: 248654 - RNA, 19 nt, Artificial Sequence
  Description of Artificial Sequence: Synthetic oligonucleotide
cacucccuagucccgcgca

SEQ ID NO: 248655 - RNA, 19 nt, Artificial Sequence
  Description of Artificial Sequence: Synthetic oligonucleotide
gggauguaggaagcaguca

SEQ ID NO: 248656 - RNA, 19 nt, Artificial Sequence
  Description of Artificial Sequence: Synthetic oligonucleotide
cuucgccccgcgcgccacg

SEQ ID NO: 248657 - RNA, 19 nt, Artificial Sequence
  Description of Artificial Sequence: Synthetic oligonucleotide
gcguccaccacaaaaucgu

SEQ ID NO: 248658 - RNA, 19 nt, Artificial Sequence
  Description of Artificial Sequence: Synthetic oligonucleotide
ucuuccggucuggcccaug

SEQ ID NO: 248659 - RNA, 19 nt, Artificial Sequence
  Description of Artificial Sequence: Synthetic oligonucleotide
gcaacugcauucagggucu

SEQ ID NO: 248660 - RNA, 19 nt, Artificial Sequence
  Description of Artificial Sequence: Synthetic oligonucleotide
ucuucgccccgcgcgccac

SEQ ID NO: 248661 - RNA, 19 nt, Artificial Sequence
  Description of Artificial Sequence: Synthetic oligonucleotide
gguguugcguggaagggau

SEQ ID NO: 248662 - RNA, 19 nt, Artificial Sequence
  Description of Artificial Sequence: Synthetic oligonucleotide
ggcuguauccuucgcugcu

SEQ ID NO: 248663 - RNA, 19 nt, Artificial Sequence
  Description of Artificial Sequence: Synthetic oligonucleotide
ccggucuggcccaugauua

SEQ ID NO: 248664 - RNA, 19 nt, Artificial Sequence
  Description of Artificial Sequence: Synthetic oligonucleotide
guguugcguggaagggaug

SEQ ID NO: 248665 - RNA, 19 nt, Artificial Sequence
  Description of Artificial Sequence: Synthetic oligonucleotide
ggucacacucucggacagc

SEQ ID NO: 248666 - RNA, 19 nt, Artificial Sequence
  Description of Artificial Sequence: Synthetic oligonucleotide
acucucggacagccaggua

SEQ ID NO: 248667 - RNA, 19 nt, Artificial Sequence
  Description of Artificial Sequence: Synthetic oligonucleotide
ccgaugcaacugcauucag

SEQ ID NO: 248668 - RNA, 19 nt, Artificial Sequence
  Description of Artificial Sequence: Synthetic oligonucleotide
gcucggugagcucuuuaua

SEQ ID NO: 248669 - RNA, 19 nt, Artificial Sequence
  Description of Artificial Sequence: Synthetic oligonucleotide
cucggaggaguguccacau

SEQ ID NO: 248670 - RNA, 19 nt, Artificial Sequence
  Description of Artificial Sequence: Synthetic oligonucleotide
gguguuugacaccgagaau

SEQ ID NO: 248671 - RNA, 19 nt, Artificial Sequence
  Description of Artificial Sequence: Synthetic oligonucleotide
gcugucguggauggucaca

SEQ ID NO: 248672 - RNA, 19 nt, Artificial Sequence
  Description of Artificial Sequence: Synthetic oligonucleotide
gguuagaggagccguccuu

SEQ ID NO: 248673 - RNA, 19 nt, Artificial Sequence
  Description of Artificial Sequence: Synthetic oligonucleotide
ccgcugaauacugcaguuc

SEQ ID NO: 248674 - RNA, 19 nt, Artificial Sequence
  Description of Artificial Sequence: Synthetic oligonucleotide
cucggacagccagguaaca

SEQ ID NO: 248675 - RNA, 19 nt, Artificial Sequence
  Description of Artificial Sequence: Synthetic oligonucleotide
gcaccgaugcaacugcauu

SEQ ID NO: 248676 - RNA, 19 nt, Artificial Sequence
  Description of Artificial Sequence: Synthetic oligonucleotide
gacuuagcauuugguccau

SEQ ID NO: 248677 - RNA, 19 nt, Artificial Sequence
  Description of Artificial Sequence: Synthetic oligonucleotide
caccggcauccaggaaagc

SEQ ID NO: 248678 - RNA, 19 nt, Artificial Sequence
  Description of Artificial Sequence: Synthetic oligonucleotide
gucauacacuuucccucuu

SEQ ID NO: 248679 - RNA, 19 nt, Artificial Sequence
  Description of Artificial Sequence: Synthetic oligonucleotide
ggacaggugcuaugacacu

SEQ ID NO: 248680 - RNA, 19 nt, Artificial Sequence
  Description of Artificial Sequence: Synthetic oligonucleotide
ccgccgacagaagagagua

SEQ ID NO: 248681 - RNA, 19 nt, Artificial Sequence
  Description of Artificial Sequence: Synthetic oligonucleotide
uucuuccggucuggcccau

SEQ ID NO: 248682 - RNA, 19 nt, Artificial Sequence
  Description of Artificial Sequence: Synthetic oligonucleotide
cucuuucgaugcccacaua

SEQ ID NO: 248683 - RNA, 19 nt, Artificial Sequence
  Description of Artificial Sequence: Synthetic oligonucleotide
guucaauauuuggcuucau

SEQ ID NO: 248684 - RNA, 19 nt, Artificial Sequence
  Description of Artificial Sequence: Synthetic oligonucleotide
gaucaccguuaaccaucau

SEQ ID NO: 248685 - RNA, 19 nt, Artificial Sequence
  Description of Artificial Sequence: Synthetic oligonucleotide
gcuaugacacuggacucuu

SEQ ID NO: 248686 - RNA, 19 nt, Artificial Sequence
  Description of Artificial Sequence: Synthetic oligonucleotide
cuaugacacuggacucuuu

SEQ ID NO: 248687 - RNA, 19 nt, Artificial Sequence
  Description of Artificial Sequence: Synthetic oligonucleotide
ccguucuuuccaaaauuuu

SEQ ID NO: 248688 - RNA, 19 nt, Artificial Sequence
  Description of Artificial Sequence: Synthetic oligonucleotide
ccuuucggguugcguccac

SEQ ID NO: 248689 - RNA, 19 nt, Artificial Sequence
  Description of Artificial Sequence: Synthetic oligonucleotide
ccgaggagggcaacuuucu

SEQ ID NO: 248690 - RNA, 19 nt, Artificial Sequence
  Description of Artificial Sequence: Synthetic oligonucleotide
cuccaacaaaccggucccu

SEQ ID NO: 248691 - RNA, 19 nt, Artificial Sequence
  Description of Artificial Sequence: Synthetic oligonucleotide
cccuagucccgcgcaauga

SEQ ID NO: 248692 - RNA, 19 nt, Artificial Sequence
  Description of Artificial Sequence: Synthetic oligonucleotide
cguuaaccaucauaacuuu

SEQ ID NO: 248693 - RNA, 19 nt, Artificial Sequence
  Description of Artificial Sequence: Synthetic oligonucleotide
ggacguuugggugguguuu

SEQ ID NO: 248694 - RNA, 19 nt, Artificial Sequence
  Description of Artificial Sequence: Synthetic oligonucleotide
gcccacaguccucaagguu

SEQ ID NO: 248695 - RNA, 19 nt, Artificial Sequence
  Description of Artificial Sequence: Synthetic oligonucleotide
ggucuggcccaugauuauu

SEQ ID NO: 248696 - RNA, 19 nt, Artificial Sequence
  Description of Artificial Sequence: Synthetic oligonucleotide
cucccuagucccgcgcaau

SEQ ID NO: 248697 - RNA, 19 nt, Artificial Sequence
  Description of Artificial Sequence: Synthetic oligonucleotide
cccgcugaauacugcaguu

SEQ ID NO: 248698 - RNA, 19 nt, Artificial Sequence
  Description of Artificial Sequence: Synthetic oligonucleotide
ccggucccuucucagauuu

SEQ ID NO: 248699 - RNA, 19 nt, Artificial Sequence
  Description of Artificial Sequence: Synthetic oligonucleotide
gccagguaacauggacacu

SEQ ID NO: 248700 - RNA, 19 nt, Artificial Sequence
  Description of Artificial Sequence: Synthetic oligonucleotide
ggguugcguccaccacaaa

SEQ ID NO: 248701 - RNA, 19 nt, Artificial Sequence
  Description of Artificial Sequence: Synthetic oligonucleotide
gccugccacaucagacggu

SEQ ID NO: 248702 - RNA, 19 nt, Artificial Sequence
  Description of Artificial Sequence: Synthetic oligonucleotide
ggggugcauucgggaggca

SEQ ID NO: 248703 - RNA, 19 nt, Artificial Sequence
  Description of Artificial Sequence: Synthetic oligonucleotide
cccgcgcaaugagcucaca

SEQ ID NO: 248704 - RNA, 19 nt, Artificial Sequence
  Description of Artificial Sequence: Synthetic oligonucleotide
cgccgacagaagagaguau

SEQ ID NO: 248705 - RNA, 19 nt, Artificial Sequence
  Description of Artificial Sequence: Synthetic oligonucleotide
aguuauacaacauggaguc

SEQ ID NO: 248706 - RNA, 19 nt, Artificial Sequence
  Description of Artificial Sequence: Synthetic oligonucleotide
aauguuuuagaagagucac

SEQ ID NO: 248707 - RNA, 19 nt, Artificial Sequence
  Description of Artificial Sequence: Synthetic oligonucleotide
aagagucacacacacacac

SEQ ID NO: 248708 - RNA, 19 nt, Artificial Sequence
  Description of Artificial Sequence: Synthetic oligonucleotide
uacgaaacaaaccuggcag

SEQ ID NO: 248709 - RNA, 19 nt, Artificial Sequence
  Description of Artificial Sequence: Synthetic oligonucleotide
auaguuuauuuucacgugg

SEQ ID NO: 248710 - RNA, 19 nt, Artificial Sequence
  Description of Artificial Sequence: Synthetic oligonucleotide
uauagggcuagauauagga

SEQ ID NO: 248711 - RNA, 19 nt, Artificial Sequence
  Description of Artificial Sequence: Synthetic oligonucleotide
aaaggugacggcuaaauuu

SEQ ID NO: 248712 - RNA, 19 nt, Artificial Sequence
  Description of Artificial Sequence: Synthetic oligonucleotide
gagacguacuuauaguugg

SEQ ID NO: 248713 - RNA, 19 nt, Artificial Sequence
  Description of Artificial Sequence: Synthetic oligonucleotide
aacacagucguagcgauuc

SEQ ID NO: 248714 - RNA, 19 nt, Artificial Sequence
  Description of Artificial Sequence: Synthetic oligonucleotide
uugcacucgaagaucaacg

SEQ ID NO: 248715 - RNA, 19 nt, Artificial Sequence
  Description of Artificial Sequence: Synthetic oligonucleotide
uaacggagcagcuuguagg

SEQ ID NO: 248716 - RNA, 19 nt, Artificial Sequence
  Description of Artificial Sequence: Synthetic oligonucleotide
uauauagggcuagauauag

SEQ ID NO: 248717 - RNA, 19 nt, Artificial Sequence
  Description of Artificial Sequence: Synthetic oligonucleotide
uaugaaccggcuaacauuc

SEQ ID NO: 248718 - RNA, 19 nt, Artificial Sequence
  Description of Artificial Sequence: Synthetic oligonucleotide
uacguauucgcagacaaag

SEQ ID NO: 248719 - RNA, 19 nt, Artificial Sequence
  Description of Artificial Sequence: Synthetic oligonucleotide
aaaaguacaugaccugcca

SEQ ID NO: 248720 - RNA, 19 nt, Artificial Sequence
  Description of Artificial Sequence: Synthetic oligonucleotide
acguacuuauaguuggugg

SEQ ID NO: 248721 - RNA, 19 nt, Artificial Sequence
  Description of Artificial Sequence: Synthetic oligonucleotide
ucaugauccacgcucucag

SEQ ID NO: 248722 - RNA, 19 nt, Artificial Sequence
  Description of Artificial Sequence: Synthetic oligonucleotide
acacgauugcggcaguucc

SEQ ID NO: 248723 - RNA, 19 nt, Artificial Sequence
  Description of Artificial Sequence: Synthetic oligonucleotide
ucgguaaugguagaaaaca

SEQ ID NO: 248724 - RNA, 19 nt, Artificial Sequence
  Description of Artificial Sequence: Synthetic oligonucleotide
ucggccauccuuaucauac

SEQ ID NO: 248725 - RNA, 19 nt, Artificial Sequence
  Description of Artificial Sequence: Synthetic oligonucleotide
ugauugcacucgaagauca

SEQ ID NO: 248726 - RNA, 19 nt, Artificial Sequence
  Description of Artificial Sequence: Synthetic oligonucleotide
uauacgaaacaaaccuggc

SEQ ID NO: 248727 - RNA, 19 nt, Artificial Sequence
  Description of Artificial Sequence: Synthetic oligonucleotide
uacgcaguacugcaaauga

SEQ ID NO: 248728 - RNA, 19 nt, Artificial Sequence
  Description of Artificial Sequence: Synthetic oligonucleotide
aaugaauguuuuagaagag

SEQ ID NO: 248729 - RNA, 19 nt, Artificial Sequence
  Description of Artificial Sequence: Synthetic oligonucleotide
uguccuguguccgauaaag

SEQ ID NO: 248730 - RNA, 19 nt, Artificial Sequence
  Description of Artificial Sequence: Synthetic oligonucleotide
uguaagggagcuagugucc

SEQ ID NO: 248731 - RNA, 19 nt, Artificial Sequence
  Description of Artificial Sequence: Synthetic oligonucleotide
uguacaccggcccaauuca

SEQ ID NO: 248732 - RNA, 19 nt, Artificial Sequence
  Description of Artificial Sequence: Synthetic oligonucleotide
ucuacacagccugagaaug

SEQ ID NO: 248733 - RNA, 19 nt, Artificial Sequence
  Description of Artificial Sequence: Synthetic oligonucleotide
gaaccgagcaucaaugcag

SEQ ID NO: 248734 - RNA, 19 nt, Artificial Sequence
  Description of Artificial Sequence: Synthetic oligonucleotide
uccuguguccgauaaagcu

SEQ ID NO: 248735 - RNA, 19 nt, Artificial Sequence
  Description of Artificial Sequence: Synthetic oligonucleotide
agaucaacggugguucugc

SEQ ID NO: 248736 - RNA, 19 nt, Artificial Sequence
  Description of Artificial Sequence: Synthetic oligonucleotide
agugccuuauaguagccug

SEQ ID NO: 248737 - RNA, 19 nt, Artificial Sequence
  Description of Artificial Sequence: Synthetic oligonucleotide
auauucacggcaugcaggu

SEQ ID NO: 248738 - RNA, 19 nt, Artificial Sequence
  Description of Artificial Sequence: Synthetic oligonucleotide
gagucacacacacacacac

SEQ ID NO: 248739 - RNA, 19 nt, Artificial Sequence
  Description of Artificial Sequence: Synthetic oligonucleotide
uuacccgcagugcagaagu

SEQ ID NO: 248740 - RNA, 19 nt, Artificial Sequence
  Description of Artificial Sequence: Synthetic oligonucleotide
agcucuccuacguauucgc

SEQ ID NO: 248741 - RNA, 19 nt, Artificial Sequence
  Description of Artificial Sequence: Synthetic oligonucleotide
uucgguaaugguagaaaac

SEQ ID NO: 248742 - RNA, 19 nt, Artificial Sequence
  Description of Artificial Sequence: Synthetic oligonucleotide
uuaugaaccggcuaacauu

SEQ ID NO: 248743 - RNA, 19 nt, Artificial Sequence
  Description of Artificial Sequence: Synthetic oligonucleotide
agcgauucucccuggcugc

SEQ ID NO: 248744 - RNA, 19 nt, Artificial Sequence
  Description of Artificial Sequence: Synthetic oligonucleotide
ucaucuacgcauacgcagu

SEQ ID NO: 248745 - RNA, 19 nt, Artificial Sequence
  Description of Artificial Sequence: Synthetic oligonucleotide
cacacacacacacacacac

SEQ ID NO: 248746 - RNA, 19 nt, Artificial Sequence
  Description of Artificial Sequence: Synthetic oligonucleotide
gucacacacacacacacac

SEQ ID NO: 248747 - RNA, 19 nt, Artificial Sequence
  Description of Artificial Sequence: Synthetic oligonucleotide
ucaacggugguucugccau

SEQ ID NO: 248748 - RNA, 19 nt, Artificial Sequence
  Description of Artificial Sequence: Synthetic oligonucleotide
auacgaaacaaaccuggca

SEQ ID NO: 248749 - RNA, 19 nt, Artificial Sequence
  Description of Artificial Sequence: Synthetic oligonucleotide
caugaacacgcgcacaggc

SEQ ID NO: 248750 - RNA, 19 nt, Artificial Sequence
  Description of Artificial Sequence: Synthetic oligonucleotide
guaagaauccucuucccga

SEQ ID NO: 248751 - RNA, 19 nt, Artificial Sequence
  Description of Artificial Sequence: Synthetic oligonucleotide
uuucaucaaagugaguggu

SEQ ID NO: 248752 - RNA, 19 nt, Artificial Sequence
  Description of Artificial Sequence: Synthetic oligonucleotide
aacucacaaguuauacaac

SEQ ID NO: 248753 - RNA, 19 nt, Artificial Sequence
  Description of Artificial Sequence: Synthetic oligonucleotide
cuguaagggagcuaguguc

SEQ ID NO: 248754 - RNA, 19 nt, Artificial Sequence
  Description of Artificial Sequence: Synthetic oligonucleotide
uagcgauucucccuggcug

SEQ ID NO: 248755 - RNA, 19 nt, Artificial Sequence
  Description of Artificial Sequence: Synthetic oligonucleotide
ugaaguuuacccgcagugc

SEQ ID NO: 248756 - RNA, 19 nt, Artificial Sequence
  Description of Artificial Sequence: Synthetic oligonucleotide
uuccucgcaaagaaacacc

SEQ ID NO: 248757 - RNA, 19 nt, Artificial Sequence
  Description of Artificial Sequence: Synthetic oligonucleotide
uccuaauguucgguaaugg

SEQ ID NO: 248758 - RNA, 19 nt, Artificial Sequence
  Description of Artificial Sequence: Synthetic oligonucleotide
acgcuguuuguacaccggc

SEQ ID NO: 248759 - RNA, 19 nt, Artificial Sequence
  Description of Artificial Sequence: Synthetic oligonucleotide
ugcguucauacccucgagc

SEQ ID NO: 248760 - RNA, 19 nt, Artificial Sequence
  Description of Artificial Sequence: Synthetic oligonucleotide
aaaagcgaacccacauuuc

SEQ ID NO: 248761 - RNA, 19 nt, Artificial Sequence
  Description of Artificial Sequence: Synthetic oligonucleotide
aaagugaguggugggucgg

SEQ ID NO: 248762 - RNA, 19 nt, Artificial Sequence
  Description of Artificial Sequence: Synthetic oligonucleotide
agugccgacacuugggaga

SEQ ID NO: 248763 - RNA, 19 nt, Artificial Sequence
  Description of Artificial Sequence: Synthetic oligonucleotide
guacugaagaaggcgaucc

SEQ ID NO: 248764 - RNA, 19 nt, Artificial Sequence
  Description of Artificial Sequence: Synthetic oligonucleotide
gaacaagaaauggucugag

SEQ ID NO: 248765 - RNA, 19 nt, Artificial Sequence
  Description of Artificial Sequence: Synthetic oligonucleotide
auuuucacguggugaguag

SEQ ID NO: 248766 - RNA, 19 nt, Artificial Sequence
  Description of Artificial Sequence: Synthetic oligonucleotide
agaaccgagcaucaaugca

SEQ ID NO: 248767 - RNA, 19 nt, Artificial Sequence
  Description of Artificial Sequence: Synthetic oligonucleotide
uugcaccacacgauugcgg

SEQ ID NO: 248768 - RNA, 19 nt, Artificial Sequence
  Description of Artificial Sequence: Synthetic oligonucleotide
agauaucagcucuccuacg

SEQ ID NO: 248769 - RNA, 19 nt, Artificial Sequence
  Description of Artificial Sequence: Synthetic oligonucleotide
aguauacgaaacaaaccug

SEQ ID NO: 248770 - RNA, 19 nt, Artificial Sequence
  Description of Artificial Sequence: Synthetic oligonucleotide
uuuguccuaauguucggua

SEQ ID NO: 248771 - RNA, 19 nt, Artificial Sequence
  Description of Artificial Sequence: Synthetic oligonucleotide
aauguucgguaaugguaga

SEQ ID NO: 248772 - RNA, 19 nt, Artificial Sequence
  Description of Artificial Sequence: Synthetic oligonucleotide
caagaguggugcuuuguug

SEQ ID NO: 248773 - RNA, 19 nt, Artificial Sequence
  Description of Artificial Sequence: Synthetic oligonucleotide
agggcugcgcuugagugcc

SEQ ID NO: 248774 - RNA, 19 nt, Artificial Sequence
  Description of Artificial Sequence: Synthetic oligonucleotide
aguaacaucugaaucccga

SEQ ID NO: 248775 - RNA, 19 nt, Artificial Sequence
  Description of Artificial Sequence: Synthetic oligonucleotide
guauucgcagacaaaggug

SEQ ID NO: 248776 - RNA, 19 nt, Artificial Sequence
  Description of Artificial Sequence: Synthetic oligonucleotide
auauugaugucaggcugac

SEQ ID NO: 248777 - RNA, 19 nt, Artificial Sequence
  Description of Artificial Sequence: Synthetic oligonucleotide
acaagguugggcucgcagu

SEQ ID NO: 248778 - RNA, 19 nt, Artificial Sequence
  Description of Artificial Sequence: Synthetic oligonucleotide
agccugaucagacaguaua

SEQ ID NO: 248779 - RNA, 19 nt, Artificial Sequence
  Description of Artificial Sequence: Synthetic oligonucleotide
ugacggcuaaauuuauuuc

SEQ ID NO: 248780 - RNA, 19 nt, Artificial Sequence
  Description of Artificial Sequence: Synthetic oligonucleotide
ggcaugauugcacucgaag

SEQ ID NO: 248781 - RNA, 19 nt, Artificial Sequence
  Description of Artificial Sequence: Synthetic oligonucleotide
uugacgucccaaaagcguu

SEQ ID NO: 248782 - RNA, 19 nt, Artificial Sequence
  Description of Artificial Sequence: Synthetic oligonucleotide
gaguagaaaccacaccaga

SEQ ID NO: 248783 - RNA, 19 nt, Artificial Sequence
  Description of Artificial Sequence: Synthetic oligonucleotide
augaauguuuuagaagagu

SEQ ID NO: 248784 - RNA, 19 nt, Artificial Sequence
  Description of Artificial Sequence: Synthetic oligonucleotide
cuaacggagcagcuuguag

SEQ ID NO: 248785 - RNA, 19 nt, Artificial Sequence
  Description of Artificial Sequence: Synthetic oligonucleotide
aucccgagaaagaaagagg

SEQ ID NO: 248786 - RNA, 19 nt, Artificial Sequence
  Description of Artificial Sequence: Synthetic oligonucleotide
aaggugacggcuaaauuua

SEQ ID NO: 248787 - RNA, 19 nt, Artificial Sequence
  Description of Artificial Sequence: Synthetic oligonucleotide
auacccucgagcaaugucu

SEQ ID NO: 248788 - RNA, 19 nt, Artificial Sequence
  Description of Artificial Sequence: Synthetic oligonucleotide
guuggaugggcgcaucagc

SEQ ID NO: 248789 - RNA, 19 nt, Artificial Sequence
  Description of Artificial Sequence: Synthetic oligonucleotide
accggcccaauucaugauc

SEQ ID NO: 248790 - RNA, 19 nt, Artificial Sequence
  Description of Artificial Sequence: Synthetic oligonucleotide
ccugucaauguucaugggg

SEQ ID NO: 248791 - RNA, 19 nt, Artificial Sequence
  Description of Artificial Sequence: Synthetic oligonucleotide
aaguuuacccgcagugcag

SEQ ID NO: 248792 - RNA, 19 nt, Artificial Sequence
  Description of Artificial Sequence: Synthetic oligonucleotide
aggcgaguacugaagaagg

SEQ ID NO: 248793 - RNA, 19 nt, Artificial Sequence
  Description of Artificial Sequence: Synthetic oligonucleotide
ggucuaacggagcagcuug

SEQ ID NO: 248794 - RNA, 19 nt, Artificial Sequence
  Description of Artificial Sequence: Synthetic oligonucleotide
agcagucaucuacgcauac

SEQ ID NO: 248795 - RNA, 19 nt, Artificial Sequence
  Description of Artificial Sequence: Synthetic oligonucleotide
uguucgguaaugguagaaa

SEQ ID NO: 248796 - RNA, 19 nt, Artificial Sequence
  Description of Artificial Sequence: Synthetic oligonucleotide
acgaaacaaaccuggcagu

SEQ ID NO: 248797 - RNA, 19 nt, Artificial Sequence
  Description of Artificial Sequence: Synthetic oligonucleotide
ucagcuucggaaucagaua

SEQ ID NO: 248798 - RNA, 19 nt, Artificial Sequence
  Description of Artificial Sequence: Synthetic oligonucleotide
auugcggcaguuccuccag

SEQ ID NO: 248799 - RNA, 19 nt, Artificial Sequence
  Description of Artificial Sequence: Synthetic oligonucleotide
ucacacacacacacacaca

SEQ ID NO: 248800 - RNA, 19 nt, Artificial Sequence
  Description of Artificial Sequence: Synthetic oligonucleotide
aagugaguggugggucggc

SEQ ID NO: 248801 - RNA, 19 nt, Artificial Sequence
  Description of Artificial Sequence: Synthetic oligonucleotide
ugcgucaacggaacuggcu

SEQ ID NO: 248802 - RNA, 19 nt, Artificial Sequence
  Description of Artificial Sequence: Synthetic oligonucleotide
uccgauaaagcugcagccu

SEQ ID NO: 248803 - RNA, 19 nt, Artificial Sequence
  Description of Artificial Sequence: Synthetic oligonucleotide
gacguacuuauaguuggug

SEQ ID NO: 248804 - RNA, 19 nt, Artificial Sequence
  Description of Artificial Sequence: Synthetic oligonucleotide
cacacacacacacacaaaa

SEQ ID NO: 248805 - RNA, 19 nt, Artificial Sequence
  Description of Artificial Sequence: Synthetic oligonucleotide
auucaugauccacgcucuc

SEQ ID NO: 248806 - RNA, 19 nt, Artificial Sequence
  Description of Artificial Sequence: Synthetic oligonucleotide
ccggcuaacauucccauag

SEQ ID NO: 248807 - RNA, 19 nt, Artificial Sequence
  Description of Artificial Sequence: Synthetic oligonucleotide
guucgguaaugguagaaaa

SEQ ID NO: 248808 - RNA, 19 nt, Artificial Sequence
  Description of Artificial Sequence: Synthetic oligonucleotide
auacgcaguacugcaaaug

SEQ ID NO: 248809 - RNA, 19 nt, Artificial Sequence
  Description of Artificial Sequence: Synthetic oligonucleotide
uuuacccgcagugcagaag

SEQ ID NO: 248810 - RNA, 19 nt, Artificial Sequence
  Description of Artificial Sequence: Synthetic oligonucleotide
cuccacggcuguaagggag

SEQ ID NO: 248811 - RNA, 19 nt, Artificial Sequence
  Description of Artificial Sequence: Synthetic oligonucleotide
auucgcagacaaaggugcc

SEQ ID NO: 248812 - RNA, 19 nt, Artificial Sequence
  Description of Artificial Sequence: Synthetic oligonucleotide
ggugaguagaaaccacacc

SEQ ID NO: 248813 - RNA, 19 nt, Artificial Sequence
  Description of Artificial Sequence: Synthetic oligonucleotide
cacacacacacacacacaa

SEQ ID NO: 248814 - RNA, 19 nt, Artificial Sequence
  Description of Artificial Sequence: Synthetic oligonucleotide
auauagggcuagauauagg

SEQ ID NO: 248815 - RNA, 19 nt, Artificial Sequence
  Description of Artificial Sequence: Synthetic oligonucleotide
  modified_base (7)..(7): a, c, u, g, unknown or other
ugcggcngcugcagagagg

SEQ ID NO: 248816 - RNA, 19 nt, Artificial Sequence
  Description of Artificial Sequence: Synthetic oligonucleotide
uucgcagacaaaggugccc

SEQ ID NO: 248817 - RNA, 19 nt, Artificial Sequence
  Description of Artificial Sequence: Synthetic oligonucleotide
ggcuaaauuuauuucaacu

SEQ ID NO: 248818 - RNA, 19 nt, Artificial Sequence
  Description of Artificial Sequence: Synthetic oligonucleotide
cuucggaaucagauaucag

SEQ ID NO: 248819 - RNA, 19 nt, Artificial Sequence
  Description of Artificial Sequence: Synthetic oligonucleotide
acgauugcggcaguuccuc

SEQ ID NO: 248820 - RNA, 19 nt, Artificial Sequence
  Description of Artificial Sequence: Synthetic oligonucleotide
caacggaacuggcuggggc

SEQ ID NO: 248821 - RNA, 19 nt, Artificial Sequence
  Description of Artificial Sequence: Synthetic oligonucleotide
cauucccauagaaccgagc

SEQ ID NO: 248822 - RNA, 19 nt, Artificial Sequence
  Description of Artificial Sequence: Synthetic oligonucleotide
uuucaacuacaagacuuaa

SEQ ID NO: 248823 - RNA, 19 nt, Artificial Sequence
  Description of Artificial Sequence: Synthetic oligonucleotide
cauccuuaucauaccagca

SEQ ID NO: 248824 - RNA, 19 nt, Artificial Sequence
  Description of Artificial Sequence: Synthetic oligonucleotide
acguauucgcagacaaagg

SEQ ID NO: 248825 - RNA, 19 nt, Artificial Sequence
  Description of Artificial Sequence: Synthetic oligonucleotide
ugaccacgcuguuuguaca

SEQ ID NO: 248826 - RNA, 19 nt, Artificial Sequence
  Description of Artificial Sequence: Synthetic oligonucleotide
ccggauauugaugucaggc

SEQ ID NO: 248827 - RNA, 19 nt, Artificial Sequence
  Description of Artificial Sequence: Synthetic oligonucleotide
gcgaguacugaagaaggcg

SEQ ID NO: 248828 - RNA, 19 nt, Artificial Sequence
  Description of Artificial Sequence: Synthetic oligonucleotide
ggcaauucauagagggucg

SEQ ID NO: 248829 - RNA, 19 nt, Artificial Sequence
  Description of Artificial Sequence: Synthetic oligonucleotide
ucaggcgaguacugaagaa

SEQ ID NO: 248830 - RNA, 19 nt, Artificial Sequence
  Description of Artificial Sequence: Synthetic oligonucleotide
cauacccucgagcaauguc

SEQ ID NO: 248831 - RNA, 19 nt, Artificial Sequence
  Description of Artificial Sequence: Synthetic oligonucleotide
ucgagcaaugucucugcuc

SEQ ID NO: 248832 - RNA, 19 nt, Artificial Sequence
  Description of Artificial Sequence: Synthetic oligonucleotide
gagugccgacacuugggag

SEQ ID NO: 248833 - RNA, 19 nt, Artificial Sequence
  Description of Artificial Sequence: Synthetic oligonucleotide
gcuaacauucccauagaac

SEQ ID NO: 248834 - RNA, 19 nt, Artificial Sequence
  Description of Artificial Sequence: Synthetic oligonucleotide
ucgaagaucaacggugguu

SEQ ID NO: 248835 - RNA, 19 nt, Artificial Sequence
  Description of Artificial Sequence: Synthetic oligonucleotide
uucaccaugcgaccccgau

SEQ ID NO: 248836 - RNA, 19 nt, Artificial Sequence
  Description of Artificial Sequence: Synthetic oligonucleotide
ggagacguacuuauaguug

SEQ ID NO: 248837 - RNA, 19 nt, Artificial Sequence
  Description of Artificial Sequence: Synthetic oligonucleotide
aucuacgcauacgcaguac

SEQ ID NO: 248838 - RNA, 19 nt, Artificial Sequence
  Description of Artificial Sequence: Synthetic oligonucleotide
ucaacggaacuggcugggg

SEQ ID NO: 248839 - RNA, 19 nt, Artificial Sequence
  Description of Artificial Sequence: Synthetic oligonucleotide
aaccgagcaucaaugcagu

SEQ ID NO: 248840 - RNA, 19 nt, Artificial Sequence
  Description of Artificial Sequence: Synthetic oligonucleotide
guggugguuuaugaaccgg

SEQ ID NO: 248841 - RNA, 19 nt, Artificial Sequence
  Description of Artificial Sequence: Synthetic oligonucleotide
gucaacggaacuggcuggg

SEQ ID NO: 248842 - RNA, 19 nt, Artificial Sequence
  Description of Artificial Sequence: Synthetic oligonucleotide
ugacgucccaaaagcguuc

SEQ ID NO: 248843 - RNA, 19 nt, Artificial Sequence
  Description of Artificial Sequence: Synthetic oligonucleotide
cccuugacgucccaaaagc

SEQ ID NO: 248844 - RNA, 19 nt, Artificial Sequence
  Description of Artificial Sequence: Synthetic oligonucleotide
caucauagcauguggcuua

SEQ ID NO: 248845 - RNA, 19 nt, Artificial Sequence
  Description of Artificial Sequence: Synthetic oligonucleotide
ggugcuuuguuggaugggc

SEQ ID NO: 248846 - RNA, 19 nt, Artificial Sequence
  Description of Artificial Sequence: Synthetic oligonucleotide
ugagucccgaagugcuuug

SEQ ID NO: 248847 - RNA, 19 nt, Artificial Sequence
  Description of Artificial Sequence: Synthetic oligonucleotide
gcgucaacggaacuggcug

SEQ ID NO: 248848 - RNA, 19 nt, Artificial Sequence
  Description of Artificial Sequence: Synthetic oligonucleotide
ccggcaacugaaaagcuug

SEQ ID NO: 248849 - RNA, 19 nt, Artificial Sequence
  Description of Artificial Sequence: Synthetic oligonucleotide
cuugacgucccaaaagcgu

SEQ ID NO: 248850 - RNA, 19 nt, Artificial Sequence
  Description of Artificial Sequence: Synthetic oligonucleotide
gugugacaugaacacgcgc

SEQ ID NO: 248851 - RNA, 19 nt, Artificial Sequence
  Description of Artificial Sequence: Synthetic oligonucleotide
uacccucgagcaaugucuc

SEQ ID NO: 248852 - RNA, 19 nt, Artificial Sequence
  Description of Artificial Sequence: Synthetic oligonucleotide
aguuuacccgcagugcaga

SEQ ID NO: 248853 - RNA, 19 nt, Artificial Sequence
  Description of Artificial Sequence: Synthetic oligonucleotide
gguaaugguagaaaacaaa

SEQ ID NO: 248854 - RNA, 19 nt, Artificial Sequence
  Description of Artificial Sequence: Synthetic oligonucleotide
gugacggcuaaauuuauuu

SEQ ID NO: 248855 - RNA, 19 nt, Artificial Sequence
  Description of Artificial Sequence: Synthetic oligonucleotide
uggugcuuuguuggauggg

SEQ ID NO: 248856 - RNA, 19 nt, Artificial Sequence
  Description of Artificial Sequence: Synthetic oligonucleotide
ccuugacgucccaaaagcg

SEQ ID NO: 248857 - RNA, 19 nt, Artificial Sequence
  Description of Artificial Sequence: Synthetic oligonucleotide
gaaccggcuaacauuccca

SEQ ID NO: 248858 - RNA, 19 nt, Artificial Sequence
  Description of Artificial Sequence: Synthetic oligonucleotide
gacgucccaaaagcguucc

SEQ ID NO: 248859 - RNA, 19 nt, Artificial Sequence
  Description of Artificial Sequence: Synthetic oligonucleotide
acgcucucaguggccaugc

SEQ ID NO: 248860 - RNA, 19 nt, Artificial Sequence
  Description of Artificial Sequence: Synthetic oligonucleotide
ggagcagucaucuacgcau

SEQ ID NO: 248861 - RNA, 19 nt, Artificial Sequence
  Description of Artificial Sequence: Synthetic oligonucleotide
accguugucuguguuuugu

SEQ ID NO: 248862 - RNA, 19 nt, Artificial Sequence
  Description of Artificial Sequence: Synthetic oligonucleotide
agacaguauacgaaacaaa

SEQ ID NO: 248863 - RNA, 19 nt, Artificial Sequence
  Description of Artificial Sequence: Synthetic oligonucleotide
cugaucucgcggcucguug

SEQ ID NO: 248864 - RNA, 19 nt, Artificial Sequence
  Description of Artificial Sequence: Synthetic oligonucleotide
uugcccuugacgucccaaa

SEQ ID NO: 248865 - RNA, 19 nt, Artificial Sequence
  Description of Artificial Sequence: Synthetic oligonucleotide
aagcgaacccacauuucau

SEQ ID NO: 248866 - RNA, 19 nt, Artificial Sequence
  Description of Artificial Sequence: Synthetic oligonucleotide
gaagagucacacacacaca

SEQ ID NO: 248867 - RNA, 19 nt, Artificial Sequence
  Description of Artificial Sequence: Synthetic oligonucleotide
gcuugauauauagggcuag

SEQ ID NO: 248868 - RNA, 19 nt, Artificial Sequence
  Description of Artificial Sequence: Synthetic oligonucleotide
cuuguaggugacgguggcc

SEQ ID NO: 248869 - RNA, 19 nt, Artificial Sequence
  Description of Artificial Sequence: Synthetic oligonucleotide
augaaccggcuaacauucc

SEQ ID NO: 248870 - RNA, 19 nt, Artificial Sequence
  Description of Artificial Sequence: Synthetic oligonucleotide
caugcgaccccgauggucu

SEQ ID NO: 248871 - RNA, 19 nt, Artificial Sequence
  Description of Artificial Sequence: Synthetic oligonucleotide
gauauccuggagggagcgc

SEQ ID NO: 248872 - RNA, 19 nt, Artificial Sequence
  Description of Artificial Sequence: Synthetic oligonucleotide
uccuacguauucgcagaca

SEQ ID NO: 248873 - RNA, 19 nt, Artificial Sequence
  Description of Artificial Sequence: Synthetic oligonucleotide
ugccuuauaguagccugau

SEQ ID NO: 248874 - RNA, 19 nt, Artificial Sequence
  Description of Artificial Sequence: Synthetic oligonucleotide
acccgcagugcagaaguag

SEQ ID NO: 248875 - RNA, 19 nt, Artificial Sequence
  Description of Artificial Sequence: Synthetic oligonucleotide
caccggcaauucauagagg

SEQ ID NO: 248876 - RNA, 19 nt, Artificial Sequence
  Description of Artificial Sequence: Synthetic oligonucleotide
acgcaguacugcaaaugag

SEQ ID NO: 248877 - RNA, 19 nt, Artificial Sequence
  Description of Artificial Sequence: Synthetic oligonucleotide
ugggcgcaucagcucauac

SEQ ID NO: 248878 - RNA, 19 nt, Artificial Sequence
  Description of Artificial Sequence: Synthetic oligonucleotide
  modified_base (8)..(8): a, c, u, g, unknown or other
gugcggcngcugcagagag

SEQ ID NO: 248879 - RNA, 19 nt, Artificial Sequence
  Description of Artificial Sequence: Synthetic oligonucleotide
acgucacgcaguucuggga

SEQ ID NO: 248880 - RNA, 19 nt, Artificial Sequence
  Description of Artificial Sequence: Synthetic oligonucleotide
acaccaguaagaggcuuga

SEQ ID NO: 248881 - RNA, 19 nt, Artificial Sequence
  Description of Artificial Sequence: Synthetic oligonucleotide
aaccucuccacggcuguaa

SEQ ID NO: 248882 - RNA, 19 nt, Artificial Sequence
  Description of Artificial Sequence: Synthetic oligonucleotide
agagucacacacacacaca

SEQ ID NO: 248883 - RNA, 19 nt, Artificial Sequence
  Description of Artificial Sequence: Synthetic oligonucleotide
  modified_base (6)..(6): a, c, u, g, unknown or other
gcggcngcugcagagaggc

SEQ ID NO: 248884 - RNA, 19 nt, Artificial Sequence
  Description of Artificial Sequence: Synthetic oligonucleotide
cucgcaguggugguuuaug

SEQ ID NO: 248885 - RNA, 19 nt, Artificial Sequence
  Description of Artificial Sequence: Synthetic oligonucleotide
agccaaaagacugcucuua

SEQ ID NO: 248886 - RNA, 19 nt, Artificial Sequence
  Description of Artificial Sequence: Synthetic oligonucleotide
ccaaaagcguuccccguag

SEQ ID NO: 248887 - RNA, 19 nt, Artificial Sequence
  Description of Artificial Sequence: Synthetic oligonucleotide
cuccuacguauucgcagac

SEQ ID NO: 248888 - RNA, 19 nt, Artificial Sequence
  Description of Artificial Sequence: Synthetic oligonucleotide
ggugggacauaacucacua

SEQ ID NO: 248889 - RNA, 19 nt, Artificial Sequence
  Description of Artificial Sequence: Synthetic oligonucleotide
ucuaacggagcagcuugua

SEQ ID NO: 248890 - RNA, 19 nt, Artificial Sequence
  Description of Artificial Sequence: Synthetic oligonucleotide
ggcuguaagggagcuagug

SEQ ID NO: 248891 - RNA, 19 nt, Artificial Sequence
  Description of Artificial Sequence: Synthetic oligonucleotide
ccacgcuguuuguacaccg

SEQ ID NO: 248892 - RNA, 19 nt, Artificial Sequence
  Description of Artificial Sequence: Synthetic oligonucleotide
gacacuugggagacccaca

SEQ ID NO: 248893 - RNA, 19 nt, Artificial Sequence
  Description of Artificial Sequence: Synthetic oligonucleotide
  modified_base (9)..(9): a, c, u, g, unknown or other
agugcggcngcugcagaga

SEQ ID NO: 248894 - RNA, 19 nt, Artificial Sequence
  Description of Artificial Sequence: Synthetic oligonucleotide
ugcucaccgucuucucaac

SEQ ID NO: 248895 - RNA, 19 nt, Artificial Sequence
  Description of Artificial Sequence: Synthetic oligonucleotide
acauucccauagaaccgag

SEQ ID NO: 248896 - RNA, 19 nt, Artificial Sequence
  Description of Artificial Sequence: Synthetic oligonucleotide
cagcuucggaaucagauau

SEQ ID NO: 248897 - RNA, 19 nt, Artificial Sequence
  Description of Artificial Sequence: Synthetic oligonucleotide
agucacacacacacacaca

SEQ ID NO: 248898 - RNA, 19 nt, Artificial Sequence
  Description of Artificial Sequence: Synthetic oligonucleotide
gcgaacccacauuucauca

SEQ ID NO: 248899 - RNA, 19 nt, Artificial Sequence
  Description of Artificial Sequence: Synthetic oligonucleotide
cacacgauugcggcaguuc

SEQ ID NO: 248900 - RNA, 19 nt, Artificial Sequence
  Description of Artificial Sequence: Synthetic oligonucleotide
ggagggagcgcacacccca

SEQ ID NO: 248901 - RNA, 19 nt, Artificial Sequence
  Description of Artificial Sequence: Synthetic oligonucleotide
accaagaguggugcuuugu

SEQ ID NO: 248902 - RNA, 19 nt, Artificial Sequence
  Description of Artificial Sequence: Synthetic oligonucleotide
auguucgguaaugguagaa

SEQ ID NO: 248903 - RNA, 19 nt, Artificial Sequence
  Description of Artificial Sequence: Synthetic oligonucleotide
cugcgucaacggaacuggc

SEQ ID NO: 248904 - RNA, 19 nt, Artificial Sequence
  Description of Artificial Sequence: Synthetic oligonucleotide
uagccugaucagacaguau

SEQ ID NO: 248905 - RNA, 19 nt, Artificial Sequence
  Description of Artificial Sequence: Synthetic oligonucleotide
cagcaggucuaacggagca

SEQ ID NO: 248906 - RNA, 19 nt, Artificial Sequence
  Description of Artificial Sequence: Synthetic oligonucleotide
agacguacuuauaguuggu

SEQ ID NO: 248907 - RNA, 19 nt, Artificial Sequence
  Description of Artificial Sequence: Synthetic oligonucleotide
ggcuaacauucccauagaa

SEQ ID NO: 248908 - RNA, 19 nt, Artificial Sequence
  Description of Artificial Sequence: Synthetic oligonucleotide
guagcgauucucccuggcu

SEQ ID NO: 248909 - RNA, 19 nt, Artificial Sequence
  Description of Artificial Sequence: Synthetic oligonucleotide
gcagacaaauguucuccuc

SEQ ID NO: 248910 - RNA, 19 nt, Artificial Sequence
  Description of Artificial Sequence: Synthetic oligonucleotide
gccgacacuugggagaccc

SEQ ID NO: 248911 - RNA, 19 nt, Artificial Sequence
  Description of Artificial Sequence: Synthetic oligonucleotide
ccuacguauucgcagacaa

SEQ ID NO: 248912 - RNA, 19 nt, Artificial Sequence
  Description of Artificial Sequence: Synthetic oligonucleotide
cuacguauucgcagacaaa

SEQ ID NO: 248913 - RNA, 19 nt, Artificial Sequence
  Description of Artificial Sequence: Synthetic oligonucleotide
acacacacacacacacaca

SEQ ID NO: 248914 - RNA, 19 nt, Artificial Sequence
  Description of Artificial Sequence: Synthetic oligonucleotide
gcauacgcaguacugcaaa

SEQ ID NO: 248915 - RNA, 19 nt, Artificial Sequence
  Description of Artificial Sequence: Synthetic oligonucleotide
gagucccgaagugcuuugc

SEQ ID NO: 248916 - RNA, 19 nt, Artificial Sequence
  Description of Artificial Sequence: Synthetic oligonucleotide
cgucacgcaguucugggag

SEQ ID NO: 248917 - RNA, 19 nt, Artificial Sequence
  Description of Artificial Sequence: Synthetic oligonucleotide
ccgcagugcagaaguagcc

SEQ ID NO: 248918 - RNA, 19 nt, Artificial Sequence
  Description of Artificial Sequence: Synthetic oligonucleotide
gagggagcgcacaccccag

SEQ ID NO: 248919 - RNA, 19 nt, Artificial Sequence
  Description of Artificial Sequence: Synthetic oligonucleotide
gccugaucagacaguauac

SEQ ID NO: 248920 - RNA, 19 nt, Artificial Sequence
  Description of Artificial Sequence: Synthetic oligonucleotide
ggcgaguacugaagaaggc

SEQ ID NO: 248921 - RNA, 19 nt, Artificial Sequence
  Description of Artificial Sequence: Synthetic oligonucleotide
aucucgcggcucguugggg

SEQ ID NO: 248922 - RNA, 19 nt, Artificial Sequence
  Description of Artificial Sequence: Synthetic oligonucleotide
uauucacggcaugcagguc

SEQ ID NO: 248923 - RNA, 19 nt, Artificial Sequence
  Description of Artificial Sequence: Synthetic oligonucleotide
gucacgcaguucugggaga

SEQ ID NO: 248924 - RNA, 19 nt, Artificial Sequence
  Description of Artificial Sequence: Synthetic oligonucleotide
gcuguaagggagcuagugu

SEQ ID NO: 248925 - RNA, 19 nt, Artificial Sequence
  Description of Artificial Sequence: Synthetic oligonucleotide
caacggugguucugccaug

SEQ ID NO: 248926 - RNA, 19 nt, Artificial Sequence
  Description of Artificial Sequence: Synthetic oligonucleotide
cggcaauucauagaggguc

SEQ ID NO: 248927 - RNA, 19 nt, Artificial Sequence
  Description of Artificial Sequence: Synthetic oligonucleotide
gggucggccaaccucucca

SEQ ID NO: 248928 - RNA, 19 nt, Artificial Sequence
  Description of Artificial Sequence: Synthetic oligonucleotide
gaaugggaaugcguucaua

SEQ ID NO: 248929 - RNA, 19 nt, Artificial Sequence
  Description of Artificial Sequence: Synthetic oligonucleotide
guuuacccgcagugcagaa

SEQ ID NO: 248930 - RNA, 19 nt, Artificial Sequence
  Description of Artificial Sequence: Synthetic oligonucleotide
acccucgagcaaugucucu

SEQ ID NO: 248931 - RNA, 19 nt, Artificial Sequence
  Description of Artificial Sequence: Synthetic oligonucleotide
gugccugcgucaacggaac

SEQ ID NO: 248932 - RNA, 19 nt, Artificial Sequence
  Description of Artificial Sequence: Synthetic oligonucleotide
ggugccugcgucaacggaa

SEQ ID NO: 248933 - RNA, 19 nt, Artificial Sequence
  Description of Artificial Sequence: Synthetic oligonucleotide
guaagggagcuaguguccu

SEQ ID NO: 248934 - RNA, 19 nt, Artificial Sequence
  Description of Artificial Sequence: Synthetic oligonucleotide
gggagacguacuuauaguu

SEQ ID NO: 248935 - RNA, 19 nt, Artificial Sequence
  Description of Artificial Sequence: Synthetic oligonucleotide
aggagucggccauccuuau

SEQ ID NO: 248936 - RNA, 19 nt, Artificial Sequence
  Description of Artificial Sequence: Synthetic oligonucleotide
ccaugaaguuuacccgcag

SEQ ID NO: 248937 - RNA, 19 nt, Artificial Sequence
  Description of Artificial Sequence: Synthetic oligonucleotide
cgcuguuuguacaccggcc

SEQ ID NO: 248938 - RNA, 19 nt, Artificial Sequence
  Description of Artificial Sequence: Synthetic oligonucleotide
caucuacgcauacgcagua

SEQ ID NO: 248939 - RNA, 19 nt, Artificial Sequence
  Description of Artificial Sequence: Synthetic oligonucleotide
acacacacacacacacaaa

SEQ ID NO: 248940 - RNA, 19 nt, Artificial Sequence
  Description of Artificial Sequence: Synthetic oligonucleotide
gaguacugaagaaggcgau

SEQ ID NO: 248941 - RNA, 19 nt, Artificial Sequence
  Description of Artificial Sequence: Synthetic oligonucleotide
gcuuuguuggaugggcgca

SEQ ID NO: 248942 - RNA, 19 nt, Artificial Sequence
  Description of Artificial Sequence: Synthetic oligonucleotide
caccguugucuguguuuug

SEQ ID NO: 248943 - RNA, 19 nt, Artificial Sequence
  Description of Artificial Sequence: Synthetic oligonucleotide
gccugcgucaacggaacug

SEQ ID NO: 248944 - RNA, 19 nt, Artificial Sequence
  Description of Artificial Sequence: Synthetic oligonucleotide
ccuaauguucgguaauggu

SEQ ID NO: 248945 - RNA, 19 nt, Artificial Sequence
  Description of Artificial Sequence: Synthetic oligonucleotide
cccucgagcaaugucucug

SEQ ID NO: 248946 - RNA, 19 nt, Artificial Sequence
  Description of Artificial Sequence: Synthetic oligonucleotide
cguauucgcagacaaaggu

SEQ ID NO: 248947 - RNA, 19 nt, Artificial Sequence
  Description of Artificial Sequence: Synthetic oligonucleotide
accgagcaucaaugcagua

SEQ ID NO: 248948 - RNA, 19 nt, Artificial Sequence
  Description of Artificial Sequence: Synthetic oligonucleotide
cccggauauugaugucagg

SEQ ID NO: 248949 - RNA, 19 nt, Artificial Sequence
  Description of Artificial Sequence: Synthetic oligonucleotide
cgagcaucaaugcaguaua

SEQ ID NO: 248950 - RNA, 19 nt, Artificial Sequence
  Description of Artificial Sequence: Synthetic oligonucleotide
cacgauugcggcaguuccu

SEQ ID NO: 248951 - RNA, 19 nt, Artificial Sequence
  Description of Artificial Sequence: Synthetic oligonucleotide
ggcuugauauauagggcua

SEQ ID NO: 248952 - RNA, 19 nt, Artificial Sequence
  Description of Artificial Sequence: Synthetic oligonucleotide
ggucggccaaccucuccac

SEQ ID NO: 248953 - RNA, 19 nt, Artificial Sequence
  Description of Artificial Sequence: Synthetic oligonucleotide
cguuccccguagucgaacc

SEQ ID NO: 248954 - RNA, 19 nt, Artificial Sequence
  Description of Artificial Sequence: Synthetic oligonucleotide
ccccaccggcaauucauag

SEQ ID NO: 248955 - RNA, 19 nt, Artificial Sequence
  Description of Artificial Sequence: Synthetic oligonucleotide
aggugacggcuaaauuuau

SEQ ID NO: 248956 - RNA, 19 nt, Artificial Sequence
  Description of Artificial Sequence: Synthetic oligonucleotide
caugauccacgcucucagu

SEQ ID NO: 248957 - RNA, 19 nt, Artificial Sequence
  Description of Artificial Sequence: Synthetic oligonucleotide
ggagucggccauccuuauc

SEQ ID NO: 248958 - RNA, 19 nt, Artificial Sequence
  Description of Artificial Sequence: Synthetic oligonucleotide
gggaaugcguucauacccu

SEQ ID NO: 248959 - RNA, 19 nt, Artificial Sequence
  Description of Artificial Sequence: Synthetic oligonucleotide
gugggauauccuggaggga

SEQ ID NO: 248960 - RNA, 19 nt, Artificial Sequence
  Description of Artificial Sequence: Synthetic oligonucleotide
cccaccggcaauucauaga

SEQ ID NO: 248961 - RNA, 19 nt, Artificial Sequence
  Description of Artificial Sequence: Synthetic oligonucleotide
cguagcgauucucccuggc

SEQ ID NO: 248962 - RNA, 19 nt, Artificial Sequence
  Description of Artificial Sequence: Synthetic oligonucleotide
cuucaccaugcgaccccga

SEQ ID NO: 248963 - RNA, 19 nt, Artificial Sequence
  Description of Artificial Sequence: Synthetic oligonucleotide
gggagcuaguguccucgga

SEQ ID NO: 248964 - RNA, 19 nt, Artificial Sequence
  Description of Artificial Sequence: Synthetic oligonucleotide
caggucuaacggagcagcu

SEQ ID NO: 248965 - RNA, 19 nt, Artificial Sequence
  Description of Artificial Sequence: Synthetic oligonucleotide
ugggcucgcaguggugguu

SEQ ID NO: 248966 - RNA, 19 nt, Artificial Sequence
  Description of Artificial Sequence: Synthetic oligonucleotide
gcgauccugggaaaccgca

SEQ ID NO: 248967 - RNA, 19 nt, Artificial Sequence
  Description of Artificial Sequence: Synthetic oligonucleotide
ccaugcgaccccgaugguc

SEQ ID NO: 248968 - RNA, 19 nt, Artificial Sequence
  Description of Artificial Sequence: Synthetic oligonucleotide
caccggcaacugaaaagcu

SEQ ID NO: 248969 - RNA, 19 nt, Artificial Sequence
  Description of Artificial Sequence: Synthetic oligonucleotide
ccauggauauucacggcau

SEQ ID NO: 248970 - RNA, 19 nt, Artificial Sequence
  Description of Artificial Sequence: Synthetic oligonucleotide
gucuaacggagcagcuugu

SEQ ID NO: 248971 - RNA, 19 nt, Artificial Sequence
  Description of Artificial Sequence: Synthetic oligonucleotide
ccuggaucaggcgaguacu

SEQ ID NO: 248972 - RNA, 19 nt, Artificial Sequence
  Description of Artificial Sequence: Synthetic oligonucleotide
agaggacaacacagucgua

SEQ ID NO: 248973 - RNA, 19 nt, Artificial Sequence
  Description of Artificial Sequence: Synthetic oligonucleotide
augcgaccccgauggucuu

SEQ ID NO: 248974 - RNA, 19 nt, Artificial Sequence
  Description of Artificial Sequence: Synthetic oligonucleotide
cccaaaagcguuccccgua

SEQ ID NO: 248975 - RNA, 19 nt, Artificial Sequence
  Description of Artificial Sequence: Synthetic oligonucleotide
ggaaugggaaugcguucau

SEQ ID NO: 248976 - RNA, 19 nt, Artificial Sequence
  Description of Artificial Sequence: Synthetic oligonucleotide
gcucuccuacguauucgca

SEQ ID NO: 248977 - RNA, 19 nt, Artificial Sequence
  Description of Artificial Sequence: Synthetic oligonucleotide
cugagucccgaagugcuuu

SEQ ID NO: 248978 - RNA, 19 nt, Artificial Sequence
  Description of Artificial Sequence: Synthetic oligonucleotide
cgaacccacauuucaucaa

SEQ ID NO: 248979 - RNA, 19 nt, Artificial Sequence
  Description of Artificial Sequence: Synthetic oligonucleotide
cggccaaccucuccacggc

SEQ ID NO: 248980 - RNA, 19 nt, Artificial Sequence
  Description of Artificial Sequence: Synthetic oligonucleotide
agcguuccccguagucgaa

SEQ ID NO: 248981 - RNA, 19 nt, Artificial Sequence
  Description of Artificial Sequence: Synthetic oligonucleotide
ccacaccggcaacugaaaa

SEQ ID NO: 248982 - RNA, 19 nt, Artificial Sequence
  Description of Artificial Sequence: Synthetic oligonucleotide
gcgaccccgauggucuuca

SEQ ID NO: 248983 - RNA, 19 nt, Artificial Sequence
  Description of Artificial Sequence: Synthetic oligonucleotide
gcguuccccguagucgaac

SEQ ID NO: 248984 - RNA, 19 nt, Artificial Sequence
  Description of Artificial Sequence: Synthetic oligonucleotide
ccgauaaagcugcagccuu

SEQ ID NO: 248985 - RNA, 19 nt, Artificial Sequence
  Description of Artificial Sequence: Synthetic oligonucleotide
ggugacggcuaaauuuauu

SEQ ID NO: 248986 - RNA, 19 nt, Artificial Sequence
  Description of Artificial Sequence: Synthetic oligonucleotide
ccaauucaugauccacgcu

SEQ ID NO: 248987 - RNA, 19 nt, Artificial Sequence
  Description of Artificial Sequence: Synthetic oligonucleotide
guacaccggcccaauucau

SEQ ID NO: 248988 - RNA, 19 nt, Artificial Sequence
  Description of Artificial Sequence: Synthetic oligonucleotide
ccaagaguggugcuuuguu

SEQ ID NO: 248989 - RNA, 19 nt, Artificial Sequence
  Description of Artificial Sequence: Synthetic oligonucleotide
ccgagcaucaaugcaguau

SEQ ID NO: 248990 - RNA, 19 nt, Artificial Sequence
  Description of Artificial Sequence: Synthetic oligonucleotide
ccggcaauucauagagggu

SEQ ID NO: 248991 - RNA, 19 nt, Artificial Sequence
  Description of Artificial Sequence: Synthetic oligonucleotide
ccgaagugcuuugcucauc

SEQ ID NO: 248992 - RNA, 19 nt, Artificial Sequence
  Description of Artificial Sequence: Synthetic oligonucleotide
cgcauacgcaguacugcaa

SEQ ID NO: 248993 - RNA, 19 nt, Artificial Sequence
  Description of Artificial Sequence: Synthetic oligonucleotide
caccggcccaauucaugau

SEQ ID NO: 248994 - RNA, 19 nt, Artificial Sequence
  Description of Artificial Sequence: Synthetic oligonucleotide
cacggcuguaagggagcua

SEQ ID NO: 248995 - RNA, 19 nt, Artificial Sequence
  Description of Artificial Sequence: Synthetic oligonucleotide
ccgacacuugggagaccca

SEQ ID NO: 248996 - RNA, 19 nt, Artificial Sequence
  Description of Artificial Sequence: Synthetic oligonucleotide
cccgaacaucagcuucgga

SEQ ID NO: 248997 - RNA, 19 nt, Artificial Sequence
  Description of Artificial Sequence: Synthetic oligonucleotide
ggcucgcaguggugguuua

SEQ ID NO: 248998 - RNA, 19 nt, Artificial Sequence
  Description of Artificial Sequence: Synthetic oligonucleotide
caccaguaagaggcuugau

SEQ ID NO: 248999 - RNA, 19 nt, Artificial Sequence
  Description of Artificial Sequence: Synthetic oligonucleotide
gccccaccggcaauucaua

SEQ ID NO: 249000 - RNA, 19 nt, Artificial Sequence
  Description of Artificial Sequence: Synthetic oligonucleotide
gggcucgcaguggugguuu

SEQ ID NO: 249001 - RNA, 19 nt, Artificial Sequence
  Description of Artificial Sequence: Synthetic oligonucleotide
  modified_base (2)..(2): a, c, u, g, unknown or other
cngcugcagagaggcacuu

SEQ ID NO: 249002 - RNA, 19 nt, Artificial Sequence
  Description of Artificial Sequence: Synthetic oligonucleotide
gcugaucucgcggcucguu

SEQ ID NO: 249003 - RNA, 19 nt, Artificial Sequence
  Description of Artificial Sequence: Synthetic oligonucleotide
cccauguccuguguccgau

SEQ ID NO: 249004 - RNA, 19 nt, Artificial Sequence
  Description of Artificial Sequence: Synthetic oligonucleotide
cgaccccgauggucuucac

SEQ ID NO: 249005 - RNA, 19 nt, Artificial Sequence
  Description of Artificial Sequence: Synthetic oligonucleotide
ccacggcuguaagggagcu

SEQ ID NO: 249006 - RNA, 19 nt, Artificial Sequence
  Description of Artificial Sequence: Synthetic oligonucleotide
  modified_base (5)..(5): a, c, u, g, unknown or other
cggcngcugcagagaggca

SEQ ID NO: 249007 - RNA, 19 nt, Artificial Sequence
  Description of Artificial Sequence: Synthetic oligonucleotide
ccacacgauugcggcaguu

SEQ ID NO: 249008 - RNA, 19 nt, Artificial Sequence
  Description of Artificial Sequence: Synthetic oligonucleotide
cggcuguaagggagcuagu

SEQ ID NO: 249009 - RNA, 19 nt, Artificial Sequence
  Description of Artificial Sequence: Synthetic oligonucleotide
ugaauuauaagugauuucu

SEQ ID NO: 249010 - RNA, 19 nt, Artificial Sequence
  Description of Artificial Sequence: Synthetic oligonucleotide
agaauacaagagcucaugc

SEQ ID NO: 249011 - RNA, 19 nt, Artificial Sequence
  Description of Artificial Sequence: Synthetic oligonucleotide
aacuaaacaaaauguguca

SEQ ID NO: 249012 - RNA, 19 nt, Artificial Sequence
  Description of Artificial Sequence: Synthetic oligonucleotide
aauuggguaguugaacggc

SEQ ID NO: 249013 - RNA, 19 nt, Artificial Sequence
  Description of Artificial Sequence: Synthetic oligonucleotide
ugauucaugguauaaauua

SEQ ID NO: 249014 - RNA, 19 nt, Artificial Sequence
  Description of Artificial Sequence: Synthetic oligonucleotide
auguagauagaauacaaga

SEQ ID NO: 249015 - RNA, 19 nt, Artificial Sequence
  Description of Artificial Sequence: Synthetic oligonucleotide
gauaaugagccgcagggag

SEQ ID NO: 249016 - RNA, 19 nt, Artificial Sequence
  Description of Artificial Sequence: Synthetic oligonucleotide
uauguagauagaauacaag

SEQ ID NO: 249017 - RNA, 19 nt, Artificial Sequence
  Description of Artificial Sequence: Synthetic oligonucleotide
agacuugcgaaacagaacu

SEQ ID NO: 249018 - RNA, 19 nt, Artificial Sequence
  Description of Artificial Sequence: Synthetic oligonucleotide
aaugccgccuuagaaaugg

SEQ ID NO: 249019 - RNA, 19 nt, Artificial Sequence
  Description of Artificial Sequence: Synthetic oligonucleotide
agcaccaagucucggagcc

SEQ ID NO: 249020 - RNA, 19 nt, Artificial Sequence
  Description of Artificial Sequence: Synthetic oligonucleotide
aaccgcuuaucgcagcacc

SEQ ID NO: 249021 - RNA, 19 nt, Artificial Sequence
  Description of Artificial Sequence: Synthetic oligonucleotide
gaugagccaacucagcugc

SEQ ID NO: 249022 - RNA, 19 nt, Artificial Sequence
  Description of Artificial Sequence: Synthetic oligonucleotide
ucuaagaggauuuuccaaa

SEQ ID NO: 249023 - RNA, 19 nt, Artificial Sequence
  Description of Artificial Sequence: Synthetic oligonucleotide
aguucucccuaccugaagg

SEQ ID NO: 249024 - RNA, 19 nt, Artificial Sequence
  Description of Artificial Sequence: Synthetic oligonucleotide
uauaagugauuucuauuga

SEQ ID NO: 249025 - RNA, 19 nt, Artificial Sequence
  Description of Artificial Sequence: Synthetic oligonucleotide
uccacaaccgcuuaucgca

SEQ ID NO: 249026 - RNA, 19 nt, Artificial Sequence
  Description of Artificial Sequence: Synthetic oligonucleotide
acguuugaagcgucgaggc

SEQ ID NO: 249027 - RNA, 19 nt, Artificial Sequence
  Description of Artificial Sequence: Synthetic oligonucleotide
ucgggcucugacuugaugg

SEQ ID NO: 249028 - RNA, 19 nt, Artificial Sequence
  Description of Artificial Sequence: Synthetic oligonucleotide
ucaagacggcugcagaugg

SEQ ID NO: 249029 - RNA, 19 nt, Artificial Sequence
  Description of Artificial Sequence: Synthetic oligonucleotide
cauauggcggauaaugagc

SEQ ID NO: 249030 - RNA, 19 nt, Artificial Sequence
  Description of Artificial Sequence: Synthetic oligonucleotide
gagauauugguccagcuga

SEQ ID NO: 249031 - RNA, 19 nt, Artificial Sequence
  Description of Artificial Sequence: Synthetic oligonucleotide
aguguaacggcugaaaucu

SEQ ID NO: 249032 - RNA, 19 nt, Artificial Sequence
  Description of Artificial Sequence: Synthetic oligonucleotide
caucaucagacuuucggcg

SEQ ID NO: 249033 - RNA, 19 nt, Artificial Sequence
  Description of Artificial Sequence: Synthetic oligonucleotide
aaugcggguccacaaccgc

SEQ ID NO: 249034 - RNA, 19 nt, Artificial Sequence
  Description of Artificial Sequence: Synthetic oligonucleotide
aguuaugaugcagaaagag

SEQ ID NO: 249035 - RNA, 19 nt, Artificial Sequence
  Description of Artificial Sequence: Synthetic oligonucleotide
uguuccggaguuuacuccg

SEQ ID NO: 249036 - RNA, 19 nt, Artificial Sequence
  Description of Artificial Sequence: Synthetic oligonucleotide
uggacuauacuauacacuu

SEQ ID NO: 249037 - RNA, 19 nt, Artificial Sequence
  Description of Artificial Sequence: Synthetic oligonucleotide
ucuaaaugccgccuuagaa

SEQ ID NO: 249038 - RNA, 19 nt, Artificial Sequence
  Description of Artificial Sequence: Synthetic oligonucleotide
aacggcugaaaucugaauu

SEQ ID NO: 249039 - RNA, 19 nt, Artificial Sequence
  Description of Artificial Sequence: Synthetic oligonucleotide
gaucucgugauugagcucc

SEQ ID NO: 249040 - RNA, 19 nt, Artificial Sequence
  Description of Artificial Sequence: Synthetic oligonucleotide
ucaccaauuggguaguuga

SEQ ID NO: 249041 - RNA, 19 nt, Artificial Sequence
  Description of Artificial Sequence: Synthetic oligonucleotide
ucuauguagauagaauaca

SEQ ID NO: 249042 - RNA, 19 nt, Artificial Sequence
  Description of Artificial Sequence: Synthetic oligonucleotide
auauggcggauaaugagcc

SEQ ID NO: 249043 - RNA, 19 nt, Artificial Sequence
  Description of Artificial Sequence: Synthetic oligonucleotide
uuugaagcgucgaggcucg

SEQ ID NO: 249044 - RNA, 19 nt, Artificial Sequence
  Description of Artificial Sequence: Synthetic oligonucleotide
ugccaaccgauccucagcg

SEQ ID NO: 249045 - RNA, 19 nt, Artificial Sequence
  Description of Artificial Sequence: Synthetic oligonucleotide
uuuuaccuggacuauacua

SEQ ID NO: 249046 - RNA, 19 nt, Artificial Sequence
  Description of Artificial Sequence: Synthetic oligonucleotide
gacgugauuacaguaacug

SEQ ID NO: 249047 - RNA, 19 nt, Artificial Sequence
  Description of Artificial Sequence: Synthetic oligonucleotide
ugauuacaguaacugaggu

SEQ ID NO: 249048 - RNA, 19 nt, Artificial Sequence
  Description of Artificial Sequence: Synthetic oligonucleotide
agacuuucggcguaggaug

SEQ ID NO: 249049 - RNA, 19 nt, Artificial Sequence
  Description of Artificial Sequence: Synthetic oligonucleotide
uaaaugccgccuuagaaau

SEQ ID NO: 249050 - RNA, 19 nt, Artificial Sequence
  Description of Artificial Sequence: Synthetic oligonucleotide
auugaacacucacagacau

SEQ ID NO: 249051 - RNA, 19 nt, Artificial Sequence
  Description of Artificial Sequence: Synthetic oligonucleotide
uguaacggcugaaaucuga

SEQ ID NO: 249052 - RNA, 19 nt, Artificial Sequence
  Description of Artificial Sequence: Synthetic oligonucleotide
auguuccggaguuuacucc

SEQ ID NO: 249053 - RNA, 19 nt, Artificial Sequence
  Description of Artificial Sequence: Synthetic oligonucleotide
aagacuugcgaaacagaac

SEQ ID NO: 249054 - RNA, 19 nt, Artificial Sequence
  Description of Artificial Sequence: Synthetic oligonucleotide
ugcgaaacagaacuguguc

SEQ ID NO: 249055 - RNA, 19 nt, Artificial Sequence
  Description of Artificial Sequence: Synthetic oligonucleotide
agauguaacaaaaccaacu

SEQ ID NO: 249056 - RNA, 19 nt, Artificial Sequence
  Description of Artificial Sequence: Synthetic oligonucleotide
agcuuaggcuucuaagagg

SEQ ID NO: 249057 - RNA, 19 nt, Artificial Sequence
  Description of Artificial Sequence: Synthetic oligonucleotide
ucaugguauaaauuagauc

SEQ ID NO: 249058 - RNA, 19 nt, Artificial Sequence
  Description of Artificial Sequence: Synthetic oligonucleotide
agucucgggugguaguucc

SEQ ID NO: 249059 - RNA, 19 nt, Artificial Sequence
  Description of Artificial Sequence: Synthetic oligonucleotide
acccgccauauuuacauac

SEQ ID NO: 249060 - RNA, 19 nt, Artificial Sequence
  Description of Artificial Sequence: Synthetic oligonucleotide
gacguuugaagcgucgagg

SEQ ID NO: 249061 - RNA, 19 nt, Artificial Sequence
  Description of Artificial Sequence: Synthetic oligonucleotide
ugaugagccaacucagcug

SEQ ID NO: 249062 - RNA, 19 nt, Artificial Sequence
  Description of Artificial Sequence: Synthetic oligonucleotide
gacauuucggcuaugaacu

SEQ ID NO: 249063 - RNA, 19 nt, Artificial Sequence
  Description of Artificial Sequence: Synthetic oligonucleotide
gaucacaugacgcuccauc

SEQ ID NO: 249064 - RNA, 19 nt, Artificial Sequence
  Description of Artificial Sequence: Synthetic oligonucleotide
ugcugaagcggugugggcg

SEQ ID NO: 249065 - RNA, 19 nt, Artificial Sequence
  Description of Artificial Sequence: Synthetic oligonucleotide
acccacugaacauccaggg

SEQ ID NO: 249066 - RNA, 19 nt, Artificial Sequence
  Description of Artificial Sequence: Synthetic oligonucleotide
uagaauacaagagcucaug

SEQ ID NO: 249067 - RNA, 19 nt, Artificial Sequence
  Description of Artificial Sequence: Synthetic oligonucleotide
acagcguuugaagaaggac

SEQ ID NO: 249068 - RNA, 19 nt, Artificial Sequence
  Description of Artificial Sequence: Synthetic oligonucleotide
ugacagauauuuccacagc

SEQ ID NO: 249069 - RNA, 19 nt, Artificial Sequence
  Description of Artificial Sequence: Synthetic oligonucleotide
accaacuaaacaaaaugug

SEQ ID NO: 249070 - RNA, 19 nt, Artificial Sequence
  Description of Artificial Sequence: Synthetic oligonucleotide
cuaaaugccgccuuagaaa

SEQ ID NO: 249071 - RNA, 19 nt, Artificial Sequence
  Description of Artificial Sequence: Synthetic oligonucleotide
gucaauaugacagauauuu

SEQ ID NO: 249072 - RNA, 19 nt, Artificial Sequence
  Description of Artificial Sequence: Synthetic oligonucleotide
acuuucccgagucuuagga

SEQ ID NO: 249073 - RNA, 19 nt, Artificial Sequence
  Description of Artificial Sequence: Synthetic oligonucleotide
gaguguaacggcugaaauc

SEQ ID NO: 249074 - RNA, 19 nt, Artificial Sequence
  Description of Artificial Sequence: Synthetic oligonucleotide
agauagaauacaagagcuc

SEQ ID NO: 249075 - RNA, 19 nt, Artificial Sequence
  Description of Artificial Sequence: Synthetic oligonucleotide
cuuaucgcagcaccagcgg

SEQ ID NO: 249076 - RNA, 19 nt, Artificial Sequence
  Description of Artificial Sequence: Synthetic oligonucleotide
uccacuugcccaaauugaa

SEQ ID NO: 249077 - RNA, 19 nt, Artificial Sequence
  Description of Artificial Sequence: Synthetic oligonucleotide
aguuuacuccgauugucca

SEQ ID NO: 249078 - RNA, 19 nt, Artificial Sequence
  Description of Artificial Sequence: Synthetic oligonucleotide
ggaacaaggugucucaaac

SEQ ID NO: 249079 - RNA, 19 nt, Artificial Sequence
  Description of Artificial Sequence: Synthetic oligonucleotide
uuagaucuauguagauaga

SEQ ID NO: 249080 - RNA, 19 nt, Artificial Sequence
  Description of Artificial Sequence: Synthetic oligonucleotide
gaguauaacccgagguggg

SEQ ID NO: 249081 - RNA, 19 nt, Artificial Sequence
  Description of Artificial Sequence: Synthetic oligonucleotide
uauaacccgaggugggcug

SEQ ID NO: 249082 - RNA, 19 nt, Artificial Sequence
  Description of Artificial Sequence: Synthetic oligonucleotide
aacccuccugaguguaacg

SEQ ID NO: 249083 - RNA, 19 nt, Artificial Sequence
  Description of Artificial Sequence: Synthetic oligonucleotide
cgugauuacaguaacugag

SEQ ID NO: 249084 - RNA, 19 nt, Artificial Sequence
  Description of Artificial Sequence: Synthetic oligonucleotide
uuuacuccgauuguccauc

SEQ ID NO: 249085 - RNA, 19 nt, Artificial Sequence
  Description of Artificial Sequence: Synthetic oligonucleotide
caagacuugcgaaacagaa

SEQ ID NO: 249086 - RNA, 19 nt, Artificial Sequence
  Description of Artificial Sequence: Synthetic oligonucleotide
uauggcggauaaugagccg

SEQ ID NO: 249087 - RNA, 19 nt, Artificial Sequence
  Description of Artificial Sequence: Synthetic oligonucleotide
ugguaguuccgacugcagu

SEQ ID NO: 249088 - RNA, 19 nt, Artificial Sequence
  Description of Artificial Sequence: Synthetic oligonucleotide
gaacaaggugucucaaaca

SEQ ID NO: 249089 - RNA, 19 nt, Artificial Sequence
  Description of Artificial Sequence: Synthetic oligonucleotide
auaaugagccgcagggagg

SEQ ID NO: 249090 - RNA, 19 nt, Artificial Sequence
  Description of Artificial Sequence: Synthetic oligonucleotide
uuguguaacuugacauaca

SEQ ID NO: 249091 - RNA, 19 nt, Artificial Sequence
  Description of Artificial Sequence: Synthetic oligonucleotide
guuugaagcgucgaggcuc

SEQ ID NO: 249092 - RNA, 19 nt, Artificial Sequence
  Description of Artificial Sequence: Synthetic oligonucleotide
acgugauuacaguaacuga

SEQ ID NO: 249093 - RNA, 19 nt, Artificial Sequence
  Description of Artificial Sequence: Synthetic oligonucleotide
gggaguauaacccgaggug

SEQ ID NO: 249094 - RNA, 19 nt, Artificial Sequence
  Description of Artificial Sequence: Synthetic oligonucleotide
uaccuggacuauacuauac

SEQ ID NO: 249095 - RNA, 19 nt, Artificial Sequence
  Description of Artificial Sequence: Synthetic oligonucleotide
cuuucccgagucuuaggag

SEQ ID NO: 249096 - RNA, 19 nt, Artificial Sequence
  Description of Artificial Sequence: Synthetic oligonucleotide
gcauauggcggauaaugag

SEQ ID NO: 249097 - RNA, 19 nt, Artificial Sequence
  Description of Artificial Sequence: Synthetic oligonucleotide
ugacgugauuacaguaacu

SEQ ID NO: 249098 - RNA, 19 nt, Artificial Sequence
  Description of Artificial Sequence: Synthetic oligonucleotide
ggagauauugguccagcug

SEQ ID NO: 249099 - RNA, 19 nt, Artificial Sequence
  Description of Artificial Sequence: Synthetic oligonucleotide
gaagggguuuguuggccag

SEQ ID NO: 249100 - RNA, 19 nt, Artificial Sequence
  Description of Artificial Sequence: Synthetic oligonucleotide
acggcugaaaucugaauua

SEQ ID NO: 249101 - RNA, 19 nt, Artificial Sequence
  Description of Artificial Sequence: Synthetic oligonucleotide
augcuuguguaacuugaca

SEQ ID NO: 249102 - RNA, 19 nt, Artificial Sequence
  Description of Artificial Sequence: Synthetic oligonucleotide
uuuaguccuucuacccacu

SEQ ID NO: 249103 - RNA, 19 nt, Artificial Sequence
  Description of Artificial Sequence: Synthetic oligonucleotide
aaggaaaguuggcaaugua

SEQ ID NO: 249104 - RNA, 19 nt, Artificial Sequence
  Description of Artificial Sequence: Synthetic oligonucleotide
uccgauuguccaucugacc

SEQ ID NO: 249105 - RNA, 19 nt, Artificial Sequence
  Description of Artificial Sequence: Synthetic oligonucleotide
gugacgugauuacaguaac

SEQ ID NO: 249106 - RNA, 19 nt, Artificial Sequence
  Description of Artificial Sequence: Synthetic oligonucleotide
acagguuaaguucucccua

SEQ ID NO: 249107 - RNA, 19 nt, Artificial Sequence
  Description of Artificial Sequence: Synthetic oligonucleotide
gugguucaggucaaugcgg

SEQ ID NO: 249108 - RNA, 19 nt, Artificial Sequence
  Description of Artificial Sequence: Synthetic oligonucleotide
uggaacuacagagggcuga

SEQ ID NO: 249109 - RNA, 19 nt, Artificial Sequence
  Description of Artificial Sequence: Synthetic oligonucleotide
acuaagcuuaggcuucuaa

SEQ ID NO: 249110 - RNA, 19 nt, Artificial Sequence
  Description of Artificial Sequence: Synthetic oligonucleotide
agaucuauguagauagaau

SEQ ID NO: 249111 - RNA, 19 nt, Artificial Sequence
  Description of Artificial Sequence: Synthetic oligonucleotide
uuaccuggacuauacuaua

SEQ ID NO: 249112 - RNA, 19 nt, Artificial Sequence
  Description of Artificial Sequence: Synthetic oligonucleotide
gaggugagaggaggaaccg

SEQ ID NO: 249113 - RNA, 19 nt, Artificial Sequence
  Description of Artificial Sequence: Synthetic oligonucleotide
cauuucggcuaugaacugc

SEQ ID NO: 249114 - RNA, 19 nt, Artificial Sequence
  Description of Artificial Sequence: Synthetic oligonucleotide
agugacgugauuacaguaa

SEQ ID NO: 249115 - RNA, 19 nt, Artificial Sequence
  Description of Artificial Sequence: Synthetic oligonucleotide
gaauaagcccacuuguuuu

SEQ ID NO: 249116 - RNA, 19 nt, Artificial Sequence
  Description of Artificial Sequence: Synthetic oligonucleotide
cuuggcaagacuugcgaaa

SEQ ID NO: 249117 - RNA, 19 nt, Artificial Sequence
  Description of Artificial Sequence: Synthetic oligonucleotide
aaccgguugaugagccaac

SEQ ID NO: 249118 - RNA, 19 nt, Artificial Sequence
  Description of Artificial Sequence: Synthetic oligonucleotide
auaacccgaggugggcugc

SEQ ID NO: 249119 - RNA, 19 nt, Artificial Sequence
  Description of Artificial Sequence: Synthetic oligonucleotide
guccacaaccgcuuaucgc

SEQ ID NO: 249120 - RNA, 19 nt, Artificial Sequence
  Description of Artificial Sequence: Synthetic oligonucleotide
ugagucagguggugggcug

SEQ ID NO: 249121 - RNA, 19 nt, Artificial Sequence
  Description of Artificial Sequence: Synthetic oligonucleotide
acauuucggcuaugaacug

SEQ ID NO: 249122 - RNA, 19 nt, Artificial Sequence
  Description of Artificial Sequence: Synthetic oligonucleotide
ugucuucuaaaugccgccu

SEQ ID NO: 249123 - RNA, 19 nt, Artificial Sequence
  Description of Artificial Sequence: Synthetic oligonucleotide
auaggcugucgccggauga

SEQ ID NO: 249124 - RNA, 19 nt, Artificial Sequence
  Description of Artificial Sequence: Synthetic oligonucleotide
gguccacaaccgcuuaucg

SEQ ID NO: 249125 - RNA, 19 nt, Artificial Sequence
  Description of Artificial Sequence: Synthetic oligonucleotide
acuuagguggggacgaaga

SEQ ID NO: 249126 - RNA, 19 nt, Artificial Sequence
  Description of Artificial Sequence: Synthetic oligonucleotide
auggacuggucagugacgu

SEQ ID NO: 249127 - RNA, 19 nt, Artificial Sequence
  Description of Artificial Sequence: Synthetic oligonucleotide
uggaacgugacuggucacu

SEQ ID NO: 249128 - RNA, 19 nt, Artificial Sequence
  Description of Artificial Sequence: Synthetic oligonucleotide
ugucgccggaugaugccgc

SEQ ID NO: 249129 - RNA, 19 nt, Artificial Sequence
  Description of Artificial Sequence: Synthetic oligonucleotide
ccggaguuuacuccgauug

SEQ ID NO: 249130 - RNA, 19 nt, Artificial Sequence
  Description of Artificial Sequence: Synthetic oligonucleotide
uauugaaacuuggcauagu

SEQ ID NO: 249131 - RNA, 19 nt, Artificial Sequence
  Description of Artificial Sequence: Synthetic oligonucleotide
gucaaugcggguccacaac

SEQ ID NO: 249132 - RNA, 19 nt, Artificial Sequence
  Description of Artificial Sequence: Synthetic oligonucleotide
gcuuaucgcagcaccagcg

SEQ ID NO: 249133 - RNA, 19 nt, Artificial Sequence
  Description of Artificial Sequence: Synthetic oligonucleotide
acuuucggcguaggaugcc

SEQ ID NO: 249134 - RNA, 19 nt, Artificial Sequence
  Description of Artificial Sequence: Synthetic oligonucleotide
agauauugguccagcugag

SEQ ID NO: 249135 - RNA, 19 nt, Artificial Sequence
  Description of Artificial Sequence: Synthetic oligonucleotide
gacuuucggcguaggaugc

SEQ ID NO: 249136 - RNA, 19 nt, Artificial Sequence
  Description of Artificial Sequence: Synthetic oligonucleotide
ucgggugguaguuccgacu

SEQ ID NO: 249137 - RNA, 19 nt, Artificial Sequence
  Description of Artificial Sequence: Synthetic oligonucleotide
gucaagacggcugcagaug

SEQ ID NO: 249138 - RNA, 19 nt, Artificial Sequence
  Description of Artificial Sequence: Synthetic oligonucleotide
caaccgauccucagcguuc

SEQ ID NO: 249139 - RNA, 19 nt, Artificial Sequence
  Description of Artificial Sequence: Synthetic oligonucleotide
gcucgucugaccugcgucg

SEQ ID NO: 249140 - RNA, 19 nt, Artificial Sequence
  Description of Artificial Sequence: Synthetic oligonucleotide
uaacggcugaaaucugaau

SEQ ID NO: 249141 - RNA, 19 nt, Artificial Sequence
  Description of Artificial Sequence: Synthetic oligonucleotide
ucggcguaggaugccaucu

SEQ ID NO: 249142 - RNA, 19 nt, Artificial Sequence
  Description of Artificial Sequence: Synthetic oligonucleotide
acgugacuggucacuuucc

SEQ ID NO: 249143 - RNA, 19 nt, Artificial Sequence
  Description of Artificial Sequence: Synthetic oligonucleotide
cucggcgagaggugagagg

SEQ ID NO: 249144 - RNA, 19 nt, Artificial Sequence
  Description of Artificial Sequence: Synthetic oligonucleotide
gacuugcgaaacagaacug

SEQ ID NO: 249145 - RNA, 19 nt, Artificial Sequence
  Description of Artificial Sequence: Synthetic oligonucleotide
gccgccuuagaaauggucc

SEQ ID NO: 249146 - RNA, 19 nt, Artificial Sequence
  Description of Artificial Sequence: Synthetic oligonucleotide
cacuuucccgagucuuagg

SEQ ID NO: 249147 - RNA, 19 nt, Artificial Sequence
  Description of Artificial Sequence: Synthetic oligonucleotide
aggguccggagcaauggac

SEQ ID NO: 249148 - RNA, 19 nt, Artificial Sequence
  Description of Artificial Sequence: Synthetic oligonucleotide
aaaugccgccuuagaaaug

SEQ ID NO: 249149 - RNA, 19 nt, Artificial Sequence
  Description of Artificial Sequence: Synthetic oligonucleotide
cuggacuauacuauacacu

SEQ ID NO: 249150 - RNA, 19 nt, Artificial Sequence
  Description of Artificial Sequence: Synthetic oligonucleotide
accugcgucgaggagccuc

SEQ ID NO: 249151 - RNA, 19 nt, Artificial Sequence
  Description of Artificial Sequence: Synthetic oligonucleotide
uuacuccgauuguccaucu

SEQ ID NO: 249152 - RNA, 19 nt, Artificial Sequence
  Description of Artificial Sequence: Synthetic oligonucleotide
gcggauaaugagccgcagg

SEQ ID NO: 249153 - RNA, 19 nt, Artificial Sequence
  Description of Artificial Sequence: Synthetic oligonucleotide
ggacguuugaagcgucgag

SEQ ID NO: 249154 - RNA, 19 nt, Artificial Sequence
  Description of Artificial Sequence: Synthetic oligonucleotide
cuauacacuuaaccacaca

SEQ ID NO: 249155 - RNA, 19 nt, Artificial Sequence
  Description of Artificial Sequence: Synthetic oligonucleotide
guucucccuaccugaagga

SEQ ID NO: 249156 - RNA, 19 nt, Artificial Sequence
  Description of Artificial Sequence: Synthetic oligonucleotide
ggaaguaagugagacugga

SEQ ID NO: 249157 - RNA, 19 nt, Artificial Sequence
  Description of Artificial Sequence: Synthetic oligonucleotide
ucgucugaccugcgucgag

SEQ ID NO: 249158 - RNA, 19 nt, Artificial Sequence
  Description of Artificial Sequence: Synthetic oligonucleotide
cacaaccgcuuaucgcagc

SEQ ID NO: 249159 - RNA, 19 nt, Artificial Sequence
  Description of Artificial Sequence: Synthetic oligonucleotide
cucccuuggcaagacuugc

SEQ ID NO: 249160 - RNA, 19 nt, Artificial Sequence
  Description of Artificial Sequence: Synthetic oligonucleotide
agaucccgcaucugggcau

SEQ ID NO: 249161 - RNA, 19 nt, Artificial Sequence
  Description of Artificial Sequence: Synthetic oligonucleotide
agcuaggcgcaguucuaca

SEQ ID NO: 249162 - RNA, 19 nt, Artificial Sequence
  Description of Artificial Sequence: Synthetic oligonucleotide
aacuuggcauaguguuuua

SEQ ID NO: 249163 - RNA, 19 nt, Artificial Sequence
  Description of Artificial Sequence: Synthetic oligonucleotide
cccaaauugaacacucaca

SEQ ID NO: 249164 - RNA, 19 nt, Artificial Sequence
  Description of Artificial Sequence: Synthetic oligonucleotide
caacccgccauauuuacau

SEQ ID NO: 249165 - RNA, 19 nt, Artificial Sequence
  Description of Artificial Sequence: Synthetic oligonucleotide
cuuaaccacacaugcuugu

SEQ ID NO: 249166 - RNA, 19 nt, Artificial Sequence
  Description of Artificial Sequence: Synthetic oligonucleotide
ggugccucaggcagauucg

SEQ ID NO: 249167 - RNA, 19 nt, Artificial Sequence
  Description of Artificial Sequence: Synthetic oligonucleotide
ggggccgggaguauaaccc

SEQ ID NO: 249168 - RNA, 19 nt, Artificial Sequence
  Description of Artificial Sequence: Synthetic oligonucleotide
uuucggcguaggaugccau

SEQ ID NO: 249169 - RNA, 19 nt, Artificial Sequence
  Description of Artificial Sequence: Synthetic oligonucleotide
ugaagcgucgaggcucgcu

SEQ ID NO: 249170 - RNA, 19 nt, Artificial Sequence
  Description of Artificial Sequence: Synthetic oligonucleotide
ggcguaggaugccaucugc

SEQ ID NO: 249171 - RNA, 19 nt, Artificial Sequence
  Description of Artificial Sequence: Synthetic oligonucleotide
ugccguugaggcccuugcu

SEQ ID NO: 249172 - RNA, 19 nt, Artificial Sequence
  Description of Artificial Sequence: Synthetic oligonucleotide
uucggcguaggaugccauc

SEQ ID NO: 249173 - RNA, 19 nt, Artificial Sequence
  Description of Artificial Sequence: Synthetic oligonucleotide
gugccguugaggcccuugc

SEQ ID NO: 249174 - RNA, 19 nt, Artificial Sequence
  Description of Artificial Sequence: Synthetic oligonucleotide
ggugugggcgcucgcagug

SEQ ID NO: 249175 - RNA, 19 nt, Artificial Sequence
  Description of Artificial Sequence: Synthetic oligonucleotide
aagggguuuguuggccagu

SEQ ID NO: 249176 - RNA, 19 nt, Artificial Sequence
  Description of Artificial Sequence: Synthetic oligonucleotide
aacccgccauauuuacaua

SEQ ID NO: 249177 - RNA, 19 nt, Artificial Sequence
  Description of Artificial Sequence: Synthetic oligonucleotide
guaacggcugaaaucugaa

SEQ ID NO: 249178 - RNA, 19 nt, Artificial Sequence
  Description of Artificial Sequence: Synthetic oligonucleotide
gcugaagcggugugggcgc

SEQ ID NO: 249179 - RNA, 19 nt, Artificial Sequence
  Description of Artificial Sequence: Synthetic oligonucleotide
uuccggaguuuacuccgau

SEQ ID NO: 249180 - RNA, 19 nt, Artificial Sequence
  Description of Artificial Sequence: Synthetic oligonucleotide
gggccgggaguauaacccg

SEQ ID NO: 249181 - RNA, 19 nt, Artificial Sequence
  Description of Artificial Sequence: Synthetic oligonucleotide
ugaagcgccgaagggguuu

SEQ ID NO: 249182 - RNA, 19 nt, Artificial Sequence
  Description of Artificial Sequence: Synthetic oligonucleotide
agcaauccaugagcaaccu

SEQ ID NO: 249183 - RNA, 19 nt, Artificial Sequence
  Description of Artificial Sequence: Synthetic oligonucleotide
uaacccgaggugggcugcg

SEQ ID NO: 249184 - RNA, 19 nt, Artificial Sequence
  Description of Artificial Sequence: Synthetic oligonucleotide
gaagcucccgaggggugcc

SEQ ID NO: 249185 - RNA, 19 nt, Artificial Sequence
  Description of Artificial Sequence: Synthetic oligonucleotide
gucgaggcucgcuugcguc

SEQ ID NO: 249186 - RNA, 19 nt, Artificial Sequence
  Description of Artificial Sequence: Synthetic oligonucleotide
gaagcgccgaagggguuug

SEQ ID NO: 249187 - RNA, 19 nt, Artificial Sequence
  Description of Artificial Sequence: Synthetic oligonucleotide
aggucaaugcggguccaca

SEQ ID NO: 249188 - RNA, 19 nt, Artificial Sequence
  Description of Artificial Sequence: Synthetic oligonucleotide
cucgggugguaguuccgac

SEQ ID NO: 249189 - RNA, 19 nt, Artificial Sequence
  Description of Artificial Sequence: Synthetic oligonucleotide
cuggaacgugacuggucac

SEQ ID NO: 249190 - RNA, 19 nt, Artificial Sequence
  Description of Artificial Sequence: Synthetic oligonucleotide
gagauaggcugucgccgga

SEQ ID NO: 249191 - RNA, 19 nt, Artificial Sequence
  Description of Artificial Sequence: Synthetic oligonucleotide
uccggaguuuacuccgauu

SEQ ID NO: 249192 - RNA, 19 nt, Artificial Sequence
  Description of Artificial Sequence: Synthetic oligonucleotide
ugcgucgaggagccucuuc

SEQ ID NO: 249193 - RNA, 19 nt, Artificial Sequence
  Description of Artificial Sequence: Synthetic oligonucleotide
ugagccaacucagcugcuu

SEQ ID NO: 249194 - RNA, 19 nt, Artificial Sequence
  Description of Artificial Sequence: Synthetic oligonucleotide
ccaaagggaauaagcccac

SEQ ID NO: 249195 - RNA, 19 nt, Artificial Sequence
  Description of Artificial Sequence: Synthetic oligonucleotide
ggcauauggcggauaauga

SEQ ID NO: 249196 - RNA, 19 nt, Artificial Sequence
  Description of Artificial Sequence: Synthetic oligonucleotide
uaggcugucgccggaugau

SEQ ID NO: 249197 - RNA, 19 nt, Artificial Sequence
  Description of Artificial Sequence: Synthetic oligonucleotide
guuuacuccgauuguccau

SEQ ID NO: 249198 - RNA, 19 nt, Artificial Sequence
  Description of Artificial Sequence: Synthetic oligonucleotide
gaagcgucgaggcucgcuu

SEQ ID NO: 249199 - RNA, 19 nt, Artificial Sequence
  Description of Artificial Sequence: Synthetic oligonucleotide
gugguaguuccgacugcag

SEQ ID NO: 249200 - RNA, 19 nt, Artificial Sequence
  Description of Artificial Sequence: Synthetic oligonucleotide
cuagagcgggccucggcga

SEQ ID NO: 249201 - RNA, 19 nt, Artificial Sequence
  Description of Artificial Sequence: Synthetic oligonucleotide
caccaauuggguaguugaa

SEQ ID NO: 249202 - RNA, 19 nt, Artificial Sequence
  Description of Artificial Sequence: Synthetic oligonucleotide
gguuuguuggccagugcca

SEQ ID NO: 249203 - RNA, 19 nt, Artificial Sequence
  Description of Artificial Sequence: Synthetic oligonucleotide
caaccgguugaugagccaa

SEQ ID NO: 249204 - RNA, 19 nt, Artificial Sequence
  Description of Artificial Sequence: Synthetic oligonucleotide
cccuccugaguguaacggc

SEQ ID NO: 249205 - RNA, 19 nt, Artificial Sequence
  Description of Artificial Sequence: Synthetic oligonucleotide
ccgauuguccaucugaccu

SEQ ID NO: 249206 - RNA, 19 nt, Artificial Sequence
  Description of Artificial Sequence: Synthetic oligonucleotide
uugaagcgccgaagggguu

SEQ ID NO: 249207 - RNA, 19 nt, Artificial Sequence
  Description of Artificial Sequence: Synthetic oligonucleotide
cuugcccaaauugaacacu

SEQ ID NO: 249208 - RNA, 19 nt, Artificial Sequence
  Description of Artificial Sequence: Synthetic oligonucleotide
aaugagccgcagggaggca

SEQ ID NO: 249209 - RNA, 19 nt, Artificial Sequence
  Description of Artificial Sequence: Synthetic oligonucleotide
ggucaaugcggguccacaa

SEQ ID NO: 249210 - RNA, 19 nt, Artificial Sequence
  Description of Artificial Sequence: Synthetic oligonucleotide
ggauaaugagccgcaggga

SEQ ID NO: 249211 - RNA, 19 nt, Artificial Sequence
  Description of Artificial Sequence: Synthetic oligonucleotide
ggcucuuuauguugaugaa

SEQ ID NO: 249212 - RNA, 19 nt, Artificial Sequence
  Description of Artificial Sequence: Synthetic oligonucleotide
guguaacggcugaaaucug

SEQ ID NO: 249213 - RNA, 19 nt, Artificial Sequence
  Description of Artificial Sequence: Synthetic oligonucleotide
gagucucgggugguaguuc

SEQ ID NO: 249214 - RNA, 19 nt, Artificial Sequence
  Description of Artificial Sequence: Synthetic oligonucleotide
guauaacccgaggugggcu

SEQ ID NO: 249215 - RNA, 19 nt, Artificial Sequence
  Description of Artificial Sequence: Synthetic oligonucleotide
cccaacccgccauauuuac

SEQ ID NO: 249216 - RNA, 19 nt, Artificial Sequence
  Description of Artificial Sequence: Synthetic oligonucleotide
agauaggcugucgccggau

SEQ ID NO: 249217 - RNA, 19 nt, Artificial Sequence
  Description of Artificial Sequence: Synthetic oligonucleotide
gcuaggcgcaguucuacaa

SEQ ID NO: 249218 - RNA, 19 nt, Artificial Sequence
  Description of Artificial Sequence: Synthetic oligonucleotide
ccacaaccgcuuaucgcag

SEQ ID NO: 249219 - RNA, 19 nt, Artificial Sequence
  Description of Artificial Sequence: Synthetic oligonucleotide
gugugggcgcucgcagugg

SEQ ID NO: 249220 - RNA, 19 nt, Artificial Sequence
  Description of Artificial Sequence: Synthetic oligonucleotide
ccgagucuuaggaggugcc

SEQ ID NO: 249221 - RNA, 19 nt, Artificial Sequence
  Description of Artificial Sequence: Synthetic oligonucleotide
caaccgcuuaucgcagcac

SEQ ID NO: 249222 - RNA, 19 nt, Artificial Sequence
  Description of Artificial Sequence: Synthetic oligonucleotide
gggugcucgucugaccugc

SEQ ID NO: 249223 - RNA, 19 nt, Artificial Sequence
  Description of Artificial Sequence: Synthetic oligonucleotide
gcaagacuugcgaaacaga

SEQ ID NO: 249224 - RNA, 19 nt, Artificial Sequence
  Description of Artificial Sequence: Synthetic oligonucleotide
cgggugguaguuccgacug

SEQ ID NO: 249225 - RNA, 19 nt, Artificial Sequence
  Description of Artificial Sequence: Synthetic oligonucleotide
ggguccggagcaauggaca

SEQ ID NO: 249226 - RNA, 19 nt, Artificial Sequence
  Description of Artificial Sequence: Synthetic oligonucleotide
cuaggcgcaguucuacaau

SEQ ID NO: 249227 - RNA, 19 nt, Artificial Sequence
  Description of Artificial Sequence: Synthetic oligonucleotide
caggguccggagcaaugga

SEQ ID NO: 249228 - RNA, 19 nt, Artificial Sequence
  Description of Artificial Sequence: Synthetic oligonucleotide
ggguccacaaccgcuuauc

SEQ ID NO: 249229 - RNA, 19 nt, Artificial Sequence
  Description of Artificial Sequence: Synthetic oligonucleotide
ccgccuuagaaauggucca

SEQ ID NO: 249230 - RNA, 19 nt, Artificial Sequence
  Description of Artificial Sequence: Synthetic oligonucleotide
acgcuccaucuggaugcac

SEQ ID NO: 249231 - RNA, 19 nt, Artificial Sequence
  Description of Artificial Sequence: Synthetic oligonucleotide
acaccugggcacaucugua

SEQ ID NO: 249232 - RNA, 19 nt, Artificial Sequence
  Description of Artificial Sequence: Synthetic oligonucleotide
gccgggaguauaacccgag

SEQ ID NO: 249233 - RNA, 19 nt, Artificial Sequence
  Description of Artificial Sequence: Synthetic oligonucleotide
gggacguuugaagcgucga

SEQ ID NO: 249234 - RNA, 19 nt, Artificial Sequence
  Description of Artificial Sequence: Synthetic oligonucleotide
cccgaggugggcugcgcag

SEQ ID NO: 249235 - RNA, 19 nt, Artificial Sequence
  Description of Artificial Sequence: Synthetic oligonucleotide
cugaccuggccuguugucu

SEQ ID NO: 249236 - RNA, 19 nt, Artificial Sequence
  Description of Artificial Sequence: Synthetic oligonucleotide
cccuuggcaagacuugcga

SEQ ID NO: 249237 - RNA, 19 nt, Artificial Sequence
  Description of Artificial Sequence: Synthetic oligonucleotide
ggacuauacuauacacuua

SEQ ID NO: 249238 - RNA, 19 nt, Artificial Sequence
  Description of Artificial Sequence: Synthetic oligonucleotide
ggugccguugaggcccuug

SEQ ID NO: 249239 - RNA, 19 nt, Artificial Sequence
  Description of Artificial Sequence: Synthetic oligonucleotide
ccuuggcaagacuugcgaa

SEQ ID NO: 249240 - RNA, 19 nt, Artificial Sequence
  Description of Artificial Sequence: Synthetic oligonucleotide
ccgguugaugagccaacuc

SEQ ID NO: 249241 - RNA, 19 nt, Artificial Sequence
  Description of Artificial Sequence: Synthetic oligonucleotide
cucgucugaccugcgucga

SEQ ID NO: 249242 - RNA, 19 nt, Artificial Sequence
  Description of Artificial Sequence: Synthetic oligonucleotide
aucucgugauugagcuccu

SEQ ID NO: 249243 - RNA, 19 nt, Artificial Sequence
  Description of Artificial Sequence: Synthetic oligonucleotide
gcguaggaugccaucugca

SEQ ID NO: 249244 - RNA, 19 nt, Artificial Sequence
  Description of Artificial Sequence: Synthetic oligonucleotide
ggcucgcuugcguccacuc

SEQ ID NO: 249245 - RNA, 19 nt, Artificial Sequence
  Description of Artificial Sequence: Synthetic oligonucleotide
gcucgcuugcguccacuca

SEQ ID NO: 249246 - RNA, 19 nt, Artificial Sequence
  Description of Artificial Sequence: Synthetic oligonucleotide
gcaaccgguugaugagcca

SEQ ID NO: 249247 - RNA, 19 nt, Artificial Sequence
  Description of Artificial Sequence: Synthetic oligonucleotide
ccaacccgccauauuuaca

SEQ ID NO: 249248 - RNA, 19 nt, Artificial Sequence
  Description of Artificial Sequence: Synthetic oligonucleotide
aagcgccgaagggguuugu

SEQ ID NO: 249249 - RNA, 19 nt, Artificial Sequence
  Description of Artificial Sequence: Synthetic oligonucleotide
agcgccgaagggguuuguu

SEQ ID NO: 249250 - RNA, 19 nt, Artificial Sequence
  Description of Artificial Sequence: Synthetic oligonucleotide
cuuaggcuucuaagaggau

SEQ ID NO: 249251 - RNA, 19 nt, Artificial Sequence
  Description of Artificial Sequence: Synthetic oligonucleotide
ucgccggaugaugccgcuc

SEQ ID NO: 249252 - RNA, 19 nt, Artificial Sequence
  Description of Artificial Sequence: Synthetic oligonucleotide
caagacggcugcagauggu

SEQ ID NO: 249253 - RNA, 19 nt, Artificial Sequence
  Description of Artificial Sequence: Synthetic oligonucleotide
gcgucgaggcucgcuugcg

SEQ ID NO: 249254 - RNA, 19 nt, Artificial Sequence
  Description of Artificial Sequence: Synthetic oligonucleotide
ccucggcgagaggugagag

SEQ ID NO: 249255 - RNA, 19 nt, Artificial Sequence
  Description of Artificial Sequence: Synthetic oligonucleotide
ccugugcaugacaugggcu

SEQ ID NO: 249256 - RNA, 19 nt, Artificial Sequence
  Description of Artificial Sequence: Synthetic oligonucleotide
caaagggaauaagcccacu

SEQ ID NO: 249257 - RNA, 19 nt, Artificial Sequence
  Description of Artificial Sequence: Synthetic oligonucleotide
ccgaagcucccgaggggug

SEQ ID NO: 249258 - RNA, 19 nt, Artificial Sequence
  Description of Artificial Sequence: Synthetic oligonucleotide
cgcucgcaguggcuuaagg

SEQ ID NO: 249259 - RNA, 19 nt, Artificial Sequence
  Description of Artificial Sequence: Synthetic oligonucleotide
augccgccuuagaaauggu

SEQ ID NO: 249260 - RNA, 19 nt, Artificial Sequence
  Description of Artificial Sequence: Synthetic oligonucleotide
ggccgggaguauaacccga

SEQ ID NO: 249261 - RNA, 19 nt, Artificial Sequence
  Description of Artificial Sequence: Synthetic oligonucleotide
cgggaguauaacccgaggu

SEQ ID NO: 249262 - RNA, 19 nt, Artificial Sequence
  Description of Artificial Sequence: Synthetic oligonucleotide
gucgccggaugaugccgcu

SEQ ID NO: 249263 - RNA, 19 nt, Artificial Sequence
  Description of Artificial Sequence: Synthetic oligonucleotide
ccgacugcagugagcaggu

SEQ ID NO: 249264 - RNA, 19 nt, Artificial Sequence
  Description of Artificial Sequence: Synthetic oligonucleotide
ccaaccgauccucagcguu

SEQ ID NO: 249265 - RNA, 19 nt, Artificial Sequence
  Description of Artificial Sequence: Synthetic oligonucleotide
cggcguaggaugccaucug

SEQ ID NO: 249266 - RNA, 19 nt, Artificial Sequence
  Description of Artificial Sequence: Synthetic oligonucleotide
cgccggaugaugccgcuca

SEQ ID NO: 249267 - RNA, 19 nt, Artificial Sequence
  Description of Artificial Sequence: Synthetic oligonucleotide
ccagcuaggcgcaguucua

SEQ ID NO: 249268 - RNA, 19 nt, Artificial Sequence
  Description of Artificial Sequence: Synthetic oligonucleotide
ccccaacccgccauauuua

SEQ ID NO: 249269 - RNA, 19 nt, Artificial Sequence
  Description of Artificial Sequence: Synthetic oligonucleotide
ggcgcucgcaguggcuuaa

SEQ ID NO: 249270 - RNA, 19 nt, Artificial Sequence
  Description of Artificial Sequence: Synthetic oligonucleotide
gcgcucgcaguggcuuaag

SEQ ID NO: 249271 - RNA, 19 nt, Artificial Sequence
  Description of Artificial Sequence: Synthetic oligonucleotide
gccaaccgauccucagcgu

SEQ ID NO: 249272 - RNA, 19 nt, Artificial Sequence
  Description of Artificial Sequence: Synthetic oligonucleotide
ccucaggcagauucgucuu

SEQ ID NO: 249273 - RNA, 19 nt, Artificial Sequence
  Description of Artificial Sequence: Synthetic oligonucleotide
gcggguccacaaccgcuua

SEQ ID NO: 249274 - RNA, 19 nt, Artificial Sequence
  Description of Artificial Sequence: Synthetic oligonucleotide
cggaguuuacuccgauugu

SEQ ID NO: 249275 - RNA, 19 nt, Artificial Sequence
  Description of Artificial Sequence: Synthetic oligonucleotide
cgaggcucgcuugcgucca

SEQ ID NO: 249276 - RNA, 19 nt, Artificial Sequence
  Description of Artificial Sequence: Synthetic oligonucleotide
ggggcauauggcggauaau

SEQ ID NO: 249277 - RNA, 19 nt, Artificial Sequence
  Description of Artificial Sequence: Synthetic oligonucleotide
cggcugaaaucugaauuau

SEQ ID NO: 249278 - RNA, 19 nt, Artificial Sequence
  Description of Artificial Sequence: Synthetic oligonucleotide
cgucgaggcucgcuugcgu

SEQ ID NO: 249279 - RNA, 19 nt, Artificial Sequence
  Description of Artificial Sequence: Synthetic oligonucleotide
cugcgucgaggagccucuu

SEQ ID NO: 249280 - RNA, 19 nt, Artificial Sequence
  Description of Artificial Sequence: Synthetic oligonucleotide
aaugcuauuaacuaacugc

SEQ ID NO: 249281 - RNA, 19 nt, Artificial Sequence
  Description of Artificial Sequence: Synthetic oligonucleotide
gaaucaucgaaauuaaugg

SEQ ID NO: 249282 - RNA, 19 nt, Artificial Sequence
  Description of Artificial Sequence: Synthetic oligonucleotide
aaucaucgaaauuaauggc

SEQ ID NO: 249283 - RNA, 19 nt, Artificial Sequence
  Description of Artificial Sequence: Synthetic oligonucleotide
acuuuagaccaucagaacc

SEQ ID NO: 249284 - RNA, 19 nt, Artificial Sequence
  Description of Artificial Sequence: Synthetic oligonucleotide
ugguuuacaauguugauag

SEQ ID NO: 249285 - RNA, 19 nt, Artificial Sequence
  Description of Artificial Sequence: Synthetic oligonucleotide
aggguaucaauuuucaagc

SEQ ID NO: 249286 - RNA, 19 nt, Artificial Sequence
  Description of Artificial Sequence: Synthetic oligonucleotide
uauauuaccugauagacau

SEQ ID NO: 249287 - RNA, 19 nt, Artificial Sequence
  Description of Artificial Sequence: Synthetic oligonucleotide
aacgcuuuuguucuucagc

SEQ ID NO: 249288 - RNA, 19 nt, Artificial Sequence
  Description of Artificial Sequence: Synthetic oligonucleotide
aauauagugugcaaaauug

SEQ ID NO: 249289 - RNA, 19 nt, Artificial Sequence
  Description of Artificial Sequence: Synthetic oligonucleotide
gaacuuagcugguauaugg

SEQ ID NO: 249290 - RNA, 19 nt, Artificial Sequence
  Description of Artificial Sequence: Synthetic oligonucleotide
uauagugugcaaaauugag

SEQ ID NO: 249291 - RNA, 19 nt, Artificial Sequence
  Description of Artificial Sequence: Synthetic oligonucleotide
ucuagcaaagucuucaaca

SEQ ID NO: 249292 - RNA, 19 nt, Artificial Sequence
  Description of Artificial Sequence: Synthetic oligonucleotide
agugccaaauaguugaagg

SEQ ID NO: 249293 - RNA, 19 nt, Artificial Sequence
  Description of Artificial Sequence: Synthetic oligonucleotide
auuaaaucacuucaggacu

SEQ ID NO: 249294 - RNA, 19 nt, Artificial Sequence
  Description of Artificial Sequence: Synthetic oligonucleotide
uagacauauaugaaguuug

SEQ ID NO: 249295 - RNA, 19 nt, Artificial Sequence
  Description of Artificial Sequence: Synthetic oligonucleotide
uaacauauguggcugagga

SEQ ID NO: 249296 - RNA, 19 nt, Artificial Sequence
  Description of Artificial Sequence: Synthetic oligonucleotide
agccauacuacucagaaca

SEQ ID NO: 249297 - RNA, 19 nt, Artificial Sequence
  Description of Artificial Sequence: Synthetic oligonucleotide
gguaggaucacuuugaaca

SEQ ID NO: 249298 - RNA, 19 nt, Artificial Sequence
  Description of Artificial Sequence: Synthetic oligonucleotide
uuuuaauuccccuucuuac

SEQ ID NO: 249299 - RNA, 19 nt, Artificial Sequence
  Description of Artificial Sequence: Synthetic oligonucleotide
aagaauauagugugcaaaa

SEQ ID NO: 249300 - RNA, 19 nt, Artificial Sequence
  Description of Artificial Sequence: Synthetic oligonucleotide
auaggugugaagucauagc

SEQ ID NO: 249301 - RNA, 19 nt, Artificial Sequence
  Description of Artificial Sequence: Synthetic oligonucleotide
aguauauucaacucuguau

SEQ ID NO: 249302 - RNA, 19 nt, Artificial Sequence
  Description of Artificial Sequence: Synthetic oligonucleotide
uauauggcagauuggguag

SEQ ID NO: 249303 - RNA, 19 nt, Artificial Sequence
  Description of Artificial Sequence: Synthetic oligonucleotide
caggguaucaauuuucaag

SEQ ID NO: 249304 - RNA, 19 nt, Artificial Sequence
  Description of Artificial Sequence: Synthetic oligonucleotide
ugguauauggcagauuggg

SEQ ID NO: 249305 - RNA, 19 nt, Artificial Sequence
  Description of Artificial Sequence: Synthetic oligonucleotide
uuuccguuaugucugaggu

SEQ ID NO: 249306 - RNA, 19 nt, Artificial Sequence
  Description of Artificial Sequence: Synthetic oligonucleotide
uaaggagcugauauaaaga

SEQ ID NO: 249307 - RNA, 19 nt, Artificial Sequence
  Description of Artificial Sequence: Synthetic oligonucleotide
aauaccacuugguaaguaa

SEQ ID NO: 249308 - RNA, 19 nt, Artificial Sequence
  Description of Artificial Sequence: Synthetic oligonucleotide
uucacgcaaauucaggaca

SEQ ID NO: 249309 - RNA, 19 nt, Artificial Sequence
  Description of Artificial Sequence: Synthetic oligonucleotide
aacaugagaagccaugauu

SEQ ID NO: 249310 - RNA, 19 nt, Artificial Sequence
  Description of Artificial Sequence: Synthetic oligonucleotide
ugcauuaggcaucugauuu

SEQ ID NO: 249311 - RNA, 19 nt, Artificial Sequence
  Description of Artificial Sequence: Synthetic oligonucleotide
agcagucaggguuuaaacg

SEQ ID NO: 249312 - RNA, 19 nt, Artificial Sequence
  Description of Artificial Sequence: Synthetic oligonucleotide
uauguaacauauguggcug

SEQ ID NO: 249313 - RNA, 19 nt, Artificial Sequence
  Description of Artificial Sequence: Synthetic oligonucleotide
acuaacugcacguuggcca

SEQ ID NO: 249314 - RNA, 19 nt, Artificial Sequence
  Description of Artificial Sequence: Synthetic oligonucleotide
gaagccaugauuguagcgc

SEQ ID NO: 249315 - RNA, 19 nt, Artificial Sequence
  Description of Artificial Sequence: Synthetic oligonucleotide
gcuauuaacuaacugcacg

SEQ ID NO: 249316 - RNA, 19 nt, Artificial Sequence
  Description of Artificial Sequence: Synthetic oligonucleotide
gggauaacaacuuuagacc

SEQ ID NO: 249317 - RNA, 19 nt, Artificial Sequence
  Description of Artificial Sequence: Synthetic oligonucleotide
uguagcuuacuuaaugcuc

SEQ ID NO: 249318 - RNA, 19 nt, Artificial Sequence
  Description of Artificial Sequence: Synthetic oligonucleotide
uagacauaugucaccaaug

SEQ ID NO: 249319 - RNA, 19 nt, Artificial Sequence
  Description of Artificial Sequence: Synthetic oligonucleotide
aacuuagcugguauauggc

SEQ ID NO: 249320 - RNA, 19 nt, Artificial Sequence
  Description of Artificial Sequence: Synthetic oligonucleotide
agcaguaaggagcugauau

SEQ ID NO: 249321 - RNA, 19 nt, Artificial Sequence
  Description of Artificial Sequence: Synthetic oligonucleotide
uuuccuuauggaagcacag

SEQ ID NO: 249322 - RNA, 19 nt, Artificial Sequence
  Description of Artificial Sequence: Synthetic oligonucleotide
ugacaagagauauguaaca

SEQ ID NO: 249323 - RNA, 19 nt, Artificial Sequence
  Description of Artificial Sequence: Synthetic oligonucleotide
ucugccauaaaaugagcac

SEQ ID NO: 249324 - RNA, 19 nt, Artificial Sequence
  Description of Artificial Sequence: Synthetic oligonucleotide
agccuauauuaccugauag

SEQ ID NO: 249325 - RNA, 19 nt, Artificial Sequence
  Description of Artificial Sequence: Synthetic oligonucleotide
ugugguaucugaagcaggu

SEQ ID NO: 249326 - RNA, 19 nt, Artificial Sequence
  Description of Artificial Sequence: Synthetic oligonucleotide
aaauaguugaaggccagga

SEQ ID NO: 249327 - RNA, 19 nt, Artificial Sequence
  Description of Artificial Sequence: Synthetic oligonucleotide
auacagauuaauaagcagu

SEQ ID NO: 249328 - RNA, 19 nt, Artificial Sequence
  Description of Artificial Sequence: Synthetic oligonucleotide
cuuagcugguauauggcag

SEQ ID NO: 249329 - RNA, 19 nt, Artificial Sequence
  Description of Artificial Sequence: Synthetic oligonucleotide
aacuaacugcacguuggcc

SEQ ID NO: 249330 - RNA, 19 nt, Artificial Sequence
  Description of Artificial Sequence: Synthetic oligonucleotide
agacaaagaagcacggcgc

SEQ ID NO: 249331 - RNA, 19 nt, Artificial Sequence
  Description of Artificial Sequence: Synthetic oligonucleotide
ucuaguagcuaugaugugu

SEQ ID NO: 249332 - RNA, 19 nt, Artificial Sequence
  Description of Artificial Sequence: Synthetic oligonucleotide
gaaaaugccggacucucac

SEQ ID NO: 249333 - RNA, 19 nt, Artificial Sequence
  Description of Artificial Sequence: Synthetic oligonucleotide
aauaguugaaggccaggaa

SEQ ID NO: 249334 - RNA, 19 nt, Artificial Sequence
  Description of Artificial Sequence: Synthetic oligonucleotide
uaccugauagacauauaug

SEQ ID NO: 249335 - RNA, 19 nt, Artificial Sequence
  Description of Artificial Sequence: Synthetic oligonucleotide
agaaaaggccagcuucuac

SEQ ID NO: 249336 - RNA, 19 nt, Artificial Sequence
  Description of Artificial Sequence: Synthetic oligonucleotide
aguuguauccuggagagga

SEQ ID NO: 249337 - RNA, 19 nt, Artificial Sequence
  Description of Artificial Sequence: Synthetic oligonucleotide
uagcccaaugcuauuaacu

SEQ ID NO: 249338 - RNA, 19 nt, Artificial Sequence
  Description of Artificial Sequence: Synthetic oligonucleotide
cuuuagaccaucagaacca

SEQ ID NO: 249339 - RNA, 19 nt, Artificial Sequence
  Description of Artificial Sequence: Synthetic oligonucleotide
cuuauggaagcacagucuc

SEQ ID NO: 249340 - RNA, 19 nt, Artificial Sequence
  Description of Artificial Sequence: Synthetic oligonucleotide
auuugguuuacaauguuga

SEQ ID NO: 249341 - RNA, 19 nt, Artificial Sequence
  Description of Artificial Sequence: Synthetic oligonucleotide
aaguuuggaaggaaaauaa

SEQ ID NO: 249342 - RNA, 19 nt, Artificial Sequence
  Description of Artificial Sequence: Synthetic oligonucleotide
gauaguuguagcuuacuua

SEQ ID NO: 249343 - RNA, 19 nt, Artificial Sequence
  Description of Artificial Sequence: Synthetic oligonucleotide
uuggguaggaucacuuuga

SEQ ID NO: 249344 - RNA, 19 nt, Artificial Sequence
  Description of Artificial Sequence: Synthetic oligonucleotide
ugaugagacacaucugaac

SEQ ID NO: 249345 - RNA, 19 nt, Artificial Sequence
  Description of Artificial Sequence: Synthetic oligonucleotide
caacuuuagaccaucagaa

SEQ ID NO: 249346 - RNA, 19 nt, Artificial Sequence
  Description of Artificial Sequence: Synthetic oligonucleotide
aggaguuguauccuggaga

SEQ ID NO: 249347 - RNA, 19 nt, Artificial Sequence
  Description of Artificial Sequence: Synthetic oligonucleotide
cauguuauggugcuccgac

SEQ ID NO: 249348 - RNA, 19 nt, Artificial Sequence
  Description of Artificial Sequence: Synthetic oligonucleotide
cuuacacuccacaguaagc

SEQ ID NO: 249349 - RNA, 19 nt, Artificial Sequence
  Description of Artificial Sequence: Synthetic oligonucleotide
aguagaagugugaugaacu

SEQ ID NO: 249350 - RNA, 19 nt, Artificial Sequence
  Description of Artificial Sequence: Synthetic oligonucleotide
ugcauaagagggcuuugug

SEQ ID NO: 249351 - RNA, 19 nt, Artificial Sequence
  Description of Artificial Sequence: Synthetic oligonucleotide
ucaagccuauauuaccuga

SEQ ID NO: 249352 - RNA, 19 nt, Artificial Sequence
  Description of Artificial Sequence: Synthetic oligonucleotide
gucaacuguuaauagcacc

SEQ ID NO: 249353 - RNA, 19 nt, Artificial Sequence
  Description of Artificial Sequence: Synthetic oligonucleotide
cuuaaugcucuaauggaga

SEQ ID NO: 249354 - RNA, 19 nt, Artificial Sequence
  Description of Artificial Sequence: Synthetic oligonucleotide
uguugauaguuguagcuua

SEQ ID NO: 249355 - RNA, 19 nt, Artificial Sequence
  Description of Artificial Sequence: Synthetic oligonucleotide
aucaucgaaauuaauggca

SEQ ID NO: 249356 - RNA, 19 nt, Artificial Sequence
  Description of Artificial Sequence: Synthetic oligonucleotide
gugagugcccauuugaauc

SEQ ID NO: 249357 - RNA, 19 nt, Artificial Sequence
  Description of Artificial Sequence: Synthetic oligonucleotide
cagacuaaaagcgacugug

SEQ ID NO: 249358 - RNA, 19 nt, Artificial Sequence
  Description of Artificial Sequence: Synthetic oligonucleotide
aaagaagcacggcgcugac

SEQ ID NO: 249359 - RNA, 19 nt, Artificial Sequence
  Description of Artificial Sequence: Synthetic oligonucleotide
ucaugggauaacaacuuua

SEQ ID NO: 249360 - RNA, 19 nt, Artificial Sequence
  Description of Artificial Sequence: Synthetic oligonucleotide
gauuguagcgcagagcaga

SEQ ID NO: 249361 - RNA, 19 nt, Artificial Sequence
  Description of Artificial Sequence: Synthetic oligonucleotide
aaauccucacucauuaaau

SEQ ID NO: 249362 - RNA, 19 nt, Artificial Sequence
  Description of Artificial Sequence: Synthetic oligonucleotide
gcagucaggguuuaaacgc

SEQ ID NO: 249363 - RNA, 19 nt, Artificial Sequence
  Description of Artificial Sequence: Synthetic oligonucleotide
uguaacauauguggcugag

SEQ ID NO: 249364 - RNA, 19 nt, Artificial Sequence
  Description of Artificial Sequence: Synthetic oligonucleotide
gugccaaauaguugaaggc

SEQ ID NO: 249365 - RNA, 19 nt, Artificial Sequence
  Description of Artificial Sequence: Synthetic oligonucleotide
guauauggcagauugggua

SEQ ID NO: 249366 - RNA, 19 nt, Artificial Sequence
  Description of Artificial Sequence: Synthetic oligonucleotide
uaacuaacugcacguuggc

SEQ ID NO: 249367 - RNA, 19 nt, Artificial Sequence
  Description of Artificial Sequence: Synthetic oligonucleotide
augcuauuaacuaacugca

SEQ ID NO: 249368 - RNA, 19 nt, Artificial Sequence
  Description of Artificial Sequence: Synthetic oligonucleotide
ggugacaagagauauguaa

SEQ ID NO: 249369 - RNA, 19 nt, Artificial Sequence
  Description of Artificial Sequence: Synthetic oligonucleotide
cauaggugugaagucauag

SEQ ID NO: 249370 - RNA, 19 nt, Artificial Sequence
  Description of Artificial Sequence: Synthetic oligonucleotide
acggugacaagagauaugu

SEQ ID NO: 249371 - RNA, 19 nt, Artificial Sequence
  Description of Artificial Sequence: Synthetic oligonucleotide
auagacauauaugaaguuu

SEQ ID NO: 249372 - RNA, 19 nt, Artificial Sequence
  Description of Artificial Sequence: Synthetic oligonucleotide
ugaguauauucaacucugu

SEQ ID NO: 249373 - RNA, 19 nt, Artificial Sequence
  Description of Artificial Sequence: Synthetic oligonucleotide
uugguuuacaauguugaua

SEQ ID NO: 249374 - RNA, 19 nt, Artificial Sequence
  Description of Artificial Sequence: Synthetic oligonucleotide
uuauggugcuccgacaaac

SEQ ID NO: 249375 - RNA, 19 nt, Artificial Sequence
  Description of Artificial Sequence: Synthetic oligonucleotide
caaugcuauuaacuaacug

SEQ ID NO: 249376 - RNA, 19 nt, Artificial Sequence
  Description of Artificial Sequence: Synthetic oligonucleotide
caggacucaauacuaucag

SEQ ID NO: 249377 - RNA, 19 nt, Artificial Sequence
  Description of Artificial Sequence: Synthetic oligonucleotide
guaucuuauguucacgcaa

SEQ ID NO: 249378 - RNA, 19 nt, Artificial Sequence
  Description of Artificial Sequence: Synthetic oligonucleotide
acacguauacacgucuuuc

SEQ ID NO: 249379 - RNA, 19 nt, Artificial Sequence
  Description of Artificial Sequence: Synthetic oligonucleotide
uuguugagagcccgaguug

SEQ ID NO: 249380 - RNA, 19 nt, Artificial Sequence
  Description of Artificial Sequence: Synthetic oligonucleotide
ugucaacuguuaauagcac

SEQ ID NO: 249381 - RNA, 19 nt, Artificial Sequence
  Description of Artificial Sequence: Synthetic oligonucleotide
ugcuauuaacuaacugcac

SEQ ID NO: 249382 - RNA, 19 nt, Artificial Sequence
  Description of Artificial Sequence: Synthetic oligonucleotide
auacacgucuuucuacugu

SEQ ID NO: 249383 - RNA, 19 nt, Artificial Sequence
  Description of Artificial Sequence: Synthetic oligonucleotide
agucucgugccuuucaaaa

SEQ ID NO: 249384 - RNA, 19 nt, Artificial Sequence
  Description of Artificial Sequence: Synthetic oligonucleotide
uguacugcauuaggcaucu

SEQ ID NO: 249385 - RNA, 19 nt, Artificial Sequence
  Description of Artificial Sequence: Synthetic oligonucleotide
uucaggacucaauacuauc

SEQ ID NO: 249386 - RNA, 19 nt, Artificial Sequence
  Description of Artificial Sequence: Synthetic oligonucleotide
ucacggugaguguuuuccg

SEQ ID NO: 249387 - RNA, 19 nt, Artificial Sequence
  Description of Artificial Sequence: Synthetic oligonucleotide
accaggaucaaaagucaac

SEQ ID NO: 249388 - RNA, 19 nt, Artificial Sequence
  Description of Artificial Sequence: Synthetic oligonucleotide
acugccgaagugcuugcuc

SEQ ID NO: 249389 - RNA, 19 nt, Artificial Sequence
  Description of Artificial Sequence: Synthetic oligonucleotide
ucacgcaaauucaggacaa

SEQ ID NO: 249390 - RNA, 19 nt, Artificial Sequence
  Description of Artificial Sequence: Synthetic oligonucleotide
ugauuguagcgcagagcag

SEQ ID NO: 249391 - RNA, 19 nt, Artificial Sequence
  Description of Artificial Sequence: Synthetic oligonucleotide
ccuauauuaccugauagac

SEQ ID NO: 249392 - RNA, 19 nt, Artificial Sequence
  Description of Artificial Sequence: Synthetic oligonucleotide
uggagaggauggcaaauuc

SEQ ID NO: 249393 - RNA, 19 nt, Artificial Sequence
  Description of Artificial Sequence: Synthetic oligonucleotide
aacacguauacacgucuuu

SEQ ID NO: 249394 - RNA, 19 nt, Artificial Sequence
  Description of Artificial Sequence: Synthetic oligonucleotide
ugaacuuagcugguauaug

SEQ ID NO: 249395 - RNA, 19 nt, Artificial Sequence
  Description of Artificial Sequence: Synthetic oligonucleotide
guucacgcaaauucaggac

SEQ ID NO: 249396 - RNA, 19 nt, Artificial Sequence
  Description of Artificial Sequence: Synthetic oligonucleotide
caauguuguugagagcccg

SEQ ID NO: 249397 - RNA, 19 nt, Artificial Sequence
  Description of Artificial Sequence: Synthetic oligonucleotide
uaagcaguaaggagcugau

SEQ ID NO: 249398 - RNA, 19 nt, Artificial Sequence
  Description of Artificial Sequence: Synthetic oligonucleotide
gcuuacacuccacaguaag

SEQ ID NO: 249399 - RNA, 19 nt, Artificial Sequence
  Description of Artificial Sequence: Synthetic oligonucleotide
uuagucuaguagcuaugau

SEQ ID NO: 249400 - RNA, 19 nt, Artificial Sequence
  Description of Artificial Sequence: Synthetic oligonucleotide
aagccuauauuaccugaua

SEQ ID NO: 249401 - RNA, 19 nt, Artificial Sequence
  Description of Artificial Sequence: Synthetic oligonucleotide
caccauguuauggugcucc

SEQ ID NO: 249402 - RNA, 19 nt, Artificial Sequence
  Description of Artificial Sequence: Synthetic oligonucleotide
caugauuguagcgcagagc

SEQ ID NO: 249403 - RNA, 19 nt, Artificial Sequence
  Description of Artificial Sequence: Synthetic oligonucleotide
aggacucaauacuaucagu

SEQ ID NO: 249404 - RNA, 19 nt, Artificial Sequence
  Description of Artificial Sequence: Synthetic oligonucleotide
uaaaagcgacuguguuugg

SEQ ID NO: 249405 - RNA, 19 nt, Artificial Sequence
  Description of Artificial Sequence: Synthetic oligonucleotide
ucugaacuuagcugguaua

SEQ ID NO: 249406 - RNA, 19 nt, Artificial Sequence
  Description of Artificial Sequence: Synthetic oligonucleotide
uguuguugagagcccgagu

SEQ ID NO: 249407 - RNA, 19 nt, Artificial Sequence
  Description of Artificial Sequence: Synthetic oligonucleotide
gaguauauucaacucugua

SEQ ID NO: 249408 - RNA, 19 nt, Artificial Sequence
  Description of Artificial Sequence: Synthetic oligonucleotide
ugccauuccuuauugcuuu

SEQ ID NO: 249409 - RNA, 19 nt, Artificial Sequence
  Description of Artificial Sequence: Synthetic oligonucleotide
guaucaauuuucaagccua

SEQ ID NO: 249410 - RNA, 19 nt, Artificial Sequence
  Description of Artificial Sequence: Synthetic oligonucleotide
accauguuauggugcuccg

SEQ ID NO: 249411 - RNA, 19 nt, Artificial Sequence
  Description of Artificial Sequence: Synthetic oligonucleotide
agaauauagugugcaaaau

SEQ ID NO: 249412 - RNA, 19 nt, Artificial Sequence
  Description of Artificial Sequence: Synthetic oligonucleotide
ggcuacucaagaaaaggcc

SEQ ID NO: 249413 - RNA, 19 nt, Artificial Sequence
  Description of Artificial Sequence: Synthetic oligonucleotide
uaccaggaucaaaagucaa

SEQ ID NO: 249414 - RNA, 19 nt, Artificial Sequence
  Description of Artificial Sequence: Synthetic oligonucleotide
uaacuaggacaaugacacc

SEQ ID NO: 249415 - RNA, 19 nt, Artificial Sequence
  Description of Artificial Sequence: Synthetic oligonucleotide
cuagcccaaugcuauuaac

SEQ ID NO: 249416 - RNA, 19 nt, Artificial Sequence
  Description of Artificial Sequence: Synthetic oligonucleotide
cuaguggcaauauuugcua

SEQ ID NO: 249417 - RNA, 19 nt, Artificial Sequence
  Description of Artificial Sequence: Synthetic oligonucleotide
ucuuauguucacgcaaauu

SEQ ID NO: 249418 - RNA, 19 nt, Artificial Sequence
  Description of Artificial Sequence: Synthetic oligonucleotide
agggaguaaagugcaaagu

SEQ ID NO: 249419 - RNA, 19 nt, Artificial Sequence
  Description of Artificial Sequence: Synthetic oligonucleotide
caucgaaauuaauggcauc

SEQ ID NO: 249420 - RNA, 19 nt, Artificial Sequence
  Description of Artificial Sequence: Synthetic oligonucleotide
cauagacacggugacaaga

SEQ ID NO: 249421 - RNA, 19 nt, Artificial Sequence
  Description of Artificial Sequence: Synthetic oligonucleotide
gagccauacuacucagaac

SEQ ID NO: 249422 - RNA, 19 nt, Artificial Sequence
  Description of Artificial Sequence: Synthetic oligonucleotide
acguauacacgucuuucua

SEQ ID NO: 249423 - RNA, 19 nt, Artificial Sequence
  Description of Artificial Sequence: Synthetic oligonucleotide
uuccuuauggaagcacagu

SEQ ID NO: 249424 - RNA, 19 nt, Artificial Sequence
  Description of Artificial Sequence: Synthetic oligonucleotide
acuagcccaaugcuauuaa

SEQ ID NO: 249425 - RNA, 19 nt, Artificial Sequence
  Description of Artificial Sequence: Synthetic oligonucleotide
guagcuuacuuaaugcucu

SEQ ID NO: 249426 - RNA, 19 nt, Artificial Sequence
  Description of Artificial Sequence: Synthetic oligonucleotide
auguuguugagagcccgag

SEQ ID NO: 249427 - RNA, 19 nt, Artificial Sequence
  Description of Artificial Sequence: Synthetic oligonucleotide
gagcugauauaaagagcag

SEQ ID NO: 249428 - RNA, 19 nt, Artificial Sequence
  Description of Artificial Sequence: Synthetic oligonucleotide
uaauuccccuucuuacaau

SEQ ID NO: 249429 - RNA, 19 nt, Artificial Sequence
  Description of Artificial Sequence: Synthetic oligonucleotide
guagacauaugucaccaau

SEQ ID NO: 249430 - RNA, 19 nt, Artificial Sequence
  Description of Artificial Sequence: Synthetic oligonucleotide
acggugucaacuguuaaua

SEQ ID NO: 249431 - RNA, 19 nt, Artificial Sequence
  Description of Artificial Sequence: Synthetic oligonucleotide
auagucuugaugagacaca

SEQ ID NO: 249432 - RNA, 19 nt, Artificial Sequence
  Description of Artificial Sequence: Synthetic oligonucleotide
ggcuaguggcaauauuugc

SEQ ID NO: 249433 - RNA, 19 nt, Artificial Sequence
  Description of Artificial Sequence: Synthetic oligonucleotide
gcauuaggcaucugauuug

SEQ ID NO: 249434 - RNA, 19 nt, Artificial Sequence
  Description of Artificial Sequence: Synthetic oligonucleotide
aucuuauguucacgcaaau

SEQ ID NO: 249435 - RNA, 19 nt, Artificial Sequence
  Description of Artificial Sequence: Synthetic oligonucleotide
uuaauggcaucaggguguc

SEQ ID NO: 249436 - RNA, 19 nt, Artificial Sequence
  Description of Artificial Sequence: Synthetic oligonucleotide
agcgacuguguuuggcaca

SEQ ID NO: 249437 - RNA, 19 nt, Artificial Sequence
  Description of Artificial Sequence: Synthetic oligonucleotide
uaguagcuaugauguguac

SEQ ID NO: 249438 - RNA, 19 nt, Artificial Sequence
  Description of Artificial Sequence: Synthetic oligonucleotide
ugggcgugcauaggaaugu

SEQ ID NO: 249439 - RNA, 19 nt, Artificial Sequence
  Description of Artificial Sequence: Synthetic oligonucleotide
ucaauacuaucaguaucuu

SEQ ID NO: 249440 - RNA, 19 nt, Artificial Sequence
  Description of Artificial Sequence: Synthetic oligonucleotide
aaacacguauacacgucuu

SEQ ID NO: 249441 - RNA, 19 nt, Artificial Sequence
  Description of Artificial Sequence: Synthetic oligonucleotide
gcuacucaagaaaaggcca

SEQ ID NO: 249442 - RNA, 19 nt, Artificial Sequence
  Description of Artificial Sequence: Synthetic oligonucleotide
gucuaguagcuaugaugug

SEQ ID NO: 249443 - RNA, 19 nt, Artificial Sequence
  Description of Artificial Sequence: Synthetic oligonucleotide
uuagaccaucagaaccaua

SEQ ID NO: 249444 - RNA, 19 nt, Artificial Sequence
  Description of Artificial Sequence: Synthetic oligonucleotide
agugacuagcccaaugcua

SEQ ID NO: 249445 - RNA, 19 nt, Artificial Sequence
  Description of Artificial Sequence: Synthetic oligonucleotide
cuggccagacuaaaagcga

SEQ ID NO: 249446 - RNA, 19 nt, Artificial Sequence
  Description of Artificial Sequence: Synthetic oligonucleotide
ggacucaauacuaucagua

SEQ ID NO: 249447 - RNA, 19 nt, Artificial Sequence
  Description of Artificial Sequence: Synthetic oligonucleotide
uuccguuaugucugaggua

SEQ ID NO: 249448 - RNA, 19 nt, Artificial Sequence
  Description of Artificial Sequence: Synthetic oligonucleotide
gguggcuacucaagaaaag

SEQ ID NO: 249449 - RNA, 19 nt, Artificial Sequence
  Description of Artificial Sequence: Synthetic oligonucleotide
uuugcccguucaugucuca

SEQ ID NO: 249450 - RNA, 19 nt, Artificial Sequence
  Description of Artificial Sequence: Synthetic oligonucleotide
uccgggagguagacauaug

SEQ ID NO: 249451 - RNA, 19 nt, Artificial Sequence
  Description of Artificial Sequence: Synthetic oligonucleotide
caguacuuauguagauaca

SEQ ID NO: 249452 - RNA, 19 nt, Artificial Sequence
  Description of Artificial Sequence: Synthetic oligonucleotide
ggcgaaaagcaugaaggca

SEQ ID NO: 249453 - RNA, 19 nt, Artificial Sequence
  Description of Artificial Sequence: Synthetic oligonucleotide
guguccgggagguagacau

SEQ ID NO: 249454 - RNA, 19 nt, Artificial Sequence
  Description of Artificial Sequence: Synthetic oligonucleotide
uagcuuacuuaaugcucua

SEQ ID NO: 249455 - RNA, 19 nt, Artificial Sequence
  Description of Artificial Sequence: Synthetic oligonucleotide
gccagacuaaaagcgacug

SEQ ID NO: 249456 - RNA, 19 nt, Artificial Sequence
  Description of Artificial Sequence: Synthetic oligonucleotide
cacguauacacgucuuucu

SEQ ID NO: 249457 - RNA, 19 nt, Artificial Sequence
  Description of Artificial Sequence: Synthetic oligonucleotide
cugccauaaaaugagcacu

SEQ ID NO: 249458 - RNA, 19 nt, Artificial Sequence
  Description of Artificial Sequence: Synthetic oligonucleotide
gacuagcccaaugcuauua

SEQ ID NO: 249459 - RNA, 19 nt, Artificial Sequence
  Description of Artificial Sequence: Synthetic oligonucleotide
gugacuagcccaaugcuau

SEQ ID NO: 249460 - RNA, 19 nt, Artificial Sequence
  Description of Artificial Sequence: Synthetic oligonucleotide
ugacacugauggcucuguu

SEQ ID NO: 249461 - RNA, 19 nt, Artificial Sequence
  Description of Artificial Sequence: Synthetic oligonucleotide
ugugggcuaguggcaauau

SEQ ID NO: 249462 - RNA, 19 nt, Artificial Sequence
  Description of Artificial Sequence: Synthetic oligonucleotide
uugagagcccgaguugguu

SEQ ID NO: 249463 - RNA, 19 nt, Artificial Sequence
  Description of Artificial Sequence: Synthetic oligonucleotide
gagagcccgaguugguucu

SEQ ID NO: 249464 - RNA, 19 nt, Artificial Sequence
  Description of Artificial Sequence: Synthetic oligonucleotide
ugacuagcccaaugcuauu

SEQ ID NO: 249465 - RNA, 19 nt, Artificial Sequence
  Description of Artificial Sequence: Synthetic oligonucleotide
ccugaaucaucgaaauuaa

SEQ ID NO: 249466 - RNA, 19 nt, Artificial Sequence
  Description of Artificial Sequence: Synthetic oligonucleotide
gcuaguggcaauauuugcu

SEQ ID NO: 249467 - RNA, 19 nt, Artificial Sequence
  Description of Artificial Sequence: Synthetic oligonucleotide
agcuuacuuaaugcucuaa

SEQ ID NO: 249468 - RNA, 19 nt, Artificial Sequence
  Description of Artificial Sequence: Synthetic oligonucleotide
ucuucacggugaguguuuu

SEQ ID NO: 249469 - RNA, 19 nt, Artificial Sequence
  Description of Artificial Sequence: Synthetic oligonucleotide
gcgacuguguuuggcacag

SEQ ID NO: 249470 - RNA, 19 nt, Artificial Sequence
  Description of Artificial Sequence: Synthetic oligonucleotide
cauggguacaauacagauu

SEQ ID NO: 249471 - RNA, 19 nt, Artificial Sequence
  Description of Artificial Sequence: Synthetic oligonucleotide
aagcaguaaggagcugaua

SEQ ID NO: 249472 - RNA, 19 nt, Artificial Sequence
  Description of Artificial Sequence: Synthetic oligonucleotide
ggaaaucauggaggagugc

SEQ ID NO: 249473 - RNA, 19 nt, Artificial Sequence
  Description of Artificial Sequence: Synthetic oligonucleotide
cugaacuuagcugguauau

SEQ ID NO: 249474 - RNA, 19 nt, Artificial Sequence
  Description of Artificial Sequence: Synthetic oligonucleotide
uguccgggagguagacaua

SEQ ID NO: 249475 - RNA, 19 nt, Artificial Sequence
  Description of Artificial Sequence: Synthetic oligonucleotide
uugcccguucaugucucac

SEQ ID NO: 249476 - RNA, 19 nt, Artificial Sequence
  Description of Artificial Sequence: Synthetic oligonucleotide
gcuuacuuaaugcucuaau

SEQ ID NO: 249477 - RNA, 19 nt, Artificial Sequence
  Description of Artificial Sequence: Synthetic oligonucleotide
caagccuauauuaccugau

SEQ ID NO: 249478 - RNA, 19 nt, Artificial Sequence
  Description of Artificial Sequence: Synthetic oligonucleotide
gcgcugacgagccauacua

SEQ ID NO: 249479 - RNA, 19 nt, Artificial Sequence
  Description of Artificial Sequence: Synthetic oligonucleotide
cagucaggguuuaaacgcu

SEQ ID NO: 249480 - RNA, 19 nt, Artificial Sequence
  Description of Artificial Sequence: Synthetic oligonucleotide
uaauggcaucagggugucc

SEQ ID NO: 249481 - RNA, 19 nt, Artificial Sequence
  Description of Artificial Sequence: Synthetic oligonucleotide
cacggaaugccaugcugua

SEQ ID NO: 249482 - RNA, 19 nt, Artificial Sequence
  Description of Artificial Sequence: Synthetic oligonucleotide
cugaaucaucgaaauuaau

SEQ ID NO: 249483 - RNA, 19 nt, Artificial Sequence
  Description of Artificial Sequence: Synthetic oligonucleotide
gguagacauaugucaccaa

SEQ ID NO: 249484 - RNA, 19 nt, Artificial Sequence
  Description of Artificial Sequence: Synthetic oligonucleotide
cacggugaguguuuuccgu

SEQ ID NO: 249485 - RNA, 19 nt, Artificial Sequence
  Description of Artificial Sequence: Synthetic oligonucleotide
ccuugugagugcccauuug

SEQ ID NO: 249486 - RNA, 19 nt, Artificial Sequence
  Description of Artificial Sequence: Synthetic oligonucleotide
gcgugcauaggaauguaaa

SEQ ID NO: 249487 - RNA, 19 nt, Artificial Sequence
  Description of Artificial Sequence: Synthetic oligonucleotide
cgagccauacuacucagaa

SEQ ID NO: 249488 - RNA, 19 nt, Artificial Sequence
  Description of Artificial Sequence: Synthetic oligonucleotide
uaacugcacguuggccagu

SEQ ID NO: 249489 - RNA, 19 nt, Artificial Sequence
  Description of Artificial Sequence: Synthetic oligonucleotide
acgagccauacuacucaga

SEQ ID NO: 249490 - RNA, 19 nt, Artificial Sequence
  Description of Artificial Sequence: Synthetic oligonucleotide
accaccuaccugccauguu

SEQ ID NO: 249491 - RNA, 19 nt, Artificial Sequence
  Description of Artificial Sequence: Synthetic oligonucleotide
ggguacaauacagauuaau

SEQ ID NO: 249492 - RNA, 19 nt, Artificial Sequence
  Description of Artificial Sequence: Synthetic oligonucleotide
auauguggcugaggagaua

SEQ ID NO: 249493 - RNA, 19 nt, Artificial Sequence
  Description of Artificial Sequence: Synthetic oligonucleotide
cgggagguagacauauguc

SEQ ID NO: 249494 - RNA, 19 nt, Artificial Sequence
  Description of Artificial Sequence: Synthetic oligonucleotide
cugcauuaggcaucugauu

SEQ ID NO: 249495 - RNA, 19 nt, Artificial Sequence
  Description of Artificial Sequence: Synthetic oligonucleotide
caccauagacacggugaca

SEQ ID NO: 249496 - RNA, 19 nt, Artificial Sequence
  Description of Artificial Sequence: Synthetic oligonucleotide
cagucaagcuuggguaaaa

SEQ ID NO: 249497 - RNA, 19 nt, Artificial Sequence
  Description of Artificial Sequence: Synthetic oligonucleotide
ggugaguguuuuccguuau

SEQ ID NO: 249498 - RNA, 19 nt, Artificial Sequence
  Description of Artificial Sequence: Synthetic oligonucleotide
ccgggagguagacauaugu

SEQ ID NO: 249499 - RNA, 19 nt, Artificial Sequence
  Description of Artificial Sequence: Synthetic oligonucleotide
cacugcauaagagggcuuu

SEQ ID NO: 249500 - RNA, 19 nt, Artificial Sequence
  Description of Artificial Sequence: Synthetic oligonucleotide
cacgcaaauucaggacaaa

SEQ ID NO: 249501 - RNA, 19 nt, Artificial Sequence
  Description of Artificial Sequence: Synthetic oligonucleotide
ggcgugcauaggaauguaa

SEQ ID NO: 249502 - RNA, 19 nt, Artificial Sequence
  Description of Artificial Sequence: Synthetic oligonucleotide
caccugaaucaucgaaauu

SEQ ID NO: 249503 - RNA, 19 nt, Artificial Sequence
  Description of Artificial Sequence: Synthetic oligonucleotide
ccguuaugucugagguauc

SEQ ID NO: 249504 - RNA, 19 nt, Artificial Sequence
  Description of Artificial Sequence: Synthetic oligonucleotide
ggcgcugacgagccauacu

SEQ ID NO: 249505 - RNA, 19 nt, Artificial Sequence
  Description of Artificial Sequence: Synthetic oligonucleotide
acggcgcugacgagccaua

SEQ ID NO: 249506 - RNA, 19 nt, Artificial Sequence
  Description of Artificial Sequence: Synthetic oligonucleotide
gagcccgaguugguucuuu

SEQ ID NO: 249507 - RNA, 19 nt, Artificial Sequence
  Description of Artificial Sequence: Synthetic oligonucleotide
gggcgugcauaggaaugua

SEQ ID NO: 249508 - RNA, 19 nt, Artificial Sequence
  Description of Artificial Sequence: Synthetic oligonucleotide
cggcgcugacgagccauac

SEQ ID NO: 249509 - RNA, 19 nt, Artificial Sequence
  Description of Artificial Sequence: Synthetic oligonucleotide
agacuuuucacauauaagc

SEQ ID NO: 249510 - RNA, 19 nt, Artificial Sequence
  Description of Artificial Sequence: Synthetic oligonucleotide
aauuaaagugcccuggggc

SEQ ID NO: 249511 - RNA, 19 nt, Artificial Sequence
  Description of Artificial Sequence: Synthetic oligonucleotide
gaaaaggcuuacuagaugg

SEQ ID NO: 249512 - RNA, 19 nt, Artificial Sequence
  Description of Artificial Sequence: Synthetic oligonucleotide
acauauaagcucuaguggc

SEQ ID NO: 249513 - RNA, 19 nt, Artificial Sequence
  Description of Artificial Sequence: Synthetic oligonucleotide
auauucaacacaaaggagc

SEQ ID NO: 249514 - RNA, 19 nt, Artificial Sequence
  Description of Artificial Sequence: Synthetic oligonucleotide
agaacgucaacuuugagcu

SEQ ID NO: 249515 - RNA, 19 nt, Artificial Sequence
  Description of Artificial Sequence: Synthetic oligonucleotide
aaccuggugcuauauagcc

SEQ ID NO: 249516 - RNA, 19 nt, Artificial Sequence
  Description of Artificial Sequence: Synthetic oligonucleotide
cauuagugcauucauaagg

SEQ ID NO: 249517 - RNA, 19 nt, Artificial Sequence
  Description of Artificial Sequence: Synthetic oligonucleotide
uucccuacaacaaaggggc

SEQ ID NO: 249518 - RNA, 19 nt, Artificial Sequence
  Description of Artificial Sequence: Synthetic oligonucleotide
ucuugggcaaaccauaugc

SEQ ID NO: 249519 - RNA, 19 nt, Artificial Sequence
  Description of Artificial Sequence: Synthetic oligonucleotide
gaaaccauuuugcaugucg

SEQ ID NO: 249520 - RNA, 19 nt, Artificial Sequence
  Description of Artificial Sequence: Synthetic oligonucleotide
uguugggaauuucauaacg

SEQ ID NO: 249521 - RNA, 19 nt, Artificial Sequence
  Description of Artificial Sequence: Synthetic oligonucleotide
uaaacuacagcccaauuaa

SEQ ID NO: 249522 - RNA, 19 nt, Artificial Sequence
  Description of Artificial Sequence: Synthetic oligonucleotide
uguguuccgaauuauaaug

SEQ ID NO: 249523 - RNA, 19 nt, Artificial Sequence
  Description of Artificial Sequence: Synthetic oligonucleotide
uuccgaauuauaauggaag

SEQ ID NO: 249524 - RNA, 19 nt, Artificial Sequence
  Description of Artificial Sequence: Synthetic oligonucleotide
uucauaacggguaacagaa

SEQ ID NO: 249525 - RNA, 19 nt, Artificial Sequence
  Description of Artificial Sequence: Synthetic oligonucleotide
uccauuacucgucucaagg

SEQ ID NO: 249526 - RNA, 19 nt, Artificial Sequence
  Description of Artificial Sequence: Synthetic oligonucleotide
uaaucugauacucucugag

SEQ ID NO: 249527 - RNA, 19 nt, Artificial Sequence
  Description of Artificial Sequence: Synthetic oligonucleotide
augucaaggcauuacaaac

SEQ ID NO: 249528 - RNA, 19 nt, Artificial Sequence
  Description of Artificial Sequence: Synthetic oligonucleotide
aacgucaacuuugagcugc

SEQ ID NO: 249529 - RNA, 19 nt, Artificial Sequence
  Description of Artificial Sequence: Synthetic oligonucleotide
ucaaauggccucuuuagag

SEQ ID NO: 249530 - RNA, 19 nt, Artificial Sequence
  Description of Artificial Sequence: Synthetic oligonucleotide
uucgucccuaauuagaggg

SEQ ID NO: 249531 - RNA, 19 nt, Artificial Sequence
  Description of Artificial Sequence: Synthetic oligonucleotide
aaguaucaccuucaaaguc

SEQ ID NO: 249532 - RNA, 19 nt, Artificial Sequence
  Description of Artificial Sequence: Synthetic oligonucleotide
uuguucaauaggaauaagc

SEQ ID NO: 249533 - RNA, 19 nt, Artificial Sequence
  Description of Artificial Sequence: Synthetic oligonucleotide
uuauuugugaucaguguug

SEQ ID NO: 249534 - RNA, 19 nt, Artificial Sequence
  Description of Artificial Sequence: Synthetic oligonucleotide
auaaccuggugcuauauag

SEQ ID NO: 249535 - RNA, 19 nt, Artificial Sequence
  Description of Artificial Sequence: Synthetic oligonucleotide
cuuauugggaucuuuauca

SEQ ID NO: 249536 - RNA, 19 nt, Artificial Sequence
  Description of Artificial Sequence: Synthetic oligonucleotide
ucuguguuacaacaaagca

SEQ ID NO: 249537 - RNA, 19 nt, Artificial Sequence
  Description of Artificial Sequence: Synthetic oligonucleotide
acuuuucacauauaagcuc

SEQ ID NO: 249538 - RNA, 19 nt, Artificial Sequence
  Description of Artificial Sequence: Synthetic oligonucleotide
guugagacucuauacaucc

SEQ ID NO: 249539 - RNA, 19 nt, Artificial Sequence
  Description of Artificial Sequence: Synthetic oligonucleotide
uaauuagaggggaaguaag

SEQ ID NO: 249540 - RNA, 19 nt, Artificial Sequence
  Description of Artificial Sequence: Synthetic oligonucleotide
cauaugguguuccauaacc

SEQ ID NO: 249541 - RNA, 19 nt, Artificial Sequence
  Description of Artificial Sequence: Synthetic oligonucleotide
caaguauguucaaagaaag

SEQ ID NO: 249542 - RNA, 19 nt, Artificial Sequence
  Description of Artificial Sequence: Synthetic oligonucleotide
uucaucauaacauuuucuc

SEQ ID NO: 249543 - RNA, 19 nt, Artificial Sequence
  Description of Artificial Sequence: Synthetic oligonucleotide
cuucccuacaacaaagggg

SEQ ID NO: 249544 - RNA, 19 nt, Artificial Sequence
  Description of Artificial Sequence: Synthetic oligonucleotide
uccacgguaaucuuuaaac

SEQ ID NO: 249545 - RNA, 19 nt, Artificial Sequence
  Description of Artificial Sequence: Synthetic oligonucleotide
ugaguggucauguagcuca

SEQ ID NO: 249546 - RNA, 19 nt, Artificial Sequence
  Description of Artificial Sequence: Synthetic oligonucleotide
aggaauacuucugaaaagg

SEQ ID NO: 249547 - RNA, 19 nt, Artificial Sequence
  Description of Artificial Sequence: Synthetic oligonucleotide
cauaacggguaacagaacc

SEQ ID NO: 249548 - RNA, 19 nt, Artificial Sequence
  Description of Artificial Sequence: Synthetic oligonucleotide
ugacaguccauacaugcag

SEQ ID NO: 249549 - RNA, 19 nt, Artificial Sequence
  Description of Artificial Sequence: Synthetic oligonucleotide
ugggcaaaccauaugcagg

SEQ ID NO: 249550 - RNA, 19 nt, Artificial Sequence
  Description of Artificial Sequence: Synthetic oligonucleotide
uucugaaaaggcuuacuag

SEQ ID NO: 249551 - RNA, 19 nt, Artificial Sequence
  Description of Artificial Sequence: Synthetic oligonucleotide
ugucaaggcauuacaaacc

SEQ ID NO: 249552 - RNA, 19 nt, Artificial Sequence
  Description of Artificial Sequence: Synthetic oligonucleotide
uuuacauaaucugauacuc

SEQ ID NO: 249553 - RNA, 19 nt, Artificial Sequence
  Description of Artificial Sequence: Synthetic oligonucleotide
ucuacuucuaccuccauua

SEQ ID NO: 249554 - RNA, 19 nt, Artificial Sequence
  Description of Artificial Sequence: Synthetic oligonucleotide
cuguguuacaacaaagcag

SEQ ID NO: 249555 - RNA, 19 nt, Artificial Sequence
  Description of Artificial Sequence: Synthetic oligonucleotide
uagacuuuucacauauaag

SEQ ID NO: 249556 - RNA, 19 nt, Artificial Sequence
  Description of Artificial Sequence: Synthetic oligonucleotide
cucuguugcacaaaucacg

SEQ ID NO: 249557 - RNA, 19 nt, Artificial Sequence
  Description of Artificial Sequence: Synthetic oligonucleotide
aauuucauaacggguaaca

SEQ ID NO: 249558 - RNA, 19 nt, Artificial Sequence
  Description of Artificial Sequence: Synthetic oligonucleotide
uuacuucccuacaacaaag

SEQ ID NO: 249559 - RNA, 19 nt, Artificial Sequence
  Description of Artificial Sequence: Synthetic oligonucleotide
aacaugucaaggcauuaca

SEQ ID NO: 249560 - RNA, 19 nt, Artificial Sequence
  Description of Artificial Sequence: Synthetic oligonucleotide
aauucgucccuaauuagag

SEQ ID NO: 249561 - RNA, 19 nt, Artificial Sequence
  Description of Artificial Sequence: Synthetic oligonucleotide
aaguauguucaaagaaagc

SEQ ID NO: 249562 - RNA, 19 nt, Artificial Sequence
  Description of Artificial Sequence: Synthetic oligonucleotide
caaaucacguagaaugcgg

SEQ ID NO: 249563 - RNA, 19 nt, Artificial Sequence
  Description of Artificial Sequence: Synthetic oligonucleotide
ucauacuugagaccucucc

SEQ ID NO: 249564 - RNA, 19 nt, Artificial Sequence
  Description of Artificial Sequence: Synthetic oligonucleotide
uccgaauuauaauggaagc

SEQ ID NO: 249565 - RNA, 19 nt, Artificial Sequence
  Description of Artificial Sequence: Synthetic oligonucleotide
ucuauuacaaguaccuaua

SEQ ID NO: 249566 - RNA, 19 nt, Artificial Sequence
  Description of Artificial Sequence: Synthetic oligonucleotide
uuagagaacugaauuugca

SEQ ID NO: 249567 - RNA, 19 nt, Artificial Sequence
  Description of Artificial Sequence: Synthetic oligonucleotide
uaccguuucacagaacugg

SEQ ID NO: 249568 - RNA, 19 nt, Artificial Sequence
  Description of Artificial Sequence: Synthetic oligonucleotide
cacuuuauaaaucuggcca

SEQ ID NO: 249569 - RNA, 19 nt, Artificial Sequence
  Description of Artificial Sequence: Synthetic oligonucleotide
aggacaauaacacaugauu

SEQ ID NO: 249570 - RNA, 19 nt, Artificial Sequence
  Description of Artificial Sequence: Synthetic oligonucleotide
aaugcggaggacaauaaca

SEQ ID NO: 249571 - RNA, 19 nt, Artificial Sequence
  Description of Artificial Sequence: Synthetic oligonucleotide
aaucacguagaaugcggag

SEQ ID NO: 249572 - RNA, 19 nt, Artificial Sequence
  Description of Artificial Sequence: Synthetic oligonucleotide
ucuguugcacaaaucacgu

SEQ ID NO: 249573 - RNA, 19 nt, Artificial Sequence
  Description of Artificial Sequence: Synthetic oligonucleotide
ugauagucuaagugcaugc

SEQ ID NO: 249574 - RNA, 19 nt, Artificial Sequence
  Description of Artificial Sequence: Synthetic oligonucleotide
ggaagguuaucuuugacug

SEQ ID NO: 249575 - RNA, 19 nt, Artificial Sequence
  Description of Artificial Sequence: Synthetic oligonucleotide
cucuguguuacaacaaagc

SEQ ID NO: 249576 - RNA, 19 nt, Artificial Sequence
  Description of Artificial Sequence: Synthetic oligonucleotide
uccaauucgucccuaauua

SEQ ID NO: 249577 - RNA, 19 nt, Artificial Sequence
  Description of Artificial Sequence: Synthetic oligonucleotide
acuacagcccaauuaaagu

SEQ ID NO: 249578 - RNA, 19 nt, Artificial Sequence
  Description of Artificial Sequence: Synthetic oligonucleotide
aacuacagcccaauuaaag

SEQ ID NO: 249579 - RNA, 19 nt, Artificial Sequence
  Description of Artificial Sequence: Synthetic oligonucleotide
cauauucaacacaaaggag

SEQ ID NO: 249580 - RNA, 19 nt, Artificial Sequence
  Description of Artificial Sequence: Synthetic oligonucleotide
uaccuauagacuuuucaca

SEQ ID NO: 249581 - RNA, 19 nt, Artificial Sequence
  Description of Artificial Sequence: Synthetic oligonucleotide
uagucuaagugcaugcugu

SEQ ID NO: 249582 - RNA, 19 nt, Artificial Sequence
  Description of Artificial Sequence: Synthetic oligonucleotide
auuaaagugcccuggggca

SEQ ID NO: 249583 - RNA, 19 nt, Artificial Sequence
  Description of Artificial Sequence: Synthetic oligonucleotide
caucauaacauuuucucca

SEQ ID NO: 249584 - RNA, 19 nt, Artificial Sequence
  Description of Artificial Sequence: Synthetic oligonucleotide
auaaacuacagcccaauua

SEQ ID NO: 249585 - RNA, 19 nt, Artificial Sequence
  Description of Artificial Sequence: Synthetic oligonucleotide
aguaccuauagacuuuuca

SEQ ID NO: 249586 - RNA, 19 nt, Artificial Sequence
  Description of Artificial Sequence: Synthetic oligonucleotide
ucugcauuguacuguacug

SEQ ID NO: 249587 - RNA, 19 nt, Artificial Sequence
  Description of Artificial Sequence: Synthetic oligonucleotide
cugauacucucugagaacg

SEQ ID NO: 249588 - RNA, 19 nt, Artificial Sequence
  Description of Artificial Sequence: Synthetic oligonucleotide
cauauaagcucuaguggcc

SEQ ID NO: 249589 - RNA, 19 nt, Artificial Sequence
  Description of Artificial Sequence: Synthetic oligonucleotide
aggucuauugcuuuacugu

SEQ ID NO: 249590 - RNA, 19 nt, Artificial Sequence
  Description of Artificial Sequence: Synthetic oligonucleotide
agacuuacuucccuacaac

SEQ ID NO: 249591 - RNA, 19 nt, Artificial Sequence
  Description of Artificial Sequence: Synthetic oligonucleotide
cauuacucgucucaaggcc

SEQ ID NO: 249592 - RNA, 19 nt, Artificial Sequence
  Description of Artificial Sequence: Synthetic oligonucleotide
cuuauacugaagcccaggc

SEQ ID NO: 249593 - RNA, 19 nt, Artificial Sequence
  Description of Artificial Sequence: Synthetic oligonucleotide
ugcugaguggucauguagc

SEQ ID NO: 249594 - RNA, 19 nt, Artificial Sequence
  Description of Artificial Sequence: Synthetic oligonucleotide
aggcauuacaaaccacagc

SEQ ID NO: 249595 - RNA, 19 nt, Artificial Sequence
  Description of Artificial Sequence: Synthetic oligonucleotide
guucuuaccucuaagguac

SEQ ID NO: 249596 - RNA, 19 nt, Artificial Sequence
  Description of Artificial Sequence: Synthetic oligonucleotide
uaggaauaagcuucuguca

SEQ ID NO: 249597 - RNA, 19 nt, Artificial Sequence
  Description of Artificial Sequence: Synthetic oligonucleotide
aggaagguuaucuuugacu

SEQ ID NO: 249598 - RNA, 19 nt, Artificial Sequence
  Description of Artificial Sequence: Synthetic oligonucleotide
uucugcauuguacuguacu

SEQ ID NO: 249599 - RNA, 19 nt, Artificial Sequence
  Description of Artificial Sequence: Synthetic oligonucleotide
uucaucggagcucauacau

SEQ ID NO: 249600 - RNA, 19 nt, Artificial Sequence
  Description of Artificial Sequence: Synthetic oligonucleotide
guauuauugcuugaguuug

SEQ ID NO: 249601 - RNA, 19 nt, Artificial Sequence
  Description of Artificial Sequence: Synthetic oligonucleotide
uuaucauccccuaauccau

SEQ ID NO: 249602 - RNA, 19 nt, Artificial Sequence
  Description of Artificial Sequence: Synthetic oligonucleotide
ggucauguagcucagagca

SEQ ID NO: 249603 - RNA, 19 nt, Artificial Sequence
  Description of Artificial Sequence: Synthetic oligonucleotide
ucccuuuggaugaaaggcc

SEQ ID NO: 249604 - RNA, 19 nt, Artificial Sequence
  Description of Artificial Sequence: Synthetic oligonucleotide
acuaaaagaaugaguagug

SEQ ID NO: 249605 - RNA, 19 nt, Artificial Sequence
  Description of Artificial Sequence: Synthetic oligonucleotide
uuuauuggcuuuaguuaca

SEQ ID NO: 249606 - RNA, 19 nt, Artificial Sequence
  Description of Artificial Sequence: Synthetic oligonucleotide
uuagaggggaaguaaguau

SEQ ID NO: 249607 - RNA, 19 nt, Artificial Sequence
  Description of Artificial Sequence: Synthetic oligonucleotide
uccaguauuauugcuugag

SEQ ID NO: 249608 - RNA, 19 nt, Artificial Sequence
  Description of Artificial Sequence: Synthetic oligonucleotide
auagucuaagugcaugcug

SEQ ID NO: 249609 - RNA, 19 nt, Artificial Sequence
  Description of Artificial Sequence: Synthetic oligonucleotide
aacacccuuugccugagga

SEQ ID NO: 249610 - RNA, 19 nt, Artificial Sequence
  Description of Artificial Sequence: Synthetic oligonucleotide
acaaaucacguagaaugcg

SEQ ID NO: 249611 - RNA, 19 nt, Artificial Sequence
  Description of Artificial Sequence: Synthetic oligonucleotide
aguuuauuugugaucagug

SEQ ID NO: 249612 - RNA, 19 nt, Artificial Sequence
  Description of Artificial Sequence: Synthetic oligonucleotide
uugcugaguggucauguag

SEQ ID NO: 249613 - RNA, 19 nt, Artificial Sequence
  Description of Artificial Sequence: Synthetic oligonucleotide
uuuagagcugaagacccag

SEQ ID NO: 249614 - RNA, 19 nt, Artificial Sequence
  Description of Artificial Sequence: Synthetic oligonucleotide
ugcaccucuaaauuucugu

SEQ ID NO: 249615 - RNA, 19 nt, Artificial Sequence
  Description of Artificial Sequence: Synthetic oligonucleotide
uucacugcuacgugaagcu

SEQ ID NO: 249616 - RNA, 19 nt, Artificial Sequence
  Description of Artificial Sequence: Synthetic oligonucleotide
uaaccuggugcuauauagc

SEQ ID NO: 249617 - RNA, 19 nt, Artificial Sequence
  Description of Artificial Sequence: Synthetic oligonucleotide
cuaccuccauuacaaagcg

SEQ ID NO: 249618 - RNA, 19 nt, Artificial Sequence
  Description of Artificial Sequence: Synthetic oligonucleotide
uguuccgaauuauaaugga

SEQ ID NO: 249619 - RNA, 19 nt, Artificial Sequence
  Description of Artificial Sequence: Synthetic oligonucleotide
cuauauagccaggagcugc

SEQ ID NO: 249620 - RNA, 19 nt, Artificial Sequence
  Description of Artificial Sequence: Synthetic oligonucleotide
agaaugaguaguggggaac

SEQ ID NO: 249621 - RNA, 19 nt, Artificial Sequence
  Description of Artificial Sequence: Synthetic oligonucleotide
uuugccacuugcugugagg

SEQ ID NO: 249622 - RNA, 19 nt, Artificial Sequence
  Description of Artificial Sequence: Synthetic oligonucleotide
acuuuauaaaucuggccaa

SEQ ID NO: 249623 - RNA, 19 nt, Artificial Sequence
  Description of Artificial Sequence: Synthetic oligonucleotide
uuaccucuaagguacugga

SEQ ID NO: 249624 - RNA, 19 nt, Artificial Sequence
  Description of Artificial Sequence: Synthetic oligonucleotide
auuagugcauucauaaggu

SEQ ID NO: 249625 - RNA, 19 nt, Artificial Sequence
  Description of Artificial Sequence: Synthetic oligonucleotide
uccauuacaaagcgcuugu

SEQ ID NO: 249626 - RNA, 19 nt, Artificial Sequence
  Description of Artificial Sequence: Synthetic oligonucleotide
aaucugaauaggaagguua

SEQ ID NO: 249627 - RNA, 19 nt, Artificial Sequence
  Description of Artificial Sequence: Synthetic oligonucleotide
ucuaagguacuggaggucu

SEQ ID NO: 249628 - RNA, 19 nt, Artificial Sequence
  Description of Artificial Sequence: Synthetic oligonucleotide
aguauuccagaugccaaac

SEQ ID NO: 249629 - RNA, 19 nt, Artificial Sequence
  Description of Artificial Sequence: Synthetic oligonucleotide
uucauaaggucuauugcuu

SEQ ID NO: 249630 - RNA, 19 nt, Artificial Sequence
  Description of Artificial Sequence: Synthetic oligonucleotide
ugagguaccguuucacaga

SEQ ID NO: 249631 - RNA, 19 nt, Artificial Sequence
  Description of Artificial Sequence: Synthetic oligonucleotide
auguugggaauuucauaac

SEQ ID NO: 249632 - RNA, 19 nt, Artificial Sequence
  Description of Artificial Sequence: Synthetic oligonucleotide
caauuaaagugcccugggg

SEQ ID NO: 249633 - RNA, 19 nt, Artificial Sequence
  Description of Artificial Sequence: Synthetic oligonucleotide
uagacuuacuucccuacaa

SEQ ID NO: 249634 - RNA, 19 nt, Artificial Sequence
  Description of Artificial Sequence: Synthetic oligonucleotide
cauauguugugccauccac

SEQ ID NO: 249635 - RNA, 19 nt, Artificial Sequence
  Description of Artificial Sequence: Synthetic oligonucleotide
cuauuacaaguaccuauag

SEQ ID NO: 249636 - RNA, 19 nt, Artificial Sequence
  Description of Artificial Sequence: Synthetic oligonucleotide
guuagguuaaaugaaaagu

SEQ ID NO: 249637 - RNA, 19 nt, Artificial Sequence
  Description of Artificial Sequence: Synthetic oligonucleotide
aaccauaugcaggggcagc

SEQ ID NO: 249638 - RNA, 19 nt, Artificial Sequence
  Description of Artificial Sequence: Synthetic oligonucleotide
uguuguucaauaggaauaa

SEQ ID NO: 249639 - RNA, 19 nt, Artificial Sequence
  Description of Artificial Sequence: Synthetic oligonucleotide
uagagaacugaauuugcau

SEQ ID NO: 249640 - RNA, 19 nt, Artificial Sequence
  Description of Artificial Sequence: Synthetic oligonucleotide
uguaacaugucaaggcauu

SEQ ID NO: 249641 - RNA, 19 nt, Artificial Sequence
  Description of Artificial Sequence: Synthetic oligonucleotide
agugcuguaaccauauggu

SEQ ID NO: 249642 - RNA, 19 nt, Artificial Sequence
  Description of Artificial Sequence: Synthetic oligonucleotide
gguauuucucuucugucag

SEQ ID NO: 249643 - RNA, 19 nt, Artificial Sequence
  Description of Artificial Sequence: Synthetic oligonucleotide
acugaugacaguccauaca

SEQ ID NO: 249644 - RNA, 19 nt, Artificial Sequence
  Description of Artificial Sequence: Synthetic oligonucleotide
ugucaugacuuccaccagu

SEQ ID NO: 249645 - RNA, 19 nt, Artificial Sequence
  Description of Artificial Sequence: Synthetic oligonucleotide
uuuggaugaaaggccaggc

SEQ ID NO: 249646 - RNA, 19 nt, Artificial Sequence
  Description of Artificial Sequence: Synthetic oligonucleotide
caucggagcucauacauuc

SEQ ID NO: 249647 - RNA, 19 nt, Artificial Sequence
  Description of Artificial Sequence: Synthetic oligonucleotide
ugucgaagagaagccaagg

SEQ ID NO: 249648 - RNA, 19 nt, Artificial Sequence
  Description of Artificial Sequence: Synthetic oligonucleotide
auucauccaaaugggaaag

SEQ ID NO: 249649 - RNA, 19 nt, Artificial Sequence
  Description of Artificial Sequence: Synthetic oligonucleotide
uguugagacucuauacauc

SEQ ID NO: 249650 - RNA, 19 nt, Artificial Sequence
  Description of Artificial Sequence: Synthetic oligonucleotide
aguaguggggaacaggaua

SEQ ID NO: 249651 - RNA, 19 nt, Artificial Sequence
  Description of Artificial Sequence: Synthetic oligonucleotide
gucccuuuggaugaaaggc

SEQ ID NO: 249652 - RNA, 19 nt, Artificial Sequence
  Description of Artificial Sequence: Synthetic oligonucleotide
ugagacucuauacauccuu

SEQ ID NO: 249653 - RNA, 19 nt, Artificial Sequence
  Description of Artificial Sequence: Synthetic oligonucleotide
gacuuacuucccuacaaca

SEQ ID NO: 249654 - RNA, 19 nt, Artificial Sequence
  Description of Artificial Sequence: Synthetic oligonucleotide
cauuuugcaugucgaagag

SEQ ID NO: 249655 - RNA, 19 nt, Artificial Sequence
  Description of Artificial Sequence: Synthetic oligonucleotide
augcggaggacaauaacac

SEQ ID NO: 249656 - RNA, 19 nt, Artificial Sequence
  Description of Artificial Sequence: Synthetic oligonucleotide
aagguuaucuuugacugua

SEQ ID NO: 249657 - RNA, 19 nt, Artificial Sequence
  Description of Artificial Sequence: Synthetic oligonucleotide
aaguaguauuccagaugcc

SEQ ID NO: 249658 - RNA, 19 nt, Artificial Sequence
  Description of Artificial Sequence: Synthetic oligonucleotide
aaaccauuuugcaugucga

SEQ ID NO: 249659 - RNA, 19 nt, Artificial Sequence
  Description of Artificial Sequence: Synthetic oligonucleotide
ucgucccuaauuagagggg

SEQ ID NO: 249660 - RNA, 19 nt, Artificial Sequence
  Description of Artificial Sequence: Synthetic oligonucleotide
gggcaaaccauaugcaggg

SEQ ID NO: 249661 - RNA, 19 nt, Artificial Sequence
  Description of Artificial Sequence: Synthetic oligonucleotide
caguguugagacucuauac

SEQ ID NO: 249662 - RNA, 19 nt, Artificial Sequence
  Description of Artificial Sequence: Synthetic oligonucleotide
gacucuauacauccuucac

SEQ ID NO: 249663 - RNA, 19 nt, Artificial Sequence
  Description of Artificial Sequence: Synthetic oligonucleotide
ucauauguugugccaucca

SEQ ID NO: 249664 - RNA, 19 nt, Artificial Sequence
  Description of Artificial Sequence: Synthetic oligonucleotide
accuccauuacaaagcgcu

SEQ ID NO: 249665 - RNA, 19 nt, Artificial Sequence
  Description of Artificial Sequence: Synthetic oligonucleotide
guccaguaaguccggaggg

SEQ ID NO: 249666 - RNA, 19 nt, Artificial Sequence
  Description of Artificial Sequence: Synthetic oligonucleotide
aaaccauaugcaggggcag

SEQ ID NO: 249667 - RNA, 19 nt, Artificial Sequence
  Description of Artificial Sequence: Synthetic oligonucleotide
aaaggcuuacuagauggaa

SEQ ID NO: 249668 - RNA, 19 nt, Artificial Sequence
  Description of Artificial Sequence: Synthetic oligonucleotide
uguugggucucgcucacaa

SEQ ID NO: 249669 - RNA, 19 nt, Artificial Sequence
  Description of Artificial Sequence: Synthetic oligonucleotide
auugugaagacuggggcgu

SEQ ID NO: 249670 - RNA, 19 nt, Artificial Sequence
  Description of Artificial Sequence: Synthetic oligonucleotide
agcgcuugucaugacuucc

SEQ ID NO: 249671 - RNA, 19 nt, Artificial Sequence
  Description of Artificial Sequence: Synthetic oligonucleotide
gucaaggcauuacaaacca

SEQ ID NO: 249672 - RNA, 19 nt, Artificial Sequence
  Description of Artificial Sequence: Synthetic oligonucleotide
acagcccaauuaaagugcc

SEQ ID NO: 249673 - RNA, 19 nt, Artificial Sequence
  Description of Artificial Sequence: Synthetic oligonucleotide
aaaucacguagaaugcgga

SEQ ID NO: 249674 - RNA, 19 nt, Artificial Sequence
  Description of Artificial Sequence: Synthetic oligonucleotide
ucauguagcucagagcauc

SEQ ID NO: 249675 - RNA, 19 nt, Artificial Sequence
  Description of Artificial Sequence: Synthetic oligonucleotide
auauguugggaauuucaua

SEQ ID NO: 249676 - RNA, 19 nt, Artificial Sequence
  Description of Artificial Sequence: Synthetic oligonucleotide
aucucauuagugcauucau

SEQ ID NO: 249677 - RNA, 19 nt, Artificial Sequence
  Description of Artificial Sequence: Synthetic oligonucleotide
uaguauuccagaugccaaa

SEQ ID NO: 249678 - RNA, 19 nt, Artificial Sequence
  Description of Artificial Sequence: Synthetic oligonucleotide
uggucauguagcucagagc

SEQ ID NO: 249679 - RNA, 19 nt, Artificial Sequence
  Description of Artificial Sequence: Synthetic oligonucleotide
ugaucugauuuaaucucau

SEQ ID NO: 249680 - RNA, 19 nt, Artificial Sequence
  Description of Artificial Sequence: Synthetic oligonucleotide
uggccaaaggcugauaguc

SEQ ID NO: 249681 - RNA, 19 nt, Artificial Sequence
  Description of Artificial Sequence: Synthetic oligonucleotide
agacucuauacauccuuca

SEQ ID NO: 249682 - RNA, 19 nt, Artificial Sequence
  Description of Artificial Sequence: Synthetic oligonucleotide
aaguuuuagagaacugaau

SEQ ID NO: 249683 - RNA, 19 nt, Artificial Sequence
  Description of Artificial Sequence: Synthetic oligonucleotide
ucccuaauuagaggggaag

SEQ ID NO: 249684 - RNA, 19 nt, Artificial Sequence
  Description of Artificial Sequence: Synthetic oligonucleotide
aucauaacauuuucuccau

SEQ ID NO: 249685 - RNA, 19 nt, Artificial Sequence
  Description of Artificial Sequence: Synthetic oligonucleotide
cuguacuguuguucaauag

SEQ ID NO: 249686 - RNA, 19 nt, Artificial Sequence
  Description of Artificial Sequence: Synthetic oligonucleotide
cauucauccaaaugggaaa

SEQ ID NO: 249687 - RNA, 19 nt, Artificial Sequence
  Description of Artificial Sequence: Synthetic oligonucleotide
uuauuggcuuuaguuacac

SEQ ID NO: 249688 - RNA, 19 nt, Artificial Sequence
  Description of Artificial Sequence: Synthetic oligonucleotide
gaguucauacuugagaccu

SEQ ID NO: 249689 - RNA, 19 nt, Artificial Sequence
  Description of Artificial Sequence: Synthetic oligonucleotide
gaaugcggaggacaauaac

SEQ ID NO: 249690 - RNA, 19 nt, Artificial Sequence
  Description of Artificial Sequence: Synthetic oligonucleotide
uaaggucuauugcuuuacu

SEQ ID NO: 249691 - RNA, 19 nt, Artificial Sequence
  Description of Artificial Sequence: Synthetic oligonucleotide
uccucugccccgaacugcc

SEQ ID NO: 249692 - RNA, 19 nt, Artificial Sequence
  Description of Artificial Sequence: Synthetic oligonucleotide
uagaaugcggaggacaaua

SEQ ID NO: 249693 - RNA, 19 nt, Artificial Sequence
  Description of Artificial Sequence: Synthetic oligonucleotide
uccagaugccaaacacucc

SEQ ID NO: 249694 - RNA, 19 nt, Artificial Sequence
  Description of Artificial Sequence: Synthetic oligonucleotide
aggaaguaguauuccagau

SEQ ID NO: 249695 - RNA, 19 nt, Artificial Sequence
  Description of Artificial Sequence: Synthetic oligonucleotide
uaacaugucaaggcauuac

SEQ ID NO: 249696 - RNA, 19 nt, Artificial Sequence
  Description of Artificial Sequence: Synthetic oligonucleotide
uuucaucggagcucauaca

SEQ ID NO: 249697 - RNA, 19 nt, Artificial Sequence
  Description of Artificial Sequence: Synthetic oligonucleotide
ucauaaggucuauugcuuu

SEQ ID NO: 249698 - RNA, 19 nt, Artificial Sequence
  Description of Artificial Sequence: Synthetic oligonucleotide
ugccugaaaccauuuugca

SEQ ID NO: 249699 - RNA, 19 nt, Artificial Sequence
  Description of Artificial Sequence: Synthetic oligonucleotide
caauucgucccuaauuaga

SEQ ID NO: 249700 - RNA, 19 nt, Artificial Sequence
  Description of Artificial Sequence: Synthetic oligonucleotide
aaagcgcuugucaugacuu

SEQ ID NO: 249701 - RNA, 19 nt, Artificial Sequence
  Description of Artificial Sequence: Synthetic oligonucleotide
aucugcaagucaccacagg

SEQ ID NO: 249702 - RNA, 19 nt, Artificial Sequence
  Description of Artificial Sequence: Synthetic oligonucleotide
ugcauuguacuguacuguu

SEQ ID NO: 249703 - RNA, 19 nt, Artificial Sequence
  Description of Artificial Sequence: Synthetic oligonucleotide
gcuacgugaagcuuugcug

SEQ ID NO: 249704 - RNA, 19 nt, Artificial Sequence
  Description of Artificial Sequence: Synthetic oligonucleotide
uugucaugacuuccaccag

SEQ ID NO: 249705 - RNA, 19 nt, Artificial Sequence
  Description of Artificial Sequence: Synthetic oligonucleotide
cacuaugagugauuucuuc

SEQ ID NO: 249706 - RNA, 19 nt, Artificial Sequence
  Description of Artificial Sequence: Synthetic oligonucleotide
gaguucuuaccucuaaggu

SEQ ID NO: 249707 - RNA, 19 nt, Artificial Sequence
  Description of Artificial Sequence: Synthetic oligonucleotide
ugagcuccauuacaggguu

SEQ ID NO: 249708 - RNA, 19 nt, Artificial Sequence
  Description of Artificial Sequence: Synthetic oligonucleotide
gucagucuauggcagaguc

SEQ ID NO: 249709 - RNA, 19 nt, Artificial Sequence
  Description of Artificial Sequence: Synthetic oligonucleotide
cuuacuucccuacaacaaa

SEQ ID NO: 249710 - RNA, 19 nt, Artificial Sequence
  Description of Artificial Sequence: Synthetic oligonucleotide
caugucaaggcauuacaaa

SEQ ID NO: 249711 - RNA, 19 nt, Artificial Sequence
  Description of Artificial Sequence: Synthetic oligonucleotide
cugaucugauuuaaucuca

SEQ ID NO: 249712 - RNA, 19 nt, Artificial Sequence
  Description of Artificial Sequence: Synthetic oligonucleotide
gcuuacuagauggaagggg

SEQ ID NO: 249713 - RNA, 19 nt, Artificial Sequence
  Description of Artificial Sequence: Synthetic oligonucleotide
uuaaucucauuagugcauu

SEQ ID NO: 249714 - RNA, 19 nt, Artificial Sequence
  Description of Artificial Sequence: Synthetic oligonucleotide
ugaucaguguugagacucu

SEQ ID NO: 249715 - RNA, 19 nt, Artificial Sequence
  Description of Artificial Sequence: Synthetic oligonucleotide
agcccaauuaaagugcccu

SEQ ID NO: 249716 - RNA, 19 nt, Artificial Sequence
  Description of Artificial Sequence: Synthetic oligonucleotide
auauaagcucuaguggcca

SEQ ID NO: 249717 - RNA, 19 nt, Artificial Sequence
  Description of Artificial Sequence: Synthetic oligonucleotide
aaaaggcuuacuagaugga

SEQ ID NO: 249718 - RNA, 19 nt, Artificial Sequence
  Description of Artificial Sequence: Synthetic oligonucleotide
ugauacucucugagaacgu

SEQ ID NO: 249719 - RNA, 19 nt, Artificial Sequence
  Description of Artificial Sequence: Synthetic oligonucleotide
ggugcuauauagccaggag

SEQ ID NO: 249720 - RNA, 19 nt, Artificial Sequence
  Description of Artificial Sequence: Synthetic oligonucleotide
auuagaggggaaguaagua

SEQ ID NO: 249721 - RNA, 19 nt, Artificial Sequence
  Description of Artificial Sequence: Synthetic oligonucleotide
ugugcacuaugagugauuu

SEQ ID NO: 249722 - RNA, 19 nt, Artificial Sequence
  Description of Artificial Sequence: Synthetic oligonucleotide
cauccccuaauccaucuuc

SEQ ID NO: 249723 - RNA, 19 nt, Artificial Sequence
  Description of Artificial Sequence: Synthetic oligonucleotide
gucuauuacaaguaccuau

SEQ ID NO: 249724 - RNA, 19 nt, Artificial Sequence
  Description of Artificial Sequence: Synthetic oligonucleotide
gauacucucugagaacguc

SEQ ID NO: 249725 - RNA, 19 nt, Artificial Sequence
  Description of Artificial Sequence: Synthetic oligonucleotide
ugcggaggacaauaacaca

SEQ ID NO: 249726 - RNA, 19 nt, Artificial Sequence
  Description of Artificial Sequence: Synthetic oligonucleotide
ucauaacggguaacagaac

SEQ ID NO: 249727 - RNA, 19 nt, Artificial Sequence
  Description of Artificial Sequence: Synthetic oligonucleotide
auaacggguaacagaacca

SEQ ID NO: 249728 - RNA, 19 nt, Artificial Sequence
  Description of Artificial Sequence: Synthetic oligonucleotide
uugagacucuauacauccu

SEQ ID NO: 249729 - RNA, 19 nt, Artificial Sequence
  Description of Artificial Sequence: Synthetic oligonucleotide
ugugaucaguguugagacu

SEQ ID NO: 249730 - RNA, 19 nt, Artificial Sequence
  Description of Artificial Sequence: Synthetic oligonucleotide
auacaugcaggcugcugcu

SEQ ID NO: 249731 - RNA, 19 nt, Artificial Sequence
  Description of Artificial Sequence: Synthetic oligonucleotide
cuccauuacaaagcgcuug

SEQ ID NO: 249732 - RNA, 19 nt, Artificial Sequence
  Description of Artificial Sequence: Synthetic oligonucleotide
caucuguugggucucgcuc

SEQ ID NO: 249733 - RNA, 19 nt, Artificial Sequence
  Description of Artificial Sequence: Synthetic oligonucleotide
aguaaccgaccaggaauac

SEQ ID NO: 249734 - RNA, 19 nt, Artificial Sequence
  Description of Artificial Sequence: Synthetic oligonucleotide
uaacggguaacagaaccau

SEQ ID NO: 249735 - RNA, 19 nt, Artificial Sequence
  Description of Artificial Sequence: Synthetic oligonucleotide
caacuuugagcugcuagac

SEQ ID NO: 249736 - RNA, 19 nt, Artificial Sequence
  Description of Artificial Sequence: Synthetic oligonucleotide
uaucauccccuaauccauc

SEQ ID NO: 249737 - RNA, 19 nt, Artificial Sequence
  Description of Artificial Sequence: Synthetic oligonucleotide
aguccagcaucugcaaguc

SEQ ID NO: 249738 - RNA, 19 nt, Artificial Sequence
  Description of Artificial Sequence: Synthetic oligonucleotide
gaauuucauaacggguaac

SEQ ID NO: 249739 - RNA, 19 nt, Artificial Sequence
  Description of Artificial Sequence: Synthetic oligonucleotide
cauugccuguaaaaccuuc

SEQ ID NO: 249740 - RNA, 19 nt, Artificial Sequence
  Description of Artificial Sequence: Synthetic oligonucleotide
uggaggucucaguuguaga

SEQ ID NO: 249741 - RNA, 19 nt, Artificial Sequence
  Description of Artificial Sequence: Synthetic oligonucleotide
accgaccaggaauacuucu

SEQ ID NO: 249742 - RNA, 19 nt, Artificial Sequence
  Description of Artificial Sequence: Synthetic oligonucleotide
acgaacgcuccccuuguca

SEQ ID NO: 249743 - RNA, 19 nt, Artificial Sequence
  Description of Artificial Sequence: Synthetic oligonucleotide
gagacucuauacauccuuc

SEQ ID NO: 249744 - RNA, 19 nt, Artificial Sequence
  Description of Artificial Sequence: Synthetic oligonucleotide
ucuccaauucgucccuaau

SEQ ID NO: 249745 - RNA, 19 nt, Artificial Sequence
  Description of Artificial Sequence: Synthetic oligonucleotide
gagguaccguuucacagaa

SEQ ID NO: 249746 - RNA, 19 nt, Artificial Sequence
  Description of Artificial Sequence: Synthetic oligonucleotide
acaaagcgcuugucaugac

SEQ ID NO: 249747 - RNA, 19 nt, Artificial Sequence
  Description of Artificial Sequence: Synthetic oligonucleotide
acgguaaucuuuaaacuua

SEQ ID NO: 249748 - RNA, 19 nt, Artificial Sequence
  Description of Artificial Sequence: Synthetic oligonucleotide
gcaucugcaagucaccaca

SEQ ID NO: 249749 - RNA, 19 nt, Artificial Sequence
  Description of Artificial Sequence: Synthetic oligonucleotide
uggugcuauauagccagga

SEQ ID NO: 249750 - RNA, 19 nt, Artificial Sequence
  Description of Artificial Sequence: Synthetic oligonucleotide
uaagugcaugcugugcacu

SEQ ID NO: 249751 - RNA, 19 nt, Artificial Sequence
  Description of Artificial Sequence: Synthetic oligonucleotide
cuacgugaagcuuugcugu

SEQ ID NO: 249752 - RNA, 19 nt, Artificial Sequence
  Description of Artificial Sequence: Synthetic oligonucleotide
aaguccggagggucuuuca

SEQ ID NO: 249753 - RNA, 19 nt, Artificial Sequence
  Description of Artificial Sequence: Synthetic oligonucleotide
ucgucucaaggccucccca

SEQ ID NO: 249754 - RNA, 19 nt, Artificial Sequence
  Description of Artificial Sequence: Synthetic oligonucleotide
uauaagcucuaguggccau

SEQ ID NO: 249755 - RNA, 19 nt, Artificial Sequence
  Description of Artificial Sequence: Synthetic oligonucleotide
ccuaauccaucuucaaaug

SEQ ID NO: 249756 - RNA, 19 nt, Artificial Sequence
  Description of Artificial Sequence: Synthetic oligonucleotide
guucaauaggaauaagcuu

SEQ ID NO: 249757 - RNA, 19 nt, Artificial Sequence
  Description of Artificial Sequence: Synthetic oligonucleotide
auacucucugagaacguca

SEQ ID NO: 249758 - RNA, 19 nt, Artificial Sequence
  Description of Artificial Sequence: Synthetic oligonucleotide
auugccuguaaaaccuuca

SEQ ID NO: 249759 - RNA, 19 nt, Artificial Sequence
  Description of Artificial Sequence: Synthetic oligonucleotide
ucaucggagcucauacauu

SEQ ID NO: 249760 - RNA, 19 nt, Artificial Sequence
  Description of Artificial Sequence: Synthetic oligonucleotide
uucauccaaaugggaaaga

SEQ ID NO: 249761 - RNA, 19 nt, Artificial Sequence
  Description of Artificial Sequence: Synthetic oligonucleotide
cuguuggguaucccauugc

SEQ ID NO: 249762 - RNA, 19 nt, Artificial Sequence
  Description of Artificial Sequence: Synthetic oligonucleotide
accacgccgacacuuguaa

SEQ ID NO: 249763 - RNA, 19 nt, Artificial Sequence
  Description of Artificial Sequence: Synthetic oligonucleotide
agcucuaguggccauccuu

SEQ ID NO: 249764 - RNA, 19 nt, Artificial Sequence
  Description of Artificial Sequence: Synthetic oligonucleotide
cuacuucuaccuccauuac

SEQ ID NO: 249765 - RNA, 19 nt, Artificial Sequence
  Description of Artificial Sequence: Synthetic oligonucleotide
guaguauuccagaugccaa

SEQ ID NO: 249766 - RNA, 19 nt, Artificial Sequence
  Description of Artificial Sequence: Synthetic oligonucleotide
gaacgucaacuuugagcug

SEQ ID NO: 249767 - RNA, 19 nt, Artificial Sequence
  Description of Artificial Sequence: Synthetic oligonucleotide
ggaauuucauaacggguaa

SEQ ID NO: 249768 - RNA, 19 nt, Artificial Sequence
  Description of Artificial Sequence: Synthetic oligonucleotide
cuagacuuacuucccuaca

SEQ ID NO: 249769 - RNA, 19 nt, Artificial Sequence
  Description of Artificial Sequence: Synthetic oligonucleotide
aaccuguuggguaucccau

SEQ ID NO: 249770 - RNA, 19 nt, Artificial Sequence
  Description of Artificial Sequence: Synthetic oligonucleotide
gucucgcucacaaggauca

SEQ ID NO: 249771 - RNA, 19 nt, Artificial Sequence
  Description of Artificial Sequence: Synthetic oligonucleotide
aaguuucguuucaucuucu

SEQ ID NO: 249772 - RNA, 19 nt, Artificial Sequence
  Description of Artificial Sequence: Synthetic oligonucleotide
ggcugguauaaauuauuuc

SEQ ID NO: 249773 - RNA, 19 nt, Artificial Sequence
  Description of Artificial Sequence: Synthetic oligonucleotide
acaugucaaggcauuacaa

SEQ ID NO: 249774 - RNA, 19 nt, Artificial Sequence
  Description of Artificial Sequence: Synthetic oligonucleotide
uccaguaaguccggagggu

SEQ ID NO: 249775 - RNA, 19 nt, Artificial Sequence
  Description of Artificial Sequence: Synthetic oligonucleotide
cuaagguacuggaggucuc

SEQ ID NO: 249776 - RNA, 19 nt, Artificial Sequence
  Description of Artificial Sequence: Synthetic oligonucleotide
aguucauacuugagaccuc

SEQ ID NO: 249777 - RNA, 19 nt, Artificial Sequence
  Description of Artificial Sequence: Synthetic oligonucleotide
uggguccagaaaacaacuu

SEQ ID NO: 249778 - RNA, 19 nt, Artificial Sequence
  Description of Artificial Sequence: Synthetic oligonucleotide
uuggaccugcaccucuaaa

SEQ ID NO: 249779 - RNA, 19 nt, Artificial Sequence
  Description of Artificial Sequence: Synthetic oligonucleotide
gucaugacuuccaccaguc

SEQ ID NO: 249780 - RNA, 19 nt, Artificial Sequence
  Description of Artificial Sequence: Synthetic oligonucleotide
guguugagacucuauacau

SEQ ID NO: 249781 - RNA, 19 nt, Artificial Sequence
  Description of Artificial Sequence: Synthetic oligonucleotide
gaagguuaucuuugacugu

SEQ ID NO: 249782 - RNA, 19 nt, Artificial Sequence
  Description of Artificial Sequence: Synthetic oligonucleotide
auguaacaugucaaggcau

SEQ ID NO: 249783 - RNA, 19 nt, Artificial Sequence
  Description of Artificial Sequence: Synthetic oligonucleotide
gggaauuucauaacgggua

SEQ ID NO: 249784 - RNA, 19 nt, Artificial Sequence
  Description of Artificial Sequence: Synthetic oligonucleotide
ccaauucgucccuaauuag

SEQ ID NO: 249785 - RNA, 19 nt, Artificial Sequence
  Description of Artificial Sequence: Synthetic oligonucleotide
uucuuaccucuaagguacu

SEQ ID NO: 249786 - RNA, 19 nt, Artificial Sequence
  Description of Artificial Sequence: Synthetic oligonucleotide
augacaguccauacaugca

SEQ ID NO: 249787 - RNA, 19 nt, Artificial Sequence
  Description of Artificial Sequence: Synthetic oligonucleotide
accauaugcaggggcagca

SEQ ID NO: 249788 - RNA, 19 nt, Artificial Sequence
  Description of Artificial Sequence: Synthetic oligonucleotide
gauagucuaagugcaugcu

SEQ ID NO: 249789 - RNA, 19 nt, Artificial Sequence
  Description of Artificial Sequence: Synthetic oligonucleotide
aguuucguuucaucuucuu

SEQ ID NO: 249790 - RNA, 19 nt, Artificial Sequence
  Description of Artificial Sequence: Synthetic oligonucleotide
acauggggcaguccacggu

SEQ ID NO: 249791 - RNA, 19 nt, Artificial Sequence
  Description of Artificial Sequence: Synthetic oligonucleotide
aaucuggccaaaggcugau

SEQ ID NO: 249792 - RNA, 19 nt, Artificial Sequence
  Description of Artificial Sequence: Synthetic oligonucleotide
gcuugucaugacuuccacc

SEQ ID NO: 249793 - RNA, 19 nt, Artificial Sequence
  Description of Artificial Sequence: Synthetic oligonucleotide
ggaggucucaguuguagaa

SEQ ID NO: 249794 - RNA, 19 nt, Artificial Sequence
  Description of Artificial Sequence: Synthetic oligonucleotide
uccccuaauccaucuucaa

SEQ ID NO: 249795 - RNA, 19 nt, Artificial Sequence
  Description of Artificial Sequence: Synthetic oligonucleotide
gaggggaaguaaguaucac

SEQ ID NO: 249796 - RNA, 19 nt, Artificial Sequence
  Description of Artificial Sequence: Synthetic oligonucleotide
cacgguaaucuuuaaacuu

SEQ ID NO: 249797 - RNA, 19 nt, Artificial Sequence
  Description of Artificial Sequence: Synthetic oligonucleotide
ggggaaguaaguaucaccu

SEQ ID NO: 249798 - RNA, 19 nt, Artificial Sequence
  Description of Artificial Sequence: Synthetic oligonucleotide
cagcccaauuaaagugccc

SEQ ID NO: 249799 - RNA, 19 nt, Artificial Sequence
  Description of Artificial Sequence: Synthetic oligonucleotide
cucgcucacaaggaucaug

SEQ ID NO: 249800 - RNA, 19 nt, Artificial Sequence
  Description of Artificial Sequence: Synthetic oligonucleotide
caguaaccgaccaggaaua

SEQ ID NO: 249801 - RNA, 19 nt, Artificial Sequence
  Description of Artificial Sequence: Synthetic oligonucleotide
ggcuuacuagauggaaggg

SEQ ID NO: 249802 - RNA, 19 nt, Artificial Sequence
  Description of Artificial Sequence: Synthetic oligonucleotide
gccgacacuuguaaagucc

SEQ ID NO: 249803 - RNA, 19 nt, Artificial Sequence
  Description of Artificial Sequence: Synthetic oligonucleotide
cucuaguggccauccuuuc

SEQ ID NO: 249804 - RNA, 19 nt, Artificial Sequence
  Description of Artificial Sequence: Synthetic oligonucleotide
ugcccuugccugaaaccau

SEQ ID NO: 249805 - RNA, 19 nt, Artificial Sequence
  Description of Artificial Sequence: Synthetic oligonucleotide
agcuccauuacaggguuuu

SEQ ID NO: 249806 - RNA, 19 nt, Artificial Sequence
  Description of Artificial Sequence: Synthetic oligonucleotide
acgccgacacuuguaaagu

SEQ ID NO: 249807 - RNA, 19 nt, Artificial Sequence
  Description of Artificial Sequence: Synthetic oligonucleotide
accguuucacagaacuggu

SEQ ID NO: 249808 - RNA, 19 nt, Artificial Sequence
  Description of Artificial Sequence: Synthetic oligonucleotide
ucccuacaacaaaggggcu

SEQ ID NO: 249809 - RNA, 19 nt, Artificial Sequence
  Description of Artificial Sequence: Synthetic oligonucleotide
caguccacgguaaucuuua

SEQ ID NO: 249810 - RNA, 19 nt, Artificial Sequence
  Description of Artificial Sequence: Synthetic oligonucleotide
guuacacacuucauuauuu

SEQ ID NO: 249811 - RNA, 19 nt, Artificial Sequence
  Description of Artificial Sequence: Synthetic oligonucleotide
ggcgaggcacugaugacag

SEQ ID NO: 249812 - RNA, 19 nt, Artificial Sequence
  Description of Artificial Sequence: Synthetic oligonucleotide
caauaggaauaagcuucug

SEQ ID NO: 249813 - RNA, 19 nt, Artificial Sequence
  Description of Artificial Sequence: Synthetic oligonucleotide
agacugugacaaaagcuua

SEQ ID NO: 249814 - RNA, 19 nt, Artificial Sequence
  Description of Artificial Sequence: Synthetic oligonucleotide
cucuaagguacuggagguc

SEQ ID NO: 249815 - RNA, 19 nt, Artificial Sequence
  Description of Artificial Sequence: Synthetic oligonucleotide
gcugcuucaaccacgccga

SEQ ID NO: 249816 - RNA, 19 nt, Artificial Sequence
  Description of Artificial Sequence: Synthetic oligonucleotide
agaaugcggaggacaauaa

SEQ ID NO: 249817 - RNA, 19 nt, Artificial Sequence
  Description of Artificial Sequence: Synthetic oligonucleotide
agcgcccaaaggucuauua

SEQ ID NO: 249818 - RNA, 19 nt, Artificial Sequence
  Description of Artificial Sequence: Synthetic oligonucleotide
aacggguaacagaaccauu

SEQ ID NO: 249819 - RNA, 19 nt, Artificial Sequence
  Description of Artificial Sequence: Synthetic oligonucleotide
augaaaggccaggcaucuc

SEQ ID NO: 249820 - RNA, 19 nt, Artificial Sequence
  Description of Artificial Sequence: Synthetic oligonucleotide
cucugccccgaacugccug

SEQ ID NO: 249821 - RNA, 19 nt, Artificial Sequence
  Description of Artificial Sequence: Synthetic oligonucleotide
uaaguccggagggucuuuc

SEQ ID NO: 249822 - RNA, 19 nt, Artificial Sequence
  Description of Artificial Sequence: Synthetic oligonucleotide
ccgaccaggaauacuucug

SEQ ID NO: 249823 - RNA, 19 nt, Artificial Sequence
  Description of Artificial Sequence: Synthetic oligonucleotide
auauagccaggagcugcug

SEQ ID NO: 249824 - RNA, 19 nt, Artificial Sequence
  Description of Artificial Sequence: Synthetic oligonucleotide
cauaaccuggugcuauaua

SEQ ID NO: 249825 - RNA, 19 nt, Artificial Sequence
  Description of Artificial Sequence: Synthetic oligonucleotide
gcccaauuaaagugcccug

SEQ ID NO: 249826 - RNA, 19 nt, Artificial Sequence
  Description of Artificial Sequence: Synthetic oligonucleotide
caaaggggcugguauaaau

SEQ ID NO: 249827 - RNA, 19 nt, Artificial Sequence
  Description of Artificial Sequence: Synthetic oligonucleotide
accuggugcuauauagcca

SEQ ID NO: 249828 - RNA, 19 nt, Artificial Sequence
  Description of Artificial Sequence: Synthetic oligonucleotide
guaacaugucaaggcauua

SEQ ID NO: 249829 - RNA, 19 nt, Artificial Sequence
  Description of Artificial Sequence: Synthetic oligonucleotide
uacucgucucaaggccucc

SEQ ID NO: 249830 - RNA, 19 nt, Artificial Sequence
  Description of Artificial Sequence: Synthetic oligonucleotide
gccacagcgagggugcugc

SEQ ID NO: 249831 - RNA, 19 nt, Artificial Sequence
  Description of Artificial Sequence: Synthetic oligonucleotide
gcauuguacuguacuguug

SEQ ID NO: 249832 - RNA, 19 nt, Artificial Sequence
  Description of Artificial Sequence: Synthetic oligonucleotide
ugaaaccauuuugcauguc

SEQ ID NO: 249833 - RNA, 19 nt, Artificial Sequence
  Description of Artificial Sequence: Synthetic oligonucleotide
gaaccaggcaguacucugu

SEQ ID NO: 249834 - RNA, 19 nt, Artificial Sequence
  Description of Artificial Sequence: Synthetic oligonucleotide
gcucuguugcacaaaucac

SEQ ID NO: 249835 - RNA, 19 nt, Artificial Sequence
  Description of Artificial Sequence: Synthetic oligonucleotide
agugcaugcugugcacuau

SEQ ID NO: 249836 - RNA, 19 nt, Artificial Sequence
  Description of Artificial Sequence: Synthetic oligonucleotide
gcgcccaaaggucuauuac

SEQ ID NO: 249837 - RNA, 19 nt, Artificial Sequence
  Description of Artificial Sequence: Synthetic oligonucleotide
ggagggucuuucaucauaa

SEQ ID NO: 249838 - RNA, 19 nt, Artificial Sequence
  Description of Artificial Sequence: Synthetic oligonucleotide
aggggcugguauaaauuau

SEQ ID NO: 249839 - RNA, 19 nt, Artificial Sequence
  Description of Artificial Sequence: Synthetic oligonucleotide
uggagcagcagggucccuu

SEQ ID NO: 249840 - RNA, 19 nt, Artificial Sequence
  Description of Artificial Sequence: Synthetic oligonucleotide
aguccacgguaaucuuuaa

SEQ ID NO: 249841 - RNA, 19 nt, Artificial Sequence
  Description of Artificial Sequence: Synthetic oligonucleotide
cuuauacauuguuccacuu

SEQ ID NO: 249842 - RNA, 19 nt, Artificial Sequence
  Description of Artificial Sequence: Synthetic oligonucleotide
aucggagcucauacauuca

SEQ ID NO: 249843 - RNA, 19 nt, Artificial Sequence
  Description of Artificial Sequence: Synthetic oligonucleotide
ccgacacuuguaaagucca

SEQ ID NO: 249844 - RNA, 19 nt, Artificial Sequence
  Description of Artificial Sequence: Synthetic oligonucleotide
acaaaggggcugguauaaa

SEQ ID NO: 249845 - RNA, 19 nt, Artificial Sequence
  Description of Artificial Sequence: Synthetic oligonucleotide
gaggucucaguuguagaau

SEQ ID NO: 249846 - RNA, 19 nt, Artificial Sequence
  Description of Artificial Sequence: Synthetic oligonucleotide
cccuacaacaaaggggcug

SEQ ID NO: 249847 - RNA, 19 nt, Artificial Sequence
  Description of Artificial Sequence: Synthetic oligonucleotide
aaccacgccgacacuugua

SEQ ID NO: 249848 - RNA, 19 nt, Artificial Sequence
  Description of Artificial Sequence: Synthetic oligonucleotide
cagcgagggugcugcuugc

SEQ ID NO: 249849 - RNA, 19 nt, Artificial Sequence
  Description of Artificial Sequence: Synthetic oligonucleotide
gaucaguguugagacucua

SEQ ID NO: 249850 - RNA, 19 nt, Artificial Sequence
  Description of Artificial Sequence: Synthetic oligonucleotide
gcgagggugcugcuugcag

SEQ ID NO: 249851 - RNA, 19 nt, Artificial Sequence
  Description of Artificial Sequence: Synthetic oligonucleotide
caccagucucugagaugag

SEQ ID NO: 249852 - RNA, 19 nt, Artificial Sequence
  Description of Artificial Sequence: Synthetic oligonucleotide
guaaccgaccaggaauacu

SEQ ID NO: 249853 - RNA, 19 nt, Artificial Sequence
  Description of Artificial Sequence: Synthetic oligonucleotide
gcccaaaggucuauuacaa

SEQ ID NO: 249854 - RNA, 19 nt, Artificial Sequence
  Description of Artificial Sequence: Synthetic oligonucleotide
ccccgaacugccugaacug

SEQ ID NO: 249855 - RNA, 19 nt, Artificial Sequence
  Description of Artificial Sequence: Synthetic oligonucleotide
cuguaaccauaugguguuc

SEQ ID NO: 249856 - RNA, 19 nt, Artificial Sequence
  Description of Artificial Sequence: Synthetic oligonucleotide
ggcaguacucuguguuaca

SEQ ID NO: 249857 - RNA, 19 nt, Artificial Sequence
  Description of Artificial Sequence: Synthetic oligonucleotide
caguaaguccggagggucu

SEQ ID NO: 249858 - RNA, 19 nt, Artificial Sequence
  Description of Artificial Sequence: Synthetic oligonucleotide
ccaguaaguccggaggguc

SEQ ID NO: 249859 - RNA, 19 nt, Artificial Sequence
  Description of Artificial Sequence: Synthetic oligonucleotide
gcggaggacaauaacacau

SEQ ID NO: 249860 - RNA, 19 nt, Artificial Sequence
  Description of Artificial Sequence: Synthetic oligonucleotide
cuauggcagaguccaacau

SEQ ID NO: 249861 - RNA, 19 nt, Artificial Sequence
  Description of Artificial Sequence: Synthetic oligonucleotide
guagcucagagcaucuguu

SEQ ID NO: 249862 - RNA, 19 nt, Artificial Sequence
  Description of Artificial Sequence: Synthetic oligonucleotide
caggccugaucugauuuaa

SEQ ID NO: 249863 - RNA, 19 nt, Artificial Sequence
  Description of Artificial Sequence: Synthetic oligonucleotide
ccuaauuagaggggaagua

SEQ ID NO: 249864 - RNA, 19 nt, Artificial Sequence
  Description of Artificial Sequence: Synthetic oligonucleotide
gggcgaggcacugaugaca

SEQ ID NO: 249865 - RNA, 19 nt, Artificial Sequence
  Description of Artificial Sequence: Synthetic oligonucleotide
acgucaacuuugagcugcu

SEQ ID NO: 249866 - RNA, 19 nt, Artificial Sequence
  Description of Artificial Sequence: Synthetic oligonucleotide
ccacgguaaucuuuaaacu

SEQ ID NO: 249867 - RNA, 19 nt, Artificial Sequence
  Description of Artificial Sequence: Synthetic oligonucleotide
ggucuauuacaaguaccua

SEQ ID NO: 249868 - RNA, 19 nt, Artificial Sequence
  Description of Artificial Sequence: Synthetic oligonucleotide
cugcuucaaccacgccgac

SEQ ID NO: 249869 - RNA, 19 nt, Artificial Sequence
  Description of Artificial Sequence: Synthetic oligonucleotide
caggaaugagguaccguuu

SEQ ID NO: 249870 - RNA, 19 nt, Artificial Sequence
  Description of Artificial Sequence: Synthetic oligonucleotide
cugcuagacuuacuucccu

SEQ ID NO: 249871 - RNA, 19 nt, Artificial Sequence
  Description of Artificial Sequence: Synthetic oligonucleotide
gggcaguccacgguaaucu

SEQ ID NO: 249872 - RNA, 19 nt, Artificial Sequence
  Description of Artificial Sequence: Synthetic oligonucleotide
cugcuacgugaagcuuugc

SEQ ID NO: 249873 - RNA, 19 nt, Artificial Sequence
  Description of Artificial Sequence: Synthetic oligonucleotide
ccgaauuauaauggaagcu

SEQ ID NO: 249874 - RNA, 19 nt, Artificial Sequence
  Description of Artificial Sequence: Synthetic oligonucleotide
ccauuacaaagcgcuuguc

SEQ ID NO: 249875 - RNA, 19 nt, Artificial Sequence
  Description of Artificial Sequence: Synthetic oligonucleotide
caacuucucuaaggcagcu

SEQ ID NO: 249876 - RNA, 19 nt, Artificial Sequence
  Description of Artificial Sequence: Synthetic oligonucleotide
ggggcugguauaaauuauu

SEQ ID NO: 249877 - RNA, 19 nt, Artificial Sequence
  Description of Artificial Sequence: Synthetic oligonucleotide
cgccgacacuuguaaaguc

SEQ ID NO: 249878 - RNA, 19 nt, Artificial Sequence
  Description of Artificial Sequence: Synthetic oligonucleotide
cccuaauuagaggggaagu

SEQ ID NO: 249879 - RNA, 19 nt, Artificial Sequence
  Description of Artificial Sequence: Synthetic oligonucleotide
ggcguggacugggccagac

SEQ ID NO: 249880 - RNA, 19 nt, Artificial Sequence
  Description of Artificial Sequence: Synthetic oligonucleotide
ggucagucuauggcagagu

SEQ ID NO: 249881 - RNA, 19 nt, Artificial Sequence
  Description of Artificial Sequence: Synthetic oligonucleotide
ggucucaguuguagaauuu

SEQ ID NO: 249882 - RNA, 19 nt, Artificial Sequence
  Description of Artificial Sequence: Synthetic oligonucleotide
gcuccccuugucagaguuc

SEQ ID NO: 249883 - RNA, 19 nt, Artificial Sequence
  Description of Artificial Sequence: Synthetic oligonucleotide
ggacugggccagacuguga

SEQ ID NO: 249884 - RNA, 19 nt, Artificial Sequence
  Description of Artificial Sequence: Synthetic oligonucleotide
ggcaguccacgguaaucuu

SEQ ID NO: 249885 - RNA, 19 nt, Artificial Sequence
  Description of Artificial Sequence: Synthetic oligonucleotide
ccucuaaauuucuguccau

SEQ ID NO: 249886 - RNA, 19 nt, Artificial Sequence
  Description of Artificial Sequence: Synthetic oligonucleotide
ccacgccgacacuuguaaa

SEQ ID NO: 249887 - RNA, 19 nt, Artificial Sequence
  Description of Artificial Sequence: Synthetic oligonucleotide
ccuccauuacaaagcgcuu

SEQ ID NO: 249888 - RNA, 19 nt, Artificial Sequence
  Description of Artificial Sequence: Synthetic oligonucleotide
ccguuucacagaacugguu

SEQ ID NO: 249889 - RNA, 19 nt, Artificial Sequence
  Description of Artificial Sequence: Synthetic oligonucleotide
gcgaggcacugaugacagu

SEQ ID NO: 249890 - RNA, 19 nt, Artificial Sequence
  Description of Artificial Sequence: Synthetic oligonucleotide
gggcguggacugggccaga

SEQ ID NO: 249891 - RNA, 19 nt, Artificial Sequence
  Description of Artificial Sequence: Synthetic oligonucleotide
aguucaaccacuuaagagc

SEQ ID NO: 249892 - RNA, 19 nt, Artificial Sequence
  Description of Artificial Sequence: Synthetic oligonucleotide
aaagugguacauuugaauc

SEQ ID NO: 249893 - RNA, 19 nt, Artificial Sequence
  Description of Artificial Sequence: Synthetic oligonucleotide
aggagggucaaauaaagcc

SEQ ID NO: 249894 - RNA, 19 nt, Artificial Sequence
  Description of Artificial Sequence: Synthetic oligonucleotide
uuucauauaacacaguauc

SEQ ID NO: 249895 - RNA, 19 nt, Artificial Sequence
  Description of Artificial Sequence: Synthetic oligonucleotide
aaucgaaggagacggacgc

SEQ ID NO: 249896 - RNA, 19 nt, Artificial Sequence
  Description of Artificial Sequence: Synthetic oligonucleotide
ucugcuuaaguuuuaaugc

SEQ ID NO: 249897 - RNA, 19 nt, Artificial Sequence
  Description of Artificial Sequence: Synthetic oligonucleotide
ucuuaagauaugaacagag

SEQ ID NO: 249898 - RNA, 19 nt, Artificial Sequence
  Description of Artificial Sequence: Synthetic oligonucleotide
aauuaguucaaccacuuaa

SEQ ID NO: 249899 - RNA, 19 nt, Artificial Sequence
  Description of Artificial Sequence: Synthetic oligonucleotide
uuuaguuuucgacauguag

SEQ ID NO: 249900 - RNA, 19 nt, Artificial Sequence
  Description of Artificial Sequence: Synthetic oligonucleotide
auaaagugauaacaagggc

SEQ ID NO: 249901 - RNA, 19 nt, Artificial Sequence
  Description of Artificial Sequence: Synthetic oligonucleotide
gaucccacgaacuuuaaag

SEQ ID NO: 249902 - RNA, 19 nt, Artificial Sequence
  Description of Artificial Sequence: Synthetic oligonucleotide
cuuacaaggcccaagaaug

SEQ ID NO: 249903 - RNA, 19 nt, Artificial Sequence
  Description of Artificial Sequence: Synthetic oligonucleotide
uauguggaaacucagcaug

SEQ ID NO: 249904 - RNA, 19 nt, Artificial Sequence
  Description of Artificial Sequence: Synthetic oligonucleotide
cacuuaagagccuauaagg

SEQ ID NO: 249905 - RNA, 19 nt, Artificial Sequence
  Description of Artificial Sequence: Synthetic oligonucleotide
uaccauuuauguaauauca

SEQ ID NO: 249906 - RNA, 19 nt, Artificial Sequence
  Description of Artificial Sequence: Synthetic oligonucleotide
auaccuuaagaauucuagc

SEQ ID NO: 249907 - RNA, 19 nt, Artificial Sequence
  Description of Artificial Sequence: Synthetic oligonucleotide
agccuauugugauaggucc

SEQ ID NO: 249908 - RNA, 19 nt, Artificial Sequence
  Description of Artificial Sequence: Synthetic oligonucleotide
aaagugauaacaagggcuc

SEQ ID NO: 249909 - RNA, 19 nt, Artificial Sequence
  Description of Artificial Sequence: Synthetic oligonucleotide
ucuaacauauuacuuagua

SEQ ID NO: 249910 - RNA, 19 nt, Artificial Sequence
  Description of Artificial Sequence: Synthetic oligonucleotide
agaacucuaucccagugac

SEQ ID NO: 249911 - RNA, 19 nt, Artificial Sequence
  Description of Artificial Sequence: Synthetic oligonucleotide
ugcuuaaacgguaugcugc

SEQ ID NO: 249912 - RNA, 19 nt, Artificial Sequence
  Description of Artificial Sequence: Synthetic oligonucleotide
guuacucuuacccaggcgc

SEQ ID NO: 249913 - RNA, 19 nt, Artificial Sequence
  Description of Artificial Sequence: Synthetic oligonucleotide
aaauggguaguuuaauuaa

SEQ ID NO: 249914 - RNA, 19 nt, Artificial Sequence
  Description of Artificial Sequence: Synthetic oligonucleotide
aaaucccgagaaucgaagg

SEQ ID NO: 249915 - RNA, 19 nt, Artificial Sequence
  Description of Artificial Sequence: Synthetic oligonucleotide
aguauaugacaggugaggc

SEQ ID NO: 249916 - RNA, 19 nt, Artificial Sequence
  Description of Artificial Sequence: Synthetic oligonucleotide
aaguagacggaacagacua

SEQ ID NO: 249917 - RNA, 19 nt, Artificial Sequence
  Description of Artificial Sequence: Synthetic oligonucleotide
aauugauguggguuaaaga

SEQ ID NO: 249918 - RNA, 19 nt, Artificial Sequence
  Description of Artificial Sequence: Synthetic oligonucleotide
uaguuuucgacauguaggc

SEQ ID NO: 249919 - RNA, 19 nt, Artificial Sequence
  Description of Artificial Sequence: Synthetic oligonucleotide
aaauugauguggguuaaag

SEQ ID NO: 249920 - RNA, 19 nt, Artificial Sequence
  Description of Artificial Sequence: Synthetic oligonucleotide
agaugcuuaaacgguaugc

SEQ ID NO: 249921 - RNA, 19 nt, Artificial Sequence
  Description of Artificial Sequence: Synthetic oligonucleotide
cuucaaaucccgagaaucg

SEQ ID NO: 249922 - RNA, 19 nt, Artificial Sequence
  Description of Artificial Sequence: Synthetic oligonucleotide
acgaacuuuaaagugguac

SEQ ID NO: 249923 - RNA, 19 nt, Artificial Sequence
  Description of Artificial Sequence: Synthetic oligonucleotide
uccuucugggaucauaaag

SEQ ID NO: 249924 - RNA, 19 nt, Artificial Sequence
  Description of Artificial Sequence: Synthetic oligonucleotide
uaugggucggccuaaacgu

SEQ ID NO: 249925 - RNA, 19 nt, Artificial Sequence
  Description of Artificial Sequence: Synthetic oligonucleotide
agcccgaauauucacuggc

SEQ ID NO: 249926 - RNA, 19 nt, Artificial Sequence
  Description of Artificial Sequence: Synthetic oligonucleotide
cagguuuugaccucggagc

SEQ ID NO: 249927 - RNA, 19 nt, Artificial Sequence
  Description of Artificial Sequence: Synthetic oligonucleotide
uuauggguaggcuucuucc

SEQ ID NO: 249928 - RNA, 19 nt, Artificial Sequence
  Description of Artificial Sequence: Synthetic oligonucleotide
cuaugggucggccuaaacg

SEQ ID NO: 249929 - RNA, 19 nt, Artificial Sequence
  Description of Artificial Sequence: Synthetic oligonucleotide
agacggaacagacuaaaug

SEQ ID NO: 249930 - RNA, 19 nt, Artificial Sequence
  Description of Artificial Sequence: Synthetic oligonucleotide
uaucccgccccuaagcagg

SEQ ID NO: 249931 - RNA, 19 nt, Artificial Sequence
  Description of Artificial Sequence: Synthetic oligonucleotide
uaucauaucuuaagauaug

SEQ ID NO: 249932 - RNA, 19 nt, Artificial Sequence
  Description of Artificial Sequence: Synthetic oligonucleotide
gcaagugccucuuacaagg

SEQ ID NO: 249933 - RNA, 19 nt, Artificial Sequence
  Description of Artificial Sequence: Synthetic oligonucleotide
acucaaccaaaucaaagga

SEQ ID NO: 249934 - RNA, 19 nt, Artificial Sequence
  Description of Artificial Sequence: Synthetic oligonucleotide
ucuucaaaucccgagaauc

SEQ ID NO: 249935 - RNA, 19 nt, Artificial Sequence
  Description of Artificial Sequence: Synthetic oligonucleotide
aaucccgagaaucgaagga

SEQ ID NO: 249936 - RNA, 19 nt, Artificial Sequence
  Description of Artificial Sequence: Synthetic oligonucleotide
gaugacaagagacauagau

SEQ ID NO: 249937 - RNA, 19 nt, Artificial Sequence
  Description of Artificial Sequence: Synthetic oligonucleotide
aagagugaagguucauucu

SEQ ID NO: 249938 - RNA, 19 nt, Artificial Sequence
  Description of Artificial Sequence: Synthetic oligonucleotide
agagccuauaaggacauuc

SEQ ID NO: 249939 - RNA, 19 nt, Artificial Sequence
  Description of Artificial Sequence: Synthetic oligonucleotide
caaggucgaacaaaauggg

SEQ ID NO: 249940 - RNA, 19 nt, Artificial Sequence
  Description of Artificial Sequence: Synthetic oligonucleotide
aagagucuaacaggcgggc

SEQ ID NO: 249941 - RNA, 19 nt, Artificial Sequence
  Description of Artificial Sequence: Synthetic oligonucleotide
agauguggugacuuuaaca

SEQ ID NO: 249942 - RNA, 19 nt, Artificial Sequence
  Description of Artificial Sequence: Synthetic oligonucleotide
gcauuaagcaaauaugaug

SEQ ID NO: 249943 - RNA, 19 nt, Artificial Sequence
  Description of Artificial Sequence: Synthetic oligonucleotide
aaaacacgcauuaagcaaa

SEQ ID NO: 249944 - RNA, 19 nt, Artificial Sequence
  Description of Artificial Sequence: Synthetic oligonucleotide
ggguuagaugcuuaaacgg

SEQ ID NO: 249945 - RNA, 19 nt, Artificial Sequence
  Description of Artificial Sequence: Synthetic oligonucleotide
uuaaacgguaugcugcgaa

SEQ ID NO: 249946 - RNA, 19 nt, Artificial Sequence
  Description of Artificial Sequence: Synthetic oligonucleotide
uauugugauagguccuucc

SEQ ID NO: 249947 - RNA, 19 nt, Artificial Sequence
  Description of Artificial Sequence: Synthetic oligonucleotide
gacggaacagacuaaaugu

SEQ ID NO: 249948 - RNA, 19 nt, Artificial Sequence
  Description of Artificial Sequence: Synthetic oligonucleotide
acacgcauuaagcaaauau

SEQ ID NO: 249949 - RNA, 19 nt, Artificial Sequence
  Description of Artificial Sequence: Synthetic oligonucleotide
uugaaucaaaauugaugug

SEQ ID NO: 249950 - RNA, 19 nt, Artificial Sequence
  Description of Artificial Sequence: Synthetic oligonucleotide
caagagucuaacaggcggg

SEQ ID NO: 249951 - RNA, 19 nt, Artificial Sequence
  Description of Artificial Sequence: Synthetic oligonucleotide
gaaucgaaggagacggacg

SEQ ID NO: 249952 - RNA, 19 nt, Artificial Sequence
  Description of Artificial Sequence: Synthetic oligonucleotide
agaaucgaaggagacggac

SEQ ID NO: 249953 - RNA, 19 nt, Artificial Sequence
  Description of Artificial Sequence: Synthetic oligonucleotide
ucuuaagcccauucgggga

SEQ ID NO: 249954 - RNA, 19 nt, Artificial Sequence
  Description of Artificial Sequence: Synthetic oligonucleotide
aaacgugccuggauguuac

SEQ ID NO: 249955 - RNA, 19 nt, Artificial Sequence
  Description of Artificial Sequence: Synthetic oligonucleotide
cagaguauaugacagguga

SEQ ID NO: 249956 - RNA, 19 nt, Artificial Sequence
  Description of Artificial Sequence: Synthetic oligonucleotide
acaccuuuaguuuuaguua

SEQ ID NO: 249957 - RNA, 19 nt, Artificial Sequence
  Description of Artificial Sequence: Synthetic oligonucleotide
caacuuucggcgcugacug

SEQ ID NO: 249958 - RNA, 19 nt, Artificial Sequence
  Description of Artificial Sequence: Synthetic oligonucleotide
caaaucccgagaaucgaag

SEQ ID NO: 249959 - RNA, 19 nt, Artificial Sequence
  Description of Artificial Sequence: Synthetic oligonucleotide
guucaaccacuuaagagcc

SEQ ID NO: 249960 - RNA, 19 nt, Artificial Sequence
  Description of Artificial Sequence: Synthetic oligonucleotide
ggucgaacaaaauggguag

SEQ ID NO: 249961 - RNA, 19 nt, Artificial Sequence
  Description of Artificial Sequence: Synthetic oligonucleotide
ucguggguugcguaucugg

SEQ ID NO: 249962 - RNA, 19 nt, Artificial Sequence
  Description of Artificial Sequence: Synthetic oligonucleotide
uugcguaucuggccggccg

SEQ ID NO: 249963 - RNA, 19 nt, Artificial Sequence
  Description of Artificial Sequence: Synthetic oligonucleotide
acgacccauagcuccacgc

SEQ ID NO: 249964 - RNA, 19 nt, Artificial Sequence
  Description of Artificial Sequence: Synthetic oligonucleotide
caucgaagcccgaauauuc

SEQ ID NO: 249965 - RNA, 19 nt, Artificial Sequence
  Description of Artificial Sequence: Synthetic oligonucleotide
uuauguggaaacucagcau

SEQ ID NO: 249966 - RNA, 19 nt, Artificial Sequence
  Description of Artificial Sequence: Synthetic oligonucleotide
ugaccucggagcgauaucc

SEQ ID NO: 249967 - RNA, 19 nt, Artificial Sequence
  Description of Artificial Sequence: Synthetic oligonucleotide
aauuuacuaccuucaccaa

SEQ ID NO: 249968 - RNA, 19 nt, Artificial Sequence
  Description of Artificial Sequence: Synthetic oligonucleotide
acuuaagagccuauaagga

SEQ ID NO: 249969 - RNA, 19 nt, Artificial Sequence
  Description of Artificial Sequence: Synthetic oligonucleotide
acgcauuaagcaaauauga

SEQ ID NO: 249970 - RNA, 19 nt, Artificial Sequence
  Description of Artificial Sequence: Synthetic oligonucleotide
uuagcacaacuuucggcgc

SEQ ID NO: 249971 - RNA, 19 nt, Artificial Sequence
  Description of Artificial Sequence: Synthetic oligonucleotide
uaugaugacaagagacaua

SEQ ID NO: 249972 - RNA, 19 nt, Artificial Sequence
  Description of Artificial Sequence: Synthetic oligonucleotide
gauaacaagggcucaggua

SEQ ID NO: 249973 - RNA, 19 nt, Artificial Sequence
  Description of Artificial Sequence: Synthetic oligonucleotide
aucccacgaacuuuaaagu

SEQ ID NO: 249974 - RNA, 19 nt, Artificial Sequence
  Description of Artificial Sequence: Synthetic oligonucleotide
gaagcucacucgucguggg

SEQ ID NO: 249975 - RNA, 19 nt, Artificial Sequence
  Description of Artificial Sequence: Synthetic oligonucleotide
gcaagaaccagaaacucag

SEQ ID NO: 249976 - RNA, 19 nt, Artificial Sequence
  Description of Artificial Sequence: Synthetic oligonucleotide
agugauaacaagggcucag

SEQ ID NO: 249977 - RNA, 19 nt, Artificial Sequence
  Description of Artificial Sequence: Synthetic oligonucleotide
auaugaugacaagagacau

SEQ ID NO: 249978 - RNA, 19 nt, Artificial Sequence
  Description of Artificial Sequence: Synthetic oligonucleotide
gauaucccgccccuaagca

SEQ ID NO: 249979 - RNA, 19 nt, Artificial Sequence
  Description of Artificial Sequence: Synthetic oligonucleotide
uauggguaggcuucuuccu

SEQ ID NO: 249980 - RNA, 19 nt, Artificial Sequence
  Description of Artificial Sequence: Synthetic oligonucleotide
uuacucuuacccaggcgcu

SEQ ID NO: 249981 - RNA, 19 nt, Artificial Sequence
  Description of Artificial Sequence: Synthetic oligonucleotide
aaagccaguuauguggaaa

SEQ ID NO: 249982 - RNA, 19 nt, Artificial Sequence
  Description of Artificial Sequence: Synthetic oligonucleotide
gggcgguuggguuagaugc

SEQ ID NO: 249983 - RNA, 19 nt, Artificial Sequence
  Description of Artificial Sequence: Synthetic oligonucleotide
ucggccuaaacgugccugg

SEQ ID NO: 249984 - RNA, 19 nt, Artificial Sequence
  Description of Artificial Sequence: Synthetic oligonucleotide
gcuuaaacgguaugcugcg

SEQ ID NO: 249985 - RNA, 19 nt, Artificial Sequence
  Description of Artificial Sequence: Synthetic oligonucleotide
accacuuaagagccuauaa

SEQ ID NO: 249986 - RNA, 19 nt, Artificial Sequence
  Description of Artificial Sequence: Synthetic oligonucleotide
cagguaauguaucauaucu

SEQ ID NO: 249987 - RNA, 19 nt, Artificial Sequence
  Description of Artificial Sequence: Synthetic oligonucleotide
ugcaucgaagcccgaauau

SEQ ID NO: 249988 - RNA, 19 nt, Artificial Sequence
  Description of Artificial Sequence: Synthetic oligonucleotide
gacccauagcuccacgccc

SEQ ID NO: 249989 - RNA, 19 nt, Artificial Sequence
  Description of Artificial Sequence: Synthetic oligonucleotide
agagaaguggaaagcauga

SEQ ID NO: 249990 - RNA, 19 nt, Artificial Sequence
  Description of Artificial Sequence: Synthetic oligonucleotide
cgaauauucacuggcaucg

SEQ ID NO: 249991 - RNA, 19 nt, Artificial Sequence
  Description of Artificial Sequence: Synthetic oligonucleotide
gaauauucacuggcaucgg

SEQ ID NO: 249992 - RNA, 19 nt, Artificial Sequence
  Description of Artificial Sequence: Synthetic oligonucleotide
auaucccgccccuaagcag

SEQ ID NO: 249993 - RNA, 19 nt, Artificial Sequence
  Description of Artificial Sequence: Synthetic oligonucleotide
ggggcuaacuagcugggcg

SEQ ID NO: 249994 - RNA, 19 nt, Artificial Sequence
  Description of Artificial Sequence: Synthetic oligonucleotide
ugggucggccuaaacgugc

SEQ ID NO: 249995 - RNA, 19 nt, Artificial Sequence
  Description of Artificial Sequence: Synthetic oligonucleotide
accucggagcgauaucccg

SEQ ID NO: 249996 - RNA, 19 nt, Artificial Sequence
  Description of Artificial Sequence: Synthetic oligonucleotide
gggucuauucuccaucugc

SEQ ID NO: 249997 - RNA, 19 nt, Artificial Sequence
  Description of Artificial Sequence: Synthetic oligonucleotide
uucacucacaaggccaaug

SEQ ID NO: 249998 - RNA, 19 nt, Artificial Sequence
  Description of Artificial Sequence: Synthetic oligonucleotide
ggaacagacuaaaugugcc

SEQ ID NO: 249999 - RNA, 19 nt, Artificial Sequence
  Description of Artificial Sequence: Synthetic oligonucleotide
agaguauaugacaggugag

SEQ ID NO: 250000 - RNA, 19 nt, Artificial Sequence
  Description of Artificial Sequence: Synthetic oligonucleotide
uggcuugcuagaccaggag

SEQ ID NO: 250001 - RNA, 19 nt, Artificial Sequence
  Description of Artificial Sequence: Synthetic oligonucleotide
guaucauaucuuaagauau

SEQ ID NO: 250002 - RNA, 19 nt, Artificial Sequence
  Description of Artificial Sequence: Synthetic oligonucleotide
ucgaagcccgaauauucac

SEQ ID NO: 250003 - RNA, 19 nt, Artificial Sequence
  Description of Artificial Sequence: Synthetic oligonucleotide
acaacuuucggcgcugacu

SEQ ID NO: 250004 - RNA, 19 nt, Artificial Sequence
  Description of Artificial Sequence: Synthetic oligonucleotide
aucuuaagauaugaacaga

SEQ ID NO: 250005 - RNA, 19 nt, Artificial Sequence
  Description of Artificial Sequence: Synthetic oligonucleotide
ucaaccacuuaagagccua

SEQ ID NO: 250006 - RNA, 19 nt, Artificial Sequence
  Description of Artificial Sequence: Synthetic oligonucleotide
cagugaccacacauuauug

SEQ ID NO: 250007 - RNA, 19 nt, Artificial Sequence
  Description of Artificial Sequence: Synthetic oligonucleotide
gcacaauaaagugauaaca

SEQ ID NO: 250008 - RNA, 19 nt, Artificial Sequence
  Description of Artificial Sequence: Synthetic oligonucleotide
ugauagguccuuccagcau

SEQ ID NO: 250009 - RNA, 19 nt, Artificial Sequence
  Description of Artificial Sequence: Synthetic oligonucleotide
uugcaagaaccagaaacuc

SEQ ID NO: 250010 - RNA, 19 nt, Artificial Sequence
  Description of Artificial Sequence: Synthetic oligonucleotide
cagccuauugugauagguc

SEQ ID NO: 250011 - RNA, 19 nt, Artificial Sequence
  Description of Artificial Sequence: Synthetic oligonucleotide
uuggucaguacagggcgag

SEQ ID NO: 250012 - RNA, 19 nt, Artificial Sequence
  Description of Artificial Sequence: Synthetic oligonucleotide
aaugugccaacugguggca

SEQ ID NO: 250013 - RNA, 19 nt, Artificial Sequence
  Description of Artificial Sequence: Synthetic oligonucleotide
uacuaccuucaccaacaac

SEQ ID NO: 250014 - RNA, 19 nt, Artificial Sequence
  Description of Artificial Sequence: Synthetic oligonucleotide
guaaguccacagccuauug

SEQ ID NO: 250015 - RNA, 19 nt, Artificial Sequence
  Description of Artificial Sequence: Synthetic oligonucleotide
agagaacaauuuguuauaa

SEQ ID NO: 250016 - RNA, 19 nt, Artificial Sequence
  Description of Artificial Sequence: Synthetic oligonucleotide
caccgauuccgccacgacc

SEQ ID NO: 250017 - RNA, 19 nt, Artificial Sequence
  Description of Artificial Sequence: Synthetic oligonucleotide
ggaucauaaagaugaacaa

SEQ ID NO: 250018 - RNA, 19 nt, Artificial Sequence
  Description of Artificial Sequence: Synthetic oligonucleotide
cuuccccgaccuaucauac

SEQ ID NO: 250019 - RNA, 19 nt, Artificial Sequence
  Description of Artificial Sequence: Synthetic oligonucleotide
ucgucugugccaccacagc

SEQ ID NO: 250020 - RNA, 19 nt, Artificial Sequence
  Description of Artificial Sequence: Synthetic oligonucleotide
gaccuaucauaccccgacc

SEQ ID NO: 250021 - RNA, 19 nt, Artificial Sequence
  Description of Artificial Sequence: Synthetic oligonucleotide
acggaacagacuaaaugug

SEQ ID NO: 250022 - RNA, 19 nt, Artificial Sequence
  Description of Artificial Sequence: Synthetic oligonucleotide
ugacauuacaggcgcucau

SEQ ID NO: 250023 - RNA, 19 nt, Artificial Sequence
  Description of Artificial Sequence: Synthetic oligonucleotide
aggucgaacaaaaugggua

SEQ ID NO: 250024 - RNA, 19 nt, Artificial Sequence
  Description of Artificial Sequence: Synthetic oligonucleotide
uaucauaccccgaccucua

SEQ ID NO: 250025 - RNA, 19 nt, Artificial Sequence
  Description of Artificial Sequence: Synthetic oligonucleotide
gggcuaacuagcugggcgg

SEQ ID NO: 250026 - RNA, 19 nt, Artificial Sequence
  Description of Artificial Sequence: Synthetic oligonucleotide
uauuaacaggaagucuuua

SEQ ID NO: 250027 - RNA, 19 nt, Artificial Sequence
  Description of Artificial Sequence: Synthetic oligonucleotide
uacaaggcccaagaaugac

SEQ ID NO: 250028 - RNA, 19 nt, Artificial Sequence
  Description of Artificial Sequence: Synthetic oligonucleotide
ugggcgguuggguuagaug

SEQ ID NO: 250029 - RNA, 19 nt, Artificial Sequence
  Description of Artificial Sequence: Synthetic oligonucleotide
agacggacgccagcgcucc

SEQ ID NO: 250030 - RNA, 19 nt, Artificial Sequence
  Description of Artificial Sequence: Synthetic oligonucleotide
uagacggaacagacuaaau

SEQ ID NO: 250031 - RNA, 19 nt, Artificial Sequence
  Description of Artificial Sequence: Synthetic oligonucleotide
acuuucggcgcugacugug

SEQ ID NO: 250032 - RNA, 19 nt, Artificial Sequence
  Description of Artificial Sequence: Synthetic oligonucleotide
ugaugacaagagacauaga

SEQ ID NO: 250033 - RNA, 19 nt, Artificial Sequence
  Description of Artificial Sequence: Synthetic oligonucleotide
cuuucggcgcugacugugc

SEQ ID NO: 250034 - RNA, 19 nt, Artificial Sequence
  Description of Artificial Sequence: Synthetic oligonucleotide
gguaguuuaauuaaagcuu

SEQ ID NO: 250035 - RNA, 19 nt, Artificial Sequence
  Description of Artificial Sequence: Synthetic oligonucleotide
auguggguuaaagacuccu

SEQ ID NO: 250036 - RNA, 19 nt, Artificial Sequence
  Description of Artificial Sequence: Synthetic oligonucleotide
acgaccucgaacaccaccu

SEQ ID NO: 250037 - RNA, 19 nt, Artificial Sequence
  Description of Artificial Sequence: Synthetic oligonucleotide
uuucgacauguaggcaucc

SEQ ID NO: 250038 - RNA, 19 nt, Artificial Sequence
  Description of Artificial Sequence: Synthetic oligonucleotide
gccuaaacgugccuggaug

SEQ ID NO: 250039 - RNA, 19 nt, Artificial Sequence
  Description of Artificial Sequence: Synthetic oligonucleotide
cugagaaaguuaaauuagu

SEQ ID NO: 250040 - RNA, 19 nt, Artificial Sequence
  Description of Artificial Sequence: Synthetic oligonucleotide
ggcuugcuagaccaggagc

SEQ ID NO: 250041 - RNA, 19 nt, Artificial Sequence
  Description of Artificial Sequence: Synthetic oligonucleotide
accauuuauguaauaucaa

SEQ ID NO: 250042 - RNA, 19 nt, Artificial Sequence
  Description of Artificial Sequence: Synthetic oligonucleotide
agcgauaucccgccccuaa

SEQ ID NO: 250043 - RNA, 19 nt, Artificial Sequence
  Description of Artificial Sequence: Synthetic oligonucleotide
ugcgaagcucacucgucgu

SEQ ID NO: 250044 - RNA, 19 nt, Artificial Sequence
  Description of Artificial Sequence: Synthetic oligonucleotide
ugcguaucuggccggccgu

SEQ ID NO: 250045 - RNA, 19 nt, Artificial Sequence
  Description of Artificial Sequence: Synthetic oligonucleotide
aacuuucggcgcugacugu

SEQ ID NO: 250046 - RNA, 19 nt, Artificial Sequence
  Description of Artificial Sequence: Synthetic oligonucleotide
gccaaugcauuccuguuca

SEQ ID NO: 250047 - RNA, 19 nt, Artificial Sequence
  Description of Artificial Sequence: Synthetic oligonucleotide
cuaccaccgauuccgccac

SEQ ID NO: 250048 - RNA, 19 nt, Artificial Sequence
  Description of Artificial Sequence: Synthetic oligonucleotide
aagcucacucgucgugggu

SEQ ID NO: 250049 - RNA, 19 nt, Artificial Sequence
  Description of Artificial Sequence: Synthetic oligonucleotide
gucaguacagggcgaguga

SEQ ID NO: 250050 - RNA, 19 nt, Artificial Sequence
  Description of Artificial Sequence: Synthetic oligonucleotide
uagcugcugcugcugcugc

SEQ ID NO: 250051 - RNA, 19 nt, Artificial Sequence
  Description of Artificial Sequence: Synthetic oligonucleotide
agaucccacgaacuuuaaa

SEQ ID NO: 250052 - RNA, 19 nt, Artificial Sequence
  Description of Artificial Sequence: Synthetic oligonucleotide
aguuuucgacauguaggca

SEQ ID NO: 250053 - RNA, 19 nt, Artificial Sequence
  Description of Artificial Sequence: Synthetic oligonucleotide
aucgaagcccgaauauuca

SEQ ID NO: 250054 - RNA, 19 nt, Artificial Sequence
  Description of Artificial Sequence: Synthetic oligonucleotide
ucuaacaggcgggcaggca

SEQ ID NO: 250055 - RNA, 19 nt, Artificial Sequence
  Description of Artificial Sequence: Synthetic oligonucleotide
uucgacauguaggcaucca

SEQ ID NO: 250056 - RNA, 19 nt, Artificial Sequence
  Description of Artificial Sequence: Synthetic oligonucleotide
ucacucgucguggguugcg

SEQ ID NO: 250057 - RNA, 19 nt, Artificial Sequence
  Description of Artificial Sequence: Synthetic oligonucleotide
aaccacuuaagagccuaua

SEQ ID NO: 250058 - RNA, 19 nt, Artificial Sequence
  Description of Artificial Sequence: Synthetic oligonucleotide
guaccuaugggucggccua

SEQ ID NO: 250059 - RNA, 19 nt, Artificial Sequence
  Description of Artificial Sequence: Synthetic oligonucleotide
gccgaaccugagcugacgg

SEQ ID NO: 250060 - RNA, 19 nt, Artificial Sequence
  Description of Artificial Sequence: Synthetic oligonucleotide
uugaccucggagcgauauc

SEQ ID NO: 250061 - RNA, 19 nt, Artificial Sequence
  Description of Artificial Sequence: Synthetic oligonucleotide
agggucuauucuccaucug

SEQ ID NO: 250062 - RNA, 19 nt, Artificial Sequence
  Description of Artificial Sequence: Synthetic oligonucleotide
agcuacggcucguccaccu

SEQ ID NO: 250063 - RNA, 19 nt, Artificial Sequence
  Description of Artificial Sequence: Synthetic oligonucleotide
ggucaguacagggcgagug

SEQ ID NO: 250064 - RNA, 19 nt, Artificial Sequence
  Description of Artificial Sequence: Synthetic oligonucleotide
gucggccuaaacgugccug

SEQ ID NO: 250065 - RNA, 19 nt, Artificial Sequence
  Description of Artificial Sequence: Synthetic oligonucleotide
cuccaaucgcuccccuggc

SEQ ID NO: 250066 - RNA, 19 nt, Artificial Sequence
  Description of Artificial Sequence: Synthetic oligonucleotide
ccgaauauucacuggcauc

SEQ ID NO: 250067 - RNA, 19 nt, Artificial Sequence
  Description of Artificial Sequence: Synthetic oligonucleotide
gccuacaucuuuggaagag

SEQ ID NO: 250068 - RNA, 19 nt, Artificial Sequence
  Description of Artificial Sequence: Synthetic oligonucleotide
caagaaccagaaacucaga

SEQ ID NO: 250069 - RNA, 19 nt, Artificial Sequence
  Description of Artificial Sequence: Synthetic oligonucleotide
acaagccauuccuggccca

SEQ ID NO: 250070 - RNA, 19 nt, Artificial Sequence
  Description of Artificial Sequence: Synthetic oligonucleotide
cuauugugauagguccuuc

SEQ ID NO: 250071 - RNA, 19 nt, Artificial Sequence
  Description of Artificial Sequence: Synthetic oligonucleotide
gguuagaugcuuaaacggu

SEQ ID NO: 250072 - RNA, 19 nt, Artificial Sequence
  Description of Artificial Sequence: Synthetic oligonucleotide
agagucuaacaggcgggca

SEQ ID NO: 250073 - RNA, 19 nt, Artificial Sequence
  Description of Artificial Sequence: Synthetic oligonucleotide
ggagcaaagcaagugccuc

SEQ ID NO: 250074 - RNA, 19 nt, Artificial Sequence
  Description of Artificial Sequence: Synthetic oligonucleotide
gaccucggagcgauauccc

SEQ ID NO: 250075 - RNA, 19 nt, Artificial Sequence
  Description of Artificial Sequence: Synthetic oligonucleotide
agccaguuauguggaaacu

SEQ ID NO: 250076 - RNA, 19 nt, Artificial Sequence
  Description of Artificial Sequence: Synthetic oligonucleotide
cuaucauaccccgaccucu

SEQ ID NO: 250077 - RNA, 19 nt, Artificial Sequence
  Description of Artificial Sequence: Synthetic oligonucleotide
uaccaccgauuccgccacg

SEQ ID NO: 250078 - RNA, 19 nt, Artificial Sequence
  Description of Artificial Sequence: Synthetic oligonucleotide
cauuacaggcgcucauuua

SEQ ID NO: 250079 - RNA, 19 nt, Artificial Sequence
  Description of Artificial Sequence: Synthetic oligonucleotide
ucggagcgauaucccgccc

SEQ ID NO: 250080 - RNA, 19 nt, Artificial Sequence
  Description of Artificial Sequence: Synthetic oligonucleotide
ccgagaaucgaaggagacg

SEQ ID NO: 250081 - RNA, 19 nt, Artificial Sequence
  Description of Artificial Sequence: Synthetic oligonucleotide
cuggauuauggguaggcuu

SEQ ID NO: 250082 - RNA, 19 nt, Artificial Sequence
  Description of Artificial Sequence: Synthetic oligonucleotide
ggccgcuggggcuaacuag

SEQ ID NO: 250083 - RNA, 19 nt, Artificial Sequence
  Description of Artificial Sequence: Synthetic oligonucleotide
guuggguuagaugcuuaaa

SEQ ID NO: 250084 - RNA, 19 nt, Artificial Sequence
  Description of Artificial Sequence: Synthetic oligonucleotide
aggguaccuaugggucggc

SEQ ID NO: 250085 - RNA, 19 nt, Artificial Sequence
  Description of Artificial Sequence: Synthetic oligonucleotide
cacaacuuucggcgcugac

SEQ ID NO: 250086 - RNA, 19 nt, Artificial Sequence
  Description of Artificial Sequence: Synthetic oligonucleotide
cgaccuaucauaccccgac

SEQ ID NO: 250087 - RNA, 19 nt, Artificial Sequence
  Description of Artificial Sequence: Synthetic oligonucleotide
ccauguacaagccauuccu

SEQ ID NO: 250088 - RNA, 19 nt, Artificial Sequence
  Description of Artificial Sequence: Synthetic oligonucleotide
gagacggacgccagcgcuc

SEQ ID NO: 250089 - RNA, 19 nt, Artificial Sequence
  Description of Artificial Sequence: Synthetic oligonucleotide
acggacgccagcgcuccuc

SEQ ID NO: 250090 - RNA, 19 nt, Artificial Sequence
  Description of Artificial Sequence: Synthetic oligonucleotide
cccgagaaucgaaggagac

SEQ ID NO: 250091 - RNA, 19 nt, Artificial Sequence
  Description of Artificial Sequence: Synthetic oligonucleotide
gguuggguuagaugcuuaa

SEQ ID NO: 250092 - RNA, 19 nt, Artificial Sequence
  Description of Artificial Sequence: Synthetic oligonucleotide
gagaaucgaaggagacgga

SEQ ID NO: 250093 - RNA, 19 nt, Artificial Sequence
  Description of Artificial Sequence: Synthetic oligonucleotide
augggucggccuaaacgug

SEQ ID NO: 250094 - RNA, 19 nt, Artificial Sequence
  Description of Artificial Sequence: Synthetic oligonucleotide
cgauaucccgccccuaagc

SEQ ID NO: 250095 - RNA, 19 nt, Artificial Sequence
  Description of Artificial Sequence: Synthetic oligonucleotide
gauuccgccacgacccaua

SEQ ID NO: 250096 - RNA, 19 nt, Artificial Sequence
  Description of Artificial Sequence: Synthetic oligonucleotide
guuuugaccucggagcgau

SEQ ID NO: 250097 - RNA, 19 nt, Artificial Sequence
  Description of Artificial Sequence: Synthetic oligonucleotide
ccgaaccugagcugacggg

SEQ ID NO: 250098 - RNA, 19 nt, Artificial Sequence
  Description of Artificial Sequence: Synthetic oligonucleotide
ccuaucauaccccgaccuc

SEQ ID NO: 250099 - RNA, 19 nt, Artificial Sequence
  Description of Artificial Sequence: Synthetic oligonucleotide
gcucacucgucguggguug

SEQ ID NO: 250100 - RNA, 19 nt, Artificial Sequence
  Description of Artificial Sequence: Synthetic oligonucleotide
gccgcuggggcuaacuagc

SEQ ID NO: 250101 - RNA, 19 nt, Artificial Sequence
  Description of Artificial Sequence: Synthetic oligonucleotide
ggguugcguaucuggccgg

SEQ ID NO: 250102 - RNA, 19 nt, Artificial Sequence
  Description of Artificial Sequence: Synthetic oligonucleotide
ucgucguggguugcguauc

SEQ ID NO: 250103 - RNA, 19 nt, Artificial Sequence
  Description of Artificial Sequence: Synthetic oligonucleotide
gcgauaucccgccccuaag

SEQ ID NO: 250104 - RNA, 19 nt, Artificial Sequence
  Description of Artificial Sequence: Synthetic oligonucleotide
gcgaagcucacucgucgug

SEQ ID NO: 250105 - RNA, 19 nt, Artificial Sequence
  Description of Artificial Sequence: Synthetic oligonucleotide
agcugcugcugcugcugca

SEQ ID NO: 250106 - RNA, 19 nt, Artificial Sequence
  Description of Artificial Sequence: Synthetic oligonucleotide
cugcaucgaagcccgaaua

SEQ ID NO: 250107 - RNA, 19 nt, Artificial Sequence
  Description of Artificial Sequence: Synthetic oligonucleotide
uuuugaccucggagcgaua

SEQ ID NO: 250108 - RNA, 19 nt, Artificial Sequence
  Description of Artificial Sequence: Synthetic oligonucleotide
cucacucgucguggguugc

SEQ ID NO: 250109 - RNA, 19 nt, Artificial Sequence
  Description of Artificial Sequence: Synthetic oligonucleotide
uaccuaugggucggccuaa

SEQ ID NO: 250110 - RNA, 19 nt, Artificial Sequence
  Description of Artificial Sequence: Synthetic oligonucleotide
cgaagcucacucgucgugg

SEQ ID NO: 250111 - RNA, 19 nt, Artificial Sequence
  Description of Artificial Sequence: Synthetic oligonucleotide
augcaguuacaaagacaga

SEQ ID NO: 250112 - RNA, 19 nt, Artificial Sequence
  Description of Artificial Sequence: Synthetic oligonucleotide
uggucaguacagggcgagu

SEQ ID NO: 250113 - RNA, 19 nt, Artificial Sequence
  Description of Artificial Sequence: Synthetic oligonucleotide
cgacccauagcuccacgcc

SEQ ID NO: 250114 - RNA, 19 nt, Artificial Sequence
  Description of Artificial Sequence: Synthetic oligonucleotide
acucgucguggguugcgua

SEQ ID NO: 250115 - RNA, 19 nt, Artificial Sequence
  Description of Artificial Sequence: Synthetic oligonucleotide
gguaccuaugggucggccu

SEQ ID NO: 250116 - RNA, 19 nt, Artificial Sequence
  Description of Artificial Sequence: Synthetic oligonucleotide
gagcuacggcucguccacc

SEQ ID NO: 250117 - RNA, 19 nt, Artificial Sequence
  Description of Artificial Sequence: Synthetic oligonucleotide
ggccgaaccugagcugacg

SEQ ID NO: 250118 - RNA, 19 nt, Artificial Sequence
  Description of Artificial Sequence: Synthetic oligonucleotide
aagagccuauaaggacauu

SEQ ID NO: 250119 - RNA, 19 nt, Artificial Sequence
  Description of Artificial Sequence: Synthetic oligonucleotide
gguugcguaucuggccggc

SEQ ID NO: 250120 - RNA, 19 nt, Artificial Sequence
  Description of Artificial Sequence: Synthetic oligonucleotide
cccggggcugccaccacgg

SEQ ID NO: 250121 - RNA, 19 nt, Artificial Sequence
  Description of Artificial Sequence: Synthetic oligonucleotide
cgguaugcugcgaagcuca

SEQ ID NO: 250122 - RNA, 19 nt, Artificial Sequence
  Description of Artificial Sequence: Synthetic oligonucleotide
ccuaaacgugccuggaugu

SEQ ID NO: 250123 - RNA, 19 nt, Artificial Sequence
  Description of Artificial Sequence: Synthetic oligonucleotide
gguuuugaccucggagcga

SEQ ID NO: 250124 - RNA, 19 nt, Artificial Sequence
  Description of Artificial Sequence: Synthetic oligonucleotide
gggucggccuaaacgugcc

SEQ ID NO: 250125 - RNA, 19 nt, Artificial Sequence
  Description of Artificial Sequence: Synthetic oligonucleotide
cucgucguggguugcguau

SEQ ID NO: 250126 - RNA, 19 nt, Artificial Sequence
  Description of Artificial Sequence: Synthetic oligonucleotide
cacgaacuuuaaaguggua

SEQ ID NO: 250127 - RNA, 19 nt, Artificial Sequence
  Description of Artificial Sequence: Synthetic oligonucleotide
ccuaugggucggccuaaac

SEQ ID NO: 250128 - RNA, 19 nt, Artificial Sequence
  Description of Artificial Sequence: Synthetic oligonucleotide
ccagugaccacacauuauu

SEQ ID NO: 250129 - RNA, 19 nt, Artificial Sequence
  Description of Artificial Sequence: Synthetic oligonucleotide
cggagcgauaucccgcccc

SEQ ID NO: 250130 - RNA, 19 nt, Artificial Sequence
  Description of Artificial Sequence: Synthetic oligonucleotide
cccauucggggagcuacgg

SEQ ID NO: 250131 - RNA, 19 nt, Artificial Sequence
  Description of Artificial Sequence: Synthetic oligonucleotide
aggcgcucauuuagagaca

SEQ ID NO: 250132 - RNA, 19 nt, Artificial Sequence
  Description of Artificial Sequence: Synthetic oligonucleotide
ggagcgauaucccgccccu

SEQ ID NO: 250133 - RNA, 19 nt, Artificial Sequence
  Description of Artificial Sequence: Synthetic oligonucleotide
gcccgaauauucacuggca

SEQ ID NO: 250134 - RNA, 19 nt, Artificial Sequence
  Description of Artificial Sequence: Synthetic oligonucleotide
cagagggucuauucuccau

SEQ ID NO: 250135 - RNA, 19 nt, Artificial Sequence
  Description of Artificial Sequence: Synthetic oligonucleotide
aagcccauucggggagcua

SEQ ID NO: 250136 - RNA, 19 nt, Artificial Sequence
  Description of Artificial Sequence: Synthetic oligonucleotide
ggccggccgaaccugagcu

SEQ ID NO: 250137 - RNA, 19 nt, Artificial Sequence
  Description of Artificial Sequence: Synthetic oligonucleotide
gguaaguccacagccuauu

SEQ ID NO: 250138 - RNA, 19 nt, Artificial Sequence
  Description of Artificial Sequence: Synthetic oligonucleotide
gcugcaucgaagcccgaau

SEQ ID NO: 250139 - RNA, 19 nt, Artificial Sequence
  Description of Artificial Sequence: Synthetic oligonucleotide
ggguaccuaugggucggcc

SEQ ID NO: 250140 - RNA, 19 nt, Artificial Sequence
  Description of Artificial Sequence: Synthetic oligonucleotide
gauuauggguaggcuucuu

SEQ ID NO: 250141 - RNA, 19 nt, Artificial Sequence
  Description of Artificial Sequence: Synthetic oligonucleotide
accuaugggucggccuaaa

SEQ ID NO: 250142 - RNA, 19 nt, Artificial Sequence
  Description of Artificial Sequence: Synthetic oligonucleotide
caaccacuuaagagccuau

SEQ ID NO: 250143 - RNA, 19 nt, Artificial Sequence
  Description of Artificial Sequence: Synthetic oligonucleotide
ggauuauggguaggcuucu

SEQ ID NO: 250144 - RNA, 19 nt, Artificial Sequence
  Description of Artificial Sequence: Synthetic oligonucleotide
cuaaacgugccuggauguu

SEQ ID NO: 250145 - RNA, 19 nt, Artificial Sequence
  Description of Artificial Sequence: Synthetic oligonucleotide
ccaccgauuccgccacgac

SEQ ID NO: 250146 - RNA, 19 nt, Artificial Sequence
  Description of Artificial Sequence: Synthetic oligonucleotide
gccuauugugauagguccu

SEQ ID NO: 250147 - RNA, 19 nt, Artificial Sequence
  Description of Artificial Sequence: Synthetic oligonucleotide
cccgaauauucacuggcau

SEQ ID NO: 250148 - RNA, 19 nt, Artificial Sequence
  Description of Artificial Sequence: Synthetic oligonucleotide
cacagccggcgccgccaac

SEQ ID NO: 250149 - RNA, 19 nt, Artificial Sequence
  Description of Artificial Sequence: Synthetic oligonucleotide
ccgaccuaucauaccccga

SEQ ID NO: 250150 - RNA, 19 nt, Artificial Sequence
  Description of Artificial Sequence: Synthetic oligonucleotide
ggguuucauauaacacagu

SEQ ID NO: 250151 - RNA, 19 nt, Artificial Sequence
  Description of Artificial Sequence: Synthetic oligonucleotide
ccggccgaaccugagcuga

SEQ ID NO: 250152 - RNA, 19 nt, Artificial Sequence
  Description of Artificial Sequence: Synthetic oligonucleotide
ccgcucgccaggccugccc

SEQ ID NO: 250153 - RNA, 19 nt, Artificial Sequence
  Description of Artificial Sequence: Synthetic oligonucleotide
ggcuaacuagcugggcggu

SEQ ID NO: 250154 - RNA, 19 nt, Artificial Sequence
  Description of Artificial Sequence: Synthetic oligonucleotide
ggcgguuggguuagaugcu

SEQ ID NO: 250155 - RNA, 19 nt, Artificial Sequence
  Description of Artificial Sequence: Synthetic oligonucleotide
ccuauugugauagguccuu

SEQ ID NO: 250156 - RNA, 19 nt, Artificial Sequence
  Description of Artificial Sequence: Synthetic oligonucleotide
ggggccggccgaaccugag

SEQ ID NO: 250157 - RNA, 19 nt, Artificial Sequence
  Description of Artificial Sequence: Synthetic oligonucleotide
gggccgcuggggcuaacua

SEQ ID NO: 250158 - RNA, 19 nt, Artificial Sequence
  Description of Artificial Sequence: Synthetic oligonucleotide
gcacaacuuucggcgcuga

SEQ ID NO: 250159 - RNA, 19 nt, Artificial Sequence
  Description of Artificial Sequence: Synthetic oligonucleotide
ccgccacgacccauagcuc

SEQ ID NO: 250160 - RNA, 19 nt, Artificial Sequence
  Description of Artificial Sequence: Synthetic oligonucleotide
ggucggccuaaacgugccu

SEQ ID NO: 250161 - RNA, 19 nt, Artificial Sequence
  Description of Artificial Sequence: Synthetic oligonucleotide
gcugcugcugcugcugcau

SEQ ID NO: 250162 - RNA, 19 nt, Artificial Sequence
  Description of Artificial Sequence: Synthetic oligonucleotide
gacggacgccagcgcuccu

SEQ ID NO: 250163 - RNA, 19 nt, Artificial Sequence
  Description of Artificial Sequence: Synthetic oligonucleotide
cugggcgguuggguuagau

SEQ ID NO: 250164 - RNA, 19 nt, Artificial Sequence
  Description of Artificial Sequence: Synthetic oligonucleotide
gcgguuggguuagaugcuu

SEQ ID NO: 250165 - RNA, 19 nt, Artificial Sequence
  Description of Artificial Sequence: Synthetic oligonucleotide
cgguuggguuagaugcuua

SEQ ID NO: 250166 - RNA, 19 nt, Artificial Sequence
  Description of Artificial Sequence: Synthetic oligonucleotide
gcuaacuagcugggcgguu

SEQ ID NO: 250167 - RNA, 19 nt, Artificial Sequence
  Description of Artificial Sequence: Synthetic oligonucleotide
cccgaccucuaccaccgau

SEQ ID NO: 250168 - RNA, 19 nt, Artificial Sequence
  Description of Artificial Sequence: Synthetic oligonucleotide
cgucguggguugcguaucu

SEQ ID NO: 250169 - RNA, 19 nt, Artificial Sequence
  Description of Artificial Sequence: Synthetic oligonucleotide
cgauuccgccacgacccau

SEQ ID NO: 250170 - RNA, 19 nt, Artificial Sequence
  Description of Artificial Sequence: Synthetic oligonucleotide
aauauuuccaugucgaucc

SEQ ID NO: 250171 - RNA, 19 nt, Artificial Sequence
  Description of Artificial Sequence: Synthetic oligonucleotide
aacugaaagaaacaaaggc

SEQ ID NO: 250172 - RNA, 19 nt, Artificial Sequence
  Description of Artificial Sequence: Synthetic oligonucleotide
aaucucacaaucuuuauuc

SEQ ID NO: 250173 - RNA, 19 nt, Artificial Sequence
  Description of Artificial Sequence: Synthetic oligonucleotide
auggauaaggaucauaucc

SEQ ID NO: 250174 - RNA, 19 nt, Artificial Sequence
  Description of Artificial Sequence: Synthetic oligonucleotide
uugaucaugaagaauaacc

SEQ ID NO: 250175 - RNA, 19 nt, Artificial Sequence
  Description of Artificial Sequence: Synthetic oligonucleotide
uguaauuucagacauccgc

SEQ ID NO: 250176 - RNA, 19 nt, Artificial Sequence
  Description of Artificial Sequence: Synthetic oligonucleotide
ugaagaauaaccauguggu

SEQ ID NO: 250177 - RNA, 19 nt, Artificial Sequence
  Description of Artificial Sequence: Synthetic oligonucleotide
auucaauacagagaaaggc

SEQ ID NO: 250178 - RNA, 19 nt, Artificial Sequence
  Description of Artificial Sequence: Synthetic oligonucleotide
auuuuagggugcuuuaugc

SEQ ID NO: 250179 - RNA, 19 nt, Artificial Sequence
  Description of Artificial Sequence: Synthetic oligonucleotide
aaucucaaggaucuugagg

SEQ ID NO: 250180 - RNA, 19 nt, Artificial Sequence
  Description of Artificial Sequence: Synthetic oligonucleotide
aaugugagaauucaauaca

SEQ ID NO: 250181 - RNA, 19 nt, Artificial Sequence
  Description of Artificial Sequence: Synthetic oligonucleotide
uucaauacagagaaaggcc

SEQ ID NO: 250182 - RNA, 19 nt, Artificial Sequence
  Description of Artificial Sequence: Synthetic oligonucleotide
agggauaaauuccagugcc

SEQ ID NO: 250183 - RNA, 19 nt, Artificial Sequence
  Description of Artificial Sequence: Synthetic oligonucleotide
uguaauaaagucugguuug

SEQ ID NO: 250184 - RNA, 19 nt, Artificial Sequence
  Description of Artificial Sequence: Synthetic oligonucleotide
caauuaauggauaaggauc

SEQ ID NO: 250185 - RNA, 19 nt, Artificial Sequence
  Description of Artificial Sequence: Synthetic oligonucleotide
uuaaagaagugaaaacuca

SEQ ID NO: 250186 - RNA, 19 nt, Artificial Sequence
  Description of Artificial Sequence: Synthetic oligonucleotide
ugaucaugaagaauaacca

SEQ ID NO: 250187 - RNA, 19 nt, Artificial Sequence
  Description of Artificial Sequence: Synthetic oligonucleotide
uguggaagcuauaaaacug

SEQ ID NO: 250188 - RNA, 19 nt, Artificial Sequence
  Description of Artificial Sequence: Synthetic oligonucleotide
uuaaugacaagaaagcauu

SEQ ID NO: 250189 - RNA, 19 nt, Artificial Sequence
  Description of Artificial Sequence: Synthetic oligonucleotide
acucuauuaguacagcuuc

SEQ ID NO: 250190 - RNA, 19 nt, Artificial Sequence
  Description of Artificial Sequence: Synthetic oligonucleotide
uuaaauugcaucacuggac

SEQ ID NO: 250191 - RNA, 19 nt, Artificial Sequence
  Description of Artificial Sequence: Synthetic oligonucleotide
aaguugacuucuccggugc

SEQ ID NO: 250192 - RNA, 19 nt, Artificial Sequence
  Description of Artificial Sequence: Synthetic oligonucleotide
aauccuuaaaguacuuggc

SEQ ID NO: 250193 - RNA, 19 nt, Artificial Sequence
  Description of Artificial Sequence: Synthetic oligonucleotide
aaucgaagaaccuucuggu

SEQ ID NO: 250194 - RNA, 19 nt, Artificial Sequence
  Description of Artificial Sequence: Synthetic oligonucleotide
cauagauaaauauucagca

SEQ ID NO: 250195 - RNA, 19 nt, Artificial Sequence
  Description of Artificial Sequence: Synthetic oligonucleotide
uuuuggagcuuaccgaagg

SEQ ID NO: 250196 - RNA, 19 nt, Artificial Sequence
  Description of Artificial Sequence: Synthetic oligonucleotide
uauagagucagauuguaau

SEQ ID NO: 250197 - RNA, 19 nt, Artificial Sequence
  Description of Artificial Sequence: Synthetic oligonucleotide
cuuauauggauguagauaa

SEQ ID NO: 250198 - RNA, 19 nt, Artificial Sequence
  Description of Artificial Sequence: Synthetic oligonucleotide
uaagggguuauacugguug

SEQ ID NO: 250199 - RNA, 19 nt, Artificial Sequence
  Description of Artificial Sequence: Synthetic oligonucleotide
aggaauuccaauuaaugga

SEQ ID NO: 250200 - RNA, 19 nt, Artificial Sequence
  Description of Artificial Sequence: Synthetic oligonucleotide
aagugggaaucucacaauc

SEQ ID NO: 250201 - RNA, 19 nt, Artificial Sequence
  Description of Artificial Sequence: Synthetic oligonucleotide
aauggauaaggaucauauc

SEQ ID NO: 250202 - RNA, 19 nt, Artificial Sequence
  Description of Artificial Sequence: Synthetic oligonucleotide
uccauagauaaauauucag

SEQ ID NO: 250203 - RNA, 19 nt, Artificial Sequence
  Description of Artificial Sequence: Synthetic oligonucleotide
aaagaugaauccuucugga

SEQ ID NO: 250204 - RNA, 19 nt, Artificial Sequence
  Description of Artificial Sequence: Synthetic oligonucleotide
uuaguaaacuucuuuggcu

SEQ ID NO: 250205 - RNA, 19 nt, Artificial Sequence
  Description of Artificial Sequence: Synthetic oligonucleotide
agaaacaaaggcuugacua

SEQ ID NO: 250206 - RNA, 19 nt, Artificial Sequence
  Description of Artificial Sequence: Synthetic oligonucleotide
ucuuuugagaacaggguga

SEQ ID NO: 250207 - RNA, 19 nt, Artificial Sequence
  Description of Artificial Sequence: Synthetic oligonucleotide
caagccuagaauaaauacc

SEQ ID NO: 250208 - RNA, 19 nt, Artificial Sequence
  Description of Artificial Sequence: Synthetic oligonucleotide
ugaucguuccccacaagcg

SEQ ID NO: 250209 - RNA, 19 nt, Artificial Sequence
  Description of Artificial Sequence: Synthetic oligonucleotide
cuaaagacucaacaggacc

SEQ ID NO: 250210 - RNA, 19 nt, Artificial Sequence
  Description of Artificial Sequence: Synthetic oligonucleotide
uauuaguacagcuuccaga

SEQ ID NO: 250211 - RNA, 19 nt, Artificial Sequence
  Description of Artificial Sequence: Synthetic oligonucleotide
aauaaugacugcuguuuca

SEQ ID NO: 250212 - RNA, 19 nt, Artificial Sequence
  Description of Artificial Sequence: Synthetic oligonucleotide
cuuaguaaacuucuuuggc

SEQ ID NO: 250213 - RNA, 19 nt, Artificial Sequence
  Description of Artificial Sequence: Synthetic oligonucleotide
gauaccaaaagaucucgug

SEQ ID NO: 250214 - RNA, 19 nt, Artificial Sequence
  Description of Artificial Sequence: Synthetic oligonucleotide
caaugugagaauucaauac

SEQ ID NO: 250215 - RNA, 19 nt, Artificial Sequence
  Description of Artificial Sequence: Synthetic oligonucleotide
aucuaguccaaauaauuug

SEQ ID NO: 250216 - RNA, 19 nt, Artificial Sequence
  Description of Artificial Sequence: Synthetic oligonucleotide
agcaucuauauaauguugc

SEQ ID NO: 250217 - RNA, 19 nt, Artificial Sequence
  Description of Artificial Sequence: Synthetic oligonucleotide
uggauaaggaucauaucca

SEQ ID NO: 250218 - RNA, 19 nt, Artificial Sequence
  Description of Artificial Sequence: Synthetic oligonucleotide
uaauuucagacauccgccg

SEQ ID NO: 250219 - RNA, 19 nt, Artificial Sequence
  Description of Artificial Sequence: Synthetic oligonucleotide
ucgucaguaaaauccaaag

SEQ ID NO: 250220 - RNA, 19 nt, Artificial Sequence
  Description of Artificial Sequence: Synthetic oligonucleotide
auaaacuaccacuucugag

SEQ ID NO: 250221 - RNA, 19 nt, Artificial Sequence
  Description of Artificial Sequence: Synthetic oligonucleotide
uuggguguuaaccaggcac

SEQ ID NO: 250222 - RNA, 19 nt, Artificial Sequence
  Description of Artificial Sequence: Synthetic oligonucleotide
ucgugggcaaauaaaaucu

SEQ ID NO: 250223 - RNA, 19 nt, Artificial Sequence
  Description of Artificial Sequence: Synthetic oligonucleotide
uuccgauaccaaaagaucu

SEQ ID NO: 250224 - RNA, 19 nt, Artificial Sequence
  Description of Artificial Sequence: Synthetic oligonucleotide
uaccauuugguuauuauua

SEQ ID NO: 250225 - RNA, 19 nt, Artificial Sequence
  Description of Artificial Sequence: Synthetic oligonucleotide
uccaauuaauggauaagga

SEQ ID NO: 250226 - RNA, 19 nt, Artificial Sequence
  Description of Artificial Sequence: Synthetic oligonucleotide
uauuuuagggugcuuuaug

SEQ ID NO: 250227 - RNA, 19 nt, Artificial Sequence
  Description of Artificial Sequence: Synthetic oligonucleotide
aaacaaaggcuugacuaac

SEQ ID NO: 250228 - RNA, 19 nt, Artificial Sequence
  Description of Artificial Sequence: Synthetic oligonucleotide
uugaucguuccccacaagc

SEQ ID NO: 250229 - RNA, 19 nt, Artificial Sequence
  Description of Artificial Sequence: Synthetic oligonucleotide
auaugcacaguauaguagu

SEQ ID NO: 250230 - RNA, 19 nt, Artificial Sequence
  Description of Artificial Sequence: Synthetic oligonucleotide
auaaggaucauauccagua

SEQ ID NO: 250231 - RNA, 19 nt, Artificial Sequence
  Description of Artificial Sequence: Synthetic oligonucleotide
uuaccgaaggauaugcaca

SEQ ID NO: 250232 - RNA, 19 nt, Artificial Sequence
  Description of Artificial Sequence: Synthetic oligonucleotide
uguauuugguuccagcaaa

SEQ ID NO: 250233 - RNA, 19 nt, Artificial Sequence
  Description of Artificial Sequence: Synthetic oligonucleotide
uuaucuaguccaaauaauu

SEQ ID NO: 250234 - RNA, 19 nt, Artificial Sequence
  Description of Artificial Sequence: Synthetic oligonucleotide
ugaaucucaaggaucuuga

SEQ ID NO: 250235 - RNA, 19 nt, Artificial Sequence
  Description of Artificial Sequence: Synthetic oligonucleotide
cuuuacagcccuuugugag

SEQ ID NO: 250236 - RNA, 19 nt, Artificial Sequence
  Description of Artificial Sequence: Synthetic oligonucleotide
ucauuuccgauaccaaaag

SEQ ID NO: 250237 - RNA, 19 nt, Artificial Sequence
  Description of Artificial Sequence: Synthetic oligonucleotide
aaaaucuccuuguguuuuc

SEQ ID NO: 250238 - RNA, 19 nt, Artificial Sequence
  Description of Artificial Sequence: Synthetic oligonucleotide
ucgagaaucuggauucacg

SEQ ID NO: 250239 - RNA, 19 nt, Artificial Sequence
  Description of Artificial Sequence: Synthetic oligonucleotide
ugcacgcucacaacgaaag

SEQ ID NO: 250240 - RNA, 19 nt, Artificial Sequence
  Description of Artificial Sequence: Synthetic oligonucleotide
uaauguaaggaaauccuua

SEQ ID NO: 250241 - RNA, 19 nt, Artificial Sequence
  Description of Artificial Sequence: Synthetic oligonucleotide
ucguccaguauucuaguag

SEQ ID NO: 250242 - RNA, 19 nt, Artificial Sequence
  Description of Artificial Sequence: Synthetic oligonucleotide
uuuuggguugcuuaguaaa

SEQ ID NO: 250243 - RNA, 19 nt, Artificial Sequence
  Description of Artificial Sequence: Synthetic oligonucleotide
uuuucuccagcauuacgag

SEQ ID NO: 250244 - RNA, 19 nt, Artificial Sequence
  Description of Artificial Sequence: Synthetic oligonucleotide
gccaaaacgacuuuuagac

SEQ ID NO: 250245 - RNA, 19 nt, Artificial Sequence
  Description of Artificial Sequence: Synthetic oligonucleotide
aauucacaccaucuuaaau

SEQ ID NO: 250246 - RNA, 19 nt, Artificial Sequence
  Description of Artificial Sequence: Synthetic oligonucleotide
uuuccgauaccaaaagauc

SEQ ID NO: 250247 - RNA, 19 nt, Artificial Sequence
  Description of Artificial Sequence: Synthetic oligonucleotide
ucgucuacggaguuguugc

SEQ ID NO: 250248 - RNA, 19 nt, Artificial Sequence
  Description of Artificial Sequence: Synthetic oligonucleotide
acgacuuuuagaccugggg

SEQ ID NO: 250249 - RNA, 19 nt, Artificial Sequence
  Description of Artificial Sequence: Synthetic oligonucleotide
ugcacaguauaguaguuac

SEQ ID NO: 250250 - RNA, 19 nt, Artificial Sequence
  Description of Artificial Sequence: Synthetic oligonucleotide
uuauugugguggaauaaac

SEQ ID NO: 250251 - RNA, 19 nt, Artificial Sequence
  Description of Artificial Sequence: Synthetic oligonucleotide
aaaauucacaccaucuuaa

SEQ ID NO: 250252 - RNA, 19 nt, Artificial Sequence
  Description of Artificial Sequence: Synthetic oligonucleotide
cuuaccgaaggauaugcac

SEQ ID NO: 250253 - RNA, 19 nt, Artificial Sequence
  Description of Artificial Sequence: Synthetic oligonucleotide
uaucuaguccaaauaauuu

SEQ ID NO: 250254 - RNA, 19 nt, Artificial Sequence
  Description of Artificial Sequence: Synthetic oligonucleotide
auauacaucucuccaagau

SEQ ID NO: 250255 - RNA, 19 nt, Artificial Sequence
  Description of Artificial Sequence: Synthetic oligonucleotide
guaauuucagacauccgcc

SEQ ID NO: 250256 - RNA, 19 nt, Artificial Sequence
  Description of Artificial Sequence: Synthetic oligonucleotide
uaaauuccagugcccacag

SEQ ID NO: 250257 - RNA, 19 nt, Artificial Sequence
  Description of Artificial Sequence: Synthetic oligonucleotide
aauaccuccugcaaauucu

SEQ ID NO: 250258 - RNA, 19 nt, Artificial Sequence
  Description of Artificial Sequence: Synthetic oligonucleotide
aucaugaagaauaaccaug

SEQ ID NO: 250259 - RNA, 19 nt, Artificial Sequence
  Description of Artificial Sequence: Synthetic oligonucleotide
agcaacgugcacauuaucg

SEQ ID NO: 250260 - RNA, 19 nt, Artificial Sequence
  Description of Artificial Sequence: Synthetic oligonucleotide
uggauucacguacucagca

SEQ ID NO: 250261 - RNA, 19 nt, Artificial Sequence
  Description of Artificial Sequence: Synthetic oligonucleotide
acuaacugcaucuuuuaaa

SEQ ID NO: 250262 - RNA, 19 nt, Artificial Sequence
  Description of Artificial Sequence: Synthetic oligonucleotide
uguagaucguccaguauuc

SEQ ID NO: 250263 - RNA, 19 nt, Artificial Sequence
  Description of Artificial Sequence: Synthetic oligonucleotide
agugauacugacaauguga

SEQ ID NO: 250264 - RNA, 19 nt, Artificial Sequence
  Description of Artificial Sequence: Synthetic oligonucleotide
uguuucaacugcagagucc

SEQ ID NO: 250265 - RNA, 19 nt, Artificial Sequence
  Description of Artificial Sequence: Synthetic oligonucleotide
uuuuagggugcuuuaugca

SEQ ID NO: 250266 - RNA, 19 nt, Artificial Sequence
  Description of Artificial Sequence: Synthetic oligonucleotide
auaguaguuacaaguacag

SEQ ID NO: 250267 - RNA, 19 nt, Artificial Sequence
  Description of Artificial Sequence: Synthetic oligonucleotide
gguuaaaaguuucuuacac

SEQ ID NO: 250268 - RNA, 19 nt, Artificial Sequence
  Description of Artificial Sequence: Synthetic oligonucleotide
ccauagauaaauauucagc

SEQ ID NO: 250269 - RNA, 19 nt, Artificial Sequence
  Description of Artificial Sequence: Synthetic oligonucleotide
cuuaaauugcaucacugga

SEQ ID NO: 250270 - RNA, 19 nt, Artificial Sequence
  Description of Artificial Sequence: Synthetic oligonucleotide
agcuuaccgaaggauaugc

SEQ ID NO: 250271 - RNA, 19 nt, Artificial Sequence
  Description of Artificial Sequence: Synthetic oligonucleotide
acauggaucaccauauuug

SEQ ID NO: 250272 - RNA, 19 nt, Artificial Sequence
  Description of Artificial Sequence: Synthetic oligonucleotide
uaccgaaggauaugcacag

SEQ ID NO: 250273 - RNA, 19 nt, Artificial Sequence
  Description of Artificial Sequence: Synthetic oligonucleotide
guaacaauaacaucucugu

SEQ ID NO: 250274 - RNA, 19 nt, Artificial Sequence
  Description of Artificial Sequence: Synthetic oligonucleotide
uaguucaguccccuugggg

SEQ ID NO: 250275 - RNA, 19 nt, Artificial Sequence
  Description of Artificial Sequence: Synthetic oligonucleotide
gcuuaguaaacuucuuugg

SEQ ID NO: 250276 - RNA, 19 nt, Artificial Sequence
  Description of Artificial Sequence: Synthetic oligonucleotide
uaguccaaauaauuugugu

SEQ ID NO: 250277 - RNA, 19 nt, Artificial Sequence
  Description of Artificial Sequence: Synthetic oligonucleotide
gagucagauuguaauaaag

SEQ ID NO: 250278 - RNA, 19 nt, Artificial Sequence
  Description of Artificial Sequence: Synthetic oligonucleotide
uaauauuuccaugucgauc

SEQ ID NO: 250279 - RNA, 19 nt, Artificial Sequence
  Description of Artificial Sequence: Synthetic oligonucleotide
uuagaugcccuguaauuuc

SEQ ID NO: 250280 - RNA, 19 nt, Artificial Sequence
  Description of Artificial Sequence: Synthetic oligonucleotide
cucgugggcaaauaaaauc

SEQ ID NO: 250281 - RNA, 19 nt, Artificial Sequence
  Description of Artificial Sequence: Synthetic oligonucleotide
ugcguuauuucgagaaucu

SEQ ID NO: 250282 - RNA, 19 nt, Artificial Sequence
  Description of Artificial Sequence: Synthetic oligonucleotide
gacgcccuuggccaaaacg

SEQ ID NO: 250283 - RNA, 19 nt, Artificial Sequence
  Description of Artificial Sequence: Synthetic oligonucleotide
ugguuaaaaguuucuuaca

SEQ ID NO: 250284 - RNA, 19 nt, Artificial Sequence
  Description of Artificial Sequence: Synthetic oligonucleotide
gaucguuccccacaagcgc

SEQ ID NO: 250285 - RNA, 19 nt, Artificial Sequence
  Description of Artificial Sequence: Synthetic oligonucleotide
uauaauguugcugcguuau

SEQ ID NO: 250286 - RNA, 19 nt, Artificial Sequence
  Description of Artificial Sequence: Synthetic oligonucleotide
acaguauaguaguuacaag

SEQ ID NO: 250287 - RNA, 19 nt, Artificial Sequence
  Description of Artificial Sequence: Synthetic oligonucleotide
aacaucacaaugaacugaa

SEQ ID NO: 250288 - RNA, 19 nt, Artificial Sequence
  Description of Artificial Sequence: Synthetic oligonucleotide
ccugguaacaccuugaaca

SEQ ID NO: 250289 - RNA, 19 nt, Artificial Sequence
  Description of Artificial Sequence: Synthetic oligonucleotide
ucuauuaguacagcuucca

SEQ ID NO: 250290 - RNA, 19 nt, Artificial Sequence
  Description of Artificial Sequence: Synthetic oligonucleotide
cuagaauaaauaccuccug

SEQ ID NO: 250291 - RNA, 19 nt, Artificial Sequence
  Description of Artificial Sequence: Synthetic oligonucleotide
ucacuuuacagcccuuugu

SEQ ID NO: 250292 - RNA, 19 nt, Artificial Sequence
  Description of Artificial Sequence: Synthetic oligonucleotide
agcgccaauauacaucucu

SEQ ID NO: 250293 - RNA, 19 nt, Artificial Sequence
  Description of Artificial Sequence: Synthetic oligonucleotide
cacuuauucuucugcacgc

SEQ ID NO: 250294 - RNA, 19 nt, Artificial Sequence
  Description of Artificial Sequence: Synthetic oligonucleotide
cauuaucuaguccaaauaa

SEQ ID NO: 250295 - RNA, 19 nt, Artificial Sequence
  Description of Artificial Sequence: Synthetic oligonucleotide
ucugaggaauuccaauuaa

SEQ ID NO: 250296 - RNA, 19 nt, Artificial Sequence
  Description of Artificial Sequence: Synthetic oligonucleotide
gugauacugacaaugugag

SEQ ID NO: 250297 - RNA, 19 nt, Artificial Sequence
  Description of Artificial Sequence: Synthetic oligonucleotide
gauucacguacucagcauc

SEQ ID NO: 250298 - RNA, 19 nt, Artificial Sequence
  Description of Artificial Sequence: Synthetic oligonucleotide
acauacauggaucaccaua

SEQ ID NO: 250299 - RNA, 19 nt, Artificial Sequence
  Description of Artificial Sequence: Synthetic oligonucleotide
uggguguuaaccaggcaca

SEQ ID NO: 250300 - RNA, 19 nt, Artificial Sequence
  Description of Artificial Sequence: Synthetic oligonucleotide
uaguaaacuucuuuggcuu

SEQ ID NO: 250301 - RNA, 19 nt, Artificial Sequence
  Description of Artificial Sequence: Synthetic oligonucleotide
uucagaucgucuacggagu

SEQ ID NO: 250302 - RNA, 19 nt, Artificial Sequence
  Description of Artificial Sequence: Synthetic oligonucleotide
gaaguugacuucuccggug

SEQ ID NO: 250303 - RNA, 19 nt, Artificial Sequence
  Description of Artificial Sequence: Synthetic oligonucleotide
guugcugcguuauuucgag

SEQ ID NO: 250304 - RNA, 19 nt, Artificial Sequence
  Description of Artificial Sequence: Synthetic oligonucleotide
aacuuauugugguggaaua

SEQ ID NO: 250305 - RNA, 19 nt, Artificial Sequence
  Description of Artificial Sequence: Synthetic oligonucleotide
auuuccgauaccaaaagau

SEQ ID NO: 250306 - RNA, 19 nt, Artificial Sequence
  Description of Artificial Sequence: Synthetic oligonucleotide
ugcugcguuauuucgagaa

SEQ ID NO: 250307 - RNA, 19 nt, Artificial Sequence
  Description of Artificial Sequence: Synthetic oligonucleotide
caaaacgacuuuuagaccu

SEQ ID NO: 250308 - RNA, 19 nt, Artificial Sequence
  Description of Artificial Sequence: Synthetic oligonucleotide
uacgaguaguacaauuuuc

SEQ ID NO: 250309 - RNA, 19 nt, Artificial Sequence
  Description of Artificial Sequence: Synthetic oligonucleotide
uuacgaguaguacaauuuu

SEQ ID NO: 250310 - RNA, 19 nt, Artificial Sequence
  Description of Artificial Sequence: Synthetic oligonucleotide
acagcaucuauauaauguu

SEQ ID NO: 250311 - RNA, 19 nt, Artificial Sequence
  Description of Artificial Sequence: Synthetic oligonucleotide
agaucguccaguauucuag

SEQ ID NO: 250312 - RNA, 19 nt, Artificial Sequence
  Description of Artificial Sequence: Synthetic oligonucleotide
aagaugaauccuucuggau

SEQ ID NO: 250313 - RNA, 19 nt, Artificial Sequence
  Description of Artificial Sequence: Synthetic oligonucleotide
auuuaauguaaguggcuaa

SEQ ID NO: 250314 - RNA, 19 nt, Artificial Sequence
  Description of Artificial Sequence: Synthetic oligonucleotide
agauucugaugugagacug

SEQ ID NO: 250315 - RNA, 19 nt, Artificial Sequence
  Description of Artificial Sequence: Synthetic oligonucleotide
gcagggauaaauuccagug

SEQ ID NO: 250316 - RNA, 19 nt, Artificial Sequence
  Description of Artificial Sequence: Synthetic oligonucleotide
aagucagccaguugaucgu

SEQ ID NO: 250317 - RNA, 19 nt, Artificial Sequence
  Description of Artificial Sequence: Synthetic oligonucleotide
uccgauaccaaaagaucuc

SEQ ID NO: 250318 - RNA, 19 nt, Artificial Sequence
  Description of Artificial Sequence: Synthetic oligonucleotide
cucagauuuaauguaagga

SEQ ID NO: 250319 - RNA, 19 nt, Artificial Sequence
  Description of Artificial Sequence: Synthetic oligonucleotide
uggaauaaacuaccacuuc

SEQ ID NO: 250320 - RNA, 19 nt, Artificial Sequence
  Description of Artificial Sequence: Synthetic oligonucleotide
ccauuaagggguuauacug

SEQ ID NO: 250321 - RNA, 19 nt, Artificial Sequence
  Description of Artificial Sequence: Synthetic oligonucleotide
ugaacaagucagccaguug

SEQ ID NO: 250322 - RNA, 19 nt, Artificial Sequence
  Description of Artificial Sequence: Synthetic oligonucleotide
augugagaauucaauacag

SEQ ID NO: 250323 - RNA, 19 nt, Artificial Sequence
  Description of Artificial Sequence: Synthetic oligonucleotide
aagcaacgugcacauuauc

SEQ ID NO: 250324 - RNA, 19 nt, Artificial Sequence
  Description of Artificial Sequence: Synthetic oligonucleotide
cacgacucaucuuuuggag

SEQ ID NO: 250325 - RNA, 19 nt, Artificial Sequence
  Description of Artificial Sequence: Synthetic oligonucleotide
cuaguccaaauaauuugug

SEQ ID NO: 250326 - RNA, 19 nt, Artificial Sequence
  Description of Artificial Sequence: Synthetic oligonucleotide
cacauuaucgucaguaaaa

SEQ ID NO: 250327 - RNA, 19 nt, Artificial Sequence
  Description of Artificial Sequence: Synthetic oligonucleotide
cucuauuaguacagcuucc

SEQ ID NO: 250328 - RNA, 19 nt, Artificial Sequence
  Description of Artificial Sequence: Synthetic oligonucleotide
caguauaguaguuacaagu

SEQ ID NO: 250329 - RNA, 19 nt, Artificial Sequence
  Description of Artificial Sequence: Synthetic oligonucleotide
gccuagaauaaauaccucc

SEQ ID NO: 250330 - RNA, 19 nt, Artificial Sequence
  Description of Artificial Sequence: Synthetic oligonucleotide
aaacgacuuuuagaccugg

SEQ ID NO: 250331 - RNA, 19 nt, Artificial Sequence
  Description of Artificial Sequence: Synthetic oligonucleotide
gaagaauaaccaugugguc

SEQ ID NO: 250332 - RNA, 19 nt, Artificial Sequence
  Description of Artificial Sequence: Synthetic oligonucleotide
uuuggagcuuaccgaagga

SEQ ID NO: 250333 - RNA, 19 nt, Artificial Sequence
  Description of Artificial Sequence: Synthetic oligonucleotide
uguggauccugguucuacc

SEQ ID NO: 250334 - RNA, 19 nt, Artificial Sequence
  Description of Artificial Sequence: Synthetic oligonucleotide
gagugauacugacaaugug

SEQ ID NO: 250335 - RNA, 19 nt, Artificial Sequence
  Description of Artificial Sequence: Synthetic oligonucleotide
agaaguugacuucuccggu

SEQ ID NO: 250336 - RNA, 19 nt, Artificial Sequence
  Description of Artificial Sequence: Synthetic oligonucleotide
auucaaccaguugaaaaug

SEQ ID NO: 250337 - RNA, 19 nt, Artificial Sequence
  Description of Artificial Sequence: Synthetic oligonucleotide
auagagucagauuguaaua

SEQ ID NO: 250338 - RNA, 19 nt, Artificial Sequence
  Description of Artificial Sequence: Synthetic oligonucleotide
aguacuuggcagaagaaau

SEQ ID NO: 250339 - RNA, 19 nt, Artificial Sequence
  Description of Artificial Sequence: Synthetic oligonucleotide
gaaggauaugcacaguaua

SEQ ID NO: 250340 - RNA, 19 nt, Artificial Sequence
  Description of Artificial Sequence: Synthetic oligonucleotide
agugaaaacucagauuuaa

SEQ ID NO: 250341 - RNA, 19 nt, Artificial Sequence
  Description of Artificial Sequence: Synthetic oligonucleotide
auaaccauguggucccuca

SEQ ID NO: 250342 - RNA, 19 nt, Artificial Sequence
  Description of Artificial Sequence: Synthetic oligonucleotide
guccagaucacccaaucuc

SEQ ID NO: 250343 - RNA, 19 nt, Artificial Sequence
  Description of Artificial Sequence: Synthetic oligonucleotide
aguugacuucuccggugcc

SEQ ID NO: 250344 - RNA, 19 nt, Artificial Sequence
  Description of Artificial Sequence: Synthetic oligonucleotide
ucucuagaaguugacuucu

SEQ ID NO: 250345 - RNA, 19 nt, Artificial Sequence
  Description of Artificial Sequence: Synthetic oligonucleotide
aacucuauuaguacagcuu

SEQ ID NO: 250346 - RNA, 19 nt, Artificial Sequence
  Description of Artificial Sequence: Synthetic oligonucleotide
auaauauuuccaugucgau

SEQ ID NO: 250347 - RNA, 19 nt, Artificial Sequence
  Description of Artificial Sequence: Synthetic oligonucleotide
ugcgcauccugguugaauc

SEQ ID NO: 250348 - RNA, 19 nt, Artificial Sequence
  Description of Artificial Sequence: Synthetic oligonucleotide
gacugugcaacuguggauc

SEQ ID NO: 250349 - RNA, 19 nt, Artificial Sequence
  Description of Artificial Sequence: Synthetic oligonucleotide
aucguuccccacaagcgcc

SEQ ID NO: 250350 - RNA, 19 nt, Artificial Sequence
  Description of Artificial Sequence: Synthetic oligonucleotide
acuuuacagcccuuuguga

SEQ ID NO: 250351 - RNA, 19 nt, Artificial Sequence
  Description of Artificial Sequence: Synthetic oligonucleotide
aguauaguaguuacaagua

SEQ ID NO: 250352 - RNA, 19 nt, Artificial Sequence
  Description of Artificial Sequence: Synthetic oligonucleotide
aacgugcacauuaucguca

SEQ ID NO: 250353 - RNA, 19 nt, Artificial Sequence
  Description of Artificial Sequence: Synthetic oligonucleotide
uggagcuuaccgaaggaua

SEQ ID NO: 250354 - RNA, 19 nt, Artificial Sequence
  Description of Artificial Sequence: Synthetic oligonucleotide
ggauaaggaucauauccag

SEQ ID NO: 250355 - RNA, 19 nt, Artificial Sequence
  Description of Artificial Sequence: Synthetic oligonucleotide
ggucccucacuuuacagcc

SEQ ID NO: 250356 - RNA, 19 nt, Artificial Sequence
  Description of Artificial Sequence: Synthetic oligonucleotide
cagcaucuauauaauguug

SEQ ID NO: 250357 - RNA, 19 nt, Artificial Sequence
  Description of Artificial Sequence: Synthetic oligonucleotide
acgaguaguacaauuuuca

SEQ ID NO: 250358 - RNA, 19 nt, Artificial Sequence
  Description of Artificial Sequence: Synthetic oligonucleotide
aaaacgacuuuuagaccug

SEQ ID NO: 250359 - RNA, 19 nt, Artificial Sequence
  Description of Artificial Sequence: Synthetic oligonucleotide
auuucagaucgucuacgga

SEQ ID NO: 250360 - RNA, 19 nt, Artificial Sequence
  Description of Artificial Sequence: Synthetic oligonucleotide
ugcacauuaucgucaguaa

SEQ ID NO: 250361 - RNA, 19 nt, Artificial Sequence
  Description of Artificial Sequence: Synthetic oligonucleotide
aggaauucgucuuucuguu

SEQ ID NO: 250362 - RNA, 19 nt, Artificial Sequence
  Description of Artificial Sequence: Synthetic oligonucleotide
ucauacaauuucagaucgu

SEQ ID NO: 250363 - RNA, 19 nt, Artificial Sequence
  Description of Artificial Sequence: Synthetic oligonucleotide
ucucgugggcaaauaaaau

SEQ ID NO: 250364 - RNA, 19 nt, Artificial Sequence
  Description of Artificial Sequence: Synthetic oligonucleotide
agcauuacgaguaguacaa

SEQ ID NO: 250365 - RNA, 19 nt, Artificial Sequence
  Description of Artificial Sequence: Synthetic oligonucleotide
ucuccagcauuacgaguag

SEQ ID NO: 250366 - RNA, 19 nt, Artificial Sequence
  Description of Artificial Sequence: Synthetic oligonucleotide
aguuaaagugggaaucuca

SEQ ID NO: 250367 - RNA, 19 nt, Artificial Sequence
  Description of Artificial Sequence: Synthetic oligonucleotide
auggaucaccauauuuggc

SEQ ID NO: 250368 - RNA, 19 nt, Artificial Sequence
  Description of Artificial Sequence: Synthetic oligonucleotide
auacucauguacaucccag

SEQ ID NO: 250369 - RNA, 19 nt, Artificial Sequence
  Description of Artificial Sequence: Synthetic oligonucleotide
ugagugggaucaaaucgaa

SEQ ID NO: 250370 - RNA, 19 nt, Artificial Sequence
  Description of Artificial Sequence: Synthetic oligonucleotide
aucucacaaucuuuauucu

SEQ ID NO: 250371 - RNA, 19 nt, Artificial Sequence
  Description of Artificial Sequence: Synthetic oligonucleotide
uguauagagucagauugua

SEQ ID NO: 250372 - RNA, 19 nt, Artificial Sequence
  Description of Artificial Sequence: Synthetic oligonucleotide
agacauccgccgcugauca

SEQ ID NO: 250373 - RNA, 19 nt, Artificial Sequence
  Description of Artificial Sequence: Synthetic oligonucleotide
cugagugggaucaaaucga

SEQ ID NO: 250374 - RNA, 19 nt, Artificial Sequence
  Description of Artificial Sequence: Synthetic oligonucleotide
uguggucccucacuuuaca

SEQ ID NO: 250375 - RNA, 19 nt, Artificial Sequence
  Description of Artificial Sequence: Synthetic oligonucleotide
uaauguugcugcguuauuu

SEQ ID NO: 250376 - RNA, 19 nt, Artificial Sequence
  Description of Artificial Sequence: Synthetic oligonucleotide
aacaaaggcuugacuaaca

SEQ ID NO: 250377 - RNA, 19 nt, Artificial Sequence
  Description of Artificial Sequence: Synthetic oligonucleotide
uuauauggauguagauaau

SEQ ID NO: 250378 - RNA, 19 nt, Artificial Sequence
  Description of Artificial Sequence: Synthetic oligonucleotide
uuggguugcuuaguaaacu

SEQ ID NO: 250379 - RNA, 19 nt, Artificial Sequence
  Description of Artificial Sequence: Synthetic oligonucleotide
ccugguucuaccaugaaga

SEQ ID NO: 250380 - RNA, 19 nt, Artificial Sequence
  Description of Artificial Sequence: Synthetic oligonucleotide
aucugucacuccuuaaaau

SEQ ID NO: 250381 - RNA, 19 nt, Artificial Sequence
  Description of Artificial Sequence: Synthetic oligonucleotide
agagucagauuguaauaaa

SEQ ID NO: 250382 - RNA, 19 nt, Artificial Sequence
  Description of Artificial Sequence: Synthetic oligonucleotide
uucagugaccucagaucca

SEQ ID NO: 250383 - RNA, 19 nt, Artificial Sequence
  Description of Artificial Sequence: Synthetic oligonucleotide
guauucuaguagcuggaca

SEQ ID NO: 250384 - RNA, 19 nt, Artificial Sequence
  Description of Artificial Sequence: Synthetic oligonucleotide
caguaguucaguccccuug

SEQ ID NO: 250385 - RNA, 19 nt, Artificial Sequence
  Description of Artificial Sequence: Synthetic oligonucleotide
auaaugacugcuguuucaa

SEQ ID NO: 250386 - RNA, 19 nt, Artificial Sequence
  Description of Artificial Sequence: Synthetic oligonucleotide
ugauacugacaaugugaga

SEQ ID NO: 250387 - RNA, 19 nt, Artificial Sequence
  Description of Artificial Sequence: Synthetic oligonucleotide
agcccagagucacuaacug

SEQ ID NO: 250388 - RNA, 19 nt, Artificial Sequence
  Description of Artificial Sequence: Synthetic oligonucleotide
acgaaaggagacauaucuc

SEQ ID NO: 250389 - RNA, 19 nt, Artificial Sequence
  Description of Artificial Sequence: Synthetic oligonucleotide
aguaacuugaaaagaugaa

SEQ ID NO: 250390 - RNA, 19 nt, Artificial Sequence
  Description of Artificial Sequence: Synthetic oligonucleotide
gaugcaaggaauucgucuu

SEQ ID NO: 250391 - RNA, 19 nt, Artificial Sequence
  Description of Artificial Sequence: Synthetic oligonucleotide
cagcauuacgaguaguaca

SEQ ID NO: 250392 - RNA, 19 nt, Artificial Sequence
  Description of Artificial Sequence: Synthetic oligonucleotide
cauacauggaucaccauau

SEQ ID NO: 250393 - RNA, 19 nt, Artificial Sequence
  Description of Artificial Sequence: Synthetic oligonucleotide
caacgugcacauuaucguc

SEQ ID NO: 250394 - RNA, 19 nt, Artificial Sequence
  Description of Artificial Sequence: Synthetic oligonucleotide
aguugaucguuccccacaa

SEQ ID NO: 250395 - RNA, 19 nt, Artificial Sequence
  Description of Artificial Sequence: Synthetic oligonucleotide
uccuuaaaauucacaccau

SEQ ID NO: 250396 - RNA, 19 nt, Artificial Sequence
  Description of Artificial Sequence: Synthetic oligonucleotide
uuauuucgagaaucuggau

SEQ ID NO: 250397 - RNA, 19 nt, Artificial Sequence
  Description of Artificial Sequence: Synthetic oligonucleotide
ucacguacucagcaucaaa

SEQ ID NO: 250398 - RNA, 19 nt, Artificial Sequence
  Description of Artificial Sequence: Synthetic oligonucleotide
ugugcuuguguagaucguc

SEQ ID NO: 250399 - RNA, 19 nt, Artificial Sequence
  Description of Artificial Sequence: Synthetic oligonucleotide
cuugaucaugaagaauaac

SEQ ID NO: 250400 - RNA, 19 nt, Artificial Sequence
  Description of Artificial Sequence: Synthetic oligonucleotide
uuguguagaucguccagua

SEQ ID NO: 250401 - RNA, 19 nt, Artificial Sequence
  Description of Artificial Sequence: Synthetic oligonucleotide
uagaucguccaguauucua

SEQ ID NO: 250402 - RNA, 19 nt, Artificial Sequence
  Description of Artificial Sequence: Synthetic oligonucleotide
guaguucaguccccuuggg

SEQ ID NO: 250403 - RNA, 19 nt, Artificial Sequence
  Description of Artificial Sequence: Synthetic oligonucleotide
uggaagcuauaaaacugua

SEQ ID NO: 250404 - RNA, 19 nt, Artificial Sequence
  Description of Artificial Sequence: Synthetic oligonucleotide
agaucucgugggcaaauaa

SEQ ID NO: 250405 - RNA, 19 nt, Artificial Sequence
  Description of Artificial Sequence: Synthetic oligonucleotide
cuugaaaagaugaauccuu

SEQ ID NO: 250406 - RNA, 19 nt, Artificial Sequence
  Description of Artificial Sequence: Synthetic oligonucleotide
uguguagaucguccaguau

SEQ ID NO: 250407 - RNA, 19 nt, Artificial Sequence
  Description of Artificial Sequence: Synthetic oligonucleotide
uggguugcuuaguaaacuu

SEQ ID NO: 250408 - RNA, 19 nt, Artificial Sequence
  Description of Artificial Sequence: Synthetic oligonucleotide
aaaguacuuggcagaagaa

SEQ ID NO: 250409 - RNA, 19 nt, Artificial Sequence
  Description of Artificial Sequence: Synthetic oligonucleotide
ucacccaaucucaucuuua

SEQ ID NO: 250410 - RNA, 19 nt, Artificial Sequence
  Description of Artificial Sequence: Synthetic oligonucleotide
ucuacggaguuguugccuu

SEQ ID NO: 250411 - RNA, 19 nt, Artificial Sequence
  Description of Artificial Sequence: Synthetic oligonucleotide
aucgucuacggaguuguug

SEQ ID NO: 250412 - RNA, 19 nt, Artificial Sequence
  Description of Artificial Sequence: Synthetic oligonucleotide
uuucagacauccgccgcug

SEQ ID NO: 250413 - RNA, 19 nt, Artificial Sequence
  Description of Artificial Sequence: Synthetic oligonucleotide
cugcguuauuucgagaauc

SEQ ID NO: 250414 - RNA, 19 nt, Artificial Sequence
  Description of Artificial Sequence: Synthetic oligonucleotide
ugucaacaggugagcuucc

SEQ ID NO: 250415 - RNA, 19 nt, Artificial Sequence
  Description of Artificial Sequence: Synthetic oligonucleotide
aucucgugggcaaauaaaa

SEQ ID NO: 250416 - RNA, 19 nt, Artificial Sequence
  Description of Artificial Sequence: Synthetic oligonucleotide
cacaguaacuugaaaagau

SEQ ID NO: 250417 - RNA, 19 nt, Artificial Sequence
  Description of Artificial Sequence: Synthetic oligonucleotide
uugaacaagucagccaguu

SEQ ID NO: 250418 - RNA, 19 nt, Artificial Sequence
  Description of Artificial Sequence: Synthetic oligonucleotide
auucacguacucagcauca

SEQ ID NO: 250419 - RNA, 19 nt, Artificial Sequence
  Description of Artificial Sequence: Synthetic oligonucleotide
uuuaugcaggacgcccuug

SEQ ID NO: 250420 - RNA, 19 nt, Artificial Sequence
  Description of Artificial Sequence: Synthetic oligonucleotide
uggauccugguucuaccau

SEQ ID NO: 250421 - RNA, 19 nt, Artificial Sequence
  Description of Artificial Sequence: Synthetic oligonucleotide
agggguuauacugguuguc

SEQ ID NO: 250422 - RNA, 19 nt, Artificial Sequence
  Description of Artificial Sequence: Synthetic oligonucleotide
aggcaucccacuuauucuu

SEQ ID NO: 250423 - RNA, 19 nt, Artificial Sequence
  Description of Artificial Sequence: Synthetic oligonucleotide
ugaacuuauugugguggaa

SEQ ID NO: 250424 - RNA, 19 nt, Artificial Sequence
  Description of Artificial Sequence: Synthetic oligonucleotide
agcauugagcuccccaguu

SEQ ID NO: 250425 - RNA, 19 nt, Artificial Sequence
  Description of Artificial Sequence: Synthetic oligonucleotide
caucacaaugaacugaaau

SEQ ID NO: 250426 - RNA, 19 nt, Artificial Sequence
  Description of Artificial Sequence: Synthetic oligonucleotide
gaucucgugggcaaauaaa

SEQ ID NO: 250427 - RNA, 19 nt, Artificial Sequence
  Description of Artificial Sequence: Synthetic oligonucleotide
agacugugcaacuguggau

SEQ ID NO: 250428 - RNA, 19 nt, Artificial Sequence
  Description of Artificial Sequence: Synthetic oligonucleotide
ccaaaacgacuuuuagacc

SEQ ID NO: 250429 - RNA, 19 nt, Artificial Sequence
  Description of Artificial Sequence: Synthetic oligonucleotide
ugacuaacacugugcuuuc

SEQ ID NO: 250430 - RNA, 19 nt, Artificial Sequence
  Description of Artificial Sequence: Synthetic oligonucleotide
gagaaucuggauucacgua

SEQ ID NO: 250431 - RNA, 19 nt, Artificial Sequence
  Description of Artificial Sequence: Synthetic oligonucleotide
acgcccuuggccaaaacga

SEQ ID NO: 250432 - RNA, 19 nt, Artificial Sequence
  Description of Artificial Sequence: Synthetic oligonucleotide
gugaacuuauuguggugga

SEQ ID NO: 250433 - RNA, 19 nt, Artificial Sequence
  Description of Artificial Sequence: Synthetic oligonucleotide
auaucauauuccaggcccu

SEQ ID NO: 250434 - RNA, 19 nt, Artificial Sequence
  Description of Artificial Sequence: Synthetic oligonucleotide
cuuuauuagaugcccugua

SEQ ID NO: 250435 - RNA, 19 nt, Artificial Sequence
  Description of Artificial Sequence: Synthetic oligonucleotide
uucgagaaucuggauucac

SEQ ID NO: 250436 - RNA, 19 nt, Artificial Sequence
  Description of Artificial Sequence: Synthetic oligonucleotide
uuaagggguuauacugguu

SEQ ID NO: 250437 - RNA, 19 nt, Artificial Sequence
  Description of Artificial Sequence: Synthetic oligonucleotide
ugcaacuguggauccuggu

SEQ ID NO: 250438 - RNA, 19 nt, Artificial Sequence
  Description of Artificial Sequence: Synthetic oligonucleotide
guuaaccaggcacaagccu

SEQ ID NO: 250439 - RNA, 19 nt, Artificial Sequence
  Description of Artificial Sequence: Synthetic oligonucleotide
aucgaagaaccuucugguu

SEQ ID NO: 250440 - RNA, 19 nt, Artificial Sequence
  Description of Artificial Sequence: Synthetic oligonucleotide
ugcaaggaauucgucuuuc

SEQ ID NO: 250441 - RNA, 19 nt, Artificial Sequence
  Description of Artificial Sequence: Synthetic oligonucleotide
cacgcucacaacgaaagga

SEQ ID NO: 250442 - RNA, 19 nt, Artificial Sequence
  Description of Artificial Sequence: Synthetic oligonucleotide
uuucgagaaucuggauuca

SEQ ID NO: 250443 - RNA, 19 nt, Artificial Sequence
  Description of Artificial Sequence: Synthetic oligonucleotide
cagaucacccaaucucauc

SEQ ID NO: 250444 - RNA, 19 nt, Artificial Sequence
  Description of Artificial Sequence: Synthetic oligonucleotide
gagugggaucaaaucgaag

SEQ ID NO: 250445 - RNA, 19 nt, Artificial Sequence
  Description of Artificial Sequence: Synthetic oligonucleotide
guguagaucguccaguauu

SEQ ID NO: 250446 - RNA, 19 nt, Artificial Sequence
  Description of Artificial Sequence: Synthetic oligonucleotide
ucugagugauacugacaau

SEQ ID NO: 250447 - RNA, 19 nt, Artificial Sequence
  Description of Artificial Sequence: Synthetic oligonucleotide
uggauacccacgacucauc

SEQ ID NO: 250448 - RNA, 19 nt, Artificial Sequence
  Description of Artificial Sequence: Synthetic oligonucleotide
gaacuuauugugguggaau

SEQ ID NO: 250449 - RNA, 19 nt, Artificial Sequence
  Description of Artificial Sequence: Synthetic oligonucleotide
acggaguuguugccuucuc

SEQ ID NO: 250450 - RNA, 19 nt, Artificial Sequence
  Description of Artificial Sequence: Synthetic oligonucleotide
agccuagaauaaauaccuc

SEQ ID NO: 250451 - RNA, 19 nt, Artificial Sequence
  Description of Artificial Sequence: Synthetic oligonucleotide
ucagaucgucuacggaguu

SEQ ID NO: 250452 - RNA, 19 nt, Artificial Sequence
  Description of Artificial Sequence: Synthetic oligonucleotide
caacaugauacuggaauaa

SEQ ID NO: 250453 - RNA, 19 nt, Artificial Sequence
  Description of Artificial Sequence: Synthetic oligonucleotide
cauguggucccucacuuua

SEQ ID NO: 250454 - RNA, 19 nt, Artificial Sequence
  Description of Artificial Sequence: Synthetic oligonucleotide
guacucagcaucaaauagu

SEQ ID NO: 250455 - RNA, 19 nt, Artificial Sequence
  Description of Artificial Sequence: Synthetic oligonucleotide
ccuugaaacucuauuagua

SEQ ID NO: 250456 - RNA, 19 nt, Artificial Sequence
  Description of Artificial Sequence: Synthetic oligonucleotide
ggaugcaaggaauucgucu

SEQ ID NO: 250457 - RNA, 19 nt, Artificial Sequence
  Description of Artificial Sequence: Synthetic oligonucleotide
auaauguugcugcguuauu

SEQ ID NO: 250458 - RNA, 19 nt, Artificial Sequence
  Description of Artificial Sequence: Synthetic oligonucleotide
ggcuugacuaacacugugc

SEQ ID NO: 250459 - RNA, 19 nt, Artificial Sequence
  Description of Artificial Sequence: Synthetic oligonucleotide
gagcuuaccgaaggauaug

SEQ ID NO: 250460 - RNA, 19 nt, Artificial Sequence
  Description of Artificial Sequence: Synthetic oligonucleotide
ugacuugacucgguccaga

SEQ ID NO: 250461 - RNA, 19 nt, Artificial Sequence
  Description of Artificial Sequence: Synthetic oligonucleotide
guggauccugguucuacca

SEQ ID NO: 250462 - RNA, 19 nt, Artificial Sequence
  Description of Artificial Sequence: Synthetic oligonucleotide
guaccauuugguuauuauu

SEQ ID NO: 250463 - RNA, 19 nt, Artificial Sequence
  Description of Artificial Sequence: Synthetic oligonucleotide
caaauagucuuucaaucuu

SEQ ID NO: 250464 - RNA, 19 nt, Artificial Sequence
  Description of Artificial Sequence: Synthetic oligonucleotide
ugaauccuucuggaucaac

SEQ ID NO: 250465 - RNA, 19 nt, Artificial Sequence
  Description of Artificial Sequence: Synthetic oligonucleotide
cuuuugagaacagggugaa

SEQ ID NO: 250466 - RNA, 19 nt, Artificial Sequence
  Description of Artificial Sequence: Synthetic oligonucleotide
cccacgacucaucuuuugg

SEQ ID NO: 250467 - RNA, 19 nt, Artificial Sequence
  Description of Artificial Sequence: Synthetic oligonucleotide
ccgauaccaaaagaucucg

SEQ ID NO: 250468 - RNA, 19 nt, Artificial Sequence
  Description of Artificial Sequence: Synthetic oligonucleotide
caguugaucguuccccaca

SEQ ID NO: 250469 - RNA, 19 nt, Artificial Sequence
  Description of Artificial Sequence: Synthetic oligonucleotide
acccacgacucaucuuuug

SEQ ID NO: 250470 - RNA, 19 nt, Artificial Sequence
  Description of Artificial Sequence: Synthetic oligonucleotide
aguacagcuuccagaucug

SEQ ID NO: 250471 - RNA, 19 nt, Artificial Sequence
  Description of Artificial Sequence: Synthetic oligonucleotide
augucgauccacauugauu

SEQ ID NO: 250472 - RNA, 19 nt, Artificial Sequence
  Description of Artificial Sequence: Synthetic oligonucleotide
cuucaucacauacauggau

SEQ ID NO: 250473 - RNA, 19 nt, Artificial Sequence
  Description of Artificial Sequence: Synthetic oligonucleotide
cacguacucagcaucaaau

SEQ ID NO: 250474 - RNA, 19 nt, Artificial Sequence
  Description of Artificial Sequence: Synthetic oligonucleotide
gaucguccaguauucuagu

SEQ ID NO: 250475 - RNA, 19 nt, Artificial Sequence
  Description of Artificial Sequence: Synthetic oligonucleotide
guauagagucagauuguaa

SEQ ID NO: 250476 - RNA, 19 nt, Artificial Sequence
  Description of Artificial Sequence: Synthetic oligonucleotide
auacauggaucaccauauu

SEQ ID NO: 250477 - RNA, 19 nt, Artificial Sequence
  Description of Artificial Sequence: Synthetic oligonucleotide
uaucauauuccaggcccuu

SEQ ID NO: 250478 - RNA, 19 nt, Artificial Sequence
  Description of Artificial Sequence: Synthetic oligonucleotide
cauuacgaguaguacaauu

SEQ ID NO: 250479 - RNA, 19 nt, Artificial Sequence
  Description of Artificial Sequence: Synthetic oligonucleotide
cuguggauccugguucuac

SEQ ID NO: 250480 - RNA, 19 nt, Artificial Sequence
  Description of Artificial Sequence: Synthetic oligonucleotide
aagaucucgugggcaaaua

SEQ ID NO: 250481 - RNA, 19 nt, Artificial Sequence
  Description of Artificial Sequence: Synthetic oligonucleotide
gacuugugcuucaagccua

SEQ ID NO: 250482 - RNA, 19 nt, Artificial Sequence
  Description of Artificial Sequence: Synthetic oligonucleotide
guaaguggcuaaagacuca

SEQ ID NO: 250483 - RNA, 19 nt, Artificial Sequence
  Description of Artificial Sequence: Synthetic oligonucleotide
cuguauagagucagauugu

SEQ ID NO: 250484 - RNA, 19 nt, Artificial Sequence
  Description of Artificial Sequence: Synthetic oligonucleotide
guaacaccuugaacaaguc

SEQ ID NO: 250485 - RNA, 19 nt, Artificial Sequence
  Description of Artificial Sequence: Synthetic oligonucleotide
gaaucuggauucacguacu

SEQ ID NO: 250486 - RNA, 19 nt, Artificial Sequence
  Description of Artificial Sequence: Synthetic oligonucleotide
aucguccaguauucuagua

SEQ ID NO: 250487 - RNA, 19 nt, Artificial Sequence
  Description of Artificial Sequence: Synthetic oligonucleotide
uucacguacucagcaucaa

SEQ ID NO: 250488 - RNA, 19 nt, Artificial Sequence
  Description of Artificial Sequence: Synthetic oligonucleotide
ucaguaguucaguccccuu

SEQ ID NO: 250489 - RNA, 19 nt, Artificial Sequence
  Description of Artificial Sequence: Synthetic oligonucleotide
cgaguaguacaauuuucac

SEQ ID NO: 250490 - RNA, 19 nt, Artificial Sequence
  Description of Artificial Sequence: Synthetic oligonucleotide
gcacauuaucgucaguaaa

SEQ ID NO: 250491 - RNA, 19 nt, Artificial Sequence
  Description of Artificial Sequence: Synthetic oligonucleotide
gcuugacuaacacugugcu

SEQ ID NO: 250492 - RNA, 19 nt, Artificial Sequence
  Description of Artificial Sequence: Synthetic oligonucleotide
cagacauccgccgcugauc

SEQ ID NO: 250493 - RNA, 19 nt, Artificial Sequence
  Description of Artificial Sequence: Synthetic oligonucleotide
cagaucgucuacggaguug

SEQ ID NO: 250494 - RNA, 19 nt, Artificial Sequence
  Description of Artificial Sequence: Synthetic oligonucleotide
gcacgcucacaacgaaagg

SEQ ID NO: 250495 - RNA, 19 nt, Artificial Sequence
  Description of Artificial Sequence: Synthetic oligonucleotide
ucgguccagaucacccaau

SEQ ID NO: 250496 - RNA, 19 nt, Artificial Sequence
  Description of Artificial Sequence: Synthetic oligonucleotide
cugaggaauuccaauuaau

SEQ ID NO: 250497 - RNA, 19 nt, Artificial Sequence
  Description of Artificial Sequence: Synthetic oligonucleotide
cgccaauauacaucucucc

SEQ ID NO: 250498 - RNA, 19 nt, Artificial Sequence
  Description of Artificial Sequence: Synthetic oligonucleotide
gccauuaagggguuauacu

SEQ ID NO: 250499 - RNA, 19 nt, Artificial Sequence
  Description of Artificial Sequence: Synthetic oligonucleotide
gaagcaacgugcacauuau

SEQ ID NO: 250500 - RNA, 19 nt, Artificial Sequence
  Description of Artificial Sequence: Synthetic oligonucleotide
cuucccagcgcugggcauc

SEQ ID NO: 250501 - RNA, 19 nt, Artificial Sequence
  Description of Artificial Sequence: Synthetic oligonucleotide
uugcgcauccugguugaau

SEQ ID NO: 250502 - RNA, 19 nt, Artificial Sequence
  Description of Artificial Sequence: Synthetic oligonucleotide
ggguuauacugguugucaa

SEQ ID NO: 250503 - RNA, 19 nt, Artificial Sequence
  Description of Artificial Sequence: Synthetic oligonucleotide
gugcuuuaugcaggacgcc

SEQ ID NO: 250504 - RNA, 19 nt, Artificial Sequence
  Description of Artificial Sequence: Synthetic oligonucleotide
uacccacgacucaucuuuu

SEQ ID NO: 250505 - RNA, 19 nt, Artificial Sequence
  Description of Artificial Sequence: Synthetic oligonucleotide
ggagaagcaacgugcacau

SEQ ID NO: 250506 - RNA, 19 nt, Artificial Sequence
  Description of Artificial Sequence: Synthetic oligonucleotide
cuuacacaaacagcaucua

SEQ ID NO: 250507 - RNA, 19 nt, Artificial Sequence
  Description of Artificial Sequence: Synthetic oligonucleotide
cagauccagugguguacuc

SEQ ID NO: 250508 - RNA, 19 nt, Artificial Sequence
  Description of Artificial Sequence: Synthetic oligonucleotide
gccuguccauguaucacag

SEQ ID NO: 250509 - RNA, 19 nt, Artificial Sequence
  Description of Artificial Sequence: Synthetic oligonucleotide
cauugagcuccccaguuuu

SEQ ID NO: 250510 - RNA, 19 nt, Artificial Sequence
  Description of Artificial Sequence: Synthetic oligonucleotide
ccagccgccauuaaggggu

SEQ ID NO: 250511 - RNA, 19 nt, Artificial Sequence
  Description of Artificial Sequence: Synthetic oligonucleotide
cgucaguaaaauccaaaga

SEQ ID NO: 250512 - RNA, 19 nt, Artificial Sequence
  Description of Artificial Sequence: Synthetic oligonucleotide
gacuugacucgguccagau

SEQ ID NO: 250513 - RNA, 19 nt, Artificial Sequence
  Description of Artificial Sequence: Synthetic oligonucleotide
gauacccacgacucaucuu

SEQ ID NO: 250514 - RNA, 19 nt, Artificial Sequence
  Description of Artificial Sequence: Synthetic oligonucleotide
cccagccgccauuaagggg

SEQ ID NO: 250515 - RNA, 19 nt, Artificial Sequence
  Description of Artificial Sequence: Synthetic oligonucleotide
gccugguaacaccuugaac

SEQ ID NO: 250516 - RNA, 19 nt, Artificial Sequence
  Description of Artificial Sequence: Synthetic oligonucleotide
gcguuauuucgagaaucug

SEQ ID NO: 250517 - RNA, 19 nt, Artificial Sequence
  Description of Artificial Sequence: Synthetic oligonucleotide
cacaagcgccaauauacau

SEQ ID NO: 250518 - RNA, 19 nt, Artificial Sequence
  Description of Artificial Sequence: Synthetic oligonucleotide
ccagguuuuaucucuuaua

SEQ ID NO: 250519 - RNA, 19 nt, Artificial Sequence
  Description of Artificial Sequence: Synthetic oligonucleotide
gcuuucuacacaguaacuu

SEQ ID NO: 250520 - RNA, 19 nt, Artificial Sequence
  Description of Artificial Sequence: Synthetic oligonucleotide
ccacgacucaucuuuugga

SEQ ID NO: 250521 - RNA, 19 nt, Artificial Sequence
  Description of Artificial Sequence: Synthetic oligonucleotide
agucagccaguugaucguu

SEQ ID NO: 250522 - RNA, 19 nt, Artificial Sequence
  Description of Artificial Sequence: Synthetic oligonucleotide
ccccagccgccauuaaggg

SEQ ID NO: 250523 - RNA, 19 nt, Artificial Sequence
  Description of Artificial Sequence: Synthetic oligonucleotide
uugaggcaucccacuuauu

SEQ ID NO: 250524 - RNA, 19 nt, Artificial Sequence
  Description of Artificial Sequence: Synthetic oligonucleotide
guugacuucuccggugccu

SEQ ID NO: 250525 - RNA, 19 nt, Artificial Sequence
  Description of Artificial Sequence: Synthetic oligonucleotide
ggauacccacgacucaucu

SEQ ID NO: 250526 - RNA, 19 nt, Artificial Sequence
  Description of Artificial Sequence: Synthetic oligonucleotide
acaagccuugccacaguuu

SEQ ID NO: 250527 - RNA, 19 nt, Artificial Sequence
  Description of Artificial Sequence: Synthetic oligonucleotide
accgaaggauaugcacagu

SEQ ID NO: 250528 - RNA, 19 nt, Artificial Sequence
  Description of Artificial Sequence: Synthetic oligonucleotide
ccaguugaucguuccccac

SEQ ID NO: 250529 - RNA, 19 nt, Artificial Sequence
  Description of Artificial Sequence: Synthetic oligonucleotide
cuugacuaacacugugcuu

SEQ ID NO: 250530 - RNA, 19 nt, Artificial Sequence
  Description of Artificial Sequence: Synthetic oligonucleotide
ccgaaggauaugcacagua

SEQ ID NO: 250531 - RNA, 19 nt, Artificial Sequence
  Description of Artificial Sequence: Synthetic oligonucleotide
ggagcuuaccgaaggauau

SEQ ID NO: 250532 - RNA, 19 nt, Artificial Sequence
  Description of Artificial Sequence: Synthetic oligonucleotide
guaguacaauuuucacuuu

SEQ ID NO: 250533 - RNA, 19 nt, Artificial Sequence
  Description of Artificial Sequence: Synthetic oligonucleotide
gcgccaauauacaucucuc

SEQ ID NO: 250534 - RNA, 19 nt, Artificial Sequence
  Description of Artificial Sequence: Synthetic oligonucleotide
uuugcgcauccugguugaa

SEQ ID NO: 250535 - RNA, 19 nt, Artificial Sequence
  Description of Artificial Sequence: Synthetic oligonucleotide
gucuacggaguuguugccu

SEQ ID NO: 250536 - RNA, 19 nt, Artificial Sequence
  Description of Artificial Sequence: Synthetic oligonucleotide
ccacaagcgccaauauaca

SEQ ID NO: 250537 - RNA, 19 nt, Artificial Sequence
  Description of Artificial Sequence: Synthetic oligonucleotide
cuggauacccacgacucau

SEQ ID NO: 250538 - RNA, 19 nt, Artificial Sequence
  Description of Artificial Sequence: Synthetic oligonucleotide
ggauucacguacucagcau

SEQ ID NO: 250539 - RNA, 19 nt, Artificial Sequence
  Description of Artificial Sequence: Synthetic oligonucleotide
guccaguauucuaguagcu

SEQ ID NO: 250540 - RNA, 19 nt, Artificial Sequence
  Description of Artificial Sequence: Synthetic oligonucleotide
cccuguaauuucagacauc

SEQ ID NO: 250541 - RNA, 19 nt, Artificial Sequence
  Description of Artificial Sequence: Synthetic oligonucleotide
guagaucguccaguauucu

SEQ ID NO: 250542 - RNA, 19 nt, Artificial Sequence
  Description of Artificial Sequence: Synthetic oligonucleotide
gguugucaacaggugagcu

SEQ ID NO: 250543 - RNA, 19 nt, Artificial Sequence
  Description of Artificial Sequence: Synthetic oligonucleotide
gcuuaccgaaggauaugca

SEQ ID NO: 250544 - RNA, 19 nt, Artificial Sequence
  Description of Artificial Sequence: Synthetic oligonucleotide
cuuuaugcaggacgcccuu

SEQ ID NO: 250545 - RNA, 19 nt, Artificial Sequence
  Description of Artificial Sequence: Synthetic oligonucleotide
cgucuacggaguuguugcc

SEQ ID NO: 250546 - RNA, 19 nt, Artificial Sequence
  Description of Artificial Sequence: Synthetic oligonucleotide
gggaugcaaggaauucguc

SEQ ID NO: 250547 - RNA, 19 nt, Artificial Sequence
  Description of Artificial Sequence: Synthetic oligonucleotide
cugugcuuguguagaucgu

SEQ ID NO: 250548 - RNA, 19 nt, Artificial Sequence
  Description of Artificial Sequence: Synthetic oligonucleotide
gcuuuaugcaggacgcccu

SEQ ID NO: 250549 - RNA, 19 nt, Artificial Sequence
  Description of Artificial Sequence: Synthetic oligonucleotide
gcgcugggcauccauagau

SEQ ID NO: 250550 - RNA, 19 nt, Artificial Sequence
  Description of Artificial Sequence: Synthetic oligonucleotide
acuguggauccugguucua

SEQ ID NO: 250551 - RNA, 19 nt, Artificial Sequence
  Description of Artificial Sequence: Synthetic oligonucleotide
gcugcguuauuucgagaau

SEQ ID NO: 250552 - RNA, 19 nt, Artificial Sequence
  Description of Artificial Sequence: Synthetic oligonucleotide
cucuuugcgcauccugguu

SEQ ID NO: 250553 - RNA, 19 nt, Artificial Sequence
  Description of Artificial Sequence: Synthetic oligonucleotide
cuucuccggugccuuuucu

SEQ ID NO: 250554 - RNA, 19 nt, Artificial Sequence
  Description of Artificial Sequence: Synthetic oligonucleotide
gacauccgccgcugaucau

SEQ ID NO: 250555 - RNA, 19 nt, Artificial Sequence
  Description of Artificial Sequence: Synthetic oligonucleotide
gcgcauccugguugaaucu

SEQ ID NO: 250556 - RNA, 19 nt, Artificial Sequence
  Description of Artificial Sequence: Synthetic oligonucleotide
ggacgcccuuggccaaaac

SEQ ID NO: 250557 - RNA, 19 nt, Artificial Sequence
  Description of Artificial Sequence: Synthetic oligonucleotide
cuccagcauuacgaguagu

SEQ ID NO: 250558 - RNA, 19 nt, Artificial Sequence
  Description of Artificial Sequence: Synthetic oligonucleotide
cgauaccaaaagaucucgu

SEQ ID NO: 250559 - RNA, 19 nt, Artificial Sequence
  Description of Artificial Sequence: Synthetic oligonucleotide
gcccuuggccaaaacgacu

SEQ ID NO: 250560 - RNA, 19 nt, Artificial Sequence
  Description of Artificial Sequence: Synthetic oligonucleotide
gccgccauuaagggguuau

SEQ ID NO: 250561 - RNA, 19 nt, Artificial Sequence
  Description of Artificial Sequence: Synthetic oligonucleotide
cagcucagucaaaccuuuu

SEQ ID NO: 250562 - RNA, 19 nt, Artificial Sequence
  Description of Artificial Sequence: Synthetic oligonucleotide
gcauuacgaguaguacaau

SEQ ID NO: 250563 - RNA, 19 nt, Artificial Sequence
  Description of Artificial Sequence: Synthetic oligonucleotide
agccgccauuaagggguua

SEQ ID NO: 250564 - RNA, 19 nt, Artificial Sequence
  Description of Artificial Sequence: Synthetic oligonucleotide
cgcugggcauccauagaua

SEQ ID NO: 250565 - RNA, 19 nt, Artificial Sequence
  Description of Artificial Sequence: Synthetic oligonucleotide
ccucaccuugaaacucuau

SEQ ID NO: 250566 - RNA, 19 nt, Artificial Sequence
  Description of Artificial Sequence: Synthetic oligonucleotide
ccgccauuaagggguuaua

SEQ ID NO: 250567 - RNA, 19 nt, Artificial Sequence
  Description of Artificial Sequence: Synthetic oligonucleotide
ccuuggccaaaacgacuuu

SEQ ID NO: 250568 - RNA, 19 nt, Artificial Sequence
  Description of Artificial Sequence: Synthetic oligonucleotide
uauaauauuauauagagcg

SEQ ID NO: 250569 - RNA, 19 nt, Artificial Sequence
  Description of Artificial Sequence: Synthetic oligonucleotide
aauacccguguauauaugc

SEQ ID NO: 250570 - RNA, 19 nt, Artificial Sequence
  Description of Artificial Sequence: Synthetic oligonucleotide
agagcgauauauuuaauac

SEQ ID NO: 250571 - RNA, 19 nt, Artificial Sequence
  Description of Artificial Sequence: Synthetic oligonucleotide
auaauaguauauuuggguc

SEQ ID NO: 250572 - RNA, 19 nt, Artificial Sequence
  Description of Artificial Sequence: Synthetic oligonucleotide
auauaugcaucacaggggc

SEQ ID NO: 250573 - RNA, 19 nt, Artificial Sequence
  Description of Artificial Sequence: Synthetic oligonucleotide
aucccuuggacacagaagc

SEQ ID NO: 250574 - RNA, 19 nt, Artificial Sequence
  Description of Artificial Sequence: Synthetic oligonucleotide
uauauaugcaucacagggg

SEQ ID NO: 250575 - RNA, 19 nt, Artificial Sequence
  Description of Artificial Sequence: Synthetic oligonucleotide
ugaucuuaauauuaccugg

SEQ ID NO: 250576 - RNA, 19 nt, Artificial Sequence
  Description of Artificial Sequence: Synthetic oligonucleotide
agcgauauauuuaauaccc

SEQ ID NO: 250577 - RNA, 19 nt, Artificial Sequence
  Description of Artificial Sequence: Synthetic oligonucleotide
uguuauuaaaacaucuaca

SEQ ID NO: 250578 - RNA, 19 nt, Artificial Sequence
  Description of Artificial Sequence: Synthetic oligonucleotide
acaggggcaacauauauac

SEQ ID NO: 250579 - RNA, 19 nt, Artificial Sequence
  Description of Artificial Sequence: Synthetic oligonucleotide
uuggauaccacacacauau

SEQ ID NO: 250580 - RNA, 19 nt, Artificial Sequence
  Description of Artificial Sequence: Synthetic oligonucleotide
guaucaucgacuuucacag

SEQ ID NO: 250581 - RNA, 19 nt, Artificial Sequence
  Description of Artificial Sequence: Synthetic oligonucleotide
aggggcaacauauauacac

SEQ ID NO: 250582 - RNA, 19 nt, Artificial Sequence
  Description of Artificial Sequence: Synthetic oligonucleotide
aucaucgacuuucacagcc

SEQ ID NO: 250583 - RNA, 19 nt, Artificial Sequence
  Description of Artificial Sequence: Synthetic oligonucleotide
uucacgucuacaauagugg

SEQ ID NO: 250584 - RNA, 19 nt, Artificial Sequence
  Description of Artificial Sequence: Synthetic oligonucleotide
acaaguaucaucgacuuuc

SEQ ID NO: 250585 - RNA, 19 nt, Artificial Sequence
  Description of Artificial Sequence: Synthetic oligonucleotide
aaacaucuacauuauuauc

SEQ ID NO: 250586 - RNA, 19 nt, Artificial Sequence
  Description of Artificial Sequence: Synthetic oligonucleotide
cagauuaucaucuaccuuc

SEQ ID NO: 250587 - RNA, 19 nt, Artificial Sequence
  Description of Artificial Sequence: Synthetic oligonucleotide
auauuuuaagcuaaugagg

SEQ ID NO: 250588 - RNA, 19 nt, Artificial Sequence
  Description of Artificial Sequence: Synthetic oligonucleotide
ugaacgaugucuucguggg

SEQ ID NO: 250589 - RNA, 19 nt, Artificial Sequence
  Description of Artificial Sequence: Synthetic oligonucleotide
uaucauuaugccaucaaac

SEQ ID NO: 250590 - RNA, 19 nt, Artificial Sequence
  Description of Artificial Sequence: Synthetic oligonucleotide
uuuggacaucaccagaagg

SEQ ID NO: 250591 - RNA, 19 nt, Artificial Sequence
  Description of Artificial Sequence: Synthetic oligonucleotide
aagauacuagaccuuauga

SEQ ID NO: 250592 - RNA, 19 nt, Artificial Sequence
  Description of Artificial Sequence: Synthetic oligonucleotide
aaguaaccaguauaguguc

SEQ ID NO: 250593 - RNA, 19 nt, Artificial Sequence
  Description of Artificial Sequence: Synthetic oligonucleotide
gaagagaucccuuggauac

SEQ ID NO: 250594 - RNA, 19 nt, Artificial Sequence
  Description of Artificial Sequence: Synthetic oligonucleotide
ggaaguuucgaauggaugg

SEQ ID NO: 250595 - RNA, 19 nt, Artificial Sequence
  Description of Artificial Sequence: Synthetic oligonucleotide
cauagugcuaacaagacca

SEQ ID NO: 250596 - RNA, 19 nt, Artificial Sequence
  Description of Artificial Sequence: Synthetic oligonucleotide
ucucacuauauuuuaagcu

SEQ ID NO: 250597 - RNA, 19 nt, Artificial Sequence
  Description of Artificial Sequence: Synthetic oligonucleotide
gaagcaucguccuugcggg

SEQ ID NO: 250598 - RNA, 19 nt, Artificial Sequence
  Description of Artificial Sequence: Synthetic oligonucleotide
uagcaaguaaccaguauag

SEQ ID NO: 250599 - RNA, 19 nt, Artificial Sequence
  Description of Artificial Sequence: Synthetic oligonucleotide
aguauagugucuccaacuc

SEQ ID NO: 250600 - RNA, 19 nt, Artificial Sequence
  Description of Artificial Sequence: Synthetic oligonucleotide
acuuaccccaccaacaucc

SEQ ID NO: 250601 - RNA, 19 nt, Artificial Sequence
  Description of Artificial Sequence: Synthetic oligonucleotide
aacacuagcaacccuggcu

SEQ ID NO: 250602 - RNA, 19 nt, Artificial Sequence
  Description of Artificial Sequence: Synthetic oligonucleotide
uggaucaccucccugaucu

SEQ ID NO: 250603 - RNA, 19 nt, Artificial Sequence
  Description of Artificial Sequence: Synthetic oligonucleotide
ugugggaaguuucgaaugg

SEQ ID NO: 250604 - RNA, 19 nt, Artificial Sequence
  Description of Artificial Sequence: Synthetic oligonucleotide
guaccaguccccuaaauag

SEQ ID NO: 250605 - RNA, 19 nt, Artificial Sequence
  Description of Artificial Sequence: Synthetic oligonucleotide
ggagacgugaaguagaaag

SEQ ID NO: 250606 - RNA, 19 nt, Artificial Sequence
  Description of Artificial Sequence: Synthetic oligonucleotide
gagaucuacacuuggggag

SEQ ID NO: 250607 - RNA, 19 nt, Artificial Sequence
  Description of Artificial Sequence: Synthetic oligonucleotide
cuuaugauauuuaauauua

SEQ ID NO: 250608 - RNA, 19 nt, Artificial Sequence
  Description of Artificial Sequence: Synthetic oligonucleotide
cauuagguugauuacugcc

SEQ ID NO: 250609 - RNA, 19 nt, Artificial Sequence
  Description of Artificial Sequence: Synthetic oligonucleotide
aggaaagagaggcuauggc

SEQ ID NO: 250610 - RNA, 19 nt, Artificial Sequence
  Description of Artificial Sequence: Synthetic oligonucleotide
uuagcccucauuagaagag

SEQ ID NO: 250611 - RNA, 19 nt, Artificial Sequence
  Description of Artificial Sequence: Synthetic oligonucleotide
uauuaucaagauacuagac

SEQ ID NO: 250612 - RNA, 19 nt, Artificial Sequence
  Description of Artificial Sequence: Synthetic oligonucleotide
acauacuggcacuugcggc

SEQ ID NO: 250613 - RNA, 19 nt, Artificial Sequence
  Description of Artificial Sequence: Synthetic oligonucleotide
cuugcggccauucugggcg

SEQ ID NO: 250614 - RNA, 19 nt, Artificial Sequence
  Description of Artificial Sequence: Synthetic oligonucleotide
uccauuagguugauuacug

SEQ ID NO: 250615 - RNA, 19 nt, Artificial Sequence
  Description of Artificial Sequence: Synthetic oligonucleotide
gaccuuaugauauuuaaua

SEQ ID NO: 250616 - RNA, 19 nt, Artificial Sequence
  Description of Artificial Sequence: Synthetic oligonucleotide
aguuguauuugccgaaguc

SEQ ID NO: 250617 - RNA, 19 nt, Artificial Sequence
  Description of Artificial Sequence: Synthetic oligonucleotide
uaauauuauauagagcgau

SEQ ID NO: 250618 - RNA, 19 nt, Artificial Sequence
  Description of Artificial Sequence: Synthetic oligonucleotide
uuaauacccguguauauau

SEQ ID NO: 250619 - RNA, 19 nt, Artificial Sequence
  Description of Artificial Sequence: Synthetic oligonucleotide
uuuagcccucauuagaaga

SEQ ID NO: 250620 - RNA, 19 nt, Artificial Sequence
  Description of Artificial Sequence: Synthetic oligonucleotide
ugggaugacuguuaggagc

SEQ ID NO: 250621 - RNA, 19 nt, Artificial Sequence
  Description of Artificial Sequence: Synthetic oligonucleotide
cugaucuuaauauuaccug

SEQ ID NO: 250622 - RNA, 19 nt, Artificial Sequence
  Description of Artificial Sequence: Synthetic oligonucleotide
gagcgauauauuuaauacc

SEQ ID NO: 250623 - RNA, 19 nt, Artificial Sequence
  Description of Artificial Sequence: Synthetic oligonucleotide
guguauauaugcaucacag

SEQ ID NO: 250624 - RNA, 19 nt, Artificial Sequence
  Description of Artificial Sequence: Synthetic oligonucleotide
agaugcaugccaugguuac

SEQ ID NO: 250625 - RNA, 19 nt, Artificial Sequence
  Description of Artificial Sequence: Synthetic oligonucleotide
cuucacgucuacaauagug

SEQ ID NO: 250626 - RNA, 19 nt, Artificial Sequence
  Description of Artificial Sequence: Synthetic oligonucleotide
uuagaagagaucccuugga

SEQ ID NO: 250627 - RNA, 19 nt, Artificial Sequence
  Description of Artificial Sequence: Synthetic oligonucleotide
ucuuuagcccucauuagaa

SEQ ID NO: 250628 - RNA, 19 nt, Artificial Sequence
  Description of Artificial Sequence: Synthetic oligonucleotide
aaaacucacagggaugucu

SEQ ID NO: 250629 - RNA, 19 nt, Artificial Sequence
  Description of Artificial Sequence: Synthetic oligonucleotide
aaguccaucaucccuugga

SEQ ID NO: 250630 - RNA, 19 nt, Artificial Sequence
  Description of Artificial Sequence: Synthetic oligonucleotide
cugaacgaugucuucgugg

SEQ ID NO: 250631 - RNA, 19 nt, Artificial Sequence
  Description of Artificial Sequence: Synthetic oligonucleotide
uuuaagcuaaugagggccu

SEQ ID NO: 250632 - RNA, 19 nt, Artificial Sequence
  Description of Artificial Sequence: Synthetic oligonucleotide
agauacuagaccuuaugau

SEQ ID NO: 250633 - RNA, 19 nt, Artificial Sequence
  Description of Artificial Sequence: Synthetic oligonucleotide
aucuacuccagggaaaggg

SEQ ID NO: 250634 - RNA, 19 nt, Artificial Sequence
  Description of Artificial Sequence: Synthetic oligonucleotide
aucucacuccuugauagcc

SEQ ID NO: 250635 - RNA, 19 nt, Artificial Sequence
  Description of Artificial Sequence: Synthetic oligonucleotide
acgucuacaauaguggcuc

SEQ ID NO: 250636 - RNA, 19 nt, Artificial Sequence
  Description of Artificial Sequence: Synthetic oligonucleotide
ccuuaaaucauuucugagc

SEQ ID NO: 250637 - RNA, 19 nt, Artificial Sequence
  Description of Artificial Sequence: Synthetic oligonucleotide
uaucuuuagcccucauuag

SEQ ID NO: 250638 - RNA, 19 nt, Artificial Sequence
  Description of Artificial Sequence: Synthetic oligonucleotide
aaauacaagcucugccacu

SEQ ID NO: 250639 - RNA, 19 nt, Artificial Sequence
  Description of Artificial Sequence: Synthetic oligonucleotide
agacgugaaguagaaaggg

SEQ ID NO: 250640 - RNA, 19 nt, Artificial Sequence
  Description of Artificial Sequence: Synthetic oligonucleotide
aauggguggggucuuuuga

SEQ ID NO: 250641 - RNA, 19 nt, Artificial Sequence
  Description of Artificial Sequence: Synthetic oligonucleotide
agcaguugcagcaaugggg

SEQ ID NO: 250642 - RNA, 19 nt, Artificial Sequence
  Description of Artificial Sequence: Synthetic oligonucleotide
gaguccuuggucuagcuuc

SEQ ID NO: 250643 - RNA, 19 nt, Artificial Sequence
  Description of Artificial Sequence: Synthetic oligonucleotide
uuaugauauuuaauauuaa

SEQ ID NO: 250644 - RNA, 19 nt, Artificial Sequence
  Description of Artificial Sequence: Synthetic oligonucleotide
ggaaagagaggcuauggcc

SEQ ID NO: 250645 - RNA, 19 nt, Artificial Sequence
  Description of Artificial Sequence: Synthetic oligonucleotide
agucuguucauuccaucuc

SEQ ID NO: 250646 - RNA, 19 nt, Artificial Sequence
  Description of Artificial Sequence: Synthetic oligonucleotide
gagacgugaaguagaaagg

SEQ ID NO: 250647 - RNA, 19 nt, Artificial Sequence
  Description of Artificial Sequence: Synthetic oligonucleotide
aaguaucaucgacuuucac

SEQ ID NO: 250648 - RNA, 19 nt, Artificial Sequence
  Description of Artificial Sequence: Synthetic oligonucleotide
ugugucuacucauggggag

SEQ ID NO: 250649 - RNA, 19 nt, Artificial Sequence
  Description of Artificial Sequence: Synthetic oligonucleotide
cuaccuucacccuugcccc

SEQ ID NO: 250650 - RNA, 19 nt, Artificial Sequence
  Description of Artificial Sequence: Synthetic oligonucleotide
uuaaagugugguauucuua

SEQ ID NO: 250651 - RNA, 19 nt, Artificial Sequence
  Description of Artificial Sequence: Synthetic oligonucleotide
ugcuuugaaccuuguacag

SEQ ID NO: 250652 - RNA, 19 nt, Artificial Sequence
  Description of Artificial Sequence: Synthetic oligonucleotide
uacaugaccugcauacgca

SEQ ID NO: 250653 - RNA, 19 nt, Artificial Sequence
  Description of Artificial Sequence: Synthetic oligonucleotide
gcaaguaaccaguauagug

SEQ ID NO: 250654 - RNA, 19 nt, Artificial Sequence
  Description of Artificial Sequence: Synthetic oligonucleotide
cccgauucaacucugagcc

SEQ ID NO: 250655 - RNA, 19 nt, Artificial Sequence
  Description of Artificial Sequence: Synthetic oligonucleotide
uagaccuuaugauauuuaa

SEQ ID NO: 250656 - RNA, 19 nt, Artificial Sequence
  Description of Artificial Sequence: Synthetic oligonucleotide
cuugguccagcaaugccgg

SEQ ID NO: 250657 - RNA, 19 nt, Artificial Sequence
  Description of Artificial Sequence: Synthetic oligonucleotide
agaacaaguaucaucgacu

SEQ ID NO: 250658 - RNA, 19 nt, Artificial Sequence
  Description of Artificial Sequence: Synthetic oligonucleotide
ugaucuacuccagggaaag

SEQ ID NO: 250659 - RNA, 19 nt, Artificial Sequence
  Description of Artificial Sequence: Synthetic oligonucleotide
uauuugggucuuuuggaga

SEQ ID NO: 250660 - RNA, 19 nt, Artificial Sequence
  Description of Artificial Sequence: Synthetic oligonucleotide
ucuacuccagggaaaggga

SEQ ID NO: 250661 - RNA, 19 nt, Artificial Sequence
  Description of Artificial Sequence: Synthetic oligonucleotide
ggauagacaggcauaauag

SEQ ID NO: 250662 - RNA, 19 nt, Artificial Sequence
  Description of Artificial Sequence: Synthetic oligonucleotide
aauauuaccuggacucucu

SEQ ID NO: 250663 - RNA, 19 nt, Artificial Sequence
  Description of Artificial Sequence: Synthetic oligonucleotide
aucuuuagcccucauuaga

SEQ ID NO: 250664 - RNA, 19 nt, Artificial Sequence
  Description of Artificial Sequence: Synthetic oligonucleotide
aauaguauauuugggucuu

SEQ ID NO: 250665 - RNA, 19 nt, Artificial Sequence
  Description of Artificial Sequence: Synthetic oligonucleotide
uauuugccgaaguccauca

SEQ ID NO: 250666 - RNA, 19 nt, Artificial Sequence
  Description of Artificial Sequence: Synthetic oligonucleotide
ucgaauggauggcaguggc

SEQ ID NO: 250667 - RNA, 19 nt, Artificial Sequence
  Description of Artificial Sequence: Synthetic oligonucleotide
accuuaugauauuuaauau

SEQ ID NO: 250668 - RNA, 19 nt, Artificial Sequence
  Description of Artificial Sequence: Synthetic oligonucleotide
uauuaccuggacucucucc

SEQ ID NO: 250669 - RNA, 19 nt, Artificial Sequence
  Description of Artificial Sequence: Synthetic oligonucleotide
ucacgucuacaauaguggc

SEQ ID NO: 250670 - RNA, 19 nt, Artificial Sequence
  Description of Artificial Sequence: Synthetic oligonucleotide
agugguguggagcauucug

SEQ ID NO: 250671 - RNA, 19 nt, Artificial Sequence
  Description of Artificial Sequence: Synthetic oligonucleotide
agugcuaacaagaccagcu

SEQ ID NO: 250672 - RNA, 19 nt, Artificial Sequence
  Description of Artificial Sequence: Synthetic oligonucleotide
ugcauacgcacaccugggg

SEQ ID NO: 250673 - RNA, 19 nt, Artificial Sequence
  Description of Artificial Sequence: Synthetic oligonucleotide
cuaaauagccagaugaccu

SEQ ID NO: 250674 - RNA, 19 nt, Artificial Sequence
  Description of Artificial Sequence: Synthetic oligonucleotide
agugugguauucuuaaauu

SEQ ID NO: 250675 - RNA, 19 nt, Artificial Sequence
  Description of Artificial Sequence: Synthetic oligonucleotide
ugguccuacuccccggugg

SEQ ID NO: 250676 - RNA, 19 nt, Artificial Sequence
  Description of Artificial Sequence: Synthetic oligonucleotide
uuaauauuaccuggacucu

SEQ ID NO: 250677 - RNA, 19 nt, Artificial Sequence
  Description of Artificial Sequence: Synthetic oligonucleotide
gaaccugagcucauggugc

SEQ ID NO: 250678 - RNA, 19 nt, Artificial Sequence
  Description of Artificial Sequence: Synthetic oligonucleotide
ucccgauucaacucugagc

SEQ ID NO: 250679 - RNA, 19 nt, Artificial Sequence
  Description of Artificial Sequence: Synthetic oligonucleotide
aacuccaucucacuauauu

SEQ ID NO: 250680 - RNA, 19 nt, Artificial Sequence
  Description of Artificial Sequence: Synthetic oligonucleotide
cagguaugcuacauggggc

SEQ ID NO: 250681 - RNA, 19 nt, Artificial Sequence
  Description of Artificial Sequence: Synthetic oligonucleotide
gaaaacggggcagggagag

SEQ ID NO: 250682 - RNA, 19 nt, Artificial Sequence
  Description of Artificial Sequence: Synthetic oligonucleotide
uaccaguccccuaaauagc

SEQ ID NO: 250683 - RNA, 19 nt, Artificial Sequence
  Description of Artificial Sequence: Synthetic oligonucleotide
caggagaacaaguaucauc

SEQ ID NO: 250684 - RNA, 19 nt, Artificial Sequence
  Description of Artificial Sequence: Synthetic oligonucleotide
uauuaaagugugguauucu

SEQ ID NO: 250685 - RNA, 19 nt, Artificial Sequence
  Description of Artificial Sequence: Synthetic oligonucleotide
cauacgcacaccuggggag

SEQ ID NO: 250686 - RNA, 19 nt, Artificial Sequence
  Description of Artificial Sequence: Synthetic oligonucleotide
agguugauuacugcccagc

SEQ ID NO: 250687 - RNA, 19 nt, Artificial Sequence
  Description of Artificial Sequence: Synthetic oligonucleotide
caaguaaccaguauagugu

SEQ ID NO: 250688 - RNA, 19 nt, Artificial Sequence
  Description of Artificial Sequence: Synthetic oligonucleotide
caggugccuaucauuaugc

SEQ ID NO: 250689 - RNA, 19 nt, Artificial Sequence
  Description of Artificial Sequence: Synthetic oligonucleotide
guagcaaguaaccaguaua

SEQ ID NO: 250690 - RNA, 19 nt, Artificial Sequence
  Description of Artificial Sequence: Synthetic oligonucleotide
uugcgugugggaaguuucg

SEQ ID NO: 250691 - RNA, 19 nt, Artificial Sequence
  Description of Artificial Sequence: Synthetic oligonucleotide
guauagugucuccaacucc

SEQ ID NO: 250692 - RNA, 19 nt, Artificial Sequence
  Description of Artificial Sequence: Synthetic oligonucleotide
aggugccuaucauuaugcc

SEQ ID NO: 250693 - RNA, 19 nt, Artificial Sequence
  Description of Artificial Sequence: Synthetic oligonucleotide
agguaugcuacauggggcu

SEQ ID NO: 250694 - RNA, 19 nt, Artificial Sequence
  Description of Artificial Sequence: Synthetic oligonucleotide
gaucuuaauauuaccugga

SEQ ID NO: 250695 - RNA, 19 nt, Artificial Sequence
  Description of Artificial Sequence: Synthetic oligonucleotide
ucguauugcgugugggaag

SEQ ID NO: 250696 - RNA, 19 nt, Artificial Sequence
  Description of Artificial Sequence: Synthetic oligonucleotide
uacaagcucugccacuuac

SEQ ID NO: 250697 - RNA, 19 nt, Artificial Sequence
  Description of Artificial Sequence: Synthetic oligonucleotide
gggaaaacggggcagggag

SEQ ID NO: 250698 - RNA, 19 nt, Artificial Sequence
  Description of Artificial Sequence: Synthetic oligonucleotide
uagccuuacuuucuaguuc

SEQ ID NO: 250699 - RNA, 19 nt, Artificial Sequence
  Description of Artificial Sequence: Synthetic oligonucleotide
aggcauaauaguauauuug

SEQ ID NO: 250700 - RNA, 19 nt, Artificial Sequence
  Description of Artificial Sequence: Synthetic oligonucleotide
cuuuagcccucauuagaag

SEQ ID NO: 250701 - RNA, 19 nt, Artificial Sequence
  Description of Artificial Sequence: Synthetic oligonucleotide
uccugaucuacuccaggga

SEQ ID NO: 250702 - RNA, 19 nt, Artificial Sequence
  Description of Artificial Sequence: Synthetic oligonucleotide
uugguugccagguaugcua

SEQ ID NO: 250703 - RNA, 19 nt, Artificial Sequence
  Description of Artificial Sequence: Synthetic oligonucleotide
uucuugguugccagguaug

SEQ ID NO: 250704 - RNA, 19 nt, Artificial Sequence
  Description of Artificial Sequence: Synthetic oligonucleotide
acuugcggccauucugggc

SEQ ID NO: 250705 - RNA, 19 nt, Artificial Sequence
  Description of Artificial Sequence: Synthetic oligonucleotide
auaauauuauauagagcga

SEQ ID NO: 250706 - RNA, 19 nt, Artificial Sequence
  Description of Artificial Sequence: Synthetic oligonucleotide
ucuacacuuggggaggggc

SEQ ID NO: 250707 - RNA, 19 nt, Artificial Sequence
  Description of Artificial Sequence: Synthetic oligonucleotide
auacuagaccuuaugauau

SEQ ID NO: 250708 - RNA, 19 nt, Artificial Sequence
  Description of Artificial Sequence: Synthetic oligonucleotide
aucuucacgucuacaauag

SEQ ID NO: 250709 - RNA, 19 nt, Artificial Sequence
  Description of Artificial Sequence: Synthetic oligonucleotide
ucagauuaucaucuaccuu

SEQ ID NO: 250710 - RNA, 19 nt, Artificial Sequence
  Description of Artificial Sequence: Synthetic oligonucleotide
aaagugugguauucuuaaa

SEQ ID NO: 250711 - RNA, 19 nt, Artificial Sequence
  Description of Artificial Sequence: Synthetic oligonucleotide
cauaguggcccauggauca

SEQ ID NO: 250712 - RNA, 19 nt, Artificial Sequence
  Description of Artificial Sequence: Synthetic oligonucleotide
guugauuacugcccagcug

SEQ ID NO: 250713 - RNA, 19 nt, Artificial Sequence
  Description of Artificial Sequence: Synthetic oligonucleotide
accgacacccauuuucucu

SEQ ID NO: 250714 - RNA, 19 nt, Artificial Sequence
  Description of Artificial Sequence: Synthetic oligonucleotide
ucacaggggcaacauauau

SEQ ID NO: 250715 - RNA, 19 nt, Artificial Sequence
  Description of Artificial Sequence: Synthetic oligonucleotide
ucaucgacuuucacagcca

SEQ ID NO: 250716 - RNA, 19 nt, Artificial Sequence
  Description of Artificial Sequence: Synthetic oligonucleotide
cuacuccagggaaagggag

SEQ ID NO: 250717 - RNA, 19 nt, Artificial Sequence
  Description of Artificial Sequence: Synthetic oligonucleotide
auugcgugugggaaguuuc

SEQ ID NO: 250718 - RNA, 19 nt, Artificial Sequence
  Description of Artificial Sequence: Synthetic oligonucleotide
aguacaugaccugcauacg

SEQ ID NO: 250719 - RNA, 19 nt, Artificial Sequence
  Description of Artificial Sequence: Synthetic oligonucleotide
agcaucguccuugcgggcc

SEQ ID NO: 250720 - RNA, 19 nt, Artificial Sequence
  Description of Artificial Sequence: Synthetic oligonucleotide
gacgacagacugcaacacc

SEQ ID NO: 250721 - RNA, 19 nt, Artificial Sequence
  Description of Artificial Sequence: Synthetic oligonucleotide
uggugggccaccaugccgu

SEQ ID NO: 250722 - RNA, 19 nt, Artificial Sequence
  Description of Artificial Sequence: Synthetic oligonucleotide
caucuacauuauuaucaag

SEQ ID NO: 250723 - RNA, 19 nt, Artificial Sequence
  Description of Artificial Sequence: Synthetic oligonucleotide
ccagguaugcuacaugggg

SEQ ID NO: 250724 - RNA, 19 nt, Artificial Sequence
  Description of Artificial Sequence: Synthetic oligonucleotide
auagacaggcauaauagua

SEQ ID NO: 250725 - RNA, 19 nt, Artificial Sequence
  Description of Artificial Sequence: Synthetic oligonucleotide
ccaucucacuccuugauag

SEQ ID NO: 250726 - RNA, 19 nt, Artificial Sequence
  Description of Artificial Sequence: Synthetic oligonucleotide
uaauauuaccuggacucuc

SEQ ID NO: 250727 - RNA, 19 nt, Artificial Sequence
  Description of Artificial Sequence: Synthetic oligonucleotide
ugauuacugcccagcugag

SEQ ID NO: 250728 - RNA, 19 nt, Artificial Sequence
  Description of Artificial Sequence: Synthetic oligonucleotide
gcuaaugagggccuccugc

SEQ ID NO: 250729 - RNA, 19 nt, Artificial Sequence
  Description of Artificial Sequence: Synthetic oligonucleotide
ucacaaagauggcugggua

SEQ ID NO: 250730 - RNA, 19 nt, Artificial Sequence
  Description of Artificial Sequence: Synthetic oligonucleotide
ucuuauggccaguggugug

SEQ ID NO: 250731 - RNA, 19 nt, Artificial Sequence
  Description of Artificial Sequence: Synthetic oligonucleotide
gauagccuuacuuucuagu

SEQ ID NO: 250732 - RNA, 19 nt, Artificial Sequence
  Description of Artificial Sequence: Synthetic oligonucleotide
uaauggguggggucuuuug

SEQ ID NO: 250733 - RNA, 19 nt, Artificial Sequence
  Description of Artificial Sequence: Synthetic oligonucleotide
ucucacuccuugauagccu

SEQ ID NO: 250734 - RNA, 19 nt, Artificial Sequence
  Description of Artificial Sequence: Synthetic oligonucleotide
gauagacaggcauaauagu

SEQ ID NO: 250735 - RNA, 19 nt, Artificial Sequence
  Description of Artificial Sequence: Synthetic oligonucleotide
gugacgacagacugcaaca

SEQ ID NO: 250736 - RNA, 19 nt, Artificial Sequence
  Description of Artificial Sequence: Synthetic oligonucleotide
ccugcauacgcacaccugg

SEQ ID NO: 250737 - RNA, 19 nt, Artificial Sequence
  Description of Artificial Sequence: Synthetic oligonucleotide
ucugauaugcugucucauu

SEQ ID NO: 250738 - RNA, 19 nt, Artificial Sequence
  Description of Artificial Sequence: Synthetic oligonucleotide
ugccaccuaucugugaaag

SEQ ID NO: 250739 - RNA, 19 nt, Artificial Sequence
  Description of Artificial Sequence: Synthetic oligonucleotide
aaccaguauagugucucca

SEQ ID NO: 250740 - RNA, 19 nt, Artificial Sequence
  Description of Artificial Sequence: Synthetic oligonucleotide
guugccaguauuucuugga

SEQ ID NO: 250741 - RNA, 19 nt, Artificial Sequence
  Description of Artificial Sequence: Synthetic oligonucleotide
uaagcuaaugagggccucc

SEQ ID NO: 250742 - RNA, 19 nt, Artificial Sequence
  Description of Artificial Sequence: Synthetic oligonucleotide
guugcuaaugggugggguc

SEQ ID NO: 250743 - RNA, 19 nt, Artificial Sequence
  Description of Artificial Sequence: Synthetic oligonucleotide
uccugaacgaugucuucgu

SEQ ID NO: 250744 - RNA, 19 nt, Artificial Sequence
  Description of Artificial Sequence: Synthetic oligonucleotide
cugcauacgcacaccuggg

SEQ ID NO: 250745 - RNA, 19 nt, Artificial Sequence
  Description of Artificial Sequence: Synthetic oligonucleotide
ggugacgacagacugcaac

SEQ ID NO: 250746 - RNA, 19 nt, Artificial Sequence
  Description of Artificial Sequence: Synthetic oligonucleotide
uugcuaauggguggggucu

SEQ ID NO: 250747 - RNA, 19 nt, Artificial Sequence
  Description of Artificial Sequence: Synthetic oligonucleotide
uucugggcgauggaugcag

SEQ ID NO: 250748 - RNA, 19 nt, Artificial Sequence
  Description of Artificial Sequence: Synthetic oligonucleotide
uacccguguauauaugcau

SEQ ID NO: 250749 - RNA, 19 nt, Artificial Sequence
  Description of Artificial Sequence: Synthetic oligonucleotide
auauagagcgauauauuua

SEQ ID NO: 250750 - RNA, 19 nt, Artificial Sequence
  Description of Artificial Sequence: Synthetic oligonucleotide
agcaccuagaguccuuggu

SEQ ID NO: 250751 - RNA, 19 nt, Artificial Sequence
  Description of Artificial Sequence: Synthetic oligonucleotide
gcagaggucguauugcgug

SEQ ID NO: 250752 - RNA, 19 nt, Artificial Sequence
  Description of Artificial Sequence: Synthetic oligonucleotide
ugguugccagguaugcuac

SEQ ID NO: 250753 - RNA, 19 nt, Artificial Sequence
  Description of Artificial Sequence: Synthetic oligonucleotide
accaguauagugucuccaa

SEQ ID NO: 250754 - RNA, 19 nt, Artificial Sequence
  Description of Artificial Sequence: Synthetic oligonucleotide
cuauggcccauaguggccc

SEQ ID NO: 250755 - RNA, 19 nt, Artificial Sequence
  Description of Artificial Sequence: Synthetic oligonucleotide
aguuucgaauggauggcag

SEQ ID NO: 250756 - RNA, 19 nt, Artificial Sequence
  Description of Artificial Sequence: Synthetic oligonucleotide
ggcuauggcccauaguggc

SEQ ID NO: 250757 - RNA, 19 nt, Artificial Sequence
  Description of Artificial Sequence: Synthetic oligonucleotide
agacaggcauaauaguaua

SEQ ID NO: 250758 - RNA, 19 nt, Artificial Sequence
  Description of Artificial Sequence: Synthetic oligonucleotide
uuaugccaucaaacacuag

SEQ ID NO: 250759 - RNA, 19 nt, Artificial Sequence
  Description of Artificial Sequence: Synthetic oligonucleotide
cucacgccggucuagccac

SEQ ID NO: 250760 - RNA, 19 nt, Artificial Sequence
  Description of Artificial Sequence: Synthetic oligonucleotide
agacugcaacaccacaggu

SEQ ID NO: 250761 - RNA, 19 nt, Artificial Sequence
  Description of Artificial Sequence: Synthetic oligonucleotide
ccuaaauagccagaugacc

SEQ ID NO: 250762 - RNA, 19 nt, Artificial Sequence
  Description of Artificial Sequence: Synthetic oligonucleotide
ugcagaggucguauugcgu

SEQ ID NO: 250763 - RNA, 19 nt, Artificial Sequence
  Description of Artificial Sequence: Synthetic oligonucleotide
gccuuaaaucauuucugag

SEQ ID NO: 250764 - RNA, 19 nt, Artificial Sequence
  Description of Artificial Sequence: Synthetic oligonucleotide
ucuucacgucuacaauagu

SEQ ID NO: 250765 - RNA, 19 nt, Artificial Sequence
  Description of Artificial Sequence: Synthetic oligonucleotide
acccguguauauaugcauc

SEQ ID NO: 250766 - RNA, 19 nt, Artificial Sequence
  Description of Artificial Sequence: Synthetic oligonucleotide
agcggcacuugucuccauc

SEQ ID NO: 250767 - RNA, 19 nt, Artificial Sequence
  Description of Artificial Sequence: Synthetic oligonucleotide
caucucacuccuugauagc

SEQ ID NO: 250768 - RNA, 19 nt, Artificial Sequence
  Description of Artificial Sequence: Synthetic oligonucleotide
gacugcaacaccacagguc

SEQ ID NO: 250769 - RNA, 19 nt, Artificial Sequence
  Description of Artificial Sequence: Synthetic oligonucleotide
uugccaaauucuuuaucuu

SEQ ID NO: 250770 - RNA, 19 nt, Artificial Sequence
  Description of Artificial Sequence: Synthetic oligonucleotide
gauucaagugggaccccag

SEQ ID NO: 250771 - RNA, 19 nt, Artificial Sequence
  Description of Artificial Sequence: Synthetic oligonucleotide
acccuugccccuuucacaa

SEQ ID NO: 250772 - RNA, 19 nt, Artificial Sequence
  Description of Artificial Sequence: Synthetic oligonucleotide
agcacccaagcucugcagu

SEQ ID NO: 250773 - RNA, 19 nt, Artificial Sequence
  Description of Artificial Sequence: Synthetic oligonucleotide
gaucuacacuuggggaggg

SEQ ID NO: 250774 - RNA, 19 nt, Artificial Sequence
  Description of Artificial Sequence: Synthetic oligonucleotide
gacaacuuggggcuguagu

SEQ ID NO: 250775 - RNA, 19 nt, Artificial Sequence
  Description of Artificial Sequence: Synthetic oligonucleotide
auaguggcucacaaagaug

SEQ ID NO: 250776 - RNA, 19 nt, Artificial Sequence
  Description of Artificial Sequence: Synthetic oligonucleotide
ucuagccacucguucaguu

SEQ ID NO: 250777 - RNA, 19 nt, Artificial Sequence
  Description of Artificial Sequence: Synthetic oligonucleotide
uagugcuaacaagaccagc

SEQ ID NO: 250778 - RNA, 19 nt, Artificial Sequence
  Description of Artificial Sequence: Synthetic oligonucleotide
gacgugaaguagaaaggga

SEQ ID NO: 250779 - RNA, 19 nt, Artificial Sequence
  Description of Artificial Sequence: Synthetic oligonucleotide
aagaugcaugccaugguua

SEQ ID NO: 250780 - RNA, 19 nt, Artificial Sequence
  Description of Artificial Sequence: Synthetic oligonucleotide
cuuaccccaccaacauccc

SEQ ID NO: 250781 - RNA, 19 nt, Artificial Sequence
  Description of Artificial Sequence: Synthetic oligonucleotide
caaugccgggccuuggcac

SEQ ID NO: 250782 - RNA, 19 nt, Artificial Sequence
  Description of Artificial Sequence: Synthetic oligonucleotide
auuaugccaucaaacacua

SEQ ID NO: 250783 - RNA, 19 nt, Artificial Sequence
  Description of Artificial Sequence: Synthetic oligonucleotide
accucacgccggucuagcc

SEQ ID NO: 250784 - RNA, 19 nt, Artificial Sequence
  Description of Artificial Sequence: Synthetic oligonucleotide
auagugcuaacaagaccag

SEQ ID NO: 250785 - RNA, 19 nt, Artificial Sequence
  Description of Artificial Sequence: Synthetic oligonucleotide
caucgacuuucacagccac

SEQ ID NO: 250786 - RNA, 19 nt, Artificial Sequence
  Description of Artificial Sequence: Synthetic oligonucleotide
gagcaccuagaguccuugg

SEQ ID NO: 250787 - RNA, 19 nt, Artificial Sequence
  Description of Artificial Sequence: Synthetic oligonucleotide
gccguuucugccuuaaauc

SEQ ID NO: 250788 - RNA, 19 nt, Artificial Sequence
  Description of Artificial Sequence: Synthetic oligonucleotide
ggcucacaaagauggcugg

SEQ ID NO: 250789 - RNA, 19 nt, Artificial Sequence
  Description of Artificial Sequence: Synthetic oligonucleotide
cucccgauucaacucugag

SEQ ID NO: 250790 - RNA, 19 nt, Artificial Sequence
  Description of Artificial Sequence: Synthetic oligonucleotide
gcccauguguccuuggagc

SEQ ID NO: 250791 - RNA, 19 nt, Artificial Sequence
  Description of Artificial Sequence: Synthetic oligonucleotide
cacugcaguacuugagguc

SEQ ID NO: 250792 - RNA, 19 nt, Artificial Sequence
  Description of Artificial Sequence: Synthetic oligonucleotide
uacuccccggugguggugg

SEQ ID NO: 250793 - RNA, 19 nt, Artificial Sequence
  Description of Artificial Sequence: Synthetic oligonucleotide
caucacaggggcaacauau

SEQ ID NO: 250794 - RNA, 19 nt, Artificial Sequence
  Description of Artificial Sequence: Synthetic oligonucleotide
ggugccuaucauuaugcca

SEQ ID NO: 250795 - RNA, 19 nt, Artificial Sequence
  Description of Artificial Sequence: Synthetic oligonucleotide
caucaucccuuggacacag

SEQ ID NO: 250796 - RNA, 19 nt, Artificial Sequence
  Description of Artificial Sequence: Synthetic oligonucleotide
cuugauagccuuacuuucu

SEQ ID NO: 250797 - RNA, 19 nt, Artificial Sequence
  Description of Artificial Sequence: Synthetic oligonucleotide
ugacgacagacugcaacac

SEQ ID NO: 250798 - RNA, 19 nt, Artificial Sequence
  Description of Artificial Sequence: Synthetic oligonucleotide
guauuugccgaaguccauc

SEQ ID NO: 250799 - RNA, 19 nt, Artificial Sequence
  Description of Artificial Sequence: Synthetic oligonucleotide
gguccauuagguugauuac

SEQ ID NO: 250800 - RNA, 19 nt, Artificial Sequence
  Description of Artificial Sequence: Synthetic oligonucleotide
aggucguauugcguguggg

SEQ ID NO: 250801 - RNA, 19 nt, Artificial Sequence
  Description of Artificial Sequence: Synthetic oligonucleotide
cuagaguccuuggucuagc

SEQ ID NO: 250802 - RNA, 19 nt, Artificial Sequence
  Description of Artificial Sequence: Synthetic oligonucleotide
gggauagacaggcauaaua

SEQ ID NO: 250803 - RNA, 19 nt, Artificial Sequence
  Description of Artificial Sequence: Synthetic oligonucleotide
agugggaccccaggcuccc

SEQ ID NO: 250804 - RNA, 19 nt, Artificial Sequence
  Description of Artificial Sequence: Synthetic oligonucleotide
ccuuguacagaaccugagc

SEQ ID NO: 250805 - RNA, 19 nt, Artificial Sequence
  Description of Artificial Sequence: Synthetic oligonucleotide
caaguaucaucgacuuuca

SEQ ID NO: 250806 - RNA, 19 nt, Artificial Sequence
  Description of Artificial Sequence: Synthetic oligonucleotide
agaccuuaugauauuuaau

SEQ ID NO: 250807 - RNA, 19 nt, Artificial Sequence
  Description of Artificial Sequence: Synthetic oligonucleotide
ggucuagccacucguucag

SEQ ID NO: 250808 - RNA, 19 nt, Artificial Sequence
  Description of Artificial Sequence: Synthetic oligonucleotide
gcgauauauuuaauacccg

SEQ ID NO: 250809 - RNA, 19 nt, Artificial Sequence
  Description of Artificial Sequence: Synthetic oligonucleotide
agcaaguaaccaguauagu

SEQ ID NO: 250810 - RNA, 19 nt, Artificial Sequence
  Description of Artificial Sequence: Synthetic oligonucleotide
auacccguguauauaugca

SEQ ID NO: 250811 - RNA, 19 nt, Artificial Sequence
  Description of Artificial Sequence: Synthetic oligonucleotide
cuacaauaguggcucacaa

SEQ ID NO: 250812 - RNA, 19 nt, Artificial Sequence
  Description of Artificial Sequence: Synthetic oligonucleotide
agauucaagugggacccca

SEQ ID NO: 250813 - RNA, 19 nt, Artificial Sequence
  Description of Artificial Sequence: Synthetic oligonucleotide
ggacccugggacaacuugg

SEQ ID NO: 250814 - RNA, 19 nt, Artificial Sequence
  Description of Artificial Sequence: Synthetic oligonucleotide
uacuagaccuuaugauauu

SEQ ID NO: 250815 - RNA, 19 nt, Artificial Sequence
  Description of Artificial Sequence: Synthetic oligonucleotide
caguauagugucuccaacu

SEQ ID NO: 250816 - RNA, 19 nt, Artificial Sequence
  Description of Artificial Sequence: Synthetic oligonucleotide
uuaagcuaaugagggccuc

SEQ ID NO: 250817 - RNA, 19 nt, Artificial Sequence
  Description of Artificial Sequence: Synthetic oligonucleotide
gugccuaucauuaugccau

SEQ ID NO: 250818 - RNA, 19 nt, Artificial Sequence
  Description of Artificial Sequence: Synthetic oligonucleotide
gggaaguuucgaauggaug

SEQ ID NO: 250819 - RNA, 19 nt, Artificial Sequence
  Description of Artificial Sequence: Synthetic oligonucleotide
aguugcuaauggguggggu

SEQ ID NO: 250820 - RNA, 19 nt, Artificial Sequence
  Description of Artificial Sequence: Synthetic oligonucleotide
ggauaccacacacauauau

SEQ ID NO: 250821 - RNA, 19 nt, Artificial Sequence
  Description of Artificial Sequence: Synthetic oligonucleotide
uauugcgugugggaaguuu

SEQ ID NO: 250822 - RNA, 19 nt, Artificial Sequence
  Description of Artificial Sequence: Synthetic oligonucleotide
agccacgcugccagcaccc

SEQ ID NO: 250823 - RNA, 19 nt, Artificial Sequence
  Description of Artificial Sequence: Synthetic oligonucleotide
cuagaccuuaugauauuua

SEQ ID NO: 250824 - RNA, 19 nt, Artificial Sequence
  Description of Artificial Sequence: Synthetic oligonucleotide
cacuagcaacccuggcugc

SEQ ID NO: 250825 - RNA, 19 nt, Artificial Sequence
  Description of Artificial Sequence: Synthetic oligonucleotide
ugucuucgugggucauucc

SEQ ID NO: 250826 - RNA, 19 nt, Artificial Sequence
  Description of Artificial Sequence: Synthetic oligonucleotide
cccugaucuuaauauuacc

SEQ ID NO: 250827 - RNA, 19 nt, Artificial Sequence
  Description of Artificial Sequence: Synthetic oligonucleotide
aauagccagaugaccucau

SEQ ID NO: 250828 - RNA, 19 nt, Artificial Sequence
  Description of Artificial Sequence: Synthetic oligonucleotide
ccauuagguugauuacugc

SEQ ID NO: 250829 - RNA, 19 nt, Artificial Sequence
  Description of Artificial Sequence: Synthetic oligonucleotide
agcaacccuggcugcagga

SEQ ID NO: 250830 - RNA, 19 nt, Artificial Sequence
  Description of Artificial Sequence: Synthetic oligonucleotide
ccugaucuuaauauuaccu

SEQ ID NO: 250831 - RNA, 19 nt, Artificial Sequence
  Description of Artificial Sequence: Synthetic oligonucleotide
uaguggcccauggaucacc

SEQ ID NO: 250832 - RNA, 19 nt, Artificial Sequence
  Description of Artificial Sequence: Synthetic oligonucleotide
guaguacaugaccugcaua

SEQ ID NO: 250833 - RNA, 19 nt, Artificial Sequence
  Description of Artificial Sequence: Synthetic oligonucleotide
cugaucuacuccagggaaa

SEQ ID NO: 250834 - RNA, 19 nt, Artificial Sequence
  Description of Artificial Sequence: Synthetic oligonucleotide
gucguauugcgugugggaa

SEQ ID NO: 250835 - RNA, 19 nt, Artificial Sequence
  Description of Artificial Sequence: Synthetic oligonucleotide
guuucgaauggauggcagu

SEQ ID NO: 250836 - RNA, 19 nt, Artificial Sequence
  Description of Artificial Sequence: Synthetic oligonucleotide
acuagcaacccuggcugca

SEQ ID NO: 250837 - RNA, 19 nt, Artificial Sequence
  Description of Artificial Sequence: Synthetic oligonucleotide
gcaccuagaguccuugguc

SEQ ID NO: 250838 - RNA, 19 nt, Artificial Sequence
  Description of Artificial Sequence: Synthetic oligonucleotide
gauuacugcccagcugaga

SEQ ID NO: 250839 - RNA, 19 nt, Artificial Sequence
  Description of Artificial Sequence: Synthetic oligonucleotide
ccguuucugccuuaaauca

SEQ ID NO: 250840 - RNA, 19 nt, Artificial Sequence
  Description of Artificial Sequence: Synthetic oligonucleotide
ugaccucaucaguacccaa

SEQ ID NO: 250841 - RNA, 19 nt, Artificial Sequence
  Description of Artificial Sequence: Synthetic oligonucleotide
aucuacacuuggggagggg

SEQ ID NO: 250842 - RNA, 19 nt, Artificial Sequence
  Description of Artificial Sequence: Synthetic oligonucleotide
accuaucugugaaagcuuu

SEQ ID NO: 250843 - RNA, 19 nt, Artificial Sequence
  Description of Artificial Sequence: Synthetic oligonucleotide
cacaggggcaacauauaua

SEQ ID NO: 250844 - RNA, 19 nt, Artificial Sequence
  Description of Artificial Sequence: Synthetic oligonucleotide
accuuggauguggucccac

SEQ ID NO: 250845 - RNA, 19 nt, Artificial Sequence
  Description of Artificial Sequence: Synthetic oligonucleotide
cacuuaccccaccaacauc

SEQ ID NO: 250846 - RNA, 19 nt, Artificial Sequence
  Description of Artificial Sequence: Synthetic oligonucleotide
ccaggugccuaucauuaug

SEQ ID NO: 250847 - RNA, 19 nt, Artificial Sequence
  Description of Artificial Sequence: Synthetic oligonucleotide
ccaguauagugucuccaac

SEQ ID NO: 250848 - RNA, 19 nt, Artificial Sequence
  Description of Artificial Sequence: Synthetic oligonucleotide
caccuagaguccuuggucu

SEQ ID NO: 250849 - RNA, 19 nt, Artificial Sequence
  Description of Artificial Sequence: Synthetic oligonucleotide
ggcccauaguggcccaugg

SEQ ID NO: 250850 - RNA, 19 nt, Artificial Sequence
  Description of Artificial Sequence: Synthetic oligonucleotide
uggauaccacacacauaua

SEQ ID NO: 250851 - RNA, 19 nt, Artificial Sequence
  Description of Artificial Sequence: Synthetic oligonucleotide
acgccggucuagccacucg

SEQ ID NO: 250852 - RNA, 19 nt, Artificial Sequence
  Description of Artificial Sequence: Synthetic oligonucleotide
uggggucuuuugaccagau

SEQ ID NO: 250853 - RNA, 19 nt, Artificial Sequence
  Description of Artificial Sequence: Synthetic oligonucleotide
ugguuacugggagaagguu

SEQ ID NO: 250854 - RNA, 19 nt, Artificial Sequence
  Description of Artificial Sequence: Synthetic oligonucleotide
auacgcacaccuggggagu

SEQ ID NO: 250855 - RNA, 19 nt, Artificial Sequence
  Description of Artificial Sequence: Synthetic oligonucleotide
ucguccuugcgggccuugg

SEQ ID NO: 250856 - RNA, 19 nt, Artificial Sequence
  Description of Artificial Sequence: Synthetic oligonucleotide
gcauacgcacaccugggga

SEQ ID NO: 250857 - RNA, 19 nt, Artificial Sequence
  Description of Artificial Sequence: Synthetic oligonucleotide
uggaugcagaggucguauu

SEQ ID NO: 250858 - RNA, 19 nt, Artificial Sequence
  Description of Artificial Sequence: Synthetic oligonucleotide
ggucguauugcguguggga

SEQ ID NO: 250859 - RNA, 19 nt, Artificial Sequence
  Description of Artificial Sequence: Synthetic oligonucleotide
cacgucuacaauaguggcu

SEQ ID NO: 250860 - RNA, 19 nt, Artificial Sequence
  Description of Artificial Sequence: Synthetic oligonucleotide
ccuccuaggcucccgauuc

SEQ ID NO: 250861 - RNA, 19 nt, Artificial Sequence
  Description of Artificial Sequence: Synthetic oligonucleotide
ugggacaacuuggggcugu

SEQ ID NO: 250862 - RNA, 19 nt, Artificial Sequence
  Description of Artificial Sequence: Synthetic oligonucleotide
gcucacaaagauggcuggg

SEQ ID NO: 250863 - RNA, 19 nt, Artificial Sequence
  Description of Artificial Sequence: Synthetic oligonucleotide
accuagaguccuuggucua

SEQ ID NO: 250864 - RNA, 19 nt, Artificial Sequence
  Description of Artificial Sequence: Synthetic oligonucleotide
agggaaaacggggcaggga

SEQ ID NO: 250865 - RNA, 19 nt, Artificial Sequence
  Description of Artificial Sequence: Synthetic oligonucleotide
cuggguaugggaugacugu

SEQ ID NO: 250866 - RNA, 19 nt, Artificial Sequence
  Description of Artificial Sequence: Synthetic oligonucleotide
uccuaggcucccgauucaa

SEQ ID NO: 250867 - RNA, 19 nt, Artificial Sequence
  Description of Artificial Sequence: Synthetic oligonucleotide
gaccagaucuucacgucua

SEQ ID NO: 250868 - RNA, 19 nt, Artificial Sequence
  Description of Artificial Sequence: Synthetic oligonucleotide
ggggcaacauauauacaca

SEQ ID NO: 250869 - RNA, 19 nt, Artificial Sequence
  Description of Artificial Sequence: Synthetic oligonucleotide
ggguggggucuuuugacca

SEQ ID NO: 250870 - RNA, 19 nt, Artificial Sequence
  Description of Artificial Sequence: Synthetic oligonucleotide
cuuggauguggucccaccu

SEQ ID NO: 250871 - RNA, 19 nt, Artificial Sequence
  Description of Artificial Sequence: Synthetic oligonucleotide
auagagcgauauauuuaau

SEQ ID NO: 250872 - RNA, 19 nt, Artificial Sequence
  Description of Artificial Sequence: Synthetic oligonucleotide
ggagaacaaguaucaucga

SEQ ID NO: 250873 - RNA, 19 nt, Artificial Sequence
  Description of Artificial Sequence: Synthetic oligonucleotide
ccuuggauguggucccacc

SEQ ID NO: 250874 - RNA, 19 nt, Artificial Sequence
  Description of Artificial Sequence: Synthetic oligonucleotide
gccaccuaucugugaaagc

SEQ ID NO: 250875 - RNA, 19 nt, Artificial Sequence
  Description of Artificial Sequence: Synthetic oligonucleotide
ugacuguuaggagcaccua

SEQ ID NO: 250876 - RNA, 19 nt, Artificial Sequence
  Description of Artificial Sequence: Synthetic oligonucleotide
gccagguaugcuacauggg

SEQ ID NO: 250877 - RNA, 19 nt, Artificial Sequence
  Description of Artificial Sequence: Synthetic oligonucleotide
aguccccuaaauagccaga

SEQ ID NO: 250878 - RNA, 19 nt, Artificial Sequence
  Description of Artificial Sequence: Synthetic oligonucleotide
caaaacucacagggauguc

SEQ ID NO: 250879 - RNA, 19 nt, Artificial Sequence
  Description of Artificial Sequence: Synthetic oligonucleotide
gguugauuacugcccagcu

SEQ ID NO: 250880 - RNA, 19 nt, Artificial Sequence
  Description of Artificial Sequence: Synthetic oligonucleotide
ggcacagcggcacuugucu

SEQ ID NO: 250881 - RNA, 19 nt, Artificial Sequence
  Description of Artificial Sequence: Synthetic oligonucleotide
auacaagcucugccacuua

SEQ ID NO: 250882 - RNA, 19 nt, Artificial Sequence
  Description of Artificial Sequence: Synthetic oligonucleotide
ccugaucuacuccagggaa

SEQ ID NO: 250883 - RNA, 19 nt, Artificial Sequence
  Description of Artificial Sequence: Synthetic oligonucleotide
gcuauggcccauaguggcc

SEQ ID NO: 250884 - RNA, 19 nt, Artificial Sequence
  Description of Artificial Sequence: Synthetic oligonucleotide
cuacacuuggggaggggcu

SEQ ID NO: 250885 - RNA, 19 nt, Artificial Sequence
  Description of Artificial Sequence: Synthetic oligonucleotide
ugggauagacaggcauaau

SEQ ID NO: 250886 - RNA, 19 nt, Artificial Sequence
  Description of Artificial Sequence: Synthetic oligonucleotide
cucacaaagauggcugggu

SEQ ID NO: 250887 - RNA, 19 nt, Artificial Sequence
  Description of Artificial Sequence: Synthetic oligonucleotide
cgauauauuuaauacccgu

SEQ ID NO: 250888 - RNA, 19 nt, Artificial Sequence
  Description of Artificial Sequence: Synthetic oligonucleotide
uugcggccauucugggcga

SEQ ID NO: 250889 - RNA, 19 nt, Artificial Sequence
  Description of Artificial Sequence: Synthetic oligonucleotide
caccucacgccggucuagc

SEQ ID NO: 250890 - RNA, 19 nt, Artificial Sequence
  Description of Artificial Sequence: Synthetic oligonucleotide
ccauuucuuauggccagug

SEQ ID NO: 250891 - RNA, 19 nt, Artificial Sequence
  Description of Artificial Sequence: Synthetic oligonucleotide
gggcuguccccauuuugac

SEQ ID NO: 250892 - RNA, 19 nt, Artificial Sequence
  Description of Artificial Sequence: Synthetic oligonucleotide
aucacaggggcaacauaua

SEQ ID NO: 250893 - RNA, 19 nt, Artificial Sequence
  Description of Artificial Sequence: Synthetic oligonucleotide
cugguccuacuccccggug

SEQ ID NO: 250894 - RNA, 19 nt, Artificial Sequence
  Description of Artificial Sequence: Synthetic oligonucleotide
caggggcaacauauauaca

SEQ ID NO: 250895 - RNA, 19 nt, Artificial Sequence
  Description of Artificial Sequence: Synthetic oligonucleotide
gguagcaaguaaccaguau

SEQ ID NO: 250896 - RNA, 19 nt, Artificial Sequence
  Description of Artificial Sequence: Synthetic oligonucleotide
ccggugguggugguggugg

SEQ ID NO: 250897 - RNA, 19 nt, Artificial Sequence
  Description of Artificial Sequence: Synthetic oligonucleotide
gcaaugccgggccuuggca

SEQ ID NO: 250898 - RNA, 19 nt, Artificial Sequence
  Description of Artificial Sequence: Synthetic oligonucleotide
cuggcacuugcggccauuc

SEQ ID NO: 250899 - RNA, 19 nt, Artificial Sequence
  Description of Artificial Sequence: Synthetic oligonucleotide
gaacgaugucuucgugggu

SEQ ID NO: 250900 - RNA, 19 nt, Artificial Sequence
  Description of Artificial Sequence: Synthetic oligonucleotide
ggucuagcuucagauuauc

SEQ ID NO: 250901 - RNA, 19 nt, Artificial Sequence
  Description of Artificial Sequence: Synthetic oligonucleotide
ugcuaauggguggggucuu

SEQ ID NO: 250902 - RNA, 19 nt, Artificial Sequence
  Description of Artificial Sequence: Synthetic oligonucleotide
ccagugguguggagcauuc

SEQ ID NO: 250903 - RNA, 19 nt, Artificial Sequence
  Description of Artificial Sequence: Synthetic oligonucleotide
guggggucuuuugaccaga

SEQ ID NO: 250904 - RNA, 19 nt, Artificial Sequence
  Description of Artificial Sequence: Synthetic oligonucleotide
ccuaggcucccgauucaac

SEQ ID NO: 250905 - RNA, 19 nt, Artificial Sequence
  Description of Artificial Sequence: Synthetic oligonucleotide
agguagcaaguaaccagua

SEQ ID NO: 250906 - RNA, 19 nt, Artificial Sequence
  Description of Artificial Sequence: Synthetic oligonucleotide
gaaggacacgccucuccuu

SEQ ID NO: 250907 - RNA, 19 nt, Artificial Sequence
  Description of Artificial Sequence: Synthetic oligonucleotide
ccaauccaugucugauaug

SEQ ID NO: 250908 - RNA, 19 nt, Artificial Sequence
  Description of Artificial Sequence: Synthetic oligonucleotide
ccguguauauaugcaucac

SEQ ID NO: 250909 - RNA, 19 nt, Artificial Sequence
  Description of Artificial Sequence: Synthetic oligonucleotide
ggcugggauagacaggcau

SEQ ID NO: 250910 - RNA, 19 nt, Artificial Sequence
  Description of Artificial Sequence: Synthetic oligonucleotide
gugucuacucauggggagu

SEQ ID NO: 250911 - RNA, 19 nt, Artificial Sequence
  Description of Artificial Sequence: Synthetic oligonucleotide
gcccuuugugccccaggug

SEQ ID NO: 250912 - RNA, 19 nt, Artificial Sequence
  Description of Artificial Sequence: Synthetic oligonucleotide
cuccuaggcucccgauuca

SEQ ID NO: 250913 - RNA, 19 nt, Artificial Sequence
  Description of Artificial Sequence: Synthetic oligonucleotide
ggggucuuuugaccagauc

SEQ ID NO: 250914 - RNA, 19 nt, Artificial Sequence
  Description of Artificial Sequence: Synthetic oligonucleotide
ccggucuagccacucguuc

SEQ ID NO: 250915 - RNA, 19 nt, Artificial Sequence
  Description of Artificial Sequence: Synthetic oligonucleotide
ggacaacuuggggcuguag

SEQ ID NO: 250916 - RNA, 19 nt, Artificial Sequence
  Description of Artificial Sequence: Synthetic oligonucleotide
caccuaucugugaaagcuu

SEQ ID NO: 250917 - RNA, 19 nt, Artificial Sequence
  Description of Artificial Sequence: Synthetic oligonucleotide
gcuaacaagaccagcucuu

SEQ ID NO: 250918 - RNA, 19 nt, Artificial Sequence
  Description of Artificial Sequence: Synthetic oligonucleotide
cccauggaucaccucccug

SEQ ID NO: 250919 - RNA, 19 nt, Artificial Sequence
  Description of Artificial Sequence: Synthetic oligonucleotide
gcccucauuagaagagauc

SEQ ID NO: 250920 - RNA, 19 nt, Artificial Sequence
  Description of Artificial Sequence: Synthetic oligonucleotide
cuacuccccggugguggug

SEQ ID NO: 250921 - RNA, 19 nt, Artificial Sequence
  Description of Artificial Sequence: Synthetic oligonucleotide
cccauaguggcccauggau

SEQ ID NO: 250922 - RNA, 19 nt, Artificial Sequence
  Description of Artificial Sequence: Synthetic oligonucleotide
ccucacgccggucuagcca

SEQ ID NO: 250923 - RNA, 19 nt, Artificial Sequence
  Description of Artificial Sequence: Synthetic oligonucleotide
gguccuacuccccgguggu

SEQ ID NO: 250924 - RNA, 19 nt, Artificial Sequence
  Description of Artificial Sequence: Synthetic oligonucleotide
ggcccuuugugccccaggu

SEQ ID NO: 250925 - RNA, 19 nt, Artificial Sequence
  Description of Artificial Sequence: Synthetic oligonucleotide
cggucuagccacucguuca

SEQ ID NO: 250926 - RNA, 19 nt, Artificial Sequence
  Description of Artificial Sequence: Synthetic oligonucleotide
gcccauaguggcccaugga

SEQ ID NO: 250927 - RNA, 19 nt, Artificial Sequence
  Description of Artificial Sequence: Synthetic oligonucleotide
cacgccggucuagccacuc

SEQ ID NO: 250928 - RNA, 19 nt, Artificial Sequence
  Description of Artificial Sequence: Synthetic oligonucleotide
gcaucacaggggcaacaua

SEQ ID NO: 250929 - RNA, 19 nt, Artificial Sequence
  Description of Artificial Sequence: Synthetic oligonucleotide
cugcaguacuugagguccu

SEQ ID NO: 250930 - RNA, 19 nt, Artificial Sequence
  Description of Artificial Sequence: Synthetic oligonucleotide
gguggugguggugguggca

SEQ ID NO: 250931 - RNA, 19 nt, Artificial Sequence
  Description of Artificial Sequence: Synthetic oligonucleotide
aucaucccuuggacacaga

SEQ ID NO: 250932 - RNA, 19 nt, Artificial Sequence
  Description of Artificial Sequence: Synthetic oligonucleotide
cuccaguaccaguccccua

SEQ ID NO: 250933 - RNA, 19 nt, Artificial Sequence
  Description of Artificial Sequence: Synthetic oligonucleotide
cguccuugcgggccuuggc

SEQ ID NO: 250934 - RNA, 19 nt, Artificial Sequence
  Description of Artificial Sequence: Synthetic oligonucleotide
ccccaauccaugucugaua

SEQ ID NO: 250935 - RNA, 19 nt, Artificial Sequence
  Description of Artificial Sequence: Synthetic oligonucleotide
cgugugggaaguuucgaau

SEQ ID NO: 250936 - RNA, 19 nt, Artificial Sequence
  Description of Artificial Sequence: Synthetic oligonucleotide
cuaauggguggggucuuuu

SEQ ID NO: 250937 - RNA, 19 nt, Artificial Sequence
  Description of Artificial Sequence: Synthetic oligonucleotide
gggagacgugaaguagaaa

SEQ ID NO: 250938 - RNA, 19 nt, Artificial Sequence
  Description of Artificial Sequence: Synthetic oligonucleotide
gucuagccacucguucagu

SEQ ID NO: 250939 - RNA, 19 nt, Artificial Sequence
  Description of Artificial Sequence: Synthetic oligonucleotide
gcaucguccuugcgggccu

SEQ ID NO: 250940 - RNA, 19 nt, Artificial Sequence
  Description of Artificial Sequence: Synthetic oligonucleotide
gugggaccccaggcucccc

SEQ ID NO: 250941 - RNA, 19 nt, Artificial Sequence
  Description of Artificial Sequence: Synthetic oligonucleotide
cguuucugccuuaaaucau

SEQ ID NO: 250942 - RNA, 19 nt, Artificial Sequence
  Description of Artificial Sequence: Synthetic oligonucleotide
cguauugcgugugggaagu

SEQ ID NO: 250943 - RNA, 19 nt, Artificial Sequence
  Description of Artificial Sequence: Synthetic oligonucleotide
gcggccauucugggcgaug

SEQ ID NO: 250944 - RNA, 19 nt, Artificial Sequence
  Description of Artificial Sequence: Synthetic oligonucleotide
cgucuacaauaguggcuca

SEQ ID NO: 250945 - RNA, 19 nt, Artificial Sequence
  Description of Artificial Sequence: Synthetic oligonucleotide
cgguggugguggugguggc

SEQ ID NO: 250946 - RNA, 19 nt, Artificial Sequence
  Description of Artificial Sequence: Synthetic oligonucleotide
gccccaggugccuaucauu

SEQ ID NO: 250947 - RNA, 19 nt, Artificial Sequence
  Description of Artificial Sequence: Synthetic oligonucleotide
gccuccuaggcucccgauu

SEQ ID NO: 250948 - RNA, 19 nt, Artificial Sequence
  Description of Artificial Sequence: Synthetic oligonucleotide
cagugguguggagcauucu

SEQ ID NO: 250949 - RNA, 19 nt, Artificial Sequence
  Description of Artificial Sequence: Synthetic oligonucleotide
gcccauggaucaccucccu

SEQ ID NO: 250950 - RNA, 19 nt, Artificial Sequence
  Description of Artificial Sequence: Synthetic oligonucleotide
guauugcgugugggaaguu

SEQ ID NO: 250951 - RNA, 19 nt, Artificial Sequence
  Description of Artificial Sequence: Synthetic oligonucleotide
ccuacuccccggugguggu

SEQ ID NO: 250952 - RNA, 19 nt, Artificial Sequence
  Description of Artificial Sequence: Synthetic oligonucleotide
cccaggugccuaucauuau

SEQ ID NO: 250953 - RNA, 19 nt, Artificial Sequence
  Description of Artificial Sequence: Synthetic oligonucleotide
gcuaauggguggggucuuu

SEQ ID NO: 250954 - RNA, 19 nt, Artificial Sequence
  Description of Artificial Sequence: Synthetic oligonucleotide
gugggccaccaugccguuu

SEQ ID NO: 250955 - RNA, 19 nt, Artificial Sequence
  Description of Artificial Sequence: Synthetic oligonucleotide
gccggucuagccacucguu

SEQ ID NO: 250956 - RNA, 19 nt, Artificial Sequence
  Description of Artificial Sequence: Synthetic oligonucleotide
cagcggcacuugucuccau

SEQ ID NO: 250957 - RNA, 19 nt, Artificial Sequence
  Description of Artificial Sequence: Synthetic oligonucleotide
aauaauaggcuucuuaaac

SEQ ID NO: 250958 - RNA, 19 nt, Artificial Sequence
  Description of Artificial Sequence: Synthetic oligonucleotide
aauuagagcuucuaagagc

SEQ ID NO: 250959 - RNA, 19 nt, Artificial Sequence
  Description of Artificial Sequence: Synthetic oligonucleotide
aaucuugggaaacauaacg

SEQ ID NO: 250960 - RNA, 19 nt, Artificial Sequence
  Description of Artificial Sequence: Synthetic oligonucleotide
aagguuucgauuuuauuuc

SEQ ID NO: 250961 - RNA, 19 nt, Artificial Sequence
  Description of Artificial Sequence: Synthetic oligonucleotide
uucacgaaguuucugauag

SEQ ID NO: 250962 - RNA, 19 nt, Artificial Sequence
  Description of Artificial Sequence: Synthetic oligonucleotide
aaauuagagcuucuaagag

SEQ ID NO: 250963 - RNA, 19 nt, Artificial Sequence
  Description of Artificial Sequence: Synthetic oligonucleotide
ucuaagagcagccuggugc

SEQ ID NO: 250964 - RNA, 19 nt, Artificial Sequence
  Description of Artificial Sequence: Synthetic oligonucleotide
ugccaaucaaaacucaucg

SEQ ID NO: 250965 - RNA, 19 nt, Artificial Sequence
  Description of Artificial Sequence: Synthetic oligonucleotide
uuuucguuagcccaaacca

SEQ ID NO: 250966 - RNA, 19 nt, Artificial Sequence
  Description of Artificial Sequence: Synthetic oligonucleotide
uuuaacauggaguccaugc

SEQ ID NO: 250967 - RNA, 19 nt, Artificial Sequence
  Description of Artificial Sequence: Synthetic oligonucleotide
uucaauaugauugcaagcc

SEQ ID NO: 250968 - RNA, 19 nt, Artificial Sequence
  Description of Artificial Sequence: Synthetic oligonucleotide
aaaccugaggcacuagugg

SEQ ID NO: 250969 - RNA, 19 nt, Artificial Sequence
  Description of Artificial Sequence: Synthetic oligonucleotide
uuuucuagcaucgagguac

SEQ ID NO: 250970 - RNA, 19 nt, Artificial Sequence
  Description of Artificial Sequence: Synthetic oligonucleotide
uagcuuacaagaaaauuag

SEQ ID NO: 250971 - RNA, 19 nt, Artificial Sequence
  Description of Artificial Sequence: Synthetic oligonucleotide
ucgguaauaaauagcuugg

SEQ ID NO: 250972 - RNA, 19 nt, Artificial Sequence
  Description of Artificial Sequence: Synthetic oligonucleotide
auacaucaaucauauuugc

SEQ ID NO: 250973 - RNA, 19 nt, Artificial Sequence
  Description of Artificial Sequence: Synthetic oligonucleotide
gacgcuuggacaaagaagc

SEQ ID NO: 250974 - RNA, 19 nt, Artificial Sequence
  Description of Artificial Sequence: Synthetic oligonucleotide
cuaacuaguaauaggcgcc

SEQ ID NO: 250975 - RNA, 19 nt, Artificial Sequence
  Description of Artificial Sequence: Synthetic oligonucleotide
uccucgguaauaaauagcu

SEQ ID NO: 250976 - RNA, 19 nt, Artificial Sequence
  Description of Artificial Sequence: Synthetic oligonucleotide
uguaacagaugucuguaug

SEQ ID NO: 250977 - RNA, 19 nt, Artificial Sequence
  Description of Artificial Sequence: Synthetic oligonucleotide
uuaacagcuaagcccgugg

SEQ ID NO: 250978 - RNA, 19 nt, Artificial Sequence
  Description of Artificial Sequence: Synthetic oligonucleotide
ugcgguuugcaagagaugg

SEQ ID NO: 250979 - RNA, 19 nt, Artificial Sequence
  Description of Artificial Sequence: Synthetic oligonucleotide
uuaacauggaguccaugcc

SEQ ID NO: 250980 - RNA, 19 nt, Artificial Sequence
  Description of Artificial Sequence: Synthetic oligonucleotide
gauuuaagcccaccaaugc

SEQ ID NO: 250981 - RNA, 19 nt, Artificial Sequence
  Description of Artificial Sequence: Synthetic oligonucleotide
aaaagguuggucucuucug

SEQ ID NO: 250982 - RNA, 19 nt, Artificial Sequence
  Description of Artificial Sequence: Synthetic oligonucleotide
uuaggcacgagaaucuuga

SEQ ID NO: 250983 - RNA, 19 nt, Artificial Sequence
  Description of Artificial Sequence: Synthetic oligonucleotide
acggagauguaccuuuucc

SEQ ID NO: 250984 - RNA, 19 nt, Artificial Sequence
  Description of Artificial Sequence: Synthetic oligonucleotide
ggcacgagaaucuugaucc

SEQ ID NO: 250985 - RNA, 19 nt, Artificial Sequence
  Description of Artificial Sequence: Synthetic oligonucleotide
cuagcaucgagguacuugc

SEQ ID NO: 250986 - RNA, 19 nt, Artificial Sequence
  Description of Artificial Sequence: Synthetic oligonucleotide
cugucgucaauaaauuucc

SEQ ID NO: 250987 - RNA, 19 nt, Artificial Sequence
  Description of Artificial Sequence: Synthetic oligonucleotide
aacccauccacgguaaagg

SEQ ID NO: 250988 - RNA, 19 nt, Artificial Sequence
  Description of Artificial Sequence: Synthetic oligonucleotide
uauaggguguuugaaacca

SEQ ID NO: 250989 - RNA, 19 nt, Artificial Sequence
  Description of Artificial Sequence: Synthetic oligonucleotide
accgcaaacaauaaagguc

SEQ ID NO: 250990 - RNA, 19 nt, Artificial Sequence
  Description of Artificial Sequence: Synthetic oligonucleotide
auaacuuagcaaguagcac

SEQ ID NO: 250991 - RNA, 19 nt, Artificial Sequence
  Description of Artificial Sequence: Synthetic oligonucleotide
cuuuucguuagcccaaacc

SEQ ID NO: 250992 - RNA, 19 nt, Artificial Sequence
  Description of Artificial Sequence: Synthetic oligonucleotide
uuuaagcccaccaaugcua

SEQ ID NO: 250993 - RNA, 19 nt, Artificial Sequence
  Description of Artificial Sequence: Synthetic oligonucleotide
gacaauaucucuguaucug

SEQ ID NO: 250994 - RNA, 19 nt, Artificial Sequence
  Description of Artificial Sequence: Synthetic oligonucleotide
cuuuacggggcucuuaggc

SEQ ID NO: 250995 - RNA, 19 nt, Artificial Sequence
  Description of Artificial Sequence: Synthetic oligonucleotide
uguauucggggccugcucc

SEQ ID NO: 250996 - RNA, 19 nt, Artificial Sequence
  Description of Artificial Sequence: Synthetic oligonucleotide
aauaugauugcaagcccag

SEQ ID NO: 250997 - RNA, 19 nt, Artificial Sequence
  Description of Artificial Sequence: Synthetic oligonucleotide
ucaggaaucaguccccacu

SEQ ID NO: 250998 - RNA, 19 nt, Artificial Sequence
  Description of Artificial Sequence: Synthetic oligonucleotide
aaccaagccuuuucguuag

SEQ ID NO: 250999 - RNA, 19 nt, Artificial Sequence
  Description of Artificial Sequence: Synthetic oligonucleotide
uucguuagcccaaaccaca

SEQ ID NO: 251000 - RNA, 19 nt, Artificial Sequence
  Description of Artificial Sequence: Synthetic oligonucleotide
aacgauuuaagcccaccaa

SEQ ID NO: 251001 - RNA, 19 nt, Artificial Sequence
  Description of Artificial Sequence: Synthetic oligonucleotide
aaaacuaugcaaaguagua

SEQ ID NO: 251002 - RNA, 19 nt, Artificial Sequence
  Description of Artificial Sequence: Synthetic oligonucleotide
ucugucguccgugagacgc

SEQ ID NO: 251003 - RNA, 19 nt, Artificial Sequence
  Description of Artificial Sequence: Synthetic oligonucleotide
uggcuagcacucuuuaggg

SEQ ID NO: 251004 - RNA, 19 nt, Artificial Sequence
  Description of Artificial Sequence: Synthetic oligonucleotide
ugagacgccguauaaaaua

SEQ ID NO: 251005 - RNA, 19 nt, Artificial Sequence
  Description of Artificial Sequence: Synthetic oligonucleotide
acugcuacaauaauaggcu

SEQ ID NO: 251006 - RNA, 19 nt, Artificial Sequence
  Description of Artificial Sequence: Synthetic oligonucleotide
aagcaugaguuacuguuga

SEQ ID NO: 251007 - RNA, 19 nt, Artificial Sequence
  Description of Artificial Sequence: Synthetic oligonucleotide
aagugcuuuggguguaguc

SEQ ID NO: 251008 - RNA, 19 nt, Artificial Sequence
  Description of Artificial Sequence: Synthetic oligonucleotide
aaaccaagccuuuucguua

SEQ ID NO: 251009 - RNA, 19 nt, Artificial Sequence
  Description of Artificial Sequence: Synthetic oligonucleotide
uccauuggcuguuagcgca

SEQ ID NO: 251010 - RNA, 19 nt, Artificial Sequence
  Description of Artificial Sequence: Synthetic oligonucleotide
agacgcuccucccauaauc

SEQ ID NO: 251011 - RNA, 19 nt, Artificial Sequence
  Description of Artificial Sequence: Synthetic oligonucleotide
uuucguuagcccaaaccac

SEQ ID NO: 251012 - RNA, 19 nt, Artificial Sequence
  Description of Artificial Sequence: Synthetic oligonucleotide
acaacuagcuuacaagaaa

SEQ ID NO: 251013 - RNA, 19 nt, Artificial Sequence
  Description of Artificial Sequence: Synthetic oligonucleotide
uguuacagcguaccagggc

SEQ ID NO: 251014 - RNA, 19 nt, Artificial Sequence
  Description of Artificial Sequence: Synthetic oligonucleotide
uguagucuuggagagguug

SEQ ID NO: 251015 - RNA, 19 nt, Artificial Sequence
  Description of Artificial Sequence: Synthetic oligonucleotide
acgguaaaggcagauuuac

SEQ ID NO: 251016 - RNA, 19 nt, Artificial Sequence
  Description of Artificial Sequence: Synthetic oligonucleotide
uaguaauaggcgccuguag

SEQ ID NO: 251017 - RNA, 19 nt, Artificial Sequence
  Description of Artificial Sequence: Synthetic oligonucleotide
ugcuacaauaauaggcuuc

SEQ ID NO: 251018 - RNA, 19 nt, Artificial Sequence
  Description of Artificial Sequence: Synthetic oligonucleotide
uaaauagcuuggaugcuuc

SEQ ID NO: 251019 - RNA, 19 nt, Artificial Sequence
  Description of Artificial Sequence: Synthetic oligonucleotide
caugaguuacuguugagga

SEQ ID NO: 251020 - RNA, 19 nt, Artificial Sequence
  Description of Artificial Sequence: Synthetic oligonucleotide
uauauucuaagugaaccua

SEQ ID NO: 251021 - RNA, 19 nt, Artificial Sequence
  Description of Artificial Sequence: Synthetic oligonucleotide
guauucacgaaguuucuga

SEQ ID NO: 251022 - RNA, 19 nt, Artificial Sequence
  Description of Artificial Sequence: Synthetic oligonucleotide
gguauaggguguuugaaac

SEQ ID NO: 251023 - RNA, 19 nt, Artificial Sequence
  Description of Artificial Sequence: Synthetic oligonucleotide
ucuagcaucgagguacuug

SEQ ID NO: 251024 - RNA, 19 nt, Artificial Sequence
  Description of Artificial Sequence: Synthetic oligonucleotide
ugaucccugacuuggcgag

SEQ ID NO: 251025 - RNA, 19 nt, Artificial Sequence
  Description of Artificial Sequence: Synthetic oligonucleotide
uacuacaagugcuuugggu

SEQ ID NO: 251026 - RNA, 19 nt, Artificial Sequence
  Description of Artificial Sequence: Synthetic oligonucleotide
uguuccauuggcuguuagc

SEQ ID NO: 251027 - RNA, 19 nt, Artificial Sequence
  Description of Artificial Sequence: Synthetic oligonucleotide
aaacgcaagcgcuugucaa

SEQ ID NO: 251028 - RNA, 19 nt, Artificial Sequence
  Description of Artificial Sequence: Synthetic oligonucleotide
ccuaacuaguaauaggcgc

SEQ ID NO: 251029 - RNA, 19 nt, Artificial Sequence
  Description of Artificial Sequence: Synthetic oligonucleotide
ugaacggagauguaccuuu

SEQ ID NO: 251030 - RNA, 19 nt, Artificial Sequence
  Description of Artificial Sequence: Synthetic oligonucleotide
ggaaacauaacgguagagc

SEQ ID NO: 251031 - RNA, 19 nt, Artificial Sequence
  Description of Artificial Sequence: Synthetic oligonucleotide
uuuacacacugcacagcgc

SEQ ID NO: 251032 - RNA, 19 nt, Artificial Sequence
  Description of Artificial Sequence: Synthetic oligonucleotide
gcuaauucauaacuuagca

SEQ ID NO: 251033 - RNA, 19 nt, Artificial Sequence
  Description of Artificial Sequence: Synthetic oligonucleotide
acgauuuaagcccaccaau

SEQ ID NO: 251034 - RNA, 19 nt, Artificial Sequence
  Description of Artificial Sequence: Synthetic oligonucleotide
ucagguuauggagugacuc

SEQ ID NO: 251035 - RNA, 19 nt, Artificial Sequence
  Description of Artificial Sequence: Synthetic oligonucleotide
uaacagcuaagcccguggc

SEQ ID NO: 251036 - RNA, 19 nt, Artificial Sequence
  Description of Artificial Sequence: Synthetic oligonucleotide
guauaggguguuugaaacc

SEQ ID NO: 251037 - RNA, 19 nt, Artificial Sequence
  Description of Artificial Sequence: Synthetic oligonucleotide
uauucacgaaguuucugau

SEQ ID NO: 251038 - RNA, 19 nt, Artificial Sequence
  Description of Artificial Sequence: Synthetic oligonucleotide
aauaagguuucgauuuuau

SEQ ID NO: 251039 - RNA, 19 nt, Artificial Sequence
  Description of Artificial Sequence: Synthetic oligonucleotide
agaccgcaaacaauaaagg

SEQ ID NO: 251040 - RNA, 19 nt, Artificial Sequence
  Description of Artificial Sequence: Synthetic oligonucleotide
ugaaagccguccaccgagg

SEQ ID NO: 251041 - RNA, 19 nt, Artificial Sequence
  Description of Artificial Sequence: Synthetic oligonucleotide
acuaguaauaggcgccugu

SEQ ID NO: 251042 - RNA, 19 nt, Artificial Sequence
  Description of Artificial Sequence: Synthetic oligonucleotide
uggagugacucauccagac

SEQ ID NO: 251043 - RNA, 19 nt, Artificial Sequence
  Description of Artificial Sequence: Synthetic oligonucleotide
caauaugauugcaagccca

SEQ ID NO: 251044 - RNA, 19 nt, Artificial Sequence
  Description of Artificial Sequence: Synthetic oligonucleotide
agcuucuaagagcagccug

SEQ ID NO: 251045 - RNA, 19 nt, Artificial Sequence
  Description of Artificial Sequence: Synthetic oligonucleotide
cuuccugacgacaauaucu

SEQ ID NO: 251046 - RNA, 19 nt, Artificial Sequence
  Description of Artificial Sequence: Synthetic oligonucleotide
uaaagacgcuuggacaaag

SEQ ID NO: 251047 - RNA, 19 nt, Artificial Sequence
  Description of Artificial Sequence: Synthetic oligonucleotide
auucuaagugaaccuaaaa

SEQ ID NO: 251048 - RNA, 19 nt, Artificial Sequence
  Description of Artificial Sequence: Synthetic oligonucleotide
acggcagacauaaaagcag

SEQ ID NO: 251049 - RNA, 19 nt, Artificial Sequence
  Description of Artificial Sequence: Synthetic oligonucleotide
uaauaggcgccuguaguca

SEQ ID NO: 251050 - RNA, 19 nt, Artificial Sequence
  Description of Artificial Sequence: Synthetic oligonucleotide
ugggguacucgugaacacg

SEQ ID NO: 251051 - RNA, 19 nt, Artificial Sequence
  Description of Artificial Sequence: Synthetic oligonucleotide
ucuucauguuacagcguac

SEQ ID NO: 251052 - RNA, 19 nt, Artificial Sequence
  Description of Artificial Sequence: Synthetic oligonucleotide
uacauucaauaugauugca

SEQ ID NO: 251053 - RNA, 19 nt, Artificial Sequence
  Description of Artificial Sequence: Synthetic oligonucleotide
gguccugcccuuuacgggg

SEQ ID NO: 251054 - RNA, 19 nt, Artificial Sequence
  Description of Artificial Sequence: Synthetic oligonucleotide
augggguacucgugaacac

SEQ ID NO: 251055 - RNA, 19 nt, Artificial Sequence
  Description of Artificial Sequence: Synthetic oligonucleotide
agcacuuacguaguuauuu

SEQ ID NO: 251056 - RNA, 19 nt, Artificial Sequence
  Description of Artificial Sequence: Synthetic oligonucleotide
auguauucggggccugcuc

SEQ ID NO: 251057 - RNA, 19 nt, Artificial Sequence
  Description of Artificial Sequence: Synthetic oligonucleotide
guuacagcguaccagggcu

SEQ ID NO: 251058 - RNA, 19 nt, Artificial Sequence
  Description of Artificial Sequence: Synthetic oligonucleotide
gcaugaguuacuguugagg

SEQ ID NO: 251059 - RNA, 19 nt, Artificial Sequence
  Description of Artificial Sequence: Synthetic oligonucleotide
gaaacgcaagcgcuuguca

SEQ ID NO: 251060 - RNA, 19 nt, Artificial Sequence
  Description of Artificial Sequence: Synthetic oligonucleotide
agguuucgauuuuauuuca

SEQ ID NO: 251061 - RNA, 19 nt, Artificial Sequence
  Description of Artificial Sequence: Synthetic oligonucleotide
uaacuaguaauaggcgccu

SEQ ID NO: 251062 - RNA, 19 nt, Artificial Sequence
  Description of Artificial Sequence: Synthetic oligonucleotide
guucuugcgguuugcaaga

SEQ ID NO: 251063 - RNA, 19 nt, Artificial Sequence
  Description of Artificial Sequence: Synthetic oligonucleotide
uuucuagcaucgagguacu

SEQ ID NO: 251064 - RNA, 19 nt, Artificial Sequence
  Description of Artificial Sequence: Synthetic oligonucleotide
ucaaucauauuugcagaua

SEQ ID NO: 251065 - RNA, 19 nt, Artificial Sequence
  Description of Artificial Sequence: Synthetic oligonucleotide
uacucgugaacacgauacu

SEQ ID NO: 251066 - RNA, 19 nt, Artificial Sequence
  Description of Artificial Sequence: Synthetic oligonucleotide
ugucgucaauaaauuuccu

SEQ ID NO: 251067 - RNA, 19 nt, Artificial Sequence
  Description of Artificial Sequence: Synthetic oligonucleotide
ccaugaacggagauguacc

SEQ ID NO: 251068 - RNA, 19 nt, Artificial Sequence
  Description of Artificial Sequence: Synthetic oligonucleotide
cuacuacaagugcuuuggg

SEQ ID NO: 251069 - RNA, 19 nt, Artificial Sequence
  Description of Artificial Sequence: Synthetic oligonucleotide
ucucuucugucgucaauaa

SEQ ID NO: 251070 - RNA, 19 nt, Artificial Sequence
  Description of Artificial Sequence: Synthetic oligonucleotide
uucugaguauaaacuucaa

SEQ ID NO: 251071 - RNA, 19 nt, Artificial Sequence
  Description of Artificial Sequence: Synthetic oligonucleotide
agcgcuugucaaaagguug

SEQ ID NO: 251072 - RNA, 19 nt, Artificial Sequence
  Description of Artificial Sequence: Synthetic oligonucleotide
gaccgcaaacaauaaaggu

SEQ ID NO: 251073 - RNA, 19 nt, Artificial Sequence
  Description of Artificial Sequence: Synthetic oligonucleotide
aaguauucacgaaguuucu

SEQ ID NO: 251074 - RNA, 19 nt, Artificial Sequence
  Description of Artificial Sequence: Synthetic oligonucleotide
auauucuaagugaaccuaa

SEQ ID NO: 251075 - RNA, 19 nt, Artificial Sequence
  Description of Artificial Sequence: Synthetic oligonucleotide
uacggggcucuuaggcacg

SEQ ID NO: 251076 - RNA, 19 nt, Artificial Sequence
  Description of Artificial Sequence: Synthetic oligonucleotide
gaaaccaagccuuuucguu

SEQ ID NO: 251077 - RNA, 19 nt, Artificial Sequence
  Description of Artificial Sequence: Synthetic oligonucleotide
ccgcaaacaauaaagguca

SEQ ID NO: 251078 - RNA, 19 nt, Artificial Sequence
  Description of Artificial Sequence: Synthetic oligonucleotide
gcaucgagguacuugcacc

SEQ ID NO: 251079 - RNA, 19 nt, Artificial Sequence
  Description of Artificial Sequence: Synthetic oligonucleotide
ucacgaaguuucugauagc

SEQ ID NO: 251080 - RNA, 19 nt, Artificial Sequence
  Description of Artificial Sequence: Synthetic oligonucleotide
ccagcaaagcuccaacggg

SEQ ID NO: 251081 - RNA, 19 nt, Artificial Sequence
  Description of Artificial Sequence: Synthetic oligonucleotide
uggugcucaauuacauuuu

SEQ ID NO: 251082 - RNA, 19 nt, Artificial Sequence
  Description of Artificial Sequence: Synthetic oligonucleotide
ccugacgacaauaucucug

SEQ ID NO: 251083 - RNA, 19 nt, Artificial Sequence
  Description of Artificial Sequence: Synthetic oligonucleotide
uugcgguuugcaagagaug

SEQ ID NO: 251084 - RNA, 19 nt, Artificial Sequence
  Description of Artificial Sequence: Synthetic oligonucleotide
aagaagcacuuacguaguu

SEQ ID NO: 251085 - RNA, 19 nt, Artificial Sequence
  Description of Artificial Sequence: Synthetic oligonucleotide
ugaaacgcaagcgcuuguc

SEQ ID NO: 251086 - RNA, 19 nt, Artificial Sequence
  Description of Artificial Sequence: Synthetic oligonucleotide
guacuuuaacauggagucc

SEQ ID NO: 251087 - RNA, 19 nt, Artificial Sequence
  Description of Artificial Sequence: Synthetic oligonucleotide
ucguuagcccaaaccacau

SEQ ID NO: 251088 - RNA, 19 nt, Artificial Sequence
  Description of Artificial Sequence: Synthetic oligonucleotide
aacuaguaauaggcgccug

SEQ ID NO: 251089 - RNA, 19 nt, Artificial Sequence
  Description of Artificial Sequence: Synthetic oligonucleotide
gcacuaguggauguauucg

SEQ ID NO: 251090 - RNA, 19 nt, Artificial Sequence
  Description of Artificial Sequence: Synthetic oligonucleotide
cacgauacugugcacagua

SEQ ID NO: 251091 - RNA, 19 nt, Artificial Sequence
  Description of Artificial Sequence: Synthetic oligonucleotide
acauaacgguagagcagcc

SEQ ID NO: 251092 - RNA, 19 nt, Artificial Sequence
  Description of Artificial Sequence: Synthetic oligonucleotide
uccgugagacgccguauaa

SEQ ID NO: 251093 - RNA, 19 nt, Artificial Sequence
  Description of Artificial Sequence: Synthetic oligonucleotide
guaggcacucucugucugc

SEQ ID NO: 251094 - RNA, 19 nt, Artificial Sequence
  Description of Artificial Sequence: Synthetic oligonucleotide
ugcgaaccaugacuuccug

SEQ ID NO: 251095 - RNA, 19 nt, Artificial Sequence
  Description of Artificial Sequence: Synthetic oligonucleotide
caacccauccacgguaaag

SEQ ID NO: 251096 - RNA, 19 nt, Artificial Sequence
  Description of Artificial Sequence: Synthetic oligonucleotide
ugucguccgugagacgccg

SEQ ID NO: 251097 - RNA, 19 nt, Artificial Sequence
  Description of Artificial Sequence: Synthetic oligonucleotide
acgagaaucuugaucccug

SEQ ID NO: 251098 - RNA, 19 nt, Artificial Sequence
  Description of Artificial Sequence: Synthetic oligonucleotide
uagcgcauccaugaacgga

SEQ ID NO: 251099 - RNA, 19 nt, Artificial Sequence
  Description of Artificial Sequence: Synthetic oligonucleotide
cauccaugaacggagaugu

SEQ ID NO: 251100 - RNA, 19 nt, Artificial Sequence
  Description of Artificial Sequence: Synthetic oligonucleotide
gagacgccguauaaaauaa

SEQ ID NO: 251101 - RNA, 19 nt, Artificial Sequence
  Description of Artificial Sequence: Synthetic oligonucleotide
cauaaucuugggaaacaua

SEQ ID NO: 251102 - RNA, 19 nt, Artificial Sequence
  Description of Artificial Sequence: Synthetic oligonucleotide
guauucggggccugcuccc

SEQ ID NO: 251103 - RNA, 19 nt, Artificial Sequence
  Description of Artificial Sequence: Synthetic oligonucleotide
auguuacagcguaccaggg

SEQ ID NO: 251104 - RNA, 19 nt, Artificial Sequence
  Description of Artificial Sequence: Synthetic oligonucleotide
gccuaacuaguaauaggcg

SEQ ID NO: 251105 - RNA, 19 nt, Artificial Sequence
  Description of Artificial Sequence: Synthetic oligonucleotide
cgccguauaaaauaaauaa

SEQ ID NO: 251106 - RNA, 19 nt, Artificial Sequence
  Description of Artificial Sequence: Synthetic oligonucleotide
agaagccuaacuaguaaua

SEQ ID NO: 251107 - RNA, 19 nt, Artificial Sequence
  Description of Artificial Sequence: Synthetic oligonucleotide
gcuuccaagcaugaguuac

SEQ ID NO: 251108 - RNA, 19 nt, Artificial Sequence
  Description of Artificial Sequence: Synthetic oligonucleotide
cacaagaagcacuuacgua

SEQ ID NO: 251109 - RNA, 19 nt, Artificial Sequence
  Description of Artificial Sequence: Synthetic oligonucleotide
cucgugaacacgauacugu

SEQ ID NO: 251110 - RNA, 19 nt, Artificial Sequence
  Description of Artificial Sequence: Synthetic oligonucleotide
ggugguauaggguguuuga

SEQ ID NO: 251111 - RNA, 19 nt, Artificial Sequence
  Description of Artificial Sequence: Synthetic oligonucleotide
cugacgacaauaucucugu

SEQ ID NO: 251112 - RNA, 19 nt, Artificial Sequence
  Description of Artificial Sequence: Synthetic oligonucleotide
gcgcuugucaaaagguugg

SEQ ID NO: 251113 - RNA, 19 nt, Artificial Sequence
  Description of Artificial Sequence: Synthetic oligonucleotide
gaucccugacuuggcgagg

SEQ ID NO: 251114 - RNA, 19 nt, Artificial Sequence
  Description of Artificial Sequence: Synthetic oligonucleotide
gacgccguauaaaauaaau

SEQ ID NO: 251115 - RNA, 19 nt, Artificial Sequence
  Description of Artificial Sequence: Synthetic oligonucleotide
cuaagagcagccuggugcu

SEQ ID NO: 251116 - RNA, 19 nt, Artificial Sequence
  Description of Artificial Sequence: Synthetic oligonucleotide
uucugucguccgugagacg

SEQ ID NO: 251117 - RNA, 19 nt, Artificial Sequence
  Description of Artificial Sequence: Synthetic oligonucleotide
auaaagacgcuuggacaaa

SEQ ID NO: 251118 - RNA, 19 nt, Artificial Sequence
  Description of Artificial Sequence: Synthetic oligonucleotide
cagcuugcgcccacugagc

SEQ ID NO: 251119 - RNA, 19 nt, Artificial Sequence
  Description of Artificial Sequence: Synthetic oligonucleotide
gccaaaacaccugggagac

SEQ ID NO: 251120 - RNA, 19 nt, Artificial Sequence
  Description of Artificial Sequence: Synthetic oligonucleotide
cugucguccgugagacgcc

SEQ ID NO: 251121 - RNA, 19 nt, Artificial Sequence
  Description of Artificial Sequence: Synthetic oligonucleotide
gucgucaauaaauuuccuu

SEQ ID NO: 251122 - RNA, 19 nt, Artificial Sequence
  Description of Artificial Sequence: Synthetic oligonucleotide
acgccguauaaaauaaaua

SEQ ID NO: 251123 - RNA, 19 nt, Artificial Sequence
  Description of Artificial Sequence: Synthetic oligonucleotide
caucgauuuuccucugcaa

SEQ ID NO: 251124 - RNA, 19 nt, Artificial Sequence
  Description of Artificial Sequence: Synthetic oligonucleotide
caugaacggagauguaccu

SEQ ID NO: 251125 - RNA, 19 nt, Artificial Sequence
  Description of Artificial Sequence: Synthetic oligonucleotide
cccuuuacggggcucuuag

SEQ ID NO: 251126 - RNA, 19 nt, Artificial Sequence
  Description of Artificial Sequence: Synthetic oligonucleotide
caagaagcacuuacguagu

SEQ ID NO: 251127 - RNA, 19 nt, Artificial Sequence
  Description of Artificial Sequence: Synthetic oligonucleotide
uacaagugcuuugggugua

SEQ ID NO: 251128 - RNA, 19 nt, Artificial Sequence
  Description of Artificial Sequence: Synthetic oligonucleotide
cagaagccuaacuaguaau

SEQ ID NO: 251129 - RNA, 19 nt, Artificial Sequence
  Description of Artificial Sequence: Synthetic oligonucleotide
cauaacgguagagcagcca

SEQ ID NO: 251130 - RNA, 19 nt, Artificial Sequence
  Description of Artificial Sequence: Synthetic oligonucleotide
cuaguaauaggcgccugua

SEQ ID NO: 251131 - RNA, 19 nt, Artificial Sequence
  Description of Artificial Sequence: Synthetic oligonucleotide
cacgguaaaggcagauuua

SEQ ID NO: 251132 - RNA, 19 nt, Artificial Sequence
  Description of Artificial Sequence: Synthetic oligonucleotide
uagccaauagcuggcuguu

SEQ ID NO: 251133 - RNA, 19 nt, Artificial Sequence
  Description of Artificial Sequence: Synthetic oligonucleotide
cgugaacacgauacugugc

SEQ ID NO: 251134 - RNA, 19 nt, Artificial Sequence
  Description of Artificial Sequence: Synthetic oligonucleotide
acuuagcaaguagcacuca

SEQ ID NO: 251135 - RNA, 19 nt, Artificial Sequence
  Description of Artificial Sequence: Synthetic oligonucleotide
augaacggagauguaccuu

SEQ ID NO: 251136 - RNA, 19 nt, Artificial Sequence
  Description of Artificial Sequence: Synthetic oligonucleotide
acgaaguuucugauagcau

SEQ ID NO: 251137 - RNA, 19 nt, Artificial Sequence
  Description of Artificial Sequence: Synthetic oligonucleotide
gacgcuccucccauaaucu

SEQ ID NO: 251138 - RNA, 19 nt, Artificial Sequence
  Description of Artificial Sequence: Synthetic oligonucleotide
cuucuaguccugcuuccaa

SEQ ID NO: 251139 - RNA, 19 nt, Artificial Sequence
  Description of Artificial Sequence: Synthetic oligonucleotide
uaggcacgagaaucuugau

SEQ ID NO: 251140 - RNA, 19 nt, Artificial Sequence
  Description of Artificial Sequence: Synthetic oligonucleotide
acgcaagcgcuugucaaaa

SEQ ID NO: 251141 - RNA, 19 nt, Artificial Sequence
  Description of Artificial Sequence: Synthetic oligonucleotide
uacagcguaccagggcuuu

SEQ ID NO: 251142 - RNA, 19 nt, Artificial Sequence
  Description of Artificial Sequence: Synthetic oligonucleotide
gcgguuugcaagagauggg

SEQ ID NO: 251143 - RNA, 19 nt, Artificial Sequence
  Description of Artificial Sequence: Synthetic oligonucleotide
ccuuuacggggcucuuagg

SEQ ID NO: 251144 - RNA, 19 nt, Artificial Sequence
  Description of Artificial Sequence: Synthetic oligonucleotide
ggcuguuagcgcauccaug

SEQ ID NO: 251145 - RNA, 19 nt, Artificial Sequence
  Description of Artificial Sequence: Synthetic oligonucleotide
auaggguguuugaaaccaa

SEQ ID NO: 251146 - RNA, 19 nt, Artificial Sequence
  Description of Artificial Sequence: Synthetic oligonucleotide
cuaagcccguggccauggc

SEQ ID NO: 251147 - RNA, 19 nt, Artificial Sequence
  Description of Artificial Sequence: Synthetic oligonucleotide
gggguacucgugaacacga

SEQ ID NO: 251148 - RNA, 19 nt, Artificial Sequence
  Description of Artificial Sequence: Synthetic oligonucleotide
gaaucaguccccacuccau

SEQ ID NO: 251149 - RNA, 19 nt, Artificial Sequence
  Description of Artificial Sequence: Synthetic oligonucleotide
uggaugcuccuaguccaau

SEQ ID NO: 251150 - RNA, 19 nt, Artificial Sequence
  Description of Artificial Sequence: Synthetic oligonucleotide
acacgauacugugcacagu

SEQ ID NO: 251151 - RNA, 19 nt, Artificial Sequence
  Description of Artificial Sequence: Synthetic oligonucleotide
ccuugaugcgaaccaugac

SEQ ID NO: 251152 - RNA, 19 nt, Artificial Sequence
  Description of Artificial Sequence: Synthetic oligonucleotide
auccacgguaaaggcagau

SEQ ID NO: 251153 - RNA, 19 nt, Artificial Sequence
  Description of Artificial Sequence: Synthetic oligonucleotide
acgcuuggacaaagaagcu

SEQ ID NO: 251154 - RNA, 19 nt, Artificial Sequence
  Description of Artificial Sequence: Synthetic oligonucleotide
ggauguauucggggccugc

SEQ ID NO: 251155 - RNA, 19 nt, Artificial Sequence
  Description of Artificial Sequence: Synthetic oligonucleotide
cacacgcuggggaggcguc

SEQ ID NO: 251156 - RNA, 19 nt, Artificial Sequence
  Description of Artificial Sequence: Synthetic oligonucleotide
acgauacugugcacaguau

SEQ ID NO: 251157 - RNA, 19 nt, Artificial Sequence
  Description of Artificial Sequence: Synthetic oligonucleotide
agacgccguauaaaauaaa

SEQ ID NO: 251158 - RNA, 19 nt, Artificial Sequence
  Description of Artificial Sequence: Synthetic oligonucleotide
gguuucgauuuuauuucaa

SEQ ID NO: 251159 - RNA, 19 nt, Artificial Sequence
  Description of Artificial Sequence: Synthetic oligonucleotide
ccagaagccuaacuaguaa

SEQ ID NO: 251160 - RNA, 19 nt, Artificial Sequence
  Description of Artificial Sequence: Synthetic oligonucleotide
cugggcggagccccagauc

SEQ ID NO: 251161 - RNA, 19 nt, Artificial Sequence
  Description of Artificial Sequence: Synthetic oligonucleotide
uccucgggaccuugcucua

SEQ ID NO: 251162 - RNA, 19 nt, Artificial Sequence
  Description of Artificial Sequence: Synthetic oligonucleotide
ccacaagaagcacuuacgu

SEQ ID NO: 251163 - RNA, 19 nt, Artificial Sequence
  Description of Artificial Sequence: Synthetic oligonucleotide
gggcucuuaggcacgagaa

SEQ ID NO: 251164 - RNA, 19 nt, Artificial Sequence
  Description of Artificial Sequence: Synthetic oligonucleotide
cacgagaaucuugaucccu

SEQ ID NO: 251165 - RNA, 19 nt, Artificial Sequence
  Description of Artificial Sequence: Synthetic oligonucleotide
gagcuucuaagagcagccu

SEQ ID NO: 251166 - RNA, 19 nt, Artificial Sequence
  Description of Artificial Sequence: Synthetic oligonucleotide
cacugaaacgcaagcgcuu

SEQ ID NO: 251167 - RNA, 19 nt, Artificial Sequence
  Description of Artificial Sequence: Synthetic oligonucleotide
acacgcuggggaggcguca

SEQ ID NO: 251168 - RNA, 19 nt, Artificial Sequence
  Description of Artificial Sequence: Synthetic oligonucleotide
gcacuuacguaguuauuuu

SEQ ID NO: 251169 - RNA, 19 nt, Artificial Sequence
  Description of Artificial Sequence: Synthetic oligonucleotide
gcccaccaaugcuaauuca

SEQ ID NO: 251170 - RNA, 19 nt, Artificial Sequence
  Description of Artificial Sequence: Synthetic oligonucleotide
uucuagcaucgagguacuu

SEQ ID NO: 251171 - RNA, 19 nt, Artificial Sequence
  Description of Artificial Sequence: Synthetic oligonucleotide
ccacgguaaaggcagauuu

SEQ ID NO: 251172 - RNA, 19 nt, Artificial Sequence
  Description of Artificial Sequence: Synthetic oligonucleotide
ggcgucaguucugaguaua

SEQ ID NO: 251173 - RNA, 19 nt, Artificial Sequence
  Description of Artificial Sequence: Synthetic oligonucleotide
cguaccagggcuuuggauu

SEQ ID NO: 251174 - RNA, 19 nt, Artificial Sequence
  Description of Artificial Sequence: Synthetic oligonucleotide
gggaggcgucaguucugag

SEQ ID NO: 251175 - RNA, 19 nt, Artificial Sequence
  Description of Artificial Sequence: Synthetic oligonucleotide
agccaauagcuggcuguuu

SEQ ID NO: 251176 - RNA, 19 nt, Artificial Sequence
  Description of Artificial Sequence: Synthetic oligonucleotide
ccccacaacuagcuuacaa

SEQ ID NO: 251177 - RNA, 19 nt, Artificial Sequence
  Description of Artificial Sequence: Synthetic oligonucleotide
ccgagguccugcccuuuac

SEQ ID NO: 251178 - RNA, 19 nt, Artificial Sequence
  Description of Artificial Sequence: Synthetic oligonucleotide
cgcaagcgcuugucaaaag

SEQ ID NO: 251179 - RNA, 19 nt, Artificial Sequence
  Description of Artificial Sequence: Synthetic oligonucleotide
cguuagcccaaaccacauc

SEQ ID NO: 251180 - RNA, 19 nt, Artificial Sequence
  Description of Artificial Sequence: Synthetic oligonucleotide
auccaugaacggagaugua

SEQ ID NO: 251181 - RNA, 19 nt, Artificial Sequence
  Description of Artificial Sequence: Synthetic oligonucleotide
gcgucaguucugaguauaa

SEQ ID NO: 251182 - RNA, 19 nt, Artificial Sequence
  Description of Artificial Sequence: Synthetic oligonucleotide
cagcuaagcccguggccau

SEQ ID NO: 251183 - RNA, 19 nt, Artificial Sequence
  Description of Artificial Sequence: Synthetic oligonucleotide
gccuuuucguuagcccaaa

SEQ ID NO: 251184 - RNA, 19 nt, Artificial Sequence
  Description of Artificial Sequence: Synthetic oligonucleotide
gcguaccagggcuuuggau

SEQ ID NO: 251185 - RNA, 19 nt, Artificial Sequence
  Description of Artificial Sequence: Synthetic oligonucleotide
cgcaaacaauaaaggucaa

SEQ ID NO: 251186 - RNA, 19 nt, Artificial Sequence
  Description of Artificial Sequence: Synthetic oligonucleotide
ccgugagacgccguauaaa

SEQ ID NO: 251187 - RNA, 19 nt, Artificial Sequence
  Description of Artificial Sequence: Synthetic oligonucleotide
gcgcauccaugaacggaga

SEQ ID NO: 251188 - RNA, 19 nt, Artificial Sequence
  Description of Artificial Sequence: Synthetic oligonucleotide
ccucgguaauaaauagcuu

SEQ ID NO: 251189 - RNA, 19 nt, Artificial Sequence
  Description of Artificial Sequence: Synthetic oligonucleotide
ccaacccauccacgguaaa

SEQ ID NO: 251190 - RNA, 19 nt, Artificial Sequence
  Description of Artificial Sequence: Synthetic oligonucleotide
ccauuggcuguuagcgcau

SEQ ID NO: 251191 - RNA, 19 nt, Artificial Sequence
  Description of Artificial Sequence: Synthetic oligonucleotide
guguagucuuggagagguu

SEQ ID NO: 251192 - RNA, 19 nt, Artificial Sequence
  Description of Artificial Sequence: Synthetic oligonucleotide
gcccuuuacggggcucuua

SEQ ID NO: 251193 - RNA, 19 nt, Artificial Sequence
  Description of Artificial Sequence: Synthetic oligonucleotide
gucguccgugagacgccgu

SEQ ID NO: 251194 - RNA, 19 nt, Artificial Sequence
  Description of Artificial Sequence: Synthetic oligonucleotide
gcacagcgcuccacacgcu

SEQ ID NO: 251195 - RNA, 19 nt, Artificial Sequence
  Description of Artificial Sequence: Synthetic oligonucleotide
aaugaauugaacuuucagc

SEQ ID NO: 251196 - RNA, 19 nt, Artificial Sequence
  Description of Artificial Sequence: Synthetic oligonucleotide
augaauugaacuuucagcc

SEQ ID NO: 251197 - RNA, 19 nt, Artificial Sequence
  Description of Artificial Sequence: Synthetic oligonucleotide
aaagugauaaucacggucc

SEQ ID NO: 251198 - RNA, 19 nt, Artificial Sequence
  Description of Artificial Sequence: Synthetic oligonucleotide
aaacgacggagguagaggc

SEQ ID NO: 251199 - RNA, 19 nt, Artificial Sequence
  Description of Artificial Sequence: Synthetic oligonucleotide
aacgauaagcuacugcuag

SEQ ID NO: 251200 - RNA, 19 nt, Artificial Sequence
  Description of Artificial Sequence: Synthetic oligonucleotide
auggauaucacccucacga

SEQ ID NO: 251201 - RNA, 19 nt, Artificial Sequence
  Description of Artificial Sequence: Synthetic oligonucleotide
aauagaacauuuaggcggc

SEQ ID NO: 251202 - RNA, 19 nt, Artificial Sequence
  Description of Artificial Sequence: Synthetic oligonucleotide
gaauguuaggaucuuuggg

SEQ ID NO: 251203 - RNA, 19 nt, Artificial Sequence
  Description of Artificial Sequence: Synthetic oligonucleotide
aacgcauccacacaugcug

SEQ ID NO: 251204 - RNA, 19 nt, Artificial Sequence
  Description of Artificial Sequence: Synthetic oligonucleotide
aaguacugaaacccgcucg

SEQ ID NO: 251205 - RNA, 19 nt, Artificial Sequence
  Description of Artificial Sequence: Synthetic oligonucleotide
aucaaguggccacagacac

SEQ ID NO: 251206 - RNA, 19 nt, Artificial Sequence
  Description of Artificial Sequence: Synthetic oligonucleotide
aaacagauauucuuccuca

SEQ ID NO: 251207 - RNA, 19 nt, Artificial Sequence
  Description of Artificial Sequence: Synthetic oligonucleotide
aacagaaucugauguuggg

SEQ ID NO: 251208 - RNA, 19 nt, Artificial Sequence
  Description of Artificial Sequence: Synthetic oligonucleotide
acagcucagauauaauugg

SEQ ID NO: 251209 - RNA, 19 nt, Artificial Sequence
  Description of Artificial Sequence: Synthetic oligonucleotide
acugcuagagaacuaagug

SEQ ID NO: 251210 - RNA, 19 nt, Artificial Sequence
  Description of Artificial Sequence: Synthetic oligonucleotide
uuacaaacgaugcaucgga

SEQ ID NO: 251211 - RNA, 19 nt, Artificial Sequence
  Description of Artificial Sequence: Synthetic oligonucleotide
aaggggacgccauccaggc

SEQ ID NO: 251212 - RNA, 19 nt, Artificial Sequence
  Description of Artificial Sequence: Synthetic oligonucleotide
aaggggaucgagcucuugg

SEQ ID NO: 251213 - RNA, 19 nt, Artificial Sequence
  Description of Artificial Sequence: Synthetic oligonucleotide
auuuaggcggcuauaaaac

SEQ ID NO: 251214 - RNA, 19 nt, Artificial Sequence
  Description of Artificial Sequence: Synthetic oligonucleotide
agaccugcucauuacuucc

SEQ ID NO: 251215 - RNA, 19 nt, Artificial Sequence
  Description of Artificial Sequence: Synthetic oligonucleotide
uggaauguuaggaucuuug

SEQ ID NO: 251216 - RNA, 19 nt, Artificial Sequence
  Description of Artificial Sequence: Synthetic oligonucleotide
ucugauguugggaaguacu

SEQ ID NO: 251217 - RNA, 19 nt, Artificial Sequence
  Description of Artificial Sequence: Synthetic oligonucleotide
aguagaccgagccauugac

SEQ ID NO: 251218 - RNA, 19 nt, Artificial Sequence
  Description of Artificial Sequence: Synthetic oligonucleotide
accaagucaaaccauuuug

SEQ ID NO: 251219 - RNA, 19 nt, Artificial Sequence
  Description of Artificial Sequence: Synthetic oligonucleotide
ugugugugggccuccaacg

SEQ ID NO: 251220 - RNA, 19 nt, Artificial Sequence
  Description of Artificial Sequence: Synthetic oligonucleotide
acuauacagacucuugaug

SEQ ID NO: 251221 - RNA, 19 nt, Artificial Sequence
  Description of Artificial Sequence: Synthetic oligonucleotide
ugcuagagaacuaagugua

SEQ ID NO: 251222 - RNA, 19 nt, Artificial Sequence
  Description of Artificial Sequence: Synthetic oligonucleotide
agcaaccaaggacaggccc

SEQ ID NO: 251223 - RNA, 19 nt, Artificial Sequence
  Description of Artificial Sequence: Synthetic oligonucleotide
aaugcucaaucccuagaug

SEQ ID NO: 251224 - RNA, 19 nt, Artificial Sequence
  Description of Artificial Sequence: Synthetic oligonucleotide
aacugagugucguccgggc

SEQ ID NO: 251225 - RNA, 19 nt, Artificial Sequence
  Description of Artificial Sequence: Synthetic oligonucleotide
cauuccuugccucaacugg

SEQ ID NO: 251226 - RNA, 19 nt, Artificial Sequence
  Description of Artificial Sequence: Synthetic oligonucleotide
auaaucacgguccauggau

SEQ ID NO: 251227 - RNA, 19 nt, Artificial Sequence
  Description of Artificial Sequence: Synthetic oligonucleotide
ugcacuucaaccccgcgug

SEQ ID NO: 251228 - RNA, 19 nt, Artificial Sequence
  Description of Artificial Sequence: Synthetic oligonucleotide
agcaagugaacugacuucg

SEQ ID NO: 251229 - RNA, 19 nt, Artificial Sequence
  Description of Artificial Sequence: Synthetic oligonucleotide
gacuuaggugaauucaagc

SEQ ID NO: 251230 - RNA, 19 nt, Artificial Sequence
  Description of Artificial Sequence: Synthetic oligonucleotide
aacgaagggaccagcagac

SEQ ID NO: 251231 - RNA, 19 nt, Artificial Sequence
  Description of Artificial Sequence: Synthetic oligonucleotide
uuaggcggcuauaaaacac

SEQ ID NO: 251232 - RNA, 19 nt, Artificial Sequence
  Description of Artificial Sequence: Synthetic oligonucleotide
cuuguguaggguacaacag

SEQ ID NO: 251233 - RNA, 19 nt, Artificial Sequence
  Description of Artificial Sequence: Synthetic oligonucleotide
uuguguaggguacaacaga

SEQ ID NO: 251234 - RNA, 19 nt, Artificial Sequence
  Description of Artificial Sequence: Synthetic oligonucleotide
uuuaggcggcuauaaaaca

SEQ ID NO: 251235 - RNA, 19 nt, Artificial Sequence
  Description of Artificial Sequence: Synthetic oligonucleotide
uguuagcucguccugguaa

SEQ ID NO: 251236 - RNA, 19 nt, Artificial Sequence
  Description of Artificial Sequence: Synthetic oligonucleotide
caacagaaucugauguugg

SEQ ID NO: 251237 - RNA, 19 nt, Artificial Sequence
  Description of Artificial Sequence: Synthetic oligonucleotide
ugcagcgcaaaguucgucc

SEQ ID NO: 251238 - RNA, 19 nt, Artificial Sequence
  Description of Artificial Sequence: Synthetic oligonucleotide
cucgguguaaugaagagaa

SEQ ID NO: 251239 - RNA, 19 nt, Artificial Sequence
  Description of Artificial Sequence: Synthetic oligonucleotide
aggggaucgagcucuuggc

SEQ ID NO: 251240 - RNA, 19 nt, Artificial Sequence
  Description of Artificial Sequence: Synthetic oligonucleotide
agaaucugauguugggaag

SEQ ID NO: 251241 - RNA, 19 nt, Artificial Sequence
  Description of Artificial Sequence: Synthetic oligonucleotide
uacugcuagagaacuaagu

SEQ ID NO: 251242 - RNA, 19 nt, Artificial Sequence
  Description of Artificial Sequence: Synthetic oligonucleotide
acuaaguguaaaagucacc

SEQ ID NO: 251243 - RNA, 19 nt, Artificial Sequence
  Description of Artificial Sequence: Synthetic oligonucleotide
cauaugggaagcucucuag

SEQ ID NO: 251244 - RNA, 19 nt, Artificial Sequence
  Description of Artificial Sequence: Synthetic oligonucleotide
uggcccauagccuuuaauc

SEQ ID NO: 251245 - RNA, 19 nt, Artificial Sequence
  Description of Artificial Sequence: Synthetic oligonucleotide
ggaauguuaggaucuuugg

SEQ ID NO: 251246 - RNA, 19 nt, Artificial Sequence
  Description of Artificial Sequence: Synthetic oligonucleotide
acugguccgauugacuggc

SEQ ID NO: 251247 - RNA, 19 nt, Artificial Sequence
  Description of Artificial Sequence: Synthetic oligonucleotide
gacggaaccccuccggagg

SEQ ID NO: 251248 - RNA, 19 nt, Artificial Sequence
  Description of Artificial Sequence: Synthetic oligonucleotide
gacuucgccacauccagac

SEQ ID NO: 251249 - RNA, 19 nt, Artificial Sequence
  Description of Artificial Sequence: Synthetic oligonucleotide
aggcaaacgacggagguag

SEQ ID NO: 251250 - RNA, 19 nt, Artificial Sequence
  Description of Artificial Sequence: Synthetic oligonucleotide
auacagacucuugaugaac

SEQ ID NO: 251251 - RNA, 19 nt, Artificial Sequence
  Description of Artificial Sequence: Synthetic oligonucleotide
gaacuaaguguaaaaguca

SEQ ID NO: 251252 - RNA, 19 nt, Artificial Sequence
  Description of Artificial Sequence: Synthetic oligonucleotide
uaaaaucaaguggccacag

SEQ ID NO: 251253 - RNA, 19 nt, Artificial Sequence
  Description of Artificial Sequence: Synthetic oligonucleotide
aacauuuaggcggcuauaa

SEQ ID NO: 251254 - RNA, 19 nt, Artificial Sequence
  Description of Artificial Sequence: Synthetic oligonucleotide
aacgaugcaucggaagcag

SEQ ID NO: 251255 - RNA, 19 nt, Artificial Sequence
  Description of Artificial Sequence: Synthetic oligonucleotide
caagugaacugacuucgcc

SEQ ID NO: 251256 - RNA, 19 nt, Artificial Sequence
  Description of Artificial Sequence: Synthetic oligonucleotide
gauugacuggcacggccgg

SEQ ID NO: 251257 - RNA, 19 nt, Artificial Sequence
  Description of Artificial Sequence: Synthetic oligonucleotide
aaacgaugcaucggaagca

SEQ ID NO: 251258 - RNA, 19 nt, Artificial Sequence
  Description of Artificial Sequence: Synthetic oligonucleotide
uaggcggcuauaaaacacu

SEQ ID NO: 251259 - RNA, 19 nt, Artificial Sequence
  Description of Artificial Sequence: Synthetic oligonucleotide
aaucacgguccauggauau

SEQ ID NO: 251260 - RNA, 19 nt, Artificial Sequence
  Description of Artificial Sequence: Synthetic oligonucleotide
aagugauaaucacggucca

SEQ ID NO: 251261 - RNA, 19 nt, Artificial Sequence
  Description of Artificial Sequence: Synthetic oligonucleotide
gacggcucaauccccgagg

SEQ ID NO: 251262 - RNA, 19 nt, Artificial Sequence
  Description of Artificial Sequence: Synthetic oligonucleotide
agaacauuuaggcggcuau

SEQ ID NO: 251263 - RNA, 19 nt, Artificial Sequence
  Description of Artificial Sequence: Synthetic oligonucleotide
cucagugcacuucaacccc

SEQ ID NO: 251264 - RNA, 19 nt, Artificial Sequence
  Description of Artificial Sequence: Synthetic oligonucleotide
cacacgcggauacaaacgc

SEQ ID NO: 251265 - RNA, 19 nt, Artificial Sequence
  Description of Artificial Sequence: Synthetic oligonucleotide
gaaggggacgccauccagg

SEQ ID NO: 251266 - RNA, 19 nt, Artificial Sequence
  Description of Artificial Sequence: Synthetic oligonucleotide
gacuagaaccaagucaaac

SEQ ID NO: 251267 - RNA, 19 nt, Artificial Sequence
  Description of Artificial Sequence: Synthetic oligonucleotide
ugcucgguguaaugaagag

SEQ ID NO: 251268 - RNA, 19 nt, Artificial Sequence
  Description of Artificial Sequence: Synthetic oligonucleotide
auaugggaagcucucuagu

SEQ ID NO: 251269 - RNA, 19 nt, Artificial Sequence
  Description of Artificial Sequence: Synthetic oligonucleotide
cuacuggcgaagcuggagc

SEQ ID NO: 251270 - RNA, 19 nt, Artificial Sequence
  Description of Artificial Sequence: Synthetic oligonucleotide
agguggacggaaccccucc

SEQ ID NO: 251271 - RNA, 19 nt, Artificial Sequence
  Description of Artificial Sequence: Synthetic oligonucleotide
aguucguccacaggaacag

SEQ ID NO: 251272 - RNA, 19 nt, Artificial Sequence
  Description of Artificial Sequence: Synthetic oligonucleotide
gauaucacccucacgaugu

SEQ ID NO: 251273 - RNA, 19 nt, Artificial Sequence
  Description of Artificial Sequence: Synthetic oligonucleotide
augcccucucgagugaucc

SEQ ID NO: 251274 - RNA, 19 nt, Artificial Sequence
  Description of Artificial Sequence: Synthetic oligonucleotide
augagcgcacagucggucg

SEQ ID NO: 251275 - RNA, 19 nt, Artificial Sequence
  Description of Artificial Sequence: Synthetic oligonucleotide
cagcucagauauaauuggc

SEQ ID NO: 251276 - RNA, 19 nt, Artificial Sequence
  Description of Artificial Sequence: Synthetic oligonucleotide
augccgacugguccgauug

SEQ ID NO: 251277 - RNA, 19 nt, Artificial Sequence
  Description of Artificial Sequence: Synthetic oligonucleotide
agcggacuagaaccaaguc

SEQ ID NO: 251278 - RNA, 19 nt, Artificial Sequence
  Description of Artificial Sequence: Synthetic oligonucleotide
caagccucagccaagcgga

SEQ ID NO: 251279 - RNA, 19 nt, Artificial Sequence
  Description of Artificial Sequence: Synthetic oligonucleotide
uucaagccucagccaagcg

SEQ ID NO: 251280 - RNA, 19 nt, Artificial Sequence
  Description of Artificial Sequence: Synthetic oligonucleotide
ggagcgagggcugagagcc

SEQ ID NO: 251281 - RNA, 19 nt, Artificial Sequence
  Description of Artificial Sequence: Synthetic oligonucleotide
gauugcagaaugcauuccu

SEQ ID NO: 251282 - RNA, 19 nt, Artificial Sequence
  Description of Artificial Sequence: Synthetic oligonucleotide
agccuauuuggaauguuag

SEQ ID NO: 251283 - RNA, 19 nt, Artificial Sequence
  Description of Artificial Sequence: Synthetic oligonucleotide
ucgagcucuuggcaaccgg

SEQ ID NO: 251284 - RNA, 19 nt, Artificial Sequence
  Description of Artificial Sequence: Synthetic oligonucleotide
guccgauugacuggcacgg

SEQ ID NO: 251285 - RNA, 19 nt, Artificial Sequence
  Description of Artificial Sequence: Synthetic oligonucleotide
uccagccgaaaaucuagga

SEQ ID NO: 251286 - RNA, 19 nt, Artificial Sequence
  Description of Artificial Sequence: Synthetic oligonucleotide
cuuaggugaauucaagccu

SEQ ID NO: 251287 - RNA, 19 nt, Artificial Sequence
  Description of Artificial Sequence: Synthetic oligonucleotide
gccggagcaguauucaagg

SEQ ID NO: 251288 - RNA, 19 nt, Artificial Sequence
  Description of Artificial Sequence: Synthetic oligonucleotide
caagcggacuagaaccaag

SEQ ID NO: 251289 - RNA, 19 nt, Artificial Sequence
  Description of Artificial Sequence: Synthetic oligonucleotide
caugcuugaugccgacugg

SEQ ID NO: 251290 - RNA, 19 nt, Artificial Sequence
  Description of Artificial Sequence: Synthetic oligonucleotide
gguccgauugacuggcacg

SEQ ID NO: 251291 - RNA, 19 nt, Artificial Sequence
  Description of Artificial Sequence: Synthetic oligonucleotide
guagaccgagccauugacg

SEQ ID NO: 251292 - RNA, 19 nt, Artificial Sequence
  Description of Artificial Sequence: Synthetic oligonucleotide
gacagccaagaaaugacuc

SEQ ID NO: 251293 - RNA, 19 nt, Artificial Sequence
  Description of Artificial Sequence: Synthetic oligonucleotide
uacaaacgaugcaucggaa

SEQ ID NO: 251294 - RNA, 19 nt, Artificial Sequence
  Description of Artificial Sequence: Synthetic oligonucleotide
uuagcucguccugguaacg

SEQ ID NO: 251295 - RNA, 19 nt, Artificial Sequence
  Description of Artificial Sequence: Synthetic oligonucleotide
agacuuaggugaauucaag

SEQ ID NO: 251296 - RNA, 19 nt, Artificial Sequence
  Description of Artificial Sequence: Synthetic oligonucleotide
uacaggugccaaaguaauc

SEQ ID NO: 251297 - RNA, 19 nt, Artificial Sequence
  Description of Artificial Sequence: Synthetic oligonucleotide
ugggacguugcuugaauuu

SEQ ID NO: 251298 - RNA, 19 nt, Artificial Sequence
  Description of Artificial Sequence: Synthetic oligonucleotide
cuugcuugcgucgcuggcc

SEQ ID NO: 251299 - RNA, 19 nt, Artificial Sequence
  Description of Artificial Sequence: Synthetic oligonucleotide
agugcacuucaaccccgcg

SEQ ID NO: 251300 - RNA, 19 nt, Artificial Sequence
  Description of Artificial Sequence: Synthetic oligonucleotide
ggauaucacccucacgaug

SEQ ID NO: 251301 - RNA, 19 nt, Artificial Sequence
  Description of Artificial Sequence: Synthetic oligonucleotide
aagcggacuagaaccaagu

SEQ ID NO: 251302 - RNA, 19 nt, Artificial Sequence
  Description of Artificial Sequence: Synthetic oligonucleotide
ugguagcacucaaagugau

SEQ ID NO: 251303 - RNA, 19 nt, Artificial Sequence
  Description of Artificial Sequence: Synthetic oligonucleotide
uucaaccccgcguggggcc

SEQ ID NO: 251304 - RNA, 19 nt, Artificial Sequence
  Description of Artificial Sequence: Synthetic oligonucleotide
auaucacccucacgauguc

SEQ ID NO: 251305 - RNA, 19 nt, Artificial Sequence
  Description of Artificial Sequence: Synthetic oligonucleotide
acgauaagcuacugcuaga

SEQ ID NO: 251306 - RNA, 19 nt, Artificial Sequence
  Description of Artificial Sequence: Synthetic oligonucleotide
acauuuaggcggcuauaaa

SEQ ID NO: 251307 - RNA, 19 nt, Artificial Sequence
  Description of Artificial Sequence: Synthetic oligonucleotide
guguaaugaagagaauaga

SEQ ID NO: 251308 - RNA, 19 nt, Artificial Sequence
  Description of Artificial Sequence: Synthetic oligonucleotide
ugguccgauugacuggcac

SEQ ID NO: 251309 - RNA, 19 nt, Artificial Sequence
  Description of Artificial Sequence: Synthetic oligonucleotide
ugaaacccgcucgugugug

SEQ ID NO: 251310 - RNA, 19 nt, Artificial Sequence
  Description of Artificial Sequence: Synthetic oligonucleotide
uggauaucacccucacgau

SEQ ID NO: 251311 - RNA, 19 nt, Artificial Sequence
  Description of Artificial Sequence: Synthetic oligonucleotide
guggacggaaccccuccgg

SEQ ID NO: 251312 - RNA, 19 nt, Artificial Sequence
  Description of Artificial Sequence: Synthetic oligonucleotide
ccaggcacuuguuacaaac

SEQ ID NO: 251313 - RNA, 19 nt, Artificial Sequence
  Description of Artificial Sequence: Synthetic oligonucleotide
caaucccuagaugugugug

SEQ ID NO: 251314 - RNA, 19 nt, Artificial Sequence
  Description of Artificial Sequence: Synthetic oligonucleotide
ccgaugagcgcacagucgg

SEQ ID NO: 251315 - RNA, 19 nt, Artificial Sequence
  Description of Artificial Sequence: Synthetic oligonucleotide
ugugggccuccaacgauaa

SEQ ID NO: 251316 - RNA, 19 nt, Artificial Sequence
  Description of Artificial Sequence: Synthetic oligonucleotide
ccagccgaaaaucuaggag

SEQ ID NO: 251317 - RNA, 19 nt, Artificial Sequence
  Description of Artificial Sequence: Synthetic oligonucleotide
aaucugauguugggaagua

SEQ ID NO: 251318 - RNA, 19 nt, Artificial Sequence
  Description of Artificial Sequence: Synthetic oligonucleotide
cugcuagagaacuaagugu

SEQ ID NO: 251319 - RNA, 19 nt, Artificial Sequence
  Description of Artificial Sequence: Synthetic oligonucleotide
ccuuguguaggguacaaca

SEQ ID NO: 251320 - RNA, 19 nt, Artificial Sequence
  Description of Artificial Sequence: Synthetic oligonucleotide
ucggucgagggcggcaugg

SEQ ID NO: 251321 - RNA, 19 nt, Artificial Sequence
  Description of Artificial Sequence: Synthetic oligonucleotide
cucucgagugauccagcgc

SEQ ID NO: 251322 - RNA, 19 nt, Artificial Sequence
  Description of Artificial Sequence: Synthetic oligonucleotide
aguccccguagcccguaac

SEQ ID NO: 251323 - RNA, 19 nt, Artificial Sequence
  Description of Artificial Sequence: Synthetic oligonucleotide
caaccggcucaucaaauga

SEQ ID NO: 251324 - RNA, 19 nt, Artificial Sequence
  Description of Artificial Sequence: Synthetic oligonucleotide
gaaacccgcucgugugugc

SEQ ID NO: 251325 - RNA, 19 nt, Artificial Sequence
  Description of Artificial Sequence: Synthetic oligonucleotide
ggcacacgcggauacaaac

SEQ ID NO: 251326 - RNA, 19 nt, Artificial Sequence
  Description of Artificial Sequence: Synthetic oligonucleotide
ucgacggcuugcuugcguc

SEQ ID NO: 251327 - RNA, 19 nt, Artificial Sequence
  Description of Artificial Sequence: Synthetic oligonucleotide
cacuucaaccccgcguggg

SEQ ID NO: 251328 - RNA, 19 nt, Artificial Sequence
  Description of Artificial Sequence: Synthetic oligonucleotide
aaccggcucaucaaaugaa

SEQ ID NO: 251329 - RNA, 19 nt, Artificial Sequence
  Description of Artificial Sequence: Synthetic oligonucleotide
ugguaacgggccccgcggc

SEQ ID NO: 251330 - RNA, 19 nt, Artificial Sequence
  Description of Artificial Sequence: Synthetic oligonucleotide
gccuccaacgauaagcuac

SEQ ID NO: 251331 - RNA, 19 nt, Artificial Sequence
  Description of Artificial Sequence: Synthetic oligonucleotide
cagacauaugggaagcucu

SEQ ID NO: 251332 - RNA, 19 nt, Artificial Sequence
  Description of Artificial Sequence: Synthetic oligonucleotide
ccaacgauaagcuacugcu

SEQ ID NO: 251333 - RNA, 19 nt, Artificial Sequence
  Description of Artificial Sequence: Synthetic oligonucleotide
cugcucgguguaaugaaga

SEQ ID NO: 251334 - RNA, 19 nt, Artificial Sequence
  Description of Artificial Sequence: Synthetic oligonucleotide
uccccguagcccguaacug

SEQ ID NO: 251335 - RNA, 19 nt, Artificial Sequence
  Description of Artificial Sequence: Synthetic oligonucleotide
gaaacccugaaaacagaua

SEQ ID NO: 251336 - RNA, 19 nt, Artificial Sequence
  Description of Artificial Sequence: Synthetic oligonucleotide
aggcccgaaacaggcacgg

SEQ ID NO: 251337 - RNA, 19 nt, Artificial Sequence
  Description of Artificial Sequence: Synthetic oligonucleotide
uagaacauuuaggcggcua

SEQ ID NO: 251338 - RNA, 19 nt, Artificial Sequence
  Description of Artificial Sequence: Synthetic oligonucleotide
aaccccuccggaggaguag

SEQ ID NO: 251339 - RNA, 19 nt, Artificial Sequence
  Description of Artificial Sequence: Synthetic oligonucleotide
ggaggcccgaaacaggcac

SEQ ID NO: 251340 - RNA, 19 nt, Artificial Sequence
  Description of Artificial Sequence: Synthetic oligonucleotide
acgaugcaucggaagcagc

SEQ ID NO: 251341 - RNA, 19 nt, Artificial Sequence
  Description of Artificial Sequence: Synthetic oligonucleotide
accccuccggaggaguagc

SEQ ID NO: 251342 - RNA, 19 nt, Artificial Sequence
  Description of Artificial Sequence: Synthetic oligonucleotide
aggcggcuauaaaacacuc

SEQ ID NO: 251343 - RNA, 19 nt, Artificial Sequence
  Description of Artificial Sequence: Synthetic oligonucleotide
aacgacggagguagaggca

SEQ ID NO: 251344 - RNA, 19 nt, Artificial Sequence
  Description of Artificial Sequence: Synthetic oligonucleotide
uacgaguggcggcucuccu

SEQ ID NO: 251345 - RNA, 19 nt, Artificial Sequence
  Description of Artificial Sequence: Synthetic oligonucleotide
cuucucgcccaccgguagc

SEQ ID NO: 251346 - RNA, 19 nt, Artificial Sequence
  Description of Artificial Sequence: Synthetic oligonucleotide
agaccgagccauugacgcu

SEQ ID NO: 251347 - RNA, 19 nt, Artificial Sequence
  Description of Artificial Sequence: Synthetic oligonucleotide
gaccccuuguguaggguac

SEQ ID NO: 251348 - RNA, 19 nt, Artificial Sequence
  Description of Artificial Sequence: Synthetic oligonucleotide
cagugcacuucaaccccgc

SEQ ID NO: 251349 - RNA, 19 nt, Artificial Sequence
  Description of Artificial Sequence: Synthetic oligonucleotide
ggaucgagcucuuggcaac

SEQ ID NO: 251350 - RNA, 19 nt, Artificial Sequence
  Description of Artificial Sequence: Synthetic oligonucleotide
acgacggagguagaggcaa

SEQ ID NO: 251351 - RNA, 19 nt, Artificial Sequence
  Description of Artificial Sequence: Synthetic oligonucleotide
cagcaaccaaggacaggcc

SEQ ID NO: 251352 - RNA, 19 nt, Artificial Sequence
  Description of Artificial Sequence: Synthetic oligonucleotide
cguaacugagugucguccg

SEQ ID NO: 251353 - RNA, 19 nt, Artificial Sequence
  Description of Artificial Sequence: Synthetic oligonucleotide
ucgguguaaugaagagaau

SEQ ID NO: 251354 - RNA, 19 nt, Artificial Sequence
  Description of Artificial Sequence: Synthetic oligonucleotide
gguaacgggccccgcggcg

SEQ ID NO: 251355 - RNA, 19 nt, Artificial Sequence
  Description of Artificial Sequence: Synthetic oligonucleotide
cccguagaugccuuuguug

SEQ ID NO: 251356 - RNA, 19 nt, Artificial Sequence
  Description of Artificial Sequence: Synthetic oligonucleotide
agcuccggguagguggacg

SEQ ID NO: 251357 - RNA, 19 nt, Artificial Sequence
  Description of Artificial Sequence: Synthetic oligonucleotide
cuggcugaccccuugugua

SEQ ID NO: 251358 - RNA, 19 nt, Artificial Sequence
  Description of Artificial Sequence: Synthetic oligonucleotide
cucgggaggccuccggaac

SEQ ID NO: 251359 - RNA, 19 nt, Artificial Sequence
  Description of Artificial Sequence: Synthetic oligonucleotide
cgauugacuggcacggccg

SEQ ID NO: 251360 - RNA, 19 nt, Artificial Sequence
  Description of Artificial Sequence: Synthetic oligonucleotide
cagccuauuuggaauguua

SEQ ID NO: 251361 - RNA, 19 nt, Artificial Sequence
  Description of Artificial Sequence: Synthetic oligonucleotide
uagguggacggaaccccuc

SEQ ID NO: 251362 - RNA, 19 nt, Artificial Sequence
  Description of Artificial Sequence: Synthetic oligonucleotide
cacagucggucgagggcgg

SEQ ID NO: 251363 - RNA, 19 nt, Artificial Sequence
  Description of Artificial Sequence: Synthetic oligonucleotide
cggacuagaaccaagucaa

SEQ ID NO: 251364 - RNA, 19 nt, Artificial Sequence
  Description of Artificial Sequence: Synthetic oligonucleotide
gguggacggaaccccuccg

SEQ ID NO: 251365 - RNA, 19 nt, Artificial Sequence
  Description of Artificial Sequence: Synthetic oligonucleotide
cucaauccccgaggguucc

SEQ ID NO: 251366 - RNA, 19 nt, Artificial Sequence
  Description of Artificial Sequence: Synthetic oligonucleotide
caaugcucaaucccuagau

SEQ ID NO: 251367 - RNA, 19 nt, Artificial Sequence
  Description of Artificial Sequence: Synthetic oligonucleotide
acgcggauacaaacgcauc

SEQ ID NO: 251368 - RNA, 19 nt, Artificial Sequence
  Description of Artificial Sequence: Synthetic oligonucleotide
ccucucgagugauccagcg

SEQ ID NO: 251369 - RNA, 19 nt, Artificial Sequence
  Description of Artificial Sequence: Synthetic oligonucleotide
ggacggaaccccuccggag

SEQ ID NO: 251370 - RNA, 19 nt, Artificial Sequence
  Description of Artificial Sequence: Synthetic oligonucleotide
cgauaagcuacugcuagag

SEQ ID NO: 251371 - RNA, 19 nt, Artificial Sequence
  Description of Artificial Sequence: Synthetic oligonucleotide
gaacauuuaggcggcuaua

SEQ ID NO: 251372 - RNA, 19 nt, Artificial Sequence
  Description of Artificial Sequence: Synthetic oligonucleotide
uugaugccgacugguccga

SEQ ID NO: 251373 - RNA, 19 nt, Artificial Sequence
  Description of Artificial Sequence: Synthetic oligonucleotide
gugugugggccuccaacga

SEQ ID NO: 251374 - RNA, 19 nt, Artificial Sequence
  Description of Artificial Sequence: Synthetic oligonucleotide
ccgauugacuggcacggcc

SEQ ID NO: 251375 - RNA, 19 nt, Artificial Sequence
  Description of Artificial Sequence: Synthetic oligonucleotide
ggaguagcccgccggagca

SEQ ID NO: 251376 - RNA, 19 nt, Artificial Sequence
  Description of Artificial Sequence: Synthetic oligonucleotide
guacugaaacccgcucgug

SEQ ID NO: 251377 - RNA, 19 nt, Artificial Sequence
  Description of Artificial Sequence: Synthetic oligonucleotide
gcgcaguccccguagcccg

SEQ ID NO: 251378 - RNA, 19 nt, Artificial Sequence
  Description of Artificial Sequence: Synthetic oligonucleotide
caauccccgaggguucccc

SEQ ID NO: 251379 - RNA, 19 nt, Artificial Sequence
  Description of Artificial Sequence: Synthetic oligonucleotide
guaacgggccccgcggcgc

SEQ ID NO: 251380 - RNA, 19 nt, Artificial Sequence
  Description of Artificial Sequence: Synthetic oligonucleotide
guacgaguggcggcucucc

SEQ ID NO: 251381 - RNA, 19 nt, Artificial Sequence
  Description of Artificial Sequence: Synthetic oligonucleotide
ccuugccucaacuggccag

SEQ ID NO: 251382 - RNA, 19 nt, Artificial Sequence
  Description of Artificial Sequence: Synthetic oligonucleotide
uccggguagguggacggaa

SEQ ID NO: 251383 - RNA, 19 nt, Artificial Sequence
  Description of Artificial Sequence: Synthetic oligonucleotide
ggauugcagaaugcauucc

SEQ ID NO: 251384 - RNA, 19 nt, Artificial Sequence
  Description of Artificial Sequence: Synthetic oligonucleotide
uccgauugacuggcacggc

SEQ ID NO: 251385 - RNA, 19 nt, Artificial Sequence
  Description of Artificial Sequence: Synthetic oligonucleotide
acauccagacuuaggugaa

SEQ ID NO: 251386 - RNA, 19 nt, Artificial Sequence
  Description of Artificial Sequence: Synthetic oligonucleotide
cagccaacccuccuggcaa

SEQ ID NO: 251387 - RNA, 19 nt, Artificial Sequence
  Description of Artificial Sequence: Synthetic oligonucleotide
ccgucuagcagcaggccug

SEQ ID NO: 251388 - RNA, 19 nt, Artificial Sequence
  Description of Artificial Sequence: Synthetic oligonucleotide
ugcccucucgagugaucca

SEQ ID NO: 251389 - RNA, 19 nt, Artificial Sequence
  Description of Artificial Sequence: Synthetic oligonucleotide
gcuucucgcccaccgguag

SEQ ID NO: 251390 - RNA, 19 nt, Artificial Sequence
  Description of Artificial Sequence: Synthetic oligonucleotide
accggcucaucaaaugaau

SEQ ID NO: 251391 - RNA, 19 nt, Artificial Sequence
  Description of Artificial Sequence: Synthetic oligonucleotide
ucaauccccgaggguuccc

SEQ ID NO: 251392 - RNA, 19 nt, Artificial Sequence
  Description of Artificial Sequence: Synthetic oligonucleotide
gaaggggaucgagcucuug

SEQ ID NO: 251393 - RNA, 19 nt, Artificial Sequence
  Description of Artificial Sequence: Synthetic oligonucleotide
auagaacauuuaggcggcu

SEQ ID NO: 251394 - RNA, 19 nt, Artificial Sequence
  Description of Artificial Sequence: Synthetic oligonucleotide
gcgcaaaguucguccacag

SEQ ID NO: 251395 - RNA, 19 nt, Artificial Sequence
  Description of Artificial Sequence: Synthetic oligonucleotide
gucaagcgcagcagugcug

SEQ ID NO: 251396 - RNA, 19 nt, Artificial Sequence
  Description of Artificial Sequence: Synthetic oligonucleotide
ugaugcccucucgagugau

SEQ ID NO: 251397 - RNA, 19 nt, Artificial Sequence
  Description of Artificial Sequence: Synthetic oligonucleotide
acacgcggauacaaacgca

SEQ ID NO: 251398 - RNA, 19 nt, Artificial Sequence
  Description of Artificial Sequence: Synthetic oligonucleotide
gugcacuucaaccccgcgu

SEQ ID NO: 251399 - RNA, 19 nt, Artificial Sequence
  Description of Artificial Sequence: Synthetic oligonucleotide
aguagcccgccggagcagu

SEQ ID NO: 251400 - RNA, 19 nt, Artificial Sequence
  Description of Artificial Sequence: Synthetic oligonucleotide
cacgcggauacaaacgcau

SEQ ID NO: 251401 - RNA, 19 nt, Artificial Sequence
  Description of Artificial Sequence: Synthetic oligonucleotide
gcgcacagucggucgaggg

SEQ ID NO: 251402 - RNA, 19 nt, Artificial Sequence
  Description of Artificial Sequence: Synthetic oligonucleotide
agcccguaacugagugucg

SEQ ID NO: 251403 - RNA, 19 nt, Artificial Sequence
  Description of Artificial Sequence: Synthetic oligonucleotide
ggggaucgagcucuuggca

SEQ ID NO: 251404 - RNA, 19 nt, Artificial Sequence
  Description of Artificial Sequence: Synthetic oligonucleotide
cgaagggaccagcagacuc

SEQ ID NO: 251405 - RNA, 19 nt, Artificial Sequence
  Description of Artificial Sequence: Synthetic oligonucleotide
ucaaccccgcguggggcca

SEQ ID NO: 251406 - RNA, 19 nt, Artificial Sequence
  Description of Artificial Sequence: Synthetic oligonucleotide
gguuggagaaguccacugu

SEQ ID NO: 251407 - RNA, 19 nt, Artificial Sequence
  Description of Artificial Sequence: Synthetic oligonucleotide
gcacuucaaccccgcgugg

SEQ ID NO: 251408 - RNA, 19 nt, Artificial Sequence
  Description of Artificial Sequence: Synthetic oligonucleotide
gcagcgcaaaguucgucca

SEQ ID NO: 251409 - RNA, 19 nt, Artificial Sequence
  Description of Artificial Sequence: Synthetic oligonucleotide
cguagcccguaacugagug

SEQ ID NO: 251410 - RNA, 19 nt, Artificial Sequence
  Description of Artificial Sequence: Synthetic oligonucleotide
cugcccguagaugccuuug

SEQ ID NO: 251411 - RNA, 19 nt, Artificial Sequence
  Description of Artificial Sequence: Synthetic oligonucleotide
gcccucucgagugauccag

SEQ ID NO: 251412 - RNA, 19 nt, Artificial Sequence
  Description of Artificial Sequence: Synthetic oligonucleotide
acggcuugcuugcgucgcu

SEQ ID NO: 251413 - RNA, 19 nt, Artificial Sequence
  Description of Artificial Sequence: Synthetic oligonucleotide
acagccuauuuggaauguu

SEQ ID NO: 251414 - RNA, 19 nt, Artificial Sequence
  Description of Artificial Sequence: Synthetic oligonucleotide
gaugcccucucgagugauc

SEQ ID NO: 251415 - RNA, 19 nt, Artificial Sequence
  Description of Artificial Sequence: Synthetic oligonucleotide
cagacccgacggcucaauc

SEQ ID NO: 251416 - RNA, 19 nt, Artificial Sequence
  Description of Artificial Sequence: Synthetic oligonucleotide
gcauggagcuccggguagg

SEQ ID NO: 251417 - RNA, 19 nt, Artificial Sequence
  Description of Artificial Sequence: Synthetic oligonucleotide
gugaugcccucucgaguga

SEQ ID NO: 251418 - RNA, 19 nt, Artificial Sequence
  Description of Artificial Sequence: Synthetic oligonucleotide
cccgacggcucaauccccg

SEQ ID NO: 251419 - RNA, 19 nt, Artificial Sequence
  Description of Artificial Sequence: Synthetic oligonucleotide
agccaacccuccuggcaau

SEQ ID NO: 251420 - RNA, 19 nt, Artificial Sequence
  Description of Artificial Sequence: Synthetic oligonucleotide
guccccguagcccguaacu

SEQ ID NO: 251421 - RNA, 19 nt, Artificial Sequence
  Description of Artificial Sequence: Synthetic oligonucleotide
gcucgguguaaugaagaga

SEQ ID NO: 251422 - RNA, 19 nt, Artificial Sequence
  Description of Artificial Sequence: Synthetic oligonucleotide
guagcccguaacugagugu

SEQ ID NO: 251423 - RNA, 19 nt, Artificial Sequence
  Description of Artificial Sequence: Synthetic oligonucleotide
acgaagggaccagcagacu

SEQ ID NO: 251424 - RNA, 19 nt, Artificial Sequence
  Description of Artificial Sequence: Synthetic oligonucleotide
cuccaacgauaagcuacug

SEQ ID NO: 251425 - RNA, 19 nt, Artificial Sequence
  Description of Artificial Sequence: Synthetic oligonucleotide
agucggucgagggcggcau

SEQ ID NO: 251426 - RNA, 19 nt, Artificial Sequence
  Description of Artificial Sequence: Synthetic oligonucleotide
cgccggagcaguauucaag

SEQ ID NO: 251427 - RNA, 19 nt, Artificial Sequence
  Description of Artificial Sequence: Synthetic oligonucleotide
accccuuguguaggguaca

SEQ ID NO: 251428 - RNA, 19 nt, Artificial Sequence
  Description of Artificial Sequence: Synthetic oligonucleotide
gaaugcugcucgguguaau

SEQ ID NO: 251429 - RNA, 19 nt, Artificial Sequence
  Description of Artificial Sequence: Synthetic oligonucleotide
gggacguugcuugaauuua

SEQ ID NO: 251430 - RNA, 19 nt, Artificial Sequence
  Description of Artificial Sequence: Synthetic oligonucleotide
ggcggcuauaaaacacuca

SEQ ID NO: 251431 - RNA, 19 nt, Artificial Sequence
  Description of Artificial Sequence: Synthetic oligonucleotide
cagccaagaaaugacucau

SEQ ID NO: 251432 - RNA, 19 nt, Artificial Sequence
  Description of Artificial Sequence: Synthetic oligonucleotide
cacgggccgaugagcgcac

SEQ ID NO: 251433 - RNA, 19 nt, Artificial Sequence
  Description of Artificial Sequence: Synthetic oligonucleotide
gcuagagaacuaaguguaa

SEQ ID NO: 251434 - RNA, 19 nt, Artificial Sequence
  Description of Artificial Sequence: Synthetic oligonucleotide
ggcucaauccccgaggguu

SEQ ID NO: 251435 - RNA, 19 nt, Artificial Sequence
  Description of Artificial Sequence: Synthetic oligonucleotide
cgaaaaucuaggaggcaaa

SEQ ID NO: 251436 - RNA, 19 nt, Artificial Sequence
  Description of Artificial Sequence: Synthetic oligonucleotide
gucggucgagggcggcaug

SEQ ID NO: 251437 - RNA, 19 nt, Artificial Sequence
  Description of Artificial Sequence: Synthetic oligonucleotide
cacggucaagcgcagcagu

SEQ ID NO: 251438 - RNA, 19 nt, Artificial Sequence
  Description of Artificial Sequence: Synthetic oligonucleotide
gccggcuaccuccggcucc

SEQ ID NO: 251439 - RNA, 19 nt, Artificial Sequence
  Description of Artificial Sequence: Synthetic oligonucleotide
agcccgccggagcaguauu

SEQ ID NO: 251440 - RNA, 19 nt, Artificial Sequence
  Description of Artificial Sequence: Synthetic oligonucleotide
gaugccgacugguccgauu

SEQ ID NO: 251441 - RNA, 19 nt, Artificial Sequence
  Description of Artificial Sequence: Synthetic oligonucleotide
guagguggacggaaccccu

SEQ ID NO: 251442 - RNA, 19 nt, Artificial Sequence
  Description of Artificial Sequence: Synthetic oligonucleotide
gcucaauccccgaggguuc

SEQ ID NO: 251443 - RNA, 19 nt, Artificial Sequence
  Description of Artificial Sequence: Synthetic oligonucleotide
uagcccgccggagcaguau

SEQ ID NO: 251444 - RNA, 19 nt, Artificial Sequence
  Description of Artificial Sequence: Synthetic oligonucleotide
cgguguaaugaagagaaua

SEQ ID NO: 251445 - RNA, 19 nt, Artificial Sequence
  Description of Artificial Sequence: Synthetic oligonucleotide
ccagccaacccuccuggca

SEQ ID NO: 251446 - RNA, 19 nt, Artificial Sequence
  Description of Artificial Sequence: Synthetic oligonucleotide
gaaccccuccggaggagua

SEQ ID NO: 251447 - RNA, 19 nt, Artificial Sequence
  Description of Artificial Sequence: Synthetic oligonucleotide
gggcagcgggcucccgugg

SEQ ID NO: 251448 - RNA, 19 nt, Artificial Sequence
  Description of Artificial Sequence: Synthetic oligonucleotide
gagugucguccgggcugcg

SEQ ID NO: 251449 - RNA, 19 nt, Artificial Sequence
  Description of Artificial Sequence: Synthetic oligonucleotide
gccgacugguccgauugac

SEQ ID NO: 251450 - RNA, 19 nt, Artificial Sequence
  Description of Artificial Sequence: Synthetic oligonucleotide
cccguaacugagugucguc

SEQ ID NO: 251451 - RNA, 19 nt, Artificial Sequence
  Description of Artificial Sequence: Synthetic oligonucleotide
cuguuagcucguccuggua

SEQ ID NO: 251452 - RNA, 19 nt, Artificial Sequence
  Description of Artificial Sequence: Synthetic oligonucleotide
gguagcacucaaagugaua

SEQ ID NO: 251453 - RNA, 19 nt, Artificial Sequence
  Description of Artificial Sequence: Synthetic oligonucleotide
ccuccaacgauaagcuacu

SEQ ID NO: 251454 - RNA, 19 nt, Artificial Sequence
  Description of Artificial Sequence: Synthetic oligonucleotide
cgacggcuugcuugcgucg

SEQ ID NO: 251455 - RNA, 19 nt, Artificial Sequence
  Description of Artificial Sequence: Synthetic oligonucleotide
ccccguagcccguaacuga

SEQ ID NO: 251456 - RNA, 19 nt, Artificial Sequence
  Description of Artificial Sequence: Synthetic oligonucleotide
ccggcuaccuccggcuccg

SEQ ID NO: 251457 - RNA, 19 nt, Artificial Sequence
  Description of Artificial Sequence: Synthetic oligonucleotide
ugaugccgacugguccgau

SEQ ID NO: 251458 - RNA, 19 nt, Artificial Sequence
  Description of Artificial Sequence: Synthetic oligonucleotide
cugguccgauugacuggca

SEQ ID NO: 251459 - RNA, 19 nt, Artificial Sequence
  Description of Artificial Sequence: Synthetic oligonucleotide
ccggaacgaagggaccagc

SEQ ID NO: 251460 - RNA, 19 nt, Artificial Sequence
  Description of Artificial Sequence: Synthetic oligonucleotide
cccgaggguuccccgcggg

SEQ ID NO: 251461 - RNA, 19 nt, Artificial Sequence
  Description of Artificial Sequence: Synthetic oligonucleotide
cacagccuauuuggaaugu

SEQ ID NO: 251462 - RNA, 19 nt, Artificial Sequence
  Description of Artificial Sequence: Synthetic oligonucleotide
ccggaggaguagcccgccg

SEQ ID NO: 251463 - RNA, 19 nt, Artificial Sequence
  Description of Artificial Sequence: Synthetic oligonucleotide
gcgcuggucauagcccaug

SEQ ID NO: 251464 - RNA, 19 nt, Artificial Sequence
  Description of Artificial Sequence: Synthetic oligonucleotide
gcggcauggagcuccgggu

SEQ ID NO: 251465 - RNA, 19 nt, Artificial Sequence
  Description of Artificial Sequence: Synthetic oligonucleotide
ccuagaugugugugggccu

SEQ ID NO: 251466 - RNA, 19 nt, Artificial Sequence
  Description of Artificial Sequence: Synthetic oligonucleotide
ggacuagaaccaagucaaa

SEQ ID NO: 251467 - RNA, 19 nt, Artificial Sequence
  Description of Artificial Sequence: Synthetic oligonucleotide
ggacguugcuugaauuuau

SEQ ID NO: 251468 - RNA, 19 nt, Artificial Sequence
  Description of Artificial Sequence: Synthetic oligonucleotide
ccgaggguuccccgcgggc

SEQ ID NO: 251469 - RNA, 19 nt, Artificial Sequence
  Description of Artificial Sequence: Synthetic oligonucleotide
gcccaugcuugaugccgac

SEQ ID NO: 251470 - RNA, 19 nt, Artificial Sequence
  Description of Artificial Sequence: Synthetic oligonucleotide
ccccuccggaggaguagcc

SEQ ID NO: 251471 - RNA, 19 nt, Artificial Sequence
  Description of Artificial Sequence: Synthetic oligonucleotide
caccgguagccacggucaa

SEQ ID NO: 251472 - RNA, 19 nt, Artificial Sequence
  Description of Artificial Sequence: Synthetic oligonucleotide
gcggcgcaguccccguagc

SEQ ID NO: 251473 - RNA, 19 nt, Artificial Sequence
  Description of Artificial Sequence: Synthetic oligonucleotide
ccacgggccgaugagcgca

SEQ ID NO: 251474 - RNA, 19 nt, Artificial Sequence
  Description of Artificial Sequence: Synthetic oligonucleotide
gcccgucuagcagcaggcc

SEQ ID NO: 251475 - RNA, 19 nt, Artificial Sequence
  Description of Artificial Sequence: Synthetic oligonucleotide
cccgagggaggugcacagg

SEQ ID NO: 251476 - RNA, 19 nt, Artificial Sequence
  Description of Artificial Sequence: Synthetic oligonucleotide
cccgcucgugugugcuagg

SEQ ID NO: 251477 - RNA, 19 nt, Artificial Sequence
  Description of Artificial Sequence: Synthetic oligonucleotide
cuccggguagguggacgga

SEQ ID NO: 251478 - RNA, 19 nt, Artificial Sequence
  Description of Artificial Sequence: Synthetic oligonucleotide
ggcccgaaacaggcacggc

SEQ ID NO: 251479 - RNA, 19 nt, Artificial Sequence
  Description of Artificial Sequence: Synthetic oligonucleotide
cgcggcgcaguccccguag

SEQ ID NO: 251480 - RNA, 19 nt, Artificial Sequence
  Description of Artificial Sequence: Synthetic oligonucleotide
cccgucuagcagcaggccu

SEQ ID NO: 251481 - RNA, 19 nt, Artificial Sequence
  Description of Artificial Sequence: Synthetic oligonucleotide
ccgacugguccgauugacu

SEQ ID NO: 251482 - RNA, 19 nt, Artificial Sequence
  Description of Artificial Sequence: Synthetic oligonucleotide
ggcuucucgcccaccggua

SEQ ID NO: 251483 - RNA, 19 nt, Artificial Sequence
  Description of Artificial Sequence: Synthetic oligonucleotide
ggguacgaguggcggcucu

SEQ ID NO: 251484 - RNA, 19 nt, Artificial Sequence
  Description of Artificial Sequence: Synthetic oligonucleotide
ccggcucaucaaaugaauu

SEQ ID NO: 251485 - RNA, 19 nt, Artificial Sequence
  Description of Artificial Sequence: Synthetic oligonucleotide
cccgccggagcaguauuca

SEQ ID NO: 251486 - RNA, 19 nt, Artificial Sequence
  Description of Artificial Sequence: Synthetic oligonucleotide
guagcccgccggagcagua

SEQ ID NO: 251487 - RNA, 19 nt, Artificial Sequence
  Description of Artificial Sequence: Synthetic oligonucleotide
gcugcgccccacgucucuc

SEQ ID NO: 251488 - RNA, 19 nt, Artificial Sequence
  Description of Artificial Sequence: Synthetic oligonucleotide
cgaggguuccccgcgggca

SEQ ID NO: 251489 - RNA, 19 nt, Artificial Sequence
  Description of Artificial Sequence: Synthetic oligonucleotide
ccgacggcucaauccccga

SEQ ID NO: 251490 - RNA, 19 nt, Artificial Sequence
  Description of Artificial Sequence: Synthetic oligonucleotide
gcccgccggagcaguauuc

SEQ ID NO: 251491 - RNA, 19 nt, Artificial Sequence
  Description of Artificial Sequence: Synthetic oligonucleotide
cucccguggcgcuggucau

SEQ ID NO: 251492 - RNA, 19 nt, Artificial Sequence
  Description of Artificial Sequence: Synthetic oligonucleotide
gauccagcgcugggacguu

SEQ ID NO: 251493 - RNA, 19 nt, Artificial Sequence
  Description of Artificial Sequence: Synthetic oligonucleotide
ccgcucgugugugcuagga

SEQ ID NO: 251494 - RNA, 19 nt, Artificial Sequence
  Description of Artificial Sequence: Synthetic oligonucleotide
ccgccggagcaguauucaa

SEQ ID NO: 251495 - RNA, 19 nt, Artificial Sequence
  Description of Artificial Sequence: Synthetic oligonucleotide
gggacgccauccaggcacu

SEQ ID NO: 251496 - RNA, 19 nt, Artificial Sequence
  Description of Artificial Sequence: Synthetic oligonucleotide
ccccuuguguaggguacaa

SEQ ID NO: 251497 - RNA, 19 nt, Artificial Sequence
  Description of Artificial Sequence: Synthetic oligonucleotide
cagcgcugggacguugcuu

SEQ ID NO: 251498 - RNA, 19 nt, Artificial Sequence
  Description of Artificial Sequence: Synthetic oligonucleotide
ccguagcccguaacugagu

SEQ ID NO: 251499 - RNA, 19 nt, Artificial Sequence
  Description of Artificial Sequence: Synthetic oligonucleotide
ggcgcuggucauagcccau

SEQ ID NO: 251500 - RNA, 19 nt, Artificial Sequence
  Description of Artificial Sequence: Synthetic oligonucleotide
ccggcccgucuagcagcag

SEQ ID NO: 251501 - RNA, 19 nt, Artificial Sequence
  Description of Artificial Sequence: Synthetic oligonucleotide
ccgagccauugacgcugua

SEQ ID NO: 251502 - RNA, 19 nt, Artificial Sequence
  Description of Artificial Sequence: Synthetic oligonucleotide
ccgaaccccacgggccgau

SEQ ID NO: 251503 - RNA, 19 nt, Artificial Sequence
  Description of Artificial Sequence: Synthetic oligonucleotide
gauaagaggauguauaagg

SEQ ID NO: 251504 - RNA, 19 nt, Artificial Sequence
  Description of Artificial Sequence: Synthetic oligonucleotide
uuuacagugaccugaaucg

SEQ ID NO: 251505 - RNA, 19 nt, Artificial Sequence
  Description of Artificial Sequence: Synthetic oligonucleotide
aguucaucgagccaccucc

SEQ ID NO: 251506 - RNA, 19 nt, Artificial Sequence
  Description of Artificial Sequence: Synthetic oligonucleotide
aagacgauaaucuccaacu

SEQ ID NO: 251507 - RNA, 19 nt, Artificial Sequence
  Description of Artificial Sequence: Synthetic oligonucleotide
uaaagcuucggcaacauaa

SEQ ID NO: 251508 - RNA, 19 nt, Artificial Sequence
  Description of Artificial Sequence: Synthetic oligonucleotide
aaucgcauuaccgagacca

SEQ ID NO: 251509 - RNA, 19 nt, Artificial Sequence
  Description of Artificial Sequence: Synthetic oligonucleotide
uuuauguggacguggacag

SEQ ID NO: 251510 - RNA, 19 nt, Artificial Sequence
  Description of Artificial Sequence: Synthetic oligonucleotide
aguagauaaagcuucggca

SEQ ID NO: 251511 - RNA, 19 nt, Artificial Sequence
  Description of Artificial Sequence: Synthetic oligonucleotide
aacucgacauucugggcgc

SEQ ID NO: 251512 - RNA, 19 nt, Artificial Sequence
  Description of Artificial Sequence: Synthetic oligonucleotide
auaaucuccaacucaaggu

SEQ ID NO: 251513 - RNA, 19 nt, Artificial Sequence
  Description of Artificial Sequence: Synthetic oligonucleotide
uuaaugaaagccagugggc

SEQ ID NO: 251514 - RNA, 19 nt, Artificial Sequence
  Description of Artificial Sequence: Synthetic oligonucleotide
aucaucacgaguccgccgc

SEQ ID NO: 251515 - RNA, 19 nt, Artificial Sequence
  Description of Artificial Sequence: Synthetic oligonucleotide
agauuugagacaacgaccg

SEQ ID NO: 251516 - RNA, 19 nt, Artificial Sequence
  Description of Artificial Sequence: Synthetic oligonucleotide
uagagaggucacuuaaucg

SEQ ID NO: 251517 - RNA, 19 nt, Artificial Sequence
  Description of Artificial Sequence: Synthetic oligonucleotide
uuuuauguggacguggaca

SEQ ID NO: 251518 - RNA, 19 nt, Artificial Sequence
  Description of Artificial Sequence: Synthetic oligonucleotide
uuugguaucgacgauccgc

SEQ ID NO: 251519 - RNA, 19 nt, Artificial Sequence
  Description of Artificial Sequence: Synthetic oligonucleotide
ucagauaagaggauguaua

SEQ ID NO: 251520 - RNA, 19 nt, Artificial Sequence
  Description of Artificial Sequence: Synthetic oligonucleotide
acuuaaucgcauuaccgag

SEQ ID NO: 251521 - RNA, 19 nt, Artificial Sequence
  Description of Artificial Sequence: Synthetic oligonucleotide
uaccaauuuugacaugagg

SEQ ID NO: 251522 - RNA, 19 nt, Artificial Sequence
  Description of Artificial Sequence: Synthetic oligonucleotide
cagauuugagacaacgacc

SEQ ID NO: 251523 - RNA, 19 nt, Artificial Sequence
  Description of Artificial Sequence: Synthetic oligonucleotide
ucgguuuucaacuuuccga

SEQ ID NO: 251524 - RNA, 19 nt, Artificial Sequence
  Description of Artificial Sequence: Synthetic oligonucleotide
gaguagauaaagcuucggc

SEQ ID NO: 251525 - RNA, 19 nt, Artificial Sequence
  Description of Artificial Sequence: Synthetic oligonucleotide
cauaauucugcaugcugcg

SEQ ID NO: 251526 - RNA, 19 nt, Artificial Sequence
  Description of Artificial Sequence: Synthetic oligonucleotide
gaccgcauucauuagacug

SEQ ID NO: 251527 - RNA, 19 nt, Artificial Sequence
  Description of Artificial Sequence: Synthetic oligonucleotide
uuaaucgcauuaccgagac

SEQ ID NO: 251528 - RNA, 19 nt, Artificial Sequence
  Description of Artificial Sequence: Synthetic oligonucleotide
uaagacgauaaucuccaac

SEQ ID NO: 251529 - RNA, 19 nt, Artificial Sequence
  Description of Artificial Sequence: Synthetic oligonucleotide
acaacgaccgcauucauua

SEQ ID NO: 251530 - RNA, 19 nt, Artificial Sequence
  Description of Artificial Sequence: Synthetic oligonucleotide
cacccggucauuuaagacg

SEQ ID NO: 251531 - RNA, 19 nt, Artificial Sequence
  Description of Artificial Sequence: Synthetic oligonucleotide
gaaugggugagcucgucag

SEQ ID NO: 251532 - RNA, 19 nt, Artificial Sequence
  Description of Artificial Sequence: Synthetic oligonucleotide
gagcgaaugggugagcucg

SEQ ID NO: 251533 - RNA, 19 nt, Artificial Sequence
  Description of Artificial Sequence: Synthetic oligonucleotide
caaucuucuuaucguaacg

SEQ ID NO: 251534 - RNA, 19 nt, Artificial Sequence
  Description of Artificial Sequence: Synthetic oligonucleotide
uuugcaguguuguucucgc

SEQ ID NO: 251535 - RNA, 19 nt, Artificial Sequence
  Description of Artificial Sequence: Synthetic oligonucleotide
uugguaucgacgauccgca

SEQ ID NO: 251536 - RNA, 19 nt, Artificial Sequence
  Description of Artificial Sequence: Synthetic oligonucleotide
gaaucgucgucuucuguag

SEQ ID NO: 251537 - RNA, 19 nt, Artificial Sequence
  Description of Artificial Sequence: Synthetic oligonucleotide
aagcuucggcaacauaaag

SEQ ID NO: 251538 - RNA, 19 nt, Artificial Sequence
  Description of Artificial Sequence: Synthetic oligonucleotide
agacgauaaucuccaacuc

SEQ ID NO: 251539 - RNA, 19 nt, Artificial Sequence
  Description of Artificial Sequence: Synthetic oligonucleotide
gacgauaaucuccaacuca

SEQ ID NO: 251540 - RNA, 19 nt, Artificial Sequence
  Description of Artificial Sequence: Synthetic oligonucleotide
ucgauauucuuccucucgu

SEQ ID NO: 251541 - RNA, 19 nt, Artificial Sequence
  Description of Artificial Sequence: Synthetic oligonucleotide
aguucugucuugguccugc

SEQ ID NO: 251542 - RNA, 19 nt, Artificial Sequence
  Description of Artificial Sequence: Synthetic oligonucleotide
uaguugucgaucauccccu

SEQ ID NO: 251543 - RNA, 19 nt, Artificial Sequence
  Description of Artificial Sequence: Synthetic oligonucleotide
aacgaccgcauucauuaga

SEQ ID NO: 251544 - RNA, 19 nt, Artificial Sequence
  Description of Artificial Sequence: Synthetic oligonucleotide
agcuucggcaacauaaagg

SEQ ID NO: 251545 - RNA, 19 nt, Artificial Sequence
  Description of Artificial Sequence: Synthetic oligonucleotide
ucaacuuuccgaugguauc

SEQ ID NO: 251546 - RNA, 19 nt, Artificial Sequence
  Description of Artificial Sequence: Synthetic oligonucleotide
gcgcuuaugagauuucugg

SEQ ID NO: 251547 - RNA, 19 nt, Artificial Sequence
  Description of Artificial Sequence: Synthetic oligonucleotide
ucuucuuaucguaacgguu

SEQ ID NO: 251548 - RNA, 19 nt, Artificial Sequence
  Description of Artificial Sequence: Synthetic oligonucleotide
uuuucacccggacacucca

SEQ ID NO: 251549 - RNA, 19 nt, Artificial Sequence
  Description of Artificial Sequence: Synthetic oligonucleotide
guaucgacgauccgcauca

SEQ ID NO: 251550 - RNA, 19 nt, Artificial Sequence
  Description of Artificial Sequence: Synthetic oligonucleotide
aucguaacgguucauuuua

SEQ ID NO: 251551 - RNA, 19 nt, Artificial Sequence
  Description of Artificial Sequence: Synthetic oligonucleotide
guagagaggucacuuaauc

SEQ ID NO: 251552 - RNA, 19 nt, Artificial Sequence
  Description of Artificial Sequence: Synthetic oligonucleotide
uguaggaacucgacauucu

SEQ ID NO: 251553 - RNA, 19 nt, Artificial Sequence
  Description of Artificial Sequence: Synthetic oligonucleotide
cagaguagauaaagcuucg

SEQ ID NO: 251554 - RNA, 19 nt, Artificial Sequence
  Description of Artificial Sequence: Synthetic oligonucleotide
aggucgauauucuuccucu

SEQ ID NO: 251555 - RNA, 19 nt, Artificial Sequence
  Description of Artificial Sequence: Synthetic oligonucleotide
acagugaccugaaucgucg

SEQ ID NO: 251556 - RNA, 19 nt, Artificial Sequence
  Description of Artificial Sequence: Synthetic oligonucleotide
uuaucguaacgguucauuu

SEQ ID NO: 251557 - RNA, 19 nt, Artificial Sequence
  Description of Artificial Sequence: Synthetic oligonucleotide
cuuauaguugucgaucauc

SEQ ID NO: 251558 - RNA, 19 nt, Artificial Sequence
  Description of Artificial Sequence: Synthetic oligonucleotide
uucauuccgcgcuuaugag

SEQ ID NO: 251559 - RNA, 19 nt, Artificial Sequence
  Description of Artificial Sequence: Synthetic oligonucleotide
auacucggcggucugccgg

SEQ ID NO: 251560 - RNA, 19 nt, Artificial Sequence
  Description of Artificial Sequence: Synthetic oligonucleotide
agcuauaggauggcaacuc

SEQ ID NO: 251561 - RNA, 19 nt, Artificial Sequence
  Description of Artificial Sequence: Synthetic oligonucleotide
cucgguuuucaacuuuccg

SEQ ID NO: 251562 - RNA, 19 nt, Artificial Sequence
  Description of Artificial Sequence: Synthetic oligonucleotide
cuugagccuucucacauug

SEQ ID NO: 251563 - RNA, 19 nt, Artificial Sequence
  Description of Artificial Sequence: Synthetic oligonucleotide
cacuuaaucgcauuaccga

SEQ ID NO: 251564 - RNA, 19 nt, Artificial Sequence
  Description of Artificial Sequence: Synthetic oligonucleotide
ucauuccgcgcuuaugaga

SEQ ID NO: 251565 - RNA, 19 nt, Artificial Sequence
  Description of Artificial Sequence: Synthetic oligonucleotide
agugaccugaaucgucguc

SEQ ID NO: 251566 - RNA, 19 nt, Artificial Sequence
  Description of Artificial Sequence: Synthetic oligonucleotide
uuaugagauuucuggcugu

SEQ ID NO: 251567 - RNA, 19 nt, Artificial Sequence
  Description of Artificial Sequence: Synthetic oligonucleotide
caucgagccaccucccucc

SEQ ID NO: 251568 - RNA, 19 nt, Artificial Sequence
  Description of Artificial Sequence: Synthetic oligonucleotide
ugguccauuuguacguucu

SEQ ID NO: 251569 - RNA, 19 nt, Artificial Sequence
  Description of Artificial Sequence: Synthetic oligonucleotide
uucacccggacacuccacc

SEQ ID NO: 251570 - RNA, 19 nt, Artificial Sequence
  Description of Artificial Sequence: Synthetic oligonucleotide
acgaccgcauucauuagac

SEQ ID NO: 251571 - RNA, 19 nt, Artificial Sequence
  Description of Artificial Sequence: Synthetic oligonucleotide
uuccaagcggucuuucaga

SEQ ID NO: 251572 - RNA, 19 nt, Artificial Sequence
  Description of Artificial Sequence: Synthetic oligonucleotide
agugagguggauucuccca

SEQ ID NO: 251573 - RNA, 19 nt, Artificial Sequence
  Description of Artificial Sequence: Synthetic oligonucleotide
uaucguaacgguucauuuu

SEQ ID NO: 251574 - RNA, 19 nt, Artificial Sequence
  Description of Artificial Sequence: Synthetic oligonucleotide
ucguaguucuucaccgaug

SEQ ID NO: 251575 - RNA, 19 nt, Artificial Sequence
  Description of Artificial Sequence: Synthetic oligonucleotide
uucacgguguccccuuuca

SEQ ID NO: 251576 - RNA, 19 nt, Artificial Sequence
  Description of Artificial Sequence: Synthetic oligonucleotide
guaccuugguuuucacccg

SEQ ID NO: 251577 - RNA, 19 nt, Artificial Sequence
  Description of Artificial Sequence: Synthetic oligonucleotide
gauguccacgcauggacuc

SEQ ID NO: 251578 - RNA, 19 nt, Artificial Sequence
  Description of Artificial Sequence: Synthetic oligonucleotide
cuuaaucgcauuaccgaga

SEQ ID NO: 251579 - RNA, 19 nt, Artificial Sequence
  Description of Artificial Sequence: Synthetic oligonucleotide
aucacgaguccgccgcagc

SEQ ID NO: 251580 - RNA, 19 nt, Artificial Sequence
  Description of Artificial Sequence: Synthetic oligonucleotide
ugguggauugccucuuccc

SEQ ID NO: 251581 - RNA, 19 nt, Artificial Sequence
  Description of Artificial Sequence: Synthetic oligonucleotide
cucgcagcagaucucggag

SEQ ID NO: 251582 - RNA, 19 nt, Artificial Sequence
  Description of Artificial Sequence: Synthetic oligonucleotide
aaucgucgucuucuguaga

SEQ ID NO: 251583 - RNA, 19 nt, Artificial Sequence
  Description of Artificial Sequence: Synthetic oligonucleotide
cucggcauacuccucacuc

SEQ ID NO: 251584 - RNA, 19 nt, Artificial Sequence
  Description of Artificial Sequence: Synthetic oligonucleotide
gagacaacgaccgcauuca

SEQ ID NO: 251585 - RNA, 19 nt, Artificial Sequence
  Description of Artificial Sequence: Synthetic oligonucleotide
uguuccaagcggucuuuca

SEQ ID NO: 251586 - RNA, 19 nt, Artificial Sequence
  Description of Artificial Sequence: Synthetic oligonucleotide
aaagcuucggcaacauaaa

SEQ ID NO: 251587 - RNA, 19 nt, Artificial Sequence
  Description of Artificial Sequence: Synthetic oligonucleotide
guugucgaucauccccucg

SEQ ID NO: 251588 - RNA, 19 nt, Artificial Sequence
  Description of Artificial Sequence: Synthetic oligonucleotide
acgauaaucuccaacucaa

SEQ ID NO: 251589 - RNA, 19 nt, Artificial Sequence
  Description of Artificial Sequence: Synthetic oligonucleotide
ugccagacgcuucagcaau

SEQ ID NO: 251590 - RNA, 19 nt, Artificial Sequence
  Description of Artificial Sequence: Synthetic oligonucleotide
aucgacgauccgcaucauc

SEQ ID NO: 251591 - RNA, 19 nt, Artificial Sequence
  Description of Artificial Sequence: Synthetic oligonucleotide
caauguugugucugagcac

SEQ ID NO: 251592 - RNA, 19 nt, Artificial Sequence
  Description of Artificial Sequence: Synthetic oligonucleotide
cuaggaaccuuuuggucca

SEQ ID NO: 251593 - RNA, 19 nt, Artificial Sequence
  Description of Artificial Sequence: Synthetic oligonucleotide
cugguguucgauccggcug

SEQ ID NO: 251594 - RNA, 19 nt, Artificial Sequence
  Description of Artificial Sequence: Synthetic oligonucleotide
cucagauuugagacaacga

SEQ ID NO: 251595 - RNA, 19 nt, Artificial Sequence
  Description of Artificial Sequence: Synthetic oligonucleotide
caucaucacgaguccgccg

SEQ ID NO: 251596 - RNA, 19 nt, Artificial Sequence
  Description of Artificial Sequence: Synthetic oligonucleotide
auucacgguguccccuuuc

SEQ ID NO: 251597 - RNA, 19 nt, Artificial Sequence
  Description of Artificial Sequence: Synthetic oligonucleotide
auguaacugcucggcauac

SEQ ID NO: 251598 - RNA, 19 nt, Artificial Sequence
  Description of Artificial Sequence: Synthetic oligonucleotide
cucgucagauaagaggaug

SEQ ID NO: 251599 - RNA, 19 nt, Artificial Sequence
  Description of Artificial Sequence: Synthetic oligonucleotide
uucgauccggcugcgcagg

SEQ ID NO: 251600 - RNA, 19 nt, Artificial Sequence
  Description of Artificial Sequence: Synthetic oligonucleotide
ggaauuggacauaauucug

SEQ ID NO: 251601 - RNA, 19 nt, Artificial Sequence
  Description of Artificial Sequence: Synthetic oligonucleotide
ugagccugguggauugccu

SEQ ID NO: 251602 - RNA, 19 nt, Artificial Sequence
  Description of Artificial Sequence: Synthetic oligonucleotide
ucguaacgguucauuuuac

SEQ ID NO: 251603 - RNA, 19 nt, Artificial Sequence
  Description of Artificial Sequence: Synthetic oligonucleotide
uuacagugaccugaaucgu

SEQ ID NO: 251604 - RNA, 19 nt, Artificial Sequence
  Description of Artificial Sequence: Synthetic oligonucleotide
cuguaggaacucgacauuc

SEQ ID NO: 251605 - RNA, 19 nt, Artificial Sequence
  Description of Artificial Sequence: Synthetic oligonucleotide
uucuguagagaggucacuu

SEQ ID NO: 251606 - RNA, 19 nt, Artificial Sequence
  Description of Artificial Sequence: Synthetic oligonucleotide
guucgauccggcugcgcag

SEQ ID NO: 251607 - RNA, 19 nt, Artificial Sequence
  Description of Artificial Sequence: Synthetic oligonucleotide
guacguucuccuuucugca

SEQ ID NO: 251608 - RNA, 19 nt, Artificial Sequence
  Description of Artificial Sequence: Synthetic oligonucleotide
ugagguggauucucccacu

SEQ ID NO: 251609 - RNA, 19 nt, Artificial Sequence
  Description of Artificial Sequence: Synthetic oligonucleotide
uaaucgcauuaccgagacc

SEQ ID NO: 251610 - RNA, 19 nt, Artificial Sequence
  Description of Artificial Sequence: Synthetic oligonucleotide
gcuucggcaacauaaaggu

SEQ ID NO: 251611 - RNA, 19 nt, Artificial Sequence
  Description of Artificial Sequence: Synthetic oligonucleotide
gaucgggagcgaaugggug

SEQ ID NO: 251612 - RNA, 19 nt, Artificial Sequence
  Description of Artificial Sequence: Synthetic oligonucleotide
gcuauaggauggcaacucc

SEQ ID NO: 251613 - RNA, 19 nt, Artificial Sequence
  Description of Artificial Sequence: Synthetic oligonucleotide
ucgggagcgaaugggugag

SEQ ID NO: 251614 - RNA, 19 nt, Artificial Sequence
  Description of Artificial Sequence: Synthetic oligonucleotide
accgcauucauuagacugu

SEQ ID NO: 251615 - RNA, 19 nt, Artificial Sequence
  Description of Artificial Sequence: Synthetic oligonucleotide
cuuugguaucgacgauccg

SEQ ID NO: 251616 - RNA, 19 nt, Artificial Sequence
  Description of Artificial Sequence: Synthetic oligonucleotide
aggucacuuaaucgcauua

SEQ ID NO: 251617 - RNA, 19 nt, Artificial Sequence
  Description of Artificial Sequence: Synthetic oligonucleotide
ucgcauuaccgagaccagc

SEQ ID NO: 251618 - RNA, 19 nt, Artificial Sequence
  Description of Artificial Sequence: Synthetic oligonucleotide
uuaagacgauaaucuccaa

SEQ ID NO: 251619 - RNA, 19 nt, Artificial Sequence
  Description of Artificial Sequence: Synthetic oligonucleotide
auacguuggcauaggagga

SEQ ID NO: 251620 - RNA, 19 nt, Artificial Sequence
  Description of Artificial Sequence: Synthetic oligonucleotide
ucguuaagguguugauguc

SEQ ID NO: 251621 - RNA, 19 nt, Artificial Sequence
  Description of Artificial Sequence: Synthetic oligonucleotide
uuucacccggacacuccac

SEQ ID NO: 251622 - RNA, 19 nt, Artificial Sequence
  Description of Artificial Sequence: Synthetic oligonucleotide
gucacccggucauuuaaga

SEQ ID NO: 251623 - RNA, 19 nt, Artificial Sequence
  Description of Artificial Sequence: Synthetic oligonucleotide
cuccauaggggcaaagcua

SEQ ID NO: 251624 - RNA, 19 nt, Artificial Sequence
  Description of Artificial Sequence: Synthetic oligonucleotide
cagaauacucggcggucug

SEQ ID NO: 251625 - RNA, 19 nt, Artificial Sequence
  Description of Artificial Sequence: Synthetic oligonucleotide
ugcgcucaauguugugucu

SEQ ID NO: 251626 - RNA, 19 nt, Artificial Sequence
  Description of Artificial Sequence: Synthetic oligonucleotide
gguaucgacgauccgcauc

SEQ ID NO: 251627 - RNA, 19 nt, Artificial Sequence
  Description of Artificial Sequence: Synthetic oligonucleotide
agacuguuccaagcggucu

SEQ ID NO: 251628 - RNA, 19 nt, Artificial Sequence
  Description of Artificial Sequence: Synthetic oligonucleotide
cauuccgcgcuuaugagau

SEQ ID NO: 251629 - RNA, 19 nt, Artificial Sequence
  Description of Artificial Sequence: Synthetic oligonucleotide
gcuuaugagauuucuggcu

SEQ ID NO: 251630 - RNA, 19 nt, Artificial Sequence
  Description of Artificial Sequence: Synthetic oligonucleotide
uugguccauuuguacguuc

SEQ ID NO: 251631 - RNA, 19 nt, Artificial Sequence
  Description of Artificial Sequence: Synthetic oligonucleotide
uuccgcgcuuaugagauuu

SEQ ID NO: 251632 - RNA, 19 nt, Artificial Sequence
  Description of Artificial Sequence: Synthetic oligonucleotide
ugacuccagaguagauaaa

SEQ ID NO: 251633 - RNA, 19 nt, Artificial Sequence
  Description of Artificial Sequence: Synthetic oligonucleotide
cauguaacugcucggcaua

SEQ ID NO: 251634 - RNA, 19 nt, Artificial Sequence
  Description of Artificial Sequence: Synthetic oligonucleotide
cauccccaaauacguuggc

SEQ ID NO: 251635 - RNA, 19 nt, Artificial Sequence
  Description of Artificial Sequence: Synthetic oligonucleotide
ggucacuuaaucgcauuac

SEQ ID NO: 251636 - RNA, 19 nt, Artificial Sequence
  Description of Artificial Sequence: Synthetic oligonucleotide
caacgaccgcauucauuag

SEQ ID NO: 251637 - RNA, 19 nt, Artificial Sequence
  Description of Artificial Sequence: Synthetic oligonucleotide
acauucacgguguccccuu

SEQ ID NO: 251638 - RNA, 19 nt, Artificial Sequence
  Description of Artificial Sequence: Synthetic oligonucleotide
guagauguccacgcaugga

SEQ ID NO: 251639 - RNA, 19 nt, Artificial Sequence
  Description of Artificial Sequence: Synthetic oligonucleotide
caguucaucgagccaccuc

SEQ ID NO: 251640 - RNA, 19 nt, Artificial Sequence
  Description of Artificial Sequence: Synthetic oligonucleotide
uacucggcggucugccggu

SEQ ID NO: 251641 - RNA, 19 nt, Artificial Sequence
  Description of Artificial Sequence: Synthetic oligonucleotide
ccggcuuugguaucgacga

SEQ ID NO: 251642 - RNA, 19 nt, Artificial Sequence
  Description of Artificial Sequence: Synthetic oligonucleotide
gacguggacaggaguguuc

SEQ ID NO: 251643 - RNA, 19 nt, Artificial Sequence
  Description of Artificial Sequence: Synthetic oligonucleotide
gugaccugaaucgucgucu

SEQ ID NO: 251644 - RNA, 19 nt, Artificial Sequence
  Description of Artificial Sequence: Synthetic oligonucleotide
ccaaggacccgcacucccg

SEQ ID NO: 251645 - RNA, 19 nt, Artificial Sequence
  Description of Artificial Sequence: Synthetic oligonucleotide
uugagacaacgaccgcauu

SEQ ID NO: 251646 - RNA, 19 nt, Artificial Sequence
  Description of Artificial Sequence: Synthetic oligonucleotide
ugcugacgguuucgggagu

SEQ ID NO: 251647 - RNA, 19 nt, Artificial Sequence
  Description of Artificial Sequence: Synthetic oligonucleotide
uccgcgcuuaugagauuuc

SEQ ID NO: 251648 - RNA, 19 nt, Artificial Sequence
  Description of Artificial Sequence: Synthetic oligonucleotide
cugcucggcauacuccuca

SEQ ID NO: 251649 - RNA, 19 nt, Artificial Sequence
  Description of Artificial Sequence: Synthetic oligonucleotide
uccccucguaguucuucac

SEQ ID NO: 251650 - RNA, 19 nt, Artificial Sequence
  Description of Artificial Sequence: Synthetic oligonucleotide
cacuugcaucccacaugcc

SEQ ID NO: 251651 - RNA, 19 nt, Artificial Sequence
  Description of Artificial Sequence: Synthetic oligonucleotide
agacaacgaccgcauucau

SEQ ID NO: 251652 - RNA, 19 nt, Artificial Sequence
  Description of Artificial Sequence: Synthetic oligonucleotide
agaggucacuuaaucgcau

SEQ ID NO: 251653 - RNA, 19 nt, Artificial Sequence
  Description of Artificial Sequence: Synthetic oligonucleotide
ggagggugcgguugguuuc

SEQ ID NO: 251654 - RNA, 19 nt, Artificial Sequence
  Description of Artificial Sequence: Synthetic oligonucleotide
caucacgaguccgccgcag

SEQ ID NO: 251655 - RNA, 19 nt, Artificial Sequence
  Description of Artificial Sequence: Synthetic oligonucleotide
aguccgccgcagcuggcca

SEQ ID NO: 251656 - RNA, 19 nt, Artificial Sequence
  Description of Artificial Sequence: Synthetic oligonucleotide
accucagauuugagacaac

SEQ ID NO: 251657 - RNA, 19 nt, Artificial Sequence
  Description of Artificial Sequence: Synthetic oligonucleotide
gguccauuuguacguucuc

SEQ ID NO: 251658 - RNA, 19 nt, Artificial Sequence
  Description of Artificial Sequence: Synthetic oligonucleotide
aagcuagccuugagccucu

SEQ ID NO: 251659 - RNA, 19 nt, Artificial Sequence
  Description of Artificial Sequence: Synthetic oligonucleotide
aguccgccucugccagacg

SEQ ID NO: 251660 - RNA, 19 nt, Artificial Sequence
  Description of Artificial Sequence: Synthetic oligonucleotide
ugguaucgacgauccgcau

SEQ ID NO: 251661 - RNA, 19 nt, Artificial Sequence
  Description of Artificial Sequence: Synthetic oligonucleotide
cuguagccggcuuugguau

SEQ ID NO: 251662 - RNA, 19 nt, Artificial Sequence
  Description of Artificial Sequence: Synthetic oligonucleotide
caggcgcgcuuucucugag

SEQ ID NO: 251663 - RNA, 19 nt, Artificial Sequence
  Description of Artificial Sequence: Synthetic oligonucleotide
caugccgggcagaugauuu

SEQ ID NO: 251664 - RNA, 19 nt, Artificial Sequence
  Description of Artificial Sequence: Synthetic oligonucleotide
ugucccggucuucccgcau

SEQ ID NO: 251665 - RNA, 19 nt, Artificial Sequence
  Description of Artificial Sequence: Synthetic oligonucleotide
cggucauuuaagacgauaa

SEQ ID NO: 251666 - RNA, 19 nt, Artificial Sequence
  Description of Artificial Sequence: Synthetic oligonucleotide
augccgggcagaugauuuu

SEQ ID NO: 251667 - RNA, 19 nt, Artificial Sequence
  Description of Artificial Sequence: Synthetic oligonucleotide
cauuaccgagaccagcuuu

SEQ ID NO: 251668 - RNA, 19 nt, Artificial Sequence
  Description of Artificial Sequence: Synthetic oligonucleotide
cucggcggucugccggugc

SEQ ID NO: 251669 - RNA, 19 nt, Artificial Sequence
  Description of Artificial Sequence: Synthetic oligonucleotide
ggagcgaaugggugagcuc

SEQ ID NO: 251670 - RNA, 19 nt, Artificial Sequence
  Description of Artificial Sequence: Synthetic oligonucleotide
gagccuucucacauuguau

SEQ ID NO: 251671 - RNA, 19 nt, Artificial Sequence
  Description of Artificial Sequence: Synthetic oligonucleotide
aggcgcgcuuucucugagu

SEQ ID NO: 251672 - RNA, 19 nt, Artificial Sequence
  Description of Artificial Sequence: Synthetic oligonucleotide
ccuguagccggcuuuggua

SEQ ID NO: 251673 - RNA, 19 nt, Artificial Sequence
  Description of Artificial Sequence: Synthetic oligonucleotide
ggcugcgcaggucugaaau

SEQ ID NO: 251674 - RNA, 19 nt, Artificial Sequence
  Description of Artificial Sequence: Synthetic oligonucleotide
gacaacgaccgcauucauu

SEQ ID NO: 251675 - RNA, 19 nt, Artificial Sequence
  Description of Artificial Sequence: Synthetic oligonucleotide
cgcgcuuaugagauuucug

SEQ ID NO: 251676 - RNA, 19 nt, Artificial Sequence
  Description of Artificial Sequence: Synthetic oligonucleotide
agcgaaugggugagcucgu

SEQ ID NO: 251677 - RNA, 19 nt, Artificial Sequence
  Description of Artificial Sequence: Synthetic oligonucleotide
ggugugaucuccaggcagu

SEQ ID NO: 251678 - RNA, 19 nt, Artificial Sequence
  Description of Artificial Sequence: Synthetic oligonucleotide
guaacagcaggcgcgcuuu

SEQ ID NO: 251679 - RNA, 19 nt, Artificial Sequence
  Description of Artificial Sequence: Synthetic oligonucleotide
gcuccuugguuuguuccac

SEQ ID NO: 251680 - RNA, 19 nt, Artificial Sequence
  Description of Artificial Sequence: Synthetic oligonucleotide
cguaacgguucauuuuaca

SEQ ID NO: 251681 - RNA, 19 nt, Artificial Sequence
  Description of Artificial Sequence: Synthetic oligonucleotide
ccgagaccagcuuuucuga

SEQ ID NO: 251682 - RNA, 19 nt, Artificial Sequence
  Description of Artificial Sequence: Synthetic oligonucleotide
ggucugccggugcagucuc

SEQ ID NO: 251683 - RNA, 19 nt, Artificial Sequence
  Description of Artificial Sequence: Synthetic oligonucleotide
auuccgcgcuuaugagauu

SEQ ID NO: 251684 - RNA, 19 nt, Artificial Sequence
  Description of Artificial Sequence: Synthetic oligonucleotide
uagccggcuuugguaucga

SEQ ID NO: 251685 - RNA, 19 nt, Artificial Sequence
  Description of Artificial Sequence: Synthetic oligonucleotide
gcgcgcuuucucugagucc

SEQ ID NO: 251686 - RNA, 19 nt, Artificial Sequence
  Description of Artificial Sequence: Synthetic oligonucleotide
gggccauccccaaauacgu

SEQ ID NO: 251687 - RNA, 19 nt, Artificial Sequence
  Description of Artificial Sequence: Synthetic oligonucleotide
gccaguucaucgagccacc

SEQ ID NO: 251688 - RNA, 19 nt, Artificial Sequence
  Description of Artificial Sequence: Synthetic oligonucleotide
caaggacccgcacucccgu

SEQ ID NO: 251689 - RNA, 19 nt, Artificial Sequence
  Description of Artificial Sequence: Synthetic oligonucleotide
cagcuauaggauggcaacu

SEQ ID NO: 251690 - RNA, 19 nt, Artificial Sequence
  Description of Artificial Sequence: Synthetic oligonucleotide
uaucgacgauccgcaucau

SEQ ID NO: 251691 - RNA, 19 nt, Artificial Sequence
  Description of Artificial Sequence: Synthetic oligonucleotide
guguucgauccggcugcgc

SEQ ID NO: 251692 - RNA, 19 nt, Artificial Sequence
  Description of Artificial Sequence: Synthetic oligonucleotide
ccgcaucaucacgaguccg

SEQ ID NO: 251693 - RNA, 19 nt, Artificial Sequence
  Description of Artificial Sequence: Synthetic oligonucleotide
uaggaaccuuuugguccau

SEQ ID NO: 251694 - RNA, 19 nt, Artificial Sequence
  Description of Artificial Sequence: Synthetic oligonucleotide
cuucagcaaugcaccuugu

SEQ ID NO: 251695 - RNA, 19 nt, Artificial Sequence
  Description of Artificial Sequence: Synthetic oligonucleotide
cccugguguucgauccggc

SEQ ID NO: 251696 - RNA, 19 nt, Artificial Sequence
  Description of Artificial Sequence: Synthetic oligonucleotide
gcagaauacucggcggucu

SEQ ID NO: 251697 - RNA, 19 nt, Artificial Sequence
  Description of Artificial Sequence: Synthetic oligonucleotide
caaccugguuguagcggcu

SEQ ID NO: 251698 - RNA, 19 nt, Artificial Sequence
  Description of Artificial Sequence: Synthetic oligonucleotide
ccacuuccgccuugugcug

SEQ ID NO: 251699 - RNA, 19 nt, Artificial Sequence
  Description of Artificial Sequence: Synthetic oligonucleotide
gccagacgcuucagcaaug

SEQ ID NO: 251700 - RNA, 19 nt, Artificial Sequence
  Description of Artificial Sequence: Synthetic oligonucleotide
cagugaccugaaucgucgu

SEQ ID NO: 251701 - RNA, 19 nt, Artificial Sequence
  Description of Artificial Sequence: Synthetic oligonucleotide
cccggacacuccaccguac

SEQ ID NO: 251702 - RNA, 19 nt, Artificial Sequence
  Description of Artificial Sequence: Synthetic oligonucleotide
cuuggcacucggccaacuu

SEQ ID NO: 251703 - RNA, 19 nt, Artificial Sequence
  Description of Artificial Sequence: Synthetic oligonucleotide
cgacuggaacugccggcgg

SEQ ID NO: 251704 - RNA, 19 nt, Artificial Sequence
  Description of Artificial Sequence: Synthetic oligonucleotide
ccggacacuccaccguaca

SEQ ID NO: 251705 - RNA, 19 nt, Artificial Sequence
  Description of Artificial Sequence: Synthetic oligonucleotide
gcggucugccggugcaguc

SEQ ID NO: 251706 - RNA, 19 nt, Artificial Sequence
  Description of Artificial Sequence: Synthetic oligonucleotide
ccggucauuuaagacgaua

SEQ ID NO: 251707 - RNA, 19 nt, Artificial Sequence
  Description of Artificial Sequence: Synthetic oligonucleotide
ccugguguucgauccggcu

SEQ ID NO: 251708 - RNA, 19 nt, Artificial Sequence
  Description of Artificial Sequence: Synthetic oligonucleotide
gcgaaugggugagcucguc

SEQ ID NO: 251709 - RNA, 19 nt, Artificial Sequence
  Description of Artificial Sequence: Synthetic oligonucleotide
gcauuaccgagaccagcuu

SEQ ID NO: 251710 - RNA, 19 nt, Artificial Sequence
  Description of Artificial Sequence: Synthetic oligonucleotide
cauucacgguguccccuuu

SEQ ID NO: 251711 - RNA, 19 nt, Artificial Sequence
  Description of Artificial Sequence: Synthetic oligonucleotide
gcgcuuucucugaguccgc

SEQ ID NO: 251712 - RNA, 19 nt, Artificial Sequence
  Description of Artificial Sequence: Synthetic oligonucleotide
gcucggcauacuccucacu

SEQ ID NO: 251713 - RNA, 19 nt, Artificial Sequence
  Description of Artificial Sequence: Synthetic oligonucleotide
cgucagauaagaggaugua

SEQ ID NO: 251714 - RNA, 19 nt, Artificial Sequence
  Description of Artificial Sequence: Synthetic oligonucleotide
gccgccuggcaucuucaau

SEQ ID NO: 251715 - RNA, 19 nt, Artificial Sequence
  Description of Artificial Sequence: Synthetic oligonucleotide
gcucgucagauaagaggau

SEQ ID NO: 251716 - RNA, 19 nt, Artificial Sequence
  Description of Artificial Sequence: Synthetic oligonucleotide
ccuuucauuccgcgcuuau

SEQ ID NO: 251717 - RNA, 19 nt, Artificial Sequence
  Description of Artificial Sequence: Synthetic oligonucleotide
ugccggcgggccgccucaa

SEQ ID NO: 251718 - RNA, 19 nt, Artificial Sequence
  Description of Artificial Sequence: Synthetic oligonucleotide
cugacgguuucgggaguuu

SEQ ID NO: 251719 - RNA, 19 nt, Artificial Sequence
  Description of Artificial Sequence: Synthetic oligonucleotide
ggcggucugccggugcagu

SEQ ID NO: 251720 - RNA, 19 nt, Artificial Sequence
  Description of Artificial Sequence: Synthetic oligonucleotide
caccggagcugugccugua

SEQ ID NO: 251721 - RNA, 19 nt, Artificial Sequence
  Description of Artificial Sequence: Synthetic oligonucleotide
ccgcgcuuaugagauuucu

SEQ ID NO: 251722 - RNA, 19 nt, Artificial Sequence
  Description of Artificial Sequence: Synthetic oligonucleotide
gcaccggagcugugccugu

SEQ ID NO: 251723 - RNA, 19 nt, Artificial Sequence
  Description of Artificial Sequence: Synthetic oligonucleotide
cucggagggugcgguuggu

SEQ ID NO: 251724 - RNA, 19 nt, Artificial Sequence
  Description of Artificial Sequence: Synthetic oligonucleotide
ggccauccccaaauacguu

SEQ ID NO: 251725 - RNA, 19 nt, Artificial Sequence
  Description of Artificial Sequence: Synthetic oligonucleotide
ccaguucaucgagccaccu

SEQ ID NO: 251726 - RNA, 19 nt, Artificial Sequence
  Description of Artificial Sequence: Synthetic oligonucleotide
cccuuucauuccgcgcuua

SEQ ID NO: 251727 - RNA, 19 nt, Artificial Sequence
  Description of Artificial Sequence: Synthetic oligonucleotide
cggucugccggugcagucu

SEQ ID NO: 251728 - RNA, 19 nt, Artificial Sequence
  Description of Artificial Sequence: Synthetic oligonucleotide
ccggcgggccgccucaauu

SEQ ID NO: 251729 - RNA, 19 nt, Artificial Sequence
  Description of Artificial Sequence: Synthetic oligonucleotide
cggcgggccgccucaauuu

SEQ ID NO: 251730 - RNA, 19 nt, Artificial Sequence
  Description of Artificial Sequence: Synthetic oligonucleotide
uauuguaccauucaaaugc

SEQ ID NO: 251731 - RNA, 19 nt, Artificial Sequence
  Description of Artificial Sequence: Synthetic oligonucleotide
aauaugaaaaugcaauauc

SEQ ID NO: 251732 - RNA, 19 nt, Artificial Sequence
  Description of Artificial Sequence: Synthetic oligonucleotide
aaacuauacagcuuacggc

SEQ ID NO: 251733 - RNA, 19 nt, Artificial Sequence
  Description of Artificial Sequence: Synthetic oligonucleotide
uaaacuauacagcuuacgg

SEQ ID NO: 251734 - RNA, 19 nt, Artificial Sequence
  Description of Artificial Sequence: Synthetic oligonucleotide
guaacuaagaacuuaauac

SEQ ID NO: 251735 - RNA, 19 nt, Artificial Sequence
  Description of Artificial Sequence: Synthetic oligonucleotide
aauuguaucacuaaagcug

SEQ ID NO: 251736 - RNA, 19 nt, Artificial Sequence
  Description of Artificial Sequence: Synthetic oligonucleotide
uggaugacaaaucacaucc

SEQ ID NO: 251737 - RNA, 19 nt, Artificial Sequence
  Description of Artificial Sequence: Synthetic oligonucleotide
aaacguuucuuuuaaacug

SEQ ID NO: 251738 - RNA, 19 nt, Artificial Sequence
  Description of Artificial Sequence: Synthetic oligonucleotide
auuucauuacuauucaggg

SEQ ID NO: 251739 - RNA, 19 nt, Artificial Sequence
  Description of Artificial Sequence: Synthetic oligonucleotide
uuucgauaaaagcaaaucc

SEQ ID NO: 251740 - RNA, 19 nt, Artificial Sequence
  Description of Artificial Sequence: Synthetic oligonucleotide
aacacucauugauagagac

SEQ ID NO: 251741 - RNA, 19 nt, Artificial Sequence
  Description of Artificial Sequence: Synthetic oligonucleotide
uaauugaagauaaaccugc

SEQ ID NO: 251742 - RNA, 19 nt, Artificial Sequence
  Description of Artificial Sequence: Synthetic oligonucleotide
aauagccucacagugaaac

SEQ ID NO: 251743 - RNA, 19 nt, Artificial Sequence
  Description of Artificial Sequence: Synthetic oligonucleotide
auauuaucgaacuuuaugu

SEQ ID NO: 251744 - RNA, 19 nt, Artificial Sequence
  Description of Artificial Sequence: Synthetic oligonucleotide
ucuacaaaacagcauacag

SEQ ID NO: 251745 - RNA, 19 nt, Artificial Sequence
  Description of Artificial Sequence: Synthetic oligonucleotide
auuaucgaacuuuauguac

SEQ ID NO: 251746 - RNA, 19 nt, Artificial Sequence
  Description of Artificial Sequence: Synthetic oligonucleotide
ugccuuauaauuuaggugu

SEQ ID NO: 251747 - RNA, 19 nt, Artificial Sequence
  Description of Artificial Sequence: Synthetic oligonucleotide
gauauucuaaucauaaagc

SEQ ID NO: 251748 - RNA, 19 nt, Artificial Sequence
  Description of Artificial Sequence: Synthetic oligonucleotide
aaugccuuauaauuuaggu

SEQ ID NO: 251749 - RNA, 19 nt, Artificial Sequence
  Description of Artificial Sequence: Synthetic oligonucleotide
uguuauucaaccacagugc

SEQ ID NO: 251750 - RNA, 19 nt, Artificial Sequence
  Description of Artificial Sequence: Synthetic oligonucleotide
aaugaagugaagcaaccca

SEQ ID NO: 251751 - RNA, 19 nt, Artificial Sequence
  Description of Artificial Sequence: Synthetic oligonucleotide
uccuuuauaaauaaagaau

SEQ ID NO: 251752 - RNA, 19 nt, Artificial Sequence
  Description of Artificial Sequence: Synthetic oligonucleotide
auauuucauaaauugacug

SEQ ID NO: 251753 - RNA, 19 nt, Artificial Sequence
  Description of Artificial Sequence: Synthetic oligonucleotide
uugaagauaaaccugcuau

SEQ ID NO: 251754 - RNA, 19 nt, Artificial Sequence
  Description of Artificial Sequence: Synthetic oligonucleotide
ucgauaaaagcaaauccag

SEQ ID NO: 251755 - RNA, 19 nt, Artificial Sequence
  Description of Artificial Sequence: Synthetic oligonucleotide
ucauaacacucauugauag

SEQ ID NO: 251756 - RNA, 19 nt, Artificial Sequence
  Description of Artificial Sequence: Synthetic oligonucleotide
auaccaguuauuuacagca

SEQ ID NO: 251757 - RNA, 19 nt, Artificial Sequence
  Description of Artificial Sequence: Synthetic oligonucleotide
uugaguaaacuauacagcu

SEQ ID NO: 251758 - RNA, 19 nt, Artificial Sequence
  Description of Artificial Sequence: Synthetic oligonucleotide
caaauuguaucacuaaagc

SEQ ID NO: 251759 - RNA, 19 nt, Artificial Sequence
  Description of Artificial Sequence: Synthetic oligonucleotide
aauccuaaugcagagaggu

SEQ ID NO: 251760 - RNA, 19 nt, Artificial Sequence
  Description of Artificial Sequence: Synthetic oligonucleotide
aaaacaauucaagucagcu

SEQ ID NO: 251761 - RNA, 19 nt, Artificial Sequence
  Description of Artificial Sequence: Synthetic oligonucleotide
agcaaauccagguuggcgg

SEQ ID NO: 251762 - RNA, 19 nt, Artificial Sequence
  Description of Artificial Sequence: Synthetic oligonucleotide
ggauauucuaaucauaaag

SEQ ID NO: 251763 - RNA, 19 nt, Artificial Sequence
  Description of Artificial Sequence: Synthetic oligonucleotide
agacaucuauccuagcacc

SEQ ID NO: 251764 - RNA, 19 nt, Artificial Sequence
  Description of Artificial Sequence: Synthetic oligonucleotide
uauucaaccacagugcuug

SEQ ID NO: 251765 - RNA, 19 nt, Artificial Sequence
  Description of Artificial Sequence: Synthetic oligonucleotide
ucuagauuaauccaauaua

SEQ ID NO: 251766 - RNA, 19 nt, Artificial Sequence
  Description of Artificial Sequence: Synthetic oligonucleotide
agauuaauccaauauauuu

SEQ ID NO: 251767 - RNA, 19 nt, Artificial Sequence
  Description of Artificial Sequence: Synthetic oligonucleotide
uuaucgaacuuuauguaca

SEQ ID NO: 251768 - RNA, 19 nt, Artificial Sequence
  Description of Artificial Sequence: Synthetic oligonucleotide
ucuaacaucugguucauuc

SEQ ID NO: 251769 - RNA, 19 nt, Artificial Sequence
  Description of Artificial Sequence: Synthetic oligonucleotide
uuauaauccuaaugcagag

SEQ ID NO: 251770 - RNA, 19 nt, Artificial Sequence
  Description of Artificial Sequence: Synthetic oligonucleotide
ugugcaaacaaugcuagcc

SEQ ID NO: 251771 - RNA, 19 nt, Artificial Sequence
  Description of Artificial Sequence: Synthetic oligonucleotide
uccauuucgauaaaagcaa

SEQ ID NO: 251772 - RNA, 19 nt, Artificial Sequence
  Description of Artificial Sequence: Synthetic oligonucleotide
uggaugguauacauaauug

SEQ ID NO: 251773 - RNA, 19 nt, Artificial Sequence
  Description of Artificial Sequence: Synthetic oligonucleotide
uucuagauuaauccaauau

SEQ ID NO: 251774 - RNA, 19 nt, Artificial Sequence
  Description of Artificial Sequence: Synthetic oligonucleotide
uuuaauuuauuuucuuguc

SEQ ID NO: 251775 - RNA, 19 nt, Artificial Sequence
  Description of Artificial Sequence: Synthetic oligonucleotide
auucuaaucauaaagcaca

SEQ ID NO: 251776 - RNA, 19 nt, Artificial Sequence
  Description of Artificial Sequence: Synthetic oligonucleotide
aaacacucgagaaugaagu

SEQ ID NO: 251777 - RNA, 19 nt, Artificial Sequence
  Description of Artificial Sequence: Synthetic oligonucleotide
agcuuuauauuaucgaacu

SEQ ID NO: 251778 - RNA, 19 nt, Artificial Sequence
  Description of Artificial Sequence: Synthetic oligonucleotide
uuuaacagaaccaggcuua

SEQ ID NO: 251779 - RNA, 19 nt, Artificial Sequence
  Description of Artificial Sequence: Synthetic oligonucleotide
agguuuaacagaaccaggc

SEQ ID NO: 251780 - RNA, 19 nt, Artificial Sequence
  Description of Artificial Sequence: Synthetic oligonucleotide
auaaauccaugcuucauga

SEQ ID NO: 251781 - RNA, 19 nt, Artificial Sequence
  Description of Artificial Sequence: Synthetic oligonucleotide
agugaaacacaucguaaag

SEQ ID NO: 251782 - RNA, 19 nt, Artificial Sequence
  Description of Artificial Sequence: Synthetic oligonucleotide
aaagcuuaugccccuucag

SEQ ID NO: 251783 - RNA, 19 nt, Artificial Sequence
  Description of Artificial Sequence: Synthetic oligonucleotide
aaauagaacaaagggauuu

SEQ ID NO: 251784 - RNA, 19 nt, Artificial Sequence
  Description of Artificial Sequence: Synthetic oligonucleotide
augugcauaaaacacacaa

SEQ ID NO: 251785 - RNA, 19 nt, Artificial Sequence
  Description of Artificial Sequence: Synthetic oligonucleotide
ucgagaaugaagugaagca

SEQ ID NO: 251786 - RNA, 19 nt, Artificial Sequence
  Description of Artificial Sequence: Synthetic oligonucleotide
ugcuuaagaaaugacauaa

SEQ ID NO: 251787 - RNA, 19 nt, Artificial Sequence
  Description of Artificial Sequence: Synthetic oligonucleotide
aaacagcuuuauauuaucg

SEQ ID NO: 251788 - RNA, 19 nt, Artificial Sequence
  Description of Artificial Sequence: Synthetic oligonucleotide
ugaagauaaaccugcuaug

SEQ ID NO: 251789 - RNA, 19 nt, Artificial Sequence
  Description of Artificial Sequence: Synthetic oligonucleotide
ugaaaccgcuuucuguugg

SEQ ID NO: 251790 - RNA, 19 nt, Artificial Sequence
  Description of Artificial Sequence: Synthetic oligonucleotide
auaugaaaaugcaauaucu

SEQ ID NO: 251791 - RNA, 19 nt, Artificial Sequence
  Description of Artificial Sequence: Synthetic oligonucleotide
ucuuacaugauuucuucaa

SEQ ID NO: 251792 - RNA, 19 nt, Artificial Sequence
  Description of Artificial Sequence: Synthetic oligonucleotide
  modified_base (3)..(3): a, c, u, g, unknown or other
uanccugaggauuuccugc

SEQ ID NO: 251793 - RNA, 19 nt, Artificial Sequence
  Description of Artificial Sequence: Synthetic oligonucleotide
uugaauuaguuucacugaa

SEQ ID NO: 251794 - RNA, 19 nt, Artificial Sequence
  Description of Artificial Sequence: Synthetic oligonucleotide
aauuucuagauuaauccaa

SEQ ID NO: 251795 - RNA, 19 nt, Artificial Sequence
  Description of Artificial Sequence: Synthetic oligonucleotide
gaugacaaaucacauccac

SEQ ID NO: 251796 - RNA, 19 nt, Artificial Sequence
  Description of Artificial Sequence: Synthetic oligonucleotide
acuauuuaaauagccucac

SEQ ID NO: 251797 - RNA, 19 nt, Artificial Sequence
  Description of Artificial Sequence: Synthetic oligonucleotide
aguaacuaagaacuuaaua

SEQ ID NO: 251798 - RNA, 19 nt, Artificial Sequence
  Description of Artificial Sequence: Synthetic oligonucleotide
ugcauaggagccaucauaa

SEQ ID NO: 251799 - RNA, 19 nt, Artificial Sequence
  Description of Artificial Sequence: Synthetic oligonucleotide
ugcuucaugacauggagau

SEQ ID NO: 251800 - RNA, 19 nt, Artificial Sequence
  Description of Artificial Sequence: Synthetic oligonucleotide
cacuaaagcugauaaacac

SEQ ID NO: 251801 - RNA, 19 nt, Artificial Sequence
  Description of Artificial Sequence: Synthetic oligonucleotide
uaugaaaaugcaauaucuu

SEQ ID NO: 251802 - RNA, 19 nt, Artificial Sequence
  Description of Artificial Sequence: Synthetic oligonucleotide
uccuaaugcagagaggugc

SEQ ID NO: 251803 - RNA, 19 nt, Artificial Sequence
  Description of Artificial Sequence: Synthetic oligonucleotide
uccuuaacagcaauaaguu

SEQ ID NO: 251804 - RNA, 19 nt, Artificial Sequence
  Description of Artificial Sequence: Synthetic oligonucleotide
caaggguacauauagaaaa

SEQ ID NO: 251805 - RNA, 19 nt, Artificial Sequence
  Description of Artificial Sequence: Synthetic oligonucleotide
augggguuagaccucagag

SEQ ID NO: 251806 - RNA, 19 nt, Artificial Sequence
  Description of Artificial Sequence: Synthetic oligonucleotide
gauagagacaucuauccua

SEQ ID NO: 251807 - RNA, 19 nt, Artificial Sequence
  Description of Artificial Sequence: Synthetic oligonucleotide
uguaccauucaaaugcuuu

SEQ ID NO: 251808 - RNA, 19 nt, Artificial Sequence
  Description of Artificial Sequence: Synthetic oligonucleotide
agcauaacugcuuaagaaa

SEQ ID NO: 251809 - RNA, 19 nt, Artificial Sequence
  Description of Artificial Sequence: Synthetic oligonucleotide
uuucuggcgauuuucauuu

SEQ ID NO: 251810 - RNA, 19 nt, Artificial Sequence
  Description of Artificial Sequence: Synthetic oligonucleotide
augccuuauaauuuaggug

SEQ ID NO: 251811 - RNA, 19 nt, Artificial Sequence
  Description of Artificial Sequence: Synthetic oligonucleotide
cuuacggcaguugagagug

SEQ ID NO: 251812 - RNA, 19 nt, Artificial Sequence
  Description of Artificial Sequence: Synthetic oligonucleotide
ugcagguuuaacagaacca

SEQ ID NO: 251813 - RNA, 19 nt, Artificial Sequence
  Description of Artificial Sequence: Synthetic oligonucleotide
guugagagugcaccaaggg

SEQ ID NO: 251814 - RNA, 19 nt, Artificial Sequence
  Description of Artificial Sequence: Synthetic oligonucleotide
cacaucguaaagaccagcc

SEQ ID NO: 251815 - RNA, 19 nt, Artificial Sequence
  Description of Artificial Sequence: Synthetic oligonucleotide
aaauugacuguuucaguua

SEQ ID NO: 251816 - RNA, 19 nt, Artificial Sequence
  Description of Artificial Sequence: Synthetic oligonucleotide
uaauccuaaugcagagagg

SEQ ID NO: 251817 - RNA, 19 nt, Artificial Sequence
  Description of Artificial Sequence: Synthetic oligonucleotide
aggguacauauagaaaagc

SEQ ID NO: 251818 - RNA, 19 nt, Artificial Sequence
  Description of Artificial Sequence: Synthetic oligonucleotide
uuuuacugguccauuucga

SEQ ID NO: 251819 - RNA, 19 nt, Artificial Sequence
  Description of Artificial Sequence: Synthetic oligonucleotide
uccacacuauuuaaauagc

SEQ ID NO: 251820 - RNA, 19 nt, Artificial Sequence
  Description of Artificial Sequence: Synthetic oligonucleotide
  modified_base (4)..(4): a, c, u, g, unknown or other
auanccugaggauuuccug

SEQ ID NO: 251821 - RNA, 19 nt, Artificial Sequence
  Description of Artificial Sequence: Synthetic oligonucleotide
gauuucuagaaucaagggu

SEQ ID NO: 251822 - RNA, 19 nt, Artificial Sequence
  Description of Artificial Sequence: Synthetic oligonucleotide
uuucuagaaucaaggguca

SEQ ID NO: 251823 - RNA, 19 nt, Artificial Sequence
  Description of Artificial Sequence: Synthetic oligonucleotide
uauuaucgaacuuuaugua

SEQ ID NO: 251824 - RNA, 19 nt, Artificial Sequence
  Description of Artificial Sequence: Synthetic oligonucleotide
agugaaaccgcuuucuguu

SEQ ID NO: 251825 - RNA, 19 nt, Artificial Sequence
  Description of Artificial Sequence: Synthetic oligonucleotide
uuuagaugcuugaguaaac

SEQ ID NO: 251826 - RNA, 19 nt, Artificial Sequence
  Description of Artificial Sequence: Synthetic oligonucleotide
acaucucaaggaaacaagg

SEQ ID NO: 251827 - RNA, 19 nt, Artificial Sequence
  Description of Artificial Sequence: Synthetic oligonucleotide
ugaagugaagcaacccaca

SEQ ID NO: 251828 - RNA, 19 nt, Artificial Sequence
  Description of Artificial Sequence: Synthetic oligonucleotide
uacagcuuacggcaguuga

SEQ ID NO: 251829 - RNA, 19 nt, Artificial Sequence
  Description of Artificial Sequence: Synthetic oligonucleotide
ugauagagacaucuauccu

SEQ ID NO: 251830 - RNA, 19 nt, Artificial Sequence
  Description of Artificial Sequence: Synthetic oligonucleotide
uugucagcaauaaauccau

SEQ ID NO: 251831 - RNA, 19 nt, Artificial Sequence
  Description of Artificial Sequence: Synthetic oligonucleotide
cuauuguaccauucaaaug

SEQ ID NO: 251832 - RNA, 19 nt, Artificial Sequence
  Description of Artificial Sequence: Synthetic oligonucleotide
ugcuugaguaaacuauaca

SEQ ID NO: 251833 - RNA, 19 nt, Artificial Sequence
  Description of Artificial Sequence: Synthetic oligonucleotide
aaccccugagacaccaucc

SEQ ID NO: 251834 - RNA, 19 nt, Artificial Sequence
  Description of Artificial Sequence: Synthetic oligonucleotide
uuuacaucuauuguaccau

SEQ ID NO: 251835 - RNA, 19 nt, Artificial Sequence
  Description of Artificial Sequence: Synthetic oligonucleotide
guaaacuauacagcuuacg

SEQ ID NO: 251836 - RNA, 19 nt, Artificial Sequence
  Description of Artificial Sequence: Synthetic oligonucleotide
cuauccuagcaccuuuugg

SEQ ID NO: 251837 - RNA, 19 nt, Artificial Sequence
  Description of Artificial Sequence: Synthetic oligonucleotide
  modified_base (2)..(2): a, c, u, g, unknown or other
anccugaggauuuccugca

SEQ ID NO: 251838 - RNA, 19 nt, Artificial Sequence
  Description of Artificial Sequence: Synthetic oligonucleotide
  modified_base (13)..(13): a, c, u, g, unknown or other
uuggcggugauanccugag

SEQ ID NO: 251839 - RNA, 19 nt, Artificial Sequence
  Description of Artificial Sequence: Synthetic oligonucleotide
cagcuuuauauuaucgaac

SEQ ID NO: 251840 - RNA, 19 nt, Artificial Sequence
  Description of Artificial Sequence: Synthetic oligonucleotide
ugucuuguauuauuauuau

SEQ ID NO: 251841 - RNA, 19 nt, Artificial Sequence
  Description of Artificial Sequence: Synthetic oligonucleotide
aacguuucuuuuaaacuga

SEQ ID NO: 251842 - RNA, 19 nt, Artificial Sequence
  Description of Artificial Sequence: Synthetic oligonucleotide
cauaggagccaucauaaca

SEQ ID NO: 251843 - RNA, 19 nt, Artificial Sequence
  Description of Artificial Sequence: Synthetic oligonucleotide
caaaacaauucaagucagc

SEQ ID NO: 251844 - RNA, 19 nt, Artificial Sequence
  Description of Artificial Sequence: Synthetic oligonucleotide
acaacacagggaaaaucgc

SEQ ID NO: 251845 - RNA, 19 nt, Artificial Sequence
  Description of Artificial Sequence: Synthetic oligonucleotide
uagauuaauccaauauauu

SEQ ID NO: 251846 - RNA, 19 nt, Artificial Sequence
  Description of Artificial Sequence: Synthetic oligonucleotide
uuuuacugcuuuucaggcu

SEQ ID NO: 251847 - RNA, 19 nt, Artificial Sequence
  Description of Artificial Sequence: Synthetic oligonucleotide
ccaaauuguaucacuaaag

SEQ ID NO: 251848 - RNA, 19 nt, Artificial Sequence
  Description of Artificial Sequence: Synthetic oligonucleotide
ugaauuaguuucacugaau

SEQ ID NO: 251849 - RNA, 19 nt, Artificial Sequence
  Description of Artificial Sequence: Synthetic oligonucleotide
uagcaucucauaaaaucuc

SEQ ID NO: 251850 - RNA, 19 nt, Artificial Sequence
  Description of Artificial Sequence: Synthetic oligonucleotide
ucuauccuagcaccuuuug

SEQ ID NO: 251851 - RNA, 19 nt, Artificial Sequence
  Description of Artificial Sequence: Synthetic oligonucleotide
cagguuuaacagaaccagg

SEQ ID NO: 251852 - RNA, 19 nt, Artificial Sequence
  Description of Artificial Sequence: Synthetic oligonucleotide
gacauaagcaauaauucua

SEQ ID NO: 251853 - RNA, 19 nt, Artificial Sequence
  Description of Artificial Sequence: Synthetic oligonucleotide
ucaagucagcuuaucugca

SEQ ID NO: 251854 - RNA, 19 nt, Artificial Sequence
  Description of Artificial Sequence: Synthetic oligonucleotide
uacaucuauuguaccauuc

SEQ ID NO: 251855 - RNA, 19 nt, Artificial Sequence
  Description of Artificial Sequence: Synthetic oligonucleotide
auuucauaaauugacuguu

SEQ ID NO: 251856 - RNA, 19 nt, Artificial Sequence
  Description of Artificial Sequence: Synthetic oligonucleotide
ucacugaauccauuugcug

SEQ ID NO: 251857 - RNA, 19 nt, Artificial Sequence
  Description of Artificial Sequence: Synthetic oligonucleotide
gaaacugauaaaauauucu

SEQ ID NO: 251858 - RNA, 19 nt, Artificial Sequence
  Description of Artificial Sequence: Synthetic oligonucleotide
cacuauuuaaauagccuca

SEQ ID NO: 251859 - RNA, 19 nt, Artificial Sequence
  Description of Artificial Sequence: Synthetic oligonucleotide
uuuacugguccauuucgau

SEQ ID NO: 251860 - RNA, 19 nt, Artificial Sequence
  Description of Artificial Sequence: Synthetic oligonucleotide
gagaaugacaccccaaccu

SEQ ID NO: 251861 - RNA, 19 nt, Artificial Sequence
  Description of Artificial Sequence: Synthetic oligonucleotide
uugacuguuucaguuaaaa

SEQ ID NO: 251862 - RNA, 19 nt, Artificial Sequence
  Description of Artificial Sequence: Synthetic oligonucleotide
ugaauucccuagaagcaau

SEQ ID NO: 251863 - RNA, 19 nt, Artificial Sequence
  Description of Artificial Sequence: Synthetic oligonucleotide
uucuaaucauaaagcacau

SEQ ID NO: 251864 - RNA, 19 nt, Artificial Sequence
  Description of Artificial Sequence: Synthetic oligonucleotide
aagggucaacuuuugggaa

SEQ ID NO: 251865 - RNA, 19 nt, Artificial Sequence
  Description of Artificial Sequence: Synthetic oligonucleotide
gcaauaauucuacaucuac

SEQ ID NO: 251866 - RNA, 19 nt, Artificial Sequence
  Description of Artificial Sequence: Synthetic oligonucleotide
ugggguuagaccucagagu

SEQ ID NO: 251867 - RNA, 19 nt, Artificial Sequence
  Description of Artificial Sequence: Synthetic oligonucleotide
uguugucuuguauuauuau

SEQ ID NO: 251868 - RNA, 19 nt, Artificial Sequence
  Description of Artificial Sequence: Synthetic oligonucleotide
agaaguaauuucauuacua

SEQ ID NO: 251869 - RNA, 19 nt, Artificial Sequence
  Description of Artificial Sequence: Synthetic oligonucleotide
aauugaagauaaaccugcu

SEQ ID NO: 251870 - RNA, 19 nt, Artificial Sequence
  Description of Artificial Sequence: Synthetic oligonucleotide
aguaaacuauacagcuuac

SEQ ID NO: 251871 - RNA, 19 nt, Artificial Sequence
  Description of Artificial Sequence: Synthetic oligonucleotide
uuagaccucagaguuucug

SEQ ID NO: 251872 - RNA, 19 nt, Artificial Sequence
  Description of Artificial Sequence: Synthetic oligonucleotide
ggauuuccugcauaggagc

SEQ ID NO: 251873 - RNA, 19 nt, Artificial Sequence
  Description of Artificial Sequence: Synthetic oligonucleotide
agaugcuugaguaaacuau

SEQ ID NO: 251874 - RNA, 19 nt, Artificial Sequence
  Description of Artificial Sequence: Synthetic oligonucleotide
acacaucguaaagaccagc

SEQ ID NO: 251875 - RNA, 19 nt, Artificial Sequence
  Description of Artificial Sequence: Synthetic oligonucleotide
gaacuuaauacuggaugac

SEQ ID NO: 251876 - RNA, 19 nt, Artificial Sequence
  Description of Artificial Sequence: Synthetic oligonucleotide
auacuggaugacaaaucac

SEQ ID NO: 251877 - RNA, 19 nt, Artificial Sequence
  Description of Artificial Sequence: Synthetic oligonucleotide
uacuauucaggggagggaa

SEQ ID NO: 251878 - RNA, 19 nt, Artificial Sequence
  Description of Artificial Sequence: Synthetic oligonucleotide
accgcuuucuguuggagaa

SEQ ID NO: 251879 - RNA, 19 nt, Artificial Sequence
  Description of Artificial Sequence: Synthetic oligonucleotide
auugaagauaaaccugcua

SEQ ID NO: 251880 - RNA, 19 nt, Artificial Sequence
  Description of Artificial Sequence: Synthetic oligonucleotide
uuagcaaauuaaagcccaa

SEQ ID NO: 251881 - RNA, 19 nt, Artificial Sequence
  Description of Artificial Sequence: Synthetic oligonucleotide
ccuaaaaccacaacucuuc

SEQ ID NO: 251882 - RNA, 19 nt, Artificial Sequence
  Description of Artificial Sequence: Synthetic oligonucleotide
ucacagugaaacacaucgu

SEQ ID NO: 251883 - RNA, 19 nt, Artificial Sequence
  Description of Artificial Sequence: Synthetic oligonucleotide
ggagaauuuuccaugguac

SEQ ID NO: 251884 - RNA, 19 nt, Artificial Sequence
  Description of Artificial Sequence: Synthetic oligonucleotide
agcuuacggcaguugagag

SEQ ID NO: 251885 - RNA, 19 nt, Artificial Sequence
  Description of Artificial Sequence: Synthetic oligonucleotide
gaaagcuuaugccccuuca

SEQ ID NO: 251886 - RNA, 19 nt, Artificial Sequence
  Description of Artificial Sequence: Synthetic oligonucleotide
ucauugauagagacaucua

SEQ ID NO: 251887 - RNA, 19 nt, Artificial Sequence
  Description of Artificial Sequence: Synthetic oligonucleotide
ggaugguauacauaauuga

SEQ ID NO: 251888 - RNA, 19 nt, Artificial Sequence
  Description of Artificial Sequence: Synthetic oligonucleotide
aguugagagugcaccaagg

SEQ ID NO: 251889 - RNA, 19 nt, Artificial Sequence
  Description of Artificial Sequence: Synthetic oligonucleotide
augcuugaguaaacuauac

SEQ ID NO: 251890 - RNA, 19 nt, Artificial Sequence
  Description of Artificial Sequence: Synthetic oligonucleotide
uuucuagauuaauccaaua

SEQ ID NO: 251891 - RNA, 19 nt, Artificial Sequence
  Description of Artificial Sequence: Synthetic oligonucleotide
  modified_base (6)..(6): a, c, u, g, unknown or other
ugauanccugaggauuucc

SEQ ID NO: 251892 - RNA, 19 nt, Artificial Sequence
  Description of Artificial Sequence: Synthetic oligonucleotide
aacacaucguaaagaccag

SEQ ID NO: 251893 - RNA, 19 nt, Artificial Sequence
  Description of Artificial Sequence: Synthetic oligonucleotide
caucguaaagaccagccaa

SEQ ID NO: 251894 - RNA, 19 nt, Artificial Sequence
  Description of Artificial Sequence: Synthetic oligonucleotide
accccugagacaccauccg

SEQ ID NO: 251895 - RNA, 19 nt, Artificial Sequence
  Description of Artificial Sequence: Synthetic oligonucleotide
uuauucaaccacagugcuu

SEQ ID NO: 251896 - RNA, 19 nt, Artificial Sequence
  Description of Artificial Sequence: Synthetic oligonucleotide
aacaucugguucauucgca

SEQ ID NO: 251897 - RNA, 19 nt, Artificial Sequence
  Description of Artificial Sequence: Synthetic oligonucleotide
uuuggaugguauacauaau

SEQ ID NO: 251898 - RNA, 19 nt, Artificial Sequence
  Description of Artificial Sequence: Synthetic oligonucleotide
auagccucacagugaaaca

SEQ ID NO: 251899 - RNA, 19 nt, Artificial Sequence
  Description of Artificial Sequence: Synthetic oligonucleotide
agcuuaugccccuucagua

SEQ ID NO: 251900 - RNA, 19 nt, Artificial Sequence
  Description of Artificial Sequence: Synthetic oligonucleotide
aaauugaggugauguuauu

SEQ ID NO: 251901 - RNA, 19 nt, Artificial Sequence
  Description of Artificial Sequence: Synthetic oligonucleotide
  modified_base (11)..(11): a, c, u, g, unknown or other
ggcggugauanccugagga

SEQ ID NO: 251902 - RNA, 19 nt, Artificial Sequence
  Description of Artificial Sequence: Synthetic oligonucleotide
ccacacuauuuaaauagcc

SEQ ID NO: 251903 - RNA, 19 nt, Artificial Sequence
  Description of Artificial Sequence: Synthetic oligonucleotide
uuacuauucaggggaggga

SEQ ID NO: 251904 - RNA, 19 nt, Artificial Sequence
  Description of Artificial Sequence: Synthetic oligonucleotide
cauuacuauucaggggagg

SEQ ID NO: 251905 - RNA, 19 nt, Artificial Sequence
  Description of Artificial Sequence: Synthetic oligonucleotide
auucgcagggacacacacc

SEQ ID NO: 251906 - RNA, 19 nt, Artificial Sequence
  Description of Artificial Sequence: Synthetic oligonucleotide
agaauuuuccaugguacua

SEQ ID NO: 251907 - RNA, 19 nt, Artificial Sequence
  Description of Artificial Sequence: Synthetic oligonucleotide
aaagagaaugacaccccaa

SEQ ID NO: 251908 - RNA, 19 nt, Artificial Sequence
  Description of Artificial Sequence: Synthetic oligonucleotide
ugcaaacaaugcuagccuu

SEQ ID NO: 251909 - RNA, 19 nt, Artificial Sequence
  Description of Artificial Sequence: Synthetic oligonucleotide
gauaaacacucgagaauga

SEQ ID NO: 251910 - RNA, 19 nt, Artificial Sequence
  Description of Artificial Sequence: Synthetic oligonucleotide
aaaccgcuuucuguuggag

SEQ ID NO: 251911 - RNA, 19 nt, Artificial Sequence
  Description of Artificial Sequence: Synthetic oligonucleotide
cagugaaacacaucguaaa

SEQ ID NO: 251912 - RNA, 19 nt, Artificial Sequence
  Description of Artificial Sequence: Synthetic oligonucleotide
auucuuaguuucuggcgau

SEQ ID NO: 251913 - RNA, 19 nt, Artificial Sequence
  Description of Artificial Sequence: Synthetic oligonucleotide
aaccugcuauggcagaguu

SEQ ID NO: 251914 - RNA, 19 nt, Artificial Sequence
  Description of Artificial Sequence: Synthetic oligonucleotide
ggaaaaucgcucaaaacaa

SEQ ID NO: 251915 - RNA, 19 nt, Artificial Sequence
  Description of Artificial Sequence: Synthetic oligonucleotide
uuaugccccuucaguaaac

SEQ ID NO: 251916 - RNA, 19 nt, Artificial Sequence
  Description of Artificial Sequence: Synthetic oligonucleotide
agcaucucauaaaaucuca

SEQ ID NO: 251917 - RNA, 19 nt, Artificial Sequence
  Description of Artificial Sequence: Synthetic oligonucleotide
auuuugauugucagcaaua

SEQ ID NO: 251918 - RNA, 19 nt, Artificial Sequence
  Description of Artificial Sequence: Synthetic oligonucleotide
caguugagagugcaccaag

SEQ ID NO: 251919 - RNA, 19 nt, Artificial Sequence
  Description of Artificial Sequence: Synthetic oligonucleotide
uuacaucuauuguaccauu

SEQ ID NO: 251920 - RNA, 19 nt, Artificial Sequence
  Description of Artificial Sequence: Synthetic oligonucleotide
cacucgagaaugaagugaa

SEQ ID NO: 251921 - RNA, 19 nt, Artificial Sequence
  Description of Artificial Sequence: Synthetic oligonucleotide
acaccccaaccuucccucc

SEQ ID NO: 251922 - RNA, 19 nt, Artificial Sequence
  Description of Artificial Sequence: Synthetic oligonucleotide
ucuaaucauaaagcacauc

SEQ ID NO: 251923 - RNA, 19 nt, Artificial Sequence
  Description of Artificial Sequence: Synthetic oligonucleotide
gaaccccugagacaccauc

SEQ ID NO: 251924 - RNA, 19 nt, Artificial Sequence
  Description of Artificial Sequence: Synthetic oligonucleotide
guuugcagcgacacugcag

SEQ ID NO: 251925 - RNA, 19 nt, Artificial Sequence
  Description of Artificial Sequence: Synthetic oligonucleotide
cauaacacucauugauaga

SEQ ID NO: 251926 - RNA, 19 nt, Artificial Sequence
  Description of Artificial Sequence: Synthetic oligonucleotide
uuuaagcauuaagagcaua

SEQ ID NO: 251927 - RNA, 19 nt, Artificial Sequence
  Description of Artificial Sequence: Synthetic oligonucleotide
cuucauuugcagggguugc

SEQ ID NO: 251928 - RNA, 19 nt, Artificial Sequence
  Description of Artificial Sequence: Synthetic oligonucleotide
auuguaccauucaaaugcu

SEQ ID NO: 251929 - RNA, 19 nt, Artificial Sequence
  Description of Artificial Sequence: Synthetic oligonucleotide
auccuagcaccuuuuggau

SEQ ID NO: 251930 - RNA, 19 nt, Artificial Sequence
  Description of Artificial Sequence: Synthetic oligonucleotide
accauccguuuccaaagcu

SEQ ID NO: 251931 - RNA, 19 nt, Artificial Sequence
  Description of Artificial Sequence: Synthetic oligonucleotide
auaaguuugugcagguuua

SEQ ID NO: 251932 - RNA, 19 nt, Artificial Sequence
  Description of Artificial Sequence: Synthetic oligonucleotide
ucccguuuuguuccucagu

SEQ ID NO: 251933 - RNA, 19 nt, Artificial Sequence
  Description of Artificial Sequence: Synthetic oligonucleotide
acagcuuacggcaguugag

SEQ ID NO: 251934 - RNA, 19 nt, Artificial Sequence
  Description of Artificial Sequence: Synthetic oligonucleotide
accaguaacuaagaacuua

SEQ ID NO: 251935 - RNA, 19 nt, Artificial Sequence
  Description of Artificial Sequence: Synthetic oligonucleotide
gcauugauccuuuauaaau

SEQ ID NO: 251936 - RNA, 19 nt, Artificial Sequence
  Description of Artificial Sequence: Synthetic oligonucleotide
gaaucaagggucaacuuuu

SEQ ID NO: 251937 - RNA, 19 nt, Artificial Sequence
  Description of Artificial Sequence: Synthetic oligonucleotide
  modified_base (12)..(12): a, c, u, g, unknown or other
uggcggugauanccugagg

SEQ ID NO: 251938 - RNA, 19 nt, Artificial Sequence
  Description of Artificial Sequence: Synthetic oligonucleotide
  modified_base (5)..(5): a, c, u, g, unknown or other
gauanccugaggauuuccu

SEQ ID NO: 251939 - RNA, 19 nt, Artificial Sequence
  Description of Artificial Sequence: Synthetic oligonucleotide
uacggcaguugagagugca

SEQ ID NO: 251940 - RNA, 19 nt, Artificial Sequence
  Description of Artificial Sequence: Synthetic oligonucleotide
uccgucuguugucuuguau

SEQ ID NO: 251941 - RNA, 19 nt, Artificial Sequence
  Description of Artificial Sequence: Synthetic oligonucleotide
agguaagcagguguucucu

SEQ ID NO: 251942 - RNA, 19 nt, Artificial Sequence
  Description of Artificial Sequence: Synthetic oligonucleotide
uuaacagaaccaggcuuau

SEQ ID NO: 251943 - RNA, 19 nt, Artificial Sequence
  Description of Artificial Sequence: Synthetic oligonucleotide
aggcaugauucauuuugau

SEQ ID NO: 251944 - RNA, 19 nt, Artificial Sequence
  Description of Artificial Sequence: Synthetic oligonucleotide
aucguaaagaccagccaaa

SEQ ID NO: 251945 - RNA, 19 nt, Artificial Sequence
  Description of Artificial Sequence: Synthetic oligonucleotide
ucguaaagaccagccaaau

SEQ ID NO: 251946 - RNA, 19 nt, Artificial Sequence
  Description of Artificial Sequence: Synthetic oligonucleotide
cuuaugccccuucaguaaa

SEQ ID NO: 251947 - RNA, 19 nt, Artificial Sequence
  Description of Artificial Sequence: Synthetic oligonucleotide
ggagccaucauaacacuca

SEQ ID NO: 251948 - RNA, 19 nt, Artificial Sequence
  Description of Artificial Sequence: Synthetic oligonucleotide
gugcaaacaaugcuagccu

SEQ ID NO: 251949 - RNA, 19 nt, Artificial Sequence
  Description of Artificial Sequence: Synthetic oligonucleotide
caguagugaaaccgcuuuc

SEQ ID NO: 251950 - RNA, 19 nt, Artificial Sequence
  Description of Artificial Sequence: Synthetic oligonucleotide
caucucaaggaaacaaggu

SEQ ID NO: 251951 - RNA, 19 nt, Artificial Sequence
  Description of Artificial Sequence: Synthetic oligonucleotide
acacucauugauagagaca

SEQ ID NO: 251952 - RNA, 19 nt, Artificial Sequence
  Description of Artificial Sequence: Synthetic oligonucleotide
accuaaaaccacaacucuu

SEQ ID NO: 251953 - RNA, 19 nt, Artificial Sequence
  Description of Artificial Sequence: Synthetic oligonucleotide
guuaucaaggguacauaua

SEQ ID NO: 251954 - RNA, 19 nt, Artificial Sequence
  Description of Artificial Sequence: Synthetic oligonucleotide
  modified_base (14)..(14): a, c, u, g, unknown or other
guuggcggugauanccuga

SEQ ID NO: 251955 - RNA, 19 nt, Artificial Sequence
  Description of Artificial Sequence: Synthetic oligonucleotide
cugauaaacacucgagaau

SEQ ID NO: 251956 - RNA, 19 nt, Artificial Sequence
  Description of Artificial Sequence: Synthetic oligonucleotide
cugaauucccuagaagcaa

SEQ ID NO: 251957 - RNA, 19 nt, Artificial Sequence
  Description of Artificial Sequence: Synthetic oligonucleotide
ugaggccgaagagguaagc

SEQ ID NO: 251958 - RNA, 19 nt, Artificial Sequence
  Description of Artificial Sequence: Synthetic oligonucleotide
agcacaucucaaggaaaca

SEQ ID NO: 251959 - RNA, 19 nt, Artificial Sequence
  Description of Artificial Sequence: Synthetic oligonucleotide
cauuucgauaaaagcaaau

SEQ ID NO: 251960 - RNA, 19 nt, Artificial Sequence
  Description of Artificial Sequence: Synthetic oligonucleotide
uuacggcaguugagagugc

SEQ ID NO: 251961 - RNA, 19 nt, Artificial Sequence
  Description of Artificial Sequence: Synthetic oligonucleotide
augguacuaccuaauuaaa

SEQ ID NO: 251962 - RNA, 19 nt, Artificial Sequence
  Description of Artificial Sequence: Synthetic oligonucleotide
gguuuaacagaaccaggcu

SEQ ID NO: 251963 - RNA, 19 nt, Artificial Sequence
  Description of Artificial Sequence: Synthetic oligonucleotide
gagggaaaucaccaauuuu

SEQ ID NO: 251964 - RNA, 19 nt, Artificial Sequence
  Description of Artificial Sequence: Synthetic oligonucleotide
cugagacaccauccguuuc

SEQ ID NO: 251965 - RNA, 19 nt, Artificial Sequence
  Description of Artificial Sequence: Synthetic oligonucleotide
acaucuauccuagcaccuu

SEQ ID NO: 251966 - RNA, 19 nt, Artificial Sequence
  Description of Artificial Sequence: Synthetic oligonucleotide
  modified_base (7)..(7): a, c, u, g, unknown or other
gugauanccugaggauuuc

SEQ ID NO: 251967 - RNA, 19 nt, Artificial Sequence
  Description of Artificial Sequence: Synthetic oligonucleotide
acggcaguugagagugcac

SEQ ID NO: 251968 - RNA, 19 nt, Artificial Sequence
  Description of Artificial Sequence: Synthetic oligonucleotide
auccuaaugcagagaggug

SEQ ID NO: 251969 - RNA, 19 nt, Artificial Sequence
  Description of Artificial Sequence: Synthetic oligonucleotide
gguacauauagaaaagcuu

SEQ ID NO: 251970 - RNA, 19 nt, Artificial Sequence
  Description of Artificial Sequence: Synthetic oligonucleotide
gcuuaugccccuucaguaa

SEQ ID NO: 251971 - RNA, 19 nt, Artificial Sequence
  Description of Artificial Sequence: Synthetic oligonucleotide
gacaucuauccuagcaccu

SEQ ID NO: 251972 - RNA, 19 nt, Artificial Sequence
  Description of Artificial Sequence: Synthetic oligonucleotide
cagcuuacggcaguugaga

SEQ ID NO: 251973 - RNA, 19 nt, Artificial Sequence
  Description of Artificial Sequence: Synthetic oligonucleotide
caaccuucccuccccagaa

SEQ ID NO: 251974 - RNA, 19 nt, Artificial Sequence
  Description of Artificial Sequence: Synthetic oligonucleotide
acucgagaaugaagugaag

SEQ ID NO: 251975 - RNA, 19 nt, Artificial Sequence
  Description of Artificial Sequence: Synthetic oligonucleotide
aggugcacaggagaauuuu

SEQ ID NO: 251976 - RNA, 19 nt, Artificial Sequence
  Description of Artificial Sequence: Synthetic oligonucleotide
gcaaacaaugcuagccuuc

SEQ ID NO: 251977 - RNA, 19 nt, Artificial Sequence
  Description of Artificial Sequence: Synthetic oligonucleotide
cagcuuaucugcauuggau

SEQ ID NO: 251978 - RNA, 19 nt, Artificial Sequence
  Description of Artificial Sequence: Synthetic oligonucleotide
cuaacucugccuguuccaa

SEQ ID NO: 251979 - RNA, 19 nt, Artificial Sequence
  Description of Artificial Sequence: Synthetic oligonucleotide
aguuucccucuucucuaua

SEQ ID NO: 251980 - RNA, 19 nt, Artificial Sequence
  Description of Artificial Sequence: Synthetic oligonucleotide
caaauccagguuggcggug

SEQ ID NO: 251981 - RNA, 19 nt, Artificial Sequence
  Description of Artificial Sequence: Synthetic oligonucleotide
ccuaaugcagagaggugca

SEQ ID NO: 251982 - RNA, 19 nt, Artificial Sequence
  Description of Artificial Sequence: Synthetic oligonucleotide
aaauagccucacagugaaa

SEQ ID NO: 251983 - RNA, 19 nt, Artificial Sequence
  Description of Artificial Sequence: Synthetic oligonucleotide
uccacaucaugggguuaga

SEQ ID NO: 251984 - RNA, 19 nt, Artificial Sequence
  Description of Artificial Sequence: Synthetic oligonucleotide
gcacaucucaaggaaacaa

SEQ ID NO: 251985 - RNA, 19 nt, Artificial Sequence
  Description of Artificial Sequence: Synthetic oligonucleotide
acguuucuuuuaaacugaa

SEQ ID NO: 251986 - RNA, 19 nt, Artificial Sequence
  Description of Artificial Sequence: Synthetic oligonucleotide
aggucaucucuggcuuccg

SEQ ID NO: 251987 - RNA, 19 nt, Artificial Sequence
  Description of Artificial Sequence: Synthetic oligonucleotide
gccuuauaauuuaggugug

SEQ ID NO: 251988 - RNA, 19 nt, Artificial Sequence
  Description of Artificial Sequence: Synthetic oligonucleotide
  modified_base (15)..(15): a, c, u, g, unknown or other
gguuggcggugauanccug

SEQ ID NO: 251989 - RNA, 19 nt, Artificial Sequence
  Description of Artificial Sequence: Synthetic oligonucleotide
ggugcacaggagaauuuuc

SEQ ID NO: 251990 - RNA, 19 nt, Artificial Sequence
  Description of Artificial Sequence: Synthetic oligonucleotide
acccacccaaguagcaucu

SEQ ID NO: 251991 - RNA, 19 nt, Artificial Sequence
  Description of Artificial Sequence: Synthetic oligonucleotide
cagugaagucaggaggaga

SEQ ID NO: 251992 - RNA, 19 nt, Artificial Sequence
  Description of Artificial Sequence: Synthetic oligonucleotide
ggcaugauucauuuugauu

SEQ ID NO: 251993 - RNA, 19 nt, Artificial Sequence
  Description of Artificial Sequence: Synthetic oligonucleotide
  modified_base (8)..(8): a, c, u, g, unknown or other
ggugauanccugaggauuu

SEQ ID NO: 251994 - RNA, 19 nt, Artificial Sequence
  Description of Artificial Sequence: Synthetic oligonucleotide
uaacagaaccaggcuuauu

SEQ ID NO: 251995 - RNA, 19 nt, Artificial Sequence
  Description of Artificial Sequence: Synthetic oligonucleotide
guaagcagguguucucuuu

SEQ ID NO: 251996 - RNA, 19 nt, Artificial Sequence
  Description of Artificial Sequence: Synthetic oligonucleotide
uugcugcauaaaguucuuu

SEQ ID NO: 251997 - RNA, 19 nt, Artificial Sequence
  Description of Artificial Sequence: Synthetic oligonucleotide
ccaugguacuaccuaauua

SEQ ID NO: 251998 - RNA, 19 nt, Artificial Sequence
  Description of Artificial Sequence: Synthetic oligonucleotide
caagucagcuuaucugcau

SEQ ID NO: 251999 - RNA, 19 nt, Artificial Sequence
  Description of Artificial Sequence: Synthetic oligonucleotide
ccauuucgauaaaagcaaa

SEQ ID NO: 252000 - RNA, 19 nt, Artificial Sequence
  Description of Artificial Sequence: Synthetic oligonucleotide
  modified_base (10)..(10): a, c, u, g, unknown or other
gcggugauanccugaggau

SEQ ID NO: 252001 - RNA, 19 nt, Artificial Sequence
  Description of Artificial Sequence: Synthetic oligonucleotide
gcaccuuuuggaugguaua

SEQ ID NO: 252002 - RNA, 19 nt, Artificial Sequence
  Description of Artificial Sequence: Synthetic oligonucleotide
gaauucccuagaagcaauu

SEQ ID NO: 252003 - RNA, 19 nt, Artificial Sequence
  Description of Artificial Sequence: Synthetic oligonucleotide
caucuauccuagcaccuuu

SEQ ID NO: 252004 - RNA, 19 nt, Artificial Sequence
  Description of Artificial Sequence: Synthetic oligonucleotide
ccuuauaauuuagguguga

SEQ ID NO: 252005 - RNA, 19 nt, Artificial Sequence
  Description of Artificial Sequence: Synthetic oligonucleotide
gcuuacggcaguugagagu

SEQ ID NO: 252006 - RNA, 19 nt, Artificial Sequence
  Description of Artificial Sequence: Synthetic oligonucleotide
cauggagauuccacaguuu

SEQ ID NO: 252007 - RNA, 19 nt, Artificial Sequence
  Description of Artificial Sequence: Synthetic oligonucleotide
gcuuuauauuaucgaacuu

SEQ ID NO: 252008 - RNA, 19 nt, Artificial Sequence
  Description of Artificial Sequence: Synthetic oligonucleotide
gcaguugagagugcaccaa

SEQ ID NO: 252009 - RNA, 19 nt, Artificial Sequence
  Description of Artificial Sequence: Synthetic oligonucleotide
cgaagagguaagcaggugu

SEQ ID NO: 252010 - RNA, 19 nt, Artificial Sequence
  Description of Artificial Sequence: Synthetic oligonucleotide
agccaucauaacacucauu

SEQ ID NO: 252011 - RNA, 19 nt, Artificial Sequence
  Description of Artificial Sequence: Synthetic oligonucleotide
ccaguagugaaaccgcuuu

SEQ ID NO: 252012 - RNA, 19 nt, Artificial Sequence
  Description of Artificial Sequence: Synthetic oligonucleotide
caauaaguuugugcagguu

SEQ ID NO: 252013 - RNA, 19 nt, Artificial Sequence
  Description of Artificial Sequence: Synthetic oligonucleotide
ccgucuguugucuuguauu

SEQ ID NO: 252014 - RNA, 19 nt, Artificial Sequence
  Description of Artificial Sequence: Synthetic oligonucleotide
gcgacacugcaguuucccu

SEQ ID NO: 252015 - RNA, 19 nt, Artificial Sequence
  Description of Artificial Sequence: Synthetic oligonucleotide
ccugagacaccauccguuu

SEQ ID NO: 252016 - RNA, 19 nt, Artificial Sequence
  Description of Artificial Sequence: Synthetic oligonucleotide
ccauuugcugucccguuuu

SEQ ID NO: 252017 - RNA, 19 nt, Artificial Sequence
  Description of Artificial Sequence: Synthetic oligonucleotide
gcugucccguuuuguuccu

SEQ ID NO: 252018 - RNA, 19 nt, Artificial Sequence
  Description of Artificial Sequence: Synthetic oligonucleotide
  modified_base (9)..(9): a, c, u, g, unknown or other
cggugauanccugaggauu

SEQ ID NO: 252019 - RNA, 19 nt, Artificial Sequence
  Description of Artificial Sequence: Synthetic oligonucleotide
auggaaauaauccaugccc

SEQ ID NO: 252020 - RNA, 19 nt, Artificial Sequence
  Description of Artificial Sequence: Synthetic oligonucleotide
aaauacaagaauugggcuc

SEQ ID NO: 252021 - RNA, 19 nt, Artificial Sequence
  Description of Artificial Sequence: Synthetic oligonucleotide
aagggacaaaguuugaggc

SEQ ID NO: 252022 - RNA, 19 nt, Artificial Sequence
  Description of Artificial Sequence: Synthetic oligonucleotide
uaaaauaaaauaaaauaaa

SEQ ID NO: 252023 - RNA, 19 nt, Artificial Sequence
  Description of Artificial Sequence: Synthetic oligonucleotide
aauacaagaauugggcucc

SEQ ID NO: 252024 - RNA, 19 nt, Artificial Sequence
  Description of Artificial Sequence: Synthetic oligonucleotide
uaguguaccaaucuggugg

SEQ ID NO: 252025 - RNA, 19 nt, Artificial Sequence
  Description of Artificial Sequence: Synthetic oligonucleotide
aauggagcguaccagggcc

SEQ ID NO: 252026 - RNA, 19 nt, Artificial Sequence
  Description of Artificial Sequence: Synthetic oligonucleotide
aggauaaacguucagggac

SEQ ID NO: 252027 - RNA, 19 nt, Artificial Sequence
  Description of Artificial Sequence: Synthetic oligonucleotide
ugugaugagcauuaaaucc

SEQ ID NO: 252028 - RNA, 19 nt, Artificial Sequence
  Description of Artificial Sequence: Synthetic oligonucleotide
uucuacaagaaacugaccu

SEQ ID NO: 252029 - RNA, 19 nt, Artificial Sequence
  Description of Artificial Sequence: Synthetic oligonucleotide
ucaauacaccccaagaucc

SEQ ID NO: 252030 - RNA, 19 nt, Artificial Sequence
  Description of Artificial Sequence: Synthetic oligonucleotide
auauggaaauaauccaugc

SEQ ID NO: 252031 - RNA, 19 nt, Artificial Sequence
  Description of Artificial Sequence: Synthetic oligonucleotide
aaguggaauuaccagaaag

SEQ ID NO: 252032 - RNA, 19 nt, Artificial Sequence
  Description of Artificial Sequence: Synthetic oligonucleotide
aauuaguguaccaaucugg

SEQ ID NO: 252033 - RNA, 19 nt, Artificial Sequence
  Description of Artificial Sequence: Synthetic oligonucleotide
uugacguggauaaagcagg

SEQ ID NO: 252034 - RNA, 19 nt, Artificial Sequence
  Description of Artificial Sequence: Synthetic oligonucleotide
ugaccuuuacucaacaaag

SEQ ID NO: 252035 - RNA, 19 nt, Artificial Sequence
  Description of Artificial Sequence: Synthetic oligonucleotide
aaaauaaaauaaaauaaaa

SEQ ID NO: 252036 - RNA, 19 nt, Artificial Sequence
  Description of Artificial Sequence: Synthetic oligonucleotide
aaagcccaaaauauaaugg

SEQ ID NO: 252037 - RNA, 19 nt, Artificial Sequence
  Description of Artificial Sequence: Synthetic oligonucleotide
aagccuauaggguagccuc

SEQ ID NO: 252038 - RNA, 19 nt, Artificial Sequence
  Description of Artificial Sequence: Synthetic oligonucleotide
aucaauacaccccaagauc

SEQ ID NO: 252039 - RNA, 19 nt, Artificial Sequence
  Description of Artificial Sequence: Synthetic oligonucleotide
agucaauccaucaauacac

SEQ ID NO: 252040 - RNA, 19 nt, Artificial Sequence
  Description of Artificial Sequence: Synthetic oligonucleotide
agagcgauccaagaaaugc

SEQ ID NO: 252041 - RNA, 19 nt, Artificial Sequence
  Description of Artificial Sequence: Synthetic oligonucleotide
acccaguaaaccuuugucc

SEQ ID NO: 252042 - RNA, 19 nt, Artificial Sequence
  Description of Artificial Sequence: Synthetic oligonucleotide
cuugagagcagacacgugg

SEQ ID NO: 252043 - RNA, 19 nt, Artificial Sequence
  Description of Artificial Sequence: Synthetic oligonucleotide
aauccaucaauacacccca

SEQ ID NO: 252044 - RNA, 19 nt, Artificial Sequence
  Description of Artificial Sequence: Synthetic oligonucleotide
gguaaggucucccagaagg

SEQ ID NO: 252045 - RNA, 19 nt, Artificial Sequence
  Description of Artificial Sequence: Synthetic oligonucleotide
uauaggguagccucaagcc

SEQ ID NO: 252046 - RNA, 19 nt, Artificial Sequence
  Description of Artificial Sequence: Synthetic oligonucleotide
auuuaggucccacucacuc

SEQ ID NO: 252047 - RNA, 19 nt, Artificial Sequence
  Description of Artificial Sequence: Synthetic oligonucleotide
acaaguggaaucucacgcc

SEQ ID NO: 252048 - RNA, 19 nt, Artificial Sequence
  Description of Artificial Sequence: Synthetic oligonucleotide
uggaaauaauccaugcccc

SEQ ID NO: 252049 - RNA, 19 nt, Artificial Sequence
  Description of Artificial Sequence: Synthetic oligonucleotide
gauggggacacacuaaaug

SEQ ID NO: 252050 - RNA, 19 nt, Artificial Sequence
  Description of Artificial Sequence: Synthetic oligonucleotide
uacucuagaugcaagguac

SEQ ID NO: 252051 - RNA, 19 nt, Artificial Sequence
  Description of Artificial Sequence: Synthetic oligonucleotide
cuugacguggauaaagcag

SEQ ID NO: 252052 - RNA, 19 nt, Artificial Sequence
  Description of Artificial Sequence: Synthetic oligonucleotide
ucacaacaccaucagacag

SEQ ID NO: 252053 - RNA, 19 nt, Artificial Sequence
  Description of Artificial Sequence: Synthetic oligonucleotide
aacucaacuauccuugaaa

SEQ ID NO: 252054 - RNA, 19 nt, Artificial Sequence
  Description of Artificial Sequence: Synthetic oligonucleotide
uauggaaugugcacuaagu

SEQ ID NO: 252055 - RNA, 19 nt, Artificial Sequence
  Description of Artificial Sequence: Synthetic oligonucleotide
gauaggcaugaacucagcg

SEQ ID NO: 252056 - RNA, 19 nt, Artificial Sequence
  Description of Artificial Sequence: Synthetic oligonucleotide
agacacguggccuggaugg

SEQ ID NO: 252057 - RNA, 19 nt, Artificial Sequence
  Description of Artificial Sequence: Synthetic oligonucleotide
acuagucccaggccuaugc

SEQ ID NO: 252058 - RNA, 19 nt, Artificial Sequence
  Description of Artificial Sequence: Synthetic oligonucleotide
caauccaucaauacacccc

SEQ ID NO: 252059 - RNA, 19 nt, Artificial Sequence
  Description of Artificial Sequence: Synthetic oligonucleotide
cuugccuuaucugacaccg

SEQ ID NO: 252060 - RNA, 19 nt, Artificial Sequence
  Description of Artificial Sequence: Synthetic oligonucleotide
uggaaugugcacuaagugu

SEQ ID NO: 252061 - RNA, 19 nt, Artificial Sequence
  Description of Artificial Sequence: Synthetic oligonucleotide
ugaauuuaggucccacuca

SEQ ID NO: 252062 - RNA, 19 nt, Artificial Sequence
  Description of Artificial Sequence: Synthetic oligonucleotide
gaauuaguguaccaaucug

SEQ ID NO: 252063 - RNA, 19 nt, Artificial Sequence
  Description of Artificial Sequence: Synthetic oligonucleotide
uuagaauuaguguaccaau

SEQ ID NO: 252064 - RNA, 19 nt, Artificial Sequence
  Description of Artificial Sequence: Synthetic oligonucleotide
auaccuuuggagcacagga

SEQ ID NO: 252065 - RNA, 19 nt, Artificial Sequence
  Description of Artificial Sequence: Synthetic oligonucleotide
aauuuugaggcuggagggg

SEQ ID NO: 252066 - RNA, 19 nt, Artificial Sequence
  Description of Artificial Sequence: Synthetic oligonucleotide
cagauuagagccuagagaa

SEQ ID NO: 252067 - RNA, 19 nt, Artificial Sequence
  Description of Artificial Sequence: Synthetic oligonucleotide
uuaucugacaccggauucg

SEQ ID NO: 252068 - RNA, 19 nt, Artificial Sequence
  Description of Artificial Sequence: Synthetic oligonucleotide
caugcagucgaggaaaugg

SEQ ID NO: 252069 - RNA, 19 nt, Artificial Sequence
  Description of Artificial Sequence: Synthetic oligonucleotide
aguggaaucucacgccacc

SEQ ID NO: 252070 - RNA, 19 nt, Artificial Sequence
  Description of Artificial Sequence: Synthetic oligonucleotide
uuguuacagacagagauga

SEQ ID NO: 252071 - RNA, 19 nt, Artificial Sequence
  Description of Artificial Sequence: Synthetic oligonucleotide
uaugccuuuaaauaccuuu

SEQ ID NO: 252072 - RNA, 19 nt, Artificial Sequence
  Description of Artificial Sequence: Synthetic oligonucleotide
gaauuuaggucccacucac

SEQ ID NO: 252073 - RNA, 19 nt, Artificial Sequence
  Description of Artificial Sequence: Synthetic oligonucleotide
uaggguagccucaagccag

SEQ ID NO: 252074 - RNA, 19 nt, Artificial Sequence
  Description of Artificial Sequence: Synthetic oligonucleotide
uaaacguucagggaccuug

SEQ ID NO: 252075 - RNA, 19 nt, Artificial Sequence
  Description of Artificial Sequence: Synthetic oligonucleotide
gauacagggcuugacgugg

SEQ ID NO: 252076 - RNA, 19 nt, Artificial Sequence
  Description of Artificial Sequence: Synthetic oligonucleotide
guagccucaagccaguccc

SEQ ID NO: 252077 - RNA, 19 nt, Artificial Sequence
  Description of Artificial Sequence: Synthetic oligonucleotide
uugcccaccaagaaguccc

SEQ ID NO: 252078 - RNA, 19 nt, Artificial Sequence
  Description of Artificial Sequence: Synthetic oligonucleotide
aaugugcacuaaguguccc

SEQ ID NO: 252079 - RNA, 19 nt, Artificial Sequence
  Description of Artificial Sequence: Synthetic oligonucleotide
agcgauacagggcuugacg

SEQ ID NO: 252080 - RNA, 19 nt, Artificial Sequence
  Description of Artificial Sequence: Synthetic oligonucleotide
ucaauccaucaauacaccc

SEQ ID NO: 252081 - RNA, 19 nt, Artificial Sequence
  Description of Artificial Sequence: Synthetic oligonucleotide
agauagggcaccgauuccc

SEQ ID NO: 252082 - RNA, 19 nt, Artificial Sequence
  Description of Artificial Sequence: Synthetic oligonucleotide
uauuuguaggaugaggagu

SEQ ID NO: 252083 - RNA, 19 nt, Artificial Sequence
  Description of Artificial Sequence: Synthetic oligonucleotide
guagauagggcaccgauuc

SEQ ID NO: 252084 - RNA, 19 nt, Artificial Sequence
  Description of Artificial Sequence: Synthetic oligonucleotide
cuauaggguagccucaagc

SEQ ID NO: 252085 - RNA, 19 nt, Artificial Sequence
  Description of Artificial Sequence: Synthetic oligonucleotide
gauggacagaugcacaaac

SEQ ID NO: 252086 - RNA, 19 nt, Artificial Sequence
  Description of Artificial Sequence: Synthetic oligonucleotide
agaacucuugcccaccaag

SEQ ID NO: 252087 - RNA, 19 nt, Artificial Sequence
  Description of Artificial Sequence: Synthetic oligonucleotide
uuuuagaauuaguguacca

SEQ ID NO: 252088 - RNA, 19 nt, Artificial Sequence
  Description of Artificial Sequence: Synthetic oligonucleotide
uuugguaaggucucccaga

SEQ ID NO: 252089 - RNA, 19 nt, Artificial Sequence
  Description of Artificial Sequence: Synthetic oligonucleotide
gauucgguaggccuuagga

SEQ ID NO: 252090 - RNA, 19 nt, Artificial Sequence
  Description of Artificial Sequence: Synthetic oligonucleotide
ucaaggucagucuguaucu

SEQ ID NO: 252091 - RNA, 19 nt, Artificial Sequence
  Description of Artificial Sequence: Synthetic oligonucleotide
aguguaccaaucugguggg

SEQ ID NO: 252092 - RNA, 19 nt, Artificial Sequence
  Description of Artificial Sequence: Synthetic oligonucleotide
uacccagugggcauagcgg

SEQ ID NO: 252093 - RNA, 19 nt, Artificial Sequence
  Description of Artificial Sequence: Synthetic oligonucleotide
uaugcuucucuacaaggaa

SEQ ID NO: 252094 - RNA, 19 nt, Artificial Sequence
  Description of Artificial Sequence: Synthetic oligonucleotide
uggggacacacuaaaugag

SEQ ID NO: 252095 - RNA, 19 nt, Artificial Sequence
  Description of Artificial Sequence: Synthetic oligonucleotide
agccuagagaacucuugcc

SEQ ID NO: 252096 - RNA, 19 nt, Artificial Sequence
  Description of Artificial Sequence: Synthetic oligonucleotide
cuauuuguaggaugaggag

SEQ ID NO: 252097 - RNA, 19 nt, Artificial Sequence
  Description of Artificial Sequence: Synthetic oligonucleotide
ucagcuccgguagauaggg

SEQ ID NO: 252098 - RNA, 19 nt, Artificial Sequence
  Description of Artificial Sequence: Synthetic oligonucleotide
ugucaugaccuccaaagua

SEQ ID NO: 252099 - RNA, 19 nt, Artificial Sequence
  Description of Artificial Sequence: Synthetic oligonucleotide
caaaguuugaggcccuggg

SEQ ID NO: 252100 - RNA, 19 nt, Artificial Sequence
  Description of Artificial Sequence: Synthetic oligonucleotide
aacagacggacagaccugg

SEQ ID NO: 252101 - RNA, 19 nt, Artificial Sequence
  Description of Artificial Sequence: Synthetic oligonucleotide
accaaucacccgcuguugc

SEQ ID NO: 252102 - RNA, 19 nt, Artificial Sequence
  Description of Artificial Sequence: Synthetic oligonucleotide
uaaugguaaugaaagucuc

SEQ ID NO: 252103 - RNA, 19 nt, Artificial Sequence
  Description of Artificial Sequence: Synthetic oligonucleotide
gaaacugaaacuucauugu

SEQ ID NO: 252104 - RNA, 19 nt, Artificial Sequence
  Description of Artificial Sequence: Synthetic oligonucleotide
acugugaugagcauuaaau

SEQ ID NO: 252105 - RNA, 19 nt, Artificial Sequence
  Description of Artificial Sequence: Synthetic oligonucleotide
uuacucaacaaaguucuac

SEQ ID NO: 252106 - RNA, 19 nt, Artificial Sequence
  Description of Artificial Sequence: Synthetic oligonucleotide
cugaauuuaggucccacuc

SEQ ID NO: 252107 - RNA, 19 nt, Artificial Sequence
  Description of Artificial Sequence: Synthetic oligonucleotide
auuccggcaaaacagcgga

SEQ ID NO: 252108 - RNA, 19 nt, Artificial Sequence
  Description of Artificial Sequence: Synthetic oligonucleotide
ugugaguguaugcuucucu

SEQ ID NO: 252109 - RNA, 19 nt, Artificial Sequence
  Description of Artificial Sequence: Synthetic oligonucleotide
guaacaaagauggggacac

SEQ ID NO: 252110 - RNA, 19 nt, Artificial Sequence
  Description of Artificial Sequence: Synthetic oligonucleotide
aagucucagggaaaugggg

SEQ ID NO: 252111 - RNA, 19 nt, Artificial Sequence
  Description of Artificial Sequence: Synthetic oligonucleotide
guaacagacggacagaccu

SEQ ID NO: 252112 - RNA, 19 nt, Artificial Sequence
  Description of Artificial Sequence: Synthetic oligonucleotide
caauuccggcaaaacagcg

SEQ ID NO: 252113 - RNA, 19 nt, Artificial Sequence
  Description of Artificial Sequence: Synthetic oligonucleotide
ugccuuaucugacaccgga

SEQ ID NO: 252114 - RNA, 19 nt, Artificial Sequence
  Description of Artificial Sequence: Synthetic oligonucleotide
aaacguucagggaccuugc

SEQ ID NO: 252115 - RNA, 19 nt, Artificial Sequence
  Description of Artificial Sequence: Synthetic oligonucleotide
aauacaccccaagauccag

SEQ ID NO: 252116 - RNA, 19 nt, Artificial Sequence
  Description of Artificial Sequence: Synthetic oligonucleotide
aaugguaaugaaagucuca

SEQ ID NO: 252117 - RNA, 19 nt, Artificial Sequence
  Description of Artificial Sequence: Synthetic oligonucleotide
aguggaccaacagauggac

SEQ ID NO: 252118 - RNA, 19 nt, Artificial Sequence
  Description of Artificial Sequence: Synthetic oligonucleotide
cugugaugagcauuaaauc

SEQ ID NO: 252119 - RNA, 19 nt, Artificial Sequence
  Description of Artificial Sequence: Synthetic oligonucleotide
uaagaaacugaaacuucau

SEQ ID NO: 252120 - RNA, 19 nt, Artificial Sequence
  Description of Artificial Sequence: Synthetic oligonucleotide
cuacccagugggcauagcg

SEQ ID NO: 252121 - RNA, 19 nt, Artificial Sequence
  Description of Artificial Sequence: Synthetic oligonucleotide
guaaugaaagucucaggga

SEQ ID NO: 252122 - RNA, 19 nt, Artificial Sequence
  Description of Artificial Sequence: Synthetic oligonucleotide
uuaguguaccaaucuggug

SEQ ID NO: 252123 - RNA, 19 nt, Artificial Sequence
  Description of Artificial Sequence: Synthetic oligonucleotide
gguagccccaaaaugaccg

SEQ ID NO: 252124 - RNA, 19 nt, Artificial Sequence
  Description of Artificial Sequence: Synthetic oligonucleotide
guugaguuauggaaugugc

SEQ ID NO: 252125 - RNA, 19 nt, Artificial Sequence
  Description of Artificial Sequence: Synthetic oligonucleotide
ucucacgccaccgaggcgc

SEQ ID NO: 252126 - RNA, 19 nt, Artificial Sequence
  Description of Artificial Sequence: Synthetic oligonucleotide
ucuacaagaaacugaccuu

SEQ ID NO: 252127 - RNA, 19 nt, Artificial Sequence
  Description of Artificial Sequence: Synthetic oligonucleotide
uucgguaggccuuaggauu

SEQ ID NO: 252128 - RNA, 19 nt, Artificial Sequence
  Description of Artificial Sequence: Synthetic oligonucleotide
agccaauauggaaauaauc

SEQ ID NO: 252129 - RNA, 19 nt, Artificial Sequence
  Description of Artificial Sequence: Synthetic oligonucleotide
ucugacaccggauucggua

SEQ ID NO: 252130 - RNA, 19 nt, Artificial Sequence
  Description of Artificial Sequence: Synthetic oligonucleotide
cauuguuacagacagagau

SEQ ID NO: 252131 - RNA, 19 nt, Artificial Sequence
  Description of Artificial Sequence: Synthetic oligonucleotide
uucuuauacucuagaugca

SEQ ID NO: 252132 - RNA, 19 nt, Artificial Sequence
  Description of Artificial Sequence: Synthetic oligonucleotide
cuggaagcagcacauuccc

SEQ ID NO: 252133 - RNA, 19 nt, Artificial Sequence
  Description of Artificial Sequence: Synthetic oligonucleotide
ucuagaugcaagguacaca

SEQ ID NO: 252134 - RNA, 19 nt, Artificial Sequence
  Description of Artificial Sequence: Synthetic oligonucleotide
cuuaucugacaccggauuc

SEQ ID NO: 252135 - RNA, 19 nt, Artificial Sequence
  Description of Artificial Sequence: Synthetic oligonucleotide
auaggguagccucaagcca

SEQ ID NO: 252136 - RNA, 19 nt, Artificial Sequence
  Description of Artificial Sequence: Synthetic oligonucleotide
cagucgaggaaaugguggg

SEQ ID NO: 252137 - RNA, 19 nt, Artificial Sequence
  Description of Artificial Sequence: Synthetic oligonucleotide
cuuaggauuccucccuccc

SEQ ID NO: 252138 - RNA, 19 nt, Artificial Sequence
  Description of Artificial Sequence: Synthetic oligonucleotide
agacagucaauccaucaau

SEQ ID NO: 252139 - RNA, 19 nt, Artificial Sequence
  Description of Artificial Sequence: Synthetic oligonucleotide
aggccuaugccuuuaaaua

SEQ ID NO: 252140 - RNA, 19 nt, Artificial Sequence
  Description of Artificial Sequence: Synthetic oligonucleotide
ugaguguaugcuucucuac

SEQ ID NO: 252141 - RNA, 19 nt, Artificial Sequence
  Description of Artificial Sequence: Synthetic oligonucleotide
aaagccuauaggguagccu

SEQ ID NO: 252142 - RNA, 19 nt, Artificial Sequence
  Description of Artificial Sequence: Synthetic oligonucleotide
guuucaagagcgauccaag

SEQ ID NO: 252143 - RNA, 19 nt, Artificial Sequence
  Description of Artificial Sequence: Synthetic oligonucleotide
uaucugacaccggauucgg

SEQ ID NO: 252144 - RNA, 19 nt, Artificial Sequence
  Description of Artificial Sequence: Synthetic oligonucleotide
aagugcugagaggguagcc

SEQ ID NO: 252145 - RNA, 19 nt, Artificial Sequence
  Description of Artificial Sequence: Synthetic oligonucleotide
gaugggauaagguccaggu

SEQ ID NO: 252146 - RNA, 19 nt, Artificial Sequence
  Description of Artificial Sequence: Synthetic oligonucleotide
ggucacaacaccaucagac

SEQ ID NO: 252147 - RNA, 19 nt, Artificial Sequence
  Description of Artificial Sequence: Synthetic oligonucleotide
aggggauggaggauaaacg

SEQ ID NO: 252148 - RNA, 19 nt, Artificial Sequence
  Description of Artificial Sequence: Synthetic oligonucleotide
aguugaguuauggaaugug

SEQ ID NO: 252149 - RNA, 19 nt, Artificial Sequence
  Description of Artificial Sequence: Synthetic oligonucleotide
gauuagagccuagagaacu

SEQ ID NO: 252150 - RNA, 19 nt, Artificial Sequence
  Description of Artificial Sequence: Synthetic oligonucleotide
agcuccgguagauagggca

SEQ ID NO: 252151 - RNA, 19 nt, Artificial Sequence
  Description of Artificial Sequence: Synthetic oligonucleotide
cauggcuggcccaaugggc

SEQ ID NO: 252152 - RNA, 19 nt, Artificial Sequence
  Description of Artificial Sequence: Synthetic oligonucleotide
ccuacuugagagcagacac

SEQ ID NO: 252153 - RNA, 19 nt, Artificial Sequence
  Description of Artificial Sequence: Synthetic oligonucleotide
accgauucccugcaugcag

SEQ ID NO: 252154 - RNA, 19 nt, Artificial Sequence
  Description of Artificial Sequence: Synthetic oligonucleotide
uucccuacaaauggcuucc

SEQ ID NO: 252155 - RNA, 19 nt, Artificial Sequence
  Description of Artificial Sequence: Synthetic oligonucleotide
acguggauaaagcaggcuu

SEQ ID NO: 252156 - RNA, 19 nt, Artificial Sequence
  Description of Artificial Sequence: Synthetic oligonucleotide
agaccugcucaauuuugag

SEQ ID NO: 252157 - RNA, 19 nt, Artificial Sequence
  Description of Artificial Sequence: Synthetic oligonucleotide
gaaucucacgccaccgagg

SEQ ID NO: 252158 - RNA, 19 nt, Artificial Sequence
  Description of Artificial Sequence: Synthetic oligonucleotide
  modified_base (7)..(7): a, c, u, g, unknown or other
cauggcncccagcaccagg

SEQ ID NO: 252159 - RNA, 19 nt, Artificial Sequence
  Description of Artificial Sequence: Synthetic oligonucleotide
  modified_base (10)..(10): a, c, u, g, unknown or other
  modified_base (18)..(18): a, c, u, g, unknown or other
ugcagcccungcauggcnc

SEQ ID NO: 252160 - RNA, 19 nt, Artificial Sequence
  Description of Artificial Sequence: Synthetic oligonucleotide
ugacaccggauucgguagg

SEQ ID NO: 252161 - RNA, 19 nt, Artificial Sequence
  Description of Artificial Sequence: Synthetic oligonucleotide
ugacguggauaaagcaggc

SEQ ID NO: 252162 - RNA, 19 nt, Artificial Sequence
  Description of Artificial Sequence: Synthetic oligonucleotide
cugacaccggauucgguag

SEQ ID NO: 252163 - RNA, 19 nt, Artificial Sequence
  Description of Artificial Sequence: Synthetic oligonucleotide
acggacagaccugggagcc

SEQ ID NO: 252164 - RNA, 19 nt, Artificial Sequence
  Description of Artificial Sequence: Synthetic oligonucleotide
cuagagaacucuugcccac

SEQ ID NO: 252165 - RNA, 19 nt, Artificial Sequence
  Description of Artificial Sequence: Synthetic oligonucleotide
ggaaugugcacuaaguguc

SEQ ID NO: 252166 - RNA, 19 nt, Artificial Sequence
  Description of Artificial Sequence: Synthetic oligonucleotide
agaaguggaauuaccagaa

SEQ ID NO: 252167 - RNA, 19 nt, Artificial Sequence
  Description of Artificial Sequence: Synthetic oligonucleotide
gagcgauccaagaaaugcc

SEQ ID NO: 252168 - RNA, 19 nt, Artificial Sequence
  Description of Artificial Sequence: Synthetic oligonucleotide
aaguggaaucucacgccac

SEQ ID NO: 252169 - RNA, 19 nt, Artificial Sequence
  Description of Artificial Sequence: Synthetic oligonucleotide
cauagggcugcaucucugc

SEQ ID NO: 252170 - RNA, 19 nt, Artificial Sequence
  Description of Artificial Sequence: Synthetic oligonucleotide
ucugccggaccucaggcau

SEQ ID NO: 252171 - RNA, 19 nt, Artificial Sequence
  Description of Artificial Sequence: Synthetic oligonucleotide
uguaccaaucugguggggu

SEQ ID NO: 252172 - RNA, 19 nt, Artificial Sequence
  Description of Artificial Sequence: Synthetic oligonucleotide
cuccccaccuguaauuccc

SEQ ID NO: 252173 - RNA, 19 nt, Artificial Sequence
  Description of Artificial Sequence: Synthetic oligonucleotide
agaagggcgaaggagcucu

SEQ ID NO: 252174 - RNA, 19 nt, Artificial Sequence
  Description of Artificial Sequence: Synthetic oligonucleotide
cccaaaauauaaugggccc

SEQ ID NO: 252175 - RNA, 19 nt, Artificial Sequence
  Description of Artificial Sequence: Synthetic oligonucleotide
auuagagccuagagaacuc

SEQ ID NO: 252176 - RNA, 19 nt, Artificial Sequence
  Description of Artificial Sequence: Synthetic oligonucleotide
uggaaucucacgccaccga

SEQ ID NO: 252177 - RNA, 19 nt, Artificial Sequence
  Description of Artificial Sequence: Synthetic oligonucleotide
cagucaauccaucaauaca

SEQ ID NO: 252178 - RNA, 19 nt, Artificial Sequence
  Description of Artificial Sequence: Synthetic oligonucleotide
agcggaagcuucuuauacu

SEQ ID NO: 252179 - RNA, 19 nt, Artificial Sequence
  Description of Artificial Sequence: Synthetic oligonucleotide
uagauagggcaccgauucc

SEQ ID NO: 252180 - RNA, 19 nt, Artificial Sequence
  Description of Artificial Sequence: Synthetic oligonucleotide
cucccuauuuguaggauga

SEQ ID NO: 252181 - RNA, 19 nt, Artificial Sequence
  Description of Artificial Sequence: Synthetic oligonucleotide
agauuagagccuagagaac

SEQ ID NO: 252182 - RNA, 19 nt, Artificial Sequence
  Description of Artificial Sequence: Synthetic oligonucleotide
uacaugugaguguaugcuu

SEQ ID NO: 252183 - RNA, 19 nt, Artificial Sequence
  Description of Artificial Sequence: Synthetic oligonucleotide
aagggcgaaggagcucugc

SEQ ID NO: 252184 - RNA, 19 nt, Artificial Sequence
  Description of Artificial Sequence: Synthetic oligonucleotide
ucgguaggccuuaggauuc

SEQ ID NO: 252185 - RNA, 19 nt, Artificial Sequence
  Description of Artificial Sequence: Synthetic oligonucleotide
aagugugcaagugcugaga

SEQ ID NO: 252186 - RNA, 19 nt, Artificial Sequence
  Description of Artificial Sequence: Synthetic oligonucleotide
gaacucagcgauacagggc

SEQ ID NO: 252187 - RNA, 19 nt, Artificial Sequence
  Description of Artificial Sequence: Synthetic oligonucleotide
ccaaagaaguggaauuacc

SEQ ID NO: 252188 - RNA, 19 nt, Artificial Sequence
  Description of Artificial Sequence: Synthetic oligonucleotide
gccuagagaacucuugccc

SEQ ID NO: 252189 - RNA, 19 nt, Artificial Sequence
  Description of Artificial Sequence: Synthetic oligonucleotide
cugcagaucaaggucaguc

SEQ ID NO: 252190 - RNA, 19 nt, Artificial Sequence
  Description of Artificial Sequence: Synthetic oligonucleotide
gcccuuagcccucuuaagg

SEQ ID NO: 252191 - RNA, 19 nt, Artificial Sequence
  Description of Artificial Sequence: Synthetic oligonucleotide
ucaggguaaugguaaugaa

SEQ ID NO: 252192 - RNA, 19 nt, Artificial Sequence
  Description of Artificial Sequence: Synthetic oligonucleotide
ggaaaagccuauaggguag

SEQ ID NO: 252193 - RNA, 19 nt, Artificial Sequence
  Description of Artificial Sequence: Synthetic oligonucleotide
auggaggauaaacguucag

SEQ ID NO: 252194 - RNA, 19 nt, Artificial Sequence
  Description of Artificial Sequence: Synthetic oligonucleotide
caauggagcguaccagggc

SEQ ID NO: 252195 - RNA, 19 nt, Artificial Sequence
  Description of Artificial Sequence: Synthetic oligonucleotide
aggguagccccaaaaugac

SEQ ID NO: 252196 - RNA, 19 nt, Artificial Sequence
  Description of Artificial Sequence: Synthetic oligonucleotide
ugcuccaaagaaguggaau

SEQ ID NO: 252197 - RNA, 19 nt, Artificial Sequence
  Description of Artificial Sequence: Synthetic oligonucleotide
gaacuugggucaaagccca

SEQ ID NO: 252198 - RNA, 19 nt, Artificial Sequence
  Description of Artificial Sequence: Synthetic oligonucleotide
ggaaucucacgccaccgag

SEQ ID NO: 252199 - RNA, 19 nt, Artificial Sequence
  Description of Artificial Sequence: Synthetic oligonucleotide
ucuugggcguguugggucu

SEQ ID NO: 252200 - RNA, 19 nt, Artificial Sequence
  Description of Artificial Sequence: Synthetic oligonucleotide
gcccaaaauauaaugggcc

SEQ ID NO: 252201 - RNA, 19 nt, Artificial Sequence
  Description of Artificial Sequence: Synthetic oligonucleotide
ggccuaugccuuuaaauac

SEQ ID NO: 252202 - RNA, 19 nt, Artificial Sequence
  Description of Artificial Sequence: Synthetic oligonucleotide
gaaaagccuauaggguagc

SEQ ID NO: 252203 - RNA, 19 nt, Artificial Sequence
  Description of Artificial Sequence: Synthetic oligonucleotide
cuacacaaguggaaucuca

SEQ ID NO: 252204 - RNA, 19 nt, Artificial Sequence
  Description of Artificial Sequence: Synthetic oligonucleotide
gacagagaacucaacuauc

SEQ ID NO: 252205 - RNA, 19 nt, Artificial Sequence
  Description of Artificial Sequence: Synthetic oligonucleotide
ugcccuuagcccucuuaag

SEQ ID NO: 252206 - RNA, 19 nt, Artificial Sequence
  Description of Artificial Sequence: Synthetic oligonucleotide
aacguucagggaccuugca

SEQ ID NO: 252207 - RNA, 19 nt, Artificial Sequence
  Description of Artificial Sequence: Synthetic oligonucleotide
caggguaaugguaaugaaa

SEQ ID NO: 252208 - RNA, 19 nt, Artificial Sequence
  Description of Artificial Sequence: Synthetic oligonucleotide
uugccuuaucugacaccgg

SEQ ID NO: 252209 - RNA, 19 nt, Artificial Sequence
  Description of Artificial Sequence: Synthetic oligonucleotide
gucgaggaaaugguggggc

SEQ ID NO: 252210 - RNA, 19 nt, Artificial Sequence
  Description of Artificial Sequence: Synthetic oligonucleotide
ugcccacucgucaggcccg

SEQ ID NO: 252211 - RNA, 19 nt, Artificial Sequence
  Description of Artificial Sequence: Synthetic oligonucleotide
gauacgcuugagcagcucu

SEQ ID NO: 252212 - RNA, 19 nt, Artificial Sequence
  Description of Artificial Sequence: Synthetic oligonucleotide
uuuacucaacaaaguucua

SEQ ID NO: 252213 - RNA, 19 nt, Artificial Sequence
  Description of Artificial Sequence: Synthetic oligonucleotide
agccccaaaaugaccgccc

SEQ ID NO: 252214 - RNA, 19 nt, Artificial Sequence
  Description of Artificial Sequence: Synthetic oligonucleotide
cccucuuaaggaaaacuag

SEQ ID NO: 252215 - RNA, 19 nt, Artificial Sequence
  Description of Artificial Sequence: Synthetic oligonucleotide
caaagugugcaagugcuga

SEQ ID NO: 252216 - RNA, 19 nt, Artificial Sequence
  Description of Artificial Sequence: Synthetic oligonucleotide
ggauaaacguucagggacc

SEQ ID NO: 252217 - RNA, 19 nt, Artificial Sequence
  Description of Artificial Sequence: Synthetic oligonucleotide
gucaauccaucaauacacc

SEQ ID NO: 252218 - RNA, 19 nt, Artificial Sequence
  Description of Artificial Sequence: Synthetic oligonucleotide
ccaaugguccccauucugc

SEQ ID NO: 252219 - RNA, 19 nt, Artificial Sequence
  Description of Artificial Sequence: Synthetic oligonucleotide
aagagcgauccaagaaaug

SEQ ID NO: 252220 - RNA, 19 nt, Artificial Sequence
  Description of Artificial Sequence: Synthetic oligonucleotide
agucgaggaaauggugggg

SEQ ID NO: 252221 - RNA, 19 nt, Artificial Sequence
  Description of Artificial Sequence: Synthetic oligonucleotide
caaguggaaucucacgcca

SEQ ID NO: 252222 - RNA, 19 nt, Artificial Sequence
  Description of Artificial Sequence: Synthetic oligonucleotide
ccaauuccggcaaaacagc

SEQ ID NO: 252223 - RNA, 19 nt, Artificial Sequence
  Description of Artificial Sequence: Synthetic oligonucleotide
aguguauggagcaggucca

SEQ ID NO: 252224 - RNA, 19 nt, Artificial Sequence
  Description of Artificial Sequence: Synthetic oligonucleotide
ggggacacacuaaaugagg

SEQ ID NO: 252225 - RNA, 19 nt, Artificial Sequence
  Description of Artificial Sequence: Synthetic oligonucleotide
ggauggaggauaaacguuc

SEQ ID NO: 252226 - RNA, 19 nt, Artificial Sequence
  Description of Artificial Sequence: Synthetic oligonucleotide
agcgauccaagaaaugcca

SEQ ID NO: 252227 - RNA, 19 nt, Artificial Sequence
  Description of Artificial Sequence: Synthetic oligonucleotide
acaaacuagguagcaucug

SEQ ID NO: 252228 - RNA, 19 nt, Artificial Sequence
  Description of Artificial Sequence: Synthetic oligonucleotide
  modified_base (3)..(3): a, c, u, g, unknown or other
  modified_base (11)..(11): a, c, u, g, unknown or other
cungcauggcncccagcac

SEQ ID NO: 252229 - RNA, 19 nt, Artificial Sequence
  Description of Artificial Sequence: Synthetic oligonucleotide
auacaagaauugggcuccc

SEQ ID NO: 252230 - RNA, 19 nt, Artificial Sequence
  Description of Artificial Sequence: Synthetic oligonucleotide
guggauaaagcaggcuuug

SEQ ID NO: 252231 - RNA, 19 nt, Artificial Sequence
  Description of Artificial Sequence: Synthetic oligonucleotide
gauggaggauaaacguuca

SEQ ID NO: 252232 - RNA, 19 nt, Artificial Sequence
  Description of Artificial Sequence: Synthetic oligonucleotide
gaguuauggaaugugcacu

SEQ ID NO: 252233 - RNA, 19 nt, Artificial Sequence
  Description of Artificial Sequence: Synthetic oligonucleotide
ggcauagcggcucagcguc

SEQ ID NO: 252234 - RNA, 19 nt, Artificial Sequence
  Description of Artificial Sequence: Synthetic oligonucleotide
ccaaaauauaaugggcccc

SEQ ID NO: 252235 - RNA, 19 nt, Artificial Sequence
  Description of Artificial Sequence: Synthetic oligonucleotide
cucuagaugcaagguacac

SEQ ID NO: 252236 - RNA, 19 nt, Artificial Sequence
  Description of Artificial Sequence: Synthetic oligonucleotide
auucuacugucuccaugca

SEQ ID NO: 252237 - RNA, 19 nt, Artificial Sequence
  Description of Artificial Sequence: Synthetic oligonucleotide
gaccuugcaaggcugauuu

SEQ ID NO: 252238 - RNA, 19 nt, Artificial Sequence
  Description of Artificial Sequence: Synthetic oligonucleotide
guggaauuaccagaaagcu

SEQ ID NO: 252239 - RNA, 19 nt, Artificial Sequence
  Description of Artificial Sequence: Synthetic oligonucleotide
cuaguccccagcacagcac

SEQ ID NO: 252240 - RNA, 19 nt, Artificial Sequence
  Description of Artificial Sequence: Synthetic oligonucleotide
ugccaugaagcuggcagga

SEQ ID NO: 252241 - RNA, 19 nt, Artificial Sequence
  Description of Artificial Sequence: Synthetic oligonucleotide
uugccccagcucuugagaa

SEQ ID NO: 252242 - RNA, 19 nt, Artificial Sequence
  Description of Artificial Sequence: Synthetic oligonucleotide
ggaauagaggcagggcccg

SEQ ID NO: 252243 - RNA, 19 nt, Artificial Sequence
  Description of Artificial Sequence: Synthetic oligonucleotide
acguucagggaccuugcaa

SEQ ID NO: 252244 - RNA, 19 nt, Artificial Sequence
  Description of Artificial Sequence: Synthetic oligonucleotide
ucccuugccuuaucugaca

SEQ ID NO: 252245 - RNA, 19 nt, Artificial Sequence
  Description of Artificial Sequence: Synthetic oligonucleotide
augugcacuaagugucccu

SEQ ID NO: 252246 - RNA, 19 nt, Artificial Sequence
  Description of Artificial Sequence: Synthetic oligonucleotide
guagccccaaaaugaccgc

SEQ ID NO: 252247 - RNA, 19 nt, Artificial Sequence
  Description of Artificial Sequence: Synthetic oligonucleotide
uagccccaaaaugaccgcc

SEQ ID NO: 252248 - RNA, 19 nt, Artificial Sequence
  Description of Artificial Sequence: Synthetic oligonucleotide
ccuaaggggcagaacuugg

SEQ ID NO: 252249 - RNA, 19 nt, Artificial Sequence
  Description of Artificial Sequence: Synthetic oligonucleotide
caucaauacaccccaagau

SEQ ID NO: 252250 - RNA, 19 nt, Artificial Sequence
  Description of Artificial Sequence: Synthetic oligonucleotide
cagauuguugaggaccauc

SEQ ID NO: 252251 - RNA, 19 nt, Artificial Sequence
  Description of Artificial Sequence: Synthetic oligonucleotide
caauacaccccaagaucca

SEQ ID NO: 252252 - RNA, 19 nt, Artificial Sequence
  Description of Artificial Sequence: Synthetic oligonucleotide
gaaguggaauuaccagaaa

SEQ ID NO: 252253 - RNA, 19 nt, Artificial Sequence
  Description of Artificial Sequence: Synthetic oligonucleotide
ccagauuagagccuagaga

SEQ ID NO: 252254 - RNA, 19 nt, Artificial Sequence
  Description of Artificial Sequence: Synthetic oligonucleotide
uaccaaucugguggggucu

SEQ ID NO: 252255 - RNA, 19 nt, Artificial Sequence
  Description of Artificial Sequence: Synthetic oligonucleotide
gcggaagcuucuuauacuc

SEQ ID NO: 252256 - RNA, 19 nt, Artificial Sequence
  Description of Artificial Sequence: Synthetic oligonucleotide
augugaguguaugcuucuc

SEQ ID NO: 252257 - RNA, 19 nt, Artificial Sequence
  Description of Artificial Sequence: Synthetic oligonucleotide
gaauccccuaccaauuucu

SEQ ID NO: 252258 - RNA, 19 nt, Artificial Sequence
  Description of Artificial Sequence: Synthetic oligonucleotide
gacccuacuugagagcaga

SEQ ID NO: 252259 - RNA, 19 nt, Artificial Sequence
  Description of Artificial Sequence: Synthetic oligonucleotide
caccaagaagucccacccc

SEQ ID NO: 252260 - RNA, 19 nt, Artificial Sequence
  Description of Artificial Sequence: Synthetic oligonucleotide
ucccuauuuguaggaugag

SEQ ID NO: 252261 - RNA, 19 nt, Artificial Sequence
  Description of Artificial Sequence: Synthetic oligonucleotide
cccaagauccagcagagga

SEQ ID NO: 252262 - RNA, 19 nt, Artificial Sequence
  Description of Artificial Sequence: Synthetic oligonucleotide
cuaagugucccugggaaua

SEQ ID NO: 252263 - RNA, 19 nt, Artificial Sequence
  Description of Artificial Sequence: Synthetic oligonucleotide
gcaauggagcguaccaggg

SEQ ID NO: 252264 - RNA, 19 nt, Artificial Sequence
  Description of Artificial Sequence: Synthetic oligonucleotide
gcaccgauucccugcaugc

SEQ ID NO: 252265 - RNA, 19 nt, Artificial Sequence
  Description of Artificial Sequence: Synthetic oligonucleotide
ccuacaaauggcuuccaga

SEQ ID NO: 252266 - RNA, 19 nt, Artificial Sequence
  Description of Artificial Sequence: Synthetic oligonucleotide
  modified_base (4)..(4): a, c, u, g, unknown or other
  modified_base (12)..(12): a, c, u, g, unknown or other
ccungcauggcncccagca

SEQ ID NO: 252267 - RNA, 19 nt, Artificial Sequence
  Description of Artificial Sequence: Synthetic oligonucleotide
gguucacuaauucuacugu

SEQ ID NO: 252268 - RNA, 19 nt, Artificial Sequence
  Description of Artificial Sequence: Synthetic oligonucleotide
cccagauuagagccuagag

SEQ ID NO: 252269 - RNA, 19 nt, Artificial Sequence
  Description of Artificial Sequence: Synthetic oligonucleotide
gccuaugccuuuaaauacc

SEQ ID NO: 252270 - RNA, 19 nt, Artificial Sequence
  Description of Artificial Sequence: Synthetic oligonucleotide
gggacagagaacucaacua

SEQ ID NO: 252271 - RNA, 19 nt, Artificial Sequence
  Description of Artificial Sequence: Synthetic oligonucleotide
auacgcuugagcagcucug

SEQ ID NO: 252272 - RNA, 19 nt, Artificial Sequence
  Description of Artificial Sequence: Synthetic oligonucleotide
aggcgcuaguccccagcac

SEQ ID NO: 252273 - RNA, 19 nt, Artificial Sequence
  Description of Artificial Sequence: Synthetic oligonucleotide
ucagcgauacagggcuuga

SEQ ID NO: 252274 - RNA, 19 nt, Artificial Sequence
  Description of Artificial Sequence: Synthetic oligonucleotide
aucucacgccaccgaggcg

SEQ ID NO: 252275 - RNA, 19 nt, Artificial Sequence
  Description of Artificial Sequence: Synthetic oligonucleotide
cucccaaucaccaccaauu

SEQ ID NO: 252276 - RNA, 19 nt, Artificial Sequence
  Description of Artificial Sequence: Synthetic oligonucleotide
cucagcgauacagggcuug

SEQ ID NO: 252277 - RNA, 19 nt, Artificial Sequence
  Description of Artificial Sequence: Synthetic oligonucleotide
cccuauuuguaggaugagg

SEQ ID NO: 252278 - RNA, 19 nt, Artificial Sequence
  Description of Artificial Sequence: Synthetic oligonucleotide
ggcuugacguggauaaagc

SEQ ID NO: 252279 - RNA, 19 nt, Artificial Sequence
  Description of Artificial Sequence: Synthetic oligonucleotide
aacuauccuugaaacuguu

SEQ ID NO: 252280 - RNA, 19 nt, Artificial Sequence
  Description of Artificial Sequence: Synthetic oligonucleotide
gcuugacguggauaaagca

SEQ ID NO: 252281 - RNA, 19 nt, Artificial Sequence
  Description of Artificial Sequence: Synthetic oligonucleotide
ggacagagaacucaacuau

SEQ ID NO: 252282 - RNA, 19 nt, Artificial Sequence
  Description of Artificial Sequence: Synthetic oligonucleotide
  modified_base (6)..(6): a, c, u, g, unknown or other
auggcncccagcaccagga

SEQ ID NO: 252283 - RNA, 19 nt, Artificial Sequence
  Description of Artificial Sequence: Synthetic oligonucleotide
ggaauccccuaccaauuuc

SEQ ID NO: 252284 - RNA, 19 nt, Artificial Sequence
  Description of Artificial Sequence: Synthetic oligonucleotide
ccuagagaacucuugccca

SEQ ID NO: 252285 - RNA, 19 nt, Artificial Sequence
  Description of Artificial Sequence: Synthetic oligonucleotide
ggauucgguaggccuuagg

SEQ ID NO: 252286 - RNA, 19 nt, Artificial Sequence
  Description of Artificial Sequence: Synthetic oligonucleotide
acucuagaugcaagguaca

SEQ ID NO: 252287 - RNA, 19 nt, Artificial Sequence
  Description of Artificial Sequence: Synthetic oligonucleotide
ggcaccgauucccugcaug

SEQ ID NO: 252288 - RNA, 19 nt, Artificial Sequence
  Description of Artificial Sequence: Synthetic oligonucleotide
agggcaccgauucccugca

SEQ ID NO: 252289 - RNA, 19 nt, Artificial Sequence
  Description of Artificial Sequence: Synthetic oligonucleotide
gaugauggaacaggcccua

SEQ ID NO: 252290 - RNA, 19 nt, Artificial Sequence
  Description of Artificial Sequence: Synthetic oligonucleotide
ggcgcuaguccccagcaca

SEQ ID NO: 252291 - RNA, 19 nt, Artificial Sequence
  Description of Artificial Sequence: Synthetic oligonucleotide
agccuagcuggcuguggug

SEQ ID NO: 252292 - RNA, 19 nt, Artificial Sequence
  Description of Artificial Sequence: Synthetic oligonucleotide
ccaucaauacaccccaaga

SEQ ID NO: 252293 - RNA, 19 nt, Artificial Sequence
  Description of Artificial Sequence: Synthetic oligonucleotide
ggcccgguggggcaagugg

SEQ ID NO: 252294 - RNA, 19 nt, Artificial Sequence
  Description of Artificial Sequence: Synthetic oligonucleotide
aagugucccugggaauaga

SEQ ID NO: 252295 - RNA, 19 nt, Artificial Sequence
  Description of Artificial Sequence: Synthetic oligonucleotide
  modified_base (11)..(11): a, c, u, g, unknown or other
  modified_base (19)..(19): a, c, u, g, unknown or other
augcagcccungcauggcn

SEQ ID NO: 252296 - RNA, 19 nt, Artificial Sequence
  Description of Artificial Sequence: Synthetic oligonucleotide
aauccccuaccaauuucuu

SEQ ID NO: 252297 - RNA, 19 nt, Artificial Sequence
  Description of Artificial Sequence: Synthetic oligonucleotide
uuccggcaaaacagcggaa

SEQ ID NO: 252298 - RNA, 19 nt, Artificial Sequence
  Description of Artificial Sequence: Synthetic oligonucleotide
gcuaguccccagcacagca

SEQ ID NO: 252299 - RNA, 19 nt, Artificial Sequence
  Description of Artificial Sequence: Synthetic oligonucleotide
gauaaacguucagggaccu

SEQ ID NO: 252300 - RNA, 19 nt, Artificial Sequence
  Description of Artificial Sequence: Synthetic oligonucleotide
  modified_base (9)..(9): a, c, u, g, unknown or other
  modified_base (17)..(17): a, c, u, g, unknown or other
gcagcccungcauggcncc

SEQ ID NO: 252301 - RNA, 19 nt, Artificial Sequence
  Description of Artificial Sequence: Synthetic oligonucleotide
acuacccagugggcauagc

SEQ ID NO: 252302 - RNA, 19 nt, Artificial Sequence
  Description of Artificial Sequence: Synthetic oligonucleotide
gcccgacccuacuugagag

SEQ ID NO: 252303 - RNA, 19 nt, Artificial Sequence
  Description of Artificial Sequence: Synthetic oligonucleotide
ccuuaggauuccucccucc

SEQ ID NO: 252304 - RNA, 19 nt, Artificial Sequence
  Description of Artificial Sequence: Synthetic oligonucleotide
ccucccuauuuguaggaug

SEQ ID NO: 252305 - RNA, 19 nt, Artificial Sequence
  Description of Artificial Sequence: Synthetic oligonucleotide
ggcugauuuccacagccaa

SEQ ID NO: 252306 - RNA, 19 nt, Artificial Sequence
  Description of Artificial Sequence: Synthetic oligonucleotide
cagaugcacaaacuaggua

SEQ ID NO: 252307 - RNA, 19 nt, Artificial Sequence
  Description of Artificial Sequence: Synthetic oligonucleotide
acccagauuagagccuaga

SEQ ID NO: 252308 - RNA, 19 nt, Artificial Sequence
  Description of Artificial Sequence: Synthetic oligonucleotide
ugaccgcccuccucccuug

SEQ ID NO: 252309 - RNA, 19 nt, Artificial Sequence
  Description of Artificial Sequence: Synthetic oligonucleotide
gaggaguccccacccaccu

SEQ ID NO: 252310 - RNA, 19 nt, Artificial Sequence
  Description of Artificial Sequence: Synthetic oligonucleotide
accaacagauggacagaug

SEQ ID NO: 252311 - RNA, 19 nt, Artificial Sequence
  Description of Artificial Sequence: Synthetic oligonucleotide
ccgauucccugcaugcagc

SEQ ID NO: 252312 - RNA, 19 nt, Artificial Sequence
  Description of Artificial Sequence: Synthetic oligonucleotide
augaccgcccuccucccuu

SEQ ID NO: 252313 - RNA, 19 nt, Artificial Sequence
  Description of Artificial Sequence: Synthetic oligonucleotide
gagaacucuugcccaccaa

SEQ ID NO: 252314 - RNA, 19 nt, Artificial Sequence
  Description of Artificial Sequence: Synthetic oligonucleotide
  modified_base (8)..(8): a, c, u, g, unknown or other
  modified_base (16)..(16): a, c, u, g, unknown or other
cagcccungcauggcnccc

SEQ ID NO: 252315 - RNA, 19 nt, Artificial Sequence
  Description of Artificial Sequence: Synthetic oligonucleotide
agguagcaucugaauuuag

SEQ ID NO: 252316 - RNA, 19 nt, Artificial Sequence
  Description of Artificial Sequence: Synthetic oligonucleotide
guuauggaaugugcacuaa

SEQ ID NO: 252317 - RNA, 19 nt, Artificial Sequence
  Description of Artificial Sequence: Synthetic oligonucleotide
  modified_base (7)..(7): a, c, u, g, unknown or other
  modified_base (15)..(15): a, c, u, g, unknown or other
agcccungcauggcnccca

SEQ ID NO: 252318 - RNA, 19 nt, Artificial Sequence
  Description of Artificial Sequence: Synthetic oligonucleotide
acuauccuugaaacuguuu

SEQ ID NO: 252319 - RNA, 19 nt, Artificial Sequence
  Description of Artificial Sequence: Synthetic oligonucleotide
ggucccacucacuccuccc

SEQ ID NO: 252320 - RNA, 19 nt, Artificial Sequence
  Description of Artificial Sequence: Synthetic oligonucleotide
gccuagcuggcuguggugc

SEQ ID NO: 252321 - RNA, 19 nt, Artificial Sequence
  Description of Artificial Sequence: Synthetic oligonucleotide
gcgauccaagaaaugccag

SEQ ID NO: 252322 - RNA, 19 nt, Artificial Sequence
  Description of Artificial Sequence: Synthetic oligonucleotide
agauggggacacacuaaau

SEQ ID NO: 252323 - RNA, 19 nt, Artificial Sequence
  Description of Artificial Sequence: Synthetic oligonucleotide
cccuuagcccucuuaagga

SEQ ID NO: 252324 - RNA, 19 nt, Artificial Sequence
  Description of Artificial Sequence: Synthetic oligonucleotide
guaggccuuaggauuccuc

SEQ ID NO: 252325 - RNA, 19 nt, Artificial Sequence
  Description of Artificial Sequence: Synthetic oligonucleotide
gcgauacagggcuugacgu

SEQ ID NO: 252326 - RNA, 19 nt, Artificial Sequence
  Description of Artificial Sequence: Synthetic oligonucleotide
cccaguaaaccuuuguccu

SEQ ID NO: 252327 - RNA, 19 nt, Artificial Sequence
  Description of Artificial Sequence: Synthetic oligonucleotide
ggucaaagcccaaaauaua

SEQ ID NO: 252328 - RNA, 19 nt, Artificial Sequence
  Description of Artificial Sequence: Synthetic oligonucleotide
aggcccuaaggggcagaac

SEQ ID NO: 252329 - RNA, 19 nt, Artificial Sequence
  Description of Artificial Sequence: Synthetic oligonucleotide
gaccgcccuccucccuugg

SEQ ID NO: 252330 - RNA, 19 nt, Artificial Sequence
  Description of Artificial Sequence: Synthetic oligonucleotide
ccuguacccucuuguugcc

SEQ ID NO: 252331 - RNA, 19 nt, Artificial Sequence
  Description of Artificial Sequence: Synthetic oligonucleotide
cugccggaccucaggcaug

SEQ ID NO: 252332 - RNA, 19 nt, Artificial Sequence
  Description of Artificial Sequence: Synthetic oligonucleotide
cccuacaaauggcuuccag

SEQ ID NO: 252333 - RNA, 19 nt, Artificial Sequence
  Description of Artificial Sequence: Synthetic oligonucleotide
ggcccaaugggcugccuga

SEQ ID NO: 252334 - RNA, 19 nt, Artificial Sequence
  Description of Artificial Sequence: Synthetic oligonucleotide
ucccuacaaauggcuucca

SEQ ID NO: 252335 - RNA, 19 nt, Artificial Sequence
  Description of Artificial Sequence: Synthetic oligonucleotide
agugggcauagcggcucag

SEQ ID NO: 252336 - RNA, 19 nt, Artificial Sequence
  Description of Artificial Sequence: Synthetic oligonucleotide
  modified_base (5)..(5): a, c, u, g, unknown or other
uggcncccagcaccaggau

SEQ ID NO: 252337 - RNA, 19 nt, Artificial Sequence
  Description of Artificial Sequence: Synthetic oligonucleotide
ggguagccccaaaaugacc

SEQ ID NO: 252338 - RNA, 19 nt, Artificial Sequence
  Description of Artificial Sequence: Synthetic oligonucleotide
auggagcguaccagggccu

SEQ ID NO: 252339 - RNA, 19 nt, Artificial Sequence
  Description of Artificial Sequence: Synthetic oligonucleotide
gcaggcaauggagcguacc

SEQ ID NO: 252340 - RNA, 19 nt, Artificial Sequence
  Description of Artificial Sequence: Synthetic oligonucleotide
gaagggcgaaggagcucug

SEQ ID NO: 252341 - RNA, 19 nt, Artificial Sequence
  Description of Artificial Sequence: Synthetic oligonucleotide
guggaccaacagauggaca

SEQ ID NO: 252342 - RNA, 19 nt, Artificial Sequence
  Description of Artificial Sequence: Synthetic oligonucleotide
gacguggauaaagcaggcu

SEQ ID NO: 252343 - RNA, 19 nt, Artificial Sequence
  Description of Artificial Sequence: Synthetic oligonucleotide
ccugcacaugcgugugucc

SEQ ID NO: 252344 - RNA, 19 nt, Artificial Sequence
  Description of Artificial Sequence: Synthetic oligonucleotide
ggucugaguccaguggaca

SEQ ID NO: 252345 - RNA, 19 nt, Artificial Sequence
  Description of Artificial Sequence: Synthetic oligonucleotide
cucccagaagggcgaagga

SEQ ID NO: 252346 - RNA, 19 nt, Artificial Sequence
  Description of Artificial Sequence: Synthetic oligonucleotide
ccuauaggguagccucaag

SEQ ID NO: 252347 - RNA, 19 nt, Artificial Sequence
  Description of Artificial Sequence: Synthetic oligonucleotide
  modified_base (6)..(6): a, c, u, g, unknown or other
  modified_base (14)..(14): a, c, u, g, unknown or other
gcccungcauggcncccag

SEQ ID NO: 252348 - RNA, 19 nt, Artificial Sequence
  Description of Artificial Sequence: Synthetic oligonucleotide
cccuugccuuaucugacac

SEQ ID NO: 252349 - RNA, 19 nt, Artificial Sequence
  Description of Artificial Sequence: Synthetic oligonucleotide
caccggauucgguaggccu

SEQ ID NO: 252350 - RNA, 19 nt, Artificial Sequence
  Description of Artificial Sequence: Synthetic oligonucleotide
ccuccccaccuguaauucc

SEQ ID NO: 252351 - RNA, 19 nt, Artificial Sequence
  Description of Artificial Sequence: Synthetic oligonucleotide
gcuccgguagauagggcac

SEQ ID NO: 252352 - RNA, 19 nt, Artificial Sequence
  Description of Artificial Sequence: Synthetic oligonucleotide
cccuaaggggcagaacuug

SEQ ID NO: 252353 - RNA, 19 nt, Artificial Sequence
  Description of Artificial Sequence: Synthetic oligonucleotide
cccaaaguaguaggaagca

SEQ ID NO: 252354 - RNA, 19 nt, Artificial Sequence
  Description of Artificial Sequence: Synthetic oligonucleotide
auaaacguucagggaccuu

SEQ ID NO: 252355 - RNA, 19 nt, Artificial Sequence
  Description of Artificial Sequence: Synthetic oligonucleotide
agguacacagaaggccaua

SEQ ID NO: 252356 - RNA, 19 nt, Artificial Sequence
  Description of Artificial Sequence: Synthetic oligonucleotide
cgauucccugcaugcagcc

SEQ ID NO: 252357 - RNA, 19 nt, Artificial Sequence
  Description of Artificial Sequence: Synthetic oligonucleotide
ccuuagcccucuuaaggaa

SEQ ID NO: 252358 - RNA, 19 nt, Artificial Sequence
  Description of Artificial Sequence: Synthetic oligonucleotide
ggcccgacccuacuugaga

SEQ ID NO: 252359 - RNA, 19 nt, Artificial Sequence
  Description of Artificial Sequence: Synthetic oligonucleotide
cccgacccuacuugagagc

SEQ ID NO: 252360 - RNA, 19 nt, Artificial Sequence
  Description of Artificial Sequence: Synthetic oligonucleotide
gcgcuaguccccagcacag

SEQ ID NO: 252361 - RNA, 19 nt, Artificial Sequence
  Description of Artificial Sequence: Synthetic oligonucleotide
uugggcguguugggucugu

SEQ ID NO: 252362 - RNA, 19 nt, Artificial Sequence
  Description of Artificial Sequence: Synthetic oligonucleotide
aggguagccucaagccagu

SEQ ID NO: 252363 - RNA, 19 nt, Artificial Sequence
  Description of Artificial Sequence: Synthetic oligonucleotide
uggagcguaccagggccuu

SEQ ID NO: 252364 - RNA, 19 nt, Artificial Sequence
  Description of Artificial Sequence: Synthetic oligonucleotide
augauggaacaggcccuaa

SEQ ID NO: 252365 - RNA, 19 nt, Artificial Sequence
  Description of Artificial Sequence: Synthetic oligonucleotide
ggacccaguaaaccuuugu

SEQ ID NO: 252366 - RNA, 19 nt, Artificial Sequence
  Description of Artificial Sequence: Synthetic oligonucleotide
caguaaaccuuuguccuuu

SEQ ID NO: 252367 - RNA, 19 nt, Artificial Sequence
  Description of Artificial Sequence: Synthetic oligonucleotide
ccgacccuacuugagagca

SEQ ID NO: 252368 - RNA, 19 nt, Artificial Sequence
  Description of Artificial Sequence: Synthetic oligonucleotide
cagcguccagcaggcaaug

SEQ ID NO: 252369 - RNA, 19 nt, Artificial Sequence
  Description of Artificial Sequence: Synthetic oligonucleotide
cuugggcguguugggucug

SEQ ID NO: 252370 - RNA, 19 nt, Artificial Sequence
  Description of Artificial Sequence: Synthetic oligonucleotide
gggucugaguccaguggac

SEQ ID NO: 252371 - RNA, 19 nt, Artificial Sequence
  Description of Artificial Sequence: Synthetic oligonucleotide
guguauggagcagguccaa

SEQ ID NO: 252372 - RNA, 19 nt, Artificial Sequence
  Description of Artificial Sequence: Synthetic oligonucleotide
cccugggcaaggaagguua

SEQ ID NO: 252373 - RNA, 19 nt, Artificial Sequence
  Description of Artificial Sequence: Synthetic oligonucleotide
acccaccugcccacucguc

SEQ ID NO: 252374 - RNA, 19 nt, Artificial Sequence
  Description of Artificial Sequence: Synthetic oligonucleotide
uggguacacccugcuccuc

SEQ ID NO: 252375 - RNA, 19 nt, Artificial Sequence
  Description of Artificial Sequence: Synthetic oligonucleotide
  modified_base (17)..(17): a, c, u, g, unknown or other
cccugcaugcagcccungc

SEQ ID NO: 252376 - RNA, 19 nt, Artificial Sequence
  Description of Artificial Sequence: Synthetic oligonucleotide
agggcuugacguggauaaa

SEQ ID NO: 252377 - RNA, 19 nt, Artificial Sequence
  Description of Artificial Sequence: Synthetic oligonucleotide
cagccuagcuggcuguggu

SEQ ID NO: 252378 - RNA, 19 nt, Artificial Sequence
  Description of Artificial Sequence: Synthetic oligonucleotide
guggggcaaguggaccaac

SEQ ID NO: 252379 - RNA, 19 nt, Artificial Sequence
  Description of Artificial Sequence: Synthetic oligonucleotide
gcacaugcguguguccaca

SEQ ID NO: 252380 - RNA, 19 nt, Artificial Sequence
  Description of Artificial Sequence: Synthetic oligonucleotide
caguugaguuauggaaugu

SEQ ID NO: 252381 - RNA, 19 nt, Artificial Sequence
  Description of Artificial Sequence: Synthetic oligonucleotide
ccagccuagcuggcugugg

SEQ ID NO: 252382 - RNA, 19 nt, Artificial Sequence
  Description of Artificial Sequence: Synthetic oligonucleotide
cccgcuguugccccagcuc

SEQ ID NO: 252383 - RNA, 19 nt, Artificial Sequence
  Description of Artificial Sequence: Synthetic oligonucleotide
acgccaccgaggcgcuagu

SEQ ID NO: 252384 - RNA, 19 nt, Artificial Sequence
  Description of Artificial Sequence: Synthetic oligonucleotide
  modified_base (5)..(5): a, c, u, g, unknown or other
  modified_base (13)..(13): a, c, u, g, unknown or other
cccungcauggcncccagc

SEQ ID NO: 252385 - RNA, 19 nt, Artificial Sequence
  Description of Artificial Sequence: Synthetic oligonucleotide
cccuacuugagagcagaca

SEQ ID NO: 252386 - RNA, 19 nt, Artificial Sequence
  Description of Artificial Sequence: Synthetic oligonucleotide
ccuuaucugacaccggauu

SEQ ID NO: 252387 - RNA, 19 nt, Artificial Sequence
  Description of Artificial Sequence: Synthetic oligonucleotide
ggauuccucccucccacau

SEQ ID NO: 252388 - RNA, 19 nt, Artificial Sequence
  Description of Artificial Sequence: Synthetic oligonucleotide
gacagaccugggagcccuc

SEQ ID NO: 252389 - RNA, 19 nt, Artificial Sequence
  Description of Artificial Sequence: Synthetic oligonucleotide
gcgaaggagcucugccgga

SEQ ID NO: 252390 - RNA, 19 nt, Artificial Sequence
  Description of Artificial Sequence: Synthetic oligonucleotide
ccccaaaaugaccgcccuc

SEQ ID NO: 252391 - RNA, 19 nt, Artificial Sequence
  Description of Artificial Sequence: Synthetic oligonucleotide
aggcccgguggggcaagug

SEQ ID NO: 252392 - RNA, 19 nt, Artificial Sequence
  Description of Artificial Sequence: Synthetic oligonucleotide
ugggcguguugggucuguu

SEQ ID NO: 252393 - RNA, 19 nt, Artificial Sequence
  Description of Artificial Sequence: Synthetic oligonucleotide
cgacccuacuugagagcag

SEQ ID NO: 252394 - RNA, 19 nt, Artificial Sequence
  Description of Artificial Sequence: Synthetic oligonucleotide
acucagcgauacagggcuu

SEQ ID NO: 252395 - RNA, 19 nt, Artificial Sequence
  Description of Artificial Sequence: Synthetic oligonucleotide
ggacacugugaugagcauu

SEQ ID NO: 252396 - RNA, 19 nt, Artificial Sequence
  Description of Artificial Sequence: Synthetic oligonucleotide
cacaugcguguguccacau

SEQ ID NO: 252397 - RNA, 19 nt, Artificial Sequence
  Description of Artificial Sequence: Synthetic oligonucleotide
gccccaaaaugaccgcccu

SEQ ID NO: 252398 - RNA, 19 nt, Artificial Sequence
  Description of Artificial Sequence: Synthetic oligonucleotide
ccucccaccuugauggaau

SEQ ID NO: 252399 - RNA, 19 nt, Artificial Sequence
  Description of Artificial Sequence: Synthetic oligonucleotide
cguggauaaagcaggcuuu

SEQ ID NO: 252400 - RNA, 19 nt, Artificial Sequence
  Description of Artificial Sequence: Synthetic oligonucleotide
ccgcuguugccccagcucu

SEQ ID NO: 252401 - RNA, 19 nt, Artificial Sequence
  Description of Artificial Sequence: Synthetic oligonucleotide
ggagcguaccagggccuuc

SEQ ID NO: 252402 - RNA, 19 nt, Artificial Sequence
  Description of Artificial Sequence: Synthetic oligonucleotide
cucacgccaccgaggcgcu

SEQ ID NO: 252403 - RNA, 19 nt, Artificial Sequence
  Description of Artificial Sequence: Synthetic oligonucleotide
gccuuaucugacaccggau

SEQ ID NO: 252404 - RNA, 19 nt, Artificial Sequence
  Description of Artificial Sequence: Synthetic oligonucleotide
ucacgccaccgaggcgcua

SEQ ID NO: 252405 - RNA, 19 nt, Artificial Sequence
  Description of Artificial Sequence: Synthetic oligonucleotide
ccccaucugcaugcagauc

SEQ ID NO: 252406 - RNA, 19 nt, Artificial Sequence
  Description of Artificial Sequence: Synthetic oligonucleotide
cggauucgguaggccuuag

SEQ ID NO: 252407 - RNA, 19 nt, Artificial Sequence
  Description of Artificial Sequence: Synthetic oligonucleotide
cccucccuauuuguaggau

SEQ ID NO: 252408 - RNA, 19 nt, Artificial Sequence
  Description of Artificial Sequence: Synthetic oligonucleotide
gggcaccgauucccugcau

SEQ ID NO: 252409 - RNA, 19 nt, Artificial Sequence
  Description of Artificial Sequence: Synthetic oligonucleotide
caggcccgguggggcaagu

SEQ ID NO: 252410 - RNA, 19 nt, Artificial Sequence
  Description of Artificial Sequence: Synthetic oligonucleotide
aaaccuacuuuucagaucc

SEQ ID NO: 252411 - RNA, 19 nt, Artificial Sequence
  Description of Artificial Sequence: Synthetic oligonucleotide
uauaauaacguucaaauac

SEQ ID NO: 252412 - RNA, 19 nt, Artificial Sequence
  Description of Artificial Sequence: Synthetic oligonucleotide
ucucuaaucaucaccaugg

SEQ ID NO: 252413 - RNA, 19 nt, Artificial Sequence
  Description of Artificial Sequence: Synthetic oligonucleotide
auaacguacaacuugaucu

SEQ ID NO: 252414 - RNA, 19 nt, Artificial Sequence
  Description of Artificial Sequence: Synthetic oligonucleotide
accacuguuauucuuacgc

SEQ ID NO: 252415 - RNA, 19 nt, Artificial Sequence
  Description of Artificial Sequence: Synthetic oligonucleotide
auuaguaugucucuaauca

SEQ ID NO: 252416 - RNA, 19 nt, Artificial Sequence
  Description of Artificial Sequence: Synthetic oligonucleotide
guaaagaugaucucuacag

SEQ ID NO: 252417 - RNA, 19 nt, Artificial Sequence
  Description of Artificial Sequence: Synthetic oligonucleotide
auacacacgguccauauac

SEQ ID NO: 252418 - RNA, 19 nt, Artificial Sequence
  Description of Artificial Sequence: Synthetic oligonucleotide
acuaagaccacuguuauuc

SEQ ID NO: 252419 - RNA, 19 nt, Artificial Sequence
  Description of Artificial Sequence: Synthetic oligonucleotide
agaacucauacauucacac

SEQ ID NO: 252420 - RNA, 19 nt, Artificial Sequence
  Description of Artificial Sequence: Synthetic oligonucleotide
aaauuauuaaucccaaauu

SEQ ID NO: 252421 - RNA, 19 nt, Artificial Sequence
  Description of Artificial Sequence: Synthetic oligonucleotide
uguuuaugcaaaaccauug

SEQ ID NO: 252422 - RNA, 19 nt, Artificial Sequence
  Description of Artificial Sequence: Synthetic oligonucleotide
acgacuaaauaauuuguac

SEQ ID NO: 252423 - RNA, 19 nt, Artificial Sequence
  Description of Artificial Sequence: Synthetic oligonucleotide
aauguuugaagaaaguugu

SEQ ID NO: 252424 - RNA, 19 nt, Artificial Sequence
  Description of Artificial Sequence: Synthetic oligonucleotide
uucaacauauguacuagcc

SEQ ID NO: 252425 - RNA, 19 nt, Artificial Sequence
  Description of Artificial Sequence: Synthetic oligonucleotide
uuuuaugcuacguaugugu

SEQ ID NO: 252426 - RNA, 19 nt, Artificial Sequence
  Description of Artificial Sequence: Synthetic oligonucleotide
auugccuuauccaauaucg

SEQ ID NO: 252427 - RNA, 19 nt, Artificial Sequence
  Description of Artificial Sequence: Synthetic oligonucleotide
aauaaauaaugagagguau

SEQ ID NO: 252428 - RNA, 19 nt, Artificial Sequence
  Description of Artificial Sequence: Synthetic oligonucleotide
ugaaucuugacucugugua

SEQ ID NO: 252429 - RNA, 19 nt, Artificial Sequence
  Description of Artificial Sequence: Synthetic oligonucleotide
aauaaguccuucaauacgu

SEQ ID NO: 252430 - RNA, 19 nt, Artificial Sequence
  Description of Artificial Sequence: Synthetic oligonucleotide
gaugaucccuaauacaccc

SEQ ID NO: 252431 - RNA, 19 nt, Artificial Sequence
  Description of Artificial Sequence: Synthetic oligonucleotide
ucaacauauguacuagccc

SEQ ID NO: 252432 - RNA, 19 nt, Artificial Sequence
  Description of Artificial Sequence: Synthetic oligonucleotide
aaugagagguauucaggag

SEQ ID NO: 252433 - RNA, 19 nt, Artificial Sequence
  Description of Artificial Sequence: Synthetic oligonucleotide
ucucucuauuauuaaagag

SEQ ID NO: 252434 - RNA, 19 nt, Artificial Sequence
  Description of Artificial Sequence: Synthetic oligonucleotide
ucucguaccuuauuuauga

SEQ ID NO: 252435 - RNA, 19 nt, Artificial Sequence
  Description of Artificial Sequence: Synthetic oligonucleotide
uacuuugcgauccucaggu

SEQ ID NO: 252436 - RNA, 19 nt, Artificial Sequence
  Description of Artificial Sequence: Synthetic oligonucleotide
auuuaguacaucuucucgu

SEQ ID NO: 252437 - RNA, 19 nt, Artificial Sequence
  Description of Artificial Sequence: Synthetic oligonucleotide
uauguacuagcccagaauu

SEQ ID NO: 252438 - RNA, 19 nt, Artificial Sequence
  Description of Artificial Sequence: Synthetic oligonucleotide
aaaacucucaagagggagg

SEQ ID NO: 252439 - RNA, 19 nt, Artificial Sequence
  Description of Artificial Sequence: Synthetic oligonucleotide
aucugaguggucuauaaca

SEQ ID NO: 252440 - RNA, 19 nt, Artificial Sequence
  Description of Artificial Sequence: Synthetic oligonucleotide
uauguguauacuuugcgau

SEQ ID NO: 252441 - RNA, 19 nt, Artificial Sequence
  Description of Artificial Sequence: Synthetic oligonucleotide
agcaauagucuguuuaaag

SEQ ID NO: 252442 - RNA, 19 nt, Artificial Sequence
  Description of Artificial Sequence: Synthetic oligonucleotide
aaccaguuacuugugcacc

SEQ ID NO: 252443 - RNA, 19 nt, Artificial Sequence
  Description of Artificial Sequence: Synthetic oligonucleotide
uuuguacaugcaagcaagg

SEQ ID NO: 252444 - RNA, 19 nt, Artificial Sequence
  Description of Artificial Sequence: Synthetic oligonucleotide
ucugcuacuaaaacauugu

SEQ ID NO: 252445 - RNA, 19 nt, Artificial Sequence
  Description of Artificial Sequence: Synthetic oligonucleotide
uccuagacuucauuauucg

SEQ ID NO: 252446 - RNA, 19 nt, Artificial Sequence
  Description of Artificial Sequence: Synthetic oligonucleotide
caugcgaagaguacagucc

SEQ ID NO: 252447 - RNA, 19 nt, Artificial Sequence
  Description of Artificial Sequence: Synthetic oligonucleotide
ugaagcucaaucaacugau

SEQ ID NO: 252448 - RNA, 19 nt, Artificial Sequence
  Description of Artificial Sequence: Synthetic oligonucleotide
acuaccuucacaaugggcu

SEQ ID NO: 252449 - RNA, 19 nt, Artificial Sequence
  Description of Artificial Sequence: Synthetic oligonucleotide
uccucguuaauucuagccu

SEQ ID NO: 252450 - RNA, 19 nt, Artificial Sequence
  Description of Artificial Sequence: Synthetic oligonucleotide
uauaacauguacugcaauu

SEQ ID NO: 252451 - RNA, 19 nt, Artificial Sequence
  Description of Artificial Sequence: Synthetic oligonucleotide
ugaacugaucguuaacugu

SEQ ID NO: 252452 - RNA, 19 nt, Artificial Sequence
  Description of Artificial Sequence: Synthetic oligonucleotide
acagggauaacguuggaaa

SEQ ID NO: 252453 - RNA, 19 nt, Artificial Sequence
  Description of Artificial Sequence: Synthetic oligonucleotide
cuagacuucauuauucgca

SEQ ID NO: 252454 - RNA, 19 nt, Artificial Sequence
  Description of Artificial Sequence: Synthetic oligonucleotide
aaacgcggcacauucacau

SEQ ID NO: 252455 - RNA, 19 nt, Artificial Sequence
  Description of Artificial Sequence: Synthetic oligonucleotide
agaaucgagccuucaauug

SEQ ID NO: 252456 - RNA, 19 nt, Artificial Sequence
  Description of Artificial Sequence: Synthetic oligonucleotide
ugaucguuaacuguaaaua

SEQ ID NO: 252457 - RNA, 19 nt, Artificial Sequence
  Description of Artificial Sequence: Synthetic oligonucleotide
uucucucuauuauuaaaga

SEQ ID NO: 252458 - RNA, 19 nt, Artificial Sequence
  Description of Artificial Sequence: Synthetic oligonucleotide
uaaagagcauuaauauggu

SEQ ID NO: 252459 - RNA, 19 nt, Artificial Sequence
  Description of Artificial Sequence: Synthetic oligonucleotide
ugagagguauucaggagac

SEQ ID NO: 252460 - RNA, 19 nt, Artificial Sequence
  Description of Artificial Sequence: Synthetic oligonucleotide
cccuaauacacccauaacg

SEQ ID NO: 252461 - RNA, 19 nt, Artificial Sequence
  Description of Artificial Sequence: Synthetic oligonucleotide
caacauauguacuagccca

SEQ ID NO: 252462 - RNA, 19 nt, Artificial Sequence
  Description of Artificial Sequence: Synthetic oligonucleotide
ucuuaguccaguguagagc

SEQ ID NO: 252463 - RNA, 19 nt, Artificial Sequence
  Description of Artificial Sequence: Synthetic oligonucleotide
uacguauguguauacuuug

SEQ ID NO: 252464 - RNA, 19 nt, Artificial Sequence
  Description of Artificial Sequence: Synthetic oligonucleotide
uucucuuaguccaguguag

SEQ ID NO: 252465 - RNA, 19 nt, Artificial Sequence
  Description of Artificial Sequence: Synthetic oligonucleotide
auguguauacuuugcgauc

SEQ ID NO: 252466 - RNA, 19 nt, Artificial Sequence
  Description of Artificial Sequence: Synthetic oligonucleotide
uguacuagcccagaauucu

SEQ ID NO: 252467 - RNA, 19 nt, Artificial Sequence
  Description of Artificial Sequence: Synthetic oligonucleotide
ugagaacccggacugugag

SEQ ID NO: 252468 - RNA, 19 nt, Artificial Sequence
  Description of Artificial Sequence: Synthetic oligonucleotide
ucaauuguugaguuaccuc

SEQ ID NO: 252469 - RNA, 19 nt, Artificial Sequence
  Description of Artificial Sequence: Synthetic oligonucleotide
ggguauuagaaccaguuac

SEQ ID NO: 252470 - RNA, 19 nt, Artificial Sequence
  Description of Artificial Sequence: Synthetic oligonucleotide
aauaucccguugugagaac

SEQ ID NO: 252471 - RNA, 19 nt, Artificial Sequence
  Description of Artificial Sequence: Synthetic oligonucleotide
uuccuagacuucauuauuc

SEQ ID NO: 252472 - RNA, 19 nt, Artificial Sequence
  Description of Artificial Sequence: Synthetic oligonucleotide
aguaacaacuucucuuagu

SEQ ID NO: 252473 - RNA, 19 nt, Artificial Sequence
  Description of Artificial Sequence: Synthetic oligonucleotide
ucguaccuuauuuaugaga

SEQ ID NO: 252474 - RNA, 19 nt, Artificial Sequence
  Description of Artificial Sequence: Synthetic oligonucleotide
ucuuacgcuggauuucuug

SEQ ID NO: 252475 - RNA, 19 nt, Artificial Sequence
  Description of Artificial Sequence: Synthetic oligonucleotide
uucuguuagcccuuugacu

SEQ ID NO: 252476 - RNA, 19 nt, Artificial Sequence
  Description of Artificial Sequence: Synthetic oligonucleotide
aacguacaacuugaucucg

SEQ ID NO: 252477 - RNA, 19 nt, Artificial Sequence
  Description of Artificial Sequence: Synthetic oligonucleotide
accaguuacuugugcaccg

SEQ ID NO: 252478 - RNA, 19 nt, Artificial Sequence
  Description of Artificial Sequence: Synthetic oligonucleotide
auaucccguugugagaacc

SEQ ID NO: 252479 - RNA, 19 nt, Artificial Sequence
  Description of Artificial Sequence: Synthetic oligonucleotide
uaacguacaacuugaucuc

SEQ ID NO: 252480 - RNA, 19 nt, Artificial Sequence
  Description of Artificial Sequence: Synthetic oligonucleotide
aaacucucaagagggagga

SEQ ID NO: 252481 - RNA, 19 nt, Artificial Sequence
  Description of Artificial Sequence: Synthetic oligonucleotide
uuuaugcuacguaugugua

SEQ ID NO: 252482 - RNA, 19 nt, Artificial Sequence
  Description of Artificial Sequence: Synthetic oligonucleotide
cacuccgucuuuaauuuag

SEQ ID NO: 252483 - RNA, 19 nt, Artificial Sequence
  Description of Artificial Sequence: Synthetic oligonucleotide
uuagaaccaguuacuugug

SEQ ID NO: 252484 - RNA, 19 nt, Artificial Sequence
  Description of Artificial Sequence: Synthetic oligonucleotide
uguucgugccaaauauucu

SEQ ID NO: 252485 - RNA, 19 nt, Artificial Sequence
  Description of Artificial Sequence: Synthetic oligonucleotide
caaaacgcggcacauucac

SEQ ID NO: 252486 - RNA, 19 nt, Artificial Sequence
  Description of Artificial Sequence: Synthetic oligonucleotide
cauaacguacaacuugauc

SEQ ID NO: 252487 - RNA, 19 nt, Artificial Sequence
  Description of Artificial Sequence: Synthetic oligonucleotide
guauguguauacuuugcga

SEQ ID NO: 252488 - RNA, 19 nt, Artificial Sequence
  Description of Artificial Sequence: Synthetic oligonucleotide
augugaacugaucguuaac

SEQ ID NO: 252489 - RNA, 19 nt, Artificial Sequence
  Description of Artificial Sequence: Synthetic oligonucleotide
auauguacuagcccagaau

SEQ ID NO: 252490 - RNA, 19 nt, Artificial Sequence
  Description of Artificial Sequence: Synthetic oligonucleotide
aguggagacuugcaguaug

SEQ ID NO: 252491 - RNA, 19 nt, Artificial Sequence
  Description of Artificial Sequence: Synthetic oligonucleotide
cacuguuauucuuacgcug

SEQ ID NO: 252492 - RNA, 19 nt, Artificial Sequence
  Description of Artificial Sequence: Synthetic oligonucleotide
uuaguaugucucuaaucau

SEQ ID NO: 252493 - RNA, 19 nt, Artificial Sequence
  Description of Artificial Sequence: Synthetic oligonucleotide
gucucuaaucaucaccaug

SEQ ID NO: 252494 - RNA, 19 nt, Artificial Sequence
  Description of Artificial Sequence: Synthetic oligonucleotide
guuaauucuagccucuacu

SEQ ID NO: 252495 - RNA, 19 nt, Artificial Sequence
  Description of Artificial Sequence: Synthetic oligonucleotide
uaugcuacguauguguaua

SEQ ID NO: 252496 - RNA, 19 nt, Artificial Sequence
  Description of Artificial Sequence: Synthetic oligonucleotide
aguaugucucuaaucauca

SEQ ID NO: 252497 - RNA, 19 nt, Artificial Sequence
  Description of Artificial Sequence: Synthetic oligonucleotide
aucguuaacuguaaauaug

SEQ ID NO: 252498 - RNA, 19 nt, Artificial Sequence
  Description of Artificial Sequence: Synthetic oligonucleotide
gucgucuuaauaguaauga

SEQ ID NO: 252499 - RNA, 19 nt, Artificial Sequence
  Description of Artificial Sequence: Synthetic oligonucleotide
ugggccaauaucccguugu

SEQ ID NO: 252500 - RNA, 19 nt, Artificial Sequence
  Description of Artificial Sequence: Synthetic oligonucleotide
ugaucccuaauacacccau

SEQ ID NO: 252501 - RNA, 19 nt, Artificial Sequence
  Description of Artificial Sequence: Synthetic oligonucleotide
gagccggucauuauugaag

SEQ ID NO: 252502 - RNA, 19 nt, Artificial Sequence
  Description of Artificial Sequence: Synthetic oligonucleotide
acguauguguauacuuugc

SEQ ID NO: 252503 - RNA, 19 nt, Artificial Sequence
  Description of Artificial Sequence: Synthetic oligonucleotide
cugucgaccacuguguuug

SEQ ID NO: 252504 - RNA, 19 nt, Artificial Sequence
  Description of Artificial Sequence: Synthetic oligonucleotide
agguguucgugccaaauau

SEQ ID NO: 252505 - RNA, 19 nt, Artificial Sequence
  Description of Artificial Sequence: Synthetic oligonucleotide
uaucccguugugagaaccc

SEQ ID NO: 252506 - RNA, 19 nt, Artificial Sequence
  Description of Artificial Sequence: Synthetic oligonucleotide
cagggauaacguuggaaag

SEQ ID NO: 252507 - RNA, 19 nt, Artificial Sequence
  Description of Artificial Sequence: Synthetic oligonucleotide
guucuguuagcccuuugac

SEQ ID NO: 252508 - RNA, 19 nt, Artificial Sequence
  Description of Artificial Sequence: Synthetic oligonucleotide
augcgaagaguacagucca

SEQ ID NO: 252509 - RNA, 19 nt, Artificial Sequence
  Description of Artificial Sequence: Synthetic oligonucleotide
ucuucucguaccuuauuua

SEQ ID NO: 252510 - RNA, 19 nt, Artificial Sequence
  Description of Artificial Sequence: Synthetic oligonucleotide
cuucaauuguugaguuacc

SEQ ID NO: 252511 - RNA, 19 nt, Artificial Sequence
  Description of Artificial Sequence: Synthetic oligonucleotide
uuugcgauccucagguguu

SEQ ID NO: 252512 - RNA, 19 nt, Artificial Sequence
  Description of Artificial Sequence: Synthetic oligonucleotide
cucuuaguccaguguagag

SEQ ID NO: 252513 - RNA, 19 nt, Artificial Sequence
  Description of Artificial Sequence: Synthetic oligonucleotide
uuaugcuacguauguguau

SEQ ID NO: 252514 - RNA, 19 nt, Artificial Sequence
  Description of Artificial Sequence: Synthetic oligonucleotide
uauucgcacuauagcagcu

SEQ ID NO: 252515 - RNA, 19 nt, Artificial Sequence
  Description of Artificial Sequence: Synthetic oligonucleotide
aucucuacagggauaacgu

SEQ ID NO: 252516 - RNA, 19 nt, Artificial Sequence
  Description of Artificial Sequence: Synthetic oligonucleotide
auuuuaugcuacguaugug

SEQ ID NO: 252517 - RNA, 19 nt, Artificial Sequence
  Description of Artificial Sequence: Synthetic oligonucleotide
cuuaguccaguguagagcu

SEQ ID NO: 252518 - RNA, 19 nt, Artificial Sequence
  Description of Artificial Sequence: Synthetic oligonucleotide
cuuacgcuggauuucuuga

SEQ ID NO: 252519 - RNA, 19 nt, Artificial Sequence
  Description of Artificial Sequence: Synthetic oligonucleotide
cugagugggccaauauccc

SEQ ID NO: 252520 - RNA, 19 nt, Artificial Sequence
  Description of Artificial Sequence: Synthetic oligonucleotide
ucgucuuaauaguaaugau

SEQ ID NO: 252521 - RNA, 19 nt, Artificial Sequence
  Description of Artificial Sequence: Synthetic oligonucleotide
uucgcacuauagcagcuuc

SEQ ID NO: 252522 - RNA, 19 nt, Artificial Sequence
  Description of Artificial Sequence: Synthetic oligonucleotide
ugaguuaccucugcuacua

SEQ ID NO: 252523 - RNA, 19 nt, Artificial Sequence
  Description of Artificial Sequence: Synthetic oligonucleotide
augcuacguauguguauac

SEQ ID NO: 252524 - RNA, 19 nt, Artificial Sequence
  Description of Artificial Sequence: Synthetic oligonucleotide
gagacuugcaguaugugcu

SEQ ID NO: 252525 - RNA, 19 nt, Artificial Sequence
  Description of Artificial Sequence: Synthetic oligonucleotide
cugcuacuaaaacauugug

SEQ ID NO: 252526 - RNA, 19 nt, Artificial Sequence
  Description of Artificial Sequence: Synthetic oligonucleotide
uugaguuaccucugcuacu

SEQ ID NO: 252527 - RNA, 19 nt, Artificial Sequence
  Description of Artificial Sequence: Synthetic oligonucleotide
ucucuuaguccaguguaga

SEQ ID NO: 252528 - RNA, 19 nt, Artificial Sequence
  Description of Artificial Sequence: Synthetic oligonucleotide
ugcaucacccgcucuauuu

SEQ ID NO: 252529 - RNA, 19 nt, Artificial Sequence
  Description of Artificial Sequence: Synthetic oligonucleotide
accaaccucagauccgucu

SEQ ID NO: 252530 - RNA, 19 nt, Artificial Sequence
  Description of Artificial Sequence: Synthetic oligonucleotide
ccuucaauuguugaguuac

SEQ ID NO: 252531 - RNA, 19 nt, Artificial Sequence
  Description of Artificial Sequence: Synthetic oligonucleotide
auguacuagcccagaauuc

SEQ ID NO: 252532 - RNA, 19 nt, Artificial Sequence
  Description of Artificial Sequence: Synthetic oligonucleotide
caucacccgcucuauuucc

SEQ ID NO: 252533 - RNA, 19 nt, Artificial Sequence
  Description of Artificial Sequence: Synthetic oligonucleotide
auucuuacgcuggauuucu

SEQ ID NO: 252534 - RNA, 19 nt, Artificial Sequence
  Description of Artificial Sequence: Synthetic oligonucleotide
gaaucgagccuucaauugu

SEQ ID NO: 252535 - RNA, 19 nt, Artificial Sequence
  Description of Artificial Sequence: Synthetic oligonucleotide
agaacccggacugugagau

SEQ ID NO: 252536 - RNA, 19 nt, Artificial Sequence
  Description of Artificial Sequence: Synthetic oligonucleotide
ugagaucugcagaacccau

SEQ ID NO: 252537 - RNA, 19 nt, Artificial Sequence
  Description of Artificial Sequence: Synthetic oligonucleotide
guguucgugccaaauauuc

SEQ ID NO: 252538 - RNA, 19 nt, Artificial Sequence
  Description of Artificial Sequence: Synthetic oligonucleotide
uggucgucuuaauaguaau

SEQ ID NO: 252539 - RNA, 19 nt, Artificial Sequence
  Description of Artificial Sequence: Synthetic oligonucleotide
ucgagccuucaauuguuga

SEQ ID NO: 252540 - RNA, 19 nt, Artificial Sequence
  Description of Artificial Sequence: Synthetic oligonucleotide
cauuuuaugcuacguaugu

SEQ ID NO: 252541 - RNA, 19 nt, Artificial Sequence
  Description of Artificial Sequence: Synthetic oligonucleotide
gggauaacguuggaaagcc

SEQ ID NO: 252542 - RNA, 19 nt, Artificial Sequence
  Description of Artificial Sequence: Synthetic oligonucleotide
caaucauauccaauaaagu

SEQ ID NO: 252543 - RNA, 19 nt, Artificial Sequence
  Description of Artificial Sequence: Synthetic oligonucleotide
cuucucuuaguccagugua

SEQ ID NO: 252544 - RNA, 19 nt, Artificial Sequence
  Description of Artificial Sequence: Synthetic oligonucleotide
acacacgguccauauacau

SEQ ID NO: 252545 - RNA, 19 nt, Artificial Sequence
  Description of Artificial Sequence: Synthetic oligonucleotide
caguaacaacuucucuuag

SEQ ID NO: 252546 - RNA, 19 nt, Artificial Sequence
  Description of Artificial Sequence: Synthetic oligonucleotide
cucguaccuuauuuaugag

SEQ ID NO: 252547 - RNA, 19 nt, Artificial Sequence
  Description of Artificial Sequence: Synthetic oligonucleotide
caccaccuaaagauacccc

SEQ ID NO: 252548 - RNA, 19 nt, Artificial Sequence
  Description of Artificial Sequence: Synthetic oligonucleotide
auguuuaugcaaaaccauu

SEQ ID NO: 252549 - RNA, 19 nt, Artificial Sequence
  Description of Artificial Sequence: Synthetic oligonucleotide
guguuguuuauaauaacgu

SEQ ID NO: 252550 - RNA, 19 nt, Artificial Sequence
  Description of Artificial Sequence: Synthetic oligonucleotide
ucgcacuauagcagcuucu

SEQ ID NO: 252551 - RNA, 19 nt, Artificial Sequence
  Description of Artificial Sequence: Synthetic oligonucleotide
guccaugcgaagaguacag

SEQ ID NO: 252552 - RNA, 19 nt, Artificial Sequence
  Description of Artificial Sequence: Synthetic oligonucleotide
ugacugagugggccaauau

SEQ ID NO: 252553 - RNA, 19 nt, Artificial Sequence
  Description of Artificial Sequence: Synthetic oligonucleotide
aggaagcgaucaaaccuac

SEQ ID NO: 252554 - RNA, 19 nt, Artificial Sequence
  Description of Artificial Sequence: Synthetic oligonucleotide
ccgucuuuaauuuagaaau

SEQ ID NO: 252555 - RNA, 19 nt, Artificial Sequence
  Description of Artificial Sequence: Synthetic oligonucleotide
cacgacuaaauaauuugua

SEQ ID NO: 252556 - RNA, 19 nt, Artificial Sequence
  Description of Artificial Sequence: Synthetic oligonucleotide
gaggaagcgaucaaaccua

SEQ ID NO: 252557 - RNA, 19 nt, Artificial Sequence
  Description of Artificial Sequence: Synthetic oligonucleotide
gagggcucuaacaaguucu

SEQ ID NO: 252558 - RNA, 19 nt, Artificial Sequence
  Description of Artificial Sequence: Synthetic oligonucleotide
ugcuacguauguguauacu

SEQ ID NO: 252559 - RNA, 19 nt, Artificial Sequence
  Description of Artificial Sequence: Synthetic oligonucleotide
aaaacgcggcacauucaca

SEQ ID NO: 252560 - RNA, 19 nt, Artificial Sequence
  Description of Artificial Sequence: Synthetic oligonucleotide
uuccggguauuagaaccag

SEQ ID NO: 252561 - RNA, 19 nt, Artificial Sequence
  Description of Artificial Sequence: Synthetic oligonucleotide
agauguucaguaacaacuu

SEQ ID NO: 252562 - RNA, 19 nt, Artificial Sequence
  Description of Artificial Sequence: Synthetic oligonucleotide
ccuaauacacccauaacgu

SEQ ID NO: 252563 - RNA, 19 nt, Artificial Sequence
  Description of Artificial Sequence: Synthetic oligonucleotide
uccggguauuagaaccagu

SEQ ID NO: 252564 - RNA, 19 nt, Artificial Sequence
  Description of Artificial Sequence: Synthetic oligonucleotide
cuuccggguauuagaacca

SEQ ID NO: 252565 - RNA, 19 nt, Artificial Sequence
  Description of Artificial Sequence: Synthetic oligonucleotide
uggagacuugcaguaugug

SEQ ID NO: 252566 - RNA, 19 nt, Artificial Sequence
  Description of Artificial Sequence: Synthetic oligonucleotide
ugcuuccggguauuagaac

SEQ ID NO: 252567 - RNA, 19 nt, Artificial Sequence
  Description of Artificial Sequence: Synthetic oligonucleotide
ccuuauccaauaucguuuc

SEQ ID NO: 252568 - RNA, 19 nt, Artificial Sequence
  Description of Artificial Sequence: Synthetic oligonucleotide
ccaauaucguuucuacuuc

SEQ ID NO: 252569 - RNA, 19 nt, Artificial Sequence
  Description of Artificial Sequence: Synthetic oligonucleotide
ugucgaccacuguguuugg

SEQ ID NO: 252570 - RNA, 19 nt, Artificial Sequence
  Description of Artificial Sequence: Synthetic oligonucleotide
gauggucgucuuaauagua

SEQ ID NO: 252571 - RNA, 19 nt, Artificial Sequence
  Description of Artificial Sequence: Synthetic oligonucleotide
acgcggcacauucacauuu

SEQ ID NO: 252572 - RNA, 19 nt, Artificial Sequence
  Description of Artificial Sequence: Synthetic oligonucleotide
ugcgaagaguacaguccaa

SEQ ID NO: 252573 - RNA, 19 nt, Artificial Sequence
  Description of Artificial Sequence: Synthetic oligonucleotide
acuuugcgauccucaggug

SEQ ID NO: 252574 - RNA, 19 nt, Artificial Sequence
  Description of Artificial Sequence: Synthetic oligonucleotide
gagaugcucaugucccuaa

SEQ ID NO: 252575 - RNA, 19 nt, Artificial Sequence
  Description of Artificial Sequence: Synthetic oligonucleotide
agacuugcaguaugugcuu

SEQ ID NO: 252576 - RNA, 19 nt, Artificial Sequence
  Description of Artificial Sequence: Synthetic oligonucleotide
ccaugcgaagaguacaguc

SEQ ID NO: 252577 - RNA, 19 nt, Artificial Sequence
  Description of Artificial Sequence: Synthetic oligonucleotide
aacgcggcacauucacauu

SEQ ID NO: 252578 - RNA, 19 nt, Artificial Sequence
  Description of Artificial Sequence: Synthetic oligonucleotide
cuuugcgauccucaggugu

SEQ ID NO: 252579 - RNA, 19 nt, Artificial Sequence
  Description of Artificial Sequence: Synthetic oligonucleotide
cugaucguuaacuguaaau

SEQ ID NO: 252580 - RNA, 19 nt, Artificial Sequence
  Description of Artificial Sequence: Synthetic oligonucleotide
auggucgucuuaauaguaa

SEQ ID NO: 252581 - RNA, 19 nt, Artificial Sequence
  Description of Artificial Sequence: Synthetic oligonucleotide
ggucgucuuaauaguaaug

SEQ ID NO: 252582 - RNA, 19 nt, Artificial Sequence
  Description of Artificial Sequence: Synthetic oligonucleotide
cuucucguaccuuauuuau

SEQ ID NO: 252583 - RNA, 19 nt, Artificial Sequence
  Description of Artificial Sequence: Synthetic oligonucleotide
gagagguauucaggagacc

SEQ ID NO: 252584 - RNA, 19 nt, Artificial Sequence
  Description of Artificial Sequence: Synthetic oligonucleotide
uuuccccgaggaacuguaa

SEQ ID NO: 252585 - RNA, 19 nt, Artificial Sequence
  Description of Artificial Sequence: Synthetic oligonucleotide
gagaacccggacugugaga

SEQ ID NO: 252586 - RNA, 19 nt, Artificial Sequence
  Description of Artificial Sequence: Synthetic oligonucleotide
gcgaagaguacaguccaag

SEQ ID NO: 252587 - RNA, 19 nt, Artificial Sequence
  Description of Artificial Sequence: Synthetic oligonucleotide
cuacguauguguauacuuu

SEQ ID NO: 252588 - RNA, 19 nt, Artificial Sequence
  Description of Artificial Sequence: Synthetic oligonucleotide
cuggagggcucuaacaagu

SEQ ID NO: 252589 - RNA, 19 nt, Artificial Sequence
  Description of Artificial Sequence: Synthetic oligonucleotide
uccaugcgaagaguacagu

SEQ ID NO: 252590 - RNA, 19 nt, Artificial Sequence
  Description of Artificial Sequence: Synthetic oligonucleotide
acaaaacgcggcacauuca

SEQ ID NO: 252591 - RNA, 19 nt, Artificial Sequence
  Description of Artificial Sequence: Synthetic oligonucleotide
accuacuuuucagauccaa

SEQ ID NO: 252592 - RNA, 19 nt, Artificial Sequence
  Description of Artificial Sequence: Synthetic oligonucleotide
cuccgucuuuaauuuagaa

SEQ ID NO: 252593 - RNA, 19 nt, Artificial Sequence
  Description of Artificial Sequence: Synthetic oligonucleotide
ggucccaaaugcuguuuac

SEQ ID NO: 252594 - RNA, 19 nt, Artificial Sequence
  Description of Artificial Sequence: Synthetic oligonucleotide
aucgagccuucaauuguug

SEQ ID NO: 252595 - RNA, 19 nt, Artificial Sequence
  Description of Artificial Sequence: Synthetic oligonucleotide
cagaacccaugugaugcug

SEQ ID NO: 252596 - RNA, 19 nt, Artificial Sequence
  Description of Artificial Sequence: Synthetic oligonucleotide
ggacuggagggcucuaaca

SEQ ID NO: 252597 - RNA, 19 nt, Artificial Sequence
  Description of Artificial Sequence: Synthetic oligonucleotide
uggcaagcauuuucuuauu

SEQ ID NO: 252598 - RNA, 19 nt, Artificial Sequence
  Description of Artificial Sequence: Synthetic oligonucleotide
acuccgucuuuaauuuaga

SEQ ID NO: 252599 - RNA, 19 nt, Artificial Sequence
  Description of Artificial Sequence: Synthetic oligonucleotide
guauuagaaccaguuacuu

SEQ ID NO: 252600 - RNA, 19 nt, Artificial Sequence
  Description of Artificial Sequence: Synthetic oligonucleotide
auucgcacuauagcagcuu

SEQ ID NO: 252601 - RNA, 19 nt, Artificial Sequence
  Description of Artificial Sequence: Synthetic oligonucleotide
gcaucacccgcucuauuuc

SEQ ID NO: 252602 - RNA, 19 nt, Artificial Sequence
  Description of Artificial Sequence: Synthetic oligonucleotide
augucccuaaacauuccuu

SEQ ID NO: 252603 - RNA, 19 nt, Artificial Sequence
  Description of Artificial Sequence: Synthetic oligonucleotide
uucuuacgcuggauuucuu

SEQ ID NO: 252604 - RNA, 19 nt, Artificial Sequence
  Description of Artificial Sequence: Synthetic oligonucleotide
gcuacguauguguauacuu

SEQ ID NO: 252605 - RNA, 19 nt, Artificial Sequence
  Description of Artificial Sequence: Synthetic oligonucleotide
cuuccuagacuucauuauu

SEQ ID NO: 252606 - RNA, 19 nt, Artificial Sequence
  Description of Artificial Sequence: Synthetic oligonucleotide
gugagaacccggacuguga

SEQ ID NO: 252607 - RNA, 19 nt, Artificial Sequence
  Description of Artificial Sequence: Synthetic oligonucleotide
auuugucaaggcagugcau

SEQ ID NO: 252608 - RNA, 19 nt, Artificial Sequence
  Description of Artificial Sequence: Synthetic oligonucleotide
gugcuuccggguauuagaa

SEQ ID NO: 252609 - RNA, 19 nt, Artificial Sequence
  Description of Artificial Sequence: Synthetic oligonucleotide
ggcucuaacaaguucucuu

SEQ ID NO: 252610 - RNA, 19 nt, Artificial Sequence
  Description of Artificial Sequence: Synthetic oligonucleotide
gaaggucccaaaugcuguu

SEQ ID NO: 252611 - RNA, 19 nt, Artificial Sequence
  Description of Artificial Sequence: Synthetic oligonucleotide
cagguguucgugccaaaua

SEQ ID NO: 252612 - RNA, 19 nt, Artificial Sequence
  Description of Artificial Sequence: Synthetic oligonucleotide
gaacccggacugugagauc

SEQ ID NO: 252613 - RNA, 19 nt, Artificial Sequence
  Description of Artificial Sequence: Synthetic oligonucleotide
gaucccuaauacacccaua

SEQ ID NO: 252614 - RNA, 19 nt, Artificial Sequence
  Description of Artificial Sequence: Synthetic oligonucleotide
cgcuguguugguuuaccac

SEQ ID NO: 252615 - RNA, 19 nt, Artificial Sequence
  Description of Artificial Sequence: Synthetic oligonucleotide
acccgcuguguugguuuac

SEQ ID NO: 252616 - RNA, 19 nt, Artificial Sequence
  Description of Artificial Sequence: Synthetic oligonucleotide
guggagacuugcaguaugu

SEQ ID NO: 252617 - RNA, 19 nt, Artificial Sequence
  Description of Artificial Sequence: Synthetic oligonucleotide
ccaguuacuugugcaccgc

SEQ ID NO: 252618 - RNA, 19 nt, Artificial Sequence
  Description of Artificial Sequence: Synthetic oligonucleotide
gccuuauccaauaucguuu

SEQ ID NO: 252619 - RNA, 19 nt, Artificial Sequence
  Description of Artificial Sequence: Synthetic oligonucleotide
caccaaccucagauccguc

SEQ ID NO: 252620 - RNA, 19 nt, Artificial Sequence
  Description of Artificial Sequence: Synthetic oligonucleotide
ggccaauaucccguuguga

SEQ ID NO: 252621 - RNA, 19 nt, Artificial Sequence
  Description of Artificial Sequence: Synthetic oligonucleotide
ccggacugugagaucaaca

SEQ ID NO: 252622 - RNA, 19 nt, Artificial Sequence
  Description of Artificial Sequence: Synthetic oligonucleotide
gacccgcuguguugguuua

SEQ ID NO: 252623 - RNA, 19 nt, Artificial Sequence
  Description of Artificial Sequence: Synthetic oligonucleotide
cccgcuguguugguuuacc

SEQ ID NO: 252624 - RNA, 19 nt, Artificial Sequence
  Description of Artificial Sequence: Synthetic oligonucleotide
gcuugaucugaguggucua

SEQ ID NO: 252625 - RNA, 19 nt, Artificial Sequence
  Description of Artificial Sequence: Synthetic oligonucleotide
caucuacuuucugucuugu

SEQ ID NO: 252626 - RNA, 19 nt, Artificial Sequence
  Description of Artificial Sequence: Synthetic oligonucleotide
ccuacuuuucagauccaau

SEQ ID NO: 252627 - RNA, 19 nt, Artificial Sequence
  Description of Artificial Sequence: Synthetic oligonucleotide
gccuucaauuguugaguua

SEQ ID NO: 252628 - RNA, 19 nt, Artificial Sequence
  Description of Artificial Sequence: Synthetic oligonucleotide
ccacacuccgucuuuaauu

SEQ ID NO: 252629 - RNA, 19 nt, Artificial Sequence
  Description of Artificial Sequence: Synthetic oligonucleotide
guacauacacacgguccau

SEQ ID NO: 252630 - RNA, 19 nt, Artificial Sequence
  Description of Artificial Sequence: Synthetic oligonucleotide
ccggguauuagaaccaguu

SEQ ID NO: 252631 - RNA, 19 nt, Artificial Sequence
  Description of Artificial Sequence: Synthetic oligonucleotide
ccccguugccuguagaugu

SEQ ID NO: 252632 - RNA, 19 nt, Artificial Sequence
  Description of Artificial Sequence: Synthetic oligonucleotide
gcacacgacuaaauaauuu

SEQ ID NO: 252633 - RNA, 19 nt, Artificial Sequence
  Description of Artificial Sequence: Synthetic oligonucleotide
aggacccgcuguguugguu

SEQ ID NO: 252634 - RNA, 19 nt, Artificial Sequence
  Description of Artificial Sequence: Synthetic oligonucleotide
ggacccgcuguguugguuu

SEQ ID NO: 252635 - RNA, 19 nt, Artificial Sequence
  Description of Artificial Sequence: Synthetic oligonucleotide
ccguugccuguagauguug

SEQ ID NO: 252636 - RNA, 19 nt, Artificial Sequence
  Description of Artificial Sequence: Synthetic oligonucleotide
ggcacacgacuaaauaauu

SEQ ID NO: 252637 - RNA, 19 nt, Artificial Sequence
  Description of Artificial Sequence: Synthetic oligonucleotide
ggauaacguuggaaagccu

SEQ ID NO: 252638 - RNA, 19 nt, Artificial Sequence
  Description of Artificial Sequence: Synthetic oligonucleotide
cgcucucuggcaaucauau

SEQ ID NO: 252639 - RNA, 19 nt, Artificial Sequence
  Description of Artificial Sequence: Synthetic oligonucleotide
gccugaacucauccauagu

SEQ ID NO: 252640 - RNA, 19 nt, Artificial Sequence
  Description of Artificial Sequence: Synthetic oligonucleotide
cggguauuagaaccaguua

SEQ ID NO: 252641 - RNA, 19 nt, Artificial Sequence
  Description of Artificial Sequence: Synthetic oligonucleotide
ggaagcgaucaaaccuacu

SEQ ID NO: 252642 - RNA, 19 nt, Artificial Sequence
  Description of Artificial Sequence: Synthetic oligonucleotide
ccaaccucagauccgucuu

SEQ ID NO: 252643 - RNA, 19 nt, Artificial Sequence
  Description of Artificial Sequence: Synthetic oligonucleotide
cgcacuauagcagcuucua

SEQ ID NO: 252644 - RNA, 19 nt, Artificial Sequence
  Description of Artificial Sequence: Synthetic oligonucleotide
gugcaucacccgcucuauu

SEQ ID NO: 252645 - RNA, 19 nt, Artificial Sequence
  Description of Artificial Sequence: Synthetic oligonucleotide
cccguugccuguagauguu

SEQ ID NO: 252646 - RNA, 19 nt, Artificial Sequence
  Description of Artificial Sequence: Synthetic oligonucleotide
cgcggcacauucacauuuu

SEQ ID NO: 252647 - RNA, 19 nt, Artificial Sequence
  Description of Artificial Sequence: Synthetic oligonucleotide
aaccacauaaccuaaugcc

SEQ ID NO: 252648 - RNA, 19 nt, Artificial Sequence
  Description of Artificial Sequence: Synthetic oligonucleotide
uauauaagcaaacagcaag

SEQ ID NO: 252649 - RNA, 19 nt, Artificial Sequence
  Description of Artificial Sequence: Synthetic oligonucleotide
gauaauaguagacacgugg

SEQ ID NO: 252650 - RNA, 19 nt, Artificial Sequence
  Description of Artificial Sequence: Synthetic oligonucleotide
aaaagggucaaccuguguc

SEQ ID NO: 252651 - RNA, 19 nt, Artificial Sequence
  Description of Artificial Sequence: Synthetic oligonucleotide
auaauggaaugucacacgc

SEQ ID NO: 252652 - RNA, 19 nt, Artificial Sequence
  Description of Artificial Sequence: Synthetic oligonucleotide
ucugcgauaacacuugugc

SEQ ID NO: 252653 - RNA, 19 nt, Artificial Sequence
  Description of Artificial Sequence: Synthetic oligonucleotide
aaccaaucaaugcacaaag

SEQ ID NO: 252654 - RNA, 19 nt, Artificial Sequence
  Description of Artificial Sequence: Synthetic oligonucleotide
uaauuaucgcagcaaaagg

SEQ ID NO: 252655 - RNA, 19 nt, Artificial Sequence
  Description of Artificial Sequence: Synthetic oligonucleotide
aaaugauucgaacccauug

SEQ ID NO: 252656 - RNA, 19 nt, Artificial Sequence
  Description of Artificial Sequence: Synthetic oligonucleotide
uuaauuaucgcagcaaaag

SEQ ID NO: 252657 - RNA, 19 nt, Artificial Sequence
  Description of Artificial Sequence: Synthetic oligonucleotide
ugucguauguacauaaaag

SEQ ID NO: 252658 - RNA, 19 nt, Artificial Sequence
  Description of Artificial Sequence: Synthetic oligonucleotide
uuuauggagauuugguggg

SEQ ID NO: 252659 - RNA, 19 nt, Artificial Sequence
  Description of Artificial Sequence: Synthetic oligonucleotide
ugcacuuugagaacuuucg

SEQ ID NO: 252660 - RNA, 19 nt, Artificial Sequence
  Description of Artificial Sequence: Synthetic oligonucleotide
uguuggguaauauuaaaca

SEQ ID NO: 252661 - RNA, 19 nt, Artificial Sequence
  Description of Artificial Sequence: Synthetic oligonucleotide
ucacuauauaagcaaacag

SEQ ID NO: 252662 - RNA, 19 nt, Artificial Sequence
  Description of Artificial Sequence: Synthetic oligonucleotide
aauggaaugucacacgcga

SEQ ID NO: 252663 - RNA, 19 nt, Artificial Sequence
  Description of Artificial Sequence: Synthetic oligonucleotide
guugaaacaugucauaccc

SEQ ID NO: 252664 - RNA, 19 nt, Artificial Sequence
  Description of Artificial Sequence: Synthetic oligonucleotide
cugaaaaugauucgaaccc

SEQ ID NO: 252665 - RNA, 19 nt, Artificial Sequence
  Description of Artificial Sequence: Synthetic oligonucleotide
aaugauucgaacccauugu

SEQ ID NO: 252666 - RNA, 19 nt, Artificial Sequence
  Description of Artificial Sequence: Synthetic oligonucleotide
ucuuauaauggaaugucac

SEQ ID NO: 252667 - RNA, 19 nt, Artificial Sequence
  Description of Artificial Sequence: Synthetic oligonucleotide
uaucgcagcaaaaggauag

SEQ ID NO: 252668 - RNA, 19 nt, Artificial Sequence
  Description of Artificial Sequence: Synthetic oligonucleotide
aagaagaagaagaagaaaa

SEQ ID NO: 252669 - RNA, 19 nt, Artificial Sequence
  Description of Artificial Sequence: Synthetic oligonucleotide
uguuuacugauaaccagag

SEQ ID NO: 252670 - RNA, 19 nt, Artificial Sequence
  Description of Artificial Sequence: Synthetic oligonucleotide
ugcgagaacacacaccucc

SEQ ID NO: 252671 - RNA, 19 nt, Artificial Sequence
  Description of Artificial Sequence: Synthetic oligonucleotide
aaugucacacgcgagauga

SEQ ID NO: 252672 - RNA, 19 nt, Artificial Sequence
  Description of Artificial Sequence: Synthetic oligonucleotide
uguuuauggagauuuggug

SEQ ID NO: 252673 - RNA, 19 nt, Artificial Sequence
  Description of Artificial Sequence: Synthetic oligonucleotide
auaauaguagacacguggc

SEQ ID NO: 252674 - RNA, 19 nt, Artificial Sequence
  Description of Artificial Sequence: Synthetic oligonucleotide
uguuaucacuauauaagca

SEQ ID NO: 252675 - RNA, 19 nt, Artificial Sequence
  Description of Artificial Sequence: Synthetic oligonucleotide
uucguuacuacacacccca

SEQ ID NO: 252676 - RNA, 19 nt, Artificial Sequence
  Description of Artificial Sequence: Synthetic oligonucleotide
gagccuuuaauugagacug

SEQ ID NO: 252677 - RNA, 19 nt, Artificial Sequence
  Description of Artificial Sequence: Synthetic oligonucleotide
aacacaucauggaugggcc

SEQ ID NO: 252678 - RNA, 19 nt, Artificial Sequence
  Description of Artificial Sequence: Synthetic oligonucleotide
caagcgucauuaauuaucg

SEQ ID NO: 252679 - RNA, 19 nt, Artificial Sequence
  Description of Artificial Sequence: Synthetic oligonucleotide
uuccgaucuaaacacauca

SEQ ID NO: 252680 - RNA, 19 nt, Artificial Sequence
  Description of Artificial Sequence: Synthetic oligonucleotide
ugccuugaaaauaguaggg

SEQ ID NO: 252681 - RNA, 19 nt, Artificial Sequence
  Description of Artificial Sequence: Synthetic oligonucleotide
aauuaucgcagcaaaagga

SEQ ID NO: 252682 - RNA, 19 nt, Artificial Sequence
  Description of Artificial Sequence: Synthetic oligonucleotide
acacgcauaguuuaaagcu

SEQ ID NO: 252683 - RNA, 19 nt, Artificial Sequence
  Description of Artificial Sequence: Synthetic oligonucleotide
aaugaguacggugugguug

SEQ ID NO: 252684 - RNA, 19 nt, Artificial Sequence
  Description of Artificial Sequence: Synthetic oligonucleotide
ucguauguacauaaaaguc

SEQ ID NO: 252685 - RNA, 19 nt, Artificial Sequence
  Description of Artificial Sequence: Synthetic oligonucleotide
aggauagcaagugaaacgg

SEQ ID NO: 252686 - RNA, 19 nt, Artificial Sequence
  Description of Artificial Sequence: Synthetic oligonucleotide
aacccaacaguacaaggug

SEQ ID NO: 252687 - RNA, 19 nt, Artificial Sequence
  Description of Artificial Sequence: Synthetic oligonucleotide
gugccuugaaaauaguagg

SEQ ID NO: 252688 - RNA, 19 nt, Artificial Sequence
  Description of Artificial Sequence: Synthetic oligonucleotide
uuagguuauggucuggggu

SEQ ID NO: 252689 - RNA, 19 nt, Artificial Sequence
  Description of Artificial Sequence: Synthetic oligonucleotide
caaugaugcaagaacacac

SEQ ID NO: 252690 - RNA, 19 nt, Artificial Sequence
  Description of Artificial Sequence: Synthetic oligonucleotide
ugcuugguaucucauagug

SEQ ID NO: 252691 - RNA, 19 nt, Artificial Sequence
  Description of Artificial Sequence: Synthetic oligonucleotide
aaagggucaaccugugucu

SEQ ID NO: 252692 - RNA, 19 nt, Artificial Sequence
  Description of Artificial Sequence: Synthetic oligonucleotide
uaugauugcacuacccuuc

SEQ ID NO: 252693 - RNA, 19 nt, Artificial Sequence
  Description of Artificial Sequence: Synthetic oligonucleotide
uuggguaauauuaaacaau

SEQ ID NO: 252694 - RNA, 19 nt, Artificial Sequence
  Description of Artificial Sequence: Synthetic oligonucleotide
agcgucauuaauuaucgca

SEQ ID NO: 252695 - RNA, 19 nt, Artificial Sequence
  Description of Artificial Sequence: Synthetic oligonucleotide
uaauggaaugucacacgcg

SEQ ID NO: 252696 - RNA, 19 nt, Artificial Sequence
  Description of Artificial Sequence: Synthetic oligonucleotide
acaguaugauugcacuacc

SEQ ID NO: 252697 - RNA, 19 nt, Artificial Sequence
  Description of Artificial Sequence: Synthetic oligonucleotide
ugaugguagaaggacgucg

SEQ ID NO: 252698 - RNA, 19 nt, Artificial Sequence
  Description of Artificial Sequence: Synthetic oligonucleotide
gaaguugaccaauccuugg

SEQ ID NO: 252699 - RNA, 19 nt, Artificial Sequence
  Description of Artificial Sequence: Synthetic oligonucleotide
aguaugauugcacuacccu

SEQ ID NO: 252700 - RNA, 19 nt, Artificial Sequence
  Description of Artificial Sequence: Synthetic oligonucleotide
cuuccuacuagaagguucc

SEQ ID NO: 252701 - RNA, 19 nt, Artificial Sequence
  Description of Artificial Sequence: Synthetic oligonucleotide
aaaagaagaagaagaagaa

SEQ ID NO: 252702 - RNA, 19 nt, Artificial Sequence
  Description of Artificial Sequence: Synthetic oligonucleotide
auguacauaaaagucacca

SEQ ID NO: 252703 - RNA, 19 nt, Artificial Sequence
  Description of Artificial Sequence: Synthetic oligonucleotide
uaucacuauauaagcaaac

SEQ ID NO: 252704 - RNA, 19 nt, Artificial Sequence
  Description of Artificial Sequence: Synthetic oligonucleotide
aaauaguagggaaaugagu

SEQ ID NO: 252705 - RNA, 19 nt, Artificial Sequence
  Description of Artificial Sequence: Synthetic oligonucleotide
augaguacggugugguugg

SEQ ID NO: 252706 - RNA, 19 nt, Artificial Sequence
  Description of Artificial Sequence: Synthetic oligonucleotide
guaguauauagcaaucaag

SEQ ID NO: 252707 - RNA, 19 nt, Artificial Sequence
  Description of Artificial Sequence: Synthetic oligonucleotide
gaacacgucauguuugcug

SEQ ID NO: 252708 - RNA, 19 nt, Artificial Sequence
  Description of Artificial Sequence: Synthetic oligonucleotide
gacacguggccauuuaacc

SEQ ID NO: 252709 - RNA, 19 nt, Artificial Sequence
  Description of Artificial Sequence: Synthetic oligonucleotide
acuacgugagcaccacugc

SEQ ID NO: 252710 - RNA, 19 nt, Artificial Sequence
  Description of Artificial Sequence: Synthetic oligonucleotide
gaugguagaaggacgucgg

SEQ ID NO: 252711 - RNA, 19 nt, Artificial Sequence
  Description of Artificial Sequence: Synthetic oligonucleotide
aaagaagaagaagaagaaa

SEQ ID NO: 252712 - RNA, 19 nt, Artificial Sequence
  Description of Artificial Sequence: Synthetic oligonucleotide
ucuacauauccauuuccac

SEQ ID NO: 252713 - RNA, 19 nt, Artificial Sequence
  Description of Artificial Sequence: Synthetic oligonucleotide
ucugaugcgagaacacaca

SEQ ID NO: 252714 - RNA, 19 nt, Artificial Sequence
  Description of Artificial Sequence: Synthetic oligonucleotide
uugucguauguacauaaaa

SEQ ID NO: 252715 - RNA, 19 nt, Artificial Sequence
  Description of Artificial Sequence: Synthetic oligonucleotide
uuaaccauuggagcauagg

SEQ ID NO: 252716 - RNA, 19 nt, Artificial Sequence
  Description of Artificial Sequence: Synthetic oligonucleotide
uacgugagcaccacugcag

SEQ ID NO: 252717 - RNA, 19 nt, Artificial Sequence
  Description of Artificial Sequence: Synthetic oligonucleotide
uggucauuaccacccauug

SEQ ID NO: 252718 - RNA, 19 nt, Artificial Sequence
  Description of Artificial Sequence: Synthetic oligonucleotide
acugcauaccugcauagca

SEQ ID NO: 252719 - RNA, 19 nt, Artificial Sequence
  Description of Artificial Sequence: Synthetic oligonucleotide
acuagaagguucccacugg

SEQ ID NO: 252720 - RNA, 19 nt, Artificial Sequence
  Description of Artificial Sequence: Synthetic oligonucleotide
cuuggagucaagugggcag

SEQ ID NO: 252721 - RNA, 19 nt, Artificial Sequence
  Description of Artificial Sequence: Synthetic oligonucleotide
ugccauucaguaaaagggu

SEQ ID NO: 252722 - RNA, 19 nt, Artificial Sequence
  Description of Artificial Sequence: Synthetic oligonucleotide
augauucgaacccauugug

SEQ ID NO: 252723 - RNA, 19 nt, Artificial Sequence
  Description of Artificial Sequence: Synthetic oligonucleotide
aagcgucauuaauuaucgc

SEQ ID NO: 252724 - RNA, 19 nt, Artificial Sequence
  Description of Artificial Sequence: Synthetic oligonucleotide
uauagcaaucaagaugucu

SEQ ID NO: 252725 - RNA, 19 nt, Artificial Sequence
  Description of Artificial Sequence: Synthetic oligonucleotide
ugcauaccugcauagcacc

SEQ ID NO: 252726 - RNA, 19 nt, Artificial Sequence
  Description of Artificial Sequence: Synthetic oligonucleotide
ugggguaguauauagcaau

SEQ ID NO: 252727 - RNA, 19 nt, Artificial Sequence
  Description of Artificial Sequence: Synthetic oligonucleotide
auuugucguauguacauaa

SEQ ID NO: 252728 - RNA, 19 nt, Artificial Sequence
  Description of Artificial Sequence: Synthetic oligonucleotide
aaggacgucgggaugaucu

SEQ ID NO: 252729 - RNA, 19 nt, Artificial Sequence
  Description of Artificial Sequence: Synthetic oligonucleotide
ugagccuuuaauugagacu

SEQ ID NO: 252730 - RNA, 19 nt, Artificial Sequence
  Description of Artificial Sequence: Synthetic oligonucleotide
ugauucgaacccauugugu

SEQ ID NO: 252731 - RNA, 19 nt, Artificial Sequence
  Description of Artificial Sequence: Synthetic oligonucleotide
uuaaacaauggugggcuug

SEQ ID NO: 252732 - RNA, 19 nt, Artificial Sequence
  Description of Artificial Sequence: Synthetic oligonucleotide
gaaucccagauaauaguag

SEQ ID NO: 252733 - RNA, 19 nt, Artificial Sequence
  Description of Artificial Sequence: Synthetic oligonucleotide
guugaccaauccuuggugc

SEQ ID NO: 252734 - RNA, 19 nt, Artificial Sequence
  Description of Artificial Sequence: Synthetic oligonucleotide
aagaccauacucauuuaca

SEQ ID NO: 252735 - RNA, 19 nt, Artificial Sequence
  Description of Artificial Sequence: Synthetic oligonucleotide
uaguuuaaagcuucugcau

SEQ ID NO: 252736 - RNA, 19 nt, Artificial Sequence
  Description of Artificial Sequence: Synthetic oligonucleotide
agcgauggagccuauuaug

SEQ ID NO: 252737 - RNA, 19 nt, Artificial Sequence
  Description of Artificial Sequence: Synthetic oligonucleotide
aguuuaaagcuucugcauu

SEQ ID NO: 252738 - RNA, 19 nt, Artificial Sequence
  Description of Artificial Sequence: Synthetic oligonucleotide
acauuugucguauguacau

SEQ ID NO: 252739 - RNA, 19 nt, Artificial Sequence
  Description of Artificial Sequence: Synthetic oligonucleotide
uuaaccaaugaugcaagaa

SEQ ID NO: 252740 - RNA, 19 nt, Artificial Sequence
  Description of Artificial Sequence: Synthetic oligonucleotide
guuagguuauggucugggg

SEQ ID NO: 252741 - RNA, 19 nt, Artificial Sequence
  Description of Artificial Sequence: Synthetic oligonucleotide
uuuaaccauuggagcauag

SEQ ID NO: 252742 - RNA, 19 nt, Artificial Sequence
  Description of Artificial Sequence: Synthetic oligonucleotide
guaagauuggugcacagua

SEQ ID NO: 252743 - RNA, 19 nt, Artificial Sequence
  Description of Artificial Sequence: Synthetic oligonucleotide
aucacuauauaagcaaaca

SEQ ID NO: 252744 - RNA, 19 nt, Artificial Sequence
  Description of Artificial Sequence: Synthetic oligonucleotide
guuggguaauauuaaacaa

SEQ ID NO: 252745 - RNA, 19 nt, Artificial Sequence
  Description of Artificial Sequence: Synthetic oligonucleotide
guacaugguccuuaacucc

SEQ ID NO: 252746 - RNA, 19 nt, Artificial Sequence
  Description of Artificial Sequence: Synthetic oligonucleotide
uuacacugacauuugucgu

SEQ ID NO: 252747 - RNA, 19 nt, Artificial Sequence
  Description of Artificial Sequence: Synthetic oligonucleotide
auauaagcaaacagcaagu

SEQ ID NO: 252748 - RNA, 19 nt, Artificial Sequence
  Description of Artificial Sequence: Synthetic oligonucleotide
ucggagaugcugcacuuug

SEQ ID NO: 252749 - RNA, 19 nt, Artificial Sequence
  Description of Artificial Sequence: Synthetic oligonucleotide
uuauuagacuuaagaguuc

SEQ ID NO: 252750 - RNA, 19 nt, Artificial Sequence
  Description of Artificial Sequence: Synthetic oligonucleotide
uuaacacucuuguugggua

SEQ ID NO: 252751 - RNA, 19 nt, Artificial Sequence
  Description of Artificial Sequence: Synthetic oligonucleotide
aguuagcgcacaccucccc

SEQ ID NO: 252752 - RNA, 19 nt, Artificial Sequence
  Description of Artificial Sequence: Synthetic oligonucleotide
cucugaugcgagaacacac

SEQ ID NO: 252753 - RNA, 19 nt, Artificial Sequence
  Description of Artificial Sequence: Synthetic oligonucleotide
aguagggaaaugaguacgg

SEQ ID NO: 252754 - RNA, 19 nt, Artificial Sequence
  Description of Artificial Sequence: Synthetic oligonucleotide
uuaaauccccagccugugc

SEQ ID NO: 252755 - RNA, 19 nt, Artificial Sequence
  Description of Artificial Sequence: Synthetic oligonucleotide
gauucgaacccauugugua

SEQ ID NO: 252756 - RNA, 19 nt, Artificial Sequence
  Description of Artificial Sequence: Synthetic oligonucleotide
cuugauacgcugccgguac

SEQ ID NO: 252757 - RNA, 19 nt, Artificial Sequence
  Description of Artificial Sequence: Synthetic oligonucleotide
ugaaaauaguagggaaaug

SEQ ID NO: 252758 - RNA, 19 nt, Artificial Sequence
  Description of Artificial Sequence: Synthetic oligonucleotide
ucuugcacuccccauucgu

SEQ ID NO: 252759 - RNA, 19 nt, Artificial Sequence
  Description of Artificial Sequence: Synthetic oligonucleotide
ucuucuacguagcccacau

SEQ ID NO: 252760 - RNA, 19 nt, Artificial Sequence
  Description of Artificial Sequence: Synthetic oligonucleotide
aucuuguuuauggagauuu

SEQ ID NO: 252761 - RNA, 19 nt, Artificial Sequence
  Description of Artificial Sequence: Synthetic oligonucleotide
ugggguuccgcacuggauc

SEQ ID NO: 252762 - RNA, 19 nt, Artificial Sequence
  Description of Artificial Sequence: Synthetic oligonucleotide
cacacgcgagaugagaugg

SEQ ID NO: 252763 - RNA, 19 nt, Artificial Sequence
  Description of Artificial Sequence: Synthetic oligonucleotide
gucauuaauuaucgcagca

SEQ ID NO: 252764 - RNA, 19 nt, Artificial Sequence
  Description of Artificial Sequence: Synthetic oligonucleotide
uacguagcccacaucugug

SEQ ID NO: 252765 - RNA, 19 nt, Artificial Sequence
  Description of Artificial Sequence: Synthetic oligonucleotide
ugcauuggauccaucgguc

SEQ ID NO: 252766 - RNA, 19 nt, Artificial Sequence
  Description of Artificial Sequence: Synthetic oligonucleotide
cugcgauaacacuugugcc

SEQ ID NO: 252767 - RNA, 19 nt, Artificial Sequence
  Description of Artificial Sequence: Synthetic oligonucleotide
gcuucguuacuacacaccc

SEQ ID NO: 252768 - RNA, 19 nt, Artificial Sequence
  Description of Artificial Sequence: Synthetic oligonucleotide
caguaugauugcacuaccc

SEQ ID NO: 252769 - RNA, 19 nt, Artificial Sequence
  Description of Artificial Sequence: Synthetic oligonucleotide
uuucgggagugugauaccc

SEQ ID NO: 252770 - RNA, 19 nt, Artificial Sequence
  Description of Artificial Sequence: Synthetic oligonucleotide
gguugaaacaugucauacc

SEQ ID NO: 252771 - RNA, 19 nt, Artificial Sequence
  Description of Artificial Sequence: Synthetic oligonucleotide
aaguuagcgcacaccuccc

SEQ ID NO: 252772 - RNA, 19 nt, Artificial Sequence
  Description of Artificial Sequence: Synthetic oligonucleotide
agacugcauaccugcauag

SEQ ID NO: 252773 - RNA, 19 nt, Artificial Sequence
  Description of Artificial Sequence: Synthetic oligonucleotide
auucguagcagcgacccug

SEQ ID NO: 252774 - RNA, 19 nt, Artificial Sequence
  Description of Artificial Sequence: Synthetic oligonucleotide
cugcuugauacgcugccgg

SEQ ID NO: 252775 - RNA, 19 nt, Artificial Sequence
  Description of Artificial Sequence: Synthetic oligonucleotide
uuugucguauguacauaaa

SEQ ID NO: 252776 - RNA, 19 nt, Artificial Sequence
  Description of Artificial Sequence: Synthetic oligonucleotide
ggccauuuaaccaaugaug

SEQ ID NO: 252777 - RNA, 19 nt, Artificial Sequence
  Description of Artificial Sequence: Synthetic oligonucleotide
ugucuugcacuccccauuc

SEQ ID NO: 252778 - RNA, 19 nt, Artificial Sequence
  Description of Artificial Sequence: Synthetic oligonucleotide
auguuuacugauaaccaga

SEQ ID NO: 252779 - RNA, 19 nt, Artificial Sequence
  Description of Artificial Sequence: Synthetic oligonucleotide
auuaucgcagcaaaaggau

SEQ ID NO: 252780 - RNA, 19 nt, Artificial Sequence
  Description of Artificial Sequence: Synthetic oligonucleotide
auuaagauguuagguuaug

SEQ ID NO: 252781 - RNA, 19 nt, Artificial Sequence
  Description of Artificial Sequence: Synthetic oligonucleotide
cugcauaccugcauagcac

SEQ ID NO: 252782 - RNA, 19 nt, Artificial Sequence
  Description of Artificial Sequence: Synthetic oligonucleotide
aaaggggcaguugucuugu

SEQ ID NO: 252783 - RNA, 19 nt, Artificial Sequence
  Description of Artificial Sequence: Synthetic oligonucleotide
auacgcugccgguacuugg

SEQ ID NO: 252784 - RNA, 19 nt, Artificial Sequence
  Description of Artificial Sequence: Synthetic oligonucleotide
cuucguuacuacacacccc

SEQ ID NO: 252785 - RNA, 19 nt, Artificial Sequence
  Description of Artificial Sequence: Synthetic oligonucleotide
uaaaagggucaaccugugu

SEQ ID NO: 252786 - RNA, 19 nt, Artificial Sequence
  Description of Artificial Sequence: Synthetic oligonucleotide
acgcauaguuuaaagcuuc

SEQ ID NO: 252787 - RNA, 19 nt, Artificial Sequence
  Description of Artificial Sequence: Synthetic oligonucleotide
auuaccacccauuggucuu

SEQ ID NO: 252788 - RNA, 19 nt, Artificial Sequence
  Description of Artificial Sequence: Synthetic oligonucleotide
auccaagcgucauuaauua

SEQ ID NO: 252789 - RNA, 19 nt, Artificial Sequence
  Description of Artificial Sequence: Synthetic oligonucleotide
guagcagcgacccugauuu

SEQ ID NO: 252790 - RNA, 19 nt, Artificial Sequence
  Description of Artificial Sequence: Synthetic oligonucleotide
uagauagcccuguuaucac

SEQ ID NO: 252791 - RNA, 19 nt, Artificial Sequence
  Description of Artificial Sequence: Synthetic oligonucleotide
agauggaccgcaucggcau

SEQ ID NO: 252792 - RNA, 19 nt, Artificial Sequence
  Description of Artificial Sequence: Synthetic oligonucleotide
ggagccuauuaugagauug

SEQ ID NO: 252793 - RNA, 19 nt, Artificial Sequence
  Description of Artificial Sequence: Synthetic oligonucleotide
acagaacacgucauguuug

SEQ ID NO: 252794 - RNA, 19 nt, Artificial Sequence
  Description of Artificial Sequence: Synthetic oligonucleotide
uucuaaaggggcaguuguc

SEQ ID NO: 252795 - RNA, 19 nt, Artificial Sequence
  Description of Artificial Sequence: Synthetic oligonucleotide
uucgggagugugauacccc

SEQ ID NO: 252796 - RNA, 19 nt, Artificial Sequence
  Description of Artificial Sequence: Synthetic oligonucleotide
gauaccaagucaucugagu

SEQ ID NO: 252797 - RNA, 19 nt, Artificial Sequence
  Description of Artificial Sequence: Synthetic oligonucleotide
gaaugucacacgcgagaug

SEQ ID NO: 252798 - RNA, 19 nt, Artificial Sequence
  Description of Artificial Sequence: Synthetic oligonucleotide
ccgaggauuaagauguuag

SEQ ID NO: 252799 - RNA, 19 nt, Artificial Sequence
  Description of Artificial Sequence: Synthetic oligonucleotide
auuaauuaucgcagcaaaa

SEQ ID NO: 252800 - RNA, 19 nt, Artificial Sequence
  Description of Artificial Sequence: Synthetic oligonucleotide
uggauaggaggguuuacuu

SEQ ID NO: 252801 - RNA, 19 nt, Artificial Sequence
  Description of Artificial Sequence: Synthetic oligonucleotide
uccgaucuaaacacaucau

SEQ ID NO: 252802 - RNA, 19 nt, Artificial Sequence
  Description of Artificial Sequence: Synthetic oligonucleotide
gcgucauuaauuaucgcag

SEQ ID NO: 252803 - RNA, 19 nt, Artificial Sequence
  Description of Artificial Sequence: Synthetic oligonucleotide
uuuagggcuugaaucugua

SEQ ID NO: 252804 - RNA, 19 nt, Artificial Sequence
  Description of Artificial Sequence: Synthetic oligonucleotide
uuucguuugacagguggau

SEQ ID NO: 252805 - RNA, 19 nt, Artificial Sequence
  Description of Artificial Sequence: Synthetic oligonucleotide
ccuugaugguagaaggacg

SEQ ID NO: 252806 - RNA, 19 nt, Artificial Sequence
  Description of Artificial Sequence: Synthetic oligonucleotide
uacaccgaccccucugaug

SEQ ID NO: 252807 - RNA, 19 nt, Artificial Sequence
  Description of Artificial Sequence: Synthetic oligonucleotide
gcacuuccgaucuaaacac

SEQ ID NO: 252808 - RNA, 19 nt, Artificial Sequence
  Description of Artificial Sequence: Synthetic oligonucleotide
uuggagucaagugggcagc

SEQ ID NO: 252809 - RNA, 19 nt, Artificial Sequence
  Description of Artificial Sequence: Synthetic oligonucleotide
gguaguauauagcaaucaa

SEQ ID NO: 252810 - RNA, 19 nt, Artificial Sequence
  Description of Artificial Sequence: Synthetic oligonucleotide
aaaugaguacggugugguu

SEQ ID NO: 252811 - RNA, 19 nt, Artificial Sequence
  Description of Artificial Sequence: Synthetic oligonucleotide
ucgggagugugauaccccu

SEQ ID NO: 252812 - RNA, 19 nt, Artificial Sequence
  Description of Artificial Sequence: Synthetic oligonucleotide
ugucacacgcgagaugaga

SEQ ID NO: 252813 - RNA, 19 nt, Artificial Sequence
  Description of Artificial Sequence: Synthetic oligonucleotide
uuuugauugcaggcauagc

SEQ ID NO: 252814 - RNA, 19 nt, Artificial Sequence
  Description of Artificial Sequence: Synthetic oligonucleotide
uucguagcagcgacccuga

SEQ ID NO: 252815 - RNA, 19 nt, Artificial Sequence
  Description of Artificial Sequence: Synthetic oligonucleotide
ggggcaguugucuuguacc

SEQ ID NO: 252816 - RNA, 19 nt, Artificial Sequence
  Description of Artificial Sequence: Synthetic oligonucleotide
accccuaagcaaugcaaca

SEQ ID NO: 252817 - RNA, 19 nt, Artificial Sequence
  Description of Artificial Sequence: Synthetic oligonucleotide
uggaccccuaagcaaugca

SEQ ID NO: 252818 - RNA, 19 nt, Artificial Sequence
  Description of Artificial Sequence: Synthetic oligonucleotide
auggaccgcaucggcaugc

SEQ ID NO: 252819 - RNA, 19 nt, Artificial Sequence
  Description of Artificial Sequence: Synthetic oligonucleotide
uggcuuccuacuagaaggu

SEQ ID NO: 252820 - RNA, 19 nt, Artificial Sequence
  Description of Artificial Sequence: Synthetic oligonucleotide
cguauguacauaaaaguca

SEQ ID NO: 252821 - RNA, 19 nt, Artificial Sequence
  Description of Artificial Sequence: Synthetic oligonucleotide
uuauggagauuuggugggc

SEQ ID NO: 252822 - RNA, 19 nt, Artificial Sequence
  Description of Artificial Sequence: Synthetic oligonucleotide
cuuccgaucuaaacacauc

SEQ ID NO: 252823 - RNA, 19 nt, Artificial Sequence
  Description of Artificial Sequence: Synthetic oligonucleotide
acgucgggaugaucucucc

SEQ ID NO: 252824 - RNA, 19 nt, Artificial Sequence
  Description of Artificial Sequence: Synthetic oligonucleotide
cuugaugguagaaggacgu

SEQ ID NO: 252825 - RNA, 19 nt, Artificial Sequence
  Description of Artificial Sequence: Synthetic oligonucleotide
aaaaugauucgaacccauu

SEQ ID NO: 252826 - RNA, 19 nt, Artificial Sequence
  Description of Artificial Sequence: Synthetic oligonucleotide
guagaaggacgucgggaug

SEQ ID NO: 252827 - RNA, 19 nt, Artificial Sequence
  Description of Artificial Sequence: Synthetic oligonucleotide
gaccccuaagcaaugcaac

SEQ ID NO: 252828 - RNA, 19 nt, Artificial Sequence
  Description of Artificial Sequence: Synthetic oligonucleotide
caucacuuaacacucuugu

SEQ ID NO: 252829 - RNA, 19 nt, Artificial Sequence
  Description of Artificial Sequence: Synthetic oligonucleotide
uccgugccugcccaaguga

SEQ ID NO: 252830 - RNA, 19 nt, Artificial Sequence
  Description of Artificial Sequence: Synthetic oligonucleotide
uggcuucguuacuacacac

SEQ ID NO: 252831 - RNA, 19 nt, Artificial Sequence
  Description of Artificial Sequence: Synthetic oligonucleotide
ugcggcugauucagauggg

SEQ ID NO: 252832 - RNA, 19 nt, Artificial Sequence
  Description of Artificial Sequence: Synthetic oligonucleotide
aaaccaggaauaaggccaa

SEQ ID NO: 252833 - RNA, 19 nt, Artificial Sequence
  Description of Artificial Sequence: Synthetic oligonucleotide
gagagauaccaagucaucu

SEQ ID NO: 252834 - RNA, 19 nt, Artificial Sequence
  Description of Artificial Sequence: Synthetic oligonucleotide
cucgaguaagauuggugca

SEQ ID NO: 252835 - RNA, 19 nt, Artificial Sequence
  Description of Artificial Sequence: Synthetic oligonucleotide
ugguugucccuugucuugc

SEQ ID NO: 252836 - RNA, 19 nt, Artificial Sequence
  Description of Artificial Sequence: Synthetic oligonucleotide
cucugcgauaacacuugug

SEQ ID NO: 252837 - RNA, 19 nt, Artificial Sequence
  Description of Artificial Sequence: Synthetic oligonucleotide
agcaaaugaauggcaugug

SEQ ID NO: 252838 - RNA, 19 nt, Artificial Sequence
  Description of Artificial Sequence: Synthetic oligonucleotide
gacugcauaccugcauagc

SEQ ID NO: 252839 - RNA, 19 nt, Artificial Sequence
  Description of Artificial Sequence: Synthetic oligonucleotide
ccgaucuaaacacaucaug

SEQ ID NO: 252840 - RNA, 19 nt, Artificial Sequence
  Description of Artificial Sequence: Synthetic oligonucleotide
uuagcgcacaccuccccau

SEQ ID NO: 252841 - RNA, 19 nt, Artificial Sequence
  Description of Artificial Sequence: Synthetic oligonucleotide
agcagcgacccugauuuug

SEQ ID NO: 252842 - RNA, 19 nt, Artificial Sequence
  Description of Artificial Sequence: Synthetic oligonucleotide
ggcccgaacagacuuuacc

SEQ ID NO: 252843 - RNA, 19 nt, Artificial Sequence
  Description of Artificial Sequence: Synthetic oligonucleotide
gauacgcugccgguacuug

SEQ ID NO: 252844 - RNA, 19 nt, Artificial Sequence
  Description of Artificial Sequence: Synthetic oligonucleotide
uuggaagaccauacucauu

SEQ ID NO: 252845 - RNA, 19 nt, Artificial Sequence
  Description of Artificial Sequence: Synthetic oligonucleotide
agccuuuaauugagacugc

SEQ ID NO: 252846 - RNA, 19 nt, Artificial Sequence
  Description of Artificial Sequence: Synthetic oligonucleotide
acuuccgaucuaaacacau

SEQ ID NO: 252847 - RNA, 19 nt, Artificial Sequence
  Description of Artificial Sequence: Synthetic oligonucleotide
guuagcgcacaccucccca

SEQ ID NO: 252848 - RNA, 19 nt, Artificial Sequence
  Description of Artificial Sequence: Synthetic oligonucleotide
uuaccacccauuggucuug

SEQ ID NO: 252849 - RNA, 19 nt, Artificial Sequence
  Description of Artificial Sequence: Synthetic oligonucleotide
guggcuucguuacuacaca

SEQ ID NO: 252850 - RNA, 19 nt, Artificial Sequence
  Description of Artificial Sequence: Synthetic oligonucleotide
acacaucauggaugggcca

SEQ ID NO: 252851 - RNA, 19 nt, Artificial Sequence
  Description of Artificial Sequence: Synthetic oligonucleotide
acuaggacccuuagguccu

SEQ ID NO: 252852 - RNA, 19 nt, Artificial Sequence
  Description of Artificial Sequence: Synthetic oligonucleotide
uugauacgcugccgguacu

SEQ ID NO: 252853 - RNA, 19 nt, Artificial Sequence
  Description of Artificial Sequence: Synthetic oligonucleotide
aaacaauggugggcuugug

SEQ ID NO: 252854 - RNA, 19 nt, Artificial Sequence
  Description of Artificial Sequence: Synthetic oligonucleotide
uugcacuacccuucauguc

SEQ ID NO: 252855 - RNA, 19 nt, Artificial Sequence
  Description of Artificial Sequence: Synthetic oligonucleotide
uucguuugacagguggaua

SEQ ID NO: 252856 - RNA, 19 nt, Artificial Sequence
  Description of Artificial Sequence: Synthetic oligonucleotide
gauuaagauguuagguuau

SEQ ID NO: 252857 - RNA, 19 nt, Artificial Sequence
  Description of Artificial Sequence: Synthetic oligonucleotide
accgcaucggcaugcugcu

SEQ ID NO: 252858 - RNA, 19 nt, Artificial Sequence
  Description of Artificial Sequence: Synthetic oligonucleotide
cuacgugagcaccacugca

SEQ ID NO: 252859 - RNA, 19 nt, Artificial Sequence
  Description of Artificial Sequence: Synthetic oligonucleotide
cauuaccacccauuggucu

SEQ ID NO: 252860 - RNA, 19 nt, Artificial Sequence
  Description of Artificial Sequence: Synthetic oligonucleotide
auauagcaaucaagauguc

SEQ ID NO: 252861 - RNA, 19 nt, Artificial Sequence
  Description of Artificial Sequence: Synthetic oligonucleotide
ccauucguagcagcgaccc

SEQ ID NO: 252862 - RNA, 19 nt, Artificial Sequence
  Description of Artificial Sequence: Synthetic oligonucleotide
cuacaacauccuauaguaa

SEQ ID NO: 252863 - RNA, 19 nt, Artificial Sequence
  Description of Artificial Sequence: Synthetic oligonucleotide
ugcagccuuuguuccccag

SEQ ID NO: 252864 - RNA, 19 nt, Artificial Sequence
  Description of Artificial Sequence: Synthetic oligonucleotide
ccaauaaaccuuauagaua

SEQ ID NO: 252865 - RNA, 19 nt, Artificial Sequence
  Description of Artificial Sequence: Synthetic oligonucleotide
agauuggugcacaguaaaa

SEQ ID NO: 252866 - RNA, 19 nt, Artificial Sequence
  Description of Artificial Sequence: Synthetic oligonucleotide
uugaugguagaaggacguc

SEQ ID NO: 252867 - RNA, 19 nt, Artificial Sequence
  Description of Artificial Sequence: Synthetic oligonucleotide
acccugauuuugauugcag

SEQ ID NO: 252868 - RNA, 19 nt, Artificial Sequence
  Description of Artificial Sequence: Synthetic oligonucleotide
ugggcucaaacagcuuugu

SEQ ID NO: 252869 - RNA, 19 nt, Artificial Sequence
  Description of Artificial Sequence: Synthetic oligonucleotide
aacuuucgggagugugaua

SEQ ID NO: 252870 - RNA, 19 nt, Artificial Sequence
  Description of Artificial Sequence: Synthetic oligonucleotide
caagcuaagccacugccau

SEQ ID NO: 252871 - RNA, 19 nt, Artificial Sequence
  Description of Artificial Sequence: Synthetic oligonucleotide
uuacaccgaccccucugau

SEQ ID NO: 252872 - RNA, 19 nt, Artificial Sequence
  Description of Artificial Sequence: Synthetic oligonucleotide
ccaucggucuccauccuug

SEQ ID NO: 252873 - RNA, 19 nt, Artificial Sequence
  Description of Artificial Sequence: Synthetic oligonucleotide
gcuuccuacuagaagguuc

SEQ ID NO: 252874 - RNA, 19 nt, Artificial Sequence
  Description of Artificial Sequence: Synthetic oligonucleotide
guccgugccugcccaagug

SEQ ID NO: 252875 - RNA, 19 nt, Artificial Sequence
  Description of Artificial Sequence: Synthetic oligonucleotide
gauugcaggcauagccauc

SEQ ID NO: 252876 - RNA, 19 nt, Artificial Sequence
  Description of Artificial Sequence: Synthetic oligonucleotide
cugcauuggauccaucggu

SEQ ID NO: 252877 - RNA, 19 nt, Artificial Sequence
  Description of Artificial Sequence: Synthetic oligonucleotide
agucaagugggcagcugcu

SEQ ID NO: 252878 - RNA, 19 nt, Artificial Sequence
  Description of Artificial Sequence: Synthetic oligonucleotide
guaggcacuuccgaucuaa

SEQ ID NO: 252879 - RNA, 19 nt, Artificial Sequence
  Description of Artificial Sequence: Synthetic oligonucleotide
ggcuucguuacuacacacc

SEQ ID NO: 252880 - RNA, 19 nt, Artificial Sequence
  Description of Artificial Sequence: Synthetic oligonucleotide
gacgucgggaugaucucuc

SEQ ID NO: 252881 - RNA, 19 nt, Artificial Sequence
  Description of Artificial Sequence: Synthetic oligonucleotide
augacucggccuugauggu

SEQ ID NO: 252882 - RNA, 19 nt, Artificial Sequence
  Description of Artificial Sequence: Synthetic oligonucleotide
cugggguaguauauagcaa

SEQ ID NO: 252883 - RNA, 19 nt, Artificial Sequence
  Description of Artificial Sequence: Synthetic oligonucleotide
ugauacgcugccgguacuu

SEQ ID NO: 252884 - RNA, 19 nt, Artificial Sequence
  Description of Artificial Sequence: Synthetic oligonucleotide
cuacguagcccacaucugu

SEQ ID NO: 252885 - RNA, 19 nt, Artificial Sequence
  Description of Artificial Sequence: Synthetic oligonucleotide
ggguaguauauagcaauca

SEQ ID NO: 252886 - RNA, 19 nt, Artificial Sequence
  Description of Artificial Sequence: Synthetic oligonucleotide
gcgauaacacuugugccac

SEQ ID NO: 252887 - RNA, 19 nt, Artificial Sequence
  Description of Artificial Sequence: Synthetic oligonucleotide
cauacacgcauaguuuaaa

SEQ ID NO: 252888 - RNA, 19 nt, Artificial Sequence
  Description of Artificial Sequence: Synthetic oligonucleotide
acgcugccgguacuuggag

SEQ ID NO: 252889 - RNA, 19 nt, Artificial Sequence
  Description of Artificial Sequence: Synthetic oligonucleotide
ucguuacuacacaccccau

SEQ ID NO: 252890 - RNA, 19 nt, Artificial Sequence
  Description of Artificial Sequence: Synthetic oligonucleotide
agugagccuuuaauugaga

SEQ ID NO: 252891 - RNA, 19 nt, Artificial Sequence
  Description of Artificial Sequence: Synthetic oligonucleotide
gagugugauaccccuguuu

SEQ ID NO: 252892 - RNA, 19 nt, Artificial Sequence
  Description of Artificial Sequence: Synthetic oligonucleotide
ggugcucgaguaagauugg

SEQ ID NO: 252893 - RNA, 19 nt, Artificial Sequence
  Description of Artificial Sequence: Synthetic oligonucleotide
gcgauggagccuauuauga

SEQ ID NO: 252894 - RNA, 19 nt, Artificial Sequence
  Description of Artificial Sequence: Synthetic oligonucleotide
ggauugggguuccgcacug

SEQ ID NO: 252895 - RNA, 19 nt, Artificial Sequence
  Description of Artificial Sequence: Synthetic oligonucleotide
cuucuacguagcccacauc

SEQ ID NO: 252896 - RNA, 19 nt, Artificial Sequence
  Description of Artificial Sequence: Synthetic oligonucleotide
cucauauuuagggcuugaa

SEQ ID NO: 252897 - RNA, 19 nt, Artificial Sequence
  Description of Artificial Sequence: Synthetic oligonucleotide
auuggagcauagguuugua

SEQ ID NO: 252898 - RNA, 19 nt, Artificial Sequence
  Description of Artificial Sequence: Synthetic oligonucleotide
cacgcauaguuuaaagcuu

SEQ ID NO: 252899 - RNA, 19 nt, Artificial Sequence
  Description of Artificial Sequence: Synthetic oligonucleotide
cagucaaugacucggccuu

SEQ ID NO: 252900 - RNA, 19 nt, Artificial Sequence
  Description of Artificial Sequence: Synthetic oligonucleotide
cacugacauuugucguaug

SEQ ID NO: 252901 - RNA, 19 nt, Artificial Sequence
  Description of Artificial Sequence: Synthetic oligonucleotide
gggguaguauauagcaauc

SEQ ID NO: 252902 - RNA, 19 nt, Artificial Sequence
  Description of Artificial Sequence: Synthetic oligonucleotide
uggcccgaacagacuuuac

SEQ ID NO: 252903 - RNA, 19 nt, Artificial Sequence
  Description of Artificial Sequence: Synthetic oligonucleotide
guagacacguggccauuua

SEQ ID NO: 252904 - RNA, 19 nt, Artificial Sequence
  Description of Artificial Sequence: Synthetic oligonucleotide
ggcaguugucuuguacccc

SEQ ID NO: 252905 - RNA, 19 nt, Artificial Sequence
  Description of Artificial Sequence: Synthetic oligonucleotide
ugaguacggugugguuggc

SEQ ID NO: 252906 - RNA, 19 nt, Artificial Sequence
  Description of Artificial Sequence: Synthetic oligonucleotide
agguggauaggaggguuua

SEQ ID NO: 252907 - RNA, 19 nt, Artificial Sequence
  Description of Artificial Sequence: Synthetic oligonucleotide
gggagugugauaccccugu

SEQ ID NO: 252908 - RNA, 19 nt, Artificial Sequence
  Description of Artificial Sequence: Synthetic oligonucleotide
ccacugaaaaugauucgaa

SEQ ID NO: 252909 - RNA, 19 nt, Artificial Sequence
  Description of Artificial Sequence: Synthetic oligonucleotide
caccgaccccucugaugcg

SEQ ID NO: 252910 - RNA, 19 nt, Artificial Sequence
  Description of Artificial Sequence: Synthetic oligonucleotide
augucacacgcgagaugag

SEQ ID NO: 252911 - RNA, 19 nt, Artificial Sequence
  Description of Artificial Sequence: Synthetic oligonucleotide
cccauucguagcagcgacc

SEQ ID NO: 252912 - RNA, 19 nt, Artificial Sequence
  Description of Artificial Sequence: Synthetic oligonucleotide
ccccauucguagcagcgac

SEQ ID NO: 252913 - RNA, 19 nt, Artificial Sequence
  Description of Artificial Sequence: Synthetic oligonucleotide
agaaggacgucgggaugau

SEQ ID NO: 252914 - RNA, 19 nt, Artificial Sequence
  Description of Artificial Sequence: Synthetic oligonucleotide
gucacacgcgagaugagau

SEQ ID NO: 252915 - RNA, 19 nt, Artificial Sequence
  Description of Artificial Sequence: Synthetic oligonucleotide
auagugaaguggaccccua

SEQ ID NO: 252916 - RNA, 19 nt, Artificial Sequence
  Description of Artificial Sequence: Synthetic oligonucleotide
uggaccgcaucggcaugcu

SEQ ID NO: 252917 - RNA, 19 nt, Artificial Sequence
  Description of Artificial Sequence: Synthetic oligonucleotide
cuccccggccucuacauau

SEQ ID NO: 252918 - RNA, 19 nt, Artificial Sequence
  Description of Artificial Sequence: Synthetic oligonucleotide
cucuaugcauucacauuuu

SEQ ID NO: 252919 - RNA, 19 nt, Artificial Sequence
  Description of Artificial Sequence: Synthetic oligonucleotide
acacgcgagaugagaugga

SEQ ID NO: 252920 - RNA, 19 nt, Artificial Sequence
  Description of Artificial Sequence: Synthetic oligonucleotide
ggaagaccauacucauuua

SEQ ID NO: 252921 - RNA, 19 nt, Artificial Sequence
  Description of Artificial Sequence: Synthetic oligonucleotide
ucguagcagcgacccugau

SEQ ID NO: 252922 - RNA, 19 nt, Artificial Sequence
  Description of Artificial Sequence: Synthetic oligonucleotide
gggauugggguuccgcacu

SEQ ID NO: 252923 - RNA, 19 nt, Artificial Sequence
  Description of Artificial Sequence: Synthetic oligonucleotide
ggaaugucacacgcgagau

SEQ ID NO: 252924 - RNA, 19 nt, Artificial Sequence
  Description of Artificial Sequence: Synthetic oligonucleotide
ccagcgauggagccuauua

SEQ ID NO: 252925 - RNA, 19 nt, Artificial Sequence
  Description of Artificial Sequence: Synthetic oligonucleotide
ccauacacgcauaguuuaa

SEQ ID NO: 252926 - RNA, 19 nt, Artificial Sequence
  Description of Artificial Sequence: Synthetic oligonucleotide
cagcgauggagccuauuau

SEQ ID NO: 252927 - RNA, 19 nt, Artificial Sequence
  Description of Artificial Sequence: Synthetic oligonucleotide
ccguguuucagcuuuucau

SEQ ID NO: 252928 - RNA, 19 nt, Artificial Sequence
  Description of Artificial Sequence: Synthetic oligonucleotide
cuuagguccuucguccuuu

SEQ ID NO: 252929 - RNA, 19 nt, Artificial Sequence
  Description of Artificial Sequence: Synthetic oligonucleotide
acggugccuugaaaauagu

SEQ ID NO: 252930 - RNA, 19 nt, Artificial Sequence
  Description of Artificial Sequence: Synthetic oligonucleotide
gcucauauuuagggcuuga

SEQ ID NO: 252931 - RNA, 19 nt, Artificial Sequence
  Description of Artificial Sequence: Synthetic oligonucleotide
acguggccauuuaaccaau

SEQ ID NO: 252932 - RNA, 19 nt, Artificial Sequence
  Description of Artificial Sequence: Synthetic oligonucleotide
ccgcacuggaucccugaug

SEQ ID NO: 252933 - RNA, 19 nt, Artificial Sequence
  Description of Artificial Sequence: Synthetic oligonucleotide
uagcagcgacccugauuuu

SEQ ID NO: 252934 - RNA, 19 nt, Artificial Sequence
  Description of Artificial Sequence: Synthetic oligonucleotide
gcuaagccacugccauuca

SEQ ID NO: 252935 - RNA, 19 nt, Artificial Sequence
  Description of Artificial Sequence: Synthetic oligonucleotide
ggacccuuagguccuucgu

SEQ ID NO: 252936 - RNA, 19 nt, Artificial Sequence
  Description of Artificial Sequence: Synthetic oligonucleotide
gcaccagcgauggagccua

SEQ ID NO: 252937 - RNA, 19 nt, Artificial Sequence
  Description of Artificial Sequence: Synthetic oligonucleotide
ccccuaagcaaugcaacaa

SEQ ID NO: 252938 - RNA, 19 nt, Artificial Sequence
  Description of Artificial Sequence: Synthetic oligonucleotide
accacccauuggucuuguu

SEQ ID NO: 252939 - RNA, 19 nt, Artificial Sequence
  Description of Artificial Sequence: Synthetic oligonucleotide
ggggccuugcuguguugga

SEQ ID NO: 252940 - RNA, 19 nt, Artificial Sequence
  Description of Artificial Sequence: Synthetic oligonucleotide
cauucguagcagcgacccu

SEQ ID NO: 252941 - RNA, 19 nt, Artificial Sequence
  Description of Artificial Sequence: Synthetic oligonucleotide
cucggccuugaugguagaa

SEQ ID NO: 252942 - RNA, 19 nt, Artificial Sequence
  Description of Artificial Sequence: Synthetic oligonucleotide
ccauccaagcgucauuaau

SEQ ID NO: 252943 - RNA, 19 nt, Artificial Sequence
  Description of Artificial Sequence: Synthetic oligonucleotide
cacgucauguuugcugcau

SEQ ID NO: 252944 - RNA, 19 nt, Artificial Sequence
  Description of Artificial Sequence: Synthetic oligonucleotide
gggucaaccugugucuuau

SEQ ID NO: 252945 - RNA, 19 nt, Artificial Sequence
  Description of Artificial Sequence: Synthetic oligonucleotide
accagcgauggagccuauu

SEQ ID NO: 252946 - RNA, 19 nt, Artificial Sequence
  Description of Artificial Sequence: Synthetic oligonucleotide
guguuggaucgaaccuccu

SEQ ID NO: 252947 - RNA, 19 nt, Artificial Sequence
  Description of Artificial Sequence: Synthetic oligonucleotide
ggagugugauaccccuguu

SEQ ID NO: 252948 - RNA, 19 nt, Artificial Sequence
  Description of Artificial Sequence: Synthetic oligonucleotide
cccauccaagcgucauuaa

SEQ ID NO: 252949 - RNA, 19 nt, Artificial Sequence
  Description of Artificial Sequence: Synthetic oligonucleotide
ggcuuccuacuagaagguu

SEQ ID NO: 252950 - RNA, 19 nt, Artificial Sequence
  Description of Artificial Sequence: Synthetic oligonucleotide
cguagcagcgacccugauu

SEQ ID NO: 252951 - RNA, 19 nt, Artificial Sequence
  Description of Artificial Sequence: Synthetic oligonucleotide
cgauaacacuugugccacu

SEQ ID NO: 252952 - RNA, 19 nt, Artificial Sequence
  Description of Artificial Sequence: Synthetic oligonucleotide
ccuccccggccucuacaua

SEQ ID NO: 252953 - RNA, 19 nt, Artificial Sequence
  Description of Artificial Sequence: Synthetic oligonucleotide
ccccgccaccccucuguaa

SEQ ID NO: 252954 - RNA, 19 nt, Artificial Sequence
  Description of Artificial Sequence: Synthetic oligonucleotide
cgaacccauuguguacagu

SEQ ID NO: 252955 - RNA, 19 nt, Artificial Sequence
  Description of Artificial Sequence: Synthetic oligonucleotide
ucugucaacuagcagaucg

SEQ ID NO: 252956 - RNA, 19 nt, Artificial Sequence
  Description of Artificial Sequence: Synthetic oligonucleotide
ugcaaaaucaggcaugugc

SEQ ID NO: 252957 - RNA, 19 nt, Artificial Sequence
  Description of Artificial Sequence: Synthetic oligonucleotide
cuuguaacuacgcaggagg

SEQ ID NO: 252958 - RNA, 19 nt, Artificial Sequence
  Description of Artificial Sequence: Synthetic oligonucleotide
gagguguuaaauaagauac

SEQ ID NO: 252959 - RNA, 19 nt, Artificial Sequence
  Description of Artificial Sequence: Synthetic oligonucleotide
uuuaugaacgucuguagga

SEQ ID NO: 252960 - RNA, 19 nt, Artificial Sequence
  Description of Artificial Sequence: Synthetic oligonucleotide
agcauuuagcagcagaguc

SEQ ID NO: 252961 - RNA, 19 nt, Artificial Sequence
  Description of Artificial Sequence: Synthetic oligonucleotide
cagauuauuaaacugagca

SEQ ID NO: 252962 - RNA, 19 nt, Artificial Sequence
  Description of Artificial Sequence: Synthetic oligonucleotide
agauuauuaaacugagcag

SEQ ID NO: 252963 - RNA, 19 nt, Artificial Sequence
  Description of Artificial Sequence: Synthetic oligonucleotide
aaaggcuugccacccauuc

SEQ ID NO: 252964 - RNA, 19 nt, Artificial Sequence
  Description of Artificial Sequence: Synthetic oligonucleotide
auaagauacagaugaagca

SEQ ID NO: 252965 - RNA, 19 nt, Artificial Sequence
  Description of Artificial Sequence: Synthetic oligonucleotide
auaguuacagaucuugaca

SEQ ID NO: 252966 - RNA, 19 nt, Artificial Sequence
  Description of Artificial Sequence: Synthetic oligonucleotide
uucaccuuggugcugcacg

SEQ ID NO: 252967 - RNA, 19 nt, Artificial Sequence
  Description of Artificial Sequence: Synthetic oligonucleotide
uugacaguaggguaggucu

SEQ ID NO: 252968 - RNA, 19 nt, Artificial Sequence
  Description of Artificial Sequence: Synthetic oligonucleotide
auuacugcuaggugcagag

SEQ ID NO: 252969 - RNA, 19 nt, Artificial Sequence
  Description of Artificial Sequence: Synthetic oligonucleotide
ugugauacggcgguguccg

SEQ ID NO: 252970 - RNA, 19 nt, Artificial Sequence
  Description of Artificial Sequence: Synthetic oligonucleotide
uucacguuagcauggagcu

SEQ ID NO: 252971 - RNA, 19 nt, Artificial Sequence
  Description of Artificial Sequence: Synthetic oligonucleotide
aacuagcagaucgaggcac

SEQ ID NO: 252972 - RNA, 19 nt, Artificial Sequence
  Description of Artificial Sequence: Synthetic oligonucleotide
ugcaggaacaccgucacag

SEQ ID NO: 252973 - RNA, 19 nt, Artificial Sequence
  Description of Artificial Sequence: Synthetic oligonucleotide
ugagguguuaaauaagaua

SEQ ID NO: 252974 - RNA, 19 nt, Artificial Sequence
  Description of Artificial Sequence: Synthetic oligonucleotide
uccaccagacuucucagcc

SEQ ID NO: 252975 - RNA, 19 nt, Artificial Sequence
  Description of Artificial Sequence: Synthetic oligonucleotide
ugucgauccagcagugugg

SEQ ID NO: 252976 - RNA, 19 nt, Artificial Sequence
  Description of Artificial Sequence: Synthetic oligonucleotide
cucguguauacccaugucc

SEQ ID NO: 252977 - RNA, 19 nt, Artificial Sequence
  Description of Artificial Sequence: Synthetic oligonucleotide
uuaugaacgucuguaggag

SEQ ID NO: 252978 - RNA, 19 nt, Artificial Sequence
  Description of Artificial Sequence: Synthetic oligonucleotide
ucguguauacccauguccu

SEQ ID NO: 252979 - RNA, 19 nt, Artificial Sequence
  Description of Artificial Sequence: Synthetic oligonucleotide
aggcaugugcaauauuugg

SEQ ID NO: 252980 - RNA, 19 nt, Artificial Sequence
  Description of Artificial Sequence: Synthetic oligonucleotide
aacuguuuggagucggaga

SEQ ID NO: 252981 - RNA, 19 nt, Artificial Sequence
  Description of Artificial Sequence: Synthetic oligonucleotide
agaucgaggcacucggggc

SEQ ID NO: 252982 - RNA, 19 nt, Artificial Sequence
  Description of Artificial Sequence: Synthetic oligonucleotide
uguuuccagcaaauguccg

SEQ ID NO: 252983 - RNA, 19 nt, Artificial Sequence
  Description of Artificial Sequence: Synthetic oligonucleotide
guaauaggugaacuguuug

SEQ ID NO: 252984 - RNA, 19 nt, Artificial Sequence
  Description of Artificial Sequence: Synthetic oligonucleotide
cuugguaaucagaugggug

SEQ ID NO: 252985 - RNA, 19 nt, Artificial Sequence
  Description of Artificial Sequence: Synthetic oligonucleotide
uugguuacgugcaggacac

SEQ ID NO: 252986 - RNA, 19 nt, Artificial Sequence
  Description of Artificial Sequence: Synthetic oligonucleotide
cuugagguguuaaauaaga

SEQ ID NO: 252987 - RNA, 19 nt, Artificial Sequence
  Description of Artificial Sequence: Synthetic oligonucleotide
auaauggccaggugcagug

SEQ ID NO: 252988 - RNA, 19 nt, Artificial Sequence
  Description of Artificial Sequence: Synthetic oligonucleotide
auaggugaacuguuuggag

SEQ ID NO: 252989 - RNA, 19 nt, Artificial Sequence
  Description of Artificial Sequence: Synthetic oligonucleotide
acaacccuggcccugcagg

SEQ ID NO: 252990 - RNA, 19 nt, Artificial Sequence
  Description of Artificial Sequence: Synthetic oligonucleotide
uggagacuugcugucaugg

SEQ ID NO: 252991 - RNA, 19 nt, Artificial Sequence
  Description of Artificial Sequence: Synthetic oligonucleotide
acuaugcaacagcaccugc

SEQ ID NO: 252992 - RNA, 19 nt, Artificial Sequence
  Description of Artificial Sequence: Synthetic oligonucleotide
gcaugugcaauauuugggg

SEQ ID NO: 252993 - RNA, 19 nt, Artificial Sequence
  Description of Artificial Sequence: Synthetic oligonucleotide
uauacccauguccuucaag

SEQ ID NO: 252994 - RNA, 19 nt, Artificial Sequence
  Description of Artificial Sequence: Synthetic oligonucleotide
gaggguaauaggugaacug

SEQ ID NO: 252995 - RNA, 19 nt, Artificial Sequence
  Description of Artificial Sequence: Synthetic oligonucleotide
uacuguuuaugaacgucug

SEQ ID NO: 252996 - RNA, 19 nt, Artificial Sequence
  Description of Artificial Sequence: Synthetic oligonucleotide
uuguaacuacgcaggaggc

SEQ ID NO: 252997 - RNA, 19 nt, Artificial Sequence
  Description of Artificial Sequence: Synthetic oligonucleotide
aaucagaugggugaccaaa

SEQ ID NO: 252998 - RNA, 19 nt, Artificial Sequence
  Description of Artificial Sequence: Synthetic oligonucleotide
aauguccgggcguucacgu

SEQ ID NO: 252999 - RNA, 19 nt, Artificial Sequence
  Description of Artificial Sequence: Synthetic oligonucleotide
ucuuagcagcauuuagcag

SEQ ID NO: 253000 - RNA, 19 nt, Artificial Sequence
  Description of Artificial Sequence: Synthetic oligonucleotide
accugcaacaggccuaggg

SEQ ID NO: 253001 - RNA, 19 nt, Artificial Sequence
  Description of Artificial Sequence: Synthetic oligonucleotide
ugcgccagaccgaacaggc

SEQ ID NO: 253002 - RNA, 19 nt, Artificial Sequence
  Description of Artificial Sequence: Synthetic oligonucleotide
guucacguuagcauggagc

SEQ ID NO: 253003 - RNA, 19 nt, Artificial Sequence
  Description of Artificial Sequence: Synthetic oligonucleotide
gacacccagauuauuaaac

SEQ ID NO: 253004 - RNA, 19 nt, Artificial Sequence
  Description of Artificial Sequence: Synthetic oligonucleotide
uguaaggcccugcggacug

SEQ ID NO: 253005 - RNA, 19 nt, Artificial Sequence
  Description of Artificial Sequence: Synthetic oligonucleotide
acccaugugggauccgccc

SEQ ID NO: 253006 - RNA, 19 nt, Artificial Sequence
  Description of Artificial Sequence: Synthetic oligonucleotide
guaacuacgcaggaggcug

SEQ ID NO: 253007 - RNA, 19 nt, Artificial Sequence
  Description of Artificial Sequence: Synthetic oligonucleotide
aaauguccgggcguucacg

SEQ ID NO: 253008 - RNA, 19 nt, Artificial Sequence
  Description of Artificial Sequence: Synthetic oligonucleotide
uucuugguuacgugcagga

SEQ ID NO: 253009 - RNA, 19 nt, Artificial Sequence
  Description of Artificial Sequence: Synthetic oligonucleotide
uccuguauguguccaccag

SEQ ID NO: 253010 - RNA, 19 nt, Artificial Sequence
  Description of Artificial Sequence: Synthetic oligonucleotide
cuugguuacgugcaggaca

SEQ ID NO: 253011 - RNA, 19 nt, Artificial Sequence
  Description of Artificial Sequence: Synthetic oligonucleotide
uguaggucaaggaggggaa

SEQ ID NO: 253012 - RNA, 19 nt, Artificial Sequence
  Description of Artificial Sequence: Synthetic oligonucleotide
ugugcaauauuuggggcac

SEQ ID NO: 253013 - RNA, 19 nt, Artificial Sequence
  Description of Artificial Sequence: Synthetic oligonucleotide
ucgggaaaucuucagguuu

SEQ ID NO: 253014 - RNA, 19 nt, Artificial Sequence
  Description of Artificial Sequence: Synthetic oligonucleotide
uccauucgggaaaucuuca

SEQ ID NO: 253015 - RNA, 19 nt, Artificial Sequence
  Description of Artificial Sequence: Synthetic oligonucleotide
gaaggguugggagaaggug

SEQ ID NO: 253016 - RNA, 19 nt, Artificial Sequence
  Description of Artificial Sequence: Synthetic oligonucleotide
cacguuagcauggagcuug

SEQ ID NO: 253017 - RNA, 19 nt, Artificial Sequence
  Description of Artificial Sequence: Synthetic oligonucleotide
agccgaacgaugcucaggu

SEQ ID NO: 253018 - RNA, 19 nt, Artificial Sequence
  Description of Artificial Sequence: Synthetic oligonucleotide
aggguaauaggugaacugu

SEQ ID NO: 253019 - RNA, 19 nt, Artificial Sequence
  Description of Artificial Sequence: Synthetic oligonucleotide
uguacucgcgagcucgcug

SEQ ID NO: 253020 - RNA, 19 nt, Artificial Sequence
  Description of Artificial Sequence: Synthetic oligonucleotide
gaugaccccaagguacugg

SEQ ID NO: 253021 - RNA, 19 nt, Artificial Sequence
  Description of Artificial Sequence: Synthetic oligonucleotide
cagaucgaggcacucgggg

SEQ ID NO: 253022 - RNA, 19 nt, Artificial Sequence
  Description of Artificial Sequence: Synthetic oligonucleotide
augaacgucuguaggagag

SEQ ID NO: 253023 - RNA, 19 nt, Artificial Sequence
  Description of Artificial Sequence: Synthetic oligonucleotide
cucaaucuuggcugguccc

SEQ ID NO: 253024 - RNA, 19 nt, Artificial Sequence
  Description of Artificial Sequence: Synthetic oligonucleotide
aacaccgucacaggucucu

SEQ ID NO: 253025 - RNA, 19 nt, Artificial Sequence
  Description of Artificial Sequence: Synthetic oligonucleotide
ugggcaaggccuuccuccg

SEQ ID NO: 253026 - RNA, 19 nt, Artificial Sequence
  Description of Artificial Sequence: Synthetic oligonucleotide
aggucgagagguguaugcc

SEQ ID NO: 253027 - RNA, 19 nt, Artificial Sequence
  Description of Artificial Sequence: Synthetic oligonucleotide
uguccauucgggaaaucuu

SEQ ID NO: 253028 - RNA, 19 nt, Artificial Sequence
  Description of Artificial Sequence: Synthetic oligonucleotide
aacuacgcaggaggcugcc

SEQ ID NO: 253029 - RNA, 19 nt, Artificial Sequence
  Description of Artificial Sequence: Synthetic oligonucleotide
agaugggugaccaaaccca

SEQ ID NO: 253030 - RNA, 19 nt, Artificial Sequence
  Description of Artificial Sequence: Synthetic oligonucleotide
ccagcuuguaacuacgcag

SEQ ID NO: 253031 - RNA, 19 nt, Artificial Sequence
  Description of Artificial Sequence: Synthetic oligonucleotide
gaacuguuuggagucggag

SEQ ID NO: 253032 - RNA, 19 nt, Artificial Sequence
  Description of Artificial Sequence: Synthetic oligonucleotide
gaagacguuggcaccauca

SEQ ID NO: 253033 - RNA, 19 nt, Artificial Sequence
  Description of Artificial Sequence: Synthetic oligonucleotide
ucuguaaggcccugcggac

SEQ ID NO: 253034 - RNA, 19 nt, Artificial Sequence
  Description of Artificial Sequence: Synthetic oligonucleotide
uauuuggcccacugaggug

SEQ ID NO: 253035 - RNA, 19 nt, Artificial Sequence
  Description of Artificial Sequence: Synthetic oligonucleotide
cagacugugggcaugcgca

SEQ ID NO: 253036 - RNA, 19 nt, Artificial Sequence
  Description of Artificial Sequence: Synthetic oligonucleotide
aucagaugggugaccaaac

SEQ ID NO: 253037 - RNA, 19 nt, Artificial Sequence
  Description of Artificial Sequence: Synthetic oligonucleotide
gaugggugaccaaacccag

SEQ ID NO: 253038 - RNA, 19 nt, Artificial Sequence
  Description of Artificial Sequence: Synthetic oligonucleotide
guacucgcgagcucgcugc

SEQ ID NO: 253039 - RNA, 19 nt, Artificial Sequence
  Description of Artificial Sequence: Synthetic oligonucleotide
acaguaggguaggucuucc

SEQ ID NO: 253040 - RNA, 19 nt, Artificial Sequence
  Description of Artificial Sequence: Synthetic oligonucleotide
uguaacuacgcaggaggcu

SEQ ID NO: 253041 - RNA, 19 nt, Artificial Sequence
  Description of Artificial Sequence: Synthetic oligonucleotide
gagucgcucccagaggugg

SEQ ID NO: 253042 - RNA, 19 nt, Artificial Sequence
  Description of Artificial Sequence: Synthetic oligonucleotide
aguucugcccagcugcccu

SEQ ID NO: 253043 - RNA, 19 nt, Artificial Sequence
  Description of Artificial Sequence: Synthetic oligonucleotide
guaaucagaugggugacca

SEQ ID NO: 253044 - RNA, 19 nt, Artificial Sequence
  Description of Artificial Sequence: Synthetic oligonucleotide
cagucauguccuugggucc

SEQ ID NO: 253045 - RNA, 19 nt, Artificial Sequence
  Description of Artificial Sequence: Synthetic oligonucleotide
cuaugcaacagcaccugca

SEQ ID NO: 253046 - RNA, 19 nt, Artificial Sequence
  Description of Artificial Sequence: Synthetic oligonucleotide
aguggcgugucuccguucu

SEQ ID NO: 253047 - RNA, 19 nt, Artificial Sequence
  Description of Artificial Sequence: Synthetic oligonucleotide
uucacucccucguguauac

SEQ ID NO: 253048 - RNA, 19 nt, Artificial Sequence
  Description of Artificial Sequence: Synthetic oligonucleotide
guuagcauggagcuuggua

SEQ ID NO: 253049 - RNA, 19 nt, Artificial Sequence
  Description of Artificial Sequence: Synthetic oligonucleotide
cugcggacuggaacgaagc

SEQ ID NO: 253050 - RNA, 19 nt, Artificial Sequence
  Description of Artificial Sequence: Synthetic oligonucleotide
uaacuacgcaggaggcugc

SEQ ID NO: 253051 - RNA, 19 nt, Artificial Sequence
  Description of Artificial Sequence: Synthetic oligonucleotide
uuccaccagaggguaauag

SEQ ID NO: 253052 - RNA, 19 nt, Artificial Sequence
  Description of Artificial Sequence: Synthetic oligonucleotide
gcuagcucggaggaaagcg

SEQ ID NO: 253053 - RNA, 19 nt, Artificial Sequence
  Description of Artificial Sequence: Synthetic oligonucleotide
uggcuugagguguuaaaua

SEQ ID NO: 253054 - RNA, 19 nt, Artificial Sequence
  Description of Artificial Sequence: Synthetic oligonucleotide
gcagucauguccuuggguc

SEQ ID NO: 253055 - RNA, 19 nt, Artificial Sequence
  Description of Artificial Sequence: Synthetic oligonucleotide
cacagaaccugcuguuuug

SEQ ID NO: 253056 - RNA, 19 nt, Artificial Sequence
  Description of Artificial Sequence: Synthetic oligonucleotide
guauguguccaccagacuu

SEQ ID NO: 253057 - RNA, 19 nt, Artificial Sequence
  Description of Artificial Sequence: Synthetic oligonucleotide
uguccgggcguucacguua

SEQ ID NO: 253058 - RNA, 19 nt, Artificial Sequence
  Description of Artificial Sequence: Synthetic oligonucleotide
aacgcucgggcgcugcgcu

SEQ ID NO: 253059 - RNA, 19 nt, Artificial Sequence
  Description of Artificial Sequence: Synthetic oligonucleotide
aaucaggcaugugcaauau

SEQ ID NO: 253060 - RNA, 19 nt, Artificial Sequence
  Description of Artificial Sequence: Synthetic oligonucleotide
cuugccacccauucucguc

SEQ ID NO: 253061 - RNA, 19 nt, Artificial Sequence
  Description of Artificial Sequence: Synthetic oligonucleotide
ccgaacgaugcucaggucc

SEQ ID NO: 253062 - RNA, 19 nt, Artificial Sequence
  Description of Artificial Sequence: Synthetic oligonucleotide
cacgcuugcguuucagcug

SEQ ID NO: 253063 - RNA, 19 nt, Artificial Sequence
  Description of Artificial Sequence: Synthetic oligonucleotide
gcugcgcugcgccagaccg

SEQ ID NO: 253064 - RNA, 19 nt, Artificial Sequence
  Description of Artificial Sequence: Synthetic oligonucleotide
gugauuacugcuaggugca

SEQ ID NO: 253065 - RNA, 19 nt, Artificial Sequence
  Description of Artificial Sequence: Synthetic oligonucleotide
cuccccguucucugcaugg

SEQ ID NO: 253066 - RNA, 19 nt, Artificial Sequence
  Description of Artificial Sequence: Synthetic oligonucleotide
uacggcgguguccggaaca

SEQ ID NO: 253067 - RNA, 19 nt, Artificial Sequence
  Description of Artificial Sequence: Synthetic oligonucleotide
cugcagcgcgucuagggcc

SEQ ID NO: 253068 - RNA, 19 nt, Artificial Sequence
  Description of Artificial Sequence: Synthetic oligonucleotide
uugugauacggcggugucc

SEQ ID NO: 253069 - RNA, 19 nt, Artificial Sequence
  Description of Artificial Sequence: Synthetic oligonucleotide
uuacugcuaggugcagagg

SEQ ID NO: 253070 - RNA, 19 nt, Artificial Sequence
  Description of Artificial Sequence: Synthetic oligonucleotide
ggcccugcggacuggaacg

SEQ ID NO: 253071 - RNA, 19 nt, Artificial Sequence
  Description of Artificial Sequence: Synthetic oligonucleotide
gucgagagguguaugcccc

SEQ ID NO: 253072 - RNA, 19 nt, Artificial Sequence
  Description of Artificial Sequence: Synthetic oligonucleotide
gucuccguucucauccugg

SEQ ID NO: 253073 - RNA, 19 nt, Artificial Sequence
  Description of Artificial Sequence: Synthetic oligonucleotide
acgugcaggacacccagau

SEQ ID NO: 253074 - RNA, 19 nt, Artificial Sequence
  Description of Artificial Sequence: Synthetic oligonucleotide
ccuuggguccuacagacac

SEQ ID NO: 253075 - RNA, 19 nt, Artificial Sequence
  Description of Artificial Sequence: Synthetic oligonucleotide
gccaucgcuagcucggagg

SEQ ID NO: 253076 - RNA, 19 nt, Artificial Sequence
  Description of Artificial Sequence: Synthetic oligonucleotide
uucgggaaaucuucagguu

SEQ ID NO: 253077 - RNA, 19 nt, Artificial Sequence
  Description of Artificial Sequence: Synthetic oligonucleotide
cauccucauagaaccgaac

SEQ ID NO: 253078 - RNA, 19 nt, Artificial Sequence
  Description of Artificial Sequence: Synthetic oligonucleotide
augcgcacgagguggguca

SEQ ID NO: 253079 - RNA, 19 nt, Artificial Sequence
  Description of Artificial Sequence: Synthetic oligonucleotide
gguguccggaacacaaugg

SEQ ID NO: 253080 - RNA, 19 nt, Artificial Sequence
  Description of Artificial Sequence: Synthetic oligonucleotide
guguauacccauguccuuc

SEQ ID NO: 253081 - RNA, 19 nt, Artificial Sequence
  Description of Artificial Sequence: Synthetic oligonucleotide
ucgcuagcucggaggaaag

SEQ ID NO: 253082 - RNA, 19 nt, Artificial Sequence
  Description of Artificial Sequence: Synthetic oligonucleotide
gguuacgugcaggacaccc

SEQ ID NO: 253083 - RNA, 19 nt, Artificial Sequence
  Description of Artificial Sequence: Synthetic oligonucleotide
cucgcgagcucgcugcagc

SEQ ID NO: 253084 - RNA, 19 nt, Artificial Sequence
  Description of Artificial Sequence: Synthetic oligonucleotide
ugauacggcgguguccgga

SEQ ID NO: 253085 - RNA, 19 nt, Artificial Sequence
  Description of Artificial Sequence: Synthetic oligonucleotide
ugacaguaggguaggucuu

SEQ ID NO: 253086 - RNA, 19 nt, Artificial Sequence
  Description of Artificial Sequence: Synthetic oligonucleotide
ggagccaucgcuagcucgg

SEQ ID NO: 253087 - RNA, 19 nt, Artificial Sequence
  Description of Artificial Sequence: Synthetic oligonucleotide
ugaacgucuguaggagaga

SEQ ID NO: 253088 - RNA, 19 nt, Artificial Sequence
  Description of Artificial Sequence: Synthetic oligonucleotide
guccauucgggaaaucuuc

SEQ ID NO: 253089 - RNA, 19 nt, Artificial Sequence
  Description of Artificial Sequence: Synthetic oligonucleotide
ucgcgagcucgcugcagcg

SEQ ID NO: 253090 - RNA, 19 nt, Artificial Sequence
  Description of Artificial Sequence: Synthetic oligonucleotide
uagaugcagggguguucgg

SEQ ID NO: 253091 - RNA, 19 nt, Artificial Sequence
  Description of Artificial Sequence: Synthetic oligonucleotide
aucgcuagcucggaggaaa

SEQ ID NO: 253092 - RNA, 19 nt, Artificial Sequence
  Description of Artificial Sequence: Synthetic oligonucleotide
agccuuuaggaggaggcga

SEQ ID NO: 253093 - RNA, 19 nt, Artificial Sequence
  Description of Artificial Sequence: Synthetic oligonucleotide
uaaucagaugggugaccaa

SEQ ID NO: 253094 - RNA, 19 nt, Artificial Sequence
  Description of Artificial Sequence: Synthetic oligonucleotide
gauacggcgguguccggaa

SEQ ID NO: 253095 - RNA, 19 nt, Artificial Sequence
  Description of Artificial Sequence: Synthetic oligonucleotide
caccacgcacagaaccugc

SEQ ID NO: 253096 - RNA, 19 nt, Artificial Sequence
  Description of Artificial Sequence: Synthetic oligonucleotide
gagaagcgcagccgaacga

SEQ ID NO: 253097 - RNA, 19 nt, Artificial Sequence
  Description of Artificial Sequence: Synthetic oligonucleotide
agaugacaugggcuaucug

SEQ ID NO: 253098 - RNA, 19 nt, Artificial Sequence
  Description of Artificial Sequence: Synthetic oligonucleotide
ucccucguguauacccaug

SEQ ID NO: 253099 - RNA, 19 nt, Artificial Sequence
  Description of Artificial Sequence: Synthetic oligonucleotide
gaucgaggcacucggggcu

SEQ ID NO: 253100 - RNA, 19 nt, Artificial Sequence
  Description of Artificial Sequence: Synthetic oligonucleotide
agaccgaacaggcgcgcgu

SEQ ID NO: 253101 - RNA, 19 nt, Artificial Sequence
  Description of Artificial Sequence: Synthetic oligonucleotide
gacuggaacgaagccgcug

SEQ ID NO: 253102 - RNA, 19 nt, Artificial Sequence
  Description of Artificial Sequence: Synthetic oligonucleotide
agucauguccuuggguccu

SEQ ID NO: 253103 - RNA, 19 nt, Artificial Sequence
  Description of Artificial Sequence: Synthetic oligonucleotide
gguccuacagacacagcgc

SEQ ID NO: 253104 - RNA, 19 nt, Artificial Sequence
  Description of Artificial Sequence: Synthetic oligonucleotide
auacggcgguguccggaac

SEQ ID NO: 253105 - RNA, 19 nt, Artificial Sequence
  Description of Artificial Sequence: Synthetic oligonucleotide
gauaauggccaggugcagu

SEQ ID NO: 253106 - RNA, 19 nt, Artificial Sequence
  Description of Artificial Sequence: Synthetic oligonucleotide
uggaacgaagccgcugccu

SEQ ID NO: 253107 - RNA, 19 nt, Artificial Sequence
  Description of Artificial Sequence: Synthetic oligonucleotide
agugacaacccuggcccug

SEQ ID NO: 253108 - RNA, 19 nt, Artificial Sequence
  Description of Artificial Sequence: Synthetic oligonucleotide
gggcaugcgcacgaggugg

SEQ ID NO: 253109 - RNA, 19 nt, Artificial Sequence
  Description of Artificial Sequence: Synthetic oligonucleotide
guggcuagaugcaggggug

SEQ ID NO: 253110 - RNA, 19 nt, Artificial Sequence
  Description of Artificial Sequence: Synthetic oligonucleotide
cuggagacuugcugucaug

SEQ ID NO: 253111 - RNA, 19 nt, Artificial Sequence
  Description of Artificial Sequence: Synthetic oligonucleotide
ccucauagaaccgaaccuc

SEQ ID NO: 253112 - RNA, 19 nt, Artificial Sequence
  Description of Artificial Sequence: Synthetic oligonucleotide
cuccguucucauccugggc

SEQ ID NO: 253113 - RNA, 19 nt, Artificial Sequence
  Description of Artificial Sequence: Synthetic oligonucleotide
ggaucuucggccaccuccc

SEQ ID NO: 253114 - RNA, 19 nt, Artificial Sequence
  Description of Artificial Sequence: Synthetic oligonucleotide
cguaguccagcaacgcucg

SEQ ID NO: 253115 - RNA, 19 nt, Artificial Sequence
  Description of Artificial Sequence: Synthetic oligonucleotide
ccgagugacaacccuggcc

SEQ ID NO: 253116 - RNA, 19 nt, Artificial Sequence
  Description of Artificial Sequence: Synthetic oligonucleotide
ugaugaccccaagguacug

SEQ ID NO: 253117 - RNA, 19 nt, Artificial Sequence
  Description of Artificial Sequence: Synthetic oligonucleotide
agcaacgcucgggcgcugc

SEQ ID NO: 253118 - RNA, 19 nt, Artificial Sequence
  Description of Artificial Sequence: Synthetic oligonucleotide
gggcuaucugcucaaugac

SEQ ID NO: 253119 - RNA, 19 nt, Artificial Sequence
  Description of Artificial Sequence: Synthetic oligonucleotide
agggguguguuuccagcaa

SEQ ID NO: 253120 - RNA, 19 nt, Artificial Sequence
  Description of Artificial Sequence: Synthetic oligonucleotide
cguuguacucgcgagcucg

SEQ ID NO: 253121 - RNA, 19 nt, Artificial Sequence
  Description of Artificial Sequence: Synthetic oligonucleotide
ccacccauucucgucaucc

SEQ ID NO: 253122 - RNA, 19 nt, Artificial Sequence
  Description of Artificial Sequence: Synthetic oligonucleotide
ccguaguccagcaacgcuc

SEQ ID NO: 253123 - RNA, 19 nt, Artificial Sequence
  Description of Artificial Sequence: Synthetic oligonucleotide
agcgcagccgaacgaugcu

SEQ ID NO: 253124 - RNA, 19 nt, Artificial Sequence
  Description of Artificial Sequence: Synthetic oligonucleotide
guuacgugcaggacaccca

SEQ ID NO: 253125 - RNA, 19 nt, Artificial Sequence
  Description of Artificial Sequence: Synthetic oligonucleotide
caucuugugauacggcggu

SEQ ID NO: 253126 - RNA, 19 nt, Artificial Sequence
  Description of Artificial Sequence: Synthetic oligonucleotide
guaguccagcaacgcucgg

SEQ ID NO: 253127 - RNA, 19 nt, Artificial Sequence
  Description of Artificial Sequence: Synthetic oligonucleotide
caacuagcagaucgaggca

SEQ ID NO: 253128 - RNA, 19 nt, Artificial Sequence
  Description of Artificial Sequence: Synthetic oligonucleotide
gcgagcucgcugcagcgcg

SEQ ID NO: 253129 - RNA, 19 nt, Artificial Sequence
  Description of Artificial Sequence: Synthetic oligonucleotide
cggaucuucggccaccucc

SEQ ID NO: 253130 - RNA, 19 nt, Artificial Sequence
  Description of Artificial Sequence: Synthetic oligonucleotide
acgccguaguccagcaacg

SEQ ID NO: 253131 - RNA, 19 nt, Artificial Sequence
  Description of Artificial Sequence: Synthetic oligonucleotide
ccauucgggaaaucuucag

SEQ ID NO: 253132 - RNA, 19 nt, Artificial Sequence
  Description of Artificial Sequence: Synthetic oligonucleotide
acuagcagaucgaggcacu

SEQ ID NO: 253133 - RNA, 19 nt, Artificial Sequence
  Description of Artificial Sequence: Synthetic oligonucleotide
ggaacaccgucacaggucu

SEQ ID NO: 253134 - RNA, 19 nt, Artificial Sequence
  Description of Artificial Sequence: Synthetic oligonucleotide
gggcaugacagaugacaug

SEQ ID NO: 253135 - RNA, 19 nt, Artificial Sequence
  Description of Artificial Sequence: Synthetic oligonucleotide
ccugagccggccaucugcg

SEQ ID NO: 253136 - RNA, 19 nt, Artificial Sequence
  Description of Artificial Sequence: Synthetic oligonucleotide
cagccgaacgaugcucagg

SEQ ID NO: 253137 - RNA, 19 nt, Artificial Sequence
  Description of Artificial Sequence: Synthetic oligonucleotide
ggcggugacgccguagucc

SEQ ID NO: 253138 - RNA, 19 nt, Artificial Sequence
  Description of Artificial Sequence: Synthetic oligonucleotide
aucgaggcacucggggcuc

SEQ ID NO: 253139 - RNA, 19 nt, Artificial Sequence
  Description of Artificial Sequence: Synthetic oligonucleotide
acgcacagaaccugcuguu

SEQ ID NO: 253140 - RNA, 19 nt, Artificial Sequence
  Description of Artificial Sequence: Synthetic oligonucleotide
uuggggccgcgccggacug

SEQ ID NO: 253141 - RNA, 19 nt, Artificial Sequence
  Description of Artificial Sequence: Synthetic oligonucleotide
cucggaggaaagcggagaa

SEQ ID NO: 253142 - RNA, 19 nt, Artificial Sequence
  Description of Artificial Sequence: Synthetic oligonucleotide
caccgacuggcucccguag

SEQ ID NO: 253143 - RNA, 19 nt, Artificial Sequence
  Description of Artificial Sequence: Synthetic oligonucleotide
accuuaucacaaagcaaau

SEQ ID NO: 253144 - RNA, 19 nt, Artificial Sequence
  Description of Artificial Sequence: Synthetic oligonucleotide
uacucgcgagcucgcugca

SEQ ID NO: 253145 - RNA, 19 nt, Artificial Sequence
  Description of Artificial Sequence: Synthetic oligonucleotide
cacgugaggucgagaggug

SEQ ID NO: 253146 - RNA, 19 nt, Artificial Sequence
  Description of Artificial Sequence: Synthetic oligonucleotide
caucagugcaccugaggcu

SEQ ID NO: 253147 - RNA, 19 nt, Artificial Sequence
  Description of Artificial Sequence: Synthetic oligonucleotide
agcgcgucuagggccggcg

SEQ ID NO: 253148 - RNA, 19 nt, Artificial Sequence
  Description of Artificial Sequence: Synthetic oligonucleotide
accgaacaggcgcgcguug

SEQ ID NO: 253149 - RNA, 19 nt, Artificial Sequence
  Description of Artificial Sequence: Synthetic oligonucleotide
ccguucucauccugggccg

SEQ ID NO: 253150 - RNA, 19 nt, Artificial Sequence
  Description of Artificial Sequence: Synthetic oligonucleotide
uccacgccccgcccugagc

SEQ ID NO: 253151 - RNA, 19 nt, Artificial Sequence
  Description of Artificial Sequence: Synthetic oligonucleotide
ccugcggacuggaacgaag

SEQ ID NO: 253152 - RNA, 19 nt, Artificial Sequence
  Description of Artificial Sequence: Synthetic oligonucleotide
cuagcagaucgaggcacuc

SEQ ID NO: 253153 - RNA, 19 nt, Artificial Sequence
  Description of Artificial Sequence: Synthetic oligonucleotide
ggcgagugaggguugggga

SEQ ID NO: 253154 - RNA, 19 nt, Artificial Sequence
  Description of Artificial Sequence: Synthetic oligonucleotide
cagaccgaacaggcgcgcg

SEQ ID NO: 253155 - RNA, 19 nt, Artificial Sequence
  Description of Artificial Sequence: Synthetic oligonucleotide
agucgcucccagagguggg

SEQ ID NO: 253156 - RNA, 19 nt, Artificial Sequence
  Description of Artificial Sequence: Synthetic oligonucleotide
ggccgcgccggacugguag

SEQ ID NO: 253157 - RNA, 19 nt, Artificial Sequence
  Description of Artificial Sequence: Synthetic oligonucleotide
ccagacugugggcaugcgc

SEQ ID NO: 253158 - RNA, 19 nt, Artificial Sequence
  Description of Artificial Sequence: Synthetic oligonucleotide
uuguacucgcgagcucgcu

SEQ ID NO: 253159 - RNA, 19 nt, Artificial Sequence
  Description of Artificial Sequence: Synthetic oligonucleotide
cccucauaguuacagaucu

SEQ ID NO: 253160 - RNA, 19 nt, Artificial Sequence
  Description of Artificial Sequence: Synthetic oligonucleotide
caugggccccacuaugcaa

SEQ ID NO: 253161 - RNA, 19 nt, Artificial Sequence
  Description of Artificial Sequence: Synthetic oligonucleotide
aucuugugauacggcggug

SEQ ID NO: 253162 - RNA, 19 nt, Artificial Sequence
  Description of Artificial Sequence: Synthetic oligonucleotide
uccccguucucugcaugga

SEQ ID NO: 253163 - RNA, 19 nt, Artificial Sequence
  Description of Artificial Sequence: Synthetic oligonucleotide
ucacucccucguguauacc

SEQ ID NO: 253164 - RNA, 19 nt, Artificial Sequence
  Description of Artificial Sequence: Synthetic oligonucleotide
gugauacggcgguguccgg

SEQ ID NO: 253165 - RNA, 19 nt, Artificial Sequence
  Description of Artificial Sequence: Synthetic oligonucleotide
gccagaccgaacaggcgcg

SEQ ID NO: 253166 - RNA, 19 nt, Artificial Sequence
  Description of Artificial Sequence: Synthetic oligonucleotide
guaaggcccugcggacugg

SEQ ID NO: 253167 - RNA, 19 nt, Artificial Sequence
  Description of Artificial Sequence: Synthetic oligonucleotide
gcugcgccagaccgaacag

SEQ ID NO: 253168 - RNA, 19 nt, Artificial Sequence
  Description of Artificial Sequence: Synthetic oligonucleotide
auccacgccccgcccugag

SEQ ID NO: 253169 - RNA, 19 nt, Artificial Sequence
  Description of Artificial Sequence: Synthetic oligonucleotide
ccacgccccgcccugagcc

SEQ ID NO: 253170 - RNA, 19 nt, Artificial Sequence
  Description of Artificial Sequence: Synthetic oligonucleotide
agagucgcucccagaggug

SEQ ID NO: 253171 - RNA, 19 nt, Artificial Sequence
  Description of Artificial Sequence: Synthetic oligonucleotide
gcggugacgccguagucca

SEQ ID NO: 253172 - RNA, 19 nt, Artificial Sequence
  Description of Artificial Sequence: Synthetic oligonucleotide
cccaugugggauccgcccc

SEQ ID NO: 253173 - RNA, 19 nt, Artificial Sequence
  Description of Artificial Sequence: Synthetic oligonucleotide
ccgcucagccucuguaagg

SEQ ID NO: 253174 - RNA, 19 nt, Artificial Sequence
  Description of Artificial Sequence: Synthetic oligonucleotide
agccccagucgcucugcca

SEQ ID NO: 253175 - RNA, 19 nt, Artificial Sequence
  Description of Artificial Sequence: Synthetic oligonucleotide
ucacguuagcauggagcuu

SEQ ID NO: 253176 - RNA, 19 nt, Artificial Sequence
  Description of Artificial Sequence: Synthetic oligonucleotide
caacgcucgggcgcugcgc

SEQ ID NO: 253177 - RNA, 19 nt, Artificial Sequence
  Description of Artificial Sequence: Synthetic oligonucleotide
ggcgcgcucggaucuucgg

SEQ ID NO: 253178 - RNA, 19 nt, Artificial Sequence
  Description of Artificial Sequence: Synthetic oligonucleotide
ggaggcgagugaggguugg

SEQ ID NO: 253179 - RNA, 19 nt, Artificial Sequence
  Description of Artificial Sequence: Synthetic oligonucleotide
cgcgcucggaucuucggcc

SEQ ID NO: 253180 - RNA, 19 nt, Artificial Sequence
  Description of Artificial Sequence: Synthetic oligonucleotide
ugccacccauucucgucau

SEQ ID NO: 253181 - RNA, 19 nt, Artificial Sequence
  Description of Artificial Sequence: Synthetic oligonucleotide
guauacccauguccuucaa

SEQ ID NO: 253182 - RNA, 19 nt, Artificial Sequence
  Description of Artificial Sequence: Synthetic oligonucleotide
acucgcgagcucgcugcag

SEQ ID NO: 253183 - RNA, 19 nt, Artificial Sequence
  Description of Artificial Sequence: Synthetic oligonucleotide
acuacgcaggaggcugcca

SEQ ID NO: 253184 - RNA, 19 nt, Artificial Sequence
  Description of Artificial Sequence: Synthetic oligonucleotide
gcaacgcucgggcgcugcg

SEQ ID NO: 253185 - RNA, 19 nt, Artificial Sequence
  Description of Artificial Sequence: Synthetic oligonucleotide
ccggaaguuucuuugggua

SEQ ID NO: 253186 - RNA, 19 nt, Artificial Sequence
  Description of Artificial Sequence: Synthetic oligonucleotide
cccacgcuugcguuucagc

SEQ ID NO: 253187 - RNA, 19 nt, Artificial Sequence
  Description of Artificial Sequence: Synthetic oligonucleotide
gcgccggacugguaggggc

SEQ ID NO: 253188 - RNA, 19 nt, Artificial Sequence
  Description of Artificial Sequence: Synthetic oligonucleotide
ggcgguguccggaacacaa

SEQ ID NO: 253189 - RNA, 19 nt, Artificial Sequence
  Description of Artificial Sequence: Synthetic oligonucleotide
gguaauaggugaacuguuu

SEQ ID NO: 253190 - RNA, 19 nt, Artificial Sequence
  Description of Artificial Sequence: Synthetic oligonucleotide
cgaacgaugcucaggucca

SEQ ID NO: 253191 - RNA, 19 nt, Artificial Sequence
  Description of Artificial Sequence: Synthetic oligonucleotide
guaggucaaggaggggaaa

SEQ ID NO: 253192 - RNA, 19 nt, Artificial Sequence
  Description of Artificial Sequence: Synthetic oligonucleotide
ucgaggcacucggggcucc

SEQ ID NO: 253193 - RNA, 19 nt, Artificial Sequence
  Description of Artificial Sequence: Synthetic oligonucleotide
gucggcggugacgccguag

SEQ ID NO: 253194 - RNA, 19 nt, Artificial Sequence
  Description of Artificial Sequence: Synthetic oligonucleotide
ggcaugcacugccaggugu

SEQ ID NO: 253195 - RNA, 19 nt, Artificial Sequence
  Description of Artificial Sequence: Synthetic oligonucleotide
ccagugauuacugcuaggu

SEQ ID NO: 253196 - RNA, 19 nt, Artificial Sequence
  Description of Artificial Sequence: Synthetic oligonucleotide
uaucccucucaggcccuuc

SEQ ID NO: 253197 - RNA, 19 nt, Artificial Sequence
  Description of Artificial Sequence: Synthetic oligonucleotide
caguggcgugucuccguuc

SEQ ID NO: 253198 - RNA, 19 nt, Artificial Sequence
  Description of Artificial Sequence: Synthetic oligonucleotide
caccuuggugcugcacgug

SEQ ID NO: 253199 - RNA, 19 nt, Artificial Sequence
  Description of Artificial Sequence: Synthetic oligonucleotide
ccggcauccacgccccgcc

SEQ ID NO: 253200 - RNA, 19 nt, Artificial Sequence
  Description of Artificial Sequence: Synthetic oligonucleotide
cagaugacaugggcuaucu

SEQ ID NO: 253201 - RNA, 19 nt, Artificial Sequence
  Description of Artificial Sequence: Synthetic oligonucleotide
cugcauccccgagugacaa

SEQ ID NO: 253202 - RNA, 19 nt, Artificial Sequence
  Description of Artificial Sequence: Synthetic oligonucleotide
cagguguacuggauauagu

SEQ ID NO: 253203 - RNA, 19 nt, Artificial Sequence
  Description of Artificial Sequence: Synthetic oligonucleotide
cucugucaacuagcagauc

SEQ ID NO: 253204 - RNA, 19 nt, Artificial Sequence
  Description of Artificial Sequence: Synthetic oligonucleotide
cgcgcguuguacucgcgag

SEQ ID NO: 253205 - RNA, 19 nt, Artificial Sequence
  Description of Artificial Sequence: Synthetic oligonucleotide
ccacuaugcaacagcaccu

SEQ ID NO: 253206 - RNA, 19 nt, Artificial Sequence
  Description of Artificial Sequence: Synthetic oligonucleotide
ccacccaugugggauccgc

SEQ ID NO: 253207 - RNA, 19 nt, Artificial Sequence
  Description of Artificial Sequence: Synthetic oligonucleotide
uggggccgcgccggacugg

SEQ ID NO: 253208 - RNA, 19 nt, Artificial Sequence
  Description of Artificial Sequence: Synthetic oligonucleotide
gccccacuaugcaacagca

SEQ ID NO: 253209 - RNA, 19 nt, Artificial Sequence
  Description of Artificial Sequence: Synthetic oligonucleotide
gccgcgccggacugguagg

SEQ ID NO: 253210 - RNA, 19 nt, Artificial Sequence
  Description of Artificial Sequence: Synthetic oligonucleotide
cugugggcaugcgcacgag

SEQ ID NO: 253211 - RNA, 19 nt, Artificial Sequence
  Description of Artificial Sequence: Synthetic oligonucleotide
cauuggggccgcgccggac

SEQ ID NO: 253212 - RNA, 19 nt, Artificial Sequence
  Description of Artificial Sequence: Synthetic oligonucleotide
ccgaaccucaaugucaucu

SEQ ID NO: 253213 - RNA, 19 nt, Artificial Sequence
  Description of Artificial Sequence: Synthetic oligonucleotide
gccuuugaaguuucugaau

SEQ ID NO: 253214 - RNA, 19 nt, Artificial Sequence
  Description of Artificial Sequence: Synthetic oligonucleotide
gaacaccgucacaggucuc

SEQ ID NO: 253215 - RNA, 19 nt, Artificial Sequence
  Description of Artificial Sequence: Synthetic oligonucleotide
ccacgcuugcguuucagcu

SEQ ID NO: 253216 - RNA, 19 nt, Artificial Sequence
  Description of Artificial Sequence: Synthetic oligonucleotide
gugcaauauuuggggcaca

SEQ ID NO: 253217 - RNA, 19 nt, Artificial Sequence
  Description of Artificial Sequence: Synthetic oligonucleotide
cuagggccggcggcucgcc

SEQ ID NO: 253218 - RNA, 19 nt, Artificial Sequence
  Description of Artificial Sequence: Synthetic oligonucleotide
gggccgucagcagguggcg

SEQ ID NO: 253219 - RNA, 19 nt, Artificial Sequence
  Description of Artificial Sequence: Synthetic oligonucleotide
cguucacguuagcauggag

SEQ ID NO: 253220 - RNA, 19 nt, Artificial Sequence
  Description of Artificial Sequence: Synthetic oligonucleotide
ccucugucaacuagcagau

SEQ ID NO: 253221 - RNA, 19 nt, Artificial Sequence
  Description of Artificial Sequence: Synthetic oligonucleotide
gcgcgucuagggccggcgg

SEQ ID NO: 253222 - RNA, 19 nt, Artificial Sequence
  Description of Artificial Sequence: Synthetic oligonucleotide
ccaccacgcacagaaccug

SEQ ID NO: 253223 - RNA, 19 nt, Artificial Sequence
  Description of Artificial Sequence: Synthetic oligonucleotide
gcaacaggccuagggcuuc

SEQ ID NO: 253224 - RNA, 19 nt, Artificial Sequence
  Description of Artificial Sequence: Synthetic oligonucleotide
gugaggucgagagguguau

SEQ ID NO: 253225 - RNA, 19 nt, Artificial Sequence
  Description of Artificial Sequence: Synthetic oligonucleotide
agugaggguuggggaucca

SEQ ID NO: 253226 - RNA, 19 nt, Artificial Sequence
  Description of Artificial Sequence: Synthetic oligonucleotide
cgcgcgucggcggugacgc

SEQ ID NO: 253227 - RNA, 19 nt, Artificial Sequence
  Description of Artificial Sequence: Synthetic oligonucleotide
ucccgccagcagagcgcgc

SEQ ID NO: 253228 - RNA, 19 nt, Artificial Sequence
  Description of Artificial Sequence: Synthetic oligonucleotide
gccguaguccagcaacgcu

SEQ ID NO: 253229 - RNA, 19 nt, Artificial Sequence
  Description of Artificial Sequence: Synthetic oligonucleotide
cugcgcugcgccagaccga

SEQ ID NO: 253230 - RNA, 19 nt, Artificial Sequence
  Description of Artificial Sequence: Synthetic oligonucleotide
cccgagugacaacccuggc

SEQ ID NO: 253231 - RNA, 19 nt, Artificial Sequence
  Description of Artificial Sequence: Synthetic oligonucleotide
gcacagaaccugcuguuuu

SEQ ID NO: 253232 - RNA, 19 nt, Artificial Sequence
  Description of Artificial Sequence: Synthetic oligonucleotide
ggguaauaggugaacuguu

SEQ ID NO: 253233 - RNA, 19 nt, Artificial Sequence
  Description of Artificial Sequence: Synthetic oligonucleotide
ccgagucuccaugucgauc

SEQ ID NO: 253234 - RNA, 19 nt, Artificial Sequence
  Description of Artificial Sequence: Synthetic oligonucleotide
gggucugcacccaccugca

SEQ ID NO: 253235 - RNA, 19 nt, Artificial Sequence
  Description of Artificial Sequence: Synthetic oligonucleotide
cgcugcgccagaccgaaca

SEQ ID NO: 253236 - RNA, 19 nt, Artificial Sequence
  Description of Artificial Sequence: Synthetic oligonucleotide
gcgcgcguuguacucgcga

SEQ ID NO: 253237 - RNA, 19 nt, Artificial Sequence
  Description of Artificial Sequence: Synthetic oligonucleotide
gaccgaacaggcgcgcguu

SEQ ID NO: 253238 - RNA, 19 nt, Artificial Sequence
  Description of Artificial Sequence: Synthetic oligonucleotide
ccagaccgaacaggcgcgc

SEQ ID NO: 253239 - RNA, 19 nt, Artificial Sequence
  Description of Artificial Sequence: Synthetic oligonucleotide
cuuccaccagaggguaaua

SEQ ID NO: 253240 - RNA, 19 nt, Artificial Sequence
  Description of Artificial Sequence: Synthetic oligonucleotide
cgcgucggcggugacgccg

SEQ ID NO: 253241 - RNA, 19 nt, Artificial Sequence
  Description of Artificial Sequence: Synthetic oligonucleotide
gggcgcgcucggaucuucg

SEQ ID NO: 253242 - RNA, 19 nt, Artificial Sequence
  Description of Artificial Sequence: Synthetic oligonucleotide
cucccucguguauacccau

SEQ ID NO: 253243 - RNA, 19 nt, Artificial Sequence
  Description of Artificial Sequence: Synthetic oligonucleotide
caacaggccuagggcuuca

SEQ ID NO: 253244 - RNA, 19 nt, Artificial Sequence
  Description of Artificial Sequence: Synthetic oligonucleotide
cgcgucuagggccggcggc

SEQ ID NO: 253245 - RNA, 19 nt, Artificial Sequence
  Description of Artificial Sequence: Synthetic oligonucleotide
ccccaagguacugggcaug

SEQ ID NO: 253246 - RNA, 19 nt, Artificial Sequence
  Description of Artificial Sequence: Synthetic oligonucleotide
caucgcuagcucggaggaa

SEQ ID NO: 253247 - RNA, 19 nt, Artificial Sequence
  Description of Artificial Sequence: Synthetic oligonucleotide
cccggaaguuucuuugggu

SEQ ID NO: 253248 - RNA, 19 nt, Artificial Sequence
  Description of Artificial Sequence: Synthetic oligonucleotide
gcguuguacucgcgagcuc

SEQ ID NO: 253249 - RNA, 19 nt, Artificial Sequence
  Description of Artificial Sequence: Synthetic oligonucleotide
cgcacgaggugggucacug

SEQ ID NO: 253250 - RNA, 19 nt, Artificial Sequence
  Description of Artificial Sequence: Synthetic oligonucleotide
gaacgaugcucagguccau

SEQ ID NO: 253251 - RNA, 19 nt, Artificial Sequence
  Description of Artificial Sequence: Synthetic oligonucleotide
cggagaagcgcagccgaac

SEQ ID NO: 253252 - RNA, 19 nt, Artificial Sequence
  Description of Artificial Sequence: Synthetic oligonucleotide
ggcuccgggcaugcacugc

SEQ ID NO: 253253 - RNA, 19 nt, Artificial Sequence
  Description of Artificial Sequence: Synthetic oligonucleotide
gcuucacucccucguguau

SEQ ID NO: 253254 - RNA, 19 nt, Artificial Sequence
  Description of Artificial Sequence: Synthetic oligonucleotide
gcgcagccgaacgaugcuc

SEQ ID NO: 253255 - RNA, 19 nt, Artificial Sequence
  Description of Artificial Sequence: Synthetic oligonucleotide
gcguucacguuagcaugga

SEQ ID NO: 253256 - RNA, 19 nt, Artificial Sequence
  Description of Artificial Sequence: Synthetic oligonucleotide
cucgggcgcugcgcugcgc

SEQ ID NO: 253257 - RNA, 19 nt, Artificial Sequence
  Description of Artificial Sequence: Synthetic oligonucleotide
gcgcgcgucggcggugacg

SEQ ID NO: 253258 - RNA, 19 nt, Artificial Sequence
  Description of Artificial Sequence: Synthetic oligonucleotide
cccaagguacugggcauga

SEQ ID NO: 253259 - RNA, 19 nt, Artificial Sequence
  Description of Artificial Sequence: Synthetic oligonucleotide
cgcuagcucggaggaaagc

SEQ ID NO: 253260 - RNA, 19 nt, Artificial Sequence
  Description of Artificial Sequence: Synthetic oligonucleotide
cccggcauccacgccccgc

SEQ ID NO: 253261 - RNA, 19 nt, Artificial Sequence
  Description of Artificial Sequence: Synthetic oligonucleotide
cgugaggucgagaggugua

SEQ ID NO: 253262 - RNA, 19 nt, Artificial Sequence
  Description of Artificial Sequence: Synthetic oligonucleotide
cgccguaguccagcaacgc

SEQ ID NO: 253263 - RNA, 19 nt, Artificial Sequence
  Description of Artificial Sequence: Synthetic oligonucleotide
gagcgcgcgcgucggcggu

SEQ ID NO: 253264 - RNA, 19 nt, Artificial Sequence
  Description of Artificial Sequence: Synthetic oligonucleotide
gccacccauucucgucauc

SEQ ID NO: 253265 - RNA, 19 nt, Artificial Sequence
  Description of Artificial Sequence: Synthetic oligonucleotide
ccgcgccggacugguaggg

SEQ ID NO: 253266 - RNA, 19 nt, Artificial Sequence
  Description of Artificial Sequence: Synthetic oligonucleotide
ccccgaaggguugggagaa

SEQ ID NO: 253267 - RNA, 19 nt, Artificial Sequence
  Description of Artificial Sequence: Synthetic oligonucleotide
gcaguggcgugucuccguu

SEQ ID NO: 253268 - RNA, 19 nt, Artificial Sequence
  Description of Artificial Sequence: Synthetic oligonucleotide
ccccacgcuugcguuucag

SEQ ID NO: 253269 - RNA, 19 nt, Artificial Sequence
  Description of Artificial Sequence: Synthetic oligonucleotide
gcagcgcgucuagggccgg

SEQ ID NO: 253270 - RNA, 19 nt, Artificial Sequence
  Description of Artificial Sequence: Synthetic oligonucleotide
cccgaaggguugggagaag

SEQ ID NO: 253271 - RNA, 19 nt, Artificial Sequence
  Description of Artificial Sequence: Synthetic oligonucleotide
cagcaacgcucgggcgcug

SEQ ID NO: 253272 - RNA, 19 nt, Artificial Sequence
  Description of Artificial Sequence: Synthetic oligonucleotide
caugggcuaucugcucaau

SEQ ID NO: 253273 - RNA, 19 nt, Artificial Sequence
  Description of Artificial Sequence: Synthetic oligonucleotide
cgcgagcucgcugcagcgc

SEQ ID NO: 253274 - RNA, 19 nt, Artificial Sequence
  Description of Artificial Sequence: Synthetic oligonucleotide
ccaccgacuggcucccgua

SEQ ID NO: 253275 - RNA, 19 nt, Artificial Sequence
  Description of Artificial Sequence: Synthetic oligonucleotide
gcgucuagggccggcggcu

SEQ ID NO: 253276 - RNA, 19 nt, Artificial Sequence
  Description of Artificial Sequence: Synthetic oligonucleotide
caccucaaucuuggcuggu

SEQ ID NO: 253277 - RNA, 19 nt, Artificial Sequence
  Description of Artificial Sequence: Synthetic oligonucleotide
cgcguuguacucgcgagcu

SEQ ID NO: 253278 - RNA, 19 nt, Artificial Sequence
  Description of Artificial Sequence: Synthetic oligonucleotide
gcccugcggacuggaacga

SEQ ID NO: 253279 - RNA, 19 nt, Artificial Sequence
  Description of Artificial Sequence: Synthetic oligonucleotide
cgcgccggacugguagggg

SEQ ID NO: 253280 - RNA, 19 nt, Artificial Sequence
  Description of Artificial Sequence: Synthetic oligonucleotide
gcacgaggugggucacugu

SEQ ID NO: 253281 - RNA, 19 nt, Artificial Sequence
  Description of Artificial Sequence: Synthetic oligonucleotide
ggggcgcgcucggaucuuc

SEQ ID NO: 253282 - RNA, 19 nt, Artificial Sequence
  Description of Artificial Sequence: Synthetic oligonucleotide
gccgagucuccaugucgau

SEQ ID NO: 253283 - RNA, 19 nt, Artificial Sequence
  Description of Artificial Sequence: Synthetic oligonucleotide
cguguauacccauguccuu

SEQ ID NO: 253284 - RNA, 19 nt, Artificial Sequence
  Description of Artificial Sequence: Synthetic oligonucleotide
cgggucucgggaccuucca

SEQ ID NO: 253285 - RNA, 19 nt, Artificial Sequence
  Description of Artificial Sequence: Synthetic oligonucleotide
cggugacgccguaguccag

SEQ ID NO: 253286 - RNA, 19 nt, Artificial Sequence
  Description of Artificial Sequence: Synthetic oligonucleotide
ccuuuaggaggaggcgagu

SEQ ID NO: 253287 - RNA, 19 nt, Artificial Sequence
  Description of Artificial Sequence: Synthetic oligonucleotide
cgacuggcucccguaggca

SEQ ID NO: 253288 - RNA, 19 nt, Artificial Sequence
  Description of Artificial Sequence: Synthetic oligonucleotide
gcgcgucggcggugacgcc

SEQ ID NO: 253289 - RNA, 19 nt, Artificial Sequence
  Description of Artificial Sequence: Synthetic oligonucleotide
gcgguguccggaacacaau

SEQ ID NO: 253290 - RNA, 19 nt, Artificial Sequence
  Description of Artificial Sequence: Synthetic oligonucleotide
cggcggugacgccguaguc

SEQ ID NO: 253291 - RNA, 19 nt, Artificial Sequence
  Description of Artificial Sequence: Synthetic oligonucleotide
cgucuagggccggcggcuc

SEQ ID NO: 253292 - RNA, 19 nt, Artificial Sequence
  Description of Artificial Sequence: Synthetic oligonucleotide
gcaugcgcacgaggugggu

SEQ ID NO: 253293 - RNA, 19 nt, Artificial Sequence
  Description of Artificial Sequence: Synthetic oligonucleotide
gcgucggcggugacgccgu

SEQ ID NO: 253294 - RNA, 19 nt, Artificial Sequence
  Description of Artificial Sequence: Synthetic oligonucleotide
ccgcccugagccggccauc

SEQ ID NO: 253295 - RNA, 19 nt, Artificial Sequence
  Description of Artificial Sequence: Synthetic oligonucleotide
cccugcggacuggaacgaa

SEQ ID NO: 253296 - RNA, 19 nt, Artificial Sequence
  Description of Artificial Sequence: Synthetic oligonucleotide
cccgcccugagccggccau

SEQ ID NO: 253297 - RNA, 19 nt, Artificial Sequence
  Description of Artificial Sequence: Synthetic oligonucleotide
ccccgccacccugguagca

SEQ ID NO: 253298 - RNA, 19 nt, Artificial Sequence
  Description of Artificial Sequence: Synthetic oligonucleotide
ccguaggcacugucuucuu

SEQ ID NO: 253299 - RNA, 19 nt, Artificial Sequence
  Description of Artificial Sequence: Synthetic oligonucleotide
ccccgcccugagccggcca

SEQ ID NO: 253300 - RNA, 19 nt, Artificial Sequence
  Description of Artificial Sequence: Synthetic oligonucleotide
gcgcacgaggugggucacu

SEQ ID NO: 253301 - RNA, 19 nt, Artificial Sequence
  Description of Artificial Sequence: Synthetic oligonucleotide
cgcgcgcgucggcggugac

SEQ ID NO: 253302 - RNA, 19 nt, Artificial Sequence
  Description of Artificial Sequence: Synthetic oligonucleotide
auuggacuaagauagaucc

SEQ ID NO: 253303 - RNA, 19 nt, Artificial Sequence
  Description of Artificial Sequence: Synthetic oligonucleotide
auuacuaguuuccauaacc

SEQ ID NO: 253304 - RNA, 19 nt, Artificial Sequence
  Description of Artificial Sequence: Synthetic oligonucleotide
aacuuaugcgacuugagcg

SEQ ID NO: 253305 - RNA, 19 nt, Artificial Sequence
  Description of Artificial Sequence: Synthetic oligonucleotide
uaaaauaccgauaagcccu

SEQ ID NO: 253306 - RNA, 19 nt, Artificial Sequence
  Description of Artificial Sequence: Synthetic oligonucleotide
cugauuaccaauuacucgg

SEQ ID NO: 253307 - RNA, 19 nt, Artificial Sequence
  Description of Artificial Sequence: Synthetic oligonucleotide
ugguauugugcucacaucg

SEQ ID NO: 253308 - RNA, 19 nt, Artificial Sequence
  Description of Artificial Sequence: Synthetic oligonucleotide
ucguguacagacaugaucc

SEQ ID NO: 253309 - RNA, 19 nt, Artificial Sequence
  Description of Artificial Sequence: Synthetic oligonucleotide
caaguuacgacucuguagg

SEQ ID NO: 253310 - RNA, 19 nt, Artificial Sequence
  Description of Artificial Sequence: Synthetic oligonucleotide
uuauggauaaacaacaauu

SEQ ID NO: 253311 - RNA, 19 nt, Artificial Sequence
  Description of Artificial Sequence: Synthetic oligonucleotide
aaggcuaugcauuucaagu

SEQ ID NO: 253312 - RNA, 19 nt, Artificial Sequence
  Description of Artificial Sequence: Synthetic oligonucleotide
uccauaacccuacaauugg

SEQ ID NO: 253313 - RNA, 19 nt, Artificial Sequence
  Description of Artificial Sequence: Synthetic oligonucleotide
uauggcucgaaaaugacaa

SEQ ID NO: 253314 - RNA, 19 nt, Artificial Sequence
  Description of Artificial Sequence: Synthetic oligonucleotide
aguuaugcuguccagagcu

SEQ ID NO: 253315 - RNA, 19 nt, Artificial Sequence
  Description of Artificial Sequence: Synthetic oligonucleotide
uggacuaagauagaucccg

SEQ ID NO: 253316 - RNA, 19 nt, Artificial Sequence
  Description of Artificial Sequence: Synthetic oligonucleotide
ucaaguuacgacucuguag

SEQ ID NO: 253317 - RNA, 19 nt, Artificial Sequence
  Description of Artificial Sequence: Synthetic oligonucleotide
uaugcaugaacuucaguug

SEQ ID NO: 253318 - RNA, 19 nt, Artificial Sequence
  Description of Artificial Sequence: Synthetic oligonucleotide
acuaagauagaucccgcuc

SEQ ID NO: 253319 - RNA, 19 nt, Artificial Sequence
  Description of Artificial Sequence: Synthetic oligonucleotide
uauggauaaacaacaauua

SEQ ID NO: 253320 - RNA, 19 nt, Artificial Sequence
  Description of Artificial Sequence: Synthetic oligonucleotide
uguacagacaugauccgug

SEQ ID NO: 253321 - RNA, 19 nt, Artificial Sequence
  Description of Artificial Sequence: Synthetic oligonucleotide
aguaucucuuugugaaugc

SEQ ID NO: 253322 - RNA, 19 nt, Artificial Sequence
  Description of Artificial Sequence: Synthetic oligonucleotide
uaacuuaugcgacuugagc

SEQ ID NO: 253323 - RNA, 19 nt, Artificial Sequence
  Description of Artificial Sequence: Synthetic oligonucleotide
uguucggauuucaauuugg

SEQ ID NO: 253324 - RNA, 19 nt, Artificial Sequence
  Description of Artificial Sequence: Synthetic oligonucleotide
uuuauuguguaugcaaccc

SEQ ID NO: 253325 - RNA, 19 nt, Artificial Sequence
  Description of Artificial Sequence: Synthetic oligonucleotide
ucggauuucaauuuggauu

SEQ ID NO: 253326 - RNA, 19 nt, Artificial Sequence
  Description of Artificial Sequence: Synthetic oligonucleotide
uuuggggccgccaacguag

SEQ ID NO: 253327 - RNA, 19 nt, Artificial Sequence
  Description of Artificial Sequence: Synthetic oligonucleotide
uucaauuuggauuuacuuu

SEQ ID NO: 253328 - RNA, 19 nt, Artificial Sequence
  Description of Artificial Sequence: Synthetic oligonucleotide
gaucuuauggauaaacaac

SEQ ID NO: 253329 - RNA, 19 nt, Artificial Sequence
  Description of Artificial Sequence: Synthetic oligonucleotide
uauugugcucacaucgcgg

SEQ ID NO: 253330 - RNA, 19 nt, Artificial Sequence
  Description of Artificial Sequence: Synthetic oligonucleotide
aucguguacagacaugauc

SEQ ID NO: 253331 - RNA, 19 nt, Artificial Sequence
  Description of Artificial Sequence: Synthetic oligonucleotide
aagaaucguguacagacau

SEQ ID NO: 253332 - RNA, 19 nt, Artificial Sequence
  Description of Artificial Sequence: Synthetic oligonucleotide
cauuacucgaucauaguuc

SEQ ID NO: 253333 - RNA, 19 nt, Artificial Sequence
  Description of Artificial Sequence: Synthetic oligonucleotide
aagaccauuccucaggaua

SEQ ID NO: 253334 - RNA, 19 nt, Artificial Sequence
  Description of Artificial Sequence: Synthetic oligonucleotide
guaauuuggaucuuaugga

SEQ ID NO: 253335 - RNA, 19 nt, Artificial Sequence
  Description of Artificial Sequence: Synthetic oligonucleotide
aauaccgauaagcccugag

SEQ ID NO: 253336 - RNA, 19 nt, Artificial Sequence
  Description of Artificial Sequence: Synthetic oligonucleotide
gagacgugcacugaguagg

SEQ ID NO: 253337 - RNA, 19 nt, Artificial Sequence
  Description of Artificial Sequence: Synthetic oligonucleotide
cuugagaugacccauugca

SEQ ID NO: 253338 - RNA, 19 nt, Artificial Sequence
  Description of Artificial Sequence: Synthetic oligonucleotide
uaugcaacccaaacuuaag

SEQ ID NO: 253339 - RNA, 19 nt, Artificial Sequence
  Description of Artificial Sequence: Synthetic oligonucleotide
ugagaugacccauugcaga

SEQ ID NO: 253340 - RNA, 19 nt, Artificial Sequence
  Description of Artificial Sequence: Synthetic oligonucleotide
cacgaguagaucuaccacc

SEQ ID NO: 253341 - RNA, 19 nt, Artificial Sequence
  Description of Artificial Sequence: Synthetic oligonucleotide
aaccaaacgauaugcuuga

SEQ ID NO: 253342 - RNA, 19 nt, Artificial Sequence
  Description of Artificial Sequence: Synthetic oligonucleotide
uggaucuuauggauaaaca

SEQ ID NO: 253343 - RNA, 19 nt, Artificial Sequence
  Description of Artificial Sequence: Synthetic oligonucleotide
uucaauacggggauccgcu

SEQ ID NO: 253344 - RNA, 19 nt, Artificial Sequence
  Description of Artificial Sequence: Synthetic oligonucleotide
ucauuacucgaucauaguu

SEQ ID NO: 253345 - RNA, 19 nt, Artificial Sequence
  Description of Artificial Sequence: Synthetic oligonucleotide
gaucacgacgucgauaucc

SEQ ID NO: 253346 - RNA, 19 nt, Artificial Sequence
  Description of Artificial Sequence: Synthetic oligonucleotide
cuaguuuccauaacccuac

SEQ ID NO: 253347 - RNA, 19 nt, Artificial Sequence
  Description of Artificial Sequence: Synthetic oligonucleotide
augacaacuuuccuaggag

SEQ ID NO: 253348 - RNA, 19 nt, Artificial Sequence
  Description of Artificial Sequence: Synthetic oligonucleotide
uuuccauaacccuacaauu

SEQ ID NO: 253349 - RNA, 19 nt, Artificial Sequence
  Description of Artificial Sequence: Synthetic oligonucleotide
uaaguuuaagggcuguuua

SEQ ID NO: 253350 - RNA, 19 nt, Artificial Sequence
  Description of Artificial Sequence: Synthetic oligonucleotide
auggaaaugacaggaauug

SEQ ID NO: 253351 - RNA, 19 nt, Artificial Sequence
  Description of Artificial Sequence: Synthetic oligonucleotide
uauuguguaugcaacccaa

SEQ ID NO: 253352 - RNA, 19 nt, Artificial Sequence
  Description of Artificial Sequence: Synthetic oligonucleotide
uggaucacgacgucgauau

SEQ ID NO: 253353 - RNA, 19 nt, Artificial Sequence
  Description of Artificial Sequence: Synthetic oligonucleotide
ucccugaguaaccaaacga

SEQ ID NO: 253354 - RNA, 19 nt, Artificial Sequence
  Description of Artificial Sequence: Synthetic oligonucleotide
auacaucgcaccguggagc

SEQ ID NO: 253355 - RNA, 19 nt, Artificial Sequence
  Description of Artificial Sequence: Synthetic oligonucleotide
uucacaauaugugaccugu

SEQ ID NO: 253356 - RNA, 19 nt, Artificial Sequence
  Description of Artificial Sequence: Synthetic oligonucleotide
aucuuauggauaaacaaca

SEQ ID NO: 253357 - RNA, 19 nt, Artificial Sequence
  Description of Artificial Sequence: Synthetic oligonucleotide
ugaugucccaauccgaauc

SEQ ID NO: 253358 - RNA, 19 nt, Artificial Sequence
  Description of Artificial Sequence: Synthetic oligonucleotide
gagauuacuggaguaagac

SEQ ID NO: 253359 - RNA, 19 nt, Artificial Sequence
  Description of Artificial Sequence: Synthetic oligonucleotide
guauugugcucacaucgcg

SEQ ID NO: 253360 - RNA, 19 nt, Artificial Sequence
  Description of Artificial Sequence: Synthetic oligonucleotide
aagaguuugugcgauuuga

SEQ ID NO: 253361 - RNA, 19 nt, Artificial Sequence
  Description of Artificial Sequence: Synthetic oligonucleotide
uuucagcccauauaacucu

SEQ ID NO: 253362 - RNA, 19 nt, Artificial Sequence
  Description of Artificial Sequence: Synthetic oligonucleotide
uuucaaguuacgacucugu

SEQ ID NO: 253363 - RNA, 19 nt, Artificial Sequence
  Description of Artificial Sequence: Synthetic oligonucleotide
acuuaugcgacuugagcgu

SEQ ID NO: 253364 - RNA, 19 nt, Artificial Sequence
  Description of Artificial Sequence: Synthetic oligonucleotide
auucaauacggggauccgc

SEQ ID NO: 253365 - RNA, 19 nt, Artificial Sequence
  Description of Artificial Sequence: Synthetic oligonucleotide
ugcgacuuggcgcacacgu

SEQ ID NO: 253366 - RNA, 19 nt, Artificial Sequence
  Description of Artificial Sequence: Synthetic oligonucleotide
uugugcgauuugauggugg

SEQ ID NO: 253367 - RNA, 19 nt, Artificial Sequence
  Description of Artificial Sequence: Synthetic oligonucleotide
guaacgaaggucugcauga

SEQ ID NO: 253368 - RNA, 19 nt, Artificial Sequence
  Description of Artificial Sequence: Synthetic oligonucleotide
uuguagagaucugaaagac

SEQ ID NO: 253369 - RNA, 19 nt, Artificial Sequence
  Description of Artificial Sequence: Synthetic oligonucleotide
guaagcgagagccuccugc

SEQ ID NO: 253370 - RNA, 19 nt, Artificial Sequence
  Description of Artificial Sequence: Synthetic oligonucleotide
uaugcuugacauuggacua

SEQ ID NO: 253371 - RNA, 19 nt, Artificial Sequence
  Description of Artificial Sequence: Synthetic oligonucleotide
gaaucgcucuuuuguagag

SEQ ID NO: 253372 - RNA, 19 nt, Artificial Sequence
  Description of Artificial Sequence: Synthetic oligonucleotide
gaacuugacacauauguau

SEQ ID NO: 253373 - RNA, 19 nt, Artificial Sequence
  Description of Artificial Sequence: Synthetic oligonucleotide
ugaguaacgaaggucugca

SEQ ID NO: 253374 - RNA, 19 nt, Artificial Sequence
  Description of Artificial Sequence: Synthetic oligonucleotide
gacacgaguagaucuacca

SEQ ID NO: 253375 - RNA, 19 nt, Artificial Sequence
  Description of Artificial Sequence: Synthetic oligonucleotide
uacuaguuuccauaacccu

SEQ ID NO: 253376 - RNA, 19 nt, Artificial Sequence
  Description of Artificial Sequence: Synthetic oligonucleotide
gauuaccaauuacucggag

SEQ ID NO: 253377 - RNA, 19 nt, Artificial Sequence
  Description of Artificial Sequence: Synthetic oligonucleotide
auaacccuacaauugguaa

SEQ ID NO: 253378 - RNA, 19 nt, Artificial Sequence
  Description of Artificial Sequence: Synthetic oligonucleotide
uacuugagaugacccauug

SEQ ID NO: 253379 - RNA, 19 nt, Artificial Sequence
  Description of Artificial Sequence: Synthetic oligonucleotide
accaauuacucggaguauc

SEQ ID NO: 253380 - RNA, 19 nt, Artificial Sequence
  Description of Artificial Sequence: Synthetic oligonucleotide
uauuacuaguuuccauaac

SEQ ID NO: 253381 - RNA, 19 nt, Artificial Sequence
  Description of Artificial Sequence: Synthetic oligonucleotide
uuguucggauuucaauuug

SEQ ID NO: 253382 - RNA, 19 nt, Artificial Sequence
  Description of Artificial Sequence: Synthetic oligonucleotide
cuaccacagaaggauaugg

SEQ ID NO: 253383 - RNA, 19 nt, Artificial Sequence
  Description of Artificial Sequence: Synthetic oligonucleotide
uaagcgagagccuccugcc

SEQ ID NO: 253384 - RNA, 19 nt, Artificial Sequence
  Description of Artificial Sequence: Synthetic oligonucleotide
ugagacgugcacugaguag

SEQ ID NO: 253385 - RNA, 19 nt, Artificial Sequence
  Description of Artificial Sequence: Synthetic oligonucleotide
ugauuaccaauuacucgga

SEQ ID NO: 253386 - RNA, 19 nt, Artificial Sequence
  Description of Artificial Sequence: Synthetic oligonucleotide
ugcgcaagguagaaaacaa

SEQ ID NO: 253387 - RNA, 19 nt, Artificial Sequence
  Description of Artificial Sequence: Synthetic oligonucleotide
cauuggacuaagauagauc

SEQ ID NO: 253388 - RNA, 19 nt, Artificial Sequence
  Description of Artificial Sequence: Synthetic oligonucleotide
ucggucucggauuggaaug

SEQ ID NO: 253389 - RNA, 19 nt, Artificial Sequence
  Description of Artificial Sequence: Synthetic oligonucleotide
uuggacuaagauagauccc

SEQ ID NO: 253390 - RNA, 19 nt, Artificial Sequence
  Description of Artificial Sequence: Synthetic oligonucleotide
aucccugaguaaccaaacg

SEQ ID NO: 253391 - RNA, 19 nt, Artificial Sequence
  Description of Artificial Sequence: Synthetic oligonucleotide
uacucgaucauaguucuuc

SEQ ID NO: 253392 - RNA, 19 nt, Artificial Sequence
  Description of Artificial Sequence: Synthetic oligonucleotide
uagcuaucucgucagcagc

SEQ ID NO: 253393 - RNA, 19 nt, Artificial Sequence
  Description of Artificial Sequence: Synthetic oligonucleotide
ucugagauuacuggaguaa

SEQ ID NO: 253394 - RNA, 19 nt, Artificial Sequence
  Description of Artificial Sequence: Synthetic oligonucleotide
aacccuacaauugguaaau

SEQ ID NO: 253395 - RNA, 19 nt, Artificial Sequence
  Description of Artificial Sequence: Synthetic oligonucleotide
uuagcaucucccaccuggc

SEQ ID NO: 253396 - RNA, 19 nt, Artificial Sequence
  Description of Artificial Sequence: Synthetic oligonucleotide
ugugaugcauugcuguuuu

SEQ ID NO: 253397 - RNA, 19 nt, Artificial Sequence
  Description of Artificial Sequence: Synthetic oligonucleotide
uuguggguuuuggagaugc

SEQ ID NO: 253398 - RNA, 19 nt, Artificial Sequence
  Description of Artificial Sequence: Synthetic oligonucleotide
uacucggaguaucucuuug

SEQ ID NO: 253399 - RNA, 19 nt, Artificial Sequence
  Description of Artificial Sequence: Synthetic oligonucleotide
agaccauuccucaggauag

SEQ ID NO: 253400 - RNA, 19 nt, Artificial Sequence
  Description of Artificial Sequence: Synthetic oligonucleotide
uggauuuacuuuugccaca

SEQ ID NO: 253401 - RNA, 19 nt, Artificial Sequence
  Description of Artificial Sequence: Synthetic oligonucleotide
uucauuacucgaucauagu

SEQ ID NO: 253402 - RNA, 19 nt, Artificial Sequence
  Description of Artificial Sequence: Synthetic oligonucleotide
ugugcgauuugauggugga

SEQ ID NO: 253403 - RNA, 19 nt, Artificial Sequence
  Description of Artificial Sequence: Synthetic oligonucleotide
gauaugcuugacauuggac

SEQ ID NO: 253404 - RNA, 19 nt, Artificial Sequence
  Description of Artificial Sequence: Synthetic oligonucleotide
uucaaguuacgacucugua

SEQ ID NO: 253405 - RNA, 19 nt, Artificial Sequence
  Description of Artificial Sequence: Synthetic oligonucleotide
accugcgcaagguagaaaa

SEQ ID NO: 253406 - RNA, 19 nt, Artificial Sequence
  Description of Artificial Sequence: Synthetic oligonucleotide
caaacgauaugcuugacau

SEQ ID NO: 253407 - RNA, 19 nt, Artificial Sequence
  Description of Artificial Sequence: Synthetic oligonucleotide
ucugagacugugaugcauu

SEQ ID NO: 253408 - RNA, 19 nt, Artificial Sequence
  Description of Artificial Sequence: Synthetic oligonucleotide
cauaaggcuaugcauuuca

SEQ ID NO: 253409 - RNA, 19 nt, Artificial Sequence
  Description of Artificial Sequence: Synthetic oligonucleotide
uggcucgaaaaugacaacu

SEQ ID NO: 253410 - RNA, 19 nt, Artificial Sequence
  Description of Artificial Sequence: Synthetic oligonucleotide
gaguaagaccugcuuagca

SEQ ID NO: 253411 - RNA, 19 nt, Artificial Sequence
  Description of Artificial Sequence: Synthetic oligonucleotide
uccguguuugggacaaccc

SEQ ID NO: 253412 - RNA, 19 nt, Artificial Sequence
  Description of Artificial Sequence: Synthetic oligonucleotide
aucgcucuuuuguagagau

SEQ ID NO: 253413 - RNA, 19 nt, Artificial Sequence
  Description of Artificial Sequence: Synthetic oligonucleotide
gacagcgagcgcccaaagg

SEQ ID NO: 253414 - RNA, 19 nt, Artificial Sequence
  Description of Artificial Sequence: Synthetic oligonucleotide
cuacaauugguaaaucuua

SEQ ID NO: 253415 - RNA, 19 nt, Artificial Sequence
  Description of Artificial Sequence: Synthetic oligonucleotide
agcaagagcgagucaauaa

SEQ ID NO: 253416 - RNA, 19 nt, Artificial Sequence
  Description of Artificial Sequence: Synthetic oligonucleotide
aucuuguucggauuucaau

SEQ ID NO: 253417 - RNA, 19 nt, Artificial Sequence
  Description of Artificial Sequence: Synthetic oligonucleotide
auaacuuaugcgacuugag

SEQ ID NO: 253418 - RNA, 19 nt, Artificial Sequence
  Description of Artificial Sequence: Synthetic oligonucleotide
uugcaccauuuguaggagg

SEQ ID NO: 253419 - RNA, 19 nt, Artificial Sequence
  Description of Artificial Sequence: Synthetic oligonucleotide
ucucggauuggaaugcauu

SEQ ID NO: 253420 - RNA, 19 nt, Artificial Sequence
  Description of Artificial Sequence: Synthetic oligonucleotide
auggcucgaaaaugacaac

SEQ ID NO: 253421 - RNA, 19 nt, Artificial Sequence
  Description of Artificial Sequence: Synthetic oligonucleotide
ugucccaauccgaaucgcu

SEQ ID NO: 253422 - RNA, 19 nt, Artificial Sequence
  Description of Artificial Sequence: Synthetic oligonucleotide
cauacaucgcaccguggag

SEQ ID NO: 253423 - RNA, 19 nt, Artificial Sequence
  Description of Artificial Sequence: Synthetic oligonucleotide
ucccaauccgaaucgcucu

SEQ ID NO: 253424 - RNA, 19 nt, Artificial Sequence
  Description of Artificial Sequence: Synthetic oligonucleotide
guuuccauaacccuacaau

SEQ ID NO: 253425 - RNA, 19 nt, Artificial Sequence
  Description of Artificial Sequence: Synthetic oligonucleotide
uugaaacacguguggcuca

SEQ ID NO: 253426 - RNA, 19 nt, Artificial Sequence
  Description of Artificial Sequence: Synthetic oligonucleotide
caaugugagagccaugaaa

SEQ ID NO: 253427 - RNA, 19 nt, Artificial Sequence
  Description of Artificial Sequence: Synthetic oligonucleotide
uacaucgcaccguggagcu

SEQ ID NO: 253428 - RNA, 19 nt, Artificial Sequence
  Description of Artificial Sequence: Synthetic oligonucleotide
gacucuguaggaauuggga

SEQ ID NO: 253429 - RNA, 19 nt, Artificial Sequence
  Description of Artificial Sequence: Synthetic oligonucleotide
aaguuacgacucuguagga

SEQ ID NO: 253430 - RNA, 19 nt, Artificial Sequence
  Description of Artificial Sequence: Synthetic oligonucleotide
acauauguauugucuggau

SEQ ID NO: 253431 - RNA, 19 nt, Artificial Sequence
  Description of Artificial Sequence: Synthetic oligonucleotide
uguuugggacaacccauau

SEQ ID NO: 253432 - RNA, 19 nt, Artificial Sequence
  Description of Artificial Sequence: Synthetic oligonucleotide
agauagaucccgcucccau

SEQ ID NO: 253433 - RNA, 19 nt, Artificial Sequence
  Description of Artificial Sequence: Synthetic oligonucleotide
gcaagagcgagucaauaac

SEQ ID NO: 253434 - RNA, 19 nt, Artificial Sequence
  Description of Artificial Sequence: Synthetic oligonucleotide
gaguaucugaaaucugcaa

SEQ ID NO: 253435 - RNA, 19 nt, Artificial Sequence
  Description of Artificial Sequence: Synthetic oligonucleotide
cucggaguaucucuuugug

SEQ ID NO: 253436 - RNA, 19 nt, Artificial Sequence
  Description of Artificial Sequence: Synthetic oligonucleotide
uaugcgacuugagcgugag

SEQ ID NO: 253437 - RNA, 19 nt, Artificial Sequence
  Description of Artificial Sequence: Synthetic oligonucleotide
ucaggauagagugccaauu

SEQ ID NO: 253438 - RNA, 19 nt, Artificial Sequence
  Description of Artificial Sequence: Synthetic oligonucleotide
cugaguaacgaaggucugc

SEQ ID NO: 253439 - RNA, 19 nt, Artificial Sequence
  Description of Artificial Sequence: Synthetic oligonucleotide
ucaauacggggauccgcug

SEQ ID NO: 253440 - RNA, 19 nt, Artificial Sequence
  Description of Artificial Sequence: Synthetic oligonucleotide
aggcuaugcauuucaaguu

SEQ ID NO: 253441 - RNA, 19 nt, Artificial Sequence
  Description of Artificial Sequence: Synthetic oligonucleotide
acucggaguaucucuuugu

SEQ ID NO: 253442 - RNA, 19 nt, Artificial Sequence
  Description of Artificial Sequence: Synthetic oligonucleotide
guugguauugugcucacau

SEQ ID NO: 253443 - RNA, 19 nt, Artificial Sequence
  Description of Artificial Sequence: Synthetic oligonucleotide
ggaauugggauugcugucc

SEQ ID NO: 253444 - RNA, 19 nt, Artificial Sequence
  Description of Artificial Sequence: Synthetic oligonucleotide
uugguauugugcucacauc

SEQ ID NO: 253445 - RNA, 19 nt, Artificial Sequence
  Description of Artificial Sequence: Synthetic oligonucleotide
agagcgagucaauaacuua

SEQ ID NO: 253446 - RNA, 19 nt, Artificial Sequence
  Description of Artificial Sequence: Synthetic oligonucleotide
aaucgcucuuuuguagaga

SEQ ID NO: 253447 - RNA, 19 nt, Artificial Sequence
  Description of Artificial Sequence: Synthetic oligonucleotide
uggcgcacacgucaucagc

SEQ ID NO: 253448 - RNA, 19 nt, Artificial Sequence
  Description of Artificial Sequence: Synthetic oligonucleotide
gacgaugaugguguuaaaa

SEQ ID NO: 253449 - RNA, 19 nt, Artificial Sequence
  Description of Artificial Sequence: Synthetic oligonucleotide
uuaugcgacuugagcguga

SEQ ID NO: 253450 - RNA, 19 nt, Artificial Sequence
  Description of Artificial Sequence: Synthetic oligonucleotide
ucaaugugagagccaugaa

SEQ ID NO: 253451 - RNA, 19 nt, Artificial Sequence
  Description of Artificial Sequence: Synthetic oligonucleotide
aagagcgagucaauaacuu

SEQ ID NO: 253452 - RNA, 19 nt, Artificial Sequence
  Description of Artificial Sequence: Synthetic oligonucleotide
acauuggacuaagauagau

SEQ ID NO: 253453 - RNA, 19 nt, Artificial Sequence
  Description of Artificial Sequence: Synthetic oligonucleotide
agauagggugccuguguca

SEQ ID NO: 253454 - RNA, 19 nt, Artificial Sequence
  Description of Artificial Sequence: Synthetic oligonucleotide
aggauagagugccaauuuu

SEQ ID NO: 253455 - RNA, 19 nt, Artificial Sequence
  Description of Artificial Sequence: Synthetic oligonucleotide
caucgcaccguggagcugc

SEQ ID NO: 253456 - RNA, 19 nt, Artificial Sequence
  Description of Artificial Sequence: Synthetic oligonucleotide
accguggagcugcagacgu

SEQ ID NO: 253457 - RNA, 19 nt, Artificial Sequence
  Description of Artificial Sequence: Synthetic oligonucleotide
uuacgacucuguaggaauu

SEQ ID NO: 253458 - RNA, 19 nt, Artificial Sequence
  Description of Artificial Sequence: Synthetic oligonucleotide
acauaaggcuaugcauuuc

SEQ ID NO: 253459 - RNA, 19 nt, Artificial Sequence
  Description of Artificial Sequence: Synthetic oligonucleotide
acgacucuguaggaauugg

SEQ ID NO: 253460 - RNA, 19 nt, Artificial Sequence
  Description of Artificial Sequence: Synthetic oligonucleotide
ucgcuggacagcgagcgcc

SEQ ID NO: 253461 - RNA, 19 nt, Artificial Sequence
  Description of Artificial Sequence: Synthetic oligonucleotide
cucacaucgcgggucaccc

SEQ ID NO: 253462 - RNA, 19 nt, Artificial Sequence
  Description of Artificial Sequence: Synthetic oligonucleotide
gaugacccauugcagaagu

SEQ ID NO: 253463 - RNA, 19 nt, Artificial Sequence
  Description of Artificial Sequence: Synthetic oligonucleotide
cugcagacguguguuagag

SEQ ID NO: 253464 - RNA, 19 nt, Artificial Sequence
  Description of Artificial Sequence: Synthetic oligonucleotide
cauucaauacggggauccg

SEQ ID NO: 253465 - RNA, 19 nt, Artificial Sequence
  Description of Artificial Sequence: Synthetic oligonucleotide
uauguauugucuggauaau

SEQ ID NO: 253466 - RNA, 19 nt, Artificial Sequence
  Description of Artificial Sequence: Synthetic oligonucleotide
gcucccauacaucgcaccg

SEQ ID NO: 253467 - RNA, 19 nt, Artificial Sequence
  Description of Artificial Sequence: Synthetic oligonucleotide
ugauggaaguuaugcuguc

SEQ ID NO: 253468 - RNA, 19 nt, Artificial Sequence
  Description of Artificial Sequence: Synthetic oligonucleotide
ugugcgacuuggcgcacac

SEQ ID NO: 253469 - RNA, 19 nt, Artificial Sequence
  Description of Artificial Sequence: Synthetic oligonucleotide
uacggggauccgcuguuca

SEQ ID NO: 253470 - RNA, 19 nt, Artificial Sequence
  Description of Artificial Sequence: Synthetic oligonucleotide
auugguauucaaaggguua

SEQ ID NO: 253471 - RNA, 19 nt, Artificial Sequence
  Description of Artificial Sequence: Synthetic oligonucleotide
acgaguagaucuaccaccu

SEQ ID NO: 253472 - RNA, 19 nt, Artificial Sequence
  Description of Artificial Sequence: Synthetic oligonucleotide
augucccaauccgaaucgc

SEQ ID NO: 253473 - RNA, 19 nt, Artificial Sequence
  Description of Artificial Sequence: Synthetic oligonucleotide
guaagaccugcuuagcagu

SEQ ID NO: 253474 - RNA, 19 nt, Artificial Sequence
  Description of Artificial Sequence: Synthetic oligonucleotide
agguugguauugugcucac

SEQ ID NO: 253475 - RNA, 19 nt, Artificial Sequence
  Description of Artificial Sequence: Synthetic oligonucleotide
ugugcucacaucgcggguc

SEQ ID NO: 253476 - RNA, 19 nt, Artificial Sequence
  Description of Artificial Sequence: Synthetic oligonucleotide
aguccuccgcagcagcuug

SEQ ID NO: 253477 - RNA, 19 nt, Artificial Sequence
  Description of Artificial Sequence: Synthetic oligonucleotide
cauaacccuacaauuggua

SEQ ID NO: 253478 - RNA, 19 nt, Artificial Sequence
  Description of Artificial Sequence: Synthetic oligonucleotide
agaucccgcucccauacau

SEQ ID NO: 253479 - RNA, 19 nt, Artificial Sequence
  Description of Artificial Sequence: Synthetic oligonucleotide
gcgagucaauaacuuaugc

SEQ ID NO: 253480 - RNA, 19 nt, Artificial Sequence
  Description of Artificial Sequence: Synthetic oligonucleotide
uuggcgcacacgucaucag

SEQ ID NO: 253481 - RNA, 19 nt, Artificial Sequence
  Description of Artificial Sequence: Synthetic oligonucleotide
cagauagggugccuguguc

SEQ ID NO: 253482 - RNA, 19 nt, Artificial Sequence
  Description of Artificial Sequence: Synthetic oligonucleotide
agacguguguuagaggcaa

SEQ ID NO: 253483 - RNA, 19 nt, Artificial Sequence
  Description of Artificial Sequence: Synthetic oligonucleotide
aguuacgacucuguaggaa

SEQ ID NO: 253484 - RNA, 19 nt, Artificial Sequence
  Description of Artificial Sequence: Synthetic oligonucleotide
caggugaugugaucacuuc

SEQ ID NO: 253485 - RNA, 19 nt, Artificial Sequence
  Description of Artificial Sequence: Synthetic oligonucleotide
ucacaucgcgggucacccg

SEQ ID NO: 253486 - RNA, 19 nt, Artificial Sequence
  Description of Artificial Sequence: Synthetic oligonucleotide
gguauugugcucacaucgc

SEQ ID NO: 253487 - RNA, 19 nt, Artificial Sequence
  Description of Artificial Sequence: Synthetic oligonucleotide
aagauagaucccgcuccca

SEQ ID NO: 253488 - RNA, 19 nt, Artificial Sequence
  Description of Artificial Sequence: Synthetic oligonucleotide
gacuaagauagaucccgcu

SEQ ID NO: 253489 - RNA, 19 nt, Artificial Sequence
  Description of Artificial Sequence: Synthetic oligonucleotide
agcgagucaauaacuuaug

SEQ ID NO: 253490 - RNA, 19 nt, Artificial Sequence
  Description of Artificial Sequence: Synthetic oligonucleotide
cuuaccgugcaggcaacug

SEQ ID NO: 253491 - RNA, 19 nt, Artificial Sequence
  Description of Artificial Sequence: Synthetic oligonucleotide
uuggggccgccaacguagg

SEQ ID NO: 253492 - RNA, 19 nt, Artificial Sequence
  Description of Artificial Sequence: Synthetic oligonucleotide
accgauaagcccugaggua

SEQ ID NO: 253493 - RNA, 19 nt, Artificial Sequence
  Description of Artificial Sequence: Synthetic oligonucleotide
uggacacgaguagaucuac

SEQ ID NO: 253494 - RNA, 19 nt, Artificial Sequence
  Description of Artificial Sequence: Synthetic oligonucleotide
acgauaugcuugacauugg

SEQ ID NO: 253495 - RNA, 19 nt, Artificial Sequence
  Description of Artificial Sequence: Synthetic oligonucleotide
agaaucguguacagacaug

SEQ ID NO: 253496 - RNA, 19 nt, Artificial Sequence
  Description of Artificial Sequence: Synthetic oligonucleotide
cuaucucgucagcagcuuc

SEQ ID NO: 253497 - RNA, 19 nt, Artificial Sequence
  Description of Artificial Sequence: Synthetic oligonucleotide
uagggugccugugucauuu

SEQ ID NO: 253498 - RNA, 19 nt, Artificial Sequence
  Description of Artificial Sequence: Synthetic oligonucleotide
acguguguuagaggcaaca

SEQ ID NO: 253499 - RNA, 19 nt, Artificial Sequence
  Description of Artificial Sequence: Synthetic oligonucleotide
cagguugguauugugcuca

SEQ ID NO: 253500 - RNA, 19 nt, Artificial Sequence
  Description of Artificial Sequence: Synthetic oligonucleotide
augauccguguuugggaca

SEQ ID NO: 253501 - RNA, 19 nt, Artificial Sequence
  Description of Artificial Sequence: Synthetic oligonucleotide
guucggauuucaauuugga

SEQ ID NO: 253502 - RNA, 19 nt, Artificial Sequence
  Description of Artificial Sequence: Synthetic oligonucleotide
ucggauuggaaugcauuuu

SEQ ID NO: 253503 - RNA, 19 nt, Artificial Sequence
  Description of Artificial Sequence: Synthetic oligonucleotide
gagcgagucaauaacuuau

SEQ ID NO: 253504 - RNA, 19 nt, Artificial Sequence
  Description of Artificial Sequence: Synthetic oligonucleotide
cugcgcaagguagaaaaca

SEQ ID NO: 253505 - RNA, 19 nt, Artificial Sequence
  Description of Artificial Sequence: Synthetic oligonucleotide
uuacuacuugaagcuggcu

SEQ ID NO: 253506 - RNA, 19 nt, Artificial Sequence
  Description of Artificial Sequence: Synthetic oligonucleotide
cuuggcgcacacgucauca

SEQ ID NO: 253507 - RNA, 19 nt, Artificial Sequence
  Description of Artificial Sequence: Synthetic oligonucleotide
agggcuguuuaauguuuau

SEQ ID NO: 253508 - RNA, 19 nt, Artificial Sequence
  Description of Artificial Sequence: Synthetic oligonucleotide
guuacuugagaugacccau

SEQ ID NO: 253509 - RNA, 19 nt, Artificial Sequence
  Description of Artificial Sequence: Synthetic oligonucleotide
cuuguucggauuucaauuu

SEQ ID NO: 253510 - RNA, 19 nt, Artificial Sequence
  Description of Artificial Sequence: Synthetic oligonucleotide
ugguauucaaaggguuaau

SEQ ID NO: 253511 - RNA, 19 nt, Artificial Sequence
  Description of Artificial Sequence: Synthetic oligonucleotide
ccgaaucgcucuuuuguag

SEQ ID NO: 253512 - RNA, 19 nt, Artificial Sequence
  Description of Artificial Sequence: Synthetic oligonucleotide
augcaaacgugcucccgaa

SEQ ID NO: 253513 - RNA, 19 nt, Artificial Sequence
  Description of Artificial Sequence: Synthetic oligonucleotide
accaaacgauaugcuugac

SEQ ID NO: 253514 - RNA, 19 nt, Artificial Sequence
  Description of Artificial Sequence: Synthetic oligonucleotide
aaauaccgauaagcccuga

SEQ ID NO: 253515 - RNA, 19 nt, Artificial Sequence
  Description of Artificial Sequence: Synthetic oligonucleotide
caguagcagucugauuacc

SEQ ID NO: 253516 - RNA, 19 nt, Artificial Sequence
  Description of Artificial Sequence: Synthetic oligonucleotide
ggcuaugcauuucaaguua

SEQ ID NO: 253517 - RNA, 19 nt, Artificial Sequence
  Description of Artificial Sequence: Synthetic oligonucleotide
gucccaauccgaaucgcuc

SEQ ID NO: 253518 - RNA, 19 nt, Artificial Sequence
  Description of Artificial Sequence: Synthetic oligonucleotide
uaccaauuacucggaguau

SEQ ID NO: 253519 - RNA, 19 nt, Artificial Sequence
  Description of Artificial Sequence: Synthetic oligonucleotide
acccuacaauugguaaauc

SEQ ID NO: 253520 - RNA, 19 nt, Artificial Sequence
  Description of Artificial Sequence: Synthetic oligonucleotide
cucugauggaaguuaugcu

SEQ ID NO: 253521 - RNA, 19 nt, Artificial Sequence
  Description of Artificial Sequence: Synthetic oligonucleotide
gauccgcuguucagcaaac

SEQ ID NO: 253522 - RNA, 19 nt, Artificial Sequence
  Description of Artificial Sequence: Synthetic oligonucleotide
cacaucgcgggucacccga

SEQ ID NO: 253523 - RNA, 19 nt, Artificial Sequence
  Description of Artificial Sequence: Synthetic oligonucleotide
gacauuggacuaagauaga

SEQ ID NO: 253524 - RNA, 19 nt, Artificial Sequence
  Description of Artificial Sequence: Synthetic oligonucleotide
auuguguaugcaacccaaa

SEQ ID NO: 253525 - RNA, 19 nt, Artificial Sequence
  Description of Artificial Sequence: Synthetic oligonucleotide
ggggucgcuggacagcgag

SEQ ID NO: 253526 - RNA, 19 nt, Artificial Sequence
  Description of Artificial Sequence: Synthetic oligonucleotide
gcuaugcauuucaaguuac

SEQ ID NO: 253527 - RNA, 19 nt, Artificial Sequence
  Description of Artificial Sequence: Synthetic oligonucleotide
auaaggcuaugcauuucaa

SEQ ID NO: 253528 - RNA, 19 nt, Artificial Sequence
  Description of Artificial Sequence: Synthetic oligonucleotide
ucuuaccgugcaggcaacu

SEQ ID NO: 253529 - RNA, 19 nt, Artificial Sequence
  Description of Artificial Sequence: Synthetic oligonucleotide
uggacagcgagcgcccaaa

SEQ ID NO: 253530 - RNA, 19 nt, Artificial Sequence
  Description of Artificial Sequence: Synthetic oligonucleotide
uuacucgaucauaguucuu

SEQ ID NO: 253531 - RNA, 19 nt, Artificial Sequence
  Description of Artificial Sequence: Synthetic oligonucleotide
ggcgaccugcgcaagguag

SEQ ID NO: 253532 - RNA, 19 nt, Artificial Sequence
  Description of Artificial Sequence: Synthetic oligonucleotide
cugagacgugcacugagua

SEQ ID NO: 253533 - RNA, 19 nt, Artificial Sequence
  Description of Artificial Sequence: Synthetic oligonucleotide
cggauuggaaugcauuuug

SEQ ID NO: 253534 - RNA, 19 nt, Artificial Sequence
  Description of Artificial Sequence: Synthetic oligonucleotide
cguguacagacaugauccg

SEQ ID NO: 253535 - RNA, 19 nt, Artificial Sequence
  Description of Artificial Sequence: Synthetic oligonucleotide
guaagugaacaguguaguu

SEQ ID NO: 253536 - RNA, 19 nt, Artificial Sequence
  Description of Artificial Sequence: Synthetic oligonucleotide
ccaacguaggugaaaguaa

SEQ ID NO: 253537 - RNA, 19 nt, Artificial Sequence
  Description of Artificial Sequence: Synthetic oligonucleotide
ccaaacgauaugcuugaca

SEQ ID NO: 253538 - RNA, 19 nt, Artificial Sequence
  Description of Artificial Sequence: Synthetic oligonucleotide
ggauuuacuuuugccacaa

SEQ ID NO: 253539 - RNA, 19 nt, Artificial Sequence
  Description of Artificial Sequence: Synthetic oligonucleotide
ccauacaucgcaccgugga

SEQ ID NO: 253540 - RNA, 19 nt, Artificial Sequence
  Description of Artificial Sequence: Synthetic oligonucleotide
guguggcguaugcaugaac

SEQ ID NO: 253541 - RNA, 19 nt, Artificial Sequence
  Description of Artificial Sequence: Synthetic oligonucleotide
cggaguaucucuuugugaa

SEQ ID NO: 253542 - RNA, 19 nt, Artificial Sequence
  Description of Artificial Sequence: Synthetic oligonucleotide
cucggauuggaaugcauuu

SEQ ID NO: 253543 - RNA, 19 nt, Artificial Sequence
  Description of Artificial Sequence: Synthetic oligonucleotide
cgacucuguaggaauuggg

SEQ ID NO: 253544 - RNA, 19 nt, Artificial Sequence
  Description of Artificial Sequence: Synthetic oligonucleotide
acaucgccugcucggcccu

SEQ ID NO: 253545 - RNA, 19 nt, Artificial Sequence
  Description of Artificial Sequence: Synthetic oligonucleotide
auggacacgaguagaucua

SEQ ID NO: 253546 - RNA, 19 nt, Artificial Sequence
  Description of Artificial Sequence: Synthetic oligonucleotide
agcaguuuguggggcuuca

SEQ ID NO: 253547 - RNA, 19 nt, Artificial Sequence
  Description of Artificial Sequence: Synthetic oligonucleotide
cacauaaggcuaugcauuu

SEQ ID NO: 253548 - RNA, 19 nt, Artificial Sequence
  Description of Artificial Sequence: Synthetic oligonucleotide
agguggaaucugaguaucu

SEQ ID NO: 253549 - RNA, 19 nt, Artificial Sequence
  Description of Artificial Sequence: Synthetic oligonucleotide
gagcaagagcgagucaaua

SEQ ID NO: 253550 - RNA, 19 nt, Artificial Sequence
  Description of Artificial Sequence: Synthetic oligonucleotide
acguguggcucaucacaaa

SEQ ID NO: 253551 - RNA, 19 nt, Artificial Sequence
  Description of Artificial Sequence: Synthetic oligonucleotide
caucgcgggucacccgagc

SEQ ID NO: 253552 - RNA, 19 nt, Artificial Sequence
  Description of Artificial Sequence: Synthetic oligonucleotide
gaccauuccucaggauaga

SEQ ID NO: 253553 - RNA, 19 nt, Artificial Sequence
  Description of Artificial Sequence: Synthetic oligonucleotide
augacccauugcagaagug

SEQ ID NO: 253554 - RNA, 19 nt, Artificial Sequence
  Description of Artificial Sequence: Synthetic oligonucleotide
caauacggggauccgcugu

SEQ ID NO: 253555 - RNA, 19 nt, Artificial Sequence
  Description of Artificial Sequence: Synthetic oligonucleotide
gugcgauuugaugguggac

SEQ ID NO: 253556 - RNA, 19 nt, Artificial Sequence
  Description of Artificial Sequence: Synthetic oligonucleotide
ggaacugguguggcguaug

SEQ ID NO: 253557 - RNA, 19 nt, Artificial Sequence
  Description of Artificial Sequence: Synthetic oligonucleotide
gggccgccaacguagguga

SEQ ID NO: 253558 - RNA, 19 nt, Artificial Sequence
  Description of Artificial Sequence: Synthetic oligonucleotide
ccugcgcaagguagaaaac

SEQ ID NO: 253559 - RNA, 19 nt, Artificial Sequence
  Description of Artificial Sequence: Synthetic oligonucleotide
gacguguguuagaggcaac

SEQ ID NO: 253560 - RNA, 19 nt, Artificial Sequence
  Description of Artificial Sequence: Synthetic oligonucleotide
caggauagagugccaauuu

SEQ ID NO: 253561 - RNA, 19 nt, Artificial Sequence
  Description of Artificial Sequence: Synthetic oligonucleotide
ccgccaacguaggugaaag

SEQ ID NO: 253562 - RNA, 19 nt, Artificial Sequence
  Description of Artificial Sequence: Synthetic oligonucleotide
ggacaucgccugcucggcc

SEQ ID NO: 253563 - RNA, 19 nt, Artificial Sequence
  Description of Artificial Sequence: Synthetic oligonucleotide
guguuugggacaacccaua

SEQ ID NO: 253564 - RNA, 19 nt, Artificial Sequence
  Description of Artificial Sequence: Synthetic oligonucleotide
auagggugccugugucauu

SEQ ID NO: 253565 - RNA, 19 nt, Artificial Sequence
  Description of Artificial Sequence: Synthetic oligonucleotide
ccguguuugggacaaccca

SEQ ID NO: 253566 - RNA, 19 nt, Artificial Sequence
  Description of Artificial Sequence: Synthetic oligonucleotide
uggggccgccaacguaggu

SEQ ID NO: 253567 - RNA, 19 nt, Artificial Sequence
  Description of Artificial Sequence: Synthetic oligonucleotide
cccauacaucgcaccgugg

SEQ ID NO: 253568 - RNA, 19 nt, Artificial Sequence
  Description of Artificial Sequence: Synthetic oligonucleotide
cccuacaauugguaaaucu

SEQ ID NO: 253569 - RNA, 19 nt, Artificial Sequence
  Description of Artificial Sequence: Synthetic oligonucleotide
gaaacacguguggcucauc

SEQ ID NO: 253570 - RNA, 19 nt, Artificial Sequence
  Description of Artificial Sequence: Synthetic oligonucleotide
ccgauaagcccugagguaa

SEQ ID NO: 253571 - RNA, 19 nt, Artificial Sequence
  Description of Artificial Sequence: Synthetic oligonucleotide
gguaagcgagagccuccug

SEQ ID NO: 253572 - RNA, 19 nt, Artificial Sequence
  Description of Artificial Sequence: Synthetic oligonucleotide
aggaacugguguggcguau

SEQ ID NO: 253573 - RNA, 19 nt, Artificial Sequence
  Description of Artificial Sequence: Synthetic oligonucleotide
ccaauuacucggaguaucu

SEQ ID NO: 253574 - RNA, 19 nt, Artificial Sequence
  Description of Artificial Sequence: Synthetic oligonucleotide
cuggcucguccuugguuga

SEQ ID NO: 253575 - RNA, 19 nt, Artificial Sequence
  Description of Artificial Sequence: Synthetic oligonucleotide
gcauggggccauuuugaaa

SEQ ID NO: 253576 - RNA, 19 nt, Artificial Sequence
  Description of Artificial Sequence: Synthetic oligonucleotide
acaucgcgggucacccgag

SEQ ID NO: 253577 - RNA, 19 nt, Artificial Sequence
  Description of Artificial Sequence: Synthetic oligonucleotide
cugaugucccaauccgaau

SEQ ID NO: 253578 - RNA, 19 nt, Artificial Sequence
  Description of Artificial Sequence: Synthetic oligonucleotide
gugcgacuuggcgcacacg

SEQ ID NO: 253579 - RNA, 19 nt, Artificial Sequence
  Description of Artificial Sequence: Synthetic oligonucleotide
cuggaucacgacgucgaua

SEQ ID NO: 253580 - RNA, 19 nt, Artificial Sequence
  Description of Artificial Sequence: Synthetic oligonucleotide
cuuuuggggccgccaacgu

SEQ ID NO: 253581 - RNA, 19 nt, Artificial Sequence
  Description of Artificial Sequence: Synthetic oligonucleotide
ggaguaucucuuugugaau

SEQ ID NO: 253582 - RNA, 19 nt, Artificial Sequence
  Description of Artificial Sequence: Synthetic oligonucleotide
acaucgcaccguggagcug

SEQ ID NO: 253583 - RNA, 19 nt, Artificial Sequence
  Description of Artificial Sequence: Synthetic oligonucleotide
gaccugcgcaagguagaaa

SEQ ID NO: 253584 - RNA, 19 nt, Artificial Sequence
  Description of Artificial Sequence: Synthetic oligonucleotide
ggcgcacacgucaucagcu

SEQ ID NO: 253585 - RNA, 19 nt, Artificial Sequence
  Description of Artificial Sequence: Synthetic oligonucleotide
ccauaacccuacaauuggu

SEQ ID NO: 253586 - RNA, 19 nt, Artificial Sequence
  Description of Artificial Sequence: Synthetic oligonucleotide
cuggacagcgagcgcccaa

SEQ ID NO: 253587 - RNA, 19 nt, Artificial Sequence
  Description of Artificial Sequence: Synthetic oligonucleotide
gguugguauugugcucaca

SEQ ID NO: 253588 - RNA, 19 nt, Artificial Sequence
  Description of Artificial Sequence: Synthetic oligonucleotide
cggucucggauuggaaugc

SEQ ID NO: 253589 - RNA, 19 nt, Artificial Sequence
  Description of Artificial Sequence: Synthetic oligonucleotide
ucgcaccguggagcugcag

SEQ ID NO: 253590 - RNA, 19 nt, Artificial Sequence
  Description of Artificial Sequence: Synthetic oligonucleotide
caagaccauuccucaggau

SEQ ID NO: 253591 - RNA, 19 nt, Artificial Sequence
  Description of Artificial Sequence: Synthetic oligonucleotide
ggucucggauuggaaugca

SEQ ID NO: 253592 - RNA, 19 nt, Artificial Sequence
  Description of Artificial Sequence: Synthetic oligonucleotide
cucccauacaucgcaccgu

SEQ ID NO: 253593 - RNA, 19 nt, Artificial Sequence
  Description of Artificial Sequence: Synthetic oligonucleotide
ggaucacgacgucgauauc

SEQ ID NO: 253594 - RNA, 19 nt, Artificial Sequence
  Description of Artificial Sequence: Synthetic oligonucleotide
gcgaccugcgcaagguaga

SEQ ID NO: 253595 - RNA, 19 nt, Artificial Sequence
  Description of Artificial Sequence: Synthetic oligonucleotide
cgaguagaucuaccaccug

SEQ ID NO: 253596 - RNA, 19 nt, Artificial Sequence
  Description of Artificial Sequence: Synthetic oligonucleotide
cugugcgacuuggcgcaca

SEQ ID NO: 253597 - RNA, 19 nt, Artificial Sequence
  Description of Artificial Sequence: Synthetic oligonucleotide
gcgacuuggcgcacacguc

SEQ ID NO: 253598 - RNA, 19 nt, Artificial Sequence
  Description of Artificial Sequence: Synthetic oligonucleotide
aucgcaccguggagcugca

SEQ ID NO: 253599 - RNA, 19 nt, Artificial Sequence
  Description of Artificial Sequence: Synthetic oligonucleotide
caucgccugcucggcccug

SEQ ID NO: 253600 - RNA, 19 nt, Artificial Sequence
  Description of Artificial Sequence: Synthetic oligonucleotide
ggggcgccggaguaagacu

SEQ ID NO: 253601 - RNA, 19 nt, Artificial Sequence
  Description of Artificial Sequence: Synthetic oligonucleotide
ccaagaguuugugcgauuu

SEQ ID NO: 253602 - RNA, 19 nt, Artificial Sequence
  Description of Artificial Sequence: Synthetic oligonucleotide
acgugcucccgaagagcuu

SEQ ID NO: 253603 - RNA, 19 nt, Artificial Sequence
  Description of Artificial Sequence: Synthetic oligonucleotide
gccgccaacguaggugaaa

SEQ ID NO: 253604 - RNA, 19 nt, Artificial Sequence
  Description of Artificial Sequence: Synthetic oligonucleotide
gggcgccggaguaagacuu

SEQ ID NO: 253605 - RNA, 19 nt, Artificial Sequence
  Description of Artificial Sequence: Synthetic oligonucleotide
ccugugcgacuuggcgcac

SEQ ID NO: 253606 - RNA, 19 nt, Artificial Sequence
  Description of Artificial Sequence: Synthetic oligonucleotide
cgagcgcccaaagguccug

SEQ ID NO: 253607 - RNA, 19 nt, Artificial Sequence
  Description of Artificial Sequence: Synthetic oligonucleotide
gcgagcgcccaaagguccu

SEQ ID NO: 253608 - RNA, 19 nt, Artificial Sequence
  Description of Artificial Sequence: Synthetic oligonucleotide
cgaccugcgcaagguagaa

SEQ ID NO: 253609 - RNA, 19 nt, Artificial Sequence
  Description of Artificial Sequence: Synthetic oligonucleotide
cgccaacguaggugaaagu

SEQ ID NO: 253610 - RNA, 19 nt, Artificial Sequence
  Description of Artificial Sequence: Synthetic oligonucleotide
ucuauuauagacaagcccc

SEQ ID NO: 253611 - RNA, 19 nt, Artificial Sequence
  Description of Artificial Sequence: Synthetic oligonucleotide
aaauauucaaucugccggc

SEQ ID NO: 253612 - RNA, 19 nt, Artificial Sequence
  Description of Artificial Sequence: Synthetic oligonucleotide
aaauaaucgacaguaacac

SEQ ID NO: 253613 - RNA, 19 nt, Artificial Sequence
  Description of Artificial Sequence: Synthetic oligonucleotide
gugauucucacauagaugg

SEQ ID NO: 253614 - RNA, 19 nt, Artificial Sequence
  Description of Artificial Sequence: Synthetic oligonucleotide
cuaucaaacacccuggugc

SEQ ID NO: 253615 - RNA, 19 nt, Artificial Sequence
  Description of Artificial Sequence: Synthetic oligonucleotide
agaaaugugaugcucaucu

SEQ ID NO: 253616 - RNA, 19 nt, Artificial Sequence
  Description of Artificial Sequence: Synthetic oligonucleotide
aauugugaacggcaagccc

SEQ ID NO: 253617 - RNA, 19 nt, Artificial Sequence
  Description of Artificial Sequence: Synthetic oligonucleotide
cauccaucuaguuagaggc

SEQ ID NO: 253618 - RNA, 19 nt, Artificial Sequence
  Description of Artificial Sequence: Synthetic oligonucleotide
aacucaucaaauaaucgac

SEQ ID NO: 253619 - RNA, 19 nt, Artificial Sequence
  Description of Artificial Sequence: Synthetic oligonucleotide
auuacguucugccagucgg

SEQ ID NO: 253620 - RNA, 19 nt, Artificial Sequence
  Description of Artificial Sequence: Synthetic oligonucleotide
uuuuaggcgccuauuagag

SEQ ID NO: 253621 - RNA, 19 nt, Artificial Sequence
  Description of Artificial Sequence: Synthetic oligonucleotide
ucuaguuagaggcuguggc

SEQ ID NO: 253622 - RNA, 19 nt, Artificial Sequence
  Description of Artificial Sequence: Synthetic oligonucleotide
aaauugugaacggcaagcc

SEQ ID NO: 253623 - RNA, 19 nt, Artificial Sequence
  Description of Artificial Sequence: Synthetic oligonucleotide
aauuaacuuugguacuaac

SEQ ID NO: 253624 - RNA, 19 nt, Artificial Sequence
  Description of Artificial Sequence: Synthetic oligonucleotide
acagaauugggccaacgac

SEQ ID NO: 253625 - RNA, 19 nt, Artificial Sequence
  Description of Artificial Sequence: Synthetic oligonucleotide
gaaacaauuaacuuuggua

SEQ ID NO: 253626 - RNA, 19 nt, Artificial Sequence
  Description of Artificial Sequence: Synthetic oligonucleotide
guacuaacagaauaggagc

SEQ ID NO: 253627 - RNA, 19 nt, Artificial Sequence
  Description of Artificial Sequence: Synthetic oligonucleotide
ugaccaguuuaucuggugg

SEQ ID NO: 253628 - RNA, 19 nt, Artificial Sequence
  Description of Artificial Sequence: Synthetic oligonucleotide
aagcuuuagggguucuagc

SEQ ID NO: 253629 - RNA, 19 nt, Artificial Sequence
  Description of Artificial Sequence: Synthetic oligonucleotide
auaagggcuuccuauuccc

SEQ ID NO: 253630 - RNA, 19 nt, Artificial Sequence
  Description of Artificial Sequence: Synthetic oligonucleotide
cagaauugggccaacgacg

SEQ ID NO: 253631 - RNA, 19 nt, Artificial Sequence
  Description of Artificial Sequence: Synthetic oligonucleotide
gaaauugugaacggcaagc

SEQ ID NO: 253632 - RNA, 19 nt, Artificial Sequence
  Description of Artificial Sequence: Synthetic oligonucleotide
auaaucgacaguaacacug

SEQ ID NO: 253633 - RNA, 19 nt, Artificial Sequence
  Description of Artificial Sequence: Synthetic oligonucleotide
guuaccuguagacuugugg

SEQ ID NO: 253634 - RNA, 19 nt, Artificial Sequence
  Description of Artificial Sequence: Synthetic oligonucleotide
ucuuuuaggcgccuauuag

SEQ ID NO: 253635 - RNA, 19 nt, Artificial Sequence
  Description of Artificial Sequence: Synthetic oligonucleotide
uguaucccggaaauaacag

SEQ ID NO: 253636 - RNA, 19 nt, Artificial Sequence
  Description of Artificial Sequence: Synthetic oligonucleotide
aacauuaugcuugaacaca

SEQ ID NO: 253637 - RNA, 19 nt, Artificial Sequence
  Description of Artificial Sequence: Synthetic oligonucleotide
cagcccuagaauaagagag

SEQ ID NO: 253638 - RNA, 19 nt, Artificial Sequence
  Description of Artificial Sequence: Synthetic oligonucleotide
cuuaacaagacaacccuuc

SEQ ID NO: 253639 - RNA, 19 nt, Artificial Sequence
  Description of Artificial Sequence: Synthetic oligonucleotide
ugaugcucaucuagaaggg

SEQ ID NO: 253640 - RNA, 19 nt, Artificial Sequence
  Description of Artificial Sequence: Synthetic oligonucleotide
caaauaaucgacaguaaca

SEQ ID NO: 253641 - RNA, 19 nt, Artificial Sequence
  Description of Artificial Sequence: Synthetic oligonucleotide
aauaaucgacaguaacacu

SEQ ID NO: 253642 - RNA, 19 nt, Artificial Sequence
  Description of Artificial Sequence: Synthetic oligonucleotide
gguacuaacagaauaggag

SEQ ID NO: 253643 - RNA, 19 nt, Artificial Sequence
  Description of Artificial Sequence: Synthetic oligonucleotide
ugaauccucacccucgcca

SEQ ID NO: 253644 - RNA, 19 nt, Artificial Sequence
  Description of Artificial Sequence: Synthetic oligonucleotide
ucaagaguauuuacuagaa

SEQ ID NO: 253645 - RNA, 19 nt, Artificial Sequence
  Description of Artificial Sequence: Synthetic oligonucleotide
ucuggaguuaccuguagac

SEQ ID NO: 253646 - RNA, 19 nt, Artificial Sequence
  Description of Artificial Sequence: Synthetic oligonucleotide
aauccguucugucaggcaa

SEQ ID NO: 253647 - RNA, 19 nt, Artificial Sequence
  Description of Artificial Sequence: Synthetic oligonucleotide
aacagaauugggccaacga

SEQ ID NO: 253648 - RNA, 19 nt, Artificial Sequence
  Description of Artificial Sequence: Synthetic oligonucleotide
uaacauuaugcuugaacac

SEQ ID NO: 253649 - RNA, 19 nt, Artificial Sequence
  Description of Artificial Sequence: Synthetic oligonucleotide
gauaagggcuuccuauucc

SEQ ID NO: 253650 - RNA, 19 nt, Artificial Sequence
  Description of Artificial Sequence: Synthetic oligonucleotide
agcggaaauauucaaucug

SEQ ID NO: 253651 - RNA, 19 nt, Artificial Sequence
  Description of Artificial Sequence: Synthetic oligonucleotide
ucaggcacgugagauaagg

SEQ ID NO: 253652 - RNA, 19 nt, Artificial Sequence
  Description of Artificial Sequence: Synthetic oligonucleotide
agauaagggcuuccuauuc

SEQ ID NO: 253653 - RNA, 19 nt, Artificial Sequence
  Description of Artificial Sequence: Synthetic oligonucleotide
uuaacaagacaacccuucu

SEQ ID NO: 253654 - RNA, 19 nt, Artificial Sequence
  Description of Artificial Sequence: Synthetic oligonucleotide
aaguguaucccggaaauaa

SEQ ID NO: 253655 - RNA, 19 nt, Artificial Sequence
  Description of Artificial Sequence: Synthetic oligonucleotide
ugguacuaacagaauagga

SEQ ID NO: 253656 - RNA, 19 nt, Artificial Sequence
  Description of Artificial Sequence: Synthetic oligonucleotide
auugaguaaggccuuggcu

SEQ ID NO: 253657 - RNA, 19 nt, Artificial Sequence
  Description of Artificial Sequence: Synthetic oligonucleotide
aauugggccaacgacgacu

SEQ ID NO: 253658 - RNA, 19 nt, Artificial Sequence
  Description of Artificial Sequence: Synthetic oligonucleotide
ugcauuguagacaggcgcu

SEQ ID NO: 253659 - RNA, 19 nt, Artificial Sequence
  Description of Artificial Sequence: Synthetic oligonucleotide
auaagaaaugugaugcuca

SEQ ID NO: 253660 - RNA, 19 nt, Artificial Sequence
  Description of Artificial Sequence: Synthetic oligonucleotide
uauucaaucugccggccaa

SEQ ID NO: 253661 - RNA, 19 nt, Artificial Sequence
  Description of Artificial Sequence: Synthetic oligonucleotide
ggugaauccguucugucag

SEQ ID NO: 253662 - RNA, 19 nt, Artificial Sequence
  Description of Artificial Sequence: Synthetic oligonucleotide
uggaguuaccuguagacuu

SEQ ID NO: 253663 - RNA, 19 nt, Artificial Sequence
  Description of Artificial Sequence: Synthetic oligonucleotide
gacacuguucaaagaauag

SEQ ID NO: 253664 - RNA, 19 nt, Artificial Sequence
  Description of Artificial Sequence: Synthetic oligonucleotide
ugggcccucacacaaacgu

SEQ ID NO: 253665 - RNA, 19 nt, Artificial Sequence
  Description of Artificial Sequence: Synthetic oligonucleotide
gugcauuguagacaggcgc

SEQ ID NO: 253666 - RNA, 19 nt, Artificial Sequence
  Description of Artificial Sequence: Synthetic oligonucleotide
aaacgugggcagccuggcc

SEQ ID NO: 253667 - RNA, 19 nt, Artificial Sequence
  Description of Artificial Sequence: Synthetic oligonucleotide
cucauauagccagcgaggg

SEQ ID NO: 253668 - RNA, 19 nt, Artificial Sequence
  Description of Artificial Sequence: Synthetic oligonucleotide
ucccggaaauaacaggucu

SEQ ID NO: 253669 - RNA, 19 nt, Artificial Sequence
  Description of Artificial Sequence: Synthetic oligonucleotide
ucccaaauacuacuuuuaa

SEQ ID NO: 253670 - RNA, 19 nt, Artificial Sequence
  Description of Artificial Sequence: Synthetic oligonucleotide
auaacaggucuugacacug

SEQ ID NO: 253671 - RNA, 19 nt, Artificial Sequence
  Description of Artificial Sequence: Synthetic oligonucleotide
acagaaauugugaacggca

SEQ ID NO: 253672 - RNA, 19 nt, Artificial Sequence
  Description of Artificial Sequence: Synthetic oligonucleotide
aguuccauguagcgcccgc

SEQ ID NO: 253673 - RNA, 19 nt, Artificial Sequence
  Description of Artificial Sequence: Synthetic oligonucleotide
uguagacaggcgcucuacc

SEQ ID NO: 253674 - RNA, 19 nt, Artificial Sequence
  Description of Artificial Sequence: Synthetic oligonucleotide
acagcguggagccaucucu

SEQ ID NO: 253675 - RNA, 19 nt, Artificial Sequence
  Description of Artificial Sequence: Synthetic oligonucleotide
ucccuaaagcgccuucucc

SEQ ID NO: 253676 - RNA, 19 nt, Artificial Sequence
  Description of Artificial Sequence: Synthetic oligonucleotide
uccaucuaguuagaggcug

SEQ ID NO: 253677 - RNA, 19 nt, Artificial Sequence
  Description of Artificial Sequence: Synthetic oligonucleotide
aggcggguaaacuuccauc

SEQ ID NO: 253678 - RNA, 19 nt, Artificial Sequence
  Description of Artificial Sequence: Synthetic oligonucleotide
ggcucauauagccagcgag

SEQ ID NO: 253679 - RNA, 19 nt, Artificial Sequence
  Description of Artificial Sequence: Synthetic oligonucleotide
aggcaaaugacaguagaca

SEQ ID NO: 253680 - RNA, 19 nt, Artificial Sequence
  Description of Artificial Sequence: Synthetic oligonucleotide
gcauccaucuaguuagagg

SEQ ID NO: 253681 - RNA, 19 nt, Artificial Sequence
  Description of Artificial Sequence: Synthetic oligonucleotide
uaggcucauauagccagcg

SEQ ID NO: 253682 - RNA, 19 nt, Artificial Sequence
  Description of Artificial Sequence: Synthetic oligonucleotide
ugaacggcaagcccaggaa

SEQ ID NO: 253683 - RNA, 19 nt, Artificial Sequence
  Description of Artificial Sequence: Synthetic oligonucleotide
guaucauucaucagcagaa

SEQ ID NO: 253684 - RNA, 19 nt, Artificial Sequence
  Description of Artificial Sequence: Synthetic oligonucleotide
agcaauggucuggaguuac

SEQ ID NO: 253685 - RNA, 19 nt, Artificial Sequence
  Description of Artificial Sequence: Synthetic oligonucleotide
ugucccuacuacuggcucc

SEQ ID NO: 253686 - RNA, 19 nt, Artificial Sequence
  Description of Artificial Sequence: Synthetic oligonucleotide
cagccaaauccauguaccg

SEQ ID NO: 253687 - RNA, 19 nt, Artificial Sequence
  Description of Artificial Sequence: Synthetic oligonucleotide
augaauccucacccucgcc

SEQ ID NO: 253688 - RNA, 19 nt, Artificial Sequence
  Description of Artificial Sequence: Synthetic oligonucleotide
caaguaagcuggcugugug

SEQ ID NO: 253689 - RNA, 19 nt, Artificial Sequence
  Description of Artificial Sequence: Synthetic oligonucleotide
cauguuugaacugggcaug

SEQ ID NO: 253690 - RNA, 19 nt, Artificial Sequence
  Description of Artificial Sequence: Synthetic oligonucleotide
uuuaggcgccuauuagaga

SEQ ID NO: 253691 - RNA, 19 nt, Artificial Sequence
  Description of Artificial Sequence: Synthetic oligonucleotide
caugaauccucacccucgc

SEQ ID NO: 253692 - RNA, 19 nt, Artificial Sequence
  Description of Artificial Sequence: Synthetic oligonucleotide
cauuacguucugccagucg

SEQ ID NO: 253693 - RNA, 19 nt, Artificial Sequence
  Description of Artificial Sequence: Synthetic oligonucleotide
acccugacaggucuucguc

SEQ ID NO: 253694 - RNA, 19 nt, Artificial Sequence
  Description of Artificial Sequence: Synthetic oligonucleotide
aucuaguuagaggcugugg

SEQ ID NO: 253695 - RNA, 19 nt, Artificial Sequence
  Description of Artificial Sequence: Synthetic oligonucleotide
ugauucucacauagauggu

SEQ ID NO: 253696 - RNA, 19 nt, Artificial Sequence
  Description of Artificial Sequence: Synthetic oligonucleotide
agcgacuccaucaggauga

SEQ ID NO: 253697 - RNA, 19 nt, Artificial Sequence
  Description of Artificial Sequence: Synthetic oligonucleotide
agagaaccuccaaauauca

SEQ ID NO: 253698 - RNA, 19 nt, Artificial Sequence
  Description of Artificial Sequence: Synthetic oligonucleotide
auaggguaugcugcuggac

SEQ ID NO: 253699 - RNA, 19 nt, Artificial Sequence
  Description of Artificial Sequence: Synthetic oligonucleotide
agaauugggccaacgacga

SEQ ID NO: 253700 - RNA, 19 nt, Artificial Sequence
  Description of Artificial Sequence: Synthetic oligonucleotide
uaagggcuuccuauuccca

SEQ ID NO: 253701 - RNA, 19 nt, Artificial Sequence
  Description of Artificial Sequence: Synthetic oligonucleotide
cuuuagggguucuagcuaa

SEQ ID NO: 253702 - RNA, 19 nt, Artificial Sequence
  Description of Artificial Sequence: Synthetic oligonucleotide
ugaauccguucugucaggc

SEQ ID NO: 253703 - RNA, 19 nt, Artificial Sequence
  Description of Artificial Sequence: Synthetic oligonucleotide
uuacaugccaaggcuggca

SEQ ID NO: 253704 - RNA, 19 nt, Artificial Sequence
  Description of Artificial Sequence: Synthetic oligonucleotide
cugccagucgggucguucg

SEQ ID NO: 253705 - RNA, 19 nt, Artificial Sequence
  Description of Artificial Sequence: Synthetic oligonucleotide
caguguucuuuuaggcgcc

SEQ ID NO: 253706 - RNA, 19 nt, Artificial Sequence
  Description of Artificial Sequence: Synthetic oligonucleotide
cuacuacuggcuccaggcc

SEQ ID NO: 253707 - RNA, 19 nt, Artificial Sequence
  Description of Artificial Sequence: Synthetic oligonucleotide
gcggaaauauucaaucugc

SEQ ID NO: 253708 - RNA, 19 nt, Artificial Sequence
  Description of Artificial Sequence: Synthetic oligonucleotide
gccaacgacgacuggagag

SEQ ID NO: 253709 - RNA, 19 nt, Artificial Sequence
  Description of Artificial Sequence: Synthetic oligonucleotide
uaggcgccuauuagagaag

SEQ ID NO: 253710 - RNA, 19 nt, Artificial Sequence
  Description of Artificial Sequence: Synthetic oligonucleotide
ugggccaacgacgacugga

SEQ ID NO: 253711 - RNA, 19 nt, Artificial Sequence
  Description of Artificial Sequence: Synthetic oligonucleotide
ccucgugcauuguagacag

SEQ ID NO: 253712 - RNA, 19 nt, Artificial Sequence
  Description of Artificial Sequence: Synthetic oligonucleotide
gucugucccuacuacuggc

SEQ ID NO: 253713 - RNA, 19 nt, Artificial Sequence
  Description of Artificial Sequence: Synthetic oligonucleotide
cacagcgacuccaucagga

SEQ ID NO: 253714 - RNA, 19 nt, Artificial Sequence
  Description of Artificial Sequence: Synthetic oligonucleotide
ucuagcuaauggugucacu

SEQ ID NO: 253715 - RNA, 19 nt, Artificial Sequence
  Description of Artificial Sequence: Synthetic oligonucleotide
ggacaggccucagugaagg

SEQ ID NO: 253716 - RNA, 19 nt, Artificial Sequence
  Description of Artificial Sequence: Synthetic oligonucleotide
acaagacaacccuucuuua

SEQ ID NO: 253717 - RNA, 19 nt, Artificial Sequence
  Description of Artificial Sequence: Synthetic oligonucleotide
cgaggcuaggcucauauag

SEQ ID NO: 253718 - RNA, 19 nt, Artificial Sequence
  Description of Artificial Sequence: Synthetic oligonucleotide
ucuuaacuccugcccugga

SEQ ID NO: 253719 - RNA, 19 nt, Artificial Sequence
  Description of Artificial Sequence: Synthetic oligonucleotide
agaauugaguaaggccuug

SEQ ID NO: 253720 - RNA, 19 nt, Artificial Sequence
  Description of Artificial Sequence: Synthetic oligonucleotide
gaggucccuaguugguagc

SEQ ID NO: 253721 - RNA, 19 nt, Artificial Sequence
  Description of Artificial Sequence: Synthetic oligonucleotide
cuagaauaagagagaaccu

SEQ ID NO: 253722 - RNA, 19 nt, Artificial Sequence
  Description of Artificial Sequence: Synthetic oligonucleotide
gguaugcugcuggacaccg

SEQ ID NO: 253723 - RNA, 19 nt, Artificial Sequence
  Description of Artificial Sequence: Synthetic oligonucleotide
ucgccaugcuaacacccac

SEQ ID NO: 253724 - RNA, 19 nt, Artificial Sequence
  Description of Artificial Sequence: Synthetic oligonucleotide
accaguuuaucugguggug

SEQ ID NO: 253725 - RNA, 19 nt, Artificial Sequence
  Description of Artificial Sequence: Synthetic oligonucleotide
ccuaguugguagcagcagc

SEQ ID NO: 253726 - RNA, 19 nt, Artificial Sequence
  Description of Artificial Sequence: Synthetic oligonucleotide
cuauuauagacaagccccu

SEQ ID NO: 253727 - RNA, 19 nt, Artificial Sequence
  Description of Artificial Sequence: Synthetic oligonucleotide
acgugagauaagggcuucc

SEQ ID NO: 253728 - RNA, 19 nt, Artificial Sequence
  Description of Artificial Sequence: Synthetic oligonucleotide
aagcaacggagaccucacu

SEQ ID NO: 253729 - RNA, 19 nt, Artificial Sequence
  Description of Artificial Sequence: Synthetic oligonucleotide
gagcggaaauauucaaucu

SEQ ID NO: 253730 - RNA, 19 nt, Artificial Sequence
  Description of Artificial Sequence: Synthetic oligonucleotide
uuuagggguucuagcuaau

SEQ ID NO: 253731 - RNA, 19 nt, Artificial Sequence
  Description of Artificial Sequence: Synthetic oligonucleotide
gaauccguucugucaggca

SEQ ID NO: 253732 - RNA, 19 nt, Artificial Sequence
  Description of Artificial Sequence: Synthetic oligonucleotide
gguucuagcuaaugguguc

SEQ ID NO: 253733 - RNA, 19 nt, Artificial Sequence
  Description of Artificial Sequence: Synthetic oligonucleotide
acuaacagaauaggagcua

SEQ ID NO: 253734 - RNA, 19 nt, Artificial Sequence
  Description of Artificial Sequence: Synthetic oligonucleotide
uauuauagacaagccccuu

SEQ ID NO: 253735 - RNA, 19 nt, Artificial Sequence
  Description of Artificial Sequence: Synthetic oligonucleotide
agcauccaucuaguuagag

SEQ ID NO: 253736 - RNA, 19 nt, Artificial Sequence
  Description of Artificial Sequence: Synthetic oligonucleotide
auuguagacaggcgcucua

SEQ ID NO: 253737 - RNA, 19 nt, Artificial Sequence
  Description of Artificial Sequence: Synthetic oligonucleotide
cucacccucgccaugcuaa

SEQ ID NO: 253738 - RNA, 19 nt, Artificial Sequence
  Description of Artificial Sequence: Synthetic oligonucleotide
gaugcucaucuagaaggga

SEQ ID NO: 253739 - RNA, 19 nt, Artificial Sequence
  Description of Artificial Sequence: Synthetic oligonucleotide
guacuuguagauggcugug

SEQ ID NO: 253740 - RNA, 19 nt, Artificial Sequence
  Description of Artificial Sequence: Synthetic oligonucleotide
cuugauaggguaugcugcu

SEQ ID NO: 253741 - RNA, 19 nt, Artificial Sequence
  Description of Artificial Sequence: Synthetic oligonucleotide
cagcgacuccaucaggaug

SEQ ID NO: 253742 - RNA, 19 nt, Artificial Sequence
  Description of Artificial Sequence: Synthetic oligonucleotide
ccaacgacgacuggagagg

SEQ ID NO: 253743 - RNA, 19 nt, Artificial Sequence
  Description of Artificial Sequence: Synthetic oligonucleotide
caaacgugggcagccuggc

SEQ ID NO: 253744 - RNA, 19 nt, Artificial Sequence
  Description of Artificial Sequence: Synthetic oligonucleotide
cacaaacgugggcagccug

SEQ ID NO: 253745 - RNA, 19 nt, Artificial Sequence
  Description of Artificial Sequence: Synthetic oligonucleotide
ggccccauaccccaggcac

SEQ ID NO: 253746 - RNA, 19 nt, Artificial Sequence
  Description of Artificial Sequence: Synthetic oligonucleotide
uuccccugcgggcaugaau

SEQ ID NO: 253747 - RNA, 19 nt, Artificial Sequence
  Description of Artificial Sequence: Synthetic oligonucleotide
gaauugggccaacgacgac

SEQ ID NO: 253748 - RNA, 19 nt, Artificial Sequence
  Description of Artificial Sequence: Synthetic oligonucleotide
caacgacgacuggagaggc

SEQ ID NO: 253749 - RNA, 19 nt, Artificial Sequence
  Description of Artificial Sequence: Synthetic oligonucleotide
ccaacuuaucacucugcug

SEQ ID NO: 253750 - RNA, 19 nt, Artificial Sequence
  Description of Artificial Sequence: Synthetic oligonucleotide
gagauaagggcuuccuauu

SEQ ID NO: 253751 - RNA, 19 nt, Artificial Sequence
  Description of Artificial Sequence: Synthetic oligonucleotide
agcccuagaauaagagaga

SEQ ID NO: 253752 - RNA, 19 nt, Artificial Sequence
  Description of Artificial Sequence: Synthetic oligonucleotide
gccaaauccauguaccgcu

SEQ ID NO: 253753 - RNA, 19 nt, Artificial Sequence
  Description of Artificial Sequence: Synthetic oligonucleotide
ggcggguaaacuuccaucu

SEQ ID NO: 253754 - RNA, 19 nt, Artificial Sequence
  Description of Artificial Sequence: Synthetic oligonucleotide
aggcucauauagccagcga

SEQ ID NO: 253755 - RNA, 19 nt, Artificial Sequence
  Description of Artificial Sequence: Synthetic oligonucleotide
acgacuggagaggccuuuc

SEQ ID NO: 253756 - RNA, 19 nt, Artificial Sequence
  Description of Artificial Sequence: Synthetic oligonucleotide
cgugcauuguagacaggcg

SEQ ID NO: 253757 - RNA, 19 nt, Artificial Sequence
  Description of Artificial Sequence: Synthetic oligonucleotide
cucgccaugcuaacaccca

SEQ ID NO: 253758 - RNA, 19 nt, Artificial Sequence
  Description of Artificial Sequence: Synthetic oligonucleotide
cuagcuaauggugucacuu

SEQ ID NO: 253759 - RNA, 19 nt, Artificial Sequence
  Description of Artificial Sequence: Synthetic oligonucleotide
gcgagggacagaaauugug

SEQ ID NO: 253760 - RNA, 19 nt, Artificial Sequence
  Description of Artificial Sequence: Synthetic oligonucleotide
ucugccagucgggucguuc

SEQ ID NO: 253761 - RNA, 19 nt, Artificial Sequence
  Description of Artificial Sequence: Synthetic oligonucleotide
gcagccaacuuacugcaaa

SEQ ID NO: 253762 - RNA, 19 nt, Artificial Sequence
  Description of Artificial Sequence: Synthetic oligonucleotide
auauagccagcgagggaca

SEQ ID NO: 253763 - RNA, 19 nt, Artificial Sequence
  Description of Artificial Sequence: Synthetic oligonucleotide
gcgccuauuagagaaggca

SEQ ID NO: 253764 - RNA, 19 nt, Artificial Sequence
  Description of Artificial Sequence: Synthetic oligonucleotide
cucgugcauuguagacagg

SEQ ID NO: 253765 - RNA, 19 nt, Artificial Sequence
  Description of Artificial Sequence: Synthetic oligonucleotide
cuaacagaauaggagcuau

SEQ ID NO: 253766 - RNA, 19 nt, Artificial Sequence
  Description of Artificial Sequence: Synthetic oligonucleotide
aagcaauggucuggaguua

SEQ ID NO: 253767 - RNA, 19 nt, Artificial Sequence
  Description of Artificial Sequence: Synthetic oligonucleotide
ccggaaauaacaggucuug

SEQ ID NO: 253768 - RNA, 19 nt, Artificial Sequence
  Description of Artificial Sequence: Synthetic oligonucleotide
acccacauuuuguguuuaa

SEQ ID NO: 253769 - RNA, 19 nt, Artificial Sequence
  Description of Artificial Sequence: Synthetic oligonucleotide
agcgggcauucucagccaa

SEQ ID NO: 253770 - RNA, 19 nt, Artificial Sequence
  Description of Artificial Sequence: Synthetic oligonucleotide
ccauccgugacuugaaucu

SEQ ID NO: 253771 - RNA, 19 nt, Artificial Sequence
  Description of Artificial Sequence: Synthetic oligonucleotide
aggucccuaguugguagca

SEQ ID NO: 253772 - RNA, 19 nt, Artificial Sequence
  Description of Artificial Sequence: Synthetic oligonucleotide
ucgggucguucggugcggg

SEQ ID NO: 253773 - RNA, 19 nt, Artificial Sequence
  Description of Artificial Sequence: Synthetic oligonucleotide
agccauccgugacuugaau

SEQ ID NO: 253774 - RNA, 19 nt, Artificial Sequence
  Description of Artificial Sequence: Synthetic oligonucleotide
gugggcccucacacaaacg

SEQ ID NO: 253775 - RNA, 19 nt, Artificial Sequence
  Description of Artificial Sequence: Synthetic oligonucleotide
ccauguaccgcugcuccag

SEQ ID NO: 253776 - RNA, 19 nt, Artificial Sequence
  Description of Artificial Sequence: Synthetic oligonucleotide
ggauuugauuccaacacuu

SEQ ID NO: 253777 - RNA, 19 nt, Artificial Sequence
  Description of Artificial Sequence: Synthetic oligonucleotide
cacgugagauaagggcuuc

SEQ ID NO: 253778 - RNA, 19 nt, Artificial Sequence
  Description of Artificial Sequence: Synthetic oligonucleotide
caguuccauguagcgcccg

SEQ ID NO: 253779 - RNA, 19 nt, Artificial Sequence
  Description of Artificial Sequence: Synthetic oligonucleotide
cccaccaacaugcaggacu

SEQ ID NO: 253780 - RNA, 19 nt, Artificial Sequence
  Description of Artificial Sequence: Synthetic oligonucleotide
ccuauuagagaaggcaaaa

SEQ ID NO: 253781 - RNA, 19 nt, Artificial Sequence
  Description of Artificial Sequence: Synthetic oligonucleotide
gucgggucguucggugcgg

SEQ ID NO: 253782 - RNA, 19 nt, Artificial Sequence
  Description of Artificial Sequence: Synthetic oligonucleotide
gaggcggguaaacuuccau

SEQ ID NO: 253783 - RNA, 19 nt, Artificial Sequence
  Description of Artificial Sequence: Synthetic oligonucleotide
cuggaguuaccuguagacu

SEQ ID NO: 253784 - RNA, 19 nt, Artificial Sequence
  Description of Artificial Sequence: Synthetic oligonucleotide
cuacucugacacgaggcua

SEQ ID NO: 253785 - RNA, 19 nt, Artificial Sequence
  Description of Artificial Sequence: Synthetic oligonucleotide
ggucccuaguugguagcag

SEQ ID NO: 253786 - RNA, 19 nt, Artificial Sequence
  Description of Artificial Sequence: Synthetic oligonucleotide
caggaagcagcccuagaau

SEQ ID NO: 253787 - RNA, 19 nt, Artificial Sequence
  Description of Artificial Sequence: Synthetic oligonucleotide
acgaggcuaggcucauaua

SEQ ID NO: 253788 - RNA, 19 nt, Artificial Sequence
  Description of Artificial Sequence: Synthetic oligonucleotide
ggugucuugcagguggcaa

SEQ ID NO: 253789 - RNA, 19 nt, Artificial Sequence
  Description of Artificial Sequence: Synthetic oligonucleotide
gcuaggcauacucccugca

SEQ ID NO: 253790 - RNA, 19 nt, Artificial Sequence
  Description of Artificial Sequence: Synthetic oligonucleotide
ggucguucggugcgggcca

SEQ ID NO: 253791 - RNA, 19 nt, Artificial Sequence
  Description of Artificial Sequence: Synthetic oligonucleotide
gcauuguagacaggcgcuc

SEQ ID NO: 253792 - RNA, 19 nt, Artificial Sequence
  Description of Artificial Sequence: Synthetic oligonucleotide
cccucacacaaacgugggc

SEQ ID NO: 253793 - RNA, 19 nt, Artificial Sequence
  Description of Artificial Sequence: Synthetic oligonucleotide
cagcguggagccaucucua

SEQ ID NO: 253794 - RNA, 19 nt, Artificial Sequence
  Description of Artificial Sequence: Synthetic oligonucleotide
ggcgccuauuagagaaggc

SEQ ID NO: 253795 - RNA, 19 nt, Artificial Sequence
  Description of Artificial Sequence: Synthetic oligonucleotide
ggguucuagcuaauggugu

SEQ ID NO: 253796 - RNA, 19 nt, Artificial Sequence
  Description of Artificial Sequence: Synthetic oligonucleotide
cucucgcucgaagcgggca

SEQ ID NO: 253797 - RNA, 19 nt, Artificial Sequence
  Description of Artificial Sequence: Synthetic oligonucleotide
cagagucgcugaaagcuuu

SEQ ID NO: 253798 - RNA, 19 nt, Artificial Sequence
  Description of Artificial Sequence: Synthetic oligonucleotide
cagccauccgugacuugaa

SEQ ID NO: 253799 - RNA, 19 nt, Artificial Sequence
  Description of Artificial Sequence: Synthetic oligonucleotide
ccccauaccccaggcacag

SEQ ID NO: 253800 - RNA, 19 nt, Artificial Sequence
  Description of Artificial Sequence: Synthetic oligonucleotide
ggacagggucuuacaugcc

SEQ ID NO: 253801 - RNA, 19 nt, Artificial Sequence
  Description of Artificial Sequence: Synthetic oligonucleotide
ccuaucccaaguccacaga

SEQ ID NO: 253802 - RNA, 19 nt, Artificial Sequence
  Description of Artificial Sequence: Synthetic oligonucleotide
ggccuagagcuaggcauac

SEQ ID NO: 253803 - RNA, 19 nt, Artificial Sequence
  Description of Artificial Sequence: Synthetic oligonucleotide
ggccaacgacgacuggaga

SEQ ID NO: 253804 - RNA, 19 nt, Artificial Sequence
  Description of Artificial Sequence: Synthetic oligonucleotide
uuccgccaucagugguguc

SEQ ID NO: 253805 - RNA, 19 nt, Artificial Sequence
  Description of Artificial Sequence: Synthetic oligonucleotide
gaucaacccagggccucgu

SEQ ID NO: 253806 - RNA, 19 nt, Artificial Sequence
  Description of Artificial Sequence: Synthetic oligonucleotide
ggccuaucccaaguccaca

SEQ ID NO: 253807 - RNA, 19 nt, Artificial Sequence
  Description of Artificial Sequence: Synthetic oligonucleotide
cucccgaggauggccaugu

SEQ ID NO: 253808 - RNA, 19 nt, Artificial Sequence
  Description of Artificial Sequence: Synthetic oligonucleotide
cagggccucgugcauugua

SEQ ID NO: 253809 - RNA, 19 nt, Artificial Sequence
  Description of Artificial Sequence: Synthetic oligonucleotide
gcauuacguucugccaguc

SEQ ID NO: 253810 - RNA, 19 nt, Artificial Sequence
  Description of Artificial Sequence: Synthetic oligonucleotide
gacgacuggagaggccuuu

SEQ ID NO: 253811 - RNA, 19 nt, Artificial Sequence
  Description of Artificial Sequence: Synthetic oligonucleotide
cacccucgccaugcuaaca

SEQ ID NO: 253812 - RNA, 19 nt, Artificial Sequence
  Description of Artificial Sequence: Synthetic oligonucleotide
cacccacauuuuguguuua

SEQ ID NO: 253813 - RNA, 19 nt, Artificial Sequence
  Description of Artificial Sequence: Synthetic oligonucleotide
ucguucggugcgggccauc

SEQ ID NO: 253814 - RNA, 19 nt, Artificial Sequence
  Description of Artificial Sequence: Synthetic oligonucleotide
cggaaauaacaggucuuga

SEQ ID NO: 253815 - RNA, 19 nt, Artificial Sequence
  Description of Artificial Sequence: Synthetic oligonucleotide
ccuaaagcgccuucuccuu

SEQ ID NO: 253816 - RNA, 19 nt, Artificial Sequence
  Description of Artificial Sequence: Synthetic oligonucleotide
ccagcgagggacagaaauu

SEQ ID NO: 253817 - RNA, 19 nt, Artificial Sequence
  Description of Artificial Sequence: Synthetic oligonucleotide
cccggaaauaacaggucuu

SEQ ID NO: 253818 - RNA, 19 nt, Artificial Sequence
  Description of Artificial Sequence: Synthetic oligonucleotide
gcacgugagauaagggcuu

SEQ ID NO: 253819 - RNA, 19 nt, Artificial Sequence
  Description of Artificial Sequence: Synthetic oligonucleotide
cggcaagcccaggaaaguc

SEQ ID NO: 253820 - RNA, 19 nt, Artificial Sequence
  Description of Artificial Sequence: Synthetic oligonucleotide
ccagagucgcugaaagcuu

SEQ ID NO: 253821 - RNA, 19 nt, Artificial Sequence
  Description of Artificial Sequence: Synthetic oligonucleotide
gcggguaaacuuccaucuu

SEQ ID NO: 253822 - RNA, 19 nt, Artificial Sequence
  Description of Artificial Sequence: Synthetic oligonucleotide
cgggucguucggugcgggc

SEQ ID NO: 253823 - RNA, 19 nt, Artificial Sequence
  Description of Artificial Sequence: Synthetic oligonucleotide
ccguucugucaggcaagca

SEQ ID NO: 253824 - RNA, 19 nt, Artificial Sequence
  Description of Artificial Sequence: Synthetic oligonucleotide
gucguucggugcgggccau

SEQ ID NO: 253825 - RNA, 19 nt, Artificial Sequence
  Description of Artificial Sequence: Synthetic oligonucleotide
aaagcauacaacucaaaac

SEQ ID NO: 253826 - RNA, 19 nt, Artificial Sequence
  Description of Artificial Sequence: Synthetic oligonucleotide
aaacauaggacuaagacuc

SEQ ID NO: 253827 - RNA, 19 nt, Artificial Sequence
  Description of Artificial Sequence: Synthetic oligonucleotide
aaauuaguaacacuauagg

SEQ ID NO: 253828 - RNA, 19 nt, Artificial Sequence
  Description of Artificial Sequence: Synthetic oligonucleotide
aagauuucgacacucauug

SEQ ID NO: 253829 - RNA, 19 nt, Artificial Sequence
  Description of Artificial Sequence: Synthetic oligonucleotide
gauauucgcagucagaucc

SEQ ID NO: 253830 - RNA, 19 nt, Artificial Sequence
  Description of Artificial Sequence: Synthetic oligonucleotide
aaaacauaggacuaagacu

SEQ ID NO: 253831 - RNA, 19 nt, Artificial Sequence
  Description of Artificial Sequence: Synthetic oligonucleotide
cauagaagcgccaaaagcg

SEQ ID NO: 253832 - RNA, 19 nt, Artificial Sequence
  Description of Artificial Sequence: Synthetic oligonucleotide
auaggacuaagacucaucc

SEQ ID NO: 253833 - RNA, 19 nt, Artificial Sequence
  Description of Artificial Sequence: Synthetic oligonucleotide
gauuucgacacucauugcg

SEQ ID NO: 253834 - RNA, 19 nt, Artificial Sequence
  Description of Artificial Sequence: Synthetic oligonucleotide
uguacucuagcucugcacg

SEQ ID NO: 253835 - RNA, 19 nt, Artificial Sequence
  Description of Artificial Sequence: Synthetic oligonucleotide
uuuaaguugccagagagca

SEQ ID NO: 253836 - RNA, 19 nt, Artificial Sequence
  Description of Artificial Sequence: Synthetic oligonucleotide
uuguauucaauaacagggg

SEQ ID NO: 253837 - RNA, 19 nt, Artificial Sequence
  Description of Artificial Sequence: Synthetic oligonucleotide
uguacauaugacaucauaa

SEQ ID NO: 253838 - RNA, 19 nt, Artificial Sequence
  Description of Artificial Sequence: Synthetic oligonucleotide
agauccguagcacggaucc

SEQ ID NO: 253839 - RNA, 19 nt, Artificial Sequence
  Description of Artificial Sequence: Synthetic oligonucleotide
acuaauuggccuaacaugg

SEQ ID NO: 253840 - RNA, 19 nt, Artificial Sequence
  Description of Artificial Sequence: Synthetic oligonucleotide
acuauaaguggcaaagagc

SEQ ID NO: 253841 - RNA, 19 nt, Artificial Sequence
  Description of Artificial Sequence: Synthetic oligonucleotide
guacauaugacaucauaag

SEQ ID NO: 253842 - RNA, 19 nt, Artificial Sequence
  Description of Artificial Sequence: Synthetic oligonucleotide
uagaaggucccucugaagu

SEQ ID NO: 253843 - RNA, 19 nt, Artificial Sequence
  Description of Artificial Sequence: Synthetic oligonucleotide
aaaaugcucgcaaagguca

SEQ ID NO: 253844 - RNA, 19 nt, Artificial Sequence
  Description of Artificial Sequence: Synthetic oligonucleotide
aguacgaccuccuuggcug

SEQ ID NO: 253845 - RNA, 19 nt, Artificial Sequence
  Description of Artificial Sequence: Synthetic oligonucleotide
ugcuacuuauuauuaacug

SEQ ID NO: 253846 - RNA, 19 nt, Artificial Sequence
  Description of Artificial Sequence: Synthetic oligonucleotide
aauguccuauugcaacaac

SEQ ID NO: 253847 - RNA, 19 nt, Artificial Sequence
  Description of Artificial Sequence: Synthetic oligonucleotide
auuaguaacacuauaggaa

SEQ ID NO: 253848 - RNA, 19 nt, Artificial Sequence
  Description of Artificial Sequence: Synthetic oligonucleotide
ucuugauacuaauuggccu

SEQ ID NO: 253849 - RNA, 19 nt, Artificial Sequence
  Description of Artificial Sequence: Synthetic oligonucleotide
ucccguauccacuuggaag

SEQ ID NO: 253850 - RNA, 19 nt, Artificial Sequence
  Description of Artificial Sequence: Synthetic oligonucleotide
uucgcagucagauccguag

SEQ ID NO: 253851 - RNA, 19 nt, Artificial Sequence
  Description of Artificial Sequence: Synthetic oligonucleotide
auagaagcgccaaaagcgc

SEQ ID NO: 253852 - RNA, 19 nt, Artificial Sequence
  Description of Artificial Sequence: Synthetic oligonucleotide
cuucucacgaggauggggc

SEQ ID NO: 253853 - RNA, 19 nt, Artificial Sequence
  Description of Artificial Sequence: Synthetic oligonucleotide
ucguuguauucaauaacag

SEQ ID NO: 253854 - RNA, 19 nt, Artificial Sequence
  Description of Artificial Sequence: Synthetic oligonucleotide
uccagcuaaacuccaauaa

SEQ ID NO: 253855 - RNA, 19 nt, Artificial Sequence
  Description of Artificial Sequence: Synthetic oligonucleotide
gacauagaagcgccaaaag

SEQ ID NO: 253856 - RNA, 19 nt, Artificial Sequence
  Description of Artificial Sequence: Synthetic oligonucleotide
uaacacuauaggaaccugu

SEQ ID NO: 253857 - RNA, 19 nt, Artificial Sequence
  Description of Artificial Sequence: Synthetic oligonucleotide
uuucgacacucauugcggg

SEQ ID NO: 253858 - RNA, 19 nt, Artificial Sequence
  Description of Artificial Sequence: Synthetic oligonucleotide
ugagcgaccaucagccugc

SEQ ID NO: 253859 - RNA, 19 nt, Artificial Sequence
  Description of Artificial Sequence: Synthetic oligonucleotide
uacuuauuauuaacugaca

SEQ ID NO: 253860 - RNA, 19 nt, Artificial Sequence
  Description of Artificial Sequence: Synthetic oligonucleotide
uaguaacacuauaggaacc

SEQ ID NO: 253861 - RNA, 19 nt, Artificial Sequence
  Description of Artificial Sequence: Synthetic oligonucleotide
gauacuaauuggccuaaca

SEQ ID NO: 253862 - RNA, 19 nt, Artificial Sequence
  Description of Artificial Sequence: Synthetic oligonucleotide
uauaaguggcaaagagcag

SEQ ID NO: 253863 - RNA, 19 nt, Artificial Sequence
  Description of Artificial Sequence: Synthetic oligonucleotide
auaaguggcaaagagcagu

SEQ ID NO: 253864 - RNA, 19 nt, Artificial Sequence
  Description of Artificial Sequence: Synthetic oligonucleotide
uccgaaauuccaagcuggg

SEQ ID NO: 253865 - RNA, 19 nt, Artificial Sequence
  Description of Artificial Sequence: Synthetic oligonucleotide
uuuuaugcaugagcgacca

SEQ ID NO: 253866 - RNA, 19 nt, Artificial Sequence
  Description of Artificial Sequence: Synthetic oligonucleotide
agaugcacucauaggagcc

SEQ ID NO: 253867 - RNA, 19 nt, Artificial Sequence
  Description of Artificial Sequence: Synthetic oligonucleotide
gcucauuaagacaagaccc

SEQ ID NO: 253868 - RNA, 19 nt, Artificial Sequence
  Description of Artificial Sequence: Synthetic oligonucleotide
gaaauuccaagcugggcuc

SEQ ID NO: 253869 - RNA, 19 nt, Artificial Sequence
  Description of Artificial Sequence: Synthetic oligonucleotide
gagacauucaaagccgccc

SEQ ID NO: 253870 - RNA, 19 nt, Artificial Sequence
  Description of Artificial Sequence: Synthetic oligonucleotide
gcugcuaugcuguugagac

SEQ ID NO: 253871 - RNA, 19 nt, Artificial Sequence
  Description of Artificial Sequence: Synthetic oligonucleotide
caauacaucugaagauggc

SEQ ID NO: 253872 - RNA, 19 nt, Artificial Sequence
  Description of Artificial Sequence: Synthetic oligonucleotide
cuaauuggccuaacauggc

SEQ ID NO: 253873 - RNA, 19 nt, Artificial Sequence
  Description of Artificial Sequence: Synthetic oligonucleotide
ugcgcaggugacauagaag

SEQ ID NO: 253874 - RNA, 19 nt, Artificial Sequence
  Description of Artificial Sequence: Synthetic oligonucleotide
cagaugcacucauaggagc

SEQ ID NO: 253875 - RNA, 19 nt, Artificial Sequence
  Description of Artificial Sequence: Synthetic oligonucleotide
aauuggccuaacauggccu

SEQ ID NO: 253876 - RNA, 19 nt, Artificial Sequence
  Description of Artificial Sequence: Synthetic oligonucleotide
ucauagcagagacauucaa

SEQ ID NO: 253877 - RNA, 19 nt, Artificial Sequence
  Description of Artificial Sequence: Synthetic oligonucleotide
gaugcacucauaggagccg

SEQ ID NO: 253878 - RNA, 19 nt, Artificial Sequence
  Description of Artificial Sequence: Synthetic oligonucleotide
auugcgggagcauuccucu

SEQ ID NO: 253879 - RNA, 19 nt, Artificial Sequence
  Description of Artificial Sequence: Synthetic oligonucleotide
ugugguugucgccuguaac

SEQ ID NO: 253880 - RNA, 19 nt, Artificial Sequence
  Description of Artificial Sequence: Synthetic oligonucleotide
ugaccuucguccagaauaa

SEQ ID NO: 253881 - RNA, 19 nt, Artificial Sequence
  Description of Artificial Sequence: Synthetic oligonucleotide
cuaggcacaaagcauacaa

SEQ ID NO: 253882 - RNA, 19 nt, Artificial Sequence
  Description of Artificial Sequence: Synthetic oligonucleotide
ugacauagaagcgccaaaa

SEQ ID NO: 253883 - RNA, 19 nt, Artificial Sequence
  Description of Artificial Sequence: Synthetic oligonucleotide
cauucaaagccgcccuugg

SEQ ID NO: 253884 - RNA, 19 nt, Artificial Sequence
  Description of Artificial Sequence: Synthetic oligonucleotide
gggacuauaaguggcaaag

SEQ ID NO: 253885 - RNA, 19 nt, Artificial Sequence
  Description of Artificial Sequence: Synthetic oligonucleotide
auaguuauguggcccaaua

SEQ ID NO: 253886 - RNA, 19 nt, Artificial Sequence
  Description of Artificial Sequence: Synthetic oligonucleotide
cuugauacuaauuggccua

SEQ ID NO: 253887 - RNA, 19 nt, Artificial Sequence
  Description of Artificial Sequence: Synthetic oligonucleotide
augagcgaccaucagccug

SEQ ID NO: 253888 - RNA, 19 nt, Artificial Sequence
  Description of Artificial Sequence: Synthetic oligonucleotide
agagacauucaaagccgcc

SEQ ID NO: 253889 - RNA, 19 nt, Artificial Sequence
  Description of Artificial Sequence: Synthetic oligonucleotide
agucagauccguagcacgg

SEQ ID NO: 253890 - RNA, 19 nt, Artificial Sequence
  Description of Artificial Sequence: Synthetic oligonucleotide
ugcgggagcauuccucuug

SEQ ID NO: 253891 - RNA, 19 nt, Artificial Sequence
  Description of Artificial Sequence: Synthetic oligonucleotide
cacauacaucccaggauag

SEQ ID NO: 253892 - RNA, 19 nt, Artificial Sequence
  Description of Artificial Sequence: Synthetic oligonucleotide
gcuacuuauuauuaacuga

SEQ ID NO: 253893 - RNA, 19 nt, Artificial Sequence
  Description of Artificial Sequence: Synthetic oligonucleotide
aacacuauaggaaccugua

SEQ ID NO: 253894 - RNA, 19 nt, Artificial Sequence
  Description of Artificial Sequence: Synthetic oligonucleotide
acagucguccacauccucg

SEQ ID NO: 253895 - RNA, 19 nt, Artificial Sequence
  Description of Artificial Sequence: Synthetic oligonucleotide
cugagggcggaccuguggg

SEQ ID NO: 253896 - RNA, 19 nt, Artificial Sequence
  Description of Artificial Sequence: Synthetic oligonucleotide
gaaguggaacucacagagg

SEQ ID NO: 253897 - RNA, 19 nt, Artificial Sequence
  Description of Artificial Sequence: Synthetic oligonucleotide
ggcaauguccuauugcaac

SEQ ID NO: 253898 - RNA, 19 nt, Artificial Sequence
  Description of Artificial Sequence: Synthetic oligonucleotide
ucgcacauacagguguacg

SEQ ID NO: 253899 - RNA, 19 nt, Artificial Sequence
  Description of Artificial Sequence: Synthetic oligonucleotide
uccguagcacggauccagg

SEQ ID NO: 253900 - RNA, 19 nt, Artificial Sequence
  Description of Artificial Sequence: Synthetic oligonucleotide
agaacgccagaaugcacug

SEQ ID NO: 253901 - RNA, 19 nt, Artificial Sequence
  Description of Artificial Sequence: Synthetic oligonucleotide
guuuuaugcaugagcgacc

SEQ ID NO: 253902 - RNA, 19 nt, Artificial Sequence
  Description of Artificial Sequence: Synthetic oligonucleotide
aaaugcucgcaaaggucag

SEQ ID NO: 253903 - RNA, 19 nt, Artificial Sequence
  Description of Artificial Sequence: Synthetic oligonucleotide
uugcgcaggugacauagaa

SEQ ID NO: 253904 - RNA, 19 nt, Artificial Sequence
  Description of Artificial Sequence: Synthetic oligonucleotide
cacuauaggaaccuguaua

SEQ ID NO: 253905 - RNA, 19 nt, Artificial Sequence
  Description of Artificial Sequence: Synthetic oligonucleotide
cacugauauucgcagucag

SEQ ID NO: 253906 - RNA, 19 nt, Artificial Sequence
  Description of Artificial Sequence: Synthetic oligonucleotide
ugcagcguccgaucagucc

SEQ ID NO: 253907 - RNA, 19 nt, Artificial Sequence
  Description of Artificial Sequence: Synthetic oligonucleotide
auagccgagcugccuauug

SEQ ID NO: 253908 - RNA, 19 nt, Artificial Sequence
  Description of Artificial Sequence: Synthetic oligonucleotide
cacgcauaugugaccuucg

SEQ ID NO: 253909 - RNA, 19 nt, Artificial Sequence
  Description of Artificial Sequence: Synthetic oligonucleotide
auaggagccgggaagauuu

SEQ ID NO: 253910 - RNA, 19 nt, Artificial Sequence
  Description of Artificial Sequence: Synthetic oligonucleotide
ccugcuacuuauuauuaac

SEQ ID NO: 253911 - RNA, 19 nt, Artificial Sequence
  Description of Artificial Sequence: Synthetic oligonucleotide
auacagguguacgagccug

SEQ ID NO: 253912 - RNA, 19 nt, Artificial Sequence
  Description of Artificial Sequence: Synthetic oligonucleotide
uggccugcuacuuauuauu

SEQ ID NO: 253913 - RNA, 19 nt, Artificial Sequence
  Description of Artificial Sequence: Synthetic oligonucleotide
gugucccguauccacuugg

SEQ ID NO: 253914 - RNA, 19 nt, Artificial Sequence
  Description of Artificial Sequence: Synthetic oligonucleotide
uucgacacucauugcggga

SEQ ID NO: 253915 - RNA, 19 nt, Artificial Sequence
  Description of Artificial Sequence: Synthetic oligonucleotide
uuccagcuaaacuccaaua

SEQ ID NO: 253916 - RNA, 19 nt, Artificial Sequence
  Description of Artificial Sequence: Synthetic oligonucleotide
aagcgccaaaagcgccacc

SEQ ID NO: 253917 - RNA, 19 nt, Artificial Sequence
  Description of Artificial Sequence: Synthetic oligonucleotide
cuccacgcacucuccaucc

SEQ ID NO: 253918 - RNA, 19 nt, Artificial Sequence
  Description of Artificial Sequence: Synthetic oligonucleotide
auccguagcacggauccag

SEQ ID NO: 253919 - RNA, 19 nt, Artificial Sequence
  Description of Artificial Sequence: Synthetic oligonucleotide
auauucgcagucagauccg

SEQ ID NO: 253920 - RNA, 19 nt, Artificial Sequence
  Description of Artificial Sequence: Synthetic oligonucleotide
ugucccguauccacuugga

SEQ ID NO: 253921 - RNA, 19 nt, Artificial Sequence
  Description of Artificial Sequence: Synthetic oligonucleotide
gguguacgagccugggucg

SEQ ID NO: 253922 - RNA, 19 nt, Artificial Sequence
  Description of Artificial Sequence: Synthetic oligonucleotide
ucccuccgaaauuccaagc

SEQ ID NO: 253923 - RNA, 19 nt, Artificial Sequence
  Description of Artificial Sequence: Synthetic oligonucleotide
acacuauaggaaccuguau

SEQ ID NO: 253924 - RNA, 19 nt, Artificial Sequence
  Description of Artificial Sequence: Synthetic oligonucleotide
ucagauccguagcacggau

SEQ ID NO: 253925 - RNA, 19 nt, Artificial Sequence
  Description of Artificial Sequence: Synthetic oligonucleotide
gccgggaagauuucgacac

SEQ ID NO: 253926 - RNA, 19 nt, Artificial Sequence
  Description of Artificial Sequence: Synthetic oligonucleotide
ucuugggccgcgcccaccu

SEQ ID NO: 253927 - RNA, 19 nt, Artificial Sequence
  Description of Artificial Sequence: Synthetic oligonucleotide
acauucaaagccgcccuug

SEQ ID NO: 253928 - RNA, 19 nt, Artificial Sequence
  Description of Artificial Sequence: Synthetic oligonucleotide
agcuaggcacaaagcauac

SEQ ID NO: 253929 - RNA, 19 nt, Artificial Sequence
  Description of Artificial Sequence: Synthetic oligonucleotide
acguugugaaguggaacuc

SEQ ID NO: 253930 - RNA, 19 nt, Artificial Sequence
  Description of Artificial Sequence: Synthetic oligonucleotide
acgugcggcucccugcuuc

SEQ ID NO: 253931 - RNA, 19 nt, Artificial Sequence
  Description of Artificial Sequence: Synthetic oligonucleotide
uugauacuaauuggccuaa

SEQ ID NO: 253932 - RNA, 19 nt, Artificial Sequence
  Description of Artificial Sequence: Synthetic oligonucleotide
ucucacgaggauggggcag

SEQ ID NO: 253933 - RNA, 19 nt, Artificial Sequence
  Description of Artificial Sequence: Synthetic oligonucleotide
agcuaaacuccaauaaaua

SEQ ID NO: 253934 - RNA, 19 nt, Artificial Sequence
  Description of Artificial Sequence: Synthetic oligonucleotide
uugcaauucuagccagauc

SEQ ID NO: 253935 - RNA, 19 nt, Artificial Sequence
  Description of Artificial Sequence: Synthetic oligonucleotide
ugcgggcauggauugggcc

SEQ ID NO: 253936 - RNA, 19 nt, Artificial Sequence
  Description of Artificial Sequence: Synthetic oligonucleotide
caauguccacgcauaugug

SEQ ID NO: 253937 - RNA, 19 nt, Artificial Sequence
  Description of Artificial Sequence: Synthetic oligonucleotide
agacucguucuuucaacaa

SEQ ID NO: 253938 - RNA, 19 nt, Artificial Sequence
  Description of Artificial Sequence: Synthetic oligonucleotide
gugguugcacgaguacucg

SEQ ID NO: 253939 - RNA, 19 nt, Artificial Sequence
  Description of Artificial Sequence: Synthetic oligonucleotide
cugcaguacgaccuccuug

SEQ ID NO: 253940 - RNA, 19 nt, Artificial Sequence
  Description of Artificial Sequence: Synthetic oligonucleotide
ugguugcacgaguacucgc

SEQ ID NO: 253941 - RNA, 19 nt, Artificial Sequence
  Description of Artificial Sequence: Synthetic oligonucleotide
gagaacgccagaaugcacu

SEQ ID NO: 253942 - RNA, 19 nt, Artificial Sequence
  Description of Artificial Sequence: Synthetic oligonucleotide
ugguguugacacagcgcug

SEQ ID NO: 253943 - RNA, 19 nt, Artificial Sequence
  Description of Artificial Sequence: Synthetic oligonucleotide
cagacucguucuuucaaca

SEQ ID NO: 253944 - RNA, 19 nt, Artificial Sequence
  Description of Artificial Sequence: Synthetic oligonucleotide
uucucacgaggauggggca

SEQ ID NO: 253945 - RNA, 19 nt, Artificial Sequence
  Description of Artificial Sequence: Synthetic oligonucleotide
cucacgaggauggggcagg

SEQ ID NO: 253946 - RNA, 19 nt, Artificial Sequence
  Description of Artificial Sequence: Synthetic oligonucleotide
gaacgccagaaugcacugg

SEQ ID NO: 253947 - RNA, 19 nt, Artificial Sequence
  Description of Artificial Sequence: Synthetic oligonucleotide
augcucgcaaaggucagug

SEQ ID NO: 253948 - RNA, 19 nt, Artificial Sequence
  Description of Artificial Sequence: Synthetic oligonucleotide
uucccgagaccaguguccc

SEQ ID NO: 253949 - RNA, 19 nt, Artificial Sequence
  Description of Artificial Sequence: Synthetic oligonucleotide
ccgaaugguguguuguagg

SEQ ID NO: 253950 - RNA, 19 nt, Artificial Sequence
  Description of Artificial Sequence: Synthetic oligonucleotide
caggacguugugaagugga

SEQ ID NO: 253951 - RNA, 19 nt, Artificial Sequence
  Description of Artificial Sequence: Synthetic oligonucleotide
cagucagccgggcaugaac

SEQ ID NO: 253952 - RNA, 19 nt, Artificial Sequence
  Description of Artificial Sequence: Synthetic oligonucleotide
acgcauaugugaccuucgu

SEQ ID NO: 253953 - RNA, 19 nt, Artificial Sequence
  Description of Artificial Sequence: Synthetic oligonucleotide
agucagccgggcaugaacu

SEQ ID NO: 253954 - RNA, 19 nt, Artificial Sequence
  Description of Artificial Sequence: Synthetic oligonucleotide
acggacgccgaauggugug

SEQ ID NO: 253955 - RNA, 19 nt, Artificial Sequence
  Description of Artificial Sequence: Synthetic oligonucleotide
uuugggugcgaagcccuca

SEQ ID NO: 253956 - RNA, 19 nt, Artificial Sequence
  Description of Artificial Sequence: Synthetic oligonucleotide
cugcuacuuauuauuaacu

SEQ ID NO: 253957 - RNA, 19 nt, Artificial Sequence
  Description of Artificial Sequence: Synthetic oligonucleotide
caaaccgagggacuccaca

SEQ ID NO: 253958 - RNA, 19 nt, Artificial Sequence
  Description of Artificial Sequence: Synthetic oligonucleotide
acucguucuuucaacaaua

SEQ ID NO: 253959 - RNA, 19 nt, Artificial Sequence
  Description of Artificial Sequence: Synthetic oligonucleotide
acacuagcuccaaaccgag

SEQ ID NO: 253960 - RNA, 19 nt, Artificial Sequence
  Description of Artificial Sequence: Synthetic oligonucleotide
guacgaccuccuuggcugg

SEQ ID NO: 253961 - RNA, 19 nt, Artificial Sequence
  Description of Artificial Sequence: Synthetic oligonucleotide
guugagaccgugacgcaca

SEQ ID NO: 253962 - RNA, 19 nt, Artificial Sequence
  Description of Artificial Sequence: Synthetic oligonucleotide
agaagcgccaaaagcgcca

SEQ ID NO: 253963 - RNA, 19 nt, Artificial Sequence
  Description of Artificial Sequence: Synthetic oligonucleotide
uauucgcagucagauccgu

SEQ ID NO: 253964 - RNA, 19 nt, Artificial Sequence
  Description of Artificial Sequence: Synthetic oligonucleotide
cacuuguacucuagcucug

SEQ ID NO: 253965 - RNA, 19 nt, Artificial Sequence
  Description of Artificial Sequence: Synthetic oligonucleotide
gacucguucuuucaacaau

SEQ ID NO: 253966 - RNA, 19 nt, Artificial Sequence
  Description of Artificial Sequence: Synthetic oligonucleotide
gcucgcaaaggucagugca

SEQ ID NO: 253967 - RNA, 19 nt, Artificial Sequence
  Description of Artificial Sequence: Synthetic oligonucleotide
auaugacaucauaagcaaa

SEQ ID NO: 253968 - RNA, 19 nt, Artificial Sequence
  Description of Artificial Sequence: Synthetic oligonucleotide
ucuuguguacaggcccgug

SEQ ID NO: 253969 - RNA, 19 nt, Artificial Sequence
  Description of Artificial Sequence: Synthetic oligonucleotide
ugagggcggaccuguggga

SEQ ID NO: 253970 - RNA, 19 nt, Artificial Sequence
  Description of Artificial Sequence: Synthetic oligonucleotide
gagggcggaccugugggag

SEQ ID NO: 253971 - RNA, 19 nt, Artificial Sequence
  Description of Artificial Sequence: Synthetic oligonucleotide
accgugacgcacagcgggc

SEQ ID NO: 253972 - RNA, 19 nt, Artificial Sequence
  Description of Artificial Sequence: Synthetic oligonucleotide
cagcuaggcacaaagcaua

SEQ ID NO: 253973 - RNA, 19 nt, Artificial Sequence
  Description of Artificial Sequence: Synthetic oligonucleotide
cccguauccacuuggaaga

SEQ ID NO: 253974 - RNA, 19 nt, Artificial Sequence
  Description of Artificial Sequence: Synthetic oligonucleotide
ucgcaccgguguuugucag

SEQ ID NO: 253975 - RNA, 19 nt, Artificial Sequence
  Description of Artificial Sequence: Synthetic oligonucleotide
accacggacgccgaauggu

SEQ ID NO: 253976 - RNA, 19 nt, Artificial Sequence
  Description of Artificial Sequence: Synthetic oligonucleotide
gacgccgaaugguguguug

SEQ ID NO: 253977 - RNA, 19 nt, Artificial Sequence
  Description of Artificial Sequence: Synthetic oligonucleotide
gaagauuucgacacucauu

SEQ ID NO: 253978 - RNA, 19 nt, Artificial Sequence
  Description of Artificial Sequence: Synthetic oligonucleotide
guuccccggguuugggugc

SEQ ID NO: 253979 - RNA, 19 nt, Artificial Sequence
  Description of Artificial Sequence: Synthetic oligonucleotide
ugauacuaauuggccuaac

SEQ ID NO: 253980 - RNA, 19 nt, Artificial Sequence
  Description of Artificial Sequence: Synthetic oligonucleotide
agccuaaggaccacauaca

SEQ ID NO: 253981 - RNA, 19 nt, Artificial Sequence
  Description of Artificial Sequence: Synthetic oligonucleotide
cucguucuuucaacaauaa

SEQ ID NO: 253982 - RNA, 19 nt, Artificial Sequence
  Description of Artificial Sequence: Synthetic oligonucleotide
uccacgcacucuccaucca

SEQ ID NO: 253983 - RNA, 19 nt, Artificial Sequence
  Description of Artificial Sequence: Synthetic oligonucleotide
gaagcgccaaaagcgccac

SEQ ID NO: 253984 - RNA, 19 nt, Artificial Sequence
  Description of Artificial Sequence: Synthetic oligonucleotide
caauucuagccagauccca

SEQ ID NO: 253985 - RNA, 19 nt, Artificial Sequence
  Description of Artificial Sequence: Synthetic oligonucleotide
uuuaugcaugagcgaccau

SEQ ID NO: 253986 - RNA, 19 nt, Artificial Sequence
  Description of Artificial Sequence: Synthetic oligonucleotide
gcgggcauggauugggccc

SEQ ID NO: 253987 - RNA, 19 nt, Artificial Sequence
  Description of Artificial Sequence: Synthetic oligonucleotide
caccacggacgccgaaugg

SEQ ID NO: 253988 - RNA, 19 nt, Artificial Sequence
  Description of Artificial Sequence: Synthetic oligonucleotide
auacaucccaggauaguua

SEQ ID NO: 253989 - RNA, 19 nt, Artificial Sequence
  Description of Artificial Sequence: Synthetic oligonucleotide
cagauccguagcacggauc

SEQ ID NO: 253990 - RNA, 19 nt, Artificial Sequence
  Description of Artificial Sequence: Synthetic oligonucleotide
ugcgguuccccggguuugg

SEQ ID NO: 253991 - RNA, 19 nt, Artificial Sequence
  Description of Artificial Sequence: Synthetic oligonucleotide
ccaggauaguuauguggcc

SEQ ID NO: 253992 - RNA, 19 nt, Artificial Sequence
  Description of Artificial Sequence: Synthetic oligonucleotide
ucccaagagaggucccaau

SEQ ID NO: 253993 - RNA, 19 nt, Artificial Sequence
  Description of Artificial Sequence: Synthetic oligonucleotide
acgagccugggucguccgg

SEQ ID NO: 253994 - RNA, 19 nt, Artificial Sequence
  Description of Artificial Sequence: Synthetic oligonucleotide
acgccgaaugguguguugu

SEQ ID NO: 253995 - RNA, 19 nt, Artificial Sequence
  Description of Artificial Sequence: Synthetic oligonucleotide
ccuccgaaauuccaagcug

SEQ ID NO: 253996 - RNA, 19 nt, Artificial Sequence
  Description of Artificial Sequence: Synthetic oligonucleotide
cucgcaccgguguuuguca

SEQ ID NO: 253997 - RNA, 19 nt, Artificial Sequence
  Description of Artificial Sequence: Synthetic oligonucleotide
gcuagaaggucccucugaa

SEQ ID NO: 253998 - RNA, 19 nt, Artificial Sequence
  Description of Artificial Sequence: Synthetic oligonucleotide
aggucccaauucuugugua

SEQ ID NO: 253999 - RNA, 19 nt, Artificial Sequence
  Description of Artificial Sequence: Synthetic oligonucleotide
agcuccacgcacucuccau

SEQ ID NO: 254000 - RNA, 19 nt, Artificial Sequence
  Description of Artificial Sequence: Synthetic oligonucleotide
gguugcacgaguacucgca

SEQ ID NO: 254001 - RNA, 19 nt, Artificial Sequence
  Description of Artificial Sequence: Synthetic oligonucleotide
guccgaucaguccuuacau

SEQ ID NO: 254002 - RNA, 19 nt, Artificial Sequence
  Description of Artificial Sequence: Synthetic oligonucleotide
ccgagcugccuauuggcag

SEQ ID NO: 254003 - RNA, 19 nt, Artificial Sequence
  Description of Artificial Sequence: Synthetic oligonucleotide
acauccucgcaccgguguu

SEQ ID NO: 254004 - RNA, 19 nt, Artificial Sequence
  Description of Artificial Sequence: Synthetic oligonucleotide
aauagccgagcugccuauu

SEQ ID NO: 254005 - RNA, 19 nt, Artificial Sequence
  Description of Artificial Sequence: Synthetic oligonucleotide
accuccgguuuuaugcaug

SEQ ID NO: 254006 - RNA, 19 nt, Artificial Sequence
  Description of Artificial Sequence: Synthetic oligonucleotide
cugccuacagucguccaca

SEQ ID NO: 254007 - RNA, 19 nt, Artificial Sequence
  Description of Artificial Sequence: Synthetic oligonucleotide
gucagugcacgagggcacc

SEQ ID NO: 254008 - RNA, 19 nt, Artificial Sequence
  Description of Artificial Sequence: Synthetic oligonucleotide
ggcuagaaggucccucuga

SEQ ID NO: 254009 - RNA, 19 nt, Artificial Sequence
  Description of Artificial Sequence: Synthetic oligonucleotide
cucgcacauacagguguac

SEQ ID NO: 254010 - RNA, 19 nt, Artificial Sequence
  Description of Artificial Sequence: Synthetic oligonucleotide
ccagcuaaacuccaauaaa

SEQ ID NO: 254011 - RNA, 19 nt, Artificial Sequence
  Description of Artificial Sequence: Synthetic oligonucleotide
gccgaaugguguguuguag

SEQ ID NO: 254012 - RNA, 19 nt, Artificial Sequence
  Description of Artificial Sequence: Synthetic oligonucleotide
gcagcguccgaucaguccu

SEQ ID NO: 254013 - RNA, 19 nt, Artificial Sequence
  Description of Artificial Sequence: Synthetic oligonucleotide
gccuaacauggccugcuac

SEQ ID NO: 254014 - RNA, 19 nt, Artificial Sequence
  Description of Artificial Sequence: Synthetic oligonucleotide
ggaagauuucgacacucau

SEQ ID NO: 254015 - RNA, 19 nt, Artificial Sequence
  Description of Artificial Sequence: Synthetic oligonucleotide
ugccuacagucguccacau

SEQ ID NO: 254016 - RNA, 19 nt, Artificial Sequence
  Description of Artificial Sequence: Synthetic oligonucleotide
ggguuugggugcgaagccc

SEQ ID NO: 254017 - RNA, 19 nt, Artificial Sequence
  Description of Artificial Sequence: Synthetic oligonucleotide
ccugccuacagucguccac

SEQ ID NO: 254018 - RNA, 19 nt, Artificial Sequence
  Description of Artificial Sequence: Synthetic oligonucleotide
gcaccuccgguuuuaugca

SEQ ID NO: 254019 - RNA, 19 nt, Artificial Sequence
  Description of Artificial Sequence: Synthetic oligonucleotide
aucccaagagaggucccaa

SEQ ID NO: 254020 - RNA, 19 nt, Artificial Sequence
  Description of Artificial Sequence: Synthetic oligonucleotide
gauaguuauguggcccaau

SEQ ID NO: 254021 - RNA, 19 nt, Artificial Sequence
  Description of Artificial Sequence: Synthetic oligonucleotide
uccgcaccacggacgccga

SEQ ID NO: 254022 - RNA, 19 nt, Artificial Sequence
  Description of Artificial Sequence: Synthetic oligonucleotide
cuccgguuuuaugcaugag

SEQ ID NO: 254023 - RNA, 19 nt, Artificial Sequence
  Description of Artificial Sequence: Synthetic oligonucleotide
ggucagugcacgagggcac

SEQ ID NO: 254024 - RNA, 19 nt, Artificial Sequence
  Description of Artificial Sequence: Synthetic oligonucleotide
aggacguugugaaguggaa

SEQ ID NO: 254025 - RNA, 19 nt, Artificial Sequence
  Description of Artificial Sequence: Synthetic oligonucleotide
gucccguauccacuuggaa

SEQ ID NO: 254026 - RNA, 19 nt, Artificial Sequence
  Description of Artificial Sequence: Synthetic oligonucleotide
ccacggacgccgaauggug

SEQ ID NO: 254027 - RNA, 19 nt, Artificial Sequence
  Description of Artificial Sequence: Synthetic oligonucleotide
ccuaacauggccugcuacu

SEQ ID NO: 254028 - RNA, 19 nt, Artificial Sequence
  Description of Artificial Sequence: Synthetic oligonucleotide
agcgaccaucagccugcag

SEQ ID NO: 254029 - RNA, 19 nt, Artificial Sequence
  Description of Artificial Sequence: Synthetic oligonucleotide
gauccguagcacggaucca

SEQ ID NO: 254030 - RNA, 19 nt, Artificial Sequence
  Description of Artificial Sequence: Synthetic oligonucleotide
uucuugcgcaggugacaua

SEQ ID NO: 254031 - RNA, 19 nt, Artificial Sequence
  Description of Artificial Sequence: Synthetic oligonucleotide
gggaagauuucgacacuca

SEQ ID NO: 254032 - RNA, 19 nt, Artificial Sequence
  Description of Artificial Sequence: Synthetic oligonucleotide
cuugcgcaggugacauaga

SEQ ID NO: 254033 - RNA, 19 nt, Artificial Sequence
  Description of Artificial Sequence: Synthetic oligonucleotide
gcccaauacaucugaagau

SEQ ID NO: 254034 - RNA, 19 nt, Artificial Sequence
  Description of Artificial Sequence: Synthetic oligonucleotide
cacauccucgcaccggugu

SEQ ID NO: 254035 - RNA, 19 nt, Artificial Sequence
  Description of Artificial Sequence: Synthetic oligonucleotide
ucccgagaccagugucccu

SEQ ID NO: 254036 - RNA, 19 nt, Artificial Sequence
  Description of Artificial Sequence: Synthetic oligonucleotide
cuccagaaaguuggaaacu

SEQ ID NO: 254037 - RNA, 19 nt, Artificial Sequence
  Description of Artificial Sequence: Synthetic oligonucleotide
ggagccgggaagauuucga

SEQ ID NO: 254038 - RNA, 19 nt, Artificial Sequence
  Description of Artificial Sequence: Synthetic oligonucleotide
caguacgaccuccuuggcu

SEQ ID NO: 254039 - RNA, 19 nt, Artificial Sequence
  Description of Artificial Sequence: Synthetic oligonucleotide
gugcgguuccccggguuug

SEQ ID NO: 254040 - RNA, 19 nt, Artificial Sequence
  Description of Artificial Sequence: Synthetic oligonucleotide
uacgaccuccuuggcuggu

SEQ ID NO: 254041 - RNA, 19 nt, Artificial Sequence
  Description of Artificial Sequence: Synthetic oligonucleotide
guuugggugcgaagcccuc

SEQ ID NO: 254042 - RNA, 19 nt, Artificial Sequence
  Description of Artificial Sequence: Synthetic oligonucleotide
ggucguccggguuggcgac

SEQ ID NO: 254043 - RNA, 19 nt, Artificial Sequence
  Description of Artificial Sequence: Synthetic oligonucleotide
gucguccggguuggcgacg

SEQ ID NO: 254044 - RNA, 19 nt, Artificial Sequence
  Description of Artificial Sequence: Synthetic oligonucleotide
caggccggcucacccggug

SEQ ID NO: 254045 - RNA, 19 nt, Artificial Sequence
  Description of Artificial Sequence: Synthetic oligonucleotide
gcaguacgaccuccuuggc

SEQ ID NO: 254046 - RNA, 19 nt, Artificial Sequence
  Description of Artificial Sequence: Synthetic oligonucleotide
caccgguguuugucagcug

SEQ ID NO: 254047 - RNA, 19 nt, Artificial Sequence
  Description of Artificial Sequence: Synthetic oligonucleotide
ggguccucuccgguuauca

SEQ ID NO: 254048 - RNA, 19 nt, Artificial Sequence
  Description of Artificial Sequence: Synthetic oligonucleotide
cguccgaucaguccuuaca

SEQ ID NO: 254049 - RNA, 19 nt, Artificial Sequence
  Description of Artificial Sequence: Synthetic oligonucleotide
gcaggguccucuccgguua

SEQ ID NO: 254050 - RNA, 19 nt, Artificial Sequence
  Description of Artificial Sequence: Synthetic oligonucleotide
cgaccaucagccugcagga

SEQ ID NO: 254051 - RNA, 19 nt, Artificial Sequence
  Description of Artificial Sequence: Synthetic oligonucleotide
cuugggccgcgcccaccug

SEQ ID NO: 254052 - RNA, 19 nt, Artificial Sequence
  Description of Artificial Sequence: Synthetic oligonucleotide
cacggacgccgaauggugu

SEQ ID NO: 254053 - RNA, 19 nt, Artificial Sequence
  Description of Artificial Sequence: Synthetic oligonucleotide
acagucagccgggcaugaa

SEQ ID NO: 254054 - RNA, 19 nt, Artificial Sequence
  Description of Artificial Sequence: Synthetic oligonucleotide
gguuugggugcgaagcccu

SEQ ID NO: 254055 - RNA, 19 nt, Artificial Sequence
  Description of Artificial Sequence: Synthetic oligonucleotide
gcuaggcacaaagcauaca

SEQ ID NO: 254056 - RNA, 19 nt, Artificial Sequence
  Description of Artificial Sequence: Synthetic oligonucleotide
acggugucuguggggcaga

SEQ ID NO: 254057 - RNA, 19 nt, Artificial Sequence
  Description of Artificial Sequence: Synthetic oligonucleotide
ggauaguuauguggcccaa

SEQ ID NO: 254058 - RNA, 19 nt, Artificial Sequence
  Description of Artificial Sequence: Synthetic oligonucleotide
ccucgcaccgguguuuguc

SEQ ID NO: 254059 - RNA, 19 nt, Artificial Sequence
  Description of Artificial Sequence: Synthetic oligonucleotide
gucuugggccgcgcccacc

SEQ ID NO: 254060 - RNA, 19 nt, Artificial Sequence
  Description of Artificial Sequence: Synthetic oligonucleotide
ggccugcuacuuauuauua

SEQ ID NO: 254061 - RNA, 19 nt, Artificial Sequence
  Description of Artificial Sequence: Synthetic oligonucleotide
cacgagggcaccuccgguu

SEQ ID NO: 254062 - RNA, 19 nt, Artificial Sequence
  Description of Artificial Sequence: Synthetic oligonucleotide
cccggguuugggugcgaag

SEQ ID NO: 254063 - RNA, 19 nt, Artificial Sequence
  Description of Artificial Sequence: Synthetic oligonucleotide
cgacacucauugcgggagc

SEQ ID NO: 254064 - RNA, 19 nt, Artificial Sequence
  Description of Artificial Sequence: Synthetic oligonucleotide
gacccuaaccaggcacccu

SEQ ID NO: 254065 - RNA, 19 nt, Artificial Sequence
  Description of Artificial Sequence: Synthetic oligonucleotide
cauaggagccgggaagauu

SEQ ID NO: 254066 - RNA, 19 nt, Artificial Sequence
  Description of Artificial Sequence: Synthetic oligonucleotide
guagccagucucgcacaua

SEQ ID NO: 254067 - RNA, 19 nt, Artificial Sequence
  Description of Artificial Sequence: Synthetic oligonucleotide
ccgggcaugaacuuucauu

SEQ ID NO: 254068 - RNA, 19 nt, Artificial Sequence
  Description of Artificial Sequence: Synthetic oligonucleotide
agcguccgaucaguccuua

SEQ ID NO: 254069 - RNA, 19 nt, Artificial Sequence
  Description of Artificial Sequence: Synthetic oligonucleotide
ggcuuugcugagggcggac

SEQ ID NO: 254070 - RNA, 19 nt, Artificial Sequence
  Description of Artificial Sequence: Synthetic oligonucleotide
gagcgaccaucagccugca

SEQ ID NO: 254071 - RNA, 19 nt, Artificial Sequence
  Description of Artificial Sequence: Synthetic oligonucleotide
gcgguuccccggguuuggg

SEQ ID NO: 254072 - RNA, 19 nt, Artificial Sequence
  Description of Artificial Sequence: Synthetic oligonucleotide
guguacgagccugggucgu

SEQ ID NO: 254073 - RNA, 19 nt, Artificial Sequence
  Description of Artificial Sequence: Synthetic oligonucleotide
ccggcucacccggugcugc

SEQ ID NO: 254074 - RNA, 19 nt, Artificial Sequence
  Description of Artificial Sequence: Synthetic oligonucleotide
caccuccgguuuuaugcau

SEQ ID NO: 254075 - RNA, 19 nt, Artificial Sequence
  Description of Artificial Sequence: Synthetic oligonucleotide
ggcgcuucccgagaccagu

SEQ ID NO: 254076 - RNA, 19 nt, Artificial Sequence
  Description of Artificial Sequence: Synthetic oligonucleotide
caaagccgcccuugguguu

SEQ ID NO: 254077 - RNA, 19 nt, Artificial Sequence
  Description of Artificial Sequence: Synthetic oligonucleotide
guacucugugggacucacu

SEQ ID NO: 254078 - RNA, 19 nt, Artificial Sequence
  Description of Artificial Sequence: Synthetic oligonucleotide
cugggucguccggguuggc

SEQ ID NO: 254079 - RNA, 19 nt, Artificial Sequence
  Description of Artificial Sequence: Synthetic oligonucleotide
cagcguccgaucaguccuu

SEQ ID NO: 254080 - RNA, 19 nt, Artificial Sequence
  Description of Artificial Sequence: Synthetic oligonucleotide
cgcgcccaccugcuguaac

SEQ ID NO: 254081 - RNA, 19 nt, Artificial Sequence
  Description of Artificial Sequence: Synthetic oligonucleotide
ccguauccacuuggaagaa

SEQ ID NO: 254082 - RNA, 19 nt, Artificial Sequence
  Description of Artificial Sequence: Synthetic oligonucleotide
cgaguacucgcagccaccu

SEQ ID NO: 254083 - RNA, 19 nt, Artificial Sequence
  Description of Artificial Sequence: Synthetic oligonucleotide
cagagccaugguccucguu

SEQ ID NO: 254084 - RNA, 19 nt, Artificial Sequence
  Description of Artificial Sequence: Synthetic oligonucleotide
cgccgaaugguguguugua

SEQ ID NO: 254085 - RNA, 19 nt, Artificial Sequence
  Description of Artificial Sequence: Synthetic oligonucleotide
ggacgccgaaugguguguu

SEQ ID NO: 254086 - RNA, 19 nt, Artificial Sequence
  Description of Artificial Sequence: Synthetic oligonucleotide
cccacccaggugucccgua

SEQ ID NO: 254087 - RNA, 19 nt, Artificial Sequence
  Description of Artificial Sequence: Synthetic oligonucleotide
ccaggccggcucacccggu

SEQ ID NO: 254088 - RNA, 19 nt, Artificial Sequence
  Description of Artificial Sequence: Synthetic oligonucleotide
ccccacccaggugucccgu

SEQ ID NO: 254089 - RNA, 19 nt, Artificial Sequence
  Description of Artificial Sequence: Synthetic oligonucleotide
cgagggcaccuccgguuuu

SEQ ID NO: 254090 - RNA, 19 nt, Artificial Sequence
  Description of Artificial Sequence: Synthetic oligonucleotide
ccgcgcccaccugcuguaa

SEQ ID NO: 254091 - RNA, 19 nt, Artificial Sequence
  Description of Artificial Sequence: Synthetic oligonucleotide
aaacaaucccgcuuaagcc

SEQ ID NO: 254092 - RNA, 19 nt, Artificial Sequence
  Description of Artificial Sequence: Synthetic oligonucleotide
ugaaguucaaaccugguag

SEQ ID NO: 254093 - RNA, 19 nt, Artificial Sequence
  Description of Artificial Sequence: Synthetic oligonucleotide
ugaaucguggucuagaccc

SEQ ID NO: 254094 - RNA, 19 nt, Artificial Sequence
  Description of Artificial Sequence: Synthetic oligonucleotide
aaaggcauuaccccgagug

SEQ ID NO: 254095 - RNA, 19 nt, Artificial Sequence
  Description of Artificial Sequence: Synthetic oligonucleotide
uaagccuuaaaucugggca

SEQ ID NO: 254096 - RNA, 19 nt, Artificial Sequence
  Description of Artificial Sequence: Synthetic oligonucleotide
agcucaauaauuuuggucu

SEQ ID NO: 254097 - RNA, 19 nt, Artificial Sequence
  Description of Artificial Sequence: Synthetic oligonucleotide
gaagaaugugucuagcagg

SEQ ID NO: 254098 - RNA, 19 nt, Artificial Sequence
  Description of Artificial Sequence: Synthetic oligonucleotide
cuguuaacaaacaaucccg

SEQ ID NO: 254099 - RNA, 19 nt, Artificial Sequence
  Description of Artificial Sequence: Synthetic oligonucleotide
ugucuaacaggacagccgg

SEQ ID NO: 254100 - RNA, 19 nt, Artificial Sequence
  Description of Artificial Sequence: Synthetic oligonucleotide
uccuuuaagccuuaaaucu

SEQ ID NO: 254101 - RNA, 19 nt, Artificial Sequence
  Description of Artificial Sequence: Synthetic oligonucleotide
ucucuguuaacaaacaauc

SEQ ID NO: 254102 - RNA, 19 nt, Artificial Sequence
  Description of Artificial Sequence: Synthetic oligonucleotide
aguaccaaucaccagcugg

SEQ ID NO: 254103 - RNA, 19 nt, Artificial Sequence
  Description of Artificial Sequence: Synthetic oligonucleotide
aacaacaaugagaggaccc

SEQ ID NO: 254104 - RNA, 19 nt, Artificial Sequence
  Description of Artificial Sequence: Synthetic oligonucleotide
gaaagaugcacguacuagc

SEQ ID NO: 254105 - RNA, 19 nt, Artificial Sequence
  Description of Artificial Sequence: Synthetic oligonucleotide
acuccuaagaugcuugugg

SEQ ID NO: 254106 - RNA, 19 nt, Artificial Sequence
  Description of Artificial Sequence: Synthetic oligonucleotide
agaugcacguacuagcugg

SEQ ID NO: 254107 - RNA, 19 nt, Artificial Sequence
  Description of Artificial Sequence: Synthetic oligonucleotide
caaggauccauucaggggc

SEQ ID NO: 254108 - RNA, 19 nt, Artificial Sequence
  Description of Artificial Sequence: Synthetic oligonucleotide
agagcgaggauacugcugg

SEQ ID NO: 254109 - RNA, 19 nt, Artificial Sequence
  Description of Artificial Sequence: Synthetic oligonucleotide
gauuggaucugucagccag

SEQ ID NO: 254110 - RNA, 19 nt, Artificial Sequence
  Description of Artificial Sequence: Synthetic oligonucleotide
uguggagugguccauauuc

SEQ ID NO: 254111 - RNA, 19 nt, Artificial Sequence
  Description of Artificial Sequence: Synthetic oligonucleotide
aacaaucccgcuuaagccu

SEQ ID NO: 254112 - RNA, 19 nt, Artificial Sequence
  Description of Artificial Sequence: Synthetic oligonucleotide
uguauaagcuccgagauau

SEQ ID NO: 254113 - RNA, 19 nt, Artificial Sequence
  Description of Artificial Sequence: Synthetic oligonucleotide
agaaggaaguaccaaucac

SEQ ID NO: 254114 - RNA, 19 nt, Artificial Sequence
  Description of Artificial Sequence: Synthetic oligonucleotide
uugucuaacaggacagccg

SEQ ID NO: 254115 - RNA, 19 nt, Artificial Sequence
  Description of Artificial Sequence: Synthetic oligonucleotide
aaaccccugaucccggagc

SEQ ID NO: 254116 - RNA, 19 nt, Artificial Sequence
  Description of Artificial Sequence: Synthetic oligonucleotide
aagaaugugucuagcaggg

SEQ ID NO: 254117 - RNA, 19 nt, Artificial Sequence
  Description of Artificial Sequence: Synthetic oligonucleotide
uugcaugccaacuuggagc

SEQ ID NO: 254118 - RNA, 19 nt, Artificial Sequence
  Description of Artificial Sequence: Synthetic oligonucleotide
uguuaacaaacaaucccgc

SEQ ID NO: 254119 - RNA, 19 nt, Artificial Sequence
  Description of Artificial Sequence: Synthetic oligonucleotide
agaccaacgagccagggug

SEQ ID NO: 254120 - RNA, 19 nt, Artificial Sequence
  Description of Artificial Sequence: Synthetic oligonucleotide
ucuguauaagcuccgagau

SEQ ID NO: 254121 - RNA, 19 nt, Artificial Sequence
  Description of Artificial Sequence: Synthetic oligonucleotide
gaaugugucuagcaggggc

SEQ ID NO: 254122 - RNA, 19 nt, Artificial Sequence
  Description of Artificial Sequence: Synthetic oligonucleotide
uuaacaaacaaucccgcuu

SEQ ID NO: 254123 - RNA, 19 nt, Artificial Sequence
  Description of Artificial Sequence: Synthetic oligonucleotide
uucuguauaagcuccgaga

SEQ ID NO: 254124 - RNA, 19 nt, Artificial Sequence
  Description of Artificial Sequence: Synthetic oligonucleotide
ggaaguaccaaucaccagc

SEQ ID NO: 254125 - RNA, 19 nt, Artificial Sequence
  Description of Artificial Sequence: Synthetic oligonucleotide
ugaccucugaauuaucagc

SEQ ID NO: 254126 - RNA, 19 nt, Artificial Sequence
  Description of Artificial Sequence: Synthetic oligonucleotide
aaguuugcaugccaacuug

SEQ ID NO: 254127 - RNA, 19 nt, Artificial Sequence
  Description of Artificial Sequence: Synthetic oligonucleotide
uccauauucacaccuccug

SEQ ID NO: 254128 - RNA, 19 nt, Artificial Sequence
  Description of Artificial Sequence: Synthetic oligonucleotide
aauggcaucuccaggagug

SEQ ID NO: 254129 - RNA, 19 nt, Artificial Sequence
  Description of Artificial Sequence: Synthetic oligonucleotide
uacuagcuggcuuagugcc

SEQ ID NO: 254130 - RNA, 19 nt, Artificial Sequence
  Description of Artificial Sequence: Synthetic oligonucleotide
ucacaaucgucccugcgag

SEQ ID NO: 254131 - RNA, 19 nt, Artificial Sequence
  Description of Artificial Sequence: Synthetic oligonucleotide
uguuuggaggcacaguggu

SEQ ID NO: 254132 - RNA, 19 nt, Artificial Sequence
  Description of Artificial Sequence: Synthetic oligonucleotide
uaagcuccgagauaugacu

SEQ ID NO: 254133 - RNA, 19 nt, Artificial Sequence
  Description of Artificial Sequence: Synthetic oligonucleotide
ucaaggggcuggaagaaug

SEQ ID NO: 254134 - RNA, 19 nt, Artificial Sequence
  Description of Artificial Sequence: Synthetic oligonucleotide
aaggacaacugcucccagg

SEQ ID NO: 254135 - RNA, 19 nt, Artificial Sequence
  Description of Artificial Sequence: Synthetic oligonucleotide
uggucuagacccaagcugu

SEQ ID NO: 254136 - RNA, 19 nt, Artificial Sequence
  Description of Artificial Sequence: Synthetic oligonucleotide
ucaugggcgauugaggaag

SEQ ID NO: 254137 - RNA, 19 nt, Artificial Sequence
  Description of Artificial Sequence: Synthetic oligonucleotide
cucuguuaacaaacaaucc

SEQ ID NO: 254138 - RNA, 19 nt, Artificial Sequence
  Description of Artificial Sequence: Synthetic oligonucleotide
acagcgcccaugcauacac

SEQ ID NO: 254139 - RNA, 19 nt, Artificial Sequence
  Description of Artificial Sequence: Synthetic oligonucleotide
cauauucacaccuccugag

SEQ ID NO: 254140 - RNA, 19 nt, Artificial Sequence
  Description of Artificial Sequence: Synthetic oligonucleotide
aaggaaguaccaaucacca

SEQ ID NO: 254141 - RNA, 19 nt, Artificial Sequence
  Description of Artificial Sequence: Synthetic oligonucleotide
gaauuaucagccacaauca

SEQ ID NO: 254142 - RNA, 19 nt, Artificial Sequence
  Description of Artificial Sequence: Synthetic oligonucleotide
gggcauaagaggcacagcg

SEQ ID NO: 254143 - RNA, 19 nt, Artificial Sequence
  Description of Artificial Sequence: Synthetic oligonucleotide
aggaccaauaacaacagga

SEQ ID NO: 254144 - RNA, 19 nt, Artificial Sequence
  Description of Artificial Sequence: Synthetic oligonucleotide
cagauugugucccucacug

SEQ ID NO: 254145 - RNA, 19 nt, Artificial Sequence
  Description of Artificial Sequence: Synthetic oligonucleotide
agagaaggaaguaccaauc

SEQ ID NO: 254146 - RNA, 19 nt, Artificial Sequence
  Description of Artificial Sequence: Synthetic oligonucleotide
aaagaugcacguacuagcu

SEQ ID NO: 254147 - RNA, 19 nt, Artificial Sequence
  Description of Artificial Sequence: Synthetic oligonucleotide
acaaucgucccugcgaggg

SEQ ID NO: 254148 - RNA, 19 nt, Artificial Sequence
  Description of Artificial Sequence: Synthetic oligonucleotide
ugugaaugcggugccaucc

SEQ ID NO: 254149 - RNA, 19 nt, Artificial Sequence
  Description of Artificial Sequence: Synthetic oligonucleotide
acacaacggggacauaggg

SEQ ID NO: 254150 - RNA, 19 nt, Artificial Sequence
  Description of Artificial Sequence: Synthetic oligonucleotide
aguguauagcuucucucug

SEQ ID NO: 254151 - RNA, 19 nt, Artificial Sequence
  Description of Artificial Sequence: Synthetic oligonucleotide
aacucaugggcgauugagg

SEQ ID NO: 254152 - RNA, 19 nt, Artificial Sequence
  Description of Artificial Sequence: Synthetic oligonucleotide
gugggcacaaguuugcaug

SEQ ID NO: 254153 - RNA, 19 nt, Artificial Sequence
  Description of Artificial Sequence: Synthetic oligonucleotide
caugcagucaggaggugcc

SEQ ID NO: 254154 - RNA, 19 nt, Artificial Sequence
  Description of Artificial Sequence: Synthetic oligonucleotide
acggucaaugcacaccagg

SEQ ID NO: 254155 - RNA, 19 nt, Artificial Sequence
  Description of Artificial Sequence: Synthetic oligonucleotide
guaccaaucaccagcuggg

SEQ ID NO: 254156 - RNA, 19 nt, Artificial Sequence
  Description of Artificial Sequence: Synthetic oligonucleotide
uacccgagugccaucaggc

SEQ ID NO: 254157 - RNA, 19 nt, Artificial Sequence
  Description of Artificial Sequence: Synthetic oligonucleotide
ucacugacuacccgagugc

SEQ ID NO: 254158 - RNA, 19 nt, Artificial Sequence
  Description of Artificial Sequence: Synthetic oligonucleotide
aagaugcacguacuagcug

SEQ ID NO: 254159 - RNA, 19 nt, Artificial Sequence
  Description of Artificial Sequence: Synthetic oligonucleotide
uugagcugagucaugcagu

SEQ ID NO: 254160 - RNA, 19 nt, Artificial Sequence
  Description of Artificial Sequence: Synthetic oligonucleotide
ucaggcaagucacaaucgu

SEQ ID NO: 254161 - RNA, 19 nt, Artificial Sequence
  Description of Artificial Sequence: Synthetic oligonucleotide
cuuagugccuggcaucugc

SEQ ID NO: 254162 - RNA, 19 nt, Artificial Sequence
  Description of Artificial Sequence: Synthetic oligonucleotide
cuaagaugcuuguggagug

SEQ ID NO: 254163 - RNA, 19 nt, Artificial Sequence
  Description of Artificial Sequence: Synthetic oligonucleotide
aaucgucccugcgagggcg

SEQ ID NO: 254164 - RNA, 19 nt, Artificial Sequence
  Description of Artificial Sequence: Synthetic oligonucleotide
agcgcccaugcauacacac

SEQ ID NO: 254165 - RNA, 19 nt, Artificial Sequence
  Description of Artificial Sequence: Synthetic oligonucleotide
cacaacggggacauagggg

SEQ ID NO: 254166 - RNA, 19 nt, Artificial Sequence
  Description of Artificial Sequence: Synthetic oligonucleotide
aucaggucguggugggucc

SEQ ID NO: 254167 - RNA, 19 nt, Artificial Sequence
  Description of Artificial Sequence: Synthetic oligonucleotide
uggacaaggacaacugcuc

SEQ ID NO: 254168 - RNA, 19 nt, Artificial Sequence
  Description of Artificial Sequence: Synthetic oligonucleotide
guggucuagacccaagcug

SEQ ID NO: 254169 - RNA, 19 nt, Artificial Sequence
  Description of Artificial Sequence: Synthetic oligonucleotide
agucgggguaccuucugac

SEQ ID NO: 254170 - RNA, 19 nt, Artificial Sequence
  Description of Artificial Sequence: Synthetic oligonucleotide
ugagugggcacaaguuugc

SEQ ID NO: 254171 - RNA, 19 nt, Artificial Sequence
  Description of Artificial Sequence: Synthetic oligonucleotide
aaggcauuaccccgagugu

SEQ ID NO: 254172 - RNA, 19 nt, Artificial Sequence
  Description of Artificial Sequence: Synthetic oligonucleotide
auaagcuccgagauaugac

SEQ ID NO: 254173 - RNA, 19 nt, Artificial Sequence
  Description of Artificial Sequence: Synthetic oligonucleotide
ucgggguaccuucugaccu

SEQ ID NO: 254174 - RNA, 19 nt, Artificial Sequence
  Description of Artificial Sequence: Synthetic oligonucleotide
uuaagccugugaaugcggu

SEQ ID NO: 254175 - RNA, 19 nt, Artificial Sequence
  Description of Artificial Sequence: Synthetic oligonucleotide
auauuuccacacaacgggg

SEQ ID NO: 254176 - RNA, 19 nt, Artificial Sequence
  Description of Artificial Sequence: Synthetic oligonucleotide
ugcggugccaucccagaag

SEQ ID NO: 254177 - RNA, 19 nt, Artificial Sequence
  Description of Artificial Sequence: Synthetic oligonucleotide
guacuagcuggcuuagugc

SEQ ID NO: 254178 - RNA, 19 nt, Artificial Sequence
  Description of Artificial Sequence: Synthetic oligonucleotide
gcuacccggacauucaagg

SEQ ID NO: 254179 - RNA, 19 nt, Artificial Sequence
  Description of Artificial Sequence: Synthetic oligonucleotide
aguugucuaacaggacagc

SEQ ID NO: 254180 - RNA, 19 nt, Artificial Sequence
  Description of Artificial Sequence: Synthetic oligonucleotide
uccgagauaugacucucac

SEQ ID NO: 254181 - RNA, 19 nt, Artificial Sequence
  Description of Artificial Sequence: Synthetic oligonucleotide
aaugcggugccaucccaga

SEQ ID NO: 254182 - RNA, 19 nt, Artificial Sequence
  Description of Artificial Sequence: Synthetic oligonucleotide
gacuaggaccaauaacaac

SEQ ID NO: 254183 - RNA, 19 nt, Artificial Sequence
  Description of Artificial Sequence: Synthetic oligonucleotide
auauucacaccuccugaga

SEQ ID NO: 254184 - RNA, 19 nt, Artificial Sequence
  Description of Artificial Sequence: Synthetic oligonucleotide
ggauccgagaacaacaaug

SEQ ID NO: 254185 - RNA, 19 nt, Artificial Sequence
  Description of Artificial Sequence: Synthetic oligonucleotide
guugucuaacaggacagcc

SEQ ID NO: 254186 - RNA, 19 nt, Artificial Sequence
  Description of Artificial Sequence: Synthetic oligonucleotide
aagcuccgagauaugacuc

SEQ ID NO: 254187 - RNA, 19 nt, Artificial Sequence
  Description of Artificial Sequence: Synthetic oligonucleotide
uuggauccgagaacaacaa

SEQ ID NO: 254188 - RNA, 19 nt, Artificial Sequence
  Description of Artificial Sequence: Synthetic oligonucleotide
aacaaugagaggacccuga

SEQ ID NO: 254189 - RNA, 19 nt, Artificial Sequence
  Description of Artificial Sequence: Synthetic oligonucleotide
cuauauuggcagcuggauc

SEQ ID NO: 254190 - RNA, 19 nt, Artificial Sequence
  Description of Artificial Sequence: Synthetic oligonucleotide
gcauaagaggcacagcgcc

SEQ ID NO: 254191 - RNA, 19 nt, Artificial Sequence
  Description of Artificial Sequence: Synthetic oligonucleotide
ucguggucuagacccaagc

SEQ ID NO: 254192 - RNA, 19 nt, Artificial Sequence
  Description of Artificial Sequence: Synthetic oligonucleotide
acgaccugccucuccaagg

SEQ ID NO: 254193 - RNA, 19 nt, Artificial Sequence
  Description of Artificial Sequence: Synthetic oligonucleotide
auaacaacaggaggcugag

SEQ ID NO: 254194 - RNA, 19 nt, Artificial Sequence
  Description of Artificial Sequence: Synthetic oligonucleotide
ucccgcuuaagccugugaa

SEQ ID NO: 254195 - RNA, 19 nt, Artificial Sequence
  Description of Artificial Sequence: Synthetic oligonucleotide
cacacaacggggacauagg

SEQ ID NO: 254196 - RNA, 19 nt, Artificial Sequence
  Description of Artificial Sequence: Synthetic oligonucleotide
aaguucaaaccugguagga

SEQ ID NO: 254197 - RNA, 19 nt, Artificial Sequence
  Description of Artificial Sequence: Synthetic oligonucleotide
agucacaaucgucccugcg

SEQ ID NO: 254198 - RNA, 19 nt, Artificial Sequence
  Description of Artificial Sequence: Synthetic oligonucleotide
ugggcacaaguuugcaugc

SEQ ID NO: 254199 - RNA, 19 nt, Artificial Sequence
  Description of Artificial Sequence: Synthetic oligonucleotide
cuacccggacauucaaggg

SEQ ID NO: 254200 - RNA, 19 nt, Artificial Sequence
  Description of Artificial Sequence: Synthetic oligonucleotide
cuugagcuggcagagucgc

SEQ ID NO: 254201 - RNA, 19 nt, Artificial Sequence
  Description of Artificial Sequence: Synthetic oligonucleotide
caacucaugggcgauugag

SEQ ID NO: 254202 - RNA, 19 nt, Artificial Sequence
  Description of Artificial Sequence: Synthetic oligonucleotide
ggaaagaugcacguacuag

SEQ ID NO: 254203 - RNA, 19 nt, Artificial Sequence
  Description of Artificial Sequence: Synthetic oligonucleotide
agccugugaaugcggugcc

SEQ ID NO: 254204 - RNA, 19 nt, Artificial Sequence
  Description of Artificial Sequence: Synthetic oligonucleotide
cuagacccaagcuguggcc

SEQ ID NO: 254205 - RNA, 19 nt, Artificial Sequence
  Description of Artificial Sequence: Synthetic oligonucleotide
gucacaaucgucccugcga

SEQ ID NO: 254206 - RNA, 19 nt, Artificial Sequence
  Description of Artificial Sequence: Synthetic oligonucleotide
ugcuacccggacauucaag

SEQ ID NO: 254207 - RNA, 19 nt, Artificial Sequence
  Description of Artificial Sequence: Synthetic oligonucleotide
ugcuaggcuaaccgugggc

SEQ ID NO: 254208 - RNA, 19 nt, Artificial Sequence
  Description of Artificial Sequence: Synthetic oligonucleotide
ugggugccggcccuguggg

SEQ ID NO: 254209 - RNA, 19 nt, Artificial Sequence
  Description of Artificial Sequence: Synthetic oligonucleotide
gagcugguugcuuugagcu

SEQ ID NO: 254210 - RNA, 19 nt, Artificial Sequence
  Description of Artificial Sequence: Synthetic oligonucleotide
gaguugggcggccagggac

SEQ ID NO: 254211 - RNA, 19 nt, Artificial Sequence
  Description of Artificial Sequence: Synthetic oligonucleotide
aagucgggguaccuucuga

SEQ ID NO: 254212 - RNA, 19 nt, Artificial Sequence
  Description of Artificial Sequence: Synthetic oligonucleotide
aaaucuguggaggccucca

SEQ ID NO: 254213 - RNA, 19 nt, Artificial Sequence
  Description of Artificial Sequence: Synthetic oligonucleotide
cuaucauggggcagucgag

SEQ ID NO: 254214 - RNA, 19 nt, Artificial Sequence
  Description of Artificial Sequence: Synthetic oligonucleotide
cuccugagaagucaggaga

SEQ ID NO: 254215 - RNA, 19 nt, Artificial Sequence
  Description of Artificial Sequence: Synthetic oligonucleotide
ggcaaccaaaccuccagag

SEQ ID NO: 254216 - RNA, 19 nt, Artificial Sequence
  Description of Artificial Sequence: Synthetic oligonucleotide
aacuccuaagaugcuugug

SEQ ID NO: 254217 - RNA, 19 nt, Artificial Sequence
  Description of Artificial Sequence: Synthetic oligonucleotide
caccaaaccccugaucccg

SEQ ID NO: 254218 - RNA, 19 nt, Artificial Sequence
  Description of Artificial Sequence: Synthetic oligonucleotide
agguagagcgaggauacug

SEQ ID NO: 254219 - RNA, 19 nt, Artificial Sequence
  Description of Artificial Sequence: Synthetic oligonucleotide
aacaaacaaucccgcuuaa

SEQ ID NO: 254220 - RNA, 19 nt, Artificial Sequence
  Description of Artificial Sequence: Synthetic oligonucleotide
gugaaucguggucuagacc

SEQ ID NO: 254221 - RNA, 19 nt, Artificial Sequence
  Description of Artificial Sequence: Synthetic oligonucleotide
cugcaguccagcugcgucc

SEQ ID NO: 254222 - RNA, 19 nt, Artificial Sequence
  Description of Artificial Sequence: Synthetic oligonucleotide
auaagaggcacagcgccca

SEQ ID NO: 254223 - RNA, 19 nt, Artificial Sequence
  Description of Artificial Sequence: Synthetic oligonucleotide
cuaaccgugggcuguccug

SEQ ID NO: 254224 - RNA, 19 nt, Artificial Sequence
  Description of Artificial Sequence: Synthetic oligonucleotide
ugaaugcggugccauccca

SEQ ID NO: 254225 - RNA, 19 nt, Artificial Sequence
  Description of Artificial Sequence: Synthetic oligonucleotide
uuagugccuggcaucugcu

SEQ ID NO: 254226 - RNA, 19 nt, Artificial Sequence
  Description of Artificial Sequence: Synthetic oligonucleotide
ccaaggauccauucagggg

SEQ ID NO: 254227 - RNA, 19 nt, Artificial Sequence
  Description of Artificial Sequence: Synthetic oligonucleotide
agcugccuaucccaucuag

SEQ ID NO: 254228 - RNA, 19 nt, Artificial Sequence
  Description of Artificial Sequence: Synthetic oligonucleotide
auuaccccgaguguuggcu

SEQ ID NO: 254229 - RNA, 19 nt, Artificial Sequence
  Description of Artificial Sequence: Synthetic oligonucleotide
uguccggcgccaguggagg

SEQ ID NO: 254230 - RNA, 19 nt, Artificial Sequence
  Description of Artificial Sequence: Synthetic oligonucleotide
acaaacaaucccgcuuaag

SEQ ID NO: 254231 - RNA, 19 nt, Artificial Sequence
  Description of Artificial Sequence: Synthetic oligonucleotide
cucgccgggguccacaaac

SEQ ID NO: 254232 - RNA, 19 nt, Artificial Sequence
  Description of Artificial Sequence: Synthetic oligonucleotide
cugccauuggggcugcgcc

SEQ ID NO: 254233 - RNA, 19 nt, Artificial Sequence
  Description of Artificial Sequence: Synthetic oligonucleotide
accuagaucucuguucugu

SEQ ID NO: 254234 - RNA, 19 nt, Artificial Sequence
  Description of Artificial Sequence: Synthetic oligonucleotide
ccuuuaagccuuaaaucug

SEQ ID NO: 254235 - RNA, 19 nt, Artificial Sequence
  Description of Artificial Sequence: Synthetic oligonucleotide
agcgacggucaaugcacac

SEQ ID NO: 254236 - RNA, 19 nt, Artificial Sequence
  Description of Artificial Sequence: Synthetic oligonucleotide
uguucuguauaagcuccga

SEQ ID NO: 254237 - RNA, 19 nt, Artificial Sequence
  Description of Artificial Sequence: Synthetic oligonucleotide
gacgaccugccucuccaag

SEQ ID NO: 254238 - RNA, 19 nt, Artificial Sequence
  Description of Artificial Sequence: Synthetic oligonucleotide
cugccaacuugcugggugc

SEQ ID NO: 254239 - RNA, 19 nt, Artificial Sequence
  Description of Artificial Sequence: Synthetic oligonucleotide
agccuuaaaucugggcagg

SEQ ID NO: 254240 - RNA, 19 nt, Artificial Sequence
  Description of Artificial Sequence: Synthetic oligonucleotide
aggaggcaaccaaaccucc

SEQ ID NO: 254241 - RNA, 19 nt, Artificial Sequence
  Description of Artificial Sequence: Synthetic oligonucleotide
cacggugccaguagcuggc

SEQ ID NO: 254242 - RNA, 19 nt, Artificial Sequence
  Description of Artificial Sequence: Synthetic oligonucleotide
uuaccccgaguguuggcug

SEQ ID NO: 254243 - RNA, 19 nt, Artificial Sequence
  Description of Artificial Sequence: Synthetic oligonucleotide
gacagccguucaaagagac

SEQ ID NO: 254244 - RNA, 19 nt, Artificial Sequence
  Description of Artificial Sequence: Synthetic oligonucleotide
gaaugcggugccaucccag

SEQ ID NO: 254245 - RNA, 19 nt, Artificial Sequence
  Description of Artificial Sequence: Synthetic oligonucleotide
ugcacguacuagcuggcuu

SEQ ID NO: 254246 - RNA, 19 nt, Artificial Sequence
  Description of Artificial Sequence: Synthetic oligonucleotide
gguagagcgaggauacugc

SEQ ID NO: 254247 - RNA, 19 nt, Artificial Sequence
  Description of Artificial Sequence: Synthetic oligonucleotide
caggcaagucacaaucguc

SEQ ID NO: 254248 - RNA, 19 nt, Artificial Sequence
  Description of Artificial Sequence: Synthetic oligonucleotide
ugccaucccagaaggucug

SEQ ID NO: 254249 - RNA, 19 nt, Artificial Sequence
  Description of Artificial Sequence: Synthetic oligonucleotide
guuaacaaacaaucccgcu

SEQ ID NO: 254250 - RNA, 19 nt, Artificial Sequence
  Description of Artificial Sequence: Synthetic oligonucleotide
gaagucgggguaccuucug

SEQ ID NO: 254251 - RNA, 19 nt, Artificial Sequence
  Description of Artificial Sequence: Synthetic oligonucleotide
uccugugcucccaggagau

SEQ ID NO: 254252 - RNA, 19 nt, Artificial Sequence
  Description of Artificial Sequence: Synthetic oligonucleotide
ucccaggugaaucgugguc

SEQ ID NO: 254253 - RNA, 19 nt, Artificial Sequence
  Description of Artificial Sequence: Synthetic oligonucleotide
ugccucaccacagggucag

SEQ ID NO: 254254 - RNA, 19 nt, Artificial Sequence
  Description of Artificial Sequence: Synthetic oligonucleotide
cuccuaagaugcuugugga

SEQ ID NO: 254255 - RNA, 19 nt, Artificial Sequence
  Description of Artificial Sequence: Synthetic oligonucleotide
acuaucuccugggcagaac

SEQ ID NO: 254256 - RNA, 19 nt, Artificial Sequence
  Description of Artificial Sequence: Synthetic oligonucleotide
gugaaugcggugccauccc

SEQ ID NO: 254257 - RNA, 19 nt, Artificial Sequence
  Description of Artificial Sequence: Synthetic oligonucleotide
agaaugugucuagcagggg

SEQ ID NO: 254258 - RNA, 19 nt, Artificial Sequence
  Description of Artificial Sequence: Synthetic oligonucleotide
auaugacucucaccaucca

SEQ ID NO: 254259 - RNA, 19 nt, Artificial Sequence
  Description of Artificial Sequence: Synthetic oligonucleotide
ggugaaucguggucuagac

SEQ ID NO: 254260 - RNA, 19 nt, Artificial Sequence
  Description of Artificial Sequence: Synthetic oligonucleotide
gggauuggaucugucagcc

SEQ ID NO: 254261 - RNA, 19 nt, Artificial Sequence
  Description of Artificial Sequence: Synthetic oligonucleotide
gaugcacguacuagcuggc

SEQ ID NO: 254262 - RNA, 19 nt, Artificial Sequence
  Description of Artificial Sequence: Synthetic oligonucleotide
aguucaaaccugguaggaa

SEQ ID NO: 254263 - RNA, 19 nt, Artificial Sequence
  Description of Artificial Sequence: Synthetic oligonucleotide
uguuggaagucgggguacc

SEQ ID NO: 254264 - RNA, 19 nt, Artificial Sequence
  Description of Artificial Sequence: Synthetic oligonucleotide
cuaggcuaaccgugggcug

SEQ ID NO: 254265 - RNA, 19 nt, Artificial Sequence
  Description of Artificial Sequence: Synthetic oligonucleotide
uaacaacaggaggcugagg

SEQ ID NO: 254266 - RNA, 19 nt, Artificial Sequence
  Description of Artificial Sequence: Synthetic oligonucleotide
gucgggguaccuucugacc

SEQ ID NO: 254267 - RNA, 19 nt, Artificial Sequence
  Description of Artificial Sequence: Synthetic oligonucleotide
ugguaggccccugagacuu

SEQ ID NO: 254268 - RNA, 19 nt, Artificial Sequence
  Description of Artificial Sequence: Synthetic oligonucleotide
acaaucccgcuuaagccug

SEQ ID NO: 254269 - RNA, 19 nt, Artificial Sequence
  Description of Artificial Sequence: Synthetic oligonucleotide
guggacagccguucaaaga

SEQ ID NO: 254270 - RNA, 19 nt, Artificial Sequence
  Description of Artificial Sequence: Synthetic oligonucleotide
cugaaguucaaaccuggua

SEQ ID NO: 254271 - RNA, 19 nt, Artificial Sequence
  Description of Artificial Sequence: Synthetic oligonucleotide
ccgagugccaucaggcugg

SEQ ID NO: 254272 - RNA, 19 nt, Artificial Sequence
  Description of Artificial Sequence: Synthetic oligonucleotide
cagaguugggcggccaggg

SEQ ID NO: 254273 - RNA, 19 nt, Artificial Sequence
  Description of Artificial Sequence: Synthetic oligonucleotide
uaggcuaaccgugggcugu

SEQ ID NO: 254274 - RNA, 19 nt, Artificial Sequence
  Description of Artificial Sequence: Synthetic oligonucleotide
guuugguaggccccugaga

SEQ ID NO: 254275 - RNA, 19 nt, Artificial Sequence
  Description of Artificial Sequence: Synthetic oligonucleotide
ugcuuugagcugagucaug

SEQ ID NO: 254276 - RNA, 19 nt, Artificial Sequence
  Description of Artificial Sequence: Synthetic oligonucleotide
aggcaaccaaaccuccaga

SEQ ID NO: 254277 - RNA, 19 nt, Artificial Sequence
  Description of Artificial Sequence: Synthetic oligonucleotide
aggauuugguugggcugcc

SEQ ID NO: 254278 - RNA, 19 nt, Artificial Sequence
  Description of Artificial Sequence: Synthetic oligonucleotide
ggggauuggaucugucagc

SEQ ID NO: 254279 - RNA, 19 nt, Artificial Sequence
  Description of Artificial Sequence: Synthetic oligonucleotide
gggaccuagaucucuguuc

SEQ ID NO: 254280 - RNA, 19 nt, Artificial Sequence
  Description of Artificial Sequence: Synthetic oligonucleotide
gagcgaggauacugcuggg

SEQ ID NO: 254281 - RNA, 19 nt, Artificial Sequence
  Description of Artificial Sequence: Synthetic oligonucleotide
ugggcgauugaggaagcaa

SEQ ID NO: 254282 - RNA, 19 nt, Artificial Sequence
  Description of Artificial Sequence: Synthetic oligonucleotide
ggucuuggauccgagaaca

SEQ ID NO: 254283 - RNA, 19 nt, Artificial Sequence
  Description of Artificial Sequence: Synthetic oligonucleotide
caugggcgauugaggaagc

SEQ ID NO: 254284 - RNA, 19 nt, Artificial Sequence
  Description of Artificial Sequence: Synthetic oligonucleotide
aggugcacccagcugcagu

SEQ ID NO: 254285 - RNA, 19 nt, Artificial Sequence
  Description of Artificial Sequence: Synthetic oligonucleotide
caaaccccugaucccggag

SEQ ID NO: 254286 - RNA, 19 nt, Artificial Sequence
  Description of Artificial Sequence: Synthetic oligonucleotide
caugccaacuuggagcaca

SEQ ID NO: 254287 - RNA, 19 nt, Artificial Sequence
  Description of Artificial Sequence: Synthetic oligonucleotide
accgugggcuguccugacg

SEQ ID NO: 254288 - RNA, 19 nt, Artificial Sequence
  Description of Artificial Sequence: Synthetic oligonucleotide
ggcugcccuauauuggcag

SEQ ID NO: 254289 - RNA, 19 nt, Artificial Sequence
  Description of Artificial Sequence: Synthetic oligonucleotide
cugcuaggcuaaccguggg

SEQ ID NO: 254290 - RNA, 19 nt, Artificial Sequence
  Description of Artificial Sequence: Synthetic oligonucleotide
ugguugggcugcccuauau

SEQ ID NO: 254291 - RNA, 19 nt, Artificial Sequence
  Description of Artificial Sequence: Synthetic oligonucleotide
aaucguggucuagacccaa

SEQ ID NO: 254292 - RNA, 19 nt, Artificial Sequence
  Description of Artificial Sequence: Synthetic oligonucleotide
cguacuagcuggcuuagug

SEQ ID NO: 254293 - RNA, 19 nt, Artificial Sequence
  Description of Artificial Sequence: Synthetic oligonucleotide
uaggcccacaagugcuacc

SEQ ID NO: 254294 - RNA, 19 nt, Artificial Sequence
  Description of Artificial Sequence: Synthetic oligonucleotide
gacuacccgagugccauca

SEQ ID NO: 254295 - RNA, 19 nt, Artificial Sequence
  Description of Artificial Sequence: Synthetic oligonucleotide
augccucuaggcccacaag

SEQ ID NO: 254296 - RNA, 19 nt, Artificial Sequence
  Description of Artificial Sequence: Synthetic oligonucleotide
gcccuauauuggcagcugg

SEQ ID NO: 254297 - RNA, 19 nt, Artificial Sequence
  Description of Artificial Sequence: Synthetic oligonucleotide
gaccuagaucucuguucug

SEQ ID NO: 254298 - RNA, 19 nt, Artificial Sequence
  Description of Artificial Sequence: Synthetic oligonucleotide
ugcccuauauuggcagcug

SEQ ID NO: 254299 - RNA, 19 nt, Artificial Sequence
  Description of Artificial Sequence: Synthetic oligonucleotide
ggcaggaggcaaccaaacc

SEQ ID NO: 254300 - RNA, 19 nt, Artificial Sequence
  Description of Artificial Sequence: Synthetic oligonucleotide
ccucugaauuaucagccac

SEQ ID NO: 254301 - RNA, 19 nt, Artificial Sequence
  Description of Artificial Sequence: Synthetic oligonucleotide
accugguaggaaaucugug

SEQ ID NO: 254302 - RNA, 19 nt, Artificial Sequence
  Description of Artificial Sequence: Synthetic oligonucleotide
agacccaagcuguggccca

SEQ ID NO: 254303 - RNA, 19 nt, Artificial Sequence
  Description of Artificial Sequence: Synthetic oligonucleotide
aacuaucuccugggcagaa

SEQ ID NO: 254304 - RNA, 19 nt, Artificial Sequence
  Description of Artificial Sequence: Synthetic oligonucleotide
cugacgaccugccucucca

SEQ ID NO: 254305 - RNA, 19 nt, Artificial Sequence
  Description of Artificial Sequence: Synthetic oligonucleotide
ggaccuagaucucuguucu

SEQ ID NO: 254306 - RNA, 19 nt, Artificial Sequence
  Description of Artificial Sequence: Synthetic oligonucleotide
acuacccgagugccaucag

SEQ ID NO: 254307 - RNA, 19 nt, Artificial Sequence
  Description of Artificial Sequence: Synthetic oligonucleotide
caaucgucccugcgagggc

SEQ ID NO: 254308 - RNA, 19 nt, Artificial Sequence
  Description of Artificial Sequence: Synthetic oligonucleotide
gcagcgacggucaaugcac

SEQ ID NO: 254309 - RNA, 19 nt, Artificial Sequence
  Description of Artificial Sequence: Synthetic oligonucleotide
cuguccggcgccaguggag

SEQ ID NO: 254310 - RNA, 19 nt, Artificial Sequence
  Description of Artificial Sequence: Synthetic oligonucleotide
ugggcauaagaggcacagc

SEQ ID NO: 254311 - RNA, 19 nt, Artificial Sequence
  Description of Artificial Sequence: Synthetic oligonucleotide
gucuaacaggacagccggg

SEQ ID NO: 254312 - RNA, 19 nt, Artificial Sequence
  Description of Artificial Sequence: Synthetic oligonucleotide
gaccaccaaaccccugauc

SEQ ID NO: 254313 - RNA, 19 nt, Artificial Sequence
  Description of Artificial Sequence: Synthetic oligonucleotide
caaggacaacugcucccag

SEQ ID NO: 254314 - RNA, 19 nt, Artificial Sequence
  Description of Artificial Sequence: Synthetic oligonucleotide
uaccccgaguguuggcugu

SEQ ID NO: 254315 - RNA, 19 nt, Artificial Sequence
  Description of Artificial Sequence: Synthetic oligonucleotide
gggcacguaacugccauug

SEQ ID NO: 254316 - RNA, 19 nt, Artificial Sequence
  Description of Artificial Sequence: Synthetic oligonucleotide
gguaccuucugaccucuga

SEQ ID NO: 254317 - RNA, 19 nt, Artificial Sequence
  Description of Artificial Sequence: Synthetic oligonucleotide
cuguuggaagucgggguac

SEQ ID NO: 254318 - RNA, 19 nt, Artificial Sequence
  Description of Artificial Sequence: Synthetic oligonucleotide
gcugccuaucccaucuagg

SEQ ID NO: 254319 - RNA, 19 nt, Artificial Sequence
  Description of Artificial Sequence: Synthetic oligonucleotide
gaccuggacaaggacaacu

SEQ ID NO: 254320 - RNA, 19 nt, Artificial Sequence
  Description of Artificial Sequence: Synthetic oligonucleotide
ccagcugcgucccaucggc

SEQ ID NO: 254321 - RNA, 19 nt, Artificial Sequence
  Description of Artificial Sequence: Synthetic oligonucleotide
ggcacguaacugccauugg

SEQ ID NO: 254322 - RNA, 19 nt, Artificial Sequence
  Description of Artificial Sequence: Synthetic oligonucleotide
uucaaggggcuggaagaau

SEQ ID NO: 254323 - RNA, 19 nt, Artificial Sequence
  Description of Artificial Sequence: Synthetic oligonucleotide
agggaccuagaucucuguu

SEQ ID NO: 254324 - RNA, 19 nt, Artificial Sequence
  Description of Artificial Sequence: Synthetic oligonucleotide
ccucuaggcccacaagugc

SEQ ID NO: 254325 - RNA, 19 nt, Artificial Sequence
  Description of Artificial Sequence: Synthetic oligonucleotide
aacgagccagggugacccu

SEQ ID NO: 254326 - RNA, 19 nt, Artificial Sequence
  Description of Artificial Sequence: Synthetic oligonucleotide
aggcauuaccccgaguguu

SEQ ID NO: 254327 - RNA, 19 nt, Artificial Sequence
  Description of Artificial Sequence: Synthetic oligonucleotide
cgcccaugcauacacacag

SEQ ID NO: 254328 - RNA, 19 nt, Artificial Sequence
  Description of Artificial Sequence: Synthetic oligonucleotide
gcaaccaaaccuccagaga

SEQ ID NO: 254329 - RNA, 19 nt, Artificial Sequence
  Description of Artificial Sequence: Synthetic oligonucleotide
cacuucugcuaggcuaacc

SEQ ID NO: 254330 - RNA, 19 nt, Artificial Sequence
  Description of Artificial Sequence: Synthetic oligonucleotide
cugugaaugcggugccauc

SEQ ID NO: 254331 - RNA, 19 nt, Artificial Sequence
  Description of Artificial Sequence: Synthetic oligonucleotide
gggcgauugaggaagcaac

SEQ ID NO: 254332 - RNA, 19 nt, Artificial Sequence
  Description of Artificial Sequence: Synthetic oligonucleotide
uuguggagugguccauauu

SEQ ID NO: 254333 - RNA, 19 nt, Artificial Sequence
  Description of Artificial Sequence: Synthetic oligonucleotide
ugugucccucacugacuac

SEQ ID NO: 254334 - RNA, 19 nt, Artificial Sequence
  Description of Artificial Sequence: Synthetic oligonucleotide
gagaccaacgagccagggu

SEQ ID NO: 254335 - RNA, 19 nt, Artificial Sequence
  Description of Artificial Sequence: Synthetic oligonucleotide
ccgagauaugacucucacc

SEQ ID NO: 254336 - RNA, 19 nt, Artificial Sequence
  Description of Artificial Sequence: Synthetic oligonucleotide
gaaucguggucuagaccca

SEQ ID NO: 254337 - RNA, 19 nt, Artificial Sequence
  Description of Artificial Sequence: Synthetic oligonucleotide
ccgcuuaagccugugaaug

SEQ ID NO: 254338 - RNA, 19 nt, Artificial Sequence
  Description of Artificial Sequence: Synthetic oligonucleotide
gaacuaucuccugggcaga

SEQ ID NO: 254339 - RNA, 19 nt, Artificial Sequence
  Description of Artificial Sequence: Synthetic oligonucleotide
cacguacuagcuggcuuag

SEQ ID NO: 254340 - RNA, 19 nt, Artificial Sequence
  Description of Artificial Sequence: Synthetic oligonucleotide
guauaagcuccgagauaug

SEQ ID NO: 254341 - RNA, 19 nt, Artificial Sequence
  Description of Artificial Sequence: Synthetic oligonucleotide
ggcagcgacggucaaugca

SEQ ID NO: 254342 - RNA, 19 nt, Artificial Sequence
  Description of Artificial Sequence: Synthetic oligonucleotide
cccguggucagggagcugg

SEQ ID NO: 254343 - RNA, 19 nt, Artificial Sequence
  Description of Artificial Sequence: Synthetic oligonucleotide
gagggagaccaacgagcca

SEQ ID NO: 254344 - RNA, 19 nt, Artificial Sequence
  Description of Artificial Sequence: Synthetic oligonucleotide
guagagcgaggauacugcu

SEQ ID NO: 254345 - RNA, 19 nt, Artificial Sequence
  Description of Artificial Sequence: Synthetic oligonucleotide
ccauauucacaccuccuga

SEQ ID NO: 254346 - RNA, 19 nt, Artificial Sequence
  Description of Artificial Sequence: Synthetic oligonucleotide
ccacaccagaguugggcgg

SEQ ID NO: 254347 - RNA, 19 nt, Artificial Sequence
  Description of Artificial Sequence: Synthetic oligonucleotide
ugucuagcaggggcgccac

SEQ ID NO: 254348 - RNA, 19 nt, Artificial Sequence
  Description of Artificial Sequence: Synthetic oligonucleotide
aucccgcuuaagccuguga

SEQ ID NO: 254349 - RNA, 19 nt, Artificial Sequence
  Description of Artificial Sequence: Synthetic oligonucleotide
gacggucaaugcacaccag

SEQ ID NO: 254350 - RNA, 19 nt, Artificial Sequence
  Description of Artificial Sequence: Synthetic oligonucleotide
acuagcuggcuuagugccu

SEQ ID NO: 254351 - RNA, 19 nt, Artificial Sequence
  Description of Artificial Sequence: Synthetic oligonucleotide
gagauaugacucucaccau

SEQ ID NO: 254352 - RNA, 19 nt, Artificial Sequence
  Description of Artificial Sequence: Synthetic oligonucleotide
caaguuugcaugccaacuu

SEQ ID NO: 254353 - RNA, 19 nt, Artificial Sequence
  Description of Artificial Sequence: Synthetic oligonucleotide
ucgcugaugcaggcgggca

SEQ ID NO: 254354 - RNA, 19 nt, Artificial Sequence
  Description of Artificial Sequence: Synthetic oligonucleotide
ugccaacuugcugggugca

SEQ ID NO: 254355 - RNA, 19 nt, Artificial Sequence
  Description of Artificial Sequence: Synthetic oligonucleotide
ccuuaaaucugggcaggag

SEQ ID NO: 254356 - RNA, 19 nt, Artificial Sequence
  Description of Artificial Sequence: Synthetic oligonucleotide
gucucaggcagaccagucu

SEQ ID NO: 254357 - RNA, 19 nt, Artificial Sequence
  Description of Artificial Sequence: Synthetic oligonucleotide
cuccgagauaugacucuca

SEQ ID NO: 254358 - RNA, 19 nt, Artificial Sequence
  Description of Artificial Sequence: Synthetic oligonucleotide
aucguggucuagacccaag

SEQ ID NO: 254359 - RNA, 19 nt, Artificial Sequence
  Description of Artificial Sequence: Synthetic oligonucleotide
cugggugcaacuugcaguu

SEQ ID NO: 254360 - RNA, 19 nt, Artificial Sequence
  Description of Artificial Sequence: Synthetic oligonucleotide
acugacuacccgagugcca

SEQ ID NO: 254361 - RNA, 19 nt, Artificial Sequence
  Description of Artificial Sequence: Synthetic oligonucleotide
cuucugcuaggcuaaccgu

SEQ ID NO: 254362 - RNA, 19 nt, Artificial Sequence
  Description of Artificial Sequence: Synthetic oligonucleotide
guaggccccugagacuuug

SEQ ID NO: 254363 - RNA, 19 nt, Artificial Sequence
  Description of Artificial Sequence: Synthetic oligonucleotide
aggcuaaccgugggcuguc

SEQ ID NO: 254364 - RNA, 19 nt, Artificial Sequence
  Description of Artificial Sequence: Synthetic oligonucleotide
ugacgaccugccucuccaa

SEQ ID NO: 254365 - RNA, 19 nt, Artificial Sequence
  Description of Artificial Sequence: Synthetic oligonucleotide
cgcuuaagccugugaaugc

SEQ ID NO: 254366 - RNA, 19 nt, Artificial Sequence
  Description of Artificial Sequence: Synthetic oligonucleotide
cccgagugccaucaggcug

SEQ ID NO: 254367 - RNA, 19 nt, Artificial Sequence
  Description of Artificial Sequence: Synthetic oligonucleotide
gcgacggucaaugcacacc

SEQ ID NO: 254368 - RNA, 19 nt, Artificial Sequence
  Description of Artificial Sequence: Synthetic oligonucleotide
cgucccaucggcucccagg

SEQ ID NO: 254369 - RNA, 19 nt, Artificial Sequence
  Description of Artificial Sequence: Synthetic oligonucleotide
gcacguacuagcuggcuua

SEQ ID NO: 254370 - RNA, 19 nt, Artificial Sequence
  Description of Artificial Sequence: Synthetic oligonucleotide
ugacuacccgagugccauc

SEQ ID NO: 254371 - RNA, 19 nt, Artificial Sequence
  Description of Artificial Sequence: Synthetic oligonucleotide
cugcgagggcggcacugcc

SEQ ID NO: 254372 - RNA, 19 nt, Artificial Sequence
  Description of Artificial Sequence: Synthetic oligonucleotide
ggacuaggaccaauaacaa

SEQ ID NO: 254373 - RNA, 19 nt, Artificial Sequence
  Description of Artificial Sequence: Synthetic oligonucleotide
ugaugggugccggcccugu

SEQ ID NO: 254374 - RNA, 19 nt, Artificial Sequence
  Description of Artificial Sequence: Synthetic oligonucleotide
cuggcuuagugccuggcau

SEQ ID NO: 254375 - RNA, 19 nt, Artificial Sequence
  Description of Artificial Sequence: Synthetic oligonucleotide
ggcccacaagugcuacccg

SEQ ID NO: 254376 - RNA, 19 nt, Artificial Sequence
  Description of Artificial Sequence: Synthetic oligonucleotide
gugucuagcaggggcgcca

SEQ ID NO: 254377 - RNA, 19 nt, Artificial Sequence
  Description of Artificial Sequence: Synthetic oligonucleotide
cuuguggagugguccauau

SEQ ID NO: 254378 - RNA, 19 nt, Artificial Sequence
  Description of Artificial Sequence: Synthetic oligonucleotide
ccccugagacuuugggugc

SEQ ID NO: 254379 - RNA, 19 nt, Artificial Sequence
  Description of Artificial Sequence: Synthetic oligonucleotide
gcuggcaccaaggaggacu

SEQ ID NO: 254380 - RNA, 19 nt, Artificial Sequence
  Description of Artificial Sequence: Synthetic oligonucleotide
gcgauugaggaagcaacuc

SEQ ID NO: 254381 - RNA, 19 nt, Artificial Sequence
  Description of Artificial Sequence: Synthetic oligonucleotide
gccccucuggcacuguaac

SEQ ID NO: 254382 - RNA, 19 nt, Artificial Sequence
  Description of Artificial Sequence: Synthetic oligonucleotide
aucgucccugcgagggcgg

SEQ ID NO: 254383 - RNA, 19 nt, Artificial Sequence
  Description of Artificial Sequence: Synthetic oligonucleotide
cuaucccaucuaggagggc

SEQ ID NO: 254384 - RNA, 19 nt, Artificial Sequence
  Description of Artificial Sequence: Synthetic oligonucleotide
cccuauauuggcagcugga

SEQ ID NO: 254385 - RNA, 19 nt, Artificial Sequence
  Description of Artificial Sequence: Synthetic oligonucleotide
gcuaggcuaaccgugggcu

SEQ ID NO: 254386 - RNA, 19 nt, Artificial Sequence
  Description of Artificial Sequence: Synthetic oligonucleotide
ugugcccucuguggagguc

SEQ ID NO: 254387 - RNA, 19 nt, Artificial Sequence
  Description of Artificial Sequence: Synthetic oligonucleotide
ggcacuaucauggggcagu

SEQ ID NO: 254388 - RNA, 19 nt, Artificial Sequence
  Description of Artificial Sequence: Synthetic oligonucleotide
caggaccaccaaaccccug

SEQ ID NO: 254389 - RNA, 19 nt, Artificial Sequence
  Description of Artificial Sequence: Synthetic oligonucleotide
ggaguucugaauggcccca

SEQ ID NO: 254390 - RNA, 19 nt, Artificial Sequence
  Description of Artificial Sequence: Synthetic oligonucleotide
gugcuacccggacauucaa

SEQ ID NO: 254391 - RNA, 19 nt, Artificial Sequence
  Description of Artificial Sequence: Synthetic oligonucleotide
augggcgauugaggaagca

SEQ ID NO: 254392 - RNA, 19 nt, Artificial Sequence
  Description of Artificial Sequence: Synthetic oligonucleotide
cuucggcauuccugugcuc

SEQ ID NO: 254393 - RNA, 19 nt, Artificial Sequence
  Description of Artificial Sequence: Synthetic oligonucleotide
caacuccuaagaugcuugu

SEQ ID NO: 254394 - RNA, 19 nt, Artificial Sequence
  Description of Artificial Sequence: Synthetic oligonucleotide
acggggacauaggggccag

SEQ ID NO: 254395 - RNA, 19 nt, Artificial Sequence
  Description of Artificial Sequence: Synthetic oligonucleotide
cugacuacccgagugccau

SEQ ID NO: 254396 - RNA, 19 nt, Artificial Sequence
  Description of Artificial Sequence: Synthetic oligonucleotide
gcgggcacggugccaguag

SEQ ID NO: 254397 - RNA, 19 nt, Artificial Sequence
  Description of Artificial Sequence: Synthetic oligonucleotide
ggucuagacccaagcugug

SEQ ID NO: 254398 - RNA, 19 nt, Artificial Sequence
  Description of Artificial Sequence: Synthetic oligonucleotide
gccugucggcugcaguugc

SEQ ID NO: 254399 - RNA, 19 nt, Artificial Sequence
  Description of Artificial Sequence: Synthetic oligonucleotide
gccggguuggagcucaucu

SEQ ID NO: 254400 - RNA, 19 nt, Artificial Sequence
  Description of Artificial Sequence: Synthetic oligonucleotide
gcuucggcauuccugugcu

SEQ ID NO: 254401 - RNA, 19 nt, Artificial Sequence
  Description of Artificial Sequence: Synthetic oligonucleotide
ccugacgaccugccucucc

SEQ ID NO: 254402 - RNA, 19 nt, Artificial Sequence
  Description of Artificial Sequence: Synthetic oligonucleotide
gucaugcagucaggaggug

SEQ ID NO: 254403 - RNA, 19 nt, Artificial Sequence
  Description of Artificial Sequence: Synthetic oligonucleotide
agccggguuggagcucauc

SEQ ID NO: 254404 - RNA, 19 nt, Artificial Sequence
  Description of Artificial Sequence: Synthetic oligonucleotide
caggguggacagccguuca

SEQ ID NO: 254405 - RNA, 19 nt, Artificial Sequence
  Description of Artificial Sequence: Synthetic oligonucleotide
gcaggggcgccaccucuag

SEQ ID NO: 254406 - RNA, 19 nt, Artificial Sequence
  Description of Artificial Sequence: Synthetic oligonucleotide
ugggugcaacuugcaguuc

SEQ ID NO: 254407 - RNA, 19 nt, Artificial Sequence
  Description of Artificial Sequence: Synthetic oligonucleotide
aggucgugguggguccaug

SEQ ID NO: 254408 - RNA, 19 nt, Artificial Sequence
  Description of Artificial Sequence: Synthetic oligonucleotide
gcuccgagauaugacucuc

SEQ ID NO: 254409 - RNA, 19 nt, Artificial Sequence
  Description of Artificial Sequence: Synthetic oligonucleotide
ugguugcuuugagcugagu

SEQ ID NO: 254410 - RNA, 19 nt, Artificial Sequence
  Description of Artificial Sequence: Synthetic oligonucleotide
cccacaagugcuacccgga

SEQ ID NO: 254411 - RNA, 19 nt, Artificial Sequence
  Description of Artificial Sequence: Synthetic oligonucleotide
ggacauucaaggggcugga

SEQ ID NO: 254412 - RNA, 19 nt, Artificial Sequence
  Description of Artificial Sequence: Synthetic oligonucleotide
acguacuagcuggcuuagu

SEQ ID NO: 254413 - RNA, 19 nt, Artificial Sequence
  Description of Artificial Sequence: Synthetic oligonucleotide
ggguuugguaggccccuga

SEQ ID NO: 254414 - RNA, 19 nt, Artificial Sequence
  Description of Artificial Sequence: Synthetic oligonucleotide
gcaccggaaagaugcacgu

SEQ ID NO: 254415 - RNA, 19 nt, Artificial Sequence
  Description of Artificial Sequence: Synthetic oligonucleotide
ggcacagcgcccaugcaua

SEQ ID NO: 254416 - RNA, 19 nt, Artificial Sequence
  Description of Artificial Sequence: Synthetic oligonucleotide
ggcgauugaggaagcaacu

SEQ ID NO: 254417 - RNA, 19 nt, Artificial Sequence
  Description of Artificial Sequence: Synthetic oligonucleotide
ccccugaucccggagccag

SEQ ID NO: 254418 - RNA, 19 nt, Artificial Sequence
  Description of Artificial Sequence: Synthetic oligonucleotide
cuaacaggacagccggguu

SEQ ID NO: 254419 - RNA, 19 nt, Artificial Sequence
  Description of Artificial Sequence: Synthetic oligonucleotide
ggguuagguggcagcggcc

SEQ ID NO: 254420 - RNA, 19 nt, Artificial Sequence
  Description of Artificial Sequence: Synthetic oligonucleotide
ggccugucggcugcaguug

SEQ ID NO: 254421 - RNA, 19 nt, Artificial Sequence
  Description of Artificial Sequence: Synthetic oligonucleotide
guggagguccuggccguuc

SEQ ID NO: 254422 - RNA, 19 nt, Artificial Sequence
  Description of Artificial Sequence: Synthetic oligonucleotide
ccgugggcuguccugacga

SEQ ID NO: 254423 - RNA, 19 nt, Artificial Sequence
  Description of Artificial Sequence: Synthetic oligonucleotide
ggcuuagugccuggcaucu

SEQ ID NO: 254424 - RNA, 19 nt, Artificial Sequence
  Description of Artificial Sequence: Synthetic oligonucleotide
ggauccauucaggggccuc

SEQ ID NO: 254425 - RNA, 19 nt, Artificial Sequence
  Description of Artificial Sequence: Synthetic oligonucleotide
ucccugcgagggcggcacu

SEQ ID NO: 254426 - RNA, 19 nt, Artificial Sequence
  Description of Artificial Sequence: Synthetic oligonucleotide
ccaacgagccagggugacc

SEQ ID NO: 254427 - RNA, 19 nt, Artificial Sequence
  Description of Artificial Sequence: Synthetic oligonucleotide
acggugccaguagcuggca

SEQ ID NO: 254428 - RNA, 19 nt, Artificial Sequence
  Description of Artificial Sequence: Synthetic oligonucleotide
gggcaccggaaagaugcac

SEQ ID NO: 254429 - RNA, 19 nt, Artificial Sequence
  Description of Artificial Sequence: Synthetic oligonucleotide
cccugagacuuugggugcc

SEQ ID NO: 254430 - RNA, 19 nt, Artificial Sequence
  Description of Artificial Sequence: Synthetic oligonucleotide
gccuuaaaucugggcagga

SEQ ID NO: 254431 - RNA, 19 nt, Artificial Sequence
  Description of Artificial Sequence: Synthetic oligonucleotide
ccauggcauuugcuucggc

SEQ ID NO: 254432 - RNA, 19 nt, Artificial Sequence
  Description of Artificial Sequence: Synthetic oligonucleotide
cagcgcccaugcauacaca

SEQ ID NO: 254433 - RNA, 19 nt, Artificial Sequence
  Description of Artificial Sequence: Synthetic oligonucleotide
gucagcgggcagagggcga

SEQ ID NO: 254434 - RNA, 19 nt, Artificial Sequence
  Description of Artificial Sequence: Synthetic oligonucleotide
gcuuagugccuggcaucug

SEQ ID NO: 254435 - RNA, 19 nt, Artificial Sequence
  Description of Artificial Sequence: Synthetic oligonucleotide
gcacuaucauggggcaguc

SEQ ID NO: 254436 - RNA, 19 nt, Artificial Sequence
  Description of Artificial Sequence: Synthetic oligonucleotide
gcuaaccgugggcuguccu

SEQ ID NO: 254437 - RNA, 19 nt, Artificial Sequence
  Description of Artificial Sequence: Synthetic oligonucleotide
ggcuaaccgugggcugucc

SEQ ID NO: 254438 - RNA, 19 nt, Artificial Sequence
  Description of Artificial Sequence: Synthetic oligonucleotide
gccaccucuaguguccggu

SEQ ID NO: 254439 - RNA, 19 nt, Artificial Sequence
  Description of Artificial Sequence: Synthetic oligonucleotide
gucgaggcagcaggucugu

SEQ ID NO: 254440 - RNA, 19 nt, Artificial Sequence
  Description of Artificial Sequence: Synthetic oligonucleotide
cgggguaccuucugaccuc

SEQ ID NO: 254441 - RNA, 19 nt, Artificial Sequence
  Description of Artificial Sequence: Synthetic oligonucleotide
ggaccuggacaaggacaac

SEQ ID NO: 254442 - RNA, 19 nt, Artificial Sequence
  Description of Artificial Sequence: Synthetic oligonucleotide
ccggaaagaugcacguacu

SEQ ID NO: 254443 - RNA, 19 nt, Artificial Sequence
  Description of Artificial Sequence: Synthetic oligonucleotide
caccggaaagaugcacgua

SEQ ID NO: 254444 - RNA, 19 nt, Artificial Sequence
  Description of Artificial Sequence: Synthetic oligonucleotide
gggguuugguaggccccug

SEQ ID NO: 254445 - RNA, 19 nt, Artificial Sequence
  Description of Artificial Sequence: Synthetic oligonucleotide
ccaaaccccugaucccgga

SEQ ID NO: 254446 - RNA, 19 nt, Artificial Sequence
  Description of Artificial Sequence: Synthetic oligonucleotide
ccggcgccaguggaggaag

SEQ ID NO: 254447 - RNA, 19 nt, Artificial Sequence
  Description of Artificial Sequence: Synthetic oligonucleotide
cugcucgccgggguccaca

SEQ ID NO: 254448 - RNA, 19 nt, Artificial Sequence
  Description of Artificial Sequence: Synthetic oligonucleotide
caccagaguugggcggcca

SEQ ID NO: 254449 - RNA, 19 nt, Artificial Sequence
  Description of Artificial Sequence: Synthetic oligonucleotide
cguggucuagacccaagcu

SEQ ID NO: 254450 - RNA, 19 nt, Artificial Sequence
  Description of Artificial Sequence: Synthetic oligonucleotide
cggguuggagcucaucucu

SEQ ID NO: 254451 - RNA, 19 nt, Artificial Sequence
  Description of Artificial Sequence: Synthetic oligonucleotide
gccgggguccacaaacaua

SEQ ID NO: 254452 - RNA, 19 nt, Artificial Sequence
  Description of Artificial Sequence: Synthetic oligonucleotide
ccaucuaggagggcuuucu

SEQ ID NO: 254453 - RNA, 19 nt, Artificial Sequence
  Description of Artificial Sequence: Synthetic oligonucleotide
cacugcucgccggggucca

SEQ ID NO: 254454 - RNA, 19 nt, Artificial Sequence
  Description of Artificial Sequence: Synthetic oligonucleotide
cccgcuuaagccugugaau

SEQ ID NO: 254455 - RNA, 19 nt, Artificial Sequence
  Description of Artificial Sequence: Synthetic oligonucleotide
cuggccguucaggaggauu

SEQ ID NO: 254456 - RNA, 19 nt, Artificial Sequence
  Description of Artificial Sequence: Synthetic oligonucleotide
gcaugccaacuuggagcac

SEQ ID NO: 254457 - RNA, 19 nt, Artificial Sequence
  Description of Artificial Sequence: Synthetic oligonucleotide
cccugcgagggcggcacug

SEQ ID NO: 254458 - RNA, 19 nt, Artificial Sequence
  Description of Artificial Sequence: Synthetic oligonucleotide
ggucagggagcugguugcu

SEQ ID NO: 254459 - RNA, 19 nt, Artificial Sequence
  Description of Artificial Sequence: Synthetic oligonucleotide
cgccaccucuaguguccgg

SEQ ID NO: 254460 - RNA, 19 nt, Artificial Sequence
  Description of Artificial Sequence: Synthetic oligonucleotide
caggggcgccaccucuagu

SEQ ID NO: 254461 - RNA, 19 nt, Artificial Sequence
  Description of Artificial Sequence: Synthetic oligonucleotide
ccccucuggcacuguaacu

SEQ ID NO: 254462 - RNA, 19 nt, Artificial Sequence
  Description of Artificial Sequence: Synthetic oligonucleotide
caagugcuacccggacauu

SEQ ID NO: 254463 - RNA, 19 nt, Artificial Sequence
  Description of Artificial Sequence: Synthetic oligonucleotide
caggucgugguggguccau

SEQ ID NO: 254464 - RNA, 19 nt, Artificial Sequence
  Description of Artificial Sequence: Synthetic oligonucleotide
ccaccucuaguguccgguu

SEQ ID NO: 254465 - RNA, 19 nt, Artificial Sequence
  Description of Artificial Sequence: Synthetic oligonucleotide
gcccguggucagggagcug

SEQ ID NO: 254466 - RNA, 19 nt, Artificial Sequence
  Description of Artificial Sequence: Synthetic oligonucleotide
gggugccggcccugugggu

SEQ ID NO: 254467 - RNA, 19 nt, Artificial Sequence
  Description of Artificial Sequence: Synthetic oligonucleotide
ccguggucagggagcuggu

SEQ ID NO: 254468 - RNA, 19 nt, Artificial Sequence
  Description of Artificial Sequence: Synthetic oligonucleotide
gguaggccccugagacuuu

SEQ ID NO: 254469 - RNA, 19 nt, Artificial Sequence
  Description of Artificial Sequence: Synthetic oligonucleotide
cgccgggguccacaaacau

SEQ ID NO: 254470 - RNA, 19 nt, Artificial Sequence
  Description of Artificial Sequence: Synthetic oligonucleotide
cggcgccaguggaggaagu

SEQ ID NO: 254471 - RNA, 19 nt, Artificial Sequence
  Description of Artificial Sequence: Synthetic oligonucleotide
ccccgaguguuggcuguuu

SEQ ID NO: 254472 - RNA, 19 nt, Artificial Sequence
  Description of Artificial Sequence: Synthetic oligonucleotide
ccuggccguucaggaggau

SEQ ID NO: 254473 - RNA, 19 nt, Artificial Sequence
  Description of Artificial Sequence: Synthetic oligonucleotide
aauauaguaauauaugggg

SEQ ID NO: 254474 - RNA, 19 nt, Artificial Sequence
  Description of Artificial Sequence: Synthetic oligonucleotide
uauaaugugguuaugguca

SEQ ID NO: 254475 - RNA, 19 nt, Artificial Sequence
  Description of Artificial Sequence: Synthetic oligonucleotide
aaaagggucauguauguuc

SEQ ID NO: 254476 - RNA, 19 nt, Artificial Sequence
  Description of Artificial Sequence: Synthetic oligonucleotide
uuaguuaguaccuagauau

SEQ ID NO: 254477 - RNA, 19 nt, Artificial Sequence
  Description of Artificial Sequence: Synthetic oligonucleotide
aaacaaguagggcauauuc

SEQ ID NO: 254478 - RNA, 19 nt, Artificial Sequence
  Description of Artificial Sequence: Synthetic oligonucleotide
aauaaaacuaaacuacgau

SEQ ID NO: 254479 - RNA, 19 nt, Artificial Sequence
  Description of Artificial Sequence: Synthetic oligonucleotide
aaucauaccauaaaccuag

SEQ ID NO: 254480 - RNA, 19 nt, Artificial Sequence
  Description of Artificial Sequence: Synthetic oligonucleotide
aacaauauuuuauacuccu

SEQ ID NO: 254481 - RNA, 19 nt, Artificial Sequence
  Description of Artificial Sequence: Synthetic oligonucleotide
aaagugcuacuguagaagg

SEQ ID NO: 254482 - RNA, 19 nt, Artificial Sequence
  Description of Artificial Sequence: Synthetic oligonucleotide
ugagaauuaacauaagguc

SEQ ID NO: 254483 - RNA, 19 nt, Artificial Sequence
  Description of Artificial Sequence: Synthetic oligonucleotide
uuaccuucuagaauguccg

SEQ ID NO: 254484 - RNA, 19 nt, Artificial Sequence
  Description of Artificial Sequence: Synthetic oligonucleotide
acgauuaccuucuagaaug

SEQ ID NO: 254485 - RNA, 19 nt, Artificial Sequence
  Description of Artificial Sequence: Synthetic oligonucleotide
auuaacauaaggucaaacu

SEQ ID NO: 254486 - RNA, 19 nt, Artificial Sequence
  Description of Artificial Sequence: Synthetic oligonucleotide
gauaacauuguuaacgccc

SEQ ID NO: 254487 - RNA, 19 nt, Artificial Sequence
  Description of Artificial Sequence: Synthetic oligonucleotide
uuaacauaaggucaaacua

SEQ ID NO: 254488 - RNA, 19 nt, Artificial Sequence
  Description of Artificial Sequence: Synthetic oligonucleotide
aguaccuagauauuaaggu

SEQ ID NO: 254489 - RNA, 19 nt, Artificial Sequence
  Description of Artificial Sequence: Synthetic oligonucleotide
aaauauguuuaguggcugg

SEQ ID NO: 254490 - RNA, 19 nt, Artificial Sequence
  Description of Artificial Sequence: Synthetic oligonucleotide
uauguauugaguagggaca

SEQ ID NO: 254491 - RNA, 19 nt, Artificial Sequence
  Description of Artificial Sequence: Synthetic oligonucleotide
auaccauaaaccuagggca

SEQ ID NO: 254492 - RNA, 19 nt, Artificial Sequence
  Description of Artificial Sequence: Synthetic oligonucleotide
aguaauauauggggaaucc

SEQ ID NO: 254493 - RNA, 19 nt, Artificial Sequence
  Description of Artificial Sequence: Synthetic oligonucleotide
aacuauuugacacuuuaaa

SEQ ID NO: 254494 - RNA, 19 nt, Artificial Sequence
  Description of Artificial Sequence: Synthetic oligonucleotide
ugugguuauggucagaaaa

SEQ ID NO: 254495 - RNA, 19 nt, Artificial Sequence
  Description of Artificial Sequence: Synthetic oligonucleotide
aaaauagccugcuguuugg

SEQ ID NO: 254496 - RNA, 19 nt, Artificial Sequence
  Description of Artificial Sequence: Synthetic oligonucleotide
acguuaaauacauugauaa

SEQ ID NO: 254497 - RNA, 19 nt, Artificial Sequence
  Description of Artificial Sequence: Synthetic oligonucleotide
uauaguaauauauggggaa

SEQ ID NO: 254498 - RNA, 19 nt, Artificial Sequence
  Description of Artificial Sequence: Synthetic oligonucleotide
uuguauaaugugguuaugg

SEQ ID NO: 254499 - RNA, 19 nt, Artificial Sequence
  Description of Artificial Sequence: Synthetic oligonucleotide
aaacguuaaauacauugau

SEQ ID NO: 254500 - RNA, 19 nt, Artificial Sequence
  Description of Artificial Sequence: Synthetic oligonucleotide
aaagaccuggucuguauag

SEQ ID NO: 254501 - RNA, 19 nt, Artificial Sequence
  Description of Artificial Sequence: Synthetic oligonucleotide
acuacgauuaccuucuaga

SEQ ID NO: 254502 - RNA, 19 nt, Artificial Sequence
  Description of Artificial Sequence: Synthetic oligonucleotide
uguucgacaauucugguuu

SEQ ID NO: 254503 - RNA, 19 nt, Artificial Sequence
  Description of Artificial Sequence: Synthetic oligonucleotide
auuguuaacgcccaaccgu

SEQ ID NO: 254504 - RNA, 19 nt, Artificial Sequence
  Description of Artificial Sequence: Synthetic oligonucleotide
aauauguuuaguggcuggg

SEQ ID NO: 254505 - RNA, 19 nt, Artificial Sequence
  Description of Artificial Sequence: Synthetic oligonucleotide
gauaauggauuccacauaa

SEQ ID NO: 254506 - RNA, 19 nt, Artificial Sequence
  Description of Artificial Sequence: Synthetic oligonucleotide
aagaguaacgauuccccug

SEQ ID NO: 254507 - RNA, 19 nt, Artificial Sequence
  Description of Artificial Sequence: Synthetic oligonucleotide
ggauaaauauaucaugaag

SEQ ID NO: 254508 - RNA, 19 nt, Artificial Sequence
  Description of Artificial Sequence: Synthetic oligonucleotide
guuugugguagccugaggc

SEQ ID NO: 254509 - RNA, 19 nt, Artificial Sequence
  Description of Artificial Sequence: Synthetic oligonucleotide
caacuuaaggcugaaaggc

SEQ ID NO: 254510 - RNA, 19 nt, Artificial Sequence
  Description of Artificial Sequence: Synthetic oligonucleotide
uuaguaccuagauauuaag

SEQ ID NO: 254511 - RNA, 19 nt, Artificial Sequence
  Description of Artificial Sequence: Synthetic oligonucleotide
uguauaaugugguuauggu

SEQ ID NO: 254512 - RNA, 19 nt, Artificial Sequence
  Description of Artificial Sequence: Synthetic oligonucleotide
ucauaccauaaaccuaggg

SEQ ID NO: 254513 - RNA, 19 nt, Artificial Sequence
  Description of Artificial Sequence: Synthetic oligonucleotide
ugaaagaguaacgauuccc

SEQ ID NO: 254514 - RNA, 19 nt, Artificial Sequence
  Description of Artificial Sequence: Synthetic oligonucleotide
uggguugaggcugaaaccg

SEQ ID NO: 254515 - RNA, 19 nt, Artificial Sequence
  Description of Artificial Sequence: Synthetic oligonucleotide
aagaggaucgcugaccuug

SEQ ID NO: 254516 - RNA, 19 nt, Artificial Sequence
  Description of Artificial Sequence: Synthetic oligonucleotide
acuagucgcuguuugcagc

SEQ ID NO: 254517 - RNA, 19 nt, Artificial Sequence
  Description of Artificial Sequence: Synthetic oligonucleotide
aaaguucgauagcaucagg

SEQ ID NO: 254518 - RNA, 19 nt, Artificial Sequence
  Description of Artificial Sequence: Synthetic oligonucleotide
uacuaacaacaauacuugg

SEQ ID NO: 254519 - RNA, 19 nt, Artificial Sequence
  Description of Artificial Sequence: Synthetic oligonucleotide
ucuacuuuaggaguccacc

SEQ ID NO: 254520 - RNA, 19 nt, Artificial Sequence
  Description of Artificial Sequence: Synthetic oligonucleotide
aguuucaagccugucacgg

SEQ ID NO: 254521 - RNA, 19 nt, Artificial Sequence
  Description of Artificial Sequence: Synthetic oligonucleotide
uaacaacaauacuuggcag

SEQ ID NO: 254522 - RNA, 19 nt, Artificial Sequence
  Description of Artificial Sequence: Synthetic oligonucleotide
cauuaguuguuccuuuugc

SEQ ID NO: 254523 - RNA, 19 nt, Artificial Sequence
  Description of Artificial Sequence: Synthetic oligonucleotide
aguucgauagcaucaggug

SEQ ID NO: 254524 - RNA, 19 nt, Artificial Sequence
  Description of Artificial Sequence: Synthetic oligonucleotide
aaugucguuguuauuaaaa

SEQ ID NO: 254525 - RNA, 19 nt, Artificial Sequence
  Description of Artificial Sequence: Synthetic oligonucleotide
uuugcgacgaccgaaguuc

SEQ ID NO: 254526 - RNA, 19 nt, Artificial Sequence
  Description of Artificial Sequence: Synthetic oligonucleotide
auguuuaguggcuggggac

SEQ ID NO: 254527 - RNA, 19 nt, Artificial Sequence
  Description of Artificial Sequence: Synthetic oligonucleotide
acgaccgaaguucuuaaag

SEQ ID NO: 254528 - RNA, 19 nt, Artificial Sequence
  Description of Artificial Sequence: Synthetic oligonucleotide
uuaucauagcuuuaucaau

SEQ ID NO: 254529 - RNA, 19 nt, Artificial Sequence
  Description of Artificial Sequence: Synthetic oligonucleotide
acauugauaaggcaaggaa

SEQ ID NO: 254530 - RNA, 19 nt, Artificial Sequence
  Description of Artificial Sequence: Synthetic oligonucleotide
aaauagccugcuguuuggc

SEQ ID NO: 254531 - RNA, 19 nt, Artificial Sequence
  Description of Artificial Sequence: Synthetic oligonucleotide
ugcaacggaguccacauaa

SEQ ID NO: 254532 - RNA, 19 nt, Artificial Sequence
  Description of Artificial Sequence: Synthetic oligonucleotide
uacauguucuuugcaacgg

SEQ ID NO: 254533 - RNA, 19 nt, Artificial Sequence
  Description of Artificial Sequence: Synthetic oligonucleotide
uaccuagauauuaagguuu

SEQ ID NO: 254534 - RNA, 19 nt, Artificial Sequence
  Description of Artificial Sequence: Synthetic oligonucleotide
gucucgaagacucaccgcc

SEQ ID NO: 254535 - RNA, 19 nt, Artificial Sequence
  Description of Artificial Sequence: Synthetic oligonucleotide
gaauguccgguaauguugg

SEQ ID NO: 254536 - RNA, 19 nt, Artificial Sequence
  Description of Artificial Sequence: Synthetic oligonucleotide
agccauuauugacacguac

SEQ ID NO: 254537 - RNA, 19 nt, Artificial Sequence
  Description of Artificial Sequence: Synthetic oligonucleotide
caagccaggauuugcgacg

SEQ ID NO: 254538 - RNA, 19 nt, Artificial Sequence
  Description of Artificial Sequence: Synthetic oligonucleotide
cauuguuaacgcccaaccg

SEQ ID NO: 254539 - RNA, 19 nt, Artificial Sequence
  Description of Artificial Sequence: Synthetic oligonucleotide
ggauccacgagccaaagug

SEQ ID NO: 254540 - RNA, 19 nt, Artificial Sequence
  Description of Artificial Sequence: Synthetic oligonucleotide
aucaugaagauuccuagua

SEQ ID NO: 254541 - RNA, 19 nt, Artificial Sequence
  Description of Artificial Sequence: Synthetic oligonucleotide
auacaacucaaugacaggu

SEQ ID NO: 254542 - RNA, 19 nt, Artificial Sequence
  Description of Artificial Sequence: Synthetic oligonucleotide
uacauuguaccaaaauguu

SEQ ID NO: 254543 - RNA, 19 nt, Artificial Sequence
  Description of Artificial Sequence: Synthetic oligonucleotide
guauaaugugguuaugguc

SEQ ID NO: 254544 - RNA, 19 nt, Artificial Sequence
  Description of Artificial Sequence: Synthetic oligonucleotide
uccuaguauguauugagua

SEQ ID NO: 254545 - RNA, 19 nt, Artificial Sequence
  Description of Artificial Sequence: Synthetic oligonucleotide
aguuaguuaguaccuagau

SEQ ID NO: 254546 - RNA, 19 nt, Artificial Sequence
  Description of Artificial Sequence: Synthetic oligonucleotide
auagcaucagguguucgac

SEQ ID NO: 254547 - RNA, 19 nt, Artificial Sequence
  Description of Artificial Sequence: Synthetic oligonucleotide
aacuaguuaguuaguaccu

SEQ ID NO: 254548 - RNA, 19 nt, Artificial Sequence
  Description of Artificial Sequence: Synthetic oligonucleotide
aauguccgguaauguuggc

SEQ ID NO: 254549 - RNA, 19 nt, Artificial Sequence
  Description of Artificial Sequence: Synthetic oligonucleotide
gacgcggggagacuagucg

SEQ ID NO: 254550 - RNA, 19 nt, Artificial Sequence
  Description of Artificial Sequence: Synthetic oligonucleotide
uugaugcuccuacacauuc

SEQ ID NO: 254551 - RNA, 19 nt, Artificial Sequence
  Description of Artificial Sequence: Synthetic oligonucleotide
agaaagaaccaccaaccaa

SEQ ID NO: 254552 - RNA, 19 nt, Artificial Sequence
  Description of Artificial Sequence: Synthetic oligonucleotide
uauuaucugcagagggacc

SEQ ID NO: 254553 - RNA, 19 nt, Artificial Sequence
  Description of Artificial Sequence: Synthetic oligonucleotide
uuguuaacgcccaaccguc

SEQ ID NO: 254554 - RNA, 19 nt, Artificial Sequence
  Description of Artificial Sequence: Synthetic oligonucleotide
uaguuaguuaguaccuaga

SEQ ID NO: 254555 - RNA, 19 nt, Artificial Sequence
  Description of Artificial Sequence: Synthetic oligonucleotide
aaguucgauagcaucaggu

SEQ ID NO: 254556 - RNA, 19 nt, Artificial Sequence
  Description of Artificial Sequence: Synthetic oligonucleotide
auaaugugguuauggucag

SEQ ID NO: 254557 - RNA, 19 nt, Artificial Sequence
  Description of Artificial Sequence: Synthetic oligonucleotide
ccaagcaauaaucuguagg

SEQ ID NO: 254558 - RNA, 19 nt, Artificial Sequence
  Description of Artificial Sequence: Synthetic oligonucleotide
gauagcaucagguguucga

SEQ ID NO: 254559 - RNA, 19 nt, Artificial Sequence
  Description of Artificial Sequence: Synthetic oligonucleotide
guacaugcuguacagcgug

SEQ ID NO: 254560 - RNA, 19 nt, Artificial Sequence
  Description of Artificial Sequence: Synthetic oligonucleotide
aauaaccauccagagcugu

SEQ ID NO: 254561 - RNA, 19 nt, Artificial Sequence
  Description of Artificial Sequence: Synthetic oligonucleotide
ugcuccuacacauuccuuc

SEQ ID NO: 254562 - RNA, 19 nt, Artificial Sequence
  Description of Artificial Sequence: Synthetic oligonucleotide
auuaucugcagagggacca

SEQ ID NO: 254563 - RNA, 19 nt, Artificial Sequence
  Description of Artificial Sequence: Synthetic oligonucleotide
uuccuaguauguauugagu

SEQ ID NO: 254564 - RNA, 19 nt, Artificial Sequence
  Description of Artificial Sequence: Synthetic oligonucleotide
uguccgguaauguuggcau

SEQ ID NO: 254565 - RNA, 19 nt, Artificial Sequence
  Description of Artificial Sequence: Synthetic oligonucleotide
uacauugauaaggcaagga

SEQ ID NO: 254566 - RNA, 19 nt, Artificial Sequence
  Description of Artificial Sequence: Synthetic oligonucleotide
uauuuccgagcaaaugguc

SEQ ID NO: 254567 - RNA, 19 nt, Artificial Sequence
  Description of Artificial Sequence: Synthetic oligonucleotide
ugaugcuccuacacauucc

SEQ ID NO: 254568 - RNA, 19 nt, Artificial Sequence
  Description of Artificial Sequence: Synthetic oligonucleotide
ucaaacuaguuaguuagua

SEQ ID NO: 254569 - RNA, 19 nt, Artificial Sequence
  Description of Artificial Sequence: Synthetic oligonucleotide
cuaggggaaugcccgagcg

SEQ ID NO: 254570 - RNA, 19 nt, Artificial Sequence
  Description of Artificial Sequence: Synthetic oligonucleotide
aacguuaaauacauugaua

SEQ ID NO: 254571 - RNA, 19 nt, Artificial Sequence
  Description of Artificial Sequence: Synthetic oligonucleotide
gugagaauuaacauaaggu

SEQ ID NO: 254572 - RNA, 19 nt, Artificial Sequence
  Description of Artificial Sequence: Synthetic oligonucleotide
uggccuuaaguaaacguua

SEQ ID NO: 254573 - RNA, 19 nt, Artificial Sequence
  Description of Artificial Sequence: Synthetic oligonucleotide
ucccacuugauacauugua

SEQ ID NO: 254574 - RNA, 19 nt, Artificial Sequence
  Description of Artificial Sequence: Synthetic oligonucleotide
acaauacuuggcagcaugg

SEQ ID NO: 254575 - RNA, 19 nt, Artificial Sequence
  Description of Artificial Sequence: Synthetic oligonucleotide
guaagagcaacgacaucgg

SEQ ID NO: 254576 - RNA, 19 nt, Artificial Sequence
  Description of Artificial Sequence: Synthetic oligonucleotide
gacuagucgcuguuugcag

SEQ ID NO: 254577 - RNA, 19 nt, Artificial Sequence
  Description of Artificial Sequence: Synthetic oligonucleotide
acgcggggagacuagucgc

SEQ ID NO: 254578 - RNA, 19 nt, Artificial Sequence
  Description of Artificial Sequence: Synthetic oligonucleotide
aauugcauguggaagcaua

SEQ ID NO: 254579 - RNA, 19 nt, Artificial Sequence
  Description of Artificial Sequence: Synthetic oligonucleotide
ccuaguauguauugaguag

SEQ ID NO: 254580 - RNA, 19 nt, Artificial Sequence
  Description of Artificial Sequence: Synthetic oligonucleotide
aguaaagcaagauguucuu

SEQ ID NO: 254581 - RNA, 19 nt, Artificial Sequence
  Description of Artificial Sequence: Synthetic oligonucleotide
auaacauuguuaacgccca

SEQ ID NO: 254582 - RNA, 19 nt, Artificial Sequence
  Description of Artificial Sequence: Synthetic oligonucleotide
gaagauuccuaguauguau

SEQ ID NO: 254583 - RNA, 19 nt, Artificial Sequence
  Description of Artificial Sequence: Synthetic oligonucleotide
uacaacucaaugacaggua

SEQ ID NO: 254584 - RNA, 19 nt, Artificial Sequence
  Description of Artificial Sequence: Synthetic oligonucleotide
caaaguucgauagcaucag

SEQ ID NO: 254585 - RNA, 19 nt, Artificial Sequence
  Description of Artificial Sequence: Synthetic oligonucleotide
uaauaaccauccagagcug

SEQ ID NO: 254586 - RNA, 19 nt, Artificial Sequence
  Description of Artificial Sequence: Synthetic oligonucleotide
cacgccgggaucaaggcug

SEQ ID NO: 254587 - RNA, 19 nt, Artificial Sequence
  Description of Artificial Sequence: Synthetic oligonucleotide
uguuaacgcccaaccgucc

SEQ ID NO: 254588 - RNA, 19 nt, Artificial Sequence
  Description of Artificial Sequence: Synthetic oligonucleotide
gauggucggugacauagca

SEQ ID NO: 254589 - RNA, 19 nt, Artificial Sequence
  Description of Artificial Sequence: Synthetic oligonucleotide
uccaccaaacaaguagggc

SEQ ID NO: 254590 - RNA, 19 nt, Artificial Sequence
  Description of Artificial Sequence: Synthetic oligonucleotide
ucgaagacucaccgccagg

SEQ ID NO: 254591 - RNA, 19 nt, Artificial Sequence
  Description of Artificial Sequence: Synthetic oligonucleotide
uucuaccaguuucaagccu

SEQ ID NO: 254592 - RNA, 19 nt, Artificial Sequence
  Description of Artificial Sequence: Synthetic oligonucleotide
aguuaguaccuagauauua

SEQ ID NO: 254593 - RNA, 19 nt, Artificial Sequence
  Description of Artificial Sequence: Synthetic oligonucleotide
uaguaauauauggggaauc

SEQ ID NO: 254594 - RNA, 19 nt, Artificial Sequence
  Description of Artificial Sequence: Synthetic oligonucleotide
uuucccgggauaacauugu

SEQ ID NO: 254595 - RNA, 19 nt, Artificial Sequence
  Description of Artificial Sequence: Synthetic oligonucleotide
gguacuaacaacaauacuu

SEQ ID NO: 254596 - RNA, 19 nt, Artificial Sequence
  Description of Artificial Sequence: Synthetic oligonucleotide
uccaagcaauaaucuguag

SEQ ID NO: 254597 - RNA, 19 nt, Artificial Sequence
  Description of Artificial Sequence: Synthetic oligonucleotide
ggaaaucuaauuaaauuaa

SEQ ID NO: 254598 - RNA, 19 nt, Artificial Sequence
  Description of Artificial Sequence: Synthetic oligonucleotide
ugacacacuugugacaaaa

SEQ ID NO: 254599 - RNA, 19 nt, Artificial Sequence
  Description of Artificial Sequence: Synthetic oligonucleotide
aagauuccuaguauguauu

SEQ ID NO: 254600 - RNA, 19 nt, Artificial Sequence
  Description of Artificial Sequence: Synthetic oligonucleotide
cgggauaacauuguuaacg

SEQ ID NO: 254601 - RNA, 19 nt, Artificial Sequence
  Description of Artificial Sequence: Synthetic oligonucleotide
gaagacucaccgccaggag

SEQ ID NO: 254602 - RNA, 19 nt, Artificial Sequence
  Description of Artificial Sequence: Synthetic oligonucleotide
aacgauuccccuggguuga

SEQ ID NO: 254603 - RNA, 19 nt, Artificial Sequence
  Description of Artificial Sequence: Synthetic oligonucleotide
aacggaguccacauaaauu

SEQ ID NO: 254604 - RNA, 19 nt, Artificial Sequence
  Description of Artificial Sequence: Synthetic oligonucleotide
agcgugaccugauguaaug

SEQ ID NO: 254605 - RNA, 19 nt, Artificial Sequence
  Description of Artificial Sequence: Synthetic oligonucleotide
uuaacgcccaaccguccac

SEQ ID NO: 254606 - RNA, 19 nt, Artificial Sequence
  Description of Artificial Sequence: Synthetic oligonucleotide
ccaggauuugcgacgaccg

SEQ ID NO: 254607 - RNA, 19 nt, Artificial Sequence
  Description of Artificial Sequence: Synthetic oligonucleotide
uaaucagcggcaguauuau

SEQ ID NO: 254608 - RNA, 19 nt, Artificial Sequence
  Description of Artificial Sequence: Synthetic oligonucleotide
ucucgaagacucaccgcca

SEQ ID NO: 254609 - RNA, 19 nt, Artificial Sequence
  Description of Artificial Sequence: Synthetic oligonucleotide
gucacuguaagagcaacga

SEQ ID NO: 254610 - RNA, 19 nt, Artificial Sequence
  Description of Artificial Sequence: Synthetic oligonucleotide
uagcccacguuuucccggg

SEQ ID NO: 254611 - RNA, 19 nt, Artificial Sequence
  Description of Artificial Sequence: Synthetic oligonucleotide
guuaguaccuagauauuaa

SEQ ID NO: 254612 - RNA, 19 nt, Artificial Sequence
  Description of Artificial Sequence: Synthetic oligonucleotide
aggggaaugcccgagcgug

SEQ ID NO: 254613 - RNA, 19 nt, Artificial Sequence
  Description of Artificial Sequence: Synthetic oligonucleotide
gaugcuccuacacauuccu

SEQ ID NO: 254614 - RNA, 19 nt, Artificial Sequence
  Description of Artificial Sequence: Synthetic oligonucleotide
aggaucgcugaccuuggca

SEQ ID NO: 254615 - RNA, 19 nt, Artificial Sequence
  Description of Artificial Sequence: Synthetic oligonucleotide
aguuagaaucagaaggcaa

SEQ ID NO: 254616 - RNA, 19 nt, Artificial Sequence
  Description of Artificial Sequence: Synthetic oligonucleotide
cuacgauuaccuucuagaa

SEQ ID NO: 254617 - RNA, 19 nt, Artificial Sequence
  Description of Artificial Sequence: Synthetic oligonucleotide
ggauaacauuguuaacgcc

SEQ ID NO: 254618 - RNA, 19 nt, Artificial Sequence
  Description of Artificial Sequence: Synthetic oligonucleotide
ggcgcuacgaugguggcgg

SEQ ID NO: 254619 - RNA, 19 nt, Artificial Sequence
  Description of Artificial Sequence: Synthetic oligonucleotide
ugaacaugccuggccgccg

SEQ ID NO: 254620 - RNA, 19 nt, Artificial Sequence
  Description of Artificial Sequence: Synthetic oligonucleotide
auaaucagcggcaguauua

SEQ ID NO: 254621 - RNA, 19 nt, Artificial Sequence
  Description of Artificial Sequence: Synthetic oligonucleotide
aaugcccgagcguggcuga

SEQ ID NO: 254622 - RNA, 19 nt, Artificial Sequence
  Description of Artificial Sequence: Synthetic oligonucleotide
ugucacggcaucugcugcu

SEQ ID NO: 254623 - RNA, 19 nt, Artificial Sequence
  Description of Artificial Sequence: Synthetic oligonucleotide
cacagcgauguccugugug

SEQ ID NO: 254624 - RNA, 19 nt, Artificial Sequence
  Description of Artificial Sequence: Synthetic oligonucleotide
ccgggaucaaggcugaggg

SEQ ID NO: 254625 - RNA, 19 nt, Artificial Sequence
  Description of Artificial Sequence: Synthetic oligonucleotide
auuugcgacgaccgaaguu

SEQ ID NO: 254626 - RNA, 19 nt, Artificial Sequence
  Description of Artificial Sequence: Synthetic oligonucleotide
gaaugcccgagcguggcug

SEQ ID NO: 254627 - RNA, 19 nt, Artificial Sequence
  Description of Artificial Sequence: Synthetic oligonucleotide
agguuugucccacuugaua

SEQ ID NO: 254628 - RNA, 19 nt, Artificial Sequence
  Description of Artificial Sequence: Synthetic oligonucleotide
cucgaagacucaccgccag

SEQ ID NO: 254629 - RNA, 19 nt, Artificial Sequence
  Description of Artificial Sequence: Synthetic oligonucleotide
aaaccuagggcaagaguua

SEQ ID NO: 254630 - RNA, 19 nt, Artificial Sequence
  Description of Artificial Sequence: Synthetic oligonucleotide
caggcgaagccugagucgc

SEQ ID NO: 254631 - RNA, 19 nt, Artificial Sequence
  Description of Artificial Sequence: Synthetic oligonucleotide
agcguggcugaacaugccu

SEQ ID NO: 254632 - RNA, 19 nt, Artificial Sequence
  Description of Artificial Sequence: Synthetic oligonucleotide
cucuacuuuaggaguccac

SEQ ID NO: 254633 - RNA, 19 nt, Artificial Sequence
  Description of Artificial Sequence: Synthetic oligonucleotide
ucccgggauaacauuguua

SEQ ID NO: 254634 - RNA, 19 nt, Artificial Sequence
  Description of Artificial Sequence: Synthetic oligonucleotide
cagcacuauaauauaguaa

SEQ ID NO: 254635 - RNA, 19 nt, Artificial Sequence
  Description of Artificial Sequence: Synthetic oligonucleotide
cuagucgcuguuugcagca

SEQ ID NO: 254636 - RNA, 19 nt, Artificial Sequence
  Description of Artificial Sequence: Synthetic oligonucleotide
ugauaaucagcggcaguau

SEQ ID NO: 254637 - RNA, 19 nt, Artificial Sequence
  Description of Artificial Sequence: Synthetic oligonucleotide
uuuaguggcuggggacccg

SEQ ID NO: 254638 - RNA, 19 nt, Artificial Sequence
  Description of Artificial Sequence: Synthetic oligonucleotide
gguuugaugcuccuacaca

SEQ ID NO: 254639 - RNA, 19 nt, Artificial Sequence
  Description of Artificial Sequence: Synthetic oligonucleotide
uuggaucagucuaguccca

SEQ ID NO: 254640 - RNA, 19 nt, Artificial Sequence
  Description of Artificial Sequence: Synthetic oligonucleotide
accuucuagaauguccggu

SEQ ID NO: 254641 - RNA, 19 nt, Artificial Sequence
  Description of Artificial Sequence: Synthetic oligonucleotide
uggaucagucuagucccag

SEQ ID NO: 254642 - RNA, 19 nt, Artificial Sequence
  Description of Artificial Sequence: Synthetic oligonucleotide
aaccuagggcaagaguuaa

SEQ ID NO: 254643 - RNA, 19 nt, Artificial Sequence
  Description of Artificial Sequence: Synthetic oligonucleotide
guuuuggaucagucuaguc

SEQ ID NO: 254644 - RNA, 19 nt, Artificial Sequence
  Description of Artificial Sequence: Synthetic oligonucleotide
acgcccaaccguccacagc

SEQ ID NO: 254645 - RNA, 19 nt, Artificial Sequence
  Description of Artificial Sequence: Synthetic oligonucleotide
guugacacuuccuuguuuu

SEQ ID NO: 254646 - RNA, 19 nt, Artificial Sequence
  Description of Artificial Sequence: Synthetic oligonucleotide
aagccaggauuugcgacga

SEQ ID NO: 254647 - RNA, 19 nt, Artificial Sequence
  Description of Artificial Sequence: Synthetic oligonucleotide
uccuggccuuaaguaaacg

SEQ ID NO: 254648 - RNA, 19 nt, Artificial Sequence
  Description of Artificial Sequence: Synthetic oligonucleotide
uccgguaauguuggcauua

SEQ ID NO: 254649 - RNA, 19 nt, Artificial Sequence
  Description of Artificial Sequence: Synthetic oligonucleotide
cugaacaugccuggccgcc

SEQ ID NO: 254650 - RNA, 19 nt, Artificial Sequence
  Description of Artificial Sequence: Synthetic oligonucleotide
uucgacaauucugguuuga

SEQ ID NO: 254651 - RNA, 19 nt, Artificial Sequence
  Description of Artificial Sequence: Synthetic oligonucleotide
cugucacggcaucugcugc

SEQ ID NO: 254652 - RNA, 19 nt, Artificial Sequence
  Description of Artificial Sequence: Synthetic oligonucleotide
acgacaucggguguucugu

SEQ ID NO: 254653 - RNA, 19 nt, Artificial Sequence
  Description of Artificial Sequence: Synthetic oligonucleotide
ggcguuuuggaucagucua

SEQ ID NO: 254654 - RNA, 19 nt, Artificial Sequence
  Description of Artificial Sequence: Synthetic oligonucleotide
aggauuugcgacgaccgaa

SEQ ID NO: 254655 - RNA, 19 nt, Artificial Sequence
  Description of Artificial Sequence: Synthetic oligonucleotide
caacuauuugacacuuuaa

SEQ ID NO: 254656 - RNA, 19 nt, Artificial Sequence
  Description of Artificial Sequence: Synthetic oligonucleotide
cccacuugauacauuguac

SEQ ID NO: 254657 - RNA, 19 nt, Artificial Sequence
  Description of Artificial Sequence: Synthetic oligonucleotide
caaguagggcauauucuaa

SEQ ID NO: 254658 - RNA, 19 nt, Artificial Sequence
  Description of Artificial Sequence: Synthetic oligonucleotide
guucgacaauucugguuug

SEQ ID NO: 254659 - RNA, 19 nt, Artificial Sequence
  Description of Artificial Sequence: Synthetic oligonucleotide
ucggguguucugucaucag

SEQ ID NO: 254660 - RNA, 19 nt, Artificial Sequence
  Description of Artificial Sequence: Synthetic oligonucleotide
ggauuugcgacgaccgaag

SEQ ID NO: 254661 - RNA, 19 nt, Artificial Sequence
  Description of Artificial Sequence: Synthetic oligonucleotide
guuuaguggcuggggaccc

SEQ ID NO: 254662 - RNA, 19 nt, Artificial Sequence
  Description of Artificial Sequence: Synthetic oligonucleotide
aucauaccauaaaccuagg

SEQ ID NO: 254663 - RNA, 19 nt, Artificial Sequence
  Description of Artificial Sequence: Synthetic oligonucleotide
agucgcuguuugcagcaca

SEQ ID NO: 254664 - RNA, 19 nt, Artificial Sequence
  Description of Artificial Sequence: Synthetic oligonucleotide
uugcgacgaccgaaguucu

SEQ ID NO: 254665 - RNA, 19 nt, Artificial Sequence
  Description of Artificial Sequence: Synthetic oligonucleotide
auguccgguaauguuggca

SEQ ID NO: 254666 - RNA, 19 nt, Artificial Sequence
  Description of Artificial Sequence: Synthetic oligonucleotide
acagcgugaccugauguaa

SEQ ID NO: 254667 - RNA, 19 nt, Artificial Sequence
  Description of Artificial Sequence: Synthetic oligonucleotide
gauaaucagcggcaguauu

SEQ ID NO: 254668 - RNA, 19 nt, Artificial Sequence
  Description of Artificial Sequence: Synthetic oligonucleotide
ggacccgcaguguacuugc

SEQ ID NO: 254669 - RNA, 19 nt, Artificial Sequence
  Description of Artificial Sequence: Synthetic oligonucleotide
ggccguggcgcuacgaugg

SEQ ID NO: 254670 - RNA, 19 nt, Artificial Sequence
  Description of Artificial Sequence: Synthetic oligonucleotide
uaacgcccaaccguccaca

SEQ ID NO: 254671 - RNA, 19 nt, Artificial Sequence
  Description of Artificial Sequence: Synthetic oligonucleotide
guauuuccgagcaaauggu

SEQ ID NO: 254672 - RNA, 19 nt, Artificial Sequence
  Description of Artificial Sequence: Synthetic oligonucleotide
gaccauuggaacagcaagu

SEQ ID NO: 254673 - RNA, 19 nt, Artificial Sequence
  Description of Artificial Sequence: Synthetic oligonucleotide
uccacgagccaaagugcua

SEQ ID NO: 254674 - RNA, 19 nt, Artificial Sequence
  Description of Artificial Sequence: Synthetic oligonucleotide
ugggccguggcgcuacgau

SEQ ID NO: 254675 - RNA, 19 nt, Artificial Sequence
  Description of Artificial Sequence: Synthetic oligonucleotide
uggcgcuacgaugguggcg

SEQ ID NO: 254676 - RNA, 19 nt, Artificial Sequence
  Description of Artificial Sequence: Synthetic oligonucleotide
uaaugugguuauggucaga

SEQ ID NO: 254677 - RNA, 19 nt, Artificial Sequence
  Description of Artificial Sequence: Synthetic oligonucleotide
cuggggacccgcaguguac

SEQ ID NO: 254678 - RNA, 19 nt, Artificial Sequence
  Description of Artificial Sequence: Synthetic oligonucleotide
cuggccuuaaguaaacguu

SEQ ID NO: 254679 - RNA, 19 nt, Artificial Sequence
  Description of Artificial Sequence: Synthetic oligonucleotide
uucccgggauaacauuguu

SEQ ID NO: 254680 - RNA, 19 nt, Artificial Sequence
  Description of Artificial Sequence: Synthetic oligonucleotide
guagggcauggcuuuguaa

SEQ ID NO: 254681 - RNA, 19 nt, Artificial Sequence
  Description of Artificial Sequence: Synthetic oligonucleotide
uuccgagcaaaugguccac

SEQ ID NO: 254682 - RNA, 19 nt, Artificial Sequence
  Description of Artificial Sequence: Synthetic oligonucleotide
uccgagcaaaugguccacu

SEQ ID NO: 254683 - RNA, 19 nt, Artificial Sequence
  Description of Artificial Sequence: Synthetic oligonucleotide
gcguuuuggaucagucuag

SEQ ID NO: 254684 - RNA, 19 nt, Artificial Sequence
  Description of Artificial Sequence: Synthetic oligonucleotide
agcaacgacaucggguguu

SEQ ID NO: 254685 - RNA, 19 nt, Artificial Sequence
  Description of Artificial Sequence: Synthetic oligonucleotide
gauuugcgacgaccgaagu

SEQ ID NO: 254686 - RNA, 19 nt, Artificial Sequence
  Description of Artificial Sequence: Synthetic oligonucleotide
uaagaggaucgcugaccuu

SEQ ID NO: 254687 - RNA, 19 nt, Artificial Sequence
  Description of Artificial Sequence: Synthetic oligonucleotide
cuguuuggcccacagaauu

SEQ ID NO: 254688 - RNA, 19 nt, Artificial Sequence
  Description of Artificial Sequence: Synthetic oligonucleotide
cuggucuguauagcuaaca

SEQ ID NO: 254689 - RNA, 19 nt, Artificial Sequence
  Description of Artificial Sequence: Synthetic oligonucleotide
caucggguguucugucauc

SEQ ID NO: 254690 - RNA, 19 nt, Artificial Sequence
  Description of Artificial Sequence: Synthetic oligonucleotide
gccaggauuugcgacgacc

SEQ ID NO: 254691 - RNA, 19 nt, Artificial Sequence
  Description of Artificial Sequence: Synthetic oligonucleotide
uugcaacggaguccacaua

SEQ ID NO: 254692 - RNA, 19 nt, Artificial Sequence
  Description of Artificial Sequence: Synthetic oligonucleotide
gcgauguccuguguggcag

SEQ ID NO: 254693 - RNA, 19 nt, Artificial Sequence
  Description of Artificial Sequence: Synthetic oligonucleotide
ggaucgcugaccuuggcau

SEQ ID NO: 254694 - RNA, 19 nt, Artificial Sequence
  Description of Artificial Sequence: Synthetic oligonucleotide
gaagcauagcccacguuuu

SEQ ID NO: 254695 - RNA, 19 nt, Artificial Sequence
  Description of Artificial Sequence: Synthetic oligonucleotide
guggcgcuacgaugguggc

SEQ ID NO: 254696 - RNA, 19 nt, Artificial Sequence
  Description of Artificial Sequence: Synthetic oligonucleotide
cacguuuucccgggauaac

SEQ ID NO: 254697 - RNA, 19 nt, Artificial Sequence
  Description of Artificial Sequence: Synthetic oligonucleotide
caggauuugcgacgaccga

SEQ ID NO: 254698 - RNA, 19 nt, Artificial Sequence
  Description of Artificial Sequence: Synthetic oligonucleotide
ccuaggggaaugcccgagc

SEQ ID NO: 254699 - RNA, 19 nt, Artificial Sequence
  Description of Artificial Sequence: Synthetic oligonucleotide
ccaaccguccacagcgaug

SEQ ID NO: 254700 - RNA, 19 nt, Artificial Sequence
  Description of Artificial Sequence: Synthetic oligonucleotide
uacaaccaacagaguuguu

SEQ ID NO: 254701 - RNA, 19 nt, Artificial Sequence
  Description of Artificial Sequence: Synthetic oligonucleotide
caacggaguccacauaaau

SEQ ID NO: 254702 - RNA, 19 nt, Artificial Sequence
  Description of Artificial Sequence: Synthetic oligonucleotide
gauccccggcagguggccc

SEQ ID NO: 254703 - RNA, 19 nt, Artificial Sequence
  Description of Artificial Sequence: Synthetic oligonucleotide
cuacgaugguggcgggcuc

SEQ ID NO: 254704 - RNA, 19 nt, Artificial Sequence
  Description of Artificial Sequence: Synthetic oligonucleotide
ugcgacgaccgaaguucuu

SEQ ID NO: 254705 - RNA, 19 nt, Artificial Sequence
  Description of Artificial Sequence: Synthetic oligonucleotide
gucaaacuaguuaguuagu

SEQ ID NO: 254706 - RNA, 19 nt, Artificial Sequence
  Description of Artificial Sequence: Synthetic oligonucleotide
aguuuccucccagguuaga

SEQ ID NO: 254707 - RNA, 19 nt, Artificial Sequence
  Description of Artificial Sequence: Synthetic oligonucleotide
ccagguuagacacaguauu

SEQ ID NO: 254708 - RNA, 19 nt, Artificial Sequence
  Description of Artificial Sequence: Synthetic oligonucleotide
guaaagcaagauguucuuu

SEQ ID NO: 254709 - RNA, 19 nt, Artificial Sequence
  Description of Artificial Sequence: Synthetic oligonucleotide
gccuuaaguaaacguuaaa

SEQ ID NO: 254710 - RNA, 19 nt, Artificial Sequence
  Description of Artificial Sequence: Synthetic oligonucleotide
gggccguggcgcuacgaug

SEQ ID NO: 254711 - RNA, 19 nt, Artificial Sequence
  Description of Artificial Sequence: Synthetic oligonucleotide
ggccuuaaguaaacguuaa

SEQ ID NO: 254712 - RNA, 19 nt, Artificial Sequence
  Description of Artificial Sequence: Synthetic oligonucleotide
ccuggucuguauagcuaac

SEQ ID NO: 254713 - RNA, 19 nt, Artificial Sequence
  Description of Artificial Sequence: Synthetic oligonucleotide
gggacccgcaguguacuug

SEQ ID NO: 254714 - RNA, 19 nt, Artificial Sequence
  Description of Artificial Sequence: Synthetic oligonucleotide
ccgggauaacauuguuaac

SEQ ID NO: 254715 - RNA, 19 nt, Artificial Sequence
  Description of Artificial Sequence: Synthetic oligonucleotide
ugcccgagcguggcugaac

SEQ ID NO: 254716 - RNA, 19 nt, Artificial Sequence
  Description of Artificial Sequence: Synthetic oligonucleotide
gaauugcauguggaagcau

SEQ ID NO: 254717 - RNA, 19 nt, Artificial Sequence
  Description of Artificial Sequence: Synthetic oligonucleotide
gagcaacgacaucgggugu

SEQ ID NO: 254718 - RNA, 19 nt, Artificial Sequence
  Description of Artificial Sequence: Synthetic oligonucleotide
gcugauaaucagcggcagu

SEQ ID NO: 254719 - RNA, 19 nt, Artificial Sequence
  Description of Artificial Sequence: Synthetic oligonucleotide
cagcagcuuguaaguaucu

SEQ ID NO: 254720 - RNA, 19 nt, Artificial Sequence
  Description of Artificial Sequence: Synthetic oligonucleotide
gcccgagcguggcugaaca

SEQ ID NO: 254721 - RNA, 19 nt, Artificial Sequence
  Description of Artificial Sequence: Synthetic oligonucleotide
auacuccuacacacugauu

SEQ ID NO: 254722 - RNA, 19 nt, Artificial Sequence
  Description of Artificial Sequence: Synthetic oligonucleotide
agcccacguuuucccggga

SEQ ID NO: 254723 - RNA, 19 nt, Artificial Sequence
  Description of Artificial Sequence: Synthetic oligonucleotide
gcgacgaccgaaguucuua

SEQ ID NO: 254724 - RNA, 19 nt, Artificial Sequence
  Description of Artificial Sequence: Synthetic oligonucleotide
gcgcccagagcaacuuaag

SEQ ID NO: 254725 - RNA, 19 nt, Artificial Sequence
  Description of Artificial Sequence: Synthetic oligonucleotide
gcucuacuuuaggagucca

SEQ ID NO: 254726 - RNA, 19 nt, Artificial Sequence
  Description of Artificial Sequence: Synthetic oligonucleotide
agggcgcccagagcaacuu

SEQ ID NO: 254727 - RNA, 19 nt, Artificial Sequence
  Description of Artificial Sequence: Synthetic oligonucleotide
cgauagcaucagguguucg

SEQ ID NO: 254728 - RNA, 19 nt, Artificial Sequence
  Description of Artificial Sequence: Synthetic oligonucleotide
cagcgugaccugauguaau

SEQ ID NO: 254729 - RNA, 19 nt, Artificial Sequence
  Description of Artificial Sequence: Synthetic oligonucleotide
gcaacggaguccacauaaa

SEQ ID NO: 254730 - RNA, 19 nt, Artificial Sequence
  Description of Artificial Sequence: Synthetic oligonucleotide
ccacguuuucccgggauaa

SEQ ID NO: 254731 - RNA, 19 nt, Artificial Sequence
  Description of Artificial Sequence: Synthetic oligonucleotide
acgccgggaucaaggcuga

SEQ ID NO: 254732 - RNA, 19 nt, Artificial Sequence
  Description of Artificial Sequence: Synthetic oligonucleotide
ggcgggcucgccagugcag

SEQ ID NO: 254733 - RNA, 19 nt, Artificial Sequence
  Description of Artificial Sequence: Synthetic oligonucleotide
aggcgaagccugagucgcu

SEQ ID NO: 254734 - RNA, 19 nt, Artificial Sequence
  Description of Artificial Sequence: Synthetic oligonucleotide
cuugugggagauggucggu

SEQ ID NO: 254735 - RNA, 19 nt, Artificial Sequence
  Description of Artificial Sequence: Synthetic oligonucleotide
ggacgcggggagacuaguc

SEQ ID NO: 254736 - RNA, 19 nt, Artificial Sequence
  Description of Artificial Sequence: Synthetic oligonucleotide
gggauccacgagccaaagu

SEQ ID NO: 254737 - RNA, 19 nt, Artificial Sequence
  Description of Artificial Sequence: Synthetic oligonucleotide
gcgcuacgaugguggcggg

SEQ ID NO: 254738 - RNA, 19 nt, Artificial Sequence
  Description of Artificial Sequence: Synthetic oligonucleotide
gcggacgcggggagacuag

SEQ ID NO: 254739 - RNA, 19 nt, Artificial Sequence
  Description of Artificial Sequence: Synthetic oligonucleotide
cguuuucccgggauaacau

SEQ ID NO: 254740 - RNA, 19 nt, Artificial Sequence
  Description of Artificial Sequence: Synthetic oligonucleotide
ggcggacgcggggagacua

SEQ ID NO: 254741 - RNA, 19 nt, Artificial Sequence
  Description of Artificial Sequence: Synthetic oligonucleotide
augcccgagcguggcugaa

SEQ ID NO: 254742 - RNA, 19 nt, Artificial Sequence
  Description of Artificial Sequence: Synthetic oligonucleotide
gcaucagguguucgacaau

SEQ ID NO: 254743 - RNA, 19 nt, Artificial Sequence
  Description of Artificial Sequence: Synthetic oligonucleotide
gacccgcaguguacuugcu

SEQ ID NO: 254744 - RNA, 19 nt, Artificial Sequence
  Description of Artificial Sequence: Synthetic oligonucleotide
cgcuacgaugguggcgggc

SEQ ID NO: 254745 - RNA, 19 nt, Artificial Sequence
  Description of Artificial Sequence: Synthetic oligonucleotide
gcccaggcgaagccugagu

SEQ ID NO: 254746 - RNA, 19 nt, Artificial Sequence
  Description of Artificial Sequence: Synthetic oligonucleotide
ccguggcgcuacgauggug

SEQ ID NO: 254747 - RNA, 19 nt, Artificial Sequence
  Description of Artificial Sequence: Synthetic oligonucleotide
gcccaaccguccacagcga

SEQ ID NO: 254748 - RNA, 19 nt, Artificial Sequence
  Description of Artificial Sequence: Synthetic oligonucleotide
ccacgccgggaucaaggcu

SEQ ID NO: 254749 - RNA, 19 nt, Artificial Sequence
  Description of Artificial Sequence: Synthetic oligonucleotide
gcccgguuugugguagccu

SEQ ID NO: 254750 - RNA, 19 nt, Artificial Sequence
  Description of Artificial Sequence: Synthetic oligonucleotide
cgguaauguuggcauuagu

SEQ ID NO: 254751 - RNA, 19 nt, Artificial Sequence
  Description of Artificial Sequence: Synthetic oligonucleotide
cccaaccguccacagcgau

SEQ ID NO: 254752 - RNA, 19 nt, Artificial Sequence
  Description of Artificial Sequence: Synthetic oligonucleotide
gccguggcgcuacgauggu

SEQ ID NO: 254753 - RNA, 19 nt, Artificial Sequence
  Description of Artificial Sequence: Synthetic oligonucleotide
cggacgcggggagacuagu

SEQ ID NO: 254754 - RNA, 19 nt, Artificial Sequence
  Description of Artificial Sequence: Synthetic oligonucleotide
aauuaaaacauuuucagga

SEQ ID NO: 254755 - RNA, 19 nt, Artificial Sequence
  Description of Artificial Sequence: Synthetic oligonucleotide
aacuagaagauccauggcc

SEQ ID NO: 254756 - RNA, 19 nt, Artificial Sequence
  Description of Artificial Sequence: Synthetic oligonucleotide
ucuauuaugaaaagcacag

SEQ ID NO: 254757 - RNA, 19 nt, Artificial Sequence
  Description of Artificial Sequence: Synthetic oligonucleotide
aaauggucauuacacagcc

SEQ ID NO: 254758 - RNA, 19 nt, Artificial Sequence
  Description of Artificial Sequence: Synthetic oligonucleotide
caaucuaucaauaauuugc

SEQ ID NO: 254759 - RNA, 19 nt, Artificial Sequence
  Description of Artificial Sequence: Synthetic oligonucleotide
acuguuaauacuucugucc

SEQ ID NO: 254760 - RNA, 19 nt, Artificial Sequence
  Description of Artificial Sequence: Synthetic oligonucleotide
auuaguggcaguuuauugc

SEQ ID NO: 254761 - RNA, 19 nt, Artificial Sequence
  Description of Artificial Sequence: Synthetic oligonucleotide
aaaccagucccacaggucg

SEQ ID NO: 254762 - RNA, 19 nt, Artificial Sequence
  Description of Artificial Sequence: Synthetic oligonucleotide
ucuaucaauaauuugcuga

SEQ ID NO: 254763 - RNA, 19 nt, Artificial Sequence
  Description of Artificial Sequence: Synthetic oligonucleotide
aaaggauacuuuaucaagc

SEQ ID NO: 254764 - RNA, 19 nt, Artificial Sequence
  Description of Artificial Sequence: Synthetic oligonucleotide
agaauguuaacccuacaac

SEQ ID NO: 254765 - RNA, 19 nt, Artificial Sequence
  Description of Artificial Sequence: Synthetic oligonucleotide
acauuuauaggauucaaug

SEQ ID NO: 254766 - RNA, 19 nt, Artificial Sequence
  Description of Artificial Sequence: Synthetic oligonucleotide
agugaauuaauuuuaggca

SEQ ID NO: 254767 - RNA, 19 nt, Artificial Sequence
  Description of Artificial Sequence: Synthetic oligonucleotide
cuaacuucaguacacaacc

SEQ ID NO: 254768 - RNA, 19 nt, Artificial Sequence
  Description of Artificial Sequence: Synthetic oligonucleotide
ugagguagaaugcuaaaag

SEQ ID NO: 254769 - RNA, 19 nt, Artificial Sequence
  Description of Artificial Sequence: Synthetic oligonucleotide
ugucgaaacuagaagaucc

SEQ ID NO: 254770 - RNA, 19 nt, Artificial Sequence
  Description of Artificial Sequence: Synthetic oligonucleotide
aagagugcggaacuacugc

SEQ ID NO: 254771 - RNA, 19 nt, Artificial Sequence
  Description of Artificial Sequence: Synthetic oligonucleotide
uucccuacacaaaagaaag

SEQ ID NO: 254772 - RNA, 19 nt, Artificial Sequence
  Description of Artificial Sequence: Synthetic oligonucleotide
acaaccauaaucccacgcc

SEQ ID NO: 254773 - RNA, 19 nt, Artificial Sequence
  Description of Artificial Sequence: Synthetic oligonucleotide
uuuaggcauacuaacagug

SEQ ID NO: 254774 - RNA, 19 nt, Artificial Sequence
  Description of Artificial Sequence: Synthetic oligonucleotide
gaagcuugaggcuugaaug

SEQ ID NO: 254775 - RNA, 19 nt, Artificial Sequence
  Description of Artificial Sequence: Synthetic oligonucleotide
aaugugauccaauuuuaca

SEQ ID NO: 254776 - RNA, 19 nt, Artificial Sequence
  Description of Artificial Sequence: Synthetic oligonucleotide
aauuaguggcaguuuauug

SEQ ID NO: 254777 - RNA, 19 nt, Artificial Sequence
  Description of Artificial Sequence: Synthetic oligonucleotide
uuuauaggauucaauguga

SEQ ID NO: 254778 - RNA, 19 nt, Artificial Sequence
  Description of Artificial Sequence: Synthetic oligonucleotide
aaucugcugaucaauauuc

SEQ ID NO: 254779 - RNA, 19 nt, Artificial Sequence
  Description of Artificial Sequence: Synthetic oligonucleotide
aacaugugugaccuuaaag

SEQ ID NO: 254780 - RNA, 19 nt, Artificial Sequence
  Description of Artificial Sequence: Synthetic oligonucleotide
aaacuagaagauccauggc

SEQ ID NO: 254781 - RNA, 19 nt, Artificial Sequence
  Description of Artificial Sequence: Synthetic oligonucleotide
uucuauuaugaaaagcaca

SEQ ID NO: 254782 - RNA, 19 nt, Artificial Sequence
  Description of Artificial Sequence: Synthetic oligonucleotide
ugcauuaugugucaacuca

SEQ ID NO: 254783 - RNA, 19 nt, Artificial Sequence
  Description of Artificial Sequence: Synthetic oligonucleotide
aaaauagaauuaguggcag

SEQ ID NO: 254784 - RNA, 19 nt, Artificial Sequence
  Description of Artificial Sequence: Synthetic oligonucleotide
uuauacaaauuuaaccaac

SEQ ID NO: 254785 - RNA, 19 nt, Artificial Sequence
  Description of Artificial Sequence: Synthetic oligonucleotide
uuuaaccucucauaaauuc

SEQ ID NO: 254786 - RNA, 19 nt, Artificial Sequence
  Description of Artificial Sequence: Synthetic oligonucleotide
aagaauguuaacccuacaa

SEQ ID NO: 254787 - RNA, 19 nt, Artificial Sequence
  Description of Artificial Sequence: Synthetic oligonucleotide
uaugagacccaucacuugc

SEQ ID NO: 254788 - RNA, 19 nt, Artificial Sequence
  Description of Artificial Sequence: Synthetic oligonucleotide
aguacacaaccauaauccc

SEQ ID NO: 254789 - RNA, 19 nt, Artificial Sequence
  Description of Artificial Sequence: Synthetic oligonucleotide
cuagacuucucuuugcuag

SEQ ID NO: 254790 - RNA, 19 nt, Artificial Sequence
  Description of Artificial Sequence: Synthetic oligonucleotide
uuaucaagcuguuucauaa

SEQ ID NO: 254791 - RNA, 19 nt, Artificial Sequence
  Description of Artificial Sequence: Synthetic oligonucleotide
aaugcaagaacaaucugug

SEQ ID NO: 254792 - RNA, 19 nt, Artificial Sequence
  Description of Artificial Sequence: Synthetic oligonucleotide
ucuaucucgucuucgaccc

SEQ ID NO: 254793 - RNA, 19 nt, Artificial Sequence
  Description of Artificial Sequence: Synthetic oligonucleotide
aacuguggagaauauuaag

SEQ ID NO: 254794 - RNA, 19 nt, Artificial Sequence
  Description of Artificial Sequence: Synthetic oligonucleotide
aaaugcaagaacaaucugu

SEQ ID NO: 254795 - RNA, 19 nt, Artificial Sequence
  Description of Artificial Sequence: Synthetic oligonucleotide
auagucuuaaauaacgcag

SEQ ID NO: 254796 - RNA, 19 nt, Artificial Sequence
  Description of Artificial Sequence: Synthetic oligonucleotide
ucugcauuacuguuaauac

SEQ ID NO: 254797 - RNA, 19 nt, Artificial Sequence
  Description of Artificial Sequence: Synthetic oligonucleotide
acguaauucuccuaaaaca

SEQ ID NO: 254798 - RNA, 19 nt, Artificial Sequence
  Description of Artificial Sequence: Synthetic oligonucleotide
ugauagucuuaaauaacgc

SEQ ID NO: 254799 - RNA, 19 nt, Artificial Sequence
  Description of Artificial Sequence: Synthetic oligonucleotide
aaggauacuuuaucaagcu

SEQ ID NO: 254800 - RNA, 19 nt, Artificial Sequence
  Description of Artificial Sequence: Synthetic oligonucleotide
ugugugaccuuaaaguaga

SEQ ID NO: 254801 - RNA, 19 nt, Artificial Sequence
  Description of Artificial Sequence: Synthetic oligonucleotide
ugucuauuuccucaacucc

SEQ ID NO: 254802 - RNA, 19 nt, Artificial Sequence
  Description of Artificial Sequence: Synthetic oligonucleotide
uuaaauaacgcagcucugc

SEQ ID NO: 254803 - RNA, 19 nt, Artificial Sequence
  Description of Artificial Sequence: Synthetic oligonucleotide
aggaccuuugaucaaauca

SEQ ID NO: 254804 - RNA, 19 nt, Artificial Sequence
  Description of Artificial Sequence: Synthetic oligonucleotide
auggcaaccaugccaaagg

SEQ ID NO: 254805 - RNA, 19 nt, Artificial Sequence
  Description of Artificial Sequence: Synthetic oligonucleotide
agaaauacaaguacauaag

SEQ ID NO: 254806 - RNA, 19 nt, Artificial Sequence
  Description of Artificial Sequence: Synthetic oligonucleotide
ucuaauucucugucgaaac

SEQ ID NO: 254807 - RNA, 19 nt, Artificial Sequence
  Description of Artificial Sequence: Synthetic oligonucleotide
uuaacccuacaacuguugc

SEQ ID NO: 254808 - RNA, 19 nt, Artificial Sequence
  Description of Artificial Sequence: Synthetic oligonucleotide
uaaauaacgcagcucugca

SEQ ID NO: 254809 - RNA, 19 nt, Artificial Sequence
  Description of Artificial Sequence: Synthetic oligonucleotide
aauagaauuaguggcaguu

SEQ ID NO: 254810 - RNA, 19 nt, Artificial Sequence
  Description of Artificial Sequence: Synthetic oligonucleotide
ugcugauagucuuaaauaa

SEQ ID NO: 254811 - RNA, 19 nt, Artificial Sequence
  Description of Artificial Sequence: Synthetic oligonucleotide
accucuacuucgcugcucc

SEQ ID NO: 254812 - RNA, 19 nt, Artificial Sequence
  Description of Artificial Sequence: Synthetic oligonucleotide
agacccaucacuugcuuuc

SEQ ID NO: 254813 - RNA, 19 nt, Artificial Sequence
  Description of Artificial Sequence: Synthetic oligonucleotide
ucgucuucgaccccucucg

SEQ ID NO: 254814 - RNA, 19 nt, Artificial Sequence
  Description of Artificial Sequence: Synthetic oligonucleotide
gauacuucgggaucuucgc

SEQ ID NO: 254815 - RNA, 19 nt, Artificial Sequence
  Description of Artificial Sequence: Synthetic oligonucleotide
ugaaagcacguaauucucc

SEQ ID NO: 254816 - RNA, 19 nt, Artificial Sequence
  Description of Artificial Sequence: Synthetic oligonucleotide
gaaacaaugccuccuguuc

SEQ ID NO: 254817 - RNA, 19 nt, Artificial Sequence
  Description of Artificial Sequence: Synthetic oligonucleotide
aaucccacgccuacaaaac

SEQ ID NO: 254818 - RNA, 19 nt, Artificial Sequence
  Description of Artificial Sequence: Synthetic oligonucleotide
guggacaagaauguuaacc

SEQ ID NO: 254819 - RNA, 19 nt, Artificial Sequence
  Description of Artificial Sequence: Synthetic oligonucleotide
guagaaugcuaaaaggacc

SEQ ID NO: 254820 - RNA, 19 nt, Artificial Sequence
  Description of Artificial Sequence: Synthetic oligonucleotide
aacccuacaacuguugccu

SEQ ID NO: 254821 - RNA, 19 nt, Artificial Sequence
  Description of Artificial Sequence: Synthetic oligonucleotide
ucugugucgccuauccucc

SEQ ID NO: 254822 - RNA, 19 nt, Artificial Sequence
  Description of Artificial Sequence: Synthetic oligonucleotide
aacaucucuccaaaugguc

SEQ ID NO: 254823 - RNA, 19 nt, Artificial Sequence
  Description of Artificial Sequence: Synthetic oligonucleotide
ucauuacacagccuccgcc

SEQ ID NO: 254824 - RNA, 19 nt, Artificial Sequence
  Description of Artificial Sequence: Synthetic oligonucleotide
ucuacuucgcugcuccuug

SEQ ID NO: 254825 - RNA, 19 nt, Artificial Sequence
  Description of Artificial Sequence: Synthetic oligonucleotide
uucucguuaacuucagggu

SEQ ID NO: 254826 - RNA, 19 nt, Artificial Sequence
  Description of Artificial Sequence: Synthetic oligonucleotide
ucugucgaaacuagaagau

SEQ ID NO: 254827 - RNA, 19 nt, Artificial Sequence
  Description of Artificial Sequence: Synthetic oligonucleotide
guauaccuuauauacauaa

SEQ ID NO: 254828 - RNA, 19 nt, Artificial Sequence
  Description of Artificial Sequence: Synthetic oligonucleotide
uaauacuucuguccuagau

SEQ ID NO: 254829 - RNA, 19 nt, Artificial Sequence
  Description of Artificial Sequence: Synthetic oligonucleotide
aaauagaauuaguggcagu

SEQ ID NO: 254830 - RNA, 19 nt, Artificial Sequence
  Description of Artificial Sequence: Synthetic oligonucleotide
uguagagucuguauguguu

SEQ ID NO: 254831 - RNA, 19 nt, Artificial Sequence
  Description of Artificial Sequence: Synthetic oligonucleotide
accauaaucccacgccuac

SEQ ID NO: 254832 - RNA, 19 nt, Artificial Sequence
  Description of Artificial Sequence: Synthetic oligonucleotide
ucuaaaccccgaucgauac

SEQ ID NO: 254833 - RNA, 19 nt, Artificial Sequence
  Description of Artificial Sequence: Synthetic oligonucleotide
ugauauauguagagucugu

SEQ ID NO: 254834 - RNA, 19 nt, Artificial Sequence
  Description of Artificial Sequence: Synthetic oligonucleotide
cuuucuagacuucucuuug

SEQ ID NO: 254835 - RNA, 19 nt, Artificial Sequence
  Description of Artificial Sequence: Synthetic oligonucleotide
cuugaucucucccuguccc

SEQ ID NO: 254836 - RNA, 19 nt, Artificial Sequence
  Description of Artificial Sequence: Synthetic oligonucleotide
auacuucgggaucuucgcc

SEQ ID NO: 254837 - RNA, 19 nt, Artificial Sequence
  Description of Artificial Sequence: Synthetic oligonucleotide
cuacagggagcucaaagag

SEQ ID NO: 254838 - RNA, 19 nt, Artificial Sequence
  Description of Artificial Sequence: Synthetic oligonucleotide
aagcacguaauucuccuaa

SEQ ID NO: 254839 - RNA, 19 nt, Artificial Sequence
  Description of Artificial Sequence: Synthetic oligonucleotide
uugcugauagucuuaaaua

SEQ ID NO: 254840 - RNA, 19 nt, Artificial Sequence
  Description of Artificial Sequence: Synthetic oligonucleotide
uagaauuaguggcaguuua

SEQ ID NO: 254841 - RNA, 19 nt, Artificial Sequence
  Description of Artificial Sequence: Synthetic oligonucleotide
uuaggcauacuaacagugu

SEQ ID NO: 254842 - RNA, 19 nt, Artificial Sequence
  Description of Artificial Sequence: Synthetic oligonucleotide
uugacugccacuucuacuu

SEQ ID NO: 254843 - RNA, 19 nt, Artificial Sequence
  Description of Artificial Sequence: Synthetic oligonucleotide
aucuggaccgccuucgcuc

SEQ ID NO: 254844 - RNA, 19 nt, Artificial Sequence
  Description of Artificial Sequence: Synthetic oligonucleotide
aguacauaagaacaaucua

SEQ ID NO: 254845 - RNA, 19 nt, Artificial Sequence
  Description of Artificial Sequence: Synthetic oligonucleotide
ugaauuaauuuuaggcaua

SEQ ID NO: 254846 - RNA, 19 nt, Artificial Sequence
  Description of Artificial Sequence: Synthetic oligonucleotide
aaccccgaucgauacuucg

SEQ ID NO: 254847 - RNA, 19 nt, Artificial Sequence
  Description of Artificial Sequence: Synthetic oligonucleotide
uaaucccacgccuacaaaa

SEQ ID NO: 254848 - RNA, 19 nt, Artificial Sequence
  Description of Artificial Sequence: Synthetic oligonucleotide
cacguaauucuccuaaaac

SEQ ID NO: 254849 - RNA, 19 nt, Artificial Sequence
  Description of Artificial Sequence: Synthetic oligonucleotide
uucccgaucuucuuggaga

SEQ ID NO: 254850 - RNA, 19 nt, Artificial Sequence
  Description of Artificial Sequence: Synthetic oligonucleotide
guauauugaaagcacguaa

SEQ ID NO: 254851 - RNA, 19 nt, Artificial Sequence
  Description of Artificial Sequence: Synthetic oligonucleotide
augcaagaacaaucugugc

SEQ ID NO: 254852 - RNA, 19 nt, Artificial Sequence
  Description of Artificial Sequence: Synthetic oligonucleotide
uguagaaacaaugccuccu

SEQ ID NO: 254853 - RNA, 19 nt, Artificial Sequence
  Description of Artificial Sequence: Synthetic oligonucleotide
aaucucuaucucgucuucg

SEQ ID NO: 254854 - RNA, 19 nt, Artificial Sequence
  Description of Artificial Sequence: Synthetic oligonucleotide
cauaagaacaaucuaucaa

SEQ ID NO: 254855 - RNA, 19 nt, Artificial Sequence
  Description of Artificial Sequence: Synthetic oligonucleotide
ccuaucacgacuucgacug

SEQ ID NO: 254856 - RNA, 19 nt, Artificial Sequence
  Description of Artificial Sequence: Synthetic oligonucleotide
acaagaauguuaacccuac

SEQ ID NO: 254857 - RNA, 19 nt, Artificial Sequence
  Description of Artificial Sequence: Synthetic oligonucleotide
ucucguuaacuucagggua

SEQ ID NO: 254858 - RNA, 19 nt, Artificial Sequence
  Description of Artificial Sequence: Synthetic oligonucleotide
uuugucgucucugugucgc

SEQ ID NO: 254859 - RNA, 19 nt, Artificial Sequence
  Description of Artificial Sequence: Synthetic oligonucleotide
aaggaccuuugaucaaauc

SEQ ID NO: 254860 - RNA, 19 nt, Artificial Sequence
  Description of Artificial Sequence: Synthetic oligonucleotide
uaggcauacuaacaguguc

SEQ ID NO: 254861 - RNA, 19 nt, Artificial Sequence
  Description of Artificial Sequence: Synthetic oligonucleotide
aauauuaacuguggagaau

SEQ ID NO: 254862 - RNA, 19 nt, Artificial Sequence
  Description of Artificial Sequence: Synthetic oligonucleotide
ucuucgaccccucucguuc

SEQ ID NO: 254863 - RNA, 19 nt, Artificial Sequence
  Description of Artificial Sequence: Synthetic oligonucleotide
auguuaacccuacaacugu

SEQ ID NO: 254864 - RNA, 19 nt, Artificial Sequence
  Description of Artificial Sequence: Synthetic oligonucleotide
cuuauacaaauuuaaccaa

SEQ ID NO: 254865 - RNA, 19 nt, Artificial Sequence
  Description of Artificial Sequence: Synthetic oligonucleotide
uaacccuacaacuguugcc

SEQ ID NO: 254866 - RNA, 19 nt, Artificial Sequence
  Description of Artificial Sequence: Synthetic oligonucleotide
acuguggagaauauuaagu

SEQ ID NO: 254867 - RNA, 19 nt, Artificial Sequence
  Description of Artificial Sequence: Synthetic oligonucleotide
aggcauacuaacagugucc

SEQ ID NO: 254868 - RNA, 19 nt, Artificial Sequence
  Description of Artificial Sequence: Synthetic oligonucleotide
aaaaggaccuuugaucaaa

SEQ ID NO: 254869 - RNA, 19 nt, Artificial Sequence
  Description of Artificial Sequence: Synthetic oligonucleotide
  modified_base (15)..(15): a, c, u, g, unknown or other
aguauucuccauuunuaaa

SEQ ID NO: 254870 - RNA, 19 nt, Artificial Sequence
  Description of Artificial Sequence: Synthetic oligonucleotide
ucuauccccuuuccuauca

SEQ ID NO: 254871 - RNA, 19 nt, Artificial Sequence
  Description of Artificial Sequence: Synthetic oligonucleotide
ucccuuugagguagaaugc

SEQ ID NO: 254872 - RNA, 19 nt, Artificial Sequence
  Description of Artificial Sequence: Synthetic oligonucleotide
aaauaacgcagcucugcau

SEQ ID NO: 254873 - RNA, 19 nt, Artificial Sequence
  Description of Artificial Sequence: Synthetic oligonucleotide
auauacaguggacaagaau

SEQ ID NO: 254874 - RNA, 19 nt, Artificial Sequence
  Description of Artificial Sequence: Synthetic oligonucleotide
gcguucuaaaccccgaucg

SEQ ID NO: 254875 - RNA, 19 nt, Artificial Sequence
  Description of Artificial Sequence: Synthetic oligonucleotide
aaagagugcggaacuacug

SEQ ID NO: 254876 - RNA, 19 nt, Artificial Sequence
  Description of Artificial Sequence: Synthetic oligonucleotide
cucugucgaaacuagaaga

SEQ ID NO: 254877 - RNA, 19 nt, Artificial Sequence
  Description of Artificial Sequence: Synthetic oligonucleotide
uaucacgacuucgacugcg

SEQ ID NO: 254878 - RNA, 19 nt, Artificial Sequence
  Description of Artificial Sequence: Synthetic oligonucleotide
uuaugagacccaucacuug

SEQ ID NO: 254879 - RNA, 19 nt, Artificial Sequence
  Description of Artificial Sequence: Synthetic oligonucleotide
ucuugaucucucccugucc

SEQ ID NO: 254880 - RNA, 19 nt, Artificial Sequence
  Description of Artificial Sequence: Synthetic oligonucleotide
agagcuuccaagguaauau

SEQ ID NO: 254881 - RNA, 19 nt, Artificial Sequence
  Description of Artificial Sequence: Synthetic oligonucleotide
accucucauaaauucucuc

SEQ ID NO: 254882 - RNA, 19 nt, Artificial Sequence
  Description of Artificial Sequence: Synthetic oligonucleotide
ucuguccuagauuaaguuu

SEQ ID NO: 254883 - RNA, 19 nt, Artificial Sequence
  Description of Artificial Sequence: Synthetic oligonucleotide
aucuaucaauaauuugcug

SEQ ID NO: 254884 - RNA, 19 nt, Artificial Sequence
  Description of Artificial Sequence: Synthetic oligonucleotide
cuuaaauaacgcagcucug

SEQ ID NO: 254885 - RNA, 19 nt, Artificial Sequence
  Description of Artificial Sequence: Synthetic oligonucleotide
ucaaugcaauaaaugggau

SEQ ID NO: 254886 - RNA, 19 nt, Artificial Sequence
  Description of Artificial Sequence: Synthetic oligonucleotide
uacuguuaauacuucuguc

SEQ ID NO: 254887 - RNA, 19 nt, Artificial Sequence
  Description of Artificial Sequence: Synthetic oligonucleotide
aauuugcugauagucuuaa

SEQ ID NO: 254888 - RNA, 19 nt, Artificial Sequence
  Description of Artificial Sequence: Synthetic oligonucleotide
uacuucgggaucuucgccu

SEQ ID NO: 254889 - RNA, 19 nt, Artificial Sequence
  Description of Artificial Sequence: Synthetic oligonucleotide
gugccugcguucuaaaccc

SEQ ID NO: 254890 - RNA, 19 nt, Artificial Sequence
  Description of Artificial Sequence: Synthetic oligonucleotide
cuuuccuaucacgacuucg

SEQ ID NO: 254891 - RNA, 19 nt, Artificial Sequence
  Description of Artificial Sequence: Synthetic oligonucleotide
ugaccuuaaaguagaucuc

SEQ ID NO: 254892 - RNA, 19 nt, Artificial Sequence
  Description of Artificial Sequence: Synthetic oligonucleotide
uuuugucgucucugugucg

SEQ ID NO: 254893 - RNA, 19 nt, Artificial Sequence
  Description of Artificial Sequence: Synthetic oligonucleotide
uggucauuacacagccucc

SEQ ID NO: 254894 - RNA, 19 nt, Artificial Sequence
  Description of Artificial Sequence: Synthetic oligonucleotide
uucuaaaccccgaucgaua

SEQ ID NO: 254895 - RNA, 19 nt, Artificial Sequence
  Description of Artificial Sequence: Synthetic oligonucleotide
acuucgcugcuccuuggac

SEQ ID NO: 254896 - RNA, 19 nt, Artificial Sequence
  Description of Artificial Sequence: Synthetic oligonucleotide
auuacacagccuccgccag

SEQ ID NO: 254897 - RNA, 19 nt, Artificial Sequence
  Description of Artificial Sequence: Synthetic oligonucleotide
gguagaaugcuaaaaggac

SEQ ID NO: 254898 - RNA, 19 nt, Artificial Sequence
  Description of Artificial Sequence: Synthetic oligonucleotide
uccuaucacgacuucgacu

SEQ ID NO: 254899 - RNA, 19 nt, Artificial Sequence
  Description of Artificial Sequence: Synthetic oligonucleotide
gagucuguauguguuauga

SEQ ID NO: 254900 - RNA, 19 nt, Artificial Sequence
  Description of Artificial Sequence: Synthetic oligonucleotide
gugaauuaauuuuaggcau

SEQ ID NO: 254901 - RNA, 19 nt, Artificial Sequence
  Description of Artificial Sequence: Synthetic oligonucleotide
aguggacaagaauguuaac

SEQ ID NO: 254902 - RNA, 19 nt, Artificial Sequence
  Description of Artificial Sequence: Synthetic oligonucleotide
uggaauucuuggaaacaaa

SEQ ID NO: 254903 - RNA, 19 nt, Artificial Sequence
  Description of Artificial Sequence: Synthetic oligonucleotide
gaucucucuugugggagcg

SEQ ID NO: 254904 - RNA, 19 nt, Artificial Sequence
  Description of Artificial Sequence: Synthetic oligonucleotide
auucaaugugauccaauuu

SEQ ID NO: 254905 - RNA, 19 nt, Artificial Sequence
  Description of Artificial Sequence: Synthetic oligonucleotide
uauuaacuguggagaauau

SEQ ID NO: 254906 - RNA, 19 nt, Artificial Sequence
  Description of Artificial Sequence: Synthetic oligonucleotide
aaguagggcggcgacagga

SEQ ID NO: 254907 - RNA, 19 nt, Artificial Sequence
  Description of Artificial Sequence: Synthetic oligonucleotide
ugucugacugguccuugcc

SEQ ID NO: 254908 - RNA, 19 nt, Artificial Sequence
  Description of Artificial Sequence: Synthetic oligonucleotide
ugaucaaaucacagccuaa

SEQ ID NO: 254909 - RNA, 19 nt, Artificial Sequence
  Description of Artificial Sequence: Synthetic oligonucleotide
uucuguccuagauuaaguu

SEQ ID NO: 254910 - RNA, 19 nt, Artificial Sequence
  Description of Artificial Sequence: Synthetic oligonucleotide
agagugcggaacuacugca

SEQ ID NO: 254911 - RNA, 19 nt, Artificial Sequence
  Description of Artificial Sequence: Synthetic oligonucleotide
guguauaccuuauauacau

SEQ ID NO: 254912 - RNA, 19 nt, Artificial Sequence
  Description of Artificial Sequence: Synthetic oligonucleotide
aacuacugcacaaucucaa

SEQ ID NO: 254913 - RNA, 19 nt, Artificial Sequence
  Description of Artificial Sequence: Synthetic oligonucleotide
uaaaccccgaucgauacuu

SEQ ID NO: 254914 - RNA, 19 nt, Artificial Sequence
  Description of Artificial Sequence: Synthetic oligonucleotide
ugaugguuuucuugaaaua

SEQ ID NO: 254915 - RNA, 19 nt, Artificial Sequence
  Description of Artificial Sequence: Synthetic oligonucleotide
ugaucucucuugugggagc

SEQ ID NO: 254916 - RNA, 19 nt, Artificial Sequence
  Description of Artificial Sequence: Synthetic oligonucleotide
aacgcagcucugcauuacu

SEQ ID NO: 254917 - RNA, 19 nt, Artificial Sequence
  Description of Artificial Sequence: Synthetic oligonucleotide
uuggagaccuccguggacu

SEQ ID NO: 254918 - RNA, 19 nt, Artificial Sequence
  Description of Artificial Sequence: Synthetic oligonucleotide
ugugccccacccucaaaag

SEQ ID NO: 254919 - RNA, 19 nt, Artificial Sequence
  Description of Artificial Sequence: Synthetic oligonucleotide
caauauuaacuguggagaa

SEQ ID NO: 254920 - RNA, 19 nt, Artificial Sequence
  Description of Artificial Sequence: Synthetic oligonucleotide
ggguaaauaauuguauaac

SEQ ID NO: 254921 - RNA, 19 nt, Artificial Sequence
  Description of Artificial Sequence: Synthetic oligonucleotide
ugcuaacuucaguacacaa

SEQ ID NO: 254922 - RNA, 19 nt, Artificial Sequence
  Description of Artificial Sequence: Synthetic oligonucleotide
augaucucucuugugggag

SEQ ID NO: 254923 - RNA, 19 nt, Artificial Sequence
  Description of Artificial Sequence: Synthetic oligonucleotide
gaaagcacguaauucuccu

SEQ ID NO: 254924 - RNA, 19 nt, Artificial Sequence
  Description of Artificial Sequence: Synthetic oligonucleotide
uguuaacccuacaacuguu

SEQ ID NO: 254925 - RNA, 19 nt, Artificial Sequence
  Description of Artificial Sequence: Synthetic oligonucleotide
cauuacacagccuccgcca

SEQ ID NO: 254926 - RNA, 19 nt, Artificial Sequence
  Description of Artificial Sequence: Synthetic oligonucleotide
uguccuagauuaaguuuaa

SEQ ID NO: 254927 - RNA, 19 nt, Artificial Sequence
  Description of Artificial Sequence: Synthetic oligonucleotide
acagccuacagggagcuca

SEQ ID NO: 254928 - RNA, 19 nt, Artificial Sequence
  Description of Artificial Sequence: Synthetic oligonucleotide
guacauaagaacaaucuau

SEQ ID NO: 254929 - RNA, 19 nt, Artificial Sequence
  Description of Artificial Sequence: Synthetic oligonucleotide
ggaccuuugaucaaaucac

SEQ ID NO: 254930 - RNA, 19 nt, Artificial Sequence
  Description of Artificial Sequence: Synthetic oligonucleotide
ucgcucaacaugucugucu

SEQ ID NO: 254931 - RNA, 19 nt, Artificial Sequence
  Description of Artificial Sequence: Synthetic oligonucleotide
aggucuugagccucguaga

SEQ ID NO: 254932 - RNA, 19 nt, Artificial Sequence
  Description of Artificial Sequence: Synthetic oligonucleotide
ugcguucuaaaccccgauc

SEQ ID NO: 254933 - RNA, 19 nt, Artificial Sequence
  Description of Artificial Sequence: Synthetic oligonucleotide
acaagagcuuccaagguaa

SEQ ID NO: 254934 - RNA, 19 nt, Artificial Sequence
  Description of Artificial Sequence: Synthetic oligonucleotide
uuaauacuucuguccuaga

SEQ ID NO: 254935 - RNA, 19 nt, Artificial Sequence
  Description of Artificial Sequence: Synthetic oligonucleotide
aaccaugccaaaggaauua

SEQ ID NO: 254936 - RNA, 19 nt, Artificial Sequence
  Description of Artificial Sequence: Synthetic oligonucleotide
uuccuaucacgacuucgac

SEQ ID NO: 254937 - RNA, 19 nt, Artificial Sequence
  Description of Artificial Sequence: Synthetic oligonucleotide
aaagcacguaauucuccua

SEQ ID NO: 254938 - RNA, 19 nt, Artificial Sequence
  Description of Artificial Sequence: Synthetic oligonucleotide
uauguguuaugagacccau

SEQ ID NO: 254939 - RNA, 19 nt, Artificial Sequence
  Description of Artificial Sequence: Synthetic oligonucleotide
uuucucccauggcucaaca

SEQ ID NO: 254940 - RNA, 19 nt, Artificial Sequence
  Description of Artificial Sequence: Synthetic oligonucleotide
augcaauaaaugggauuac

SEQ ID NO: 254941 - RNA, 19 nt, Artificial Sequence
  Description of Artificial Sequence: Synthetic oligonucleotide
ugaggcuugaaugcuuuuc

SEQ ID NO: 254942 - RNA, 19 nt, Artificial Sequence
  Description of Artificial Sequence: Synthetic oligonucleotide
guuaacccuacaacuguug

SEQ ID NO: 254943 - RNA, 19 nt, Artificial Sequence
  Description of Artificial Sequence: Synthetic oligonucleotide
uaucaagcuguuucauaau

SEQ ID NO: 254944 - RNA, 19 nt, Artificial Sequence
  Description of Artificial Sequence: Synthetic oligonucleotide
ccaauauuaacuguggaga

SEQ ID NO: 254945 - RNA, 19 nt, Artificial Sequence
  Description of Artificial Sequence: Synthetic oligonucleotide
ugugaccuuaaaguagauc

SEQ ID NO: 254946 - RNA, 19 nt, Artificial Sequence
  Description of Artificial Sequence: Synthetic oligonucleotide
aggccgaguuuuaaucugc

SEQ ID NO: 254947 - RNA, 19 nt, Artificial Sequence
  Description of Artificial Sequence: Synthetic oligonucleotide
ucccgaucuucuuggagac

SEQ ID NO: 254948 - RNA, 19 nt, Artificial Sequence
  Description of Artificial Sequence: Synthetic oligonucleotide
auggcucaacaugugugac

SEQ ID NO: 254949 - RNA, 19 nt, Artificial Sequence
  Description of Artificial Sequence: Synthetic oligonucleotide
uccccaugaucucucuugu

SEQ ID NO: 254950 - RNA, 19 nt, Artificial Sequence
  Description of Artificial Sequence: Synthetic oligonucleotide
uguucucguuuccucaauu

SEQ ID NO: 254951 - RNA, 19 nt, Artificial Sequence
  Description of Artificial Sequence: Synthetic oligonucleotide
aucaaaucacagccuaauu

SEQ ID NO: 254952 - RNA, 19 nt, Artificial Sequence
  Description of Artificial Sequence: Synthetic oligonucleotide
augauccugucugucugac

SEQ ID NO: 254953 - RNA, 19 nt, Artificial Sequence
  Description of Artificial Sequence: Synthetic oligonucleotide
ggucauuacacagccuccg

SEQ ID NO: 254954 - RNA, 19 nt, Artificial Sequence
  Description of Artificial Sequence: Synthetic oligonucleotide
uugcuugacuugucuuugc

SEQ ID NO: 254955 - RNA, 19 nt, Artificial Sequence
  Description of Artificial Sequence: Synthetic oligonucleotide
cuucccgaucuucuuggag

SEQ ID NO: 254956 - RNA, 19 nt, Artificial Sequence
  Description of Artificial Sequence: Synthetic oligonucleotide
ucuggaccgccuucgcuca

SEQ ID NO: 254957 - RNA, 19 nt, Artificial Sequence
  Description of Artificial Sequence: Synthetic oligonucleotide
ggcauacuaacaguguccc

SEQ ID NO: 254958 - RNA, 19 nt, Artificial Sequence
  Description of Artificial Sequence: Synthetic oligonucleotide
cucguuaacuucaggguaa

SEQ ID NO: 254959 - RNA, 19 nt, Artificial Sequence
  Description of Artificial Sequence: Synthetic oligonucleotide
ucccucaccucuacuucgc

SEQ ID NO: 254960 - RNA, 19 nt, Artificial Sequence
  Description of Artificial Sequence: Synthetic oligonucleotide
cauaaucccacgccuacaa

SEQ ID NO: 254961 - RNA, 19 nt, Artificial Sequence
  Description of Artificial Sequence: Synthetic oligonucleotide
ggauacuuuaucaagcugu

SEQ ID NO: 254962 - RNA, 19 nt, Artificial Sequence
  Description of Artificial Sequence: Synthetic oligonucleotide
acguugcccugcuugcccg

SEQ ID NO: 254963 - RNA, 19 nt, Artificial Sequence
  Description of Artificial Sequence: Synthetic oligonucleotide
uacuucgcugcuccuugga

SEQ ID NO: 254964 - RNA, 19 nt, Artificial Sequence
  Description of Artificial Sequence: Synthetic oligonucleotide
gcacaaucucaacuugggg

SEQ ID NO: 254965 - RNA, 19 nt, Artificial Sequence
  Description of Artificial Sequence: Synthetic oligonucleotide
accuccguggacucaguga

SEQ ID NO: 254966 - RNA, 19 nt, Artificial Sequence
  Description of Artificial Sequence: Synthetic oligonucleotide
cucguagagcugcacuuug

SEQ ID NO: 254967 - RNA, 19 nt, Artificial Sequence
  Description of Artificial Sequence: Synthetic oligonucleotide
ucgaaacuagaagauccau

SEQ ID NO: 254968 - RNA, 19 nt, Artificial Sequence
  Description of Artificial Sequence: Synthetic oligonucleotide
gaccuuugaucaaaucaca

SEQ ID NO: 254969 - RNA, 19 nt, Artificial Sequence
  Description of Artificial Sequence: Synthetic oligonucleotide
ggucuugagccucguagag

SEQ ID NO: 254970 - RNA, 19 nt, Artificial Sequence
  Description of Artificial Sequence: Synthetic oligonucleotide
cucuugaucucucccuguc

SEQ ID NO: 254971 - RNA, 19 nt, Artificial Sequence
  Description of Artificial Sequence: Synthetic oligonucleotide
ggcacuucccuacacaaaa

SEQ ID NO: 254972 - RNA, 19 nt, Artificial Sequence
  Description of Artificial Sequence: Synthetic oligonucleotide
auagaauuaguggcaguuu

SEQ ID NO: 254973 - RNA, 19 nt, Artificial Sequence
  Description of Artificial Sequence: Synthetic oligonucleotide
uuuccuaggccgaguuuua

SEQ ID NO: 254974 - RNA, 19 nt, Artificial Sequence
  Description of Artificial Sequence: Synthetic oligonucleotide
gaaguagggcggcgacagg

SEQ ID NO: 254975 - RNA, 19 nt, Artificial Sequence
  Description of Artificial Sequence: Synthetic oligonucleotide
ucacgacuucgacugcgac

SEQ ID NO: 254976 - RNA, 19 nt, Artificial Sequence
  Description of Artificial Sequence: Synthetic oligonucleotide
cuacuucgcugcuccuugg

SEQ ID NO: 254977 - RNA, 19 nt, Artificial Sequence
  Description of Artificial Sequence: Synthetic oligonucleotide
gccuacagggagcucaaag

SEQ ID NO: 254978 - RNA, 19 nt, Artificial Sequence
  Description of Artificial Sequence: Synthetic oligonucleotide
agaauuaguggcaguuuau

SEQ ID NO: 254979 - RNA, 19 nt, Artificial Sequence
  Description of Artificial Sequence: Synthetic oligonucleotide
aagagcuuccaagguaaua

SEQ ID NO: 254980 - RNA, 19 nt, Artificial Sequence
  Description of Artificial Sequence: Synthetic oligonucleotide
ccgaguuuuaaucugcuga

SEQ ID NO: 254981 - RNA, 19 nt, Artificial Sequence
  Description of Artificial Sequence: Synthetic oligonucleotide
auaacgcagcucugcauua

SEQ ID NO: 254982 - RNA, 19 nt, Artificial Sequence
  Description of Artificial Sequence: Synthetic oligonucleotide
aaaggaccuuugaucaaau

SEQ ID NO: 254983 - RNA, 19 nt, Artificial Sequence
  Description of Artificial Sequence: Synthetic oligonucleotide
uugaaguagggcggcgaca

SEQ ID NO: 254984 - RNA, 19 nt, Artificial Sequence
  Description of Artificial Sequence: Synthetic oligonucleotide
cuucaggguaaauaauugu

SEQ ID NO: 254985 - RNA, 19 nt, Artificial Sequence
  Description of Artificial Sequence: Synthetic oligonucleotide
ccuucgcucaacaugucug

SEQ ID NO: 254986 - RNA, 19 nt, Artificial Sequence
  Description of Artificial Sequence: Synthetic oligonucleotide
uccuaggccgaguuuuaau

SEQ ID NO: 254987 - RNA, 19 nt, Artificial Sequence
  Description of Artificial Sequence: Synthetic oligonucleotide
ccuaauuuaaccucucaua

SEQ ID NO: 254988 - RNA, 19 nt, Artificial Sequence
  Description of Artificial Sequence: Synthetic oligonucleotide
agcggucuuggcuucugcu

SEQ ID NO: 254989 - RNA, 19 nt, Artificial Sequence
  Description of Artificial Sequence: Synthetic oligonucleotide
ccuaggccgaguuuuaauc

SEQ ID NO: 254990 - RNA, 19 nt, Artificial Sequence
  Description of Artificial Sequence: Synthetic oligonucleotide
cugucgaaacuagaagauc

SEQ ID NO: 254991 - RNA, 19 nt, Artificial Sequence
  Description of Artificial Sequence: Synthetic oligonucleotide
gguuguguauaccuuauau

SEQ ID NO: 254992 - RNA, 19 nt, Artificial Sequence
  Description of Artificial Sequence: Synthetic oligonucleotide
gggcgaagaacaucucucc

SEQ ID NO: 254993 - RNA, 19 nt, Artificial Sequence
  Description of Artificial Sequence: Synthetic oligonucleotide
cuuggagaucuggaccgcc

SEQ ID NO: 254994 - RNA, 19 nt, Artificial Sequence
  Description of Artificial Sequence: Synthetic oligonucleotide
accccgaucgauacuucgg

SEQ ID NO: 254995 - RNA, 19 nt, Artificial Sequence
  Description of Artificial Sequence: Synthetic oligonucleotide
auaaucccacgccuacaaa

SEQ ID NO: 254996 - RNA, 19 nt, Artificial Sequence
  Description of Artificial Sequence: Synthetic oligonucleotide
cguaauucuccuaaaacaa

SEQ ID NO: 254997 - RNA, 19 nt, Artificial Sequence
  Description of Artificial Sequence: Synthetic oligonucleotide
aaaccccgaucgauacuuc

SEQ ID NO: 254998 - RNA, 19 nt, Artificial Sequence
  Description of Artificial Sequence: Synthetic oligonucleotide
uucuauccccuuuccuauc

SEQ ID NO: 254999 - RNA, 19 nt, Artificial Sequence
  Description of Artificial Sequence: Synthetic oligonucleotide
ccuuaaaguagaucucguc

SEQ ID NO: 255000 - RNA, 19 nt, Artificial Sequence
  Description of Artificial Sequence: Synthetic oligonucleotide
aaccauaaucccacgccua

SEQ ID NO: 255001 - RNA, 19 nt, Artificial Sequence
  Description of Artificial Sequence: Synthetic oligonucleotide
ugauccugucugucugacu

SEQ ID NO: 255002 - RNA, 19 nt, Artificial Sequence
  Description of Artificial Sequence: Synthetic oligonucleotide
ucaccucuacuucgcugcu

SEQ ID NO: 255003 - RNA, 19 nt, Artificial Sequence
  Description of Artificial Sequence: Synthetic oligonucleotide
gugucgccuauccuccuug

SEQ ID NO: 255004 - RNA, 19 nt, Artificial Sequence
  Description of Artificial Sequence: Synthetic oligonucleotide
cuaucacgacuucgacugc

SEQ ID NO: 255005 - RNA, 19 nt, Artificial Sequence
  Description of Artificial Sequence: Synthetic oligonucleotide
uccugucugucugacuggu

SEQ ID NO: 255006 - RNA, 19 nt, Artificial Sequence
  Description of Artificial Sequence: Synthetic oligonucleotide
cugcauuacuguuaauacu

SEQ ID NO: 255007 - RNA, 19 nt, Artificial Sequence
  Description of Artificial Sequence: Synthetic oligonucleotide
cucaacaugugugaccuua

SEQ ID NO: 255008 - RNA, 19 nt, Artificial Sequence
  Description of Artificial Sequence: Synthetic oligonucleotide
auguguuaugagacccauc

SEQ ID NO: 255009 - RNA, 19 nt, Artificial Sequence
  Description of Artificial Sequence: Synthetic oligonucleotide
ugcggaacuacugcacaau

SEQ ID NO: 255010 - RNA, 19 nt, Artificial Sequence
  Description of Artificial Sequence: Synthetic oligonucleotide
ggcggcgacaggauguugg

SEQ ID NO: 255011 - RNA, 19 nt, Artificial Sequence
  Description of Artificial Sequence: Synthetic oligonucleotide
guuaugagacccaucacuu

SEQ ID NO: 255012 - RNA, 19 nt, Artificial Sequence
  Description of Artificial Sequence: Synthetic oligonucleotide
cuaauucucugucgaaacu

SEQ ID NO: 255013 - RNA, 19 nt, Artificial Sequence
  Description of Artificial Sequence: Synthetic oligonucleotide
cuaggccgaguuuuaaucu

SEQ ID NO: 255014 - RNA, 19 nt, Artificial Sequence
  Description of Artificial Sequence: Synthetic oligonucleotide
cugugccugcguucuaaac

SEQ ID NO: 255015 - RNA, 19 nt, Artificial Sequence
  Description of Artificial Sequence: Synthetic oligonucleotide
aucugcugaucaauauucu

SEQ ID NO: 255016 - RNA, 19 nt, Artificial Sequence
  Description of Artificial Sequence: Synthetic oligonucleotide
ugccugcguucuaaacccc

SEQ ID NO: 255017 - RNA, 19 nt, Artificial Sequence
  Description of Artificial Sequence: Synthetic oligonucleotide
cucgucuucgaccccucuc

SEQ ID NO: 255018 - RNA, 19 nt, Artificial Sequence
  Description of Artificial Sequence: Synthetic oligonucleotide
caaagagugcggaacuacu

SEQ ID NO: 255019 - RNA, 19 nt, Artificial Sequence
  Description of Artificial Sequence: Synthetic oligonucleotide
ucccggugaugacuucuac

SEQ ID NO: 255020 - RNA, 19 nt, Artificial Sequence
  Description of Artificial Sequence: Synthetic oligonucleotide
cuucuguccuagauuaagu

SEQ ID NO: 255021 - RNA, 19 nt, Artificial Sequence
  Description of Artificial Sequence: Synthetic oligonucleotide
uugucgucucugugucgcc

SEQ ID NO: 255022 - RNA, 19 nt, Artificial Sequence
  Description of Artificial Sequence: Synthetic oligonucleotide
ugucgccuauccuccuugu

SEQ ID NO: 255023 - RNA, 19 nt, Artificial Sequence
  Description of Artificial Sequence: Synthetic oligonucleotide
uuucccuacuccggcugug

SEQ ID NO: 255024 - RNA, 19 nt, Artificial Sequence
  Description of Artificial Sequence: Synthetic oligonucleotide
gaauuaguggcaguuuauu

SEQ ID NO: 255025 - RNA, 19 nt, Artificial Sequence
  Description of Artificial Sequence: Synthetic oligonucleotide
uucccuacuccggcugugc

SEQ ID NO: 255026 - RNA, 19 nt, Artificial Sequence
  Description of Artificial Sequence: Synthetic oligonucleotide
cuuugaaguagggcggcga

SEQ ID NO: 255027 - RNA, 19 nt, Artificial Sequence
  Description of Artificial Sequence: Synthetic oligonucleotide
ucguuaacuucaggguaaa

SEQ ID NO: 255028 - RNA, 19 nt, Artificial Sequence
  Description of Artificial Sequence: Synthetic oligonucleotide
gaagaacaucucuccaaau

SEQ ID NO: 255029 - RNA, 19 nt, Artificial Sequence
  Description of Artificial Sequence: Synthetic oligonucleotide
gcuuccaagguaauauaca

SEQ ID NO: 255030 - RNA, 19 nt, Artificial Sequence
  Description of Artificial Sequence: Synthetic oligonucleotide
caaccauaaucccacgccu

SEQ ID NO: 255031 - RNA, 19 nt, Artificial Sequence
  Description of Artificial Sequence: Synthetic oligonucleotide
caagaauguuaacccuaca

SEQ ID NO: 255032 - RNA, 19 nt, Artificial Sequence
  Description of Artificial Sequence: Synthetic oligonucleotide
cuucuauccccuuuccuau

SEQ ID NO: 255033 - RNA, 19 nt, Artificial Sequence
  Description of Artificial Sequence: Synthetic oligonucleotide
caaugcaauaaaugggauu

SEQ ID NO: 255034 - RNA, 19 nt, Artificial Sequence
  Description of Artificial Sequence: Synthetic oligonucleotide
augagacccaucacuugcu

SEQ ID NO: 255035 - RNA, 19 nt, Artificial Sequence
  Description of Artificial Sequence: Synthetic oligonucleotide
gccagcuuucacaucuagg

SEQ ID NO: 255036 - RNA, 19 nt, Artificial Sequence
  Description of Artificial Sequence: Synthetic oligonucleotide
aaccagucccacaggucgu

SEQ ID NO: 255037 - RNA, 19 nt, Artificial Sequence
  Description of Artificial Sequence: Synthetic oligonucleotide
cuaucucgucuucgacccc

SEQ ID NO: 255038 - RNA, 19 nt, Artificial Sequence
  Description of Artificial Sequence: Synthetic oligonucleotide
cugaugauccugucugucu

SEQ ID NO: 255039 - RNA, 19 nt, Artificial Sequence
  Description of Artificial Sequence: Synthetic oligonucleotide
gcgaagaacaucucuccaa

SEQ ID NO: 255040 - RNA, 19 nt, Artificial Sequence
  Description of Artificial Sequence: Synthetic oligonucleotide
gagcggucuuggcuucugc

SEQ ID NO: 255041 - RNA, 19 nt, Artificial Sequence
  Description of Artificial Sequence: Synthetic oligonucleotide
ugcgacuucugugccuuuc

SEQ ID NO: 255042 - RNA, 19 nt, Artificial Sequence
  Description of Artificial Sequence: Synthetic oligonucleotide
ccccgaucgauacuucggg

SEQ ID NO: 255043 - RNA, 19 nt, Artificial Sequence
  Description of Artificial Sequence: Synthetic oligonucleotide
uggagaccuccguggacuc

SEQ ID NO: 255044 - RNA, 19 nt, Artificial Sequence
  Description of Artificial Sequence: Synthetic oligonucleotide
caggacauauguacagacu

SEQ ID NO: 255045 - RNA, 19 nt, Artificial Sequence
  Description of Artificial Sequence: Synthetic oligonucleotide
ggggcgaagaacaucucuc

SEQ ID NO: 255046 - RNA, 19 nt, Artificial Sequence
  Description of Artificial Sequence: Synthetic oligonucleotide
ucuagucgcugucguucuu

SEQ ID NO: 255047 - RNA, 19 nt, Artificial Sequence
  Description of Artificial Sequence: Synthetic oligonucleotide
cuucgcucaacaugucugu

SEQ ID NO: 255048 - RNA, 19 nt, Artificial Sequence
  Description of Artificial Sequence: Synthetic oligonucleotide
uuccuaggccgaguuuuaa

SEQ ID NO: 255049 - RNA, 19 nt, Artificial Sequence
  Description of Artificial Sequence: Synthetic oligonucleotide
acgcagcucugcauuacug

SEQ ID NO: 255050 - RNA, 19 nt, Artificial Sequence
  Description of Artificial Sequence: Synthetic oligonucleotide
acauccccgucuggccagc

SEQ ID NO: 255051 - RNA, 19 nt, Artificial Sequence
  Description of Artificial Sequence: Synthetic oligonucleotide
guucuaaaccccgaucgau

SEQ ID NO: 255052 - RNA, 19 nt, Artificial Sequence
  Description of Artificial Sequence: Synthetic oligonucleotide
aucacgacuucgacugcga

SEQ ID NO: 255053 - RNA, 19 nt, Artificial Sequence
  Description of Artificial Sequence: Synthetic oligonucleotide
caacaugugugaccuuaaa

SEQ ID NO: 255054 - RNA, 19 nt, Artificial Sequence
  Description of Artificial Sequence: Synthetic oligonucleotide
gaucuucgccuuuccuucu

SEQ ID NO: 255055 - RNA, 19 nt, Artificial Sequence
  Description of Artificial Sequence: Synthetic oligonucleotide
uucgaccccucucguucuc

SEQ ID NO: 255056 - RNA, 19 nt, Artificial Sequence
  Description of Artificial Sequence: Synthetic oligonucleotide
ucguugccccacagcggca

SEQ ID NO: 255057 - RNA, 19 nt, Artificial Sequence
  Description of Artificial Sequence: Synthetic oligonucleotide
cacgacuucgacugcgacu

SEQ ID NO: 255058 - RNA, 19 nt, Artificial Sequence
  Description of Artificial Sequence: Synthetic oligonucleotide
gcggaacuacugcacaauc

SEQ ID NO: 255059 - RNA, 19 nt, Artificial Sequence
  Description of Artificial Sequence: Synthetic oligonucleotide
gccuaauuuaaccucucau

SEQ ID NO: 255060 - RNA, 19 nt, Artificial Sequence
  Description of Artificial Sequence: Synthetic oligonucleotide
agccuccgccagcuuucac

SEQ ID NO: 255061 - RNA, 19 nt, Artificial Sequence
  Description of Artificial Sequence: Synthetic oligonucleotide
gccugcguucuaaaccccg

SEQ ID NO: 255062 - RNA, 19 nt, Artificial Sequence
  Description of Artificial Sequence: Synthetic oligonucleotide
gaacuggaacuggaauucu

SEQ ID NO: 255063 - RNA, 19 nt, Artificial Sequence
  Description of Artificial Sequence: Synthetic oligonucleotide
ccuacuccggcugugccug

SEQ ID NO: 255064 - RNA, 19 nt, Artificial Sequence
  Description of Artificial Sequence: Synthetic oligonucleotide
gcucaaagagugcggaacu

SEQ ID NO: 255065 - RNA, 19 nt, Artificial Sequence
  Description of Artificial Sequence: Synthetic oligonucleotide
ccucaccucuacuucgcug

SEQ ID NO: 255066 - RNA, 19 nt, Artificial Sequence
  Description of Artificial Sequence: Synthetic oligonucleotide
ccuuucccuacuccggcug

SEQ ID NO: 255067 - RNA, 19 nt, Artificial Sequence
  Description of Artificial Sequence: Synthetic oligonucleotide
uggaccgccuucgcucaac

SEQ ID NO: 255068 - RNA, 19 nt, Artificial Sequence
  Description of Artificial Sequence: Synthetic oligonucleotide
guugccccacagcggcagc

SEQ ID NO: 255069 - RNA, 19 nt, Artificial Sequence
  Description of Artificial Sequence: Synthetic oligonucleotide
cuugcccgaggccgccggc

SEQ ID NO: 255070 - RNA, 19 nt, Artificial Sequence
  Description of Artificial Sequence: Synthetic oligonucleotide
ucgaccccucucguucucu

SEQ ID NO: 255071 - RNA, 19 nt, Artificial Sequence
  Description of Artificial Sequence: Synthetic oligonucleotide
gacugcgacuucugugccu

SEQ ID NO: 255072 - RNA, 19 nt, Artificial Sequence
  Description of Artificial Sequence: Synthetic oligonucleotide
cgaaccccuccgcacaucc

SEQ ID NO: 255073 - RNA, 19 nt, Artificial Sequence
  Description of Artificial Sequence: Synthetic oligonucleotide
cgaucgauacuucgggauc

SEQ ID NO: 255074 - RNA, 19 nt, Artificial Sequence
  Description of Artificial Sequence: Synthetic oligonucleotide
acccuacaacuguugccuu

SEQ ID NO: 255075 - RNA, 19 nt, Artificial Sequence
  Description of Artificial Sequence: Synthetic oligonucleotide
cucaaagagugcggaacua

SEQ ID NO: 255076 - RNA, 19 nt, Artificial Sequence
  Description of Artificial Sequence: Synthetic oligonucleotide
gccgccgcauugcugcugc

SEQ ID NO: 255077 - RNA, 19 nt, Artificial Sequence
  Description of Artificial Sequence: Synthetic oligonucleotide
cuaaaccccgaucgauacu

SEQ ID NO: 255078 - RNA, 19 nt, Artificial Sequence
  Description of Artificial Sequence: Synthetic oligonucleotide
ccucgugguaggucuugag

SEQ ID NO: 255079 - RNA, 19 nt, Artificial Sequence
  Description of Artificial Sequence: Synthetic oligonucleotide
caccucgaaccccuccgca

SEQ ID NO: 255080 - RNA, 19 nt, Artificial Sequence
  Description of Artificial Sequence: Synthetic oligonucleotide
gucgucucugugucgccua

SEQ ID NO: 255081 - RNA, 19 nt, Artificial Sequence
  Description of Artificial Sequence: Synthetic oligonucleotide
ggcaguuuauugccuuaua

SEQ ID NO: 255082 - RNA, 19 nt, Artificial Sequence
  Description of Artificial Sequence: Synthetic oligonucleotide
guaggucuugagccucgua

SEQ ID NO: 255083 - RNA, 19 nt, Artificial Sequence
  Description of Artificial Sequence: Synthetic oligonucleotide
guccuagauuaaguuuaaa

SEQ ID NO: 255084 - RNA, 19 nt, Artificial Sequence
  Description of Artificial Sequence: Synthetic oligonucleotide
gggcucugauauauguaga

SEQ ID NO: 255085 - RNA, 19 nt, Artificial Sequence
  Description of Artificial Sequence: Synthetic oligonucleotide
cuucgaccccucucguucu

SEQ ID NO: 255086 - RNA, 19 nt, Artificial Sequence
  Description of Artificial Sequence: Synthetic oligonucleotide
cuuucccuacuccggcugu

SEQ ID NO: 255087 - RNA, 19 nt, Artificial Sequence
  Description of Artificial Sequence: Synthetic oligonucleotide
gaccgcucucuugaucucu

SEQ ID NO: 255088 - RNA, 19 nt, Artificial Sequence
  Description of Artificial Sequence: Synthetic oligonucleotide
cagccuacagggagcucaa

SEQ ID NO: 255089 - RNA, 19 nt, Artificial Sequence
  Description of Artificial Sequence: Synthetic oligonucleotide
caccucuacuucgcugcuc

SEQ ID NO: 255090 - RNA, 19 nt, Artificial Sequence
  Description of Artificial Sequence: Synthetic oligonucleotide
ucgaaccccuccgcacauc

SEQ ID NO: 255091 - RNA, 19 nt, Artificial Sequence
  Description of Artificial Sequence: Synthetic oligonucleotide
ccgcacauccccgucuggc

SEQ ID NO: 255092 - RNA, 19 nt, Artificial Sequence
  Description of Artificial Sequence: Synthetic oligonucleotide
ccugcguucuaaaccccga

SEQ ID NO: 255093 - RNA, 19 nt, Artificial Sequence
  Description of Artificial Sequence: Synthetic oligonucleotide
ggauucaaugugauccaau

SEQ ID NO: 255094 - RNA, 19 nt, Artificial Sequence
  Description of Artificial Sequence: Synthetic oligonucleotide
ccgccuucgcucaacaugu

SEQ ID NO: 255095 - RNA, 19 nt, Artificial Sequence
  Description of Artificial Sequence: Synthetic oligonucleotide
ggaccgccuucgcucaaca

SEQ ID NO: 255096 - RNA, 19 nt, Artificial Sequence
  Description of Artificial Sequence: Synthetic oligonucleotide
ggguuguguauaccuuaua

SEQ ID NO: 255097 - RNA, 19 nt, Artificial Sequence
  Description of Artificial Sequence: Synthetic oligonucleotide
gcuagggcuguguucucgu

SEQ ID NO: 255098 - RNA, 19 nt, Artificial Sequence
  Description of Artificial Sequence: Synthetic oligonucleotide
cccacgccuacaaaacaaa

SEQ ID NO: 255099 - RNA, 19 nt, Artificial Sequence
  Description of Artificial Sequence: Synthetic oligonucleotide
cguucuaaaccccgaucga

SEQ ID NO: 255100 - RNA, 19 nt, Artificial Sequence
  Description of Artificial Sequence: Synthetic oligonucleotide
ggagcggucuuggcuucug

SEQ ID NO: 255101 - RNA, 19 nt, Artificial Sequence
  Description of Artificial Sequence: Synthetic oligonucleotide
caagagcuuccaagguaau

SEQ ID NO: 255102 - RNA, 19 nt, Artificial Sequence
  Description of Artificial Sequence: Synthetic oligonucleotide
gccuucgcucaacaugucu

SEQ ID NO: 255103 - RNA, 19 nt, Artificial Sequence
  Description of Artificial Sequence: Synthetic oligonucleotide
ucgcugcuccuuggaccgc

SEQ ID NO: 255104 - RNA, 19 nt, Artificial Sequence
  Description of Artificial Sequence: Synthetic oligonucleotide
cccgaucgauacuucggga

SEQ ID NO: 255105 - RNA, 19 nt, Artificial Sequence
  Description of Artificial Sequence: Synthetic oligonucleotide
ggcgccgccgccgccgccg

SEQ ID NO: 255106 - RNA, 19 nt, Artificial Sequence
  Description of Artificial Sequence: Synthetic oligonucleotide
ccacccucaaaagucaagu

SEQ ID NO: 255107 - RNA, 19 nt, Artificial Sequence
  Description of Artificial Sequence: Synthetic oligonucleotide
cugcguucuaaaccccgau

SEQ ID NO: 255108 - RNA, 19 nt, Artificial Sequence
  Description of Artificial Sequence: Synthetic oligonucleotide
cuagucgcugucguucuuu

SEQ ID NO: 255109 - RNA, 19 nt, Artificial Sequence
  Description of Artificial Sequence: Synthetic oligonucleotide
ccgaucgauacuucgggau

SEQ ID NO: 255110 - RNA, 19 nt, Artificial Sequence
  Description of Artificial Sequence: Synthetic oligonucleotide
gcugugccugcguucuaaa

SEQ ID NO: 255111 - RNA, 19 nt, Artificial Sequence
  Description of Artificial Sequence: Synthetic oligonucleotide
cugcgcuuucuagacuucu

SEQ ID NO: 255112 - RNA, 19 nt, Artificial Sequence
  Description of Artificial Sequence: Synthetic oligonucleotide
gucuucgaccccucucguu

SEQ ID NO: 255113 - RNA, 19 nt, Artificial Sequence
  Description of Artificial Sequence: Synthetic oligonucleotide
ccauaaucccacgccuaca

SEQ ID NO: 255114 - RNA, 19 nt, Artificial Sequence
  Description of Artificial Sequence: Synthetic oligonucleotide
cgcucaacaugucugucua

SEQ ID NO: 255115 - RNA, 19 nt, Artificial Sequence
  Description of Artificial Sequence: Synthetic oligonucleotide
cucuacuucgcugcuccuu

SEQ ID NO: 255116 - RNA, 19 nt, Artificial Sequence
  Description of Artificial Sequence: Synthetic oligonucleotide
cccgaucuucuuggagacc

SEQ ID NO: 255117 - RNA, 19 nt, Artificial Sequence
  Description of Artificial Sequence: Synthetic oligonucleotide
cccggugaugacuucuacu

SEQ ID NO: 255118 - RNA, 19 nt, Artificial Sequence
  Description of Artificial Sequence: Synthetic oligonucleotide
cguugccccacagcggcag

SEQ ID NO: 255119 - RNA, 19 nt, Artificial Sequence
  Description of Artificial Sequence: Synthetic oligonucleotide
ccacagcggcagcacguug

SEQ ID NO: 255120 - RNA, 19 nt, Artificial Sequence
  Description of Artificial Sequence: Synthetic oligonucleotide
gccgccgccgccgccgccg

SEQ ID NO: 255121 - RNA, 19 nt, Artificial Sequence
  Description of Artificial Sequence: Synthetic oligonucleotide
ggagaccuccguggacuca

SEQ ID NO: 255122 - RNA, 19 nt, Artificial Sequence
  Description of Artificial Sequence: Synthetic oligonucleotide
agccuacagggagcucaaa

SEQ ID NO: 255123 - RNA, 19 nt, Artificial Sequence
  Description of Artificial Sequence: Synthetic oligonucleotide
cuagggcuguguucucguu

SEQ ID NO: 255124 - RNA, 19 nt, Artificial Sequence
  Description of Artificial Sequence: Synthetic oligonucleotide
ggccgaguuuuaaucugcu

SEQ ID NO: 255125 - RNA, 19 nt, Artificial Sequence
  Description of Artificial Sequence: Synthetic oligonucleotide
cgugguaggucuugagccu

SEQ ID NO: 255126 - RNA, 19 nt, Artificial Sequence
  Description of Artificial Sequence: Synthetic oligonucleotide
gugugaccuuaaaguagau

SEQ ID NO: 255127 - RNA, 19 nt, Artificial Sequence
  Description of Artificial Sequence: Synthetic oligonucleotide
gccuuucccuacuccggcu

SEQ ID NO: 255128 - RNA, 19 nt, Artificial Sequence
  Description of Artificial Sequence: Synthetic oligonucleotide
ccuauccuccuugucuucu

SEQ ID NO: 255129 - RNA, 19 nt, Artificial Sequence
  Description of Artificial Sequence: Synthetic oligonucleotide
gcuugaggcuugaaugcuu

SEQ ID NO: 255130 - RNA, 19 nt, Artificial Sequence
  Description of Artificial Sequence: Synthetic oligonucleotide
cucuugugggagcggucuu

SEQ ID NO: 255131 - RNA, 19 nt, Artificial Sequence
  Description of Artificial Sequence: Synthetic oligonucleotide
ccacuccaguuuugugaga

SEQ ID NO: 255132 - RNA, 19 nt, Artificial Sequence
  Description of Artificial Sequence: Synthetic oligonucleotide
cccuccgcacauccccguc

SEQ ID NO: 255133 - RNA, 19 nt, Artificial Sequence
  Description of Artificial Sequence: Synthetic oligonucleotide
cuggaccgccuucgcucaa

SEQ ID NO: 255134 - RNA, 19 nt, Artificial Sequence
  Description of Artificial Sequence: Synthetic oligonucleotide
ccguggacucagugaccuc

SEQ ID NO: 255135 - RNA, 19 nt, Artificial Sequence
  Description of Artificial Sequence: Synthetic oligonucleotide
ggcccucccggugaugacu

SEQ ID NO: 255136 - RNA, 19 nt, Artificial Sequence
  Description of Artificial Sequence: Synthetic oligonucleotide
cuucgggaucuucgccuuu

SEQ ID NO: 255137 - RNA, 19 nt, Artificial Sequence
  Description of Artificial Sequence: Synthetic oligonucleotide
ccuccgcacauccccgucu

SEQ ID NO: 255138 - RNA, 19 nt, Artificial Sequence
  Description of Artificial Sequence: Synthetic oligonucleotide
ccgucuggccagcaguuuu

SEQ ID NO: 255139 - RNA, 19 nt, Artificial Sequence
  Description of Artificial Sequence: Synthetic oligonucleotide
cgccuucgcucaacauguc

SEQ ID NO: 255140 - RNA, 19 nt, Artificial Sequence
  Description of Artificial Sequence: Synthetic oligonucleotide
cguugcccugcuugcccga

SEQ ID NO: 255141 - RNA, 19 nt, Artificial Sequence
  Description of Artificial Sequence: Synthetic oligonucleotide
ccgcauugcugcugcugcu

SEQ ID NO: 255142 - RNA, 19 nt, Artificial Sequence
  Description of Artificial Sequence: Synthetic oligonucleotide
gcucaacaugugugaccuu

SEQ ID NO: 255143 - RNA, 19 nt, Artificial Sequence
  Description of Artificial Sequence: Synthetic oligonucleotide
gcccucccggugaugacuu

SEQ ID NO: 255144 - RNA, 19 nt, Artificial Sequence
  Description of Artificial Sequence: Synthetic oligonucleotide
ccccgucuggccagcaguu

SEQ ID NO: 255145 - RNA, 19 nt, Artificial Sequence
  Description of Artificial Sequence: Synthetic oligonucleotide
gcgccgccgccgccgccgc

SEQ ID NO: 255146 - RNA, 19 nt, Artificial Sequence
  Description of Artificial Sequence: Synthetic oligonucleotide
cgucuucgaccccucucgu

SEQ ID NO: 255147 - RNA, 19 nt, Artificial Sequence
  Description of Artificial Sequence: Synthetic oligonucleotide
ccgccgccgccgccgccgc

SEQ ID NO: 255148 - RNA, 19 nt, Artificial Sequence
  Description of Artificial Sequence: Synthetic oligonucleotide
cguuaacuucaggguaaau

SEQ ID NO: 255149 - RNA, 19 nt, Artificial Sequence
  Description of Artificial Sequence: Synthetic oligonucleotide
cgcucuagucgcugucguu

SEQ ID NO: 255150 - RNA, 19 nt, Artificial Sequence
  Description of Artificial Sequence: Synthetic oligonucleotide
gccgccgccgccgccgcau

SEQ ID NO: 255151 - RNA, 19 nt, Artificial Sequence
  Description of Artificial Sequence: Synthetic oligonucleotide
cgaccccucucguucucuu

SEQ ID NO: 255152 - RNA, 19 nt, Artificial Sequence
  Description of Artificial Sequence: Synthetic oligonucleotide
cgccgccgccgccgccgcc

SEQ ID NO: 255153 - RNA, 19 nt, Artificial Sequence
  Description of Artificial Sequence: Synthetic oligonucleotide
cgccgccgccgccgccgca

SEQ ID NO: 255154 - RNA, 19 nt, Artificial Sequence
  Description of Artificial Sequence: Synthetic oligonucleotide
ugucaagcaaaguacaugg

SEQ ID NO: 255155 - RNA, 19 nt, Artificial Sequence
  Description of Artificial Sequence: Synthetic oligonucleotide
auaccuagcagccauuugc

SEQ ID NO: 255156 - RNA, 19 nt, Artificial Sequence
  Description of Artificial Sequence: Synthetic oligonucleotide
uuagaacugaacauuagug

SEQ ID NO: 255157 - RNA, 19 nt, Artificial Sequence
  Description of Artificial Sequence: Synthetic oligonucleotide
agaacugaacauuagugac

SEQ ID NO: 255158 - RNA, 19 nt, Artificial Sequence
  Description of Artificial Sequence: Synthetic oligonucleotide
aucaaaauggcacuuaucu

SEQ ID NO: 255159 - RNA, 19 nt, Artificial Sequence
  Description of Artificial Sequence: Synthetic oligonucleotide
aaucgcuaaacacuacaac

SEQ ID NO: 255160 - RNA, 19 nt, Artificial Sequence
  Description of Artificial Sequence: Synthetic oligonucleotide
uacacaaucgcuaaacacu

SEQ ID NO: 255161 - RNA, 19 nt, Artificial Sequence
  Description of Artificial Sequence: Synthetic oligonucleotide
ugaguaaauugaaugacca

SEQ ID NO: 255162 - RNA, 19 nt, Artificial Sequence
  Description of Artificial Sequence: Synthetic oligonucleotide
accauggauaccuagcagc

SEQ ID NO: 255163 - RNA, 19 nt, Artificial Sequence
  Description of Artificial Sequence: Synthetic oligonucleotide
acccguauucuuuagaaac

SEQ ID NO: 255164 - RNA, 19 nt, Artificial Sequence
  Description of Artificial Sequence: Synthetic oligonucleotide
cuuaugauuagacugucag

SEQ ID NO: 255165 - RNA, 19 nt, Artificial Sequence
  Description of Artificial Sequence: Synthetic oligonucleotide
uccaacuugauacacaauc

SEQ ID NO: 255166 - RNA, 19 nt, Artificial Sequence
  Description of Artificial Sequence: Synthetic oligonucleotide
ugcacuacgaugaauguga

SEQ ID NO: 255167 - RNA, 19 nt, Artificial Sequence
  Description of Artificial Sequence: Synthetic oligonucleotide
uauaaguuuuggcaaacca

SEQ ID NO: 255168 - RNA, 19 nt, Artificial Sequence
  Description of Artificial Sequence: Synthetic oligonucleotide
cuucauuuggccucaaggg

SEQ ID NO: 255169 - RNA, 19 nt, Artificial Sequence
  Description of Artificial Sequence: Synthetic oligonucleotide
agggucaggcuuuaaaacc

SEQ ID NO: 255170 - RNA, 19 nt, Artificial Sequence
  Description of Artificial Sequence: Synthetic oligonucleotide
ugcacucuuaacacgagag

SEQ ID NO: 255171 - RNA, 19 nt, Artificial Sequence
  Description of Artificial Sequence: Synthetic oligonucleotide
aguccuacaggacaaaucu

SEQ ID NO: 255172 - RNA, 19 nt, Artificial Sequence
  Description of Artificial Sequence: Synthetic oligonucleotide
aucgcuaaacacuacaaca

SEQ ID NO: 255173 - RNA, 19 nt, Artificial Sequence
  Description of Artificial Sequence: Synthetic oligonucleotide
agaggugcacucuuaacac

SEQ ID NO: 255174 - RNA, 19 nt, Artificial Sequence
  Description of Artificial Sequence: Synthetic oligonucleotide
acaaaucuuaugauuagac

SEQ ID NO: 255175 - RNA, 19 nt, Artificial Sequence
  Description of Artificial Sequence: Synthetic oligonucleotide
cuugauacaggccucucgg

SEQ ID NO: 255176 - RNA, 19 nt, Artificial Sequence
  Description of Artificial Sequence: Synthetic oligonucleotide
guauuuaucaccacagacc

SEQ ID NO: 255177 - RNA, 19 nt, Artificial Sequence
  Description of Artificial Sequence: Synthetic oligonucleotide
gugauuuucgugucuacgg

SEQ ID NO: 255178 - RNA, 19 nt, Artificial Sequence
  Description of Artificial Sequence: Synthetic oligonucleotide
gaaacuugcacuucgcauc

SEQ ID NO: 255179 - RNA, 19 nt, Artificial Sequence
  Description of Artificial Sequence: Synthetic oligonucleotide
cuuaacacgagagagcuug

SEQ ID NO: 255180 - RNA, 19 nt, Artificial Sequence
  Description of Artificial Sequence: Synthetic oligonucleotide
uguauugaaacuugcacuu

SEQ ID NO: 255181 - RNA, 19 nt, Artificial Sequence
  Description of Artificial Sequence: Synthetic oligonucleotide
cauagauccuaugaaagcc

SEQ ID NO: 255182 - RNA, 19 nt, Artificial Sequence
  Description of Artificial Sequence: Synthetic oligonucleotide
uuagacugucaguauauug

SEQ ID NO: 255183 - RNA, 19 nt, Artificial Sequence
  Description of Artificial Sequence: Synthetic oligonucleotide
uuuuaagcagagauuggac

SEQ ID NO: 255184 - RNA, 19 nt, Artificial Sequence
  Description of Artificial Sequence: Synthetic oligonucleotide
auuccuaccugucaguucu

SEQ ID NO: 255185 - RNA, 19 nt, Artificial Sequence
  Description of Artificial Sequence: Synthetic oligonucleotide
aaucuuaugauuagacugu

SEQ ID NO: 255186 - RNA, 19 nt, Artificial Sequence
  Description of Artificial Sequence: Synthetic oligonucleotide
ugcacuucgcaucaauuug

SEQ ID NO: 255187 - RNA, 19 nt, Artificial Sequence
  Description of Artificial Sequence: Synthetic oligonucleotide
aaccacgauuccuacaaug

SEQ ID NO: 255188 - RNA, 19 nt, Artificial Sequence
  Description of Artificial Sequence: Synthetic oligonucleotide
acgguaauuacuggcaagc

SEQ ID NO: 255189 - RNA, 19 nt, Artificial Sequence
  Description of Artificial Sequence: Synthetic oligonucleotide
cacgauuccuacaaugggg

SEQ ID NO: 255190 - RNA, 19 nt, Artificial Sequence
  Description of Artificial Sequence: Synthetic oligonucleotide
aguaaauugaaugaccaaa

SEQ ID NO: 255191 - RNA, 19 nt, Artificial Sequence
  Description of Artificial Sequence: Synthetic oligonucleotide
uguaugguggcgcuucugc

SEQ ID NO: 255192 - RNA, 19 nt, Artificial Sequence
  Description of Artificial Sequence: Synthetic oligonucleotide
uaaacacacgugaccaucc

SEQ ID NO: 255193 - RNA, 19 nt, Artificial Sequence
  Description of Artificial Sequence: Synthetic oligonucleotide
uuuuggcaaaccacgauuc

SEQ ID NO: 255194 - RNA, 19 nt, Artificial Sequence
  Description of Artificial Sequence: Synthetic oligonucleotide
uagugacaacuucuuaggg

SEQ ID NO: 255195 - RNA, 19 nt, Artificial Sequence
  Description of Artificial Sequence: Synthetic oligonucleotide
aagcguguugauuuguaga

SEQ ID NO: 255196 - RNA, 19 nt, Artificial Sequence
  Description of Artificial Sequence: Synthetic oligonucleotide
agugacaacuucuuagggu

SEQ ID NO: 255197 - RNA, 19 nt, Artificial Sequence
  Description of Artificial Sequence: Synthetic oligonucleotide
uuagggucaggcuuuaaaa

SEQ ID NO: 255198 - RNA, 19 nt, Artificial Sequence
  Description of Artificial Sequence: Synthetic oligonucleotide
aguuugaaaucugggacgg

SEQ ID NO: 255199 - RNA, 19 nt, Artificial Sequence
  Description of Artificial Sequence: Synthetic oligonucleotide
cagcccaucgauuucauug

SEQ ID NO: 255200 - RNA, 19 nt, Artificial Sequence
  Description of Artificial Sequence: Synthetic oligonucleotide
aucuguacgcauugugugg

SEQ ID NO: 255201 - RNA, 19 nt, Artificial Sequence
  Description of Artificial Sequence: Synthetic oligonucleotide
cuacaauggggucucauac

SEQ ID NO: 255202 - RNA, 19 nt, Artificial Sequence
  Description of Artificial Sequence: Synthetic oligonucleotide
aacacacgugaccauccuc

SEQ ID NO: 255203 - RNA, 19 nt, Artificial Sequence
  Description of Artificial Sequence: Synthetic oligonucleotide
acaaucgcuaaacacuaca

SEQ ID NO: 255204 - RNA, 19 nt, Artificial Sequence
  Description of Artificial Sequence: Synthetic oligonucleotide
ugugcguccaugcugccca

SEQ ID NO: 255205 - RNA, 19 nt, Artificial Sequence
  Description of Artificial Sequence: Synthetic oligonucleotide
aaaaccccaguggcgaugg

SEQ ID NO: 255206 - RNA, 19 nt, Artificial Sequence
  Description of Artificial Sequence: Synthetic oligonucleotide
ucgcuaaacacuacaacau

SEQ ID NO: 255207 - RNA, 19 nt, Artificial Sequence
  Description of Artificial Sequence: Synthetic oligonucleotide
ugauuuucgugucuacggu

SEQ ID NO: 255208 - RNA, 19 nt, Artificial Sequence
  Description of Artificial Sequence: Synthetic oligonucleotide
cuuaucugccaaucucucg

SEQ ID NO: 255209 - RNA, 19 nt, Artificial Sequence
  Description of Artificial Sequence: Synthetic oligonucleotide
agugauuuucgugucuacg

SEQ ID NO: 255210 - RNA, 19 nt, Artificial Sequence
  Description of Artificial Sequence: Synthetic oligonucleotide
uuaugauuagacugucagu

SEQ ID NO: 255211 - RNA, 19 nt, Artificial Sequence
  Description of Artificial Sequence: Synthetic oligonucleotide
acucuuaacacgagagagc

SEQ ID NO: 255212 - RNA, 19 nt, Artificial Sequence
  Description of Artificial Sequence: Synthetic oligonucleotide
uguugauuuguagaacuga

SEQ ID NO: 255213 - RNA, 19 nt, Artificial Sequence
  Description of Artificial Sequence: Synthetic oligonucleotide
ugauuagacugucaguaua

SEQ ID NO: 255214 - RNA, 19 nt, Artificial Sequence
  Description of Artificial Sequence: Synthetic oligonucleotide
aacuugauacacaaucgcu

SEQ ID NO: 255215 - RNA, 19 nt, Artificial Sequence
  Description of Artificial Sequence: Synthetic oligonucleotide
gauacaggccucucggaug

SEQ ID NO: 255216 - RNA, 19 nt, Artificial Sequence
  Description of Artificial Sequence: Synthetic oligonucleotide
gguauggacacagagcgcg

SEQ ID NO: 255217 - RNA, 19 nt, Artificial Sequence
  Description of Artificial Sequence: Synthetic oligonucleotide
aucucucucgagucagugc

SEQ ID NO: 255218 - RNA, 19 nt, Artificial Sequence
  Description of Artificial Sequence: Synthetic oligonucleotide
uuuggcaaaccacgauucc

SEQ ID NO: 255219 - RNA, 19 nt, Artificial Sequence
  Description of Artificial Sequence: Synthetic oligonucleotide
guugacgccucccaguuug

SEQ ID NO: 255220 - RNA, 19 nt, Artificial Sequence
  Description of Artificial Sequence: Synthetic oligonucleotide
uuugaaaucugggacggaa

SEQ ID NO: 255221 - RNA, 19 nt, Artificial Sequence
  Description of Artificial Sequence: Synthetic oligonucleotide
ugcacaccgaaagaggugc

SEQ ID NO: 255222 - RNA, 19 nt, Artificial Sequence
  Description of Artificial Sequence: Synthetic oligonucleotide
caucuguacgcauugugug

SEQ ID NO: 255223 - RNA, 19 nt, Artificial Sequence
  Description of Artificial Sequence: Synthetic oligonucleotide
ucgugugaauccaacuuga

SEQ ID NO: 255224 - RNA, 19 nt, Artificial Sequence
  Description of Artificial Sequence: Synthetic oligonucleotide
gauacacaaucgcuaaaca

SEQ ID NO: 255225 - RNA, 19 nt, Artificial Sequence
  Description of Artificial Sequence: Synthetic oligonucleotide
cuacgguuguaccugcugg

SEQ ID NO: 255226 - RNA, 19 nt, Artificial Sequence
  Description of Artificial Sequence: Synthetic oligonucleotide
ucuuaugauuagacuguca

SEQ ID NO: 255227 - RNA, 19 nt, Artificial Sequence
  Description of Artificial Sequence: Synthetic oligonucleotide
gaaggacgguaauuacugg

SEQ ID NO: 255228 - RNA, 19 nt, Artificial Sequence
  Description of Artificial Sequence: Synthetic oligonucleotide
ucuacgguuguaccugcug

SEQ ID NO: 255229 - RNA, 19 nt, Artificial Sequence
  Description of Artificial Sequence: Synthetic oligonucleotide
gacgguaauuacuggcaag

SEQ ID NO: 255230 - RNA, 19 nt, Artificial Sequence
  Description of Artificial Sequence: Synthetic oligonucleotide
agcaaucgaaggcuucuuc

SEQ ID NO: 255231 - RNA, 19 nt, Artificial Sequence
  Description of Artificial Sequence: Synthetic oligonucleotide
agcguguugauuuguagaa

SEQ ID NO: 255232 - RNA, 19 nt, Artificial Sequence
  Description of Artificial Sequence: Synthetic oligonucleotide
uagauccuaugaaagccac

SEQ ID NO: 255233 - RNA, 19 nt, Artificial Sequence
  Description of Artificial Sequence: Synthetic oligonucleotide
ucuguacgcauuguguggc

SEQ ID NO: 255234 - RNA, 19 nt, Artificial Sequence
  Description of Artificial Sequence: Synthetic oligonucleotide
uuuaaagcccugagaguuc

SEQ ID NO: 255235 - RNA, 19 nt, Artificial Sequence
  Description of Artificial Sequence: Synthetic oligonucleotide
acacuacaacaugucaagc

SEQ ID NO: 255236 - RNA, 19 nt, Artificial Sequence
  Description of Artificial Sequence: Synthetic oligonucleotide
auuccuacaauggggucuc

SEQ ID NO: 255237 - RNA, 19 nt, Artificial Sequence
  Description of Artificial Sequence: Synthetic oligonucleotide
caaaccacgauuccuacaa

SEQ ID NO: 255238 - RNA, 19 nt, Artificial Sequence
  Description of Artificial Sequence: Synthetic oligonucleotide
agcgauugucaucccaaag

SEQ ID NO: 255239 - RNA, 19 nt, Artificial Sequence
  Description of Artificial Sequence: Synthetic oligonucleotide
agacccguauucuuuagaa

SEQ ID NO: 255240 - RNA, 19 nt, Artificial Sequence
  Description of Artificial Sequence: Synthetic oligonucleotide
gcgauugucaucccaaagc

SEQ ID NO: 255241 - RNA, 19 nt, Artificial Sequence
  Description of Artificial Sequence: Synthetic oligonucleotide
auuuucgugucuacgguug

SEQ ID NO: 255242 - RNA, 19 nt, Artificial Sequence
  Description of Artificial Sequence: Synthetic oligonucleotide
gauaccuagcagccauuug

SEQ ID NO: 255243 - RNA, 19 nt, Artificial Sequence
  Description of Artificial Sequence: Synthetic oligonucleotide
ggaaggacgguaauuacug

SEQ ID NO: 255244 - RNA, 19 nt, Artificial Sequence
  Description of Artificial Sequence: Synthetic oligonucleotide
ugcugcuguacgcgcacgg

SEQ ID NO: 255245 - RNA, 19 nt, Artificial Sequence
  Description of Artificial Sequence: Synthetic oligonucleotide
aucuuaugauuagacuguc

SEQ ID NO: 255246 - RNA, 19 nt, Artificial Sequence
  Description of Artificial Sequence: Synthetic oligonucleotide
aucucucgagaucuuccuc

SEQ ID NO: 255247 - RNA, 19 nt, Artificial Sequence
  Description of Artificial Sequence: Synthetic oligonucleotide
cuugaagcguguugauuug

SEQ ID NO: 255248 - RNA, 19 nt, Artificial Sequence
  Description of Artificial Sequence: Synthetic oligonucleotide
uuggcaaaccacgauuccu

SEQ ID NO: 255249 - RNA, 19 nt, Artificial Sequence
  Description of Artificial Sequence: Synthetic oligonucleotide
guaccugcuggaauguucc

SEQ ID NO: 255250 - RNA, 19 nt, Artificial Sequence
  Description of Artificial Sequence: Synthetic oligonucleotide
acuuaucugccaaucucuc

SEQ ID NO: 255251 - RNA, 19 nt, Artificial Sequence
  Description of Artificial Sequence: Synthetic oligonucleotide
gaguaaauugaaugaccaa

SEQ ID NO: 255252 - RNA, 19 nt, Artificial Sequence
  Description of Artificial Sequence: Synthetic oligonucleotide
agauccuaugaaagccacc

SEQ ID NO: 255253 - RNA, 19 nt, Artificial Sequence
  Description of Artificial Sequence: Synthetic oligonucleotide
uuuucgugucuacgguugu

SEQ ID NO: 255254 - RNA, 19 nt, Artificial Sequence
  Description of Artificial Sequence: Synthetic oligonucleotide
augauuagacugucaguau

SEQ ID NO: 255255 - RNA, 19 nt, Artificial Sequence
  Description of Artificial Sequence: Synthetic oligonucleotide
auagaggauggagggcggc

SEQ ID NO: 255256 - RNA, 19 nt, Artificial Sequence
  Description of Artificial Sequence: Synthetic oligonucleotide
acgccucccaguuugacau

SEQ ID NO: 255257 - RNA, 19 nt, Artificial Sequence
  Description of Artificial Sequence: Synthetic oligonucleotide
ugaagcguguugauuugua

SEQ ID NO: 255258 - RNA, 19 nt, Artificial Sequence
  Description of Artificial Sequence: Synthetic oligonucleotide
gaggaucuaauaaaaccaa

SEQ ID NO: 255259 - RNA, 19 nt, Artificial Sequence
  Description of Artificial Sequence: Synthetic oligonucleotide
cuuagaacugaacauuagu

SEQ ID NO: 255260 - RNA, 19 nt, Artificial Sequence
  Description of Artificial Sequence: Synthetic oligonucleotide
cagugcauagauccuauga

SEQ ID NO: 255261 - RNA, 19 nt, Artificial Sequence
  Description of Artificial Sequence: Synthetic oligonucleotide
uugauacaggccucucgga

SEQ ID NO: 255262 - RNA, 19 nt, Artificial Sequence
  Description of Artificial Sequence: Synthetic oligonucleotide
uucgugucuacgguuguac

SEQ ID NO: 255263 - RNA, 19 nt, Artificial Sequence
  Description of Artificial Sequence: Synthetic oligonucleotide
caaaucuuaugauuagacu

SEQ ID NO: 255264 - RNA, 19 nt, Artificial Sequence
  Description of Artificial Sequence: Synthetic oligonucleotide
ugagugauuuucgugucua

SEQ ID NO: 255265 - RNA, 19 nt, Artificial Sequence
  Description of Artificial Sequence: Synthetic oligonucleotide
ucgugucuacgguuguacc

SEQ ID NO: 255266 - RNA, 19 nt, Artificial Sequence
  Description of Artificial Sequence: Synthetic oligonucleotide
uguacgcgcacgguggcgc

SEQ ID NO: 255267 - RNA, 19 nt, Artificial Sequence
  Description of Artificial Sequence: Synthetic oligonucleotide
ccauuugugcuucauuggc

SEQ ID NO: 255268 - RNA, 19 nt, Artificial Sequence
  Description of Artificial Sequence: Synthetic oligonucleotide
cgugguagugagaaggacg

SEQ ID NO: 255269 - RNA, 19 nt, Artificial Sequence
  Description of Artificial Sequence: Synthetic oligonucleotide
gcuugauacaggccucucg

SEQ ID NO: 255270 - RNA, 19 nt, Artificial Sequence
  Description of Artificial Sequence: Synthetic oligonucleotide
agcuggucucgugugaauc

SEQ ID NO: 255271 - RNA, 19 nt, Artificial Sequence
  Description of Artificial Sequence: Synthetic oligonucleotide
uucgaugcuggcugucaca

SEQ ID NO: 255272 - RNA, 19 nt, Artificial Sequence
  Description of Artificial Sequence: Synthetic oligonucleotide
uuaacacgagagagcuugu

SEQ ID NO: 255273 - RNA, 19 nt, Artificial Sequence
  Description of Artificial Sequence: Synthetic oligonucleotide
acacaccuuggacaggggu

SEQ ID NO: 255274 - RNA, 19 nt, Artificial Sequence
  Description of Artificial Sequence: Synthetic oligonucleotide
acgugaccauccucucugc

SEQ ID NO: 255275 - RNA, 19 nt, Artificial Sequence
  Description of Artificial Sequence: Synthetic oligonucleotide
ugucuacgguuguaccugc

SEQ ID NO: 255276 - RNA, 19 nt, Artificial Sequence
  Description of Artificial Sequence: Synthetic oligonucleotide
aucuuugaccaugauucca

SEQ ID NO: 255277 - RNA, 19 nt, Artificial Sequence
  Description of Artificial Sequence: Synthetic oligonucleotide
uaaaaccccaguggcgaug

SEQ ID NO: 255278 - RNA, 19 nt, Artificial Sequence
  Description of Artificial Sequence: Synthetic oligonucleotide
agagccgucacagcccauc

SEQ ID NO: 255279 - RNA, 19 nt, Artificial Sequence
  Description of Artificial Sequence: Synthetic oligonucleotide
guagcgguuggggugugcg

SEQ ID NO: 255280 - RNA, 19 nt, Artificial Sequence
  Description of Artificial Sequence: Synthetic oligonucleotide
ucggaccugucacugcugu

SEQ ID NO: 255281 - RNA, 19 nt, Artificial Sequence
  Description of Artificial Sequence: Synthetic oligonucleotide
aagcgauugucaucccaaa

SEQ ID NO: 255282 - RNA, 19 nt, Artificial Sequence
  Description of Artificial Sequence: Synthetic oligonucleotide
ucagugcauagauccuaug

SEQ ID NO: 255283 - RNA, 19 nt, Artificial Sequence
  Description of Artificial Sequence: Synthetic oligonucleotide
gugucuacgguuguaccug

SEQ ID NO: 255284 - RNA, 19 nt, Artificial Sequence
  Description of Artificial Sequence: Synthetic oligonucleotide
auucacgaacauagggguc

SEQ ID NO: 255285 - RNA, 19 nt, Artificial Sequence
  Description of Artificial Sequence: Synthetic oligonucleotide
acgcauuguguggccaucc

SEQ ID NO: 255286 - RNA, 19 nt, Artificial Sequence
  Description of Artificial Sequence: Synthetic oligonucleotide
uguucgaugcuggcuguca

SEQ ID NO: 255287 - RNA, 19 nt, Artificial Sequence
  Description of Artificial Sequence: Synthetic oligonucleotide
cuuagggucaggcuuuaaa

SEQ ID NO: 255288 - RNA, 19 nt, Artificial Sequence
  Description of Artificial Sequence: Synthetic oligonucleotide
guguugauuuguagaacug

SEQ ID NO: 255289 - RNA, 19 nt, Artificial Sequence
  Description of Artificial Sequence: Synthetic oligonucleotide
uguacgcauuguguggcca

SEQ ID NO: 255290 - RNA, 19 nt, Artificial Sequence
  Description of Artificial Sequence: Synthetic oligonucleotide
aaaccacgauuccuacaau

SEQ ID NO: 255291 - RNA, 19 nt, Artificial Sequence
  Description of Artificial Sequence: Synthetic oligonucleotide
ucgagucagugcauagauc

SEQ ID NO: 255292 - RNA, 19 nt, Artificial Sequence
  Description of Artificial Sequence: Synthetic oligonucleotide
caccauggauaccuagcag

SEQ ID NO: 255293 - RNA, 19 nt, Artificial Sequence
  Description of Artificial Sequence: Synthetic oligonucleotide
guaaauugaaugaccaaau

SEQ ID NO: 255294 - RNA, 19 nt, Artificial Sequence
  Description of Artificial Sequence: Synthetic oligonucleotide
acgugguagugagaaggac

SEQ ID NO: 255295 - RNA, 19 nt, Artificial Sequence
  Description of Artificial Sequence: Synthetic oligonucleotide
acgcuugacuucagcauac

SEQ ID NO: 255296 - RNA, 19 nt, Artificial Sequence
  Description of Artificial Sequence: Synthetic oligonucleotide
caccgaaagaggugcacuc

SEQ ID NO: 255297 - RNA, 19 nt, Artificial Sequence
  Description of Artificial Sequence: Synthetic oligonucleotide
acuugcacuucgcaucaau

SEQ ID NO: 255298 - RNA, 19 nt, Artificial Sequence
  Description of Artificial Sequence: Synthetic oligonucleotide
ucccacacgcuugacuuca

SEQ ID NO: 255299 - RNA, 19 nt, Artificial Sequence
  Description of Artificial Sequence: Synthetic oligonucleotide
gauuagacugucaguauau

SEQ ID NO: 255300 - RNA, 19 nt, Artificial Sequence
  Description of Artificial Sequence: Synthetic oligonucleotide
gucggugcugcuguacgcg

SEQ ID NO: 255301 - RNA, 19 nt, Artificial Sequence
  Description of Artificial Sequence: Synthetic oligonucleotide
aggugcacucuuaacacga

SEQ ID NO: 255302 - RNA, 19 nt, Artificial Sequence
  Description of Artificial Sequence: Synthetic oligonucleotide
acacaaucgcuaaacacua

SEQ ID NO: 255303 - RNA, 19 nt, Artificial Sequence
  Description of Artificial Sequence: Synthetic oligonucleotide
cuugaucucgaugccugug

SEQ ID NO: 255304 - RNA, 19 nt, Artificial Sequence
  Description of Artificial Sequence: Synthetic oligonucleotide
uugaagcguguugauuugu

SEQ ID NO: 255305 - RNA, 19 nt, Artificial Sequence
  Description of Artificial Sequence: Synthetic oligonucleotide
gcacuuaucugccaaucuc

SEQ ID NO: 255306 - RNA, 19 nt, Artificial Sequence
  Description of Artificial Sequence: Synthetic oligonucleotide
cucuuaacacgagagagcu

SEQ ID NO: 255307 - RNA, 19 nt, Artificial Sequence
  Description of Artificial Sequence: Synthetic oligonucleotide
cugcacuacgaugaaugug

SEQ ID NO: 255308 - RNA, 19 nt, Artificial Sequence
  Description of Artificial Sequence: Synthetic oligonucleotide
cacuuaucugccaaucucu

SEQ ID NO: 255309 - RNA, 19 nt, Artificial Sequence
  Description of Artificial Sequence: Synthetic oligonucleotide
cacaaucgcuaaacacuac

SEQ ID NO: 255310 - RNA, 19 nt, Artificial Sequence
  Description of Artificial Sequence: Synthetic oligonucleotide
ucgaugccuguguggaacu

SEQ ID NO: 255311 - RNA, 19 nt, Artificial Sequence
  Description of Artificial Sequence: Synthetic oligonucleotide
gacccguauucuuuagaaa

SEQ ID NO: 255312 - RNA, 19 nt, Artificial Sequence
  Description of Artificial Sequence: Synthetic oligonucleotide
acaccgaaagaggugcacu

SEQ ID NO: 255313 - RNA, 19 nt, Artificial Sequence
  Description of Artificial Sequence: Synthetic oligonucleotide
uggaugccggcaugacugc

SEQ ID NO: 255314 - RNA, 19 nt, Artificial Sequence
  Description of Artificial Sequence: Synthetic oligonucleotide
gaugccggcaugacugcac

SEQ ID NO: 255315 - RNA, 19 nt, Artificial Sequence
  Description of Artificial Sequence: Synthetic oligonucleotide
cuguacgcauuguguggcc

SEQ ID NO: 255316 - RNA, 19 nt, Artificial Sequence
  Description of Artificial Sequence: Synthetic oligonucleotide
guucgaugcuggcugucac

SEQ ID NO: 255317 - RNA, 19 nt, Artificial Sequence
  Description of Artificial Sequence: Synthetic oligonucleotide
ucucgagaucuuccucagu

SEQ ID NO: 255318 - RNA, 19 nt, Artificial Sequence
  Description of Artificial Sequence: Synthetic oligonucleotide
gauuuucgugucuacgguu

SEQ ID NO: 255319 - RNA, 19 nt, Artificial Sequence
  Description of Artificial Sequence: Synthetic oligonucleotide
guauugaaacuugcacuuc

SEQ ID NO: 255320 - RNA, 19 nt, Artificial Sequence
  Description of Artificial Sequence: Synthetic oligonucleotide
guuguugacgccucccagu

SEQ ID NO: 255321 - RNA, 19 nt, Artificial Sequence
  Description of Artificial Sequence: Synthetic oligonucleotide
cagcguauaucccggcauc

SEQ ID NO: 255322 - RNA, 19 nt, Artificial Sequence
  Description of Artificial Sequence: Synthetic oligonucleotide
uaccugcuggaauguuccc

SEQ ID NO: 255323 - RNA, 19 nt, Artificial Sequence
  Description of Artificial Sequence: Synthetic oligonucleotide
auuagacugucaguauauu

SEQ ID NO: 255324 - RNA, 19 nt, Artificial Sequence
  Description of Artificial Sequence: Synthetic oligonucleotide
gcacuucgcaucaauuugc

SEQ ID NO: 255325 - RNA, 19 nt, Artificial Sequence
  Description of Artificial Sequence: Synthetic oligonucleotide
ggcgaugguguuguguugc

SEQ ID NO: 255326 - RNA, 19 nt, Artificial Sequence
  Description of Artificial Sequence: Synthetic oligonucleotide
agugagcagcuuauaaguu

SEQ ID NO: 255327 - RNA, 19 nt, Artificial Sequence
  Description of Artificial Sequence: Synthetic oligonucleotide
gugcacucuuaacacgaga

SEQ ID NO: 255328 - RNA, 19 nt, Artificial Sequence
  Description of Artificial Sequence: Synthetic oligonucleotide
ggggugugcguccaugcug

SEQ ID NO: 255329 - RNA, 19 nt, Artificial Sequence
  Description of Artificial Sequence: Synthetic oligonucleotide
caugccccauuccuaccug

SEQ ID NO: 255330 - RNA, 19 nt, Artificial Sequence
  Description of Artificial Sequence: Synthetic oligonucleotide
uugacgccucccaguuuga

SEQ ID NO: 255331 - RNA, 19 nt, Artificial Sequence
  Description of Artificial Sequence: Synthetic oligonucleotide
cacacaccuuggacagggg

SEQ ID NO: 255332 - RNA, 19 nt, Artificial Sequence
  Description of Artificial Sequence: Synthetic oligonucleotide
cacgcuugacuucagcaua

SEQ ID NO: 255333 - RNA, 19 nt, Artificial Sequence
  Description of Artificial Sequence: Synthetic oligonucleotide
acaguccuacaggacaaau

SEQ ID NO: 255334 - RNA, 19 nt, Artificial Sequence
  Description of Artificial Sequence: Synthetic oligonucleotide
auguucgaugcuggcuguc

SEQ ID NO: 255335 - RNA, 19 nt, Artificial Sequence
  Description of Artificial Sequence: Synthetic oligonucleotide
ugguagugagaaggacggc

SEQ ID NO: 255336 - RNA, 19 nt, Artificial Sequence
  Description of Artificial Sequence: Synthetic oligonucleotide
cacaccgaaagaggugcac

SEQ ID NO: 255337 - RNA, 19 nt, Artificial Sequence
  Description of Artificial Sequence: Synthetic oligonucleotide
agcauacacaggaguuuug

SEQ ID NO: 255338 - RNA, 19 nt, Artificial Sequence
  Description of Artificial Sequence: Synthetic oligonucleotide
caccggcggaucucucucg

SEQ ID NO: 255339 - RNA, 19 nt, Artificial Sequence
  Description of Artificial Sequence: Synthetic oligonucleotide
caugucaagcaaaguacau

SEQ ID NO: 255340 - RNA, 19 nt, Artificial Sequence
  Description of Artificial Sequence: Synthetic oligonucleotide
uggcgaucgccuuguuccu

SEQ ID NO: 255341 - RNA, 19 nt, Artificial Sequence
  Description of Artificial Sequence: Synthetic oligonucleotide
gguagugagaaggacggcu

SEQ ID NO: 255342 - RNA, 19 nt, Artificial Sequence
  Description of Artificial Sequence: Synthetic oligonucleotide
uaacacgagagagcuuguu

SEQ ID NO: 255343 - RNA, 19 nt, Artificial Sequence
  Description of Artificial Sequence: Synthetic oligonucleotide
cucgagucagugcauagau

SEQ ID NO: 255344 - RNA, 19 nt, Artificial Sequence
  Description of Artificial Sequence: Synthetic oligonucleotide
ggucaggcuuuaaaacccc

SEQ ID NO: 255345 - RNA, 19 nt, Artificial Sequence
  Description of Artificial Sequence: Synthetic oligonucleotide
uacgcauuguguggccauc

SEQ ID NO: 255346 - RNA, 19 nt, Artificial Sequence
  Description of Artificial Sequence: Synthetic oligonucleotide
gagcacguggcaucccuua

SEQ ID NO: 255347 - RNA, 19 nt, Artificial Sequence
  Description of Artificial Sequence: Synthetic oligonucleotide
aggcguguaugguggcgcu

SEQ ID NO: 255348 - RNA, 19 nt, Artificial Sequence
  Description of Artificial Sequence: Synthetic oligonucleotide
cccacucuucccaacccgc

SEQ ID NO: 255349 - RNA, 19 nt, Artificial Sequence
  Description of Artificial Sequence: Synthetic oligonucleotide
uagcgguuggggugugcgu

SEQ ID NO: 255350 - RNA, 19 nt, Artificial Sequence
  Description of Artificial Sequence: Synthetic oligonucleotide
cgauugucaucccaaagca

SEQ ID NO: 255351 - RNA, 19 nt, Artificial Sequence
  Description of Artificial Sequence: Synthetic oligonucleotide
gucucgugugaauccaacu

SEQ ID NO: 255352 - RNA, 19 nt, Artificial Sequence
  Description of Artificial Sequence: Synthetic oligonucleotide
uggaccgcuuuggccagug

SEQ ID NO: 255353 - RNA, 19 nt, Artificial Sequence
  Description of Artificial Sequence: Synthetic oligonucleotide
cucggaccugucacugcug

SEQ ID NO: 255354 - RNA, 19 nt, Artificial Sequence
  Description of Artificial Sequence: Synthetic oligonucleotide
cugcaggccagcguauauc

SEQ ID NO: 255355 - RNA, 19 nt, Artificial Sequence
  Description of Artificial Sequence: Synthetic oligonucleotide
gcgaucgccuuguuccugc

SEQ ID NO: 255356 - RNA, 19 nt, Artificial Sequence
  Description of Artificial Sequence: Synthetic oligonucleotide
guagcuggucucgugugaa

SEQ ID NO: 255357 - RNA, 19 nt, Artificial Sequence
  Description of Artificial Sequence: Synthetic oligonucleotide
cuguacgcgcacgguggcg

SEQ ID NO: 255358 - RNA, 19 nt, Artificial Sequence
  Description of Artificial Sequence: Synthetic oligonucleotide
cucgcccauugcucugccc

SEQ ID NO: 255359 - RNA, 19 nt, Artificial Sequence
  Description of Artificial Sequence: Synthetic oligonucleotide
gcaaaccacgauuccuaca

SEQ ID NO: 255360 - RNA, 19 nt, Artificial Sequence
  Description of Artificial Sequence: Synthetic oligonucleotide
agccgucacagcccaucga

SEQ ID NO: 255361 - RNA, 19 nt, Artificial Sequence
  Description of Artificial Sequence: Synthetic oligonucleotide
cauggauaccuagcagcca

SEQ ID NO: 255362 - RNA, 19 nt, Artificial Sequence
  Description of Artificial Sequence: Synthetic oligonucleotide
ggugcacucuuaacacgag

SEQ ID NO: 255363 - RNA, 19 nt, Artificial Sequence
  Description of Artificial Sequence: Synthetic oligonucleotide
cacuucgcaucaauuugcu

SEQ ID NO: 255364 - RNA, 19 nt, Artificial Sequence
  Description of Artificial Sequence: Synthetic oligonucleotide
agaugguaccuggcgcgga

SEQ ID NO: 255365 - RNA, 19 nt, Artificial Sequence
  Description of Artificial Sequence: Synthetic oligonucleotide
caggugagcauaguaggcu

SEQ ID NO: 255366 - RNA, 19 nt, Artificial Sequence
  Description of Artificial Sequence: Synthetic oligonucleotide
cguguugauuuguagaacu

SEQ ID NO: 255367 - RNA, 19 nt, Artificial Sequence
  Description of Artificial Sequence: Synthetic oligonucleotide
ggucucgugugaauccaac

SEQ ID NO: 255368 - RNA, 19 nt, Artificial Sequence
  Description of Artificial Sequence: Synthetic oligonucleotide
guuugaaaucugggacgga

SEQ ID NO: 255369 - RNA, 19 nt, Artificial Sequence
  Description of Artificial Sequence: Synthetic oligonucleotide
gcuguacgcgcacgguggc

SEQ ID NO: 255370 - RNA, 19 nt, Artificial Sequence
  Description of Artificial Sequence: Synthetic oligonucleotide
aacuugcacuucgcaucaa

SEQ ID NO: 255371 - RNA, 19 nt, Artificial Sequence
  Description of Artificial Sequence: Synthetic oligonucleotide
gggaaggacgguaauuacu

SEQ ID NO: 255372 - RNA, 19 nt, Artificial Sequence
  Description of Artificial Sequence: Synthetic oligonucleotide
gcguguugauuuguagaac

SEQ ID NO: 255373 - RNA, 19 nt, Artificial Sequence
  Description of Artificial Sequence: Synthetic oligonucleotide
gucaagcaaaguacauggu

SEQ ID NO: 255374 - RNA, 19 nt, Artificial Sequence
  Description of Artificial Sequence: Synthetic oligonucleotide
cauguucgaugcuggcugu

SEQ ID NO: 255375 - RNA, 19 nt, Artificial Sequence
  Description of Artificial Sequence: Synthetic oligonucleotide
ggcaucucucgagaucuuc

SEQ ID NO: 255376 - RNA, 19 nt, Artificial Sequence
  Description of Artificial Sequence: Synthetic oligonucleotide
guacgcauuguguggccau

SEQ ID NO: 255377 - RNA, 19 nt, Artificial Sequence
  Description of Artificial Sequence: Synthetic oligonucleotide
cccaucgauuucauugaga

SEQ ID NO: 255378 - RNA, 19 nt, Artificial Sequence
  Description of Artificial Sequence: Synthetic oligonucleotide
gcaucccuuagaacugaac

SEQ ID NO: 255379 - RNA, 19 nt, Artificial Sequence
  Description of Artificial Sequence: Synthetic oligonucleotide
gccagcguauaucccggca

SEQ ID NO: 255380 - RNA, 19 nt, Artificial Sequence
  Description of Artificial Sequence: Synthetic oligonucleotide
cccaaagcacgugguagug

SEQ ID NO: 255381 - RNA, 19 nt, Artificial Sequence
  Description of Artificial Sequence: Synthetic oligonucleotide
cccguauucuuuagaaacu

SEQ ID NO: 255382 - RNA, 19 nt, Artificial Sequence
  Description of Artificial Sequence: Synthetic oligonucleotide
guacgcgcacgguggcgca

SEQ ID NO: 255383 - RNA, 19 nt, Artificial Sequence
  Description of Artificial Sequence: Synthetic oligonucleotide
cacgcccugucacaucugu

SEQ ID NO: 255384 - RNA, 19 nt, Artificial Sequence
  Description of Artificial Sequence: Synthetic oligonucleotide
gccgucacagcccaucgau

SEQ ID NO: 255385 - RNA, 19 nt, Artificial Sequence
  Description of Artificial Sequence: Synthetic oligonucleotide
cgcauuguguggccauccc

SEQ ID NO: 255386 - RNA, 19 nt, Artificial Sequence
  Description of Artificial Sequence: Synthetic oligonucleotide
agacuugcuuuaggacauu

SEQ ID NO: 255387 - RNA, 19 nt, Artificial Sequence
  Description of Artificial Sequence: Synthetic oligonucleotide
ccaccggcggaucucucuc

SEQ ID NO: 255388 - RNA, 19 nt, Artificial Sequence
  Description of Artificial Sequence: Synthetic oligonucleotide
ggcgaucgccuuguuccug

SEQ ID NO: 255389 - RNA, 19 nt, Artificial Sequence
  Description of Artificial Sequence: Synthetic oligonucleotide
gcguauaucccggcaucuc

SEQ ID NO: 255390 - RNA, 19 nt, Artificial Sequence
  Description of Artificial Sequence: Synthetic oligonucleotide
guauggacacagagcgcgu

SEQ ID NO: 255391 - RNA, 19 nt, Artificial Sequence
  Description of Artificial Sequence: Synthetic oligonucleotide
ggaccgcuuuggccagugc

SEQ ID NO: 255392 - RNA, 19 nt, Artificial Sequence
  Description of Artificial Sequence: Synthetic oligonucleotide
cgugucuacgguuguaccu

SEQ ID NO: 255393 - RNA, 19 nt, Artificial Sequence
  Description of Artificial Sequence: Synthetic oligonucleotide
ccaaagcacgugguaguga

SEQ ID NO: 255394 - RNA, 19 nt, Artificial Sequence
  Description of Artificial Sequence: Synthetic oligonucleotide
gugaucccuggcugauagu

SEQ ID NO: 255395 - RNA, 19 nt, Artificial Sequence
  Description of Artificial Sequence: Synthetic oligonucleotide
caguggcgaugguguugug

SEQ ID NO: 255396 - RNA, 19 nt, Artificial Sequence
  Description of Artificial Sequence: Synthetic oligonucleotide
caccaccggcggaucucuc

SEQ ID NO: 255397 - RNA, 19 nt, Artificial Sequence
  Description of Artificial Sequence: Synthetic oligonucleotide
ggauaccuagcagccauuu

SEQ ID NO: 255398 - RNA, 19 nt, Artificial Sequence
  Description of Artificial Sequence: Synthetic oligonucleotide
ggaugccggcaugacugca

SEQ ID NO: 255399 - RNA, 19 nt, Artificial Sequence
  Description of Artificial Sequence: Synthetic oligonucleotide
gagcgcgugcagcgcacau

SEQ ID NO: 255400 - RNA, 19 nt, Artificial Sequence
  Description of Artificial Sequence: Synthetic oligonucleotide
cgaucgccuuguuccugcc

SEQ ID NO: 255401 - RNA, 19 nt, Artificial Sequence
  Description of Artificial Sequence: Synthetic oligonucleotide
ggacggcuuguccccugga

SEQ ID NO: 255402 - RNA, 19 nt, Artificial Sequence
  Description of Artificial Sequence: Synthetic oligonucleotide
gucuacgguuguaccugcu

SEQ ID NO: 255403 - RNA, 19 nt, Artificial Sequence
  Description of Artificial Sequence: Synthetic oligonucleotide
ggcuugaagcguguugauu

SEQ ID NO: 255404 - RNA, 19 nt, Artificial Sequence
  Description of Artificial Sequence: Synthetic oligonucleotide
gcugcuguacgcgcacggu

SEQ ID NO: 255405 - RNA, 19 nt, Artificial Sequence
  Description of Artificial Sequence: Synthetic oligonucleotide
ggaucucucucgagucagu

SEQ ID NO: 255406 - RNA, 19 nt, Artificial Sequence
  Description of Artificial Sequence: Synthetic oligonucleotide
cgaugccuguguggaacug

SEQ ID NO: 255407 - RNA, 19 nt, Artificial Sequence
  Description of Artificial Sequence: Synthetic oligonucleotide
cagcaaucgaaggcuucuu

SEQ ID NO: 255408 - RNA, 19 nt, Artificial Sequence
  Description of Artificial Sequence: Synthetic oligonucleotide
ccgucacagcccaucgauu

SEQ ID NO: 255409 - RNA, 19 nt, Artificial Sequence
  Description of Artificial Sequence: Synthetic oligonucleotide
ggcguguaugguggcgcuu

SEQ ID NO: 255410 - RNA, 19 nt, Artificial Sequence
  Description of Artificial Sequence: Synthetic oligonucleotide
gcgugguccucugcacauu

SEQ ID NO: 255411 - RNA, 19 nt, Artificial Sequence
  Description of Artificial Sequence: Synthetic oligonucleotide
cgcgcacgguggcgcagua

SEQ ID NO: 255412 - RNA, 19 nt, Artificial Sequence
  Description of Artificial Sequence: Synthetic oligonucleotide
ugugugauaaauaaucagg

SEQ ID NO: 255413 - RNA, 19 nt, Artificial Sequence
  Description of Artificial Sequence: Synthetic oligonucleotide
uauacaacgggcuaugggg

SEQ ID NO: 255414 - RNA, 19 nt, Artificial Sequence
  Description of Artificial Sequence: Synthetic oligonucleotide
ucaaagaacuuauagguag

SEQ ID NO: 255415 - RNA, 19 nt, Artificial Sequence
  Description of Artificial Sequence: Synthetic oligonucleotide
aauguguauccucgcaccc

SEQ ID NO: 255416 - RNA, 19 nt, Artificial Sequence
  Description of Artificial Sequence: Synthetic oligonucleotide
gaugacgaacuucaaaucc

SEQ ID NO: 255417 - RNA, 19 nt, Artificial Sequence
  Description of Artificial Sequence: Synthetic oligonucleotide
acuaguuugauacagcuaa

SEQ ID NO: 255418 - RNA, 19 nt, Artificial Sequence
  Description of Artificial Sequence: Synthetic oligonucleotide
aaucuauucaugcacuagu

SEQ ID NO: 255419 - RNA, 19 nt, Artificial Sequence
  Description of Artificial Sequence: Synthetic oligonucleotide
augaguaaauaauaaacca

SEQ ID NO: 255420 - RNA, 19 nt, Artificial Sequence
  Description of Artificial Sequence: Synthetic oligonucleotide
cuugucgacagcaucaggg

SEQ ID NO: 255421 - RNA, 19 nt, Artificial Sequence
  Description of Artificial Sequence: Synthetic oligonucleotide
auaagcaaugauucuguac

SEQ ID NO: 255422 - RNA, 19 nt, Artificial Sequence
  Description of Artificial Sequence: Synthetic oligonucleotide
uuuuccuaaaucauuugga

SEQ ID NO: 255423 - RNA, 19 nt, Artificial Sequence
  Description of Artificial Sequence: Synthetic oligonucleotide
agguaggauucucauaucc

SEQ ID NO: 255424 - RNA, 19 nt, Artificial Sequence
  Description of Artificial Sequence: Synthetic oligonucleotide
gaccagaauauaaagagag

SEQ ID NO: 255425 - RNA, 19 nt, Artificial Sequence
  Description of Artificial Sequence: Synthetic oligonucleotide
uuuguauauuaauucaagu

SEQ ID NO: 255426 - RNA, 19 nt, Artificial Sequence
  Description of Artificial Sequence: Synthetic oligonucleotide
caagaauaauauacaacgg

SEQ ID NO: 255427 - RNA, 19 nt, Artificial Sequence
  Description of Artificial Sequence: Synthetic oligonucleotide
uuguauauuaauucaaguu

SEQ ID NO: 255428 - RNA, 19 nt, Artificial Sequence
  Description of Artificial Sequence: Synthetic oligonucleotide
aggaacucggaccaccucc

SEQ ID NO: 255429 - RNA, 19 nt, Artificial Sequence
  Description of Artificial Sequence: Synthetic oligonucleotide
uuaauucaaguucaggcau

SEQ ID NO: 255430 - RNA, 19 nt, Artificial Sequence
  Description of Artificial Sequence: Synthetic oligonucleotide
aaagcguauuucaaguagg

SEQ ID NO: 255431 - RNA, 19 nt, Artificial Sequence
  Description of Artificial Sequence: Synthetic oligonucleotide
uguugaacacaugaugagg

SEQ ID NO: 255432 - RNA, 19 nt, Artificial Sequence
  Description of Artificial Sequence: Synthetic oligonucleotide
uguagagaccagaauauaa

SEQ ID NO: 255433 - RNA, 19 nt, Artificial Sequence
  Description of Artificial Sequence: Synthetic oligonucleotide
auauacaacgggcuauggg

SEQ ID NO: 255434 - RNA, 19 nt, Artificial Sequence
  Description of Artificial Sequence: Synthetic oligonucleotide
uugucaaugccgcagggca

SEQ ID NO: 255435 - RNA, 19 nt, Artificial Sequence
  Description of Artificial Sequence: Synthetic oligonucleotide
ugauuugagaccagcagaa

SEQ ID NO: 255436 - RNA, 19 nt, Artificial Sequence
  Description of Artificial Sequence: Synthetic oligonucleotide
agaacuuauagguaggauu

SEQ ID NO: 255437 - RNA, 19 nt, Artificial Sequence
  Description of Artificial Sequence: Synthetic oligonucleotide
aguucaggcaucuacuugu

SEQ ID NO: 255438 - RNA, 19 nt, Artificial Sequence
  Description of Artificial Sequence: Synthetic oligonucleotide
ucucucaugaccugggaca

SEQ ID NO: 255439 - RNA, 19 nt, Artificial Sequence
  Description of Artificial Sequence: Synthetic oligonucleotide
auucucaaugccuaaugug

SEQ ID NO: 255440 - RNA, 19 nt, Artificial Sequence
  Description of Artificial Sequence: Synthetic oligonucleotide
auaaaugaacaccgauggg

SEQ ID NO: 255441 - RNA, 19 nt, Artificial Sequence
  Description of Artificial Sequence: Synthetic oligonucleotide
uaauaaaccagaagggcuu

SEQ ID NO: 255442 - RNA, 19 nt, Artificial Sequence
  Description of Artificial Sequence: Synthetic oligonucleotide
cauguugaacacaugauga

SEQ ID NO: 255443 - RNA, 19 nt, Artificial Sequence
  Description of Artificial Sequence: Synthetic oligonucleotide
ucaauguguauccucgcac

SEQ ID NO: 255444 - RNA, 19 nt, Artificial Sequence
  Description of Artificial Sequence: Synthetic oligonucleotide
uguuugaacccacaucuuc

SEQ ID NO: 255445 - RNA, 19 nt, Artificial Sequence
  Description of Artificial Sequence: Synthetic oligonucleotide
uagucauguaaguugguac

SEQ ID NO: 255446 - RNA, 19 nt, Artificial Sequence
  Description of Artificial Sequence: Synthetic oligonucleotide
aaugcauagugaucgggaa

SEQ ID NO: 255447 - RNA, 19 nt, Artificial Sequence
  Description of Artificial Sequence: Synthetic oligonucleotide
ucucaaugccuaaugugug

SEQ ID NO: 255448 - RNA, 19 nt, Artificial Sequence
  Description of Artificial Sequence: Synthetic oligonucleotide
cacccuaugccacaaacag

SEQ ID NO: 255449 - RNA, 19 nt, Artificial Sequence
  Description of Artificial Sequence: Synthetic oligonucleotide
ucuacuuguguuacagcac

SEQ ID NO: 255450 - RNA, 19 nt, Artificial Sequence
  Description of Artificial Sequence: Synthetic oligonucleotide
caauguguauccucgcacc

SEQ ID NO: 255451 - RNA, 19 nt, Artificial Sequence
  Description of Artificial Sequence: Synthetic oligonucleotide
aaaugcauagugaucggga

SEQ ID NO: 255452 - RNA, 19 nt, Artificial Sequence
  Description of Artificial Sequence: Synthetic oligonucleotide
uaggaguuaauugugucac

SEQ ID NO: 255453 - RNA, 19 nt, Artificial Sequence
  Description of Artificial Sequence: Synthetic oligonucleotide
aaucguguccgaacucugc

SEQ ID NO: 255454 - RNA, 19 nt, Artificial Sequence
  Description of Artificial Sequence: Synthetic oligonucleotide
uagugaucgggaaaagaac

SEQ ID NO: 255455 - RNA, 19 nt, Artificial Sequence
  Description of Artificial Sequence: Synthetic oligonucleotide
aauucaaguucaggcaucu

SEQ ID NO: 255456 - RNA, 19 nt, Artificial Sequence
  Description of Artificial Sequence: Synthetic oligonucleotide
acuuguguuacagcacggc

SEQ ID NO: 255457 - RNA, 19 nt, Artificial Sequence
  Description of Artificial Sequence: Synthetic oligonucleotide
guuguaggaacucggacca

SEQ ID NO: 255458 - RNA, 19 nt, Artificial Sequence
  Description of Artificial Sequence: Synthetic oligonucleotide
gaaucuauucaugcacuag

SEQ ID NO: 255459 - RNA, 19 nt, Artificial Sequence
  Description of Artificial Sequence: Synthetic oligonucleotide
augauggcgccuuuguuug

SEQ ID NO: 255460 - RNA, 19 nt, Artificial Sequence
  Description of Artificial Sequence: Synthetic oligonucleotide
agccgaaucgauguugucg

SEQ ID NO: 255461 - RNA, 19 nt, Artificial Sequence
  Description of Artificial Sequence: Synthetic oligonucleotide
aauaaaccagaagggcuug

SEQ ID NO: 255462 - RNA, 19 nt, Artificial Sequence
  Description of Artificial Sequence: Synthetic oligonucleotide
aacaccgauggguagugaa

SEQ ID NO: 255463 - RNA, 19 nt, Artificial Sequence
  Description of Artificial Sequence: Synthetic oligonucleotide
ugcauagugaucgggaaaa

SEQ ID NO: 255464 - RNA, 19 nt, Artificial Sequence
  Description of Artificial Sequence: Synthetic oligonucleotide
ucucuuuggcgacugugug

SEQ ID NO: 255465 - RNA, 19 nt, Artificial Sequence
  Description of Artificial Sequence: Synthetic oligonucleotide
cccuaugccacaaacagag

SEQ ID NO: 255466 - RNA, 19 nt, Artificial Sequence
  Description of Artificial Sequence: Synthetic oligonucleotide
auagugaucgggaaaagaa

SEQ ID NO: 255467 - RNA, 19 nt, Artificial Sequence
  Description of Artificial Sequence: Synthetic oligonucleotide
auauccguucugcugcauc

SEQ ID NO: 255468 - RNA, 19 nt, Artificial Sequence
  Description of Artificial Sequence: Synthetic oligonucleotide
agugaucgggaaaagaaca

SEQ ID NO: 255469 - RNA, 19 nt, Artificial Sequence
  Description of Artificial Sequence: Synthetic oligonucleotide
caaaaggcgaugaugagua

SEQ ID NO: 255470 - RNA, 19 nt, Artificial Sequence
  Description of Artificial Sequence: Synthetic oligonucleotide
ugcaucagccgaaucgaug

SEQ ID NO: 255471 - RNA, 19 nt, Artificial Sequence
  Description of Artificial Sequence: Synthetic oligonucleotide
ugaaucguguccgaacucu

SEQ ID NO: 255472 - RNA, 19 nt, Artificial Sequence
  Description of Artificial Sequence: Synthetic oligonucleotide
guaggaguuaauuguguca

SEQ ID NO: 255473 - RNA, 19 nt, Artificial Sequence
  Description of Artificial Sequence: Synthetic oligonucleotide
ugaugacgaacuucaaauc

SEQ ID NO: 255474 - RNA, 19 nt, Artificial Sequence
  Description of Artificial Sequence: Synthetic oligonucleotide
aaaugcccacguucacacg

SEQ ID NO: 255475 - RNA, 19 nt, Artificial Sequence
  Description of Artificial Sequence: Synthetic oligonucleotide
uguaggaacucggaccacc

SEQ ID NO: 255476 - RNA, 19 nt, Artificial Sequence
  Description of Artificial Sequence: Synthetic oligonucleotide
ucagccgaaucgauguugu

SEQ ID NO: 255477 - RNA, 19 nt, Artificial Sequence
  Description of Artificial Sequence: Synthetic oligonucleotide
cuuauagguaggauucuca

SEQ ID NO: 255478 - RNA, 19 nt, Artificial Sequence
  Description of Artificial Sequence: Synthetic oligonucleotide
gcauguugaacacaugaug

SEQ ID NO: 255479 - RNA, 19 nt, Artificial Sequence
  Description of Artificial Sequence: Synthetic oligonucleotide
ugucaaugccgcagggcag

SEQ ID NO: 255480 - RNA, 19 nt, Artificial Sequence
  Description of Artificial Sequence: Synthetic oligonucleotide
uuuccacguuauuuuauaa

SEQ ID NO: 255481 - RNA, 19 nt, Artificial Sequence
  Description of Artificial Sequence: Synthetic oligonucleotide
guauccucgcacccuaugc

SEQ ID NO: 255482 - RNA, 19 nt, Artificial Sequence
  Description of Artificial Sequence: Synthetic oligonucleotide
uguauccucgcacccuaug

SEQ ID NO: 255483 - RNA, 19 nt, Artificial Sequence
  Description of Artificial Sequence: Synthetic oligonucleotide
aaaggcgaugaugaguaaa

SEQ ID NO: 255484 - RNA, 19 nt, Artificial Sequence
  Description of Artificial Sequence: Synthetic oligonucleotide
uauagguaggauucucaua

SEQ ID NO: 255485 - RNA, 19 nt, Artificial Sequence
  Description of Artificial Sequence: Synthetic oligonucleotide
uccguaacugauucugggu

SEQ ID NO: 255486 - RNA, 19 nt, Artificial Sequence
  Description of Artificial Sequence: Synthetic oligonucleotide
ucucucgguugccucuucg

SEQ ID NO: 255487 - RNA, 19 nt, Artificial Sequence
  Description of Artificial Sequence: Synthetic oligonucleotide
aaccuggucgaguggucag

SEQ ID NO: 255488 - RNA, 19 nt, Artificial Sequence
  Description of Artificial Sequence: Synthetic oligonucleotide
aagcaaugauucuguacaa

SEQ ID NO: 255489 - RNA, 19 nt, Artificial Sequence
  Description of Artificial Sequence: Synthetic oligonucleotide
caaguucggaggcugcugc

SEQ ID NO: 255490 - RNA, 19 nt, Artificial Sequence
  Description of Artificial Sequence: Synthetic oligonucleotide
augcacuaguuugauacag

SEQ ID NO: 255491 - RNA, 19 nt, Artificial Sequence
  Description of Artificial Sequence: Synthetic oligonucleotide
gugucauaaccugggaccg

SEQ ID NO: 255492 - RNA, 19 nt, Artificial Sequence
  Description of Artificial Sequence: Synthetic oligonucleotide
ucggugguggugguggugg

SEQ ID NO: 255493 - RNA, 19 nt, Artificial Sequence
  Description of Artificial Sequence: Synthetic oligonucleotide
ugcuaugacaacgccgccc

SEQ ID NO: 255494 - RNA, 19 nt, Artificial Sequence
  Description of Artificial Sequence: Synthetic oligonucleotide
aaggcgaugaugaguaaau

SEQ ID NO: 255495 - RNA, 19 nt, Artificial Sequence
  Description of Artificial Sequence: Synthetic oligonucleotide
accacgccaugauggaugg

SEQ ID NO: 255496 - RNA, 19 nt, Artificial Sequence
  Description of Artificial Sequence: Synthetic oligonucleotide
gccguagucauguaaguug

SEQ ID NO: 255497 - RNA, 19 nt, Artificial Sequence
  Description of Artificial Sequence: Synthetic oligonucleotide
agcagcuaaaugcccacgu

SEQ ID NO: 255498 - RNA, 19 nt, Artificial Sequence
  Description of Artificial Sequence: Synthetic oligonucleotide
ugauauuugucagcccaga

SEQ ID NO: 255499 - RNA, 19 nt, Artificial Sequence
  Description of Artificial Sequence: Synthetic oligonucleotide
uguguauccucgcacccua

SEQ ID NO: 255500 - RNA, 19 nt, Artificial Sequence
  Description of Artificial Sequence: Synthetic oligonucleotide
aagcguauuucaaguagga

SEQ ID NO: 255501 - RNA, 19 nt, Artificial Sequence
  Description of Artificial Sequence: Synthetic oligonucleotide
gaacuccccguucacagga

SEQ ID NO: 255502 - RNA, 19 nt, Artificial Sequence
  Description of Artificial Sequence: Synthetic oligonucleotide
uagaucacacggaggugug

SEQ ID NO: 255503 - RNA, 19 nt, Artificial Sequence
  Description of Artificial Sequence: Synthetic oligonucleotide
acccguaaaagugcugacg

SEQ ID NO: 255504 - RNA, 19 nt, Artificial Sequence
  Description of Artificial Sequence: Synthetic oligonucleotide
agaauacauuacugauuug

SEQ ID NO: 255505 - RNA, 19 nt, Artificial Sequence
  Description of Artificial Sequence: Synthetic oligonucleotide
aucguguccgaacucugca

SEQ ID NO: 255506 - RNA, 19 nt, Artificial Sequence
  Description of Artificial Sequence: Synthetic oligonucleotide
caccacgccaugauggaug

SEQ ID NO: 255507 - RNA, 19 nt, Artificial Sequence
  Description of Artificial Sequence: Synthetic oligonucleotide
guaggauucucauauccgu

SEQ ID NO: 255508 - RNA, 19 nt, Artificial Sequence
  Description of Artificial Sequence: Synthetic oligonucleotide
agcguauuucaaguaggag

SEQ ID NO: 255509 - RNA, 19 nt, Artificial Sequence
  Description of Artificial Sequence: Synthetic oligonucleotide
ugaacaccgauggguagug

SEQ ID NO: 255510 - RNA, 19 nt, Artificial Sequence
  Description of Artificial Sequence: Synthetic oligonucleotide
ugcgcucguagaucacacg

SEQ ID NO: 255511 - RNA, 19 nt, Artificial Sequence
  Description of Artificial Sequence: Synthetic oligonucleotide
gcgcucguagaucacacgg

SEQ ID NO: 255512 - RNA, 19 nt, Artificial Sequence
  Description of Artificial Sequence: Synthetic oligonucleotide
ccguagucauguaaguugg

SEQ ID NO: 255513 - RNA, 19 nt, Artificial Sequence
  Description of Artificial Sequence: Synthetic oligonucleotide
cccguucacaggaagaagc

SEQ ID NO: 255514 - RNA, 19 nt, Artificial Sequence
  Description of Artificial Sequence: Synthetic oligonucleotide
guggugguggugguggugg

SEQ ID NO: 255515 - RNA, 19 nt, Artificial Sequence
  Description of Artificial Sequence: Synthetic oligonucleotide
ugucauaaccugggaccgg

SEQ ID NO: 255516 - RNA, 19 nt, Artificial Sequence
  Description of Artificial Sequence: Synthetic oligonucleotide
guguccgaacucugcaucc

SEQ ID NO: 255517 - RNA, 19 nt, Artificial Sequence
  Description of Artificial Sequence: Synthetic oligonucleotide
ugcgcacauguucgaaaug

SEQ ID NO: 255518 - RNA, 19 nt, Artificial Sequence
  Description of Artificial Sequence: Synthetic oligonucleotide
caccgauggguagugaagc

SEQ ID NO: 255519 - RNA, 19 nt, Artificial Sequence
  Description of Artificial Sequence: Synthetic oligonucleotide
uccgcgcggacauacuucu

SEQ ID NO: 255520 - RNA, 19 nt, Artificial Sequence
  Description of Artificial Sequence: Synthetic oligonucleotide
caucgguguagucuguguc

SEQ ID NO: 255521 - RNA, 19 nt, Artificial Sequence
  Description of Artificial Sequence: Synthetic oligonucleotide
gcucguagaucacacggag

SEQ ID NO: 255522 - RNA, 19 nt, Artificial Sequence
  Description of Artificial Sequence: Synthetic oligonucleotide
aucagccgaaucgauguug

SEQ ID NO: 255523 - RNA, 19 nt, Artificial Sequence
  Description of Artificial Sequence: Synthetic oligonucleotide
aaaaggcgaugaugaguaa

SEQ ID NO: 255524 - RNA, 19 nt, Artificial Sequence
  Description of Artificial Sequence: Synthetic oligonucleotide
ggcgaugaugaguaaauaa

SEQ ID NO: 255525 - RNA, 19 nt, Artificial Sequence
  Description of Artificial Sequence: Synthetic oligonucleotide
cuuugagagguggcgcucc

SEQ ID NO: 255526 - RNA, 19 nt, Artificial Sequence
  Description of Artificial Sequence: Synthetic oligonucleotide
augcauagugaucgggaaa

SEQ ID NO: 255527 - RNA, 19 nt, Artificial Sequence
  Description of Artificial Sequence: Synthetic oligonucleotide
caucggaguaguucugcuc

SEQ ID NO: 255528 - RNA, 19 nt, Artificial Sequence
  Description of Artificial Sequence: Synthetic oligonucleotide
gaaucguguccgaacucug

SEQ ID NO: 255529 - RNA, 19 nt, Artificial Sequence
  Description of Artificial Sequence: Synthetic oligonucleotide
cugcacgucucuuuggcga

SEQ ID NO: 255530 - RNA, 19 nt, Artificial Sequence
  Description of Artificial Sequence: Synthetic oligonucleotide
ugcacgucucuuuggcgac

SEQ ID NO: 255531 - RNA, 19 nt, Artificial Sequence
  Description of Artificial Sequence: Synthetic oligonucleotide
auucucucaugaccuggga

SEQ ID NO: 255532 - RNA, 19 nt, Artificial Sequence
  Description of Artificial Sequence: Synthetic oligonucleotide
gugaucgggaaaagaacac

SEQ ID NO: 255533 - RNA, 19 nt, Artificial Sequence
  Description of Artificial Sequence: Synthetic oligonucleotide
augccguagucauguaagu

SEQ ID NO: 255534 - RNA, 19 nt, Artificial Sequence
  Description of Artificial Sequence: Synthetic oligonucleotide
cauagugaucgggaaaaga

SEQ ID NO: 255535 - RNA, 19 nt, Artificial Sequence
  Description of Artificial Sequence: Synthetic oligonucleotide
guagaucacacggaggugu

SEQ ID NO: 255536 - RNA, 19 nt, Artificial Sequence
  Description of Artificial Sequence: Synthetic oligonucleotide
gauucuggguucacugauc

SEQ ID NO: 255537 - RNA, 19 nt, Artificial Sequence
  Description of Artificial Sequence: Synthetic oligonucleotide
gucaaugccgcagggcagc

SEQ ID NO: 255538 - RNA, 19 nt, Artificial Sequence
  Description of Artificial Sequence: Synthetic oligonucleotide
gggacauuguagagcaggg

SEQ ID NO: 255539 - RNA, 19 nt, Artificial Sequence
  Description of Artificial Sequence: Synthetic oligonucleotide
guggucaguccucggucgg

SEQ ID NO: 255540 - RNA, 19 nt, Artificial Sequence
  Description of Artificial Sequence: Synthetic oligonucleotide
uugcuaugacaacgccgcc

SEQ ID NO: 255541 - RNA, 19 nt, Artificial Sequence
  Description of Artificial Sequence: Synthetic oligonucleotide
ucaccgggugucuccaggu

SEQ ID NO: 255542 - RNA, 19 nt, Artificial Sequence
  Description of Artificial Sequence: Synthetic oligonucleotide
ggggcuaugugugugauaa

SEQ ID NO: 255543 - RNA, 19 nt, Artificial Sequence
  Description of Artificial Sequence: Synthetic oligonucleotide
gcuaugacaacgccgccca

SEQ ID NO: 255544 - RNA, 19 nt, Artificial Sequence
  Description of Artificial Sequence: Synthetic oligonucleotide
ugggcauguucauucucau

SEQ ID NO: 255545 - RNA, 19 nt, Artificial Sequence
  Description of Artificial Sequence: Synthetic oligonucleotide
gcgcacauguucgaaaugc

SEQ ID NO: 255546 - RNA, 19 nt, Artificial Sequence
  Description of Artificial Sequence: Synthetic oligonucleotide
cuauggggcuaugugugug

SEQ ID NO: 255547 - RNA, 19 nt, Artificial Sequence
  Description of Artificial Sequence: Synthetic oligonucleotide
uagguaggauucucauauc

SEQ ID NO: 255548 - RNA, 19 nt, Artificial Sequence
  Description of Artificial Sequence: Synthetic oligonucleotide
guagucauguaaguuggua

SEQ ID NO: 255549 - RNA, 19 nt, Artificial Sequence
  Description of Artificial Sequence: Synthetic oligonucleotide
acgaugaacaggguauuuu

SEQ ID NO: 255550 - RNA, 19 nt, Artificial Sequence
  Description of Artificial Sequence: Synthetic oligonucleotide
uggcgguugucuaguucug

SEQ ID NO: 255551 - RNA, 19 nt, Artificial Sequence
  Description of Artificial Sequence: Synthetic oligonucleotide
gaaucgauguugucgcuuu

SEQ ID NO: 255552 - RNA, 19 nt, Artificial Sequence
  Description of Artificial Sequence: Synthetic oligonucleotide
ucggucggcagcggggcgg

SEQ ID NO: 255553 - RNA, 19 nt, Artificial Sequence
  Description of Artificial Sequence: Synthetic oligonucleotide
auuugucagcccagaaccu

SEQ ID NO: 255554 - RNA, 19 nt, Artificial Sequence
  Description of Artificial Sequence: Synthetic oligonucleotide
ucguguccgaacucugcau

SEQ ID NO: 255555 - RNA, 19 nt, Artificial Sequence
  Description of Artificial Sequence: Synthetic oligonucleotide
cuuguguuacagcacggcu

SEQ ID NO: 255556 - RNA, 19 nt, Artificial Sequence
  Description of Artificial Sequence: Synthetic oligonucleotide
agaaccuggucgagugguc

SEQ ID NO: 255557 - RNA, 19 nt, Artificial Sequence
  Description of Artificial Sequence: Synthetic oligonucleotide
cuaccacuuuguccucacc

SEQ ID NO: 255558 - RNA, 19 nt, Artificial Sequence
  Description of Artificial Sequence: Synthetic oligonucleotide
cacccguaaaagugcugac

SEQ ID NO: 255559 - RNA, 19 nt, Artificial Sequence
  Description of Artificial Sequence: Synthetic oligonucleotide
cuugacguucugccucuuc

SEQ ID NO: 255560 - RNA, 19 nt, Artificial Sequence
  Description of Artificial Sequence: Synthetic oligonucleotide
accccgaaaggaugccaug

SEQ ID NO: 255561 - RNA, 19 nt, Artificial Sequence
  Description of Artificial Sequence: Synthetic oligonucleotide
uuggcgacugugugccagu

SEQ ID NO: 255562 - RNA, 19 nt, Artificial Sequence
  Description of Artificial Sequence: Synthetic oligonucleotide
cccguaaaagugcugacga

SEQ ID NO: 255563 - RNA, 19 nt, Artificial Sequence
  Description of Artificial Sequence: Synthetic oligonucleotide
acggcugucaaaaggcgau

SEQ ID NO: 255564 - RNA, 19 nt, Artificial Sequence
  Description of Artificial Sequence: Synthetic oligonucleotide
gcaucagccgaaucgaugu

SEQ ID NO: 255565 - RNA, 19 nt, Artificial Sequence
  Description of Artificial Sequence: Synthetic oligonucleotide
ugccguagucauguaaguu

SEQ ID NO: 255566 - RNA, 19 nt, Artificial Sequence
  Description of Artificial Sequence: Synthetic oligonucleotide
ugacgaugaacaggguauu

SEQ ID NO: 255567 - RNA, 19 nt, Artificial Sequence
  Description of Artificial Sequence: Synthetic oligonucleotide
caucguuuccguaacugau

SEQ ID NO: 255568 - RNA, 19 nt, Artificial Sequence
  Description of Artificial Sequence: Synthetic oligonucleotide
cuccgcgcggacauacuuc

SEQ ID NO: 255569 - RNA, 19 nt, Artificial Sequence
  Description of Artificial Sequence: Synthetic oligonucleotide
uccaccccucggaacuugu

SEQ ID NO: 255570 - RNA, 19 nt, Artificial Sequence
  Description of Artificial Sequence: Synthetic oligonucleotide
gccuaaugugugcacauaa

SEQ ID NO: 255571 - RNA, 19 nt, Artificial Sequence
  Description of Artificial Sequence: Synthetic oligonucleotide
aacgggcagcacacaaacu

SEQ ID NO: 255572 - RNA, 19 nt, Artificial Sequence
  Description of Artificial Sequence: Synthetic oligonucleotide
aucgggaaaagaacacuua

SEQ ID NO: 255573 - RNA, 19 nt, Artificial Sequence
  Description of Artificial Sequence: Synthetic oligonucleotide
gucaguccucggucggcag

SEQ ID NO: 255574 - RNA, 19 nt, Artificial Sequence
  Description of Artificial Sequence: Synthetic oligonucleotide
uccaccccgaaaggaugcc

SEQ ID NO: 255575 - RNA, 19 nt, Artificial Sequence
  Description of Artificial Sequence: Synthetic oligonucleotide
ugguggugguggugguggc

SEQ ID NO: 255576 - RNA, 19 nt, Artificial Sequence
  Description of Artificial Sequence: Synthetic oligonucleotide
cuccccguucacaggaaga

SEQ ID NO: 255577 - RNA, 19 nt, Artificial Sequence
  Description of Artificial Sequence: Synthetic oligonucleotide
acccuaugccacaaacaga

SEQ ID NO: 255578 - RNA, 19 nt, Artificial Sequence
  Description of Artificial Sequence: Synthetic oligonucleotide
cguaacugauucuggguuc

SEQ ID NO: 255579 - RNA, 19 nt, Artificial Sequence
  Description of Artificial Sequence: Synthetic oligonucleotide
agaucacacggaggugugu

SEQ ID NO: 255580 - RNA, 19 nt, Artificial Sequence
  Description of Artificial Sequence: Synthetic oligonucleotide
cccgaaaggaugccauggc

SEQ ID NO: 255581 - RNA, 19 nt, Artificial Sequence
  Description of Artificial Sequence: Synthetic oligonucleotide
cacgucucuuuggcgacug

SEQ ID NO: 255582 - RNA, 19 nt, Artificial Sequence
  Description of Artificial Sequence: Synthetic oligonucleotide
gcgaugaugaguaaauaau

SEQ ID NO: 255583 - RNA, 19 nt, Artificial Sequence
  Description of Artificial Sequence: Synthetic oligonucleotide
gcacggcugucaaaaggcg

SEQ ID NO: 255584 - RNA, 19 nt, Artificial Sequence
  Description of Artificial Sequence: Synthetic oligonucleotide
uuguaggaacucggaccac

SEQ ID NO: 255585 - RNA, 19 nt, Artificial Sequence
  Description of Artificial Sequence: Synthetic oligonucleotide
acaguacacaaaacccauu

SEQ ID NO: 255586 - RNA, 19 nt, Artificial Sequence
  Description of Artificial Sequence: Synthetic oligonucleotide
gguggugguggugguggcg

SEQ ID NO: 255587 - RNA, 19 nt, Artificial Sequence
  Description of Artificial Sequence: Synthetic oligonucleotide
ggcaaguucuuugcuugac

SEQ ID NO: 255588 - RNA, 19 nt, Artificial Sequence
  Description of Artificial Sequence: Synthetic oligonucleotide
caucaccgggugucuccag

SEQ ID NO: 255589 - RNA, 19 nt, Artificial Sequence
  Description of Artificial Sequence: Synthetic oligonucleotide
cuaugacaacgccgcccac

SEQ ID NO: 255590 - RNA, 19 nt, Artificial Sequence
  Description of Artificial Sequence: Synthetic oligonucleotide
guguagagaccagaauaua

SEQ ID NO: 255591 - RNA, 19 nt, Artificial Sequence
  Description of Artificial Sequence: Synthetic oligonucleotide
ccgccaucgguguagucug

SEQ ID NO: 255592 - RNA, 19 nt, Artificial Sequence
  Description of Artificial Sequence: Synthetic oligonucleotide
ugguggugguggugguggu

SEQ ID NO: 255593 - RNA, 19 nt, Artificial Sequence
  Description of Artificial Sequence: Synthetic oligonucleotide
uggggcuaugugugugaua

SEQ ID NO: 255594 - RNA, 19 nt, Artificial Sequence
  Description of Artificial Sequence: Synthetic oligonucleotide
gcuaugugugugauaaaua

SEQ ID NO: 255595 - RNA, 19 nt, Artificial Sequence
  Description of Artificial Sequence: Synthetic oligonucleotide
cuaguuugauacagcuaau

SEQ ID NO: 255596 - RNA, 19 nt, Artificial Sequence
  Description of Artificial Sequence: Synthetic oligonucleotide
cucggucggcagcggggcg

SEQ ID NO: 255597 - RNA, 19 nt, Artificial Sequence
  Description of Artificial Sequence: Synthetic oligonucleotide
cacgccaugauggauggau

SEQ ID NO: 255598 - RNA, 19 nt, Artificial Sequence
  Description of Artificial Sequence: Synthetic oligonucleotide
accuggucgaguggucagu

SEQ ID NO: 255599 - RNA, 19 nt, Artificial Sequence
  Description of Artificial Sequence: Synthetic oligonucleotide
gggcuauggggcuaugugu

SEQ ID NO: 255600 - RNA, 19 nt, Artificial Sequence
  Description of Artificial Sequence: Synthetic oligonucleotide
acgggcuauggggcuaugu

SEQ ID NO: 255601 - RNA, 19 nt, Artificial Sequence
  Description of Artificial Sequence: Synthetic oligonucleotide
aacuccccguucacaggaa

SEQ ID NO: 255602 - RNA, 19 nt, Artificial Sequence
  Description of Artificial Sequence: Synthetic oligonucleotide
ccacccguaaaagugcuga

SEQ ID NO: 255603 - RNA, 19 nt, Artificial Sequence
  Description of Artificial Sequence: Synthetic oligonucleotide
ccugaaucguguccgaacu

SEQ ID NO: 255604 - RNA, 19 nt, Artificial Sequence
  Description of Artificial Sequence: Synthetic oligonucleotide
gaacaccgauggguaguga

SEQ ID NO: 255605 - RNA, 19 nt, Artificial Sequence
  Description of Artificial Sequence: Synthetic oligonucleotide
cgggcuauggggcuaugug

SEQ ID NO: 255606 - RNA, 19 nt, Artificial Sequence
  Description of Artificial Sequence: Synthetic oligonucleotide
cccucggaacuugucaaug

SEQ ID NO: 255607 - RNA, 19 nt, Artificial Sequence
  Description of Artificial Sequence: Synthetic oligonucleotide
aacgggcuauggggcuaug

SEQ ID NO: 255608 - RNA, 19 nt, Artificial Sequence
  Description of Artificial Sequence: Synthetic oligonucleotide
gcgccuuuguuugaaccca

SEQ ID NO: 255609 - RNA, 19 nt, Artificial Sequence
  Description of Artificial Sequence: Synthetic oligonucleotide
gacgaugaacaggguauuu

SEQ ID NO: 255610 - RNA, 19 nt, Artificial Sequence
  Description of Artificial Sequence: Synthetic oligonucleotide
gguggugguggugguggug

SEQ ID NO: 255611 - RNA, 19 nt, Artificial Sequence
  Description of Artificial Sequence: Synthetic oligonucleotide
cgcggacauacuucuugag

SEQ ID NO: 255612 - RNA, 19 nt, Artificial Sequence
  Description of Artificial Sequence: Synthetic oligonucleotide
ggguagugaagcaaugguu

SEQ ID NO: 255613 - RNA, 19 nt, Artificial Sequence
  Description of Artificial Sequence: Synthetic oligonucleotide
ccaacgggcagcacacaaa

SEQ ID NO: 255614 - RNA, 19 nt, Artificial Sequence
  Description of Artificial Sequence: Synthetic oligonucleotide
ccucggucggcagcggggc

SEQ ID NO: 255615 - RNA, 19 nt, Artificial Sequence
  Description of Artificial Sequence: Synthetic oligonucleotide
cucgcacccuaugccacaa

SEQ ID NO: 255616 - RNA, 19 nt, Artificial Sequence
  Description of Artificial Sequence: Synthetic oligonucleotide
cgccuuuguuugaacccac

SEQ ID NO: 255617 - RNA, 19 nt, Artificial Sequence
  Description of Artificial Sequence: Synthetic oligonucleotide
cgcucguagaucacacgga

SEQ ID NO: 255618 - RNA, 19 nt, Artificial Sequence
  Description of Artificial Sequence: Synthetic oligonucleotide
caccgccaucgguguaguc

SEQ ID NO: 255619 - RNA, 19 nt, Artificial Sequence
  Description of Artificial Sequence: Synthetic oligonucleotide
cggcggucguugagcaugg

SEQ ID NO: 255620 - RNA, 19 nt, Artificial Sequence
  Description of Artificial Sequence: Synthetic oligonucleotide
ccggggucacggcagcauc

SEQ ID NO: 255621 - RNA, 19 nt, Artificial Sequence
  Description of Artificial Sequence: Synthetic oligonucleotide
gggcuaugugugugauaaa

SEQ ID NO: 255622 - RNA, 19 nt, Artificial Sequence
  Description of Artificial Sequence: Synthetic oligonucleotide
caucagccgaaucgauguu

SEQ ID NO: 255623 - RNA, 19 nt, Artificial Sequence
  Description of Artificial Sequence: Synthetic oligonucleotide
ccaucgguguagucugugu

SEQ ID NO: 255624 - RNA, 19 nt, Artificial Sequence
  Description of Artificial Sequence: Synthetic oligonucleotide
cgccaugauggauggaugu

SEQ ID NO: 255625 - RNA, 19 nt, Artificial Sequence
  Description of Artificial Sequence: Synthetic oligonucleotide
ccguaaaagugcugacgau

SEQ ID NO: 255626 - RNA, 19 nt, Artificial Sequence
  Description of Artificial Sequence: Synthetic oligonucleotide
gcuccgcgcggacauacuu

SEQ ID NO: 255627 - RNA, 19 nt, Artificial Sequence
  Description of Artificial Sequence: Synthetic oligonucleotide
cauauccguucugcugcau

SEQ ID NO: 255628 - RNA, 19 nt, Artificial Sequence
  Description of Artificial Sequence: Synthetic oligonucleotide
guguauccucgcacccuau

SEQ ID NO: 255629 - RNA, 19 nt, Artificial Sequence
  Description of Artificial Sequence: Synthetic oligonucleotide
ggaucugcgcagccuucuu

SEQ ID NO: 255630 - RNA, 19 nt, Artificial Sequence
  Description of Artificial Sequence: Synthetic oligonucleotide
ccaccccgaaaggaugcca

SEQ ID NO: 255631 - RNA, 19 nt, Artificial Sequence
  Description of Artificial Sequence: Synthetic oligonucleotide
caacgggcuauggggcuau

SEQ ID NO: 255632 - RNA, 19 nt, Artificial Sequence
  Description of Artificial Sequence: Synthetic oligonucleotide
gcagagcggugauguaauu

SEQ ID NO: 255633 - RNA, 19 nt, Artificial Sequence
  Description of Artificial Sequence: Synthetic oligonucleotide
ccaccgcagggacauugua

SEQ ID NO: 255634 - RNA, 19 nt, Artificial Sequence
  Description of Artificial Sequence: Synthetic oligonucleotide
cguuuccguaacugauucu

SEQ ID NO: 255635 - RNA, 19 nt, Artificial Sequence
  Description of Artificial Sequence: Synthetic oligonucleotide
ccgaaucgauguugucgcu

SEQ ID NO: 255636 - RNA, 19 nt, Artificial Sequence
  Description of Artificial Sequence: Synthetic oligonucleotide
gccaccgcagggacauugu

SEQ ID NO: 255637 - RNA, 19 nt, Artificial Sequence
  Description of Artificial Sequence: Synthetic oligonucleotide
gcacgucucuuuggcgacu

SEQ ID NO: 255638 - RNA, 19 nt, Artificial Sequence
  Description of Artificial Sequence: Synthetic oligonucleotide
cgaaucgauguugucgcuu

SEQ ID NO: 255639 - RNA, 19 nt, Artificial Sequence
  Description of Artificial Sequence: Synthetic oligonucleotide
ccacgccaugauggaugga

SEQ ID NO: 255640 - RNA, 19 nt, Artificial Sequence
  Description of Artificial Sequence: Synthetic oligonucleotide
gcagcggggcgggcaucaa

SEQ ID NO: 255641 - RNA, 19 nt, Artificial Sequence
  Description of Artificial Sequence: Synthetic oligonucleotide
cgguggugguggugguggu

SEQ ID NO: 255642 - RNA, 19 nt, Artificial Sequence
  Description of Artificial Sequence: Synthetic oligonucleotide
cgccaucgguguagucugu

SEQ ID NO: 255643 - RNA, 19 nt, Artificial Sequence
  Description of Artificial Sequence: Synthetic oligonucleotide
ccgcgcggacauacuucuu

SEQ ID NO: 255644 - RNA, 19 nt, Artificial Sequence
  Description of Artificial Sequence: Synthetic oligonucleotide
ccaggcggcggcggucguu

SEQ ID NO: 255645 - RNA, 19 nt, Artificial Sequence
  Description of Artificial Sequence: Synthetic oligonucleotide
ugugauacgaauuggaagg

SEQ ID NO: 255646 - RNA, 19 nt, Artificial Sequence
  Description of Artificial Sequence: Synthetic oligonucleotide
ucuauaaaacaccggaucg

SEQ ID NO: 255647 - RNA, 19 nt, Artificial Sequence
  Description of Artificial Sequence: Synthetic oligonucleotide
uacaaagacugauugaagg

SEQ ID NO: 255648 - RNA, 19 nt, Artificial Sequence
  Description of Artificial Sequence: Synthetic oligonucleotide
ucuaaggcgaauaacuccc

SEQ ID NO: 255649 - RNA, 19 nt, Artificial Sequence
  Description of Artificial Sequence: Synthetic oligonucleotide
aguugcacgaaccugggcg

SEQ ID NO: 255650 - RNA, 19 nt, Artificial Sequence
  Description of Artificial Sequence: Synthetic oligonucleotide
ugagagaaacgccagucgg

SEQ ID NO: 255651 - RNA, 19 nt, Artificial Sequence
  Description of Artificial Sequence: Synthetic oligonucleotide
uucacgcuaacguuggugg

SEQ ID NO: 255652 - RNA, 19 nt, Artificial Sequence
  Description of Artificial Sequence: Synthetic oligonucleotide
aaagugaaguaauucuuga

SEQ ID NO: 255653 - RNA, 19 nt, Artificial Sequence
  Description of Artificial Sequence: Synthetic oligonucleotide
uuugcaaugcgcuccuucg

SEQ ID NO: 255654 - RNA, 19 nt, Artificial Sequence
  Description of Artificial Sequence: Synthetic oligonucleotide
gauacuuucagcggguuag

SEQ ID NO: 255655 - RNA, 19 nt, Artificial Sequence
  Description of Artificial Sequence: Synthetic oligonucleotide
aacgauuucuccguugagg

SEQ ID NO: 255656 - RNA, 19 nt, Artificial Sequence
  Description of Artificial Sequence: Synthetic oligonucleotide
uaaaacaccggaucgcagc

SEQ ID NO: 255657 - RNA, 19 nt, Artificial Sequence
  Description of Artificial Sequence: Synthetic oligonucleotide
ucuaccaguacuuugcaau

SEQ ID NO: 255658 - RNA, 19 nt, Artificial Sequence
  Description of Artificial Sequence: Synthetic oligonucleotide
agcucugcguauuucgugc

SEQ ID NO: 255659 - RNA, 19 nt, Artificial Sequence
  Description of Artificial Sequence: Synthetic oligonucleotide
aacaaauauguucacgcua

SEQ ID NO: 255660 - RNA, 19 nt, Artificial Sequence
  Description of Artificial Sequence: Synthetic oligonucleotide
aaucucguagaguuuggug

SEQ ID NO: 255661 - RNA, 19 nt, Artificial Sequence
  Description of Artificial Sequence: Synthetic oligonucleotide
acuuucagcggguuagcgc

SEQ ID NO: 255662 - RNA, 19 nt, Artificial Sequence
  Description of Artificial Sequence: Synthetic oligonucleotide
aaugaucacucccaacacu

SEQ ID NO: 255663 - RNA, 19 nt, Artificial Sequence
  Description of Artificial Sequence: Synthetic oligonucleotide
gguacaggucccuagaccg

SEQ ID NO: 255664 - RNA, 19 nt, Artificial Sequence
  Description of Artificial Sequence: Synthetic oligonucleotide
caagauuagagaaagaagu

SEQ ID NO: 255665 - RNA, 19 nt, Artificial Sequence
  Description of Artificial Sequence: Synthetic oligonucleotide
aucucguagaguuuggugu

SEQ ID NO: 255666 - RNA, 19 nt, Artificial Sequence
  Description of Artificial Sequence: Synthetic oligonucleotide
cugugauacgaauuggaag

SEQ ID NO: 255667 - RNA, 19 nt, Artificial Sequence
  Description of Artificial Sequence: Synthetic oligonucleotide
guuuaugugagcagagagg

SEQ ID NO: 255668 - RNA, 19 nt, Artificial Sequence
  Description of Artificial Sequence: Synthetic oligonucleotide
uauucguuguggcucagcu

SEQ ID NO: 255669 - RNA, 19 nt, Artificial Sequence
  Description of Artificial Sequence: Synthetic oligonucleotide
aaggucuaaggcgaauaac

SEQ ID NO: 255670 - RNA, 19 nt, Artificial Sequence
  Description of Artificial Sequence: Synthetic oligonucleotide
gaauccguguccuggacug

SEQ ID NO: 255671 - RNA, 19 nt, Artificial Sequence
  Description of Artificial Sequence: Synthetic oligonucleotide
agaccaagauuagagaaag

SEQ ID NO: 255672 - RNA, 19 nt, Artificial Sequence
  Description of Artificial Sequence: Synthetic oligonucleotide
gucuauaaaacaccggauc

SEQ ID NO: 255673 - RNA, 19 nt, Artificial Sequence
  Description of Artificial Sequence: Synthetic oligonucleotide
gauacgaauuggaaggcug

SEQ ID NO: 255674 - RNA, 19 nt, Artificial Sequence
  Description of Artificial Sequence: Synthetic oligonucleotide
aaggcgaauaacucccgca

SEQ ID NO: 255675 - RNA, 19 nt, Artificial Sequence
  Description of Artificial Sequence: Synthetic oligonucleotide
aucauugcggucuguaaca

SEQ ID NO: 255676 - RNA, 19 nt, Artificial Sequence
  Description of Artificial Sequence: Synthetic oligonucleotide
cuauaaaacaccggaucgc

SEQ ID NO: 255677 - RNA, 19 nt, Artificial Sequence
  Description of Artificial Sequence: Synthetic oligonucleotide
gacugcgaaccccacagag

SEQ ID NO: 255678 - RNA, 19 nt, Artificial Sequence
  Description of Artificial Sequence: Synthetic oligonucleotide
agcggguuagcgcuugggc

SEQ ID NO: 255679 - RNA, 19 nt, Artificial Sequence
  Description of Artificial Sequence: Synthetic oligonucleotide
aaauccacuuuagaagccu

SEQ ID NO: 255680 - RNA, 19 nt, Artificial Sequence
  Description of Artificial Sequence: Synthetic oligonucleotide
ugucuauaaaacaccggau

SEQ ID NO: 255681 - RNA, 19 nt, Artificial Sequence
  Description of Artificial Sequence: Synthetic oligonucleotide
agcaaagcgaugacagucc

SEQ ID NO: 255682 - RNA, 19 nt, Artificial Sequence
  Description of Artificial Sequence: Synthetic oligonucleotide
uaccccgucguuuauguga

SEQ ID NO: 255683 - RNA, 19 nt, Artificial Sequence
  Description of Artificial Sequence: Synthetic oligonucleotide
ucugcgugcaaggagggcc

SEQ ID NO: 255684 - RNA, 19 nt, Artificial Sequence
  Description of Artificial Sequence: Synthetic oligonucleotide
uuauucuguucucgggagc

SEQ ID NO: 255685 - RNA, 19 nt, Artificial Sequence
  Description of Artificial Sequence: Synthetic oligonucleotide
aacucccgcaccccggcac

SEQ ID NO: 255686 - RNA, 19 nt, Artificial Sequence
  Description of Artificial Sequence: Synthetic oligonucleotide
uguucuggcgacuggccag

SEQ ID NO: 255687 - RNA, 19 nt, Artificial Sequence
  Description of Artificial Sequence: Synthetic oligonucleotide
aagacgggguaccccgucg

SEQ ID NO: 255688 - RNA, 19 nt, Artificial Sequence
  Description of Artificial Sequence: Synthetic oligonucleotide
auugucagcaccccgguua

SEQ ID NO: 255689 - RNA, 19 nt, Artificial Sequence
  Description of Artificial Sequence: Synthetic oligonucleotide
agauuagagaaagaaguaa

SEQ ID NO: 255690 - RNA, 19 nt, Artificial Sequence
  Description of Artificial Sequence: Synthetic oligonucleotide
accucgaggcagcaucucc

SEQ ID NO: 255691 - RNA, 19 nt, Artificial Sequence
  Description of Artificial Sequence: Synthetic oligonucleotide
agcgucccagccuaccacc

SEQ ID NO: 255692 - RNA, 19 nt, Artificial Sequence
  Description of Artificial Sequence: Synthetic oligonucleotide
aggucuaaggcgaauaacu

SEQ ID NO: 255693 - RNA, 19 nt, Artificial Sequence
  Description of Artificial Sequence: Synthetic oligonucleotide
ugacccacccuuuuccacc

SEQ ID NO: 255694 - RNA, 19 nt, Artificial Sequence
  Description of Artificial Sequence: Synthetic oligonucleotide
uaaggcgaauaacucccgc

SEQ ID NO: 255695 - RNA, 19 nt, Artificial Sequence
  Description of Artificial Sequence: Synthetic oligonucleotide
augaucacucccaacacug

SEQ ID NO: 255696 - RNA, 19 nt, Artificial Sequence
  Description of Artificial Sequence: Synthetic oligonucleotide
gagucucgagcugugaugc

SEQ ID NO: 255697 - RNA, 19 nt, Artificial Sequence
  Description of Artificial Sequence: Synthetic oligonucleotide
uucgcagcguguucuggcg

SEQ ID NO: 255698 - RNA, 19 nt, Artificial Sequence
  Description of Artificial Sequence: Synthetic oligonucleotide
ugcggucuguaacaaauau

SEQ ID NO: 255699 - RNA, 19 nt, Artificial Sequence
  Description of Artificial Sequence: Synthetic oligonucleotide
guaaacgauuucuccguug

SEQ ID NO: 255700 - RNA, 19 nt, Artificial Sequence
  Description of Artificial Sequence: Synthetic oligonucleotide
auauguucacgcuaacguu

SEQ ID NO: 255701 - RNA, 19 nt, Artificial Sequence
  Description of Artificial Sequence: Synthetic oligonucleotide
ucuagggcgccgcugauuu

SEQ ID NO: 255702 - RNA, 19 nt, Artificial Sequence
  Description of Artificial Sequence: Synthetic oligonucleotide
auucguuguggcucagcuc

SEQ ID NO: 255703 - RNA, 19 nt, Artificial Sequence
  Description of Artificial Sequence: Synthetic oligonucleotide
uucgggauuggcacccuug

SEQ ID NO: 255704 - RNA, 19 nt, Artificial Sequence
  Description of Artificial Sequence: Synthetic oligonucleotide
cuaaggcgaauaacucccg

SEQ ID NO: 255705 - RNA, 19 nt, Artificial Sequence
  Description of Artificial Sequence: Synthetic oligonucleotide
uagggcgcgcuccaggacc

SEQ ID NO: 255706 - RNA, 19 nt, Artificial Sequence
  Description of Artificial Sequence: Synthetic oligonucleotide
cucgagucugcacacggag

SEQ ID NO: 255707 - RNA, 19 nt, Artificial Sequence
  Description of Artificial Sequence: Synthetic oligonucleotide
agagaaacgccagucggug

SEQ ID NO: 255708 - RNA, 19 nt, Artificial Sequence
  Description of Artificial Sequence: Synthetic oligonucleotide
uguguagucccacggcaaa

SEQ ID NO: 255709 - RNA, 19 nt, Artificial Sequence
  Description of Artificial Sequence: Synthetic oligonucleotide
aaaucucguagaguuuggu

SEQ ID NO: 255710 - RNA, 19 nt, Artificial Sequence
  Description of Artificial Sequence: Synthetic oligonucleotide
gaucaguugcacgaaccug

SEQ ID NO: 255711 - RNA, 19 nt, Artificial Sequence
  Description of Artificial Sequence: Synthetic oligonucleotide
aguucccgagucucgagcu

SEQ ID NO: 255712 - RNA, 19 nt, Artificial Sequence
  Description of Artificial Sequence: Synthetic oligonucleotide
auacuuucagcggguuagc

SEQ ID NO: 255713 - RNA, 19 nt, Artificial Sequence
  Description of Artificial Sequence: Synthetic oligonucleotide
cuucgcagcguguucuggc

SEQ ID NO: 255714 - RNA, 19 nt, Artificial Sequence
  Description of Artificial Sequence: Synthetic oligonucleotide
gguggcauccucccggacg

SEQ ID NO: 255715 - RNA, 19 nt, Artificial Sequence
  Description of Artificial Sequence: Synthetic oligonucleotide
accccggcacgauuguggc

SEQ ID NO: 255716 - RNA, 19 nt, Artificial Sequence
  Description of Artificial Sequence: Synthetic oligonucleotide
ccgguuacaaggucuaagg

SEQ ID NO: 255717 - RNA, 19 nt, Artificial Sequence
  Description of Artificial Sequence: Synthetic oligonucleotide
ucuggcgacuggccagugg

SEQ ID NO: 255718 - RNA, 19 nt, Artificial Sequence
  Description of Artificial Sequence: Synthetic oligonucleotide
cacccgugagaccacgugg

SEQ ID NO: 255719 - RNA, 19 nt, Artificial Sequence
  Description of Artificial Sequence: Synthetic oligonucleotide
gcaaaguauucguuguggc

SEQ ID NO: 255720 - RNA, 19 nt, Artificial Sequence
  Description of Artificial Sequence: Synthetic oligonucleotide
ggcgccgcugauuuguucg

SEQ ID NO: 255721 - RNA, 19 nt, Artificial Sequence
  Description of Artificial Sequence: Synthetic oligonucleotide
ucgggauuggcacccuugu

SEQ ID NO: 255722 - RNA, 19 nt, Artificial Sequence
  Description of Artificial Sequence: Synthetic oligonucleotide
ugauacgaauuggaaggcu

SEQ ID NO: 255723 - RNA, 19 nt, Artificial Sequence
  Description of Artificial Sequence: Synthetic oligonucleotide
guggcauccucccggacgc

SEQ ID NO: 255724 - RNA, 19 nt, Artificial Sequence
  Description of Artificial Sequence: Synthetic oligonucleotide
caccccggcacgauugugg

SEQ ID NO: 255725 - RNA, 19 nt, Artificial Sequence
  Description of Artificial Sequence: Synthetic oligonucleotide
uugucagcaccccgguuac

SEQ ID NO: 255726 - RNA, 19 nt, Artificial Sequence
  Description of Artificial Sequence: Synthetic oligonucleotide
cuuucagcggguuagcgcu

SEQ ID NO: 255727 - RNA, 19 nt, Artificial Sequence
  Description of Artificial Sequence: Synthetic oligonucleotide
ccgauacaaagacugauug

SEQ ID NO: 255728 - RNA, 19 nt, Artificial Sequence
  Description of Artificial Sequence: Synthetic oligonucleotide
gcgaauaacucccgcaccc

SEQ ID NO: 255729 - RNA, 19 nt, Artificial Sequence
  Description of Artificial Sequence: Synthetic oligonucleotide
acgauuguggcugccgaag

SEQ ID NO: 255730 - RNA, 19 nt, Artificial Sequence
  Description of Artificial Sequence: Synthetic oligonucleotide
aaacgccagucgguguugg

SEQ ID NO: 255731 - RNA, 19 nt, Artificial Sequence
  Description of Artificial Sequence: Synthetic oligonucleotide
cacugugauacgaauugga

SEQ ID NO: 255732 - RNA, 19 nt, Artificial Sequence
  Description of Artificial Sequence: Synthetic oligonucleotide
accgcgucugcgugcaagg

SEQ ID NO: 255733 - RNA, 19 nt, Artificial Sequence
  Description of Artificial Sequence: Synthetic oligonucleotide
auaaaacaccggaucgcag

SEQ ID NO: 255734 - RNA, 19 nt, Artificial Sequence
  Description of Artificial Sequence: Synthetic oligonucleotide
ucccggagguuuugcagag

SEQ ID NO: 255735 - RNA, 19 nt, Artificial Sequence
  Description of Artificial Sequence: Synthetic oligonucleotide
ucguuuaugugagcagaga

SEQ ID NO: 255736 - RNA, 19 nt, Artificial Sequence
  Description of Artificial Sequence: Synthetic oligonucleotide
caaaagcggcuccucuggg

SEQ ID NO: 255737 - RNA, 19 nt, Artificial Sequence
  Description of Artificial Sequence: Synthetic oligonucleotide
guucacgcuaacguuggug

SEQ ID NO: 255738 - RNA, 19 nt, Artificial Sequence
  Description of Artificial Sequence: Synthetic oligonucleotide
acugugauacgaauuggaa

SEQ ID NO: 255739 - RNA, 19 nt, Artificial Sequence
  Description of Artificial Sequence: Synthetic oligonucleotide
cguuuaugugagcagagag

SEQ ID NO: 255740 - RNA, 19 nt, Artificial Sequence
  Description of Artificial Sequence: Synthetic oligonucleotide
cacgcuaacguugguggcc

SEQ ID NO: 255741 - RNA, 19 nt, Artificial Sequence
  Description of Artificial Sequence: Synthetic oligonucleotide
gcggguuagcgcuugggcg

SEQ ID NO: 255742 - RNA, 19 nt, Artificial Sequence
  Description of Artificial Sequence: Synthetic oligonucleotide
acgcgcgcccgauacaaag

SEQ ID NO: 255743 - RNA, 19 nt, Artificial Sequence
  Description of Artificial Sequence: Synthetic oligonucleotide
aaugcgcuccuucgggauu

SEQ ID NO: 255744 - RNA, 19 nt, Artificial Sequence
  Description of Artificial Sequence: Synthetic oligonucleotide
gugauacgaauuggaaggc

SEQ ID NO: 255745 - RNA, 19 nt, Artificial Sequence
  Description of Artificial Sequence: Synthetic oligonucleotide
uccuucgggauuggcaccc

SEQ ID NO: 255746 - RNA, 19 nt, Artificial Sequence
  Description of Artificial Sequence: Synthetic oligonucleotide
gcguccagcacugugauac

SEQ ID NO: 255747 - RNA, 19 nt, Artificial Sequence
  Description of Artificial Sequence: Synthetic oligonucleotide
agagagggaguucccgagu

SEQ ID NO: 255748 - RNA, 19 nt, Artificial Sequence
  Description of Artificial Sequence: Synthetic oligonucleotide
gauguaaaucucguagagu

SEQ ID NO: 255749 - RNA, 19 nt, Artificial Sequence
  Description of Artificial Sequence: Synthetic oligonucleotide
gcuccuucgggauuggcac

SEQ ID NO: 255750 - RNA, 19 nt, Artificial Sequence
  Description of Artificial Sequence: Synthetic oligonucleotide
ucgagcugugaugcugagg

SEQ ID NO: 255751 - RNA, 19 nt, Artificial Sequence
  Description of Artificial Sequence: Synthetic oligonucleotide
cugaugguacaggugcggc

SEQ ID NO: 255752 - RNA, 19 nt, Artificial Sequence
  Description of Artificial Sequence: Synthetic oligonucleotide
ugggcgacgcgcgugccgg

SEQ ID NO: 255753 - RNA, 19 nt, Artificial Sequence
  Description of Artificial Sequence: Synthetic oligonucleotide
acggagcgcaaaguauucg

SEQ ID NO: 255754 - RNA, 19 nt, Artificial Sequence
  Description of Artificial Sequence: Synthetic oligonucleotide
ucugaccgguguguagucc

SEQ ID NO: 255755 - RNA, 19 nt, Artificial Sequence
  Description of Artificial Sequence: Synthetic oligonucleotide
uucuggcauggucucgcga

SEQ ID NO: 255756 - RNA, 19 nt, Artificial Sequence
  Description of Artificial Sequence: Synthetic oligonucleotide
ugcacgaaccugggcgacg

SEQ ID NO: 255757 - RNA, 19 nt, Artificial Sequence
  Description of Artificial Sequence: Synthetic oligonucleotide
agauacuuucagcggguua

SEQ ID NO: 255758 - RNA, 19 nt, Artificial Sequence
  Description of Artificial Sequence: Synthetic oligonucleotide
uggcggagcgagcuggggu

SEQ ID NO: 255759 - RNA, 19 nt, Artificial Sequence
  Description of Artificial Sequence: Synthetic oligonucleotide
acucccgcaccccggcacg

SEQ ID NO: 255760 - RNA, 19 nt, Artificial Sequence
  Description of Artificial Sequence: Synthetic oligonucleotide
ugcgaaccccacagagacc

SEQ ID NO: 255761 - RNA, 19 nt, Artificial Sequence
  Description of Artificial Sequence: Synthetic oligonucleotide
cagcucugcguauuucgug

SEQ ID NO: 255762 - RNA, 19 nt, Artificial Sequence
  Description of Artificial Sequence: Synthetic oligonucleotide
cuaacguugguggccaaga

SEQ ID NO: 255763 - RNA, 19 nt, Artificial Sequence
  Description of Artificial Sequence: Synthetic oligonucleotide
caguacuuugcaaugcgcu

SEQ ID NO: 255764 - RNA, 19 nt, Artificial Sequence
  Description of Artificial Sequence: Synthetic oligonucleotide
cacggagcgcaaaguauuc

SEQ ID NO: 255765 - RNA, 19 nt, Artificial Sequence
  Description of Artificial Sequence: Synthetic oligonucleotide
ggcacccuugucuuuggcc

SEQ ID NO: 255766 - RNA, 19 nt, Artificial Sequence
  Description of Artificial Sequence: Synthetic oligonucleotide
guccgacauggcuuucuag

SEQ ID NO: 255767 - RNA, 19 nt, Artificial Sequence
  Description of Artificial Sequence: Synthetic oligonucleotide
ggcgaauaacucccgcacc

SEQ ID NO: 255768 - RNA, 19 nt, Artificial Sequence
  Description of Artificial Sequence: Synthetic oligonucleotide
cagcuguaccucgaggcag

SEQ ID NO: 255769 - RNA, 19 nt, Artificial Sequence
  Description of Artificial Sequence: Synthetic oligonucleotide
gcgucugcgugcaaggagg

SEQ ID NO: 255770 - RNA, 19 nt, Artificial Sequence
  Description of Artificial Sequence: Synthetic oligonucleotide
ccaguacuuugcaaugcgc

SEQ ID NO: 255771 - RNA, 19 nt, Artificial Sequence
  Description of Artificial Sequence: Synthetic oligonucleotide
caaggucuaaggcgaauaa

SEQ ID NO: 255772 - RNA, 19 nt, Artificial Sequence
  Description of Artificial Sequence: Synthetic oligonucleotide
uccagaucaguugcacgaa

SEQ ID NO: 255773 - RNA, 19 nt, Artificial Sequence
  Description of Artificial Sequence: Synthetic oligonucleotide
uguucacgcuaacguuggu

SEQ ID NO: 255774 - RNA, 19 nt, Artificial Sequence
  Description of Artificial Sequence: Synthetic oligonucleotide
aucucacucaaaagcggcu

SEQ ID NO: 255775 - RNA, 19 nt, Artificial Sequence
  Description of Artificial Sequence: Synthetic oligonucleotide
acugcgaaccccacagaga

SEQ ID NO: 255776 - RNA, 19 nt, Artificial Sequence
  Description of Artificial Sequence: Synthetic oligonucleotide
gcgcccgauacaaagacug

SEQ ID NO: 255777 - RNA, 19 nt, Artificial Sequence
  Description of Artificial Sequence: Synthetic oligonucleotide
ggucuaaggcgaauaacuc

SEQ ID NO: 255778 - RNA, 19 nt, Artificial Sequence
  Description of Artificial Sequence: Synthetic oligonucleotide
accccgucguuuaugugag

SEQ ID NO: 255779 - RNA, 19 nt, Artificial Sequence
  Description of Artificial Sequence: Synthetic oligonucleotide
ucgcguccagcacugugau

SEQ ID NO: 255780 - RNA, 19 nt, Artificial Sequence
  Description of Artificial Sequence: Synthetic oligonucleotide
uucagcggguuagcgcuug

SEQ ID NO: 255781 - RNA, 19 nt, Artificial Sequence
  Description of Artificial Sequence: Synthetic oligonucleotide
ggugcggcggcaucaggcc

SEQ ID NO: 255782 - RNA, 19 nt, Artificial Sequence
  Description of Artificial Sequence: Synthetic oligonucleotide
gugaauccguguccuggac

SEQ ID NO: 255783 - RNA, 19 nt, Artificial Sequence
  Description of Artificial Sequence: Synthetic oligonucleotide
uagaccgcuuccacuugua

SEQ ID NO: 255784 - RNA, 19 nt, Artificial Sequence
  Description of Artificial Sequence: Synthetic oligonucleotide
cgcaaaguauucguugugg

SEQ ID NO: 255785 - RNA, 19 nt, Artificial Sequence
  Description of Artificial Sequence: Synthetic oligonucleotide
acacggagcgcaaaguauu

SEQ ID NO: 255786 - RNA, 19 nt, Artificial Sequence
  Description of Artificial Sequence: Synthetic oligonucleotide
uggcuuucuagggcgccgc

SEQ ID NO: 255787 - RNA, 19 nt, Artificial Sequence
  Description of Artificial Sequence: Synthetic oligonucleotide
ggcggcaccagguuucuuc

SEQ ID NO: 255788 - RNA, 19 nt, Artificial Sequence
  Description of Artificial Sequence: Synthetic oligonucleotide
ggucucgcgauccagggcu

SEQ ID NO: 255789 - RNA, 19 nt, Artificial Sequence
  Description of Artificial Sequence: Synthetic oligonucleotide
agcaccaacuggacauuug

SEQ ID NO: 255790 - RNA, 19 nt, Artificial Sequence
  Description of Artificial Sequence: Synthetic oligonucleotide
guauucguuguggcucagc

SEQ ID NO: 255791 - RNA, 19 nt, Artificial Sequence
  Description of Artificial Sequence: Synthetic oligonucleotide
caguugcacgaaccugggc

SEQ ID NO: 255792 - RNA, 19 nt, Artificial Sequence
  Description of Artificial Sequence: Synthetic oligonucleotide
caaucuagggcgcgcucca

SEQ ID NO: 255793 - RNA, 19 nt, Artificial Sequence
  Description of Artificial Sequence: Synthetic oligonucleotide
acgcuaacguugguggcca

SEQ ID NO: 255794 - RNA, 19 nt, Artificial Sequence
  Description of Artificial Sequence: Synthetic oligonucleotide
aguccgacauggcuuucua

SEQ ID NO: 255795 - RNA, 19 nt, Artificial Sequence
  Description of Artificial Sequence: Synthetic oligonucleotide
ggcacgauuguggcugccg

SEQ ID NO: 255796 - RNA, 19 nt, Artificial Sequence
  Description of Artificial Sequence: Synthetic oligonucleotide
cguauuucgugccauccuc

SEQ ID NO: 255797 - RNA, 19 nt, Artificial Sequence
  Description of Artificial Sequence: Synthetic oligonucleotide
gcggucuguaacaaauaug

SEQ ID NO: 255798 - RNA, 19 nt, Artificial Sequence
  Description of Artificial Sequence: Synthetic oligonucleotide
uccccaaucuagggcgcgc

SEQ ID NO: 255799 - RNA, 19 nt, Artificial Sequence
  Description of Artificial Sequence: Synthetic oligonucleotide
agucucgagcugugaugcu

SEQ ID NO: 255800 - RNA, 19 nt, Artificial Sequence
  Description of Artificial Sequence: Synthetic oligonucleotide
cucgcgauccagggcugcg

SEQ ID NO: 255801 - RNA, 19 nt, Artificial Sequence
  Description of Artificial Sequence: Synthetic oligonucleotide
gaguccguggugagguaca

SEQ ID NO: 255802 - RNA, 19 nt, Artificial Sequence
  Description of Artificial Sequence: Synthetic oligonucleotide
cucuaccaguacuuugcaa

SEQ ID NO: 255803 - RNA, 19 nt, Artificial Sequence
  Description of Artificial Sequence: Synthetic oligonucleotide
cggguuagcgcuugggcgc

SEQ ID NO: 255804 - RNA, 19 nt, Artificial Sequence
  Description of Artificial Sequence: Synthetic oligonucleotide
uuucagcggguuagcgcuu

SEQ ID NO: 255805 - RNA, 19 nt, Artificial Sequence
  Description of Artificial Sequence: Synthetic oligonucleotide
guaccccgucguuuaugug

SEQ ID NO: 255806 - RNA, 19 nt, Artificial Sequence
  Description of Artificial Sequence: Synthetic oligonucleotide
ccgcugauuuguucgcccg

SEQ ID NO: 255807 - RNA, 19 nt, Artificial Sequence
  Description of Artificial Sequence: Synthetic oligonucleotide
cuagggcgcgcuccaggac

SEQ ID NO: 255808 - RNA, 19 nt, Artificial Sequence
  Description of Artificial Sequence: Synthetic oligonucleotide
ucgcgauccagggcugcgc

SEQ ID NO: 255809 - RNA, 19 nt, Artificial Sequence
  Description of Artificial Sequence: Synthetic oligonucleotide
gcucugcguauuucgugcc

SEQ ID NO: 255810 - RNA, 19 nt, Artificial Sequence
  Description of Artificial Sequence: Synthetic oligonucleotide
ucucgcgauccagggcugc

SEQ ID NO: 255811 - RNA, 19 nt, Artificial Sequence
  Description of Artificial Sequence: Synthetic oligonucleotide
agccccgucaggcgacgug

SEQ ID NO: 255812 - RNA, 19 nt, Artificial Sequence
  Description of Artificial Sequence: Synthetic oligonucleotide
ggcgacccuugauugucag

SEQ ID NO: 255813 - RNA, 19 nt, Artificial Sequence
  Description of Artificial Sequence: Synthetic oligonucleotide
caccgcgucugcgugcaag

SEQ ID NO: 255814 - RNA, 19 nt, Artificial Sequence
  Description of Artificial Sequence: Synthetic oligonucleotide
ggcuggcggagcgagcugg

SEQ ID NO: 255815 - RNA, 19 nt, Artificial Sequence
  Description of Artificial Sequence: Synthetic oligonucleotide
gcuaacguugguggccaag

SEQ ID NO: 255816 - RNA, 19 nt, Artificial Sequence
  Description of Artificial Sequence: Synthetic oligonucleotide
guauuucgugccauccucu

SEQ ID NO: 255817 - RNA, 19 nt, Artificial Sequence
  Description of Artificial Sequence: Synthetic oligonucleotide
uugcacgaaccugggcgac

SEQ ID NO: 255818 - RNA, 19 nt, Artificial Sequence
  Description of Artificial Sequence: Synthetic oligonucleotide
cccggcacgauuguggcug

SEQ ID NO: 255819 - RNA, 19 nt, Artificial Sequence
  Description of Artificial Sequence: Synthetic oligonucleotide
gguaccccgucguuuaugu

SEQ ID NO: 255820 - RNA, 19 nt, Artificial Sequence
  Description of Artificial Sequence: Synthetic oligonucleotide
gcgacgugcuguagggugg

SEQ ID NO: 255821 - RNA, 19 nt, Artificial Sequence
  Description of Artificial Sequence: Synthetic oligonucleotide
cgaccaucucacucaaaag

SEQ ID NO: 255822 - RNA, 19 nt, Artificial Sequence
  Description of Artificial Sequence: Synthetic oligonucleotide
cagcggguuagcgcuuggg

SEQ ID NO: 255823 - RNA, 19 nt, Artificial Sequence
  Description of Artificial Sequence: Synthetic oligonucleotide
cucugcguauuucgugcca

SEQ ID NO: 255824 - RNA, 19 nt, Artificial Sequence
  Description of Artificial Sequence: Synthetic oligonucleotide
ccgucguuuaugugagcag

SEQ ID NO: 255825 - RNA, 19 nt, Artificial Sequence
  Description of Artificial Sequence: Synthetic oligonucleotide
cgaaccugggcgacgcgcg

SEQ ID NO: 255826 - RNA, 19 nt, Artificial Sequence
  Description of Artificial Sequence: Synthetic oligonucleotide
agacccgguggaaccucac

SEQ ID NO: 255827 - RNA, 19 nt, Artificial Sequence
  Description of Artificial Sequence: Synthetic oligonucleotide
cacacggagcgcaaaguau

SEQ ID NO: 255828 - RNA, 19 nt, Artificial Sequence
  Description of Artificial Sequence: Synthetic oligonucleotide
cccgguuacaaggucuaag

SEQ ID NO: 255829 - RNA, 19 nt, Artificial Sequence
  Description of Artificial Sequence: Synthetic oligonucleotide
agggcccugguguucggua

SEQ ID NO: 255830 - RNA, 19 nt, Artificial Sequence
  Description of Artificial Sequence: Synthetic oligonucleotide
cgagucucgagcugugaug

SEQ ID NO: 255831 - RNA, 19 nt, Artificial Sequence
  Description of Artificial Sequence: Synthetic oligonucleotide
gcgguuguggagagcaaug

SEQ ID NO: 255832 - RNA, 19 nt, Artificial Sequence
  Description of Artificial Sequence: Synthetic oligonucleotide
gguguucgguacagggagc

SEQ ID NO: 255833 - RNA, 19 nt, Artificial Sequence
  Description of Artificial Sequence: Synthetic oligonucleotide
aggaccagcucugcguauu

SEQ ID NO: 255834 - RNA, 19 nt, Artificial Sequence
  Description of Artificial Sequence: Synthetic oligonucleotide
cacgaaccugggcgacgcg

SEQ ID NO: 255835 - RNA, 19 nt, Artificial Sequence
  Description of Artificial Sequence: Synthetic oligonucleotide
ugcgcuccuucgggauugg

SEQ ID NO: 255836 - RNA, 19 nt, Artificial Sequence
  Description of Artificial Sequence: Synthetic oligonucleotide
ugagaccacguggcccgca

SEQ ID NO: 255837 - RNA, 19 nt, Artificial Sequence
  Description of Artificial Sequence: Synthetic oligonucleotide
cuagggcgccgcugauuug

SEQ ID NO: 255838 - RNA, 19 nt, Artificial Sequence
  Description of Artificial Sequence: Synthetic oligonucleotide
cacgauuguggcugccgaa

SEQ ID NO: 255839 - RNA, 19 nt, Artificial Sequence
  Description of Artificial Sequence: Synthetic oligonucleotide
gcgcgcccgauacaaagac

SEQ ID NO: 255840 - RNA, 19 nt, Artificial Sequence
  Description of Artificial Sequence: Synthetic oligonucleotide
ucgguguugggcggggcuu

SEQ ID NO: 255841 - RNA, 19 nt, Artificial Sequence
  Description of Artificial Sequence: Synthetic oligonucleotide
caggugcggcggcaucagg

SEQ ID NO: 255842 - RNA, 19 nt, Artificial Sequence
  Description of Artificial Sequence: Synthetic oligonucleotide
gcguguucuggcgacuggc

SEQ ID NO: 255843 - RNA, 19 nt, Artificial Sequence
  Description of Artificial Sequence: Synthetic oligonucleotide
gcacgauuguggcugccga

SEQ ID NO: 255844 - RNA, 19 nt, Artificial Sequence
  Description of Artificial Sequence: Synthetic oligonucleotide
cgacccuugauugucagca

SEQ ID NO: 255845 - RNA, 19 nt, Artificial Sequence
  Description of Artificial Sequence: Synthetic oligonucleotide
cuggcggagcgagcugggg

SEQ ID NO: 255846 - RNA, 19 nt, Artificial Sequence
  Description of Artificial Sequence: Synthetic oligonucleotide
cuagaccgcuuccacuugu

SEQ ID NO: 255847 - RNA, 19 nt, Artificial Sequence
  Description of Artificial Sequence: Synthetic oligonucleotide
gcacgaaccugggcgacgc

SEQ ID NO: 255848 - RNA, 19 nt, Artificial Sequence
  Description of Artificial Sequence: Synthetic oligonucleotide
caccccgguuacaaggucu

SEQ ID NO: 255849 - RNA, 19 nt, Artificial Sequence
  Description of Artificial Sequence: Synthetic oligonucleotide
gcauccucccggacgcgcg

SEQ ID NO: 255850 - RNA, 19 nt, Artificial Sequence
  Description of Artificial Sequence: Synthetic oligonucleotide
uaccucgaggcagcaucuc

SEQ ID NO: 255851 - RNA, 19 nt, Artificial Sequence
  Description of Artificial Sequence: Synthetic oligonucleotide
gcgagcagugcugaucuga

SEQ ID NO: 255852 - RNA, 19 nt, Artificial Sequence
  Description of Artificial Sequence: Synthetic oligonucleotide
ggcgcgaguccguggugag

SEQ ID NO: 255853 - RNA, 19 nt, Artificial Sequence
  Description of Artificial Sequence: Synthetic oligonucleotide
guguagucccacggcaaaa

SEQ ID NO: 255854 - RNA, 19 nt, Artificial Sequence
  Description of Artificial Sequence: Synthetic oligonucleotide
gcgacccuugauugucagc

SEQ ID NO: 255855 - RNA, 19 nt, Artificial Sequence
  Description of Artificial Sequence: Synthetic oligonucleotide
gaguccgacauggcuuucu

SEQ ID NO: 255856 - RNA, 19 nt, Artificial Sequence
  Description of Artificial Sequence: Synthetic oligonucleotide
ccgugagaccacguggccc

SEQ ID NO: 255857 - RNA, 19 nt, Artificial Sequence
  Description of Artificial Sequence: Synthetic oligonucleotide
gcgcugggcgccgaguccg

SEQ ID NO: 255858 - RNA, 19 nt, Artificial Sequence
  Description of Artificial Sequence: Synthetic oligonucleotide
acgggguaccccgucguuu

SEQ ID NO: 255859 - RNA, 19 nt, Artificial Sequence
  Description of Artificial Sequence: Synthetic oligonucleotide
cccgucguuuaugugagca

SEQ ID NO: 255860 - RNA, 19 nt, Artificial Sequence
  Description of Artificial Sequence: Synthetic oligonucleotide
ugcgugcaaggagggcccu

SEQ ID NO: 255861 - RNA, 19 nt, Artificial Sequence
  Description of Artificial Sequence: Synthetic oligonucleotide
ccacccgugagaccacgug

SEQ ID NO: 255862 - RNA, 19 nt, Artificial Sequence
  Description of Artificial Sequence: Synthetic oligonucleotide
caaugcgcuccuucgggau

SEQ ID NO: 255863 - RNA, 19 nt, Artificial Sequence
  Description of Artificial Sequence: Synthetic oligonucleotide
ggcauccucccggacgcgc

SEQ ID NO: 255864 - RNA, 19 nt, Artificial Sequence
  Description of Artificial Sequence: Synthetic oligonucleotide
ccuagaccgcuuccacuug

SEQ ID NO: 255865 - RNA, 19 nt, Artificial Sequence
  Description of Artificial Sequence: Synthetic oligonucleotide
gccccgucaggcgacgugc

SEQ ID NO: 255866 - RNA, 19 nt, Artificial Sequence
  Description of Artificial Sequence: Synthetic oligonucleotide
ccggacgcgcgcccgauac

SEQ ID NO: 255867 - RNA, 19 nt, Artificial Sequence
  Description of Artificial Sequence: Synthetic oligonucleotide
gucucgcgauccagggcug

SEQ ID NO: 255868 - RNA, 19 nt, Artificial Sequence
  Description of Artificial Sequence: Synthetic oligonucleotide
accccgguuacaaggucua

SEQ ID NO: 255869 - RNA, 19 nt, Artificial Sequence
  Description of Artificial Sequence: Synthetic oligonucleotide
gcgccgcugauuuguucgc

SEQ ID NO: 255870 - RNA, 19 nt, Artificial Sequence
  Description of Artificial Sequence: Synthetic oligonucleotide
cccgugagaccacguggcc

SEQ ID NO: 255871 - RNA, 19 nt, Artificial Sequence
  Description of Artificial Sequence: Synthetic oligonucleotide
aggcgacccuugauuguca

SEQ ID NO: 255872 - RNA, 19 nt, Artificial Sequence
  Description of Artificial Sequence: Synthetic oligonucleotide
gaaccugggcgacgcgcgu

SEQ ID NO: 255873 - RNA, 19 nt, Artificial Sequence
  Description of Artificial Sequence: Synthetic oligonucleotide
ggguaccccgucguuuaug

SEQ ID NO: 255874 - RNA, 19 nt, Artificial Sequence
  Description of Artificial Sequence: Synthetic oligonucleotide
gcguauuucgugccauccu

SEQ ID NO: 255875 - RNA, 19 nt, Artificial Sequence
  Description of Artificial Sequence: Synthetic oligonucleotide
cgugcuguaggguggaacu

SEQ ID NO: 255876 - RNA, 19 nt, Artificial Sequence
  Description of Artificial Sequence: Synthetic oligonucleotide
accacccgugagaccacgu

SEQ ID NO: 255877 - RNA, 19 nt, Artificial Sequence
  Description of Artificial Sequence: Synthetic oligonucleotide
ggacgcgcgcccgauacaa

SEQ ID NO: 255878 - RNA, 19 nt, Artificial Sequence
  Description of Artificial Sequence: Synthetic oligonucleotide
cucugggcgggguccaggu

SEQ ID NO: 255879 - RNA, 19 nt, Artificial Sequence
  Description of Artificial Sequence: Synthetic oligonucleotide
cuccauugucugagaucaa

SEQ ID NO: 255880 - RNA, 19 nt, Artificial Sequence
  Description of Artificial Sequence: Synthetic oligonucleotide
gcaguccgcugcuccgggc

SEQ ID NO: 255881 - RNA, 19 nt, Artificial Sequence
  Description of Artificial Sequence: Synthetic oligonucleotide
gcccugguguucgguacag

SEQ ID NO: 255882 - RNA, 19 nt, Artificial Sequence
  Description of Artificial Sequence: Synthetic oligonucleotide
gugagaccacguggcccgc

SEQ ID NO: 255883 - RNA, 19 nt, Artificial Sequence
  Description of Artificial Sequence: Synthetic oligonucleotide
ccguggugagguacaccug

SEQ ID NO: 255884 - RNA, 19 nt, Artificial Sequence
  Description of Artificial Sequence: Synthetic oligonucleotide
gcgucccagccuaccaccc

SEQ ID NO: 255885 - RNA, 19 nt, Artificial Sequence
  Description of Artificial Sequence: Synthetic oligonucleotide
gcaccccgguuacaagguc

SEQ ID NO: 255886 - RNA, 19 nt, Artificial Sequence
  Description of Artificial Sequence: Synthetic oligonucleotide
cccgauacaaagacugauu

SEQ ID NO: 255887 - RNA, 19 nt, Artificial Sequence
  Description of Artificial Sequence: Synthetic oligonucleotide
cccuagaccgcuuccacuu

SEQ ID NO: 255888 - RNA, 19 nt, Artificial Sequence
  Description of Artificial Sequence: Synthetic oligonucleotide
gacgggguaccccgucguu

SEQ ID NO: 255889 - RNA, 19 nt, Artificial Sequence
  Description of Artificial Sequence: Synthetic oligonucleotide
gacgcgcgcccgauacaaa

SEQ ID NO: 255890 - RNA, 19 nt, Artificial Sequence
  Description of Artificial Sequence: Synthetic oligonucleotide
ggcggagcgagcugggguu

SEQ ID NO: 255891 - RNA, 19 nt, Artificial Sequence
  Description of Artificial Sequence: Synthetic oligonucleotide
ucccgcaccccggcacgau

SEQ ID NO: 255892 - RNA, 19 nt, Artificial Sequence
  Description of Artificial Sequence: Synthetic oligonucleotide
ucccggacgcgcgcccgau

SEQ ID NO: 255893 - RNA, 19 nt, Artificial Sequence
  Description of Artificial Sequence: Synthetic oligonucleotide
gccgaaggaguaaacgauu

SEQ ID NO: 255894 - RNA, 19 nt, Artificial Sequence
  Description of Artificial Sequence: Synthetic oligonucleotide
gggcgccgcugauuuguuc

SEQ ID NO: 255895 - RNA, 19 nt, Artificial Sequence
  Description of Artificial Sequence: Synthetic oligonucleotide
ggcgguuguggagagcaau

SEQ ID NO: 255896 - RNA, 19 nt, Artificial Sequence
  Description of Artificial Sequence: Synthetic oligonucleotide
cacguggcccgcagcugua

SEQ ID NO: 255897 - RNA, 19 nt, Artificial Sequence
  Description of Artificial Sequence: Synthetic oligonucleotide
gggcuugcaguccgcugcu

SEQ ID NO: 255898 - RNA, 19 nt, Artificial Sequence
  Description of Artificial Sequence: Synthetic oligonucleotide
ccccgucguuuaugugagc

SEQ ID NO: 255899 - RNA, 19 nt, Artificial Sequence
  Description of Artificial Sequence: Synthetic oligonucleotide
gcggcgcgaguccguggug

SEQ ID NO: 255900 - RNA, 19 nt, Artificial Sequence
  Description of Artificial Sequence: Synthetic oligonucleotide
cgcgcgcccgauacaaaga

SEQ ID NO: 255901 - RNA, 19 nt, Artificial Sequence
  Description of Artificial Sequence: Synthetic oligonucleotide
ccgagucucgagcugugau

SEQ ID NO: 255902 - RNA, 19 nt, Artificial Sequence
  Description of Artificial Sequence: Synthetic oligonucleotide
gcggagcgagcugggguuc

SEQ ID NO: 255903 - RNA, 19 nt, Artificial Sequence
  Description of Artificial Sequence: Synthetic oligonucleotide
ccgaguccgacauggcuuu

SEQ ID NO: 255904 - RNA, 19 nt, Artificial Sequence
  Description of Artificial Sequence: Synthetic oligonucleotide
gcgcuccuucgggauuggc

SEQ ID NO: 255905 - RNA, 19 nt, Artificial Sequence
  Description of Artificial Sequence: Synthetic oligonucleotide
ccgucaggcgacgugcugu

SEQ ID NO: 255906 - RNA, 19 nt, Artificial Sequence
  Description of Artificial Sequence: Synthetic oligonucleotide
gcugggcgccgaguccgac

SEQ ID NO: 255907 - RNA, 19 nt, Artificial Sequence
  Description of Artificial Sequence: Synthetic oligonucleotide
cuguaccucgaggcagcau

SEQ ID NO: 255908 - RNA, 19 nt, Artificial Sequence
  Description of Artificial Sequence: Synthetic oligonucleotide
cgucaggcgacgugcugua

SEQ ID NO: 255909 - RNA, 19 nt, Artificial Sequence
  Description of Artificial Sequence: Synthetic oligonucleotide
ccgggccucugcgaccauc

SEQ ID NO: 255910 - RNA, 19 nt, Artificial Sequence
  Description of Artificial Sequence: Synthetic oligonucleotide
cccgagucucgagcuguga

SEQ ID NO: 255911 - RNA, 19 nt, Artificial Sequence
  Description of Artificial Sequence: Synthetic oligonucleotide
gagccccgucaggcgacgu

SEQ ID NO: 255912 - RNA, 19 nt, Artificial Sequence
  Description of Artificial Sequence: Synthetic oligonucleotide
ggagcgagcugggguuccu

SEQ ID NO: 255913 - RNA, 19 nt, Artificial Sequence
  Description of Artificial Sequence: Synthetic oligonucleotide
gggguaccccgucguuuau

SEQ ID NO: 255914 - RNA, 19 nt, Artificial Sequence
  Description of Artificial Sequence: Synthetic oligonucleotide
cgcaccgcgucugcgugca

SEQ ID NO: 255915 - RNA, 19 nt, Artificial Sequence
  Description of Artificial Sequence: Synthetic oligonucleotide
cccggagguuuugcagaga

SEQ ID NO: 255916 - RNA, 19 nt, Artificial Sequence
  Description of Artificial Sequence: Synthetic oligonucleotide
ccgcgucugcgugcaagga

SEQ ID NO: 255917 - RNA, 19 nt, Artificial Sequence
  Description of Artificial Sequence: Synthetic oligonucleotide
cgcgcccgauacaaagacu

SEQ ID NO: 255918 - RNA, 19 nt, Artificial Sequence
  Description of Artificial Sequence: Synthetic oligonucleotide
cgaguccgacauggcuuuc

SEQ ID NO: 255919 - RNA, 19 nt, Artificial Sequence
  Description of Artificial Sequence: Synthetic oligonucleotide
ccccgguuacaaggucuaa

SEQ ID NO: 255920 - RNA, 19 nt, Artificial Sequence
  Description of Artificial Sequence: Synthetic oligonucleotide
cggacgcgcgcccgauaca

SEQ ID NO: 255921 - RNA, 19 nt, Artificial Sequence
  Description of Artificial Sequence: Synthetic oligonucleotide
ccccggcacgauuguggcu

SEQ ID NO: 255922 - RNA, 19 nt, Artificial Sequence
  Description of Artificial Sequence: Synthetic oligonucleotide
gcaccgcgucugcgugcaa

SEQ ID NO: 255923 - RNA, 19 nt, Artificial Sequence
  Description of Artificial Sequence: Synthetic oligonucleotide
cgcugggcgccgaguccga

SEQ ID NO: 255924 - RNA, 19 nt, Artificial Sequence
  Description of Artificial Sequence: Synthetic oligonucleotide
ccuucgggauuggcacccu

SEQ ID NO: 255925 - RNA, 19 nt, Artificial Sequence
  Description of Artificial Sequence: Synthetic oligonucleotide
cccggacgcgcgcccgaua

SEQ ID NO: 255926 - RNA, 19 nt, Artificial Sequence
  Description of Artificial Sequence: Synthetic oligonucleotide
aaagauaugccuuaggacc

SEQ ID NO: 255927 - RNA, 19 nt, Artificial Sequence
  Description of Artificial Sequence: Synthetic oligonucleotide
aauaccaacaacugcaccc

SEQ ID NO: 255928 - RNA, 19 nt, Artificial Sequence
  Description of Artificial Sequence: Synthetic oligonucleotide
uauaccuuaauaaugauug

SEQ ID NO: 255929 - RNA, 19 nt, Artificial Sequence
  Description of Artificial Sequence: Synthetic oligonucleotide
aauacaguuuuccaugagc

SEQ ID NO: 255930 - RNA, 19 nt, Artificial Sequence
  Description of Artificial Sequence: Synthetic oligonucleotide
uuuauaugccauuucaaag

SEQ ID NO: 255931 - RNA, 19 nt, Artificial Sequence
  Description of Artificial Sequence: Synthetic oligonucleotide
ugccuuaggaccaagagag

SEQ ID NO: 255932 - RNA, 19 nt, Artificial Sequence
  Description of Artificial Sequence: Synthetic oligonucleotide
aauaucaaagguuccacca

SEQ ID NO: 255933 - RNA, 19 nt, Artificial Sequence
  Description of Artificial Sequence: Synthetic oligonucleotide
ucgacguccaauuagacgc

SEQ ID NO: 255934 - RNA, 19 nt, Artificial Sequence
  Description of Artificial Sequence: Synthetic oligonucleotide
aaacuuauauauuaaggaa

SEQ ID NO: 255935 - RNA, 19 nt, Artificial Sequence
  Description of Artificial Sequence: Synthetic oligonucleotide
accuaaaucauacacagca

SEQ ID NO: 255936 - RNA, 19 nt, Artificial Sequence
  Description of Artificial Sequence: Synthetic oligonucleotide
aaugaguuagcuaauuguc

SEQ ID NO: 255937 - RNA, 19 nt, Artificial Sequence
  Description of Artificial Sequence: Synthetic oligonucleotide
uuaauaaugauugguauac

SEQ ID NO: 255938 - RNA, 19 nt, Artificial Sequence
  Description of Artificial Sequence: Synthetic oligonucleotide
uguagguucauuaaucacu

SEQ ID NO: 255939 - RNA, 19 nt, Artificial Sequence
  Description of Artificial Sequence: Synthetic oligonucleotide
aaucccuauacacauaggu

SEQ ID NO: 255940 - RNA, 19 nt, Artificial Sequence
  Description of Artificial Sequence: Synthetic oligonucleotide
uguccuaaaaguuuguugu

SEQ ID NO: 255941 - RNA, 19 nt, Artificial Sequence
  Description of Artificial Sequence: Synthetic oligonucleotide
ugcuuaauccgccagaaga

SEQ ID NO: 255942 - RNA, 19 nt, Artificial Sequence
  Description of Artificial Sequence: Synthetic oligonucleotide
aaagaucuugcacagucug

SEQ ID NO: 255943 - RNA, 19 nt, Artificial Sequence
  Description of Artificial Sequence: Synthetic oligonucleotide
agcgguagaaaauaccugg

SEQ ID NO: 255944 - RNA, 19 nt, Artificial Sequence
  Description of Artificial Sequence: Synthetic oligonucleotide
gaauguauuguuuggguug

SEQ ID NO: 255945 - RNA, 19 nt, Artificial Sequence
  Description of Artificial Sequence: Synthetic oligonucleotide
uuaagcuauaguuaacaca

SEQ ID NO: 255946 - RNA, 19 nt, Artificial Sequence
  Description of Artificial Sequence: Synthetic oligonucleotide
ucgaaguacauuuagccca

SEQ ID NO: 255947 - RNA, 19 nt, Artificial Sequence
  Description of Artificial Sequence: Synthetic oligonucleotide
uguacuaucccauuggcau

SEQ ID NO: 255948 - RNA, 19 nt, Artificial Sequence
  Description of Artificial Sequence: Synthetic oligonucleotide
aaauggguuucauaccuag

SEQ ID NO: 255949 - RNA, 19 nt, Artificial Sequence
  Description of Artificial Sequence: Synthetic oligonucleotide
guuaacacagcuguuaucc

SEQ ID NO: 255950 - RNA, 19 nt, Artificial Sequence
  Description of Artificial Sequence: Synthetic oligonucleotide
uauauauagaauacugcaa

SEQ ID NO: 255951 - RNA, 19 nt, Artificial Sequence
  Description of Artificial Sequence: Synthetic oligonucleotide
ugugccgcaacaaagcuug

SEQ ID NO: 255952 - RNA, 19 nt, Artificial Sequence
  Description of Artificial Sequence: Synthetic oligonucleotide
aauuagacgcuuuguagca

SEQ ID NO: 255953 - RNA, 19 nt, Artificial Sequence
  Description of Artificial Sequence: Synthetic oligonucleotide
aggaccaaucccuauacac

SEQ ID NO: 255954 - RNA, 19 nt, Artificial Sequence
  Description of Artificial Sequence: Synthetic oligonucleotide
uccuaugucacucuugcug

SEQ ID NO: 255955 - RNA, 19 nt, Artificial Sequence
  Description of Artificial Sequence: Synthetic oligonucleotide
ucccuauacacauagguca

SEQ ID NO: 255956 - RNA, 19 nt, Artificial Sequence
  Description of Artificial Sequence: Synthetic oligonucleotide
aaggggaacguucuuagug

SEQ ID NO: 255957 - RNA, 19 nt, Artificial Sequence
  Description of Artificial Sequence: Synthetic oligonucleotide
aguaugaaccugcuacugc

SEQ ID NO: 255958 - RNA, 19 nt, Artificial Sequence
  Description of Artificial Sequence: Synthetic oligonucleotide
ugucagauauggcaaauug

SEQ ID NO: 255959 - RNA, 19 nt, Artificial Sequence
  Description of Artificial Sequence: Synthetic oligonucleotide
caagaggguagcuagaaag

SEQ ID NO: 255960 - RNA, 19 nt, Artificial Sequence
  Description of Artificial Sequence: Synthetic oligonucleotide
aguucuggcaccuucagca

SEQ ID NO: 255961 - RNA, 19 nt, Artificial Sequence
  Description of Artificial Sequence: Synthetic oligonucleotide
uguugcacucaucagcagg

SEQ ID NO: 255962 - RNA, 19 nt, Artificial Sequence
  Description of Artificial Sequence: Synthetic oligonucleotide
auuuagcccagauaucugg

SEQ ID NO: 255963 - RNA, 19 nt, Artificial Sequence
  Description of Artificial Sequence: Synthetic oligonucleotide
aaaucauacacagcaauga

SEQ ID NO: 255964 - RNA, 19 nt, Artificial Sequence
  Description of Artificial Sequence: Synthetic oligonucleotide
aacacguuccuucuuucuc

SEQ ID NO: 255965 - RNA, 19 nt, Artificial Sequence
  Description of Artificial Sequence: Synthetic oligonucleotide
uuccuauuaauaaguuugg

SEQ ID NO: 255966 - RNA, 19 nt, Artificial Sequence
  Description of Artificial Sequence: Synthetic oligonucleotide
aauguauuguuuggguugg

SEQ ID NO: 255967 - RNA, 19 nt, Artificial Sequence
  Description of Artificial Sequence: Synthetic oligonucleotide
caauuagacgcuuuguagc

SEQ ID NO: 255968 - RNA, 19 nt, Artificial Sequence
  Description of Artificial Sequence: Synthetic oligonucleotide
caaucuguugcucacgucc

SEQ ID NO: 255969 - RNA, 19 nt, Artificial Sequence
  Description of Artificial Sequence: Synthetic oligonucleotide
uuccaggauagaaauauca

SEQ ID NO: 255970 - RNA, 19 nt, Artificial Sequence
  Description of Artificial Sequence: Synthetic oligonucleotide
auaucaaagguuccaccac

SEQ ID NO: 255971 - RNA, 19 nt, Artificial Sequence
  Description of Artificial Sequence: Synthetic oligonucleotide
ucuccuaugucacucuugc

SEQ ID NO: 255972 - RNA, 19 nt, Artificial Sequence
  Description of Artificial Sequence: Synthetic oligonucleotide
ucauauucaaaugcuuggg

SEQ ID NO: 255973 - RNA, 19 nt, Artificial Sequence
  Description of Artificial Sequence: Synthetic oligonucleotide
uuaaggggaacguucuuag

SEQ ID NO: 255974 - RNA, 19 nt, Artificial Sequence
  Description of Artificial Sequence: Synthetic oligonucleotide
ugaauaauuccuucagcca

SEQ ID NO: 255975 - RNA, 19 nt, Artificial Sequence
  Description of Artificial Sequence: Synthetic oligonucleotide
aacuuauauauuaaggaaa

SEQ ID NO: 255976 - RNA, 19 nt, Artificial Sequence
  Description of Artificial Sequence: Synthetic oligonucleotide
acacguuccuucuuucucc

SEQ ID NO: 255977 - RNA, 19 nt, Artificial Sequence
  Description of Artificial Sequence: Synthetic oligonucleotide
cuaauugucacuaaacuua

SEQ ID NO: 255978 - RNA, 19 nt, Artificial Sequence
  Description of Artificial Sequence: Synthetic oligonucleotide
uguuugcccuccauaaccg

SEQ ID NO: 255979 - RNA, 19 nt, Artificial Sequence
  Description of Artificial Sequence: Synthetic oligonucleotide
uuugguuggaauaguggug

SEQ ID NO: 255980 - RNA, 19 nt, Artificial Sequence
  Description of Artificial Sequence: Synthetic oligonucleotide
caaucaucaaggauacagg

SEQ ID NO: 255981 - RNA, 19 nt, Artificial Sequence
  Description of Artificial Sequence: Synthetic oligonucleotide
ugaguuagcuaauugucac

SEQ ID NO: 255982 - RNA, 19 nt, Artificial Sequence
  Description of Artificial Sequence: Synthetic oligonucleotide
aaaugcuccuaucugacuu

SEQ ID NO: 255983 - RNA, 19 nt, Artificial Sequence
  Description of Artificial Sequence: Synthetic oligonucleotide
agagagacuucaucucucc

SEQ ID NO: 255984 - RNA, 19 nt, Artificial Sequence
  Description of Artificial Sequence: Synthetic oligonucleotide
agggucaucauaucgacgu

SEQ ID NO: 255985 - RNA, 19 nt, Artificial Sequence
  Description of Artificial Sequence: Synthetic oligonucleotide
agagucucaauacccagag

SEQ ID NO: 255986 - RNA, 19 nt, Artificial Sequence
  Description of Artificial Sequence: Synthetic oligonucleotide
auagaauguauuguuuggg

SEQ ID NO: 255987 - RNA, 19 nt, Artificial Sequence
  Description of Artificial Sequence: Synthetic oligonucleotide
auaaccgccacacacgagu

SEQ ID NO: 255988 - RNA, 19 nt, Artificial Sequence
  Description of Artificial Sequence: Synthetic oligonucleotide
uuugcaccuacaaaccaug

SEQ ID NO: 255989 - RNA, 19 nt, Artificial Sequence
  Description of Artificial Sequence: Synthetic oligonucleotide
uacugcugaauuuaccacc

SEQ ID NO: 255990 - RNA, 19 nt, Artificial Sequence
  Description of Artificial Sequence: Synthetic oligonucleotide
auugaaauaagcagggacu

SEQ ID NO: 255991 - RNA, 19 nt, Artificial Sequence
  Description of Artificial Sequence: Synthetic oligonucleotide
ugugagucauugaaauaag

SEQ ID NO: 255992 - RNA, 19 nt, Artificial Sequence
  Description of Artificial Sequence: Synthetic oligonucleotide
cauaucgacguccaauuag

SEQ ID NO: 255993 - RNA, 19 nt, Artificial Sequence
  Description of Artificial Sequence: Synthetic oligonucleotide
uauuguuuggguuggugac

SEQ ID NO: 255994 - RNA, 19 nt, Artificial Sequence
  Description of Artificial Sequence: Synthetic oligonucleotide
aauagugguguuccuauua

SEQ ID NO: 255995 - RNA, 19 nt, Artificial Sequence
  Description of Artificial Sequence: Synthetic oligonucleotide
gaaauaagcagggacugug

SEQ ID NO: 255996 - RNA, 19 nt, Artificial Sequence
  Description of Artificial Sequence: Synthetic oligonucleotide
agcuauaguuaacacagcu

SEQ ID NO: 255997 - RNA, 19 nt, Artificial Sequence
  Description of Artificial Sequence: Synthetic oligonucleotide
aucgacguccaauuagacg

SEQ ID NO: 255998 - RNA, 19 nt, Artificial Sequence
  Description of Artificial Sequence: Synthetic oligonucleotide
cauuucaaagaguuucaag

SEQ ID NO: 255999 - RNA, 19 nt, Artificial Sequence
  Description of Artificial Sequence: Synthetic oligonucleotide
ucacucgaaguacauuuag

SEQ ID NO: 256000 - RNA, 19 nt, Artificial Sequence
  Description of Artificial Sequence: Synthetic oligonucleotide
agaaacguguacuauccca

SEQ ID NO: 256001 - RNA, 19 nt, Artificial Sequence
  Description of Artificial Sequence: Synthetic oligonucleotide
uuuaaucucuacuugcguu

SEQ ID NO: 256002 - RNA, 19 nt, Artificial Sequence
  Description of Artificial Sequence: Synthetic oligonucleotide
cucgaaguacauuuagccc

SEQ ID NO: 256003 - RNA, 19 nt, Artificial Sequence
  Description of Artificial Sequence: Synthetic oligonucleotide
cagaacaguaugaaccugc

SEQ ID NO: 256004 - RNA, 19 nt, Artificial Sequence
  Description of Artificial Sequence: Synthetic oligonucleotide
uugaaauaagcagggacug

SEQ ID NO: 256005 - RNA, 19 nt, Artificial Sequence
  Description of Artificial Sequence: Synthetic oligonucleotide
uagaauguauuguuugggu

SEQ ID NO: 256006 - RNA, 19 nt, Artificial Sequence
  Description of Artificial Sequence: Synthetic oligonucleotide
uaguacccaaaucaauacc

SEQ ID NO: 256007 - RNA, 19 nt, Artificial Sequence
  Description of Artificial Sequence: Synthetic oligonucleotide
uggcaugccaacaagucgu

SEQ ID NO: 256008 - RNA, 19 nt, Artificial Sequence
  Description of Artificial Sequence: Synthetic oligonucleotide
accggauauaccuuaauaa

SEQ ID NO: 256009 - RNA, 19 nt, Artificial Sequence
  Description of Artificial Sequence: Synthetic oligonucleotide
auaccuuaauaaugauugg

SEQ ID NO: 256010 - RNA, 19 nt, Artificial Sequence
  Description of Artificial Sequence: Synthetic oligonucleotide
agaaucacuucuccuaugu

SEQ ID NO: 256011 - RNA, 19 nt, Artificial Sequence
  Description of Artificial Sequence: Synthetic oligonucleotide
gaagggguaguucuggcac

SEQ ID NO: 256012 - RNA, 19 nt, Artificial Sequence
  Description of Artificial Sequence: Synthetic oligonucleotide
cacccauuaaaugaguuag

SEQ ID NO: 256013 - RNA, 19 nt, Artificial Sequence
  Description of Artificial Sequence: Synthetic oligonucleotide
uuuggcagaaacguguacu

SEQ ID NO: 256014 - RNA, 19 nt, Artificial Sequence
  Description of Artificial Sequence: Synthetic oligonucleotide
acccaaccccuuuucaugc

SEQ ID NO: 256015 - RNA, 19 nt, Artificial Sequence
  Description of Artificial Sequence: Synthetic oligonucleotide
ucuggcauggagcaauagu

SEQ ID NO: 256016 - RNA, 19 nt, Artificial Sequence
  Description of Artificial Sequence: Synthetic oligonucleotide
ugugacccaaguaauuuuc

SEQ ID NO: 256017 - RNA, 19 nt, Artificial Sequence
  Description of Artificial Sequence: Synthetic oligonucleotide
ugucuaauguuuucuccug

SEQ ID NO: 256018 - RNA, 19 nt, Artificial Sequence
  Description of Artificial Sequence: Synthetic oligonucleotide
caaauugaugucagucugc

SEQ ID NO: 256019 - RNA, 19 nt, Artificial Sequence
  Description of Artificial Sequence: Synthetic oligonucleotide
uucaacccaggcaucacca

SEQ ID NO: 256020 - RNA, 19 nt, Artificial Sequence
  Description of Artificial Sequence: Synthetic oligonucleotide
agaguucacacuuagccuu

SEQ ID NO: 256021 - RNA, 19 nt, Artificial Sequence
  Description of Artificial Sequence: Synthetic oligonucleotide
uucaccuccuaagaaagug

SEQ ID NO: 256022 - RNA, 19 nt, Artificial Sequence
  Description of Artificial Sequence: Synthetic oligonucleotide
aucaccauuagaggcacgg

SEQ ID NO: 256023 - RNA, 19 nt, Artificial Sequence
  Description of Artificial Sequence: Synthetic oligonucleotide
caagcuucaugguauguug

SEQ ID NO: 256024 - RNA, 19 nt, Artificial Sequence
  Description of Artificial Sequence: Synthetic oligonucleotide
aacaaagcuuggucaaagu

SEQ ID NO: 256025 - RNA, 19 nt, Artificial Sequence
  Description of Artificial Sequence: Synthetic oligonucleotide
guaguacccaaaucaauac

SEQ ID NO: 256026 - RNA, 19 nt, Artificial Sequence
  Description of Artificial Sequence: Synthetic oligonucleotide
uuaaucucuacuugcguuu

SEQ ID NO: 256027 - RNA, 19 nt, Artificial Sequence
  Description of Artificial Sequence: Synthetic oligonucleotide
uggcauggagcaauagucc

SEQ ID NO: 256028 - RNA, 19 nt, Artificial Sequence
  Description of Artificial Sequence: Synthetic oligonucleotide
aguacccaaaucaauacca

SEQ ID NO: 256029 - RNA, 19 nt, Artificial Sequence
  Description of Artificial Sequence: Synthetic oligonucleotide
cuguuauccacugaccuag

SEQ ID NO: 256030 - RNA, 19 nt, Artificial Sequence
  Description of Artificial Sequence: Synthetic oligonucleotide
cauuucagcacaaaccgga

SEQ ID NO: 256031 - RNA, 19 nt, Artificial Sequence
  Description of Artificial Sequence: Synthetic oligonucleotide
acacaaaugcuccuaucug

SEQ ID NO: 256032 - RNA, 19 nt, Artificial Sequence
  Description of Artificial Sequence: Synthetic oligonucleotide
acuggauuacaaucuguug

SEQ ID NO: 256033 - RNA, 19 nt, Artificial Sequence
  Description of Artificial Sequence: Synthetic oligonucleotide
ugcaccuacaaaccauggc

SEQ ID NO: 256034 - RNA, 19 nt, Artificial Sequence
  Description of Artificial Sequence: Synthetic oligonucleotide
ucgaacucucugaagugcc

SEQ ID NO: 256035 - RNA, 19 nt, Artificial Sequence
  Description of Artificial Sequence: Synthetic oligonucleotide
uaccuuaauaaugauuggu

SEQ ID NO: 256036 - RNA, 19 nt, Artificial Sequence
  Description of Artificial Sequence: Synthetic oligonucleotide
uaucuuuggcagaaacgug

SEQ ID NO: 256037 - RNA, 19 nt, Artificial Sequence
  Description of Artificial Sequence: Synthetic oligonucleotide
agcuguuauccacugaccu

SEQ ID NO: 256038 - RNA, 19 nt, Artificial Sequence
  Description of Artificial Sequence: Synthetic oligonucleotide
aaccggauauaccuuaaua

SEQ ID NO: 256039 - RNA, 19 nt, Artificial Sequence
  Description of Artificial Sequence: Synthetic oligonucleotide
gaacaaucaucaaggauac

SEQ ID NO: 256040 - RNA, 19 nt, Artificial Sequence
  Description of Artificial Sequence: Synthetic oligonucleotide
uugguuggaauaguggugu

SEQ ID NO: 256041 - RNA, 19 nt, Artificial Sequence
  Description of Artificial Sequence: Synthetic oligonucleotide
uuaaucacucgaaguacau

SEQ ID NO: 256042 - RNA, 19 nt, Artificial Sequence
  Description of Artificial Sequence: Synthetic oligonucleotide
caguugaaggaccaauccc

SEQ ID NO: 256043 - RNA, 19 nt, Artificial Sequence
  Description of Artificial Sequence: Synthetic oligonucleotide
aaaccauggcacagguagc

SEQ ID NO: 256044 - RNA, 19 nt, Artificial Sequence
  Description of Artificial Sequence: Synthetic oligonucleotide
aaccagaaucacuucuccu

SEQ ID NO: 256045 - RNA, 19 nt, Artificial Sequence
  Description of Artificial Sequence: Synthetic oligonucleotide
ucgagucagcuucauauuc

SEQ ID NO: 256046 - RNA, 19 nt, Artificial Sequence
  Description of Artificial Sequence: Synthetic oligonucleotide
cuggcaugccaacaagucg

SEQ ID NO: 256047 - RNA, 19 nt, Artificial Sequence
  Description of Artificial Sequence: Synthetic oligonucleotide
acaaugugccgcaacaaag

SEQ ID NO: 256048 - RNA, 19 nt, Artificial Sequence
  Description of Artificial Sequence: Synthetic oligonucleotide
ugacccaaguaauuuucug

SEQ ID NO: 256049 - RNA, 19 nt, Artificial Sequence
  Description of Artificial Sequence: Synthetic oligonucleotide
uccuaaaaguuuguugucu

SEQ ID NO: 256050 - RNA, 19 nt, Artificial Sequence
  Description of Artificial Sequence: Synthetic oligonucleotide
aucauaucgacguccaauu

SEQ ID NO: 256051 - RNA, 19 nt, Artificial Sequence
  Description of Artificial Sequence: Synthetic oligonucleotide
auccuuaguagccugucgu

SEQ ID NO: 256052 - RNA, 19 nt, Artificial Sequence
  Description of Artificial Sequence: Synthetic oligonucleotide
aaguacauuuagcccagau

SEQ ID NO: 256053 - RNA, 19 nt, Artificial Sequence
  Description of Artificial Sequence: Synthetic oligonucleotide
gacgcuuuguagcauagaa

SEQ ID NO: 256054 - RNA, 19 nt, Artificial Sequence
  Description of Artificial Sequence: Synthetic oligonucleotide
caaacugagcucgagucag

SEQ ID NO: 256055 - RNA, 19 nt, Artificial Sequence
  Description of Artificial Sequence: Synthetic oligonucleotide
uugcaccuacaaaccaugg

SEQ ID NO: 256056 - RNA, 19 nt, Artificial Sequence
  Description of Artificial Sequence: Synthetic oligonucleotide
guuuggguuggugacagcc

SEQ ID NO: 256057 - RNA, 19 nt, Artificial Sequence
  Description of Artificial Sequence: Synthetic oligonucleotide
ccaccuaaaucauacacag

SEQ ID NO: 256058 - RNA, 19 nt, Artificial Sequence
  Description of Artificial Sequence: Synthetic oligonucleotide
ucagggucaucauaucgac

SEQ ID NO: 256059 - RNA, 19 nt, Artificial Sequence
  Description of Artificial Sequence: Synthetic oligonucleotide
uucaacacguuccuucuuu

SEQ ID NO: 256060 - RNA, 19 nt, Artificial Sequence
  Description of Artificial Sequence: Synthetic oligonucleotide
aucccuauacacauagguc

SEQ ID NO: 256061 - RNA, 19 nt, Artificial Sequence
  Description of Artificial Sequence: Synthetic oligonucleotide
uguauuguuuggguuggug

SEQ ID NO: 256062 - RNA, 19 nt, Artificial Sequence
  Description of Artificial Sequence: Synthetic oligonucleotide
cacucgaaguacauuuagc

SEQ ID NO: 256063 - RNA, 19 nt, Artificial Sequence
  Description of Artificial Sequence: Synthetic oligonucleotide
caagucguucuccaucugc

SEQ ID NO: 256064 - RNA, 19 nt, Artificial Sequence
  Description of Artificial Sequence: Synthetic oligonucleotide
agcagcgguagaaaauacc

SEQ ID NO: 256065 - RNA, 19 nt, Artificial Sequence
  Description of Artificial Sequence: Synthetic oligonucleotide
ggauauaccuuaauaauga

SEQ ID NO: 256066 - RNA, 19 nt, Artificial Sequence
  Description of Artificial Sequence: Synthetic oligonucleotide
cagaccauaggccagggca

SEQ ID NO: 256067 - RNA, 19 nt, Artificial Sequence
  Description of Artificial Sequence: Synthetic oligonucleotide
caugcaaggccucaguuga

SEQ ID NO: 256068 - RNA, 19 nt, Artificial Sequence
  Description of Artificial Sequence: Synthetic oligonucleotide
uuugcuuaauccgccagaa

SEQ ID NO: 256069 - RNA, 19 nt, Artificial Sequence
  Description of Artificial Sequence: Synthetic oligonucleotide
uggcaaauugaugucaguc

SEQ ID NO: 256070 - RNA, 19 nt, Artificial Sequence
  Description of Artificial Sequence: Synthetic oligonucleotide
cacacgaguugguaguacc

SEQ ID NO: 256071 - RNA, 19 nt, Artificial Sequence
  Description of Artificial Sequence: Synthetic oligonucleotide
ugcuacugcugaauuuacc

SEQ ID NO: 256072 - RNA, 19 nt, Artificial Sequence
  Description of Artificial Sequence: Synthetic oligonucleotide
cacacuuagccuucucagc

SEQ ID NO: 256073 - RNA, 19 nt, Artificial Sequence
  Description of Artificial Sequence: Synthetic oligonucleotide
uuaacacagcuguuaucca

SEQ ID NO: 256074 - RNA, 19 nt, Artificial Sequence
  Description of Artificial Sequence: Synthetic oligonucleotide
aggggaacguucuuagugu

SEQ ID NO: 256075 - RNA, 19 nt, Artificial Sequence
  Description of Artificial Sequence: Synthetic oligonucleotide
auaguuaacacagcuguua

SEQ ID NO: 256076 - RNA, 19 nt, Artificial Sequence
  Description of Artificial Sequence: Synthetic oligonucleotide
aggguagcuagaaagauau

SEQ ID NO: 256077 - RNA, 19 nt, Artificial Sequence
  Description of Artificial Sequence: Synthetic oligonucleotide
uagacgcuuuguagcauag

SEQ ID NO: 256078 - RNA, 19 nt, Artificial Sequence
  Description of Artificial Sequence: Synthetic oligonucleotide
auacagccccacccaaccc

SEQ ID NO: 256079 - RNA, 19 nt, Artificial Sequence
  Description of Artificial Sequence: Synthetic oligonucleotide
cagauauggcaaauugaug

SEQ ID NO: 256080 - RNA, 19 nt, Artificial Sequence
  Description of Artificial Sequence: Synthetic oligonucleotide
uuaguagccugucguugug

SEQ ID NO: 256081 - RNA, 19 nt, Artificial Sequence
  Description of Artificial Sequence: Synthetic oligonucleotide
ucuaauguuuucuccuguu

SEQ ID NO: 256082 - RNA, 19 nt, Artificial Sequence
  Description of Artificial Sequence: Synthetic oligonucleotide
gucguugugagucauugaa

SEQ ID NO: 256083 - RNA, 19 nt, Artificial Sequence
  Description of Artificial Sequence: Synthetic oligonucleotide
ucuacuugcguuuguccau

SEQ ID NO: 256084 - RNA, 19 nt, Artificial Sequence
  Description of Artificial Sequence: Synthetic oligonucleotide
aaauaagcagggacuguga

SEQ ID NO: 256085 - RNA, 19 nt, Artificial Sequence
  Description of Artificial Sequence: Synthetic oligonucleotide
auauggcaaauugauguca

SEQ ID NO: 256086 - RNA, 19 nt, Artificial Sequence
  Description of Artificial Sequence: Synthetic oligonucleotide
uacauuuagcccagauauc

SEQ ID NO: 256087 - RNA, 19 nt, Artificial Sequence
  Description of Artificial Sequence: Synthetic oligonucleotide
caccuacaaaccauggcac

SEQ ID NO: 256088 - RNA, 19 nt, Artificial Sequence
  Description of Artificial Sequence: Synthetic oligonucleotide
caccauuagaggcacggac

SEQ ID NO: 256089 - RNA, 19 nt, Artificial Sequence
  Description of Artificial Sequence: Synthetic oligonucleotide
gcuacugcugaauuuacca

SEQ ID NO: 256090 - RNA, 19 nt, Artificial Sequence
  Description of Artificial Sequence: Synthetic oligonucleotide
aaccauggcacagguagcu

SEQ ID NO: 256091 - RNA, 19 nt, Artificial Sequence
  Description of Artificial Sequence: Synthetic oligonucleotide
accgccacacacgaguugg

SEQ ID NO: 256092 - RNA, 19 nt, Artificial Sequence
  Description of Artificial Sequence: Synthetic oligonucleotide
ugugugacccaaguaauuu

SEQ ID NO: 256093 - RNA, 19 nt, Artificial Sequence
  Description of Artificial Sequence: Synthetic oligonucleotide
cauccuuaguagccugucg

SEQ ID NO: 256094 - RNA, 19 nt, Artificial Sequence
  Description of Artificial Sequence: Synthetic oligonucleotide
gggcauucucgucauaccg

SEQ ID NO: 256095 - RNA, 19 nt, Artificial Sequence
  Description of Artificial Sequence: Synthetic oligonucleotide
cuacaaaccauggcacagg

SEQ ID NO: 256096 - RNA, 19 nt, Artificial Sequence
  Description of Artificial Sequence: Synthetic oligonucleotide
agcaauaguccucuugauu

SEQ ID NO: 256097 - RNA, 19 nt, Artificial Sequence
  Description of Artificial Sequence: Synthetic oligonucleotide
auaucgacguccaauuaga

SEQ ID NO: 256098 - RNA, 19 nt, Artificial Sequence
  Description of Artificial Sequence: Synthetic oligonucleotide
uuagacgcuuuguagcaua

SEQ ID NO: 256099 - RNA, 19 nt, Artificial Sequence
  Description of Artificial Sequence: Synthetic oligonucleotide
agaagggguaguucuggca

SEQ ID NO: 256100 - RNA, 19 nt, Artificial Sequence
  Description of Artificial Sequence: Synthetic oligonucleotide
ucguugugagucauugaaa

SEQ ID NO: 256101 - RNA, 19 nt, Artificial Sequence
  Description of Artificial Sequence: Synthetic oligonucleotide
uaaucucuacuugcguuug

SEQ ID NO: 256102 - RNA, 19 nt, Artificial Sequence
  Description of Artificial Sequence: Synthetic oligonucleotide
gacaaugugccgcaacaaa

SEQ ID NO: 256103 - RNA, 19 nt, Artificial Sequence
  Description of Artificial Sequence: Synthetic oligonucleotide
uugcuuaauccgccagaag

SEQ ID NO: 256104 - RNA, 19 nt, Artificial Sequence
  Description of Artificial Sequence: Synthetic oligonucleotide
cauuuagcccagauaucug

SEQ ID NO: 256105 - RNA, 19 nt, Artificial Sequence
  Description of Artificial Sequence: Synthetic oligonucleotide
uuggcagaaacguguacua

SEQ ID NO: 256106 - RNA, 19 nt, Artificial Sequence
  Description of Artificial Sequence: Synthetic oligonucleotide
cuguuacuguuucuccucc

SEQ ID NO: 256107 - RNA, 19 nt, Artificial Sequence
  Description of Artificial Sequence: Synthetic oligonucleotide
auucucgucauaccgccaa

SEQ ID NO: 256108 - RNA, 19 nt, Artificial Sequence
  Description of Artificial Sequence: Synthetic oligonucleotide
uaucgacguccaauuagac

SEQ ID NO: 256109 - RNA, 19 nt, Artificial Sequence
  Description of Artificial Sequence: Synthetic oligonucleotide
ugcuggcaugccaacaagu

SEQ ID NO: 256110 - RNA, 19 nt, Artificial Sequence
  Description of Artificial Sequence: Synthetic oligonucleotide
aaaccggauauaccuuaau

SEQ ID NO: 256111 - RNA, 19 nt, Artificial Sequence
  Description of Artificial Sequence: Synthetic oligonucleotide
gcaccuacaaaccauggca

SEQ ID NO: 256112 - RNA, 19 nt, Artificial Sequence
  Description of Artificial Sequence: Synthetic oligonucleotide
accuccuaagaaagugucc

SEQ ID NO: 256113 - RNA, 19 nt, Artificial Sequence
  Description of Artificial Sequence: Synthetic oligonucleotide
aucucuacuugcguuuguc

SEQ ID NO: 256114 - RNA, 19 nt, Artificial Sequence
  Description of Artificial Sequence: Synthetic oligonucleotide
cucgaacucucugaagugc

SEQ ID NO: 256115 - RNA, 19 nt, Artificial Sequence
  Description of Artificial Sequence: Synthetic oligonucleotide
cuuagugucuuucuguacu

SEQ ID NO: 256116 - RNA, 19 nt, Artificial Sequence
  Description of Artificial Sequence: Synthetic oligonucleotide
gagagacuucaucucuccc

SEQ ID NO: 256117 - RNA, 19 nt, Artificial Sequence
  Description of Artificial Sequence: Synthetic oligonucleotide
aaucucuacuugcguuugu

SEQ ID NO: 256118 - RNA, 19 nt, Artificial Sequence
  Description of Artificial Sequence: Synthetic oligonucleotide
cucuacuugcguuugucca

SEQ ID NO: 256119 - RNA, 19 nt, Artificial Sequence
  Description of Artificial Sequence: Synthetic oligonucleotide
aaucuguugcucacguccu

SEQ ID NO: 256120 - RNA, 19 nt, Artificial Sequence
  Description of Artificial Sequence: Synthetic oligonucleotide
gcuccuaucugacuuggag

SEQ ID NO: 256121 - RNA, 19 nt, Artificial Sequence
  Description of Artificial Sequence: Synthetic oligonucleotide
guaguucuggcaccuucag

SEQ ID NO: 256122 - RNA, 19 nt, Artificial Sequence
  Description of Artificial Sequence: Synthetic oligonucleotide
uacucuuggccaacaugca

SEQ ID NO: 256123 - RNA, 19 nt, Artificial Sequence
  Description of Artificial Sequence: Synthetic oligonucleotide
ugcguuuguccaucagcag

SEQ ID NO: 256124 - RNA, 19 nt, Artificial Sequence
  Description of Artificial Sequence: Synthetic oligonucleotide
ugggcauucucgucauacc

SEQ ID NO: 256125 - RNA, 19 nt, Artificial Sequence
  Description of Artificial Sequence: Synthetic oligonucleotide
ugaaauaagcagggacugu

SEQ ID NO: 256126 - RNA, 19 nt, Artificial Sequence
  Description of Artificial Sequence: Synthetic oligonucleotide
aaacguguacuaucccauu

SEQ ID NO: 256127 - RNA, 19 nt, Artificial Sequence
  Description of Artificial Sequence: Synthetic oligonucleotide
auaccaacaacugcacccu

SEQ ID NO: 256128 - RNA, 19 nt, Artificial Sequence
  Description of Artificial Sequence: Synthetic oligonucleotide
auauaccuuaauaaugauu

SEQ ID NO: 256129 - RNA, 19 nt, Artificial Sequence
  Description of Artificial Sequence: Synthetic oligonucleotide
auucaaaugcuugggucca

SEQ ID NO: 256130 - RNA, 19 nt, Artificial Sequence
  Description of Artificial Sequence: Synthetic oligonucleotide
accuuaauaaugauuggua

SEQ ID NO: 256131 - RNA, 19 nt, Artificial Sequence
  Description of Artificial Sequence: Synthetic oligonucleotide
cacccaaccccuuuucaug

SEQ ID NO: 256132 - RNA, 19 nt, Artificial Sequence
  Description of Artificial Sequence: Synthetic oligonucleotide
gagaguucacacuuagccu

SEQ ID NO: 256133 - RNA, 19 nt, Artificial Sequence
  Description of Artificial Sequence: Synthetic oligonucleotide
ucauaucgacguccaauua

SEQ ID NO: 256134 - RNA, 19 nt, Artificial Sequence
  Description of Artificial Sequence: Synthetic oligonucleotide
accuacaaaccauggcaca

SEQ ID NO: 256135 - RNA, 19 nt, Artificial Sequence
  Description of Artificial Sequence: Synthetic oligonucleotide
ucaacacguuccuucuuuc

SEQ ID NO: 256136 - RNA, 19 nt, Artificial Sequence
  Description of Artificial Sequence: Synthetic oligonucleotide
gcagaaacguguacuaucc

SEQ ID NO: 256137 - RNA, 19 nt, Artificial Sequence
  Description of Artificial Sequence: Synthetic oligonucleotide
ugcuuguuugcccuccaua

SEQ ID NO: 256138 - RNA, 19 nt, Artificial Sequence
  Description of Artificial Sequence: Synthetic oligonucleotide
cauucuuuauagcaguacu

SEQ ID NO: 256139 - RNA, 19 nt, Artificial Sequence
  Description of Artificial Sequence: Synthetic oligonucleotide
caccuccuaagaaaguguc

SEQ ID NO: 256140 - RNA, 19 nt, Artificial Sequence
  Description of Artificial Sequence: Synthetic oligonucleotide
ucucgucauaccgccaacc

SEQ ID NO: 256141 - RNA, 19 nt, Artificial Sequence
  Description of Artificial Sequence: Synthetic oligonucleotide
aauggguuucauaccuaga

SEQ ID NO: 256142 - RNA, 19 nt, Artificial Sequence
  Description of Artificial Sequence: Synthetic oligonucleotide
uuagaggcacggacaauuu

SEQ ID NO: 256143 - RNA, 19 nt, Artificial Sequence
  Description of Artificial Sequence: Synthetic oligonucleotide
cugucguugugagucauug

SEQ ID NO: 256144 - RNA, 19 nt, Artificial Sequence
  Description of Artificial Sequence: Synthetic oligonucleotide
cuuuguagcauagaaugua

SEQ ID NO: 256145 - RNA, 19 nt, Artificial Sequence
  Description of Artificial Sequence: Synthetic oligonucleotide
cacacuuuaaucucuacuu

SEQ ID NO: 256146 - RNA, 19 nt, Artificial Sequence
  Description of Artificial Sequence: Synthetic oligonucleotide
uuuuaaggggaacguucuu

SEQ ID NO: 256147 - RNA, 19 nt, Artificial Sequence
  Description of Artificial Sequence: Synthetic oligonucleotide
ccuccuaagaaaguguccc

SEQ ID NO: 256148 - RNA, 19 nt, Artificial Sequence
  Description of Artificial Sequence: Synthetic oligonucleotide
cguuuguccaucagcagcg

SEQ ID NO: 256149 - RNA, 19 nt, Artificial Sequence
  Description of Artificial Sequence: Synthetic oligonucleotide
caccuaaaucauacacagc

SEQ ID NO: 256150 - RNA, 19 nt, Artificial Sequence
  Description of Artificial Sequence: Synthetic oligonucleotide
ugcaugugaaauggguuuc

SEQ ID NO: 256151 - RNA, 19 nt, Artificial Sequence
  Description of Artificial Sequence: Synthetic oligonucleotide
gcguuuguccaucagcagc

SEQ ID NO: 256152 - RNA, 19 nt, Artificial Sequence
  Description of Artificial Sequence: Synthetic oligonucleotide
cuuugcuuguuugcccucc

SEQ ID NO: 256153 - RNA, 19 nt, Artificial Sequence
  Description of Artificial Sequence: Synthetic oligonucleotide
acucccaagcuucauggua

SEQ ID NO: 256154 - RNA, 19 nt, Artificial Sequence
  Description of Artificial Sequence: Synthetic oligonucleotide
gcuauaguuaacacagcug

SEQ ID NO: 256155 - RNA, 19 nt, Artificial Sequence
  Description of Artificial Sequence: Synthetic oligonucleotide
caaagguuccaccaccuaa

SEQ ID NO: 256156 - RNA, 19 nt, Artificial Sequence
  Description of Artificial Sequence: Synthetic oligonucleotide
cggauauaccuuaauaaug

SEQ ID NO: 256157 - RNA, 19 nt, Artificial Sequence
  Description of Artificial Sequence: Synthetic oligonucleotide
cagcgguagaaaauaccug

SEQ ID NO: 256158 - RNA, 19 nt, Artificial Sequence
  Description of Artificial Sequence: Synthetic oligonucleotide
guaaauuguccuaaaaguu

SEQ ID NO: 256159 - RNA, 19 nt, Artificial Sequence
  Description of Artificial Sequence: Synthetic oligonucleotide
ucaaggauacagguuccaa

SEQ ID NO: 256160 - RNA, 19 nt, Artificial Sequence
  Description of Artificial Sequence: Synthetic oligonucleotide
gcauucucgucauaccgcc

SEQ ID NO: 256161 - RNA, 19 nt, Artificial Sequence
  Description of Artificial Sequence: Synthetic oligonucleotide
ucugaauuuccaggauaga

SEQ ID NO: 256162 - RNA, 19 nt, Artificial Sequence
  Description of Artificial Sequence: Synthetic oligonucleotide
ugucguugugagucauuga

SEQ ID NO: 256163 - RNA, 19 nt, Artificial Sequence
  Description of Artificial Sequence: Synthetic oligonucleotide
aaccgccacacacgaguug

SEQ ID NO: 256164 - RNA, 19 nt, Artificial Sequence
  Description of Artificial Sequence: Synthetic oligonucleotide
ggaguagcacaucugugac

SEQ ID NO: 256165 - RNA, 19 nt, Artificial Sequence
  Description of Artificial Sequence: Synthetic oligonucleotide
ucgcuuugcuggcaugcca

SEQ ID NO: 256166 - RNA, 19 nt, Artificial Sequence
  Description of Artificial Sequence: Synthetic oligonucleotide
ggcagaaacguguacuauc

SEQ ID NO: 256167 - RNA, 19 nt, Artificial Sequence
  Description of Artificial Sequence: Synthetic oligonucleotide
gaccaaucccuauacacau

SEQ ID NO: 256168 - RNA, 19 nt, Artificial Sequence
  Description of Artificial Sequence: Synthetic oligonucleotide
aguuucaaggaugccugcu

SEQ ID NO: 256169 - RNA, 19 nt, Artificial Sequence
  Description of Artificial Sequence: Synthetic oligonucleotide
cacugaccuagcuuugcac

SEQ ID NO: 256170 - RNA, 19 nt, Artificial Sequence
  Description of Artificial Sequence: Synthetic oligonucleotide
agccugucgcuuugcuggc

SEQ ID NO: 256171 - RNA, 19 nt, Artificial Sequence
  Description of Artificial Sequence: Synthetic oligonucleotide
uaaggggaacguucuuagu

SEQ ID NO: 256172 - RNA, 19 nt, Artificial Sequence
  Description of Artificial Sequence: Synthetic oligonucleotide
uugaaggaccaaucccuau

SEQ ID NO: 256173 - RNA, 19 nt, Artificial Sequence
  Description of Artificial Sequence: Synthetic oligonucleotide
uggaauagugguguuccua

SEQ ID NO: 256174 - RNA, 19 nt, Artificial Sequence
  Description of Artificial Sequence: Synthetic oligonucleotide
ucaaagguuccaccaccua

SEQ ID NO: 256175 - RNA, 19 nt, Artificial Sequence
  Description of Artificial Sequence: Synthetic oligonucleotide
cuuuggcagaaacguguac

SEQ ID NO: 256176 - RNA, 19 nt, Artificial Sequence
  Description of Artificial Sequence: Synthetic oligonucleotide
cucgcucucccugacacac

SEQ ID NO: 256177 - RNA, 19 nt, Artificial Sequence
  Description of Artificial Sequence: Synthetic oligonucleotide
agaggguagcuagaaagau

SEQ ID NO: 256178 - RNA, 19 nt, Artificial Sequence
  Description of Artificial Sequence: Synthetic oligonucleotide
gauauaccuuaauaaugau

SEQ ID NO: 256179 - RNA, 19 nt, Artificial Sequence
  Description of Artificial Sequence: Synthetic oligonucleotide
acacacgaguugguaguac

SEQ ID NO: 256180 - RNA, 19 nt, Artificial Sequence
  Description of Artificial Sequence: Synthetic oligonucleotide
ugaggagaguucacacuua

SEQ ID NO: 256181 - RNA, 19 nt, Artificial Sequence
  Description of Artificial Sequence: Synthetic oligonucleotide
ggucaucauaucgacgucc

SEQ ID NO: 256182 - RNA, 19 nt, Artificial Sequence
  Description of Artificial Sequence: Synthetic oligonucleotide
guccuaaaaguuuguuguc

SEQ ID NO: 256183 - RNA, 19 nt, Artificial Sequence
  Description of Artificial Sequence: Synthetic oligonucleotide
ucccguucagaugccaucu

SEQ ID NO: 256184 - RNA, 19 nt, Artificial Sequence
  Description of Artificial Sequence: Synthetic oligonucleotide
gaaccuugggcauucucgu

SEQ ID NO: 256185 - RNA, 19 nt, Artificial Sequence
  Description of Artificial Sequence: Synthetic oligonucleotide
ccuauuaauaaguuuggua

SEQ ID NO: 256186 - RNA, 19 nt, Artificial Sequence
  Description of Artificial Sequence: Synthetic oligonucleotide
auaguccucuugauuaggu

SEQ ID NO: 256187 - RNA, 19 nt, Artificial Sequence
  Description of Artificial Sequence: Synthetic oligonucleotide
gaugucagucugcacagau

SEQ ID NO: 256188 - RNA, 19 nt, Artificial Sequence
  Description of Artificial Sequence: Synthetic oligonucleotide
gauaugccuuaggaccaag

SEQ ID NO: 256189 - RNA, 19 nt, Artificial Sequence
  Description of Artificial Sequence: Synthetic oligonucleotide
agcaguacucuuggccaac

SEQ ID NO: 256190 - RNA, 19 nt, Artificial Sequence
  Description of Artificial Sequence: Synthetic oligonucleotide
guuugcccuccauaaccgc

SEQ ID NO: 256191 - RNA, 19 nt, Artificial Sequence
  Description of Artificial Sequence: Synthetic oligonucleotide
caguaugaaccugcuacug

SEQ ID NO: 256192 - RNA, 19 nt, Artificial Sequence
  Description of Artificial Sequence: Synthetic oligonucleotide
augcuccuaucugacuugg

SEQ ID NO: 256193 - RNA, 19 nt, Artificial Sequence
  Description of Artificial Sequence: Synthetic oligonucleotide
ugacaaugugccgcaacaa

SEQ ID NO: 256194 - RNA, 19 nt, Artificial Sequence
  Description of Artificial Sequence: Synthetic oligonucleotide
cagaaucacuucuccuaug

SEQ ID NO: 256195 - RNA, 19 nt, Artificial Sequence
  Description of Artificial Sequence: Synthetic oligonucleotide
cauauucaaaugcuugggu

SEQ ID NO: 256196 - RNA, 19 nt, Artificial Sequence
  Description of Artificial Sequence: Synthetic oligonucleotide
acgaguugguaguacccaa

SEQ ID NO: 256197 - RNA, 19 nt, Artificial Sequence
  Description of Artificial Sequence: Synthetic oligonucleotide
uccuuaguagccugucguu

SEQ ID NO: 256198 - RNA, 19 nt, Artificial Sequence
  Description of Artificial Sequence: Synthetic oligonucleotide
ucaucauaucgacguccaa

SEQ ID NO: 256199 - RNA, 19 nt, Artificial Sequence
  Description of Artificial Sequence: Synthetic oligonucleotide
cagccauauuaacugcuuc

SEQ ID NO: 256200 - RNA, 19 nt, Artificial Sequence
  Description of Artificial Sequence: Synthetic oligonucleotide
gcuuguuugcccuccauaa

SEQ ID NO: 256201 - RNA, 19 nt, Artificial Sequence
  Description of Artificial Sequence: Synthetic oligonucleotide
uucaaaugcuuggguccag

SEQ ID NO: 256202 - RNA, 19 nt, Artificial Sequence
  Description of Artificial Sequence: Synthetic oligonucleotide
gaccuagcuuugcaccuac

SEQ ID NO: 256203 - RNA, 19 nt, Artificial Sequence
  Description of Artificial Sequence: Synthetic oligonucleotide
cauaaccgccacacacgag

SEQ ID NO: 256204 - RNA, 19 nt, Artificial Sequence
  Description of Artificial Sequence: Synthetic oligonucleotide
uaaucacucgaaguacauu

SEQ ID NO: 256205 - RNA, 19 nt, Artificial Sequence
  Description of Artificial Sequence: Synthetic oligonucleotide
guugugagucauugaaaua

SEQ ID NO: 256206 - RNA, 19 nt, Artificial Sequence
  Description of Artificial Sequence: Synthetic oligonucleotide
uucucgucauaccgccaac

SEQ ID NO: 256207 - RNA, 19 nt, Artificial Sequence
  Description of Artificial Sequence: Synthetic oligonucleotide
gcuuaauccgccagaagac

SEQ ID NO: 256208 - RNA, 19 nt, Artificial Sequence
  Description of Artificial Sequence: Synthetic oligonucleotide
gaaacguguacuaucccau

SEQ ID NO: 256209 - RNA, 19 nt, Artificial Sequence
  Description of Artificial Sequence: Synthetic oligonucleotide
ugguggauuucaccucaaa

SEQ ID NO: 256210 - RNA, 19 nt, Artificial Sequence
  Description of Artificial Sequence: Synthetic oligonucleotide
ggcaaauugaugucagucu

SEQ ID NO: 256211 - RNA, 19 nt, Artificial Sequence
  Description of Artificial Sequence: Synthetic oligonucleotide
agcauagaauguauuguuu

SEQ ID NO: 256212 - RNA, 19 nt, Artificial Sequence
  Description of Artificial Sequence: Synthetic oligonucleotide
agguuccaagacacaggcc

SEQ ID NO: 256213 - RNA, 19 nt, Artificial Sequence
  Description of Artificial Sequence: Synthetic oligonucleotide
cuuaguagccugucguugu

SEQ ID NO: 256214 - RNA, 19 nt, Artificial Sequence
  Description of Artificial Sequence: Synthetic oligonucleotide
cauugucagauauggcaaa

SEQ ID NO: 256215 - RNA, 19 nt, Artificial Sequence
  Description of Artificial Sequence: Synthetic oligonucleotide
gucaucauaucgacgucca

SEQ ID NO: 256216 - RNA, 19 nt, Artificial Sequence
  Description of Artificial Sequence: Synthetic oligonucleotide
gcuagaaagauaugccuua

SEQ ID NO: 256217 - RNA, 19 nt, Artificial Sequence
  Description of Artificial Sequence: Synthetic oligonucleotide
auacccagagagaggggag

SEQ ID NO: 256218 - RNA, 19 nt, Artificial Sequence
  Description of Artificial Sequence: Synthetic oligonucleotide
uacucccaagcuucauggu

SEQ ID NO: 256219 - RNA, 19 nt, Artificial Sequence
  Description of Artificial Sequence: Synthetic oligonucleotide
uugcucacguccuguuccu

SEQ ID NO: 256220 - RNA, 19 nt, Artificial Sequence
  Description of Artificial Sequence: Synthetic oligonucleotide
ucaccauuagaggcacgga

SEQ ID NO: 256221 - RNA, 19 nt, Artificial Sequence
  Description of Artificial Sequence: Synthetic oligonucleotide
ccuacaaaccauggcacag

SEQ ID NO: 256222 - RNA, 19 nt, Artificial Sequence
  Description of Artificial Sequence: Synthetic oligonucleotide
uugucagauauggcaaauu

SEQ ID NO: 256223 - RNA, 19 nt, Artificial Sequence
  Description of Artificial Sequence: Synthetic oligonucleotide
acaagucguucuccaucug

SEQ ID NO: 256224 - RNA, 19 nt, Artificial Sequence
  Description of Artificial Sequence: Synthetic oligonucleotide
aacuccacgaggggcugga

SEQ ID NO: 256225 - RNA, 19 nt, Artificial Sequence
  Description of Artificial Sequence: Synthetic oligonucleotide
ccuaugucacucuugcuga

SEQ ID NO: 256226 - RNA, 19 nt, Artificial Sequence
  Description of Artificial Sequence: Synthetic oligonucleotide
cugccugucuaauguuuuc

SEQ ID NO: 256227 - RNA, 19 nt, Artificial Sequence
  Description of Artificial Sequence: Synthetic oligonucleotide
aaccaagaggguagcuaga

SEQ ID NO: 256228 - RNA, 19 nt, Artificial Sequence
  Description of Artificial Sequence: Synthetic oligonucleotide
uaaccgccacacacgaguu

SEQ ID NO: 256229 - RNA, 19 nt, Artificial Sequence
  Description of Artificial Sequence: Synthetic oligonucleotide
ggcauucucgucauaccgc

SEQ ID NO: 256230 - RNA, 19 nt, Artificial Sequence
  Description of Artificial Sequence: Synthetic oligonucleotide
gcuaauugucacuaaacuu

SEQ ID NO: 256231 - RNA, 19 nt, Artificial Sequence
  Description of Artificial Sequence: Synthetic oligonucleotide
uacuugcguuuguccauca

SEQ ID NO: 256232 - RNA, 19 nt, Artificial Sequence
  Description of Artificial Sequence: Synthetic oligonucleotide
ggaccaaucccuauacaca

SEQ ID NO: 256233 - RNA, 19 nt, Artificial Sequence
  Description of Artificial Sequence: Synthetic oligonucleotide
ccagagucucaauacccag

SEQ ID NO: 256234 - RNA, 19 nt, Artificial Sequence
  Description of Artificial Sequence: Synthetic oligonucleotide
guauacagccccacccaac

SEQ ID NO: 256235 - RNA, 19 nt, Artificial Sequence
  Description of Artificial Sequence: Synthetic oligonucleotide
gccgcaacaaagcuugguc

SEQ ID NO: 256236 - RNA, 19 nt, Artificial Sequence
  Description of Artificial Sequence: Synthetic oligonucleotide
accugcuacugcugaauuu

SEQ ID NO: 256237 - RNA, 19 nt, Artificial Sequence
  Description of Artificial Sequence: Synthetic oligonucleotide
cuacuugcguuuguccauc

SEQ ID NO: 256238 - RNA, 19 nt, Artificial Sequence
  Description of Artificial Sequence: Synthetic oligonucleotide
auaugccauuucaaagagu

SEQ ID NO: 256239 - RNA, 19 nt, Artificial Sequence
  Description of Artificial Sequence: Synthetic oligonucleotide
gguuggugacagccugucg

SEQ ID NO: 256240 - RNA, 19 nt, Artificial Sequence
  Description of Artificial Sequence: Synthetic oligonucleotide
auuagacgcuuuguagcau

SEQ ID NO: 256241 - RNA, 19 nt, Artificial Sequence
  Description of Artificial Sequence: Synthetic oligonucleotide
gaggguagcuagaaagaua

SEQ ID NO: 256242 - RNA, 19 nt, Artificial Sequence
  Description of Artificial Sequence: Synthetic oligonucleotide
gacuggauuacaaucuguu

SEQ ID NO: 256243 - RNA, 19 nt, Artificial Sequence
  Description of Artificial Sequence: Synthetic oligonucleotide
caugcaugugaaauggguu

SEQ ID NO: 256244 - RNA, 19 nt, Artificial Sequence
  Description of Artificial Sequence: Synthetic oligonucleotide
ucucgcucucccugacaca

SEQ ID NO: 256245 - RNA, 19 nt, Artificial Sequence
  Description of Artificial Sequence: Synthetic oligonucleotide
ggaauagugguguuccuau

SEQ ID NO: 256246 - RNA, 19 nt, Artificial Sequence
  Description of Artificial Sequence: Synthetic oligonucleotide
caaggaugccugcugaagu

SEQ ID NO: 256247 - RNA, 19 nt, Artificial Sequence
  Description of Artificial Sequence: Synthetic oligonucleotide
caaaccggauauaccuuaa

SEQ ID NO: 256248 - RNA, 19 nt, Artificial Sequence
  Description of Artificial Sequence: Synthetic oligonucleotide
uggcagaaacguguacuau

SEQ ID NO: 256249 - RNA, 19 nt, Artificial Sequence
  Description of Artificial Sequence: Synthetic oligonucleotide
gaaauggguuucauaccua

SEQ ID NO: 256250 - RNA, 19 nt, Artificial Sequence
  Description of Artificial Sequence: Synthetic oligonucleotide
cagggacugugaucacagc

SEQ ID NO: 256251 - RNA, 19 nt, Artificial Sequence
  Description of Artificial Sequence: Synthetic oligonucleotide
accgccaaccagaaucacu

SEQ ID NO: 256252 - RNA, 19 nt, Artificial Sequence
  Description of Artificial Sequence: Synthetic oligonucleotide
caucauaucgacguccaau

SEQ ID NO: 256253 - RNA, 19 nt, Artificial Sequence
  Description of Artificial Sequence: Synthetic oligonucleotide
cacgaguugguaguaccca

SEQ ID NO: 256254 - RNA, 19 nt, Artificial Sequence
  Description of Artificial Sequence: Synthetic oligonucleotide
ugauuaggucugugacaau

SEQ ID NO: 256255 - RNA, 19 nt, Artificial Sequence
  Description of Artificial Sequence: Synthetic oligonucleotide
cuuaauccgccagaagacu

SEQ ID NO: 256256 - RNA, 19 nt, Artificial Sequence
  Description of Artificial Sequence: Synthetic oligonucleotide
cgucauaccgccaaccaga

SEQ ID NO: 256257 - RNA, 19 nt, Artificial Sequence
  Description of Artificial Sequence: Synthetic oligonucleotide
gcgguagaaaauaccuggc

SEQ ID NO: 256258 - RNA, 19 nt, Artificial Sequence
  Description of Artificial Sequence: Synthetic oligonucleotide
gcagcgguagaaaauaccu

SEQ ID NO: 256259 - RNA, 19 nt, Artificial Sequence
  Description of Artificial Sequence: Synthetic oligonucleotide
guugaaggaccaaucccua

SEQ ID NO: 256260 - RNA, 19 nt, Artificial Sequence
  Description of Artificial Sequence: Synthetic oligonucleotide
ugaccuagcuuugcaccua

SEQ ID NO: 256261 - RNA, 19 nt, Artificial Sequence
  Description of Artificial Sequence: Synthetic oligonucleotide
gcuggcaugccaacaaguc

SEQ ID NO: 256262 - RNA, 19 nt, Artificial Sequence
  Description of Artificial Sequence: Synthetic oligonucleotide
ggggaacguucuuaguguc

SEQ ID NO: 256263 - RNA, 19 nt, Artificial Sequence
  Description of Artificial Sequence: Synthetic oligonucleotide
ggcauggagcaauaguccu

SEQ ID NO: 256264 - RNA, 19 nt, Artificial Sequence
  Description of Artificial Sequence: Synthetic oligonucleotide
gcuguuauccacugaccua

SEQ ID NO: 256265 - RNA, 19 nt, Artificial Sequence
  Description of Artificial Sequence: Synthetic oligonucleotide
cauucucgucauaccgcca

SEQ ID NO: 256266 - RNA, 19 nt, Artificial Sequence
  Description of Artificial Sequence: Synthetic oligonucleotide
agacgcuuuguagcauaga

SEQ ID NO: 256267 - RNA, 19 nt, Artificial Sequence
  Description of Artificial Sequence: Synthetic oligonucleotide
gaauagugguguuccuauu

SEQ ID NO: 256268 - RNA, 19 nt, Artificial Sequence
  Description of Artificial Sequence: Synthetic oligonucleotide
cugucgcuuugcuggcaug

SEQ ID NO: 256269 - RNA, 19 nt, Artificial Sequence
  Description of Artificial Sequence: Synthetic oligonucleotide
accuucccguucagaugcc

SEQ ID NO: 256270 - RNA, 19 nt, Artificial Sequence
  Description of Artificial Sequence: Synthetic oligonucleotide
cguccaauuagacgcuuug

SEQ ID NO: 256271 - RNA, 19 nt, Artificial Sequence
  Description of Artificial Sequence: Synthetic oligonucleotide
ccgcaacaaagcuugguca

SEQ ID NO: 256272 - RNA, 19 nt, Artificial Sequence
  Description of Artificial Sequence: Synthetic oligonucleotide
aguguccccauugguggau

SEQ ID NO: 256273 - RNA, 19 nt, Artificial Sequence
  Description of Artificial Sequence: Synthetic oligonucleotide
ggauuacaaucuguugcuc

SEQ ID NO: 256274 - RNA, 19 nt, Artificial Sequence
  Description of Artificial Sequence: Synthetic oligonucleotide
cucccugacacacuuuaau

SEQ ID NO: 256275 - RNA, 19 nt, Artificial Sequence
  Description of Artificial Sequence: Synthetic oligonucleotide
agcucgagucagcuucaua

SEQ ID NO: 256276 - RNA, 19 nt, Artificial Sequence
  Description of Artificial Sequence: Synthetic oligonucleotide
ccauaaccgccacacacga

SEQ ID NO: 256277 - RNA, 19 nt, Artificial Sequence
  Description of Artificial Sequence: Synthetic oligonucleotide
ccggauauaccuuaauaau

SEQ ID NO: 256278 - RNA, 19 nt, Artificial Sequence
  Description of Artificial Sequence: Synthetic oligonucleotide
gucauaccgccaaccagaa

SEQ ID NO: 256279 - RNA, 19 nt, Artificial Sequence
  Description of Artificial Sequence: Synthetic oligonucleotide
gugugacccaaguaauuuu

SEQ ID NO: 256280 - RNA, 19 nt, Artificial Sequence
  Description of Artificial Sequence: Synthetic oligonucleotide
gacagccugucgcuuugcu

SEQ ID NO: 256281 - RNA, 19 nt, Artificial Sequence
  Description of Artificial Sequence: Synthetic oligonucleotide
ccaacaacugcacccuuaa

SEQ ID NO: 256282 - RNA, 19 nt, Artificial Sequence
  Description of Artificial Sequence: Synthetic oligonucleotide
cagauuuguccagaccaua

SEQ ID NO: 256283 - RNA, 19 nt, Artificial Sequence
  Description of Artificial Sequence: Synthetic oligonucleotide
uaccgccaaccagaaucac

SEQ ID NO: 256284 - RNA, 19 nt, Artificial Sequence
  Description of Artificial Sequence: Synthetic oligonucleotide
cacccuuaauugccucuga

SEQ ID NO: 256285 - RNA, 19 nt, Artificial Sequence
  Description of Artificial Sequence: Synthetic oligonucleotide
gcuagugacagaacaguau

SEQ ID NO: 256286 - RNA, 19 nt, Artificial Sequence
  Description of Artificial Sequence: Synthetic oligonucleotide
cacucaucagcagguaacu

SEQ ID NO: 256287 - RNA, 19 nt, Artificial Sequence
  Description of Artificial Sequence: Synthetic oligonucleotide
ccacccauuaaaugaguua

SEQ ID NO: 256288 - RNA, 19 nt, Artificial Sequence
  Description of Artificial Sequence: Synthetic oligonucleotide
caggguuaacagcuuuacu

SEQ ID NO: 256289 - RNA, 19 nt, Artificial Sequence
  Description of Artificial Sequence: Synthetic oligonucleotide
cguugugagucauugaaau

SEQ ID NO: 256290 - RNA, 19 nt, Artificial Sequence
  Description of Artificial Sequence: Synthetic oligonucleotide
ggauuucaccucaaacacu

SEQ ID NO: 256291 - RNA, 19 nt, Artificial Sequence
  Description of Artificial Sequence: Synthetic oligonucleotide
ggcuagugacagaacagua

SEQ ID NO: 256292 - RNA, 19 nt, Artificial Sequence
  Description of Artificial Sequence: Synthetic oligonucleotide
accaaucccuauacacaua

SEQ ID NO: 256293 - RNA, 19 nt, Artificial Sequence
  Description of Artificial Sequence: Synthetic oligonucleotide
cucgagucagcuucauauu

SEQ ID NO: 256294 - RNA, 19 nt, Artificial Sequence
  Description of Artificial Sequence: Synthetic oligonucleotide
gaacguucuuagugucuuu

SEQ ID NO: 256295 - RNA, 19 nt, Artificial Sequence
  Description of Artificial Sequence: Synthetic oligonucleotide
gcauccuuaguagccuguc

SEQ ID NO: 256296 - RNA, 19 nt, Artificial Sequence
  Description of Artificial Sequence: Synthetic oligonucleotide
acguccaauuagacgcuuu

SEQ ID NO: 256297 - RNA, 19 nt, Artificial Sequence
  Description of Artificial Sequence: Synthetic oligonucleotide
ggaacguucuuagugucuu

SEQ ID NO: 256298 - RNA, 19 nt, Artificial Sequence
  Description of Artificial Sequence: Synthetic oligonucleotide
ccccauugguggauuucac

SEQ ID NO: 256299 - RNA, 19 nt, Artificial Sequence
  Description of Artificial Sequence: Synthetic oligonucleotide
ggguagcuagaaagauaug

SEQ ID NO: 256300 - RNA, 19 nt, Artificial Sequence
  Description of Artificial Sequence: Synthetic oligonucleotide
ccgucucccucuugaacuc

SEQ ID NO: 256301 - RNA, 19 nt, Artificial Sequence
  Description of Artificial Sequence: Synthetic oligonucleotide
cacacacgaguugguagua

SEQ ID NO: 256302 - RNA, 19 nt, Artificial Sequence
  Description of Artificial Sequence: Synthetic oligonucleotide
cugcugaagugaagaugcu

SEQ ID NO: 256303 - RNA, 19 nt, Artificial Sequence
  Description of Artificial Sequence: Synthetic oligonucleotide
ccacugaccuagcuuugca

SEQ ID NO: 256304 - RNA, 19 nt, Artificial Sequence
  Description of Artificial Sequence: Synthetic oligonucleotide
ccccgucucccucuugaac

SEQ ID NO: 256305 - RNA, 19 nt, Artificial Sequence
  Description of Artificial Sequence: Synthetic oligonucleotide
cuucuccuaugucacucuu

SEQ ID NO: 256306 - RNA, 19 nt, Artificial Sequence
  Description of Artificial Sequence: Synthetic oligonucleotide
ccagaaucacuucuccuau

SEQ ID NO: 256307 - RNA, 19 nt, Artificial Sequence
  Description of Artificial Sequence: Synthetic oligonucleotide
ccucuugauuaggucugug

SEQ ID NO: 256308 - RNA, 19 nt, Artificial Sequence
  Description of Artificial Sequence: Synthetic oligonucleotide
ccaagaggguagcuagaaa

SEQ ID NO: 256309 - RNA, 19 nt, Artificial Sequence
  Description of Artificial Sequence: Synthetic oligonucleotide
ccuaagaaaguguccccau

SEQ ID NO: 256310 - RNA, 19 nt, Artificial Sequence
  Description of Artificial Sequence: Synthetic oligonucleotide
gacguccaauuagacgcuu

SEQ ID NO: 256311 - RNA, 19 nt, Artificial Sequence
  Description of Artificial Sequence: Synthetic oligonucleotide
cgaguugguaguacccaaa

SEQ ID NO: 256312 - RNA, 19 nt, Artificial Sequence
  Description of Artificial Sequence: Synthetic oligonucleotide
ggccaacaugcaugugaaa

SEQ ID NO: 256313 - RNA, 19 nt, Artificial Sequence
  Description of Artificial Sequence: Synthetic oligonucleotide
caguacucuuggccaacau

SEQ ID NO: 256314 - RNA, 19 nt, Artificial Sequence
  Description of Artificial Sequence: Synthetic oligonucleotide
cuaucccauuggcaucaau

SEQ ID NO: 256315 - RNA, 19 nt, Artificial Sequence
  Description of Artificial Sequence: Synthetic oligonucleotide
cuugggcauucucgucaua

SEQ ID NO: 256316 - RNA, 19 nt, Artificial Sequence
  Description of Artificial Sequence: Synthetic oligonucleotide
cauuagaggcacggacaau

SEQ ID NO: 256317 - RNA, 19 nt, Artificial Sequence
  Description of Artificial Sequence: Synthetic oligonucleotide
gccuuaggaccaagagaga

SEQ ID NO: 256318 - RNA, 19 nt, Artificial Sequence
  Description of Artificial Sequence: Synthetic oligonucleotide
ccuucccguucagaugcca

SEQ ID NO: 256319 - RNA, 19 nt, Artificial Sequence
  Description of Artificial Sequence: Synthetic oligonucleotide
ccguucagaugccaucuuu

SEQ ID NO: 256320 - RNA, 19 nt, Artificial Sequence
  Description of Artificial Sequence: Synthetic oligonucleotide
gccaaccaagaggguagcu

SEQ ID NO: 256321 - RNA, 19 nt, Artificial Sequence
  Description of Artificial Sequence: Synthetic oligonucleotide
cgacguccaauuagacgcu

SEQ ID NO: 256322 - RNA, 19 nt, Artificial Sequence
  Description of Artificial Sequence: Synthetic oligonucleotide
ccugucguugugagucauu

SEQ ID NO: 256323 - RNA, 19 nt, Artificial Sequence
  Description of Artificial Sequence: Synthetic oligonucleotide
gccugucguugugagucau

SEQ ID NO: 256324 - RNA, 19 nt, Artificial Sequence
  Description of Artificial Sequence: Synthetic oligonucleotide
ccgccacacacgaguuggu

SEQ ID NO: 256325 - RNA, 19 nt, Artificial Sequence
  Description of Artificial Sequence: Synthetic oligonucleotide
gggguaguucuggcaccuu

SEQ ID NO: 256326 - RNA, 19 nt, Artificial Sequence
  Description of Artificial Sequence: Synthetic oligonucleotide
aagacuuuaauuuauuccg

SEQ ID NO: 256327 - RNA, 19 nt, Artificial Sequence
  Description of Artificial Sequence: Synthetic oligonucleotide
aacacuaguaaccugcucc

SEQ ID NO: 256328 - RNA, 19 nt, Artificial Sequence
  Description of Artificial Sequence: Synthetic oligonucleotide
aaugauaugucucuuacug

SEQ ID NO: 256329 - RNA, 19 nt, Artificial Sequence
  Description of Artificial Sequence: Synthetic oligonucleotide
aaugacaucagaugcuucc

SEQ ID NO: 256330 - RNA, 19 nt, Artificial Sequence
  Description of Artificial Sequence: Synthetic oligonucleotide
aaagucuccaaacacguac

SEQ ID NO: 256331 - RNA, 19 nt, Artificial Sequence
  Description of Artificial Sequence: Synthetic oligonucleotide
cuuacugcgaucaagagug

SEQ ID NO: 256332 - RNA, 19 nt, Artificial Sequence
  Description of Artificial Sequence: Synthetic oligonucleotide
uugcgaaauaauuugaggg

SEQ ID NO: 256333 - RNA, 19 nt, Artificial Sequence
  Description of Artificial Sequence: Synthetic oligonucleotide
uuagcuuucagaacugugg

SEQ ID NO: 256334 - RNA, 19 nt, Artificial Sequence
  Description of Artificial Sequence: Synthetic oligonucleotide
aauuggaugcaacaucugg

SEQ ID NO: 256335 - RNA, 19 nt, Artificial Sequence
  Description of Artificial Sequence: Synthetic oligonucleotide
uaagucuuaaaauaucucc

SEQ ID NO: 256336 - RNA, 19 nt, Artificial Sequence
  Description of Artificial Sequence: Synthetic oligonucleotide
uuucuagacacacagagcu

SEQ ID NO: 256337 - RNA, 19 nt, Artificial Sequence
  Description of Artificial Sequence: Synthetic oligonucleotide
aauauauauccccuuagcu

SEQ ID NO: 256338 - RNA, 19 nt, Artificial Sequence
  Description of Artificial Sequence: Synthetic oligonucleotide
aaggaagaaacgcauacag

SEQ ID NO: 256339 - RNA, 19 nt, Artificial Sequence
  Description of Artificial Sequence: Synthetic oligonucleotide
ugauaugucucuuacugcg

SEQ ID NO: 256340 - RNA, 19 nt, Artificial Sequence
  Description of Artificial Sequence: Synthetic oligonucleotide
aauguuauuucucggacca

SEQ ID NO: 256341 - RNA, 19 nt, Artificial Sequence
  Description of Artificial Sequence: Synthetic oligonucleotide
uauaucagagugcugauca

SEQ ID NO: 256342 - RNA, 19 nt, Artificial Sequence
  Description of Artificial Sequence: Synthetic oligonucleotide
agguuuacuauuuccaccc

SEQ ID NO: 256343 - RNA, 19 nt, Artificial Sequence
  Description of Artificial Sequence: Synthetic oligonucleotide
uacuaaagcaacaucagca

SEQ ID NO: 256344 - RNA, 19 nt, Artificial Sequence
  Description of Artificial Sequence: Synthetic oligonucleotide
acuauuuccacccacauaa

SEQ ID NO: 256345 - RNA, 19 nt, Artificial Sequence
  Description of Artificial Sequence: Synthetic oligonucleotide
cugucaauagcuaugacag

SEQ ID NO: 256346 - RNA, 19 nt, Artificial Sequence
  Description of Artificial Sequence: Synthetic oligonucleotide
aauaguugaaaaugggaga

SEQ ID NO: 256347 - RNA, 19 nt, Artificial Sequence
  Description of Artificial Sequence: Synthetic oligonucleotide
aauaccaauagaauugguc

SEQ ID NO: 256348 - RNA, 19 nt, Artificial Sequence
  Description of Artificial Sequence: Synthetic oligonucleotide
uuaaguuacacauuaggaa

SEQ ID NO: 256349 - RNA, 19 nt, Artificial Sequence
  Description of Artificial Sequence: Synthetic oligonucleotide
aaauguuacguuccuuaac

SEQ ID NO: 256350 - RNA, 19 nt, Artificial Sequence
  Description of Artificial Sequence: Synthetic oligonucleotide
aguucuuacagcucaucgc

SEQ ID NO: 256351 - RNA, 19 nt, Artificial Sequence
  Description of Artificial Sequence: Synthetic oligonucleotide
aguacaacacaguacagug

SEQ ID NO: 256352 - RNA, 19 nt, Artificial Sequence
  Description of Artificial Sequence: Synthetic oligonucleotide
aauaauuugaggguugggu

SEQ ID NO: 256353 - RNA, 19 nt, Artificial Sequence
  Description of Artificial Sequence: Synthetic oligonucleotide
auugcgaaauaauuugagg

SEQ ID NO: 256354 - RNA, 19 nt, Artificial Sequence
  Description of Artificial Sequence: Synthetic oligonucleotide
uugucuuugaucuacguaa

SEQ ID NO: 256355 - RNA, 19 nt, Artificial Sequence
  Description of Artificial Sequence: Synthetic oligonucleotide
aaacgcauacagcacacag

SEQ ID NO: 256356 - RNA, 19 nt, Artificial Sequence
  Description of Artificial Sequence: Synthetic oligonucleotide
ucuagaucaacacuaguaa

SEQ ID NO: 256357 - RNA, 19 nt, Artificial Sequence
  Description of Artificial Sequence: Synthetic oligonucleotide
uauauucucugaaucaaga

SEQ ID NO: 256358 - RNA, 19 nt, Artificial Sequence
  Description of Artificial Sequence: Synthetic oligonucleotide
aaauuugucauagauccca

SEQ ID NO: 256359 - RNA, 19 nt, Artificial Sequence
  Description of Artificial Sequence: Synthetic oligonucleotide
guucuuacagcucaucgcg

SEQ ID NO: 256360 - RNA, 19 nt, Artificial Sequence
  Description of Artificial Sequence: Synthetic oligonucleotide
uuugucauagaucccaagu

SEQ ID NO: 256361 - RNA, 19 nt, Artificial Sequence
  Description of Artificial Sequence: Synthetic oligonucleotide
ucacuuauuaauugccggg

SEQ ID NO: 256362 - RNA, 19 nt, Artificial Sequence
  Description of Artificial Sequence: Synthetic oligonucleotide
ccugauauaaugcugaggg

SEQ ID NO: 256363 - RNA, 19 nt, Artificial Sequence
  Description of Artificial Sequence: Synthetic oligonucleotide
aagcuagagggcgagaccc

SEQ ID NO: 256364 - RNA, 19 nt, Artificial Sequence
  Description of Artificial Sequence: Synthetic oligonucleotide
ucaucaugcaaaauacuug

SEQ ID NO: 256365 - RNA, 19 nt, Artificial Sequence
  Description of Artificial Sequence: Synthetic oligonucleotide
ucaucuauacuuugaaucu

SEQ ID NO: 256366 - RNA, 19 nt, Artificial Sequence
  Description of Artificial Sequence: Synthetic oligonucleotide
uauaccuauacucgcuggg

SEQ ID NO: 256367 - RNA, 19 nt, Artificial Sequence
  Description of Artificial Sequence: Synthetic oligonucleotide
uccaaacacguacauaugc

SEQ ID NO: 256368 - RNA, 19 nt, Artificial Sequence
  Description of Artificial Sequence: Synthetic oligonucleotide
uuuacagugguagugugag

SEQ ID NO: 256369 - RNA, 19 nt, Artificial Sequence
  Description of Artificial Sequence: Synthetic oligonucleotide
gaauauauauccccuuagc

SEQ ID NO: 256370 - RNA, 19 nt, Artificial Sequence
  Description of Artificial Sequence: Synthetic oligonucleotide
ugaguuaauggcauguuuc

SEQ ID NO: 256371 - RNA, 19 nt, Artificial Sequence
  Description of Artificial Sequence: Synthetic oligonucleotide
caaugcauuugaaucaggg

SEQ ID NO: 256372 - RNA, 19 nt, Artificial Sequence
  Description of Artificial Sequence: Synthetic oligonucleotide
agauugaaaguggagauag

SEQ ID NO: 256373 - RNA, 19 nt, Artificial Sequence
  Description of Artificial Sequence: Synthetic oligonucleotide
caugcaaaauacuugcuac

SEQ ID NO: 256374 - RNA, 19 nt, Artificial Sequence
  Description of Artificial Sequence: Synthetic oligonucleotide
uaaauugucuccacuguac

SEQ ID NO: 256375 - RNA, 19 nt, Artificial Sequence
  Description of Artificial Sequence: Synthetic oligonucleotide
agaauauauauccccuuag

SEQ ID NO: 256376 - RNA, 19 nt, Artificial Sequence
  Description of Artificial Sequence: Synthetic oligonucleotide
ugcccaaccaaucaguaca

SEQ ID NO: 256377 - RNA, 19 nt, Artificial Sequence
  Description of Artificial Sequence: Synthetic oligonucleotide
ugaggucggguaaagacag

SEQ ID NO: 256378 - RNA, 19 nt, Artificial Sequence
  Description of Artificial Sequence: Synthetic oligonucleotide
cugggacugacuuuuaucc

SEQ ID NO: 256379 - RNA, 19 nt, Artificial Sequence
  Description of Artificial Sequence: Synthetic oligonucleotide
acuauaacaaaacuacaaa

SEQ ID NO: 256380 - RNA, 19 nt, Artificial Sequence
  Description of Artificial Sequence: Synthetic oligonucleotide
uacguaacuauaacaaaac

SEQ ID NO: 256381 - RNA, 19 nt, Artificial Sequence
  Description of Artificial Sequence: Synthetic oligonucleotide
gaguucuuacagcucaucg

SEQ ID NO: 256382 - RNA, 19 nt, Artificial Sequence
  Description of Artificial Sequence: Synthetic oligonucleotide
ucuaacaauucacaauagu

SEQ ID NO: 256383 - RNA, 19 nt, Artificial Sequence
  Description of Artificial Sequence: Synthetic oligonucleotide
uucuagaucaacacuagua

SEQ ID NO: 256384 - RNA, 19 nt, Artificial Sequence
  Description of Artificial Sequence: Synthetic oligonucleotide
uacuacauaaaauggcaca

SEQ ID NO: 256385 - RNA, 19 nt, Artificial Sequence
  Description of Artificial Sequence: Synthetic oligonucleotide
uguucucgaguucuuacag

SEQ ID NO: 256386 - RNA, 19 nt, Artificial Sequence
  Description of Artificial Sequence: Synthetic oligonucleotide
auuuauuccgcucccaagu

SEQ ID NO: 256387 - RNA, 19 nt, Artificial Sequence
  Description of Artificial Sequence: Synthetic oligonucleotide
caaacacguacauaugccg

SEQ ID NO: 256388 - RNA, 19 nt, Artificial Sequence
  Description of Artificial Sequence: Synthetic oligonucleotide
ucauagaucccaaguauac

SEQ ID NO: 256389 - RNA, 19 nt, Artificial Sequence
  Description of Artificial Sequence: Synthetic oligonucleotide
cagaaugcaggucaaauac

SEQ ID NO: 256390 - RNA, 19 nt, Artificial Sequence
  Description of Artificial Sequence: Synthetic oligonucleotide
uugaaucucuugaacuggg

SEQ ID NO: 256391 - RNA, 19 nt, Artificial Sequence
  Description of Artificial Sequence: Synthetic oligonucleotide
ugauauaaugcugaggguc

SEQ ID NO: 256392 - RNA, 19 nt, Artificial Sequence
  Description of Artificial Sequence: Synthetic oligonucleotide
gguagugugaguuaauggc

SEQ ID NO: 256393 - RNA, 19 nt, Artificial Sequence
  Description of Artificial Sequence: Synthetic oligonucleotide
ucucuuacugcgaucaaga

SEQ ID NO: 256394 - RNA, 19 nt, Artificial Sequence
  Description of Artificial Sequence: Synthetic oligonucleotide
aacuauaacaaaacuacaa

SEQ ID NO: 256395 - RNA, 19 nt, Artificial Sequence
  Description of Artificial Sequence: Synthetic oligonucleotide
ucugggcuauaucagagug

SEQ ID NO: 256396 - RNA, 19 nt, Artificial Sequence
  Description of Artificial Sequence: Synthetic oligonucleotide
ugaaacgacaccagucugc

SEQ ID NO: 256397 - RNA, 19 nt, Artificial Sequence
  Description of Artificial Sequence: Synthetic oligonucleotide
uaucccaaggauaaaugac

SEQ ID NO: 256398 - RNA, 19 nt, Artificial Sequence
  Description of Artificial Sequence: Synthetic oligonucleotide
aggauaaaugacccuuggc

SEQ ID NO: 256399 - RNA, 19 nt, Artificial Sequence
  Description of Artificial Sequence: Synthetic oligonucleotide
aaucucuugaacuggguua

SEQ ID NO: 256400 - RNA, 19 nt, Artificial Sequence
  Description of Artificial Sequence: Synthetic oligonucleotide
ugcgaaauaauuugagggu

SEQ ID NO: 256401 - RNA, 19 nt, Artificial Sequence
  Description of Artificial Sequence: Synthetic oligonucleotide
gauauaaugcugagggucc

SEQ ID NO: 256402 - RNA, 19 nt, Artificial Sequence
  Description of Artificial Sequence: Synthetic oligonucleotide
aucccaaggauaaaugacc

SEQ ID NO: 256403 - RNA, 19 nt, Artificial Sequence
  Description of Artificial Sequence: Synthetic oligonucleotide
aacccaaaacuucuuucag

SEQ ID NO: 256404 - RNA, 19 nt, Artificial Sequence
  Description of Artificial Sequence: Synthetic oligonucleotide
ugguagugugaguuaaugg

SEQ ID NO: 256405 - RNA, 19 nt, Artificial Sequence
  Description of Artificial Sequence: Synthetic oligonucleotide
cauaucacauacuacauaa

SEQ ID NO: 256406 - RNA, 19 nt, Artificial Sequence
  Description of Artificial Sequence: Synthetic oligonucleotide
gcuuaaguuacacauuagg

SEQ ID NO: 256407 - RNA, 19 nt, Artificial Sequence
  Description of Artificial Sequence: Synthetic oligonucleotide
aacgacaccagucugcaua

SEQ ID NO: 256408 - RNA, 19 nt, Artificial Sequence
  Description of Artificial Sequence: Synthetic oligonucleotide
ugaucuacguaacuauaac

SEQ ID NO: 256409 - RNA, 19 nt, Artificial Sequence
  Description of Artificial Sequence: Synthetic oligonucleotide
uagguuuacuauuuccacc

SEQ ID NO: 256410 - RNA, 19 nt, Artificial Sequence
  Description of Artificial Sequence: Synthetic oligonucleotide
uaccuauacucgcugggcg

SEQ ID NO: 256411 - RNA, 19 nt, Artificial Sequence
  Description of Artificial Sequence: Synthetic oligonucleotide
uuuaaucccuagcaaauuu

SEQ ID NO: 256412 - RNA, 19 nt, Artificial Sequence
  Description of Artificial Sequence: Synthetic oligonucleotide
uccuauuauaaauauucau

SEQ ID NO: 256413 - RNA, 19 nt, Artificial Sequence
  Description of Artificial Sequence: Synthetic oligonucleotide
aggacaaucagcuggaguu

SEQ ID NO: 256414 - RNA, 19 nt, Artificial Sequence
  Description of Artificial Sequence: Synthetic oligonucleotide
aacgauggggucugcggcg

SEQ ID NO: 256415 - RNA, 19 nt, Artificial Sequence
  Description of Artificial Sequence: Synthetic oligonucleotide
cauugcgaaauaauuugag

SEQ ID NO: 256416 - RNA, 19 nt, Artificial Sequence
  Description of Artificial Sequence: Synthetic oligonucleotide
ugacuuuuaucccaaggau

SEQ ID NO: 256417 - RNA, 19 nt, Artificial Sequence
  Description of Artificial Sequence: Synthetic oligonucleotide
ggauucaugguaacgaugg

SEQ ID NO: 256418 - RNA, 19 nt, Artificial Sequence
  Description of Artificial Sequence: Synthetic oligonucleotide
gaucuacguaacuauaaca

SEQ ID NO: 256419 - RNA, 19 nt, Artificial Sequence
  Description of Artificial Sequence: Synthetic oligonucleotide
ucagaguaugcuuaaguua

SEQ ID NO: 256420 - RNA, 19 nt, Artificial Sequence
  Description of Artificial Sequence: Synthetic oligonucleotide
acgcauacagcacacagga

SEQ ID NO: 256421 - RNA, 19 nt, Artificial Sequence
  Description of Artificial Sequence: Synthetic oligonucleotide
uaaauuugucacagucugc

SEQ ID NO: 256422 - RNA, 19 nt, Artificial Sequence
  Description of Artificial Sequence: Synthetic oligonucleotide
ucuauauucucugaaucaa

SEQ ID NO: 256423 - RNA, 19 nt, Artificial Sequence
  Description of Artificial Sequence: Synthetic oligonucleotide
gcuguauuaaaugacaaug

SEQ ID NO: 256424 - RNA, 19 nt, Artificial Sequence
  Description of Artificial Sequence: Synthetic oligonucleotide
acguacauaugccgaaaac

SEQ ID NO: 256425 - RNA, 19 nt, Artificial Sequence
  Description of Artificial Sequence: Synthetic oligonucleotide
accuauacucgcugggcgc

SEQ ID NO: 256426 - RNA, 19 nt, Artificial Sequence
  Description of Artificial Sequence: Synthetic oligonucleotide
uacacauaucacauacuac

SEQ ID NO: 256427 - RNA, 19 nt, Artificial Sequence
  Description of Artificial Sequence: Synthetic oligonucleotide
ucgcgaucccucaauaaag

SEQ ID NO: 256428 - RNA, 19 nt, Artificial Sequence
  Description of Artificial Sequence: Synthetic oligonucleotide
guaacgauggggucugcgg

SEQ ID NO: 256429 - RNA, 19 nt, Artificial Sequence
  Description of Artificial Sequence: Synthetic oligonucleotide
uuaauugccgggcuacuuc

SEQ ID NO: 256430 - RNA, 19 nt, Artificial Sequence
  Description of Artificial Sequence: Synthetic oligonucleotide
gauaaaugacccuuggccu

SEQ ID NO: 256431 - RNA, 19 nt, Artificial Sequence
  Description of Artificial Sequence: Synthetic oligonucleotide
auaauuugaggguugggua

SEQ ID NO: 256432 - RNA, 19 nt, Artificial Sequence
  Description of Artificial Sequence: Synthetic oligonucleotide
cugcuuuuaucccugguag

SEQ ID NO: 256433 - RNA, 19 nt, Artificial Sequence
  Description of Artificial Sequence: Synthetic oligonucleotide
aguauaccuauacucgcug

SEQ ID NO: 256434 - RNA, 19 nt, Artificial Sequence
  Description of Artificial Sequence: Synthetic oligonucleotide
uuugaguuuuccaggaauu

SEQ ID NO: 256435 - RNA, 19 nt, Artificial Sequence
  Description of Artificial Sequence: Synthetic oligonucleotide
ugagaagaaccacuaugga

SEQ ID NO: 256436 - RNA, 19 nt, Artificial Sequence
  Description of Artificial Sequence: Synthetic oligonucleotide
ucuacguaacuauaacaaa

SEQ ID NO: 256437 - RNA, 19 nt, Artificial Sequence
  Description of Artificial Sequence: Synthetic oligonucleotide
aacgcauacagcacacagg

SEQ ID NO: 256438 - RNA, 19 nt, Artificial Sequence
  Description of Artificial Sequence: Synthetic oligonucleotide
cuaguaaccugcuccacug

SEQ ID NO: 256439 - RNA, 19 nt, Artificial Sequence
  Description of Artificial Sequence: Synthetic oligonucleotide
agcaacaucagcauuauuu

SEQ ID NO: 256440 - RNA, 19 nt, Artificial Sequence
  Description of Artificial Sequence: Synthetic oligonucleotide
aacacccgggacaacuucc

SEQ ID NO: 256441 - RNA, 19 nt, Artificial Sequence
  Description of Artificial Sequence: Synthetic oligonucleotide
guaauuaucugaauccuuc

SEQ ID NO: 256442 - RNA, 19 nt, Artificial Sequence
  Description of Artificial Sequence: Synthetic oligonucleotide
uuauuaauugccgggcuac

SEQ ID NO: 256443 - RNA, 19 nt, Artificial Sequence
  Description of Artificial Sequence: Synthetic oligonucleotide
uuuuaucccugguaguacu

SEQ ID NO: 256444 - RNA, 19 nt, Artificial Sequence
  Description of Artificial Sequence: Synthetic oligonucleotide
uucagaguaugcuuaaguu

SEQ ID NO: 256445 - RNA, 19 nt, Artificial Sequence
  Description of Artificial Sequence: Synthetic oligonucleotide
uuacagcucaucgcgaucc

SEQ ID NO: 256446 - RNA, 19 nt, Artificial Sequence
  Description of Artificial Sequence: Synthetic oligonucleotide
ucugcuuuuaucccuggua

SEQ ID NO: 256447 - RNA, 19 nt, Artificial Sequence
  Description of Artificial Sequence: Synthetic oligonucleotide
ucaauagcuaugacaggac

SEQ ID NO: 256448 - RNA, 19 nt, Artificial Sequence
  Description of Artificial Sequence: Synthetic oligonucleotide
uaacgauggggucugcggc

SEQ ID NO: 256449 - RNA, 19 nt, Artificial Sequence
  Description of Artificial Sequence: Synthetic oligonucleotide
acauaugccgaaaacuguc

SEQ ID NO: 256450 - RNA, 19 nt, Artificial Sequence
  Description of Artificial Sequence: Synthetic oligonucleotide
auaccuauacucgcugggc

SEQ ID NO: 256451 - RNA, 19 nt, Artificial Sequence
  Description of Artificial Sequence: Synthetic oligonucleotide
uugcuuauccuguaccucu

SEQ ID NO: 256452 - RNA, 19 nt, Artificial Sequence
  Description of Artificial Sequence: Synthetic oligonucleotide
auaagcaaugcccaaccaa

SEQ ID NO: 256453 - RNA, 19 nt, Artificial Sequence
  Description of Artificial Sequence: Synthetic oligonucleotide
aguuguaaguuacaucaaa

SEQ ID NO: 256454 - RNA, 19 nt, Artificial Sequence
  Description of Artificial Sequence: Synthetic oligonucleotide
ggagaauuuaaaauguuac

SEQ ID NO: 256455 - RNA, 19 nt, Artificial Sequence
  Description of Artificial Sequence: Synthetic oligonucleotide
aucaucauuccauugcgaa

SEQ ID NO: 256456 - RNA, 19 nt, Artificial Sequence
  Description of Artificial Sequence: Synthetic oligonucleotide
uguuacguuccuuaacauc

SEQ ID NO: 256457 - RNA, 19 nt, Artificial Sequence
  Description of Artificial Sequence: Synthetic oligonucleotide
uuugaucuacguaacuaua

SEQ ID NO: 256458 - RNA, 19 nt, Artificial Sequence
  Description of Artificial Sequence: Synthetic oligonucleotide
cuacguaacuauaacaaaa

SEQ ID NO: 256459 - RNA, 19 nt, Artificial Sequence
  Description of Artificial Sequence: Synthetic oligonucleotide
agaggcuguauuaaaugac

SEQ ID NO: 256460 - RNA, 19 nt, Artificial Sequence
  Description of Artificial Sequence: Synthetic oligonucleotide
uguaauuaucugaauccuu

SEQ ID NO: 256461 - RNA, 19 nt, Artificial Sequence
  Description of Artificial Sequence: Synthetic oligonucleotide
aguauccaaugauaugucu

SEQ ID NO: 256462 - RNA, 19 nt, Artificial Sequence
  Description of Artificial Sequence: Synthetic oligonucleotide
cuauacuuugaaucucuug

SEQ ID NO: 256463 - RNA, 19 nt, Artificial Sequence
  Description of Artificial Sequence: Synthetic oligonucleotide
uguuauuucucggaccaga

SEQ ID NO: 256464 - RNA, 19 nt, Artificial Sequence
  Description of Artificial Sequence: Synthetic oligonucleotide
ugucaauagcuaugacagg

SEQ ID NO: 256465 - RNA, 19 nt, Artificial Sequence
  Description of Artificial Sequence: Synthetic oligonucleotide
guauaccuauacucgcugg

SEQ ID NO: 256466 - RNA, 19 nt, Artificial Sequence
  Description of Artificial Sequence: Synthetic oligonucleotide
gauuccugauauaaugcug

SEQ ID NO: 256467 - RNA, 19 nt, Artificial Sequence
  Description of Artificial Sequence: Synthetic oligonucleotide
ugggcuauaucagagugcu

SEQ ID NO: 256468 - RNA, 19 nt, Artificial Sequence
  Description of Artificial Sequence: Synthetic oligonucleotide
aacacguacauaugccgaa

SEQ ID NO: 256469 - RNA, 19 nt, Artificial Sequence
  Description of Artificial Sequence: Synthetic oligonucleotide
acaauaguugaaaauggga

SEQ ID NO: 256470 - RNA, 19 nt, Artificial Sequence
  Description of Artificial Sequence: Synthetic oligonucleotide
gauucaugguaacgauggg

SEQ ID NO: 256471 - RNA, 19 nt, Artificial Sequence
  Description of Artificial Sequence: Synthetic oligonucleotide
uuuaucccugguaguacug

SEQ ID NO: 256472 - RNA, 19 nt, Artificial Sequence
  Description of Artificial Sequence: Synthetic oligonucleotide
uuaaucccuagcaaauuuu

SEQ ID NO: 256473 - RNA, 19 nt, Artificial Sequence
  Description of Artificial Sequence: Synthetic oligonucleotide
uuccgcuugcauuauaaaa

SEQ ID NO: 256474 - RNA, 19 nt, Artificial Sequence
  Description of Artificial Sequence: Synthetic oligonucleotide
guuggguauuugcuuaucc

SEQ ID NO: 256475 - RNA, 19 nt, Artificial Sequence
  Description of Artificial Sequence: Synthetic oligonucleotide
auaucagagugcugaucac

SEQ ID NO: 256476 - RNA, 19 nt, Artificial Sequence
  Description of Artificial Sequence: Synthetic oligonucleotide
acguaacuauaacaaaacu

SEQ ID NO: 256477 - RNA, 19 nt, Artificial Sequence
  Description of Artificial Sequence: Synthetic oligonucleotide
aucuacguaacuauaacaa

SEQ ID NO: 256478 - RNA, 19 nt, Artificial Sequence
  Description of Artificial Sequence: Synthetic oligonucleotide
ugcuuaaguuacacauuag

SEQ ID NO: 256479 - RNA, 19 nt, Artificial Sequence
  Description of Artificial Sequence: Synthetic oligonucleotide
uuucuagaucaacacuagu

SEQ ID NO: 256480 - RNA, 19 nt, Artificial Sequence
  Description of Artificial Sequence: Synthetic oligonucleotide
acuuauuaauugccgggcu

SEQ ID NO: 256481 - RNA, 19 nt, Artificial Sequence
  Description of Artificial Sequence: Synthetic oligonucleotide
uuuauuccgcucccaaguc

SEQ ID NO: 256482 - RNA, 19 nt, Artificial Sequence
  Description of Artificial Sequence: Synthetic oligonucleotide
ugucuuugaucuacguaac

SEQ ID NO: 256483 - RNA, 19 nt, Artificial Sequence
  Description of Artificial Sequence: Synthetic oligonucleotide
agcgcuuucacugaucgcu

SEQ ID NO: 256484 - RNA, 19 nt, Artificial Sequence
  Description of Artificial Sequence: Synthetic oligonucleotide
agcaaugcccaaccaauca

SEQ ID NO: 256485 - RNA, 19 nt, Artificial Sequence
  Description of Artificial Sequence: Synthetic oligonucleotide
uaauugccgggcuacuuca

SEQ ID NO: 256486 - RNA, 19 nt, Artificial Sequence
  Description of Artificial Sequence: Synthetic oligonucleotide
aaugacccuuggccuauag

SEQ ID NO: 256487 - RNA, 19 nt, Artificial Sequence
  Description of Artificial Sequence: Synthetic oligonucleotide
aaacacguacauaugccga

SEQ ID NO: 256488 - RNA, 19 nt, Artificial Sequence
  Description of Artificial Sequence: Synthetic oligonucleotide
uccugauauaaugcugagg

SEQ ID NO: 256489 - RNA, 19 nt, Artificial Sequence
  Description of Artificial Sequence: Synthetic oligonucleotide
agacccucuaacaauucac

SEQ ID NO: 256490 - RNA, 19 nt, Artificial Sequence
  Description of Artificial Sequence: Synthetic oligonucleotide
uagauuaaauugucuccac

SEQ ID NO: 256491 - RNA, 19 nt, Artificial Sequence
  Description of Artificial Sequence: Synthetic oligonucleotide
ugccgaaaacugucaauag

SEQ ID NO: 256492 - RNA, 19 nt, Artificial Sequence
  Description of Artificial Sequence: Synthetic oligonucleotide
aucgcuggccccuguauuc

SEQ ID NO: 256493 - RNA, 19 nt, Artificial Sequence
  Description of Artificial Sequence: Synthetic oligonucleotide
uuauuccgcucccaagucu

SEQ ID NO: 256494 - RNA, 19 nt, Artificial Sequence
  Description of Artificial Sequence: Synthetic oligonucleotide
ugcauguaagaaauugauu

SEQ ID NO: 256495 - RNA, 19 nt, Artificial Sequence
  Description of Artificial Sequence: Synthetic oligonucleotide
ucaacacuaguaaccugcu

SEQ ID NO: 256496 - RNA, 19 nt, Artificial Sequence
  Description of Artificial Sequence: Synthetic oligonucleotide
caaggauaaaugacccuug

SEQ ID NO: 256497 - RNA, 19 nt, Artificial Sequence
  Description of Artificial Sequence: Synthetic oligonucleotide
cucuaacaauucacaauag

SEQ ID NO: 256498 - RNA, 19 nt, Artificial Sequence
  Description of Artificial Sequence: Synthetic oligonucleotide
cacuuauuaauugccgggc

SEQ ID NO: 256499 - RNA, 19 nt, Artificial Sequence
  Description of Artificial Sequence: Synthetic oligonucleotide
gcuaugacaggacaaucag

SEQ ID NO: 256500 - RNA, 19 nt, Artificial Sequence
  Description of Artificial Sequence: Synthetic oligonucleotide
uuaaaaggucuggaagaug

SEQ ID NO: 256501 - RNA, 19 nt, Artificial Sequence
  Description of Artificial Sequence: Synthetic oligonucleotide
uaccaauagaauuggucau

SEQ ID NO: 256502 - RNA, 19 nt, Artificial Sequence
  Description of Artificial Sequence: Synthetic oligonucleotide
augcccaaccaaucaguac

SEQ ID NO: 256503 - RNA, 19 nt, Artificial Sequence
  Description of Artificial Sequence: Synthetic oligonucleotide
ucaucauuccauugcgaaa

SEQ ID NO: 256504 - RNA, 19 nt, Artificial Sequence
  Description of Artificial Sequence: Synthetic oligonucleotide
guuucuagaucaacacuag

SEQ ID NO: 256505 - RNA, 19 nt, Artificial Sequence
  Description of Artificial Sequence: Synthetic oligonucleotide
gaagcuagagggcgagacc

SEQ ID NO: 256506 - RNA, 19 nt, Artificial Sequence
  Description of Artificial Sequence: Synthetic oligonucleotide
guuuacuauuuccacccac

SEQ ID NO: 256507 - RNA, 19 nt, Artificial Sequence
  Description of Artificial Sequence: Synthetic oligonucleotide
gaagaaacgcauacagcac

SEQ ID NO: 256508 - RNA, 19 nt, Artificial Sequence
  Description of Artificial Sequence: Synthetic oligonucleotide
ucuagacacacagagcuuu

SEQ ID NO: 256509 - RNA, 19 nt, Artificial Sequence
  Description of Artificial Sequence: Synthetic oligonucleotide
cauagaucccaaguauacc

SEQ ID NO: 256510 - RNA, 19 nt, Artificial Sequence
  Description of Artificial Sequence: Synthetic oligonucleotide
acugggauuccugauauaa

SEQ ID NO: 256511 - RNA, 19 nt, Artificial Sequence
  Description of Artificial Sequence: Synthetic oligonucleotide
uuccugauauaaugcugag

SEQ ID NO: 256512 - RNA, 19 nt, Artificial Sequence
  Description of Artificial Sequence: Synthetic oligonucleotide
agaagaggaugucuaaauu

SEQ ID NO: 256513 - RNA, 19 nt, Artificial Sequence
  Description of Artificial Sequence: Synthetic oligonucleotide
agaucccaaguauaccaug

SEQ ID NO: 256514 - RNA, 19 nt, Artificial Sequence
  Description of Artificial Sequence: Synthetic oligonucleotide
gaaagggcugggcuccggg

SEQ ID NO: 256515 - RNA, 19 nt, Artificial Sequence
  Description of Artificial Sequence: Synthetic oligonucleotide
guuauuucucggaccagag

SEQ ID NO: 256516 - RNA, 19 nt, Artificial Sequence
  Description of Artificial Sequence: Synthetic oligonucleotide
aagcaaugcccaaccaauc

SEQ ID NO: 256517 - RNA, 19 nt, Artificial Sequence
  Description of Artificial Sequence: Synthetic oligonucleotide
uuucauaagcaaugcccaa

SEQ ID NO: 256518 - RNA, 19 nt, Artificial Sequence
  Description of Artificial Sequence: Synthetic oligonucleotide
uggaugcaacaucuggcug

SEQ ID NO: 256519 - RNA, 19 nt, Artificial Sequence
  Description of Artificial Sequence: Synthetic oligonucleotide
uauccccuuagcuuucaga

SEQ ID NO: 256520 - RNA, 19 nt, Artificial Sequence
  Description of Artificial Sequence: Synthetic oligonucleotide
aucgcgaucccucaauaaa

SEQ ID NO: 256521 - RNA, 19 nt, Artificial Sequence
  Description of Artificial Sequence: Synthetic oligonucleotide
guauccaaugauaugucuc

SEQ ID NO: 256522 - RNA, 19 nt, Artificial Sequence
  Description of Artificial Sequence: Synthetic oligonucleotide
ugaaucucuugaacugggu

SEQ ID NO: 256523 - RNA, 19 nt, Artificial Sequence
  Description of Artificial Sequence: Synthetic oligonucleotide
ucuuacagcucaucgcgau

SEQ ID NO: 256524 - RNA, 19 nt, Artificial Sequence
  Description of Artificial Sequence: Synthetic oligonucleotide
ugccuuuacagugguagug

SEQ ID NO: 256525 - RNA, 19 nt, Artificial Sequence
  Description of Artificial Sequence: Synthetic oligonucleotide
gucuuaaaauaucucccca

SEQ ID NO: 256526 - RNA, 19 nt, Artificial Sequence
  Description of Artificial Sequence: Synthetic oligonucleotide
ccacauaagccaaugcugc

SEQ ID NO: 256527 - RNA, 19 nt, Artificial Sequence
  Description of Artificial Sequence: Synthetic oligonucleotide
acauagaauuaugaaaaua

SEQ ID NO: 256528 - RNA, 19 nt, Artificial Sequence
  Description of Artificial Sequence: Synthetic oligonucleotide
uaugccgaaaacugucaau

SEQ ID NO: 256529 - RNA, 19 nt, Artificial Sequence
  Description of Artificial Sequence: Synthetic oligonucleotide
ucuaaacuuucuguauccu

SEQ ID NO: 256530 - RNA, 19 nt, Artificial Sequence
  Description of Artificial Sequence: Synthetic oligonucleotide
auaugucucuuacugcgau

SEQ ID NO: 256531 - RNA, 19 nt, Artificial Sequence
  Description of Artificial Sequence: Synthetic oligonucleotide
acauaucacauacuacaua

SEQ ID NO: 256532 - RNA, 19 nt, Artificial Sequence
  Description of Artificial Sequence: Synthetic oligonucleotide
ucccucaauaaaguauacc

SEQ ID NO: 256533 - RNA, 19 nt, Artificial Sequence
  Description of Artificial Sequence: Synthetic oligonucleotide
uguaucaguugggucaggu

SEQ ID NO: 256534 - RNA, 19 nt, Artificial Sequence
  Description of Artificial Sequence: Synthetic oligonucleotide
aacuggaccgggcuaggaa

SEQ ID NO: 256535 - RNA, 19 nt, Artificial Sequence
  Description of Artificial Sequence: Synthetic oligonucleotide
agugugaguuaauggcaug

SEQ ID NO: 256536 - RNA, 19 nt, Artificial Sequence
  Description of Artificial Sequence: Synthetic oligonucleotide
cugggcuauaucagagugc

SEQ ID NO: 256537 - RNA, 19 nt, Artificial Sequence
  Description of Artificial Sequence: Synthetic oligonucleotide
caaucaguacaacacagua

SEQ ID NO: 256538 - RNA, 19 nt, Artificial Sequence
  Description of Artificial Sequence: Synthetic oligonucleotide
aucuauacuuugaaucucu

SEQ ID NO: 256539 - RNA, 19 nt, Artificial Sequence
  Description of Artificial Sequence: Synthetic oligonucleotide
uuugcuuauccuguaccuc

SEQ ID NO: 256540 - RNA, 19 nt, Artificial Sequence
  Description of Artificial Sequence: Synthetic oligonucleotide
ugcuuauccuguaccucug

SEQ ID NO: 256541 - RNA, 19 nt, Artificial Sequence
  Description of Artificial Sequence: Synthetic oligonucleotide
ggcuauaucagagugcuga

SEQ ID NO: 256542 - RNA, 19 nt, Artificial Sequence
  Description of Artificial Sequence: Synthetic oligonucleotide
guagugugaguuaauggca

SEQ ID NO: 256543 - RNA, 19 nt, Artificial Sequence
  Description of Artificial Sequence: Synthetic oligonucleotide
gacuuguuauuucugcugu

SEQ ID NO: 256544 - RNA, 19 nt, Artificial Sequence
  Description of Artificial Sequence: Synthetic oligonucleotide
gaauccuucugcucaaagu

SEQ ID NO: 256545 - RNA, 19 nt, Artificial Sequence
  Description of Artificial Sequence: Synthetic oligonucleotide
gaggaugucuaaauuuguc

SEQ ID NO: 256546 - RNA, 19 nt, Artificial Sequence
  Description of Artificial Sequence: Synthetic oligonucleotide
gaaacgacaccagucugca

SEQ ID NO: 256547 - RNA, 19 nt, Artificial Sequence
  Description of Artificial Sequence: Synthetic oligonucleotide
ugcuuuuaucccugguagu

SEQ ID NO: 256548 - RNA, 19 nt, Artificial Sequence
  Description of Artificial Sequence: Synthetic oligonucleotide
gacggcaggauucauggua

SEQ ID NO: 256549 - RNA, 19 nt, Artificial Sequence
  Description of Artificial Sequence: Synthetic oligonucleotide
cuuuuaucccugguaguac

SEQ ID NO: 256550 - RNA, 19 nt, Artificial Sequence
  Description of Artificial Sequence: Synthetic oligonucleotide
uuacugcgaucaagagugg

SEQ ID NO: 256551 - RNA, 19 nt, Artificial Sequence
  Description of Artificial Sequence: Synthetic oligonucleotide
ucuauacuuugaaucucuu

SEQ ID NO: 256552 - RNA, 19 nt, Artificial Sequence
  Description of Artificial Sequence: Synthetic oligonucleotide
aaauaccaauagaauuggu

SEQ ID NO: 256553 - RNA, 19 nt, Artificial Sequence
  Description of Artificial Sequence: Synthetic oligonucleotide
gacaccagucugcauaaaa

SEQ ID NO: 256554 - RNA, 19 nt, Artificial Sequence
  Description of Artificial Sequence: Synthetic oligonucleotide
gagacccucuaacaauuca

SEQ ID NO: 256555 - RNA, 19 nt, Artificial Sequence
  Description of Artificial Sequence: Synthetic oligonucleotide
auaugccgaaaacugucaa

SEQ ID NO: 256556 - RNA, 19 nt, Artificial Sequence
  Description of Artificial Sequence: Synthetic oligonucleotide
ugauguagucugcgagcgc

SEQ ID NO: 256557 - RNA, 19 nt, Artificial Sequence
  Description of Artificial Sequence: Synthetic oligonucleotide
ccaaugauaugucucuuac

SEQ ID NO: 256558 - RNA, 19 nt, Artificial Sequence
  Description of Artificial Sequence: Synthetic oligonucleotide
gucucuuacugcgaucaag

SEQ ID NO: 256559 - RNA, 19 nt, Artificial Sequence
  Description of Artificial Sequence: Synthetic oligonucleotide
acugcgaucaagaguggug

SEQ ID NO: 256560 - RNA, 19 nt, Artificial Sequence
  Description of Artificial Sequence: Synthetic oligonucleotide
aauccaguuguaaguuaca

SEQ ID NO: 256561 - RNA, 19 nt, Artificial Sequence
  Description of Artificial Sequence: Synthetic oligonucleotide
aauuugucauagaucccaa

SEQ ID NO: 256562 - RNA, 19 nt, Artificial Sequence
  Description of Artificial Sequence: Synthetic oligonucleotide
gugguagugugaguuaaug

SEQ ID NO: 256563 - RNA, 19 nt, Artificial Sequence
  Description of Artificial Sequence: Synthetic oligonucleotide
cauaugccgaaaacuguca

SEQ ID NO: 256564 - RNA, 19 nt, Artificial Sequence
  Description of Artificial Sequence: Synthetic oligonucleotide
caauagcuaugacaggaca

SEQ ID NO: 256565 - RNA, 19 nt, Artificial Sequence
  Description of Artificial Sequence: Synthetic oligonucleotide
ggaugcaacaucuggcuga

SEQ ID NO: 256566 - RNA, 19 nt, Artificial Sequence
  Description of Artificial Sequence: Synthetic oligonucleotide
gccgaaaacugucaauagc

SEQ ID NO: 256567 - RNA, 19 nt, Artificial Sequence
  Description of Artificial Sequence: Synthetic oligonucleotide
augccgaaaacugucaaua

SEQ ID NO: 256568 - RNA, 19 nt, Artificial Sequence
  Description of Artificial Sequence: Synthetic oligonucleotide
uaugucucuuacugcgauc

SEQ ID NO: 256569 - RNA, 19 nt, Artificial Sequence
  Description of Artificial Sequence: Synthetic oligonucleotide
agggcgagacccucuaaca

SEQ ID NO: 256570 - RNA, 19 nt, Artificial Sequence
  Description of Artificial Sequence: Synthetic oligonucleotide
uugccgggcuacuucauuc

SEQ ID NO: 256571 - RNA, 19 nt, Artificial Sequence
  Description of Artificial Sequence: Synthetic oligonucleotide
caucuauacuuugaaucuc

SEQ ID NO: 256572 - RNA, 19 nt, Artificial Sequence
  Description of Artificial Sequence: Synthetic oligonucleotide
gauguagucugcgagcgcu

SEQ ID NO: 256573 - RNA, 19 nt, Artificial Sequence
  Description of Artificial Sequence: Synthetic oligonucleotide
acccucuaacaauucacaa

SEQ ID NO: 256574 - RNA, 19 nt, Artificial Sequence
  Description of Artificial Sequence: Synthetic oligonucleotide
uagucugcgagcgcuuuca

SEQ ID NO: 256575 - RNA, 19 nt, Artificial Sequence
  Description of Artificial Sequence: Synthetic oligonucleotide
agaaugcaggucaaauaca

SEQ ID NO: 256576 - RNA, 19 nt, Artificial Sequence
  Description of Artificial Sequence: Synthetic oligonucleotide
cuuugaucuacguaacuau

SEQ ID NO: 256577 - RNA, 19 nt, Artificial Sequence
  Description of Artificial Sequence: Synthetic oligonucleotide
uugccuuuacagugguagu

SEQ ID NO: 256578 - RNA, 19 nt, Artificial Sequence
  Description of Artificial Sequence: Synthetic oligonucleotide
aggauucaugguaacgaug

SEQ ID NO: 256579 - RNA, 19 nt, Artificial Sequence
  Description of Artificial Sequence: Synthetic oligonucleotide
gauaugucucuuacugcga

SEQ ID NO: 256580 - RNA, 19 nt, Artificial Sequence
  Description of Artificial Sequence: Synthetic oligonucleotide
gauaugcagaagaggaugu

SEQ ID NO: 256581 - RNA, 19 nt, Artificial Sequence
  Description of Artificial Sequence: Synthetic oligonucleotide
cuuauuaauugccgggcua

SEQ ID NO: 256582 - RNA, 19 nt, Artificial Sequence
  Description of Artificial Sequence: Synthetic oligonucleotide
auguuacguuccuuaacau

SEQ ID NO: 256583 - RNA, 19 nt, Artificial Sequence
  Description of Artificial Sequence: Synthetic oligonucleotide
gacccucuaacaauucaca

SEQ ID NO: 256584 - RNA, 19 nt, Artificial Sequence
  Description of Artificial Sequence: Synthetic oligonucleotide
ucaucgcgaucccucaaua

SEQ ID NO: 256585 - RNA, 19 nt, Artificial Sequence
  Description of Artificial Sequence: Synthetic oligonucleotide
auauauccccuuagcuuuc

SEQ ID NO: 256586 - RNA, 19 nt, Artificial Sequence
  Description of Artificial Sequence: Synthetic oligonucleotide
guguucucgaguucuuaca

SEQ ID NO: 256587 - RNA, 19 nt, Artificial Sequence
  Description of Artificial Sequence: Synthetic oligonucleotide
uggugacuucaucuauacu

SEQ ID NO: 256588 - RNA, 19 nt, Artificial Sequence
  Description of Artificial Sequence: Synthetic oligonucleotide
uacagcucaucgcgauccc

SEQ ID NO: 256589 - RNA, 19 nt, Artificial Sequence
  Description of Artificial Sequence: Synthetic oligonucleotide
uucuagacacacagagcuu

SEQ ID NO: 256590 - RNA, 19 nt, Artificial Sequence
  Description of Artificial Sequence: Synthetic oligonucleotide
augguaacgauggggucug

SEQ ID NO: 256591 - RNA, 19 nt, Artificial Sequence
  Description of Artificial Sequence: Synthetic oligonucleotide
gcacaugucaaccuuuuaa

SEQ ID NO: 256592 - RNA, 19 nt, Artificial Sequence
  Description of Artificial Sequence: Synthetic oligonucleotide
gggacugacuuuuauccca

SEQ ID NO: 256593 - RNA, 19 nt, Artificial Sequence
  Description of Artificial Sequence: Synthetic oligonucleotide
cuauaucagagugcugauc

SEQ ID NO: 256594 - RNA, 19 nt, Artificial Sequence
  Description of Artificial Sequence: Synthetic oligonucleotide
guaccuuucugguuuugaa

SEQ ID NO: 256595 - RNA, 19 nt, Artificial Sequence
  Description of Artificial Sequence: Synthetic oligonucleotide
ugaucgcuggccccuguau

SEQ ID NO: 256596 - RNA, 19 nt, Artificial Sequence
  Description of Artificial Sequence: Synthetic oligonucleotide
cuuacagcucaucgcgauc

SEQ ID NO: 256597 - RNA, 19 nt, Artificial Sequence
  Description of Artificial Sequence: Synthetic oligonucleotide
gaacacccgggacaacuuc

SEQ ID NO: 256598 - RNA, 19 nt, Artificial Sequence
  Description of Artificial Sequence: Synthetic oligonucleotide
acgacaccagucugcauaa

SEQ ID NO: 256599 - RNA, 19 nt, Artificial Sequence
  Description of Artificial Sequence: Synthetic oligonucleotide
ugugaguuaauggcauguu

SEQ ID NO: 256600 - RNA, 19 nt, Artificial Sequence
  Description of Artificial Sequence: Synthetic oligonucleotide
gaaucucuugaacuggguu

SEQ ID NO: 256601 - RNA, 19 nt, Artificial Sequence
  Description of Artificial Sequence: Synthetic oligonucleotide
acccgggacaacuuccaga

SEQ ID NO: 256602 - RNA, 19 nt, Artificial Sequence
  Description of Artificial Sequence: Synthetic oligonucleotide
ugcgaucaagaguggugac

SEQ ID NO: 256603 - RNA, 19 nt, Artificial Sequence
  Description of Artificial Sequence: Synthetic oligonucleotide
cccucaauaaaguauaccu

SEQ ID NO: 256604 - RNA, 19 nt, Artificial Sequence
  Description of Artificial Sequence: Synthetic oligonucleotide
gaucccaaguauaccaugu

SEQ ID NO: 256605 - RNA, 19 nt, Artificial Sequence
  Description of Artificial Sequence: Synthetic oligonucleotide
uauauccccuuagcuuuca

SEQ ID NO: 256606 - RNA, 19 nt, Artificial Sequence
  Description of Artificial Sequence: Synthetic oligonucleotide
uggaccgggcuaggaaagg

SEQ ID NO: 256607 - RNA, 19 nt, Artificial Sequence
  Description of Artificial Sequence: Synthetic oligonucleotide
ugccgggcuacuucauucu

SEQ ID NO: 256608 - RNA, 19 nt, Artificial Sequence
  Description of Artificial Sequence: Synthetic oligonucleotide
agcucaucgcgaucccuca

SEQ ID NO: 256609 - RNA, 19 nt, Artificial Sequence
  Description of Artificial Sequence: Synthetic oligonucleotide
acuuguuauuucugcuguu

SEQ ID NO: 256610 - RNA, 19 nt, Artificial Sequence
  Description of Artificial Sequence: Synthetic oligonucleotide
ucacugaucgcuggccccu

SEQ ID NO: 256611 - RNA, 19 nt, Artificial Sequence
  Description of Artificial Sequence: Synthetic oligonucleotide
uacugcgaucaagaguggu

SEQ ID NO: 256612 - RNA, 19 nt, Artificial Sequence
  Description of Artificial Sequence: Synthetic oligonucleotide
gaaccacuauggaauuuuc

SEQ ID NO: 256613 - RNA, 19 nt, Artificial Sequence
  Description of Artificial Sequence: Synthetic oligonucleotide
gguaacgauggggucugcg

SEQ ID NO: 256614 - RNA, 19 nt, Artificial Sequence
  Description of Artificial Sequence: Synthetic oligonucleotide
gaguuuuccaggaauuaau

SEQ ID NO: 256615 - RNA, 19 nt, Artificial Sequence
  Description of Artificial Sequence: Synthetic oligonucleotide
ggaagcuagagggcgagac

SEQ ID NO: 256616 - RNA, 19 nt, Artificial Sequence
  Description of Artificial Sequence: Synthetic oligonucleotide
agcggcaccucguccucuc

SEQ ID NO: 256617 - RNA, 19 nt, Artificial Sequence
  Description of Artificial Sequence: Synthetic oligonucleotide
auuucucggaccagaggga

SEQ ID NO: 256618 - RNA, 19 nt, Artificial Sequence
  Description of Artificial Sequence: Synthetic oligonucleotide
caucauuccauugcgaaau

SEQ ID NO: 256619 - RNA, 19 nt, Artificial Sequence
  Description of Artificial Sequence: Synthetic oligonucleotide
ucguccucucgacccggag

SEQ ID NO: 256620 - RNA, 19 nt, Artificial Sequence
  Description of Artificial Sequence: Synthetic oligonucleotide
gaccgggcuaggaaagggc

SEQ ID NO: 256621 - RNA, 19 nt, Artificial Sequence
  Description of Artificial Sequence: Synthetic oligonucleotide
cugcgaucaagagugguga

SEQ ID NO: 256622 - RNA, 19 nt, Artificial Sequence
  Description of Artificial Sequence: Synthetic oligonucleotide
aggaagacggcaggauuca

SEQ ID NO: 256623 - RNA, 19 nt, Artificial Sequence
  Description of Artificial Sequence: Synthetic oligonucleotide
ggccuauagcaccacacca

SEQ ID NO: 256624 - RNA, 19 nt, Artificial Sequence
  Description of Artificial Sequence: Synthetic oligonucleotide
caggcccugaggaaaguca

SEQ ID NO: 256625 - RNA, 19 nt, Artificial Sequence
  Description of Artificial Sequence: Synthetic oligonucleotide
ccgaaaacugucaauagcu

SEQ ID NO: 256626 - RNA, 19 nt, Artificial Sequence
  Description of Artificial Sequence: Synthetic oligonucleotide
agggaagcuagagggcgag

SEQ ID NO: 256627 - RNA, 19 nt, Artificial Sequence
  Description of Artificial Sequence: Synthetic oligonucleotide
ggauuccugauauaaugcu

SEQ ID NO: 256628 - RNA, 19 nt, Artificial Sequence
  Description of Artificial Sequence: Synthetic oligonucleotide
uagagggcgagacccucua

SEQ ID NO: 256629 - RNA, 19 nt, Artificial Sequence
  Description of Artificial Sequence: Synthetic oligonucleotide
auguuauuucucggaccag

SEQ ID NO: 256630 - RNA, 19 nt, Artificial Sequence
  Description of Artificial Sequence: Synthetic oligonucleotide
aaacgacaccagucugcau

SEQ ID NO: 256631 - RNA, 19 nt, Artificial Sequence
  Description of Artificial Sequence: Synthetic oligonucleotide
caacacuaguaaccugcuc

SEQ ID NO: 256632 - RNA, 19 nt, Artificial Sequence
  Description of Artificial Sequence: Synthetic oligonucleotide
gaaacgcauacagcacaca

SEQ ID NO: 256633 - RNA, 19 nt, Artificial Sequence
  Description of Artificial Sequence: Synthetic oligonucleotide
uuccugauuucaggguuaa

SEQ ID NO: 256634 - RNA, 19 nt, Artificial Sequence
  Description of Artificial Sequence: Synthetic oligonucleotide
accaggccggauucucuug

SEQ ID NO: 256635 - RNA, 19 nt, Artificial Sequence
  Description of Artificial Sequence: Synthetic oligonucleotide
gagcgcuuucacugaucgc

SEQ ID NO: 256636 - RNA, 19 nt, Artificial Sequence
  Description of Artificial Sequence: Synthetic oligonucleotide
gaagaaccacuauggaauu

SEQ ID NO: 256637 - RNA, 19 nt, Artificial Sequence
  Description of Artificial Sequence: Synthetic oligonucleotide
aggcuguauuaaaugacaa

SEQ ID NO: 256638 - RNA, 19 nt, Artificial Sequence
  Description of Artificial Sequence: Synthetic oligonucleotide
gcuccagcggcgaacaccc

SEQ ID NO: 256639 - RNA, 19 nt, Artificial Sequence
  Description of Artificial Sequence: Synthetic oligonucleotide
cuguaauuaucugaauccu

SEQ ID NO: 256640 - RNA, 19 nt, Artificial Sequence
  Description of Artificial Sequence: Synthetic oligonucleotide
auugccgggcuacuucauu

SEQ ID NO: 256641 - RNA, 19 nt, Artificial Sequence
  Description of Artificial Sequence: Synthetic oligonucleotide
cugcagacaugggaaauca

SEQ ID NO: 256642 - RNA, 19 nt, Artificial Sequence
  Description of Artificial Sequence: Synthetic oligonucleotide
cugcggcggggucaggagg

SEQ ID NO: 256643 - RNA, 19 nt, Artificial Sequence
  Description of Artificial Sequence: Synthetic oligonucleotide
aucauuccauugcgaaaua

SEQ ID NO: 256644 - RNA, 19 nt, Artificial Sequence
  Description of Artificial Sequence: Synthetic oligonucleotide
ugcgagcgcuuucacugau

SEQ ID NO: 256645 - RNA, 19 nt, Artificial Sequence
  Description of Artificial Sequence: Synthetic oligonucleotide
caaugauaugucucuuacu

SEQ ID NO: 256646 - RNA, 19 nt, Artificial Sequence
  Description of Artificial Sequence: Synthetic oligonucleotide
caaugcccaaccaaucagu

SEQ ID NO: 256647 - RNA, 19 nt, Artificial Sequence
  Description of Artificial Sequence: Synthetic oligonucleotide
ccuuuacagugguagugug

SEQ ID NO: 256648 - RNA, 19 nt, Artificial Sequence
  Description of Artificial Sequence: Synthetic oligonucleotide
aaguuaccagcagcagcaa

SEQ ID NO: 256649 - RNA, 19 nt, Artificial Sequence
  Description of Artificial Sequence: Synthetic oligonucleotide
acggcaggauucaugguaa

SEQ ID NO: 256650 - RNA, 19 nt, Artificial Sequence
  Description of Artificial Sequence: Synthetic oligonucleotide
accgggcuaggaaagggcu

SEQ ID NO: 256651 - RNA, 19 nt, Artificial Sequence
  Description of Artificial Sequence: Synthetic oligonucleotide
uguagucugcgagcgcuuu

SEQ ID NO: 256652 - RNA, 19 nt, Artificial Sequence
  Description of Artificial Sequence: Synthetic oligonucleotide
cuugcuacauccuggucuu

SEQ ID NO: 256653 - RNA, 19 nt, Artificial Sequence
  Description of Artificial Sequence: Synthetic oligonucleotide
ccauugcgaaauaauuuga

SEQ ID NO: 256654 - RNA, 19 nt, Artificial Sequence
  Description of Artificial Sequence: Synthetic oligonucleotide
guagucugcgagcgcuuuc

SEQ ID NO: 256655 - RNA, 19 nt, Artificial Sequence
  Description of Artificial Sequence: Synthetic oligonucleotide
cuuccgcuugcauuauaaa

SEQ ID NO: 256656 - RNA, 19 nt, Artificial Sequence
  Description of Artificial Sequence: Synthetic oligonucleotide
gugaguuaauggcauguuu

SEQ ID NO: 256657 - RNA, 19 nt, Artificial Sequence
  Description of Artificial Sequence: Synthetic oligonucleotide
ggaccgggcuaggaaaggg

SEQ ID NO: 256658 - RNA, 19 nt, Artificial Sequence
  Description of Artificial Sequence: Synthetic oligonucleotide
cugauauaaugcugagggu

SEQ ID NO: 256659 - RNA, 19 nt, Artificial Sequence
  Description of Artificial Sequence: Synthetic oligonucleotide
acacguacauaugccgaaa

SEQ ID NO: 256660 - RNA, 19 nt, Artificial Sequence
  Description of Artificial Sequence: Synthetic oligonucleotide
cacguacauaugccgaaaa

SEQ ID NO: 256661 - RNA, 19 nt, Artificial Sequence
  Description of Artificial Sequence: Synthetic oligonucleotide
caucgcgaucccucaauaa

SEQ ID NO: 256662 - RNA, 19 nt, Artificial Sequence
  Description of Artificial Sequence: Synthetic oligonucleotide
cacaaucaacucuggcaaa

SEQ ID NO: 256663 - RNA, 19 nt, Artificial Sequence
  Description of Artificial Sequence: Synthetic oligonucleotide
aauugccgggcuacuucau

SEQ ID NO: 256664 - RNA, 19 nt, Artificial Sequence
  Description of Artificial Sequence: Synthetic oligonucleotide
gguuuacuauuuccaccca

SEQ ID NO: 256665 - RNA, 19 nt, Artificial Sequence
  Description of Artificial Sequence: Synthetic oligonucleotide
ccuauacucgcugggcgcc

SEQ ID NO: 256666 - RNA, 19 nt, Artificial Sequence
  Description of Artificial Sequence: Synthetic oligonucleotide
acugaucgcuggccccugu

SEQ ID NO: 256667 - RNA, 19 nt, Artificial Sequence
  Description of Artificial Sequence: Synthetic oligonucleotide
ggugguuuguagauuaaau

SEQ ID NO: 256668 - RNA, 19 nt, Artificial Sequence
  Description of Artificial Sequence: Synthetic oligonucleotide
gcggcgaacacccgggaca

SEQ ID NO: 256669 - RNA, 19 nt, Artificial Sequence
  Description of Artificial Sequence: Synthetic oligonucleotide
guaucucuacuuuccugau

SEQ ID NO: 256670 - RNA, 19 nt, Artificial Sequence
  Description of Artificial Sequence: Synthetic oligonucleotide
ggcaccucguccucucgac

SEQ ID NO: 256671 - RNA, 19 nt, Artificial Sequence
  Description of Artificial Sequence: Synthetic oligonucleotide
caggauucaugguaacgau

SEQ ID NO: 256672 - RNA, 19 nt, Artificial Sequence
  Description of Artificial Sequence: Synthetic oligonucleotide
gguuacuuuucuguugccu

SEQ ID NO: 256673 - RNA, 19 nt, Artificial Sequence
  Description of Artificial Sequence: Synthetic oligonucleotide
auggcacaugucaaccuuu

SEQ ID NO: 256674 - RNA, 19 nt, Artificial Sequence
  Description of Artificial Sequence: Synthetic oligonucleotide
ccagaaugcaggucaaaua

SEQ ID NO: 256675 - RNA, 19 nt, Artificial Sequence
  Description of Artificial Sequence: Synthetic oligonucleotide
aacgcccuggugguuugua

SEQ ID NO: 256676 - RNA, 19 nt, Artificial Sequence
  Description of Artificial Sequence: Synthetic oligonucleotide
agagggcgagacccucuaa

SEQ ID NO: 256677 - RNA, 19 nt, Artificial Sequence
  Description of Artificial Sequence: Synthetic oligonucleotide
cuguaucaguugggucagg

SEQ ID NO: 256678 - RNA, 19 nt, Artificial Sequence
  Description of Artificial Sequence: Synthetic oligonucleotide
uacugaggccuggcaggga

SEQ ID NO: 256679 - RNA, 19 nt, Artificial Sequence
  Description of Artificial Sequence: Synthetic oligonucleotide
gggcuguaucaguuggguc

SEQ ID NO: 256680 - RNA, 19 nt, Artificial Sequence
  Description of Artificial Sequence: Synthetic oligonucleotide
agcuagagggcgagacccu

SEQ ID NO: 256681 - RNA, 19 nt, Artificial Sequence
  Description of Artificial Sequence: Synthetic oligonucleotide
ccaccuuccgcuugcauua

SEQ ID NO: 256682 - RNA, 19 nt, Artificial Sequence
  Description of Artificial Sequence: Synthetic oligonucleotide
cugcgagcgcuuucacuga

SEQ ID NO: 256683 - RNA, 19 nt, Artificial Sequence
  Description of Artificial Sequence: Synthetic oligonucleotide
cguacauaugccgaaaacu

SEQ ID NO: 256684 - RNA, 19 nt, Artificial Sequence
  Description of Artificial Sequence: Synthetic oligonucleotide
ggcgagacccucuaacaau

SEQ ID NO: 256685 - RNA, 19 nt, Artificial Sequence
  Description of Artificial Sequence: Synthetic oligonucleotide
gcaccucguccucucgacc

SEQ ID NO: 256686 - RNA, 19 nt, Artificial Sequence
  Description of Artificial Sequence: Synthetic oligonucleotide
cuccagcggcgaacacccg

SEQ ID NO: 256687 - RNA, 19 nt, Artificial Sequence
  Description of Artificial Sequence: Synthetic oligonucleotide
gcgaaauaauuugaggguu

SEQ ID NO: 256688 - RNA, 19 nt, Artificial Sequence
  Description of Artificial Sequence: Synthetic oligonucleotide
cucaucgcgaucccucaau

SEQ ID NO: 256689 - RNA, 19 nt, Artificial Sequence
  Description of Artificial Sequence: Synthetic oligonucleotide
gcgaucccucaauaaagua

SEQ ID NO: 256690 - RNA, 19 nt, Artificial Sequence
  Description of Artificial Sequence: Synthetic oligonucleotide
gguuggguauuugcuuauc

SEQ ID NO: 256691 - RNA, 19 nt, Artificial Sequence
  Description of Artificial Sequence: Synthetic oligonucleotide
ggacugacuuuuaucccaa

SEQ ID NO: 256692 - RNA, 19 nt, Artificial Sequence
  Description of Artificial Sequence: Synthetic oligonucleotide
ggcggggucaggagguggc

SEQ ID NO: 256693 - RNA, 19 nt, Artificial Sequence
  Description of Artificial Sequence: Synthetic oligonucleotide
ugguaacgauggggucugc

SEQ ID NO: 256694 - RNA, 19 nt, Artificial Sequence
  Description of Artificial Sequence: Synthetic oligonucleotide
cuauacucgcugggcgcca

SEQ ID NO: 256695 - RNA, 19 nt, Artificial Sequence
  Description of Artificial Sequence: Synthetic oligonucleotide
ccaaggauaaaugacccuu

SEQ ID NO: 256696 - RNA, 19 nt, Artificial Sequence
  Description of Artificial Sequence: Synthetic oligonucleotide
ccaauagaauuggucaugu

SEQ ID NO: 256697 - RNA, 19 nt, Artificial Sequence
  Description of Artificial Sequence: Synthetic oligonucleotide
gcgcuuucacugaucgcug

SEQ ID NO: 256698 - RNA, 19 nt, Artificial Sequence
  Description of Artificial Sequence: Synthetic oligonucleotide
ggucggguaaagacaggaa

SEQ ID NO: 256699 - RNA, 19 nt, Artificial Sequence
  Description of Artificial Sequence: Synthetic oligonucleotide
gggcuaggaaagggcuggg

SEQ ID NO: 256700 - RNA, 19 nt, Artificial Sequence
  Description of Artificial Sequence: Synthetic oligonucleotide
cgaucccucaauaaaguau

SEQ ID NO: 256701 - RNA, 19 nt, Artificial Sequence
  Description of Artificial Sequence: Synthetic oligonucleotide
auguagucugcgagcgcuu

SEQ ID NO: 256702 - RNA, 19 nt, Artificial Sequence
  Description of Artificial Sequence: Synthetic oligonucleotide
cacugaucgcuggccccug

SEQ ID NO: 256703 - RNA, 19 nt, Artificial Sequence
  Description of Artificial Sequence: Synthetic oligonucleotide
gcgaacacccgggacaacu

SEQ ID NO: 256704 - RNA, 19 nt, Artificial Sequence
  Description of Artificial Sequence: Synthetic oligonucleotide
cugaucgcuggccccugua

SEQ ID NO: 256705 - RNA, 19 nt, Artificial Sequence
  Description of Artificial Sequence: Synthetic oligonucleotide
gcgaucaagaguggugacu

SEQ ID NO: 256706 - RNA, 19 nt, Artificial Sequence
  Description of Artificial Sequence: Synthetic oligonucleotide
cacugggauuccugauaua

SEQ ID NO: 256707 - RNA, 19 nt, Artificial Sequence
  Description of Artificial Sequence: Synthetic oligonucleotide
gggcuauaucagagugcug

SEQ ID NO: 256708 - RNA, 19 nt, Artificial Sequence
  Description of Artificial Sequence: Synthetic oligonucleotide
ccucguccucucgacccgg

SEQ ID NO: 256709 - RNA, 19 nt, Artificial Sequence
  Description of Artificial Sequence: Synthetic oligonucleotide
gcucaucgcgaucccucaa

SEQ ID NO: 256710 - RNA, 19 nt, Artificial Sequence
  Description of Artificial Sequence: Synthetic oligonucleotide
cagaacgcccuggugguuu

SEQ ID NO: 256711 - RNA, 19 nt, Artificial Sequence
  Description of Artificial Sequence: Synthetic oligonucleotide
gcgagacccucuaacaauu

SEQ ID NO: 256712 - RNA, 19 nt, Artificial Sequence
  Description of Artificial Sequence: Synthetic oligonucleotide
cgcgaucccucaauaaagu

SEQ ID NO: 256713 - RNA, 19 nt, Artificial Sequence
  Description of Artificial Sequence: Synthetic oligonucleotide
gggaagcuagagggcgaga

SEQ ID NO: 256714 - RNA, 19 nt, Artificial Sequence
  Description of Artificial Sequence: Synthetic oligonucleotide
gcgagcgcuuucacugauc

SEQ ID NO: 256715 - RNA, 19 nt, Artificial Sequence
  Description of Artificial Sequence: Synthetic oligonucleotide
cgaucaagaguggugacuu

SEQ ID NO: 256716 - RNA, 19 nt, Artificial Sequence
  Description of Artificial Sequence: Synthetic oligonucleotide
ccgcucccaagucucuaga

SEQ ID NO: 256717 - RNA, 19 nt, Artificial Sequence
  Description of Artificial Sequence: Synthetic oligonucleotide
cucggaccagagggacaca

SEQ ID NO: 256718 - RNA, 19 nt, Artificial Sequence
  Description of Artificial Sequence: Synthetic oligonucleotide
gaacgcccuggugguuugu

SEQ ID NO: 256719 - RNA, 19 nt, Artificial Sequence
  Description of Artificial Sequence: Synthetic oligonucleotide
ggcgaacacccgggacaac

SEQ ID NO: 256720 - RNA, 19 nt, Artificial Sequence
  Description of Artificial Sequence: Synthetic oligonucleotide
gcggggucaggagguggca

SEQ ID NO: 256721 - RNA, 19 nt, Artificial Sequence
  Description of Artificial Sequence: Synthetic oligonucleotide
cggcaccucguccucucga

SEQ ID NO: 256722 - RNA, 19 nt, Artificial Sequence
  Description of Artificial Sequence: Synthetic oligonucleotide
caccuuccgcuugcauuau

SEQ ID NO: 256723 - RNA, 19 nt, Artificial Sequence
  Description of Artificial Sequence: Synthetic oligonucleotide
cggcgaacacccgggacaa

SEQ ID NO: 256724 - RNA, 19 nt, Artificial Sequence
  Description of Artificial Sequence: Synthetic oligonucleotide
cgacaccagucugcauaaa

SEQ ID NO: 256725 - RNA, 19 nt, Artificial Sequence
  Description of Artificial Sequence: Synthetic oligonucleotide
ccuguaccucugggcuaua

SEQ ID NO: 256726 - RNA, 19 nt, Artificial Sequence
  Description of Artificial Sequence: Synthetic oligonucleotide
auuagucagaaauagaccc

SEQ ID NO: 256727 - RNA, 19 nt, Artificial Sequence
  Description of Artificial Sequence: Synthetic oligonucleotide
acuagugugagcucgaggc

SEQ ID NO: 256728 - RNA, 19 nt, Artificial Sequence
  Description of Artificial Sequence: Synthetic oligonucleotide
uaaacuacaaauguggcag

SEQ ID NO: 256729 - RNA, 19 nt, Artificial Sequence
  Description of Artificial Sequence: Synthetic oligonucleotide
aauguuaugucuaggggcc

SEQ ID NO: 256730 - RNA, 19 nt, Artificial Sequence
  Description of Artificial Sequence: Synthetic oligonucleotide
ucuuaugauagucaaagga

SEQ ID NO: 256731 - RNA, 19 nt, Artificial Sequence
  Description of Artificial Sequence: Synthetic oligonucleotide
agauacuuuaauuuugcgg

SEQ ID NO: 256732 - RNA, 19 nt, Artificial Sequence
  Description of Artificial Sequence: Synthetic oligonucleotide
gacacuaccaugcagaaac

SEQ ID NO: 256733 - RNA, 19 nt, Artificial Sequence
  Description of Artificial Sequence: Synthetic oligonucleotide
auauauacacauuagggcu

SEQ ID NO: 256734 - RNA, 19 nt, Artificial Sequence
  Description of Artificial Sequence: Synthetic oligonucleotide
uguaauauaauuugaguua

SEQ ID NO: 256735 - RNA, 19 nt, Artificial Sequence
  Description of Artificial Sequence: Synthetic oligonucleotide
aaaugaugcauuuaaguua

SEQ ID NO: 256736 - RNA, 19 nt, Artificial Sequence
  Description of Artificial Sequence: Synthetic oligonucleotide
aguauaggaacauaccaag

SEQ ID NO: 256737 - RNA, 19 nt, Artificial Sequence
  Description of Artificial Sequence: Synthetic oligonucleotide
guauauuagcaucaguggg

SEQ ID NO: 256738 - RNA, 19 nt, Artificial Sequence
  Description of Artificial Sequence: Synthetic oligonucleotide
ucuaccagagaauuuguag

SEQ ID NO: 256739 - RNA, 19 nt, Artificial Sequence
  Description of Artificial Sequence: Synthetic oligonucleotide
uauggaacgggacagacaa

SEQ ID NO: 256740 - RNA, 19 nt, Artificial Sequence
  Description of Artificial Sequence: Synthetic oligonucleotide
auuauaagaguuuuggcaa

SEQ ID NO: 256741 - RNA, 19 nt, Artificial Sequence
  Description of Artificial Sequence: Synthetic oligonucleotide
agucaaaggauuuucagga

SEQ ID NO: 256742 - RNA, 19 nt, Artificial Sequence
  Description of Artificial Sequence: Synthetic oligonucleotide
aaagacuagugugagcucg

SEQ ID NO: 256743 - RNA, 19 nt, Artificial Sequence
  Description of Artificial Sequence: Synthetic oligonucleotide
aaaagaauguaggagggug

SEQ ID NO: 256744 - RNA, 19 nt, Artificial Sequence
  Description of Artificial Sequence: Synthetic oligonucleotide
aaaaugggaacucucagua

SEQ ID NO: 256745 - RNA, 19 nt, Artificial Sequence
  Description of Artificial Sequence: Synthetic oligonucleotide
uacaagaagcaacacguag

SEQ ID NO: 256746 - RNA, 19 nt, Artificial Sequence
  Description of Artificial Sequence: Synthetic oligonucleotide
uaucuaaagauaauaucac

SEQ ID NO: 256747 - RNA, 19 nt, Artificial Sequence
  Description of Artificial Sequence: Synthetic oligonucleotide
aauuccgauguaucuaaag

SEQ ID NO: 256748 - RNA, 19 nt, Artificial Sequence
  Description of Artificial Sequence: Synthetic oligonucleotide
gaacaagacagcaauaccc

SEQ ID NO: 256749 - RNA, 19 nt, Artificial Sequence
  Description of Artificial Sequence: Synthetic oligonucleotide
uucacuuaugcauauuccc

SEQ ID NO: 256750 - RNA, 19 nt, Artificial Sequence
  Description of Artificial Sequence: Synthetic oligonucleotide
caccuuacaucuuacaccg

SEQ ID NO: 256751 - RNA, 19 nt, Artificial Sequence
  Description of Artificial Sequence: Synthetic oligonucleotide
uaaucaaauugucaucccc

SEQ ID NO: 256752 - RNA, 19 nt, Artificial Sequence
  Description of Artificial Sequence: Synthetic oligonucleotide
uuaaacuacaaauguggca

SEQ ID NO: 256753 - RNA, 19 nt, Artificial Sequence
  Description of Artificial Sequence: Synthetic oligonucleotide
uauguugucccuuaagggu

SEQ ID NO: 256754 - RNA, 19 nt, Artificial Sequence
  Description of Artificial Sequence: Synthetic oligonucleotide
auaaucaaauugucauccc

SEQ ID NO: 256755 - RNA, 19 nt, Artificial Sequence
  Description of Artificial Sequence: Synthetic oligonucleotide
auuaaacuacaaauguggc

SEQ ID NO: 256756 - RNA, 19 nt, Artificial Sequence
  Description of Artificial Sequence: Synthetic oligonucleotide
gugaguugaucauuuaagg

SEQ ID NO: 256757 - RNA, 19 nt, Artificial Sequence
  Description of Artificial Sequence: Synthetic oligonucleotide
guauguugucccuuaaggg

SEQ ID NO: 256758 - RNA, 19 nt, Artificial Sequence
  Description of Artificial Sequence: Synthetic oligonucleotide
gauaagacauuccaucuuc

SEQ ID NO: 256759 - RNA, 19 nt, Artificial Sequence
  Description of Artificial Sequence: Synthetic oligonucleotide
uguuauagagacacgguau

SEQ ID NO: 256760 - RNA, 19 nt, Artificial Sequence
  Description of Artificial Sequence: Synthetic oligonucleotide
aauuuugcgguuauugaug

SEQ ID NO: 256761 - RNA, 19 nt, Artificial Sequence
  Description of Artificial Sequence: Synthetic oligonucleotide
ugaacuaaaugugcaagag

SEQ ID NO: 256762 - RNA, 19 nt, Artificial Sequence
  Description of Artificial Sequence: Synthetic oligonucleotide
ucucaguaugcuaagaaua

SEQ ID NO: 256763 - RNA, 19 nt, Artificial Sequence
  Description of Artificial Sequence: Synthetic oligonucleotide
aguuauuaacacgacgacg

SEQ ID NO: 256764 - RNA, 19 nt, Artificial Sequence
  Description of Artificial Sequence: Synthetic oligonucleotide
aaugaugcauuuaaguuau

SEQ ID NO: 256765 - RNA, 19 nt, Artificial Sequence
  Description of Artificial Sequence: Synthetic oligonucleotide
aacauaccaagaacaagac

SEQ ID NO: 256766 - RNA, 19 nt, Artificial Sequence
  Description of Artificial Sequence: Synthetic oligonucleotide
ugaguugaucauuuaaggu

SEQ ID NO: 256767 - RNA, 19 nt, Artificial Sequence
  Description of Artificial Sequence: Synthetic oligonucleotide
aaagaauguaggagggugg

SEQ ID NO: 256768 - RNA, 19 nt, Artificial Sequence
  Description of Artificial Sequence: Synthetic oligonucleotide
agugcacuugauuagucag

SEQ ID NO: 256769 - RNA, 19 nt, Artificial Sequence
  Description of Artificial Sequence: Synthetic oligonucleotide
aaacuuacuucagaguaug

SEQ ID NO: 256770 - RNA, 19 nt, Artificial Sequence
  Description of Artificial Sequence: Synthetic oligonucleotide
uuaugauagucaaaggauu

SEQ ID NO: 256771 - RNA, 19 nt, Artificial Sequence
  Description of Artificial Sequence: Synthetic oligonucleotide
uuucaggauaguguaagag

SEQ ID NO: 256772 - RNA, 19 nt, Artificial Sequence
  Description of Artificial Sequence: Synthetic oligonucleotide
agagaagauaaugaaaaga

SEQ ID NO: 256773 - RNA, 19 nt, Artificial Sequence
  Description of Artificial Sequence: Synthetic oligonucleotide
ucacuuaugcauauucccu

SEQ ID NO: 256774 - RNA, 19 nt, Artificial Sequence
  Description of Artificial Sequence: Synthetic oligonucleotide
uaauuuugcgguuauugau

SEQ ID NO: 256775 - RNA, 19 nt, Artificial Sequence
  Description of Artificial Sequence: Synthetic oligonucleotide
ugaugaugcgauacggacc

SEQ ID NO: 256776 - RNA, 19 nt, Artificial Sequence
  Description of Artificial Sequence: Synthetic oligonucleotide
aaucaaauugucaucccca

SEQ ID NO: 256777 - RNA, 19 nt, Artificial Sequence
  Description of Artificial Sequence: Synthetic oligonucleotide
aguagugcauaggaaauuc

SEQ ID NO: 256778 - RNA, 19 nt, Artificial Sequence
  Description of Artificial Sequence: Synthetic oligonucleotide
uccacucuaaacaaagaau

SEQ ID NO: 256779 - RNA, 19 nt, Artificial Sequence
  Description of Artificial Sequence: Synthetic oligonucleotide
aaugcgugcggagcggugc

SEQ ID NO: 256780 - RNA, 19 nt, Artificial Sequence
  Description of Artificial Sequence: Synthetic oligonucleotide
auaaucauuagagaguuua

SEQ ID NO: 256781 - RNA, 19 nt, Artificial Sequence
  Description of Artificial Sequence: Synthetic oligonucleotide
ugagugggaaagcaaaauc

SEQ ID NO: 256782 - RNA, 19 nt, Artificial Sequence
  Description of Artificial Sequence: Synthetic oligonucleotide
auuaacacgacgacgauau

SEQ ID NO: 256783 - RNA, 19 nt, Artificial Sequence
  Description of Artificial Sequence: Synthetic oligonucleotide
uucaaggguuuagugaggg

SEQ ID NO: 256784 - RNA, 19 nt, Artificial Sequence
  Description of Artificial Sequence: Synthetic oligonucleotide
aaaauccuuuuggcuaccc

SEQ ID NO: 256785 - RNA, 19 nt, Artificial Sequence
  Description of Artificial Sequence: Synthetic oligonucleotide
uuacaccgaaagcuuacag

SEQ ID NO: 256786 - RNA, 19 nt, Artificial Sequence
  Description of Artificial Sequence: Synthetic oligonucleotide
ugucuuuguggacacuacc

SEQ ID NO: 256787 - RNA, 19 nt, Artificial Sequence
  Description of Artificial Sequence: Synthetic oligonucleotide
uuauaugcuuguagauugc

SEQ ID NO: 256788 - RNA, 19 nt, Artificial Sequence
  Description of Artificial Sequence: Synthetic oligonucleotide
cugaugaugcgauacggac

SEQ ID NO: 256789 - RNA, 19 nt, Artificial Sequence
  Description of Artificial Sequence: Synthetic oligonucleotide
aaaccauuugggugaguug

SEQ ID NO: 256790 - RNA, 19 nt, Artificial Sequence
  Description of Artificial Sequence: Synthetic oligonucleotide
ggugauaagacauuccauc

SEQ ID NO: 256791 - RNA, 19 nt, Artificial Sequence
  Description of Artificial Sequence: Synthetic oligonucleotide
uccgauguaucuaaagaua

SEQ ID NO: 256792 - RNA, 19 nt, Artificial Sequence
  Description of Artificial Sequence: Synthetic oligonucleotide
caaccuuauaugcuuguag

SEQ ID NO: 256793 - RNA, 19 nt, Artificial Sequence
  Description of Artificial Sequence: Synthetic oligonucleotide
aucauuuaagguaggucac

SEQ ID NO: 256794 - RNA, 19 nt, Artificial Sequence
  Description of Artificial Sequence: Synthetic oligonucleotide
aguauggaacgggacagac

SEQ ID NO: 256795 - RNA, 19 nt, Artificial Sequence
  Description of Artificial Sequence: Synthetic oligonucleotide
gcgucaaugaccuaccugc

SEQ ID NO: 256796 - RNA, 19 nt, Artificial Sequence
  Description of Artificial Sequence: Synthetic oligonucleotide
cugacaguuugauaucaag

SEQ ID NO: 256797 - RNA, 19 nt, Artificial Sequence
  Description of Artificial Sequence: Synthetic oligonucleotide
aguucgcucauguacuuca

SEQ ID NO: 256798 - RNA, 19 nt, Artificial Sequence
  Description of Artificial Sequence: Synthetic oligonucleotide
gaugaugcgauacggaccu

SEQ ID NO: 256799 - RNA, 19 nt, Artificial Sequence
  Description of Artificial Sequence: Synthetic oligonucleotide
auacagguggaccaacuga

SEQ ID NO: 256800 - RNA, 19 nt, Artificial Sequence
  Description of Artificial Sequence: Synthetic oligonucleotide
ucaaauugucauccccaug

SEQ ID NO: 256801 - RNA, 19 nt, Artificial Sequence
  Description of Artificial Sequence: Synthetic oligonucleotide
gaaauggaauggcugagaa

SEQ ID NO: 256802 - RNA, 19 nt, Artificial Sequence
  Description of Artificial Sequence: Synthetic oligonucleotide
acgacgacgauauaucuuu

SEQ ID NO: 256803 - RNA, 19 nt, Artificial Sequence
  Description of Artificial Sequence: Synthetic oligonucleotide
cuuaugauagucaaaggau

SEQ ID NO: 256804 - RNA, 19 nt, Artificial Sequence
  Description of Artificial Sequence: Synthetic oligonucleotide
aaacuacaaauguggcagu

SEQ ID NO: 256805 - RNA, 19 nt, Artificial Sequence
  Description of Artificial Sequence: Synthetic oligonucleotide
uccgagcuacucaaaauaa

SEQ ID NO: 256806 - RNA, 19 nt, Artificial Sequence
  Description of Artificial Sequence: Synthetic oligonucleotide
ggugaguugaucauuuaag

SEQ ID NO: 256807 - RNA, 19 nt, Artificial Sequence
  Description of Artificial Sequence: Synthetic oligonucleotide
ugcaacugacaacacucca

SEQ ID NO: 256808 - RNA, 19 nt, Artificial Sequence
  Description of Artificial Sequence: Synthetic oligonucleotide
ggaccuugaccuaacaugg

SEQ ID NO: 256809 - RNA, 19 nt, Artificial Sequence
  Description of Artificial Sequence: Synthetic oligonucleotide
guguaauauaauuugaguu

SEQ ID NO: 256810 - RNA, 19 nt, Artificial Sequence
  Description of Artificial Sequence: Synthetic oligonucleotide
cauaugaacagggguggcg

SEQ ID NO: 256811 - RNA, 19 nt, Artificial Sequence
  Description of Artificial Sequence: Synthetic oligonucleotide
gacuagugugagcucgagg

SEQ ID NO: 256812 - RNA, 19 nt, Artificial Sequence
  Description of Artificial Sequence: Synthetic oligonucleotide
uagugcacuugauuaguca

SEQ ID NO: 256813 - RNA, 19 nt, Artificial Sequence
  Description of Artificial Sequence: Synthetic oligonucleotide
ucuaggggccauaccuggg

SEQ ID NO: 256814 - RNA, 19 nt, Artificial Sequence
  Description of Artificial Sequence: Synthetic oligonucleotide
uagcuauaguagugcauag

SEQ ID NO: 256815 - RNA, 19 nt, Artificial Sequence
  Description of Artificial Sequence: Synthetic oligonucleotide
uugugaagucaauuggcaa

SEQ ID NO: 256816 - RNA, 19 nt, Artificial Sequence
  Description of Artificial Sequence: Synthetic oligonucleotide
aauagaccccuuugacaca

SEQ ID NO: 256817 - RNA, 19 nt, Artificial Sequence
  Description of Artificial Sequence: Synthetic oligonucleotide
ugaugcauuuaaguuauua

SEQ ID NO: 256818 - RNA, 19 nt, Artificial Sequence
  Description of Artificial Sequence: Synthetic oligonucleotide
ucaaggguuuagugagggg

SEQ ID NO: 256819 - RNA, 19 nt, Artificial Sequence
  Description of Artificial Sequence: Synthetic oligonucleotide
auugugaagucaauuggca

SEQ ID NO: 256820 - RNA, 19 nt, Artificial Sequence
  Description of Artificial Sequence: Synthetic oligonucleotide
aaacaaccuuauaugcuug

SEQ ID NO: 256821 - RNA, 19 nt, Artificial Sequence
  Description of Artificial Sequence: Synthetic oligonucleotide
uaugucuaggggccauacc

SEQ ID NO: 256822 - RNA, 19 nt, Artificial Sequence
  Description of Artificial Sequence: Synthetic oligonucleotide
acaacucaacaguaggaaa

SEQ ID NO: 256823 - RNA, 19 nt, Artificial Sequence
  Description of Artificial Sequence: Synthetic oligonucleotide
uuccuagcuauaguagugc

SEQ ID NO: 256824 - RNA, 19 nt, Artificial Sequence
  Description of Artificial Sequence: Synthetic oligonucleotide
guaggucacugaaacagag

SEQ ID NO: 256825 - RNA, 19 nt, Artificial Sequence
  Description of Artificial Sequence: Synthetic oligonucleotide
uuagugcacuugauuaguc

SEQ ID NO: 256826 - RNA, 19 nt, Artificial Sequence
  Description of Artificial Sequence: Synthetic oligonucleotide
uaaauaucacacagccaua

SEQ ID NO: 256827 - RNA, 19 nt, Artificial Sequence
  Description of Artificial Sequence: Synthetic oligonucleotide
cacacugaugaugcgauac

SEQ ID NO: 256828 - RNA, 19 nt, Artificial Sequence
  Description of Artificial Sequence: Synthetic oligonucleotide
aaacuugcuacagcagagu

SEQ ID NO: 256829 - RNA, 19 nt, Artificial Sequence
  Description of Artificial Sequence: Synthetic oligonucleotide
cauuuaagguaggucacug

SEQ ID NO: 256830 - RNA, 19 nt, Artificial Sequence
  Description of Artificial Sequence: Synthetic oligonucleotide
ugaccuaccugcaccagua

SEQ ID NO: 256831 - RNA, 19 nt, Artificial Sequence
  Description of Artificial Sequence: Synthetic oligonucleotide
cacugaugaugcgauacgg

SEQ ID NO: 256832 - RNA, 19 nt, Artificial Sequence
  Description of Artificial Sequence: Synthetic oligonucleotide
uccuagcuauaguagugca

SEQ ID NO: 256833 - RNA, 19 nt, Artificial Sequence
  Description of Artificial Sequence: Synthetic oligonucleotide
gcuaagaauauucugauuu

SEQ ID NO: 256834 - RNA, 19 nt, Artificial Sequence
  Description of Artificial Sequence: Synthetic oligonucleotide
uugaucauuuaagguaggu

SEQ ID NO: 256835 - RNA, 19 nt, Artificial Sequence
  Description of Artificial Sequence: Synthetic oligonucleotide
aagggucuuaugauaguca

SEQ ID NO: 256836 - RNA, 19 nt, Artificial Sequence
  Description of Artificial Sequence: Synthetic oligonucleotide
auaugaacagggguggcgu

SEQ ID NO: 256837 - RNA, 19 nt, Artificial Sequence
  Description of Artificial Sequence: Synthetic oligonucleotide
caguauaggaacauaccaa

SEQ ID NO: 256838 - RNA, 19 nt, Artificial Sequence
  Description of Artificial Sequence: Synthetic oligonucleotide
ggugggugcauaugaacag

SEQ ID NO: 256839 - RNA, 19 nt, Artificial Sequence
  Description of Artificial Sequence: Synthetic oligonucleotide
uugcgguuauugaugaauu

SEQ ID NO: 256840 - RNA, 19 nt, Artificial Sequence
  Description of Artificial Sequence: Synthetic oligonucleotide
aauacccauaagccacaau

SEQ ID NO: 256841 - RNA, 19 nt, Artificial Sequence
  Description of Artificial Sequence: Synthetic oligonucleotide
ugaccuaacauggggaauu

SEQ ID NO: 256842 - RNA, 19 nt, Artificial Sequence
  Description of Artificial Sequence: Synthetic oligonucleotide
auacggaccucacucaguu

SEQ ID NO: 256843 - RNA, 19 nt, Artificial Sequence
  Description of Artificial Sequence: Synthetic oligonucleotide
agcaacacguagcuuuccu

SEQ ID NO: 256844 - RNA, 19 nt, Artificial Sequence
  Description of Artificial Sequence: Synthetic oligonucleotide
cuggguacuaaugauuuca

SEQ ID NO: 256845 - RNA, 19 nt, Artificial Sequence
  Description of Artificial Sequence: Synthetic oligonucleotide
acgacgauauaucuuuguu

SEQ ID NO: 256846 - RNA, 19 nt, Artificial Sequence
  Description of Artificial Sequence: Synthetic oligonucleotide
acacgacgacgauauaucu

SEQ ID NO: 256847 - RNA, 19 nt, Artificial Sequence
  Description of Artificial Sequence: Synthetic oligonucleotide
ggacaaugcgugcggagcg

SEQ ID NO: 256848 - RNA, 19 nt, Artificial Sequence
  Description of Artificial Sequence: Synthetic oligonucleotide
aaugaccuaccugcaccag

SEQ ID NO: 256849 - RNA, 19 nt, Artificial Sequence
  Description of Artificial Sequence: Synthetic oligonucleotide
uuagugaggggugggugca

SEQ ID NO: 256850 - RNA, 19 nt, Artificial Sequence
  Description of Artificial Sequence: Synthetic oligonucleotide
guugaucauuuaagguagg

SEQ ID NO: 256851 - RNA, 19 nt, Artificial Sequence
  Description of Artificial Sequence: Synthetic oligonucleotide
cagcauuuccuagcuauag

SEQ ID NO: 256852 - RNA, 19 nt, Artificial Sequence
  Description of Artificial Sequence: Synthetic oligonucleotide
agcgugcaaagacuagugu

SEQ ID NO: 256853 - RNA, 19 nt, Artificial Sequence
  Description of Artificial Sequence: Synthetic oligonucleotide
guuuagugaggggugggug

SEQ ID NO: 256854 - RNA, 19 nt, Artificial Sequence
  Description of Artificial Sequence: Synthetic oligonucleotide
caagggucuuaugauaguc

SEQ ID NO: 256855 - RNA, 19 nt, Artificial Sequence
  Description of Artificial Sequence: Synthetic oligonucleotide
cuugaccuaacauggggaa

SEQ ID NO: 256856 - RNA, 19 nt, Artificial Sequence
  Description of Artificial Sequence: Synthetic oligonucleotide
acaagggucuuaugauagu

SEQ ID NO: 256857 - RNA, 19 nt, Artificial Sequence
  Description of Artificial Sequence: Synthetic oligonucleotide
augcgugcggagcggugcc

SEQ ID NO: 256858 - RNA, 19 nt, Artificial Sequence
  Description of Artificial Sequence: Synthetic oligonucleotide
cagcgugcaaagacuagug

SEQ ID NO: 256859 - RNA, 19 nt, Artificial Sequence
  Description of Artificial Sequence: Synthetic oligonucleotide
cuguuauagagacacggua

SEQ ID NO: 256860 - RNA, 19 nt, Artificial Sequence
  Description of Artificial Sequence: Synthetic oligonucleotide
augaccuaccugcaccagu

SEQ ID NO: 256861 - RNA, 19 nt, Artificial Sequence
  Description of Artificial Sequence: Synthetic oligonucleotide
gacaaugcgugcggagcgg

SEQ ID NO: 256862 - RNA, 19 nt, Artificial Sequence
  Description of Artificial Sequence: Synthetic oligonucleotide
uucccucccuaaaauucac

SEQ ID NO: 256863 - RNA, 19 nt, Artificial Sequence
  Description of Artificial Sequence: Synthetic oligonucleotide
uguugucccuuaaggguau

SEQ ID NO: 256864 - RNA, 19 nt, Artificial Sequence
  Description of Artificial Sequence: Synthetic oligonucleotide
gucaaugaccuaccugcac

SEQ ID NO: 256865 - RNA, 19 nt, Artificial Sequence
  Description of Artificial Sequence: Synthetic oligonucleotide
gguggaccaacugaaauca

SEQ ID NO: 256866 - RNA, 19 nt, Artificial Sequence
  Description of Artificial Sequence: Synthetic oligonucleotide
ugcgguuauugaugaauua

SEQ ID NO: 256867 - RNA, 19 nt, Artificial Sequence
  Description of Artificial Sequence: Synthetic oligonucleotide
gaagcaacacguagcuuuc

SEQ ID NO: 256868 - RNA, 19 nt, Artificial Sequence
  Description of Artificial Sequence: Synthetic oligonucleotide
aguuugauaucaaguguau

SEQ ID NO: 256869 - RNA, 19 nt, Artificial Sequence
  Description of Artificial Sequence: Synthetic oligonucleotide
gcaacugacaacacuccag

SEQ ID NO: 256870 - RNA, 19 nt, Artificial Sequence
  Description of Artificial Sequence: Synthetic oligonucleotide
uuugggugaguugaucauu

SEQ ID NO: 256871 - RNA, 19 nt, Artificial Sequence
  Description of Artificial Sequence: Synthetic oligonucleotide
agaauguaggaggguggag

SEQ ID NO: 256872 - RNA, 19 nt, Artificial Sequence
  Description of Artificial Sequence: Synthetic oligonucleotide
acugaugaugcgauacgga

SEQ ID NO: 256873 - RNA, 19 nt, Artificial Sequence
  Description of Artificial Sequence: Synthetic oligonucleotide
uaccugggcggacucuagc

SEQ ID NO: 256874 - RNA, 19 nt, Artificial Sequence
  Description of Artificial Sequence: Synthetic oligonucleotide
ucccucccuaaaauucaca

SEQ ID NO: 256875 - RNA, 19 nt, Artificial Sequence
  Description of Artificial Sequence: Synthetic oligonucleotide
accugggcggacucuagcu

SEQ ID NO: 256876 - RNA, 19 nt, Artificial Sequence
  Description of Artificial Sequence: Synthetic oligonucleotide
aagacuagugugagcucga

SEQ ID NO: 256877 - RNA, 19 nt, Artificial Sequence
  Description of Artificial Sequence: Synthetic oligonucleotide
ccuaacauggggaauugga

SEQ ID NO: 256878 - RNA, 19 nt, Artificial Sequence
  Description of Artificial Sequence: Synthetic oligonucleotide
acucuagcuggguacuaau

SEQ ID NO: 256879 - RNA, 19 nt, Artificial Sequence
  Description of Artificial Sequence: Synthetic oligonucleotide
cauggcacggacaaugcgu

SEQ ID NO: 256880 - RNA, 19 nt, Artificial Sequence
  Description of Artificial Sequence: Synthetic oligonucleotide
gauuagcauguucuugggu

SEQ ID NO: 256881 - RNA, 19 nt, Artificial Sequence
  Description of Artificial Sequence: Synthetic oligonucleotide
cuuaaggguaucagauaaa

SEQ ID NO: 256882 - RNA, 19 nt, Artificial Sequence
  Description of Artificial Sequence: Synthetic oligonucleotide
auagaccccuuugacacau

SEQ ID NO: 256883 - RNA, 19 nt, Artificial Sequence
  Description of Artificial Sequence: Synthetic oligonucleotide
augauagucaaaggauuuu

SEQ ID NO: 256884 - RNA, 19 nt, Artificial Sequence
  Description of Artificial Sequence: Synthetic oligonucleotide
cacaucugacaguucgcuc

SEQ ID NO: 256885 - RNA, 19 nt, Artificial Sequence
  Description of Artificial Sequence: Synthetic oligonucleotide
gacaguucgcucauguacu

SEQ ID NO: 256886 - RNA, 19 nt, Artificial Sequence
  Description of Artificial Sequence: Synthetic oligonucleotide
ggugcauaugaacaggggu

SEQ ID NO: 256887 - RNA, 19 nt, Artificial Sequence
  Description of Artificial Sequence: Synthetic oligonucleotide
guuauagagacacgguauu

SEQ ID NO: 256888 - RNA, 19 nt, Artificial Sequence
  Description of Artificial Sequence: Synthetic oligonucleotide
acauuagggcuuguuuuga

SEQ ID NO: 256889 - RNA, 19 nt, Artificial Sequence
  Description of Artificial Sequence: Synthetic oligonucleotide
gcaaaacugaguccgagcu

SEQ ID NO: 256890 - RNA, 19 nt, Artificial Sequence
  Description of Artificial Sequence: Synthetic oligonucleotide
ggcacggacaaugcgugcg

SEQ ID NO: 256891 - RNA, 19 nt, Artificial Sequence
  Description of Artificial Sequence: Synthetic oligonucleotide
accuaacauggggaauugg

SEQ ID NO: 256892 - RNA, 19 nt, Artificial Sequence
  Description of Artificial Sequence: Synthetic oligonucleotide
gaccuaacauggggaauug

SEQ ID NO: 256893 - RNA, 19 nt, Artificial Sequence
  Description of Artificial Sequence: Synthetic oligonucleotide
auggcacggacaaugcgug

SEQ ID NO: 256894 - RNA, 19 nt, Artificial Sequence
  Description of Artificial Sequence: Synthetic oligonucleotide
gacgacgauauaucuuugu

SEQ ID NO: 256895 - RNA, 19 nt, Artificial Sequence
  Description of Artificial Sequence: Synthetic oligonucleotide
uguuaugucuaggggccau

SEQ ID NO: 256896 - RNA, 19 nt, Artificial Sequence
  Description of Artificial Sequence: Synthetic oligonucleotide
auguugucccuuaagggua

SEQ ID NO: 256897 - RNA, 19 nt, Artificial Sequence
  Description of Artificial Sequence: Synthetic oligonucleotide
ugcucacaaaauggaacau

SEQ ID NO: 256898 - RNA, 19 nt, Artificial Sequence
  Description of Artificial Sequence: Synthetic oligonucleotide
aaauuccgauguaucuaaa

SEQ ID NO: 256899 - RNA, 19 nt, Artificial Sequence
  Description of Artificial Sequence: Synthetic oligonucleotide
ggcgucaaugaccuaccug

SEQ ID NO: 256900 - RNA, 19 nt, Artificial Sequence
  Description of Artificial Sequence: Synthetic oligonucleotide
agacacgguauuucuucuu

SEQ ID NO: 256901 - RNA, 19 nt, Artificial Sequence
  Description of Artificial Sequence: Synthetic oligonucleotide
acaguucgcucauguacuu

SEQ ID NO: 256902 - RNA, 19 nt, Artificial Sequence
  Description of Artificial Sequence: Synthetic oligonucleotide
ccgauguaucuaaagauaa

SEQ ID NO: 256903 - RNA, 19 nt, Artificial Sequence
  Description of Artificial Sequence: Synthetic oligonucleotide
aagaggggaccuugaccua

SEQ ID NO: 256904 - RNA, 19 nt, Artificial Sequence
  Description of Artificial Sequence: Synthetic oligonucleotide
uuaacacgacgacgauaua

SEQ ID NO: 256905 - RNA, 19 nt, Artificial Sequence
  Description of Artificial Sequence: Synthetic oligonucleotide
cucucaguaugcuaagaau

SEQ ID NO: 256906 - RNA, 19 nt, Artificial Sequence
  Description of Artificial Sequence: Synthetic oligonucleotide
acguagcuuuccuuuuaaa

SEQ ID NO: 256907 - RNA, 19 nt, Artificial Sequence
  Description of Artificial Sequence: Synthetic oligonucleotide
auauucccuuggugauaag

SEQ ID NO: 256908 - RNA, 19 nt, Artificial Sequence
  Description of Artificial Sequence: Synthetic oligonucleotide
uggcacggacaaugcgugc

SEQ ID NO: 256909 - RNA, 19 nt, Artificial Sequence
  Description of Artificial Sequence: Synthetic oligonucleotide
guauggaacgggacagaca

SEQ ID NO: 256910 - RNA, 19 nt, Artificial Sequence
  Description of Artificial Sequence: Synthetic oligonucleotide
uuucagacugaggggcaau

SEQ ID NO: 256911 - RNA, 19 nt, Artificial Sequence
  Description of Artificial Sequence: Synthetic oligonucleotide
uaccugcaccaguaaggaa

SEQ ID NO: 256912 - RNA, 19 nt, Artificial Sequence
  Description of Artificial Sequence: Synthetic oligonucleotide
gcggacucuagcuggguac

SEQ ID NO: 256913 - RNA, 19 nt, Artificial Sequence
  Description of Artificial Sequence: Synthetic oligonucleotide
cgagcuacucaaaauaaaa

SEQ ID NO: 256914 - RNA, 19 nt, Artificial Sequence
  Description of Artificial Sequence: Synthetic oligonucleotide
gcgguuauugaugaauuaa

SEQ ID NO: 256915 - RNA, 19 nt, Artificial Sequence
  Description of Artificial Sequence: Synthetic oligonucleotide
aaacugaguccgagcuacu

SEQ ID NO: 256916 - RNA, 19 nt, Artificial Sequence
  Description of Artificial Sequence: Synthetic oligonucleotide
ccuuacaucuuacaccgaa

SEQ ID NO: 256917 - RNA, 19 nt, Artificial Sequence
  Description of Artificial Sequence: Synthetic oligonucleotide
gaguauggaacgggacaga

SEQ ID NO: 256918 - RNA, 19 nt, Artificial Sequence
  Description of Artificial Sequence: Synthetic oligonucleotide
ccacucuaaacaaagaauu

SEQ ID NO: 256919 - RNA, 19 nt, Artificial Sequence
  Description of Artificial Sequence: Synthetic oligonucleotide
ccuugaccuaacaugggga

SEQ ID NO: 256920 - RNA, 19 nt, Artificial Sequence
  Description of Artificial Sequence: Synthetic oligonucleotide
acaaugcgugcggagcggu

SEQ ID NO: 256921 - RNA, 19 nt, Artificial Sequence
  Description of Artificial Sequence: Synthetic oligonucleotide
cacuuaugcauauucccuu

SEQ ID NO: 256922 - RNA, 19 nt, Artificial Sequence
  Description of Artificial Sequence: Synthetic oligonucleotide
ugcggagcggugcccuggu

SEQ ID NO: 256923 - RNA, 19 nt, Artificial Sequence
  Description of Artificial Sequence: Synthetic oligonucleotide
uuaaaccauuugggugagu

SEQ ID NO: 256924 - RNA, 19 nt, Artificial Sequence
  Description of Artificial Sequence: Synthetic oligonucleotide
gguaggucacugaaacaga

SEQ ID NO: 256925 - RNA, 19 nt, Artificial Sequence
  Description of Artificial Sequence: Synthetic oligonucleotide
gauacggaccucacucagu

SEQ ID NO: 256926 - RNA, 19 nt, Artificial Sequence
  Description of Artificial Sequence: Synthetic oligonucleotide
ggagcggugcccugguaca

SEQ ID NO: 256927 - RNA, 19 nt, Artificial Sequence
  Description of Artificial Sequence: Synthetic oligonucleotide
auaccugggcggacucuag

SEQ ID NO: 256928 - RNA, 19 nt, Artificial Sequence
  Description of Artificial Sequence: Synthetic oligonucleotide
cagguggaccaacugaaau

SEQ ID NO: 256929 - RNA, 19 nt, Artificial Sequence
  Description of Artificial Sequence: Synthetic oligonucleotide
caguucgcucauguacuuc

SEQ ID NO: 256930 - RNA, 19 nt, Artificial Sequence
  Description of Artificial Sequence: Synthetic oligonucleotide
cccucccuaaaauucacaa

SEQ ID NO: 256931 - RNA, 19 nt, Artificial Sequence
  Description of Artificial Sequence: Synthetic oligonucleotide
auguaucacuguacagaaa

SEQ ID NO: 256932 - RNA, 19 nt, Artificial Sequence
  Description of Artificial Sequence: Synthetic oligonucleotide
cgauacggaccucacucag

SEQ ID NO: 256933 - RNA, 19 nt, Artificial Sequence
  Description of Artificial Sequence: Synthetic oligonucleotide
gugcggagcggugcccugg

SEQ ID NO: 256934 - RNA, 19 nt, Artificial Sequence
  Description of Artificial Sequence: Synthetic oligonucleotide
cacugugucauggcacgga

SEQ ID NO: 256935 - RNA, 19 nt, Artificial Sequence
  Description of Artificial Sequence: Synthetic oligonucleotide
gcgauacggaccucacuca

SEQ ID NO: 256936 - RNA, 19 nt, Artificial Sequence
  Description of Artificial Sequence: Synthetic oligonucleotide
accauuugggugaguugau

SEQ ID NO: 256937 - RNA, 19 nt, Artificial Sequence
  Description of Artificial Sequence: Synthetic oligonucleotide
cauaccugggcggacucua

SEQ ID NO: 256938 - RNA, 19 nt, Artificial Sequence
  Description of Artificial Sequence: Synthetic oligonucleotide
cauuagggcuuguuuugau

SEQ ID NO: 256939 - RNA, 19 nt, Artificial Sequence
  Description of Artificial Sequence: Synthetic oligonucleotide
ggggaguauggaacgggac

SEQ ID NO: 256940 - RNA, 19 nt, Artificial Sequence
  Description of Artificial Sequence: Synthetic oligonucleotide
augaugcgauacggaccuc

SEQ ID NO: 256941 - RNA, 19 nt, Artificial Sequence
  Description of Artificial Sequence: Synthetic oligonucleotide
gcaauacccauaagccaca

SEQ ID NO: 256942 - RNA, 19 nt, Artificial Sequence
  Description of Artificial Sequence: Synthetic oligonucleotide
cacgacgacgauauaucuu

SEQ ID NO: 256943 - RNA, 19 nt, Artificial Sequence
  Description of Artificial Sequence: Synthetic oligonucleotide
cggacaaugcgugcggagc

SEQ ID NO: 256944 - RNA, 19 nt, Artificial Sequence
  Description of Artificial Sequence: Synthetic oligonucleotide
cguagcuuuccuuuuaaau

SEQ ID NO: 256945 - RNA, 19 nt, Artificial Sequence
  Description of Artificial Sequence: Synthetic oligonucleotide
ccgagcuacucaaaauaaa

SEQ ID NO: 256946 - RNA, 19 nt, Artificial Sequence
  Description of Artificial Sequence: Synthetic oligonucleotide
caucugacaguucgcucau

SEQ ID NO: 256947 - RNA, 19 nt, Artificial Sequence
  Description of Artificial Sequence: Synthetic oligonucleotide
caccgaaagcuuacaguuu

SEQ ID NO: 256948 - RNA, 19 nt, Artificial Sequence
  Description of Artificial Sequence: Synthetic oligonucleotide
gcugacaguuugauaucaa

SEQ ID NO: 256949 - RNA, 19 nt, Artificial Sequence
  Description of Artificial Sequence: Synthetic oligonucleotide
cagagugcacacugaugau

SEQ ID NO: 256950 - RNA, 19 nt, Artificial Sequence
  Description of Artificial Sequence: Synthetic oligonucleotide
cccuuaaggguaucagaua

SEQ ID NO: 256951 - RNA, 19 nt, Artificial Sequence
  Description of Artificial Sequence: Synthetic oligonucleotide
ggggccauaccugggcgga

SEQ ID NO: 256952 - RNA, 19 nt, Artificial Sequence
  Description of Artificial Sequence: Synthetic oligonucleotide
ggcggacucuagcugggua

SEQ ID NO: 256953 - RNA, 19 nt, Artificial Sequence
  Description of Artificial Sequence: Synthetic oligonucleotide
ccuagcuauaguagugcau

SEQ ID NO: 256954 - RNA, 19 nt, Artificial Sequence
  Description of Artificial Sequence: Synthetic oligonucleotide
caccacgcuguuucuuuau

SEQ ID NO: 256955 - RNA, 19 nt, Artificial Sequence
  Description of Artificial Sequence: Synthetic oligonucleotide
gcaacauugugaagucaau

SEQ ID NO: 256956 - RNA, 19 nt, Artificial Sequence
  Description of Artificial Sequence: Synthetic oligonucleotide
guggaccaacugaaaucau

SEQ ID NO: 256957 - RNA, 19 nt, Artificial Sequence
  Description of Artificial Sequence: Synthetic oligonucleotide
cccuuggugauaagacauu

SEQ ID NO: 256958 - RNA, 19 nt, Artificial Sequence
  Description of Artificial Sequence: Synthetic oligonucleotide
cgugcggagcggugcccug

SEQ ID NO: 256959 - RNA, 19 nt, Artificial Sequence
  Description of Artificial Sequence: Synthetic oligonucleotide
gcgugcggagcggugcccu

SEQ ID NO: 256960 - RNA, 19 nt, Artificial Sequence
  Description of Artificial Sequence: Synthetic oligonucleotide
gcggagcggugcccuggua

SEQ ID NO: 256961 - RNA, 19 nt, Artificial Sequence
  Description of Artificial Sequence: Synthetic oligonucleotide
auauacauggucuuaggcc

SEQ ID NO: 256962 - RNA, 19 nt, Artificial Sequence
  Description of Artificial Sequence: Synthetic oligonucleotide
aagaguauuaaccuccuag

SEQ ID NO: 256963 - RNA, 19 nt, Artificial Sequence
  Description of Artificial Sequence: Synthetic oligonucleotide
uuucauaucugacuguugg

SEQ ID NO: 256964 - RNA, 19 nt, Artificial Sequence
  Description of Artificial Sequence: Synthetic oligonucleotide
gauuuaucaggucaguucg

SEQ ID NO: 256965 - RNA, 19 nt, Artificial Sequence
  Description of Artificial Sequence: Synthetic oligonucleotide
uuauucaauaccuuuaugu

SEQ ID NO: 256966 - RNA, 19 nt, Artificial Sequence
  Description of Artificial Sequence: Synthetic oligonucleotide
uaugaucuaaauaugccag

SEQ ID NO: 256967 - RNA, 19 nt, Artificial Sequence
  Description of Artificial Sequence: Synthetic oligonucleotide
uguacuaguuucaggaugg

SEQ ID NO: 256968 - RNA, 19 nt, Artificial Sequence
  Description of Artificial Sequence: Synthetic oligonucleotide
aaugcaaggcaccagcagg

SEQ ID NO: 256969 - RNA, 19 nt, Artificial Sequence
  Description of Artificial Sequence: Synthetic oligonucleotide
uuaauggucuaacagaccu

SEQ ID NO: 256970 - RNA, 19 nt, Artificial Sequence
  Description of Artificial Sequence: Synthetic oligonucleotide
aaguguacuaguuucagga

SEQ ID NO: 256971 - RNA, 19 nt, Artificial Sequence
  Description of Artificial Sequence: Synthetic oligonucleotide
ucuacaguugcuuacagac

SEQ ID NO: 256972 - RNA, 19 nt, Artificial Sequence
  Description of Artificial Sequence: Synthetic oligonucleotide
uguagugcugaccacaaag

SEQ ID NO: 256973 - RNA, 19 nt, Artificial Sequence
  Description of Artificial Sequence: Synthetic oligonucleotide
aauauaaccuuaauggucu

SEQ ID NO: 256974 - RNA, 19 nt, Artificial Sequence
  Description of Artificial Sequence: Synthetic oligonucleotide
uacaguugcuuacagacag

SEQ ID NO: 256975 - RNA, 19 nt, Artificial Sequence
  Description of Artificial Sequence: Synthetic oligonucleotide
aaccuuaauggucuaacag

SEQ ID NO: 256976 - RNA, 19 nt, Artificial Sequence
  Description of Artificial Sequence: Synthetic oligonucleotide
uaauauaaccuuaaugguc

SEQ ID NO: 256977 - RNA, 19 nt, Artificial Sequence
  Description of Artificial Sequence: Synthetic oligonucleotide
uacgaugcaauuauguaca

SEQ ID NO: 256978 - RNA, 19 nt, Artificial Sequence
  Description of Artificial Sequence: Synthetic oligonucleotide
auaauauaaccuuaauggu

SEQ ID NO: 256979 - RNA, 19 nt, Artificial Sequence
  Description of Artificial Sequence: Synthetic oligonucleotide
aauggucuaacagaccuuc

SEQ ID NO: 256980 - RNA, 19 nt, Artificial Sequence
  Description of Artificial Sequence: Synthetic oligonucleotide
ugcaguuucuaacaagcag

SEQ ID NO: 256981 - RNA, 19 nt, Artificial Sequence
  Description of Artificial Sequence: Synthetic oligonucleotide
agugauccgauuuucucac

SEQ ID NO: 256982 - RNA, 19 nt, Artificial Sequence
  Description of Artificial Sequence: Synthetic oligonucleotide
ugacuguacaugaauagga

SEQ ID NO: 256983 - RNA, 19 nt, Artificial Sequence
  Description of Artificial Sequence: Synthetic oligonucleotide
  modified_base (18)..(18): a, c, u, g, unknown or other
uaucuguuaaugaagggnu

SEQ ID NO: 256984 - RNA, 19 nt, Artificial Sequence
  Description of Artificial Sequence: Synthetic oligonucleotide
aaggagauacuacugggcu

SEQ ID NO: 256985 - RNA, 19 nt, Artificial Sequence
  Description of Artificial Sequence: Synthetic oligonucleotide
ugaacuacguccuaaccac

SEQ ID NO: 256986 - RNA, 19 nt, Artificial Sequence
  Description of Artificial Sequence: Synthetic oligonucleotide
  modified_base (16)..(16): a, c, u, g, unknown or other
ucuguuaaugaagggnucc

SEQ ID NO: 256987 - RNA, 19 nt, Artificial Sequence
  Description of Artificial Sequence: Synthetic oligonucleotide
  modified_base (6)..(6): a, c, u, g, unknown or other
aagggnuccugccagggag

SEQ ID NO: 256988 - RNA, 19 nt, Artificial Sequence
  Description of Artificial Sequence: Synthetic oligonucleotide
auaucugacuguuggaaag

SEQ ID NO: 256989 - RNA, 19 nt, Artificial Sequence
  Description of Artificial Sequence: Synthetic oligonucleotide
ucuucaccaauacuuaacu

SEQ ID NO: 256990 - RNA, 19 nt, Artificial Sequence
  Description of Artificial Sequence: Synthetic oligonucleotide
aagugauccgauuuucuca

SEQ ID NO: 256991 - RNA, 19 nt, Artificial Sequence
  Description of Artificial Sequence: Synthetic oligonucleotide
ucgaguuuaucacuggugu

SEQ ID NO: 256992 - RNA, 19 nt, Artificial Sequence
  Description of Artificial Sequence: Synthetic oligonucleotide
aggucaucgaguuuaucac

SEQ ID NO: 256993 - RNA, 19 nt, Artificial Sequence
  Description of Artificial Sequence: Synthetic oligonucleotide
caaaacuaauagcacagag

SEQ ID NO: 256994 - RNA, 19 nt, Artificial Sequence
  Description of Artificial Sequence: Synthetic oligonucleotide
  modified_base (12)..(12): a, c, u, g, unknown or other
uuaaugaagggnuccugcc

SEQ ID NO: 256995 - RNA, 19 nt, Artificial Sequence
  Description of Artificial Sequence: Synthetic oligonucleotide
cuacgaugcaauuauguac

SEQ ID NO: 256996 - RNA, 19 nt, Artificial Sequence
  Description of Artificial Sequence: Synthetic oligonucleotide
gagacuagccacuaaacga

SEQ ID NO: 256997 - RNA, 19 nt, Artificial Sequence
  Description of Artificial Sequence: Synthetic oligonucleotide
ucuuacuugggguagaguu

SEQ ID NO: 256998 - RNA, 19 nt, Artificial Sequence
  Description of Artificial Sequence: Synthetic oligonucleotide
auuaaccuccuagacaugg

SEQ ID NO: 256999 - RNA, 19 nt, Artificial Sequence
  Description of Artificial Sequence: Synthetic oligonucleotide
auaaccuuaauggucuaac

SEQ ID NO: 257000 - RNA, 19 nt, Artificial Sequence
  Description of Artificial Sequence: Synthetic oligonucleotide
cuaggcagggaauacuugg

SEQ ID NO: 257001 - RNA, 19 nt, Artificial Sequence
  Description of Artificial Sequence: Synthetic oligonucleotide
agcaucacagauuuaucag

SEQ ID NO: 257002 - RNA, 19 nt, Artificial Sequence
  Description of Artificial Sequence: Synthetic oligonucleotide
aacuguuauugacaagucu

SEQ ID NO: 257003 - RNA, 19 nt, Artificial Sequence
  Description of Artificial Sequence: Synthetic oligonucleotide
aacuccuaaauuuuacuua

SEQ ID NO: 257004 - RNA, 19 nt, Artificial Sequence
  Description of Artificial Sequence: Synthetic oligonucleotide
ucugcgacgagacuagcca

SEQ ID NO: 257005 - RNA, 19 nt, Artificial Sequence
  Description of Artificial Sequence: Synthetic oligonucleotide
acuacaauaugaucuaaau

SEQ ID NO: 257006 - RNA, 19 nt, Artificial Sequence
  Description of Artificial Sequence: Synthetic oligonucleotide
aaacucuacuacaauauga

SEQ ID NO: 257007 - RNA, 19 nt, Artificial Sequence
  Description of Artificial Sequence: Synthetic oligonucleotide
uguaucaaaguuucacaac

SEQ ID NO: 257008 - RNA, 19 nt, Artificial Sequence
  Description of Artificial Sequence: Synthetic oligonucleotide
ugcguuaugacuguacaug

SEQ ID NO: 257009 - RNA, 19 nt, Artificial Sequence
  Description of Artificial Sequence: Synthetic oligonucleotide
agaguauuaaccuccuaga

SEQ ID NO: 257010 - RNA, 19 nt, Artificial Sequence
  Description of Artificial Sequence: Synthetic oligonucleotide
uaugaacuacguccuaacc

SEQ ID NO: 257011 - RNA, 19 nt, Artificial Sequence
  Description of Artificial Sequence: Synthetic oligonucleotide
aaggaguuuuguucuccac

SEQ ID NO: 257012 - RNA, 19 nt, Artificial Sequence
  Description of Artificial Sequence: Synthetic oligonucleotide
ugauacccaaaucucgggc

SEQ ID NO: 257013 - RNA, 19 nt, Artificial Sequence
  Description of Artificial Sequence: Synthetic oligonucleotide
uuaugacuguacaugaaua

SEQ ID NO: 257014 - RNA, 19 nt, Artificial Sequence
  Description of Artificial Sequence: Synthetic oligonucleotide
ucuacuacaauaugaucua

SEQ ID NO: 257015 - RNA, 19 nt, Artificial Sequence
  Description of Artificial Sequence: Synthetic oligonucleotide
  modified_base (13)..(13): a, c, u, g, unknown or other
gagaccacuccunaagggg

SEQ ID NO: 257016 - RNA, 19 nt, Artificial Sequence
  Description of Artificial Sequence: Synthetic oligonucleotide
ugauccgauuuucucacug

SEQ ID NO: 257017 - RNA, 19 nt, Artificial Sequence
  Description of Artificial Sequence: Synthetic oligonucleotide
uuaaccuccuagacauggg

SEQ ID NO: 257018 - RNA, 19 nt, Artificial Sequence
  Description of Artificial Sequence: Synthetic oligonucleotide
aaauucugcgacgagacua

SEQ ID NO: 257019 - RNA, 19 nt, Artificial Sequence
  Description of Artificial Sequence: Synthetic oligonucleotide
aguuugaacugauacacuu

SEQ ID NO: 257020 - RNA, 19 nt, Artificial Sequence
  Description of Artificial Sequence: Synthetic oligonucleotide
uguucagaauuauucaaua

SEQ ID NO: 257021 - RNA, 19 nt, Artificial Sequence
  Description of Artificial Sequence: Synthetic oligonucleotide
aaucaacuuacagaucuga

SEQ ID NO: 257022 - RNA, 19 nt, Artificial Sequence
  Description of Artificial Sequence: Synthetic oligonucleotide
ucuuaggccauuacuacua

SEQ ID NO: 257023 - RNA, 19 nt, Artificial Sequence
  Description of Artificial Sequence: Synthetic oligonucleotide
uguagugccuaccaacuau

SEQ ID NO: 257024 - RNA, 19 nt, Artificial Sequence
  Description of Artificial Sequence: Synthetic oligonucleotide
augacuguacaugaauagg

SEQ ID NO: 257025 - RNA, 19 nt, Artificial Sequence
  Description of Artificial Sequence: Synthetic oligonucleotide
cucuacuacaauaugaucu

SEQ ID NO: 257026 - RNA, 19 nt, Artificial Sequence
  Description of Artificial Sequence: Synthetic oligonucleotide
aggacuacgaugcaauuau

SEQ ID NO: 257027 - RNA, 19 nt, Artificial Sequence
  Description of Artificial Sequence: Synthetic oligonucleotide
uuuaggacggugcuucccu

SEQ ID NO: 257028 - RNA, 19 nt, Artificial Sequence
  Description of Artificial Sequence: Synthetic oligonucleotide
gaguauuaaccuccuagac

SEQ ID NO: 257029 - RNA, 19 nt, Artificial Sequence
  Description of Artificial Sequence: Synthetic oligonucleotide
uuauguagugcugaccaca

SEQ ID NO: 257030 - RNA, 19 nt, Artificial Sequence
  Description of Artificial Sequence: Synthetic oligonucleotide
  modified_base (14)..(14): a, c, u, g, unknown or other
uguuaaugaagggnuccug

SEQ ID NO: 257031 - RNA, 19 nt, Artificial Sequence
  Description of Artificial Sequence: Synthetic oligonucleotide
uuuaucaggucaguucgcc

SEQ ID NO: 257032 - RNA, 19 nt, Artificial Sequence
  Description of Artificial Sequence: Synthetic oligonucleotide
uaagacuguaaugaaguaa

SEQ ID NO: 257033 - RNA, 19 nt, Artificial Sequence
  Description of Artificial Sequence: Synthetic oligonucleotide
aauucugcgacgagacuag

SEQ ID NO: 257034 - RNA, 19 nt, Artificial Sequence
  Description of Artificial Sequence: Synthetic oligonucleotide
ugucuaugcaacgucuucc

SEQ ID NO: 257035 - RNA, 19 nt, Artificial Sequence
  Description of Artificial Sequence: Synthetic oligonucleotide
augauacccaaaucucggg

SEQ ID NO: 257036 - RNA, 19 nt, Artificial Sequence
  Description of Artificial Sequence: Synthetic oligonucleotide
cuuacuugggguagaguug

SEQ ID NO: 257037 - RNA, 19 nt, Artificial Sequence
  Description of Artificial Sequence: Synthetic oligonucleotide
gagauacagugacaaacug

SEQ ID NO: 257038 - RNA, 19 nt, Artificial Sequence
  Description of Artificial Sequence: Synthetic oligonucleotide
uggucuaacagaccuucca

SEQ ID NO: 257039 - RNA, 19 nt, Artificial Sequence
  Description of Artificial Sequence: Synthetic oligonucleotide
cuuaauggucuaacagacc

SEQ ID NO: 257040 - RNA, 19 nt, Artificial Sequence
  Description of Artificial Sequence: Synthetic oligonucleotide
uugacaucgucuacauccc

SEQ ID NO: 257041 - RNA, 19 nt, Artificial Sequence
  Description of Artificial Sequence: Synthetic oligonucleotide
ucacuuguagugccuacca

SEQ ID NO: 257042 - RNA, 19 nt, Artificial Sequence
  Description of Artificial Sequence: Synthetic oligonucleotide
uaacaauaaggguccaccu

SEQ ID NO: 257043 - RNA, 19 nt, Artificial Sequence
  Description of Artificial Sequence: Synthetic oligonucleotide
ucaucgaguuuaucacugg

SEQ ID NO: 257044 - RNA, 19 nt, Artificial Sequence
  Description of Artificial Sequence: Synthetic oligonucleotide
acuaguuucaggauggaaa

SEQ ID NO: 257045 - RNA, 19 nt, Artificial Sequence
  Description of Artificial Sequence: Synthetic oligonucleotide
uuaggaaugggaucaucaa

SEQ ID NO: 257046 - RNA, 19 nt, Artificial Sequence
  Description of Artificial Sequence: Synthetic oligonucleotide
aaggacgcgauucgugucu

SEQ ID NO: 257047 - RNA, 19 nt, Artificial Sequence
  Description of Artificial Sequence: Synthetic oligonucleotide
agaaggacgcgauucgugu

SEQ ID NO: 257048 - RNA, 19 nt, Artificial Sequence
  Description of Artificial Sequence: Synthetic oligonucleotide
accuccuagacaugggcuc

SEQ ID NO: 257049 - RNA, 19 nt, Artificial Sequence
  Description of Artificial Sequence: Synthetic oligonucleotide
aggagauacuacugggcuc

SEQ ID NO: 257050 - RNA, 19 nt, Artificial Sequence
  Description of Artificial Sequence: Synthetic oligonucleotide
uuucacuccacguucucaa

SEQ ID NO: 257051 - RNA, 19 nt, Artificial Sequence
  Description of Artificial Sequence: Synthetic oligonucleotide
aauaccuaggcagggaaua

SEQ ID NO: 257052 - RNA, 19 nt, Artificial Sequence
  Description of Artificial Sequence: Synthetic oligonucleotide
ggcgauauacagcuaaacc

SEQ ID NO: 257053 - RNA, 19 nt, Artificial Sequence
  Description of Artificial Sequence: Synthetic oligonucleotide
caguucgccaacuucgggc

SEQ ID NO: 257054 - RNA, 19 nt, Artificial Sequence
  Description of Artificial Sequence: Synthetic oligonucleotide
gaagaaauucugcgacgag

SEQ ID NO: 257055 - RNA, 19 nt, Artificial Sequence
  Description of Artificial Sequence: Synthetic oligonucleotide
aggauauacauggucuuag

SEQ ID NO: 257056 - RNA, 19 nt, Artificial Sequence
  Description of Artificial Sequence: Synthetic oligonucleotide
cagacagauccaaugcacc

SEQ ID NO: 257057 - RNA, 19 nt, Artificial Sequence
  Description of Artificial Sequence: Synthetic oligonucleotide
cuaugaacuacguccuaac

SEQ ID NO: 257058 - RNA, 19 nt, Artificial Sequence
  Description of Artificial Sequence: Synthetic oligonucleotide
uuccuagcccaagugaucc

SEQ ID NO: 257059 - RNA, 19 nt, Artificial Sequence
  Description of Artificial Sequence: Synthetic oligonucleotide
ggagauacuacugggcucg

SEQ ID NO: 257060 - RNA, 19 nt, Artificial Sequence
  Description of Artificial Sequence: Synthetic oligonucleotide
aaugugaccuuaaacuuua

SEQ ID NO: 257061 - RNA, 19 nt, Artificial Sequence
  Description of Artificial Sequence: Synthetic oligonucleotide
acacugguauuucaggggu

SEQ ID NO: 257062 - RNA, 19 nt, Artificial Sequence
  Description of Artificial Sequence: Synthetic oligonucleotide
gcaucacagauuuaucagg

SEQ ID NO: 257063 - RNA, 19 nt, Artificial Sequence
  Description of Artificial Sequence: Synthetic oligonucleotide
acuacgaugcaauuaugua

SEQ ID NO: 257064 - RNA, 19 nt, Artificial Sequence
  Description of Artificial Sequence: Synthetic oligonucleotide
acuacguccuaaccacuuc

SEQ ID NO: 257065 - RNA, 19 nt, Artificial Sequence
  Description of Artificial Sequence: Synthetic oligonucleotide
aaacgaccaucuuuuguau

SEQ ID NO: 257066 - RNA, 19 nt, Artificial Sequence
  Description of Artificial Sequence: Synthetic oligonucleotide
uguuauugacaagucuaug

SEQ ID NO: 257067 - RNA, 19 nt, Artificial Sequence
  Description of Artificial Sequence: Synthetic oligonucleotide
auacuuaacucacuucuuu

SEQ ID NO: 257068 - RNA, 19 nt, Artificial Sequence
  Description of Artificial Sequence: Synthetic oligonucleotide
ugacaagucuaugaacuac

SEQ ID NO: 257069 - RNA, 19 nt, Artificial Sequence
  Description of Artificial Sequence: Synthetic oligonucleotide
aaacugcggcuguacugac

SEQ ID NO: 257070 - RNA, 19 nt, Artificial Sequence
  Description of Artificial Sequence: Synthetic oligonucleotide
ggucaguucgccaacuucg

SEQ ID NO: 257071 - RNA, 19 nt, Artificial Sequence
  Description of Artificial Sequence: Synthetic oligonucleotide
ucuaugaacuacguccuaa

SEQ ID NO: 257072 - RNA, 19 nt, Artificial Sequence
  Description of Artificial Sequence: Synthetic oligonucleotide
agcauguaaagguaacuuu

SEQ ID NO: 257073 - RNA, 19 nt, Artificial Sequence
  Description of Artificial Sequence: Synthetic oligonucleotide
auaaggguccaccuacagu

SEQ ID NO: 257074 - RNA, 19 nt, Artificial Sequence
  Description of Artificial Sequence: Synthetic oligonucleotide
uuuauguagugcugaccac

SEQ ID NO: 257075 - RNA, 19 nt, Artificial Sequence
  Description of Artificial Sequence: Synthetic oligonucleotide
ugcuauaaugcaccugaau

SEQ ID NO: 257076 - RNA, 19 nt, Artificial Sequence
  Description of Artificial Sequence: Synthetic oligonucleotide
caacgugcuuccuagguuc

SEQ ID NO: 257077 - RNA, 19 nt, Artificial Sequence
  Description of Artificial Sequence: Synthetic oligonucleotide
  modified_base (8)..(8): a, c, u, g, unknown or other
ugaagggnuccugccaggg

SEQ ID NO: 257078 - RNA, 19 nt, Artificial Sequence
  Description of Artificial Sequence: Synthetic oligonucleotide
uaacuguuauugacaaguc

SEQ ID NO: 257079 - RNA, 19 nt, Artificial Sequence
  Description of Artificial Sequence: Synthetic oligonucleotide
uucugcgacgagacuagcc

SEQ ID NO: 257080 - RNA, 19 nt, Artificial Sequence
  Description of Artificial Sequence: Synthetic oligonucleotide
cagcuaaaccaaaugaaga

SEQ ID NO: 257081 - RNA, 19 nt, Artificial Sequence
  Description of Artificial Sequence: Synthetic oligonucleotide
uccugucuaugcaacgucu

SEQ ID NO: 257082 - RNA, 19 nt, Artificial Sequence
  Description of Artificial Sequence: Synthetic oligonucleotide
auuuaucaggucaguucgc

SEQ ID NO: 257083 - RNA, 19 nt, Artificial Sequence
  Description of Artificial Sequence: Synthetic oligonucleotide
acaauaccuaggcagggaa

SEQ ID NO: 257084 - RNA, 19 nt, Artificial Sequence
  Description of Artificial Sequence: Synthetic oligonucleotide
ucuguugacagcgucgaau

SEQ ID NO: 257085 - RNA, 19 nt, Artificial Sequence
  Description of Artificial Sequence: Synthetic oligonucleotide
uuaagacuguaaugaagua

SEQ ID NO: 257086 - RNA, 19 nt, Artificial Sequence
  Description of Artificial Sequence: Synthetic oligonucleotide
aucaggucaguucgccaac

SEQ ID NO: 257087 - RNA, 19 nt, Artificial Sequence
  Description of Artificial Sequence: Synthetic oligonucleotide
uaguuugaacugauacacu

SEQ ID NO: 257088 - RNA, 19 nt, Artificial Sequence
  Description of Artificial Sequence: Synthetic oligonucleotide
uccuuuaggacggugcuuc

SEQ ID NO: 257089 - RNA, 19 nt, Artificial Sequence
  Description of Artificial Sequence: Synthetic oligonucleotide
gacuguacaugaauaggac

SEQ ID NO: 257090 - RNA, 19 nt, Artificial Sequence
  Description of Artificial Sequence: Synthetic oligonucleotide
uuaucaggucaguucgcca

SEQ ID NO: 257091 - RNA, 19 nt, Artificial Sequence
  Description of Artificial Sequence: Synthetic oligonucleotide
aagaaggacgcgauucgug

SEQ ID NO: 257092 - RNA, 19 nt, Artificial Sequence
  Description of Artificial Sequence: Synthetic oligonucleotide
uuccuagguucauuucucc

SEQ ID NO: 257093 - RNA, 19 nt, Artificial Sequence
  Description of Artificial Sequence: Synthetic oligonucleotide
acaucccugaaacucuacu

SEQ ID NO: 257094 - RNA, 19 nt, Artificial Sequence
  Description of Artificial Sequence: Synthetic oligonucleotide
uguugacagcgucgaauca

SEQ ID NO: 257095 - RNA, 19 nt, Artificial Sequence
  Description of Artificial Sequence: Synthetic oligonucleotide
gucaucgaguuuaucacug

SEQ ID NO: 257096 - RNA, 19 nt, Artificial Sequence
  Description of Artificial Sequence: Synthetic oligonucleotide
ucgcuguuggucuucuuac

SEQ ID NO: 257097 - RNA, 19 nt, Artificial Sequence
  Description of Artificial Sequence: Synthetic oligonucleotide
cagcaucacagauuuauca

SEQ ID NO: 257098 - RNA, 19 nt, Artificial Sequence
  Description of Artificial Sequence: Synthetic oligonucleotide
uacuuagcugcguuaugac

SEQ ID NO: 257099 - RNA, 19 nt, Artificial Sequence
  Description of Artificial Sequence: Synthetic oligonucleotide
uuagcugcguuaugacugu

SEQ ID NO: 257100 - RNA, 19 nt, Artificial Sequence
  Description of Artificial Sequence: Synthetic oligonucleotide
auggcuggcacuauuaaaa

SEQ ID NO: 257101 - RNA, 19 nt, Artificial Sequence
  Description of Artificial Sequence: Synthetic oligonucleotide
ccaaaugaagaguauuaac

SEQ ID NO: 257102 - RNA, 19 nt, Artificial Sequence
  Description of Artificial Sequence: Synthetic oligonucleotide
  modified_base (2)..(2): a, c, u, g, unknown or other
gnuccugccagggagcuga

SEQ ID NO: 257103 - RNA, 19 nt, Artificial Sequence
  Description of Artificial Sequence: Synthetic oligonucleotide
ucgggugacuuugauggag

SEQ ID NO: 257104 - RNA, 19 nt, Artificial Sequence
  Description of Artificial Sequence: Synthetic oligonucleotide
ucgaaucacuucuaacaau

SEQ ID NO: 257105 - RNA, 19 nt, Artificial Sequence
  Description of Artificial Sequence: Synthetic oligonucleotide
acguccuaaccacuucuag

SEQ ID NO: 257106 - RNA, 19 nt, Artificial Sequence
  Description of Artificial Sequence: Synthetic oligonucleotide
auaccuaggcagggaauac

SEQ ID NO: 257107 - RNA, 19 nt, Artificial Sequence
  Description of Artificial Sequence: Synthetic oligonucleotide
acuaaacgaccaucuuuug

SEQ ID NO: 257108 - RNA, 19 nt, Artificial Sequence
  Description of Artificial Sequence: Synthetic oligonucleotide
gauacccaaaucucgggcu

SEQ ID NO: 257109 - RNA, 19 nt, Artificial Sequence
  Description of Artificial Sequence: Synthetic oligonucleotide
ucucgggcuaaguucuccc

SEQ ID NO: 257110 - RNA, 19 nt, Artificial Sequence
  Description of Artificial Sequence: Synthetic oligonucleotide
acgagacuagccacuaaac

SEQ ID NO: 257111 - RNA, 19 nt, Artificial Sequence
  Description of Artificial Sequence: Synthetic oligonucleotide
aguguacuaguuucaggau

SEQ ID NO: 257112 - RNA, 19 nt, Artificial Sequence
  Description of Artificial Sequence: Synthetic oligonucleotide
gauccgauuuucucacuga

SEQ ID NO: 257113 - RNA, 19 nt, Artificial Sequence
  Description of Artificial Sequence: Synthetic oligonucleotide
aaggacuacgaugcaauua

SEQ ID NO: 257114 - RNA, 19 nt, Artificial Sequence
  Description of Artificial Sequence: Synthetic oligonucleotide
cagcaagagugacugacug

SEQ ID NO: 257115 - RNA, 19 nt, Artificial Sequence
  Description of Artificial Sequence: Synthetic oligonucleotide
guugacagcgucgaaucac

SEQ ID NO: 257116 - RNA, 19 nt, Artificial Sequence
  Description of Artificial Sequence: Synthetic oligonucleotide
agugccuaccaacuauuaa

SEQ ID NO: 257117 - RNA, 19 nt, Artificial Sequence
  Description of Artificial Sequence: Synthetic oligonucleotide
ucgggcuaaguucucccga

SEQ ID NO: 257118 - RNA, 19 nt, Artificial Sequence
  Description of Artificial Sequence: Synthetic oligonucleotide
gacagcgucgaaucacuuc

SEQ ID NO: 257119 - RNA, 19 nt, Artificial Sequence
  Description of Artificial Sequence: Synthetic oligonucleotide
uuccugucuaugcaacguc

SEQ ID NO: 257120 - RNA, 19 nt, Artificial Sequence
  Description of Artificial Sequence: Synthetic oligonucleotide
caagucuaugaacuacguc

SEQ ID NO: 257121 - RNA, 19 nt, Artificial Sequence
  Description of Artificial Sequence: Synthetic oligonucleotide
aucgaguuuaucacuggug

SEQ ID NO: 257122 - RNA, 19 nt, Artificial Sequence
  Description of Artificial Sequence: Synthetic oligonucleotide
guuaugacuguacaugaau

SEQ ID NO: 257123 - RNA, 19 nt, Artificial Sequence
  Description of Artificial Sequence: Synthetic oligonucleotide
aucucgggcuaaguucucc

SEQ ID NO: 257124 - RNA, 19 nt, Artificial Sequence
  Description of Artificial Sequence: Synthetic oligonucleotide
gauggcuggcacuauuaaa

SEQ ID NO: 257125 - RNA, 19 nt, Artificial Sequence
  Description of Artificial Sequence: Synthetic oligonucleotide
gagccgacaagucuguucu

SEQ ID NO: 257126 - RNA, 19 nt, Artificial Sequence
  Description of Artificial Sequence: Synthetic oligonucleotide
caacuucgggcuaacucac

SEQ ID NO: 257127 - RNA, 19 nt, Artificial Sequence
  Description of Artificial Sequence: Synthetic oligonucleotide
acagcauguaaagguaacu

SEQ ID NO: 257128 - RNA, 19 nt, Artificial Sequence
  Description of Artificial Sequence: Synthetic oligonucleotide
cucgggcuaaguucucccg

SEQ ID NO: 257129 - RNA, 19 nt, Artificial Sequence
  Description of Artificial Sequence: Synthetic oligonucleotide
ggucuuaggccauuacuac

SEQ ID NO: 257130 - RNA, 19 nt, Artificial Sequence
  Description of Artificial Sequence: Synthetic oligonucleotide
gcaguuucuaacaagcaga

SEQ ID NO: 257131 - RNA, 19 nt, Artificial Sequence
  Description of Artificial Sequence: Synthetic oligonucleotide
uaccaacuauuaaaucaua

SEQ ID NO: 257132 - RNA, 19 nt, Artificial Sequence
  Description of Artificial Sequence: Synthetic oligonucleotide
cuaccaacuauuaaaucau

SEQ ID NO: 257133 - RNA, 19 nt, Artificial Sequence
  Description of Artificial Sequence: Synthetic oligonucleotide
aguuccuagcccaagugau

SEQ ID NO: 257134 - RNA, 19 nt, Artificial Sequence
  Description of Artificial Sequence: Synthetic oligonucleotide
  modified_base (7)..(7): a, c, u, g, unknown or other
gaagggnuccugccaggga

SEQ ID NO: 257135 - RNA, 19 nt, Artificial Sequence
  Description of Artificial Sequence: Synthetic oligonucleotide
auaccuuuauguagugcug

SEQ ID NO: 257136 - RNA, 19 nt, Artificial Sequence
  Description of Artificial Sequence: Synthetic oligonucleotide
gacuacgaugcaauuaugu

SEQ ID NO: 257137 - RNA, 19 nt, Artificial Sequence
  Description of Artificial Sequence: Synthetic oligonucleotide
cugucuaugcaacgucuuc

SEQ ID NO: 257138 - RNA, 19 nt, Artificial Sequence
  Description of Artificial Sequence: Synthetic oligonucleotide
gaaggacgcgauucguguc

SEQ ID NO: 257139 - RNA, 19 nt, Artificial Sequence
  Description of Artificial Sequence: Synthetic oligonucleotide
auggucuaacagaccuucc

SEQ ID NO: 257140 - RNA, 19 nt, Artificial Sequence
  Description of Artificial Sequence: Synthetic oligonucleotide
agcugcguuaugacuguac

SEQ ID NO: 257141 - RNA, 19 nt, Artificial Sequence
  Description of Artificial Sequence: Synthetic oligonucleotide
ccaacuucgggcuaacuca

SEQ ID NO: 257142 - RNA, 19 nt, Artificial Sequence
  Description of Artificial Sequence: Synthetic oligonucleotide
  modified_base (5)..(5): a, c, u, g, unknown or other
agggnuccugccagggagc

SEQ ID NO: 257143 - RNA, 19 nt, Artificial Sequence
  Description of Artificial Sequence: Synthetic oligonucleotide
accuuccgcauuggcaggc

SEQ ID NO: 257144 - RNA, 19 nt, Artificial Sequence
  Description of Artificial Sequence: Synthetic oligonucleotide
uggcuggcacuauuaaaau

SEQ ID NO: 257145 - RNA, 19 nt, Artificial Sequence
  Description of Artificial Sequence: Synthetic oligonucleotide
uguugacaucgucuacauc

SEQ ID NO: 257146 - RNA, 19 nt, Artificial Sequence
  Description of Artificial Sequence: Synthetic oligonucleotide
auacccaaaucucgggcua

SEQ ID NO: 257147 - RNA, 19 nt, Artificial Sequence
  Description of Artificial Sequence: Synthetic oligonucleotide
cacuaaacgaccaucuuuu

SEQ ID NO: 257148 - RNA, 19 nt, Artificial Sequence
  Description of Artificial Sequence: Synthetic oligonucleotide
uacguccuaaccacuucua

SEQ ID NO: 257149 - RNA, 19 nt, Artificial Sequence
  Description of Artificial Sequence: Synthetic oligonucleotide
uugcuauaaugcaccugaa

SEQ ID NO: 257150 - RNA, 19 nt, Artificial Sequence
  Description of Artificial Sequence: Synthetic oligonucleotide
cuaaccacuucuaguuuaa

SEQ ID NO: 257151 - RNA, 19 nt, Artificial Sequence
  Description of Artificial Sequence: Synthetic oligonucleotide
acaagucuaugaacuacgu

SEQ ID NO: 257152 - RNA, 19 nt, Artificial Sequence
  Description of Artificial Sequence: Synthetic oligonucleotide
aacuacguccuaaccacuu

SEQ ID NO: 257153 - RNA, 19 nt, Artificial Sequence
  Description of Artificial Sequence: Synthetic oligonucleotide
agccacuaaacgaccaucu

SEQ ID NO: 257154 - RNA, 19 nt, Artificial Sequence
  Description of Artificial Sequence: Synthetic oligonucleotide
gucuacaguugcuuacaga

SEQ ID NO: 257155 - RNA, 19 nt, Artificial Sequence
  Description of Artificial Sequence: Synthetic oligonucleotide
guccuaaccacuucuaguu

SEQ ID NO: 257156 - RNA, 19 nt, Artificial Sequence
  Description of Artificial Sequence: Synthetic oligonucleotide
auucugcgacgagacuagc

SEQ ID NO: 257157 - RNA, 19 nt, Artificial Sequence
  Description of Artificial Sequence: Synthetic oligonucleotide
cgucgaaucacuucuaaca

SEQ ID NO: 257158 - RNA, 19 nt, Artificial Sequence
  Description of Artificial Sequence: Synthetic oligonucleotide
caccucauguacauuaagu

SEQ ID NO: 257159 - RNA, 19 nt, Artificial Sequence
  Description of Artificial Sequence: Synthetic oligonucleotide
uacauuaaguggggagauc

SEQ ID NO: 257160 - RNA, 19 nt, Artificial Sequence
  Description of Artificial Sequence: Synthetic oligonucleotide
cugcgacgagacuagccac

SEQ ID NO: 257161 - RNA, 19 nt, Artificial Sequence
  Description of Artificial Sequence: Synthetic oligonucleotide
caguuccuagcccaaguga

SEQ ID NO: 257162 - RNA, 19 nt, Artificial Sequence
  Description of Artificial Sequence: Synthetic oligonucleotide
uucgggugacuuugaugga

SEQ ID NO: 257163 - RNA, 19 nt, Artificial Sequence
  Description of Artificial Sequence: Synthetic oligonucleotide
gcguuaugacuguacauga

SEQ ID NO: 257164 - RNA, 19 nt, Artificial Sequence
  Description of Artificial Sequence: Synthetic oligonucleotide
gcugcguuaugacuguaca

SEQ ID NO: 257165 - RNA, 19 nt, Artificial Sequence
  Description of Artificial Sequence: Synthetic oligonucleotide
auauaaccuuaauggucua

SEQ ID NO: 257166 - RNA, 19 nt, Artificial Sequence
  Description of Artificial Sequence: Synthetic oligonucleotide
ggugcuucccuuuuacucu

SEQ ID NO: 257167 - RNA, 19 nt, Artificial Sequence
  Description of Artificial Sequence: Synthetic oligonucleotide
uucgccaacuucgggcuaa

SEQ ID NO: 257168 - RNA, 19 nt, Artificial Sequence
  Description of Artificial Sequence: Synthetic oligonucleotide
gugucuacaguugcuuaca

SEQ ID NO: 257169 - RNA, 19 nt, Artificial Sequence
  Description of Artificial Sequence: Synthetic oligonucleotide
acgcgauucgugucuccug

SEQ ID NO: 257170 - RNA, 19 nt, Artificial Sequence
  Description of Artificial Sequence: Synthetic oligonucleotide
gucuuaggccauuacuacu

SEQ ID NO: 257171 - RNA, 19 nt, Artificial Sequence
  Description of Artificial Sequence: Synthetic oligonucleotide
cuguuauugacaagucuau

SEQ ID NO: 257172 - RNA, 19 nt, Artificial Sequence
  Description of Artificial Sequence: Synthetic oligonucleotide
gaagaguauuaaccuccua

SEQ ID NO: 257173 - RNA, 19 nt, Artificial Sequence
  Description of Artificial Sequence: Synthetic oligonucleotide
acggugcuucccuuuuacu

SEQ ID NO: 257174 - RNA, 19 nt, Artificial Sequence
  Description of Artificial Sequence: Synthetic oligonucleotide
uccuucgggugacuuugau

SEQ ID NO: 257175 - RNA, 19 nt, Artificial Sequence
  Description of Artificial Sequence: Synthetic oligonucleotide
agccgacaagucuguucuc

SEQ ID NO: 257176 - RNA, 19 nt, Artificial Sequence
  Description of Artificial Sequence: Synthetic oligonucleotide
guagugcugaccacaaagu

SEQ ID NO: 257177 - RNA, 19 nt, Artificial Sequence
  Description of Artificial Sequence: Synthetic oligonucleotide
ccuuuauguagugcugacc

SEQ ID NO: 257178 - RNA, 19 nt, Artificial Sequence
  Description of Artificial Sequence: Synthetic oligonucleotide
agccuacaucccugaaacu

SEQ ID NO: 257179 - RNA, 19 nt, Artificial Sequence
  Description of Artificial Sequence: Synthetic oligonucleotide
gaggccagacuuccaacgu

SEQ ID NO: 257180 - RNA, 19 nt, Artificial Sequence
  Description of Artificial Sequence: Synthetic oligonucleotide
guuccuagcccaagugauc

SEQ ID NO: 257181 - RNA, 19 nt, Artificial Sequence
  Description of Artificial Sequence: Synthetic oligonucleotide
ugcuuacagacagcaggau

SEQ ID NO: 257182 - RNA, 19 nt, Artificial Sequence
  Description of Artificial Sequence: Synthetic oligonucleotide
aggacgcgauucgugucuc

SEQ ID NO: 257183 - RNA, 19 nt, Artificial Sequence
  Description of Artificial Sequence: Synthetic oligonucleotide
uacccaaaucucgggcuaa

SEQ ID NO: 257184 - RNA, 19 nt, Artificial Sequence
  Description of Artificial Sequence: Synthetic oligonucleotide
ccuucgggugacuuugaug

SEQ ID NO: 257185 - RNA, 19 nt, Artificial Sequence
  Description of Artificial Sequence: Synthetic oligonucleotide
accuaggcagggaauacuu

SEQ ID NO: 257186 - RNA, 19 nt, Artificial Sequence
  Description of Artificial Sequence: Synthetic oligonucleotide
acccaaaucucgggcuaag

SEQ ID NO: 257187 - RNA, 19 nt, Artificial Sequence
  Description of Artificial Sequence: Synthetic oligonucleotide
accagcaggagcguacauu

SEQ ID NO: 257188 - RNA, 19 nt, Artificial Sequence
  Description of Artificial Sequence: Synthetic oligonucleotide
cuacguccuaaccacuucu

SEQ ID NO: 257189 - RNA, 19 nt, Artificial Sequence
  Description of Artificial Sequence: Synthetic oligonucleotide
ucgggcuaacucaccucau

SEQ ID NO: 257190 - RNA, 19 nt, Artificial Sequence
  Description of Artificial Sequence: Synthetic oligonucleotide
uagcccaagugauccgauu

SEQ ID NO: 257191 - RNA, 19 nt, Artificial Sequence
  Description of Artificial Sequence: Synthetic oligonucleotide
caucgaguuuaucacuggu

SEQ ID NO: 257192 - RNA, 19 nt, Artificial Sequence
  Description of Artificial Sequence: Synthetic oligonucleotide
auguagugcugaccacaaa

SEQ ID NO: 257193 - RNA, 19 nt, Artificial Sequence
  Description of Artificial Sequence: Synthetic oligonucleotide
gcgucgaaucacuucuaac

SEQ ID NO: 257194 - RNA, 19 nt, Artificial Sequence
  Description of Artificial Sequence: Synthetic oligonucleotide
cuacaucccugaaacucua

SEQ ID NO: 257195 - RNA, 19 nt, Artificial Sequence
  Description of Artificial Sequence: Synthetic oligonucleotide
cugugucuacaguugcuua

SEQ ID NO: 257196 - RNA, 19 nt, Artificial Sequence
  Description of Artificial Sequence: Synthetic oligonucleotide
ccuaggcagggaauacuug

SEQ ID NO: 257197 - RNA, 19 nt, Artificial Sequence
  Description of Artificial Sequence: Synthetic oligonucleotide
guacauuaaguggggagau

SEQ ID NO: 257198 - RNA, 19 nt, Artificial Sequence
  Description of Artificial Sequence: Synthetic oligonucleotide
aacucaccucauguacauu

SEQ ID NO: 257199 - RNA, 19 nt, Artificial Sequence
  Description of Artificial Sequence: Synthetic oligonucleotide
gcgauucgugucuccuggg

SEQ ID NO: 257200 - RNA, 19 nt, Artificial Sequence
  Description of Artificial Sequence: Synthetic oligonucleotide
cuacuacaauaugaucuaa

SEQ ID NO: 257201 - RNA, 19 nt, Artificial Sequence
  Description of Artificial Sequence: Synthetic oligonucleotide
gagauacuacugggcucgc

SEQ ID NO: 257202 - RNA, 19 nt, Artificial Sequence
  Description of Artificial Sequence: Synthetic oligonucleotide
cggugcuucccuuuuacuc

SEQ ID NO: 257203 - RNA, 19 nt, Artificial Sequence
  Description of Artificial Sequence: Synthetic oligonucleotide
ccuaaccacuucuaguuua

SEQ ID NO: 257204 - RNA, 19 nt, Artificial Sequence
  Description of Artificial Sequence: Synthetic oligonucleotide
cacauuguucagaauuauu

SEQ ID NO: 257205 - RNA, 19 nt, Artificial Sequence
  Description of Artificial Sequence: Synthetic oligonucleotide
cugaccccgcuuucugcuc

SEQ ID NO: 257206 - RNA, 19 nt, Artificial Sequence
  Description of Artificial Sequence: Synthetic oligonucleotide
cacuuguagugccuaccaa

SEQ ID NO: 257207 - RNA, 19 nt, Artificial Sequence
  Description of Artificial Sequence: Synthetic oligonucleotide
auacauggucuuaggccau

SEQ ID NO: 257208 - RNA, 19 nt, Artificial Sequence
  Description of Artificial Sequence: Synthetic oligonucleotide
gacgcgauucgugucuccu

SEQ ID NO: 257209 - RNA, 19 nt, Artificial Sequence
  Description of Artificial Sequence: Synthetic oligonucleotide
ggaaacagucagguccuga

SEQ ID NO: 257210 - RNA, 19 nt, Artificial Sequence
  Description of Artificial Sequence: Synthetic oligonucleotide
agcguacauuccagcaaga

SEQ ID NO: 257211 - RNA, 19 nt, Artificial Sequence
  Description of Artificial Sequence: Synthetic oligonucleotide
uccgcauuggcaggcccuu

SEQ ID NO: 257212 - RNA, 19 nt, Artificial Sequence
  Description of Artificial Sequence: Synthetic oligonucleotide
ggcaccagcaggagcguac

SEQ ID NO: 257213 - RNA, 19 nt, Artificial Sequence
  Description of Artificial Sequence: Synthetic oligonucleotide
gcugcucaagaaggacgcg

SEQ ID NO: 257214 - RNA, 19 nt, Artificial Sequence
  Description of Artificial Sequence: Synthetic oligonucleotide
ggacuacgaugcaauuaug

SEQ ID NO: 257215 - RNA, 19 nt, Artificial Sequence
  Description of Artificial Sequence: Synthetic oligonucleotide
caauaccuaggcagggaau

SEQ ID NO: 257216 - RNA, 19 nt, Artificial Sequence
  Description of Artificial Sequence: Synthetic oligonucleotide
cuagccacuaaacgaccau

SEQ ID NO: 257217 - RNA, 19 nt, Artificial Sequence
  Description of Artificial Sequence: Synthetic oligonucleotide
cagcauguaaagguaacuu

SEQ ID NO: 257218 - RNA, 19 nt, Artificial Sequence
  Description of Artificial Sequence: Synthetic oligonucleotide
cugcggcuguacugacccc

SEQ ID NO: 257219 - RNA, 19 nt, Artificial Sequence
  Description of Artificial Sequence: Synthetic oligonucleotide
cugcguuaugacuguacau

SEQ ID NO: 257220 - RNA, 19 nt, Artificial Sequence
  Description of Artificial Sequence: Synthetic oligonucleotide
caccaauacuuaacucacu

SEQ ID NO: 257221 - RNA, 19 nt, Artificial Sequence
  Description of Artificial Sequence: Synthetic oligonucleotide
ccuugcuauaaugcaccug

SEQ ID NO: 257222 - RNA, 19 nt, Artificial Sequence
  Description of Artificial Sequence: Synthetic oligonucleotide
guagugccuaccaacuauu

SEQ ID NO: 257223 - RNA, 19 nt, Artificial Sequence
  Description of Artificial Sequence: Synthetic oligonucleotide
acggagccgacaagucugu

SEQ ID NO: 257224 - RNA, 19 nt, Artificial Sequence
  Description of Artificial Sequence: Synthetic oligonucleotide
ggacgcgauucgugucucc

SEQ ID NO: 257225 - RNA, 19 nt, Artificial Sequence
  Description of Artificial Sequence: Synthetic oligonucleotide
cagauuuaucaggucaguu

SEQ ID NO: 257226 - RNA, 19 nt, Artificial Sequence
  Description of Artificial Sequence: Synthetic oligonucleotide
cgggcuaaguucucccgac

SEQ ID NO: 257227 - RNA, 19 nt, Artificial Sequence
  Description of Artificial Sequence: Synthetic oligonucleotide
ucgccaacuucgggcuaac

SEQ ID NO: 257228 - RNA, 19 nt, Artificial Sequence
  Description of Artificial Sequence: Synthetic oligonucleotide
gugauccgauuuucucacu

SEQ ID NO: 257229 - RNA, 19 nt, Artificial Sequence
  Description of Artificial Sequence: Synthetic oligonucleotide
ccacuaaacgaccaucuuu

SEQ ID NO: 257230 - RNA, 19 nt, Artificial Sequence
  Description of Artificial Sequence: Synthetic oligonucleotide
cgggcuaacucaccucaug

SEQ ID NO: 257231 - RNA, 19 nt, Artificial Sequence
  Description of Artificial Sequence: Synthetic oligonucleotide
uagcugcguuaugacugua

SEQ ID NO: 257232 - RNA, 19 nt, Artificial Sequence
  Description of Artificial Sequence: Synthetic oligonucleotide
guucgccaacuucgggcua

SEQ ID NO: 257233 - RNA, 19 nt, Artificial Sequence
  Description of Artificial Sequence: Synthetic oligonucleotide
gccgacaagucuguucucu

SEQ ID NO: 257234 - RNA, 19 nt, Artificial Sequence
  Description of Artificial Sequence: Synthetic oligonucleotide
gggccacggagccgacaag

SEQ ID NO: 257235 - RNA, 19 nt, Artificial Sequence
  Description of Artificial Sequence: Synthetic oligonucleotide
ccuccuagacaugggcuca

SEQ ID NO: 257236 - RNA, 19 nt, Artificial Sequence
  Description of Artificial Sequence: Synthetic oligonucleotide
ccuuccgcauuggcaggcc

SEQ ID NO: 257237 - RNA, 19 nt, Artificial Sequence
  Description of Artificial Sequence: Synthetic oligonucleotide
gcgauggcuggcacuauua

SEQ ID NO: 257238 - RNA, 19 nt, Artificial Sequence
  Description of Artificial Sequence: Synthetic oligonucleotide
ggccacggagccgacaagu

SEQ ID NO: 257239 - RNA, 19 nt, Artificial Sequence
  Description of Artificial Sequence: Synthetic oligonucleotide
ccuagacaugggcucauau

SEQ ID NO: 257240 - RNA, 19 nt, Artificial Sequence
  Description of Artificial Sequence: Synthetic oligonucleotide
  modified_base (4)..(4): a, c, u, g, unknown or other
gggnuccugccagggagcu

SEQ ID NO: 257241 - RNA, 19 nt, Artificial Sequence
  Description of Artificial Sequence: Synthetic oligonucleotide
gguagaguuggcgcuuauu

SEQ ID NO: 257242 - RNA, 19 nt, Artificial Sequence
  Description of Artificial Sequence: Synthetic oligonucleotide
ccauuacuacuauuucauu

SEQ ID NO: 257243 - RNA, 19 nt, Artificial Sequence
  Description of Artificial Sequence: Synthetic oligonucleotide
gcgacgagacuagccacua

SEQ ID NO: 257244 - RNA, 19 nt, Artificial Sequence
  Description of Artificial Sequence: Synthetic oligonucleotide
gcucaagaaggacgcgauu

SEQ ID NO: 257245 - RNA, 19 nt, Artificial Sequence
  Description of Artificial Sequence: Synthetic oligonucleotide
ccaacgugcuuccuagguu

SEQ ID NO: 257246 - RNA, 19 nt, Artificial Sequence
  Description of Artificial Sequence: Synthetic oligonucleotide
cgaguuuaucacugguguu

SEQ ID NO: 257247 - RNA, 19 nt, Artificial Sequence
  Description of Artificial Sequence: Synthetic oligonucleotide
caccagcaggagcguacau

SEQ ID NO: 257248 - RNA, 19 nt, Artificial Sequence
  Description of Artificial Sequence: Synthetic oligonucleotide
ccgacaagucuguucucuu

SEQ ID NO: 257249 - RNA, 19 nt, Artificial Sequence
  Description of Artificial Sequence: Synthetic oligonucleotide
cgacgagacuagccacuaa

SEQ ID NO: 257250 - RNA, 19 nt, Artificial Sequence
  Description of Artificial Sequence: Synthetic oligonucleotide
cgccaacuucgggcuaacu

SEQ ID NO: 257251 - RNA, 19 nt, Artificial Sequence
  Description of Artificial Sequence: Synthetic oligonucleotide
cggagccgacaagucuguu

SEQ ID NO: 257252 - RNA, 19 nt, Artificial Sequence
  Description of Artificial Sequence: Synthetic oligonucleotide
gacacaucagucuagaagg

SEQ ID NO: 257253 - RNA, 19 nt, Artificial Sequence
  Description of Artificial Sequence: Synthetic oligonucleotide
ugugugagcacacagaugc

SEQ ID NO: 257254 - RNA, 19 nt, Artificial Sequence
  Description of Artificial Sequence: Synthetic oligonucleotide
agagcugauacauaggaac

SEQ ID NO: 257255 - RNA, 19 nt, Artificial Sequence
  Description of Artificial Sequence: Synthetic oligonucleotide
cucgguuacaguuaaauag

SEQ ID NO: 257256 - RNA, 19 nt, Artificial Sequence
  Description of Artificial Sequence: Synthetic oligonucleotide
uuugcuagggguuaccggg

SEQ ID NO: 257257 - RNA, 19 nt, Artificial Sequence
  Description of Artificial Sequence: Synthetic oligonucleotide
ucuguagucccgaaggccg

SEQ ID NO: 257258 - RNA, 19 nt, Artificial Sequence
  Description of Artificial Sequence: Synthetic oligonucleotide
uacaguuaaauagaggaag

SEQ ID NO: 257259 - RNA, 19 nt, Artificial Sequence
  Description of Artificial Sequence: Synthetic oligonucleotide
guuaaauagaggaagauga

SEQ ID NO: 257260 - RNA, 19 nt, Artificial Sequence
  Description of Artificial Sequence: Synthetic oligonucleotide
auaggaaccuucaagcugc

SEQ ID NO: 257261 - RNA, 19 nt, Artificial Sequence
  Description of Artificial Sequence: Synthetic oligonucleotide
ugguguucgacccagacuc

SEQ ID NO: 257262 - RNA, 19 nt, Artificial Sequence
  Description of Artificial Sequence: Synthetic oligonucleotide
aggcaaauacuacaagugg

SEQ ID NO: 257263 - RNA, 19 nt, Artificial Sequence
  Description of Artificial Sequence: Synthetic oligonucleotide
caucagacgauccacaaug

SEQ ID NO: 257264 - RNA, 19 nt, Artificial Sequence
  Description of Artificial Sequence: Synthetic oligonucleotide
ucgguuacaguuaaauaga

SEQ ID NO: 257265 - RNA, 19 nt, Artificial Sequence
  Description of Artificial Sequence: Synthetic oligonucleotide
aaggcaaauacuacaagug

SEQ ID NO: 257266 - RNA, 19 nt, Artificial Sequence
  Description of Artificial Sequence: Synthetic oligonucleotide
uuaaauagaggaagaugac

SEQ ID NO: 257267 - RNA, 19 nt, Artificial Sequence
  Description of Artificial Sequence: Synthetic oligonucleotide
agacgauccacaaugcugc

SEQ ID NO: 257268 - RNA, 19 nt, Artificial Sequence
  Description of Artificial Sequence: Synthetic oligonucleotide
caaggcaauugcuuaaagg

SEQ ID NO: 257269 - RNA, 19 nt, Artificial Sequence
  Description of Artificial Sequence: Synthetic oligonucleotide
cucuacagcuuucacaggg

SEQ ID NO: 257270 - RNA, 19 nt, Artificial Sequence
  Description of Artificial Sequence: Synthetic oligonucleotide
ugauacauaggaaccuuca

SEQ ID NO: 257271 - RNA, 19 nt, Artificial Sequence
  Description of Artificial Sequence: Synthetic oligonucleotide
ugauuauagaguccacgug

SEQ ID NO: 257272 - RNA, 19 nt, Artificial Sequence
  Description of Artificial Sequence: Synthetic oligonucleotide
uucgcguucccucuguucc

SEQ ID NO: 257273 - RNA, 19 nt, Artificial Sequence
  Description of Artificial Sequence: Synthetic oligonucleotide
auagaguccacguguuugg

SEQ ID NO: 257274 - RNA, 19 nt, Artificial Sequence
  Description of Artificial Sequence: Synthetic oligonucleotide
aguuaaauagaggaagaug

SEQ ID NO: 257275 - RNA, 19 nt, Artificial Sequence
  Description of Artificial Sequence: Synthetic oligonucleotide
ugagugugugagcacacag

SEQ ID NO: 257276 - RNA, 19 nt, Artificial Sequence
  Description of Artificial Sequence: Synthetic oligonucleotide
gaaguuugaucagauguag

SEQ ID NO: 257277 - RNA, 19 nt, Artificial Sequence
  Description of Artificial Sequence: Synthetic oligonucleotide
uauagaguccacguguuug

SEQ ID NO: 257278 - RNA, 19 nt, Artificial Sequence
  Description of Artificial Sequence: Synthetic oligonucleotide
agguuuacugccgacacgg

SEQ ID NO: 257279 - RNA, 19 nt, Artificial Sequence
  Description of Artificial Sequence: Synthetic oligonucleotide
aaugggaggagucccucug

SEQ ID NO: 257280 - RNA, 19 nt, Artificial Sequence
  Description of Artificial Sequence: Synthetic oligonucleotide
aucagauguaguaacacug

SEQ ID NO: 257281 - RNA, 19 nt, Artificial Sequence
  Description of Artificial Sequence: Synthetic oligonucleotide
gaaaggacccaacccgagg

SEQ ID NO: 257282 - RNA, 19 nt, Artificial Sequence
  Description of Artificial Sequence: Synthetic oligonucleotide
ucugggccggaauuguugg

SEQ ID NO: 257283 - RNA, 19 nt, Artificial Sequence
  Description of Artificial Sequence: Synthetic oligonucleotide
auucgcuugucccuuucgg

SEQ ID NO: 257284 - RNA, 19 nt, Artificial Sequence
  Description of Artificial Sequence: Synthetic oligonucleotide
aaccaguauuuguguggcc

SEQ ID NO: 257285 - RNA, 19 nt, Artificial Sequence
  Description of Artificial Sequence: Synthetic oligonucleotide
acauccacuguaccccacc

SEQ ID NO: 257286 - RNA, 19 nt, Artificial Sequence
  Description of Artificial Sequence: Synthetic oligonucleotide
ggaaccuucaagcugcacc

SEQ ID NO: 257287 - RNA, 19 nt, Artificial Sequence
  Description of Artificial Sequence: Synthetic oligonucleotide
gagguguccgagcacaagc

SEQ ID NO: 257288 - RNA, 19 nt, Artificial Sequence
  Description of Artificial Sequence: Synthetic oligonucleotide
uccgaggggcgcuacaagg

SEQ ID NO: 257289 - RNA, 19 nt, Artificial Sequence
  Description of Artificial Sequence: Synthetic oligonucleotide
cugcugucggauuucagcc

SEQ ID NO: 257290 - RNA, 19 nt, Artificial Sequence
  Description of Artificial Sequence: Synthetic oligonucleotide
cucgcguucagcucgggcc

SEQ ID NO: 257291 - RNA, 19 nt, Artificial Sequence
  Description of Artificial Sequence: Synthetic oligonucleotide
uuaccagggacccuggcau

SEQ ID NO: 257292 - RNA, 19 nt, Artificial Sequence
  Description of Artificial Sequence: Synthetic oligonucleotide
auuaccccgaagcaaccag

SEQ ID NO: 257293 - RNA, 19 nt, Artificial Sequence
  Description of Artificial Sequence: Synthetic oligonucleotide
cuacaagugguccuucccc

SEQ ID NO: 257294 - RNA, 19 nt, Artificial Sequence
  Description of Artificial Sequence: Synthetic oligonucleotide
uuggacuuagggcugugcu

SEQ ID NO: 257295 - RNA, 19 nt, Artificial Sequence
  Description of Artificial Sequence: Synthetic oligonucleotide
cuuagggcugugcucagcc

SEQ ID NO: 257296 - RNA, 19 nt, Artificial Sequence
  Description of Artificial Sequence: Synthetic oligonucleotide
guuugcuagggguuaccgg

SEQ ID NO: 257297 - RNA, 19 nt, Artificial Sequence
  Description of Artificial Sequence: Synthetic oligonucleotide
aggcaauugcuuaaaggac

SEQ ID NO: 257298 - RNA, 19 nt, Artificial Sequence
  Description of Artificial Sequence: Synthetic oligonucleotide
ucgcuugucccuuucggcc

SEQ ID NO: 257299 - RNA, 19 nt, Artificial Sequence
  Description of Artificial Sequence: Synthetic oligonucleotide
uuacugccgacacggagca

SEQ ID NO: 257300 - RNA, 19 nt, Artificial Sequence
  Description of Artificial Sequence: Synthetic oligonucleotide
gcaaccaguauuugugugg

SEQ ID NO: 257301 - RNA, 19 nt, Artificial Sequence
  Description of Artificial Sequence: Synthetic oligonucleotide
acuggucuuacguccgggg

SEQ ID NO: 257302 - RNA, 19 nt, Artificial Sequence
  Description of Artificial Sequence: Synthetic oligonucleotide
gaguccacguguuugggca

SEQ ID NO: 257303 - RNA, 19 nt, Artificial Sequence
  Description of Artificial Sequence: Synthetic oligonucleotide
ucagcuuuaagccguuguu

SEQ ID NO: 257304 - RNA, 19 nt, Artificial Sequence
  Description of Artificial Sequence: Synthetic oligonucleotide
caugcgcucagcugcaggc

SEQ ID NO: 257305 - RNA, 19 nt, Artificial Sequence
  Description of Artificial Sequence: Synthetic oligonucleotide
ccuucuguagucccgaagg

SEQ ID NO: 257306 - RNA, 19 nt, Artificial Sequence
  Description of Artificial Sequence: Synthetic oligonucleotide
uucgcuugucccuuucggc

SEQ ID NO: 257307 - RNA, 19 nt, Artificial Sequence
  Description of Artificial Sequence: Synthetic oligonucleotide
ugcuucccgccaaagacac

SEQ ID NO: 257308 - RNA, 19 nt, Artificial Sequence
  Description of Artificial Sequence: Synthetic oligonucleotide
ucagccccgguagagagcc

SEQ ID NO: 257309 - RNA, 19 nt, Artificial Sequence
  Description of Artificial Sequence: Synthetic oligonucleotide
aacacugauuccaggcgag

SEQ ID NO: 257310 - RNA, 19 nt, Artificial Sequence
  Description of Artificial Sequence: Synthetic oligonucleotide
ugugagcacacagaugcac

SEQ ID NO: 257311 - RNA, 19 nt, Artificial Sequence
  Description of Artificial Sequence: Synthetic oligonucleotide
uguugauuauagaguccac

SEQ ID NO: 257312 - RNA, 19 nt, Artificial Sequence
  Description of Artificial Sequence: Synthetic oligonucleotide
aucagacgauccacaaugc

SEQ ID NO: 257313 - RNA, 19 nt, Artificial Sequence
  Description of Artificial Sequence: Synthetic oligonucleotide
gaucagauguaguaacacu

SEQ ID NO: 257314 - RNA, 19 nt, Artificial Sequence
  Description of Artificial Sequence: Synthetic oligonucleotide
aaggcguuagcgggcuggc

SEQ ID NO: 257315 - RNA, 19 nt, Artificial Sequence
  Description of Artificial Sequence: Synthetic oligonucleotide
agaugggugucugagugug

SEQ ID NO: 257316 - RNA, 19 nt, Artificial Sequence
  Description of Artificial Sequence: Synthetic oligonucleotide
gauggcugcuucauagcgc

SEQ ID NO: 257317 - RNA, 19 nt, Artificial Sequence
  Description of Artificial Sequence: Synthetic oligonucleotide
ucugagugugugagcacac

SEQ ID NO: 257318 - RNA, 19 nt, Artificial Sequence
  Description of Artificial Sequence: Synthetic oligonucleotide
agggcauuaccccgaagca

SEQ ID NO: 257319 - RNA, 19 nt, Artificial Sequence
  Description of Artificial Sequence: Synthetic oligonucleotide
uuaccccgaagcaaccagu

SEQ ID NO: 257320 - RNA, 19 nt, Artificial Sequence
  Description of Artificial Sequence: Synthetic oligonucleotide
agcgauuggcgcuucuuga

SEQ ID NO: 257321 - RNA, 19 nt, Artificial Sequence
  Description of Artificial Sequence: Synthetic oligonucleotide
ccgcuuguugauuauagag

SEQ ID NO: 257322 - RNA, 19 nt, Artificial Sequence
  Description of Artificial Sequence: Synthetic oligonucleotide
uuagcgggcuggcggaggc

SEQ ID NO: 257323 - RNA, 19 nt, Artificial Sequence
  Description of Artificial Sequence: Synthetic oligonucleotide
agugcggucgggguguccg

SEQ ID NO: 257324 - RNA, 19 nt, Artificial Sequence
  Description of Artificial Sequence: Synthetic oligonucleotide
ucucacagacgcuggcagc

SEQ ID NO: 257325 - RNA, 19 nt, Artificial Sequence
  Description of Artificial Sequence: Synthetic oligonucleotide
aggacccaacccgaggggc

SEQ ID NO: 257326 - RNA, 19 nt, Artificial Sequence
  Description of Artificial Sequence: Synthetic oligonucleotide
aggccgagucucuacagcu

SEQ ID NO: 257327 - RNA, 19 nt, Artificial Sequence
  Description of Artificial Sequence: Synthetic oligonucleotide
caccggagcagcuuccagc

SEQ ID NO: 257328 - RNA, 19 nt, Artificial Sequence
  Description of Artificial Sequence: Synthetic oligonucleotide
cauucgcuugucccuuucg

SEQ ID NO: 257329 - RNA, 19 nt, Artificial Sequence
  Description of Artificial Sequence: Synthetic oligonucleotide
uccgaacccgccccuuggg

SEQ ID NO: 257330 - RNA, 19 nt, Artificial Sequence
  Description of Artificial Sequence: Synthetic oligonucleotide
ccgagcacaagcuauuuac

SEQ ID NO: 257331 - RNA, 19 nt, Artificial Sequence
  Description of Artificial Sequence: Synthetic oligonucleotide
cuuucggccugcaguuucc

SEQ ID NO: 257332 - RNA, 19 nt, Artificial Sequence
  Description of Artificial Sequence: Synthetic oligonucleotide
ggcguuagcgggcuggcgg

SEQ ID NO: 257333 - RNA, 19 nt, Artificial Sequence
  Description of Artificial Sequence: Synthetic oligonucleotide
uccauguagagguguccga

SEQ ID NO: 257334 - RNA, 19 nt, Artificial Sequence
  Description of Artificial Sequence: Synthetic oligonucleotide
uucuucccgggaccgagcu

SEQ ID NO: 257335 - RNA, 19 nt, Artificial Sequence
  Description of Artificial Sequence: Synthetic oligonucleotide
cccgccauagguuugcuag

SEQ ID NO: 257336 - RNA, 19 nt, Artificial Sequence
  Description of Artificial Sequence: Synthetic oligonucleotide
uuauagaguccacguguuu

SEQ ID NO: 257337 - RNA, 19 nt, Artificial Sequence
  Description of Artificial Sequence: Synthetic oligonucleotide
cuuccuccgaacccgcccc

SEQ ID NO: 257338 - RNA, 19 nt, Artificial Sequence
  Description of Artificial Sequence: Synthetic oligonucleotide
uguucgacccagacucuuc

SEQ ID NO: 257339 - RNA, 19 nt, Artificial Sequence
  Description of Artificial Sequence: Synthetic oligonucleotide
ugggcgaugcaguggugcc

SEQ ID NO: 257340 - RNA, 19 nt, Artificial Sequence
  Description of Artificial Sequence: Synthetic oligonucleotide
guagagguguccgagcaca

SEQ ID NO: 257341 - RNA, 19 nt, Artificial Sequence
  Description of Artificial Sequence: Synthetic oligonucleotide
caaggcguuagcgggcugg

SEQ ID NO: 257342 - RNA, 19 nt, Artificial Sequence
  Description of Artificial Sequence: Synthetic oligonucleotide
gccgcuagguacuuggccc

SEQ ID NO: 257343 - RNA, 19 nt, Artificial Sequence
  Description of Artificial Sequence: Synthetic oligonucleotide
cagguuuacugccgacacg

SEQ ID NO: 257344 - RNA, 19 nt, Artificial Sequence
  Description of Artificial Sequence: Synthetic oligonucleotide
ucgcguucagcucgggccu

SEQ ID NO: 257345 - RNA, 19 nt, Artificial Sequence
  Description of Artificial Sequence: Synthetic oligonucleotide
ugugcucagccccgguaga

SEQ ID NO: 257346 - RNA, 19 nt, Artificial Sequence
  Description of Artificial Sequence: Synthetic oligonucleotide
ggguguccgagccaggaag

SEQ ID NO: 257347 - RNA, 19 nt, Artificial Sequence
  Description of Artificial Sequence: Synthetic oligonucleotide
agccgcuuguugauuauag

SEQ ID NO: 257348 - RNA, 19 nt, Artificial Sequence
  Description of Artificial Sequence: Synthetic oligonucleotide
uguccgagcacaagcuauu

SEQ ID NO: 257349 - RNA, 19 nt, Artificial Sequence
  Description of Artificial Sequence: Synthetic oligonucleotide
auuggcgcuucuugaggcu

SEQ ID NO: 257350 - RNA, 19 nt, Artificial Sequence
  Description of Artificial Sequence: Synthetic oligonucleotide
auuauagaguccacguguu

SEQ ID NO: 257351 - RNA, 19 nt, Artificial Sequence
  Description of Artificial Sequence: Synthetic oligonucleotide
gaugaccagggagccuugg

SEQ ID NO: 257352 - RNA, 19 nt, Artificial Sequence
  Description of Artificial Sequence: Synthetic oligonucleotide
gggacugccuccuguaccc

SEQ ID NO: 257353 - RNA, 19 nt, Artificial Sequence
  Description of Artificial Sequence: Synthetic oligonucleotide
cagaggacuuugagagccg

SEQ ID NO: 257354 - RNA, 19 nt, Artificial Sequence
  Description of Artificial Sequence: Synthetic oligonucleotide
ugucccuuucggccugcag

SEQ ID NO: 257355 - RNA, 19 nt, Artificial Sequence
  Description of Artificial Sequence: Synthetic oligonucleotide
ggcauuaccccgaagcaac

SEQ ID NO: 257356 - RNA, 19 nt, Artificial Sequence
  Description of Artificial Sequence: Synthetic oligonucleotide
cagaaaggacccaacccga

SEQ ID NO: 257357 - RNA, 19 nt, Artificial Sequence
  Description of Artificial Sequence: Synthetic oligonucleotide
agaaaggacccaacccgag

SEQ ID NO: 257358 - RNA, 19 nt, Artificial Sequence
  Description of Artificial Sequence: Synthetic oligonucleotide
gagugugugagcacacaga

SEQ ID NO: 257359 - RNA, 19 nt, Artificial Sequence
  Description of Artificial Sequence: Synthetic oligonucleotide
cagcuuuaagccguuguuc

SEQ ID NO: 257360 - RNA, 19 nt, Artificial Sequence
  Description of Artificial Sequence: Synthetic oligonucleotide
ugggccggaauuguuggcu

SEQ ID NO: 257361 - RNA, 19 nt, Artificial Sequence
  Description of Artificial Sequence: Synthetic oligonucleotide
gguuugcuagggguuaccg

SEQ ID NO: 257362 - RNA, 19 nt, Artificial Sequence
  Description of Artificial Sequence: Synthetic oligonucleotide
cagcgauuggcgcuucuug

SEQ ID NO: 257363 - RNA, 19 nt, Artificial Sequence
  Description of Artificial Sequence: Synthetic oligonucleotide
uuggcgcuucuugaggcug

SEQ ID NO: 257364 - RNA, 19 nt, Artificial Sequence
  Description of Artificial Sequence: Synthetic oligonucleotide
gacggggugcagcggugcg

SEQ ID NO: 257365 - RNA, 19 nt, Artificial Sequence
  Description of Artificial Sequence: Synthetic oligonucleotide
uacaaggcguuagcgggcu

SEQ ID NO: 257366 - RNA, 19 nt, Artificial Sequence
  Description of Artificial Sequence: Synthetic oligonucleotide
ucgggcucucuuuugccuc

SEQ ID NO: 257367 - RNA, 19 nt, Artificial Sequence
  Description of Artificial Sequence: Synthetic oligonucleotide
uucuugaggcugcgcucgc

SEQ ID NO: 257368 - RNA, 19 nt, Artificial Sequence
  Description of Artificial Sequence: Synthetic oligonucleotide
ggacuuagggcugugcuca

SEQ ID NO: 257369 - RNA, 19 nt, Artificial Sequence
  Description of Artificial Sequence: Synthetic oligonucleotide
cagaccuggguucucccuc

SEQ ID NO: 257370 - RNA, 19 nt, Artificial Sequence
  Description of Artificial Sequence: Synthetic oligonucleotide
augagugcggucggggugu

SEQ ID NO: 257371 - RNA, 19 nt, Artificial Sequence
  Description of Artificial Sequence: Synthetic oligonucleotide
cuucgcguucccucuguuc

SEQ ID NO: 257372 - RNA, 19 nt, Artificial Sequence
  Description of Artificial Sequence: Synthetic oligonucleotide
gacuuagggcugugcucag

SEQ ID NO: 257373 - RNA, 19 nt, Artificial Sequence
  Description of Artificial Sequence: Synthetic oligonucleotide
cuccgaacccgccccuugg

SEQ ID NO: 257374 - RNA, 19 nt, Artificial Sequence
  Description of Artificial Sequence: Synthetic oligonucleotide
cuucuucccgggaccgagc

SEQ ID NO: 257375 - RNA, 19 nt, Artificial Sequence
  Description of Artificial Sequence: Synthetic oligonucleotide
gacuuccgaguccucuuca

SEQ ID NO: 257376 - RNA, 19 nt, Artificial Sequence
  Description of Artificial Sequence: Synthetic oligonucleotide
gcgauuggcgcuucuugag

SEQ ID NO: 257377 - RNA, 19 nt, Artificial Sequence
  Description of Artificial Sequence: Synthetic oligonucleotide
gagagccgcuuguugauua

SEQ ID NO: 257378 - RNA, 19 nt, Artificial Sequence
  Description of Artificial Sequence: Synthetic oligonucleotide
gucugggccggaauuguug

SEQ ID NO: 257379 - RNA, 19 nt, Artificial Sequence
  Description of Artificial Sequence: Synthetic oligonucleotide
ggcuggcggaggcugagcg

SEQ ID NO: 257380 - RNA, 19 nt, Artificial Sequence
  Description of Artificial Sequence: Synthetic oligonucleotide
gagggacugccuccuguac

SEQ ID NO: 257381 - RNA, 19 nt, Artificial Sequence
  Description of Artificial Sequence: Synthetic oligonucleotide
ugucggauuucagcccaug

SEQ ID NO: 257382 - RNA, 19 nt, Artificial Sequence
  Description of Artificial Sequence: Synthetic oligonucleotide
gaacccgccccuugggcga

SEQ ID NO: 257383 - RNA, 19 nt, Artificial Sequence
  Description of Artificial Sequence: Synthetic oligonucleotide
ccauuuaccagggacccug

SEQ ID NO: 257384 - RNA, 19 nt, Artificial Sequence
  Description of Artificial Sequence: Synthetic oligonucleotide
caacccgaggggcccaggc

SEQ ID NO: 257385 - RNA, 19 nt, Artificial Sequence
  Description of Artificial Sequence: Synthetic oligonucleotide
ggaccagcgcugcugucgg

SEQ ID NO: 257386 - RNA, 19 nt, Artificial Sequence
  Description of Artificial Sequence: Synthetic oligonucleotide
ggccauuuaccagggaccc

SEQ ID NO: 257387 - RNA, 19 nt, Artificial Sequence
  Description of Artificial Sequence: Synthetic oligonucleotide
gggaccgagcuucagcuuc

SEQ ID NO: 257388 - RNA, 19 nt, Artificial Sequence
  Description of Artificial Sequence: Synthetic oligonucleotide
ugcucccacuggucuuacg

SEQ ID NO: 257389 - RNA, 19 nt, Artificial Sequence
  Description of Artificial Sequence: Synthetic oligonucleotide
uccuuccuccgaacccgcc

SEQ ID NO: 257390 - RNA, 19 nt, Artificial Sequence
  Description of Artificial Sequence: Synthetic oligonucleotide
gccauagguuugcuagggg

SEQ ID NO: 257391 - RNA, 19 nt, Artificial Sequence
  Description of Artificial Sequence: Synthetic oligonucleotide
guucccgccauagguuugc

SEQ ID NO: 257392 - RNA, 19 nt, Artificial Sequence
  Description of Artificial Sequence: Synthetic oligonucleotide
gccguuguuccuccagccg

SEQ ID NO: 257393 - RNA, 19 nt, Artificial Sequence
  Description of Artificial Sequence: Synthetic oligonucleotide
guuagcgggcuggcggagg

SEQ ID NO: 257394 - RNA, 19 nt, Artificial Sequence
  Description of Artificial Sequence: Synthetic oligonucleotide
agcguggcagaggacuuug

SEQ ID NO: 257395 - RNA, 19 nt, Artificial Sequence
  Description of Artificial Sequence: Synthetic oligonucleotide
ggcaauugcuuaaaggacu

SEQ ID NO: 257396 - RNA, 19 nt, Artificial Sequence
  Description of Artificial Sequence: Synthetic oligonucleotide
gcugcacccggguccaagg

SEQ ID NO: 257397 - RNA, 19 nt, Artificial Sequence
  Description of Artificial Sequence: Synthetic oligonucleotide
acggggugcagcggugcgc

SEQ ID NO: 257398 - RNA, 19 nt, Artificial Sequence
  Description of Artificial Sequence: Synthetic oligonucleotide
caaugcggggcugccgccg

SEQ ID NO: 257399 - RNA, 19 nt, Artificial Sequence
  Description of Artificial Sequence: Synthetic oligonucleotide
acgcuggcagcgauuggcg

SEQ ID NO: 257400 - RNA, 19 nt, Artificial Sequence
  Description of Artificial Sequence: Synthetic oligonucleotide
cugggccggaauuguuggc

SEQ ID NO: 257401 - RNA, 19 nt, Artificial Sequence
  Description of Artificial Sequence: Synthetic oligonucleotide
agagccgcuuguugauuau

SEQ ID NO: 257402 - RNA, 19 nt, Artificial Sequence
  Description of Artificial Sequence: Synthetic oligonucleotide
guccacguguuugggcagg

SEQ ID NO: 257403 - RNA, 19 nt, Artificial Sequence
  Description of Artificial Sequence: Synthetic oligonucleotide
agggcgcucuuuuccuucu

SEQ ID NO: 257404 - RNA, 19 nt, Artificial Sequence
  Description of Artificial Sequence: Synthetic oligonucleotide
gucggcggcgcuccuggag

SEQ ID NO: 257405 - RNA, 19 nt, Artificial Sequence
  Description of Artificial Sequence: Synthetic oligonucleotide
gggaugagugcggucgggg

SEQ ID NO: 257406 - RNA, 19 nt, Artificial Sequence
  Description of Artificial Sequence: Synthetic oligonucleotide
ccgguagagagccuggguc

SEQ ID NO: 257407 - RNA, 19 nt, Artificial Sequence
  Description of Artificial Sequence: Synthetic oligonucleotide
ggcgucaucagacgaucca

SEQ ID NO: 257408 - RNA, 19 nt, Artificial Sequence
  Description of Artificial Sequence: Synthetic oligonucleotide
cauccacuguaccccacca

SEQ ID NO: 257409 - RNA, 19 nt, Artificial Sequence
  Description of Artificial Sequence: Synthetic oligonucleotide
cugcacccggguccaaggc

SEQ ID NO: 257410 - RNA, 19 nt, Artificial Sequence
  Description of Artificial Sequence: Synthetic oligonucleotide
ggccgcuagguacuuggcc

SEQ ID NO: 257411 - RNA, 19 nt, Artificial Sequence
  Description of Artificial Sequence: Synthetic oligonucleotide
gcgcucgcgggccagggcg

SEQ ID NO: 257412 - RNA, 19 nt, Artificial Sequence
  Description of Artificial Sequence: Synthetic oligonucleotide
ggcucgggcucucuuuugc

SEQ ID NO: 257413 - RNA, 19 nt, Artificial Sequence
  Description of Artificial Sequence: Synthetic oligonucleotide
cuccgaggggcgcuacaag

SEQ ID NO: 257414 - RNA, 19 nt, Artificial Sequence
  Description of Artificial Sequence: Synthetic oligonucleotide
ugcugugguucuuguccuc

SEQ ID NO: 257415 - RNA, 19 nt, Artificial Sequence
  Description of Artificial Sequence: Synthetic oligonucleotide
ugcaccggagcagcuucca

SEQ ID NO: 257416 - RNA, 19 nt, Artificial Sequence
  Description of Artificial Sequence: Synthetic oligonucleotide
cacauccacuguaccccac

SEQ ID NO: 257417 - RNA, 19 nt, Artificial Sequence
  Description of Artificial Sequence: Synthetic oligonucleotide
ugcggucgggguguccgag

SEQ ID NO: 257418 - RNA, 19 nt, Artificial Sequence
  Description of Artificial Sequence: Synthetic oligonucleotide
ucggccucgcguucagcuc

SEQ ID NO: 257419 - RNA, 19 nt, Artificial Sequence
  Description of Artificial Sequence: Synthetic oligonucleotide
ccacacugccuucuuggcc

SEQ ID NO: 257420 - RNA, 19 nt, Artificial Sequence
  Description of Artificial Sequence: Synthetic oligonucleotide
ucuucgcguucccucuguu

SEQ ID NO: 257421 - RNA, 19 nt, Artificial Sequence
  Description of Artificial Sequence: Synthetic oligonucleotide
accccgaagcaaccaguau

SEQ ID NO: 257422 - RNA, 19 nt, Artificial Sequence
  Description of Artificial Sequence: Synthetic oligonucleotide
acguguuugggcagguuua

SEQ ID NO: 257423 - RNA, 19 nt, Artificial Sequence
  Description of Artificial Sequence: Synthetic oligonucleotide
cauuaccccgaagcaacca

SEQ ID NO: 257424 - RNA, 19 nt, Artificial Sequence
  Description of Artificial Sequence: Synthetic oligonucleotide
cuucccgccaaagacacau

SEQ ID NO: 257425 - RNA, 19 nt, Artificial Sequence
  Description of Artificial Sequence: Synthetic oligonucleotide
ugcgcucgcgggccagggc

SEQ ID NO: 257426 - RNA, 19 nt, Artificial Sequence
  Description of Artificial Sequence: Synthetic oligonucleotide
ccgcuagguacuuggcccg

SEQ ID NO: 257427 - RNA, 19 nt, Artificial Sequence
  Description of Artificial Sequence: Synthetic oligonucleotide
agucuagaaggugcagauu

SEQ ID NO: 257428 - RNA, 19 nt, Artificial Sequence
  Description of Artificial Sequence: Synthetic oligonucleotide
cgaacccgccccuugggcg

SEQ ID NO: 257429 - RNA, 19 nt, Artificial Sequence
  Description of Artificial Sequence: Synthetic oligonucleotide
guugagggcugcucuuucu

SEQ ID NO: 257430 - RNA, 19 nt, Artificial Sequence
  Description of Artificial Sequence: Synthetic oligonucleotide
gcgcuacaaggcguuagcg

SEQ ID NO: 257431 - RNA, 19 nt, Artificial Sequence
  Description of Artificial Sequence: Synthetic oligonucleotide
cuguagucccgaaggccga

SEQ ID NO: 257432 - RNA, 19 nt, Artificial Sequence
  Description of Artificial Sequence: Synthetic oligonucleotide
gagggcgcuggugacacua

SEQ ID NO: 257433 - RNA, 19 nt, Artificial Sequence
  Description of Artificial Sequence: Synthetic oligonucleotide
uccccggacggggugcagc

SEQ ID NO: 257434 - RNA, 19 nt, Artificial Sequence
  Description of Artificial Sequence: Synthetic oligonucleotide
cuugggcgaugcaguggug

SEQ ID NO: 257435 - RNA, 19 nt, Artificial Sequence
  Description of Artificial Sequence: Synthetic oligonucleotide
gcugagcgugggcacacug

SEQ ID NO: 257436 - RNA, 19 nt, Artificial Sequence
  Description of Artificial Sequence: Synthetic oligonucleotide
uucccgggaccgagcuuca

SEQ ID NO: 257437 - RNA, 19 nt, Artificial Sequence
  Description of Artificial Sequence: Synthetic oligonucleotide
uccacguguuugggcaggu

SEQ ID NO: 257438 - RNA, 19 nt, Artificial Sequence
  Description of Artificial Sequence: Synthetic oligonucleotide
acaaggcguuagcgggcug

SEQ ID NO: 257439 - RNA, 19 nt, Artificial Sequence
  Description of Artificial Sequence: Synthetic oligonucleotide
gggccggaauuguuggcug

SEQ ID NO: 257440 - RNA, 19 nt, Artificial Sequence
  Description of Artificial Sequence: Synthetic oligonucleotide
gagucugcuucccgccaaa

SEQ ID NO: 257441 - RNA, 19 nt, Artificial Sequence
  Description of Artificial Sequence: Synthetic oligonucleotide
gcgucaucagacgauccac

SEQ ID NO: 257442 - RNA, 19 nt, Artificial Sequence
  Description of Artificial Sequence: Synthetic oligonucleotide
caguuaaauagaggaagau

SEQ ID NO: 257443 - RNA, 19 nt, Artificial Sequence
  Description of Artificial Sequence: Synthetic oligonucleotide
cugguguucgacccagacu

SEQ ID NO: 257444 - RNA, 19 nt, Artificial Sequence
  Description of Artificial Sequence: Synthetic oligonucleotide
aggcguuagcgggcuggcg

SEQ ID NO: 257445 - RNA, 19 nt, Artificial Sequence
  Description of Artificial Sequence: Synthetic oligonucleotide
augcgcucagcugcaggcu

SEQ ID NO: 257446 - RNA, 19 nt, Artificial Sequence
  Description of Artificial Sequence: Synthetic oligonucleotide
cucggccucgcguucagcu

SEQ ID NO: 257447 - RNA, 19 nt, Artificial Sequence
  Description of Artificial Sequence: Synthetic oligonucleotide
cgaggggcgcuacaaggcg

SEQ ID NO: 257448 - RNA, 19 nt, Artificial Sequence
  Description of Artificial Sequence: Synthetic oligonucleotide
ccauagguuugcuaggggu

SEQ ID NO: 257449 - RNA, 19 nt, Artificial Sequence
  Description of Artificial Sequence: Synthetic oligonucleotide
gacgauccacaaugcugcu

SEQ ID NO: 257450 - RNA, 19 nt, Artificial Sequence
  Description of Artificial Sequence: Synthetic oligonucleotide
ucccgccauagguuugcua

SEQ ID NO: 257451 - RNA, 19 nt, Artificial Sequence
  Description of Artificial Sequence: Synthetic oligonucleotide
cacguguuugggcagguuu

SEQ ID NO: 257452 - RNA, 19 nt, Artificial Sequence
  Description of Artificial Sequence: Synthetic oligonucleotide
gguugcaccacugccuucu

SEQ ID NO: 257453 - RNA, 19 nt, Artificial Sequence
  Description of Artificial Sequence: Synthetic oligonucleotide
ugaccgcuggauggcugcu

SEQ ID NO: 257454 - RNA, 19 nt, Artificial Sequence
  Description of Artificial Sequence: Synthetic oligonucleotide
gcauuaccccgaagcaacc

SEQ ID NO: 257455 - RNA, 19 nt, Artificial Sequence
  Description of Artificial Sequence: Synthetic oligonucleotide
ccggaauuguuggcugugg

SEQ ID NO: 257456 - RNA, 19 nt, Artificial Sequence
  Description of Artificial Sequence: Synthetic oligonucleotide
agaugaccagggagccuug

SEQ ID NO: 257457 - RNA, 19 nt, Artificial Sequence
  Description of Artificial Sequence: Synthetic oligonucleotide
guguccgagcacaagcuau

SEQ ID NO: 257458 - RNA, 19 nt, Artificial Sequence
  Description of Artificial Sequence: Synthetic oligonucleotide
gggcgcuacaaggcguuag

SEQ ID NO: 257459 - RNA, 19 nt, Artificial Sequence
  Description of Artificial Sequence: Synthetic oligonucleotide
cccgggaccgagcuucagc

SEQ ID NO: 257460 - RNA, 19 nt, Artificial Sequence
  Description of Artificial Sequence: Synthetic oligonucleotide
gugugagcacacagaugca

SEQ ID NO: 257461 - RNA, 19 nt, Artificial Sequence
  Description of Artificial Sequence: Synthetic oligonucleotide
cggccucgcguucagcucg

SEQ ID NO: 257462 - RNA, 19 nt, Artificial Sequence
  Description of Artificial Sequence: Synthetic oligonucleotide
guguccgagccaggaagga

SEQ ID NO: 257463 - RNA, 19 nt, Artificial Sequence
  Description of Artificial Sequence: Synthetic oligonucleotide
ugaugggcucgggcucucu

SEQ ID NO: 257464 - RNA, 19 nt, Artificial Sequence
  Description of Artificial Sequence: Synthetic oligonucleotide
cgagcacaagcuauuuaca

SEQ ID NO: 257465 - RNA, 19 nt, Artificial Sequence
  Description of Artificial Sequence: Synthetic oligonucleotide
gcaccggagcagcuuccag

SEQ ID NO: 257466 - RNA, 19 nt, Artificial Sequence
  Description of Artificial Sequence: Synthetic oligonucleotide
ccccggacggggugcagcg

SEQ ID NO: 257467 - RNA, 19 nt, Artificial Sequence
  Description of Artificial Sequence: Synthetic oligonucleotide
ccucgguuacaguuaaaua

SEQ ID NO: 257468 - RNA, 19 nt, Artificial Sequence
  Description of Artificial Sequence: Synthetic oligonucleotide
gggcauuaccccgaagcaa

SEQ ID NO: 257469 - RNA, 19 nt, Artificial Sequence
  Description of Artificial Sequence: Synthetic oligonucleotide
uugucccuuucggccugca

SEQ ID NO: 257470 - RNA, 19 nt, Artificial Sequence
  Description of Artificial Sequence: Synthetic oligonucleotide
uccagccggcggcgggcca

SEQ ID NO: 257471 - RNA, 19 nt, Artificial Sequence
  Description of Artificial Sequence: Synthetic oligonucleotide
gguucccgccauagguuug

SEQ ID NO: 257472 - RNA, 19 nt, Artificial Sequence
  Description of Artificial Sequence: Synthetic oligonucleotide
uucccgccauagguuugcu

SEQ ID NO: 257473 - RNA, 19 nt, Artificial Sequence
  Description of Artificial Sequence: Synthetic oligonucleotide
gcauucgcuugucccuuuc

SEQ ID NO: 257474 - RNA, 19 nt, Artificial Sequence
  Description of Artificial Sequence: Synthetic oligonucleotide
gcguuagcgggcuggcgga

SEQ ID NO: 257475 - RNA, 19 nt, Artificial Sequence
  Description of Artificial Sequence: Synthetic oligonucleotide
gagccgcuuguugauuaua

SEQ ID NO: 257476 - RNA, 19 nt, Artificial Sequence
  Description of Artificial Sequence: Synthetic oligonucleotide
ccucgcguucagcucgggc

SEQ ID NO: 257477 - RNA, 19 nt, Artificial Sequence
  Description of Artificial Sequence: Synthetic oligonucleotide
gcgaugcaguggugccucg

SEQ ID NO: 257478 - RNA, 19 nt, Artificial Sequence
  Description of Artificial Sequence: Synthetic oligonucleotide
gaggggcgcuacaaggcgu

SEQ ID NO: 257479 - RNA, 19 nt, Artificial Sequence
  Description of Artificial Sequence: Synthetic oligonucleotide
gugcgcgcuccgaggggcg

SEQ ID NO: 257480 - RNA, 19 nt, Artificial Sequence
  Description of Artificial Sequence: Synthetic oligonucleotide
cgaagcaaccaguauuugu

SEQ ID NO: 257481 - RNA, 19 nt, Artificial Sequence
  Description of Artificial Sequence: Synthetic oligonucleotide
gggcgucaucagacgaucc

SEQ ID NO: 257482 - RNA, 19 nt, Artificial Sequence
  Description of Artificial Sequence: Synthetic oligonucleotide
ccgagucucuacagcuuuc

SEQ ID NO: 257483 - RNA, 19 nt, Artificial Sequence
  Description of Artificial Sequence: Synthetic oligonucleotide
gcccugaugggcucgggcu

SEQ ID NO: 257484 - RNA, 19 nt, Artificial Sequence
  Description of Artificial Sequence: Synthetic oligonucleotide
aggggcgcuacaaggcguu

SEQ ID NO: 257485 - RNA, 19 nt, Artificial Sequence
  Description of Artificial Sequence: Synthetic oligonucleotide
ggacggggugcagcggugc

SEQ ID NO: 257486 - RNA, 19 nt, Artificial Sequence
  Description of Artificial Sequence: Synthetic oligonucleotide
ucccgccuccgagccucgg

SEQ ID NO: 257487 - RNA, 19 nt, Artificial Sequence
  Description of Artificial Sequence: Synthetic oligonucleotide
cguguuugggcagguuuac

SEQ ID NO: 257488 - RNA, 19 nt, Artificial Sequence
  Description of Artificial Sequence: Synthetic oligonucleotide
ccuugggcgaugcaguggu

SEQ ID NO: 257489 - RNA, 19 nt, Artificial Sequence
  Description of Artificial Sequence: Synthetic oligonucleotide
cgggcucucuuuugccucc

SEQ ID NO: 257490 - RNA, 19 nt, Artificial Sequence
  Description of Artificial Sequence: Synthetic oligonucleotide
gagugcggucggggugucc

SEQ ID NO: 257491 - RNA, 19 nt, Artificial Sequence
  Description of Artificial Sequence: Synthetic oligonucleotide
ccggcaccgggcuugcguc

SEQ ID NO: 257492 - RNA, 19 nt, Artificial Sequence
  Description of Artificial Sequence: Synthetic oligonucleotide
aggcccugaugggcucggg

SEQ ID NO: 257493 - RNA, 19 nt, Artificial Sequence
  Description of Artificial Sequence: Synthetic oligonucleotide
gguuuacugccgacacgga

SEQ ID NO: 257494 - RNA, 19 nt, Artificial Sequence
  Description of Artificial Sequence: Synthetic oligonucleotide
ccccuugggcgaugcagug

SEQ ID NO: 257495 - RNA, 19 nt, Artificial Sequence
  Description of Artificial Sequence: Synthetic oligonucleotide
guguuugggcagguuuacu

SEQ ID NO: 257496 - RNA, 19 nt, Artificial Sequence
  Description of Artificial Sequence: Synthetic oligonucleotide
ugagugcggucgggguguc

SEQ ID NO: 257497 - RNA, 19 nt, Artificial Sequence
  Description of Artificial Sequence: Synthetic oligonucleotide
ccgaagcaaccaguauuug

SEQ ID NO: 257498 - RNA, 19 nt, Artificial Sequence
  Description of Artificial Sequence: Synthetic oligonucleotide
aacccgccccuugggcgau

SEQ ID NO: 257499 - RNA, 19 nt, Artificial Sequence
  Description of Artificial Sequence: Synthetic oligonucleotide
ccuccgaacccgccccuug

SEQ ID NO: 257500 - RNA, 19 nt, Artificial Sequence
  Description of Artificial Sequence: Synthetic oligonucleotide
uacugccgacacggagcac

SEQ ID NO: 257501 - RNA, 19 nt, Artificial Sequence
  Description of Artificial Sequence: Synthetic oligonucleotide
gccccgguagagagccugg

SEQ ID NO: 257502 - RNA, 19 nt, Artificial Sequence
  Description of Artificial Sequence: Synthetic oligonucleotide
uccuccgaacccgccccuu

SEQ ID NO: 257503 - RNA, 19 nt, Artificial Sequence
  Description of Artificial Sequence: Synthetic oligonucleotide
ggguccaaggcaauugcuu

SEQ ID NO: 257504 - RNA, 19 nt, Artificial Sequence
  Description of Artificial Sequence: Synthetic oligonucleotide
gggguugcaccacugccuu

SEQ ID NO: 257505 - RNA, 19 nt, Artificial Sequence
  Description of Artificial Sequence: Synthetic oligonucleotide
gccgccggcaccgggcuug

SEQ ID NO: 257506 - RNA, 19 nt, Artificial Sequence
  Description of Artificial Sequence: Synthetic oligonucleotide
gugcggucgggguguccga

SEQ ID NO: 257507 - RNA, 19 nt, Artificial Sequence
  Description of Artificial Sequence: Synthetic oligonucleotide
ggccucgcguucagcucgg

SEQ ID NO: 257508 - RNA, 19 nt, Artificial Sequence
  Description of Artificial Sequence: Synthetic oligonucleotide
gggguguccgagccaggaa

SEQ ID NO: 257509 - RNA, 19 nt, Artificial Sequence
  Description of Artificial Sequence: Synthetic oligonucleotide
ccgggaccgagcuucagcu

SEQ ID NO: 257510 - RNA, 19 nt, Artificial Sequence
  Description of Artificial Sequence: Synthetic oligonucleotide
ccguuguuccuccagccgu

SEQ ID NO: 257511 - RNA, 19 nt, Artificial Sequence
  Description of Artificial Sequence: Synthetic oligonucleotide
gccgagucucuacagcuuu

SEQ ID NO: 257512 - RNA, 19 nt, Artificial Sequence
  Description of Artificial Sequence: Synthetic oligonucleotide
cgaugcaguggugccucgg

SEQ ID NO: 257513 - RNA, 19 nt, Artificial Sequence
  Description of Artificial Sequence: Synthetic oligonucleotide
guagucccgaaggccgagu

SEQ ID NO: 257514 - RNA, 19 nt, Artificial Sequence
  Description of Artificial Sequence: Synthetic oligonucleotide
ggguugcaccacugccuuc

SEQ ID NO: 257515 - RNA, 19 nt, Artificial Sequence
  Description of Artificial Sequence: Synthetic oligonucleotide
gcgcgcuccccggacgggg

SEQ ID NO: 257516 - RNA, 19 nt, Artificial Sequence
  Description of Artificial Sequence: Synthetic oligonucleotide
caccgggcuugcgucgcuc

SEQ ID NO: 257517 - RNA, 19 nt, Artificial Sequence
  Description of Artificial Sequence: Synthetic oligonucleotide
gucgcucggcgcgcucccc

SEQ ID NO: 257518 - RNA, 19 nt, Artificial Sequence
  Description of Artificial Sequence: Synthetic oligonucleotide
cccgccuccgagccucggc

SEQ ID NO: 257519 - RNA, 19 nt, Artificial Sequence
  Description of Artificial Sequence: Synthetic oligonucleotide
gcugcgcucgcgggccagg

SEQ ID NO: 257520 - RNA, 19 nt, Artificial Sequence
  Description of Artificial Sequence: Synthetic oligonucleotide
ggccggaauuguuggcugu

SEQ ID NO: 257521 - RNA, 19 nt, Artificial Sequence
  Description of Artificial Sequence: Synthetic oligonucleotide
guguucgacccagacucuu

SEQ ID NO: 257522 - RNA, 19 nt, Artificial Sequence
  Description of Artificial Sequence: Synthetic oligonucleotide
gccuccgagccucggccuc

SEQ ID NO: 257523 - RNA, 19 nt, Artificial Sequence
  Description of Artificial Sequence: Synthetic oligonucleotide
cagcggugucugcaggagu

SEQ ID NO: 257524 - RNA, 19 nt, Artificial Sequence
  Description of Artificial Sequence: Synthetic oligonucleotide
cccucgguuacaguuaaau

SEQ ID NO: 257525 - RNA, 19 nt, Artificial Sequence
  Description of Artificial Sequence: Synthetic oligonucleotide
uggcagcgauuggcgcuuc

SEQ ID NO: 257526 - RNA, 19 nt, Artificial Sequence
  Description of Artificial Sequence: Synthetic oligonucleotide
gggcgcucuuuuccuucuc

SEQ ID NO: 257527 - RNA, 19 nt, Artificial Sequence
  Description of Artificial Sequence: Synthetic oligonucleotide
guccgagcacaagcuauuu

SEQ ID NO: 257528 - RNA, 19 nt, Artificial Sequence
  Description of Artificial Sequence: Synthetic oligonucleotide
uggccgggccuuggacuua

SEQ ID NO: 257529 - RNA, 19 nt, Artificial Sequence
  Description of Artificial Sequence: Synthetic oligonucleotide
gccggcaccgggcuugcgu

SEQ ID NO: 257530 - RNA, 19 nt, Artificial Sequence
  Description of Artificial Sequence: Synthetic oligonucleotide
ggcgcgcuccccggacggg

SEQ ID NO: 257531 - RNA, 19 nt, Artificial Sequence
  Description of Artificial Sequence: Synthetic oligonucleotide
ccccucguucccagaccug

SEQ ID NO: 257532 - RNA, 19 nt, Artificial Sequence
  Description of Artificial Sequence: Synthetic oligonucleotide
gguguucgacccagacucu

SEQ ID NO: 257533 - RNA, 19 nt, Artificial Sequence
  Description of Artificial Sequence: Synthetic oligonucleotide
ggacugccuccuguaccca

SEQ ID NO: 257534 - RNA, 19 nt, Artificial Sequence
  Description of Artificial Sequence: Synthetic oligonucleotide
gcgcuccccggacggggug

SEQ ID NO: 257535 - RNA, 19 nt, Artificial Sequence
  Description of Artificial Sequence: Synthetic oligonucleotide
agccgucggcggcgcuccu

SEQ ID NO: 257536 - RNA, 19 nt, Artificial Sequence
  Description of Artificial Sequence: Synthetic oligonucleotide
cgcuagguacuuggcccgc

SEQ ID NO: 257537 - RNA, 19 nt, Artificial Sequence
  Description of Artificial Sequence: Synthetic oligonucleotide
cgucgcucggcgcgcuccc

SEQ ID NO: 257538 - RNA, 19 nt, Artificial Sequence
  Description of Artificial Sequence: Synthetic oligonucleotide
cucgcgggccagggcgcuc

SEQ ID NO: 257539 - RNA, 19 nt, Artificial Sequence
  Description of Artificial Sequence: Synthetic oligonucleotide
cguuagcgggcuggcggag

SEQ ID NO: 257540 - RNA, 19 nt, Artificial Sequence
  Description of Artificial Sequence: Synthetic oligonucleotide
cguucagcucgggccucgg

SEQ ID NO: 257541 - RNA, 19 nt, Artificial Sequence
  Description of Artificial Sequence: Synthetic oligonucleotide
gccauuuaccagggacccu

SEQ ID NO: 257542 - RNA, 19 nt, Artificial Sequence
  Description of Artificial Sequence: Synthetic oligonucleotide
cccgccccuugggcgaugc

SEQ ID NO: 257543 - RNA, 19 nt, Artificial Sequence
  Description of Artificial Sequence: Synthetic oligonucleotide
gcuucccgccaaagacaca

SEQ ID NO: 257544 - RNA, 19 nt, Artificial Sequence
  Description of Artificial Sequence: Synthetic oligonucleotide
gccucgcguucagcucggg

SEQ ID NO: 257545 - RNA, 19 nt, Artificial Sequence
  Description of Artificial Sequence: Synthetic oligonucleotide
ggcagcgauuggcgcuucu

SEQ ID NO: 257546 - RNA, 19 nt, Artificial Sequence
  Description of Artificial Sequence: Synthetic oligonucleotide
cccgguagagagccugggu

SEQ ID NO: 257547 - RNA, 19 nt, Artificial Sequence
  Description of Artificial Sequence: Synthetic oligonucleotide
gcagcgauuggcgcuucuu

SEQ ID NO: 257548 - RNA, 19 nt, Artificial Sequence
  Description of Artificial Sequence: Synthetic oligonucleotide
ccgacacggagcaccugcu

SEQ ID NO: 257549 - RNA, 19 nt, Artificial Sequence
  Description of Artificial Sequence: Synthetic oligonucleotide
ccggacggggugcagcggu

SEQ ID NO: 257550 - RNA, 19 nt, Artificial Sequence
  Description of Artificial Sequence: Synthetic oligonucleotide
acccgccccuugggcgaug

SEQ ID NO: 257551 - RNA, 19 nt, Artificial Sequence
  Description of Artificial Sequence: Synthetic oligonucleotide
cacccggguccaaggcaau

SEQ ID NO: 257552 - RNA, 19 nt, Artificial Sequence
  Description of Artificial Sequence: Synthetic oligonucleotide
cggguccaaggcaauugcu

SEQ ID NO: 257553 - RNA, 19 nt, Artificial Sequence
  Description of Artificial Sequence: Synthetic oligonucleotide
gcgggccaaugcggggcug

SEQ ID NO: 257554 - RNA, 19 nt, Artificial Sequence
  Description of Artificial Sequence: Synthetic oligonucleotide
ggggcgcuacaaggcguua

SEQ ID NO: 257555 - RNA, 19 nt, Artificial Sequence
  Description of Artificial Sequence: Synthetic oligonucleotide
ccgccggcaccgggcuugc

SEQ ID NO: 257556 - RNA, 19 nt, Artificial Sequence
  Description of Artificial Sequence: Synthetic oligonucleotide
gcgcuccgaggggcgcuac

SEQ ID NO: 257557 - RNA, 19 nt, Artificial Sequence
  Description of Artificial Sequence: Synthetic oligonucleotide
ccgcauucgcuugucccuu

SEQ ID NO: 257558 - RNA, 19 nt, Artificial Sequence
  Description of Artificial Sequence: Synthetic oligonucleotide
gcucgcgggccagggcgcu

SEQ ID NO: 257559 - RNA, 19 nt, Artificial Sequence
  Description of Artificial Sequence: Synthetic oligonucleotide
cgccuccgagccucggccu

SEQ ID NO: 257560 - RNA, 19 nt, Artificial Sequence
  Description of Artificial Sequence: Synthetic oligonucleotide
ccgccccuugggcgaugca

SEQ ID NO: 257561 - RNA, 19 nt, Artificial Sequence
  Description of Artificial Sequence: Synthetic oligonucleotide
cgggaccgagcuucagcuu

SEQ ID NO: 257562 - RNA, 19 nt, Artificial Sequence
  Description of Artificial Sequence: Synthetic oligonucleotide
ccacguguuugggcagguu

SEQ ID NO: 257563 - RNA, 19 nt, Artificial Sequence
  Description of Artificial Sequence: Synthetic oligonucleotide
cccuuucggccugcaguuu

SEQ ID NO: 257564 - RNA, 19 nt, Artificial Sequence
  Description of Artificial Sequence: Synthetic oligonucleotide
cgcgcuccgaggggcgcua

SEQ ID NO: 257565 - RNA, 19 nt, Artificial Sequence
  Description of Artificial Sequence: Synthetic oligonucleotide
aaugauuagcauuaaacag

SEQ ID NO: 257566 - RNA, 19 nt, Artificial Sequence
  Description of Artificial Sequence: Synthetic oligonucleotide
aguggaauagcccaggucc

SEQ ID NO: 257567 - RNA, 19 nt, Artificial Sequence
  Description of Artificial Sequence: Synthetic oligonucleotide
uaagauuguauuaacaccc

SEQ ID NO: 257568 - RNA, 19 nt, Artificial Sequence
  Description of Artificial Sequence: Synthetic oligonucleotide
auaagauuguauuaacacc

SEQ ID NO: 257569 - RNA, 19 nt, Artificial Sequence
  Description of Artificial Sequence: Synthetic oligonucleotide
agaauguuuagguuuaagc

SEQ ID NO: 257570 - RNA, 19 nt, Artificial Sequence
  Description of Artificial Sequence: Synthetic oligonucleotide
gaaacuaggaucaucaagg

SEQ ID NO: 257571 - RNA, 19 nt, Artificial Sequence
  Description of Artificial Sequence: Synthetic oligonucleotide
aauguuuagguuuaagcug

SEQ ID NO: 257572 - RNA, 19 nt, Artificial Sequence
  Description of Artificial Sequence: Synthetic oligonucleotide
uaccaaaugacuuugaggu

SEQ ID NO: 257573 - RNA, 19 nt, Artificial Sequence
  Description of Artificial Sequence: Synthetic oligonucleotide
auaaugacugaauaggaag

SEQ ID NO: 257574 - RNA, 19 nt, Artificial Sequence
  Description of Artificial Sequence: Synthetic oligonucleotide
uaaacuaaaggguucagca

SEQ ID NO: 257575 - RNA, 19 nt, Artificial Sequence
  Description of Artificial Sequence: Synthetic oligonucleotide
auuaguagaauguuuaggu

SEQ ID NO: 257576 - RNA, 19 nt, Artificial Sequence
  Description of Artificial Sequence: Synthetic oligonucleotide
aauaaugccuuauguuugg

SEQ ID NO: 257577 - RNA, 19 nt, Artificial Sequence
  Description of Artificial Sequence: Synthetic oligonucleotide
uuguagauaacuugaaaag

SEQ ID NO: 257578 - RNA, 19 nt, Artificial Sequence
  Description of Artificial Sequence: Synthetic oligonucleotide
cauaagauuguauuaacac

SEQ ID NO: 257579 - RNA, 19 nt, Artificial Sequence
  Description of Artificial Sequence: Synthetic oligonucleotide
aauagucagcauuacagcu

SEQ ID NO: 257580 - RNA, 19 nt, Artificial Sequence
  Description of Artificial Sequence: Synthetic oligonucleotide
uuaaaguaugauuucaagu

SEQ ID NO: 257581 - RNA, 19 nt, Artificial Sequence
  Description of Artificial Sequence: Synthetic oligonucleotide
uuugaauaaugccuuaugu

SEQ ID NO: 257582 - RNA, 19 nt, Artificial Sequence
  Description of Artificial Sequence: Synthetic oligonucleotide
auuguagauaacuugaaaa

SEQ ID NO: 257583 - RNA, 19 nt, Artificial Sequence
  Description of Artificial Sequence: Synthetic oligonucleotide
cagauuuugagacaaagac

SEQ ID NO: 257584 - RNA, 19 nt, Artificial Sequence
  Description of Artificial Sequence: Synthetic oligonucleotide
uuuagguuuaagcugcaca

SEQ ID NO: 257585 - RNA, 19 nt, Artificial Sequence
  Description of Artificial Sequence: Synthetic oligonucleotide
aaggcaguaugauaugaag

SEQ ID NO: 257586 - RNA, 19 nt, Artificial Sequence
  Description of Artificial Sequence: Synthetic oligonucleotide
ucaacaggggcucacaaga

SEQ ID NO: 257587 - RNA, 19 nt, Artificial Sequence
  Description of Artificial Sequence: Synthetic oligonucleotide
caucaaggaaaauucaggc

SEQ ID NO: 257588 - RNA, 19 nt, Artificial Sequence
  Description of Artificial Sequence: Synthetic oligonucleotide
uuagguuuaagcugcacac

SEQ ID NO: 257589 - RNA, 19 nt, Artificial Sequence
  Description of Artificial Sequence: Synthetic oligonucleotide
aagucauuucgcugaagac

SEQ ID NO: 257590 - RNA, 19 nt, Artificial Sequence
  Description of Artificial Sequence: Synthetic oligonucleotide
ugucauuccaguuuauuga

SEQ ID NO: 257591 - RNA, 19 nt, Artificial Sequence
  Description of Artificial Sequence: Synthetic oligonucleotide
aguaaugcacacaauaauc

SEQ ID NO: 257592 - RNA, 19 nt, Artificial Sequence
  Description of Artificial Sequence: Synthetic oligonucleotide
agcauuacagcuucggaag

SEQ ID NO: 257593 - RNA, 19 nt, Artificial Sequence
  Description of Artificial Sequence: Synthetic oligonucleotide
caucguuuucaaaaguucg

SEQ ID NO: 257594 - RNA, 19 nt, Artificial Sequence
  Description of Artificial Sequence: Synthetic oligonucleotide
acugaauaggaaguuagac

SEQ ID NO: 257595 - RNA, 19 nt, Artificial Sequence
  Description of Artificial Sequence: Synthetic oligonucleotide
auguuuagguuuaagcugc

SEQ ID NO: 257596 - RNA, 19 nt, Artificial Sequence
  Description of Artificial Sequence: Synthetic oligonucleotide
aguucggccaucuagaaau

SEQ ID NO: 257597 - RNA, 19 nt, Artificial Sequence
  Description of Artificial Sequence: Synthetic oligonucleotide
acaauuugaggccccaggg

SEQ ID NO: 257598 - RNA, 19 nt, Artificial Sequence
  Description of Artificial Sequence: Synthetic oligonucleotide
acagcuucggaaguuaggc

SEQ ID NO: 257599 - RNA, 19 nt, Artificial Sequence
  Description of Artificial Sequence: Synthetic oligonucleotide
gaauagucagcauuacagc

SEQ ID NO: 257600 - RNA, 19 nt, Artificial Sequence
  Description of Artificial Sequence: Synthetic oligonucleotide
ugaucaucguuuucaaaag

SEQ ID NO: 257601 - RNA, 19 nt, Artificial Sequence
  Description of Artificial Sequence: Synthetic oligonucleotide
uucauuagggcuucacucc

SEQ ID NO: 257602 - RNA, 19 nt, Artificial Sequence
  Description of Artificial Sequence: Synthetic oligonucleotide
aaaacggguguguagcuga

SEQ ID NO: 257603 - RNA, 19 nt, Artificial Sequence
  Description of Artificial Sequence: Synthetic oligonucleotide
gaucauuuggggcuaauca

SEQ ID NO: 257604 - RNA, 19 nt, Artificial Sequence
  Description of Artificial Sequence: Synthetic oligonucleotide
aaacccacaggaauucagc

SEQ ID NO: 257605 - RNA, 19 nt, Artificial Sequence
  Description of Artificial Sequence: Synthetic oligonucleotide
guuaugaggaaaauauugc

SEQ ID NO: 257606 - RNA, 19 nt, Artificial Sequence
  Description of Artificial Sequence: Synthetic oligonucleotide
uuuacucaaggcaguauga

SEQ ID NO: 257607 - RNA, 19 nt, Artificial Sequence
  Description of Artificial Sequence: Synthetic oligonucleotide
aaacuaaacuaaaggguuc

SEQ ID NO: 257608 - RNA, 19 nt, Artificial Sequence
  Description of Artificial Sequence: Synthetic oligonucleotide
accaccuagaccugcaagg

SEQ ID NO: 257609 - RNA, 19 nt, Artificial Sequence
  Description of Artificial Sequence: Synthetic oligonucleotide
uuuccguaaagccauaguu

SEQ ID NO: 257610 - RNA, 19 nt, Artificial Sequence
  Description of Artificial Sequence: Synthetic oligonucleotide
aauucaggccauaagguca

SEQ ID NO: 257611 - RNA, 19 nt, Artificial Sequence
  Description of Artificial Sequence: Synthetic oligonucleotide
ugaggauuuggacauuuac

SEQ ID NO: 257612 - RNA, 19 nt, Artificial Sequence
  Description of Artificial Sequence: Synthetic oligonucleotide
aucaagguucauuagggcu

SEQ ID NO: 257613 - RNA, 19 nt, Artificial Sequence
  Description of Artificial Sequence: Synthetic oligonucleotide
acaauuggcugaccaaaac

SEQ ID NO: 257614 - RNA, 19 nt, Artificial Sequence
  Description of Artificial Sequence: Synthetic oligonucleotide
auaggaguagccugagagg

SEQ ID NO: 257615 - RNA, 19 nt, Artificial Sequence
  Description of Artificial Sequence: Synthetic oligonucleotide
aaaccuugagcagucaucu

SEQ ID NO: 257616 - RNA, 19 nt, Artificial Sequence
  Description of Artificial Sequence: Synthetic oligonucleotide
gaauaaugccuuauguuug

SEQ ID NO: 257617 - RNA, 19 nt, Artificial Sequence
  Description of Artificial Sequence: Synthetic oligonucleotide
uccuugaggguacaacagg

SEQ ID NO: 257618 - RNA, 19 nt, Artificial Sequence
  Description of Artificial Sequence: Synthetic oligonucleotide
acaacagguguccaagguc

SEQ ID NO: 257619 - RNA, 19 nt, Artificial Sequence
  Description of Artificial Sequence: Synthetic oligonucleotide
agauuguauuaacacccac

SEQ ID NO: 257620 - RNA, 19 nt, Artificial Sequence
  Description of Artificial Sequence: Synthetic oligonucleotide
ugguucauuaaucuugcuc

SEQ ID NO: 257621 - RNA, 19 nt, Artificial Sequence
  Description of Artificial Sequence: Synthetic oligonucleotide
uccguaaagccauaguuuc

SEQ ID NO: 257622 - RNA, 19 nt, Artificial Sequence
  Description of Artificial Sequence: Synthetic oligonucleotide
gucauuucgcugaagacag

SEQ ID NO: 257623 - RNA, 19 nt, Artificial Sequence
  Description of Artificial Sequence: Synthetic oligonucleotide
ugagaaguuagucuugcuu

SEQ ID NO: 257624 - RNA, 19 nt, Artificial Sequence
  Description of Artificial Sequence: Synthetic oligonucleotide
guucauuagggcuucacuc

SEQ ID NO: 257625 - RNA, 19 nt, Artificial Sequence
  Description of Artificial Sequence: Synthetic oligonucleotide
aacuaaacuaaaggguuca

SEQ ID NO: 257626 - RNA, 19 nt, Artificial Sequence
  Description of Artificial Sequence: Synthetic oligonucleotide
ucaguuuagcuucagccua

SEQ ID NO: 257627 - RNA, 19 nt, Artificial Sequence
  Description of Artificial Sequence: Synthetic oligonucleotide
ugccguagauaauuaauga

SEQ ID NO: 257628 - RNA, 19 nt, Artificial Sequence
  Description of Artificial Sequence: Synthetic oligonucleotide
aagcauccuuuagagaagg

SEQ ID NO: 257629 - RNA, 19 nt, Artificial Sequence
  Description of Artificial Sequence: Synthetic oligonucleotide
aaacaauuggcugaccaaa

SEQ ID NO: 257630 - RNA, 19 nt, Artificial Sequence
  Description of Artificial Sequence: Synthetic oligonucleotide
cuucagccuagacagaaag

SEQ ID NO: 257631 - RNA, 19 nt, Artificial Sequence
  Description of Artificial Sequence: Synthetic oligonucleotide
uaaaccuugagcagucauc

SEQ ID NO: 257632 - RNA, 19 nt, Artificial Sequence
  Description of Artificial Sequence: Synthetic oligonucleotide
cugaauaggaaguuagaca

SEQ ID NO: 257633 - RNA, 19 nt, Artificial Sequence
  Description of Artificial Sequence: Synthetic oligonucleotide
acugaaaaggacagcguac

SEQ ID NO: 257634 - RNA, 19 nt, Artificial Sequence
  Description of Artificial Sequence: Synthetic oligonucleotide
uguggaugaccaagcauug

SEQ ID NO: 257635 - RNA, 19 nt, Artificial Sequence
  Description of Artificial Sequence: Synthetic oligonucleotide
agucauuucgcugaagaca

SEQ ID NO: 257636 - RNA, 19 nt, Artificial Sequence
  Description of Artificial Sequence: Synthetic oligonucleotide
uuaggcgaaaggauuucca

SEQ ID NO: 257637 - RNA, 19 nt, Artificial Sequence
  Description of Artificial Sequence: Synthetic oligonucleotide
gauuguauuaacacccaca

SEQ ID NO: 257638 - RNA, 19 nt, Artificial Sequence
  Description of Artificial Sequence: Synthetic oligonucleotide
gaaacgugcacaagaagac

SEQ ID NO: 257639 - RNA, 19 nt, Artificial Sequence
  Description of Artificial Sequence: Synthetic oligonucleotide
agaauaccaaaugacuuug

SEQ ID NO: 257640 - RNA, 19 nt, Artificial Sequence
  Description of Artificial Sequence: Synthetic oligonucleotide
agcuucggaaguuaggcga

SEQ ID NO: 257641 - RNA, 19 nt, Artificial Sequence
  Description of Artificial Sequence: Synthetic oligonucleotide
gaaaguggaauagcccagg

SEQ ID NO: 257642 - RNA, 19 nt, Artificial Sequence
  Description of Artificial Sequence: Synthetic oligonucleotide
aauuuccguaaagccauag

SEQ ID NO: 257643 - RNA, 19 nt, Artificial Sequence
  Description of Artificial Sequence: Synthetic oligonucleotide
cuaaacuaaaggguucagc

SEQ ID NO: 257644 - RNA, 19 nt, Artificial Sequence
  Description of Artificial Sequence: Synthetic oligonucleotide
uuauuauggcucccgggac

SEQ ID NO: 257645 - RNA, 19 nt, Artificial Sequence
  Description of Artificial Sequence: Synthetic oligonucleotide
ucguuuucaaaaguucggc

SEQ ID NO: 257646 - RNA, 19 nt, Artificial Sequence
  Description of Artificial Sequence: Synthetic oligonucleotide
auagcaggagauugaaagu

SEQ ID NO: 257647 - RNA, 19 nt, Artificial Sequence
  Description of Artificial Sequence: Synthetic oligonucleotide
cagguacauacaaaacggg

SEQ ID NO: 257648 - RNA, 19 nt, Artificial Sequence
  Description of Artificial Sequence: Synthetic oligonucleotide
auuaaggcucaagagauaa

SEQ ID NO: 257649 - RNA, 19 nt, Artificial Sequence
  Description of Artificial Sequence: Synthetic oligonucleotide
aggcaguaugauaugaagg

SEQ ID NO: 257650 - RNA, 19 nt, Artificial Sequence
  Description of Artificial Sequence: Synthetic oligonucleotide
uccaccgaaacauaagauu

SEQ ID NO: 257651 - RNA, 19 nt, Artificial Sequence
  Description of Artificial Sequence: Synthetic oligonucleotide
uuccguaaagccauaguuu

SEQ ID NO: 257652 - RNA, 19 nt, Artificial Sequence
  Description of Artificial Sequence: Synthetic oligonucleotide
uuaguagaauguuuagguu

SEQ ID NO: 257653 - RNA, 19 nt, Artificial Sequence
  Description of Artificial Sequence: Synthetic oligonucleotide
aaaaggugguuacucugaa

SEQ ID NO: 257654 - RNA, 19 nt, Artificial Sequence
  Description of Artificial Sequence: Synthetic oligonucleotide
aggagcacuuguuuugaag

SEQ ID NO: 257655 - RNA, 19 nt, Artificial Sequence
  Description of Artificial Sequence: Synthetic oligonucleotide
uuacagcuucggaaguuag

SEQ ID NO: 257656 - RNA, 19 nt, Artificial Sequence
  Description of Artificial Sequence: Synthetic oligonucleotide
auugaaugaguaaauguau

SEQ ID NO: 257657 - RNA, 19 nt, Artificial Sequence
  Description of Artificial Sequence: Synthetic oligonucleotide
aggacagcguacugcauag

SEQ ID NO: 257658 - RNA, 19 nt, Artificial Sequence
  Description of Artificial Sequence: Synthetic oligonucleotide
ugcacacuaagaauaccaa

SEQ ID NO: 257659 - RNA, 19 nt, Artificial Sequence
  Description of Artificial Sequence: Synthetic oligonucleotide
uccuauuaguagaauguuu

SEQ ID NO: 257660 - RNA, 19 nt, Artificial Sequence
  Description of Artificial Sequence: Synthetic oligonucleotide
agcucuauuaucucauuua

SEQ ID NO: 257661 - RNA, 19 nt, Artificial Sequence
  Description of Artificial Sequence: Synthetic oligonucleotide
ugcaagcaagucauuucgc

SEQ ID NO: 257662 - RNA, 19 nt, Artificial Sequence
  Description of Artificial Sequence: Synthetic oligonucleotide
aaaguucggccaucuagaa

SEQ ID NO: 257663 - RNA, 19 nt, Artificial Sequence
  Description of Artificial Sequence: Synthetic oligonucleotide
caagucauuucgcugaaga

SEQ ID NO: 257664 - RNA, 19 nt, Artificial Sequence
  Description of Artificial Sequence: Synthetic oligonucleotide
aaugacugaauaggaaguu

SEQ ID NO: 257665 - RNA, 19 nt, Artificial Sequence
  Description of Artificial Sequence: Synthetic oligonucleotide
ucaaggcaguaugauauga

SEQ ID NO: 257666 - RNA, 19 nt, Artificial Sequence
  Description of Artificial Sequence: Synthetic oligonucleotide
auuuccguaaagccauagu

SEQ ID NO: 257667 - RNA, 19 nt, Artificial Sequence
  Description of Artificial Sequence: Synthetic oligonucleotide
aggcggaaaaggugguuac

SEQ ID NO: 257668 - RNA, 19 nt, Artificial Sequence
  Description of Artificial Sequence: Synthetic oligonucleotide
ccaccgaaacauaagauug

SEQ ID NO: 257669 - RNA, 19 nt, Artificial Sequence
  Description of Artificial Sequence: Synthetic oligonucleotide
aagauuguauuaacaccca

SEQ ID NO: 257670 - RNA, 19 nt, Artificial Sequence
  Description of Artificial Sequence: Synthetic oligonucleotide
cuugaggguacaacaggug

SEQ ID NO: 257671 - RNA, 19 nt, Artificial Sequence
  Description of Artificial Sequence: Synthetic oligonucleotide
uucagccuagacagaaagu

SEQ ID NO: 257672 - RNA, 19 nt, Artificial Sequence
  Description of Artificial Sequence: Synthetic oligonucleotide
augccguagauaauuaaug

SEQ ID NO: 257673 - RNA, 19 nt, Artificial Sequence
  Description of Artificial Sequence: Synthetic oligonucleotide
aaacaauuugaggccccag

SEQ ID NO: 257674 - RNA, 19 nt, Artificial Sequence
  Description of Artificial Sequence: Synthetic oligonucleotide
agguuuaagcugcacacua

SEQ ID NO: 257675 - RNA, 19 nt, Artificial Sequence
  Description of Artificial Sequence: Synthetic oligonucleotide
cacuuauuauggcucccgg

SEQ ID NO: 257676 - RNA, 19 nt, Artificial Sequence
  Description of Artificial Sequence: Synthetic oligonucleotide
uuccaccgaaacauaagau

SEQ ID NO: 257677 - RNA, 19 nt, Artificial Sequence
  Description of Artificial Sequence: Synthetic oligonucleotide
ugacgucuggccuggaggu

SEQ ID NO: 257678 - RNA, 19 nt, Artificial Sequence
  Description of Artificial Sequence: Synthetic oligonucleotide
aaugccgaccuuacuguug

SEQ ID NO: 257679 - RNA, 19 nt, Artificial Sequence
  Description of Artificial Sequence: Synthetic oligonucleotide
guacauacaaaacgggugu

SEQ ID NO: 257680 - RNA, 19 nt, Artificial Sequence
  Description of Artificial Sequence: Synthetic oligonucleotide
augccuuauguuuggagau

SEQ ID NO: 257681 - RNA, 19 nt, Artificial Sequence
  Description of Artificial Sequence: Synthetic oligonucleotide
ggauugguaaauguuugag

SEQ ID NO: 257682 - RNA, 19 nt, Artificial Sequence
  Description of Artificial Sequence: Synthetic oligonucleotide
ggcauuuuacgagaggcag

SEQ ID NO: 257683 - RNA, 19 nt, Artificial Sequence
  Description of Artificial Sequence: Synthetic oligonucleotide
gguucuagggguacaacag

SEQ ID NO: 257684 - RNA, 19 nt, Artificial Sequence
  Description of Artificial Sequence: Synthetic oligonucleotide
gcauccuuuagagaagggg

SEQ ID NO: 257685 - RNA, 19 nt, Artificial Sequence
  Description of Artificial Sequence: Synthetic oligonucleotide
ggggcuaaucaacaggggc

SEQ ID NO: 257686 - RNA, 19 nt, Artificial Sequence
  Description of Artificial Sequence: Synthetic oligonucleotide
aaguucggccaucuagaaa

SEQ ID NO: 257687 - RNA, 19 nt, Artificial Sequence
  Description of Artificial Sequence: Synthetic oligonucleotide
cauccuuuagagaaggggu

SEQ ID NO: 257688 - RNA, 19 nt, Artificial Sequence
  Description of Artificial Sequence: Synthetic oligonucleotide
augccgaccuuacuguuga

SEQ ID NO: 257689 - RNA, 19 nt, Artificial Sequence
  Description of Artificial Sequence: Synthetic oligonucleotide
cagcuucggaaguuaggcg

SEQ ID NO: 257690 - RNA, 19 nt, Artificial Sequence
  Description of Artificial Sequence: Synthetic oligonucleotide
acaugauaugaaacuagga

SEQ ID NO: 257691 - RNA, 19 nt, Artificial Sequence
  Description of Artificial Sequence: Synthetic oligonucleotide
uuacucaaggcaguaugau

SEQ ID NO: 257692 - RNA, 19 nt, Artificial Sequence
  Description of Artificial Sequence: Synthetic oligonucleotide
aucaucguuuucaaaaguu

SEQ ID NO: 257693 - RNA, 19 nt, Artificial Sequence
  Description of Artificial Sequence: Synthetic oligonucleotide
uugagaaguuagucuugcu

SEQ ID NO: 257694 - RNA, 19 nt, Artificial Sequence
  Description of Artificial Sequence: Synthetic oligonucleotide
guuaggcgaaaggauuucc

SEQ ID NO: 257695 - RNA, 19 nt, Artificial Sequence
  Description of Artificial Sequence: Synthetic oligonucleotide
uggagguucugaggcaaag

SEQ ID NO: 257696 - RNA, 19 nt, Artificial Sequence
  Description of Artificial Sequence: Synthetic oligonucleotide
agcugcaaaaugucuggaa

SEQ ID NO: 257697 - RNA, 19 nt, Artificial Sequence
  Description of Artificial Sequence: Synthetic oligonucleotide
ggcgaaaggauuuccaaaa

SEQ ID NO: 257698 - RNA, 19 nt, Artificial Sequence
  Description of Artificial Sequence: Synthetic oligonucleotide
uuugaggccccagggagaa

SEQ ID NO: 257699 - RNA, 19 nt, Artificial Sequence
  Description of Artificial Sequence: Synthetic oligonucleotide
caccuagaccugcaagggg

SEQ ID NO: 257700 - RNA, 19 nt, Artificial Sequence
  Description of Artificial Sequence: Synthetic oligonucleotide
gguaugaggauuuggacau

SEQ ID NO: 257701 - RNA, 19 nt, Artificial Sequence
  Description of Artificial Sequence: Synthetic oligonucleotide
ccuauuaguagaauguuua

SEQ ID NO: 257702 - RNA, 19 nt, Artificial Sequence
  Description of Artificial Sequence: Synthetic oligonucleotide
guucuagggguacaacaga

SEQ ID NO: 257703 - RNA, 19 nt, Artificial Sequence
  Description of Artificial Sequence: Synthetic oligonucleotide
gcgggaggacaccagaccg

SEQ ID NO: 257704 - RNA, 19 nt, Artificial Sequence
  Description of Artificial Sequence: Synthetic oligonucleotide
acagaaacgugcacaagaa

SEQ ID NO: 257705 - RNA, 19 nt, Artificial Sequence
  Description of Artificial Sequence: Synthetic oligonucleotide
cuaaucaacaggggcucac

SEQ ID NO: 257706 - RNA, 19 nt, Artificial Sequence
  Description of Artificial Sequence: Synthetic oligonucleotide
ugcaaacgaugaaggcuga

SEQ ID NO: 257707 - RNA, 19 nt, Artificial Sequence
  Description of Artificial Sequence: Synthetic oligonucleotide
gacagcguacugcauaggu

SEQ ID NO: 257708 - RNA, 19 nt, Artificial Sequence
  Description of Artificial Sequence: Synthetic oligonucleotide
ugggucuaagccagugaaa

SEQ ID NO: 257709 - RNA, 19 nt, Artificial Sequence
  Description of Artificial Sequence: Synthetic oligonucleotide
auugggugccacaggggcg

SEQ ID NO: 257710 - RNA, 19 nt, Artificial Sequence
  Description of Artificial Sequence: Synthetic oligonucleotide
acaugccguagauaauuaa

SEQ ID NO: 257711 - RNA, 19 nt, Artificial Sequence
  Description of Artificial Sequence: Synthetic oligonucleotide
ucauuucgcugaagacagc

SEQ ID NO: 257712 - RNA, 19 nt, Artificial Sequence
  Description of Artificial Sequence: Synthetic oligonucleotide
caauuugaggccccaggga

SEQ ID NO: 257713 - RNA, 19 nt, Artificial Sequence
  Description of Artificial Sequence: Synthetic oligonucleotide
auuacagcuucggaaguua

SEQ ID NO: 257714 - RNA, 19 nt, Artificial Sequence
  Description of Artificial Sequence: Synthetic oligonucleotide
gaaguuaggcgaaaggauu

SEQ ID NO: 257715 - RNA, 19 nt, Artificial Sequence
  Description of Artificial Sequence: Synthetic oligonucleotide
aacggguguguagcugauc

SEQ ID NO: 257716 - RNA, 19 nt, Artificial Sequence
  Description of Artificial Sequence: Synthetic oligonucleotide
ggcuaaaguggccagaccu

SEQ ID NO: 257717 - RNA, 19 nt, Artificial Sequence
  Description of Artificial Sequence: Synthetic oligonucleotide
uuucaaaaguucggccauc

SEQ ID NO: 257718 - RNA, 19 nt, Artificial Sequence
  Description of Artificial Sequence: Synthetic oligonucleotide
gugggugacgucuggccug

SEQ ID NO: 257719 - RNA, 19 nt, Artificial Sequence
  Description of Artificial Sequence: Synthetic oligonucleotide
caugccguagauaauuaau

SEQ ID NO: 257720 - RNA, 19 nt, Artificial Sequence
  Description of Artificial Sequence: Synthetic oligonucleotide
gccuuauguuuggagauag

SEQ ID NO: 257721 - RNA, 19 nt, Artificial Sequence
  Description of Artificial Sequence: Synthetic oligonucleotide
cagcauaggaguagccuga

SEQ ID NO: 257722 - RNA, 19 nt, Artificial Sequence
  Description of Artificial Sequence: Synthetic oligonucleotide
guagcugaucaucguuuuc

SEQ ID NO: 257723 - RNA, 19 nt, Artificial Sequence
  Description of Artificial Sequence: Synthetic oligonucleotide
accgaaacauaagauugua

SEQ ID NO: 257724 - RNA, 19 nt, Artificial Sequence
  Description of Artificial Sequence: Synthetic oligonucleotide
agcaagucauuucgcugaa

SEQ ID NO: 257725 - RNA, 19 nt, Artificial Sequence
  Description of Artificial Sequence: Synthetic oligonucleotide
agcguacugcauagguuuc

SEQ ID NO: 257726 - RNA, 19 nt, Artificial Sequence
  Description of Artificial Sequence: Synthetic oligonucleotide
uggggcugcaaacgaugaa

SEQ ID NO: 257727 - RNA, 19 nt, Artificial Sequence
  Description of Artificial Sequence: Synthetic oligonucleotide
guucucgagugaauuguca

SEQ ID NO: 257728 - RNA, 19 nt, Artificial Sequence
  Description of Artificial Sequence: Synthetic oligonucleotide
aggcauuuuacgagaggca

SEQ ID NO: 257729 - RNA, 19 nt, Artificial Sequence
  Description of Artificial Sequence: Synthetic oligonucleotide
cauacaaaacgggugugua

SEQ ID NO: 257730 - RNA, 19 nt, Artificial Sequence
  Description of Artificial Sequence: Synthetic oligonucleotide
gggguucucgagugaauug

SEQ ID NO: 257731 - RNA, 19 nt, Artificial Sequence
  Description of Artificial Sequence: Synthetic oligonucleotide
agcauccuuuagagaaggg

SEQ ID NO: 257732 - RNA, 19 nt, Artificial Sequence
  Description of Artificial Sequence: Synthetic oligonucleotide
aaccuugagcagucaucuu

SEQ ID NO: 257733 - RNA, 19 nt, Artificial Sequence
  Description of Artificial Sequence: Synthetic oligonucleotide
auuugaggccccagggaga

SEQ ID NO: 257734 - RNA, 19 nt, Artificial Sequence
  Description of Artificial Sequence: Synthetic oligonucleotide
ggagcuuaauuuccguaaa

SEQ ID NO: 257735 - RNA, 19 nt, Artificial Sequence
  Description of Artificial Sequence: Synthetic oligonucleotide
agagaguuuaggagcuuaa

SEQ ID NO: 257736 - RNA, 19 nt, Artificial Sequence
  Description of Artificial Sequence: Synthetic oligonucleotide
auccuuuagagaagggguu

SEQ ID NO: 257737 - RNA, 19 nt, Artificial Sequence
  Description of Artificial Sequence: Synthetic oligonucleotide
ucccaguuggaggugucuc

SEQ ID NO: 257738 - RNA, 19 nt, Artificial Sequence
  Description of Artificial Sequence: Synthetic oligonucleotide
cauuucgcugaagacagcu

SEQ ID NO: 257739 - RNA, 19 nt, Artificial Sequence
  Description of Artificial Sequence: Synthetic oligonucleotide
ugccuuauguuuggagaua

SEQ ID NO: 257740 - RNA, 19 nt, Artificial Sequence
  Description of Artificial Sequence: Synthetic oligonucleotide
agggguucucgagugaauu

SEQ ID NO: 257741 - RNA, 19 nt, Artificial Sequence
  Description of Artificial Sequence: Synthetic oligonucleotide
ggaaugccgaccuuacugu

SEQ ID NO: 257742 - RNA, 19 nt, Artificial Sequence
  Description of Artificial Sequence: Synthetic oligonucleotide
cagcguacugcauagguuu

SEQ ID NO: 257743 - RNA, 19 nt, Artificial Sequence
  Description of Artificial Sequence: Synthetic oligonucleotide
aguuuagcuucagccuaga

SEQ ID NO: 257744 - RNA, 19 nt, Artificial Sequence
  Description of Artificial Sequence: Synthetic oligonucleotide
cauuaaggcucaagagaua

SEQ ID NO: 257745 - RNA, 19 nt, Artificial Sequence
  Description of Artificial Sequence: Synthetic oligonucleotide
gccauaguuucaguuuagc

SEQ ID NO: 257746 - RNA, 19 nt, Artificial Sequence
  Description of Artificial Sequence: Synthetic oligonucleotide
ccuagaccugcaaggggcc

SEQ ID NO: 257747 - RNA, 19 nt, Artificial Sequence
  Description of Artificial Sequence: Synthetic oligonucleotide
acagcguacugcauagguu

SEQ ID NO: 257748 - RNA, 19 nt, Artificial Sequence
  Description of Artificial Sequence: Synthetic oligonucleotide
ggcuaaucaacaggggcuc

SEQ ID NO: 257749 - RNA, 19 nt, Artificial Sequence
  Description of Artificial Sequence: Synthetic oligonucleotide
gguguuacugagacaccac

SEQ ID NO: 257750 - RNA, 19 nt, Artificial Sequence
  Description of Artificial Sequence: Synthetic oligonucleotide
agucagcauuacagcuucg

SEQ ID NO: 257751 - RNA, 19 nt, Artificial Sequence
  Description of Artificial Sequence: Synthetic oligonucleotide
caccgaaacauaagauugu

SEQ ID NO: 257752 - RNA, 19 nt, Artificial Sequence
  Description of Artificial Sequence: Synthetic oligonucleotide
gcuaaaguggccagaccuc

SEQ ID NO: 257753 - RNA, 19 nt, Artificial Sequence
  Description of Artificial Sequence: Synthetic oligonucleotide
ggaucauuuggggcuaauc

SEQ ID NO: 257754 - RNA, 19 nt, Artificial Sequence
  Description of Artificial Sequence: Synthetic oligonucleotide
auuuuacgagaggcagaga

SEQ ID NO: 257755 - RNA, 19 nt, Artificial Sequence
  Description of Artificial Sequence: Synthetic oligonucleotide
auaggaaguuagacaggaa

SEQ ID NO: 257756 - RNA, 19 nt, Artificial Sequence
  Description of Artificial Sequence: Synthetic oligonucleotide
cacaugccguagauaauua

SEQ ID NO: 257757 - RNA, 19 nt, Artificial Sequence
  Description of Artificial Sequence: Synthetic oligonucleotide
gccgaccuuacuguugaag

SEQ ID NO: 257758 - RNA, 19 nt, Artificial Sequence
  Description of Artificial Sequence: Synthetic oligonucleotide
ccguagauaauuaaugauu

SEQ ID NO: 257759 - RNA, 19 nt, Artificial Sequence
  Description of Artificial Sequence: Synthetic oligonucleotide
agucccaguuggagguguc

SEQ ID NO: 257760 - RNA, 19 nt, Artificial Sequence
  Description of Artificial Sequence: Synthetic oligonucleotide
auuucgcugaagacagcuu

SEQ ID NO: 257761 - RNA, 19 nt, Artificial Sequence
  Description of Artificial Sequence: Synthetic oligonucleotide
gagaguuuaggagcuuaau

SEQ ID NO: 257762 - RNA, 19 nt, Artificial Sequence
  Description of Artificial Sequence: Synthetic oligonucleotide
gcauuuuacgagaggcaga

SEQ ID NO: 257763 - RNA, 19 nt, Artificial Sequence
  Description of Artificial Sequence: Synthetic oligonucleotide
ccauaguuucaguuuagcu

SEQ ID NO: 257764 - RNA, 19 nt, Artificial Sequence
  Description of Artificial Sequence: Synthetic oligonucleotide
gggcuaaucaacaggggcu

SEQ ID NO: 257765 - RNA, 19 nt, Artificial Sequence
  Description of Artificial Sequence: Synthetic oligonucleotide
gguucucgagugaauuguc

SEQ ID NO: 257766 - RNA, 19 nt, Artificial Sequence
  Description of Artificial Sequence: Synthetic oligonucleotide
uggaucauuuggggcuaau

SEQ ID NO: 257767 - RNA, 19 nt, Artificial Sequence
  Description of Artificial Sequence: Synthetic oligonucleotide
caaacgaugaaggcugauu

SEQ ID NO: 257768 - RNA, 19 nt, Artificial Sequence
  Description of Artificial Sequence: Synthetic oligonucleotide
augaggauuuggacauuua

SEQ ID NO: 257769 - RNA, 19 nt, Artificial Sequence
  Description of Artificial Sequence: Synthetic oligonucleotide
cgagugaauugucagcaga

SEQ ID NO: 257770 - RNA, 19 nt, Artificial Sequence
  Description of Artificial Sequence: Synthetic oligonucleotide
gcguacugcauagguuucc

SEQ ID NO: 257771 - RNA, 19 nt, Artificial Sequence
  Description of Artificial Sequence: Synthetic oligonucleotide
ccgaccuuacuguugaagu

SEQ ID NO: 257772 - RNA, 19 nt, Artificial Sequence
  Description of Artificial Sequence: Synthetic oligonucleotide
guccuauuaguagaauguu

SEQ ID NO: 257773 - RNA, 19 nt, Artificial Sequence
  Description of Artificial Sequence: Synthetic oligonucleotide
ggguucucgagugaauugu

SEQ ID NO: 257774 - RNA, 19 nt, Artificial Sequence
  Description of Artificial Sequence: Synthetic oligonucleotide
ggacagcguacugcauagg

SEQ ID NO: 257775 - RNA, 19 nt, Artificial Sequence
  Description of Artificial Sequence: Synthetic oligonucleotide
gcucaagagauaacauuua

SEQ ID NO: 257776 - RNA, 19 nt, Artificial Sequence
  Description of Artificial Sequence: Synthetic oligonucleotide
ccguaaagccauaguuuca

SEQ ID NO: 257777 - RNA, 19 nt, Artificial Sequence
  Description of Artificial Sequence: Synthetic oligonucleotide
cagcucuauuaucucauuu

SEQ ID NO: 257778 - RNA, 19 nt, Artificial Sequence
  Description of Artificial Sequence: Synthetic oligonucleotide
cauuuacucaaggcaguau

SEQ ID NO: 257779 - RNA, 19 nt, Artificial Sequence
  Description of Artificial Sequence: Synthetic oligonucleotide
cagaggucagcacguuucu

SEQ ID NO: 257780 - RNA, 19 nt, Artificial Sequence
  Description of Artificial Sequence: Synthetic oligonucleotide
cagcacguuucuggcucuc

SEQ ID NO: 257781 - RNA, 19 nt, Artificial Sequence
  Description of Artificial Sequence: Synthetic oligonucleotide
guaugaggauuuggacauu

SEQ ID NO: 257782 - RNA, 19 nt, Artificial Sequence
  Description of Artificial Sequence: Synthetic oligonucleotide
cgugcacaagaagacaggu

SEQ ID NO: 257783 - RNA, 19 nt, Artificial Sequence
  Description of Artificial Sequence: Synthetic oligonucleotide
cgggaccacagauguagaa

SEQ ID NO: 257784 - RNA, 19 nt, Artificial Sequence
  Description of Artificial Sequence: Synthetic oligonucleotide
caagagaguuuaggagcuu

SEQ ID NO: 257785 - RNA, 19 nt, Artificial Sequence
  Description of Artificial Sequence: Synthetic oligonucleotide
cccacaagaccugagcauu

SEQ ID NO: 257786 - RNA, 19 nt, Artificial Sequence
  Description of Artificial Sequence: Synthetic oligonucleotide
cuugaucaucaagguucau

SEQ ID NO: 257787 - RNA, 19 nt, Artificial Sequence
  Description of Artificial Sequence: Synthetic oligonucleotide
ggaauucagcuuggaucau

SEQ ID NO: 257788 - RNA, 19 nt, Artificial Sequence
  Description of Artificial Sequence: Synthetic oligonucleotide
ugcacuauaaucaugaaag

SEQ ID NO: 257789 - RNA, 19 nt, Artificial Sequence
  Description of Artificial Sequence: Synthetic oligonucleotide
acauauaucguacacaaac

SEQ ID NO: 257790 - RNA, 19 nt, Artificial Sequence
  Description of Artificial Sequence: Synthetic oligonucleotide
cuaaaauugggaaaggugg

SEQ ID NO: 257791 - RNA, 19 nt, Artificial Sequence
  Description of Artificial Sequence: Synthetic oligonucleotide
uaaggauccauucaugugg

SEQ ID NO: 257792 - RNA, 19 nt, Artificial Sequence
  Description of Artificial Sequence: Synthetic oligonucleotide
uuaaucauuguguagaugu

SEQ ID NO: 257793 - RNA, 19 nt, Artificial Sequence
  Description of Artificial Sequence: Synthetic oligonucleotide
uauucguagacguauaaag

SEQ ID NO: 257794 - RNA, 19 nt, Artificial Sequence
  Description of Artificial Sequence: Synthetic oligonucleotide
auaauugucguucuggaag

SEQ ID NO: 257795 - RNA, 19 nt, Artificial Sequence
  Description of Artificial Sequence: Synthetic oligonucleotide
aaaacguuaaucaacauau

SEQ ID NO: 257796 - RNA, 19 nt, Artificial Sequence
  Description of Artificial Sequence: Synthetic oligonucleotide
auugaguuagcacuguugg

SEQ ID NO: 257797 - RNA, 19 nt, Artificial Sequence
  Description of Artificial Sequence: Synthetic oligonucleotide
aucgcggugacauaaaagg

SEQ ID NO: 257798 - RNA, 19 nt, Artificial Sequence
  Description of Artificial Sequence: Synthetic oligonucleotide
acuggaauuuguugaaucc

SEQ ID NO: 257799 - RNA, 19 nt, Artificial Sequence
  Description of Artificial Sequence: Synthetic oligonucleotide
uguacaaagaauucagugu

SEQ ID NO: 257800 - RNA, 19 nt, Artificial Sequence
  Description of Artificial Sequence: Synthetic oligonucleotide
uaauaugauauacaugggu

SEQ ID NO: 257801 - RNA, 19 nt, Artificial Sequence
  Description of Artificial Sequence: Synthetic oligonucleotide
aguaaauauucguagacgu

SEQ ID NO: 257802 - RNA, 19 nt, Artificial Sequence
  Description of Artificial Sequence: Synthetic oligonucleotide
uacaauguucccaagaauc

SEQ ID NO: 257803 - RNA, 19 nt, Artificial Sequence
  Description of Artificial Sequence: Synthetic oligonucleotide
uuaaucaacauauaucgua

SEQ ID NO: 257804 - RNA, 19 nt, Artificial Sequence
  Description of Artificial Sequence: Synthetic oligonucleotide
aacguuaaucaacauauau

SEQ ID NO: 257805 - RNA, 19 nt, Artificial Sequence
  Description of Artificial Sequence: Synthetic oligonucleotide
aucaacauauaucguacac

SEQ ID NO: 257806 - RNA, 19 nt, Artificial Sequence
  Description of Artificial Sequence: Synthetic oligonucleotide
caugcuuggagaauaauug

SEQ ID NO: 257807 - RNA, 19 nt, Artificial Sequence
  Description of Artificial Sequence: Synthetic oligonucleotide
aauacagagcgauccuaac

SEQ ID NO: 257808 - RNA, 19 nt, Artificial Sequence
  Description of Artificial Sequence: Synthetic oligonucleotide
aauguucccaagaauccgc

SEQ ID NO: 257809 - RNA, 19 nt, Artificial Sequence
  Description of Artificial Sequence: Synthetic oligonucleotide
uaauugucguucuggaagg

SEQ ID NO: 257810 - RNA, 19 nt, Artificial Sequence
  Description of Artificial Sequence: Synthetic oligonucleotide
uauaucguacacaaacuac

SEQ ID NO: 257811 - RNA, 19 nt, Artificial Sequence
  Description of Artificial Sequence: Synthetic oligonucleotide
uaaaggucccaaaauacac

SEQ ID NO: 257812 - RNA, 19 nt, Artificial Sequence
  Description of Artificial Sequence: Synthetic oligonucleotide
auaaaaggcugacuguggg

SEQ ID NO: 257813 - RNA, 19 nt, Artificial Sequence
  Description of Artificial Sequence: Synthetic oligonucleotide
gauaagaaggucugugcag

SEQ ID NO: 257814 - RNA, 19 nt, Artificial Sequence
  Description of Artificial Sequence: Synthetic oligonucleotide
aaagcgucagccccggccg

SEQ ID NO: 257815 - RNA, 19 nt, Artificial Sequence
  Description of Artificial Sequence: Synthetic oligonucleotide
aguaaaggucccaaaauac

SEQ ID NO: 257816 - RNA, 19 nt, Artificial Sequence
  Description of Artificial Sequence: Synthetic oligonucleotide
ugauaagaaggucugugca

SEQ ID NO: 257817 - RNA, 19 nt, Artificial Sequence
  Description of Artificial Sequence: Synthetic oligonucleotide
uucguagacguauaaagcu

SEQ ID NO: 257818 - RNA, 19 nt, Artificial Sequence
  Description of Artificial Sequence: Synthetic oligonucleotide
uaaccaauacccaucuuug

SEQ ID NO: 257819 - RNA, 19 nt, Artificial Sequence
  Description of Artificial Sequence: Synthetic oligonucleotide
acuauaaucaugaaaggcu

SEQ ID NO: 257820 - RNA, 19 nt, Artificial Sequence
  Description of Artificial Sequence: Synthetic oligonucleotide
aggguguaaauguacaaag

SEQ ID NO: 257821 - RNA, 19 nt, Artificial Sequence
  Description of Artificial Sequence: Synthetic oligonucleotide
aagagguugaauggggugg

SEQ ID NO: 257822 - RNA, 19 nt, Artificial Sequence
  Description of Artificial Sequence: Synthetic oligonucleotide
aaaauugggaaaggugggg

SEQ ID NO: 257823 - RNA, 19 nt, Artificial Sequence
  Description of Artificial Sequence: Synthetic oligonucleotide
ugaaacuaaaauugggaaa

SEQ ID NO: 257824 - RNA, 19 nt, Artificial Sequence
  Description of Artificial Sequence: Synthetic oligonucleotide
auuaaaacguuaaucaaca

SEQ ID NO: 257825 - RNA, 19 nt, Artificial Sequence
  Description of Artificial Sequence: Synthetic oligonucleotide
gaugguaucucacauaaua

SEQ ID NO: 257826 - RNA, 19 nt, Artificial Sequence
  Description of Artificial Sequence: Synthetic oligonucleotide
auucguagacguauaaagc

SEQ ID NO: 257827 - RNA, 19 nt, Artificial Sequence
  Description of Artificial Sequence: Synthetic oligonucleotide
uuuauugcaugaaacuaaa

SEQ ID NO: 257828 - RNA, 19 nt, Artificial Sequence
  Description of Artificial Sequence: Synthetic oligonucleotide
uggaauuuguugaauccgc

SEQ ID NO: 257829 - RNA, 19 nt, Artificial Sequence
  Description of Artificial Sequence: Synthetic oligonucleotide
uacuacgugaggaucuggg

SEQ ID NO: 257830 - RNA, 19 nt, Artificial Sequence
  Description of Artificial Sequence: Synthetic oligonucleotide
agcgauccuaaccaauacc

SEQ ID NO: 257831 - RNA, 19 nt, Artificial Sequence
  Description of Artificial Sequence: Synthetic oligonucleotide
uugcuagaaagacuuacca

SEQ ID NO: 257832 - RNA, 19 nt, Artificial Sequence
  Description of Artificial Sequence: Synthetic oligonucleotide
aaaaggacgaacaggagaa

SEQ ID NO: 257833 - RNA, 19 nt, Artificial Sequence
  Description of Artificial Sequence: Synthetic oligonucleotide
ugaguuagcacuguuggga

SEQ ID NO: 257834 - RNA, 19 nt, Artificial Sequence
  Description of Artificial Sequence: Synthetic oligonucleotide
aucgaagccaucccguugg

SEQ ID NO: 257835 - RNA, 19 nt, Artificial Sequence
  Description of Artificial Sequence: Synthetic oligonucleotide
aauauucguagacguauaa

SEQ ID NO: 257836 - RNA, 19 nt, Artificial Sequence
  Description of Artificial Sequence: Synthetic oligonucleotide
caugaaacuaaaauuggga

SEQ ID NO: 257837 - RNA, 19 nt, Artificial Sequence
  Description of Artificial Sequence: Synthetic oligonucleotide
uaauucagaaccagacuac

SEQ ID NO: 257838 - RNA, 19 nt, Artificial Sequence
  Description of Artificial Sequence: Synthetic oligonucleotide
acguuaaucaacauauauc

SEQ ID NO: 257839 - RNA, 19 nt, Artificial Sequence
  Description of Artificial Sequence: Synthetic oligonucleotide
ucgaaucucugauaagaag

SEQ ID NO: 257840 - RNA, 19 nt, Artificial Sequence
  Description of Artificial Sequence: Synthetic oligonucleotide
aauaauugucguucuggaa

SEQ ID NO: 257841 - RNA, 19 nt, Artificial Sequence
  Description of Artificial Sequence: Synthetic oligonucleotide
cuacgugcaguaaauauuc

SEQ ID NO: 257842 - RNA, 19 nt, Artificial Sequence
  Description of Artificial Sequence: Synthetic oligonucleotide
cacaggauuaaucauugug

SEQ ID NO: 257843 - RNA, 19 nt, Artificial Sequence
  Description of Artificial Sequence: Synthetic oligonucleotide
uggagaauaauugucguuc

SEQ ID NO: 257844 - RNA, 19 nt, Artificial Sequence
  Description of Artificial Sequence: Synthetic oligonucleotide
acuaaaauugggaaaggug

SEQ ID NO: 257845 - RNA, 19 nt, Artificial Sequence
  Description of Artificial Sequence: Synthetic oligonucleotide
accacgagugcagaaaccc

SEQ ID NO: 257846 - RNA, 19 nt, Artificial Sequence
  Description of Artificial Sequence: Synthetic oligonucleotide
cacuauaaucaugaaaggc

SEQ ID NO: 257847 - RNA, 19 nt, Artificial Sequence
  Description of Artificial Sequence: Synthetic oligonucleotide
gauccauucauguggugug

SEQ ID NO: 257848 - RNA, 19 nt, Artificial Sequence
  Description of Artificial Sequence: Synthetic oligonucleotide
ugcaguaaauauucguaga

SEQ ID NO: 257849 - RNA, 19 nt, Artificial Sequence
  Description of Artificial Sequence: Synthetic oligonucleotide
agacguauaaagcuaacuu

SEQ ID NO: 257850 - RNA, 19 nt, Artificial Sequence
  Description of Artificial Sequence: Synthetic oligonucleotide
aguuggaccggcugccucc

SEQ ID NO: 257851 - RNA, 19 nt, Artificial Sequence
  Description of Artificial Sequence: Synthetic oligonucleotide
uaucgcggugacauaaaag

SEQ ID NO: 257852 - RNA, 19 nt, Artificial Sequence
  Description of Artificial Sequence: Synthetic oligonucleotide
auuggaaaguuggaccggc

SEQ ID NO: 257853 - RNA, 19 nt, Artificial Sequence
  Description of Artificial Sequence: Synthetic oligonucleotide
cugcaaagagguugaaugg

SEQ ID NO: 257854 - RNA, 19 nt, Artificial Sequence
  Description of Artificial Sequence: Synthetic oligonucleotide
gugcaguaaauauucguag

SEQ ID NO: 257855 - RNA, 19 nt, Artificial Sequence
  Description of Artificial Sequence: Synthetic oligonucleotide
gaauaauugucguucugga

SEQ ID NO: 257856 - RNA, 19 nt, Artificial Sequence
  Description of Artificial Sequence: Synthetic oligonucleotide
uguguagauguugucacug

SEQ ID NO: 257857 - RNA, 19 nt, Artificial Sequence
  Description of Artificial Sequence: Synthetic oligonucleotide
aucgacaccucacuucuuc

SEQ ID NO: 257858 - RNA, 19 nt, Artificial Sequence
  Description of Artificial Sequence: Synthetic oligonucleotide
caguaaauauucguagacg

SEQ ID NO: 257859 - RNA, 19 nt, Artificial Sequence
  Description of Artificial Sequence: Synthetic oligonucleotide
uccuucauguuuuacggaa

SEQ ID NO: 257860 - RNA, 19 nt, Artificial Sequence
  Description of Artificial Sequence: Synthetic oligonucleotide
acaggauuaaucauugugu

SEQ ID NO: 257861 - RNA, 19 nt, Artificial Sequence
  Description of Artificial Sequence: Synthetic oligonucleotide
agaaugucccuuuaauuaa

SEQ ID NO: 257862 - RNA, 19 nt, Artificial Sequence
  Description of Artificial Sequence: Synthetic oligonucleotide
gaguacgggauugaguuag

SEQ ID NO: 257863 - RNA, 19 nt, Artificial Sequence
  Description of Artificial Sequence: Synthetic oligonucleotide
ugcuuggagaauaauuguc

SEQ ID NO: 257864 - RNA, 19 nt, Artificial Sequence
  Description of Artificial Sequence: Synthetic oligonucleotide
ugucguucuggaaggagug

SEQ ID NO: 257865 - RNA, 19 nt, Artificial Sequence
  Description of Artificial Sequence: Synthetic oligonucleotide
gaagccugcagcucgcuug

SEQ ID NO: 257866 - RNA, 19 nt, Artificial Sequence
  Description of Artificial Sequence: Synthetic oligonucleotide
caagaauccgcacaagguc

SEQ ID NO: 257867 - RNA, 19 nt, Artificial Sequence
  Description of Artificial Sequence: Synthetic oligonucleotide
agugucauguacaggaaag

SEQ ID NO: 257868 - RNA, 19 nt, Artificial Sequence
  Description of Artificial Sequence: Synthetic oligonucleotide
uagcucgccaucaucacga

SEQ ID NO: 257869 - RNA, 19 nt, Artificial Sequence
  Description of Artificial Sequence: Synthetic oligonucleotide
uaucguacacaaacuacaa

SEQ ID NO: 257870 - RNA, 19 nt, Artificial Sequence
  Description of Artificial Sequence: Synthetic oligonucleotide
gauugaguuagcacuguug

SEQ ID NO: 257871 - RNA, 19 nt, Artificial Sequence
  Description of Artificial Sequence: Synthetic oligonucleotide
guaaaaucccaaaacgaac

SEQ ID NO: 257872 - RNA, 19 nt, Artificial Sequence
  Description of Artificial Sequence: Synthetic oligonucleotide
cuggaauuuguugaauccg

SEQ ID NO: 257873 - RNA, 19 nt, Artificial Sequence
  Description of Artificial Sequence: Synthetic oligonucleotide
aagaauccgcacaaggucu

SEQ ID NO: 257874 - RNA, 19 nt, Artificial Sequence
  Description of Artificial Sequence: Synthetic oligonucleotide
gcugccguaauucuguggg

SEQ ID NO: 257875 - RNA, 19 nt, Artificial Sequence
  Description of Artificial Sequence: Synthetic oligonucleotide
ugugcguacuacgugagga

SEQ ID NO: 257876 - RNA, 19 nt, Artificial Sequence
  Description of Artificial Sequence: Synthetic oligonucleotide
auaucguacacaaacuaca

SEQ ID NO: 257877 - RNA, 19 nt, Artificial Sequence
  Description of Artificial Sequence: Synthetic oligonucleotide
uuguugaauccgcaggacu

SEQ ID NO: 257878 - RNA, 19 nt, Artificial Sequence
  Description of Artificial Sequence: Synthetic oligonucleotide
agucaccccuccuaggagg

SEQ ID NO: 257879 - RNA, 19 nt, Artificial Sequence
  Description of Artificial Sequence: Synthetic oligonucleotide
ugauccuaaggauccauuc

SEQ ID NO: 257880 - RNA, 19 nt, Artificial Sequence
  Description of Artificial Sequence: Synthetic oligonucleotide
auaauaugauauacauggg

SEQ ID NO: 257881 - RNA, 19 nt, Artificial Sequence
  Description of Artificial Sequence: Synthetic oligonucleotide
aauacccaagcaaugguaa

SEQ ID NO: 257882 - RNA, 19 nt, Artificial Sequence
  Description of Artificial Sequence: Synthetic oligonucleotide
uugucguucuggaaggagu

SEQ ID NO: 257883 - RNA, 19 nt, Artificial Sequence
  Description of Artificial Sequence: Synthetic oligonucleotide
aaccacuucagcagcccgc

SEQ ID NO: 257884 - RNA, 19 nt, Artificial Sequence
  Description of Artificial Sequence: Synthetic oligonucleotide
gauccuaaggauccauuca

SEQ ID NO: 257885 - RNA, 19 nt, Artificial Sequence
  Description of Artificial Sequence: Synthetic oligonucleotide
aauaccgaagucuguccau

SEQ ID NO: 257886 - RNA, 19 nt, Artificial Sequence
  Description of Artificial Sequence: Synthetic oligonucleotide
aauccgcaggacuaggcau

SEQ ID NO: 257887 - RNA, 19 nt, Artificial Sequence
  Description of Artificial Sequence: Synthetic oligonucleotide
uacgugcaguaaauauucg

SEQ ID NO: 257888 - RNA, 19 nt, Artificial Sequence
  Description of Artificial Sequence: Synthetic oligonucleotide
ugauauacaugggucagaa

SEQ ID NO: 257889 - RNA, 19 nt, Artificial Sequence
  Description of Artificial Sequence: Synthetic oligonucleotide
aaccaauacccaucuuuga

SEQ ID NO: 257890 - RNA, 19 nt, Artificial Sequence
  Description of Artificial Sequence: Synthetic oligonucleotide
uacgugaggaucuggggac

SEQ ID NO: 257891 - RNA, 19 nt, Artificial Sequence
  Description of Artificial Sequence: Synthetic oligonucleotide
uccuacgugcaguaaauau

SEQ ID NO: 257892 - RNA, 19 nt, Artificial Sequence
  Description of Artificial Sequence: Synthetic oligonucleotide
ggauuaaucauuguguaga

SEQ ID NO: 257893 - RNA, 19 nt, Artificial Sequence
  Description of Artificial Sequence: Synthetic oligonucleotide
acagcaauaccgaagucug

SEQ ID NO: 257894 - RNA, 19 nt, Artificial Sequence
  Description of Artificial Sequence: Synthetic oligonucleotide
accaauacccaucuuugaa

SEQ ID NO: 257895 - RNA, 19 nt, Artificial Sequence
  Description of Artificial Sequence: Synthetic oligonucleotide
auaagaaggucugugcaga

SEQ ID NO: 257896 - RNA, 19 nt, Artificial Sequence
  Description of Artificial Sequence: Synthetic oligonucleotide
cagacuacaagguaagaaa

SEQ ID NO: 257897 - RNA, 19 nt, Artificial Sequence
  Description of Artificial Sequence: Synthetic oligonucleotide
ggaucuggggaccaaaaug

SEQ ID NO: 257898 - RNA, 19 nt, Artificial Sequence
  Description of Artificial Sequence: Synthetic oligonucleotide
gcuuggagaauaauugucg

SEQ ID NO: 257899 - RNA, 19 nt, Artificial Sequence
  Description of Artificial Sequence: Synthetic oligonucleotide
cacgagugcagaaacccag

SEQ ID NO: 257900 - RNA, 19 nt, Artificial Sequence
  Description of Artificial Sequence: Synthetic oligonucleotide
caaagcgucagccccggcc

SEQ ID NO: 257901 - RNA, 19 nt, Artificial Sequence
  Description of Artificial Sequence: Synthetic oligonucleotide
aagucaccccuccuaggag

SEQ ID NO: 257902 - RNA, 19 nt, Artificial Sequence
  Description of Artificial Sequence: Synthetic oligonucleotide
aaauacagagcgauccuaa

SEQ ID NO: 257903 - RNA, 19 nt, Artificial Sequence
  Description of Artificial Sequence: Synthetic oligonucleotide
ucguagacguauaaagcua

SEQ ID NO: 257904 - RNA, 19 nt, Artificial Sequence
  Description of Artificial Sequence: Synthetic oligonucleotide
auccuaaggauccauucau

SEQ ID NO: 257905 - RNA, 19 nt, Artificial Sequence
  Description of Artificial Sequence: Synthetic oligonucleotide
ugggauugugagguggagg

SEQ ID NO: 257906 - RNA, 19 nt, Artificial Sequence
  Description of Artificial Sequence: Synthetic oligonucleotide
augcuuggagaauaauugu

SEQ ID NO: 257907 - RNA, 19 nt, Artificial Sequence
  Description of Artificial Sequence: Synthetic oligonucleotide
uacgggauugaguuagcac

SEQ ID NO: 257908 - RNA, 19 nt, Artificial Sequence
  Description of Artificial Sequence: Synthetic oligonucleotide
uagacguauaaagcuaacu

SEQ ID NO: 257909 - RNA, 19 nt, Artificial Sequence
  Description of Artificial Sequence: Synthetic oligonucleotide
caucgaaucucugauaaga

SEQ ID NO: 257910 - RNA, 19 nt, Artificial Sequence
  Description of Artificial Sequence: Synthetic oligonucleotide
gcaguaaauauucguagac

SEQ ID NO: 257911 - RNA, 19 nt, Artificial Sequence
  Description of Artificial Sequence: Synthetic oligonucleotide
aucucacauaauaugauau

SEQ ID NO: 257912 - RNA, 19 nt, Artificial Sequence
  Description of Artificial Sequence: Synthetic oligonucleotide
gguaucucacauaauauga

SEQ ID NO: 257913 - RNA, 19 nt, Artificial Sequence
  Description of Artificial Sequence: Synthetic oligonucleotide
cuagcucgccaucaucacg

SEQ ID NO: 257914 - RNA, 19 nt, Artificial Sequence
  Description of Artificial Sequence: Synthetic oligonucleotide
aaauacccaagcaauggua

SEQ ID NO: 257915 - RNA, 19 nt, Artificial Sequence
  Description of Artificial Sequence: Synthetic oligonucleotide
gcaugaaacuaaaauuggg

SEQ ID NO: 257916 - RNA, 19 nt, Artificial Sequence
  Description of Artificial Sequence: Synthetic oligonucleotide
uaccgggugaugaggagga

SEQ ID NO: 257917 - RNA, 19 nt, Artificial Sequence
  Description of Artificial Sequence: Synthetic oligonucleotide
guaaaggucccaaaauaca

SEQ ID NO: 257918 - RNA, 19 nt, Artificial Sequence
  Description of Artificial Sequence: Synthetic oligonucleotide
uuauguuguuaggagaauu

SEQ ID NO: 257919 - RNA, 19 nt, Artificial Sequence
  Description of Artificial Sequence: Synthetic oligonucleotide
gaucgaagccaucccguug

SEQ ID NO: 257920 - RNA, 19 nt, Artificial Sequence
  Description of Artificial Sequence: Synthetic oligonucleotide
gcuagaaagacuuaccacu

SEQ ID NO: 257921 - RNA, 19 nt, Artificial Sequence
  Description of Artificial Sequence: Synthetic oligonucleotide
ugccguaauucugugggcc

SEQ ID NO: 257922 - RNA, 19 nt, Artificial Sequence
  Description of Artificial Sequence: Synthetic oligonucleotide
aaggacgaacaggagaaaa

SEQ ID NO: 257923 - RNA, 19 nt, Artificial Sequence
  Description of Artificial Sequence: Synthetic oligonucleotide
gaauccgcaggacuaggca

SEQ ID NO: 257924 - RNA, 19 nt, Artificial Sequence
  Description of Artificial Sequence: Synthetic oligonucleotide
gacguauaaagcuaacuuu

SEQ ID NO: 257925 - RNA, 19 nt, Artificial Sequence
  Description of Artificial Sequence: Synthetic oligonucleotide
uaaucauuguguagauguu

SEQ ID NO: 257926 - RNA, 19 nt, Artificial Sequence
  Description of Artificial Sequence: Synthetic oligonucleotide
acguauaaagcuaacuuuu

SEQ ID NO: 257927 - RNA, 19 nt, Artificial Sequence
  Description of Artificial Sequence: Synthetic oligonucleotide
gcacuauaaucaugaaagg

SEQ ID NO: 257928 - RNA, 19 nt, Artificial Sequence
  Description of Artificial Sequence: Synthetic oligonucleotide
aagguugccauggggcgag

SEQ ID NO: 257929 - RNA, 19 nt, Artificial Sequence
  Description of Artificial Sequence: Synthetic oligonucleotide
gaucuggggaccaaaaugu

SEQ ID NO: 257930 - RNA, 19 nt, Artificial Sequence
  Description of Artificial Sequence: Synthetic oligonucleotide
ucccgagcugcccugcucc

SEQ ID NO: 257931 - RNA, 19 nt, Artificial Sequence
  Description of Artificial Sequence: Synthetic oligonucleotide
uuuguugaauccgcaggac

SEQ ID NO: 257932 - RNA, 19 nt, Artificial Sequence
  Description of Artificial Sequence: Synthetic oligonucleotide
auaccgaagucuguccauc

SEQ ID NO: 257933 - RNA, 19 nt, Artificial Sequence
  Description of Artificial Sequence: Synthetic oligonucleotide
uuggagaauaauugucguu

SEQ ID NO: 257934 - RNA, 19 nt, Artificial Sequence
  Description of Artificial Sequence: Synthetic oligonucleotide
caucaugcugcugggauug

SEQ ID NO: 257935 - RNA, 19 nt, Artificial Sequence
  Description of Artificial Sequence: Synthetic oligonucleotide
uggaccggcugccuccagg

SEQ ID NO: 257936 - RNA, 19 nt, Artificial Sequence
  Description of Artificial Sequence: Synthetic oligonucleotide
cacuuauguuguuaggaga

SEQ ID NO: 257937 - RNA, 19 nt, Artificial Sequence
  Description of Artificial Sequence: Synthetic oligonucleotide
gggcaagacacaaagguug

SEQ ID NO: 257938 - RNA, 19 nt, Artificial Sequence
  Description of Artificial Sequence: Synthetic oligonucleotide
agguccuuuagggugagga

SEQ ID NO: 257939 - RNA, 19 nt, Artificial Sequence
  Description of Artificial Sequence: Synthetic oligonucleotide
ucccuuuaauuaaaacguu

SEQ ID NO: 257940 - RNA, 19 nt, Artificial Sequence
  Description of Artificial Sequence: Synthetic oligonucleotide
auugucguucuggaaggag

SEQ ID NO: 257941 - RNA, 19 nt, Artificial Sequence
  Description of Artificial Sequence: Synthetic oligonucleotide
agacuacaagguaagaaaa

SEQ ID NO: 257942 - RNA, 19 nt, Artificial Sequence
  Description of Artificial Sequence: Synthetic oligonucleotide
aaauauucguagacguaua

SEQ ID NO: 257943 - RNA, 19 nt, Artificial Sequence
  Description of Artificial Sequence: Synthetic oligonucleotide
gcgauccuaaccaauaccc

SEQ ID NO: 257944 - RNA, 19 nt, Artificial Sequence
  Description of Artificial Sequence: Synthetic oligonucleotide
cuacgugaggaucugggga

SEQ ID NO: 257945 - RNA, 19 nt, Artificial Sequence
  Description of Artificial Sequence: Synthetic oligonucleotide
gagcgauccuaaccaauac

SEQ ID NO: 257946 - RNA, 19 nt, Artificial Sequence
  Description of Artificial Sequence: Synthetic oligonucleotide
guaccgggugaugaggagg

SEQ ID NO: 257947 - RNA, 19 nt, Artificial Sequence
  Description of Artificial Sequence: Synthetic oligonucleotide
ucguucuggaaggagugga

SEQ ID NO: 257948 - RNA, 19 nt, Artificial Sequence
  Description of Artificial Sequence: Synthetic oligonucleotide
uggggaccaaaauguggag

SEQ ID NO: 257949 - RNA, 19 nt, Artificial Sequence
  Description of Artificial Sequence: Synthetic oligonucleotide
uacccaagcaaugguaaaa

SEQ ID NO: 257950 - RNA, 19 nt, Artificial Sequence
  Description of Artificial Sequence: Synthetic oligonucleotide
gguaucgacaccucacuuc

SEQ ID NO: 257951 - RNA, 19 nt, Artificial Sequence
  Description of Artificial Sequence: Synthetic oligonucleotide
cacaaacuacaauguauca

SEQ ID NO: 257952 - RNA, 19 nt, Artificial Sequence
  Description of Artificial Sequence: Synthetic oligonucleotide
ucccauguuggggugaccu

SEQ ID NO: 257953 - RNA, 19 nt, Artificial Sequence
  Description of Artificial Sequence: Synthetic oligonucleotide
uccuaggaggggauggcuc

SEQ ID NO: 257954 - RNA, 19 nt, Artificial Sequence
  Description of Artificial Sequence: Synthetic oligonucleotide
ucucccagugugauguuuu

SEQ ID NO: 257955 - RNA, 19 nt, Artificial Sequence
  Description of Artificial Sequence: Synthetic oligonucleotide
auauucguagacguauaaa

SEQ ID NO: 257956 - RNA, 19 nt, Artificial Sequence
  Description of Artificial Sequence: Synthetic oligonucleotide
guaucgacaccucacuucu

SEQ ID NO: 257957 - RNA, 19 nt, Artificial Sequence
  Description of Artificial Sequence: Synthetic oligonucleotide
gaggaggguguaaauguac

SEQ ID NO: 257958 - RNA, 19 nt, Artificial Sequence
  Description of Artificial Sequence: Synthetic oligonucleotide
ccacuuauguuguuaggag

SEQ ID NO: 257959 - RNA, 19 nt, Artificial Sequence
  Description of Artificial Sequence: Synthetic oligonucleotide
ugucuguuugguugcuggu

SEQ ID NO: 257960 - RNA, 19 nt, Artificial Sequence
  Description of Artificial Sequence: Synthetic oligonucleotide
cccaagaauccgcacaagg

SEQ ID NO: 257961 - RNA, 19 nt, Artificial Sequence
  Description of Artificial Sequence: Synthetic oligonucleotide
ugcuaaugccacuuauguu

SEQ ID NO: 257962 - RNA, 19 nt, Artificial Sequence
  Description of Artificial Sequence: Synthetic oligonucleotide
gaauugggcagcaauggcu

SEQ ID NO: 257963 - RNA, 19 nt, Artificial Sequence
  Description of Artificial Sequence: Synthetic oligonucleotide
uguggggucccaucaugcu

SEQ ID NO: 257964 - RNA, 19 nt, Artificial Sequence
  Description of Artificial Sequence: Synthetic oligonucleotide
caggauuaaucauugugua

SEQ ID NO: 257965 - RNA, 19 nt, Artificial Sequence
  Description of Artificial Sequence: Synthetic oligonucleotide
auaucgcggugacauaaaa

SEQ ID NO: 257966 - RNA, 19 nt, Artificial Sequence
  Description of Artificial Sequence: Synthetic oligonucleotide
gggaauguugccaagcaca

SEQ ID NO: 257967 - RNA, 19 nt, Artificial Sequence
  Description of Artificial Sequence: Synthetic oligonucleotide
caugccgcugccguaauuc

SEQ ID NO: 257968 - RNA, 19 nt, Artificial Sequence
  Description of Artificial Sequence: Synthetic oligonucleotide
ggaauugggcagcaauggc

SEQ ID NO: 257969 - RNA, 19 nt, Artificial Sequence
  Description of Artificial Sequence: Synthetic oligonucleotide
agcccgcccagccugugcg

SEQ ID NO: 257970 - RNA, 19 nt, Artificial Sequence
  Description of Artificial Sequence: Synthetic oligonucleotide
uguuaaucccaggcauggc

SEQ ID NO: 257971 - RNA, 19 nt, Artificial Sequence
  Description of Artificial Sequence: Synthetic oligonucleotide
uguucccaagaauccgcac

SEQ ID NO: 257972 - RNA, 19 nt, Artificial Sequence
  Description of Artificial Sequence: Synthetic oligonucleotide
uccauucaugugguguggc

SEQ ID NO: 257973 - RNA, 19 nt, Artificial Sequence
  Description of Artificial Sequence: Synthetic oligonucleotide
uaagaaggucugugcagau

SEQ ID NO: 257974 - RNA, 19 nt, Artificial Sequence
  Description of Artificial Sequence: Synthetic oligonucleotide
ugugcagauuucugugcuc

SEQ ID NO: 257975 - RNA, 19 nt, Artificial Sequence
  Description of Artificial Sequence: Synthetic oligonucleotide
aauugucguucuggaagga

SEQ ID NO: 257976 - RNA, 19 nt, Artificial Sequence
  Description of Artificial Sequence: Synthetic oligonucleotide
aggaccagaaacagugucu

SEQ ID NO: 257977 - RNA, 19 nt, Artificial Sequence
  Description of Artificial Sequence: Synthetic oligonucleotide
caauaccgaagucugucca

SEQ ID NO: 257978 - RNA, 19 nt, Artificial Sequence
  Description of Artificial Sequence: Synthetic oligonucleotide
ucgacaccucacuucuucu

SEQ ID NO: 257979 - RNA, 19 nt, Artificial Sequence
  Description of Artificial Sequence: Synthetic oligonucleotide
auacccaagcaaugguaaa

SEQ ID NO: 257980 - RNA, 19 nt, Artificial Sequence
  Description of Artificial Sequence: Synthetic oligonucleotide
gaaagacuuaccacuuaaa

SEQ ID NO: 257981 - RNA, 19 nt, Artificial Sequence
  Description of Artificial Sequence: Synthetic oligonucleotide
ucgucaugcuuggagaaua

SEQ ID NO: 257982 - RNA, 19 nt, Artificial Sequence
  Description of Artificial Sequence: Synthetic oligonucleotide
uuagcacuguugggauugg

SEQ ID NO: 257983 - RNA, 19 nt, Artificial Sequence
  Description of Artificial Sequence: Synthetic oligonucleotide
guggggucccaucaugcug

SEQ ID NO: 257984 - RNA, 19 nt, Artificial Sequence
  Description of Artificial Sequence: Synthetic oligonucleotide
cugcacuauaaucaugaaa

SEQ ID NO: 257985 - RNA, 19 nt, Artificial Sequence
  Description of Artificial Sequence: Synthetic oligonucleotide
ccugggcccauguuaaucc

SEQ ID NO: 257986 - RNA, 19 nt, Artificial Sequence
  Description of Artificial Sequence: Synthetic oligonucleotide
ccagaucgaagccaucccg

SEQ ID NO: 257987 - RNA, 19 nt, Artificial Sequence
  Description of Artificial Sequence: Synthetic oligonucleotide
cucgcucgcgcuccgcucg

SEQ ID NO: 257988 - RNA, 19 nt, Artificial Sequence
  Description of Artificial Sequence: Synthetic oligonucleotide
cuuggagaauaauugucgu

SEQ ID NO: 257989 - RNA, 19 nt, Artificial Sequence
  Description of Artificial Sequence: Synthetic oligonucleotide
ugguaucgacaccucacuu

SEQ ID NO: 257990 - RNA, 19 nt, Artificial Sequence
  Description of Artificial Sequence: Synthetic oligonucleotide
aguacgggauugaguuagc

SEQ ID NO: 257991 - RNA, 19 nt, Artificial Sequence
  Description of Artificial Sequence: Synthetic oligonucleotide
uccgcgcucuuuuccagcu

SEQ ID NO: 257992 - RNA, 19 nt, Artificial Sequence
  Description of Artificial Sequence: Synthetic oligonucleotide
gauauacaugggucagaaa

SEQ ID NO: 257993 - RNA, 19 nt, Artificial Sequence
  Description of Artificial Sequence: Synthetic oligonucleotide
caucacgaggggugccugg

SEQ ID NO: 257994 - RNA, 19 nt, Artificial Sequence
  Description of Artificial Sequence: Synthetic oligonucleotide
ucucaugccgcugccguaa

SEQ ID NO: 257995 - RNA, 19 nt, Artificial Sequence
  Description of Artificial Sequence: Synthetic oligonucleotide
acgugaggaucuggggacc

SEQ ID NO: 257996 - RNA, 19 nt, Artificial Sequence
  Description of Artificial Sequence: Synthetic oligonucleotide
acgagugcagaaacccagg

SEQ ID NO: 257997 - RNA, 19 nt, Artificial Sequence
  Description of Artificial Sequence: Synthetic oligonucleotide
ggggaccaaaauguggagg

SEQ ID NO: 257998 - RNA, 19 nt, Artificial Sequence
  Description of Artificial Sequence: Synthetic oligonucleotide
aggaggguguaaauguaca

SEQ ID NO: 257999 - RNA, 19 nt, Artificial Sequence
  Description of Artificial Sequence: Synthetic oligonucleotide
ugcguacuacgugaggauc

SEQ ID NO: 258000 - RNA, 19 nt, Artificial Sequence
  Description of Artificial Sequence: Synthetic oligonucleotide
ccugguaucgacaccucac

SEQ ID NO: 258001 - RNA, 19 nt, Artificial Sequence
  Description of Artificial Sequence: Synthetic oligonucleotide
uggcuccgcgcucuuuucc

SEQ ID NO: 258002 - RNA, 19 nt, Artificial Sequence
  Description of Artificial Sequence: Synthetic oligonucleotide
cugacuguggggucccauc

SEQ ID NO: 258003 - RNA, 19 nt, Artificial Sequence
  Description of Artificial Sequence: Synthetic oligonucleotide
aggacccugaaagaacccu

SEQ ID NO: 258004 - RNA, 19 nt, Artificial Sequence
  Description of Artificial Sequence: Synthetic oligonucleotide
aucgaaucucugauaagaa

SEQ ID NO: 258005 - RNA, 19 nt, Artificial Sequence
  Description of Artificial Sequence: Synthetic oligonucleotide
agccugugcguacuacgug

SEQ ID NO: 258006 - RNA, 19 nt, Artificial Sequence
  Description of Artificial Sequence: Synthetic oligonucleotide
agaucgaagccaucccguu

SEQ ID NO: 258007 - RNA, 19 nt, Artificial Sequence
  Description of Artificial Sequence: Synthetic oligonucleotide
agagcgauccuaaccaaua

SEQ ID NO: 258008 - RNA, 19 nt, Artificial Sequence
  Description of Artificial Sequence: Synthetic oligonucleotide
ggccgagggaguugggugg

SEQ ID NO: 258009 - RNA, 19 nt, Artificial Sequence
  Description of Artificial Sequence: Synthetic oligonucleotide
cuacaaggguggguggggc

SEQ ID NO: 258010 - RNA, 19 nt, Artificial Sequence
  Description of Artificial Sequence: Synthetic oligonucleotide
aucgcccgcucgcucgcgc

SEQ ID NO: 258011 - RNA, 19 nt, Artificial Sequence
  Description of Artificial Sequence: Synthetic oligonucleotide
gucaccccuccuaggaggg

SEQ ID NO: 258012 - RNA, 19 nt, Artificial Sequence
  Description of Artificial Sequence: Synthetic oligonucleotide
gucaaagcgucagccccgg

SEQ ID NO: 258013 - RNA, 19 nt, Artificial Sequence
  Description of Artificial Sequence: Synthetic oligonucleotide
uccgggcaucccaucguug

SEQ ID NO: 258014 - RNA, 19 nt, Artificial Sequence
  Description of Artificial Sequence: Synthetic oligonucleotide
guagacguauaaagcuaac

SEQ ID NO: 258015 - RNA, 19 nt, Artificial Sequence
  Description of Artificial Sequence: Synthetic oligonucleotide
aucaucacgaggggugccu

SEQ ID NO: 258016 - RNA, 19 nt, Artificial Sequence
  Description of Artificial Sequence: Synthetic oligonucleotide
guacuacgugaggaucugg

SEQ ID NO: 258017 - RNA, 19 nt, Artificial Sequence
  Description of Artificial Sequence: Synthetic oligonucleotide
agguugaaugggguggggu

SEQ ID NO: 258018 - RNA, 19 nt, Artificial Sequence
  Description of Artificial Sequence: Synthetic oligonucleotide
acccugaaagaacccuggu

SEQ ID NO: 258019 - RNA, 19 nt, Artificial Sequence
  Description of Artificial Sequence: Synthetic oligonucleotide
auggggcgaggccagggca

SEQ ID NO: 258020 - RNA, 19 nt, Artificial Sequence
  Description of Artificial Sequence: Synthetic oligonucleotide
ucaucacgaggggugccug

SEQ ID NO: 258021 - RNA, 19 nt, Artificial Sequence
  Description of Artificial Sequence: Synthetic oligonucleotide
gaggacccugaaagaaccc

SEQ ID NO: 258022 - RNA, 19 nt, Artificial Sequence
  Description of Artificial Sequence: Synthetic oligonucleotide
gaguuagcacuguugggau

SEQ ID NO: 258023 - RNA, 19 nt, Artificial Sequence
  Description of Artificial Sequence: Synthetic oligonucleotide
ucccaucgaaucucugaua

SEQ ID NO: 258024 - RNA, 19 nt, Artificial Sequence
  Description of Artificial Sequence: Synthetic oligonucleotide
auccgcaggacuaggcaug

SEQ ID NO: 258025 - RNA, 19 nt, Artificial Sequence
  Description of Artificial Sequence: Synthetic oligonucleotide
cuccgcgcucuuuuccagc

SEQ ID NO: 258026 - RNA, 19 nt, Artificial Sequence
  Description of Artificial Sequence: Synthetic oligonucleotide
aggguucauucucugcauu

SEQ ID NO: 258027 - RNA, 19 nt, Artificial Sequence
  Description of Artificial Sequence: Synthetic oligonucleotide
augccgcugccguaauucu

SEQ ID NO: 258028 - RNA, 19 nt, Artificial Sequence
  Description of Artificial Sequence: Synthetic oligonucleotide
ggaauuuguugaauccgca

SEQ ID NO: 258029 - RNA, 19 nt, Artificial Sequence
  Description of Artificial Sequence: Synthetic oligonucleotide
gaccggcugccuccaggcg

SEQ ID NO: 258030 - RNA, 19 nt, Artificial Sequence
  Description of Artificial Sequence: Synthetic oligonucleotide
agggcaagacacaaagguu

SEQ ID NO: 258031 - RNA, 19 nt, Artificial Sequence
  Description of Artificial Sequence: Synthetic oligonucleotide
gcuaccguccggucucccg

SEQ ID NO: 258032 - RNA, 19 nt, Artificial Sequence
  Description of Artificial Sequence: Synthetic oligonucleotide
agccugcccguccgagggc

SEQ ID NO: 258033 - RNA, 19 nt, Artificial Sequence
  Description of Artificial Sequence: Synthetic oligonucleotide
aagguccuuuagggugagg

SEQ ID NO: 258034 - RNA, 19 nt, Artificial Sequence
  Description of Artificial Sequence: Synthetic oligonucleotide
ccgaagucuguccauccag

SEQ ID NO: 258035 - RNA, 19 nt, Artificial Sequence
  Description of Artificial Sequence: Synthetic oligonucleotide
ugcccguccgagggcaccg

SEQ ID NO: 258036 - RNA, 19 nt, Artificial Sequence
  Description of Artificial Sequence: Synthetic oligonucleotide
cccugaaagaacccuggug

SEQ ID NO: 258037 - RNA, 19 nt, Artificial Sequence
  Description of Artificial Sequence: Synthetic oligonucleotide
ccaauacccaucuuugaaa

SEQ ID NO: 258038 - RNA, 19 nt, Artificial Sequence
  Description of Artificial Sequence: Synthetic oligonucleotide
guaucucacauaauaugau

SEQ ID NO: 258039 - RNA, 19 nt, Artificial Sequence
  Description of Artificial Sequence: Synthetic oligonucleotide
ggaggguguaaauguacaa

SEQ ID NO: 258040 - RNA, 19 nt, Artificial Sequence
  Description of Artificial Sequence: Synthetic oligonucleotide
ucaaagcgucagccccggc

SEQ ID NO: 258041 - RNA, 19 nt, Artificial Sequence
  Description of Artificial Sequence: Synthetic oligonucleotide
cugcauaucgcggugacau

SEQ ID NO: 258042 - RNA, 19 nt, Artificial Sequence
  Description of Artificial Sequence: Synthetic oligonucleotide
ggaccggcugccuccaggc

SEQ ID NO: 258043 - RNA, 19 nt, Artificial Sequence
  Description of Artificial Sequence: Synthetic oligonucleotide
gcgaucgcccgcucgcucg

SEQ ID NO: 258044 - RNA, 19 nt, Artificial Sequence
  Description of Artificial Sequence: Synthetic oligonucleotide
cauaucgcggugacauaaa

SEQ ID NO: 258045 - RNA, 19 nt, Artificial Sequence
  Description of Artificial Sequence: Synthetic oligonucleotide
ugcauaucgcggugacaua

SEQ ID NO: 258046 - RNA, 19 nt, Artificial Sequence
  Description of Artificial Sequence: Synthetic oligonucleotide
cuaccguccggucucccga

SEQ ID NO: 258047 - RNA, 19 nt, Artificial Sequence
  Description of Artificial Sequence: Synthetic oligonucleotide
cugggauugugagguggag

SEQ ID NO: 258048 - RNA, 19 nt, Artificial Sequence
  Description of Artificial Sequence: Synthetic oligonucleotide
cccaucgaaucucugauaa

SEQ ID NO: 258049 - RNA, 19 nt, Artificial Sequence
  Description of Artificial Sequence: Synthetic oligonucleotide
agguaccgggugaugagga

SEQ ID NO: 258050 - RNA, 19 nt, Artificial Sequence
  Description of Artificial Sequence: Synthetic oligonucleotide
gggccgagggaguugggug

SEQ ID NO: 258051 - RNA, 19 nt, Artificial Sequence
  Description of Artificial Sequence: Synthetic oligonucleotide
gugccuggaggguugcuaa

SEQ ID NO: 258052 - RNA, 19 nt, Artificial Sequence
  Description of Artificial Sequence: Synthetic oligonucleotide
aucgucaugcuuggagaau

SEQ ID NO: 258053 - RNA, 19 nt, Artificial Sequence
  Description of Artificial Sequence: Synthetic oligonucleotide
guacgggauugaguuagca

SEQ ID NO: 258054 - RNA, 19 nt, Artificial Sequence
  Description of Artificial Sequence: Synthetic oligonucleotide
accagacuacaagguaaga

SEQ ID NO: 258055 - RNA, 19 nt, Artificial Sequence
  Description of Artificial Sequence: Synthetic oligonucleotide
guccggucucccgagcugc

SEQ ID NO: 258056 - RNA, 19 nt, Artificial Sequence
  Description of Artificial Sequence: Synthetic oligonucleotide
cagaucgaagccaucccgu

SEQ ID NO: 258057 - RNA, 19 nt, Artificial Sequence
  Description of Artificial Sequence: Synthetic oligonucleotide
gucgugugggauccaugga

SEQ ID NO: 258058 - RNA, 19 nt, Artificial Sequence
  Description of Artificial Sequence: Synthetic oligonucleotide
ggaggggagcaggagacac

SEQ ID NO: 258059 - RNA, 19 nt, Artificial Sequence
  Description of Artificial Sequence: Synthetic oligonucleotide
ugaccccggaggacccuga

SEQ ID NO: 258060 - RNA, 19 nt, Artificial Sequence
  Description of Artificial Sequence: Synthetic oligonucleotide
ccaucgaaucucugauaag

SEQ ID NO: 258061 - RNA, 19 nt, Artificial Sequence
  Description of Artificial Sequence: Synthetic oligonucleotide
uaucgacaccucacuucuu

SEQ ID NO: 258062 - RNA, 19 nt, Artificial Sequence
  Description of Artificial Sequence: Synthetic oligonucleotide
ccugugcguacuacgugag

SEQ ID NO: 258063 - RNA, 19 nt, Artificial Sequence
  Description of Artificial Sequence: Synthetic oligonucleotide
cccagaucgaagccauccc

SEQ ID NO: 258064 - RNA, 19 nt, Artificial Sequence
  Description of Artificial Sequence: Synthetic oligonucleotide
gcauaucgcggugacauaa

SEQ ID NO: 258065 - RNA, 19 nt, Artificial Sequence
  Description of Artificial Sequence: Synthetic oligonucleotide
cugguaucgacaccucacu

SEQ ID NO: 258066 - RNA, 19 nt, Artificial Sequence
  Description of Artificial Sequence: Synthetic oligonucleotide
aucccguugguggggccuc

SEQ ID NO: 258067 - RNA, 19 nt, Artificial Sequence
  Description of Artificial Sequence: Synthetic oligonucleotide
cauguacaggaaagguccu

SEQ ID NO: 258068 - RNA, 19 nt, Artificial Sequence
  Description of Artificial Sequence: Synthetic oligonucleotide
gggccgccugcauaucgcg

SEQ ID NO: 258069 - RNA, 19 nt, Artificial Sequence
  Description of Artificial Sequence: Synthetic oligonucleotide
ucaugccgcugccguaauu

SEQ ID NO: 258070 - RNA, 19 nt, Artificial Sequence
  Description of Artificial Sequence: Synthetic oligonucleotide
gaggguugcuaaugccacu

SEQ ID NO: 258071 - RNA, 19 nt, Artificial Sequence
  Description of Artificial Sequence: Synthetic oligonucleotide
ccagacuacaagguaagaa

SEQ ID NO: 258072 - RNA, 19 nt, Artificial Sequence
  Description of Artificial Sequence: Synthetic oligonucleotide
uuggaccggcugccuccag

SEQ ID NO: 258073 - RNA, 19 nt, Artificial Sequence
  Description of Artificial Sequence: Synthetic oligonucleotide
gccguaauucugugggcca

SEQ ID NO: 258074 - RNA, 19 nt, Artificial Sequence
  Description of Artificial Sequence: Synthetic oligonucleotide
cuggcuccgcgcucuuuuc

SEQ ID NO: 258075 - RNA, 19 nt, Artificial Sequence
  Description of Artificial Sequence: Synthetic oligonucleotide
cgagccuuugccuuuggca

SEQ ID NO: 258076 - RNA, 19 nt, Artificial Sequence
  Description of Artificial Sequence: Synthetic oligonucleotide
ucccuccuagcucgccauc

SEQ ID NO: 258077 - RNA, 19 nt, Artificial Sequence
  Description of Artificial Sequence: Synthetic oligonucleotide
cguagacguauaaagcuaa

SEQ ID NO: 258078 - RNA, 19 nt, Artificial Sequence
  Description of Artificial Sequence: Synthetic oligonucleotide
guggggcacgaggagggug

SEQ ID NO: 258079 - RNA, 19 nt, Artificial Sequence
  Description of Artificial Sequence: Synthetic oligonucleotide
uuucccgagccugcccguc

SEQ ID NO: 258080 - RNA, 19 nt, Artificial Sequence
  Description of Artificial Sequence: Synthetic oligonucleotide
ggcaccgccgagccuuugc

SEQ ID NO: 258081 - RNA, 19 nt, Artificial Sequence
  Description of Artificial Sequence: Synthetic oligonucleotide
agaugguaucucacauaau

SEQ ID NO: 258082 - RNA, 19 nt, Artificial Sequence
  Description of Artificial Sequence: Synthetic oligonucleotide
ucgcucgcgcuccgcucgc

SEQ ID NO: 258083 - RNA, 19 nt, Artificial Sequence
  Description of Artificial Sequence: Synthetic oligonucleotide
ccgcccaugccucccauug

SEQ ID NO: 258084 - RNA, 19 nt, Artificial Sequence
  Description of Artificial Sequence: Synthetic oligonucleotide
ggcacgaggaggguguaaa

SEQ ID NO: 258085 - RNA, 19 nt, Artificial Sequence
  Description of Artificial Sequence: Synthetic oligonucleotide
gagguucucccagugugau

SEQ ID NO: 258086 - RNA, 19 nt, Artificial Sequence
  Description of Artificial Sequence: Synthetic oligonucleotide
ccuacgugcaguaaauauu

SEQ ID NO: 258087 - RNA, 19 nt, Artificial Sequence
  Description of Artificial Sequence: Synthetic oligonucleotide
cuuugccuuuggcaaacau

SEQ ID NO: 258088 - RNA, 19 nt, Artificial Sequence
  Description of Artificial Sequence: Synthetic oligonucleotide
cuuauguuguuaggagaau

SEQ ID NO: 258089 - RNA, 19 nt, Artificial Sequence
  Description of Artificial Sequence: Synthetic oligonucleotide
cguaauucugugggccagg

SEQ ID NO: 258090 - RNA, 19 nt, Artificial Sequence
  Description of Artificial Sequence: Synthetic oligonucleotide
ccguaauucugugggccag

SEQ ID NO: 258091 - RNA, 19 nt, Artificial Sequence
  Description of Artificial Sequence: Synthetic oligonucleotide
cagagcgauccuaaccaau

SEQ ID NO: 258092 - RNA, 19 nt, Artificial Sequence
  Description of Artificial Sequence: Synthetic oligonucleotide
gugcgugcggcgagggcug

SEQ ID NO: 258093 - RNA, 19 nt, Artificial Sequence
  Description of Artificial Sequence: Synthetic oligonucleotide
cugauccuaaggauccauu

SEQ ID NO: 258094 - RNA, 19 nt, Artificial Sequence
  Description of Artificial Sequence: Synthetic oligonucleotide
gacuguggggucccaucau

SEQ ID NO: 258095 - RNA, 19 nt, Artificial Sequence
  Description of Artificial Sequence: Synthetic oligonucleotide
cagcccgcccagccugugc

SEQ ID NO: 258096 - RNA, 19 nt, Artificial Sequence
  Description of Artificial Sequence: Synthetic oligonucleotide
ccgagggcaccgccgagcc

SEQ ID NO: 258097 - RNA, 19 nt, Artificial Sequence
  Description of Artificial Sequence: Synthetic oligonucleotide
ccguccgagggcaccgccg

SEQ ID NO: 258098 - RNA, 19 nt, Artificial Sequence
  Description of Artificial Sequence: Synthetic oligonucleotide
cugugccgccgcccgcccg

SEQ ID NO: 258099 - RNA, 19 nt, Artificial Sequence
  Description of Artificial Sequence: Synthetic oligonucleotide
caccccuccuaggagggga

SEQ ID NO: 258100 - RNA, 19 nt, Artificial Sequence
  Description of Artificial Sequence: Synthetic oligonucleotide
cgauccuaaccaauaccca

SEQ ID NO: 258101 - RNA, 19 nt, Artificial Sequence
  Description of Artificial Sequence: Synthetic oligonucleotide
ccggcgaucgcccgcucgc

SEQ ID NO: 258102 - RNA, 19 nt, Artificial Sequence
  Description of Artificial Sequence: Synthetic oligonucleotide
gccucuccugcaaagaggu

SEQ ID NO: 258103 - RNA, 19 nt, Artificial Sequence
  Description of Artificial Sequence: Synthetic oligonucleotide
gggauugggccagggucug

SEQ ID NO: 258104 - RNA, 19 nt, Artificial Sequence
  Description of Artificial Sequence: Synthetic oligonucleotide
ccacgagugcagaaaccca

SEQ ID NO: 258105 - RNA, 19 nt, Artificial Sequence
  Description of Artificial Sequence: Synthetic oligonucleotide
cgcugccguaauucugugg

SEQ ID NO: 258106 - RNA, 19 nt, Artificial Sequence
  Description of Artificial Sequence: Synthetic oligonucleotide
cccgaagccugcagcucgc

SEQ ID NO: 258107 - RNA, 19 nt, Artificial Sequence
  Description of Artificial Sequence: Synthetic oligonucleotide
cagcaauaccgaagucugu

SEQ ID NO: 258108 - RNA, 19 nt, Artificial Sequence
  Description of Artificial Sequence: Synthetic oligonucleotide
cucugauaagaaggucugu

SEQ ID NO: 258109 - RNA, 19 nt, Artificial Sequence
  Description of Artificial Sequence: Synthetic oligonucleotide
gggugaugaggaggaguac

SEQ ID NO: 258110 - RNA, 19 nt, Artificial Sequence
  Description of Artificial Sequence: Synthetic oligonucleotide
cguacuacgugaggaucug

SEQ ID NO: 258111 - RNA, 19 nt, Artificial Sequence
  Description of Artificial Sequence: Synthetic oligonucleotide
ccgagccuuugccuuuggc

SEQ ID NO: 258112 - RNA, 19 nt, Artificial Sequence
  Description of Artificial Sequence: Synthetic oligonucleotide
gcguacuacgugaggaucu

SEQ ID NO: 258113 - RNA, 19 nt, Artificial Sequence
  Description of Artificial Sequence: Synthetic oligonucleotide
ccucccauugggccaucug

SEQ ID NO: 258114 - RNA, 19 nt, Artificial Sequence
  Description of Artificial Sequence: Synthetic oligonucleotide
ccguugguggggccucucc

SEQ ID NO: 258115 - RNA, 19 nt, Artificial Sequence
  Description of Artificial Sequence: Synthetic oligonucleotide
ggauugaguuagcacuguu

SEQ ID NO: 258116 - RNA, 19 nt, Artificial Sequence
  Description of Artificial Sequence: Synthetic oligonucleotide
cuccuacgugcaguaaaua

SEQ ID NO: 258117 - RNA, 19 nt, Artificial Sequence
  Description of Artificial Sequence: Synthetic oligonucleotide
gccgccugcauaucgcggu

SEQ ID NO: 258118 - RNA, 19 nt, Artificial Sequence
  Description of Artificial Sequence: Synthetic oligonucleotide
cgggcaucccaucguuggg

SEQ ID NO: 258119 - RNA, 19 nt, Artificial Sequence
  Description of Artificial Sequence: Synthetic oligonucleotide
gugaggaucuggggaccaa

SEQ ID NO: 258120 - RNA, 19 nt, Artificial Sequence
  Description of Artificial Sequence: Synthetic oligonucleotide
cgagugcagaaacccagga

SEQ ID NO: 258121 - RNA, 19 nt, Artificial Sequence
  Description of Artificial Sequence: Synthetic oligonucleotide
gccaucccguugguggggc

SEQ ID NO: 258122 - RNA, 19 nt, Artificial Sequence
  Description of Artificial Sequence: Synthetic oligonucleotide
ucccguugguggggccucu

SEQ ID NO: 258123 - RNA, 19 nt, Artificial Sequence
  Description of Artificial Sequence: Synthetic oligonucleotide
cccggcgaucgcccgcucg

SEQ ID NO: 258124 - RNA, 19 nt, Artificial Sequence
  Description of Artificial Sequence: Synthetic oligonucleotide
ggguugcuaaugccacuua

SEQ ID NO: 258125 - RNA, 19 nt, Artificial Sequence
  Description of Artificial Sequence: Synthetic oligonucleotide
ccggaggacccugaaagaa

SEQ ID NO: 258126 - RNA, 19 nt, Artificial Sequence
  Description of Artificial Sequence: Synthetic oligonucleotide
ggauugggccagggucugc

SEQ ID NO: 258127 - RNA, 19 nt, Artificial Sequence
  Description of Artificial Sequence: Synthetic oligonucleotide
gcggcacaggauuaaucau

SEQ ID NO: 258128 - RNA, 19 nt, Artificial Sequence
  Description of Artificial Sequence: Synthetic oligonucleotide
cuccuaggaggggauggcu

SEQ ID NO: 258129 - RNA, 19 nt, Artificial Sequence
  Description of Artificial Sequence: Synthetic oligonucleotide
cccggaggacccugaaaga

SEQ ID NO: 258130 - RNA, 19 nt, Artificial Sequence
  Description of Artificial Sequence: Synthetic oligonucleotide
caucccguugguggggccu

SEQ ID NO: 258131 - RNA, 19 nt, Artificial Sequence
  Description of Artificial Sequence: Synthetic oligonucleotide
gggauugaguuagcacugu

SEQ ID NO: 258132 - RNA, 19 nt, Artificial Sequence
  Description of Artificial Sequence: Synthetic oligonucleotide
ccaucccguugguggggcc

SEQ ID NO: 258133 - RNA, 19 nt, Artificial Sequence
  Description of Artificial Sequence: Synthetic oligonucleotide
ccucccggcgaucgcccgc

SEQ ID NO: 258134 - RNA, 19 nt, Artificial Sequence
  Description of Artificial Sequence: Synthetic oligonucleotide
ccccucccggcgaucgccc

SEQ ID NO: 258135 - RNA, 19 nt, Artificial Sequence
  Description of Artificial Sequence: Synthetic oligonucleotide
caccgccgagccuuugccu

SEQ ID NO: 258136 - RNA, 19 nt, Artificial Sequence
  Description of Artificial Sequence: Synthetic oligonucleotide
ccgccugcauaucgcggug

SEQ ID NO: 258137 - RNA, 19 nt, Artificial Sequence
  Description of Artificial Sequence: Synthetic oligonucleotide
gcuggcuccgcgcucuuuu

SEQ ID NO: 258138 - RNA, 19 nt, Artificial Sequence
  Description of Artificial Sequence: Synthetic oligonucleotide
cccguccgagggcaccgcc

SEQ ID NO: 258139 - RNA, 19 nt, Artificial Sequence
  Description of Artificial Sequence: Synthetic oligonucleotide
ccgcugccguaauucugug

SEQ ID NO: 258140 - RNA, 19 nt, Artificial Sequence
  Description of Artificial Sequence: Synthetic oligonucleotide
cccucccggcgaucgcccg

SEQ ID NO: 258141 - RNA, 19 nt, Artificial Sequence
  Description of Artificial Sequence: Synthetic oligonucleotide
ucccggcgaucgcccgcuc

SEQ ID NO: 258142 - RNA, 19 nt, Artificial Sequence
  Description of Artificial Sequence: Synthetic oligonucleotide
gccugcccguccgagggca

SEQ ID NO: 258143 - RNA, 19 nt, Artificial Sequence
  Description of Artificial Sequence: Synthetic oligonucleotide
ccgagccugcccguccgag

SEQ ID NO: 258144 - RNA, 19 nt, Artificial Sequence
  Description of Artificial Sequence: Synthetic oligonucleotide
cuccgggcaucccaucguu

SEQ ID NO: 258145 - RNA, 19 nt, Artificial Sequence
  Description of Artificial Sequence: Synthetic oligonucleotide
ccugcauaucgcggugaca

SEQ ID NO: 258146 - RNA, 19 nt, Artificial Sequence
  Description of Artificial Sequence: Synthetic oligonucleotide
cccgccgccgccgccgccg

SEQ ID NO: 258147 - RNA, 19 nt, Artificial Sequence
  Description of Artificial Sequence: Synthetic oligonucleotide
gccugcaaugccggcucuc

SEQ ID NO: 258148 - RNA, 19 nt, Artificial Sequence
  Description of Artificial Sequence: Synthetic oligonucleotide
ccgcgcucuuuuccagcug

SEQ ID NO: 258149 - RNA, 19 nt, Artificial Sequence
  Description of Artificial Sequence: Synthetic oligonucleotide
ggggccgagggaguugggu

SEQ ID NO: 258150 - RNA, 19 nt, Artificial Sequence
  Description of Artificial Sequence: Synthetic oligonucleotide
ccaggacccauuggaaagu

SEQ ID NO: 258151 - RNA, 19 nt, Artificial Sequence
  Description of Artificial Sequence: Synthetic oligonucleotide
cucaugccgcugccguaau

SEQ ID NO: 258152 - RNA, 19 nt, Artificial Sequence
  Description of Artificial Sequence: Synthetic oligonucleotide
cucccggcgaucgcccgcu

SEQ ID NO: 258153 - RNA, 19 nt, Artificial Sequence
  Description of Artificial Sequence: Synthetic oligonucleotide
caggcggcacaggauuaau

SEQ ID NO: 258154 - RNA, 19 nt, Artificial Sequence
  Description of Artificial Sequence: Synthetic oligonucleotide
cgugaggaucuggggacca

SEQ ID NO: 258155 - RNA, 19 nt, Artificial Sequence
  Description of Artificial Sequence: Synthetic oligonucleotide
ccaggcggcacaggauuaa

SEQ ID NO: 258156 - RNA, 19 nt, Artificial Sequence
  Description of Artificial Sequence: Synthetic oligonucleotide
gcauaauuucuggcaucuu

SEQ ID NO: 258157 - RNA, 19 nt, Artificial Sequence
  Description of Artificial Sequence: Synthetic oligonucleotide
ccuuugccuuuggcaaaca

SEQ ID NO: 258158 - RNA, 19 nt, Artificial Sequence
  Description of Artificial Sequence: Synthetic oligonucleotide
agggcaccgccgagccuuu

SEQ ID NO: 258159 - RNA, 19 nt, Artificial Sequence
  Description of Artificial Sequence: Synthetic oligonucleotide
gggcacgaggaggguguaa

SEQ ID NO: 258160 - RNA, 19 nt, Artificial Sequence
  Description of Artificial Sequence: Synthetic oligonucleotide
cgugcggcgagggcuguga

SEQ ID NO: 258161 - RNA, 19 nt, Artificial Sequence
  Description of Artificial Sequence: Synthetic oligonucleotide
ccgcuaccguccggucucc

SEQ ID NO: 258162 - RNA, 19 nt, Artificial Sequence
  Description of Artificial Sequence: Synthetic oligonucleotide
gccgagggaguuggguggu

SEQ ID NO: 258163 - RNA, 19 nt, Artificial Sequence
  Description of Artificial Sequence: Synthetic oligonucleotide
gcccguccgagggcaccgc

SEQ ID NO: 258164 - RNA, 19 nt, Artificial Sequence
  Description of Artificial Sequence: Synthetic oligonucleotide
ccguccggucucccgagcu

SEQ ID NO: 258165 - RNA, 19 nt, Artificial Sequence
  Description of Artificial Sequence: Synthetic oligonucleotide
ccgccgcuaccguccgguc

SEQ ID NO: 258166 - RNA, 19 nt, Artificial Sequence
  Description of Artificial Sequence: Synthetic oligonucleotide
cgccgagccuuugccuuug

SEQ ID NO: 258167 - RNA, 19 nt, Artificial Sequence
  Description of Artificial Sequence: Synthetic oligonucleotide
gggcaccgccgagccuuug

SEQ ID NO: 258168 - RNA, 19 nt, Artificial Sequence
  Description of Artificial Sequence: Synthetic oligonucleotide
cccguugguggggccucuc

SEQ ID NO: 258169 - RNA, 19 nt, Artificial Sequence
  Description of Artificial Sequence: Synthetic oligonucleotide
ggccgcggccccaucgccu

SEQ ID NO: 258170 - RNA, 19 nt, Artificial Sequence
  Description of Artificial Sequence: Synthetic oligonucleotide
cgccugcauaucgcgguga

SEQ ID NO: 258171 - RNA, 19 nt, Artificial Sequence
  Description of Artificial Sequence: Synthetic oligonucleotide
cgcuaccguccggucuccc

SEQ ID NO: 258172 - RNA, 19 nt, Artificial Sequence
  Description of Artificial Sequence: Synthetic oligonucleotide
cgcgcuccgcucgccgcgc

SEQ ID NO: 258173 - RNA, 19 nt, Artificial Sequence
  Description of Artificial Sequence: Synthetic oligonucleotide
cccgagccugcccguccga

SEQ ID NO: 258174 - RNA, 19 nt, Artificial Sequence
  Description of Artificial Sequence: Synthetic oligonucleotide
gccgccgccgccgccgcua

SEQ ID NO: 258175 - RNA, 19 nt, Artificial Sequence
  Description of Artificial Sequence: Synthetic oligonucleotide
cggcgcugugccgccgccc

SEQ ID NO: 258176 - RNA, 19 nt, Artificial Sequence
  Description of Artificial Sequence: Synthetic oligonucleotide
ccaugccucugggaggguu

SEQ ID NO: 258177 - RNA, 19 nt, Artificial Sequence
  Description of Artificial Sequence: Synthetic oligonucleotide
ccgccgccgccgccgccgc

SEQ ID NO: 258178 - RNA, 19 nt, Artificial Sequence
  Description of Artificial Sequence: Synthetic oligonucleotide
cgccgcuaccguccggucu

SEQ ID NO: 258179 - RNA, 19 nt, Artificial Sequence
  Description of Artificial Sequence: Synthetic oligonucleotide
cgcucgcgcuccgcucgcc

SEQ ID NO: 258180 - RNA, 19 nt, Artificial Sequence
  Description of Artificial Sequence: Synthetic oligonucleotide
gcccgccgccgccgccgcc

SEQ ID NO: 258181 - RNA, 19 nt, Artificial Sequence
  Description of Artificial Sequence: Synthetic oligonucleotide
gcgcuccgcucgccgcgcu

SEQ ID NO: 258182 - RNA, 19 nt, Artificial Sequence
  Description of Artificial Sequence: Synthetic oligonucleotide
ccgcaggacuaggcaugau

SEQ ID NO: 258183 - RNA, 19 nt, Artificial Sequence
  Description of Artificial Sequence: Synthetic oligonucleotide
cgccgccgccgccgccgcu

SEQ ID NO: 258184 - RNA, 19 nt, Artificial Sequence
  Description of Artificial Sequence: Synthetic oligonucleotide
aacuacaccauuuaaaucc

SEQ ID NO: 258185 - RNA, 19 nt, Artificial Sequence
  Description of Artificial Sequence: Synthetic oligonucleotide
uauucuuugauuuacaaca

SEQ ID NO: 258186 - RNA, 19 nt, Artificial Sequence
  Description of Artificial Sequence: Synthetic oligonucleotide
aagaauaagguacucgggc

SEQ ID NO: 258187 - RNA, 19 nt, Artificial Sequence
  Description of Artificial Sequence: Synthetic oligonucleotide
aaagauaacacuugucuuc

SEQ ID NO: 258188 - RNA, 19 nt, Artificial Sequence
  Description of Artificial Sequence: Synthetic oligonucleotide
uuuaccauuauacuuacug

SEQ ID NO: 258189 - RNA, 19 nt, Artificial Sequence
  Description of Artificial Sequence: Synthetic oligonucleotide
aaaacacugcccuauaggg

SEQ ID NO: 258190 - RNA, 19 nt, Artificial Sequence
  Description of Artificial Sequence: Synthetic oligonucleotide
aacgaaguaaaugucaccc

SEQ ID NO: 258191 - RNA, 19 nt, Artificial Sequence
  Description of Artificial Sequence: Synthetic oligonucleotide
auuauaaaaccucugguuc

SEQ ID NO: 258192 - RNA, 19 nt, Artificial Sequence
  Description of Artificial Sequence: Synthetic oligonucleotide
aguugaguaagucaguuac

SEQ ID NO: 258193 - RNA, 19 nt, Artificial Sequence
  Description of Artificial Sequence: Synthetic oligonucleotide
acuaauuuggggcagaaag

SEQ ID NO: 258194 - RNA, 19 nt, Artificial Sequence
  Description of Artificial Sequence: Synthetic oligonucleotide
ucuccauugacccagacgc

SEQ ID NO: 258195 - RNA, 19 nt, Artificial Sequence
  Description of Artificial Sequence: Synthetic oligonucleotide
uuugauuuacaacagaguc

SEQ ID NO: 258196 - RNA, 19 nt, Artificial Sequence
  Description of Artificial Sequence: Synthetic oligonucleotide
uauaaaagcacguaagcug

SEQ ID NO: 258197 - RNA, 19 nt, Artificial Sequence
  Description of Artificial Sequence: Synthetic oligonucleotide
uuaaacuuagcuuucauuc

SEQ ID NO: 258198 - RNA, 19 nt, Artificial Sequence
  Description of Artificial Sequence: Synthetic oligonucleotide
uuuguuauggcauccauca

SEQ ID NO: 258199 - RNA, 19 nt, Artificial Sequence
  Description of Artificial Sequence: Synthetic oligonucleotide
guaagaauaagguacucgg

SEQ ID NO: 258200 - RNA, 19 nt, Artificial Sequence
  Description of Artificial Sequence: Synthetic oligonucleotide
uuaauuagggaccagguau

SEQ ID NO: 258201 - RNA, 19 nt, Artificial Sequence
  Description of Artificial Sequence: Synthetic oligonucleotide
ucuauuaagguuuucucgc

SEQ ID NO: 258202 - RNA, 19 nt, Artificial Sequence
  Description of Artificial Sequence: Synthetic oligonucleotide
aauuuaccauuauacuuac

SEQ ID NO: 258203 - RNA, 19 nt, Artificial Sequence
  Description of Artificial Sequence: Synthetic oligonucleotide
uguauaaaagcacguaagc

SEQ ID NO: 258204 - RNA, 19 nt, Artificial Sequence
  Description of Artificial Sequence: Synthetic oligonucleotide
auaaaagauaugcuauugg

SEQ ID NO: 258205 - RNA, 19 nt, Artificial Sequence
  Description of Artificial Sequence: Synthetic oligonucleotide
acgaauuacacccauuuag

SEQ ID NO: 258206 - RNA, 19 nt, Artificial Sequence
  Description of Artificial Sequence: Synthetic oligonucleotide
aaacgaaguaaaugucacc

SEQ ID NO: 258207 - RNA, 19 nt, Artificial Sequence
  Description of Artificial Sequence: Synthetic oligonucleotide
aaaccugagguacucagag

SEQ ID NO: 258208 - RNA, 19 nt, Artificial Sequence
  Description of Artificial Sequence: Synthetic oligonucleotide
agugaaacucaacaggagg

SEQ ID NO: 258209 - RNA, 19 nt, Artificial Sequence
  Description of Artificial Sequence: Synthetic oligonucleotide
aaaccaguggcagugacac

SEQ ID NO: 258210 - RNA, 19 nt, Artificial Sequence
  Description of Artificial Sequence: Synthetic oligonucleotide
aagauaugcuauugguuac

SEQ ID NO: 258211 - RNA, 19 nt, Artificial Sequence
  Description of Artificial Sequence: Synthetic oligonucleotide
aaauacuacaaaguuaggu

SEQ ID NO: 258212 - RNA, 19 nt, Artificial Sequence
  Description of Artificial Sequence: Synthetic oligonucleotide
aauguuaucaauguuuaau

SEQ ID NO: 258213 - RNA, 19 nt, Artificial Sequence
  Description of Artificial Sequence: Synthetic oligonucleotide
uguaaaacgcuguucaugu

SEQ ID NO: 258214 - RNA, 19 nt, Artificial Sequence
  Description of Artificial Sequence: Synthetic oligonucleotide
uuagggaccagguauaacu

SEQ ID NO: 258215 - RNA, 19 nt, Artificial Sequence
  Description of Artificial Sequence: Synthetic oligonucleotide
ucaaugacuguacuggggc

SEQ ID NO: 258216 - RNA, 19 nt, Artificial Sequence
  Description of Artificial Sequence: Synthetic oligonucleotide
aauuuaaugcagcuuaauu

SEQ ID NO: 258217 - RNA, 19 nt, Artificial Sequence
  Description of Artificial Sequence: Synthetic oligonucleotide
uaagaauaagguacucggg

SEQ ID NO: 258218 - RNA, 19 nt, Artificial Sequence
  Description of Artificial Sequence: Synthetic oligonucleotide
aauaagguacucgggcucc

SEQ ID NO: 258219 - RNA, 19 nt, Artificial Sequence
  Description of Artificial Sequence: Synthetic oligonucleotide
ucuuuuaacuggcaacucc

SEQ ID NO: 258220 - RNA, 19 nt, Artificial Sequence
  Description of Artificial Sequence: Synthetic oligonucleotide
aguauuagauguuuuguga

SEQ ID NO: 258221 - RNA, 19 nt, Artificial Sequence
  Description of Artificial Sequence: Synthetic oligonucleotide
ugaaacuacaccauuuaaa

SEQ ID NO: 258222 - RNA, 19 nt, Artificial Sequence
  Description of Artificial Sequence: Synthetic oligonucleotide
uucacuagggacagaagag

SEQ ID NO: 258223 - RNA, 19 nt, Artificial Sequence
  Description of Artificial Sequence: Synthetic oligonucleotide
auuaaauccuccuccuccg

SEQ ID NO: 258224 - RNA, 19 nt, Artificial Sequence
  Description of Artificial Sequence: Synthetic oligonucleotide
uuaacagccauaguauuag

SEQ ID NO: 258225 - RNA, 19 nt, Artificial Sequence
  Description of Artificial Sequence: Synthetic oligonucleotide
uggcauaagaauaguaaug

SEQ ID NO: 258226 - RNA, 19 nt, Artificial Sequence
  Description of Artificial Sequence: Synthetic oligonucleotide
uuaacuggcaacuccaaaa

SEQ ID NO: 258227 - RNA, 19 nt, Artificial Sequence
  Description of Artificial Sequence: Synthetic oligonucleotide
uuaccauuauacuuacugc

SEQ ID NO: 258228 - RNA, 19 nt, Artificial Sequence
  Description of Artificial Sequence: Synthetic oligonucleotide
gaucauaugagaaccuuag

SEQ ID NO: 258229 - RNA, 19 nt, Artificial Sequence
  Description of Artificial Sequence: Synthetic oligonucleotide
ugcagcuuaauuagggacc

SEQ ID NO: 258230 - RNA, 19 nt, Artificial Sequence
  Description of Artificial Sequence: Synthetic oligonucleotide
aauuacacccauuuagauu

SEQ ID NO: 258231 - RNA, 19 nt, Artificial Sequence
  Description of Artificial Sequence: Synthetic oligonucleotide
uaguauuagauguuuugug

SEQ ID NO: 258232 - RNA, 19 nt, Artificial Sequence
  Description of Artificial Sequence: Synthetic oligonucleotide
auucacuagggacagaaga

SEQ ID NO: 258233 - RNA, 19 nt, Artificial Sequence
  Description of Artificial Sequence: Synthetic oligonucleotide
uguuaucaauguuuaaugu

SEQ ID NO: 258234 - RNA, 19 nt, Artificial Sequence
  Description of Artificial Sequence: Synthetic oligonucleotide
gguaugaagacucuguccc

SEQ ID NO: 258235 - RNA, 19 nt, Artificial Sequence
  Description of Artificial Sequence: Synthetic oligonucleotide
uaaaacgcuguucauguaa

SEQ ID NO: 258236 - RNA, 19 nt, Artificial Sequence
  Description of Artificial Sequence: Synthetic oligonucleotide
uucugaucauaugagaacc

SEQ ID NO: 258237 - RNA, 19 nt, Artificial Sequence
  Description of Artificial Sequence: Synthetic oligonucleotide
ucaggucuaaugaaaagaa

SEQ ID NO: 258238 - RNA, 19 nt, Artificial Sequence
  Description of Artificial Sequence: Synthetic oligonucleotide
cuugugaggacugaacucg

SEQ ID NO: 258239 - RNA, 19 nt, Artificial Sequence
  Description of Artificial Sequence: Synthetic oligonucleotide
uguacuggggcuuucuccc

SEQ ID NO: 258240 - RNA, 19 nt, Artificial Sequence
  Description of Artificial Sequence: Synthetic oligonucleotide
gagcguaagaauaagguac

SEQ ID NO: 258241 - RNA, 19 nt, Artificial Sequence
  Description of Artificial Sequence: Synthetic oligonucleotide
acagccauaguauuagaug

SEQ ID NO: 258242 - RNA, 19 nt, Artificial Sequence
  Description of Artificial Sequence: Synthetic oligonucleotide
aaaauacgagucugccaac

SEQ ID NO: 258243 - RNA, 19 nt, Artificial Sequence
  Description of Artificial Sequence: Synthetic oligonucleotide
cuaauuuggggcagaaagc

SEQ ID NO: 258244 - RNA, 19 nt, Artificial Sequence
  Description of Artificial Sequence: Synthetic oligonucleotide
aaaccuacuugugauuuuc

SEQ ID NO: 258245 - RNA, 19 nt, Artificial Sequence
  Description of Artificial Sequence: Synthetic oligonucleotide
agaagugucagugcagccc

SEQ ID NO: 258246 - RNA, 19 nt, Artificial Sequence
  Description of Artificial Sequence: Synthetic oligonucleotide
aaagcacguaagcuguguc

SEQ ID NO: 258247 - RNA, 19 nt, Artificial Sequence
  Description of Artificial Sequence: Synthetic oligonucleotide
agacgaaagcagcuguugc

SEQ ID NO: 258248 - RNA, 19 nt, Artificial Sequence
  Description of Artificial Sequence: Synthetic oligonucleotide
cacgucuaaccauaaaugc

SEQ ID NO: 258249 - RNA, 19 nt, Artificial Sequence
  Description of Artificial Sequence: Synthetic oligonucleotide
aaauauccgaggugcguag

SEQ ID NO: 258250 - RNA, 19 nt, Artificial Sequence
  Description of Artificial Sequence: Synthetic oligonucleotide
aaaacgcuguucauguaac

SEQ ID NO: 258251 - RNA, 19 nt, Artificial Sequence
  Description of Artificial Sequence: Synthetic oligonucleotide
ugaauacaguacugcaagg

SEQ ID NO: 258252 - RNA, 19 nt, Artificial Sequence
  Description of Artificial Sequence: Synthetic oligonucleotide
ugacacauugucuaaaauu

SEQ ID NO: 258253 - RNA, 19 nt, Artificial Sequence
  Description of Artificial Sequence: Synthetic oligonucleotide
uggacugacugaaacgaag

SEQ ID NO: 258254 - RNA, 19 nt, Artificial Sequence
  Description of Artificial Sequence: Synthetic oligonucleotide
uauucaggucuaaugaaaa

SEQ ID NO: 258255 - RNA, 19 nt, Artificial Sequence
  Description of Artificial Sequence: Synthetic oligonucleotide
uuauaauuuuaauguuagc

SEQ ID NO: 258256 - RNA, 19 nt, Artificial Sequence
  Description of Artificial Sequence: Synthetic oligonucleotide
ugaggacugaacucgcagg

SEQ ID NO: 258257 - RNA, 19 nt, Artificial Sequence
  Description of Artificial Sequence: Synthetic oligonucleotide
uugaguaagucaguuacug

SEQ ID NO: 258258 - RNA, 19 nt, Artificial Sequence
  Description of Artificial Sequence: Synthetic oligonucleotide
uucaggucuaaugaaaaga

SEQ ID NO: 258259 - RNA, 19 nt, Artificial Sequence
  Description of Artificial Sequence: Synthetic oligonucleotide
aguuuagaaauuuaccauu

SEQ ID NO: 258260 - RNA, 19 nt, Artificial Sequence
  Description of Artificial Sequence: Synthetic oligonucleotide
uaggagcguaagaauaagg

SEQ ID NO: 258261 - RNA, 19 nt, Artificial Sequence
  Description of Artificial Sequence: Synthetic oligonucleotide
uaacgaauuacacccauuu

SEQ ID NO: 258262 - RNA, 19 nt, Artificial Sequence
  Description of Artificial Sequence: Synthetic oligonucleotide
uggucaagcacgucuaacc

SEQ ID NO: 258263 - RNA, 19 nt, Artificial Sequence
  Description of Artificial Sequence: Synthetic oligonucleotide
aaguaaaugucacccugcu

SEQ ID NO: 258264 - RNA, 19 nt, Artificial Sequence
  Description of Artificial Sequence: Synthetic oligonucleotide
uucuaccaaauuuaaugca

SEQ ID NO: 258265 - RNA, 19 nt, Artificial Sequence
  Description of Artificial Sequence: Synthetic oligonucleotide
auagguagggcacuaauuu

SEQ ID NO: 258266 - RNA, 19 nt, Artificial Sequence
  Description of Artificial Sequence: Synthetic oligonucleotide
guauuagauguuuugugac

SEQ ID NO: 258267 - RNA, 19 nt, Artificial Sequence
  Description of Artificial Sequence: Synthetic oligonucleotide
guuaaagaagugucagugc

SEQ ID NO: 258268 - RNA, 19 nt, Artificial Sequence
  Description of Artificial Sequence: Synthetic oligonucleotide
augccagacguucagacug

SEQ ID NO: 258269 - RNA, 19 nt, Artificial Sequence
  Description of Artificial Sequence: Synthetic oligonucleotide
agaauaagguacucgggcu

SEQ ID NO: 258270 - RNA, 19 nt, Artificial Sequence
  Description of Artificial Sequence: Synthetic oligonucleotide
aauacgagucugccaacug

SEQ ID NO: 258271 - RNA, 19 nt, Artificial Sequence
  Description of Artificial Sequence: Synthetic oligonucleotide
gauaugaguccguagcuuc

SEQ ID NO: 258272 - RNA, 19 nt, Artificial Sequence
  Description of Artificial Sequence: Synthetic oligonucleotide
uggauugucacugcguaag

SEQ ID NO: 258273 - RNA, 19 nt, Artificial Sequence
  Description of Artificial Sequence: Synthetic oligonucleotide
gaguaagucaguuacugaa

SEQ ID NO: 258274 - RNA, 19 nt, Artificial Sequence
  Description of Artificial Sequence: Synthetic oligonucleotide
uuauacuuacugcuuuaga

SEQ ID NO: 258275 - RNA, 19 nt, Artificial Sequence
  Description of Artificial Sequence: Synthetic oligonucleotide
ugcuauugguuacagccug

SEQ ID NO: 258276 - RNA, 19 nt, Artificial Sequence
  Description of Artificial Sequence: Synthetic oligonucleotide
ucuuuacugaugacaaccu

SEQ ID NO: 258277 - RNA, 19 nt, Artificial Sequence
  Description of Artificial Sequence: Synthetic oligonucleotide
aacucaacaggaggacugc

SEQ ID NO: 258278 - RNA, 19 nt, Artificial Sequence
  Description of Artificial Sequence: Synthetic oligonucleotide
auaugcuauugguuacagc

SEQ ID NO: 258279 - RNA, 19 nt, Artificial Sequence
  Description of Artificial Sequence: Synthetic oligonucleotide
gacugaaacgaaguaaaug

SEQ ID NO: 258280 - RNA, 19 nt, Artificial Sequence
  Description of Artificial Sequence: Synthetic oligonucleotide
uaaagauaacacuugucuu

SEQ ID NO: 258281 - RNA, 19 nt, Artificial Sequence
  Description of Artificial Sequence: Synthetic oligonucleotide
ugcguaagccauuagcacu

SEQ ID NO: 258282 - RNA, 19 nt, Artificial Sequence
  Description of Artificial Sequence: Synthetic oligonucleotide
uauagggccaugcaccuuc

SEQ ID NO: 258283 - RNA, 19 nt, Artificial Sequence
  Description of Artificial Sequence: Synthetic oligonucleotide
uacacucccugaaacagga

SEQ ID NO: 258284 - RNA, 19 nt, Artificial Sequence
  Description of Artificial Sequence: Synthetic oligonucleotide
ugguaugaagacucugucc

SEQ ID NO: 258285 - RNA, 19 nt, Artificial Sequence
  Description of Artificial Sequence: Synthetic oligonucleotide
agcacgucuaaccauaaau

SEQ ID NO: 258286 - RNA, 19 nt, Artificial Sequence
  Description of Artificial Sequence: Synthetic oligonucleotide
uguuagcacaaaauuacuu

SEQ ID NO: 258287 - RNA, 19 nt, Artificial Sequence
  Description of Artificial Sequence: Synthetic oligonucleotide
gauguuuugugaccagaug

SEQ ID NO: 258288 - RNA, 19 nt, Artificial Sequence
  Description of Artificial Sequence: Synthetic oligonucleotide
uuguaaaacgcuguucaug

SEQ ID NO: 258289 - RNA, 19 nt, Artificial Sequence
  Description of Artificial Sequence: Synthetic oligonucleotide
auacuacaaaguuagguua

SEQ ID NO: 258290 - RNA, 19 nt, Artificial Sequence
  Description of Artificial Sequence: Synthetic oligonucleotide
cuauuaagguuuucucgcc

SEQ ID NO: 258291 - RNA, 19 nt, Artificial Sequence
  Description of Artificial Sequence: Synthetic oligonucleotide
ugugguuucgccuccggga

SEQ ID NO: 258292 - RNA, 19 nt, Artificial Sequence
  Description of Artificial Sequence: Synthetic oligonucleotide
auaguauuagauguuuugu

SEQ ID NO: 258293 - RNA, 19 nt, Artificial Sequence
  Description of Artificial Sequence: Synthetic oligonucleotide
auuagauguuuugugacca

SEQ ID NO: 258294 - RNA, 19 nt, Artificial Sequence
  Description of Artificial Sequence: Synthetic oligonucleotide
uacuacaaaguuagguuaa

SEQ ID NO: 258295 - RNA, 19 nt, Artificial Sequence
  Description of Artificial Sequence: Synthetic oligonucleotide
aaauucacuuagcaucaau

SEQ ID NO: 258296 - RNA, 19 nt, Artificial Sequence
  Description of Artificial Sequence: Synthetic oligonucleotide
guaaacaacucugggagug

SEQ ID NO: 258297 - RNA, 19 nt, Artificial Sequence
  Description of Artificial Sequence: Synthetic oligonucleotide
aauucacuuagcaucaauu

SEQ ID NO: 258298 - RNA, 19 nt, Artificial Sequence
  Description of Artificial Sequence: Synthetic oligonucleotide
uggaucuccauugacccag

SEQ ID NO: 258299 - RNA, 19 nt, Artificial Sequence
  Description of Artificial Sequence: Synthetic oligonucleotide
acagccugacauuuuaaca

SEQ ID NO: 258300 - RNA, 19 nt, Artificial Sequence
  Description of Artificial Sequence: Synthetic oligonucleotide
caaugcuuguaaaacgcug

SEQ ID NO: 258301 - RNA, 19 nt, Artificial Sequence
  Description of Artificial Sequence: Synthetic oligonucleotide
aaauccauugggccggaau

SEQ ID NO: 258302 - RNA, 19 nt, Artificial Sequence
  Description of Artificial Sequence: Synthetic oligonucleotide
gcagauaugaguccguagc

SEQ ID NO: 258303 - RNA, 19 nt, Artificial Sequence
  Description of Artificial Sequence: Synthetic oligonucleotide
auuauacuuacugcuuuag

SEQ ID NO: 258304 - RNA, 19 nt, Artificial Sequence
  Description of Artificial Sequence: Synthetic oligonucleotide
cuuuuaacuggcaacucca

SEQ ID NO: 258305 - RNA, 19 nt, Artificial Sequence
  Description of Artificial Sequence: Synthetic oligonucleotide
gaaguaaaugucacccugc

SEQ ID NO: 258306 - RNA, 19 nt, Artificial Sequence
  Description of Artificial Sequence: Synthetic oligonucleotide
ugcacaacaacagaacuua

SEQ ID NO: 258307 - RNA, 19 nt, Artificial Sequence
  Description of Artificial Sequence: Synthetic oligonucleotide
auuaagguuuucucgccgu

SEQ ID NO: 258308 - RNA, 19 nt, Artificial Sequence
  Description of Artificial Sequence: Synthetic oligonucleotide
gacgccacuggcuggauug

SEQ ID NO: 258309 - RNA, 19 nt, Artificial Sequence
  Description of Artificial Sequence: Synthetic oligonucleotide
agauacauacacucccuga

SEQ ID NO: 258310 - RNA, 19 nt, Artificial Sequence
  Description of Artificial Sequence: Synthetic oligonucleotide
aaauguuaucaauguuuaa

SEQ ID NO: 258311 - RNA, 19 nt, Artificial Sequence
  Description of Artificial Sequence: Synthetic oligonucleotide
ucugaucauaugagaaccu

SEQ ID NO: 258312 - RNA, 19 nt, Artificial Sequence
  Description of Artificial Sequence: Synthetic oligonucleotide
gacugccuaauauucuuug

SEQ ID NO: 258313 - RNA, 19 nt, Artificial Sequence
  Description of Artificial Sequence: Synthetic oligonucleotide
aacaacucugggagugugc

SEQ ID NO: 258314 - RNA, 19 nt, Artificial Sequence
  Description of Artificial Sequence: Synthetic oligonucleotide
ugaucauaugagaaccuua

SEQ ID NO: 258315 - RNA, 19 nt, Artificial Sequence
  Description of Artificial Sequence: Synthetic oligonucleotide
gccggaaugaacaugaagc

SEQ ID NO: 258316 - RNA, 19 nt, Artificial Sequence
  Description of Artificial Sequence: Synthetic oligonucleotide
aaaauauccgaggugcgua

SEQ ID NO: 258317 - RNA, 19 nt, Artificial Sequence
  Description of Artificial Sequence: Synthetic oligonucleotide
cucucagggucaaaauacg

SEQ ID NO: 258318 - RNA, 19 nt, Artificial Sequence
  Description of Artificial Sequence: Synthetic oligonucleotide
gguacaucuuuacugauga

SEQ ID NO: 258319 - RNA, 19 nt, Artificial Sequence
  Description of Artificial Sequence: Synthetic oligonucleotide
uuagauguuuugugaccag

SEQ ID NO: 258320 - RNA, 19 nt, Artificial Sequence
  Description of Artificial Sequence: Synthetic oligonucleotide
gaauaagguacucgggcuc

SEQ ID NO: 258321 - RNA, 19 nt, Artificial Sequence
  Description of Artificial Sequence: Synthetic oligonucleotide
ugaguaagucaguuacuga

SEQ ID NO: 258322 - RNA, 19 nt, Artificial Sequence
  Description of Artificial Sequence: Synthetic oligonucleotide
agagaggcacaguuuucac

SEQ ID NO: 258323 - RNA, 19 nt, Artificial Sequence
  Description of Artificial Sequence: Synthetic oligonucleotide
uaauuagggaccagguaua

SEQ ID NO: 258324 - RNA, 19 nt, Artificial Sequence
  Description of Artificial Sequence: Synthetic oligonucleotide
uacagccugacauuuuaac

SEQ ID NO: 258325 - RNA, 19 nt, Artificial Sequence
  Description of Artificial Sequence: Synthetic oligonucleotide
aaauacgagucugccaacu

SEQ ID NO: 258326 - RNA, 19 nt, Artificial Sequence
  Description of Artificial Sequence: Synthetic oligonucleotide
ugggagugugcuaaugcca

SEQ ID NO: 258327 - RNA, 19 nt, Artificial Sequence
  Description of Artificial Sequence: Synthetic oligonucleotide
agaugcauuuucaauucuc

SEQ ID NO: 258328 - RNA, 19 nt, Artificial Sequence
  Description of Artificial Sequence: Synthetic oligonucleotide
aguaacaaaucaauuguau

SEQ ID NO: 258329 - RNA, 19 nt, Artificial Sequence
  Description of Artificial Sequence: Synthetic oligonucleotide
uuuuggucaagcacgucua

SEQ ID NO: 258330 - RNA, 19 nt, Artificial Sequence
  Description of Artificial Sequence: Synthetic oligonucleotide
agugugcuaaugccagacg

SEQ ID NO: 258331 - RNA, 19 nt, Artificial Sequence
  Description of Artificial Sequence: Synthetic oligonucleotide
cacugcguaagccauuagc

SEQ ID NO: 258332 - RNA, 19 nt, Artificial Sequence
  Description of Artificial Sequence: Synthetic oligonucleotide
aauauccgaggugcguagg

SEQ ID NO: 258333 - RNA, 19 nt, Artificial Sequence
  Description of Artificial Sequence: Synthetic oligonucleotide
gagauacauacacucccug

SEQ ID NO: 258334 - RNA, 19 nt, Artificial Sequence
  Description of Artificial Sequence: Synthetic oligonucleotide
cauuuaggccaucaucuug

SEQ ID NO: 258335 - RNA, 19 nt, Artificial Sequence
  Description of Artificial Sequence: Synthetic oligonucleotide
uuaggagcguaagaauaag

SEQ ID NO: 258336 - RNA, 19 nt, Artificial Sequence
  Description of Artificial Sequence: Synthetic oligonucleotide
gaccaacuuucugacaagg

SEQ ID NO: 258337 - RNA, 19 nt, Artificial Sequence
  Description of Artificial Sequence: Synthetic oligonucleotide
cugaaacgaaguaaauguc

SEQ ID NO: 258338 - RNA, 19 nt, Artificial Sequence
  Description of Artificial Sequence: Synthetic oligonucleotide
ugugaccugggaguaaacc

SEQ ID NO: 258339 - RNA, 19 nt, Artificial Sequence
  Description of Artificial Sequence: Synthetic oligonucleotide
ugaccugggaguaaaccau

SEQ ID NO: 258340 - RNA, 19 nt, Artificial Sequence
  Description of Artificial Sequence: Synthetic oligonucleotide
caaccauugaguguguuuc

SEQ ID NO: 258341 - RNA, 19 nt, Artificial Sequence
  Description of Artificial Sequence: Synthetic oligonucleotide
uuuucucgccgucacuugu

SEQ ID NO: 258342 - RNA, 19 nt, Artificial Sequence
  Description of Artificial Sequence: Synthetic oligonucleotide
ucgagcauucaacucuugu

SEQ ID NO: 258343 - RNA, 19 nt, Artificial Sequence
  Description of Artificial Sequence: Synthetic oligonucleotide
acugcguaagccauuagca

SEQ ID NO: 258344 - RNA, 19 nt, Artificial Sequence
  Description of Artificial Sequence: Synthetic oligonucleotide
ucacaauaguacugguugu

SEQ ID NO: 258345 - RNA, 19 nt, Artificial Sequence
  Description of Artificial Sequence: Synthetic oligonucleotide
aacgaauuacacccauuua

SEQ ID NO: 258346 - RNA, 19 nt, Artificial Sequence
  Description of Artificial Sequence: Synthetic oligonucleotide
gauugucacugcguaagcc

SEQ ID NO: 258347 - RNA, 19 nt, Artificial Sequence
  Description of Artificial Sequence: Synthetic oligonucleotide
aaaagcacguaagcugugu

SEQ ID NO: 258348 - RNA, 19 nt, Artificial Sequence
  Description of Artificial Sequence: Synthetic oligonucleotide
uuuuaacuggcaacuccaa

SEQ ID NO: 258349 - RNA, 19 nt, Artificial Sequence
  Description of Artificial Sequence: Synthetic oligonucleotide
cuguacuggggcuuucucc

SEQ ID NO: 258350 - RNA, 19 nt, Artificial Sequence
  Description of Artificial Sequence: Synthetic oligonucleotide
guacuucugaucauaugag

SEQ ID NO: 258351 - RNA, 19 nt, Artificial Sequence
  Description of Artificial Sequence: Synthetic oligonucleotide
ugaaacucaacaggaggac

SEQ ID NO: 258352 - RNA, 19 nt, Artificial Sequence
  Description of Artificial Sequence: Synthetic oligonucleotide
gaguccguagcuucccucc

SEQ ID NO: 258353 - RNA, 19 nt, Artificial Sequence
  Description of Artificial Sequence: Synthetic oligonucleotide
acgcuguucauguaacaug

SEQ ID NO: 258354 - RNA, 19 nt, Artificial Sequence
  Description of Artificial Sequence: Synthetic oligonucleotide
cauugggccggaaugaaca

SEQ ID NO: 258355 - RNA, 19 nt, Artificial Sequence
  Description of Artificial Sequence: Synthetic oligonucleotide
auaguacugguugucacca

SEQ ID NO: 258356 - RNA, 19 nt, Artificial Sequence
  Description of Artificial Sequence: Synthetic oligonucleotide
acuccaaaaccaguggcag

SEQ ID NO: 258357 - RNA, 19 nt, Artificial Sequence
  Description of Artificial Sequence: Synthetic oligonucleotide
aaacgcuguucauguaaca

SEQ ID NO: 258358 - RNA, 19 nt, Artificial Sequence
  Description of Artificial Sequence: Synthetic oligonucleotide
auacgagucugccaacugu

SEQ ID NO: 258359 - RNA, 19 nt, Artificial Sequence
  Description of Artificial Sequence: Synthetic oligonucleotide
aacgcuguucauguaacau

SEQ ID NO: 258360 - RNA, 19 nt, Artificial Sequence
  Description of Artificial Sequence: Synthetic oligonucleotide
agcagauaugaguccguag

SEQ ID NO: 258361 - RNA, 19 nt, Artificial Sequence
  Description of Artificial Sequence: Synthetic oligonucleotide
gaguaaaccauggaggucu

SEQ ID NO: 258362 - RNA, 19 nt, Artificial Sequence
  Description of Artificial Sequence: Synthetic oligonucleotide
guggcagugacacauuguc

SEQ ID NO: 258363 - RNA, 19 nt, Artificial Sequence
  Description of Artificial Sequence: Synthetic oligonucleotide
uaaaagcacguaagcugug

SEQ ID NO: 258364 - RNA, 19 nt, Artificial Sequence
  Description of Artificial Sequence: Synthetic oligonucleotide
aggagcguaagaauaaggu

SEQ ID NO: 258365 - RNA, 19 nt, Artificial Sequence
  Description of Artificial Sequence: Synthetic oligonucleotide
ugauuugcauaguuuucuc

SEQ ID NO: 258366 - RNA, 19 nt, Artificial Sequence
  Description of Artificial Sequence: Synthetic oligonucleotide
aaccauugaguguguuucu

SEQ ID NO: 258367 - RNA, 19 nt, Artificial Sequence
  Description of Artificial Sequence: Synthetic oligonucleotide
accuacuugugauuuucug

SEQ ID NO: 258368 - RNA, 19 nt, Artificial Sequence
  Description of Artificial Sequence: Synthetic oligonucleotide
caaggcacauacaggacuc

SEQ ID NO: 258369 - RNA, 19 nt, Artificial Sequence
  Description of Artificial Sequence: Synthetic oligonucleotide
agaaccuuaggagcguaag

SEQ ID NO: 258370 - RNA, 19 nt, Artificial Sequence
  Description of Artificial Sequence: Synthetic oligonucleotide
acuucugaucauaugagaa

SEQ ID NO: 258371 - RNA, 19 nt, Artificial Sequence
  Description of Artificial Sequence: Synthetic oligonucleotide
gugaggacugaacucgcag

SEQ ID NO: 258372 - RNA, 19 nt, Artificial Sequence
  Description of Artificial Sequence: Synthetic oligonucleotide
cuuagcuuucauuccucug

SEQ ID NO: 258373 - RNA, 19 nt, Artificial Sequence
  Description of Artificial Sequence: Synthetic oligonucleotide
aaacaacucugggagugug

SEQ ID NO: 258374 - RNA, 19 nt, Artificial Sequence
  Description of Artificial Sequence: Synthetic oligonucleotide
gaggacugaacucgcagga

SEQ ID NO: 258375 - RNA, 19 nt, Artificial Sequence
  Description of Artificial Sequence: Synthetic oligonucleotide
aacugaaacuacaccauuu

SEQ ID NO: 258376 - RNA, 19 nt, Artificial Sequence
  Description of Artificial Sequence: Synthetic oligonucleotide
ugcagccaaauauaccuau

SEQ ID NO: 258377 - RNA, 19 nt, Artificial Sequence
  Description of Artificial Sequence: Synthetic oligonucleotide
uuucucgccgucacuugug

SEQ ID NO: 258378 - RNA, 19 nt, Artificial Sequence
  Description of Artificial Sequence: Synthetic oligonucleotide
acugccuaauauucuuuga

SEQ ID NO: 258379 - RNA, 19 nt, Artificial Sequence
  Description of Artificial Sequence: Synthetic oligonucleotide
uccauugacccagacgcca

SEQ ID NO: 258380 - RNA, 19 nt, Artificial Sequence
  Description of Artificial Sequence: Synthetic oligonucleotide
uacgagucugccaacugua

SEQ ID NO: 258381 - RNA, 19 nt, Artificial Sequence
  Description of Artificial Sequence: Synthetic oligonucleotide
cuuaggagcguaagaauaa

SEQ ID NO: 258382 - RNA, 19 nt, Artificial Sequence
  Description of Artificial Sequence: Synthetic oligonucleotide
aaaaccaguggcagugaca

SEQ ID NO: 258383 - RNA, 19 nt, Artificial Sequence
  Description of Artificial Sequence: Synthetic oligonucleotide
uuaacgaauuacacccauu

SEQ ID NO: 258384 - RNA, 19 nt, Artificial Sequence
  Description of Artificial Sequence: Synthetic oligonucleotide
ugugcuaaugccagacguu

SEQ ID NO: 258385 - RNA, 19 nt, Artificial Sequence
  Description of Artificial Sequence: Synthetic oligonucleotide
cugcguaagccauuagcac

SEQ ID NO: 258386 - RNA, 19 nt, Artificial Sequence
  Description of Artificial Sequence: Synthetic oligonucleotide
acgaaguaaaugucacccu

SEQ ID NO: 258387 - RNA, 19 nt, Artificial Sequence
  Description of Artificial Sequence: Synthetic oligonucleotide
auuagggaccagguauaac

SEQ ID NO: 258388 - RNA, 19 nt, Artificial Sequence
  Description of Artificial Sequence: Synthetic oligonucleotide
ugaccagaugcauuuucaa

SEQ ID NO: 258389 - RNA, 19 nt, Artificial Sequence
  Description of Artificial Sequence: Synthetic oligonucleotide
gaagacucugucccuguga

SEQ ID NO: 258390 - RNA, 19 nt, Artificial Sequence
  Description of Artificial Sequence: Synthetic oligonucleotide
gaaccuuaggagcguaaga

SEQ ID NO: 258391 - RNA, 19 nt, Artificial Sequence
  Description of Artificial Sequence: Synthetic oligonucleotide
uaugaguccguagcuuccc

SEQ ID NO: 258392 - RNA, 19 nt, Artificial Sequence
  Description of Artificial Sequence: Synthetic oligonucleotide
guauaaaagcacguaagcu

SEQ ID NO: 258393 - RNA, 19 nt, Artificial Sequence
  Description of Artificial Sequence: Synthetic oligonucleotide
acgucuaaccauaaaugca

SEQ ID NO: 258394 - RNA, 19 nt, Artificial Sequence
  Description of Artificial Sequence: Synthetic oligonucleotide
aguguguuucuuaaaguau

SEQ ID NO: 258395 - RNA, 19 nt, Artificial Sequence
  Description of Artificial Sequence: Synthetic oligonucleotide
cccuauagggccaugcacc

SEQ ID NO: 258396 - RNA, 19 nt, Artificial Sequence
  Description of Artificial Sequence: Synthetic oligonucleotide
aauuagggaccagguauaa

SEQ ID NO: 258397 - RNA, 19 nt, Artificial Sequence
  Description of Artificial Sequence: Synthetic oligonucleotide
uucucgccgucacuugugc

SEQ ID NO: 258398 - RNA, 19 nt, Artificial Sequence
  Description of Artificial Sequence: Synthetic oligonucleotide
ucccugguggaucauuguc

SEQ ID NO: 258399 - RNA, 19 nt, Artificial Sequence
  Description of Artificial Sequence: Synthetic oligonucleotide
auacacucccugaaacagg

SEQ ID NO: 258400 - RNA, 19 nt, Artificial Sequence
  Description of Artificial Sequence: Synthetic oligonucleotide
aggaggacugccuaauauu

SEQ ID NO: 258401 - RNA, 19 nt, Artificial Sequence
  Description of Artificial Sequence: Synthetic oligonucleotide
acaaccauugaguguguuu

SEQ ID NO: 258402 - RNA, 19 nt, Artificial Sequence
  Description of Artificial Sequence: Synthetic oligonucleotide
guuuagaaauuuaccauua

SEQ ID NO: 258403 - RNA, 19 nt, Artificial Sequence
  Description of Artificial Sequence: Synthetic oligonucleotide
cuuaaaguauucaggucua

SEQ ID NO: 258404 - RNA, 19 nt, Artificial Sequence
  Description of Artificial Sequence: Synthetic oligonucleotide
uccuucuaccaaauuuaau

SEQ ID NO: 258405 - RNA, 19 nt, Artificial Sequence
  Description of Artificial Sequence: Synthetic oligonucleotide
cauugaguguguuucuuaa

SEQ ID NO: 258406 - RNA, 19 nt, Artificial Sequence
  Description of Artificial Sequence: Synthetic oligonucleotide
guuacagccugacauuuua

SEQ ID NO: 258407 - RNA, 19 nt, Artificial Sequence
  Description of Artificial Sequence: Synthetic oligonucleotide
ugcccuauagggccaugca

SEQ ID NO: 258408 - RNA, 19 nt, Artificial Sequence
  Description of Artificial Sequence: Synthetic oligonucleotide
cagccauaguauuagaugu

SEQ ID NO: 258409 - RNA, 19 nt, Artificial Sequence
  Description of Artificial Sequence: Synthetic oligonucleotide
uaguugaguaagucaguua

SEQ ID NO: 258410 - RNA, 19 nt, Artificial Sequence
  Description of Artificial Sequence: Synthetic oligonucleotide
acuuaauagguagggcacu

SEQ ID NO: 258411 - RNA, 19 nt, Artificial Sequence
  Description of Artificial Sequence: Synthetic oligonucleotide
agauaugcuauugguuaca

SEQ ID NO: 258412 - RNA, 19 nt, Artificial Sequence
  Description of Artificial Sequence: Synthetic oligonucleotide
ccaacuguauuaaauccuc

SEQ ID NO: 258413 - RNA, 19 nt, Artificial Sequence
  Description of Artificial Sequence: Synthetic oligonucleotide
accuuaggagcguaagaau

SEQ ID NO: 258414 - RNA, 19 nt, Artificial Sequence
  Description of Artificial Sequence: Synthetic oligonucleotide
agugguggaucuccauuga

SEQ ID NO: 258415 - RNA, 19 nt, Artificial Sequence
  Description of Artificial Sequence: Synthetic oligonucleotide
agcguaagaauaagguacu

SEQ ID NO: 258416 - RNA, 19 nt, Artificial Sequence
  Description of Artificial Sequence: Synthetic oligonucleotide
cuuaauuagggaccaggua

SEQ ID NO: 258417 - RNA, 19 nt, Artificial Sequence
  Description of Artificial Sequence: Synthetic oligonucleotide
guauucaggucuaaugaaa

SEQ ID NO: 258418 - RNA, 19 nt, Artificial Sequence
  Description of Artificial Sequence: Synthetic oligonucleotide
ucacccugcugucauuaaa

SEQ ID NO: 258419 - RNA, 19 nt, Artificial Sequence
  Description of Artificial Sequence: Synthetic oligonucleotide
uaggcuucccuuuguguau

SEQ ID NO: 258420 - RNA, 19 nt, Artificial Sequence
  Description of Artificial Sequence: Synthetic oligonucleotide
uaaacaacucugggagugu

SEQ ID NO: 258421 - RNA, 19 nt, Artificial Sequence
  Description of Artificial Sequence: Synthetic oligonucleotide
uagaaccaucagauuuuac

SEQ ID NO: 258422 - RNA, 19 nt, Artificial Sequence
  Description of Artificial Sequence: Synthetic oligonucleotide
cccuaguaaacaacucugg

SEQ ID NO: 258423 - RNA, 19 nt, Artificial Sequence
  Description of Artificial Sequence: Synthetic oligonucleotide
ucaccuccuuugaaauaca

SEQ ID NO: 258424 - RNA, 19 nt, Artificial Sequence
  Description of Artificial Sequence: Synthetic oligonucleotide
cuauugguuacagccugac

SEQ ID NO: 258425 - RNA, 19 nt, Artificial Sequence
  Description of Artificial Sequence: Synthetic oligonucleotide
agguacaucuuuacugaug

SEQ ID NO: 258426 - RNA, 19 nt, Artificial Sequence
  Description of Artificial Sequence: Synthetic oligonucleotide
uuaauagguagggcacuaa

SEQ ID NO: 258427 - RNA, 19 nt, Artificial Sequence
  Description of Artificial Sequence: Synthetic oligonucleotide
acaaugcuuguaaaacgcu

SEQ ID NO: 258428 - RNA, 19 nt, Artificial Sequence
  Description of Artificial Sequence: Synthetic oligonucleotide
ggauuauaaaaccucuggu

SEQ ID NO: 258429 - RNA, 19 nt, Artificial Sequence
  Description of Artificial Sequence: Synthetic oligonucleotide
ggauuaaguaacaaaucaa

SEQ ID NO: 258430 - RNA, 19 nt, Artificial Sequence
  Description of Artificial Sequence: Synthetic oligonucleotide
gcacgucuaaccauaaaug

SEQ ID NO: 258431 - RNA, 19 nt, Artificial Sequence
  Description of Artificial Sequence: Synthetic oligonucleotide
auguuagcacaaaauuacu

SEQ ID NO: 258432 - RNA, 19 nt, Artificial Sequence
  Description of Artificial Sequence: Synthetic oligonucleotide
uuggucaagcacgucuaac

SEQ ID NO: 258433 - RNA, 19 nt, Artificial Sequence
  Description of Artificial Sequence: Synthetic oligonucleotide
ggcauaagaauaguaaugu

SEQ ID NO: 258434 - RNA, 19 nt, Artificial Sequence
  Description of Artificial Sequence: Synthetic oligonucleotide
uugaaggggcaggacaaaa

SEQ ID NO: 258435 - RNA, 19 nt, Artificial Sequence
  Description of Artificial Sequence: Synthetic oligonucleotide
acguaagcugugucuuuug

SEQ ID NO: 258436 - RNA, 19 nt, Artificial Sequence
  Description of Artificial Sequence: Synthetic oligonucleotide
uagcuagguucucauuaau

SEQ ID NO: 258437 - RNA, 19 nt, Artificial Sequence
  Description of Artificial Sequence: Synthetic oligonucleotide
cauuauacuuacugcuuua

SEQ ID NO: 258438 - RNA, 19 nt, Artificial Sequence
  Description of Artificial Sequence: Synthetic oligonucleotide
cagacgaaagcagcuguug

SEQ ID NO: 258439 - RNA, 19 nt, Artificial Sequence
  Description of Artificial Sequence: Synthetic oligonucleotide
uggaaaccuacuugugauu

SEQ ID NO: 258440 - RNA, 19 nt, Artificial Sequence
  Description of Artificial Sequence: Synthetic oligonucleotide
uacucgggcuccucuguga

SEQ ID NO: 258441 - RNA, 19 nt, Artificial Sequence
  Description of Artificial Sequence: Synthetic oligonucleotide
aucuguagccauaaacaau

SEQ ID NO: 258442 - RNA, 19 nt, Artificial Sequence
  Description of Artificial Sequence: Synthetic oligonucleotide
uacuggcuacuucuuguua

SEQ ID NO: 258443 - RNA, 19 nt, Artificial Sequence
  Description of Artificial Sequence: Synthetic oligonucleotide
aagcacgucuaaccauaaa

SEQ ID NO: 258444 - RNA, 19 nt, Artificial Sequence
  Description of Artificial Sequence: Synthetic oligonucleotide
cugaaacuacaccauuuaa

SEQ ID NO: 258445 - RNA, 19 nt, Artificial Sequence
  Description of Artificial Sequence: Synthetic oligonucleotide
caacagaacuuaauaggua

SEQ ID NO: 258446 - RNA, 19 nt, Artificial Sequence
  Description of Artificial Sequence: Synthetic oligonucleotide
gacugacugaaacgaagua

SEQ ID NO: 258447 - RNA, 19 nt, Artificial Sequence
  Description of Artificial Sequence: Synthetic oligonucleotide
ggucaagcacgucuaacca

SEQ ID NO: 258448 - RNA, 19 nt, Artificial Sequence
  Description of Artificial Sequence: Synthetic oligonucleotide
uucagucguagaaggcuuu

SEQ ID NO: 258449 - RNA, 19 nt, Artificial Sequence
  Description of Artificial Sequence: Synthetic oligonucleotide
uccgggauuuggagguaca

SEQ ID NO: 258450 - RNA, 19 nt, Artificial Sequence
  Description of Artificial Sequence: Synthetic oligonucleotide
ucaauucucucagggucaa

SEQ ID NO: 258451 - RNA, 19 nt, Artificial Sequence
  Description of Artificial Sequence: Synthetic oligonucleotide
gcauaagaauaguaauguc

SEQ ID NO: 258452 - RNA, 19 nt, Artificial Sequence
  Description of Artificial Sequence: Synthetic oligonucleotide
cucgccgucacuugugcca

SEQ ID NO: 258453 - RNA, 19 nt, Artificial Sequence
  Description of Artificial Sequence: Synthetic oligonucleotide
aaccuacuugugauuuucu

SEQ ID NO: 258454 - RNA, 19 nt, Artificial Sequence
  Description of Artificial Sequence: Synthetic oligonucleotide
agauaugaguccguagcuu

SEQ ID NO: 258455 - RNA, 19 nt, Artificial Sequence
  Description of Artificial Sequence: Synthetic oligonucleotide
gugugcuaaugccagacgu

SEQ ID NO: 258456 - RNA, 19 nt, Artificial Sequence
  Description of Artificial Sequence: Synthetic oligonucleotide
aauuuggggcagaaagcuu

SEQ ID NO: 258457 - RNA, 19 nt, Artificial Sequence
  Description of Artificial Sequence: Synthetic oligonucleotide
ccccuaguaaacaacucug

SEQ ID NO: 258458 - RNA, 19 nt, Artificial Sequence
  Description of Artificial Sequence: Synthetic oligonucleotide
gggagugugcuaaugccag

SEQ ID NO: 258459 - RNA, 19 nt, Artificial Sequence
  Description of Artificial Sequence: Synthetic oligonucleotide
ugcguaggcuucccuuugu

SEQ ID NO: 258460 - RNA, 19 nt, Artificial Sequence
  Description of Artificial Sequence: Synthetic oligonucleotide
gcuagguucucauuaauau

SEQ ID NO: 258461 - RNA, 19 nt, Artificial Sequence
  Description of Artificial Sequence: Synthetic oligonucleotide
ucacugcguaagccauuag

SEQ ID NO: 258462 - RNA, 19 nt, Artificial Sequence
  Description of Artificial Sequence: Synthetic oligonucleotide
ggagcguaagaauaaggua

SEQ ID NO: 258463 - RNA, 19 nt, Artificial Sequence
  Description of Artificial Sequence: Synthetic oligonucleotide
augcuauugguuacagccu

SEQ ID NO: 258464 - RNA, 19 nt, Artificial Sequence
  Description of Artificial Sequence: Synthetic oligonucleotide
ucucgccgucacuugugcc

SEQ ID NO: 258465 - RNA, 19 nt, Artificial Sequence
  Description of Artificial Sequence: Synthetic oligonucleotide
cgaaguaaaugucacccug

SEQ ID NO: 258466 - RNA, 19 nt, Artificial Sequence
  Description of Artificial Sequence: Synthetic oligonucleotide
gugaccagaugcauuuuca

SEQ ID NO: 258467 - RNA, 19 nt, Artificial Sequence
  Description of Artificial Sequence: Synthetic oligonucleotide
auugggccggaaugaacau

SEQ ID NO: 258468 - RNA, 19 nt, Artificial Sequence
  Description of Artificial Sequence: Synthetic oligonucleotide
gagcagucuugcugugacc

SEQ ID NO: 258469 - RNA, 19 nt, Artificial Sequence
  Description of Artificial Sequence: Synthetic oligonucleotide
gaaacucaacaggaggacu

SEQ ID NO: 258470 - RNA, 19 nt, Artificial Sequence
  Description of Artificial Sequence: Synthetic oligonucleotide
uugggccggaaugaacaug

SEQ ID NO: 258471 - RNA, 19 nt, Artificial Sequence
  Description of Artificial Sequence: Synthetic oligonucleotide
aaggcacauacaggacuca

SEQ ID NO: 258472 - RNA, 19 nt, Artificial Sequence
  Description of Artificial Sequence: Synthetic oligonucleotide
gucguagaaggcuuuaauu

SEQ ID NO: 258473 - RNA, 19 nt, Artificial Sequence
  Description of Artificial Sequence: Synthetic oligonucleotide
gaccagaugcauuuucaau

SEQ ID NO: 258474 - RNA, 19 nt, Artificial Sequence
  Description of Artificial Sequence: Synthetic oligonucleotide
caggucuaaugaaaagaaa

SEQ ID NO: 258475 - RNA, 19 nt, Artificial Sequence
  Description of Artificial Sequence: Synthetic oligonucleotide
guaaaccauggaggucugg

SEQ ID NO: 258476 - RNA, 19 nt, Artificial Sequence
  Description of Artificial Sequence: Synthetic oligonucleotide
accaacuuucugacaagga

SEQ ID NO: 258477 - RNA, 19 nt, Artificial Sequence
  Description of Artificial Sequence: Synthetic oligonucleotide
ggauugucacugcguaagc

SEQ ID NO: 258478 - RNA, 19 nt, Artificial Sequence
  Description of Artificial Sequence: Synthetic oligonucleotide
caugaugcauuuuguauuu

SEQ ID NO: 258479 - RNA, 19 nt, Artificial Sequence
  Description of Artificial Sequence: Synthetic oligonucleotide
gggaguaaaccauggaggu

SEQ ID NO: 258480 - RNA, 19 nt, Artificial Sequence
  Description of Artificial Sequence: Synthetic oligonucleotide
augaguccguagcuucccu

SEQ ID NO: 258481 - RNA, 19 nt, Artificial Sequence
  Description of Artificial Sequence: Synthetic oligonucleotide
cuucucacaugguacuucu

SEQ ID NO: 258482 - RNA, 19 nt, Artificial Sequence
  Description of Artificial Sequence: Synthetic oligonucleotide
agaaugcuaaauggauuuu

SEQ ID NO: 258483 - RNA, 19 nt, Artificial Sequence
  Description of Artificial Sequence: Synthetic oligonucleotide
aguccguagcuucccucca

SEQ ID NO: 258484 - RNA, 19 nt, Artificial Sequence
  Description of Artificial Sequence: Synthetic oligonucleotide
cuuuguguaugagccaaaa

SEQ ID NO: 258485 - RNA, 19 nt, Artificial Sequence
  Description of Artificial Sequence: Synthetic oligonucleotide
aacaaccauugaguguguu

SEQ ID NO: 258486 - RNA, 19 nt, Artificial Sequence
  Description of Artificial Sequence: Synthetic oligonucleotide
aaaccacucuugugacauu

SEQ ID NO: 258487 - RNA, 19 nt, Artificial Sequence
  Description of Artificial Sequence: Synthetic oligonucleotide
cgaauuacacccauuuaga

SEQ ID NO: 258488 - RNA, 19 nt, Artificial Sequence
  Description of Artificial Sequence: Synthetic oligonucleotide
aaacaaccauugagugugu

SEQ ID NO: 258489 - RNA, 19 nt, Artificial Sequence
  Description of Artificial Sequence: Synthetic oligonucleotide
aggugcguaggcuucccuu

SEQ ID NO: 258490 - RNA, 19 nt, Artificial Sequence
  Description of Artificial Sequence: Synthetic oligonucleotide
cugcccuauagggccaugc

SEQ ID NO: 258491 - RNA, 19 nt, Artificial Sequence
  Description of Artificial Sequence: Synthetic oligonucleotide
ggcucgagcauucaacucu

SEQ ID NO: 258492 - RNA, 19 nt, Artificial Sequence
  Description of Artificial Sequence: Synthetic oligonucleotide
caugguacuucugaucaua

SEQ ID NO: 258493 - RNA, 19 nt, Artificial Sequence
  Description of Artificial Sequence: Synthetic oligonucleotide
cuugugccaggagacucug

SEQ ID NO: 258494 - RNA, 19 nt, Artificial Sequence
  Description of Artificial Sequence: Synthetic oligonucleotide
acagguugguuugccauuu

SEQ ID NO: 258495 - RNA, 19 nt, Artificial Sequence
  Description of Artificial Sequence: Synthetic oligonucleotide
gugcguaggcuucccuuug

SEQ ID NO: 258496 - RNA, 19 nt, Artificial Sequence
  Description of Artificial Sequence: Synthetic oligonucleotide
cuuaauagguagggcacua

SEQ ID NO: 258497 - RNA, 19 nt, Artificial Sequence
  Description of Artificial Sequence: Synthetic oligonucleotide
ccuuaggagcguaagaaua

SEQ ID NO: 258498 - RNA, 19 nt, Artificial Sequence
  Description of Artificial Sequence: Synthetic oligonucleotide
agguuuucucgccgucacu

SEQ ID NO: 258499 - RNA, 19 nt, Artificial Sequence
  Description of Artificial Sequence: Synthetic oligonucleotide
gaauaguaauguccacuuu

SEQ ID NO: 258500 - RNA, 19 nt, Artificial Sequence
  Description of Artificial Sequence: Synthetic oligonucleotide
aguaaaccauggaggucug

SEQ ID NO: 258501 - RNA, 19 nt, Artificial Sequence
  Description of Artificial Sequence: Synthetic oligonucleotide
cagauaugaguccguagcu

SEQ ID NO: 258502 - RNA, 19 nt, Artificial Sequence
  Description of Artificial Sequence: Synthetic oligonucleotide
cugccuaauauucuuugau

SEQ ID NO: 258503 - RNA, 19 nt, Artificial Sequence
  Description of Artificial Sequence: Synthetic oligonucleotide
ugagaaccuuaggagcgua

SEQ ID NO: 258504 - RNA, 19 nt, Artificial Sequence
  Description of Artificial Sequence: Synthetic oligonucleotide
ccggaaugaacaugaagca

SEQ ID NO: 258505 - RNA, 19 nt, Artificial Sequence
  Description of Artificial Sequence: Synthetic oligonucleotide
gcaaggcacauacaggacu

SEQ ID NO: 258506 - RNA, 19 nt, Artificial Sequence
  Description of Artificial Sequence: Synthetic oligonucleotide
guaugaagacucugucccu

SEQ ID NO: 258507 - RNA, 19 nt, Artificial Sequence
  Description of Artificial Sequence: Synthetic oligonucleotide
guaaaacgcuguucaugua

SEQ ID NO: 258508 - RNA, 19 nt, Artificial Sequence
  Description of Artificial Sequence: Synthetic oligonucleotide
gaaaccuacuugugauuuu

SEQ ID NO: 258509 - RNA, 19 nt, Artificial Sequence
  Description of Artificial Sequence: Synthetic oligonucleotide
auacaggacucaccuccuu

SEQ ID NO: 258510 - RNA, 19 nt, Artificial Sequence
  Description of Artificial Sequence: Synthetic oligonucleotide
cuuguaaaacgcuguucau

SEQ ID NO: 258511 - RNA, 19 nt, Artificial Sequence
  Description of Artificial Sequence: Synthetic oligonucleotide
auaagguacucgggcuccu

SEQ ID NO: 258512 - RNA, 19 nt, Artificial Sequence
  Description of Artificial Sequence: Synthetic oligonucleotide
guugaguaagucaguuacu

SEQ ID NO: 258513 - RNA, 19 nt, Artificial Sequence
  Description of Artificial Sequence: Synthetic oligonucleotide
cuggauugucacugcguaa

SEQ ID NO: 258514 - RNA, 19 nt, Artificial Sequence
  Description of Artificial Sequence: Synthetic oligonucleotide
uaagguacucgggcuccuc

SEQ ID NO: 258515 - RNA, 19 nt, Artificial Sequence
  Description of Artificial Sequence: Synthetic oligonucleotide
agccauaguauuagauguu

SEQ ID NO: 258516 - RNA, 19 nt, Artificial Sequence
  Description of Artificial Sequence: Synthetic oligonucleotide
ccagacguucagacugggg

SEQ ID NO: 258517 - RNA, 19 nt, Artificial Sequence
  Description of Artificial Sequence: Synthetic oligonucleotide
ccugacauuuuaacagcca

SEQ ID NO: 258518 - RNA, 19 nt, Artificial Sequence
  Description of Artificial Sequence: Synthetic oligonucleotide
gucacugcguaagccauua

SEQ ID NO: 258519 - RNA, 19 nt, Artificial Sequence
  Description of Artificial Sequence: Synthetic oligonucleotide
acagacgaaagcagcuguu

SEQ ID NO: 258520 - RNA, 19 nt, Artificial Sequence
  Description of Artificial Sequence: Synthetic oligonucleotide
ggaguaaaccauggagguc

SEQ ID NO: 258521 - RNA, 19 nt, Artificial Sequence
  Description of Artificial Sequence: Synthetic oligonucleotide
caagcacgucuaaccauaa

SEQ ID NO: 258522 - RNA, 19 nt, Artificial Sequence
  Description of Artificial Sequence: Synthetic oligonucleotide
cuucagucguagaaggcuu

SEQ ID NO: 258523 - RNA, 19 nt, Artificial Sequence
  Description of Artificial Sequence: Synthetic oligonucleotide
gagaaccuuaggagcguaa

SEQ ID NO: 258524 - RNA, 19 nt, Artificial Sequence
  Description of Artificial Sequence: Synthetic oligonucleotide
gagguacucagagcagucu

SEQ ID NO: 258525 - RNA, 19 nt, Artificial Sequence
  Description of Artificial Sequence: Synthetic oligonucleotide
caacaucuacagaccaacu

SEQ ID NO: 258526 - RNA, 19 nt, Artificial Sequence
  Description of Artificial Sequence: Synthetic oligonucleotide
ccgggcucgagcauucaac

SEQ ID NO: 258527 - RNA, 19 nt, Artificial Sequence
  Description of Artificial Sequence: Synthetic oligonucleotide
gcuuaauuagggaccaggu

SEQ ID NO: 258528 - RNA, 19 nt, Artificial Sequence
  Description of Artificial Sequence: Synthetic oligonucleotide
ggaaaccuacuugugauuu

SEQ ID NO: 258529 - RNA, 19 nt, Artificial Sequence
  Description of Artificial Sequence: Synthetic oligonucleotide
ccauugggccggaaugaac

SEQ ID NO: 258530 - RNA, 19 nt, Artificial Sequence
  Description of Artificial Sequence: Synthetic oligonucleotide
gugguuucgccuccgggau

SEQ ID NO: 258531 - RNA, 19 nt, Artificial Sequence
  Description of Artificial Sequence: Synthetic oligonucleotide
gccaacuguauuaaauccu

SEQ ID NO: 258532 - RNA, 19 nt, Artificial Sequence
  Description of Artificial Sequence: Synthetic oligonucleotide
gcguaggcuucccuuugug

SEQ ID NO: 258533 - RNA, 19 nt, Artificial Sequence
  Description of Artificial Sequence: Synthetic oligonucleotide
cagcuuaauuagggaccag

SEQ ID NO: 258534 - RNA, 19 nt, Artificial Sequence
  Description of Artificial Sequence: Synthetic oligonucleotide
ggacugacugaaacgaagu

SEQ ID NO: 258535 - RNA, 19 nt, Artificial Sequence
  Description of Artificial Sequence: Synthetic oligonucleotide
acgagucugccaacuguau

SEQ ID NO: 258536 - RNA, 19 nt, Artificial Sequence
  Description of Artificial Sequence: Synthetic oligonucleotide
ggagugugcuaaugccaga

SEQ ID NO: 258537 - RNA, 19 nt, Artificial Sequence
  Description of Artificial Sequence: Synthetic oligonucleotide
agacgccacuggcuggauu

SEQ ID NO: 258538 - RNA, 19 nt, Artificial Sequence
  Description of Artificial Sequence: Synthetic oligonucleotide
gggcucgagcauucaacuc

SEQ ID NO: 258539 - RNA, 19 nt, Artificial Sequence
  Description of Artificial Sequence: Synthetic oligonucleotide
gccauuagcacugcucugu

SEQ ID NO: 258540 - RNA, 19 nt, Artificial Sequence
  Description of Artificial Sequence: Synthetic oligonucleotide
gggcacuaauuuggggcag

SEQ ID NO: 258541 - RNA, 19 nt, Artificial Sequence
  Description of Artificial Sequence: Synthetic oligonucleotide
gccuccgggauuuggaggu

SEQ ID NO: 258542 - RNA, 19 nt, Artificial Sequence
  Description of Artificial Sequence: Synthetic oligonucleotide
cccagacgccacuggcugg

SEQ ID NO: 258543 - RNA, 19 nt, Artificial Sequence
  Description of Artificial Sequence: Synthetic oligonucleotide
guacugcaaggcacauaca

SEQ ID NO: 258544 - RNA, 19 nt, Artificial Sequence
  Description of Artificial Sequence: Synthetic oligonucleotide
cagucguagaaggcuuuaa

SEQ ID NO: 258545 - RNA, 19 nt, Artificial Sequence
  Description of Artificial Sequence: Synthetic oligonucleotide
gcguaagaauaagguacuc

SEQ ID NO: 258546 - RNA, 19 nt, Artificial Sequence
  Description of Artificial Sequence: Synthetic oligonucleotide
cacagguugguuugccauu

SEQ ID NO: 258547 - RNA, 19 nt, Artificial Sequence
  Description of Artificial Sequence: Synthetic oligonucleotide
ggugcguaggcuucccuuu

SEQ ID NO: 258548 - RNA, 19 nt, Artificial Sequence
  Description of Artificial Sequence: Synthetic oligonucleotide
ccauuauacuuacugcuuu

SEQ ID NO: 258549 - RNA, 19 nt, Artificial Sequence
  Description of Artificial Sequence: Synthetic oligonucleotide
gaggugcguaggcuucccu

SEQ ID NO: 258550 - RNA, 19 nt, Artificial Sequence
  Description of Artificial Sequence: Synthetic oligonucleotide
acgccacuggcuggauugu

SEQ ID NO: 258551 - RNA, 19 nt, Artificial Sequence
  Description of Artificial Sequence: Synthetic oligonucleotide
gccauaguauuagauguuu

SEQ ID NO: 258552 - RNA, 19 nt, Artificial Sequence
  Description of Artificial Sequence: Synthetic oligonucleotide
gcuuuagaaccaucagauu

SEQ ID NO: 258553 - RNA, 19 nt, Artificial Sequence
  Description of Artificial Sequence: Synthetic oligonucleotide
gcacaacaacagaacuuaa

SEQ ID NO: 258554 - RNA, 19 nt, Artificial Sequence
  Description of Artificial Sequence: Synthetic oligonucleotide
gccgucacuugugccagga

SEQ ID NO: 258555 - RNA, 19 nt, Artificial Sequence
  Description of Artificial Sequence: Synthetic oligonucleotide
caguacugcaaggcacaua

SEQ ID NO: 258556 - RNA, 19 nt, Artificial Sequence
  Description of Artificial Sequence: Synthetic oligonucleotide
ccaugcaccuucuguaaau

SEQ ID NO: 258557 - RNA, 19 nt, Artificial Sequence
  Description of Artificial Sequence: Synthetic oligonucleotide
ccuuuguguaugagccaaa

SEQ ID NO: 258558 - RNA, 19 nt, Artificial Sequence
  Description of Artificial Sequence: Synthetic oligonucleotide
ccgaggugcguaggcuucc

SEQ ID NO: 258559 - RNA, 19 nt, Artificial Sequence
  Description of Artificial Sequence: Synthetic oligonucleotide
ggaucuccauugacccaga

SEQ ID NO: 258560 - RNA, 19 nt, Artificial Sequence
  Description of Artificial Sequence: Synthetic oligonucleotide
ccuuuguuauggcauccau

SEQ ID NO: 258561 - RNA, 19 nt, Artificial Sequence
  Description of Artificial Sequence: Synthetic oligonucleotide
ccagacgccacuggcugga

SEQ ID NO: 258562 - RNA, 19 nt, Artificial Sequence
  Description of Artificial Sequence: Synthetic oligonucleotide
caaauccauugggccggaa

SEQ ID NO: 258563 - RNA, 19 nt, Artificial Sequence
  Description of Artificial Sequence: Synthetic oligonucleotide
cguaggcuucccuuugugu

SEQ ID NO: 258564 - RNA, 19 nt, Artificial Sequence
  Description of Artificial Sequence: Synthetic oligonucleotide
cgaggugcguaggcuuccc

SEQ ID NO: 258565 - RNA, 19 nt, Artificial Sequence
  Description of Artificial Sequence: Synthetic oligonucleotide
ggcccgggcucgagcauuc

SEQ ID NO: 258566 - RNA, 19 nt, Artificial Sequence
  Description of Artificial Sequence: Synthetic oligonucleotide
ccauuagcacugcucuguu

SEQ ID NO: 258567 - RNA, 19 nt, Artificial Sequence
  Description of Artificial Sequence: Synthetic oligonucleotide
cccgggcucgagcauucaa

SEQ ID NO: 258568 - RNA, 19 nt, Artificial Sequence
  Description of Artificial Sequence: Synthetic oligonucleotide
gggccggaaugaacaugaa

SEQ ID NO: 258569 - RNA, 19 nt, Artificial Sequence
  Description of Artificial Sequence: Synthetic oligonucleotide
ccgggauuuggagguacau

SEQ ID NO: 258570 - RNA, 19 nt, Artificial Sequence
  Description of Artificial Sequence: Synthetic oligonucleotide
ccucugugauuugcauagu

SEQ ID NO: 258571 - RNA, 19 nt, Artificial Sequence
  Description of Artificial Sequence: Synthetic oligonucleotide
cagacgccacuggcuggau

SEQ ID NO: 258572 - RNA, 19 nt, Artificial Sequence
  Description of Artificial Sequence: Synthetic oligonucleotide
aaauuuaccauguacuucc

SEQ ID NO: 258573 - RNA, 19 nt, Artificial Sequence
  Description of Artificial Sequence: Synthetic oligonucleotide
aauaguucauuuuaacuuc

SEQ ID NO: 258574 - RNA, 19 nt, Artificial Sequence
  Description of Artificial Sequence: Synthetic oligonucleotide
ucaaguaaugauuugauug

SEQ ID NO: 258575 - RNA, 19 nt, Artificial Sequence
  Description of Artificial Sequence: Synthetic oligonucleotide
uuuauguccuuuaagauac

SEQ ID NO: 258576 - RNA, 19 nt, Artificial Sequence
  Description of Artificial Sequence: Synthetic oligonucleotide
aaucauaugagguaagcca

SEQ ID NO: 258577 - RNA, 19 nt, Artificial Sequence
  Description of Artificial Sequence: Synthetic oligonucleotide
auaggcuacgcauagagcg

SEQ ID NO: 258578 - RNA, 19 nt, Artificial Sequence
  Description of Artificial Sequence: Synthetic oligonucleotide
ugagauaccuauauaagca

SEQ ID NO: 258579 - RNA, 19 nt, Artificial Sequence
  Description of Artificial Sequence: Synthetic oligonucleotide
ugucauaaugacaugagcu

SEQ ID NO: 258580 - RNA, 19 nt, Artificial Sequence
  Description of Artificial Sequence: Synthetic oligonucleotide
uaaccauagcuacauaugg

SEQ ID NO: 258581 - RNA, 19 nt, Artificial Sequence
  Description of Artificial Sequence: Synthetic oligonucleotide
uaauauauuggguauugag

SEQ ID NO: 258582 - RNA, 19 nt, Artificial Sequence
  Description of Artificial Sequence: Synthetic oligonucleotide
guagccauauuguaaaucg

SEQ ID NO: 258583 - RNA, 19 nt, Artificial Sequence
  Description of Artificial Sequence: Synthetic oligonucleotide
auuuucgacaucuaauuuc

SEQ ID NO: 258584 - RNA, 19 nt, Artificial Sequence
  Description of Artificial Sequence: Synthetic oligonucleotide
aauuagacguuuugcuagc

SEQ ID NO: 258585 - RNA, 19 nt, Artificial Sequence
  Description of Artificial Sequence: Synthetic oligonucleotide
gaauuagacguuuugcuag

SEQ ID NO: 258586 - RNA, 19 nt, Artificial Sequence
  Description of Artificial Sequence: Synthetic oligonucleotide
uucuuugacgcucaugacg

SEQ ID NO: 258587 - RNA, 19 nt, Artificial Sequence
  Description of Artificial Sequence: Synthetic oligonucleotide
ucuaccuagaaccuuuucc

SEQ ID NO: 258588 - RNA, 19 nt, Artificial Sequence
  Description of Artificial Sequence: Synthetic oligonucleotide
auauuggguauugagauac

SEQ ID NO: 258589 - RNA, 19 nt, Artificial Sequence
  Description of Artificial Sequence: Synthetic oligonucleotide
uaugauacauaacaagcac

SEQ ID NO: 258590 - RNA, 19 nt, Artificial Sequence
  Description of Artificial Sequence: Synthetic oligonucleotide
auaaguuggacaaauuuac

SEQ ID NO: 258591 - RNA, 19 nt, Artificial Sequence
  Description of Artificial Sequence: Synthetic oligonucleotide
aaguuggacaaauuuacca

SEQ ID NO: 258592 - RNA, 19 nt, Artificial Sequence
  Description of Artificial Sequence: Synthetic oligonucleotide
uugagauaccuauauaagc

SEQ ID NO: 258593 - RNA, 19 nt, Artificial Sequence
  Description of Artificial Sequence: Synthetic oligonucleotide
aauaguguugggcaugugu

SEQ ID NO: 258594 - RNA, 19 nt, Artificial Sequence
  Description of Artificial Sequence: Synthetic oligonucleotide
auauauuggguauugagau

SEQ ID NO: 258595 - RNA, 19 nt, Artificial Sequence
  Description of Artificial Sequence: Synthetic oligonucleotide
uauuugacaagcagcaaca

SEQ ID NO: 258596 - RNA, 19 nt, Artificial Sequence
  Description of Artificial Sequence: Synthetic oligonucleotide
aaaucuaucacugugucuu

SEQ ID NO: 258597 - RNA, 19 nt, Artificial Sequence
  Description of Artificial Sequence: Synthetic oligonucleotide
uuuucgacaucuaauuucu

SEQ ID NO: 258598 - RNA, 19 nt, Artificial Sequence
  Description of Artificial Sequence: Synthetic oligonucleotide
ugaaaugcuggcuauaaaa

SEQ ID NO: 258599 - RNA, 19 nt, Artificial Sequence
  Description of Artificial Sequence: Synthetic oligonucleotide
uaugagguaagccacugga

SEQ ID NO: 258600 - RNA, 19 nt, Artificial Sequence
  Description of Artificial Sequence: Synthetic oligonucleotide
aaauauuuucgacaucuaa

SEQ ID NO: 258601 - RNA, 19 nt, Artificial Sequence
  Description of Artificial Sequence: Synthetic oligonucleotide
uagguuaucugucauauua

SEQ ID NO: 258602 - RNA, 19 nt, Artificial Sequence
  Description of Artificial Sequence: Synthetic oligonucleotide
uguaaaucggcuucuguca

SEQ ID NO: 258603 - RNA, 19 nt, Artificial Sequence
  Description of Artificial Sequence: Synthetic oligonucleotide
augucauaaugacaugagc

SEQ ID NO: 258604 - RNA, 19 nt, Artificial Sequence
  Description of Artificial Sequence: Synthetic oligonucleotide
uuaauaaccccauggauua

SEQ ID NO: 258605 - RNA, 19 nt, Artificial Sequence
  Description of Artificial Sequence: Synthetic oligonucleotide
auaucuacuccaccguagc

SEQ ID NO: 258606 - RNA, 19 nt, Artificial Sequence
  Description of Artificial Sequence: Synthetic oligonucleotide
uccuauuuccauaaguggu

SEQ ID NO: 258607 - RNA, 19 nt, Artificial Sequence
  Description of Artificial Sequence: Synthetic oligonucleotide
uuuauagcuaacaguuuca

SEQ ID NO: 258608 - RNA, 19 nt, Artificial Sequence
  Description of Artificial Sequence: Synthetic oligonucleotide
aauguaaccacgucaguuu

SEQ ID NO: 258609 - RNA, 19 nt, Artificial Sequence
  Description of Artificial Sequence: Synthetic oligonucleotide
ugauaaguuggacaaauuu

SEQ ID NO: 258610 - RNA, 19 nt, Artificial Sequence
  Description of Artificial Sequence: Synthetic oligonucleotide
uuagcaagcaguucaggug

SEQ ID NO: 258611 - RNA, 19 nt, Artificial Sequence
  Description of Artificial Sequence: Synthetic oligonucleotide
uuuaaucuaccuagaaccu

SEQ ID NO: 258612 - RNA, 19 nt, Artificial Sequence
  Description of Artificial Sequence: Synthetic oligonucleotide
ugagguaagccacuggaca

SEQ ID NO: 258613 - RNA, 19 nt, Artificial Sequence
  Description of Artificial Sequence: Synthetic oligonucleotide
uuucacaucaaguaaugau

SEQ ID NO: 258614 - RNA, 19 nt, Artificial Sequence
  Description of Artificial Sequence: Synthetic oligonucleotide
agguuguaaccauagcuac

SEQ ID NO: 258615 - RNA, 19 nt, Artificial Sequence
  Description of Artificial Sequence: Synthetic oligonucleotide
cuaggcauuuucuuugacg

SEQ ID NO: 258616 - RNA, 19 nt, Artificial Sequence
  Description of Artificial Sequence: Synthetic oligonucleotide
ugacguaguaauuuuaaau

SEQ ID NO: 258617 - RNA, 19 nt, Artificial Sequence
  Description of Artificial Sequence: Synthetic oligonucleotide
ugauucuuguaauaaauuu

SEQ ID NO: 258618 - RNA, 19 nt, Artificial Sequence
  Description of Artificial Sequence: Synthetic oligonucleotide
auauagucggcacccuugc

SEQ ID NO: 258619 - RNA, 19 nt, Artificial Sequence
  Description of Artificial Sequence: Synthetic oligonucleotide
aguccauauagucggcacc

SEQ ID NO: 258620 - RNA, 19 nt, Artificial Sequence
  Description of Artificial Sequence: Synthetic oligonucleotide
gagauaccuauauaagcag

SEQ ID NO: 258621 - RNA, 19 nt, Artificial Sequence
  Description of Artificial Sequence: Synthetic oligonucleotide
aauaagggcauugugccga

SEQ ID NO: 258622 - RNA, 19 nt, Artificial Sequence
  Description of Artificial Sequence: Synthetic oligonucleotide
auauuuucgacaucuaauu

SEQ ID NO: 258623 - RNA, 19 nt, Artificial Sequence
  Description of Artificial Sequence: Synthetic oligonucleotide
uaacucuuguggaauagca

SEQ ID NO: 258624 - RNA, 19 nt, Artificial Sequence
  Description of Artificial Sequence: Synthetic oligonucleotide
gaauagcaaauguugacga

SEQ ID NO: 258625 - RNA, 19 nt, Artificial Sequence
  Description of Artificial Sequence: Synthetic oligonucleotide
cauuugguagguuguaacc

SEQ ID NO: 258626 - RNA, 19 nt, Artificial Sequence
  Description of Artificial Sequence: Synthetic oligonucleotide
uuugcgugcuuucaugaug

SEQ ID NO: 258627 - RNA, 19 nt, Artificial Sequence
  Description of Artificial Sequence: Synthetic oligonucleotide
aucagagacggugucacgc

SEQ ID NO: 258628 - RNA, 19 nt, Artificial Sequence
  Description of Artificial Sequence: Synthetic oligonucleotide
uuguaaaucggcuucuguc

SEQ ID NO: 258629 - RNA, 19 nt, Artificial Sequence
  Description of Artificial Sequence: Synthetic oligonucleotide
ugaauaugauuuugcagcu

SEQ ID NO: 258630 - RNA, 19 nt, Artificial Sequence
  Description of Artificial Sequence: Synthetic oligonucleotide
agccauauuguaaaucggc

SEQ ID NO: 258631 - RNA, 19 nt, Artificial Sequence
  Description of Artificial Sequence: Synthetic oligonucleotide
auagcaaauguugacgaag

SEQ ID NO: 258632 - RNA, 19 nt, Artificial Sequence
  Description of Artificial Sequence: Synthetic oligonucleotide
auuaccucuugaauaaggg

SEQ ID NO: 258633 - RNA, 19 nt, Artificial Sequence
  Description of Artificial Sequence: Synthetic oligonucleotide
ucuaaggcccucaucguga

SEQ ID NO: 258634 - RNA, 19 nt, Artificial Sequence
  Description of Artificial Sequence: Synthetic oligonucleotide
uggguauugagauaccuau

SEQ ID NO: 258635 - RNA, 19 nt, Artificial Sequence
  Description of Artificial Sequence: Synthetic oligonucleotide
uagagcguauauaucugag

SEQ ID NO: 258636 - RNA, 19 nt, Artificial Sequence
  Description of Artificial Sequence: Synthetic oligonucleotide
guagauacaauuauuaggu

SEQ ID NO: 258637 - RNA, 19 nt, Artificial Sequence
  Description of Artificial Sequence: Synthetic oligonucleotide
aucgugaauaugauuuugc

SEQ ID NO: 258638 - RNA, 19 nt, Artificial Sequence
  Description of Artificial Sequence: Synthetic oligonucleotide
gaaucauaugagguaagcc

SEQ ID NO: 258639 - RNA, 19 nt, Artificial Sequence
  Description of Artificial Sequence: Synthetic oligonucleotide
ugaauuagacguuuugcua

SEQ ID NO: 258640 - RNA, 19 nt, Artificial Sequence
  Description of Artificial Sequence: Synthetic oligonucleotide
agcuugaaauaucucuagg

SEQ ID NO: 258641 - RNA, 19 nt, Artificial Sequence
  Description of Artificial Sequence: Synthetic oligonucleotide
caagacguacauauuugcc

SEQ ID NO: 258642 - RNA, 19 nt, Artificial Sequence
  Description of Artificial Sequence: Synthetic oligonucleotide
aguuggacaaauuuaccau

SEQ ID NO: 258643 - RNA, 19 nt, Artificial Sequence
  Description of Artificial Sequence: Synthetic oligonucleotide
ugaagggguucaaucauga

SEQ ID NO: 258644 - RNA, 19 nt, Artificial Sequence
  Description of Artificial Sequence: Synthetic oligonucleotide
caacccaugaauuagacgu

SEQ ID NO: 258645 - RNA, 19 nt, Artificial Sequence
  Description of Artificial Sequence: Synthetic oligonucleotide
aguuaauaaccccauggau

SEQ ID NO: 258646 - RNA, 19 nt, Artificial Sequence
  Description of Artificial Sequence: Synthetic oligonucleotide
uagccauauuguaaaucgg

SEQ ID NO: 258647 - RNA, 19 nt, Artificial Sequence
  Description of Artificial Sequence: Synthetic oligonucleotide
auauaucugagaaucuguc

SEQ ID NO: 258648 - RNA, 19 nt, Artificial Sequence
  Description of Artificial Sequence: Synthetic oligonucleotide
uaccauacgcugcugacac

SEQ ID NO: 258649 - RNA, 19 nt, Artificial Sequence
  Description of Artificial Sequence: Synthetic oligonucleotide
uacugguugcucuaaggcc

SEQ ID NO: 258650 - RNA, 19 nt, Artificial Sequence
  Description of Artificial Sequence: Synthetic oligonucleotide
acaacccaugaauuagacg

SEQ ID NO: 258651 - RNA, 19 nt, Artificial Sequence
  Description of Artificial Sequence: Synthetic oligonucleotide
gagcguauauaucugagaa

SEQ ID NO: 258652 - RNA, 19 nt, Artificial Sequence
  Description of Artificial Sequence: Synthetic oligonucleotide
uucauaucuacuccaccgu

SEQ ID NO: 258653 - RNA, 19 nt, Artificial Sequence
  Description of Artificial Sequence: Synthetic oligonucleotide
ugaaucauaugagguaagc

SEQ ID NO: 258654 - RNA, 19 nt, Artificial Sequence
  Description of Artificial Sequence: Synthetic oligonucleotide
aauagcaaauguugacgaa

SEQ ID NO: 258655 - RNA, 19 nt, Artificial Sequence
  Description of Artificial Sequence: Synthetic oligonucleotide
cauaucuacuccaccguag

SEQ ID NO: 258656 - RNA, 19 nt, Artificial Sequence
  Description of Artificial Sequence: Synthetic oligonucleotide
ucgugaauaugauuuugca

SEQ ID NO: 258657 - RNA, 19 nt, Artificial Sequence
  Description of Artificial Sequence: Synthetic oligonucleotide
gauaaguuggacaaauuua

SEQ ID NO: 258658 - RNA, 19 nt, Artificial Sequence
  Description of Artificial Sequence: Synthetic oligonucleotide
uccaccguagccauauugu

SEQ ID NO: 258659 - RNA, 19 nt, Artificial Sequence
  Description of Artificial Sequence: Synthetic oligonucleotide
uccugaagggguucaauca

SEQ ID NO: 258660 - RNA, 19 nt, Artificial Sequence
  Description of Artificial Sequence: Synthetic oligonucleotide
auuagguuaucugucauau

SEQ ID NO: 258661 - RNA, 19 nt, Artificial Sequence
  Description of Artificial Sequence: Synthetic oligonucleotide
agggguucaaucaugagcu

SEQ ID NO: 258662 - RNA, 19 nt, Artificial Sequence
  Description of Artificial Sequence: Synthetic oligonucleotide
ugauacugggauugaaccu

SEQ ID NO: 258663 - RNA, 19 nt, Artificial Sequence
  Description of Artificial Sequence: Synthetic oligonucleotide
cauauagucggcacccuug

SEQ ID NO: 258664 - RNA, 19 nt, Artificial Sequence
  Description of Artificial Sequence: Synthetic oligonucleotide
aauaaccccauggauuacu

SEQ ID NO: 258665 - RNA, 19 nt, Artificial Sequence
  Description of Artificial Sequence: Synthetic oligonucleotide
uauuuucgacaucuaauuu

SEQ ID NO: 258666 - RNA, 19 nt, Artificial Sequence
  Description of Artificial Sequence: Synthetic oligonucleotide
uccgcauaaagucuuucuc

SEQ ID NO: 258667 - RNA, 19 nt, Artificial Sequence
  Description of Artificial Sequence: Synthetic oligonucleotide
acgcauagagcguauauau

SEQ ID NO: 258668 - RNA, 19 nt, Artificial Sequence
  Description of Artificial Sequence: Synthetic oligonucleotide
cauagagcguauauaucug

SEQ ID NO: 258669 - RNA, 19 nt, Artificial Sequence
  Description of Artificial Sequence: Synthetic oligonucleotide
ggauaggcuacgcauagag

SEQ ID NO: 258670 - RNA, 19 nt, Artificial Sequence
  Description of Artificial Sequence: Synthetic oligonucleotide
agugguucgggauaggcua

SEQ ID NO: 258671 - RNA, 19 nt, Artificial Sequence
  Description of Artificial Sequence: Synthetic oligonucleotide
uaccauguacuuccaaaac

SEQ ID NO: 258672 - RNA, 19 nt, Artificial Sequence
  Description of Artificial Sequence: Synthetic oligonucleotide
ugucacgcgacguaacugu

SEQ ID NO: 258673 - RNA, 19 nt, Artificial Sequence
  Description of Artificial Sequence: Synthetic oligonucleotide
gacguaguaauuuuaaauu

SEQ ID NO: 258674 - RNA, 19 nt, Artificial Sequence
  Description of Artificial Sequence: Synthetic oligonucleotide
uuuccggucuucaucuaca

SEQ ID NO: 258675 - RNA, 19 nt, Artificial Sequence
  Description of Artificial Sequence: Synthetic oligonucleotide
gagguaagccacuggacac

SEQ ID NO: 258676 - RNA, 19 nt, Artificial Sequence
  Description of Artificial Sequence: Synthetic oligonucleotide
auagacaacccaugaauua

SEQ ID NO: 258677 - RNA, 19 nt, Artificial Sequence
  Description of Artificial Sequence: Synthetic oligonucleotide
gauguaagggccuuaucua

SEQ ID NO: 258678 - RNA, 19 nt, Artificial Sequence
  Description of Artificial Sequence: Synthetic oligonucleotide
auuguaaaucggcuucugu

SEQ ID NO: 258679 - RNA, 19 nt, Artificial Sequence
  Description of Artificial Sequence: Synthetic oligonucleotide
agacguacauauuugccau

SEQ ID NO: 258680 - RNA, 19 nt, Artificial Sequence
  Description of Artificial Sequence: Synthetic oligonucleotide
uaucuacuccaccguagcc

SEQ ID NO: 258681 - RNA, 19 nt, Artificial Sequence
  Description of Artificial Sequence: Synthetic oligonucleotide
uugcuaguaaacucauaac

SEQ ID NO: 258682 - RNA, 19 nt, Artificial Sequence
  Description of Artificial Sequence: Synthetic oligonucleotide
aucaugcugauacugggau

SEQ ID NO: 258683 - RNA, 19 nt, Artificial Sequence
  Description of Artificial Sequence: Synthetic oligonucleotide
guacauccgaugcagcuug

SEQ ID NO: 258684 - RNA, 19 nt, Artificial Sequence
  Description of Artificial Sequence: Synthetic oligonucleotide
agagauaauguaaccacgu

SEQ ID NO: 258685 - RNA, 19 nt, Artificial Sequence
  Description of Artificial Sequence: Synthetic oligonucleotide
auugugccgaagcacuuug

SEQ ID NO: 258686 - RNA, 19 nt, Artificial Sequence
  Description of Artificial Sequence: Synthetic oligonucleotide
aacuaauccccaaaucuau

SEQ ID NO: 258687 - RNA, 19 nt, Artificial Sequence
  Description of Artificial Sequence: Synthetic oligonucleotide
ugaugcggacgauagcagc

SEQ ID NO: 258688 - RNA, 19 nt, Artificial Sequence
  Description of Artificial Sequence: Synthetic oligonucleotide
uggcuuauuaccucuugaa

SEQ ID NO: 258689 - RNA, 19 nt, Artificial Sequence
  Description of Artificial Sequence: Synthetic oligonucleotide
agguuaucugucauauuac

SEQ ID NO: 258690 - RNA, 19 nt, Artificial Sequence
  Description of Artificial Sequence: Synthetic oligonucleotide
agagcguauauaucugaga

SEQ ID NO: 258691 - RNA, 19 nt, Artificial Sequence
  Description of Artificial Sequence: Synthetic oligonucleotide
gauacauaacaagcacuug

SEQ ID NO: 258692 - RNA, 19 nt, Artificial Sequence
  Description of Artificial Sequence: Synthetic oligonucleotide
gagauaauguaaccacguc

SEQ ID NO: 258693 - RNA, 19 nt, Artificial Sequence
  Description of Artificial Sequence: Synthetic oligonucleotide
cauaaugacaugagcuuga

SEQ ID NO: 258694 - RNA, 19 nt, Artificial Sequence
  Description of Artificial Sequence: Synthetic oligonucleotide
uuuagcaaguugucacagu

SEQ ID NO: 258695 - RNA, 19 nt, Artificial Sequence
  Description of Artificial Sequence: Synthetic oligonucleotide
uugacguaguaauuuuaaa

SEQ ID NO: 258696 - RNA, 19 nt, Artificial Sequence
  Description of Artificial Sequence: Synthetic oligonucleotide
caugaugcggacgauagca

SEQ ID NO: 258697 - RNA, 19 nt, Artificial Sequence
  Description of Artificial Sequence: Synthetic oligonucleotide
aacaugaacaaaggaguua

SEQ ID NO: 258698 - RNA, 19 nt, Artificial Sequence
  Description of Artificial Sequence: Synthetic oligonucleotide
uaaguggucugcuaccaua

SEQ ID NO: 258699 - RNA, 19 nt, Artificial Sequence
  Description of Artificial Sequence: Synthetic oligonucleotide
uuggguauugagauaccua

SEQ ID NO: 258700 - RNA, 19 nt, Artificial Sequence
  Description of Artificial Sequence: Synthetic oligonucleotide
uagcaaguugucacaguac

SEQ ID NO: 258701 - RNA, 19 nt, Artificial Sequence
  Description of Artificial Sequence: Synthetic oligonucleotide
guucaacaugaacaaagga

SEQ ID NO: 258702 - RNA, 19 nt, Artificial Sequence
  Description of Artificial Sequence: Synthetic oligonucleotide
uguugagaucagcacugac

SEQ ID NO: 258703 - RNA, 19 nt, Artificial Sequence
  Description of Artificial Sequence: Synthetic oligonucleotide
uauuggguauugagauacc

SEQ ID NO: 258704 - RNA, 19 nt, Artificial Sequence
  Description of Artificial Sequence: Synthetic oligonucleotide
aaucaugcugauacuggga

SEQ ID NO: 258705 - RNA, 19 nt, Artificial Sequence
  Description of Artificial Sequence: Synthetic oligonucleotide
caaguaaugauuugauugu

SEQ ID NO: 258706 - RNA, 19 nt, Artificial Sequence
  Description of Artificial Sequence: Synthetic oligonucleotide
gagacggugucacgcgacg

SEQ ID NO: 258707 - RNA, 19 nt, Artificial Sequence
  Description of Artificial Sequence: Synthetic oligonucleotide
gcguauauaucugagaauc

SEQ ID NO: 258708 - RNA, 19 nt, Artificial Sequence
  Description of Artificial Sequence: Synthetic oligonucleotide
uuagacguuuugcuagcau

SEQ ID NO: 258709 - RNA, 19 nt, Artificial Sequence
  Description of Artificial Sequence: Synthetic oligonucleotide
auugacguaguaauuuuaa

SEQ ID NO: 258710 - RNA, 19 nt, Artificial Sequence
  Description of Artificial Sequence: Synthetic oligonucleotide
ucaugaugcggacgauagc

SEQ ID NO: 258711 - RNA, 19 nt, Artificial Sequence
  Description of Artificial Sequence: Synthetic oligonucleotide
gauaggcuacgcauagagc

SEQ ID NO: 258712 - RNA, 19 nt, Artificial Sequence
  Description of Artificial Sequence: Synthetic oligonucleotide
auuggguauugagauaccu

SEQ ID NO: 258713 - RNA, 19 nt, Artificial Sequence
  Description of Artificial Sequence: Synthetic oligonucleotide
agcaagacguacauauuug

SEQ ID NO: 258714 - RNA, 19 nt, Artificial Sequence
  Description of Artificial Sequence: Synthetic oligonucleotide
uagucggcacccuugcugu

SEQ ID NO: 258715 - RNA, 19 nt, Artificial Sequence
  Description of Artificial Sequence: Synthetic oligonucleotide
auaauguaaccacgucagu

SEQ ID NO: 258716 - RNA, 19 nt, Artificial Sequence
  Description of Artificial Sequence: Synthetic oligonucleotide
aguggucugcuaccauacg

SEQ ID NO: 258717 - RNA, 19 nt, Artificial Sequence
  Description of Artificial Sequence: Synthetic oligonucleotide
ugcaaacagauuugggguu

SEQ ID NO: 258718 - RNA, 19 nt, Artificial Sequence
  Description of Artificial Sequence: Synthetic oligonucleotide
uaggcuacgcauagagcgu

SEQ ID NO: 258719 - RNA, 19 nt, Artificial Sequence
  Description of Artificial Sequence: Synthetic oligonucleotide
gaguuagguuacugguugc

SEQ ID NO: 258720 - RNA, 19 nt, Artificial Sequence
  Description of Artificial Sequence: Synthetic oligonucleotide
ucggcuucugucaauuauu

SEQ ID NO: 258721 - RNA, 19 nt, Artificial Sequence
  Description of Artificial Sequence: Synthetic oligonucleotide
gcaagacguacauauuugc

SEQ ID NO: 258722 - RNA, 19 nt, Artificial Sequence
  Description of Artificial Sequence: Synthetic oligonucleotide
aaaucggcuucugucaauu

SEQ ID NO: 258723 - RNA, 19 nt, Artificial Sequence
  Description of Artificial Sequence: Synthetic oligonucleotide
aucggcuucugucaauuau

SEQ ID NO: 258724 - RNA, 19 nt, Artificial Sequence
  Description of Artificial Sequence: Synthetic oligonucleotide
uuccggucuucaucuacag

SEQ ID NO: 258725 - RNA, 19 nt, Artificial Sequence
  Description of Artificial Sequence: Synthetic oligonucleotide
acgaaggagccugagugag

SEQ ID NO: 258726 - RNA, 19 nt, Artificial Sequence
  Description of Artificial Sequence: Synthetic oligonucleotide
uuaaucuaccuagaaccuu

SEQ ID NO: 258727 - RNA, 19 nt, Artificial Sequence
  Description of Artificial Sequence: Synthetic oligonucleotide
gacaacccaugaauuagac

SEQ ID NO: 258728 - RNA, 19 nt, Artificial Sequence
  Description of Artificial Sequence: Synthetic oligonucleotide
gacguacauauuugccaug

SEQ ID NO: 258729 - RNA, 19 nt, Artificial Sequence
  Description of Artificial Sequence: Synthetic oligonucleotide
caagugguucgggauaggc

SEQ ID NO: 258730 - RNA, 19 nt, Artificial Sequence
  Description of Artificial Sequence: Synthetic oligonucleotide
gacgaaggagccugaguga

SEQ ID NO: 258731 - RNA, 19 nt, Artificial Sequence
  Description of Artificial Sequence: Synthetic oligonucleotide
auaguguugggcauguguu

SEQ ID NO: 258732 - RNA, 19 nt, Artificial Sequence
  Description of Artificial Sequence: Synthetic oligonucleotide
uacgcauagagcguauaua

SEQ ID NO: 258733 - RNA, 19 nt, Artificial Sequence
  Description of Artificial Sequence: Synthetic oligonucleotide
aguuagguuacugguugcu

SEQ ID NO: 258734 - RNA, 19 nt, Artificial Sequence
  Description of Artificial Sequence: Synthetic oligonucleotide
uauagucggcacccuugcu

SEQ ID NO: 258735 - RNA, 19 nt, Artificial Sequence
  Description of Artificial Sequence: Synthetic oligonucleotide
ucgggauaggcuacgcaua

SEQ ID NO: 258736 - RNA, 19 nt, Artificial Sequence
  Description of Artificial Sequence: Synthetic oligonucleotide
gcuggcuauaaaauaauuc

SEQ ID NO: 258737 - RNA, 19 nt, Artificial Sequence
  Description of Artificial Sequence: Synthetic oligonucleotide
acgcgacguaacuguauuc

SEQ ID NO: 258738 - RNA, 19 nt, Artificial Sequence
  Description of Artificial Sequence: Synthetic oligonucleotide
uugugccgaagcacuuugc

SEQ ID NO: 258739 - RNA, 19 nt, Artificial Sequence
  Description of Artificial Sequence: Synthetic oligonucleotide
ccugugcaaaugcucaacg

SEQ ID NO: 258740 - RNA, 19 nt, Artificial Sequence
  Description of Artificial Sequence: Synthetic oligonucleotide
guaaaucggcuucugucaa

SEQ ID NO: 258741 - RNA, 19 nt, Artificial Sequence
  Description of Artificial Sequence: Synthetic oligonucleotide
ugcggacgauagcagcuug

SEQ ID NO: 258742 - RNA, 19 nt, Artificial Sequence
  Description of Artificial Sequence: Synthetic oligonucleotide
cucgugaaucacuuuagua

SEQ ID NO: 258743 - RNA, 19 nt, Artificial Sequence
  Description of Artificial Sequence: Synthetic oligonucleotide
agagacggugucacgcgac

SEQ ID NO: 258744 - RNA, 19 nt, Artificial Sequence
  Description of Artificial Sequence: Synthetic oligonucleotide
ucccaauaccuaugauaca

SEQ ID NO: 258745 - RNA, 19 nt, Artificial Sequence
  Description of Artificial Sequence: Synthetic oligonucleotide
uaaaucggcuucugucaau

SEQ ID NO: 258746 - RNA, 19 nt, Artificial Sequence
  Description of Artificial Sequence: Synthetic oligonucleotide
uucauucaucugagugcug

SEQ ID NO: 258747 - RNA, 19 nt, Artificial Sequence
  Description of Artificial Sequence: Synthetic oligonucleotide
acguaacuguauucaucug

SEQ ID NO: 258748 - RNA, 19 nt, Artificial Sequence
  Description of Artificial Sequence: Synthetic oligonucleotide
ccauuugguagguuguaac

SEQ ID NO: 258749 - RNA, 19 nt, Artificial Sequence
  Description of Artificial Sequence: Synthetic oligonucleotide
cauucaucugagugcuguc

SEQ ID NO: 258750 - RNA, 19 nt, Artificial Sequence
  Description of Artificial Sequence: Synthetic oligonucleotide
cauaagugguucauucaua

SEQ ID NO: 258751 - RNA, 19 nt, Artificial Sequence
  Description of Artificial Sequence: Synthetic oligonucleotide
auaugaacuuggaugcaaa

SEQ ID NO: 258752 - RNA, 19 nt, Artificial Sequence
  Description of Artificial Sequence: Synthetic oligonucleotide
ucacgcgacguaacuguau

SEQ ID NO: 258753 - RNA, 19 nt, Artificial Sequence
  Description of Artificial Sequence: Synthetic oligonucleotide
aaucggcuucugucaauua

SEQ ID NO: 258754 - RNA, 19 nt, Artificial Sequence
  Description of Artificial Sequence: Synthetic oligonucleotide
ugguucgggauaggcuacg

SEQ ID NO: 258755 - RNA, 19 nt, Artificial Sequence
  Description of Artificial Sequence: Synthetic oligonucleotide
uuagguuaucugucauauu

SEQ ID NO: 258756 - RNA, 19 nt, Artificial Sequence
  Description of Artificial Sequence: Synthetic oligonucleotide
cauugacguaguaauuuua

SEQ ID NO: 258757 - RNA, 19 nt, Artificial Sequence
  Description of Artificial Sequence: Synthetic oligonucleotide
guacccaaccaaauuccac

SEQ ID NO: 258758 - RNA, 19 nt, Artificial Sequence
  Description of Artificial Sequence: Synthetic oligonucleotide
ucaugcugauacugggauu

SEQ ID NO: 258759 - RNA, 19 nt, Artificial Sequence
  Description of Artificial Sequence: Synthetic oligonucleotide
guuagguuacugguugcuc

SEQ ID NO: 258760 - RNA, 19 nt, Artificial Sequence
  Description of Artificial Sequence: Synthetic oligonucleotide
augaugcggacgauagcag

SEQ ID NO: 258761 - RNA, 19 nt, Artificial Sequence
  Description of Artificial Sequence: Synthetic oligonucleotide
auuagacguuuugcuagca

SEQ ID NO: 258762 - RNA, 19 nt, Artificial Sequence
  Description of Artificial Sequence: Synthetic oligonucleotide
cauagcuacauaugguuuu

SEQ ID NO: 258763 - RNA, 19 nt, Artificial Sequence
  Description of Artificial Sequence: Synthetic oligonucleotide
uaauaaccccauggauuac

SEQ ID NO: 258764 - RNA, 19 nt, Artificial Sequence
  Description of Artificial Sequence: Synthetic oligonucleotide
guguacauccgaugcagcu

SEQ ID NO: 258765 - RNA, 19 nt, Artificial Sequence
  Description of Artificial Sequence: Synthetic oligonucleotide
gaugcggacgauagcagcu

SEQ ID NO: 258766 - RNA, 19 nt, Artificial Sequence
  Description of Artificial Sequence: Synthetic oligonucleotide
caaauauuuucgacaucua

SEQ ID NO: 258767 - RNA, 19 nt, Artificial Sequence
  Description of Artificial Sequence: Synthetic oligonucleotide
ggacgauagcagcuuggag

SEQ ID NO: 258768 - RNA, 19 nt, Artificial Sequence
  Description of Artificial Sequence: Synthetic oligonucleotide
agguaagccacuggacaca

SEQ ID NO: 258769 - RNA, 19 nt, Artificial Sequence
  Description of Artificial Sequence: Synthetic oligonucleotide
auacugugagcaauuugau

SEQ ID NO: 258770 - RNA, 19 nt, Artificial Sequence
  Description of Artificial Sequence: Synthetic oligonucleotide
ggucugcuaccauacgcug

SEQ ID NO: 258771 - RNA, 19 nt, Artificial Sequence
  Description of Artificial Sequence: Synthetic oligonucleotide
guauaugaacuuggaugca

SEQ ID NO: 258772 - RNA, 19 nt, Artificial Sequence
  Description of Artificial Sequence: Synthetic oligonucleotide
aacccaugaauuagacguu

SEQ ID NO: 258773 - RNA, 19 nt, Artificial Sequence
  Description of Artificial Sequence: Synthetic oligonucleotide
gugucacgcgacguaacug

SEQ ID NO: 258774 - RNA, 19 nt, Artificial Sequence
  Description of Artificial Sequence: Synthetic oligonucleotide
guucgggauaggcuacgca

SEQ ID NO: 258775 - RNA, 19 nt, Artificial Sequence
  Description of Artificial Sequence: Synthetic oligonucleotide
caaaucuaucacugugucu

SEQ ID NO: 258776 - RNA, 19 nt, Artificial Sequence
  Description of Artificial Sequence: Synthetic oligonucleotide
auaagggcauugugccgaa

SEQ ID NO: 258777 - RNA, 19 nt, Artificial Sequence
  Description of Artificial Sequence: Synthetic oligonucleotide
gcugcgcucaauguacugc

SEQ ID NO: 258778 - RNA, 19 nt, Artificial Sequence
  Description of Artificial Sequence: Synthetic oligonucleotide
caguucaggugcuuugcaa

SEQ ID NO: 258779 - RNA, 19 nt, Artificial Sequence
  Description of Artificial Sequence: Synthetic oligonucleotide
cuaccauacgcugcugaca

SEQ ID NO: 258780 - RNA, 19 nt, Artificial Sequence
  Description of Artificial Sequence: Synthetic oligonucleotide
ugcaaacgugaaggggaga

SEQ ID NO: 258781 - RNA, 19 nt, Artificial Sequence
  Description of Artificial Sequence: Synthetic oligonucleotide
gacggugucacgcgacgua

SEQ ID NO: 258782 - RNA, 19 nt, Artificial Sequence
  Description of Artificial Sequence: Synthetic oligonucleotide
aggcccucaucgugaauau

SEQ ID NO: 258783 - RNA, 19 nt, Artificial Sequence
  Description of Artificial Sequence: Synthetic oligonucleotide
cacaaauaguguugggcau

SEQ ID NO: 258784 - RNA, 19 nt, Artificial Sequence
  Description of Artificial Sequence: Synthetic oligonucleotide
gcaaacagauuugggguuc

SEQ ID NO: 258785 - RNA, 19 nt, Artificial Sequence
  Description of Artificial Sequence: Synthetic oligonucleotide
gccgaagcacuuugcgugc

SEQ ID NO: 258786 - RNA, 19 nt, Artificial Sequence
  Description of Artificial Sequence: Synthetic oligonucleotide
cauggauuacuuucugguu

SEQ ID NO: 258787 - RNA, 19 nt, Artificial Sequence
  Description of Artificial Sequence: Synthetic oligonucleotide
cuaaggcccucaucgugaa

SEQ ID NO: 258788 - RNA, 19 nt, Artificial Sequence
  Description of Artificial Sequence: Synthetic oligonucleotide
acggugucacgcgacguaa

SEQ ID NO: 258789 - RNA, 19 nt, Artificial Sequence
  Description of Artificial Sequence: Synthetic oligonucleotide
cuacgcauagagcguauau

SEQ ID NO: 258790 - RNA, 19 nt, Artificial Sequence
  Description of Artificial Sequence: Synthetic oligonucleotide
gugguucgggauaggcuac

SEQ ID NO: 258791 - RNA, 19 nt, Artificial Sequence
  Description of Artificial Sequence: Synthetic oligonucleotide
gucggcacccuugcuguac

SEQ ID NO: 258792 - RNA, 19 nt, Artificial Sequence
  Description of Artificial Sequence: Synthetic oligonucleotide
cgacguaacuguauucauc

SEQ ID NO: 258793 - RNA, 19 nt, Artificial Sequence
  Description of Artificial Sequence: Synthetic oligonucleotide
cuucuuaaucaugcugaua

SEQ ID NO: 258794 - RNA, 19 nt, Artificial Sequence
  Description of Artificial Sequence: Synthetic oligonucleotide
gaucaccauucaaaacagu

SEQ ID NO: 258795 - RNA, 19 nt, Artificial Sequence
  Description of Artificial Sequence: Synthetic oligonucleotide
cagagacggugucacgcga

SEQ ID NO: 258796 - RNA, 19 nt, Artificial Sequence
  Description of Artificial Sequence: Synthetic oligonucleotide
gcggacgauagcagcuugg

SEQ ID NO: 258797 - RNA, 19 nt, Artificial Sequence
  Description of Artificial Sequence: Synthetic oligonucleotide
aggcuacgcauagagcgua

SEQ ID NO: 258798 - RNA, 19 nt, Artificial Sequence
  Description of Artificial Sequence: Synthetic oligonucleotide
ggugucacgcgacguaacu

SEQ ID NO: 258799 - RNA, 19 nt, Artificial Sequence
  Description of Artificial Sequence: Synthetic oligonucleotide
cguagccauauuguaaauc

SEQ ID NO: 258800 - RNA, 19 nt, Artificial Sequence
  Description of Artificial Sequence: Synthetic oligonucleotide
cuuugcgugcuuucaugau

SEQ ID NO: 258801 - RNA, 19 nt, Artificial Sequence
  Description of Artificial Sequence: Synthetic oligonucleotide
cgcauagagcguauauauc

SEQ ID NO: 258802 - RNA, 19 nt, Artificial Sequence
  Description of Artificial Sequence: Synthetic oligonucleotide
gguucgggauaggcuacgc

SEQ ID NO: 258803 - RNA, 19 nt, Artificial Sequence
  Description of Artificial Sequence: Synthetic oligonucleotide
augcggacgauagcagcuu

SEQ ID NO: 258804 - RNA, 19 nt, Artificial Sequence
  Description of Artificial Sequence: Synthetic oligonucleotide
ccuauauaagcaguccaua

SEQ ID NO: 258805 - RNA, 19 nt, Artificial Sequence
  Description of Artificial Sequence: Synthetic oligonucleotide
gcaauacuucacucauucu

SEQ ID NO: 258806 - RNA, 19 nt, Artificial Sequence
  Description of Artificial Sequence: Synthetic oligonucleotide
aggcuugcuuuaauuuauu

SEQ ID NO: 258807 - RNA, 19 nt, Artificial Sequence
  Description of Artificial Sequence: Synthetic oligonucleotide
cacgcgacguaacuguauu

SEQ ID NO: 258808 - RNA, 19 nt, Artificial Sequence
  Description of Artificial Sequence: Synthetic oligonucleotide
ggguauugagauaccuaua

SEQ ID NO: 258809 - RNA, 19 nt, Artificial Sequence
  Description of Artificial Sequence: Synthetic oligonucleotide
cgcgacguaacuguauuca

SEQ ID NO: 258810 - RNA, 19 nt, Artificial Sequence
  Description of Artificial Sequence: Synthetic oligonucleotide
acggagcaagacguacaua

SEQ ID NO: 258811 - RNA, 19 nt, Artificial Sequence
  Description of Artificial Sequence: Synthetic oligonucleotide
agucggcacccuugcugua

SEQ ID NO: 258812 - RNA, 19 nt, Artificial Sequence
  Description of Artificial Sequence: Synthetic oligonucleotide
caaugcuagcucuccuauu

SEQ ID NO: 258813 - RNA, 19 nt, Artificial Sequence
  Description of Artificial Sequence: Synthetic oligonucleotide
acuccaccguagccauauu

SEQ ID NO: 258814 - RNA, 19 nt, Artificial Sequence
  Description of Artificial Sequence: Synthetic oligonucleotide
gucacgcgacguaacugua

SEQ ID NO: 258815 - RNA, 19 nt, Artificial Sequence
  Description of Artificial Sequence: Synthetic oligonucleotide
ccaccguagccauauugua

SEQ ID NO: 258816 - RNA, 19 nt, Artificial Sequence
  Description of Artificial Sequence: Synthetic oligonucleotide
gcgacguaacuguauucau

SEQ ID NO: 258817 - RNA, 19 nt, Artificial Sequence
  Description of Artificial Sequence: Synthetic oligonucleotide
ggcccucaucgugaauaug

SEQ ID NO: 258818 - RNA, 19 nt, Artificial Sequence
  Description of Artificial Sequence: Synthetic oligonucleotide
gcuacgcauagagcguaua

SEQ ID NO: 258819 - RNA, 19 nt, Artificial Sequence
  Description of Artificial Sequence: Synthetic oligonucleotide
cggugucacgcgacguaac

SEQ ID NO: 258820 - RNA, 19 nt, Artificial Sequence
  Description of Artificial Sequence: Synthetic oligonucleotide
cccucaucgugaauaugau

SEQ ID NO: 258821 - RNA, 19 nt, Artificial Sequence
  Description of Artificial Sequence: Synthetic oligonucleotide
ccucaucgugaauaugauu

SEQ ID NO: 258822 - RNA, 19 nt, Artificial Sequence
  Description of Artificial Sequence: Synthetic oligonucleotide
gggauugaaccuggcucuu

SEQ ID NO: 258823 - RNA, 19 nt, Artificial Sequence
  Description of Artificial Sequence: Synthetic oligonucleotide
ccguagccauauuguaaau

SEQ ID NO: 258824 - RNA, 19 nt, Artificial Sequence
  Description of Artificial Sequence: Synthetic oligonucleotide
ccgaugcagcuugcuagua

SEQ ID NO: 258825 - RNA, 19 nt, Artificial Sequence
  Description of Artificial Sequence: Synthetic oligonucleotide
aagaguggaauauuaauac

SEQ ID NO: 258826 - RNA, 19 nt, Artificial Sequence
  Description of Artificial Sequence: Synthetic oligonucleotide
aaacggaaaauaaaagugc

SEQ ID NO: 258827 - RNA, 19 nt, Artificial Sequence
  Description of Artificial Sequence: Synthetic oligonucleotide
uguguaaacaguaaacgga

SEQ ID NO: 258828 - RNA, 19 nt, Artificial Sequence
  Description of Artificial Sequence: Synthetic oligonucleotide
guuacaauaugauaguccc

SEQ ID NO: 258829 - RNA, 19 nt, Artificial Sequence
  Description of Artificial Sequence: Synthetic oligonucleotide
uaaaagauggacuggagcu

SEQ ID NO: 258830 - RNA, 19 nt, Artificial Sequence
  Description of Artificial Sequence: Synthetic oligonucleotide
aguaauaucugucggaaug

SEQ ID NO: 258831 - RNA, 19 nt, Artificial Sequence
  Description of Artificial Sequence: Synthetic oligonucleotide
uguacagcagugcagcugg

SEQ ID NO: 258832 - RNA, 19 nt, Artificial Sequence
  Description of Artificial Sequence: Synthetic oligonucleotide
uaaaguaagucuccugggg

SEQ ID NO: 258833 - RNA, 19 nt, Artificial Sequence
  Description of Artificial Sequence: Synthetic oligonucleotide
cugaacauaaggaaugggg

SEQ ID NO: 258834 - RNA, 19 nt, Artificial Sequence
  Description of Artificial Sequence: Synthetic oligonucleotide
  modified_base (7)..(7): a, c, u, g, unknown or other
auagugnucccugaugucc

SEQ ID NO: 258835 - RNA, 19 nt, Artificial Sequence
  Description of Artificial Sequence: Synthetic oligonucleotide
uuuauuccugucuugaugu

SEQ ID NO: 258836 - RNA, 19 nt, Artificial Sequence
  Description of Artificial Sequence: Synthetic oligonucleotide
aauggggugaagcaaggag

SEQ ID NO: 258837 - RNA, 19 nt, Artificial Sequence
  Description of Artificial Sequence: Synthetic oligonucleotide
gagucuacgucuuuguagg

SEQ ID NO: 258838 - RNA, 19 nt, Artificial Sequence
  Description of Artificial Sequence: Synthetic oligonucleotide
aauggguuacauugccacc

SEQ ID NO: 258839 - RNA, 19 nt, Artificial Sequence
  Description of Artificial Sequence: Synthetic oligonucleotide
aaacccucgacagaugggc

SEQ ID NO: 258840 - RNA, 19 nt, Artificial Sequence
  Description of Artificial Sequence: Synthetic oligonucleotide
uuuuauuccugucuugaug

SEQ ID NO: 258841 - RNA, 19 nt, Artificial Sequence
  Description of Artificial Sequence: Synthetic oligonucleotide
ugaacauaaggaauggggu

SEQ ID NO: 258842 - RNA, 19 nt, Artificial Sequence
  Description of Artificial Sequence: Synthetic oligonucleotide
ugagauauccauauuuagu

SEQ ID NO: 258843 - RNA, 19 nt, Artificial Sequence
  Description of Artificial Sequence: Synthetic oligonucleotide
caucuuucgcaguagaagg

SEQ ID NO: 258844 - RNA, 19 nt, Artificial Sequence
  Description of Artificial Sequence: Synthetic oligonucleotide
  modified_base (9)..(9): a, c, u, g, unknown or other
ucauagugnucccugaugu

SEQ ID NO: 258845 - RNA, 19 nt, Artificial Sequence
  Description of Artificial Sequence: Synthetic oligonucleotide
uuaucauccacucaugauu

SEQ ID NO: 258846 - RNA, 19 nt, Artificial Sequence
  Description of Artificial Sequence: Synthetic oligonucleotide
aaucucgccagucaguagu

SEQ ID NO: 258847 - RNA, 19 nt, Artificial Sequence
  Description of Artificial Sequence: Synthetic oligonucleotide
agggguuacaauaugauag

SEQ ID NO: 258848 - RNA, 19 nt, Artificial Sequence
  Description of Artificial Sequence: Synthetic oligonucleotide
uuuuauaccuuuaaaccuu

SEQ ID NO: 258849 - RNA, 19 nt, Artificial Sequence
  Description of Artificial Sequence: Synthetic oligonucleotide
acguuucugacuucgaguc

SEQ ID NO: 258850 - RNA, 19 nt, Artificial Sequence
  Description of Artificial Sequence: Synthetic oligonucleotide
uuuaggguuagacagugua

SEQ ID NO: 258851 - RNA, 19 nt, Artificial Sequence
  Description of Artificial Sequence: Synthetic oligonucleotide
uguaguaauaucugucgga

SEQ ID NO: 258852 - RNA, 19 nt, Artificial Sequence
  Description of Artificial Sequence: Synthetic oligonucleotide
ucuuaaguggauccucucc

SEQ ID NO: 258853 - RNA, 19 nt, Artificial Sequence
  Description of Artificial Sequence: Synthetic oligonucleotide
ugcugauagaagaucuggg

SEQ ID NO: 258854 - RNA, 19 nt, Artificial Sequence
  Description of Artificial Sequence: Synthetic oligonucleotide
ugggacuuaaaguaagucu

SEQ ID NO: 258855 - RNA, 19 nt, Artificial Sequence
  Description of Artificial Sequence: Synthetic oligonucleotide
uuaggguuagacaguguag

SEQ ID NO: 258856 - RNA, 19 nt, Artificial Sequence
  Description of Artificial Sequence: Synthetic oligonucleotide
ugaggcgauauccaggugu

SEQ ID NO: 258857 - RNA, 19 nt, Artificial Sequence
  Description of Artificial Sequence: Synthetic oligonucleotide
aggaguaucgcccuggggu

SEQ ID NO: 258858 - RNA, 19 nt, Artificial Sequence
  Description of Artificial Sequence: Synthetic oligonucleotide
aauagaauuaagguauuuu

SEQ ID NO: 258859 - RNA, 19 nt, Artificial Sequence
  Description of Artificial Sequence: Synthetic oligonucleotide
aguuugacuucuucccgcc

SEQ ID NO: 258860 - RNA, 19 nt, Artificial Sequence
  Description of Artificial Sequence: Synthetic oligonucleotide
gguuugaauagaauuaagg

SEQ ID NO: 258861 - RNA, 19 nt, Artificial Sequence
  Description of Artificial Sequence: Synthetic oligonucleotide
uaacaguagggacuuaaac

SEQ ID NO: 258862 - RNA, 19 nt, Artificial Sequence
  Description of Artificial Sequence: Synthetic oligonucleotide
gguccuucgauucugaagc

SEQ ID NO: 258863 - RNA, 19 nt, Artificial Sequence
  Description of Artificial Sequence: Synthetic oligonucleotide
aguaaacggaaaauaaaag

SEQ ID NO: 258864 - RNA, 19 nt, Artificial Sequence
  Description of Artificial Sequence: Synthetic oligonucleotide
agaauuaagguauuuucuu

SEQ ID NO: 258865 - RNA, 19 nt, Artificial Sequence
  Description of Artificial Sequence: Synthetic oligonucleotide
gguuagacaguguagagac

SEQ ID NO: 258866 - RNA, 19 nt, Artificial Sequence
  Description of Artificial Sequence: Synthetic oligonucleotide
  modified_base (3)..(3): a, c, u, g, unknown or other
ugnucccugauguccaggg

SEQ ID NO: 258867 - RNA, 19 nt, Artificial Sequence
  Description of Artificial Sequence: Synthetic oligonucleotide
ugaucccucacuuggagga

SEQ ID NO: 258868 - RNA, 19 nt, Artificial Sequence
  Description of Artificial Sequence: Synthetic oligonucleotide
cuuccuacaccccagauga

SEQ ID NO: 258869 - RNA, 19 nt, Artificial Sequence
  Description of Artificial Sequence: Synthetic oligonucleotide
aacggaaaauaaaagugca

SEQ ID NO: 258870 - RNA, 19 nt, Artificial Sequence
  Description of Artificial Sequence: Synthetic oligonucleotide
gaguuguccaauucagugc

SEQ ID NO: 258871 - RNA, 19 nt, Artificial Sequence
  Description of Artificial Sequence: Synthetic oligonucleotide
cugacuucgagucacagca

SEQ ID NO: 258872 - RNA, 19 nt, Artificial Sequence
  Description of Artificial Sequence: Synthetic oligonucleotide
augaugggcgguuucgugg

SEQ ID NO: 258873 - RNA, 19 nt, Artificial Sequence
  Description of Artificial Sequence: Synthetic oligonucleotide
uaggguguuacuuggaauc

SEQ ID NO: 258874 - RNA, 19 nt, Artificial Sequence
  Description of Artificial Sequence: Synthetic oligonucleotide
  modified_base (3)..(3): a, c, u, g, unknown or other
cunagcuccucccucuucg

SEQ ID NO: 258875 - RNA, 19 nt, Artificial Sequence
  Description of Artificial Sequence: Synthetic oligonucleotide
agcacaugucaucagaccu

SEQ ID NO: 258876 - RNA, 19 nt, Artificial Sequence
  Description of Artificial Sequence: Synthetic oligonucleotide
uuuccucguagcucuaggg

SEQ ID NO: 258877 - RNA, 19 nt, Artificial Sequence
  Description of Artificial Sequence: Synthetic oligonucleotide
uucagaugagauaccacgu

SEQ ID NO: 258878 - RNA, 19 nt, Artificial Sequence
  Description of Artificial Sequence: Synthetic oligonucleotide
uuuuaauucaaagcguuuu

SEQ ID NO: 258879 - RNA, 19 nt, Artificial Sequence
  Description of Artificial Sequence: Synthetic oligonucleotide
uacauugccaccugagaga

SEQ ID NO: 258880 - RNA, 19 nt, Artificial Sequence
  Description of Artificial Sequence: Synthetic oligonucleotide
cugagauauccauauuuag

SEQ ID NO: 258881 - RNA, 19 nt, Artificial Sequence
  Description of Artificial Sequence: Synthetic oligonucleotide
acaauaugauaguccccgc

SEQ ID NO: 258882 - RNA, 19 nt, Artificial Sequence
  Description of Artificial Sequence: Synthetic oligonucleotide
guguaguaauaucugucgg

SEQ ID NO: 258883 - RNA, 19 nt, Artificial Sequence
  Description of Artificial Sequence: Synthetic oligonucleotide
uguugcucgaagcccaggc

SEQ ID NO: 258884 - RNA, 19 nt, Artificial Sequence
  Description of Artificial Sequence: Synthetic oligonucleotide
uuuaucauccacucaugau

SEQ ID NO: 258885 - RNA, 19 nt, Artificial Sequence
  Description of Artificial Sequence: Synthetic oligonucleotide
ugaaggacccacuccuagg

SEQ ID NO: 258886 - RNA, 19 nt, Artificial Sequence
  Description of Artificial Sequence: Synthetic oligonucleotide
cauguucgggcccugaggc

SEQ ID NO: 258887 - RNA, 19 nt, Artificial Sequence
  Description of Artificial Sequence: Synthetic oligonucleotide
uuuauaccuuuaaaccuuc

SEQ ID NO: 258888 - RNA, 19 nt, Artificial Sequence
  Description of Artificial Sequence: Synthetic oligonucleotide
uuaagguauuuucuuccgu

SEQ ID NO: 258889 - RNA, 19 nt, Artificial Sequence
  Description of Artificial Sequence: Synthetic oligonucleotide
uccuaguccuccagguucg

SEQ ID NO: 258890 - RNA, 19 nt, Artificial Sequence
  Description of Artificial Sequence: Synthetic oligonucleotide
agcaguuaugcugagauau

SEQ ID NO: 258891 - RNA, 19 nt, Artificial Sequence
  Description of Artificial Sequence: Synthetic oligonucleotide
caguguagagacaagccug

SEQ ID NO: 258892 - RNA, 19 nt, Artificial Sequence
  Description of Artificial Sequence: Synthetic oligonucleotide
uguuuaggguuagacagug

SEQ ID NO: 258893 - RNA, 19 nt, Artificial Sequence
  Description of Artificial Sequence: Synthetic oligonucleotide
aguagggacuuaaacacag

SEQ ID NO: 258894 - RNA, 19 nt, Artificial Sequence
  Description of Artificial Sequence: Synthetic oligonucleotide
uucuguaaugucaggaauu

SEQ ID NO: 258895 - RNA, 19 nt, Artificial Sequence
  Description of Artificial Sequence: Synthetic oligonucleotide
ggaguuguccaauucagug

SEQ ID NO: 258896 - RNA, 19 nt, Artificial Sequence
  Description of Artificial Sequence: Synthetic oligonucleotide
ucgcaguagaaggucaugg

SEQ ID NO: 258897 - RNA, 19 nt, Artificial Sequence
  Description of Artificial Sequence: Synthetic oligonucleotide
ucuacgucuuuguagggaa

SEQ ID NO: 258898 - RNA, 19 nt, Artificial Sequence
  Description of Artificial Sequence: Synthetic oligonucleotide
agggcguucaguuccaugu

SEQ ID NO: 258899 - RNA, 19 nt, Artificial Sequence
  Description of Artificial Sequence: Synthetic oligonucleotide
agaguggaauauuaauaca

SEQ ID NO: 258900 - RNA, 19 nt, Artificial Sequence
  Description of Artificial Sequence: Synthetic oligonucleotide
ucuguugauuauguggcgc

SEQ ID NO: 258901 - RNA, 19 nt, Artificial Sequence
  Description of Artificial Sequence: Synthetic oligonucleotide
uuguagggaaucucgccag

SEQ ID NO: 258902 - RNA, 19 nt, Artificial Sequence
  Description of Artificial Sequence: Synthetic oligonucleotide
cuuaaacacagcaccccag

SEQ ID NO: 258903 - RNA, 19 nt, Artificial Sequence
  Description of Artificial Sequence: Synthetic oligonucleotide
uucuaggcggugcagacau

SEQ ID NO: 258904 - RNA, 19 nt, Artificial Sequence
  Description of Artificial Sequence: Synthetic oligonucleotide
uaggguuagacaguguaga

SEQ ID NO: 258905 - RNA, 19 nt, Artificial Sequence
  Description of Artificial Sequence: Synthetic oligonucleotide
gugacugucgcauguucgg

SEQ ID NO: 258906 - RNA, 19 nt, Artificial Sequence
  Description of Artificial Sequence: Synthetic oligonucleotide
aguucuguaaugucaggaa

SEQ ID NO: 258907 - RNA, 19 nt, Artificial Sequence
  Description of Artificial Sequence: Synthetic oligonucleotide
ucuaggguguuacuuggaa

SEQ ID NO: 258908 - RNA, 19 nt, Artificial Sequence
  Description of Artificial Sequence: Synthetic oligonucleotide
aggacccagccuuaguuuc

SEQ ID NO: 258909 - RNA, 19 nt, Artificial Sequence
  Description of Artificial Sequence: Synthetic oligonucleotide
gacuucgagucacagcagc

SEQ ID NO: 258910 - RNA, 19 nt, Artificial Sequence
  Description of Artificial Sequence: Synthetic oligonucleotide
uagauagugacugucgcau

SEQ ID NO: 258911 - RNA, 19 nt, Artificial Sequence
  Description of Artificial Sequence: Synthetic oligonucleotide
agaugagauaccacguuuc

SEQ ID NO: 258912 - RNA, 19 nt, Artificial Sequence
  Description of Artificial Sequence: Synthetic oligonucleotide
caauucagugcugucacag

SEQ ID NO: 258913 - RNA, 19 nt, Artificial Sequence
  Description of Artificial Sequence: Synthetic oligonucleotide
ugguuucagggucagggac

SEQ ID NO: 258914 - RNA, 19 nt, Artificial Sequence
  Description of Artificial Sequence: Synthetic oligonucleotide
gguuacaauaugauagucc

SEQ ID NO: 258915 - RNA, 19 nt, Artificial Sequence
  Description of Artificial Sequence: Synthetic oligonucleotide
aaaacccucgacagauggg

SEQ ID NO: 258916 - RNA, 19 nt, Artificial Sequence
  Description of Artificial Sequence: Synthetic oligonucleotide
gauaccacguuucugacuu

SEQ ID NO: 258917 - RNA, 19 nt, Artificial Sequence
  Description of Artificial Sequence: Synthetic oligonucleotide
uggcgcauauauauuauuu

SEQ ID NO: 258918 - RNA, 19 nt, Artificial Sequence
  Description of Artificial Sequence: Synthetic oligonucleotide
cacgagggcguucaguucc

SEQ ID NO: 258919 - RNA, 19 nt, Artificial Sequence
  Description of Artificial Sequence: Synthetic oligonucleotide
ggugguuccccuuuggccc

SEQ ID NO: 258920 - RNA, 19 nt, Artificial Sequence
  Description of Artificial Sequence: Synthetic oligonucleotide
uucccuuccaguucccagc

SEQ ID NO: 258921 - RNA, 19 nt, Artificial Sequence
  Description of Artificial Sequence: Synthetic oligonucleotide
agggaaucucgccagucag

SEQ ID NO: 258922 - RNA, 19 nt, Artificial Sequence
  Description of Artificial Sequence: Synthetic oligonucleotide
gauggguucucugagcuga

SEQ ID NO: 258923 - RNA, 19 nt, Artificial Sequence
  Description of Artificial Sequence: Synthetic oligonucleotide
  modified_base (6)..(6): a, c, u, g, unknown or other
uagugnucccugaugucca

SEQ ID NO: 258924 - RNA, 19 nt, Artificial Sequence
  Description of Artificial Sequence: Synthetic oligonucleotide
gaugacaucuuucgcagua

SEQ ID NO: 258925 - RNA, 19 nt, Artificial Sequence
  Description of Artificial Sequence: Synthetic oligonucleotide
  modified_base (7)..(7): a, c, u, g, unknown or other
augccunagcuccucccuc

SEQ ID NO: 258926 - RNA, 19 nt, Artificial Sequence
  Description of Artificial Sequence: Synthetic oligonucleotide
uuccucguagcucuagggu

SEQ ID NO: 258927 - RNA, 19 nt, Artificial Sequence
  Description of Artificial Sequence: Synthetic oligonucleotide
gacuguugcuuccuacacc

SEQ ID NO: 258928 - RNA, 19 nt, Artificial Sequence
  Description of Artificial Sequence: Synthetic oligonucleotide
ucggugacgggucuugcca

SEQ ID NO: 258929 - RNA, 19 nt, Artificial Sequence
  Description of Artificial Sequence: Synthetic oligonucleotide
uguaaauuuucaguuucua

SEQ ID NO: 258930 - RNA, 19 nt, Artificial Sequence
  Description of Artificial Sequence: Synthetic oligonucleotide
agugacugucgcauguucg

SEQ ID NO: 258931 - RNA, 19 nt, Artificial Sequence
  Description of Artificial Sequence: Synthetic oligonucleotide
aggauuggggcccuguccu

SEQ ID NO: 258932 - RNA, 19 nt, Artificial Sequence
  Description of Artificial Sequence: Synthetic oligonucleotide
ucaucagaccuuucaucug

SEQ ID NO: 258933 - RNA, 19 nt, Artificial Sequence
  Description of Artificial Sequence: Synthetic oligonucleotide
agcgauuccagguuuuaaa

SEQ ID NO: 258934 - RNA, 19 nt, Artificial Sequence
  Description of Artificial Sequence: Synthetic oligonucleotide
agcaccccaguuuucagcu

SEQ ID NO: 258935 - RNA, 19 nt, Artificial Sequence
  Description of Artificial Sequence: Synthetic oligonucleotide
auaugauaguccccgcccu

SEQ ID NO: 258936 - RNA, 19 nt, Artificial Sequence
  Description of Artificial Sequence: Synthetic oligonucleotide
uggcgaaggagaauuuuaa

SEQ ID NO: 258937 - RNA, 19 nt, Artificial Sequence
  Description of Artificial Sequence: Synthetic oligonucleotide
gguagauagugacugucgc

SEQ ID NO: 258938 - RNA, 19 nt, Artificial Sequence
  Description of Artificial Sequence: Synthetic oligonucleotide
uuauaccuuuaaaccuuca

SEQ ID NO: 258939 - RNA, 19 nt, Artificial Sequence
  Description of Artificial Sequence: Synthetic oligonucleotide
guguugaaugggcaaggag

SEQ ID NO: 258940 - RNA, 19 nt, Artificial Sequence
  Description of Artificial Sequence: Synthetic oligonucleotide
ugguguugaaugggcaagg

SEQ ID NO: 258941 - RNA, 19 nt, Artificial Sequence
  Description of Artificial Sequence: Synthetic oligonucleotide
agguagauagugacugucg

SEQ ID NO: 258942 - RNA, 19 nt, Artificial Sequence
  Description of Artificial Sequence: Synthetic oligonucleotide
gacgggucuugccacgagg

SEQ ID NO: 258943 - RNA, 19 nt, Artificial Sequence
  Description of Artificial Sequence: Synthetic oligonucleotide
gaauagaaacuggauggca

SEQ ID NO: 258944 - RNA, 19 nt, Artificial Sequence
  Description of Artificial Sequence: Synthetic oligonucleotide
uccagugggauuucugauc

SEQ ID NO: 258945 - RNA, 19 nt, Artificial Sequence
  Description of Artificial Sequence: Synthetic oligonucleotide
uguggcgcauauauauuau

SEQ ID NO: 258946 - RNA, 19 nt, Artificial Sequence
  Description of Artificial Sequence: Synthetic oligonucleotide
ccagcuuccgcucauagug

SEQ ID NO: 258947 - RNA, 19 nt, Artificial Sequence
  Description of Artificial Sequence: Synthetic oligonucleotide
gggacuuaaaguaagucuc

SEQ ID NO: 258948 - RNA, 19 nt, Artificial Sequence
  Description of Artificial Sequence: Synthetic oligonucleotide
uccuacaccccagaugaug

SEQ ID NO: 258949 - RNA, 19 nt, Artificial Sequence
  Description of Artificial Sequence: Synthetic oligonucleotide
ucguggggcggcaauguug

SEQ ID NO: 258950 - RNA, 19 nt, Artificial Sequence
  Description of Artificial Sequence: Synthetic oligonucleotide
uggaaauguaagaguggaa

SEQ ID NO: 258951 - RNA, 19 nt, Artificial Sequence
  Description of Artificial Sequence: Synthetic oligonucleotide
uggaguuguccaauucagu

SEQ ID NO: 258952 - RNA, 19 nt, Artificial Sequence
  Description of Artificial Sequence: Synthetic oligonucleotide
uuccguuuuaccacuccau

SEQ ID NO: 258953 - RNA, 19 nt, Artificial Sequence
  Description of Artificial Sequence: Synthetic oligonucleotide
aacccucgacagaugggcc

SEQ ID NO: 258954 - RNA, 19 nt, Artificial Sequence
  Description of Artificial Sequence: Synthetic oligonucleotide
guaguaauaucugucggaa

SEQ ID NO: 258955 - RNA, 19 nt, Artificial Sequence
  Description of Artificial Sequence: Synthetic oligonucleotide
uuaguuuuauaagcuucuc

SEQ ID NO: 258956 - RNA, 19 nt, Artificial Sequence
  Description of Artificial Sequence: Synthetic oligonucleotide
ccuacaccccagaugaugg

SEQ ID NO: 258957 - RNA, 19 nt, Artificial Sequence
  Description of Artificial Sequence: Synthetic oligonucleotide
gaguccacggagagcaggg

SEQ ID NO: 258958 - RNA, 19 nt, Artificial Sequence
  Description of Artificial Sequence: Synthetic oligonucleotide
auguggcgcauauauauua

SEQ ID NO: 258959 - RNA, 19 nt, Artificial Sequence
  Description of Artificial Sequence: Synthetic oligonucleotide
auccgauggguucucugag

SEQ ID NO: 258960 - RNA, 19 nt, Artificial Sequence
  Description of Artificial Sequence: Synthetic oligonucleotide
acggaaaauaaaagugcag

SEQ ID NO: 258961 - RNA, 19 nt, Artificial Sequence
  Description of Artificial Sequence: Synthetic oligonucleotide
uauguggcgcauauauauu

SEQ ID NO: 258962 - RNA, 19 nt, Artificial Sequence
  Description of Artificial Sequence: Synthetic oligonucleotide
agucuacgucuuuguaggg

SEQ ID NO: 258963 - RNA, 19 nt, Artificial Sequence
  Description of Artificial Sequence: Synthetic oligonucleotide
ucuuucgcaguagaagguc

SEQ ID NO: 258964 - RNA, 19 nt, Artificial Sequence
  Description of Artificial Sequence: Synthetic oligonucleotide
guaauaucugucggaauga

SEQ ID NO: 258965 - RNA, 19 nt, Artificial Sequence
  Description of Artificial Sequence: Synthetic oligonucleotide
ugauccaucuguguaguuu

SEQ ID NO: 258966 - RNA, 19 nt, Artificial Sequence
  Description of Artificial Sequence: Synthetic oligonucleotide
caagcugaaggacccacuc

SEQ ID NO: 258967 - RNA, 19 nt, Artificial Sequence
  Description of Artificial Sequence: Synthetic oligonucleotide
ugaugggcgguuucguggu

SEQ ID NO: 258968 - RNA, 19 nt, Artificial Sequence
  Description of Artificial Sequence: Synthetic oligonucleotide
ugacugucgcauguucggg

SEQ ID NO: 258969 - RNA, 19 nt, Artificial Sequence
  Description of Artificial Sequence: Synthetic oligonucleotide
caauguugcucgaagccca

SEQ ID NO: 258970 - RNA, 19 nt, Artificial Sequence
  Description of Artificial Sequence: Synthetic oligonucleotide
ggggcggcaauguugcucg

SEQ ID NO: 258971 - RNA, 19 nt, Artificial Sequence
  Description of Artificial Sequence: Synthetic oligonucleotide
aggagaauuuuaaagccau

SEQ ID NO: 258972 - RNA, 19 nt, Artificial Sequence
  Description of Artificial Sequence: Synthetic oligonucleotide
uguucgggcccugaggcca

SEQ ID NO: 258973 - RNA, 19 nt, Artificial Sequence
  Description of Artificial Sequence: Synthetic oligonucleotide
ugauaguccccgcccuacc

SEQ ID NO: 258974 - RNA, 19 nt, Artificial Sequence
  Description of Artificial Sequence: Synthetic oligonucleotide
aagaucuggggaugaugau

SEQ ID NO: 258975 - RNA, 19 nt, Artificial Sequence
  Description of Artificial Sequence: Synthetic oligonucleotide
gagagcacauccgcugagg

SEQ ID NO: 258976 - RNA, 19 nt, Artificial Sequence
  Description of Artificial Sequence: Synthetic oligonucleotide
gaaucucgccagucaguag

SEQ ID NO: 258977 - RNA, 19 nt, Artificial Sequence
  Description of Artificial Sequence: Synthetic oligonucleotide
cuauugccuaguugccugc

SEQ ID NO: 258978 - RNA, 19 nt, Artificial Sequence
  Description of Artificial Sequence: Synthetic oligonucleotide
agauagugacugucgcaug

SEQ ID NO: 258979 - RNA, 19 nt, Artificial Sequence
  Description of Artificial Sequence: Synthetic oligonucleotide
ccagugggauuucugaucc

SEQ ID NO: 258980 - RNA, 19 nt, Artificial Sequence
  Description of Artificial Sequence: Synthetic oligonucleotide
gaggaguaucgcccugggg

SEQ ID NO: 258981 - RNA, 19 nt, Artificial Sequence
  Description of Artificial Sequence: Synthetic oligonucleotide
caguguuuaggguuagaca

SEQ ID NO: 258982 - RNA, 19 nt, Artificial Sequence
  Description of Artificial Sequence: Synthetic oligonucleotide
uggguuacauugccaccug

SEQ ID NO: 258983 - RNA, 19 nt, Artificial Sequence
  Description of Artificial Sequence: Synthetic oligonucleotide
caggauuggggcccugucc

SEQ ID NO: 258984 - RNA, 19 nt, Artificial Sequence
  Description of Artificial Sequence: Synthetic oligonucleotide
gaugagauaccacguuucu

SEQ ID NO: 258985 - RNA, 19 nt, Artificial Sequence
  Description of Artificial Sequence: Synthetic oligonucleotide
  modified_base (8)..(8): a, c, u, g, unknown or other
cauagugnucccugauguc

SEQ ID NO: 258986 - RNA, 19 nt, Artificial Sequence
  Description of Artificial Sequence: Synthetic oligonucleotide
agcccuguacagcagugca

SEQ ID NO: 258987 - RNA, 19 nt, Artificial Sequence
  Description of Artificial Sequence: Synthetic oligonucleotide
aauguugcucgaagcccag

SEQ ID NO: 258988 - RNA, 19 nt, Artificial Sequence
  Description of Artificial Sequence: Synthetic oligonucleotide
uucggugacgggucuugcc

SEQ ID NO: 258989 - RNA, 19 nt, Artificial Sequence
  Description of Artificial Sequence: Synthetic oligonucleotide
ucgugguuugcuguuccag

SEQ ID NO: 258990 - RNA, 19 nt, Artificial Sequence
  Description of Artificial Sequence: Synthetic oligonucleotide
uaugauaguccccgcccua

SEQ ID NO: 258991 - RNA, 19 nt, Artificial Sequence
  Description of Artificial Sequence: Synthetic oligonucleotide
uggccuuucggugacgggu

SEQ ID NO: 258992 - RNA, 19 nt, Artificial Sequence
  Description of Artificial Sequence: Synthetic oligonucleotide
  modified_base (5)..(5): a, c, u, g, unknown or other
agugnucccugauguccag

SEQ ID NO: 258993 - RNA, 19 nt, Artificial Sequence
  Description of Artificial Sequence: Synthetic oligonucleotide
cacagggguuacaauauga

SEQ ID NO: 258994 - RNA, 19 nt, Artificial Sequence
  Description of Artificial Sequence: Synthetic oligonucleotide
uaguaauaucugucggaau

SEQ ID NO: 258995 - RNA, 19 nt, Artificial Sequence
  Description of Artificial Sequence: Synthetic oligonucleotide
uacgucuuuguagggaauc

SEQ ID NO: 258996 - RNA, 19 nt, Artificial Sequence
  Description of Artificial Sequence: Synthetic oligonucleotide
uuucugacuucgagucaca

SEQ ID NO: 258997 - RNA, 19 nt, Artificial Sequence
  Description of Artificial Sequence: Synthetic oligonucleotide
ccaugauccaucuguguag

SEQ ID NO: 258998 - RNA, 19 nt, Artificial Sequence
  Description of Artificial Sequence: Synthetic oligonucleotide
  modified_base (2)..(2): a, c, u, g, unknown or other
unagcuccucccucuucgc

SEQ ID NO: 258999 - RNA, 19 nt, Artificial Sequence
  Description of Artificial Sequence: Synthetic oligonucleotide
cuguugauuauguggcgca

SEQ ID NO: 259000 - RNA, 19 nt, Artificial Sequence
  Description of Artificial Sequence: Synthetic oligonucleotide
cuuaaguggauccucuccu

SEQ ID NO: 259001 - RNA, 19 nt, Artificial Sequence
  Description of Artificial Sequence: Synthetic oligonucleotide
cugucggaaugaugggcgg

SEQ ID NO: 259002 - RNA, 19 nt, Artificial Sequence
  Description of Artificial Sequence: Synthetic oligonucleotide
cuuucgcaguagaagguca

SEQ ID NO: 259003 - RNA, 19 nt, Artificial Sequence
  Description of Artificial Sequence: Synthetic oligonucleotide
acauccgauggguucucug

SEQ ID NO: 259004 - RNA, 19 nt, Artificial Sequence
  Description of Artificial Sequence: Synthetic oligonucleotide
augagauaccacguuucug

SEQ ID NO: 259005 - RNA, 19 nt, Artificial Sequence
  Description of Artificial Sequence: Synthetic oligonucleotide
auugccuaguugccugcug

SEQ ID NO: 259006 - RNA, 19 nt, Artificial Sequence
  Description of Artificial Sequence: Synthetic oligonucleotide
uaauaucugucggaaugau

SEQ ID NO: 259007 - RNA, 19 nt, Artificial Sequence
  Description of Artificial Sequence: Synthetic oligonucleotide
uaguuucccuccucccaag

SEQ ID NO: 259008 - RNA, 19 nt, Artificial Sequence
  Description of Artificial Sequence: Synthetic oligonucleotide
gcuagagcagugcagguuc

SEQ ID NO: 259009 - RNA, 19 nt, Artificial Sequence
  Description of Artificial Sequence: Synthetic oligonucleotide
ucgagucacagcagcccug

SEQ ID NO: 259010 - RNA, 19 nt, Artificial Sequence
  Description of Artificial Sequence: Synthetic oligonucleotide
auagaagaucuggggauga

SEQ ID NO: 259011 - RNA, 19 nt, Artificial Sequence
  Description of Artificial Sequence: Synthetic oligonucleotide
  modified_base (6)..(6): a, c, u, g, unknown or other
ugccunagcuccucccucu

SEQ ID NO: 259012 - RNA, 19 nt, Artificial Sequence
  Description of Artificial Sequence: Synthetic oligonucleotide
cuuaagaaagccccaucua

SEQ ID NO: 259013 - RNA, 19 nt, Artificial Sequence
  Description of Artificial Sequence: Synthetic oligonucleotide
uacaccccagaugauggcu

SEQ ID NO: 259014 - RNA, 19 nt, Artificial Sequence
  Description of Artificial Sequence: Synthetic oligonucleotide
ucugaucccugggagcaca

SEQ ID NO: 259015 - RNA, 19 nt, Artificial Sequence
  Description of Artificial Sequence: Synthetic oligonucleotide
cauccgauggguucucuga

SEQ ID NO: 259016 - RNA, 19 nt, Artificial Sequence
  Description of Artificial Sequence: Synthetic oligonucleotide
ggguccuucgauucugaag

SEQ ID NO: 259017 - RNA, 19 nt, Artificial Sequence
  Description of Artificial Sequence: Synthetic oligonucleotide
uaccgcugggagaaggcuc

SEQ ID NO: 259018 - RNA, 19 nt, Artificial Sequence
  Description of Artificial Sequence: Synthetic oligonucleotide
guguuacuuggaaucauuc

SEQ ID NO: 259019 - RNA, 19 nt, Artificial Sequence
  Description of Artificial Sequence: Synthetic oligonucleotide
caguuuccuuuccucguag

SEQ ID NO: 259020 - RNA, 19 nt, Artificial Sequence
  Description of Artificial Sequence: Synthetic oligonucleotide
cguucaucaguguugguac

SEQ ID NO: 259021 - RNA, 19 nt, Artificial Sequence
  Description of Artificial Sequence: Synthetic oligonucleotide
ggacuuaaaguaagucucc

SEQ ID NO: 259022 - RNA, 19 nt, Artificial Sequence
  Description of Artificial Sequence: Synthetic oligonucleotide
ugggagcacaugucaucag

SEQ ID NO: 259023 - RNA, 19 nt, Artificial Sequence
  Description of Artificial Sequence: Synthetic oligonucleotide
gcaauguugcucgaagccc

SEQ ID NO: 259024 - RNA, 19 nt, Artificial Sequence
  Description of Artificial Sequence: Synthetic oligonucleotide
cuacaccccagaugauggc

SEQ ID NO: 259025 - RNA, 19 nt, Artificial Sequence
  Description of Artificial Sequence: Synthetic oligonucleotide
gggucuugccacgagggcg

SEQ ID NO: 259026 - RNA, 19 nt, Artificial Sequence
  Description of Artificial Sequence: Synthetic oligonucleotide
acagggguuacaauaugau

SEQ ID NO: 259027 - RNA, 19 nt, Artificial Sequence
  Description of Artificial Sequence: Synthetic oligonucleotide
uucgugguuugcuguucca

SEQ ID NO: 259028 - RNA, 19 nt, Artificial Sequence
  Description of Artificial Sequence: Synthetic oligonucleotide
ccuucgauucugaagccug

SEQ ID NO: 259029 - RNA, 19 nt, Artificial Sequence
  Description of Artificial Sequence: Synthetic oligonucleotide
caggguaacaguagggacu

SEQ ID NO: 259030 - RNA, 19 nt, Artificial Sequence
  Description of Artificial Sequence: Synthetic oligonucleotide
gagggcguucaguuccaug

SEQ ID NO: 259031 - RNA, 19 nt, Artificial Sequence
  Description of Artificial Sequence: Synthetic oligonucleotide
aggguguuacuuggaauca

SEQ ID NO: 259032 - RNA, 19 nt, Artificial Sequence
  Description of Artificial Sequence: Synthetic oligonucleotide
acccucgacagaugggccu

SEQ ID NO: 259033 - RNA, 19 nt, Artificial Sequence
  Description of Artificial Sequence: Synthetic oligonucleotide
gcugaucccucacuuggag

SEQ ID NO: 259034 - RNA, 19 nt, Artificial Sequence
  Description of Artificial Sequence: Synthetic oligonucleotide
ugacgggucuugccacgag

SEQ ID NO: 259035 - RNA, 19 nt, Artificial Sequence
  Description of Artificial Sequence: Synthetic oligonucleotide
aucuuucgcaguagaaggu

SEQ ID NO: 259036 - RNA, 19 nt, Artificial Sequence
  Description of Artificial Sequence: Synthetic oligonucleotide
uguugauuauguggcgcau

SEQ ID NO: 259037 - RNA, 19 nt, Artificial Sequence
  Description of Artificial Sequence: Synthetic oligonucleotide
cuuucggugacgggucuug

SEQ ID NO: 259038 - RNA, 19 nt, Artificial Sequence
  Description of Artificial Sequence: Synthetic oligonucleotide
acccaugauccaucugugu

SEQ ID NO: 259039 - RNA, 19 nt, Artificial Sequence
  Description of Artificial Sequence: Synthetic oligonucleotide
guguaccgcugggagaagg

SEQ ID NO: 259040 - RNA, 19 nt, Artificial Sequence
  Description of Artificial Sequence: Synthetic oligonucleotide
auaccacguuucugacuuc

SEQ ID NO: 259041 - RNA, 19 nt, Artificial Sequence
  Description of Artificial Sequence: Synthetic oligonucleotide
agucagcgauuccagguuu

SEQ ID NO: 259042 - RNA, 19 nt, Artificial Sequence
  Description of Artificial Sequence: Synthetic oligonucleotide
ugggcgguuucgugguuug

SEQ ID NO: 259043 - RNA, 19 nt, Artificial Sequence
  Description of Artificial Sequence: Synthetic oligonucleotide
gaucccucacuuggaggag

SEQ ID NO: 259044 - RNA, 19 nt, Artificial Sequence
  Description of Artificial Sequence: Synthetic oligonucleotide
gccuuaguuucccuccucc

SEQ ID NO: 259045 - RNA, 19 nt, Artificial Sequence
  Description of Artificial Sequence: Synthetic oligonucleotide
ggcgcauauauauuauuua

SEQ ID NO: 259046 - RNA, 19 nt, Artificial Sequence
  Description of Artificial Sequence: Synthetic oligonucleotide
caguagggacuuaaacaca

SEQ ID NO: 259047 - RNA, 19 nt, Artificial Sequence
  Description of Artificial Sequence: Synthetic oligonucleotide
ggugacgggucuugccacg

SEQ ID NO: 259048 - RNA, 19 nt, Artificial Sequence
  Description of Artificial Sequence: Synthetic oligonucleotide
cuucgauucugaagccuga

SEQ ID NO: 259049 - RNA, 19 nt, Artificial Sequence
  Description of Artificial Sequence: Synthetic oligonucleotide
uagcuguaccuuccuccac

SEQ ID NO: 259050 - RNA, 19 nt, Artificial Sequence
  Description of Artificial Sequence: Synthetic oligonucleotide
uaucgcccugggguggagg

SEQ ID NO: 259051 - RNA, 19 nt, Artificial Sequence
  Description of Artificial Sequence: Synthetic oligonucleotide
ggccguucaucaguguugg

SEQ ID NO: 259052 - RNA, 19 nt, Artificial Sequence
  Description of Artificial Sequence: Synthetic oligonucleotide
ggaggaguaucgcccuggg

SEQ ID NO: 259053 - RNA, 19 nt, Artificial Sequence
  Description of Artificial Sequence: Synthetic oligonucleotide
aguugccugcugaacauaa

SEQ ID NO: 259054 - RNA, 19 nt, Artificial Sequence
  Description of Artificial Sequence: Synthetic oligonucleotide
ugccuaguugccugcugaa

SEQ ID NO: 259055 - RNA, 19 nt, Artificial Sequence
  Description of Artificial Sequence: Synthetic oligonucleotide
ugcauggagugguuauauu

SEQ ID NO: 259056 - RNA, 19 nt, Artificial Sequence
  Description of Artificial Sequence: Synthetic oligonucleotide
auuauguggcgcauauaua

SEQ ID NO: 259057 - RNA, 19 nt, Artificial Sequence
  Description of Artificial Sequence: Synthetic oligonucleotide
agugacuuauguggguuuu

SEQ ID NO: 259058 - RNA, 19 nt, Artificial Sequence
  Description of Artificial Sequence: Synthetic oligonucleotide
cauaaggaauggggugaag

SEQ ID NO: 259059 - RNA, 19 nt, Artificial Sequence
  Description of Artificial Sequence: Synthetic oligonucleotide
gucuacgucuuuguaggga

SEQ ID NO: 259060 - RNA, 19 nt, Artificial Sequence
  Description of Artificial Sequence: Synthetic oligonucleotide
cacguuucugacuucgagu

SEQ ID NO: 259061 - RNA, 19 nt, Artificial Sequence
  Description of Artificial Sequence: Synthetic oligonucleotide
ugucgcauguucgggcccu

SEQ ID NO: 259062 - RNA, 19 nt, Artificial Sequence
  Description of Artificial Sequence: Synthetic oligonucleotide
ccuuaguuucccuccuccc

SEQ ID NO: 259063 - RNA, 19 nt, Artificial Sequence
  Description of Artificial Sequence: Synthetic oligonucleotide
uuucggugacgggucuugc

SEQ ID NO: 259064 - RNA, 19 nt, Artificial Sequence
  Description of Artificial Sequence: Synthetic oligonucleotide
aguccccgcccuaccaggc

SEQ ID NO: 259065 - RNA, 19 nt, Artificial Sequence
  Description of Artificial Sequence: Synthetic oligonucleotide
uacagguuguuggcucucu

SEQ ID NO: 259066 - RNA, 19 nt, Artificial Sequence
  Description of Artificial Sequence: Synthetic oligonucleotide
ggcguucaguuccauguac

SEQ ID NO: 259067 - RNA, 19 nt, Artificial Sequence
  Description of Artificial Sequence: Synthetic oligonucleotide
guaacaguagggacuuaaa

SEQ ID NO: 259068 - RNA, 19 nt, Artificial Sequence
  Description of Artificial Sequence: Synthetic oligonucleotide
ucuaggcggugcagacaug

SEQ ID NO: 259069 - RNA, 19 nt, Artificial Sequence
  Description of Artificial Sequence: Synthetic oligonucleotide
ccaacuucugguguaccgc

SEQ ID NO: 259070 - RNA, 19 nt, Artificial Sequence
  Description of Artificial Sequence: Synthetic oligonucleotide
ucccucacuuggaggagua

SEQ ID NO: 259071 - RNA, 19 nt, Artificial Sequence
  Description of Artificial Sequence: Synthetic oligonucleotide
caguuuaguucuguaaugu

SEQ ID NO: 259072 - RNA, 19 nt, Artificial Sequence
  Description of Artificial Sequence: Synthetic oligonucleotide
cuggccuuucggugacggg

SEQ ID NO: 259073 - RNA, 19 nt, Artificial Sequence
  Description of Artificial Sequence: Synthetic oligonucleotide
agaccucagaggggaggac

SEQ ID NO: 259074 - RNA, 19 nt, Artificial Sequence
  Description of Artificial Sequence: Synthetic oligonucleotide
uggggcggcaauguugcuc

SEQ ID NO: 259075 - RNA, 19 nt, Artificial Sequence
  Description of Artificial Sequence: Synthetic oligonucleotide
cguucaguuccauguacag

SEQ ID NO: 259076 - RNA, 19 nt, Artificial Sequence
  Description of Artificial Sequence: Synthetic oligonucleotide
guagggaaucucgccaguc

SEQ ID NO: 259077 - RNA, 19 nt, Artificial Sequence
  Description of Artificial Sequence: Synthetic oligonucleotide
ggagagcacauccgcugag

SEQ ID NO: 259078 - RNA, 19 nt, Artificial Sequence
  Description of Artificial Sequence: Synthetic oligonucleotide
auguugcucgaagcccagg

SEQ ID NO: 259079 - RNA, 19 nt, Artificial Sequence
  Description of Artificial Sequence: Synthetic oligonucleotide
  modified_base (9)..(9): a, c, u, g, unknown or other
gcaugccunagcuccuccc

SEQ ID NO: 259080 - RNA, 19 nt, Artificial Sequence
  Description of Artificial Sequence: Synthetic oligonucleotide
cagugggauuucugauccc

SEQ ID NO: 259081 - RNA, 19 nt, Artificial Sequence
  Description of Artificial Sequence: Synthetic oligonucleotide
cccucuucgcaucaccagc

SEQ ID NO: 259082 - RNA, 19 nt, Artificial Sequence
  Description of Artificial Sequence: Synthetic oligonucleotide
ccacguuucugacuucgag

SEQ ID NO: 259083 - RNA, 19 nt, Artificial Sequence
  Description of Artificial Sequence: Synthetic oligonucleotide
gaauagaauuaagguauuu

SEQ ID NO: 259084 - RNA, 19 nt, Artificial Sequence
  Description of Artificial Sequence: Synthetic oligonucleotide
ucagcgauuccagguuuua

SEQ ID NO: 259085 - RNA, 19 nt, Artificial Sequence
  Description of Artificial Sequence: Synthetic oligonucleotide
cagguguaguaauaucugu

SEQ ID NO: 259086 - RNA, 19 nt, Artificial Sequence
  Description of Artificial Sequence: Synthetic oligonucleotide
cugucgcauguucgggccc

SEQ ID NO: 259087 - RNA, 19 nt, Artificial Sequence
  Description of Artificial Sequence: Synthetic oligonucleotide
cagguccuacugguggagg

SEQ ID NO: 259088 - RNA, 19 nt, Artificial Sequence
  Description of Artificial Sequence: Synthetic oligonucleotide
ucuggccguucaucagugu

SEQ ID NO: 259089 - RNA, 19 nt, Artificial Sequence
  Description of Artificial Sequence: Synthetic oligonucleotide
acauccgcugaggcgauau

SEQ ID NO: 259090 - RNA, 19 nt, Artificial Sequence
  Description of Artificial Sequence: Synthetic oligonucleotide
gcugagauauccauauuua

SEQ ID NO: 259091 - RNA, 19 nt, Artificial Sequence
  Description of Artificial Sequence: Synthetic oligonucleotide
aggcuuaagaaagccccau

SEQ ID NO: 259092 - RNA, 19 nt, Artificial Sequence
  Description of Artificial Sequence: Synthetic oligonucleotide
ugaucccugggagcacaug

SEQ ID NO: 259093 - RNA, 19 nt, Artificial Sequence
  Description of Artificial Sequence: Synthetic oligonucleotide
guuucgugguuugcuguuc

SEQ ID NO: 259094 - RNA, 19 nt, Artificial Sequence
  Description of Artificial Sequence: Synthetic oligonucleotide
gaggcgauauccaggugua

SEQ ID NO: 259095 - RNA, 19 nt, Artificial Sequence
  Description of Artificial Sequence: Synthetic oligonucleotide
ggcgaaggagaauuuuaaa

SEQ ID NO: 259096 - RNA, 19 nt, Artificial Sequence
  Description of Artificial Sequence: Synthetic oligonucleotide
auagugacugucgcauguu

SEQ ID NO: 259097 - RNA, 19 nt, Artificial Sequence
  Description of Artificial Sequence: Synthetic oligonucleotide
gggguuacaauaugauagu

SEQ ID NO: 259098 - RNA, 19 nt, Artificial Sequence
  Description of Artificial Sequence: Synthetic oligonucleotide
cuaguugccugcugaacau

SEQ ID NO: 259099 - RNA, 19 nt, Artificial Sequence
  Description of Artificial Sequence: Synthetic oligonucleotide
gcgguuucgugguuugcug

SEQ ID NO: 259100 - RNA, 19 nt, Artificial Sequence
  Description of Artificial Sequence: Synthetic oligonucleotide
guuagacaguguagagaca

SEQ ID NO: 259101 - RNA, 19 nt, Artificial Sequence
  Description of Artificial Sequence: Synthetic oligonucleotide
gcugaggcgauauccaggu

SEQ ID NO: 259102 - RNA, 19 nt, Artificial Sequence
  Description of Artificial Sequence: Synthetic oligonucleotide
gcauggagugguuauauuu

SEQ ID NO: 259103 - RNA, 19 nt, Artificial Sequence
  Description of Artificial Sequence: Synthetic oligonucleotide
ggguuacaauaugauaguc

SEQ ID NO: 259104 - RNA, 19 nt, Artificial Sequence
  Description of Artificial Sequence: Synthetic oligonucleotide
guugauuauguggcgcaua

SEQ ID NO: 259105 - RNA, 19 nt, Artificial Sequence
  Description of Artificial Sequence: Synthetic oligonucleotide
uucguggggcggcaauguu

SEQ ID NO: 259106 - RNA, 19 nt, Artificial Sequence
  Description of Artificial Sequence: Synthetic oligonucleotide
gagagaccucagaggggag

SEQ ID NO: 259107 - RNA, 19 nt, Artificial Sequence
  Description of Artificial Sequence: Synthetic oligonucleotide
cuaggguguuacuuggaau

SEQ ID NO: 259108 - RNA, 19 nt, Artificial Sequence
  Description of Artificial Sequence: Synthetic oligonucleotide
aucccucacuuggaggagu

SEQ ID NO: 259109 - RNA, 19 nt, Artificial Sequence
  Description of Artificial Sequence: Synthetic oligonucleotide
cccaagugcaaaaugugua

SEQ ID NO: 259110 - RNA, 19 nt, Artificial Sequence
  Description of Artificial Sequence: Synthetic oligonucleotide
uccuccccguccugcaguc

SEQ ID NO: 259111 - RNA, 19 nt, Artificial Sequence
  Description of Artificial Sequence: Synthetic oligonucleotide
ggaaucucgccagucagua

SEQ ID NO: 259112 - RNA, 19 nt, Artificial Sequence
  Description of Artificial Sequence: Synthetic oligonucleotide
  modified_base (8)..(8): a, c, u, g, unknown or other
caugccunagcuccucccu

SEQ ID NO: 259113 - RNA, 19 nt, Artificial Sequence
  Description of Artificial Sequence: Synthetic oligonucleotide
cgcccuaccaggcaccagg

SEQ ID NO: 259114 - RNA, 19 nt, Artificial Sequence
  Description of Artificial Sequence: Synthetic oligonucleotide
uuccuacaccccagaugau

SEQ ID NO: 259115 - RNA, 19 nt, Artificial Sequence
  Description of Artificial Sequence: Synthetic oligonucleotide
uaguugccugcugaacaua

SEQ ID NO: 259116 - RNA, 19 nt, Artificial Sequence
  Description of Artificial Sequence: Synthetic oligonucleotide
agguucguggggcggcaau

SEQ ID NO: 259117 - RNA, 19 nt, Artificial Sequence
  Description of Artificial Sequence: Synthetic oligonucleotide
aggcgauauccagguguag

SEQ ID NO: 259118 - RNA, 19 nt, Artificial Sequence
  Description of Artificial Sequence: Synthetic oligonucleotide
agcacuggcgaaggagaau

SEQ ID NO: 259119 - RNA, 19 nt, Artificial Sequence
  Description of Artificial Sequence: Synthetic oligonucleotide
uugccacgagggcguucag

SEQ ID NO: 259120 - RNA, 19 nt, Artificial Sequence
  Description of Artificial Sequence: Synthetic oligonucleotide
gguucguggggcggcaaug

SEQ ID NO: 259121 - RNA, 19 nt, Artificial Sequence
  Description of Artificial Sequence: Synthetic oligonucleotide
gcgauuccagguuuuaaau

SEQ ID NO: 259122 - RNA, 19 nt, Artificial Sequence
  Description of Artificial Sequence: Synthetic oligonucleotide
ucggaaugaugggcgguuu

SEQ ID NO: 259123 - RNA, 19 nt, Artificial Sequence
  Description of Artificial Sequence: Synthetic oligonucleotide
cuucuaggcggugcagaca

SEQ ID NO: 259124 - RNA, 19 nt, Artificial Sequence
  Description of Artificial Sequence: Synthetic oligonucleotide
cguagcucuaggguguuac

SEQ ID NO: 259125 - RNA, 19 nt, Artificial Sequence
  Description of Artificial Sequence: Synthetic oligonucleotide
ccguccugcagucccuucc

SEQ ID NO: 259126 - RNA, 19 nt, Artificial Sequence
  Description of Artificial Sequence: Synthetic oligonucleotide
aggugagucugggcuggug

SEQ ID NO: 259127 - RNA, 19 nt, Artificial Sequence
  Description of Artificial Sequence: Synthetic oligonucleotide
guacagguuguuggcucuc

SEQ ID NO: 259128 - RNA, 19 nt, Artificial Sequence
  Description of Artificial Sequence: Synthetic oligonucleotide
cauccgcugaggcgauauc

SEQ ID NO: 259129 - RNA, 19 nt, Artificial Sequence
  Description of Artificial Sequence: Synthetic oligonucleotide
ggacccacuccuaggcccc

SEQ ID NO: 259130 - RNA, 19 nt, Artificial Sequence
  Description of Artificial Sequence: Synthetic oligonucleotide
ggcgauauccagguguagu

SEQ ID NO: 259131 - RNA, 19 nt, Artificial Sequence
  Description of Artificial Sequence: Synthetic oligonucleotide
ggguuacauugccaccuga

SEQ ID NO: 259132 - RNA, 19 nt, Artificial Sequence
  Description of Artificial Sequence: Synthetic oligonucleotide
guggcgcauauauauuauu

SEQ ID NO: 259133 - RNA, 19 nt, Artificial Sequence
  Description of Artificial Sequence: Synthetic oligonucleotide
ccgcugaggcgauauccag

SEQ ID NO: 259134 - RNA, 19 nt, Artificial Sequence
  Description of Artificial Sequence: Synthetic oligonucleotide
ucgcauguucgggcccuga

SEQ ID NO: 259135 - RNA, 19 nt, Artificial Sequence
  Description of Artificial Sequence: Synthetic oligonucleotide
augggcgguuucgugguuu

SEQ ID NO: 259136 - RNA, 19 nt, Artificial Sequence
  Description of Artificial Sequence: Synthetic oligonucleotide
  modified_base (4)..(4): a, c, u, g, unknown or other
ccunagcuccucccucuuc

SEQ ID NO: 259137 - RNA, 19 nt, Artificial Sequence
  Description of Artificial Sequence: Synthetic oligonucleotide
cagcaguuaugcugagaua

SEQ ID NO: 259138 - RNA, 19 nt, Artificial Sequence
  Description of Artificial Sequence: Synthetic oligonucleotide
gugacgggucuugccacga

SEQ ID NO: 259139 - RNA, 19 nt, Artificial Sequence
  Description of Artificial Sequence: Synthetic oligonucleotide
gcccuaccaggcaccaggg

SEQ ID NO: 259140 - RNA, 19 nt, Artificial Sequence
  Description of Artificial Sequence: Synthetic oligonucleotide
cuggccguucaucaguguu

SEQ ID NO: 259141 - RNA, 19 nt, Artificial Sequence
  Description of Artificial Sequence: Synthetic oligonucleotide
guucguggggcggcaaugu

SEQ ID NO: 259142 - RNA, 19 nt, Artificial Sequence
  Description of Artificial Sequence: Synthetic oligonucleotide
ccguucaucaguguuggua

SEQ ID NO: 259143 - RNA, 19 nt, Artificial Sequence
  Description of Artificial Sequence: Synthetic oligonucleotide
gccuaguugccugcugaac

SEQ ID NO: 259144 - RNA, 19 nt, Artificial Sequence
  Description of Artificial Sequence: Synthetic oligonucleotide
cugcauggagugguuauau

SEQ ID NO: 259145 - RNA, 19 nt, Artificial Sequence
  Description of Artificial Sequence: Synthetic oligonucleotide
cagucagcgauuccagguu

SEQ ID NO: 259146 - RNA, 19 nt, Artificial Sequence
  Description of Artificial Sequence: Synthetic oligonucleotide
guuuaggguuagacagugu

SEQ ID NO: 259147 - RNA, 19 nt, Artificial Sequence
  Description of Artificial Sequence: Synthetic oligonucleotide
acgagggcguucaguucca

SEQ ID NO: 259148 - RNA, 19 nt, Artificial Sequence
  Description of Artificial Sequence: Synthetic oligonucleotide
ggccuuucggugacggguc

SEQ ID NO: 259149 - RNA, 19 nt, Artificial Sequence
  Description of Artificial Sequence: Synthetic oligonucleotide
cagcgauuccagguuuuaa

SEQ ID NO: 259150 - RNA, 19 nt, Artificial Sequence
  Description of Artificial Sequence: Synthetic oligonucleotide
gguguuacuuggaaucauu

SEQ ID NO: 259151 - RNA, 19 nt, Artificial Sequence
  Description of Artificial Sequence: Synthetic oligonucleotide
guccccgcccuaccaggca

SEQ ID NO: 259152 - RNA, 19 nt, Artificial Sequence
  Description of Artificial Sequence: Synthetic oligonucleotide
ccaauucagugcugucaca

SEQ ID NO: 259153 - RNA, 19 nt, Artificial Sequence
  Description of Artificial Sequence: Synthetic oligonucleotide
guaucgcccugggguggag

SEQ ID NO: 259154 - RNA, 19 nt, Artificial Sequence
  Description of Artificial Sequence: Synthetic oligonucleotide
ggucuugccacgagggcgu

SEQ ID NO: 259155 - RNA, 19 nt, Artificial Sequence
  Description of Artificial Sequence: Synthetic oligonucleotide
cuacgucuuuguagggaau

SEQ ID NO: 259156 - RNA, 19 nt, Artificial Sequence
  Description of Artificial Sequence: Synthetic oligonucleotide
gcagucuuaaguggauccu

SEQ ID NO: 259157 - RNA, 19 nt, Artificial Sequence
  Description of Artificial Sequence: Synthetic oligonucleotide
ucguagcucuaggguguua

SEQ ID NO: 259158 - RNA, 19 nt, Artificial Sequence
  Description of Artificial Sequence: Synthetic oligonucleotide
gucggaaugaugggcgguu

SEQ ID NO: 259159 - RNA, 19 nt, Artificial Sequence
  Description of Artificial Sequence: Synthetic oligonucleotide
ccucguagcucuagggugu

SEQ ID NO: 259160 - RNA, 19 nt, Artificial Sequence
  Description of Artificial Sequence: Synthetic oligonucleotide
ccacgagggcguucaguuc

SEQ ID NO: 259161 - RNA, 19 nt, Artificial Sequence
  Description of Artificial Sequence: Synthetic oligonucleotide
gcacuggcgaaggagaauu

SEQ ID NO: 259162 - RNA, 19 nt, Artificial Sequence
  Description of Artificial Sequence: Synthetic oligonucleotide
gucgcauguucgggcccug

SEQ ID NO: 259163 - RNA, 19 nt, Artificial Sequence
  Description of Artificial Sequence: Synthetic oligonucleotide
cccucgacagaugggccug

SEQ ID NO: 259164 - RNA, 19 nt, Artificial Sequence
  Description of Artificial Sequence: Synthetic oligonucleotide
gguguaccgcugggagaag

SEQ ID NO: 259165 - RNA, 19 nt, Artificial Sequence
  Description of Artificial Sequence: Synthetic oligonucleotide
gggcguucaguuccaugua

SEQ ID NO: 259166 - RNA, 19 nt, Artificial Sequence
  Description of Artificial Sequence: Synthetic oligonucleotide
gccugcauggagugguuau

SEQ ID NO: 259167 - RNA, 19 nt, Artificial Sequence
  Description of Artificial Sequence: Synthetic oligonucleotide
cggugacgggucuugccac

SEQ ID NO: 259168 - RNA, 19 nt, Artificial Sequence
  Description of Artificial Sequence: Synthetic oligonucleotide
gggguccuucgauucugaa

SEQ ID NO: 259169 - RNA, 19 nt, Artificial Sequence
  Description of Artificial Sequence: Synthetic oligonucleotide
gggaaucucgccagucagu

SEQ ID NO: 259170 - RNA, 19 nt, Artificial Sequence
  Description of Artificial Sequence: Synthetic oligonucleotide
ggucaagugcugggaccca

SEQ ID NO: 259171 - RNA, 19 nt, Artificial Sequence
  Description of Artificial Sequence: Synthetic oligonucleotide
gcacaugucaucagaccuu

SEQ ID NO: 259172 - RNA, 19 nt, Artificial Sequence
  Description of Artificial Sequence: Synthetic oligonucleotide
gucagcgauuccagguuuu

SEQ ID NO: 259173 - RNA, 19 nt, Artificial Sequence
  Description of Artificial Sequence: Synthetic oligonucleotide
gaugggcgguuucgugguu

SEQ ID NO: 259174 - RNA, 19 nt, Artificial Sequence
  Description of Artificial Sequence: Synthetic oligonucleotide
gggcuugggcagagaaaca

SEQ ID NO: 259175 - RNA, 19 nt, Artificial Sequence
  Description of Artificial Sequence: Synthetic oligonucleotide
ggcggcaauguugcucgaa

SEQ ID NO: 259176 - RNA, 19 nt, Artificial Sequence
  Description of Artificial Sequence: Synthetic oligonucleotide
gggcgguuucgugguuugc

SEQ ID NO: 259177 - RNA, 19 nt, Artificial Sequence
  Description of Artificial Sequence: Synthetic oligonucleotide
  modified_base (11)..(11): a, c, u, g, unknown or other
gggcaugccunagcuccuc

SEQ ID NO: 259178 - RNA, 19 nt, Artificial Sequence
  Description of Artificial Sequence: Synthetic oligonucleotide
cacuggcgaaggagaauuu

SEQ ID NO: 259179 - RNA, 19 nt, Artificial Sequence
  Description of Artificial Sequence: Synthetic oligonucleotide
ccucgacagaugggccugc

SEQ ID NO: 259180 - RNA, 19 nt, Artificial Sequence
  Description of Artificial Sequence: Synthetic oligonucleotide
gccccaucuaucuguugau

SEQ ID NO: 259181 - RNA, 19 nt, Artificial Sequence
  Description of Artificial Sequence: Synthetic oligonucleotide
ggcucacuagcuguaccuu

SEQ ID NO: 259182 - RNA, 19 nt, Artificial Sequence
  Description of Artificial Sequence: Synthetic oligonucleotide
ccacauccgauggguucuc

SEQ ID NO: 259183 - RNA, 19 nt, Artificial Sequence
  Description of Artificial Sequence: Synthetic oligonucleotide
gccuuucggugacgggucu

SEQ ID NO: 259184 - RNA, 19 nt, Artificial Sequence
  Description of Artificial Sequence: Synthetic oligonucleotide
cacauccgauggguucucu

SEQ ID NO: 259185 - RNA, 19 nt, Artificial Sequence
  Description of Artificial Sequence: Synthetic oligonucleotide
cccguccugcagucccuuc

SEQ ID NO: 259186 - RNA, 19 nt, Artificial Sequence
  Description of Artificial Sequence: Synthetic oligonucleotide
ccggcagggcaucaaugcu

SEQ ID NO: 259187 - RNA, 19 nt, Artificial Sequence
  Description of Artificial Sequence: Synthetic oligonucleotide
cgguuucgugguuugcugu

SEQ ID NO: 259188 - RNA, 19 nt, Artificial Sequence
  Description of Artificial Sequence: Synthetic oligonucleotide
cagguucguggggcggcaa

SEQ ID NO: 259189 - RNA, 19 nt, Artificial Sequence
  Description of Artificial Sequence: Synthetic oligonucleotide
guggggcggcaauguugcu

SEQ ID NO: 259190 - RNA, 19 nt, Artificial Sequence
  Description of Artificial Sequence: Synthetic oligonucleotide
cucguagcucuaggguguu

SEQ ID NO: 259191 - RNA, 19 nt, Artificial Sequence
  Description of Artificial Sequence: Synthetic oligonucleotide
gggcggcaauguugcucga

SEQ ID NO: 259192 - RNA, 19 nt, Artificial Sequence
  Description of Artificial Sequence: Synthetic oligonucleotide
  modified_base (5)..(5): a, c, u, g, unknown or other
gccunagcuccucccucuu

SEQ ID NO: 259193 - RNA, 19 nt, Artificial Sequence
  Description of Artificial Sequence: Synthetic oligonucleotide
cccgccacucugccuggga

SEQ ID NO: 259194 - RNA, 19 nt, Artificial Sequence
  Description of Artificial Sequence: Synthetic oligonucleotide
gccguucaucaguguuggu

SEQ ID NO: 259195 - RNA, 19 nt, Artificial Sequence
  Description of Artificial Sequence: Synthetic oligonucleotide
ggguaacaguagggacuua

SEQ ID NO: 259196 - RNA, 19 nt, Artificial Sequence
  Description of Artificial Sequence: Synthetic oligonucleotide
ccgcccuaccaggcaccag

SEQ ID NO: 259197 - RNA, 19 nt, Artificial Sequence
  Description of Artificial Sequence: Synthetic oligonucleotide
cccgcccuaccaggcacca

SEQ ID NO: 259198 - RNA, 19 nt, Artificial Sequence
  Description of Artificial Sequence: Synthetic oligonucleotide
ccccaucuaucuguugauu

SEQ ID NO: 259199 - RNA, 19 nt, Artificial Sequence
  Description of Artificial Sequence: Synthetic oligonucleotide
gcacauccgcugaggcgau

SEQ ID NO: 259200 - RNA, 19 nt, Artificial Sequence
  Description of Artificial Sequence: Synthetic oligonucleotide
gggccugcauggagugguu

SEQ ID NO: 259201 - RNA, 19 nt, Artificial Sequence
  Description of Artificial Sequence: Synthetic oligonucleotide
cccucacuuggaggaguau

SEQ ID NO: 259202 - RNA, 19 nt, Artificial Sequence
  Description of Artificial Sequence: Synthetic oligonucleotide
aauuagucuucucuaaugc

SEQ ID NO: 259203 - RNA, 19 nt, Artificial Sequence
  Description of Artificial Sequence: Synthetic oligonucleotide
uuggauaccacauagaggc

SEQ ID NO: 259204 - RNA, 19 nt, Artificial Sequence
  Description of Artificial Sequence: Synthetic oligonucleotide
aaaugugacucccaaaggg

SEQ ID NO: 259205 - RNA, 19 nt, Artificial Sequence
  Description of Artificial Sequence: Synthetic oligonucleotide
aaaauuauacauguguguc

SEQ ID NO: 259206 - RNA, 19 nt, Artificial Sequence
  Description of Artificial Sequence: Synthetic oligonucleotide
cuuagaagaaauauggaag

SEQ ID NO: 259207 - RNA, 19 nt, Artificial Sequence
  Description of Artificial Sequence: Synthetic oligonucleotide
ucaacugcgagauacuugg

SEQ ID NO: 259208 - RNA, 19 nt, Artificial Sequence
  Description of Artificial Sequence: Synthetic oligonucleotide
uguacgaaacaccauagcc

SEQ ID NO: 259209 - RNA, 19 nt, Artificial Sequence
  Description of Artificial Sequence: Synthetic oligonucleotide
uaauuuguggcccaccagg

SEQ ID NO: 259210 - RNA, 19 nt, Artificial Sequence
  Description of Artificial Sequence: Synthetic oligonucleotide
gagauugacagcaaaaucc

SEQ ID NO: 259211 - RNA, 19 nt, Artificial Sequence
  Description of Artificial Sequence: Synthetic oligonucleotide
auagcaugggcuuucggcc

SEQ ID NO: 259212 - RNA, 19 nt, Artificial Sequence
  Description of Artificial Sequence: Synthetic oligonucleotide
uucuauaagagcaauuuuc

SEQ ID NO: 259213 - RNA, 19 nt, Artificial Sequence
  Description of Artificial Sequence: Synthetic oligonucleotide
agguauuuauaguuugucc

SEQ ID NO: 259214 - RNA, 19 nt, Artificial Sequence
  Description of Artificial Sequence: Synthetic oligonucleotide
uuuauauccagacagcaua

SEQ ID NO: 259215 - RNA, 19 nt, Artificial Sequence
  Description of Artificial Sequence: Synthetic oligonucleotide
uuuguauuacaagaguccg

SEQ ID NO: 259216 - RNA, 19 nt, Artificial Sequence
  Description of Artificial Sequence: Synthetic oligonucleotide
ugcuuaauggaacuggcag

SEQ ID NO: 259217 - RNA, 19 nt, Artificial Sequence
  Description of Artificial Sequence: Synthetic oligonucleotide
auuagucuucucuaaugcc

SEQ ID NO: 259218 - RNA, 19 nt, Artificial Sequence
  Description of Artificial Sequence: Synthetic oligonucleotide
aaggcacucccauugaggg

SEQ ID NO: 259219 - RNA, 19 nt, Artificial Sequence
  Description of Artificial Sequence: Synthetic oligonucleotide
ucuauaagagcaauuuucu

SEQ ID NO: 259220 - RNA, 19 nt, Artificial Sequence
  Description of Artificial Sequence: Synthetic oligonucleotide
uucgccaguauuuuaaugc

SEQ ID NO: 259221 - RNA, 19 nt, Artificial Sequence
  Description of Artificial Sequence: Synthetic oligonucleotide
caagugugaagcuacaacc

SEQ ID NO: 259222 - RNA, 19 nt, Artificial Sequence
  Description of Artificial Sequence: Synthetic oligonucleotide
aaauggacagauuaggaua

SEQ ID NO: 259223 - RNA, 19 nt, Artificial Sequence
  Description of Artificial Sequence: Synthetic oligonucleotide
uugguaacugcucaggagc

SEQ ID NO: 259224 - RNA, 19 nt, Artificial Sequence
  Description of Artificial Sequence: Synthetic oligonucleotide
aauggacagauuaggauac

SEQ ID NO: 259225 - RNA, 19 nt, Artificial Sequence
  Description of Artificial Sequence: Synthetic oligonucleotide
aauaugaaauugcauuggu

SEQ ID NO: 259226 - RNA, 19 nt, Artificial Sequence
  Description of Artificial Sequence: Synthetic oligonucleotide
gaagugcuuacuuaggggc

SEQ ID NO: 259227 - RNA, 19 nt, Artificial Sequence
  Description of Artificial Sequence: Synthetic oligonucleotide
uuuuaaugccuucauccag

SEQ ID NO: 259228 - RNA, 19 nt, Artificial Sequence
  Description of Artificial Sequence: Synthetic oligonucleotide
aacgcuuggacacuagcag

SEQ ID NO: 259229 - RNA, 19 nt, Artificial Sequence
  Description of Artificial Sequence: Synthetic oligonucleotide
uauagcaugggcuuucggc

SEQ ID NO: 259230 - RNA, 19 nt, Artificial Sequence
  Description of Artificial Sequence: Synthetic oligonucleotide
ugguacacgacaaugugcc

SEQ ID NO: 259231 - RNA, 19 nt, Artificial Sequence
  Description of Artificial Sequence: Synthetic oligonucleotide
agauuuaggugucucuggc

SEQ ID NO: 259232 - RNA, 19 nt, Artificial Sequence
  Description of Artificial Sequence: Synthetic oligonucleotide
ucuaagauuuauauccaga

SEQ ID NO: 259233 - RNA, 19 nt, Artificial Sequence
  Description of Artificial Sequence: Synthetic oligonucleotide
agugugaagcuacaacccc

SEQ ID NO: 259234 - RNA, 19 nt, Artificial Sequence
  Description of Artificial Sequence: Synthetic oligonucleotide
ugugcuacugcuagcacag

SEQ ID NO: 259235 - RNA, 19 nt, Artificial Sequence
  Description of Artificial Sequence: Synthetic oligonucleotide
acuuagaagaaauauggaa

SEQ ID NO: 259236 - RNA, 19 nt, Artificial Sequence
  Description of Artificial Sequence: Synthetic oligonucleotide
gauuaggauaccaaaauca

SEQ ID NO: 259237 - RNA, 19 nt, Artificial Sequence
  Description of Artificial Sequence: Synthetic oligonucleotide
aagugugaagcuacaaccc

SEQ ID NO: 259238 - RNA, 19 nt, Artificial Sequence
  Description of Artificial Sequence: Synthetic oligonucleotide
ucgacguacacugugaaag

SEQ ID NO: 259239 - RNA, 19 nt, Artificial Sequence
  Description of Artificial Sequence: Synthetic oligonucleotide
gaaaacugaguucuauaag

SEQ ID NO: 259240 - RNA, 19 nt, Artificial Sequence
  Description of Artificial Sequence: Synthetic oligonucleotide
uuauaguuuguccccgagg

SEQ ID NO: 259241 - RNA, 19 nt, Artificial Sequence
  Description of Artificial Sequence: Synthetic oligonucleotide
aggaguguaacgcuuggac

SEQ ID NO: 259242 - RNA, 19 nt, Artificial Sequence
  Description of Artificial Sequence: Synthetic oligonucleotide
uaagauuuauauccagaca

SEQ ID NO: 259243 - RNA, 19 nt, Artificial Sequence
  Description of Artificial Sequence: Synthetic oligonucleotide
uuuuguugcuuaauggaac

SEQ ID NO: 259244 - RNA, 19 nt, Artificial Sequence
  Description of Artificial Sequence: Synthetic oligonucleotide
ucuaucauggcuuguuuca

SEQ ID NO: 259245 - RNA, 19 nt, Artificial Sequence
  Description of Artificial Sequence: Synthetic oligonucleotide
ggaaaugugacucccaaag

SEQ ID NO: 259246 - RNA, 19 nt, Artificial Sequence
  Description of Artificial Sequence: Synthetic oligonucleotide
cuguaagacaugcauaagc

SEQ ID NO: 259247 - RNA, 19 nt, Artificial Sequence
  Description of Artificial Sequence: Synthetic oligonucleotide
uguugcuuaauggaacugg

SEQ ID NO: 259248 - RNA, 19 nt, Artificial Sequence
  Description of Artificial Sequence: Synthetic oligonucleotide
augaccuagucuucuaugg

SEQ ID NO: 259249 - RNA, 19 nt, Artificial Sequence
  Description of Artificial Sequence: Synthetic oligonucleotide
gguaacacagguuagucag

SEQ ID NO: 259250 - RNA, 19 nt, Artificial Sequence
  Description of Artificial Sequence: Synthetic oligonucleotide
aaucccauuagugcauuac

SEQ ID NO: 259251 - RNA, 19 nt, Artificial Sequence
  Description of Artificial Sequence: Synthetic oligonucleotide
ugcaauuuggguccgagau

SEQ ID NO: 259252 - RNA, 19 nt, Artificial Sequence
  Description of Artificial Sequence: Synthetic oligonucleotide
ucuacguaggaaaccacug

SEQ ID NO: 259253 - RNA, 19 nt, Artificial Sequence
  Description of Artificial Sequence: Synthetic oligonucleotide
uggaaacuguauagcaugg

SEQ ID NO: 259254 - RNA, 19 nt, Artificial Sequence
  Description of Artificial Sequence: Synthetic oligonucleotide
uaaaccuucuggaaggaaa

SEQ ID NO: 259255 - RNA, 19 nt, Artificial Sequence
  Description of Artificial Sequence: Synthetic oligonucleotide
uauuuauaguuuguccccg

SEQ ID NO: 259256 - RNA, 19 nt, Artificial Sequence
  Description of Artificial Sequence: Synthetic oligonucleotide
gaguguaacgcuuggacac

SEQ ID NO: 259257 - RNA, 19 nt, Artificial Sequence
  Description of Artificial Sequence: Synthetic oligonucleotide
uuaguagacaggauuaauu

SEQ ID NO: 259258 - RNA, 19 nt, Artificial Sequence
  Description of Artificial Sequence: Synthetic oligonucleotide
ucgugcuucacacagugga

SEQ ID NO: 259259 - RNA, 19 nt, Artificial Sequence
  Description of Artificial Sequence: Synthetic oligonucleotide
uuuauaguuuguccccgag

SEQ ID NO: 259260 - RNA, 19 nt, Artificial Sequence
  Description of Artificial Sequence: Synthetic oligonucleotide
gagauuuaggugucucugg

SEQ ID NO: 259261 - RNA, 19 nt, Artificial Sequence
  Description of Artificial Sequence: Synthetic oligonucleotide
ugugaaagcgcacccuucc

SEQ ID NO: 259262 - RNA, 19 nt, Artificial Sequence
  Description of Artificial Sequence: Synthetic oligonucleotide
uaauagucuuaccuccucc

SEQ ID NO: 259263 - RNA, 19 nt, Artificial Sequence
  Description of Artificial Sequence: Synthetic oligonucleotide
aaacuacuguuguucuagg

SEQ ID NO: 259264 - RNA, 19 nt, Artificial Sequence
  Description of Artificial Sequence: Synthetic oligonucleotide
ugcuacugcuagcacaggg

SEQ ID NO: 259265 - RNA, 19 nt, Artificial Sequence
  Description of Artificial Sequence: Synthetic oligonucleotide
uuuguugcuuaauggaacu

SEQ ID NO: 259266 - RNA, 19 nt, Artificial Sequence
  Description of Artificial Sequence: Synthetic oligonucleotide
ucaugcguuggaaaucucc

SEQ ID NO: 259267 - RNA, 19 nt, Artificial Sequence
  Description of Artificial Sequence: Synthetic oligonucleotide
ugccaauccuacaaucagg

SEQ ID NO: 259268 - RNA, 19 nt, Artificial Sequence
  Description of Artificial Sequence: Synthetic oligonucleotide
auugguaacugcucaggag

SEQ ID NO: 259269 - RNA, 19 nt, Artificial Sequence
  Description of Artificial Sequence: Synthetic oligonucleotide
auaauagucuuaccuccuc

SEQ ID NO: 259270 - RNA, 19 nt, Artificial Sequence
  Description of Artificial Sequence: Synthetic oligonucleotide
ugugaagcuacaaccccag

SEQ ID NO: 259271 - RNA, 19 nt, Artificial Sequence
  Description of Artificial Sequence: Synthetic oligonucleotide
aacuguauagcaugggcuu

SEQ ID NO: 259272 - RNA, 19 nt, Artificial Sequence
  Description of Artificial Sequence: Synthetic oligonucleotide
aaaucaaaccuuggcugcg

SEQ ID NO: 259273 - RNA, 19 nt, Artificial Sequence
  Description of Artificial Sequence: Synthetic oligonucleotide
cugacagauuccaaguacc

SEQ ID NO: 259274 - RNA, 19 nt, Artificial Sequence
  Description of Artificial Sequence: Synthetic oligonucleotide
cuccuuucgacguacacug

SEQ ID NO: 259275 - RNA, 19 nt, Artificial Sequence
  Description of Artificial Sequence: Synthetic oligonucleotide
ucaguggccugacagauuc

SEQ ID NO: 259276 - RNA, 19 nt, Artificial Sequence
  Description of Artificial Sequence: Synthetic oligonucleotide
uuagucaguggucaucaac

SEQ ID NO: 259277 - RNA, 19 nt, Artificial Sequence
  Description of Artificial Sequence: Synthetic oligonucleotide
aaacuguauagcaugggcu

SEQ ID NO: 259278 - RNA, 19 nt, Artificial Sequence
  Description of Artificial Sequence: Synthetic oligonucleotide
acaugcauaagcuguucag

SEQ ID NO: 259279 - RNA, 19 nt, Artificial Sequence
  Description of Artificial Sequence: Synthetic oligonucleotide
uuaggauaccaaaaucaaa

SEQ ID NO: 259280 - RNA, 19 nt, Artificial Sequence
  Description of Artificial Sequence: Synthetic oligonucleotide
ugagauuuaggugucucug

SEQ ID NO: 259281 - RNA, 19 nt, Artificial Sequence
  Description of Artificial Sequence: Synthetic oligonucleotide
cauguguuagcuucaguug

SEQ ID NO: 259282 - RNA, 19 nt, Artificial Sequence
  Description of Artificial Sequence: Synthetic oligonucleotide
cauuuuguugcuuaaugga

SEQ ID NO: 259283 - RNA, 19 nt, Artificial Sequence
  Description of Artificial Sequence: Synthetic oligonucleotide
agauguauuccucccacca

SEQ ID NO: 259284 - RNA, 19 nt, Artificial Sequence
  Description of Artificial Sequence: Synthetic oligonucleotide
uaacgcuuggacacuagca

SEQ ID NO: 259285 - RNA, 19 nt, Artificial Sequence
  Description of Artificial Sequence: Synthetic oligonucleotide
uugagggauggcauuuggg

SEQ ID NO: 259286 - RNA, 19 nt, Artificial Sequence
  Description of Artificial Sequence: Synthetic oligonucleotide
uauucccggagccagggca

SEQ ID NO: 259287 - RNA, 19 nt, Artificial Sequence
  Description of Artificial Sequence: Synthetic oligonucleotide
agcacccaucacuugagac

SEQ ID NO: 259288 - RNA, 19 nt, Artificial Sequence
  Description of Artificial Sequence: Synthetic oligonucleotide
ucaaaagauuucagggaac

SEQ ID NO: 259289 - RNA, 19 nt, Artificial Sequence
  Description of Artificial Sequence: Synthetic oligonucleotide
guagaguugcuguugacca

SEQ ID NO: 259290 - RNA, 19 nt, Artificial Sequence
  Description of Artificial Sequence: Synthetic oligonucleotide
caagaaucccauuagugca

SEQ ID NO: 259291 - RNA, 19 nt, Artificial Sequence
  Description of Artificial Sequence: Synthetic oligonucleotide
uuuggguccgagauugaca

SEQ ID NO: 259292 - RNA, 19 nt, Artificial Sequence
  Description of Artificial Sequence: Synthetic oligonucleotide
uugacggugaggccaaaca

SEQ ID NO: 259293 - RNA, 19 nt, Artificial Sequence
  Description of Artificial Sequence: Synthetic oligonucleotide
caaacaaguugauaauguc

SEQ ID NO: 259294 - RNA, 19 nt, Artificial Sequence
  Description of Artificial Sequence: Synthetic oligonucleotide
aguucuauaagagcaauuu

SEQ ID NO: 259295 - RNA, 19 nt, Artificial Sequence
  Description of Artificial Sequence: Synthetic oligonucleotide
cacucacauaauuuguggc

SEQ ID NO: 259296 - RNA, 19 nt, Artificial Sequence
  Description of Artificial Sequence: Synthetic oligonucleotide
guaggaaaccacugagggg

SEQ ID NO: 259297 - RNA, 19 nt, Artificial Sequence
  Description of Artificial Sequence: Synthetic oligonucleotide
acaccuauucauuugguuu

SEQ ID NO: 259298 - RNA, 19 nt, Artificial Sequence
  Description of Artificial Sequence: Synthetic oligonucleotide
caccuauucauuugguuug

SEQ ID NO: 259299 - RNA, 19 nt, Artificial Sequence
  Description of Artificial Sequence: Synthetic oligonucleotide
agggucgugcuucacacag

SEQ ID NO: 259300 - RNA, 19 nt, Artificial Sequence
  Description of Artificial Sequence: Synthetic oligonucleotide
aguagacaggauuaauuaa

SEQ ID NO: 259301 - RNA, 19 nt, Artificial Sequence
  Description of Artificial Sequence: Synthetic oligonucleotide
aacugcgagauacuuggau

SEQ ID NO: 259302 - RNA, 19 nt, Artificial Sequence
  Description of Artificial Sequence: Synthetic oligonucleotide
guaagacaugcauaagcug

SEQ ID NO: 259303 - RNA, 19 nt, Artificial Sequence
  Description of Artificial Sequence: Synthetic oligonucleotide
ucgccaguauuuuaaugcc

SEQ ID NO: 259304 - RNA, 19 nt, Artificial Sequence
  Description of Artificial Sequence: Synthetic oligonucleotide
ugcguuggaaaucuccuuc

SEQ ID NO: 259305 - RNA, 19 nt, Artificial Sequence
  Description of Artificial Sequence: Synthetic oligonucleotide
ggcuggagaacuuagaaga

SEQ ID NO: 259306 - RNA, 19 nt, Artificial Sequence
  Description of Artificial Sequence: Synthetic oligonucleotide
uguuggauggugucugucu

SEQ ID NO: 259307 - RNA, 19 nt, Artificial Sequence
  Description of Artificial Sequence: Synthetic oligonucleotide
gacguacacugugaaagcg

SEQ ID NO: 259308 - RNA, 19 nt, Artificial Sequence
  Description of Artificial Sequence: Synthetic oligonucleotide
guacacgacaaugugccgg

SEQ ID NO: 259309 - RNA, 19 nt, Artificial Sequence
  Description of Artificial Sequence: Synthetic oligonucleotide
uggccugacagauuccaag

SEQ ID NO: 259310 - RNA, 19 nt, Artificial Sequence
  Description of Artificial Sequence: Synthetic oligonucleotide
ugcccaauauucccggagc

SEQ ID NO: 259311 - RNA, 19 nt, Artificial Sequence
  Description of Artificial Sequence: Synthetic oligonucleotide
uuguauuacaagaguccgu

SEQ ID NO: 259312 - RNA, 19 nt, Artificial Sequence
  Description of Artificial Sequence: Synthetic oligonucleotide
caguaguccaggaauucgc

SEQ ID NO: 259313 - RNA, 19 nt, Artificial Sequence
  Description of Artificial Sequence: Synthetic oligonucleotide
ucacuugagaccccugagu

SEQ ID NO: 259314 - RNA, 19 nt, Artificial Sequence
  Description of Artificial Sequence: Synthetic oligonucleotide
gaaccuuaauccccaggcc

SEQ ID NO: 259315 - RNA, 19 nt, Artificial Sequence
  Description of Artificial Sequence: Synthetic oligonucleotide
ggugaggccaaacaaguug

SEQ ID NO: 259316 - RNA, 19 nt, Artificial Sequence
  Description of Artificial Sequence: Synthetic oligonucleotide
cugcgagauacuuggauac

SEQ ID NO: 259317 - RNA, 19 nt, Artificial Sequence
  Description of Artificial Sequence: Synthetic oligonucleotide
ucuuggaaaugugacuccc

SEQ ID NO: 259318 - RNA, 19 nt, Artificial Sequence
  Description of Artificial Sequence: Synthetic oligonucleotide
gcauaugguauuuauuuac

SEQ ID NO: 259319 - RNA, 19 nt, Artificial Sequence
  Description of Artificial Sequence: Synthetic oligonucleotide
aauucgccaguauuuuaau

SEQ ID NO: 259320 - RNA, 19 nt, Artificial Sequence
  Description of Artificial Sequence: Synthetic oligonucleotide
uccgagauugacagcaaaa

SEQ ID NO: 259321 - RNA, 19 nt, Artificial Sequence
  Description of Artificial Sequence: Synthetic oligonucleotide
caacagugagauuuaggug

SEQ ID NO: 259322 - RNA, 19 nt, Artificial Sequence
  Description of Artificial Sequence: Synthetic oligonucleotide
aucacuugagaccccugag

SEQ ID NO: 259323 - RNA, 19 nt, Artificial Sequence
  Description of Artificial Sequence: Synthetic oligonucleotide
gaugcgggagguauugucc

SEQ ID NO: 259324 - RNA, 19 nt, Artificial Sequence
  Description of Artificial Sequence: Synthetic oligonucleotide
acgcuuggacacuagcagg

SEQ ID NO: 259325 - RNA, 19 nt, Artificial Sequence
  Description of Artificial Sequence: Synthetic oligonucleotide
ugaccuagucuucuaugga

SEQ ID NO: 259326 - RNA, 19 nt, Artificial Sequence
  Description of Artificial Sequence: Synthetic oligonucleotide
ucccauuagugcauuacau

SEQ ID NO: 259327 - RNA, 19 nt, Artificial Sequence
  Description of Artificial Sequence: Synthetic oligonucleotide
agucaguggucaucaacag

SEQ ID NO: 259328 - RNA, 19 nt, Artificial Sequence
  Description of Artificial Sequence: Synthetic oligonucleotide
ugucaugcguuggaaaucu

SEQ ID NO: 259329 - RNA, 19 nt, Artificial Sequence
  Description of Artificial Sequence: Synthetic oligonucleotide
agaggaguguaacgcuugg

SEQ ID NO: 259330 - RNA, 19 nt, Artificial Sequence
  Description of Artificial Sequence: Synthetic oligonucleotide
gacggugaggccaaacaag

SEQ ID NO: 259331 - RNA, 19 nt, Artificial Sequence
  Description of Artificial Sequence: Synthetic oligonucleotide
auuuggguccgagauugac

SEQ ID NO: 259332 - RNA, 19 nt, Artificial Sequence
  Description of Artificial Sequence: Synthetic oligonucleotide
uugauguguuggauggugu

SEQ ID NO: 259333 - RNA, 19 nt, Artificial Sequence
  Description of Artificial Sequence: Synthetic oligonucleotide
auucgccaguauuuuaaug

SEQ ID NO: 259334 - RNA, 19 nt, Artificial Sequence
  Description of Artificial Sequence: Synthetic oligonucleotide
ugacggugaggccaaacaa

SEQ ID NO: 259335 - RNA, 19 nt, Artificial Sequence
  Description of Artificial Sequence: Synthetic oligonucleotide
aaaccuuggcugcgguaag

SEQ ID NO: 259336 - RNA, 19 nt, Artificial Sequence
  Description of Artificial Sequence: Synthetic oligonucleotide
gucgggguguuucucaaag

SEQ ID NO: 259337 - RNA, 19 nt, Artificial Sequence
  Description of Artificial Sequence: Synthetic oligonucleotide
uauggagccugugacuacc

SEQ ID NO: 259338 - RNA, 19 nt, Artificial Sequence
  Description of Artificial Sequence: Synthetic oligonucleotide
uguguuagcuucaguuguc

SEQ ID NO: 259339 - RNA, 19 nt, Artificial Sequence
  Description of Artificial Sequence: Synthetic oligonucleotide
uucaguugucaccuccacu

SEQ ID NO: 259340 - RNA, 19 nt, Artificial Sequence
  Description of Artificial Sequence: Synthetic oligonucleotide
uuuuaguagacaggauuaa

SEQ ID NO: 259341 - RNA, 19 nt, Artificial Sequence
  Description of Artificial Sequence: Synthetic oligonucleotide
acagaugguaaaccuucug

SEQ ID NO: 259342 - RNA, 19 nt, Artificial Sequence
  Description of Artificial Sequence: Synthetic oligonucleotide
aagcuacaaccccaguagu

SEQ ID NO: 259343 - RNA, 19 nt, Artificial Sequence
  Description of Artificial Sequence: Synthetic oligonucleotide
ugaaagcgcacccuuccuc

SEQ ID NO: 259344 - RNA, 19 nt, Artificial Sequence
  Description of Artificial Sequence: Synthetic oligonucleotide
uuuaguagacaggauuaau

SEQ ID NO: 259345 - RNA, 19 nt, Artificial Sequence
  Description of Artificial Sequence: Synthetic oligonucleotide
uguaacgcuuggacacuag

SEQ ID NO: 259346 - RNA, 19 nt, Artificial Sequence
  Description of Artificial Sequence: Synthetic oligonucleotide
aucccauuagugcauuaca

SEQ ID NO: 259347 - RNA, 19 nt, Artificial Sequence
  Description of Artificial Sequence: Synthetic oligonucleotide
aucucuacguaggaaacca

SEQ ID NO: 259348 - RNA, 19 nt, Artificial Sequence
  Description of Artificial Sequence: Synthetic oligonucleotide
cacccaucacuugagaccc

SEQ ID NO: 259349 - RNA, 19 nt, Artificial Sequence
  Description of Artificial Sequence: Synthetic oligonucleotide
uuugacggcugggacaggc

SEQ ID NO: 259350 - RNA, 19 nt, Artificial Sequence
  Description of Artificial Sequence: Synthetic oligonucleotide
uccauggcucagauaaaac

SEQ ID NO: 259351 - RNA, 19 nt, Artificial Sequence
  Description of Artificial Sequence: Synthetic oligonucleotide
ccauggcucagauaaaacc

SEQ ID NO: 259352 - RNA, 19 nt, Artificial Sequence
  Description of Artificial Sequence: Synthetic oligonucleotide
ucacauaauuuguggccca

SEQ ID NO: 259353 - RNA, 19 nt, Artificial Sequence
  Description of Artificial Sequence: Synthetic oligonucleotide
uagcacaggggcaggaacu

SEQ ID NO: 259354 - RNA, 19 nt, Artificial Sequence
  Description of Artificial Sequence: Synthetic oligonucleotide
acugcgagauacuuggaua

SEQ ID NO: 259355 - RNA, 19 nt, Artificial Sequence
  Description of Artificial Sequence: Synthetic oligonucleotide
cguaggaaaccacugaggg

SEQ ID NO: 259356 - RNA, 19 nt, Artificial Sequence
  Description of Artificial Sequence: Synthetic oligonucleotide
gaauucgccaguauuuuaa

SEQ ID NO: 259357 - RNA, 19 nt, Artificial Sequence
  Description of Artificial Sequence: Synthetic oligonucleotide
auuuauaguuuguccccga

SEQ ID NO: 259358 - RNA, 19 nt, Artificial Sequence
  Description of Artificial Sequence: Synthetic oligonucleotide
uuucgacguacacugugaa

SEQ ID NO: 259359 - RNA, 19 nt, Artificial Sequence
  Description of Artificial Sequence: Synthetic oligonucleotide
ugugugucuguaagacaug

SEQ ID NO: 259360 - RNA, 19 nt, Artificial Sequence
  Description of Artificial Sequence: Synthetic oligonucleotide
ugauguguuggaugguguc

SEQ ID NO: 259361 - RNA, 19 nt, Artificial Sequence
  Description of Artificial Sequence: Synthetic oligonucleotide
guaacgcuuggacacuagc

SEQ ID NO: 259362 - RNA, 19 nt, Artificial Sequence
  Description of Artificial Sequence: Synthetic oligonucleotide
agcauaugguauuuauuua

SEQ ID NO: 259363 - RNA, 19 nt, Artificial Sequence
  Description of Artificial Sequence: Synthetic oligonucleotide
auauucccggagccagggc

SEQ ID NO: 259364 - RNA, 19 nt, Artificial Sequence
  Description of Artificial Sequence: Synthetic oligonucleotide
gacaugcauaagcuguuca

SEQ ID NO: 259365 - RNA, 19 nt, Artificial Sequence
  Description of Artificial Sequence: Synthetic oligonucleotide
uuacauguguuagcuucag

SEQ ID NO: 259366 - RNA, 19 nt, Artificial Sequence
  Description of Artificial Sequence: Synthetic oligonucleotide
uggacagauuaggauacca

SEQ ID NO: 259367 - RNA, 19 nt, Artificial Sequence
  Description of Artificial Sequence: Synthetic oligonucleotide
aaugugccggcuguccuug

SEQ ID NO: 259368 - RNA, 19 nt, Artificial Sequence
  Description of Artificial Sequence: Synthetic oligonucleotide
ucacccuaagacuucucaa

SEQ ID NO: 259369 - RNA, 19 nt, Artificial Sequence
  Description of Artificial Sequence: Synthetic oligonucleotide
gaccuagucuucuauggaa

SEQ ID NO: 259370 - RNA, 19 nt, Artificial Sequence
  Description of Artificial Sequence: Synthetic oligonucleotide
agacgugugaggaugguga

SEQ ID NO: 259371 - RNA, 19 nt, Artificial Sequence
  Description of Artificial Sequence: Synthetic oligonucleotide
cuauggaagccacacucuc

SEQ ID NO: 259372 - RNA, 19 nt, Artificial Sequence
  Description of Artificial Sequence: Synthetic oligonucleotide
ccaacaagugugaagcuac

SEQ ID NO: 259373 - RNA, 19 nt, Artificial Sequence
  Description of Artificial Sequence: Synthetic oligonucleotide
uccagucccagguauuuau

SEQ ID NO: 259374 - RNA, 19 nt, Artificial Sequence
  Description of Artificial Sequence: Synthetic oligonucleotide
aaaccuccuucaggaaagg

SEQ ID NO: 259375 - RNA, 19 nt, Artificial Sequence
  Description of Artificial Sequence: Synthetic oligonucleotide
agagaugucuggaaacugu

SEQ ID NO: 259376 - RNA, 19 nt, Artificial Sequence
  Description of Artificial Sequence: Synthetic oligonucleotide
gugacuaccaagccccuca

SEQ ID NO: 259377 - RNA, 19 nt, Artificial Sequence
  Description of Artificial Sequence: Synthetic oligonucleotide
uccgucuuuaaggcacugg

SEQ ID NO: 259378 - RNA, 19 nt, Artificial Sequence
  Description of Artificial Sequence: Synthetic oligonucleotide
uaacacacuccugucauuu

SEQ ID NO: 259379 - RNA, 19 nt, Artificial Sequence
  Description of Artificial Sequence: Synthetic oligonucleotide
aggggagucaacugcgaga

SEQ ID NO: 259380 - RNA, 19 nt, Artificial Sequence
  Description of Artificial Sequence: Synthetic oligonucleotide
cucaacacccucuguuaac

SEQ ID NO: 259381 - RNA, 19 nt, Artificial Sequence
  Description of Artificial Sequence: Synthetic oligonucleotide
gcacccaucacuugagacc

SEQ ID NO: 259382 - RNA, 19 nt, Artificial Sequence
  Description of Artificial Sequence: Synthetic oligonucleotide
auugacggugaggccaaac

SEQ ID NO: 259383 - RNA, 19 nt, Artificial Sequence
  Description of Artificial Sequence: Synthetic oligonucleotide
ggaauugacggugaggcca

SEQ ID NO: 259384 - RNA, 19 nt, Artificial Sequence
  Description of Artificial Sequence: Synthetic oligonucleotide
auuacauguguuagcuuca

SEQ ID NO: 259385 - RNA, 19 nt, Artificial Sequence
  Description of Artificial Sequence: Synthetic oligonucleotide
gaagccacacucuccagcu

SEQ ID NO: 259386 - RNA, 19 nt, Artificial Sequence
  Description of Artificial Sequence: Synthetic oligonucleotide
aagaaucccauuagugcau

SEQ ID NO: 259387 - RNA, 19 nt, Artificial Sequence
  Description of Artificial Sequence: Synthetic oligonucleotide
aagugcuuacuuaggggca

SEQ ID NO: 259388 - RNA, 19 nt, Artificial Sequence
  Description of Artificial Sequence: Synthetic oligonucleotide
aaagcgcacccuuccuccu

SEQ ID NO: 259389 - RNA, 19 nt, Artificial Sequence
  Description of Artificial Sequence: Synthetic oligonucleotide
aggacacauagucggggug

SEQ ID NO: 259390 - RNA, 19 nt, Artificial Sequence
  Description of Artificial Sequence: Synthetic oligonucleotide
cuuucgacguacacuguga

SEQ ID NO: 259391 - RNA, 19 nt, Artificial Sequence
  Description of Artificial Sequence: Synthetic oligonucleotide
ucucuacguaggaaaccac

SEQ ID NO: 259392 - RNA, 19 nt, Artificial Sequence
  Description of Artificial Sequence: Synthetic oligonucleotide
uaccaaggggcuuccgucu

SEQ ID NO: 259393 - RNA, 19 nt, Artificial Sequence
  Description of Artificial Sequence: Synthetic oligonucleotide
gugcccaauauucccggag

SEQ ID NO: 259394 - RNA, 19 nt, Artificial Sequence
  Description of Artificial Sequence: Synthetic oligonucleotide
uuguugcuuaauggaacug

SEQ ID NO: 259395 - RNA, 19 nt, Artificial Sequence
  Description of Artificial Sequence: Synthetic oligonucleotide
guacagccagaccuugaag

SEQ ID NO: 259396 - RNA, 19 nt, Artificial Sequence
  Description of Artificial Sequence: Synthetic oligonucleotide
agguuagucaguggucauc

SEQ ID NO: 259397 - RNA, 19 nt, Artificial Sequence
  Description of Artificial Sequence: Synthetic oligonucleotide
cuucccaaaucggugugag

SEQ ID NO: 259398 - RNA, 19 nt, Artificial Sequence
  Description of Artificial Sequence: Synthetic oligonucleotide
cuuguuucacgugcuuccc

SEQ ID NO: 259399 - RNA, 19 nt, Artificial Sequence
  Description of Artificial Sequence: Synthetic oligonucleotide
guauagcaugggcuuucgg

SEQ ID NO: 259400 - RNA, 19 nt, Artificial Sequence
  Description of Artificial Sequence: Synthetic oligonucleotide
cacgugcuucccaaaucgg

SEQ ID NO: 259401 - RNA, 19 nt, Artificial Sequence
  Description of Artificial Sequence: Synthetic oligonucleotide
uuucggccugagaagacuu

SEQ ID NO: 259402 - RNA, 19 nt, Artificial Sequence
  Description of Artificial Sequence: Synthetic oligonucleotide
ggucgugcuucacacagug

SEQ ID NO: 259403 - RNA, 19 nt, Artificial Sequence
  Description of Artificial Sequence: Synthetic oligonucleotide
cacagguuagucagugguc

SEQ ID NO: 259404 - RNA, 19 nt, Artificial Sequence
  Description of Artificial Sequence: Synthetic oligonucleotide
cucggguaacacagguuag

SEQ ID NO: 259405 - RNA, 19 nt, Artificial Sequence
  Description of Artificial Sequence: Synthetic oligonucleotide
ucccacaauaauguacgaa

SEQ ID NO: 259406 - RNA, 19 nt, Artificial Sequence
  Description of Artificial Sequence: Synthetic oligonucleotide
ggauguagcagggucgugc

SEQ ID NO: 259407 - RNA, 19 nt, Artificial Sequence
  Description of Artificial Sequence: Synthetic oligonucleotide
uccuacaaucaggagcaac

SEQ ID NO: 259408 - RNA, 19 nt, Artificial Sequence
  Description of Artificial Sequence: Synthetic oligonucleotide
uucgacguacacugugaaa

SEQ ID NO: 259409 - RNA, 19 nt, Artificial Sequence
  Description of Artificial Sequence: Synthetic oligonucleotide
ugcgagauacuuggauacc

SEQ ID NO: 259410 - RNA, 19 nt, Artificial Sequence
  Description of Artificial Sequence: Synthetic oligonucleotide
augcgggagguauugucca

SEQ ID NO: 259411 - RNA, 19 nt, Artificial Sequence
  Description of Artificial Sequence: Synthetic oligonucleotide
cuacguaggaaaccacuga

SEQ ID NO: 259412 - RNA, 19 nt, Artificial Sequence
  Description of Artificial Sequence: Synthetic oligonucleotide
ggaguguaacgcuuggaca

SEQ ID NO: 259413 - RNA, 19 nt, Artificial Sequence
  Description of Artificial Sequence: Synthetic oligonucleotide
uagcaugggcuuucggccu

SEQ ID NO: 259414 - RNA, 19 nt, Artificial Sequence
  Description of Artificial Sequence: Synthetic oligonucleotide
ucggguaacacagguuagu

SEQ ID NO: 259415 - RNA, 19 nt, Artificial Sequence
  Description of Artificial Sequence: Synthetic oligonucleotide
gguauuguccauggcguag

SEQ ID NO: 259416 - RNA, 19 nt, Artificial Sequence
  Description of Artificial Sequence: Synthetic oligonucleotide
gagguauuguccauggcgu

SEQ ID NO: 259417 - RNA, 19 nt, Artificial Sequence
  Description of Artificial Sequence: Synthetic oligonucleotide
gagucaggcaccuuccagu

SEQ ID NO: 259418 - RNA, 19 nt, Artificial Sequence
  Description of Artificial Sequence: Synthetic oligonucleotide
gaguaggggaagugcuuac

SEQ ID NO: 259419 - RNA, 19 nt, Artificial Sequence
  Description of Artificial Sequence: Synthetic oligonucleotide
gauaaccuccauggcucag

SEQ ID NO: 259420 - RNA, 19 nt, Artificial Sequence
  Description of Artificial Sequence: Synthetic oligonucleotide
ucggugugagucugucuca

SEQ ID NO: 259421 - RNA, 19 nt, Artificial Sequence
  Description of Artificial Sequence: Synthetic oligonucleotide
cccauuagugcauuacaug

SEQ ID NO: 259422 - RNA, 19 nt, Artificial Sequence
  Description of Artificial Sequence: Synthetic oligonucleotide
uugaccaugagcggcccuc

SEQ ID NO: 259423 - RNA, 19 nt, Artificial Sequence
  Description of Artificial Sequence: Synthetic oligonucleotide
caucacuugagaccccuga

SEQ ID NO: 259424 - RNA, 19 nt, Artificial Sequence
  Description of Artificial Sequence: Synthetic oligonucleotide
auaguuuguccccgaggaa

SEQ ID NO: 259425 - RNA, 19 nt, Artificial Sequence
  Description of Artificial Sequence: Synthetic oligonucleotide
ggggcaggaacugagcaag

SEQ ID NO: 259426 - RNA, 19 nt, Artificial Sequence
  Description of Artificial Sequence: Synthetic oligonucleotide
cccucuguuaacacacucc

SEQ ID NO: 259427 - RNA, 19 nt, Artificial Sequence
  Description of Artificial Sequence: Synthetic oligonucleotide
aucaaaccuuggcugcggu

SEQ ID NO: 259428 - RNA, 19 nt, Artificial Sequence
  Description of Artificial Sequence: Synthetic oligonucleotide
ggagucaggcaccuuccag

SEQ ID NO: 259429 - RNA, 19 nt, Artificial Sequence
  Description of Artificial Sequence: Synthetic oligonucleotide
ugaggccaaacaaguugau

SEQ ID NO: 259430 - RNA, 19 nt, Artificial Sequence
  Description of Artificial Sequence: Synthetic oligonucleotide
cacgacaaugugccggcug

SEQ ID NO: 259431 - RNA, 19 nt, Artificial Sequence
  Description of Artificial Sequence: Synthetic oligonucleotide
ugugcccaauauucccgga

SEQ ID NO: 259432 - RNA, 19 nt, Artificial Sequence
  Description of Artificial Sequence: Synthetic oligonucleotide
caugcguuggaaaucuccu

SEQ ID NO: 259433 - RNA, 19 nt, Artificial Sequence
  Description of Artificial Sequence: Synthetic oligonucleotide
aguuuguccccgaggaagu

SEQ ID NO: 259434 - RNA, 19 nt, Artificial Sequence
  Description of Artificial Sequence: Synthetic oligonucleotide
uggcggucgaugccggcgc

SEQ ID NO: 259435 - RNA, 19 nt, Artificial Sequence
  Description of Artificial Sequence: Synthetic oligonucleotide
uagaguugcuguugaccau

SEQ ID NO: 259436 - RNA, 19 nt, Artificial Sequence
  Description of Artificial Sequence: Synthetic oligonucleotide
agggaugcgggagguauug

SEQ ID NO: 259437 - RNA, 19 nt, Artificial Sequence
  Description of Artificial Sequence: Synthetic oligonucleotide
cuauggagccugugacuac

SEQ ID NO: 259438 - RNA, 19 nt, Artificial Sequence
  Description of Artificial Sequence: Synthetic oligonucleotide
gguacacgacaaugugccg

SEQ ID NO: 259439 - RNA, 19 nt, Artificial Sequence
  Description of Artificial Sequence: Synthetic oligonucleotide
accaacaagugugaagcua

SEQ ID NO: 259440 - RNA, 19 nt, Artificial Sequence
  Description of Artificial Sequence: Synthetic oligonucleotide
aguaggggaagugcuuacu

SEQ ID NO: 259441 - RNA, 19 nt, Artificial Sequence
  Description of Artificial Sequence: Synthetic oligonucleotide
ucgggguguuucucaaagu

SEQ ID NO: 259442 - RNA, 19 nt, Artificial Sequence
  Description of Artificial Sequence: Synthetic oligonucleotide
gguauucugcuucuuggaa

SEQ ID NO: 259443 - RNA, 19 nt, Artificial Sequence
  Description of Artificial Sequence: Synthetic oligonucleotide
aguguaacgcuuggacacu

SEQ ID NO: 259444 - RNA, 19 nt, Artificial Sequence
  Description of Artificial Sequence: Synthetic oligonucleotide
caacacccucuguuaacac

SEQ ID NO: 259445 - RNA, 19 nt, Artificial Sequence
  Description of Artificial Sequence: Synthetic oligonucleotide
cuacaaccccaguagucca

SEQ ID NO: 259446 - RNA, 19 nt, Artificial Sequence
  Description of Artificial Sequence: Synthetic oligonucleotide
aggaauucgccaguauuuu

SEQ ID NO: 259447 - RNA, 19 nt, Artificial Sequence
  Description of Artificial Sequence: Synthetic oligonucleotide
cacauucacccuaagacuu

SEQ ID NO: 259448 - RNA, 19 nt, Artificial Sequence
  Description of Artificial Sequence: Synthetic oligonucleotide
ccauuagugcauuacaugu

SEQ ID NO: 259449 - RNA, 19 nt, Artificial Sequence
  Description of Artificial Sequence: Synthetic oligonucleotide
gggcuuccgucuuuaaggc

SEQ ID NO: 259450 - RNA, 19 nt, Artificial Sequence
  Description of Artificial Sequence: Synthetic oligonucleotide
cacauaauuuguggcccac

SEQ ID NO: 259451 - RNA, 19 nt, Artificial Sequence
  Description of Artificial Sequence: Synthetic oligonucleotide
agugcuuacuuaggggcau

SEQ ID NO: 259452 - RNA, 19 nt, Artificial Sequence
  Description of Artificial Sequence: Synthetic oligonucleotide
gugugaagcuacaacccca

SEQ ID NO: 259453 - RNA, 19 nt, Artificial Sequence
  Description of Artificial Sequence: Synthetic oligonucleotide
uguugaccaugagcggccc

SEQ ID NO: 259454 - RNA, 19 nt, Artificial Sequence
  Description of Artificial Sequence: Synthetic oligonucleotide
guauuguccauggcguaga

SEQ ID NO: 259455 - RNA, 19 nt, Artificial Sequence
  Description of Artificial Sequence: Synthetic oligonucleotide
agcgcacccuuccuccuug

SEQ ID NO: 259456 - RNA, 19 nt, Artificial Sequence
  Description of Artificial Sequence: Synthetic oligonucleotide
cucuacguaggaaaccacu

SEQ ID NO: 259457 - RNA, 19 nt, Artificial Sequence
  Description of Artificial Sequence: Synthetic oligonucleotide
aaccuuggcugcgguaaga

SEQ ID NO: 259458 - RNA, 19 nt, Artificial Sequence
  Description of Artificial Sequence: Synthetic oligonucleotide
gucccagguauuuauaguu

SEQ ID NO: 259459 - RNA, 19 nt, Artificial Sequence
  Description of Artificial Sequence: Synthetic oligonucleotide
cugcgguaagacuguuuug

SEQ ID NO: 259460 - RNA, 19 nt, Artificial Sequence
  Description of Artificial Sequence: Synthetic oligonucleotide
cauugagggauggcauuug

SEQ ID NO: 259461 - RNA, 19 nt, Artificial Sequence
  Description of Artificial Sequence: Synthetic oligonucleotide
gcagggucgugcuucacac

SEQ ID NO: 259462 - RNA, 19 nt, Artificial Sequence
  Description of Artificial Sequence: Synthetic oligonucleotide
ggguaacacagguuaguca

SEQ ID NO: 259463 - RNA, 19 nt, Artificial Sequence
  Description of Artificial Sequence: Synthetic oligonucleotide
gacuaccaagccccucaac

SEQ ID NO: 259464 - RNA, 19 nt, Artificial Sequence
  Description of Artificial Sequence: Synthetic oligonucleotide
cucccauugagggauggca

SEQ ID NO: 259465 - RNA, 19 nt, Artificial Sequence
  Description of Artificial Sequence: Synthetic oligonucleotide
cugucaugcguuggaaauc

SEQ ID NO: 259466 - RNA, 19 nt, Artificial Sequence
  Description of Artificial Sequence: Synthetic oligonucleotide
ccaguaguccaggaauucg

SEQ ID NO: 259467 - RNA, 19 nt, Artificial Sequence
  Description of Artificial Sequence: Synthetic oligonucleotide
uucccaaaucggugugagu

SEQ ID NO: 259468 - RNA, 19 nt, Artificial Sequence
  Description of Artificial Sequence: Synthetic oligonucleotide
gaauugacggugaggccaa

SEQ ID NO: 259469 - RNA, 19 nt, Artificial Sequence
  Description of Artificial Sequence: Synthetic oligonucleotide
ggugugagucugucucagg

SEQ ID NO: 259470 - RNA, 19 nt, Artificial Sequence
  Description of Artificial Sequence: Synthetic oligonucleotide
uccuuucgacguacacugu

SEQ ID NO: 259471 - RNA, 19 nt, Artificial Sequence
  Description of Artificial Sequence: Synthetic oligonucleotide
cgcuuggacacuagcaggg

SEQ ID NO: 259472 - RNA, 19 nt, Artificial Sequence
  Description of Artificial Sequence: Synthetic oligonucleotide
ccuuucgacguacacugug

SEQ ID NO: 259473 - RNA, 19 nt, Artificial Sequence
  Description of Artificial Sequence: Synthetic oligonucleotide
agucaacugcgagauacuu

SEQ ID NO: 259474 - RNA, 19 nt, Artificial Sequence
  Description of Artificial Sequence: Synthetic oligonucleotide
augcguuggaaaucuccuu

SEQ ID NO: 259475 - RNA, 19 nt, Artificial Sequence
  Description of Artificial Sequence: Synthetic oligonucleotide
uccucggguaacacagguu

SEQ ID NO: 259476 - RNA, 19 nt, Artificial Sequence
  Description of Artificial Sequence: Synthetic oligonucleotide
agagaggaguguaacgcuu

SEQ ID NO: 259477 - RNA, 19 nt, Artificial Sequence
  Description of Artificial Sequence: Synthetic oligonucleotide
cguagaguugcuguugacc

SEQ ID NO: 259478 - RNA, 19 nt, Artificial Sequence
  Description of Artificial Sequence: Synthetic oligonucleotide
aauuuggguccgagauuga

SEQ ID NO: 259479 - RNA, 19 nt, Artificial Sequence
  Description of Artificial Sequence: Synthetic oligonucleotide
ccaaacaaguugauaaugu

SEQ ID NO: 259480 - RNA, 19 nt, Artificial Sequence
  Description of Artificial Sequence: Synthetic oligonucleotide
agguauuguccauggcgua

SEQ ID NO: 259481 - RNA, 19 nt, Artificial Sequence
  Description of Artificial Sequence: Synthetic oligonucleotide
uccccgaggaagucuuguc

SEQ ID NO: 259482 - RNA, 19 nt, Artificial Sequence
  Description of Artificial Sequence: Synthetic oligonucleotide
gggcuuucggccugagaag

SEQ ID NO: 259483 - RNA, 19 nt, Artificial Sequence
  Description of Artificial Sequence: Synthetic oligonucleotide
ugugccggcuguccuugau

SEQ ID NO: 259484 - RNA, 19 nt, Artificial Sequence
  Description of Artificial Sequence: Synthetic oligonucleotide
aaccggcccaaagccaccu

SEQ ID NO: 259485 - RNA, 19 nt, Artificial Sequence
  Description of Artificial Sequence: Synthetic oligonucleotide
cagcuacauucauccacac

SEQ ID NO: 259486 - RNA, 19 nt, Artificial Sequence
  Description of Artificial Sequence: Synthetic oligonucleotide
cccgaggaagucuugucac

SEQ ID NO: 259487 - RNA, 19 nt, Artificial Sequence
  Description of Artificial Sequence: Synthetic oligonucleotide
uucggccugagaagacuuu

SEQ ID NO: 259488 - RNA, 19 nt, Artificial Sequence
  Description of Artificial Sequence: Synthetic oligonucleotide
cgagauugacagcaaaauc

SEQ ID NO: 259489 - RNA, 19 nt, Artificial Sequence
  Description of Artificial Sequence: Synthetic oligonucleotide
gaugccggcgcccgcuguc

SEQ ID NO: 259490 - RNA, 19 nt, Artificial Sequence
  Description of Artificial Sequence: Synthetic oligonucleotide
aggcacucccauugaggga

SEQ ID NO: 259491 - RNA, 19 nt, Artificial Sequence
  Description of Artificial Sequence: Synthetic oligonucleotide
uggguccgagauugacagc

SEQ ID NO: 259492 - RNA, 19 nt, Artificial Sequence
  Description of Artificial Sequence: Synthetic oligonucleotide
gucgugcuucacacagugg

SEQ ID NO: 259493 - RNA, 19 nt, Artificial Sequence
  Description of Artificial Sequence: Synthetic oligonucleotide
caaccggcccaaagccacc

SEQ ID NO: 259494 - RNA, 19 nt, Artificial Sequence
  Description of Artificial Sequence: Synthetic oligonucleotide
acuuaccaaggggcuuccg

SEQ ID NO: 259495 - RNA, 19 nt, Artificial Sequence
  Description of Artificial Sequence: Synthetic oligonucleotide
aagcgcacccuuccuccuu

SEQ ID NO: 259496 - RNA, 19 nt, Artificial Sequence
  Description of Artificial Sequence: Synthetic oligonucleotide
ggcgcacugucaagaaagg

SEQ ID NO: 259497 - RNA, 19 nt, Artificial Sequence
  Description of Artificial Sequence: Synthetic oligonucleotide
aggcgcggcagagaugucu

SEQ ID NO: 259498 - RNA, 19 nt, Artificial Sequence
  Description of Artificial Sequence: Synthetic oligonucleotide
agggcgcacugucaagaaa

SEQ ID NO: 259499 - RNA, 19 nt, Artificial Sequence
  Description of Artificial Sequence: Synthetic oligonucleotide
ggcguagaguugcuguuga

SEQ ID NO: 259500 - RNA, 19 nt, Artificial Sequence
  Description of Artificial Sequence: Synthetic oligonucleotide
acuggguuuugaagacgug

SEQ ID NO: 259501 - RNA, 19 nt, Artificial Sequence
  Description of Artificial Sequence: Synthetic oligonucleotide
gagacagaugguaaaccuu

SEQ ID NO: 259502 - RNA, 19 nt, Artificial Sequence
  Description of Artificial Sequence: Synthetic oligonucleotide
guccgagauugacagcaaa

SEQ ID NO: 259503 - RNA, 19 nt, Artificial Sequence
  Description of Artificial Sequence: Synthetic oligonucleotide
caaucaggagcaacaccua

SEQ ID NO: 259504 - RNA, 19 nt, Artificial Sequence
  Description of Artificial Sequence: Synthetic oligonucleotide
caguggccugacagauucc

SEQ ID NO: 259505 - RNA, 19 nt, Artificial Sequence
  Description of Artificial Sequence: Synthetic oligonucleotide
gagggcgcacugucaagaa

SEQ ID NO: 259506 - RNA, 19 nt, Artificial Sequence
  Description of Artificial Sequence: Synthetic oligonucleotide
acgugugaggauggugaca

SEQ ID NO: 259507 - RNA, 19 nt, Artificial Sequence
  Description of Artificial Sequence: Synthetic oligonucleotide
agcaaccggcccaaagcca

SEQ ID NO: 259508 - RNA, 19 nt, Artificial Sequence
  Description of Artificial Sequence: Synthetic oligonucleotide
ggaauucgccaguauuuua

SEQ ID NO: 259509 - RNA, 19 nt, Artificial Sequence
  Description of Artificial Sequence: Synthetic oligonucleotide
gcgagauacuuggauacca

SEQ ID NO: 259510 - RNA, 19 nt, Artificial Sequence
  Description of Artificial Sequence: Synthetic oligonucleotide
guaggggaagugcuuacuu

SEQ ID NO: 259511 - RNA, 19 nt, Artificial Sequence
  Description of Artificial Sequence: Synthetic oligonucleotide
ccucggguaacacagguua

SEQ ID NO: 259512 - RNA, 19 nt, Artificial Sequence
  Description of Artificial Sequence: Synthetic oligonucleotide
gcaaccggcccaaagccac

SEQ ID NO: 259513 - RNA, 19 nt, Artificial Sequence
  Description of Artificial Sequence: Synthetic oligonucleotide
guacacugugaaagcgcac

SEQ ID NO: 259514 - RNA, 19 nt, Artificial Sequence
  Description of Artificial Sequence: Synthetic oligonucleotide
guuagucaguggucaucaa

SEQ ID NO: 259515 - RNA, 19 nt, Artificial Sequence
  Description of Artificial Sequence: Synthetic oligonucleotide
cacuuaccaaggggcuucc

SEQ ID NO: 259516 - RNA, 19 nt, Artificial Sequence
  Description of Artificial Sequence: Synthetic oligonucleotide
accaaggggcuuccgucuu

SEQ ID NO: 259517 - RNA, 19 nt, Artificial Sequence
  Description of Artificial Sequence: Synthetic oligonucleotide
cucccacaauaauguacga

SEQ ID NO: 259518 - RNA, 19 nt, Artificial Sequence
  Description of Artificial Sequence: Synthetic oligonucleotide
ggcuuucggccugagaaga

SEQ ID NO: 259519 - RNA, 19 nt, Artificial Sequence
  Description of Artificial Sequence: Synthetic oligonucleotide
gcugcgguaagacuguuuu

SEQ ID NO: 259520 - RNA, 19 nt, Artificial Sequence
  Description of Artificial Sequence: Synthetic oligonucleotide
ggcugucacccacagcaga

SEQ ID NO: 259521 - RNA, 19 nt, Artificial Sequence
  Description of Artificial Sequence: Synthetic oligonucleotide
ggccugacagauuccaagu

SEQ ID NO: 259522 - RNA, 19 nt, Artificial Sequence
  Description of Artificial Sequence: Synthetic oligonucleotide
ggcuuacuguuuguuucug

SEQ ID NO: 259523 - RNA, 19 nt, Artificial Sequence
  Description of Artificial Sequence: Synthetic oligonucleotide
gugaaagcgcacccuuccu

SEQ ID NO: 259524 - RNA, 19 nt, Artificial Sequence
  Description of Artificial Sequence: Synthetic oligonucleotide
ccucuguuaacacacuccu

SEQ ID NO: 259525 - RNA, 19 nt, Artificial Sequence
  Description of Artificial Sequence: Synthetic oligonucleotide
ggaguaggggaagugcuua

SEQ ID NO: 259526 - RNA, 19 nt, Artificial Sequence
  Description of Artificial Sequence: Synthetic oligonucleotide
agacagcauaugguauuua

SEQ ID NO: 259527 - RNA, 19 nt, Artificial Sequence
  Description of Artificial Sequence: Synthetic oligonucleotide
cuuucggccugagaagacu

SEQ ID NO: 259528 - RNA, 19 nt, Artificial Sequence
  Description of Artificial Sequence: Synthetic oligonucleotide
ccacuuaccaaggggcuuc

SEQ ID NO: 259529 - RNA, 19 nt, Artificial Sequence
  Description of Artificial Sequence: Synthetic oligonucleotide
gcuuggacacuagcagggc

SEQ ID NO: 259530 - RNA, 19 nt, Artificial Sequence
  Description of Artificial Sequence: Synthetic oligonucleotide
caacugcgagauacuugga

SEQ ID NO: 259531 - RNA, 19 nt, Artificial Sequence
  Description of Artificial Sequence: Synthetic oligonucleotide
guaacacagguuagucagu

SEQ ID NO: 259532 - RNA, 19 nt, Artificial Sequence
  Description of Artificial Sequence: Synthetic oligonucleotide
ggcgcggcagagaugucug

SEQ ID NO: 259533 - RNA, 19 nt, Artificial Sequence
  Description of Artificial Sequence: Synthetic oligonucleotide
cuccucggguaacacaggu

SEQ ID NO: 259534 - RNA, 19 nt, Artificial Sequence
  Description of Artificial Sequence: Synthetic oligonucleotide
ggcuuccgucuuuaaggca

SEQ ID NO: 259535 - RNA, 19 nt, Artificial Sequence
  Description of Artificial Sequence: Synthetic oligonucleotide
gaagacgugugaggauggu

SEQ ID NO: 259536 - RNA, 19 nt, Artificial Sequence
  Description of Artificial Sequence: Synthetic oligonucleotide
ggggagucaacugcgagau

SEQ ID NO: 259537 - RNA, 19 nt, Artificial Sequence
  Description of Artificial Sequence: Synthetic oligonucleotide
caaaucggugugagucugu

SEQ ID NO: 259538 - RNA, 19 nt, Artificial Sequence
  Description of Artificial Sequence: Synthetic oligonucleotide
cagggucgugcuucacaca

SEQ ID NO: 259539 - RNA, 19 nt, Artificial Sequence
  Description of Artificial Sequence: Synthetic oligonucleotide
ggaaaucuccuuccuucau

SEQ ID NO: 259540 - RNA, 19 nt, Artificial Sequence
  Description of Artificial Sequence: Synthetic oligonucleotide
guguaacgcuuggacacua

SEQ ID NO: 259541 - RNA, 19 nt, Artificial Sequence
  Description of Artificial Sequence: Synthetic oligonucleotide
cacaugcauuucuaagauu

SEQ ID NO: 259542 - RNA, 19 nt, Artificial Sequence
  Description of Artificial Sequence: Synthetic oligonucleotide
gugcuuacuuaggggcauc

SEQ ID NO: 259543 - RNA, 19 nt, Artificial Sequence
  Description of Artificial Sequence: Synthetic oligonucleotide
gcguagaguugcuguugac

SEQ ID NO: 259544 - RNA, 19 nt, Artificial Sequence
  Description of Artificial Sequence: Synthetic oligonucleotide
ccagcgcugucaugcguug

SEQ ID NO: 259545 - RNA, 19 nt, Artificial Sequence
  Description of Artificial Sequence: Synthetic oligonucleotide
caugggcuuucggccugag

SEQ ID NO: 259546 - RNA, 19 nt, Artificial Sequence
  Description of Artificial Sequence: Synthetic oligonucleotide
gucaugcguuggaaaucuc

SEQ ID NO: 259547 - RNA, 19 nt, Artificial Sequence
  Description of Artificial Sequence: Synthetic oligonucleotide
guaccugcucacagugucu

SEQ ID NO: 259548 - RNA, 19 nt, Artificial Sequence
  Description of Artificial Sequence: Synthetic oligonucleotide
caugagcggcccucggccu

SEQ ID NO: 259549 - RNA, 19 nt, Artificial Sequence
  Description of Artificial Sequence: Synthetic oligonucleotide
gcuuucggccugagaagac

SEQ ID NO: 259550 - RNA, 19 nt, Artificial Sequence
  Description of Artificial Sequence: Synthetic oligonucleotide
gcaauuuggguccgagauu

SEQ ID NO: 259551 - RNA, 19 nt, Artificial Sequence
  Description of Artificial Sequence: Synthetic oligonucleotide
cccgcugucugcagccgug

SEQ ID NO: 259552 - RNA, 19 nt, Artificial Sequence
  Description of Artificial Sequence: Synthetic oligonucleotide
cggguaacacagguuaguc

SEQ ID NO: 259553 - RNA, 19 nt, Artificial Sequence
  Description of Artificial Sequence: Synthetic oligonucleotide
augccggcgcccgcugucu

SEQ ID NO: 259554 - RNA, 19 nt, Artificial Sequence
  Description of Artificial Sequence: Synthetic oligonucleotide
cccucaacacccucuguua

SEQ ID NO: 259555 - RNA, 19 nt, Artificial Sequence
  Description of Artificial Sequence: Synthetic oligonucleotide
guggccugacagauuccaa

SEQ ID NO: 259556 - RNA, 19 nt, Artificial Sequence
  Description of Artificial Sequence: Synthetic oligonucleotide
agucugucucagggcugga

SEQ ID NO: 259557 - RNA, 19 nt, Artificial Sequence
  Description of Artificial Sequence: Synthetic oligonucleotide
cagguuagucaguggucau

SEQ ID NO: 259558 - RNA, 19 nt, Artificial Sequence
  Description of Artificial Sequence: Synthetic oligonucleotide
auccuacaaucaggagcaa

SEQ ID NO: 259559 - RNA, 19 nt, Artificial Sequence
  Description of Artificial Sequence: Synthetic oligonucleotide
cccaaaucggugugagucu

SEQ ID NO: 259560 - RNA, 19 nt, Artificial Sequence
  Description of Artificial Sequence: Synthetic oligonucleotide
ccgagauugacagcaaaau

SEQ ID NO: 259561 - RNA, 19 nt, Artificial Sequence
  Description of Artificial Sequence: Synthetic oligonucleotide
ccacugcaauuuggguccg

SEQ ID NO: 259562 - RNA, 19 nt, Artificial Sequence
  Description of Artificial Sequence: Synthetic oligonucleotide
gguccgagauugacagcaa

SEQ ID NO: 259563 - RNA, 19 nt, Artificial Sequence
  Description of Artificial Sequence: Synthetic oligonucleotide
cccuaagacuucucaaauu

SEQ ID NO: 259564 - RNA, 19 nt, Artificial Sequence
  Description of Artificial Sequence: Synthetic oligonucleotide
cacugcaauuuggguccga

SEQ ID NO: 259565 - RNA, 19 nt, Artificial Sequence
  Description of Artificial Sequence: Synthetic oligonucleotide
cccacaaguugaugucugu

SEQ ID NO: 259566 - RNA, 19 nt, Artificial Sequence
  Description of Artificial Sequence: Synthetic oligonucleotide
caaggccagagggcgcacu

SEQ ID NO: 259567 - RNA, 19 nt, Artificial Sequence
  Description of Artificial Sequence: Synthetic oligonucleotide
cccauugagggauggcauu

SEQ ID NO: 259568 - RNA, 19 nt, Artificial Sequence
  Description of Artificial Sequence: Synthetic oligonucleotide
cccaccagucacucacaua

SEQ ID NO: 259569 - RNA, 19 nt, Artificial Sequence
  Description of Artificial Sequence: Synthetic oligonucleotide
gggagucaacugcgagaua

SEQ ID NO: 259570 - RNA, 19 nt, Artificial Sequence
  Description of Artificial Sequence: Synthetic oligonucleotide
ccuauucauuugguuugua

SEQ ID NO: 259571 - RNA, 19 nt, Artificial Sequence
  Description of Artificial Sequence: Synthetic oligonucleotide
gcgcugucaugcguuggaa

SEQ ID NO: 259572 - RNA, 19 nt, Artificial Sequence
  Description of Artificial Sequence: Synthetic oligonucleotide
gugugaggauggugacauu

SEQ ID NO: 259573 - RNA, 19 nt, Artificial Sequence
  Description of Artificial Sequence: Synthetic oligonucleotide
gcaaggccagagggcgcac

SEQ ID NO: 259574 - RNA, 19 nt, Artificial Sequence
  Description of Artificial Sequence: Synthetic oligonucleotide
gccagcgcugucaugcguu

SEQ ID NO: 259575 - RNA, 19 nt, Artificial Sequence
  Description of Artificial Sequence: Synthetic oligonucleotide
gccgugagggcggccagcu

SEQ ID NO: 259576 - RNA, 19 nt, Artificial Sequence
  Description of Artificial Sequence: Synthetic oligonucleotide
gccucgcagguagauguau

SEQ ID NO: 259577 - RNA, 19 nt, Artificial Sequence
  Description of Artificial Sequence: Synthetic oligonucleotide
gggucgugcuucacacagu

SEQ ID NO: 259578 - RNA, 19 nt, Artificial Sequence
  Description of Artificial Sequence: Synthetic oligonucleotide
gggaugcgggagguauugu

SEQ ID NO: 259579 - RNA, 19 nt, Artificial Sequence
  Description of Artificial Sequence: Synthetic oligonucleotide
ggccucgcagguagaugua

SEQ ID NO: 259580 - RNA, 19 nt, Artificial Sequence
  Description of Artificial Sequence: Synthetic oligonucleotide
ggcugcgguaagacuguuu

SEQ ID NO: 259581 - RNA, 19 nt, Artificial Sequence
  Description of Artificial Sequence: Synthetic oligonucleotide
gcgcacccuuccuccuugu

SEQ ID NO: 259582 - RNA, 19 nt, Artificial Sequence
  Description of Artificial Sequence: Synthetic oligonucleotide
ccgugagggcggccagcuu

SEQ ID NO: 259583 - RNA, 19 nt, Artificial Sequence
  Description of Artificial Sequence: Synthetic oligonucleotide
aagucgaugaaguaaaacc

SEQ ID NO: 259584 - RNA, 19 nt, Artificial Sequence
  Description of Artificial Sequence: Synthetic oligonucleotide
uuuaaguucacucaaauga

SEQ ID NO: 259585 - RNA, 19 nt, Artificial Sequence
  Description of Artificial Sequence: Synthetic oligonucleotide
agauaauucaaugugaccc

SEQ ID NO: 259586 - RNA, 19 nt, Artificial Sequence
  Description of Artificial Sequence: Synthetic oligonucleotide
uaaaaugacguuaagacac

SEQ ID NO: 259587 - RNA, 19 nt, Artificial Sequence
  Description of Artificial Sequence: Synthetic oligonucleotide
acaguaaagacucggaccc

SEQ ID NO: 259588 - RNA, 19 nt, Artificial Sequence
  Description of Artificial Sequence: Synthetic oligonucleotide
acuacuacuaaacuggguc

SEQ ID NO: 259589 - RNA, 19 nt, Artificial Sequence
  Description of Artificial Sequence: Synthetic oligonucleotide
cuguaagugacuuauaacc

SEQ ID NO: 259590 - RNA, 19 nt, Artificial Sequence
  Description of Artificial Sequence: Synthetic oligonucleotide
uuuugaacaucccauaagc

SEQ ID NO: 259591 - RNA, 19 nt, Artificial Sequence
  Description of Artificial Sequence: Synthetic oligonucleotide
ucagcauuauaaaaugacg

SEQ ID NO: 259592 - RNA, 19 nt, Artificial Sequence
  Description of Artificial Sequence: Synthetic oligonucleotide
guuacuucggguaagaagg

SEQ ID NO: 259593 - RNA, 19 nt, Artificial Sequence
  Description of Artificial Sequence: Synthetic oligonucleotide
uuuccgauuauaaaggucu

SEQ ID NO: 259594 - RNA, 19 nt, Artificial Sequence
  Description of Artificial Sequence: Synthetic oligonucleotide
uauacacuaaggacaaugg

SEQ ID NO: 259595 - RNA, 19 nt, Artificial Sequence
  Description of Artificial Sequence: Synthetic oligonucleotide
gauaauguagauuugaagu

SEQ ID NO: 259596 - RNA, 19 nt, Artificial Sequence
  Description of Artificial Sequence: Synthetic oligonucleotide
ugauaaugacuucaaauca

SEQ ID NO: 259597 - RNA, 19 nt, Artificial Sequence
  Description of Artificial Sequence: Synthetic oligonucleotide
agcucaauaaauccagagc

SEQ ID NO: 259598 - RNA, 19 nt, Artificial Sequence
  Description of Artificial Sequence: Synthetic oligonucleotide
cauacaagaaaccggagcc

SEQ ID NO: 259599 - RNA, 19 nt, Artificial Sequence
  Description of Artificial Sequence: Synthetic oligonucleotide
aacaauaagugcaugaacu

SEQ ID NO: 259600 - RNA, 19 nt, Artificial Sequence
  Description of Artificial Sequence: Synthetic oligonucleotide
aaucacucgauaaacacag

SEQ ID NO: 259601 - RNA, 19 nt, Artificial Sequence
  Description of Artificial Sequence: Synthetic oligonucleotide
ucaugaguccaacucaggg

SEQ ID NO: 259602 - RNA, 19 nt, Artificial Sequence
  Description of Artificial Sequence: Synthetic oligonucleotide
ugugaguaaacuuucuggc

SEQ ID NO: 259603 - RNA, 19 nt, Artificial Sequence
  Description of Artificial Sequence: Synthetic oligonucleotide
acucgauaaacacagagca

SEQ ID NO: 259604 - RNA, 19 nt, Artificial Sequence
  Description of Artificial Sequence: Synthetic oligonucleotide
augugaguaaacuuucugg

SEQ ID NO: 259605 - RNA, 19 nt, Artificial Sequence
  Description of Artificial Sequence: Synthetic oligonucleotide
aaacugggcaucuagacaa

SEQ ID NO: 259606 - RNA, 19 nt, Artificial Sequence
  Description of Artificial Sequence: Synthetic oligonucleotide
ucugugaccacugauaaug

SEQ ID NO: 259607 - RNA, 19 nt, Artificial Sequence
  Description of Artificial Sequence: Synthetic oligonucleotide
aaguucacucaaaugauac

SEQ ID NO: 259608 - RNA, 19 nt, Artificial Sequence
  Description of Artificial Sequence: Synthetic oligonucleotide
ucgauaaacacagagcaag

SEQ ID NO: 259609 - RNA, 19 nt, Artificial Sequence
  Description of Artificial Sequence: Synthetic oligonucleotide
uaguccauuauuuacagau

SEQ ID NO: 259610 - RNA, 19 nt, Artificial Sequence
  Description of Artificial Sequence: Synthetic oligonucleotide
ucacucgauaaacacagag

SEQ ID NO: 259611 - RNA, 19 nt, Artificial Sequence
  Description of Artificial Sequence: Synthetic oligonucleotide
uacaguaaagacucggacc

SEQ ID NO: 259612 - RNA, 19 nt, Artificial Sequence
  Description of Artificial Sequence: Synthetic oligonucleotide
uguauacuggaauaugaug

SEQ ID NO: 259613 - RNA, 19 nt, Artificial Sequence
  Description of Artificial Sequence: Synthetic oligonucleotide
aguucguuugccuugagga

SEQ ID NO: 259614 - RNA, 19 nt, Artificial Sequence
  Description of Artificial Sequence: Synthetic oligonucleotide
uguggaguaaguuccagug

SEQ ID NO: 259615 - RNA, 19 nt, Artificial Sequence
  Description of Artificial Sequence: Synthetic oligonucleotide
uuugaugacuauugucugg

SEQ ID NO: 259616 - RNA, 19 nt, Artificial Sequence
  Description of Artificial Sequence: Synthetic oligonucleotide
auaaaaugacguuaagaca

SEQ ID NO: 259617 - RNA, 19 nt, Artificial Sequence
  Description of Artificial Sequence: Synthetic oligonucleotide
uaaguaacauacuacuacu

SEQ ID NO: 259618 - RNA, 19 nt, Artificial Sequence
  Description of Artificial Sequence: Synthetic oligonucleotide
aaugacguuaagacacugc

SEQ ID NO: 259619 - RNA, 19 nt, Artificial Sequence
  Description of Artificial Sequence: Synthetic oligonucleotide
aauuaguccauuauuuaca

SEQ ID NO: 259620 - RNA, 19 nt, Artificial Sequence
  Description of Artificial Sequence: Synthetic oligonucleotide
uguuacucgggcaauuuug

SEQ ID NO: 259621 - RNA, 19 nt, Artificial Sequence
  Description of Artificial Sequence: Synthetic oligonucleotide
guaagaaggaauauagcag

SEQ ID NO: 259622 - RNA, 19 nt, Artificial Sequence
  Description of Artificial Sequence: Synthetic oligonucleotide
aagacaaguaccagcaauc

SEQ ID NO: 259623 - RNA, 19 nt, Artificial Sequence
  Description of Artificial Sequence: Synthetic oligonucleotide
ucacuguuauacacuaagg

SEQ ID NO: 259624 - RNA, 19 nt, Artificial Sequence
  Description of Artificial Sequence: Synthetic oligonucleotide
auaauggaaugcaaauugc

SEQ ID NO: 259625 - RNA, 19 nt, Artificial Sequence
  Description of Artificial Sequence: Synthetic oligonucleotide
ugauacaguaaagacucgg

SEQ ID NO: 259626 - RNA, 19 nt, Artificial Sequence
  Description of Artificial Sequence: Synthetic oligonucleotide
uaauggaaugcaaauugcu

SEQ ID NO: 259627 - RNA, 19 nt, Artificial Sequence
  Description of Artificial Sequence: Synthetic oligonucleotide
caauuaguccauuauuuac

SEQ ID NO: 259628 - RNA, 19 nt, Artificial Sequence
  Description of Artificial Sequence: Synthetic oligonucleotide
uucgccuuuucacaaaaug

SEQ ID NO: 259629 - RNA, 19 nt, Artificial Sequence
  Description of Artificial Sequence: Synthetic oligonucleotide
aacccgaaugaaaacuugc

SEQ ID NO: 259630 - RNA, 19 nt, Artificial Sequence
  Description of Artificial Sequence: Synthetic oligonucleotide
ugaacaucccauaagcaua

SEQ ID NO: 259631 - RNA, 19 nt, Artificial Sequence
  Description of Artificial Sequence: Synthetic oligonucleotide
gauaaugacuucaaaucac

SEQ ID NO: 259632 - RNA, 19 nt, Artificial Sequence
  Description of Artificial Sequence: Synthetic oligonucleotide
aaguucguuugccuugagg

SEQ ID NO: 259633 - RNA, 19 nt, Artificial Sequence
  Description of Artificial Sequence: Synthetic oligonucleotide
cuuagugagacgagagucc

SEQ ID NO: 259634 - RNA, 19 nt, Artificial Sequence
  Description of Artificial Sequence: Synthetic oligonucleotide
aauaccaauuaguccauua

SEQ ID NO: 259635 - RNA, 19 nt, Artificial Sequence
  Description of Artificial Sequence: Synthetic oligonucleotide
aaacuuagugagacgagag

SEQ ID NO: 259636 - RNA, 19 nt, Artificial Sequence
  Description of Artificial Sequence: Synthetic oligonucleotide
aucagcgagagcaaaggcc

SEQ ID NO: 259637 - RNA, 19 nt, Artificial Sequence
  Description of Artificial Sequence: Synthetic oligonucleotide
ucgaggguaauaaggaaac

SEQ ID NO: 259638 - RNA, 19 nt, Artificial Sequence
  Description of Artificial Sequence: Synthetic oligonucleotide
uggaauaugaugacucuau

SEQ ID NO: 259639 - RNA, 19 nt, Artificial Sequence
  Description of Artificial Sequence: Synthetic oligonucleotide
aguaacauacuacuacuaa

SEQ ID NO: 259640 - RNA, 19 nt, Artificial Sequence
  Description of Artificial Sequence: Synthetic oligonucleotide
ugacucuauagacuggcca

SEQ ID NO: 259641 - RNA, 19 nt, Artificial Sequence
  Description of Artificial Sequence: Synthetic oligonucleotide
uucgaggguaauaaggaaa

SEQ ID NO: 259642 - RNA, 19 nt, Artificial Sequence
  Description of Artificial Sequence: Synthetic oligonucleotide
gaagguuggauucauccuc

SEQ ID NO: 259643 - RNA, 19 nt, Artificial Sequence
  Description of Artificial Sequence: Synthetic oligonucleotide
uacauauagccaccgaaaa

SEQ ID NO: 259644 - RNA, 19 nt, Artificial Sequence
  Description of Artificial Sequence: Synthetic oligonucleotide
aaccggagccuccacagag

SEQ ID NO: 259645 - RNA, 19 nt, Artificial Sequence
  Description of Artificial Sequence: Synthetic oligonucleotide
guaauggcgucuucaaugc

SEQ ID NO: 259646 - RNA, 19 nt, Artificial Sequence
  Description of Artificial Sequence: Synthetic oligonucleotide
ugauuuucgaggguaauaa

SEQ ID NO: 259647 - RNA, 19 nt, Artificial Sequence
  Description of Artificial Sequence: Synthetic oligonucleotide
acuccuagcaucucuauau

SEQ ID NO: 259648 - RNA, 19 nt, Artificial Sequence
  Description of Artificial Sequence: Synthetic oligonucleotide
uguaaagcucccaaauuua

SEQ ID NO: 259649 - RNA, 19 nt, Artificial Sequence
  Description of Artificial Sequence: Synthetic oligonucleotide
agacaaguaccagcaaucc

SEQ ID NO: 259650 - RNA, 19 nt, Artificial Sequence
  Description of Artificial Sequence: Synthetic oligonucleotide
aacuuagugagacgagagu

SEQ ID NO: 259651 - RNA, 19 nt, Artificial Sequence
  Description of Artificial Sequence: Synthetic oligonucleotide
aguaaaaccucgccuguug

SEQ ID NO: 259652 - RNA, 19 nt, Artificial Sequence
  Description of Artificial Sequence: Synthetic oligonucleotide
ucucuauauaauggaaugc

SEQ ID NO: 259653 - RNA, 19 nt, Artificial Sequence
  Description of Artificial Sequence: Synthetic oligonucleotide
aucuauaacuuggagaagu

SEQ ID NO: 259654 - RNA, 19 nt, Artificial Sequence
  Description of Artificial Sequence: Synthetic oligonucleotide
aauuacaucugccggcuuu

SEQ ID NO: 259655 - RNA, 19 nt, Artificial Sequence
  Description of Artificial Sequence: Synthetic oligonucleotide
auguaaagcucccaaauuu

SEQ ID NO: 259656 - RNA, 19 nt, Artificial Sequence
  Description of Artificial Sequence: Synthetic oligonucleotide
auugcuacauauagccacc

SEQ ID NO: 259657 - RNA, 19 nt, Artificial Sequence
  Description of Artificial Sequence: Synthetic oligonucleotide
aaagcgcagcauugggacg

SEQ ID NO: 259658 - RNA, 19 nt, Artificial Sequence
  Description of Artificial Sequence: Synthetic oligonucleotide
acaaguaccagcaaucccu

SEQ ID NO: 259659 - RNA, 19 nt, Artificial Sequence
  Description of Artificial Sequence: Synthetic oligonucleotide
aaaucacucgauaaacaca

SEQ ID NO: 259660 - RNA, 19 nt, Artificial Sequence
  Description of Artificial Sequence: Synthetic oligonucleotide
ucccaucgagucuuuaagg

SEQ ID NO: 259661 - RNA, 19 nt, Artificial Sequence
  Description of Artificial Sequence: Synthetic oligonucleotide
aggccaaacagguuacuuc

SEQ ID NO: 259662 - RNA, 19 nt, Artificial Sequence
  Description of Artificial Sequence: Synthetic oligonucleotide
gauuuucgaggguaauaag

SEQ ID NO: 259663 - RNA, 19 nt, Artificial Sequence
  Description of Artificial Sequence: Synthetic oligonucleotide
uacuacuaucuauaacuug

SEQ ID NO: 259664 - RNA, 19 nt, Artificial Sequence
  Description of Artificial Sequence: Synthetic oligonucleotide
auaccaucuugguuccacc

SEQ ID NO: 259665 - RNA, 19 nt, Artificial Sequence
  Description of Artificial Sequence: Synthetic oligonucleotide
acgagaguccaucugcauc

SEQ ID NO: 259666 - RNA, 19 nt, Artificial Sequence
  Description of Artificial Sequence: Synthetic oligonucleotide
ugggucaugaguccaacuc

SEQ ID NO: 259667 - RNA, 19 nt, Artificial Sequence
  Description of Artificial Sequence: Synthetic oligonucleotide
uuguauacuggaauaugau

SEQ ID NO: 259668 - RNA, 19 nt, Artificial Sequence
  Description of Artificial Sequence: Synthetic oligonucleotide
aaaaccucgccuguugugu

SEQ ID NO: 259669 - RNA, 19 nt, Artificial Sequence
  Description of Artificial Sequence: Synthetic oligonucleotide
aguguaagcucucaggcuu

SEQ ID NO: 259670 - RNA, 19 nt, Artificial Sequence
  Description of Artificial Sequence: Synthetic oligonucleotide
gaugacuauugucuggguc

SEQ ID NO: 259671 - RNA, 19 nt, Artificial Sequence
  Description of Artificial Sequence: Synthetic oligonucleotide
cuuuaaggaugacuguuac

SEQ ID NO: 259672 - RNA, 19 nt, Artificial Sequence
  Description of Artificial Sequence: Synthetic oligonucleotide
uuuuaagcccuucacuguu

SEQ ID NO: 259673 - RNA, 19 nt, Artificial Sequence
  Description of Artificial Sequence: Synthetic oligonucleotide
cuauugucugggucuaggg

SEQ ID NO: 259674 - RNA, 19 nt, Artificial Sequence
  Description of Artificial Sequence: Synthetic oligonucleotide
gugaguaaacuuucuggcc

SEQ ID NO: 259675 - RNA, 19 nt, Artificial Sequence
  Description of Artificial Sequence: Synthetic oligonucleotide
guaacauacuacuacuaaa

SEQ ID NO: 259676 - RNA, 19 nt, Artificial Sequence
  Description of Artificial Sequence: Synthetic oligonucleotide
auaccaauuaguccauuau

SEQ ID NO: 259677 - RNA, 19 nt, Artificial Sequence
  Description of Artificial Sequence: Synthetic oligonucleotide
uccgauuauaaaggucugg

SEQ ID NO: 259678 - RNA, 19 nt, Artificial Sequence
  Description of Artificial Sequence: Synthetic oligonucleotide
ugcguguaggaauaaugcu

SEQ ID NO: 259679 - RNA, 19 nt, Artificial Sequence
  Description of Artificial Sequence: Synthetic oligonucleotide
ccgaaugaaaacuugcaag

SEQ ID NO: 259680 - RNA, 19 nt, Artificial Sequence
  Description of Artificial Sequence: Synthetic oligonucleotide
acugaccaacucuuucaac

SEQ ID NO: 259681 - RNA, 19 nt, Artificial Sequence
  Description of Artificial Sequence: Synthetic oligonucleotide
uuaauaccaauuaguccau

SEQ ID NO: 259682 - RNA, 19 nt, Artificial Sequence
  Description of Artificial Sequence: Synthetic oligonucleotide
cacuguuauacacuaagga

SEQ ID NO: 259683 - RNA, 19 nt, Artificial Sequence
  Description of Artificial Sequence: Synthetic oligonucleotide
acuauugucugggucuagg

SEQ ID NO: 259684 - RNA, 19 nt, Artificial Sequence
  Description of Artificial Sequence: Synthetic oligonucleotide
aagaaaccggagccuccac

SEQ ID NO: 259685 - RNA, 19 nt, Artificial Sequence
  Description of Artificial Sequence: Synthetic oligonucleotide
uaaagacucggacccacuc

SEQ ID NO: 259686 - RNA, 19 nt, Artificial Sequence
  Description of Artificial Sequence: Synthetic oligonucleotide
cuuuccgauuauaaagguc

SEQ ID NO: 259687 - RNA, 19 nt, Artificial Sequence
  Description of Artificial Sequence: Synthetic oligonucleotide
ggaaacaggucggaaagcg

SEQ ID NO: 259688 - RNA, 19 nt, Artificial Sequence
  Description of Artificial Sequence: Synthetic oligonucleotide
gacucuauagacuggccaa

SEQ ID NO: 259689 - RNA, 19 nt, Artificial Sequence
  Description of Artificial Sequence: Synthetic oligonucleotide
accacugauaaugacuuca

SEQ ID NO: 259690 - RNA, 19 nt, Artificial Sequence
  Description of Artificial Sequence: Synthetic oligonucleotide
gauucaucgaucuuccaau

SEQ ID NO: 259691 - RNA, 19 nt, Artificial Sequence
  Description of Artificial Sequence: Synthetic oligonucleotide
aacacccucacaugccgga

SEQ ID NO: 259692 - RNA, 19 nt, Artificial Sequence
  Description of Artificial Sequence: Synthetic oligonucleotide
cacaacaauaagugcauga

SEQ ID NO: 259693 - RNA, 19 nt, Artificial Sequence
  Description of Artificial Sequence: Synthetic oligonucleotide
ucuauaacuuggagaaguu

SEQ ID NO: 259694 - RNA, 19 nt, Artificial Sequence
  Description of Artificial Sequence: Synthetic oligonucleotide
ucccaaauuuaauaccaau

SEQ ID NO: 259695 - RNA, 19 nt, Artificial Sequence
  Description of Artificial Sequence: Synthetic oligonucleotide
gacguuaagacacugcuuu

SEQ ID NO: 259696 - RNA, 19 nt, Artificial Sequence
  Description of Artificial Sequence: Synthetic oligonucleotide
aaaaugacguuaagacacu

SEQ ID NO: 259697 - RNA, 19 nt, Artificial Sequence
  Description of Artificial Sequence: Synthetic oligonucleotide
guuaacugguucaucagga

SEQ ID NO: 259698 - RNA, 19 nt, Artificial Sequence
  Description of Artificial Sequence: Synthetic oligonucleotide
uuucgaggguaauaaggaa

SEQ ID NO: 259699 - RNA, 19 nt, Artificial Sequence
  Description of Artificial Sequence: Synthetic oligonucleotide
gcucaauaaauccagagcu

SEQ ID NO: 259700 - RNA, 19 nt, Artificial Sequence
  Description of Artificial Sequence: Synthetic oligonucleotide
uugcaagucgaugaaguaa

SEQ ID NO: 259701 - RNA, 19 nt, Artificial Sequence
  Description of Artificial Sequence: Synthetic oligonucleotide
aaacccgaaugaaaacuug

SEQ ID NO: 259702 - RNA, 19 nt, Artificial Sequence
  Description of Artificial Sequence: Synthetic oligonucleotide
uuccgauuauaaaggucug

SEQ ID NO: 259703 - RNA, 19 nt, Artificial Sequence
  Description of Artificial Sequence: Synthetic oligonucleotide
ggccaaagcaaugaggucc

SEQ ID NO: 259704 - RNA, 19 nt, Artificial Sequence
  Description of Artificial Sequence: Synthetic oligonucleotide
gaauaaugcugcccuguuc

SEQ ID NO: 259705 - RNA, 19 nt, Artificial Sequence
  Description of Artificial Sequence: Synthetic oligonucleotide
accaauuaguccauuauuu

SEQ ID NO: 259706 - RNA, 19 nt, Artificial Sequence
  Description of Artificial Sequence: Synthetic oligonucleotide
uuagcaaucugcgggcaga

SEQ ID NO: 259707 - RNA, 19 nt, Artificial Sequence
  Description of Artificial Sequence: Synthetic oligonucleotide
uacuacuacuaaacugggu

SEQ ID NO: 259708 - RNA, 19 nt, Artificial Sequence
  Description of Artificial Sequence: Synthetic oligonucleotide
uuaagcccuucacuguuaa

SEQ ID NO: 259709 - RNA, 19 nt, Artificial Sequence
  Description of Artificial Sequence: Synthetic oligonucleotide
cuacauauagccaccgaaa

SEQ ID NO: 259710 - RNA, 19 nt, Artificial Sequence
  Description of Artificial Sequence: Synthetic oligonucleotide
ugaccaacucuuucaacau

SEQ ID NO: 259711 - RNA, 19 nt, Artificial Sequence
  Description of Artificial Sequence: Synthetic oligonucleotide
cuagacaacuguaagugcu

SEQ ID NO: 259712 - RNA, 19 nt, Artificial Sequence
  Description of Artificial Sequence: Synthetic oligonucleotide
ugaggucccgcuuggguga

SEQ ID NO: 259713 - RNA, 19 nt, Artificial Sequence
  Description of Artificial Sequence: Synthetic oligonucleotide
uuguggaguaaguuccagu

SEQ ID NO: 259714 - RNA, 19 nt, Artificial Sequence
  Description of Artificial Sequence: Synthetic oligonucleotide
cuacuacuaaacuggguca

SEQ ID NO: 259715 - RNA, 19 nt, Artificial Sequence
  Description of Artificial Sequence: Synthetic oligonucleotide
ugcaaugauuuucgagggu

SEQ ID NO: 259716 - RNA, 19 nt, Artificial Sequence
  Description of Artificial Sequence: Synthetic oligonucleotide
acacuaaggacaauggcaa

SEQ ID NO: 259717 - RNA, 19 nt, Artificial Sequence
  Description of Artificial Sequence: Synthetic oligonucleotide
ucuagccuuguggaguaag

SEQ ID NO: 259718 - RNA, 19 nt, Artificial Sequence
  Description of Artificial Sequence: Synthetic oligonucleotide
ugcaaacacugaucaauaa

SEQ ID NO: 259719 - RNA, 19 nt, Artificial Sequence
  Description of Artificial Sequence: Synthetic oligonucleotide
uccgaguuacuucggguaa

SEQ ID NO: 259720 - RNA, 19 nt, Artificial Sequence
  Description of Artificial Sequence: Synthetic oligonucleotide
gaaacaggucggaaagcgc

SEQ ID NO: 259721 - RNA, 19 nt, Artificial Sequence
  Description of Artificial Sequence: Synthetic oligonucleotide
aagguuggauucauccuca

SEQ ID NO: 259722 - RNA, 19 nt, Artificial Sequence
  Description of Artificial Sequence: Synthetic oligonucleotide
agacaacuguaagugcuuc

SEQ ID NO: 259723 - RNA, 19 nt, Artificial Sequence
  Description of Artificial Sequence: Synthetic oligonucleotide
ugacccauaccaucuuggu

SEQ ID NO: 259724 - RNA, 19 nt, Artificial Sequence
  Description of Artificial Sequence: Synthetic oligonucleotide
uaggaauaaugcugcccug

SEQ ID NO: 259725 - RNA, 19 nt, Artificial Sequence
  Description of Artificial Sequence: Synthetic oligonucleotide
gagaaagaguguaagcucu

SEQ ID NO: 259726 - RNA, 19 nt, Artificial Sequence
  Description of Artificial Sequence: Synthetic oligonucleotide
cuauaacuuggagaaguuc

SEQ ID NO: 259727 - RNA, 19 nt, Artificial Sequence
  Description of Artificial Sequence: Synthetic oligonucleotide
ucugccggcuuuugcaaac

SEQ ID NO: 259728 - RNA, 19 nt, Artificial Sequence
  Description of Artificial Sequence: Synthetic oligonucleotide
uugggacgguccugcaacg

SEQ ID NO: 259729 - RNA, 19 nt, Artificial Sequence
  Description of Artificial Sequence: Synthetic oligonucleotide
acaaacuuagugagacgag

SEQ ID NO: 259730 - RNA, 19 nt, Artificial Sequence
  Description of Artificial Sequence: Synthetic oligonucleotide
agaaagaguguaagcucuc

SEQ ID NO: 259731 - RNA, 19 nt, Artificial Sequence
  Description of Artificial Sequence: Synthetic oligonucleotide
caaacuuagugagacgaga

SEQ ID NO: 259732 - RNA, 19 nt, Artificial Sequence
  Description of Artificial Sequence: Synthetic oligonucleotide
uucucgucccaucgagucu

SEQ ID NO: 259733 - RNA, 19 nt, Artificial Sequence
  Description of Artificial Sequence: Synthetic oligonucleotide
ucggguaagaaggaauaua

SEQ ID NO: 259734 - RNA, 19 nt, Artificial Sequence
  Description of Artificial Sequence: Synthetic oligonucleotide
uacuacuaaacugggucau

SEQ ID NO: 259735 - RNA, 19 nt, Artificial Sequence
  Description of Artificial Sequence: Synthetic oligonucleotide
gugacuuauaaccaauuuu

SEQ ID NO: 259736 - RNA, 19 nt, Artificial Sequence
  Description of Artificial Sequence: Synthetic oligonucleotide
cucuauagacuggccaagc

SEQ ID NO: 259737 - RNA, 19 nt, Artificial Sequence
  Description of Artificial Sequence: Synthetic oligonucleotide
auacaagaaaccggagccu

SEQ ID NO: 259738 - RNA, 19 nt, Artificial Sequence
  Description of Artificial Sequence: Synthetic oligonucleotide
ggugcguguaggaauaaug

SEQ ID NO: 259739 - RNA, 19 nt, Artificial Sequence
  Description of Artificial Sequence: Synthetic oligonucleotide
gaaguaaaaccucgccugu

SEQ ID NO: 259740 - RNA, 19 nt, Artificial Sequence
  Description of Artificial Sequence: Synthetic oligonucleotide
cagauugggaaauaucagu

SEQ ID NO: 259741 - RNA, 19 nt, Artificial Sequence
  Description of Artificial Sequence: Synthetic oligonucleotide
gcuacauauagccaccgaa

SEQ ID NO: 259742 - RNA, 19 nt, Artificial Sequence
  Description of Artificial Sequence: Synthetic oligonucleotide
ugauucugacucugacaac

SEQ ID NO: 259743 - RNA, 19 nt, Artificial Sequence
  Description of Artificial Sequence: Synthetic oligonucleotide
agacucgucaagcucccau

SEQ ID NO: 259744 - RNA, 19 nt, Artificial Sequence
  Description of Artificial Sequence: Synthetic oligonucleotide
gguaucagcgagagcaaag

SEQ ID NO: 259745 - RNA, 19 nt, Artificial Sequence
  Description of Artificial Sequence: Synthetic oligonucleotide
guuacucgggcaauuuuga

SEQ ID NO: 259746 - RNA, 19 nt, Artificial Sequence
  Description of Artificial Sequence: Synthetic oligonucleotide
auucaucgaucuuccaauu

SEQ ID NO: 259747 - RNA, 19 nt, Artificial Sequence
  Description of Artificial Sequence: Synthetic oligonucleotide
cuuguggaguaaguuccag

SEQ ID NO: 259748 - RNA, 19 nt, Artificial Sequence
  Description of Artificial Sequence: Synthetic oligonucleotide
agaaguucguuugccuuga

SEQ ID NO: 259749 - RNA, 19 nt, Artificial Sequence
  Description of Artificial Sequence: Synthetic oligonucleotide
cuccauucgccuuuucaca

SEQ ID NO: 259750 - RNA, 19 nt, Artificial Sequence
  Description of Artificial Sequence: Synthetic oligonucleotide
uugauucaucgaucuucca

SEQ ID NO: 259751 - RNA, 19 nt, Artificial Sequence
  Description of Artificial Sequence: Synthetic oligonucleotide
ugaugacuauugucugggu

SEQ ID NO: 259752 - RNA, 19 nt, Artificial Sequence
  Description of Artificial Sequence: Synthetic oligonucleotide
augauuuucgaggguaaua

SEQ ID NO: 259753 - RNA, 19 nt, Artificial Sequence
  Description of Artificial Sequence: Synthetic oligonucleotide
acuucggguaagaaggaau

SEQ ID NO: 259754 - RNA, 19 nt, Artificial Sequence
  Description of Artificial Sequence: Synthetic oligonucleotide
ccccacaacaauaagugca

SEQ ID NO: 259755 - RNA, 19 nt, Artificial Sequence
  Description of Artificial Sequence: Synthetic oligonucleotide
uucggguaagaaggaauau

SEQ ID NO: 259756 - RNA, 19 nt, Artificial Sequence
  Description of Artificial Sequence: Synthetic oligonucleotide
caaugauuuucgaggguaa

SEQ ID NO: 259757 - RNA, 19 nt, Artificial Sequence
  Description of Artificial Sequence: Synthetic oligonucleotide
gaguguaagcucucaggcu

SEQ ID NO: 259758 - RNA, 19 nt, Artificial Sequence
  Description of Artificial Sequence: Synthetic oligonucleotide
ugcauggugcguguaggaa

SEQ ID NO: 259759 - RNA, 19 nt, Artificial Sequence
  Description of Artificial Sequence: Synthetic oligonucleotide
auacuccuagcaucucuau

SEQ ID NO: 259760 - RNA, 19 nt, Artificial Sequence
  Description of Artificial Sequence: Synthetic oligonucleotide
cucgauaaacacagagcaa

SEQ ID NO: 259761 - RNA, 19 nt, Artificial Sequence
  Description of Artificial Sequence: Synthetic oligonucleotide
gaaguucguuugccuugag

SEQ ID NO: 259762 - RNA, 19 nt, Artificial Sequence
  Description of Artificial Sequence: Synthetic oligonucleotide
ucucgucccaucgagucuu

SEQ ID NO: 259763 - RNA, 19 nt, Artificial Sequence
  Description of Artificial Sequence: Synthetic oligonucleotide
cauggugcguguaggaaua

SEQ ID NO: 259764 - RNA, 19 nt, Artificial Sequence
  Description of Artificial Sequence: Synthetic oligonucleotide
acuuaacacacaggacacu

SEQ ID NO: 259765 - RNA, 19 nt, Artificial Sequence
  Description of Artificial Sequence: Synthetic oligonucleotide
cgauuauaaaggucuggag

SEQ ID NO: 259766 - RNA, 19 nt, Artificial Sequence
  Description of Artificial Sequence: Synthetic oligonucleotide
ggguaagaaggaauauagc

SEQ ID NO: 259767 - RNA, 19 nt, Artificial Sequence
  Description of Artificial Sequence: Synthetic oligonucleotide
accucgccuguuguguugg

SEQ ID NO: 259768 - RNA, 19 nt, Artificial Sequence
  Description of Artificial Sequence: Synthetic oligonucleotide
uuacaucugccggcuuuug

SEQ ID NO: 259769 - RNA, 19 nt, Artificial Sequence
  Description of Artificial Sequence: Synthetic oligonucleotide
gcagcuuaggcaagagaag

SEQ ID NO: 259770 - RNA, 19 nt, Artificial Sequence
  Description of Artificial Sequence: Synthetic oligonucleotide
agacgagaguccaucugca

SEQ ID NO: 259771 - RNA, 19 nt, Artificial Sequence
  Description of Artificial Sequence: Synthetic oligonucleotide
cguuaagacacugcuuucc

SEQ ID NO: 259772 - RNA, 19 nt, Artificial Sequence
  Description of Artificial Sequence: Synthetic oligonucleotide
uagugagacgagaguccau

SEQ ID NO: 259773 - RNA, 19 nt, Artificial Sequence
  Description of Artificial Sequence: Synthetic oligonucleotide
gcaaugauuuucgagggua

SEQ ID NO: 259774 - RNA, 19 nt, Artificial Sequence
  Description of Artificial Sequence: Synthetic oligonucleotide
gcgggcagaguccauacuc

SEQ ID NO: 259775 - RNA, 19 nt, Artificial Sequence
  Description of Artificial Sequence: Synthetic oligonucleotide
augccggagguuugaacuu

SEQ ID NO: 259776 - RNA, 19 nt, Artificial Sequence
  Description of Artificial Sequence: Synthetic oligonucleotide
cccaucgagucuuuaagga

SEQ ID NO: 259777 - RNA, 19 nt, Artificial Sequence
  Description of Artificial Sequence: Synthetic oligonucleotide
cuuaacacacaggacacuu

SEQ ID NO: 259778 - RNA, 19 nt, Artificial Sequence
  Description of Artificial Sequence: Synthetic oligonucleotide
ggacacuuuucgaaggcca

SEQ ID NO: 259779 - RNA, 19 nt, Artificial Sequence
  Description of Artificial Sequence: Synthetic oligonucleotide
ucauaccacugguuuccuu

SEQ ID NO: 259780 - RNA, 19 nt, Artificial Sequence
  Description of Artificial Sequence: Synthetic oligonucleotide
ccaauuaguccauuauuua

SEQ ID NO: 259781 - RNA, 19 nt, Artificial Sequence
  Description of Artificial Sequence: Synthetic oligonucleotide
gugcauggugcguguagga

SEQ ID NO: 259782 - RNA, 19 nt, Artificial Sequence
  Description of Artificial Sequence: Synthetic oligonucleotide
ggcaucuagacaacuguaa

SEQ ID NO: 259783 - RNA, 19 nt, Artificial Sequence
  Description of Artificial Sequence: Synthetic oligonucleotide
gacucggacccacucugua

SEQ ID NO: 259784 - RNA, 19 nt, Artificial Sequence
  Description of Artificial Sequence: Synthetic oligonucleotide
acacccucacaugccggag

SEQ ID NO: 259785 - RNA, 19 nt, Artificial Sequence
  Description of Artificial Sequence: Synthetic oligonucleotide
gguuugaacuuaacacaca

SEQ ID NO: 259786 - RNA, 19 nt, Artificial Sequence
  Description of Artificial Sequence: Synthetic oligonucleotide
cuagccuuguggaguaagu

SEQ ID NO: 259787 - RNA, 19 nt, Artificial Sequence
  Description of Artificial Sequence: Synthetic oligonucleotide
gggacgguccugcaacgac

SEQ ID NO: 259788 - RNA, 19 nt, Artificial Sequence
  Description of Artificial Sequence: Synthetic oligonucleotide
gacccauaccaucuugguu

SEQ ID NO: 259789 - RNA, 19 nt, Artificial Sequence
  Description of Artificial Sequence: Synthetic oligonucleotide
gggaaacaggucggaaagc

SEQ ID NO: 259790 - RNA, 19 nt, Artificial Sequence
  Description of Artificial Sequence: Synthetic oligonucleotide
ugccggagguuugaacuua

SEQ ID NO: 259791 - RNA, 19 nt, Artificial Sequence
  Description of Artificial Sequence: Synthetic oligonucleotide
cauccugcacugaugucgu

SEQ ID NO: 259792 - RNA, 19 nt, Artificial Sequence
  Description of Artificial Sequence: Synthetic oligonucleotide
ugguuccacccaguaaguu

SEQ ID NO: 259793 - RNA, 19 nt, Artificial Sequence
  Description of Artificial Sequence: Synthetic oligonucleotide
cauugggacgguccugcaa

SEQ ID NO: 259794 - RNA, 19 nt, Artificial Sequence
  Description of Artificial Sequence: Synthetic oligonucleotide
gacacuuuucgaaggccau

SEQ ID NO: 259795 - RNA, 19 nt, Artificial Sequence
  Description of Artificial Sequence: Synthetic oligonucleotide
ggagaaguucguuugccuu

SEQ ID NO: 259796 - RNA, 19 nt, Artificial Sequence
  Description of Artificial Sequence: Synthetic oligonucleotide
cccgaaugaaaacuugcaa

SEQ ID NO: 259797 - RNA, 19 nt, Artificial Sequence
  Description of Artificial Sequence: Synthetic oligonucleotide
gacgguccugcaacgacgu

SEQ ID NO: 259798 - RNA, 19 nt, Artificial Sequence
  Description of Artificial Sequence: Synthetic oligonucleotide
aggucggaaagcgcagcau

SEQ ID NO: 259799 - RNA, 19 nt, Artificial Sequence
  Description of Artificial Sequence: Synthetic oligonucleotide
ucccuguuacucgggcaau

SEQ ID NO: 259800 - RNA, 19 nt, Artificial Sequence
  Description of Artificial Sequence: Synthetic oligonucleotide
gcauggugcguguaggaau

SEQ ID NO: 259801 - RNA, 19 nt, Artificial Sequence
  Description of Artificial Sequence: Synthetic oligonucleotide
ccgaguuacuucggguaag

SEQ ID NO: 259802 - RNA, 19 nt, Artificial Sequence
  Description of Artificial Sequence: Synthetic oligonucleotide
cagcaguaauggcgucuuc

SEQ ID NO: 259803 - RNA, 19 nt, Artificial Sequence
  Description of Artificial Sequence: Synthetic oligonucleotide
ggucggaaagcgcagcauu

SEQ ID NO: 259804 - RNA, 19 nt, Artificial Sequence
  Description of Artificial Sequence: Synthetic oligonucleotide
caguaauggcgucuucaau

SEQ ID NO: 259805 - RNA, 19 nt, Artificial Sequence
  Description of Artificial Sequence: Synthetic oligonucleotide
aggucccgcuugggugacc

SEQ ID NO: 259806 - RNA, 19 nt, Artificial Sequence
  Description of Artificial Sequence: Synthetic oligonucleotide
ccuuuccgauuauaaaggu

SEQ ID NO: 259807 - RNA, 19 nt, Artificial Sequence
  Description of Artificial Sequence: Synthetic oligonucleotide
cuggccauccgaguuacuu

SEQ ID NO: 259808 - RNA, 19 nt, Artificial Sequence
  Description of Artificial Sequence: Synthetic oligonucleotide
cuguuacucgggcaauuuu

SEQ ID NO: 259809 - RNA, 19 nt, Artificial Sequence
  Description of Artificial Sequence: Synthetic oligonucleotide
gucccgcuugggugaccag

SEQ ID NO: 259810 - RNA, 19 nt, Artificial Sequence
  Description of Artificial Sequence: Synthetic oligonucleotide
ccggagguuugaacuuaac

SEQ ID NO: 259811 - RNA, 19 nt, Artificial Sequence
  Description of Artificial Sequence: Synthetic oligonucleotide
cucugugaccacugauaau

SEQ ID NO: 259812 - RNA, 19 nt, Artificial Sequence
  Description of Artificial Sequence: Synthetic oligonucleotide
ccaucgagucuuuaaggau

SEQ ID NO: 259813 - RNA, 19 nt, Artificial Sequence
  Description of Artificial Sequence: Synthetic oligonucleotide
ccaauuacaucugccggcu

SEQ ID NO: 259814 - RNA, 19 nt, Artificial Sequence
  Description of Artificial Sequence: Synthetic oligonucleotide
ucgucccaucgagucuuua

SEQ ID NO: 259815 - RNA, 19 nt, Artificial Sequence
  Description of Artificial Sequence: Synthetic oligonucleotide
aucuagccuuguggaguaa

SEQ ID NO: 259816 - RNA, 19 nt, Artificial Sequence
  Description of Artificial Sequence: Synthetic oligonucleotide
gcaagucgaugaaguaaaa

SEQ ID NO: 259817 - RNA, 19 nt, Artificial Sequence
  Description of Artificial Sequence: Synthetic oligonucleotide
ccauucgccuuuucacaaa

SEQ ID NO: 259818 - RNA, 19 nt, Artificial Sequence
  Description of Artificial Sequence: Synthetic oligonucleotide
gcauugggacgguccugca

SEQ ID NO: 259819 - RNA, 19 nt, Artificial Sequence
  Description of Artificial Sequence: Synthetic oligonucleotide
cgagucuuuaaggaugacu

SEQ ID NO: 259820 - RNA, 19 nt, Artificial Sequence
  Description of Artificial Sequence: Synthetic oligonucleotide
ccucgccuguuguguuggc

SEQ ID NO: 259821 - RNA, 19 nt, Artificial Sequence
  Description of Artificial Sequence: Synthetic oligonucleotide
caauuacaucugccggcuu

SEQ ID NO: 259822 - RNA, 19 nt, Artificial Sequence
  Description of Artificial Sequence: Synthetic oligonucleotide
gccggagguuugaacuuaa

SEQ ID NO: 259823 - RNA, 19 nt, Artificial Sequence
  Description of Artificial Sequence: Synthetic oligonucleotide
ccgcuugggugaccagcac

SEQ ID NO: 259824 - RNA, 19 nt, Artificial Sequence
  Description of Artificial Sequence: Synthetic oligonucleotide
cucgucccaucgagucuuu

SEQ ID NO: 259825 - RNA, 19 nt, Artificial Sequence
  Description of Artificial Sequence: Synthetic oligonucleotide
gcgcagcauugggacgguc

SEQ ID NO: 259826 - RNA, 19 nt, Artificial Sequence
  Description of Artificial Sequence: Synthetic oligonucleotide
cccuguuacucgggcaauu

SEQ ID NO: 259827 - RNA, 19 nt, Artificial Sequence
  Description of Artificial Sequence: Synthetic oligonucleotide
aauauuguagacucgcccg

SEQ ID NO: 259828 - RNA, 19 nt, Artificial Sequence
  Description of Artificial Sequence: Synthetic oligonucleotide
ucuauagucaucaacauaa

SEQ ID NO: 259829 - RNA, 19 nt, Artificial Sequence
  Description of Artificial Sequence: Synthetic oligonucleotide
aagugauuaagucuguauc

SEQ ID NO: 259830 - RNA, 19 nt, Artificial Sequence
  Description of Artificial Sequence: Synthetic oligonucleotide
uaaaagucaaagaagccag

SEQ ID NO: 259831 - RNA, 19 nt, Artificial Sequence
  Description of Artificial Sequence: Synthetic oligonucleotide
aaaccuacaagaauagcgc

SEQ ID NO: 259832 - RNA, 19 nt, Artificial Sequence
  Description of Artificial Sequence: Synthetic oligonucleotide
aguaguucaaaagaagccc

SEQ ID NO: 259833 - RNA, 19 nt, Artificial Sequence
  Description of Artificial Sequence: Synthetic oligonucleotide
aauaugacggagcucuccg

SEQ ID NO: 259834 - RNA, 19 nt, Artificial Sequence
  Description of Artificial Sequence: Synthetic oligonucleotide
aagaauagcgcccacgaug

SEQ ID NO: 259835 - RNA, 19 nt, Artificial Sequence
  Description of Artificial Sequence: Synthetic oligonucleotide
aaguuaaauaacugaaaug

SEQ ID NO: 259836 - RNA, 19 nt, Artificial Sequence
  Description of Artificial Sequence: Synthetic oligonucleotide
ucaguaguucaaaagaagc

SEQ ID NO: 259837 - RNA, 19 nt, Artificial Sequence
  Description of Artificial Sequence: Synthetic oligonucleotide
aaccuacaagaauagcgcc

SEQ ID NO: 259838 - RNA, 19 nt, Artificial Sequence
  Description of Artificial Sequence: Synthetic oligonucleotide
auaaaagugauuaagucug

SEQ ID NO: 259839 - RNA, 19 nt, Artificial Sequence
  Description of Artificial Sequence: Synthetic oligonucleotide
ugguaaugaacaaaggaug

SEQ ID NO: 259840 - RNA, 19 nt, Artificial Sequence
  Description of Artificial Sequence: Synthetic oligonucleotide
uuagguuuaaggucacucg

SEQ ID NO: 259841 - RNA, 19 nt, Artificial Sequence
  Description of Artificial Sequence: Synthetic oligonucleotide
auauuagucacucacaguu

SEQ ID NO: 259842 - RNA, 19 nt, Artificial Sequence
  Description of Artificial Sequence: Synthetic oligonucleotide
uaauauuguagacucgccc

SEQ ID NO: 259843 - RNA, 19 nt, Artificial Sequence
  Description of Artificial Sequence: Synthetic oligonucleotide
uugguaaugaacaaaggau

SEQ ID NO: 259844 - RNA, 19 nt, Artificial Sequence
  Description of Artificial Sequence: Synthetic oligonucleotide
ucugaacuuauucaauugc

SEQ ID NO: 259845 - RNA, 19 nt, Artificial Sequence
  Description of Artificial Sequence: Synthetic oligonucleotide
uaaauaguuugcaugggca

SEQ ID NO: 259846 - RNA, 19 nt, Artificial Sequence
  Description of Artificial Sequence: Synthetic oligonucleotide
aacugaaaugauguucugc

SEQ ID NO: 259847 - RNA, 19 nt, Artificial Sequence
  Description of Artificial Sequence: Synthetic oligonucleotide
agaacauucauguucugug

SEQ ID NO: 259848 - RNA, 19 nt, Artificial Sequence
  Description of Artificial Sequence: Synthetic oligonucleotide
uuaauauuagucacucaca

SEQ ID NO: 259849 - RNA, 19 nt, Artificial Sequence
  Description of Artificial Sequence: Synthetic oligonucleotide
aagcaaguuaaauaacuga

SEQ ID NO: 259850 - RNA, 19 nt, Artificial Sequence
  Description of Artificial Sequence: Synthetic oligonucleotide
aauagguaaacaaacucca

SEQ ID NO: 259851 - RNA, 19 nt, Artificial Sequence
  Description of Artificial Sequence: Synthetic oligonucleotide
gaaaagaacauagauguga

SEQ ID NO: 259852 - RNA, 19 nt, Artificial Sequence
  Description of Artificial Sequence: Synthetic oligonucleotide
uuuugaaggauccuuguua

SEQ ID NO: 259853 - RNA, 19 nt, Artificial Sequence
  Description of Artificial Sequence: Synthetic oligonucleotide
aacccguuaugauaaauga

SEQ ID NO: 259854 - RNA, 19 nt, Artificial Sequence
  Description of Artificial Sequence: Synthetic oligonucleotide
uuacuuugagauauuuggc

SEQ ID NO: 259855 - RNA, 19 nt, Artificial Sequence
  Description of Artificial Sequence: Synthetic oligonucleotide
aaagugauuaagucuguau

SEQ ID NO: 259856 - RNA, 19 nt, Artificial Sequence
  Description of Artificial Sequence: Synthetic oligonucleotide
uuguguaguucuaacaaac

SEQ ID NO: 259857 - RNA, 19 nt, Artificial Sequence
  Description of Artificial Sequence: Synthetic oligonucleotide
uguucccuuaaauauaccu

SEQ ID NO: 259858 - RNA, 19 nt, Artificial Sequence
  Description of Artificial Sequence: Synthetic oligonucleotide
ucauauccgaguauucaag

SEQ ID NO: 259859 - RNA, 19 nt, Artificial Sequence
  Description of Artificial Sequence: Synthetic oligonucleotide
uuugaaggauccuuguuac

SEQ ID NO: 259860 - RNA, 19 nt, Artificial Sequence
  Description of Artificial Sequence: Synthetic oligonucleotide
uaaauaggaucauuuggca

SEQ ID NO: 259861 - RNA, 19 nt, Artificial Sequence
  Description of Artificial Sequence: Synthetic oligonucleotide
cauaccauacauguggagg

SEQ ID NO: 259862 - RNA, 19 nt, Artificial Sequence
  Description of Artificial Sequence: Synthetic oligonucleotide
uguaguucuaacaaacauu

SEQ ID NO: 259863 - RNA, 19 nt, Artificial Sequence
  Description of Artificial Sequence: Synthetic oligonucleotide
auacauauccaagccauac

SEQ ID NO: 259864 - RNA, 19 nt, Artificial Sequence
  Description of Artificial Sequence: Synthetic oligonucleotide
aaaucauagauaaugggua

SEQ ID NO: 259865 - RNA, 19 nt, Artificial Sequence
  Description of Artificial Sequence: Synthetic oligonucleotide
uggccuacaacucaagaac

SEQ ID NO: 259866 - RNA, 19 nt, Artificial Sequence
  Description of Artificial Sequence: Synthetic oligonucleotide
caguaguucaaaagaagcc

SEQ ID NO: 259867 - RNA, 19 nt, Artificial Sequence
  Description of Artificial Sequence: Synthetic oligonucleotide
uuucuagaauucaauggcu

SEQ ID NO: 259868 - RNA, 19 nt, Artificial Sequence
  Description of Artificial Sequence: Synthetic oligonucleotide
uuuguugucggccgugaag

SEQ ID NO: 259869 - RNA, 19 nt, Artificial Sequence
  Description of Artificial Sequence: Synthetic oligonucleotide
uucaugaaaacccguuaug

SEQ ID NO: 259870 - RNA, 19 nt, Artificial Sequence
  Description of Artificial Sequence: Synthetic oligonucleotide
cauauccgaguauucaagg

SEQ ID NO: 259871 - RNA, 19 nt, Artificial Sequence
  Description of Artificial Sequence: Synthetic oligonucleotide
cugaaggauagauaucuag

SEQ ID NO: 259872 - RNA, 19 nt, Artificial Sequence
  Description of Artificial Sequence: Synthetic oligonucleotide
guaguucuaacaaacauuc

SEQ ID NO: 259873 - RNA, 19 nt, Artificial Sequence
  Description of Artificial Sequence: Synthetic oligonucleotide
uagauggauuacauaaaug

SEQ ID NO: 259874 - RNA, 19 nt, Artificial Sequence
  Description of Artificial Sequence: Synthetic oligonucleotide
ucaugaaaacccguuauga

SEQ ID NO: 259875 - RNA, 19 nt, Artificial Sequence
  Description of Artificial Sequence: Synthetic oligonucleotide
aagcggguaauauuguaga

SEQ ID NO: 259876 - RNA, 19 nt, Artificial Sequence
  Description of Artificial Sequence: Synthetic oligonucleotide
uguguaguucuaacaaaca

SEQ ID NO: 259877 - RNA, 19 nt, Artificial Sequence
  Description of Artificial Sequence: Synthetic oligonucleotide
gaacaaaggauguggagga

SEQ ID NO: 259878 - RNA, 19 nt, Artificial Sequence
  Description of Artificial Sequence: Synthetic oligonucleotide
auaccauacauguggaggu

SEQ ID NO: 259879 - RNA, 19 nt, Artificial Sequence
  Description of Artificial Sequence: Synthetic oligonucleotide
cugauauauagaaaucauc

SEQ ID NO: 259880 - RNA, 19 nt, Artificial Sequence
  Description of Artificial Sequence: Synthetic oligonucleotide
ucucaauuccaggagcacg

SEQ ID NO: 259881 - RNA, 19 nt, Artificial Sequence
  Description of Artificial Sequence: Synthetic oligonucleotide
agaauagcgcccacgaugg

SEQ ID NO: 259882 - RNA, 19 nt, Artificial Sequence
  Description of Artificial Sequence: Synthetic oligonucleotide
aaacccguuaugauaaaug

SEQ ID NO: 259883 - RNA, 19 nt, Artificial Sequence
  Description of Artificial Sequence: Synthetic oligonucleotide
uuuagguuuaaggucacuc

SEQ ID NO: 259884 - RNA, 19 nt, Artificial Sequence
  Description of Artificial Sequence: Synthetic oligonucleotide
acaagaauagcgcccacga

SEQ ID NO: 259885 - RNA, 19 nt, Artificial Sequence
  Description of Artificial Sequence: Synthetic oligonucleotide
uuuguuguguguguguugu

SEQ ID NO: 259886 - RNA, 19 nt, Artificial Sequence
  Description of Artificial Sequence: Synthetic oligonucleotide
uccccuuacuuuaauaauc

SEQ ID NO: 259887 - RNA, 19 nt, Artificial Sequence
  Description of Artificial Sequence: Synthetic oligonucleotide
uaucauauccgaguauuca

SEQ ID NO: 259888 - RNA, 19 nt, Artificial Sequence
  Description of Artificial Sequence: Synthetic oligonucleotide
ucuagaauucaauggcuuc

SEQ ID NO: 259889 - RNA, 19 nt, Artificial Sequence
  Description of Artificial Sequence: Synthetic oligonucleotide
gauugguaaugaacaaagg

SEQ ID NO: 259890 - RNA, 19 nt, Artificial Sequence
  Description of Artificial Sequence: Synthetic oligonucleotide
gaagcggguaauauuguag

SEQ ID NO: 259891 - RNA, 19 nt, Artificial Sequence
  Description of Artificial Sequence: Synthetic oligonucleotide
aauaaaaguccugggcuga

SEQ ID NO: 259892 - RNA, 19 nt, Artificial Sequence
  Description of Artificial Sequence: Synthetic oligonucleotide
gacgauacaggaaaccuac

SEQ ID NO: 259893 - RNA, 19 nt, Artificial Sequence
  Description of Artificial Sequence: Synthetic oligonucleotide
uauaccuaaugugaacuga

SEQ ID NO: 259894 - RNA, 19 nt, Artificial Sequence
  Description of Artificial Sequence: Synthetic oligonucleotide
gauuaagucuguaucccug

SEQ ID NO: 259895 - RNA, 19 nt, Artificial Sequence
  Description of Artificial Sequence: Synthetic oligonucleotide
auauaccuaaugugaacug

SEQ ID NO: 259896 - RNA, 19 nt, Artificial Sequence
  Description of Artificial Sequence: Synthetic oligonucleotide
augaaaacccguuaugaua

SEQ ID NO: 259897 - RNA, 19 nt, Artificial Sequence
  Description of Artificial Sequence: Synthetic oligonucleotide
guaggcgugggcaaggacg

SEQ ID NO: 259898 - RNA, 19 nt, Artificial Sequence
  Description of Artificial Sequence: Synthetic oligonucleotide
caugaguaagacacugggc

SEQ ID NO: 259899 - RNA, 19 nt, Artificial Sequence
  Description of Artificial Sequence: Synthetic oligonucleotide
gaauccaauaugcccagca

SEQ ID NO: 259900 - RNA, 19 nt, Artificial Sequence
  Description of Artificial Sequence: Synthetic oligonucleotide
aaaaugcccggaccaagga

SEQ ID NO: 259901 - RNA, 19 nt, Artificial Sequence
  Description of Artificial Sequence: Synthetic oligonucleotide
auuguagacucgcccgugg

SEQ ID NO: 259902 - RNA, 19 nt, Artificial Sequence
  Description of Artificial Sequence: Synthetic oligonucleotide
accuacaagaauagcgccc

SEQ ID NO: 259903 - RNA, 19 nt, Artificial Sequence
  Description of Artificial Sequence: Synthetic oligonucleotide
auuaagucuguaucccuga

SEQ ID NO: 259904 - RNA, 19 nt, Artificial Sequence
  Description of Artificial Sequence: Synthetic oligonucleotide
auaugauaucacauuauca

SEQ ID NO: 259905 - RNA, 19 nt, Artificial Sequence
  Description of Artificial Sequence: Synthetic oligonucleotide
agcggguaauauuguagac

SEQ ID NO: 259906 - RNA, 19 nt, Artificial Sequence
  Description of Artificial Sequence: Synthetic oligonucleotide
uugagacaugacaugucug

SEQ ID NO: 259907 - RNA, 19 nt, Artificial Sequence
  Description of Artificial Sequence: Synthetic oligonucleotide
cuaaugugaacugagagua

SEQ ID NO: 259908 - RNA, 19 nt, Artificial Sequence
  Description of Artificial Sequence: Synthetic oligonucleotide
ugauuaagucuguaucccu

SEQ ID NO: 259909 - RNA, 19 nt, Artificial Sequence
  Description of Artificial Sequence: Synthetic oligonucleotide
ucauagauaauggguaaaa

SEQ ID NO: 259910 - RNA, 19 nt, Artificial Sequence
  Description of Artificial Sequence: Synthetic oligonucleotide
auuguguaguucuaacaaa

SEQ ID NO: 259911 - RNA, 19 nt, Artificial Sequence
  Description of Artificial Sequence: Synthetic oligonucleotide
uucuagaauucaauggcuu

SEQ ID NO: 259912 - RNA, 19 nt, Artificial Sequence
  Description of Artificial Sequence: Synthetic oligonucleotide
ugucccgucaagccccugg

SEQ ID NO: 259913 - RNA, 19 nt, Artificial Sequence
  Description of Artificial Sequence: Synthetic oligonucleotide
uguaucccugauauauaga

SEQ ID NO: 259914 - RNA, 19 nt, Artificial Sequence
  Description of Artificial Sequence: Synthetic oligonucleotide
uggccaaauaugacggagc

SEQ ID NO: 259915 - RNA, 19 nt, Artificial Sequence
  Description of Artificial Sequence: Synthetic oligonucleotide
uuguauugauguuuacuau

SEQ ID NO: 259916 - RNA, 19 nt, Artificial Sequence
  Description of Artificial Sequence: Synthetic oligonucleotide
cugggauuaaaguauaaua

SEQ ID NO: 259917 - RNA, 19 nt, Artificial Sequence
  Description of Artificial Sequence: Synthetic oligonucleotide
acaugacaugucugacucc

SEQ ID NO: 259918 - RNA, 19 nt, Artificial Sequence
  Description of Artificial Sequence: Synthetic oligonucleotide
gggaaucaaauucagguca

SEQ ID NO: 259919 - RNA, 19 nt, Artificial Sequence
  Description of Artificial Sequence: Synthetic oligonucleotide
uggucuuucuagaauucaa

SEQ ID NO: 259920 - RNA, 19 nt, Artificial Sequence
  Description of Artificial Sequence: Synthetic oligonucleotide
aacauagaugugaaauaga

SEQ ID NO: 259921 - RNA, 19 nt, Artificial Sequence
  Description of Artificial Sequence: Synthetic oligonucleotide
caauugcuaaaucacagaa

SEQ ID NO: 259922 - RNA, 19 nt, Artificial Sequence
  Description of Artificial Sequence: Synthetic oligonucleotide
agacaugacaugucugacu

SEQ ID NO: 259923 - RNA, 19 nt, Artificial Sequence
  Description of Artificial Sequence: Synthetic oligonucleotide
auauuguagacucgcccgu

SEQ ID NO: 259924 - RNA, 19 nt, Artificial Sequence
  Description of Artificial Sequence: Synthetic oligonucleotide
ugcaugggcagacugguuu

SEQ ID NO: 259925 - RNA, 19 nt, Artificial Sequence
  Description of Artificial Sequence: Synthetic oligonucleotide
uuugcaugggcagacuggu

SEQ ID NO: 259926 - RNA, 19 nt, Artificial Sequence
  Description of Artificial Sequence: Synthetic oligonucleotide
gaaggauccuuguuaccac

SEQ ID NO: 259927 - RNA, 19 nt, Artificial Sequence
  Description of Artificial Sequence: Synthetic oligonucleotide
guaaugaacaaaggaugug

SEQ ID NO: 259928 - RNA, 19 nt, Artificial Sequence
  Description of Artificial Sequence: Synthetic oligonucleotide
ugacgauacaggaaaccua

SEQ ID NO: 259929 - RNA, 19 nt, Artificial Sequence
  Description of Artificial Sequence: Synthetic oligonucleotide
uugucggccgugaagugac

SEQ ID NO: 259930 - RNA, 19 nt, Artificial Sequence
  Description of Artificial Sequence: Synthetic oligonucleotide
guuuaaggucacucggaug

SEQ ID NO: 259931 - RNA, 19 nt, Artificial Sequence
  Description of Artificial Sequence: Synthetic oligonucleotide
ucgccauuggguccgaguc

SEQ ID NO: 259932 - RNA, 19 nt, Artificial Sequence
  Description of Artificial Sequence: Synthetic oligonucleotide
ugaguaagacacugggcau

SEQ ID NO: 259933 - RNA, 19 nt, Artificial Sequence
  Description of Artificial Sequence: Synthetic oligonucleotide
ucucgucuccucaggagga

SEQ ID NO: 259934 - RNA, 19 nt, Artificial Sequence
  Description of Artificial Sequence: Synthetic oligonucleotide
guaauauuguagacucgcc

SEQ ID NO: 259935 - RNA, 19 nt, Artificial Sequence
  Description of Artificial Sequence: Synthetic oligonucleotide
aggaugcucgcugaggaag

SEQ ID NO: 259936 - RNA, 19 nt, Artificial Sequence
  Description of Artificial Sequence: Synthetic oligonucleotide
ucuaccgcuaucugggguu

SEQ ID NO: 259937 - RNA, 19 nt, Artificial Sequence
  Description of Artificial Sequence: Synthetic oligonucleotide
acccguuaugauaaaugac

SEQ ID NO: 259938 - RNA, 19 nt, Artificial Sequence
  Description of Artificial Sequence: Synthetic oligonucleotide
ugggagagucucacuaugu

SEQ ID NO: 259939 - RNA, 19 nt, Artificial Sequence
  Description of Artificial Sequence: Synthetic oligonucleotide
acccaauggucuaucuugc

SEQ ID NO: 259940 - RNA, 19 nt, Artificial Sequence
  Description of Artificial Sequence: Synthetic oligonucleotide
uguuguguguguguuguau

SEQ ID NO: 259941 - RNA, 19 nt, Artificial Sequence
  Description of Artificial Sequence: Synthetic oligonucleotide
uuccccuuacuuuaauaau

SEQ ID NO: 259942 - RNA, 19 nt, Artificial Sequence
  Description of Artificial Sequence: Synthetic oligonucleotide
caaacaucuuggcuccaag

SEQ ID NO: 259943 - RNA, 19 nt, Artificial Sequence
  Description of Artificial Sequence: Synthetic oligonucleotide
gagggcaacuuuugggaac

SEQ ID NO: 259944 - RNA, 19 nt, Artificial Sequence
  Description of Artificial Sequence: Synthetic oligonucleotide
cccguuaugauaaaugaca

SEQ ID NO: 259945 - RNA, 19 nt, Artificial Sequence
  Description of Artificial Sequence: Synthetic oligonucleotide
agauauuuggcaacugaau

SEQ ID NO: 259946 - RNA, 19 nt, Artificial Sequence
  Description of Artificial Sequence: Synthetic oligonucleotide
guacuugacggaggggucg

SEQ ID NO: 259947 - RNA, 19 nt, Artificial Sequence
  Description of Artificial Sequence: Synthetic oligonucleotide
ugguccuagacugaaggau

SEQ ID NO: 259948 - RNA, 19 nt, Artificial Sequence
  Description of Artificial Sequence: Synthetic oligonucleotide
auccacgucuccuccgcgg

SEQ ID NO: 259949 - RNA, 19 nt, Artificial Sequence
  Description of Artificial Sequence: Synthetic oligonucleotide
cugaggucgccauuggguc

SEQ ID NO: 259950 - RNA, 19 nt, Artificial Sequence
  Description of Artificial Sequence: Synthetic oligonucleotide
ugaggucgccauugggucc

SEQ ID NO: 259951 - RNA, 19 nt, Artificial Sequence
  Description of Artificial Sequence: Synthetic oligonucleotide
cucuacaacacaggaacuc

SEQ ID NO: 259952 - RNA, 19 nt, Artificial Sequence
  Description of Artificial Sequence: Synthetic oligonucleotide
cuaccguguguguccaggg

SEQ ID NO: 259953 - RNA, 19 nt, Artificial Sequence
  Description of Artificial Sequence: Synthetic oligonucleotide
uuguagacucgcccgugga

SEQ ID NO: 259954 - RNA, 19 nt, Artificial Sequence
  Description of Artificial Sequence: Synthetic oligonucleotide
cucuccguuacuuugagau

SEQ ID NO: 259955 - RNA, 19 nt, Artificial Sequence
  Description of Artificial Sequence: Synthetic oligonucleotide
uagacucgcccguggauca

SEQ ID NO: 259956 - RNA, 19 nt, Artificial Sequence
  Description of Artificial Sequence: Synthetic oligonucleotide
ugacggagcucuccguuac

SEQ ID NO: 259957 - RNA, 19 nt, Artificial Sequence
  Description of Artificial Sequence: Synthetic oligonucleotide
ucucuaccgcuaucugggg

SEQ ID NO: 259958 - RNA, 19 nt, Artificial Sequence
  Description of Artificial Sequence: Synthetic oligonucleotide
gaggucgccauuggguccg

SEQ ID NO: 259959 - RNA, 19 nt, Artificial Sequence
  Description of Artificial Sequence: Synthetic oligonucleotide
uguagacucgcccguggau

SEQ ID NO: 259960 - RNA, 19 nt, Artificial Sequence
  Description of Artificial Sequence: Synthetic oligonucleotide
ugacuggcacaucucugcu

SEQ ID NO: 259961 - RNA, 19 nt, Artificial Sequence
  Description of Artificial Sequence: Synthetic oligonucleotide
uauuguagacucgcccgug

SEQ ID NO: 259962 - RNA, 19 nt, Artificial Sequence
  Description of Artificial Sequence: Synthetic oligonucleotide
uccgcggaguuucgcuucg

SEQ ID NO: 259963 - RNA, 19 nt, Artificial Sequence
  Description of Artificial Sequence: Synthetic oligonucleotide
agaauccaauaugcccagc

SEQ ID NO: 259964 - RNA, 19 nt, Artificial Sequence
  Description of Artificial Sequence: Synthetic oligonucleotide
uggguauuagauggauuac

SEQ ID NO: 259965 - RNA, 19 nt, Artificial Sequence
  Description of Artificial Sequence: Synthetic oligonucleotide
cuggccuacaacucaagaa

SEQ ID NO: 259966 - RNA, 19 nt, Artificial Sequence
  Description of Artificial Sequence: Synthetic oligonucleotide
gagacaugacaugucugac

SEQ ID NO: 259967 - RNA, 19 nt, Artificial Sequence
  Description of Artificial Sequence: Synthetic oligonucleotide
aauacauauccaagccaua

SEQ ID NO: 259968 - RNA, 19 nt, Artificial Sequence
  Description of Artificial Sequence: Synthetic oligonucleotide
guguaguucuaacaaacau

SEQ ID NO: 259969 - RNA, 19 nt, Artificial Sequence
  Description of Artificial Sequence: Synthetic oligonucleotide
agcaaagaacauucauguu

SEQ ID NO: 259970 - RNA, 19 nt, Artificial Sequence
  Description of Artificial Sequence: Synthetic oligonucleotide
auaugacggagcucuccgu

SEQ ID NO: 259971 - RNA, 19 nt, Artificial Sequence
  Description of Artificial Sequence: Synthetic oligonucleotide
auggucuaucuugcuuccc

SEQ ID NO: 259972 - RNA, 19 nt, Artificial Sequence
  Description of Artificial Sequence: Synthetic oligonucleotide
guucccuuaaauauaccua

SEQ ID NO: 259973 - RNA, 19 nt, Artificial Sequence
  Description of Artificial Sequence: Synthetic oligonucleotide
ucgcccguggaucaccauc

SEQ ID NO: 259974 - RNA, 19 nt, Artificial Sequence
  Description of Artificial Sequence: Synthetic oligonucleotide
agucaccucagguggacuu

SEQ ID NO: 259975 - RNA, 19 nt, Artificial Sequence
  Description of Artificial Sequence: Synthetic oligonucleotide
ucgcugaggaagcggguaa

SEQ ID NO: 259976 - RNA, 19 nt, Artificial Sequence
  Description of Artificial Sequence: Synthetic oligonucleotide
gggagagucucacuaugug

SEQ ID NO: 259977 - RNA, 19 nt, Artificial Sequence
  Description of Artificial Sequence: Synthetic oligonucleotide
auccgaguauucaaggaaa

SEQ ID NO: 259978 - RNA, 19 nt, Artificial Sequence
  Description of Artificial Sequence: Synthetic oligonucleotide
aguuucgcuucgccaccuc

SEQ ID NO: 259979 - RNA, 19 nt, Artificial Sequence
  Description of Artificial Sequence: Synthetic oligonucleotide
agguuuaaggucacucgga

SEQ ID NO: 259980 - RNA, 19 nt, Artificial Sequence
  Description of Artificial Sequence: Synthetic oligonucleotide
caucaccaauguaguacug

SEQ ID NO: 259981 - RNA, 19 nt, Artificial Sequence
  Description of Artificial Sequence: Synthetic oligonucleotide
ggcaacuuuugggaacugg

SEQ ID NO: 259982 - RNA, 19 nt, Artificial Sequence
  Description of Artificial Sequence: Synthetic oligonucleotide
auagguaaacaaacuccau

SEQ ID NO: 259983 - RNA, 19 nt, Artificial Sequence
  Description of Artificial Sequence: Synthetic oligonucleotide
uacuugacggaggggucgc

SEQ ID NO: 259984 - RNA, 19 nt, Artificial Sequence
  Description of Artificial Sequence: Synthetic oligonucleotide
cucuauagucaucaacaua

SEQ ID NO: 259985 - RNA, 19 nt, Artificial Sequence
  Description of Artificial Sequence: Synthetic oligonucleotide
caaauaugacggagcucuc

SEQ ID NO: 259986 - RNA, 19 nt, Artificial Sequence
  Description of Artificial Sequence: Synthetic oligonucleotide
ggacgggccacugaaauuc

SEQ ID NO: 259987 - RNA, 19 nt, Artificial Sequence
  Description of Artificial Sequence: Synthetic oligonucleotide
caugaaaacccguuaugau

SEQ ID NO: 259988 - RNA, 19 nt, Artificial Sequence
  Description of Artificial Sequence: Synthetic oligonucleotide
ggucucgucuccucaggag

SEQ ID NO: 259989 - RNA, 19 nt, Artificial Sequence
  Description of Artificial Sequence: Synthetic oligonucleotide
ugucggccgugaagugacg

SEQ ID NO: 259990 - RNA, 19 nt, Artificial Sequence
  Description of Artificial Sequence: Synthetic oligonucleotide
gugacgauacaggaaaccu

SEQ ID NO: 259991 - RNA, 19 nt, Artificial Sequence
  Description of Artificial Sequence: Synthetic oligonucleotide
ggguauuagauggauuaca

SEQ ID NO: 259992 - RNA, 19 nt, Artificial Sequence
  Description of Artificial Sequence: Synthetic oligonucleotide
acaugacaacaguccagaa

SEQ ID NO: 259993 - RNA, 19 nt, Artificial Sequence
  Description of Artificial Sequence: Synthetic oligonucleotide
ggaguuucgcuucgccacc

SEQ ID NO: 259994 - RNA, 19 nt, Artificial Sequence
  Description of Artificial Sequence: Synthetic oligonucleotide
ggguaauauuguagacucg

SEQ ID NO: 259995 - RNA, 19 nt, Artificial Sequence
  Description of Artificial Sequence: Synthetic oligonucleotide
gucgcagcccucgucauuc

SEQ ID NO: 259996 - RNA, 19 nt, Artificial Sequence
  Description of Artificial Sequence: Synthetic oligonucleotide
uccuagacugaaggauaga

SEQ ID NO: 259997 - RNA, 19 nt, Artificial Sequence
  Description of Artificial Sequence: Synthetic oligonucleotide
augacggagcucuccguua

SEQ ID NO: 259998 - RNA, 19 nt, Artificial Sequence
  Description of Artificial Sequence: Synthetic oligonucleotide
cugguccuagacugaagga

SEQ ID NO: 259999 - RNA, 19 nt, Artificial Sequence
  Description of Artificial Sequence: Synthetic oligonucleotide
aggauccuuguuaccaccu

SEQ ID NO: 260000 - RNA, 19 nt, Artificial Sequence
  Description of Artificial Sequence: Synthetic oligonucleotide
cccugauauauagaaauca

SEQ ID NO: 260001 - RNA, 19 nt, Artificial Sequence
  Description of Artificial Sequence: Synthetic oligonucleotide
acggaggggucgcagcccu

SEQ ID NO: 260002 - RNA, 19 nt, Artificial Sequence
  Description of Artificial Sequence: Synthetic oligonucleotide
ggcgauguaggcgugggca

SEQ ID NO: 260003 - RNA, 19 nt, Artificial Sequence
  Description of Artificial Sequence: Synthetic oligonucleotide
ccgugaagugacgauacag

SEQ ID NO: 260004 - RNA, 19 nt, Artificial Sequence
  Description of Artificial Sequence: Synthetic oligonucleotide
cggaguuucgcuucgccac

SEQ ID NO: 260005 - RNA, 19 nt, Artificial Sequence
  Description of Artificial Sequence: Synthetic oligonucleotide
aggacgggccacugaaauu

SEQ ID NO: 260006 - RNA, 19 nt, Artificial Sequence
  Description of Artificial Sequence: Synthetic oligonucleotide
gcccggaccaaggagaaac

SEQ ID NO: 260007 - RNA, 19 nt, Artificial Sequence
  Description of Artificial Sequence: Synthetic oligonucleotide
acgauggggagaauccaau

SEQ ID NO: 260008 - RNA, 19 nt, Artificial Sequence
  Description of Artificial Sequence: Synthetic oligonucleotide
gacggaggggucgcagccc

SEQ ID NO: 260009 - RNA, 19 nt, Artificial Sequence
  Description of Artificial Sequence: Synthetic oligonucleotide
gacucgcccguggaucacc

SEQ ID NO: 260010 - RNA, 19 nt, Artificial Sequence
  Description of Artificial Sequence: Synthetic oligonucleotide
aguugagggugcaguaaaa

SEQ ID NO: 260011 - RNA, 19 nt, Artificial Sequence
  Description of Artificial Sequence: Synthetic oligonucleotide
gguuuaaggucacucggau

SEQ ID NO: 260012 - RNA, 19 nt, Artificial Sequence
  Description of Artificial Sequence: Synthetic oligonucleotide
ggccaaauaugacggagcu

SEQ ID NO: 260013 - RNA, 19 nt, Artificial Sequence
  Description of Artificial Sequence: Synthetic oligonucleotide
uuguuguguguguguugua

SEQ ID NO: 260014 - RNA, 19 nt, Artificial Sequence
  Description of Artificial Sequence: Synthetic oligonucleotide
ccuacaagaauagcgccca

SEQ ID NO: 260015 - RNA, 19 nt, Artificial Sequence
  Description of Artificial Sequence: Synthetic oligonucleotide
ggauagauaucuagucaaa

SEQ ID NO: 260016 - RNA, 19 nt, Artificial Sequence
  Description of Artificial Sequence: Synthetic oligonucleotide
ggaagcggguaauauugua

SEQ ID NO: 260017 - RNA, 19 nt, Artificial Sequence
  Description of Artificial Sequence: Synthetic oligonucleotide
accgcuaucugggguucug

SEQ ID NO: 260018 - RNA, 19 nt, Artificial Sequence
  Description of Artificial Sequence: Synthetic oligonucleotide
ccugauauauagaaaucau

SEQ ID NO: 260019 - RNA, 19 nt, Artificial Sequence
  Description of Artificial Sequence: Synthetic oligonucleotide
agacucgcccguggaucac

SEQ ID NO: 260020 - RNA, 19 nt, Artificial Sequence
  Description of Artificial Sequence: Synthetic oligonucleotide
gcucagauaaaagcaggaa

SEQ ID NO: 260021 - RNA, 19 nt, Artificial Sequence
  Description of Artificial Sequence: Synthetic oligonucleotide
caacuuuugggaacugguu

SEQ ID NO: 260022 - RNA, 19 nt, Artificial Sequence
  Description of Artificial Sequence: Synthetic oligonucleotide
gguccuagacugaaggaua

SEQ ID NO: 260023 - RNA, 19 nt, Artificial Sequence
  Description of Artificial Sequence: Synthetic oligonucleotide
ucgcagcccucgucauucc

SEQ ID NO: 260024 - RNA, 19 nt, Artificial Sequence
  Description of Artificial Sequence: Synthetic oligonucleotide
cuaccgcuaucugggguuc

SEQ ID NO: 260025 - RNA, 19 nt, Artificial Sequence
  Description of Artificial Sequence: Synthetic oligonucleotide
cgcccguggaucaccaucc

SEQ ID NO: 260026 - RNA, 19 nt, Artificial Sequence
  Description of Artificial Sequence: Synthetic oligonucleotide
gcggaguuucgcuucgcca

SEQ ID NO: 260027 - RNA, 19 nt, Artificial Sequence
  Description of Artificial Sequence: Synthetic oligonucleotide
acggagcucuccguuacuu

SEQ ID NO: 260028 - RNA, 19 nt, Artificial Sequence
  Description of Artificial Sequence: Synthetic oligonucleotide
gaggaaaaucauagauaau

SEQ ID NO: 260029 - RNA, 19 nt, Artificial Sequence
  Description of Artificial Sequence: Synthetic oligonucleotide
gacgggccacugaaauuca

SEQ ID NO: 260030 - RNA, 19 nt, Artificial Sequence
  Description of Artificial Sequence: Synthetic oligonucleotide
gcggguaauauuguagacu

SEQ ID NO: 260031 - RNA, 19 nt, Artificial Sequence
  Description of Artificial Sequence: Synthetic oligonucleotide
acccugguccuagacugaa

SEQ ID NO: 260032 - RNA, 19 nt, Artificial Sequence
  Description of Artificial Sequence: Synthetic oligonucleotide
ucgucuccucaggaggauu

SEQ ID NO: 260033 - RNA, 19 nt, Artificial Sequence
  Description of Artificial Sequence: Synthetic oligonucleotide
caggaugcucgcugaggaa

SEQ ID NO: 260034 - RNA, 19 nt, Artificial Sequence
  Description of Artificial Sequence: Synthetic oligonucleotide
uaccgcuaucugggguucu

SEQ ID NO: 260035 - RNA, 19 nt, Artificial Sequence
  Description of Artificial Sequence: Synthetic oligonucleotide
caagaauagcgcccacgau

SEQ ID NO: 260036 - RNA, 19 nt, Artificial Sequence
  Description of Artificial Sequence: Synthetic oligonucleotide
cugaggaagcggguaauau

SEQ ID NO: 260037 - RNA, 19 nt, Artificial Sequence
  Description of Artificial Sequence: Synthetic oligonucleotide
cucuaccgcuaucuggggu

SEQ ID NO: 260038 - RNA, 19 nt, Artificial Sequence
  Description of Artificial Sequence: Synthetic oligonucleotide
acgcacucccacacucaug

SEQ ID NO: 260039 - RNA, 19 nt, Artificial Sequence
  Description of Artificial Sequence: Synthetic oligonucleotide
acucgcccguggaucacca

SEQ ID NO: 260040 - RNA, 19 nt, Artificial Sequence
  Description of Artificial Sequence: Synthetic oligonucleotide
ggcaaggacgggccacuga

SEQ ID NO: 260041 - RNA, 19 nt, Artificial Sequence
  Description of Artificial Sequence: Synthetic oligonucleotide
gccaaauaugacggagcuc

SEQ ID NO: 260042 - RNA, 19 nt, Artificial Sequence
  Description of Artificial Sequence: Synthetic oligonucleotide
gcgauguaggcgugggcaa

SEQ ID NO: 260043 - RNA, 19 nt, Artificial Sequence
  Description of Artificial Sequence: Synthetic oligonucleotide
cuccuccgcggaguuucgc

SEQ ID NO: 260044 - RNA, 19 nt, Artificial Sequence
  Description of Artificial Sequence: Synthetic oligonucleotide
gacggagcucuccguuacu

SEQ ID NO: 260045 - RNA, 19 nt, Artificial Sequence
  Description of Artificial Sequence: Synthetic oligonucleotide
cgccauuggguccgagucc

SEQ ID NO: 260046 - RNA, 19 nt, Artificial Sequence
  Description of Artificial Sequence: Synthetic oligonucleotide
cccgucaagccccuggcaa

SEQ ID NO: 260047 - RNA, 19 nt, Artificial Sequence
  Description of Artificial Sequence: Synthetic oligonucleotide
gccgugaagugacgauaca

SEQ ID NO: 260048 - RNA, 19 nt, Artificial Sequence
  Description of Artificial Sequence: Synthetic oligonucleotide
cgcggaguuucgcuucgcc

SEQ ID NO: 260049 - RNA, 19 nt, Artificial Sequence
  Description of Artificial Sequence: Synthetic oligonucleotide
gcugaggaagcggguaaua

SEQ ID NO: 260050 - RNA, 19 nt, Artificial Sequence
  Description of Artificial Sequence: Synthetic oligonucleotide
gggcauaaggcaggugacu

SEQ ID NO: 260051 - RNA, 19 nt, Artificial Sequence
  Description of Artificial Sequence: Synthetic oligonucleotide
cacgucuccuccgcggagu

SEQ ID NO: 260052 - RNA, 19 nt, Artificial Sequence
  Description of Artificial Sequence: Synthetic oligonucleotide
cguggaucaccauccacgu

SEQ ID NO: 260053 - RNA, 19 nt, Artificial Sequence
  Description of Artificial Sequence: Synthetic oligonucleotide
cccuuacuuuaauaaucau

SEQ ID NO: 260054 - RNA, 19 nt, Artificial Sequence
  Description of Artificial Sequence: Synthetic oligonucleotide
gcccuggguauuagaugga

SEQ ID NO: 260055 - RNA, 19 nt, Artificial Sequence
  Description of Artificial Sequence: Synthetic oligonucleotide
aggucgccauuggguccga

SEQ ID NO: 260056 - RNA, 19 nt, Artificial Sequence
  Description of Artificial Sequence: Synthetic oligonucleotide
ccguuacuuugagauauuu

SEQ ID NO: 260057 - RNA, 19 nt, Artificial Sequence
  Description of Artificial Sequence: Synthetic oligonucleotide
ccgcggaguuucgcuucgc

SEQ ID NO: 260058 - RNA, 19 nt, Artificial Sequence
  Description of Artificial Sequence: Synthetic oligonucleotide
cucgcccguggaucaccau

SEQ ID NO: 260059 - RNA, 19 nt, Artificial Sequence
  Description of Artificial Sequence: Synthetic oligonucleotide
cggccgugaagugacgaua

SEQ ID NO: 260060 - RNA, 19 nt, Artificial Sequence
  Description of Artificial Sequence: Synthetic oligonucleotide
cgcccacgauggggagaau

SEQ ID NO: 260061 - RNA, 19 nt, Artificial Sequence
  Description of Artificial Sequence: Synthetic oligonucleotide
agaaguaaagcauuuauac

SEQ ID NO: 260062 - RNA, 19 nt, Artificial Sequence
  Description of Artificial Sequence: Synthetic oligonucleotide
agagcuaauauccuuaagc

SEQ ID NO: 260063 - RNA, 19 nt, Artificial Sequence
  Description of Artificial Sequence: Synthetic oligonucleotide
aaaugugggauccaaguac

SEQ ID NO: 260064 - RNA, 19 nt, Artificial Sequence
  Description of Artificial Sequence: Synthetic oligonucleotide
aauaguuagaauccuacug

SEQ ID NO: 260065 - RNA, 19 nt, Artificial Sequence
  Description of Artificial Sequence: Synthetic oligonucleotide
aaugauuugauauuucccu

SEQ ID NO: 260066 - RNA, 19 nt, Artificial Sequence
  Description of Artificial Sequence: Synthetic oligonucleotide
aaacuaaagugauucauuc

SEQ ID NO: 260067 - RNA, 19 nt, Artificial Sequence
  Description of Artificial Sequence: Synthetic oligonucleotide
uaacaaugagaacauaugg

SEQ ID NO: 260068 - RNA, 19 nt, Artificial Sequence
  Description of Artificial Sequence: Synthetic oligonucleotide
aauaaauugcaguaaggca

SEQ ID NO: 260069 - RNA, 19 nt, Artificial Sequence
  Description of Artificial Sequence: Synthetic oligonucleotide
aaugagaacauaugguuug

SEQ ID NO: 260070 - RNA, 19 nt, Artificial Sequence
  Description of Artificial Sequence: Synthetic oligonucleotide
gaauaguuuaguuaccuag

SEQ ID NO: 260071 - RNA, 19 nt, Artificial Sequence
  Description of Artificial Sequence: Synthetic oligonucleotide
aaagcauuuauacuucuug

SEQ ID NO: 260072 - RNA, 19 nt, Artificial Sequence
  Description of Artificial Sequence: Synthetic oligonucleotide
acuaaagugauucauucag

SEQ ID NO: 260073 - RNA, 19 nt, Artificial Sequence
  Description of Artificial Sequence: Synthetic oligonucleotide
uuugguaaugauuugauau

SEQ ID NO: 260074 - RNA, 19 nt, Artificial Sequence
  Description of Artificial Sequence: Synthetic oligonucleotide
uucuuauuagcacagagaa

SEQ ID NO: 260075 - RNA, 19 nt, Artificial Sequence
  Description of Artificial Sequence: Synthetic oligonucleotide
uuaacaaugagaacauaug

SEQ ID NO: 260076 - RNA, 19 nt, Artificial Sequence
  Description of Artificial Sequence: Synthetic oligonucleotide
uuucuaguaaaguacaggu

SEQ ID NO: 260077 - RNA, 19 nt, Artificial Sequence
  Description of Artificial Sequence: Synthetic oligonucleotide
cuacgaagagcuaauaucc

SEQ ID NO: 260078 - RNA, 19 nt, Artificial Sequence
  Description of Artificial Sequence: Synthetic oligonucleotide
aaacuugccuucuucacag

SEQ ID NO: 260079 - RNA, 19 nt, Artificial Sequence
  Description of Artificial Sequence: Synthetic oligonucleotide
aacucauguaauaagguuc

SEQ ID NO: 260080 - RNA, 19 nt, Artificial Sequence
  Description of Artificial Sequence: Synthetic oligonucleotide
agaaccaaacucaauaggc

SEQ ID NO: 260081 - RNA, 19 nt, Artificial Sequence
  Description of Artificial Sequence: Synthetic oligonucleotide
ugcauaauggaauauuuga

SEQ ID NO: 260082 - RNA, 19 nt, Artificial Sequence
  Description of Artificial Sequence: Synthetic oligonucleotide
aagaauugcucguuaaaug

SEQ ID NO: 260083 - RNA, 19 nt, Artificial Sequence
  Description of Artificial Sequence: Synthetic oligonucleotide
aaccuuagcggucuuuagc

SEQ ID NO: 260084 - RNA, 19 nt, Artificial Sequence
  Description of Artificial Sequence: Synthetic oligonucleotide
aagaacacaaacuacuuuu

SEQ ID NO: 260085 - RNA, 19 nt, Artificial Sequence
  Description of Artificial Sequence: Synthetic oligonucleotide
auauccucaguguacauag

SEQ ID NO: 260086 - RNA, 19 nt, Artificial Sequence
  Description of Artificial Sequence: Synthetic oligonucleotide
uuuacuaagucaaaagcua

SEQ ID NO: 260087 - RNA, 19 nt, Artificial Sequence
  Description of Artificial Sequence: Synthetic oligonucleotide
accuuagcggucuuuagcc

SEQ ID NO: 260088 - RNA, 19 nt, Artificial Sequence
  Description of Artificial Sequence: Synthetic oligonucleotide
uauguaauauguaggagaa

SEQ ID NO: 260089 - RNA, 19 nt, Artificial Sequence
  Description of Artificial Sequence: Synthetic oligonucleotide
aauaagguucuucugacuu

SEQ ID NO: 260090 - RNA, 19 nt, Artificial Sequence
  Description of Artificial Sequence: Synthetic oligonucleotide
auaguuagaauccuacugu

SEQ ID NO: 260091 - RNA, 19 nt, Artificial Sequence
  Description of Artificial Sequence: Synthetic oligonucleotide
auuguauugccuuuuguca

SEQ ID NO: 260092 - RNA, 19 nt, Artificial Sequence
  Description of Artificial Sequence: Synthetic oligonucleotide
aaucaacaaggucaaacca

SEQ ID NO: 260093 - RNA, 19 nt, Artificial Sequence
  Description of Artificial Sequence: Synthetic oligonucleotide
agaauugcucguuaaauga

SEQ ID NO: 260094 - RNA, 19 nt, Artificial Sequence
  Description of Artificial Sequence: Synthetic oligonucleotide
ucuacgaagagcuaauauc

SEQ ID NO: 260095 - RNA, 19 nt, Artificial Sequence
  Description of Artificial Sequence: Synthetic oligonucleotide
ucaugagucacuugaagca

SEQ ID NO: 260096 - RNA, 19 nt, Artificial Sequence
  Description of Artificial Sequence: Synthetic oligonucleotide
cacaaugaagaucagccgg

SEQ ID NO: 260097 - RNA, 19 nt, Artificial Sequence
  Description of Artificial Sequence: Synthetic oligonucleotide
aauggaauauuugaucugu

SEQ ID NO: 260098 - RNA, 19 nt, Artificial Sequence
  Description of Artificial Sequence: Synthetic oligonucleotide
uaaaacaaaugugggaucc

SEQ ID NO: 260099 - RNA, 19 nt, Artificial Sequence
  Description of Artificial Sequence: Synthetic oligonucleotide
uuuaaauuugcaggaaggc

SEQ ID NO: 260100 - RNA, 19 nt, Artificial Sequence
  Description of Artificial Sequence: Synthetic oligonucleotide
uuugucaguaaguuccucc

SEQ ID NO: 260101 - RNA, 19 nt, Artificial Sequence
  Description of Artificial Sequence: Synthetic oligonucleotide
cucgaaagagucaucaaag

SEQ ID NO: 260102 - RNA, 19 nt, Artificial Sequence
  Description of Artificial Sequence: Synthetic oligonucleotide
uacugaagaacacaaacua

SEQ ID NO: 260103 - RNA, 19 nt, Artificial Sequence
  Description of Artificial Sequence: Synthetic oligonucleotide
aaaugagguacagaaagcu

SEQ ID NO: 260104 - RNA, 19 nt, Artificial Sequence
  Description of Artificial Sequence: Synthetic oligonucleotide
agcauuuauacuucuuguc

SEQ ID NO: 260105 - RNA, 19 nt, Artificial Sequence
  Description of Artificial Sequence: Synthetic oligonucleotide
ucuuuagccacaaggcaag

SEQ ID NO: 260106 - RNA, 19 nt, Artificial Sequence
  Description of Artificial Sequence: Synthetic oligonucleotide
aaauacuccucccagugau

SEQ ID NO: 260107 - RNA, 19 nt, Artificial Sequence
  Description of Artificial Sequence: Synthetic oligonucleotide
aagcauuuauacuucuugu

SEQ ID NO: 260108 - RNA, 19 nt, Artificial Sequence
  Description of Artificial Sequence: Synthetic oligonucleotide
acaauaguuagaauccuac

SEQ ID NO: 260109 - RNA, 19 nt, Artificial Sequence
  Description of Artificial Sequence: Synthetic oligonucleotide
aaccaaacucaauaggcga

SEQ ID NO: 260110 - RNA, 19 nt, Artificial Sequence
  Description of Artificial Sequence: Synthetic oligonucleotide
aacucaauaggcgacugag

SEQ ID NO: 260111 - RNA, 19 nt, Artificial Sequence
  Description of Artificial Sequence: Synthetic oligonucleotide
uuauguuaggaaaguaaac

SEQ ID NO: 260112 - RNA, 19 nt, Artificial Sequence
  Description of Artificial Sequence: Synthetic oligonucleotide
auauguaggagaaccaaac

SEQ ID NO: 260113 - RNA, 19 nt, Artificial Sequence
  Description of Artificial Sequence: Synthetic oligonucleotide
auaaauugcaguaaggcaa

SEQ ID NO: 260114 - RNA, 19 nt, Artificial Sequence
  Description of Artificial Sequence: Synthetic oligonucleotide
acaaaugugggauccaagu

SEQ ID NO: 260115 - RNA, 19 nt, Artificial Sequence
  Description of Artificial Sequence: Synthetic oligonucleotide
uagaauccuacugugauga

SEQ ID NO: 260116 - RNA, 19 nt, Artificial Sequence
  Description of Artificial Sequence: Synthetic oligonucleotide
aacuaaagugauucauuca

SEQ ID NO: 260117 - RNA, 19 nt, Artificial Sequence
  Description of Artificial Sequence: Synthetic oligonucleotide
gaaccaaacucaauaggcg

SEQ ID NO: 260118 - RNA, 19 nt, Artificial Sequence
  Description of Artificial Sequence: Synthetic oligonucleotide
uggcacaauuuauacaucc

SEQ ID NO: 260119 - RNA, 19 nt, Artificial Sequence
  Description of Artificial Sequence: Synthetic oligonucleotide
cucaaaucugucaucuccg

SEQ ID NO: 260120 - RNA, 19 nt, Artificial Sequence
  Description of Artificial Sequence: Synthetic oligonucleotide
uaggaaaguaaacuugccu

SEQ ID NO: 260121 - RNA, 19 nt, Artificial Sequence
  Description of Artificial Sequence: Synthetic oligonucleotide
aguaccuauuuuaagaaug

SEQ ID NO: 260122 - RNA, 19 nt, Artificial Sequence
  Description of Artificial Sequence: Synthetic oligonucleotide
guaaaguacaggucuuagg

SEQ ID NO: 260123 - RNA, 19 nt, Artificial Sequence
  Description of Artificial Sequence: Synthetic oligonucleotide
cauaugguaauuauccuca

SEQ ID NO: 260124 - RNA, 19 nt, Artificial Sequence
  Description of Artificial Sequence: Synthetic oligonucleotide
aauaguuuaguuaccuaga

SEQ ID NO: 260125 - RNA, 19 nt, Artificial Sequence
  Description of Artificial Sequence: Synthetic oligonucleotide
aauauaaggugaugguuua

SEQ ID NO: 260126 - RNA, 19 nt, Artificial Sequence
  Description of Artificial Sequence: Synthetic oligonucleotide
caugaggccuucaucacgg

SEQ ID NO: 260127 - RNA, 19 nt, Artificial Sequence
  Description of Artificial Sequence: Synthetic oligonucleotide
ugcucguuaaaugagguac

SEQ ID NO: 260128 - RNA, 19 nt, Artificial Sequence
  Description of Artificial Sequence: Synthetic oligonucleotide
aucaacaaggucaaaccac

SEQ ID NO: 260129 - RNA, 19 nt, Artificial Sequence
  Description of Artificial Sequence: Synthetic oligonucleotide
uugauauuucccuuccaug

SEQ ID NO: 260130 - RNA, 19 nt, Artificial Sequence
  Description of Artificial Sequence: Synthetic oligonucleotide
acaauuuauacauccugga

SEQ ID NO: 260131 - RNA, 19 nt, Artificial Sequence
  Description of Artificial Sequence: Synthetic oligonucleotide
ugaguguuacuacaugaac

SEQ ID NO: 260132 - RNA, 19 nt, Artificial Sequence
  Description of Artificial Sequence: Synthetic oligonucleotide
acuacaugaacacuggauu

SEQ ID NO: 260133 - RNA, 19 nt, Artificial Sequence
  Description of Artificial Sequence: Synthetic oligonucleotide
caauuuauacauccuggag

SEQ ID NO: 260134 - RNA, 19 nt, Artificial Sequence
  Description of Artificial Sequence: Synthetic oligonucleotide
uuacuaagucaaaagcuaa

SEQ ID NO: 260135 - RNA, 19 nt, Artificial Sequence
  Description of Artificial Sequence: Synthetic oligonucleotide
ugcuaaaugaagacacaca

SEQ ID NO: 260136 - RNA, 19 nt, Artificial Sequence
  Description of Artificial Sequence: Synthetic oligonucleotide
uguauguaauauguaggag

SEQ ID NO: 260137 - RNA, 19 nt, Artificial Sequence
  Description of Artificial Sequence: Synthetic oligonucleotide
augugaacacuauucuagg

SEQ ID NO: 260138 - RNA, 19 nt, Artificial Sequence
  Description of Artificial Sequence: Synthetic oligonucleotide
aauguagacaccccuucaa

SEQ ID NO: 260139 - RNA, 19 nt, Artificial Sequence
  Description of Artificial Sequence: Synthetic oligonucleotide
cacagguagauucaagggc

SEQ ID NO: 260140 - RNA, 19 nt, Artificial Sequence
  Description of Artificial Sequence: Synthetic oligonucleotide
uuguauauccucaguguac

SEQ ID NO: 260141 - RNA, 19 nt, Artificial Sequence
  Description of Artificial Sequence: Synthetic oligonucleotide
ucaaaucugucaucuccgg

SEQ ID NO: 260142 - RNA, 19 nt, Artificial Sequence
  Description of Artificial Sequence: Synthetic oligonucleotide
aguaaguuccuccauuuaa

SEQ ID NO: 260143 - RNA, 19 nt, Artificial Sequence
  Description of Artificial Sequence: Synthetic oligonucleotide
accucuccgaaguagaucu

SEQ ID NO: 260144 - RNA, 19 nt, Artificial Sequence
  Description of Artificial Sequence: Synthetic oligonucleotide
uguauauccucaguguaca

SEQ ID NO: 260145 - RNA, 19 nt, Artificial Sequence
  Description of Artificial Sequence: Synthetic oligonucleotide
uacuacaugaacacuggau

SEQ ID NO: 260146 - RNA, 19 nt, Artificial Sequence
  Description of Artificial Sequence: Synthetic oligonucleotide
acugaagaacacaaacuac

SEQ ID NO: 260147 - RNA, 19 nt, Artificial Sequence
  Description of Artificial Sequence: Synthetic oligonucleotide
aguuacugugaggaagucc

SEQ ID NO: 260148 - RNA, 19 nt, Artificial Sequence
  Description of Artificial Sequence: Synthetic oligonucleotide
gcuaauauccuuaagcuac

SEQ ID NO: 260149 - RNA, 19 nt, Artificial Sequence
  Description of Artificial Sequence: Synthetic oligonucleotide
uuugaacauuggcaaaaga

SEQ ID NO: 260150 - RNA, 19 nt, Artificial Sequence
  Description of Artificial Sequence: Synthetic oligonucleotide
guuacuacaugaacacugg

SEQ ID NO: 260151 - RNA, 19 nt, Artificial Sequence
  Description of Artificial Sequence: Synthetic oligonucleotide
guaccuauuuuaagaaugg

SEQ ID NO: 260152 - RNA, 19 nt, Artificial Sequence
  Description of Artificial Sequence: Synthetic oligonucleotide
uaacuucccauuuauguua

SEQ ID NO: 260153 - RNA, 19 nt, Artificial Sequence
  Description of Artificial Sequence: Synthetic oligonucleotide
uuauacauccuggaguaac

SEQ ID NO: 260154 - RNA, 19 nt, Artificial Sequence
  Description of Artificial Sequence: Synthetic oligonucleotide
agaucagccggaaagauga

SEQ ID NO: 260155 - RNA, 19 nt, Artificial Sequence
  Description of Artificial Sequence: Synthetic oligonucleotide
aaauuacuauuuaacagua

SEQ ID NO: 260156 - RNA, 19 nt, Artificial Sequence
  Description of Artificial Sequence: Synthetic oligonucleotide
uauaaggugaugguuuaac

SEQ ID NO: 260157 - RNA, 19 nt, Artificial Sequence
  Description of Artificial Sequence: Synthetic oligonucleotide
ggucaaaccacacaacagc

SEQ ID NO: 260158 - RNA, 19 nt, Artificial Sequence
  Description of Artificial Sequence: Synthetic oligonucleotide
aguccuaauaaaacuuugg

SEQ ID NO: 260159 - RNA, 19 nt, Artificial Sequence
  Description of Artificial Sequence: Synthetic oligonucleotide
uaaguccuaauaaaacuuu

SEQ ID NO: 260160 - RNA, 19 nt, Artificial Sequence
  Description of Artificial Sequence: Synthetic oligonucleotide
ucacggauuaacuuccagu

SEQ ID NO: 260161 - RNA, 19 nt, Artificial Sequence
  Description of Artificial Sequence: Synthetic oligonucleotide
ugagguacagaaagcuucu

SEQ ID NO: 260162 - RNA, 19 nt, Artificial Sequence
  Description of Artificial Sequence: Synthetic oligonucleotide
agaauuaugucugaauuuu

SEQ ID NO: 260163 - RNA, 19 nt, Artificial Sequence
  Description of Artificial Sequence: Synthetic oligonucleotide
ucgaaagagucaucaaaga

SEQ ID NO: 260164 - RNA, 19 nt, Artificial Sequence
  Description of Artificial Sequence: Synthetic oligonucleotide
uguucugucaugagucacu

SEQ ID NO: 260165 - RNA, 19 nt, Artificial Sequence
  Description of Artificial Sequence: Synthetic oligonucleotide
gaauugcucguuaaaugag

SEQ ID NO: 260166 - RNA, 19 nt, Artificial Sequence
  Description of Artificial Sequence: Synthetic oligonucleotide
acguucuggucucauuggc

SEQ ID NO: 260167 - RNA, 19 nt, Artificial Sequence
  Description of Artificial Sequence: Synthetic oligonucleotide
uugucaguaaguuccucca

SEQ ID NO: 260168 - RNA, 19 nt, Artificial Sequence
  Description of Artificial Sequence: Synthetic oligonucleotide
guuggcacaauuuauacau

SEQ ID NO: 260169 - RNA, 19 nt, Artificial Sequence
  Description of Artificial Sequence: Synthetic oligonucleotide
auaucauuuggaugguccu

SEQ ID NO: 260170 - RNA, 19 nt, Artificial Sequence
  Description of Artificial Sequence: Synthetic oligonucleotide
ugccaacucauguaauaag

SEQ ID NO: 260171 - RNA, 19 nt, Artificial Sequence
  Description of Artificial Sequence: Synthetic oligonucleotide
aaugugggauccaaguacu

SEQ ID NO: 260172 - RNA, 19 nt, Artificial Sequence
  Description of Artificial Sequence: Synthetic oligonucleotide
aucacugacugccaacuca

SEQ ID NO: 260173 - RNA, 19 nt, Artificial Sequence
  Description of Artificial Sequence: Synthetic oligonucleotide
aauauguaggagaaccaaa

SEQ ID NO: 260174 - RNA, 19 nt, Artificial Sequence
  Description of Artificial Sequence: Synthetic oligonucleotide
gguucauaaaacaaaugug

SEQ ID NO: 260175 - RNA, 19 nt, Artificial Sequence
  Description of Artificial Sequence: Synthetic oligonucleotide
ugugaacacuauucuaggu

SEQ ID NO: 260176 - RNA, 19 nt, Artificial Sequence
  Description of Artificial Sequence: Synthetic oligonucleotide
aaguccuaauaaaacuuug

SEQ ID NO: 260177 - RNA, 19 nt, Artificial Sequence
  Description of Artificial Sequence: Synthetic oligonucleotide
cuagcaauguagacacccc

SEQ ID NO: 260178 - RNA, 19 nt, Artificial Sequence
  Description of Artificial Sequence: Synthetic oligonucleotide
ucaauaggcgacugagugu

SEQ ID NO: 260179 - RNA, 19 nt, Artificial Sequence
  Description of Artificial Sequence: Synthetic oligonucleotide
augagaacauaugguuugc

SEQ ID NO: 260180 - RNA, 19 nt, Artificial Sequence
  Description of Artificial Sequence: Synthetic oligonucleotide
gcggucuuuagccacaagg

SEQ ID NO: 260181 - RNA, 19 nt, Artificial Sequence
  Description of Artificial Sequence: Synthetic oligonucleotide
cauguaauaagguucuucu

SEQ ID NO: 260182 - RNA, 19 nt, Artificial Sequence
  Description of Artificial Sequence: Synthetic oligonucleotide
aaacucaauaggcgacuga

SEQ ID NO: 260183 - RNA, 19 nt, Artificial Sequence
  Description of Artificial Sequence: Synthetic oligonucleotide
ugacugccaacucauguaa

SEQ ID NO: 260184 - RNA, 19 nt, Artificial Sequence
  Description of Artificial Sequence: Synthetic oligonucleotide
cucggggugccacacaucc

SEQ ID NO: 260185 - RNA, 19 nt, Artificial Sequence
  Description of Artificial Sequence: Synthetic oligonucleotide
ucauguaauaagguucuuc

SEQ ID NO: 260186 - RNA, 19 nt, Artificial Sequence
  Description of Artificial Sequence: Synthetic oligonucleotide
cuuagcggucuuuagccac

SEQ ID NO: 260187 - RNA, 19 nt, Artificial Sequence
  Description of Artificial Sequence: Synthetic oligonucleotide
acaaacuaaagugauucau

SEQ ID NO: 260188 - RNA, 19 nt, Artificial Sequence
  Description of Artificial Sequence: Synthetic oligonucleotide
gcaaugaccaugaaccacg

SEQ ID NO: 260189 - RNA, 19 nt, Artificial Sequence
  Description of Artificial Sequence: Synthetic oligonucleotide
gguagauucaagggcaagg

SEQ ID NO: 260190 - RNA, 19 nt, Artificial Sequence
  Description of Artificial Sequence: Synthetic oligonucleotide
uacgaagagcuaauauccu

SEQ ID NO: 260191 - RNA, 19 nt, Artificial Sequence
  Description of Artificial Sequence: Synthetic oligonucleotide
accaaacucaauaggcgac

SEQ ID NO: 260192 - RNA, 19 nt, Artificial Sequence
  Description of Artificial Sequence: Synthetic oligonucleotide
cuucugacuuuucacauga

SEQ ID NO: 260193 - RNA, 19 nt, Artificial Sequence
  Description of Artificial Sequence: Synthetic oligonucleotide
accaacccuagaugcauuc

SEQ ID NO: 260194 - RNA, 19 nt, Artificial Sequence
  Description of Artificial Sequence: Synthetic oligonucleotide
ugucaucuccggcaguuac

SEQ ID NO: 260195 - RNA, 19 nt, Artificial Sequence
  Description of Artificial Sequence: Synthetic oligonucleotide
uacaugaacacuggauugu

SEQ ID NO: 260196 - RNA, 19 nt, Artificial Sequence
  Description of Artificial Sequence: Synthetic oligonucleotide
uuuggaugguccugugaug

SEQ ID NO: 260197 - RNA, 19 nt, Artificial Sequence
  Description of Artificial Sequence: Synthetic oligonucleotide
gccacagacguccagacgc

SEQ ID NO: 260198 - RNA, 19 nt, Artificial Sequence
  Description of Artificial Sequence: Synthetic oligonucleotide
uguuacugcuucacuggga

SEQ ID NO: 260199 - RNA, 19 nt, Artificial Sequence
  Description of Artificial Sequence: Synthetic oligonucleotide
aauaaaacuuuggcgucau

SEQ ID NO: 260200 - RNA, 19 nt, Artificial Sequence
  Description of Artificial Sequence: Synthetic oligonucleotide
cugaagaacacaaacuacu

SEQ ID NO: 260201 - RNA, 19 nt, Artificial Sequence
  Description of Artificial Sequence: Synthetic oligonucleotide
uaaagcauuuauacuucuu

SEQ ID NO: 260202 - RNA, 19 nt, Artificial Sequence
  Description of Artificial Sequence: Synthetic oligonucleotide
auaggcgacugaguguuac

SEQ ID NO: 260203 - RNA, 19 nt, Artificial Sequence
  Description of Artificial Sequence: Synthetic oligonucleotide
ucaugcucgaaagagucau

SEQ ID NO: 260204 - RNA, 19 nt, Artificial Sequence
  Description of Artificial Sequence: Synthetic oligonucleotide
guuacugugaggaaguccu

SEQ ID NO: 260205 - RNA, 19 nt, Artificial Sequence
  Description of Artificial Sequence: Synthetic oligonucleotide
uuccaggaccucaaaucug

SEQ ID NO: 260206 - RNA, 19 nt, Artificial Sequence
  Description of Artificial Sequence: Synthetic oligonucleotide
cuguuacugcuucacuggg

SEQ ID NO: 260207 - RNA, 19 nt, Artificial Sequence
  Description of Artificial Sequence: Synthetic oligonucleotide
gaaccuuagcggucuuuag

SEQ ID NO: 260208 - RNA, 19 nt, Artificial Sequence
  Description of Artificial Sequence: Synthetic oligonucleotide
agcuaauauccuuaagcua

SEQ ID NO: 260209 - RNA, 19 nt, Artificial Sequence
  Description of Artificial Sequence: Synthetic oligonucleotide
aaccauggcgcuugaacuu

SEQ ID NO: 260210 - RNA, 19 nt, Artificial Sequence
  Description of Artificial Sequence: Synthetic oligonucleotide
cuggacuucugucccaaag

SEQ ID NO: 260211 - RNA, 19 nt, Artificial Sequence
  Description of Artificial Sequence: Synthetic oligonucleotide
cacguucuggucucauugg

SEQ ID NO: 260212 - RNA, 19 nt, Artificial Sequence
  Description of Artificial Sequence: Synthetic oligonucleotide
acuuucuacgaagagcuaa

SEQ ID NO: 260213 - RNA, 19 nt, Artificial Sequence
  Description of Artificial Sequence: Synthetic oligonucleotide
guuagaauccuacugugau

SEQ ID NO: 260214 - RNA, 19 nt, Artificial Sequence
  Description of Artificial Sequence: Synthetic oligonucleotide
ucaccaguucaguguagcc

SEQ ID NO: 260215 - RNA, 19 nt, Artificial Sequence
  Description of Artificial Sequence: Synthetic oligonucleotide
gugaacacuauucuaggua

SEQ ID NO: 260216 - RNA, 19 nt, Artificial Sequence
  Description of Artificial Sequence: Synthetic oligonucleotide
aauuacuauuuaacaguaa

SEQ ID NO: 260217 - RNA, 19 nt, Artificial Sequence
  Description of Artificial Sequence: Synthetic oligonucleotide
acuaagucaaaagcuaauu

SEQ ID NO: 260218 - RNA, 19 nt, Artificial Sequence
  Description of Artificial Sequence: Synthetic oligonucleotide
gcuagcaauguagacaccc

SEQ ID NO: 260219 - RNA, 19 nt, Artificial Sequence
  Description of Artificial Sequence: Synthetic oligonucleotide
agaauaguuuaguuaccua

SEQ ID NO: 260220 - RNA, 19 nt, Artificial Sequence
  Description of Artificial Sequence: Synthetic oligonucleotide
cauagacuccuaguuuucc

SEQ ID NO: 260221 - RNA, 19 nt, Artificial Sequence
  Description of Artificial Sequence: Synthetic oligonucleotide
aguuccaaugucaaagaau

SEQ ID NO: 260222 - RNA, 19 nt, Artificial Sequence
  Description of Artificial Sequence: Synthetic oligonucleotide
aauugcaguaaggcaaaua

SEQ ID NO: 260223 - RNA, 19 nt, Artificial Sequence
  Description of Artificial Sequence: Synthetic oligonucleotide
aggugaugguuuaacaaug

SEQ ID NO: 260224 - RNA, 19 nt, Artificial Sequence
  Description of Artificial Sequence: Synthetic oligonucleotide
gauccagaaggaaccuuag

SEQ ID NO: 260225 - RNA, 19 nt, Artificial Sequence
  Description of Artificial Sequence: Synthetic oligonucleotide
gugcauaauggaauauuug

SEQ ID NO: 260226 - RNA, 19 nt, Artificial Sequence
  Description of Artificial Sequence: Synthetic oligonucleotide
uggcgcuugaacuucuguc

SEQ ID NO: 260227 - RNA, 19 nt, Artificial Sequence
  Description of Artificial Sequence: Synthetic oligonucleotide
aagaauggacacauauuuu

SEQ ID NO: 260228 - RNA, 19 nt, Artificial Sequence
  Description of Artificial Sequence: Synthetic oligonucleotide
gcugauuccuggugaaggg

SEQ ID NO: 260229 - RNA, 19 nt, Artificial Sequence
  Description of Artificial Sequence: Synthetic oligonucleotide
aucagccggaaagaugagg

SEQ ID NO: 260230 - RNA, 19 nt, Artificial Sequence
  Description of Artificial Sequence: Synthetic oligonucleotide
uuccagggugcauaaugga

SEQ ID NO: 260231 - RNA, 19 nt, Artificial Sequence
  Description of Artificial Sequence: Synthetic oligonucleotide
cucguuaaaugagguacag

SEQ ID NO: 260232 - RNA, 19 nt, Artificial Sequence
  Description of Artificial Sequence: Synthetic oligonucleotide
acaaugaagaucagccgga

SEQ ID NO: 260233 - RNA, 19 nt, Artificial Sequence
  Description of Artificial Sequence: Synthetic oligonucleotide
auaagguucuucugacuuu

SEQ ID NO: 260234 - RNA, 19 nt, Artificial Sequence
  Description of Artificial Sequence: Synthetic oligonucleotide
auugcucguuaaaugaggu

SEQ ID NO: 260235 - RNA, 19 nt, Artificial Sequence
  Description of Artificial Sequence: Synthetic oligonucleotide
augcucgaaagagucauca

SEQ ID NO: 260236 - RNA, 19 nt, Artificial Sequence
  Description of Artificial Sequence: Synthetic oligonucleotide
guuccaaugucaaagaauu

SEQ ID NO: 260237 - RNA, 19 nt, Artificial Sequence
  Description of Artificial Sequence: Synthetic oligonucleotide
acgaagagcuaauauccuu

SEQ ID NO: 260238 - RNA, 19 nt, Artificial Sequence
  Description of Artificial Sequence: Synthetic oligonucleotide
ccauuuaauaaauacugaa

SEQ ID NO: 260239 - RNA, 19 nt, Artificial Sequence
  Description of Artificial Sequence: Synthetic oligonucleotide
acgugaagaaggagccucc

SEQ ID NO: 260240 - RNA, 19 nt, Artificial Sequence
  Description of Artificial Sequence: Synthetic oligonucleotide
ugucaguaaguuccuccau

SEQ ID NO: 260241 - RNA, 19 nt, Artificial Sequence
  Description of Artificial Sequence: Synthetic oligonucleotide
uccggcaguuacugugagg

SEQ ID NO: 260242 - RNA, 19 nt, Artificial Sequence
  Description of Artificial Sequence: Synthetic oligonucleotide
uuggcacaauuuauacauc

SEQ ID NO: 260243 - RNA, 19 nt, Artificial Sequence
  Description of Artificial Sequence: Synthetic oligonucleotide
ucguuaaaugagguacaga

SEQ ID NO: 260244 - RNA, 19 nt, Artificial Sequence
  Description of Artificial Sequence: Synthetic oligonucleotide
agugauucauucaguuucu

SEQ ID NO: 260245 - RNA, 19 nt, Artificial Sequence
  Description of Artificial Sequence: Synthetic oligonucleotide
cugaguguuacuacaugaa

SEQ ID NO: 260246 - RNA, 19 nt, Artificial Sequence
  Description of Artificial Sequence: Synthetic oligonucleotide
cauuggcaaaagaagggaa

SEQ ID NO: 260247 - RNA, 19 nt, Artificial Sequence
  Description of Artificial Sequence: Synthetic oligonucleotide
gucuuuagccacaaggcaa

SEQ ID NO: 260248 - RNA, 19 nt, Artificial Sequence
  Description of Artificial Sequence: Synthetic oligonucleotide
cacgugaagaaggagccuc

SEQ ID NO: 260249 - RNA, 19 nt, Artificial Sequence
  Description of Artificial Sequence: Synthetic oligonucleotide
ggaagaaccauggcgcuug

SEQ ID NO: 260250 - RNA, 19 nt, Artificial Sequence
  Description of Artificial Sequence: Synthetic oligonucleotide
augagucacuugaagcaag

SEQ ID NO: 260251 - RNA, 19 nt, Artificial Sequence
  Description of Artificial Sequence: Synthetic oligonucleotide
cugaugcuaaaugaagaca

SEQ ID NO: 260252 - RNA, 19 nt, Artificial Sequence
  Description of Artificial Sequence: Synthetic oligonucleotide
ucaccaacccuagaugcau

SEQ ID NO: 260253 - RNA, 19 nt, Artificial Sequence
  Description of Artificial Sequence: Synthetic oligonucleotide
agaugcauucggagccugc

SEQ ID NO: 260254 - RNA, 19 nt, Artificial Sequence
  Description of Artificial Sequence: Synthetic oligonucleotide
ugaggccuucaucacggau

SEQ ID NO: 260255 - RNA, 19 nt, Artificial Sequence
  Description of Artificial Sequence: Synthetic oligonucleotide
gggaaugaccucuccgaag

SEQ ID NO: 260256 - RNA, 19 nt, Artificial Sequence
  Description of Artificial Sequence: Synthetic oligonucleotide
guuacugcuucacugggau

SEQ ID NO: 260257 - RNA, 19 nt, Artificial Sequence
  Description of Artificial Sequence: Synthetic oligonucleotide
caaacucaauaggcgacug

SEQ ID NO: 260258 - RNA, 19 nt, Artificial Sequence
  Description of Artificial Sequence: Synthetic oligonucleotide
ccucaugcucgaaagaguc

SEQ ID NO: 260259 - RNA, 19 nt, Artificial Sequence
  Description of Artificial Sequence: Synthetic oligonucleotide
cuucccacguucuggucuc

SEQ ID NO: 260260 - RNA, 19 nt, Artificial Sequence
  Description of Artificial Sequence: Synthetic oligonucleotide
gugaauuagaaaaucuuuu

SEQ ID NO: 260261 - RNA, 19 nt, Artificial Sequence
  Description of Artificial Sequence: Synthetic oligonucleotide
uucugacuuuucacaugac

SEQ ID NO: 260262 - RNA, 19 nt, Artificial Sequence
  Description of Artificial Sequence: Synthetic oligonucleotide
aacuugccuucuucacagu

SEQ ID NO: 260263 - RNA, 19 nt, Artificial Sequence
  Description of Artificial Sequence: Synthetic oligonucleotide
cuaaagugauucauucagu

SEQ ID NO: 260264 - RNA, 19 nt, Artificial Sequence
  Description of Artificial Sequence: Synthetic oligonucleotide
acggauuaacuuccaguuu

SEQ ID NO: 260265 - RNA, 19 nt, Artificial Sequence
  Description of Artificial Sequence: Synthetic oligonucleotide
caaaugugggauccaagua

SEQ ID NO: 260266 - RNA, 19 nt, Artificial Sequence
  Description of Artificial Sequence: Synthetic oligonucleotide
cuaagucaaaagcuaauuu

SEQ ID NO: 260267 - RNA, 19 nt, Artificial Sequence
  Description of Artificial Sequence: Synthetic oligonucleotide
uugcucguuaaaugaggua

SEQ ID NO: 260268 - RNA, 19 nt, Artificial Sequence
  Description of Artificial Sequence: Synthetic oligonucleotide
ggaaugaccucuccgaagu

SEQ ID NO: 260269 - RNA, 19 nt, Artificial Sequence
  Description of Artificial Sequence: Synthetic oligonucleotide
aggccuucaucacggauua

SEQ ID NO: 260270 - RNA, 19 nt, Artificial Sequence
  Description of Artificial Sequence: Synthetic oligonucleotide
caauguagacaccccuuca

SEQ ID NO: 260271 - RNA, 19 nt, Artificial Sequence
  Description of Artificial Sequence: Synthetic oligonucleotide
uucaagggcaaggguuggc

SEQ ID NO: 260272 - RNA, 19 nt, Artificial Sequence
  Description of Artificial Sequence: Synthetic oligonucleotide
cagacguccagacgcccag

SEQ ID NO: 260273 - RNA, 19 nt, Artificial Sequence
  Description of Artificial Sequence: Synthetic oligonucleotide
agcaaggggccuccuaaau

SEQ ID NO: 260274 - RNA, 19 nt, Artificial Sequence
  Description of Artificial Sequence: Synthetic oligonucleotide
caauaguuagaauccuacu

SEQ ID NO: 260275 - RNA, 19 nt, Artificial Sequence
  Description of Artificial Sequence: Synthetic oligonucleotide
uuacaggcauucucauuuu

SEQ ID NO: 260276 - RNA, 19 nt, Artificial Sequence
  Description of Artificial Sequence: Synthetic oligonucleotide
caggaccucaaaucuguca

SEQ ID NO: 260277 - RNA, 19 nt, Artificial Sequence
  Description of Artificial Sequence: Synthetic oligonucleotide
auggcgcuugaacuucugu

SEQ ID NO: 260278 - RNA, 19 nt, Artificial Sequence
  Description of Artificial Sequence: Synthetic oligonucleotide
agguagauucaagggcaag

SEQ ID NO: 260279 - RNA, 19 nt, Artificial Sequence
  Description of Artificial Sequence: Synthetic oligonucleotide
cugacugccaacucaugua

SEQ ID NO: 260280 - RNA, 19 nt, Artificial Sequence
  Description of Artificial Sequence: Synthetic oligonucleotide
cacggauuaacuuccaguu

SEQ ID NO: 260281 - RNA, 19 nt, Artificial Sequence
  Description of Artificial Sequence: Synthetic oligonucleotide
uuucuacgaagagcuaaua

SEQ ID NO: 260282 - RNA, 19 nt, Artificial Sequence
  Description of Artificial Sequence: Synthetic oligonucleotide
uaggcgacugaguguuacu

SEQ ID NO: 260283 - RNA, 19 nt, Artificial Sequence
  Description of Artificial Sequence: Synthetic oligonucleotide
agccggaaagaugaggcau

SEQ ID NO: 260284 - RNA, 19 nt, Artificial Sequence
  Description of Artificial Sequence: Synthetic oligonucleotide
uauugccuuuugucaguaa

SEQ ID NO: 260285 - RNA, 19 nt, Artificial Sequence
  Description of Artificial Sequence: Synthetic oligonucleotide
augaccucuccgaaguaga

SEQ ID NO: 260286 - RNA, 19 nt, Artificial Sequence
  Description of Artificial Sequence: Synthetic oligonucleotide
agcucggggugccacacau

SEQ ID NO: 260287 - RNA, 19 nt, Artificial Sequence
  Description of Artificial Sequence: Synthetic oligonucleotide
gacguccagacgcccagca

SEQ ID NO: 260288 - RNA, 19 nt, Artificial Sequence
  Description of Artificial Sequence: Synthetic oligonucleotide
uggcaucacugacugccaa

SEQ ID NO: 260289 - RNA, 19 nt, Artificial Sequence
  Description of Artificial Sequence: Synthetic oligonucleotide
caaugagaacauaugguuu

SEQ ID NO: 260290 - RNA, 19 nt, Artificial Sequence
  Description of Artificial Sequence: Synthetic oligonucleotide
ggccuccuaaauaaauugc

SEQ ID NO: 260291 - RNA, 19 nt, Artificial Sequence
  Description of Artificial Sequence: Synthetic oligonucleotide
guagccagugcaucuguua

SEQ ID NO: 260292 - RNA, 19 nt, Artificial Sequence
  Description of Artificial Sequence: Synthetic oligonucleotide
cugugaugaccauauuuua

SEQ ID NO: 260293 - RNA, 19 nt, Artificial Sequence
  Description of Artificial Sequence: Synthetic oligonucleotide
caugcucgaaagagucauc

SEQ ID NO: 260294 - RNA, 19 nt, Artificial Sequence
  Description of Artificial Sequence: Synthetic oligonucleotide
caccaguucaguguagcca

SEQ ID NO: 260295 - RNA, 19 nt, Artificial Sequence
  Description of Artificial Sequence: Synthetic oligonucleotide
acacuauucuagguagaaa

SEQ ID NO: 260296 - RNA, 19 nt, Artificial Sequence
  Description of Artificial Sequence: Synthetic oligonucleotide
cuuucuacgaagagcuaau

SEQ ID NO: 260297 - RNA, 19 nt, Artificial Sequence
  Description of Artificial Sequence: Synthetic oligonucleotide
caacucauguaauaagguu

SEQ ID NO: 260298 - RNA, 19 nt, Artificial Sequence
  Description of Artificial Sequence: Synthetic oligonucleotide
auauaaggugaugguuuaa

SEQ ID NO: 260299 - RNA, 19 nt, Artificial Sequence
  Description of Artificial Sequence: Synthetic oligonucleotide
caugagucacuugaagcaa

SEQ ID NO: 260300 - RNA, 19 nt, Artificial Sequence
  Description of Artificial Sequence: Synthetic oligonucleotide
gcugcuaccggugcucggg

SEQ ID NO: 260301 - RNA, 19 nt, Artificial Sequence
  Description of Artificial Sequence: Synthetic oligonucleotide
caguucaguguagccagug

SEQ ID NO: 260302 - RNA, 19 nt, Artificial Sequence
  Description of Artificial Sequence: Synthetic oligonucleotide
aggguuggcacaauuuaua

SEQ ID NO: 260303 - RNA, 19 nt, Artificial Sequence
  Description of Artificial Sequence: Synthetic oligonucleotide
cauuuauguuaggaaagua

SEQ ID NO: 260304 - RNA, 19 nt, Artificial Sequence
  Description of Artificial Sequence: Synthetic oligonucleotide
cucgggcuaccgcugcccg

SEQ ID NO: 260305 - RNA, 19 nt, Artificial Sequence
  Description of Artificial Sequence: Synthetic oligonucleotide
acaugaacacuggauugua

SEQ ID NO: 260306 - RNA, 19 nt, Artificial Sequence
  Description of Artificial Sequence: Synthetic oligonucleotide
acaccccuucaauccaggu

SEQ ID NO: 260307 - RNA, 19 nt, Artificial Sequence
  Description of Artificial Sequence: Synthetic oligonucleotide
agacguccagacgcccagc

SEQ ID NO: 260308 - RNA, 19 nt, Artificial Sequence
  Description of Artificial Sequence: Synthetic oligonucleotide
gaucagccggaaagaugag

SEQ ID NO: 260309 - RNA, 19 nt, Artificial Sequence
  Description of Artificial Sequence: Synthetic oligonucleotide
aggggucagcucggggugc

SEQ ID NO: 260310 - RNA, 19 nt, Artificial Sequence
  Description of Artificial Sequence: Synthetic oligonucleotide
gccuccuaaauaaauugca

SEQ ID NO: 260311 - RNA, 19 nt, Artificial Sequence
  Description of Artificial Sequence: Synthetic oligonucleotide
ggcgacugaguguuacuac

SEQ ID NO: 260312 - RNA, 19 nt, Artificial Sequence
  Description of Artificial Sequence: Synthetic oligonucleotide
gccacacaugaguuccagg

SEQ ID NO: 260313 - RNA, 19 nt, Artificial Sequence
  Description of Artificial Sequence: Synthetic oligonucleotide
ccuccauuuaauaaauacu

SEQ ID NO: 260314 - RNA, 19 nt, Artificial Sequence
  Description of Artificial Sequence: Synthetic oligonucleotide
uggccacacaugaguucca

SEQ ID NO: 260315 - RNA, 19 nt, Artificial Sequence
  Description of Artificial Sequence: Synthetic oligonucleotide
ucggggugccacacaucca

SEQ ID NO: 260316 - RNA, 19 nt, Artificial Sequence
  Description of Artificial Sequence: Synthetic oligonucleotide
gaagaucagccggaaagau

SEQ ID NO: 260317 - RNA, 19 nt, Artificial Sequence
  Description of Artificial Sequence: Synthetic oligonucleotide
ggcgcuugaacuucugucu

SEQ ID NO: 260318 - RNA, 19 nt, Artificial Sequence
  Description of Artificial Sequence: Synthetic oligonucleotide
cagggugcauaauggaaua

SEQ ID NO: 260319 - RNA, 19 nt, Artificial Sequence
  Description of Artificial Sequence: Synthetic oligonucleotide
ggcaucacugacugccaac

SEQ ID NO: 260320 - RNA, 19 nt, Artificial Sequence
  Description of Artificial Sequence: Synthetic oligonucleotide
ugcuaccggugcucgggcu

SEQ ID NO: 260321 - RNA, 19 nt, Artificial Sequence
  Description of Artificial Sequence: Synthetic oligonucleotide
cacugacugccaacucaug

SEQ ID NO: 260322 - RNA, 19 nt, Artificial Sequence
  Description of Artificial Sequence: Synthetic oligonucleotide
cugcuaccggugcucgggc

SEQ ID NO: 260323 - RNA, 19 nt, Artificial Sequence
  Description of Artificial Sequence: Synthetic oligonucleotide
caauaggcgacugaguguu

SEQ ID NO: 260324 - RNA, 19 nt, Artificial Sequence
  Description of Artificial Sequence: Synthetic oligonucleotide
cuccggcaguuacugugag

SEQ ID NO: 260325 - RNA, 19 nt, Artificial Sequence
  Description of Artificial Sequence: Synthetic oligonucleotide
uggaagaaccauggcgcuu

SEQ ID NO: 260326 - RNA, 19 nt, Artificial Sequence
  Description of Artificial Sequence: Synthetic oligonucleotide
agcggucuuuagccacaag

SEQ ID NO: 260327 - RNA, 19 nt, Artificial Sequence
  Description of Artificial Sequence: Synthetic oligonucleotide
acagacguccagacgccca

SEQ ID NO: 260328 - RNA, 19 nt, Artificial Sequence
  Description of Artificial Sequence: Synthetic oligonucleotide
ccuacugugaugaccauau

SEQ ID NO: 260329 - RNA, 19 nt, Artificial Sequence
  Description of Artificial Sequence: Synthetic oligonucleotide
cacagacguccagacgccc

SEQ ID NO: 260330 - RNA, 19 nt, Artificial Sequence
  Description of Artificial Sequence: Synthetic oligonucleotide
gaaugaccucuccgaagua

SEQ ID NO: 260331 - RNA, 19 nt, Artificial Sequence
  Description of Artificial Sequence: Synthetic oligonucleotide
ggugacagaauaguuuagu

SEQ ID NO: 260332 - RNA, 19 nt, Artificial Sequence
  Description of Artificial Sequence: Synthetic oligonucleotide
aggcgacugaguguuacua

SEQ ID NO: 260333 - RNA, 19 nt, Artificial Sequence
  Description of Artificial Sequence: Synthetic oligonucleotide
ucggagccugcaguuugug

SEQ ID NO: 260334 - RNA, 19 nt, Artificial Sequence
  Description of Artificial Sequence: Synthetic oligonucleotide
ggggaagacacugaugcua

SEQ ID NO: 260335 - RNA, 19 nt, Artificial Sequence
  Description of Artificial Sequence: Synthetic oligonucleotide
ccaacccuagaugcauucg

SEQ ID NO: 260336 - RNA, 19 nt, Artificial Sequence
  Description of Artificial Sequence: Synthetic oligonucleotide
agggugcauaauggaauau

SEQ ID NO: 260337 - RNA, 19 nt, Artificial Sequence
  Description of Artificial Sequence: Synthetic oligonucleotide
guacaggucuuaggggcuc

SEQ ID NO: 260338 - RNA, 19 nt, Artificial Sequence
  Description of Artificial Sequence: Synthetic oligonucleotide
cuaccggugcucgggcuac

SEQ ID NO: 260339 - RNA, 19 nt, Artificial Sequence
  Description of Artificial Sequence: Synthetic oligonucleotide
gggaagacacugaugcuaa

SEQ ID NO: 260340 - RNA, 19 nt, Artificial Sequence
  Description of Artificial Sequence: Synthetic oligonucleotide
ucgggcuaccgcugcccga

SEQ ID NO: 260341 - RNA, 19 nt, Artificial Sequence
  Description of Artificial Sequence: Synthetic oligonucleotide
caguguagccagugcaucu

SEQ ID NO: 260342 - RNA, 19 nt, Artificial Sequence
  Description of Artificial Sequence: Synthetic oligonucleotide
ccacagacguccagacgcc

SEQ ID NO: 260343 - RNA, 19 nt, Artificial Sequence
  Description of Artificial Sequence: Synthetic oligonucleotide
caguaaguuccuccauuua

SEQ ID NO: 260344 - RNA, 19 nt, Artificial Sequence
  Description of Artificial Sequence: Synthetic oligonucleotide
gcucguuaaaugagguaca

SEQ ID NO: 260345 - RNA, 19 nt, Artificial Sequence
  Description of Artificial Sequence: Synthetic oligonucleotide
caaugaagaucagccggaa

SEQ ID NO: 260346 - RNA, 19 nt, Artificial Sequence
  Description of Artificial Sequence: Synthetic oligonucleotide
caugaacacuggauuguau

SEQ ID NO: 260347 - RNA, 19 nt, Artificial Sequence
  Description of Artificial Sequence: Synthetic oligonucleotide
ccggaaagaugaggcaucc

SEQ ID NO: 260348 - RNA, 19 nt, Artificial Sequence
  Description of Artificial Sequence: Synthetic oligonucleotide
cuuuacaggcauucucauu

SEQ ID NO: 260349 - RNA, 19 nt, Artificial Sequence
  Description of Artificial Sequence: Synthetic oligonucleotide
gucagcucggggugccaca

SEQ ID NO: 260350 - RNA, 19 nt, Artificial Sequence
  Description of Artificial Sequence: Synthetic oligonucleotide
caucuguuacugcuucacu

SEQ ID NO: 260351 - RNA, 19 nt, Artificial Sequence
  Description of Artificial Sequence: Synthetic oligonucleotide
ggcugcgucucugcugagg

SEQ ID NO: 260352 - RNA, 19 nt, Artificial Sequence
  Description of Artificial Sequence: Synthetic oligonucleotide
aauaggcgacugaguguua

SEQ ID NO: 260353 - RNA, 19 nt, Artificial Sequence
  Description of Artificial Sequence: Synthetic oligonucleotide
gcaaggggccuccuaaaua

SEQ ID NO: 260354 - RNA, 19 nt, Artificial Sequence
  Description of Artificial Sequence: Synthetic oligonucleotide
cuucaacauucuggacuuc

SEQ ID NO: 260355 - RNA, 19 nt, Artificial Sequence
  Description of Artificial Sequence: Synthetic oligonucleotide
ccagugcaucuguuacugc

SEQ ID NO: 260356 - RNA, 19 nt, Artificial Sequence
  Description of Artificial Sequence: Synthetic oligonucleotide
gggugccacacauccacaa

SEQ ID NO: 260357 - RNA, 19 nt, Artificial Sequence
  Description of Artificial Sequence: Synthetic oligonucleotide
ggauuaacuuccaguuucu

SEQ ID NO: 260358 - RNA, 19 nt, Artificial Sequence
  Description of Artificial Sequence: Synthetic oligonucleotide
gccggaaagaugaggcauc

SEQ ID NO: 260359 - RNA, 19 nt, Artificial Sequence
  Description of Artificial Sequence: Synthetic oligonucleotide
gcuguuggcaucacugacu

SEQ ID NO: 260360 - RNA, 19 nt, Artificial Sequence
  Description of Artificial Sequence: Synthetic oligonucleotide
gaugagcaccuugccuucu

SEQ ID NO: 260361 - RNA, 19 nt, Artificial Sequence
  Description of Artificial Sequence: Synthetic oligonucleotide
acaccggaucuugcagccu

SEQ ID NO: 260362 - RNA, 19 nt, Artificial Sequence
  Description of Artificial Sequence: Synthetic oligonucleotide
ccuuagcggucuuuagcca

SEQ ID NO: 260363 - RNA, 19 nt, Artificial Sequence
  Description of Artificial Sequence: Synthetic oligonucleotide
ccagucucccuucucucga

SEQ ID NO: 260364 - RNA, 19 nt, Artificial Sequence
  Description of Artificial Sequence: Synthetic oligonucleotide
uucccacguucuggucuca

SEQ ID NO: 260365 - RNA, 19 nt, Artificial Sequence
  Description of Artificial Sequence: Synthetic oligonucleotide
gacugccaacucauguaau

SEQ ID NO: 260366 - RNA, 19 nt, Artificial Sequence
  Description of Artificial Sequence: Synthetic oligonucleotide
cuccgagccccggggcugc

SEQ ID NO: 260367 - RNA, 19 nt, Artificial Sequence
  Description of Artificial Sequence: Synthetic oligonucleotide
ccaggaccucaaaucuguc

SEQ ID NO: 260368 - RNA, 19 nt, Artificial Sequence
  Description of Artificial Sequence: Synthetic oligonucleotide
gcuaccggugcucgggcua

SEQ ID NO: 260369 - RNA, 19 nt, Artificial Sequence
  Description of Artificial Sequence: Synthetic oligonucleotide
ggcuagcaauguagacacc

SEQ ID NO: 260370 - RNA, 19 nt, Artificial Sequence
  Description of Artificial Sequence: Synthetic oligonucleotide
gcaaggguuggcacaauuu

SEQ ID NO: 260371 - RNA, 19 nt, Artificial Sequence
  Description of Artificial Sequence: Synthetic oligonucleotide
ccggugcucgggcuaccgc

SEQ ID NO: 260372 - RNA, 19 nt, Artificial Sequence
  Description of Artificial Sequence: Synthetic oligonucleotide
ccgcugcugcugcugcugc

SEQ ID NO: 260373 - RNA, 19 nt, Artificial Sequence
  Description of Artificial Sequence: Synthetic oligonucleotide
caccaacccuagaugcauu

SEQ ID NO: 260374 - RNA, 19 nt, Artificial Sequence
  Description of Artificial Sequence: Synthetic oligonucleotide
cuacugugaugaccauauu

SEQ ID NO: 260375 - RNA, 19 nt, Artificial Sequence
  Description of Artificial Sequence: Synthetic oligonucleotide
ccauggcgcuugaacuucu

SEQ ID NO: 260376 - RNA, 19 nt, Artificial Sequence
  Description of Artificial Sequence: Synthetic oligonucleotide
cggugcucgggcuaccgcu

SEQ ID NO: 260377 - RNA, 19 nt, Artificial Sequence
  Description of Artificial Sequence: Synthetic oligonucleotide
aaggcuauaaauuuauauc

SEQ ID NO: 260378 - RNA, 19 nt, Artificial Sequence
  Description of Artificial Sequence: Synthetic oligonucleotide
agaaaaggcaaucacaagg

SEQ ID NO: 260379 - RNA, 19 nt, Artificial Sequence
  Description of Artificial Sequence: Synthetic oligonucleotide
uuaggaauaauuuacacau

SEQ ID NO: 260380 - RNA, 19 nt, Artificial Sequence
  Description of Artificial Sequence: Synthetic oligonucleotide
accaagauuaaacacacac

SEQ ID NO: 260381 - RNA, 19 nt, Artificial Sequence
  Description of Artificial Sequence: Synthetic oligonucleotide
uuccuaguauuaaagaugg

SEQ ID NO: 260382 - RNA, 19 nt, Artificial Sequence
  Description of Artificial Sequence: Synthetic oligonucleotide
auuuauaucagccaaugca

SEQ ID NO: 260383 - RNA, 19 nt, Artificial Sequence
  Description of Artificial Sequence: Synthetic oligonucleotide
aaugucuuaauccauuuau

SEQ ID NO: 260384 - RNA, 19 nt, Artificial Sequence
  Description of Artificial Sequence: Synthetic oligonucleotide
gaacaaagagcuuacguag

SEQ ID NO: 260385 - RNA, 19 nt, Artificial Sequence
  Description of Artificial Sequence: Synthetic oligonucleotide
uuauuuccuaguauuaaag

SEQ ID NO: 260386 - RNA, 19 nt, Artificial Sequence
  Description of Artificial Sequence: Synthetic oligonucleotide
uuuccuaguauuaaagaug

SEQ ID NO: 260387 - RNA, 19 nt, Artificial Sequence
  Description of Artificial Sequence: Synthetic oligonucleotide
augacauuagcaucugucc

SEQ ID NO: 260388 - RNA, 19 nt, Artificial Sequence
  Description of Artificial Sequence: Synthetic oligonucleotide
agauuaaacacacacagaa

SEQ ID NO: 260389 - RNA, 19 nt, Artificial Sequence
  Description of Artificial Sequence: Synthetic oligonucleotide
aaaggcuauaaauuuauau

SEQ ID NO: 260390 - RNA, 19 nt, Artificial Sequence
  Description of Artificial Sequence: Synthetic oligonucleotide
aaacccuucaagucuugcc

SEQ ID NO: 260391 - RNA, 19 nt, Artificial Sequence
  Description of Artificial Sequence: Synthetic oligonucleotide
uuuauaucagccaaugcaa

SEQ ID NO: 260392 - RNA, 19 nt, Artificial Sequence
  Description of Artificial Sequence: Synthetic oligonucleotide
acuugaucgaguuuaauca

SEQ ID NO: 260393 - RNA, 19 nt, Artificial Sequence
  Description of Artificial Sequence: Synthetic oligonucleotide
gauucaauucaucacuaag

SEQ ID NO: 260394 - RNA, 19 nt, Artificial Sequence
  Description of Artificial Sequence: Synthetic oligonucleotide
uauucuuugaccugacugc

SEQ ID NO: 260395 - RNA, 19 nt, Artificial Sequence
  Description of Artificial Sequence: Synthetic oligonucleotide
aaauuaugcacuauggcca

SEQ ID NO: 260396 - RNA, 19 nt, Artificial Sequence
  Description of Artificial Sequence: Synthetic oligonucleotide
uuaaagauggaugacauua

SEQ ID NO: 260397 - RNA, 19 nt, Artificial Sequence
  Description of Artificial Sequence: Synthetic oligonucleotide
aaacuauaauaaauagggc

SEQ ID NO: 260398 - RNA, 19 nt, Artificial Sequence
  Description of Artificial Sequence: Synthetic oligonucleotide
auuguugggagauacgaag

SEQ ID NO: 260399 - RNA, 19 nt, Artificial Sequence
  Description of Artificial Sequence: Synthetic oligonucleotide
aggcuauaaauuuauauca

SEQ ID NO: 260400 - RNA, 19 nt, Artificial Sequence
  Description of Artificial Sequence: Synthetic oligonucleotide
uguaauguaguuacucggc

SEQ ID NO: 260401 - RNA, 19 nt, Artificial Sequence
  Description of Artificial Sequence: Synthetic oligonucleotide
aguguagcaggugaaaacc

SEQ ID NO: 260402 - RNA, 19 nt, Artificial Sequence
  Description of Artificial Sequence: Synthetic oligonucleotide
aaauuuauaucagccaaug

SEQ ID NO: 260403 - RNA, 19 nt, Artificial Sequence
  Description of Artificial Sequence: Synthetic oligonucleotide
agugucgucagagucaacc

SEQ ID NO: 260404 - RNA, 19 nt, Artificial Sequence
  Description of Artificial Sequence: Synthetic oligonucleotide
auguaaaccaagauuaaac

SEQ ID NO: 260405 - RNA, 19 nt, Artificial Sequence
  Description of Artificial Sequence: Synthetic oligonucleotide
uuuuauccgaucuacuucu

SEQ ID NO: 260406 - RNA, 19 nt, Artificial Sequence
  Description of Artificial Sequence: Synthetic oligonucleotide
cauguaguauuguaagugg

SEQ ID NO: 260407 - RNA, 19 nt, Artificial Sequence
  Description of Artificial Sequence: Synthetic oligonucleotide
cugacugccucuuuuaucc

SEQ ID NO: 260408 - RNA, 19 nt, Artificial Sequence
  Description of Artificial Sequence: Synthetic oligonucleotide
uaauguagagccuugcaac

SEQ ID NO: 260409 - RNA, 19 nt, Artificial Sequence
  Description of Artificial Sequence: Synthetic oligonucleotide
acaaacuauaauaaauagg

SEQ ID NO: 260410 - RNA, 19 nt, Artificial Sequence
  Description of Artificial Sequence: Synthetic oligonucleotide
aaauaaacuugaucgaguu

SEQ ID NO: 260411 - RNA, 19 nt, Artificial Sequence
  Description of Artificial Sequence: Synthetic oligonucleotide
aaggcaaucacaaggagca

SEQ ID NO: 260412 - RNA, 19 nt, Artificial Sequence
  Description of Artificial Sequence: Synthetic oligonucleotide
ccugauauuauuuuguggc

SEQ ID NO: 260413 - RNA, 19 nt, Artificial Sequence
  Description of Artificial Sequence: Synthetic oligonucleotide
ugaacaaagagcuuacgua

SEQ ID NO: 260414 - RNA, 19 nt, Artificial Sequence
  Description of Artificial Sequence: Synthetic oligonucleotide
auuuaagacauuuaaucua

SEQ ID NO: 260415 - RNA, 19 nt, Artificial Sequence
  Description of Artificial Sequence: Synthetic oligonucleotide
cuagguaauguaaaccaag

SEQ ID NO: 260416 - RNA, 19 nt, Artificial Sequence
  Description of Artificial Sequence: Synthetic oligonucleotide
uuuacaaggauaggaaaca

SEQ ID NO: 260417 - RNA, 19 nt, Artificial Sequence
  Description of Artificial Sequence: Synthetic oligonucleotide
uuguaaacugucaucuccc

SEQ ID NO: 260418 - RNA, 19 nt, Artificial Sequence
  Description of Artificial Sequence: Synthetic oligonucleotide
cuuucuaguuguuugcagc

SEQ ID NO: 260419 - RNA, 19 nt, Artificial Sequence
  Description of Artificial Sequence: Synthetic oligonucleotide
guaauguaaaccaagauua

SEQ ID NO: 260420 - RNA, 19 nt, Artificial Sequence
  Description of Artificial Sequence: Synthetic oligonucleotide
uccauuucauuguugggag

SEQ ID NO: 260421 - RNA, 19 nt, Artificial Sequence
  Description of Artificial Sequence: Synthetic oligonucleotide
cuguaauguaguuacucgg

SEQ ID NO: 260422 - RNA, 19 nt, Artificial Sequence
  Description of Artificial Sequence: Synthetic oligonucleotide
cagauuguuuucaaggaag

SEQ ID NO: 260423 - RNA, 19 nt, Artificial Sequence
  Description of Artificial Sequence: Synthetic oligonucleotide
guaaaccaagauuaaacac

SEQ ID NO: 260424 - RNA, 19 nt, Artificial Sequence
  Description of Artificial Sequence: Synthetic oligonucleotide
uagauccuuaaaauaaacu

SEQ ID NO: 260425 - RNA, 19 nt, Artificial Sequence
  Description of Artificial Sequence: Synthetic oligonucleotide
ucaagucuugccuugcuug

SEQ ID NO: 260426 - RNA, 19 nt, Artificial Sequence
  Description of Artificial Sequence: Synthetic oligonucleotide
ucaucucucaaacuacuga

SEQ ID NO: 260427 - RNA, 19 nt, Artificial Sequence
  Description of Artificial Sequence: Synthetic oligonucleotide
ugugaugugucaauguuua

SEQ ID NO: 260428 - RNA, 19 nt, Artificial Sequence
  Description of Artificial Sequence: Synthetic oligonucleotide
agcuuaggaaguucgcagc

SEQ ID NO: 260429 - RNA, 19 nt, Artificial Sequence
  Description of Artificial Sequence: Synthetic oligonucleotide
ucuaguguugggaaccagc

SEQ ID NO: 260430 - RNA, 19 nt, Artificial Sequence
  Description of Artificial Sequence: Synthetic oligonucleotide
ucgucugucuugcauaacc

SEQ ID NO: 260431 - RNA, 19 nt, Artificial Sequence
  Description of Artificial Sequence: Synthetic oligonucleotide
uggcauguaguauuguaag

SEQ ID NO: 260432 - RNA, 19 nt, Artificial Sequence
  Description of Artificial Sequence: Synthetic oligonucleotide
aagcuuucacucucucagc

SEQ ID NO: 260433 - RNA, 19 nt, Artificial Sequence
  Description of Artificial Sequence: Synthetic oligonucleotide
aguguugggaaccagcaga

SEQ ID NO: 260434 - RNA, 19 nt, Artificial Sequence
  Description of Artificial Sequence: Synthetic oligonucleotide
uuauuagugccuugcaaac

SEQ ID NO: 260435 - RNA, 19 nt, Artificial Sequence
  Description of Artificial Sequence: Synthetic oligonucleotide
uugcugauagcguuugcgg

SEQ ID NO: 260436 - RNA, 19 nt, Artificial Sequence
  Description of Artificial Sequence: Synthetic oligonucleotide
aucgaguuuaaucaccuga

SEQ ID NO: 260437 - RNA, 19 nt, Artificial Sequence
  Description of Artificial Sequence: Synthetic oligonucleotide
uugaucgaguuuaaucacc

SEQ ID NO: 260438 - RNA, 19 nt, Artificial Sequence
  Description of Artificial Sequence: Synthetic oligonucleotide
cuuuucaacaccugugaug

SEQ ID NO: 260439 - RNA, 19 nt, Artificial Sequence
  Description of Artificial Sequence: Synthetic oligonucleotide
uguaagugguaaaauuuaa

SEQ ID NO: 260440 - RNA, 19 nt, Artificial Sequence
  Description of Artificial Sequence: Synthetic oligonucleotide
accugauauuauuuugugg

SEQ ID NO: 260441 - RNA, 19 nt, Artificial Sequence
  Description of Artificial Sequence: Synthetic oligonucleotide
uuauugaaagacuguuuga

SEQ ID NO: 260442 - RNA, 19 nt, Artificial Sequence
  Description of Artificial Sequence: Synthetic oligonucleotide
uuaaacaugugugccacca

SEQ ID NO: 260443 - RNA, 19 nt, Artificial Sequence
  Description of Artificial Sequence: Synthetic oligonucleotide
agagguuauaguuauugaa

SEQ ID NO: 260444 - RNA, 19 nt, Artificial Sequence
  Description of Artificial Sequence: Synthetic oligonucleotide
ugccuugcaaacaauuuac

SEQ ID NO: 260445 - RNA, 19 nt, Artificial Sequence
  Description of Artificial Sequence: Synthetic oligonucleotide
ucaccugaaaagugagugg

SEQ ID NO: 260446 - RNA, 19 nt, Artificial Sequence
  Description of Artificial Sequence: Synthetic oligonucleotide
uagcuuaggaaguucgcag

SEQ ID NO: 260447 - RNA, 19 nt, Artificial Sequence
  Description of Artificial Sequence: Synthetic oligonucleotide
uauaugacuuaguguagca

SEQ ID NO: 260448 - RNA, 19 nt, Artificial Sequence
  Description of Artificial Sequence: Synthetic oligonucleotide
cauuuuaguaggaaaagaa

SEQ ID NO: 260449 - RNA, 19 nt, Artificial Sequence
  Description of Artificial Sequence: Synthetic oligonucleotide
gauggaugacauuagcauc

SEQ ID NO: 260450 - RNA, 19 nt, Artificial Sequence
  Description of Artificial Sequence: Synthetic oligonucleotide
ugaucgaguuuaaucaccu

SEQ ID NO: 260451 - RNA, 19 nt, Artificial Sequence
  Description of Artificial Sequence: Synthetic oligonucleotide
uuuguggcauguaguauug

SEQ ID NO: 260452 - RNA, 19 nt, Artificial Sequence
  Description of Artificial Sequence: Synthetic oligonucleotide
agauacgaagcuggcaugc

SEQ ID NO: 260453 - RNA, 19 nt, Artificial Sequence
  Description of Artificial Sequence: Synthetic oligonucleotide
acuauggccaacaauauaa

SEQ ID NO: 260454 - RNA, 19 nt, Artificial Sequence
  Description of Artificial Sequence: Synthetic oligonucleotide
uuuuguggcauguaguauu

SEQ ID NO: 260455 - RNA, 19 nt, Artificial Sequence
  Description of Artificial Sequence: Synthetic oligonucleotide
cucuagcuuaggaaguucg

SEQ ID NO: 260456 - RNA, 19 nt, Artificial Sequence
  Description of Artificial Sequence: Synthetic oligonucleotide
aaguucgcagcgaagaucu

SEQ ID NO: 260457 - RNA, 19 nt, Artificial Sequence
  Description of Artificial Sequence: Synthetic oligonucleotide
ucuuuuauccgaucuacuu

SEQ ID NO: 260458 - RNA, 19 nt, Artificial Sequence
  Description of Artificial Sequence: Synthetic oligonucleotide
uguaguauuguaaguggua

SEQ ID NO: 260459 - RNA, 19 nt, Artificial Sequence
  Description of Artificial Sequence: Synthetic oligonucleotide
uuggagaucagugauuagu

SEQ ID NO: 260460 - RNA, 19 nt, Artificial Sequence
  Description of Artificial Sequence: Synthetic oligonucleotide
guaguuacucggcacagug

SEQ ID NO: 260461 - RNA, 19 nt, Artificial Sequence
  Description of Artificial Sequence: Synthetic oligonucleotide
cuuuuauccgaucuacuuc

SEQ ID NO: 260462 - RNA, 19 nt, Artificial Sequence
  Description of Artificial Sequence: Synthetic oligonucleotide
auuagugccuugcaaacaa

SEQ ID NO: 260463 - RNA, 19 nt, Artificial Sequence
  Description of Artificial Sequence: Synthetic oligonucleotide
uauuccauauuuccuuuaa

SEQ ID NO: 260464 - RNA, 19 nt, Artificial Sequence
  Description of Artificial Sequence: Synthetic oligonucleotide
cuacuucuugcugauagcg

SEQ ID NO: 260465 - RNA, 19 nt, Artificial Sequence
  Description of Artificial Sequence: Synthetic oligonucleotide
accucguagcgcuauugcc

SEQ ID NO: 260466 - RNA, 19 nt, Artificial Sequence
  Description of Artificial Sequence: Synthetic oligonucleotide
auaaccgugagcucaugca

SEQ ID NO: 260467 - RNA, 19 nt, Artificial Sequence
  Description of Artificial Sequence: Synthetic oligonucleotide
ucgaguuuaaucaccugaa

SEQ ID NO: 260468 - RNA, 19 nt, Artificial Sequence
  Description of Artificial Sequence: Synthetic oligonucleotide
guaagugguaaaauuuaag

SEQ ID NO: 260469 - RNA, 19 nt, Artificial Sequence
  Description of Artificial Sequence: Synthetic oligonucleotide
uaauguaguuacucggcac

SEQ ID NO: 260470 - RNA, 19 nt, Artificial Sequence
  Description of Artificial Sequence: Synthetic oligonucleotide
ucuagcuuaggaaguucgc

SEQ ID NO: 260471 - RNA, 19 nt, Artificial Sequence
  Description of Artificial Sequence: Synthetic oligonucleotide
uuucauuguugggagauac

SEQ ID NO: 260472 - RNA, 19 nt, Artificial Sequence
  Description of Artificial Sequence: Synthetic oligonucleotide
aguuacucggcacagugaa

SEQ ID NO: 260473 - RNA, 19 nt, Artificial Sequence
  Description of Artificial Sequence: Synthetic oligonucleotide
cuugaucgaguuuaaucac

SEQ ID NO: 260474 - RNA, 19 nt, Artificial Sequence
  Description of Artificial Sequence: Synthetic oligonucleotide
cuugcugauagcguuugcg

SEQ ID NO: 260475 - RNA, 19 nt, Artificial Sequence
  Description of Artificial Sequence: Synthetic oligonucleotide
uauggccaacaauauaacu

SEQ ID NO: 260476 - RNA, 19 nt, Artificial Sequence
  Description of Artificial Sequence: Synthetic oligonucleotide
cucuaagucguuucucuag

SEQ ID NO: 260477 - RNA, 19 nt, Artificial Sequence
  Description of Artificial Sequence: Synthetic oligonucleotide
uaugguuuaucuguccugu

SEQ ID NO: 260478 - RNA, 19 nt, Artificial Sequence
  Description of Artificial Sequence: Synthetic oligonucleotide
agauuguuuucaaggaagg

SEQ ID NO: 260479 - RNA, 19 nt, Artificial Sequence
  Description of Artificial Sequence: Synthetic oligonucleotide
aggucuuuuaguaaugaug

SEQ ID NO: 260480 - RNA, 19 nt, Artificial Sequence
  Description of Artificial Sequence: Synthetic oligonucleotide
aguauuguaagugguaaaa

SEQ ID NO: 260481 - RNA, 19 nt, Artificial Sequence
  Description of Artificial Sequence: Synthetic oligonucleotide
guauuaaagauggaugaca

SEQ ID NO: 260482 - RNA, 19 nt, Artificial Sequence
  Description of Artificial Sequence: Synthetic oligonucleotide
uuauaucagccaaugcaau

SEQ ID NO: 260483 - RNA, 19 nt, Artificial Sequence
  Description of Artificial Sequence: Synthetic oligonucleotide
gauuauuagugccuugcaa

SEQ ID NO: 260484 - RNA, 19 nt, Artificial Sequence
  Description of Artificial Sequence: Synthetic oligonucleotide
uuacaaggauaggaaacag

SEQ ID NO: 260485 - RNA, 19 nt, Artificial Sequence
  Description of Artificial Sequence: Synthetic oligonucleotide
ucuaucauaccaguucccu

SEQ ID NO: 260486 - RNA, 19 nt, Artificial Sequence
  Description of Artificial Sequence: Synthetic oligonucleotide
uuauccgaucuacuucuug

SEQ ID NO: 260487 - RNA, 19 nt, Artificial Sequence
  Description of Artificial Sequence: Synthetic oligonucleotide
cuggcagauauccaccugc

SEQ ID NO: 260488 - RNA, 19 nt, Artificial Sequence
  Description of Artificial Sequence: Synthetic oligonucleotide
ugucuugcauaaccgugag

SEQ ID NO: 260489 - RNA, 19 nt, Artificial Sequence
  Description of Artificial Sequence: Synthetic oligonucleotide
uucgcagcgaagaucugca

SEQ ID NO: 260490 - RNA, 19 nt, Artificial Sequence
  Description of Artificial Sequence: Synthetic oligonucleotide
auacgcacaguucuaauua

SEQ ID NO: 260491 - RNA, 19 nt, Artificial Sequence
  Description of Artificial Sequence: Synthetic oligonucleotide
uuugcggucacgagaugca

SEQ ID NO: 260492 - RNA, 19 nt, Artificial Sequence
  Description of Artificial Sequence: Synthetic oligonucleotide
uagagguuauaguuauuga

SEQ ID NO: 260493 - RNA, 19 nt, Artificial Sequence
  Description of Artificial Sequence: Synthetic oligonucleotide
uugauucaauucaucacua

SEQ ID NO: 260494 - RNA, 19 nt, Artificial Sequence
  Description of Artificial Sequence: Synthetic oligonucleotide
aacuggcagauauccaccu

SEQ ID NO: 260495 - RNA, 19 nt, Artificial Sequence
  Description of Artificial Sequence: Synthetic oligonucleotide
acaguucuaauuauaaaau

SEQ ID NO: 260496 - RNA, 19 nt, Artificial Sequence
  Description of Artificial Sequence: Synthetic oligonucleotide
guauaugacuuaguguagc

SEQ ID NO: 260497 - RNA, 19 nt, Artificial Sequence
  Description of Artificial Sequence: Synthetic oligonucleotide
uauacgcacaguucuaauu

SEQ ID NO: 260498 - RNA, 19 nt, Artificial Sequence
  Description of Artificial Sequence: Synthetic oligonucleotide
uguuugcagcguuucacca

SEQ ID NO: 260499 - RNA, 19 nt, Artificial Sequence
  Description of Artificial Sequence: Synthetic oligonucleotide
ucaaccucagcacucuuuu

SEQ ID NO: 260500 - RNA, 19 nt, Artificial Sequence
  Description of Artificial Sequence: Synthetic oligonucleotide
aaggucuuuuaguaaugau

SEQ ID NO: 260501 - RNA, 19 nt, Artificial Sequence
  Description of Artificial Sequence: Synthetic oligonucleotide
acguagguuguguaauguc

SEQ ID NO: 260502 - RNA, 19 nt, Artificial Sequence
  Description of Artificial Sequence: Synthetic oligonucleotide
ggugaaaaccaccuucaag

SEQ ID NO: 260503 - RNA, 19 nt, Artificial Sequence
  Description of Artificial Sequence: Synthetic oligonucleotide
uuacguagguuguguaaug

SEQ ID NO: 260504 - RNA, 19 nt, Artificial Sequence
  Description of Artificial Sequence: Synthetic oligonucleotide
ugaaaaccaccuucaagau

SEQ ID NO: 260505 - RNA, 19 nt, Artificial Sequence
  Description of Artificial Sequence: Synthetic oligonucleotide
aauacuugcuaaaguugca

SEQ ID NO: 260506 - RNA, 19 nt, Artificial Sequence
  Description of Artificial Sequence: Synthetic oligonucleotide
caccugaaaagugaguggc

SEQ ID NO: 260507 - RNA, 19 nt, Artificial Sequence
  Description of Artificial Sequence: Synthetic oligonucleotide
uccgaucuacuucuugcug

SEQ ID NO: 260508 - RNA, 19 nt, Artificial Sequence
  Description of Artificial Sequence: Synthetic oligonucleotide
agacaaacuauaauaaaua

SEQ ID NO: 260509 - RNA, 19 nt, Artificial Sequence
  Description of Artificial Sequence: Synthetic oligonucleotide
uuaugcacuauggccaaca

SEQ ID NO: 260510 - RNA, 19 nt, Artificial Sequence
  Description of Artificial Sequence: Synthetic oligonucleotide
agauuauuagugccuugca

SEQ ID NO: 260511 - RNA, 19 nt, Artificial Sequence
  Description of Artificial Sequence: Synthetic oligonucleotide
cuggugguuggucauuucc

SEQ ID NO: 260512 - RNA, 19 nt, Artificial Sequence
  Description of Artificial Sequence: Synthetic oligonucleotide
cauaaccgugagcucaugc

SEQ ID NO: 260513 - RNA, 19 nt, Artificial Sequence
  Description of Artificial Sequence: Synthetic oligonucleotide
uauauacgcacaguucuaa

SEQ ID NO: 260514 - RNA, 19 nt, Artificial Sequence
  Description of Artificial Sequence: Synthetic oligonucleotide
gguuaggaauaauuuacac

SEQ ID NO: 260515 - RNA, 19 nt, Artificial Sequence
  Description of Artificial Sequence: Synthetic oligonucleotide
caagucuugccuugcuugc

SEQ ID NO: 260516 - RNA, 19 nt, Artificial Sequence
  Description of Artificial Sequence: Synthetic oligonucleotide
uguaaacugucaucucccu

SEQ ID NO: 260517 - RNA, 19 nt, Artificial Sequence
  Description of Artificial Sequence: Synthetic oligonucleotide
cauaauuaacagccaguuc

SEQ ID NO: 260518 - RNA, 19 nt, Artificial Sequence
  Description of Artificial Sequence: Synthetic oligonucleotide
uaguuauugaaagacuguu

SEQ ID NO: 260519 - RNA, 19 nt, Artificial Sequence
  Description of Artificial Sequence: Synthetic oligonucleotide
uuuaugccugcuugccucc

SEQ ID NO: 260520 - RNA, 19 nt, Artificial Sequence
  Description of Artificial Sequence: Synthetic oligonucleotide
guaauguaguuacucggca

SEQ ID NO: 260521 - RNA, 19 nt, Artificial Sequence
  Description of Artificial Sequence: Synthetic oligonucleotide
caauuccuauuucugcaag

SEQ ID NO: 260522 - RNA, 19 nt, Artificial Sequence
  Description of Artificial Sequence: Synthetic oligonucleotide
uggugguuggucauuuccu

SEQ ID NO: 260523 - RNA, 19 nt, Artificial Sequence
  Description of Artificial Sequence: Synthetic oligonucleotide
agucuugccuugcuugcuc

SEQ ID NO: 260524 - RNA, 19 nt, Artificial Sequence
  Description of Artificial Sequence: Synthetic oligonucleotide
uuaguguagcaggugaaaa

SEQ ID NO: 260525 - RNA, 19 nt, Artificial Sequence
  Description of Artificial Sequence: Synthetic oligonucleotide
aauagggcugcaguuguaa

SEQ ID NO: 260526 - RNA, 19 nt, Artificial Sequence
  Description of Artificial Sequence: Synthetic oligonucleotide
agcguuugcggucacgaga

SEQ ID NO: 260527 - RNA, 19 nt, Artificial Sequence
  Description of Artificial Sequence: Synthetic oligonucleotide
ugcugauagcguuugcggu

SEQ ID NO: 260528 - RNA, 19 nt, Artificial Sequence
  Description of Artificial Sequence: Synthetic oligonucleotide
aguauaugacuuaguguag

SEQ ID NO: 260529 - RNA, 19 nt, Artificial Sequence
  Description of Artificial Sequence: Synthetic oligonucleotide
uauuagugccuugcaaaca

SEQ ID NO: 260530 - RNA, 19 nt, Artificial Sequence
  Description of Artificial Sequence: Synthetic oligonucleotide
cuauggccaacaauauaac

SEQ ID NO: 260531 - RNA, 19 nt, Artificial Sequence
  Description of Artificial Sequence: Synthetic oligonucleotide
cuaauguagagccuugcaa

SEQ ID NO: 260532 - RNA, 19 nt, Artificial Sequence
  Description of Artificial Sequence: Synthetic oligonucleotide
cugccugggauuaaacaug

SEQ ID NO: 260533 - RNA, 19 nt, Artificial Sequence
  Description of Artificial Sequence: Synthetic oligonucleotide
auaguuauugaaagacugu

SEQ ID NO: 260534 - RNA, 19 nt, Artificial Sequence
  Description of Artificial Sequence: Synthetic oligonucleotide
ucauaccaguucccucugg

SEQ ID NO: 260535 - RNA, 19 nt, Artificial Sequence
  Description of Artificial Sequence: Synthetic oligonucleotide
ugauucaauucaucacuaa

SEQ ID NO: 260536 - RNA, 19 nt, Artificial Sequence
  Description of Artificial Sequence: Synthetic oligonucleotide
uuaauucuauaaugucuua

SEQ ID NO: 260537 - RNA, 19 nt, Artificial Sequence
  Description of Artificial Sequence: Synthetic oligonucleotide
aucauaauuaacagccagu

SEQ ID NO: 260538 - RNA, 19 nt, Artificial Sequence
  Description of Artificial Sequence: Synthetic oligonucleotide
agcaaguauaacagaauga

SEQ ID NO: 260539 - RNA, 19 nt, Artificial Sequence
  Description of Artificial Sequence: Synthetic oligonucleotide
ugaagauuauuagugccuu

SEQ ID NO: 260540 - RNA, 19 nt, Artificial Sequence
  Description of Artificial Sequence: Synthetic oligonucleotide
uaguauuguaagugguaaa

SEQ ID NO: 260541 - RNA, 19 nt, Artificial Sequence
  Description of Artificial Sequence: Synthetic oligonucleotide
aucuaucauaccaguuccc

SEQ ID NO: 260542 - RNA, 19 nt, Artificial Sequence
  Description of Artificial Sequence: Synthetic oligonucleotide
aggaaguucgcagcgaaga

SEQ ID NO: 260543 - RNA, 19 nt, Artificial Sequence
  Description of Artificial Sequence: Synthetic oligonucleotide
acaaggagcacaguccugu

SEQ ID NO: 260544 - RNA, 19 nt, Artificial Sequence
  Description of Artificial Sequence: Synthetic oligonucleotide
auacgaagcuggcaugcug

SEQ ID NO: 260545 - RNA, 19 nt, Artificial Sequence
  Description of Artificial Sequence: Synthetic oligonucleotide
ccaccuguuucuuuuauag

SEQ ID NO: 260546 - RNA, 19 nt, Artificial Sequence
  Description of Artificial Sequence: Synthetic oligonucleotide
guuugcggucacgagaugc

SEQ ID NO: 260547 - RNA, 19 nt, Artificial Sequence
  Description of Artificial Sequence: Synthetic oligonucleotide
gagauacgaagcuggcaug

SEQ ID NO: 260548 - RNA, 19 nt, Artificial Sequence
  Description of Artificial Sequence: Synthetic oligonucleotide
uaucagccaaugcaauuau

SEQ ID NO: 260549 - RNA, 19 nt, Artificial Sequence
  Description of Artificial Sequence: Synthetic oligonucleotide
agcgaagaucugcauuauc

SEQ ID NO: 260550 - RNA, 19 nt, Artificial Sequence
  Description of Artificial Sequence: Synthetic oligonucleotide
auaucagccaaugcaauua

SEQ ID NO: 260551 - RNA, 19 nt, Artificial Sequence
  Description of Artificial Sequence: Synthetic oligonucleotide
guagguuguguaaugucug

SEQ ID NO: 260552 - RNA, 19 nt, Artificial Sequence
  Description of Artificial Sequence: Synthetic oligonucleotide
uaaacaugugugccaccac

SEQ ID NO: 260553 - RNA, 19 nt, Artificial Sequence
  Description of Artificial Sequence: Synthetic oligonucleotide
uagcagcuagguaauguaa

SEQ ID NO: 260554 - RNA, 19 nt, Artificial Sequence
  Description of Artificial Sequence: Synthetic oligonucleotide
cuaucauaccaguucccuc

SEQ ID NO: 260555 - RNA, 19 nt, Artificial Sequence
  Description of Artificial Sequence: Synthetic oligonucleotide
cugauauuauuuuguggca

SEQ ID NO: 260556 - RNA, 19 nt, Artificial Sequence
  Description of Artificial Sequence: Synthetic oligonucleotide
gcaggcagcaaguauaaca

SEQ ID NO: 260557 - RNA, 19 nt, Artificial Sequence
  Description of Artificial Sequence: Synthetic oligonucleotide
acguaccaacugcuugugc

SEQ ID NO: 260558 - RNA, 19 nt, Artificial Sequence
  Description of Artificial Sequence: Synthetic oligonucleotide
ugggagauacgaagcuggc

SEQ ID NO: 260559 - RNA, 19 nt, Artificial Sequence
  Description of Artificial Sequence: Synthetic oligonucleotide
gaucgaguuuaaucaccug

SEQ ID NO: 260560 - RNA, 19 nt, Artificial Sequence
  Description of Artificial Sequence: Synthetic oligonucleotide
gauuguuuucaaggaagga

SEQ ID NO: 260561 - RNA, 19 nt, Artificial Sequence
  Description of Artificial Sequence: Synthetic oligonucleotide
ugacugccucuuuuauccg

SEQ ID NO: 260562 - RNA, 19 nt, Artificial Sequence
  Description of Artificial Sequence: Synthetic oligonucleotide
auagcguuugcggucacga

SEQ ID NO: 260563 - RNA, 19 nt, Artificial Sequence
  Description of Artificial Sequence: Synthetic oligonucleotide
ucuaaggcuuguagaacuu

SEQ ID NO: 260564 - RNA, 19 nt, Artificial Sequence
  Description of Artificial Sequence: Synthetic oligonucleotide
aagagcuuacguagguugu

SEQ ID NO: 260565 - RNA, 19 nt, Artificial Sequence
  Description of Artificial Sequence: Synthetic oligonucleotide
cuuguagaacuuccuugac

SEQ ID NO: 260566 - RNA, 19 nt, Artificial Sequence
  Description of Artificial Sequence: Synthetic oligonucleotide
augguuuaucuguccuguc

SEQ ID NO: 260567 - RNA, 19 nt, Artificial Sequence
  Description of Artificial Sequence: Synthetic oligonucleotide
auccgaucuacuucuugcu

SEQ ID NO: 260568 - RNA, 19 nt, Artificial Sequence
  Description of Artificial Sequence: Synthetic oligonucleotide
uacguagguuguguaaugu

SEQ ID NO: 260569 - RNA, 19 nt, Artificial Sequence
  Description of Artificial Sequence: Synthetic oligonucleotide
accugugaugugucaaugu

SEQ ID NO: 260570 - RNA, 19 nt, Artificial Sequence
  Description of Artificial Sequence: Synthetic oligonucleotide
cauuauuucccacagcaau

SEQ ID NO: 260571 - RNA, 19 nt, Artificial Sequence
  Description of Artificial Sequence: Synthetic oligonucleotide
cagaaugaagcagggcacc

SEQ ID NO: 260572 - RNA, 19 nt, Artificial Sequence
  Description of Artificial Sequence: Synthetic oligonucleotide
ugcuaauguagagccuugc

SEQ ID NO: 260573 - RNA, 19 nt, Artificial Sequence
  Description of Artificial Sequence: Synthetic oligonucleotide
auauacgcacaguucuaau

SEQ ID NO: 260574 - RNA, 19 nt, Artificial Sequence
  Description of Artificial Sequence: Synthetic oligonucleotide
uacgcacaguucuaauuau

SEQ ID NO: 260575 - RNA, 19 nt, Artificial Sequence
  Description of Artificial Sequence: Synthetic oligonucleotide
cucaugcuccacucuuagg

SEQ ID NO: 260576 - RNA, 19 nt, Artificial Sequence
  Description of Artificial Sequence: Synthetic oligonucleotide
gauagcguuugcggucacg

SEQ ID NO: 260577 - RNA, 19 nt, Artificial Sequence
  Description of Artificial Sequence: Synthetic oligonucleotide
agucguuucucuagcuuag

SEQ ID NO: 260578 - RNA, 19 nt, Artificial Sequence
  Description of Artificial Sequence: Synthetic oligonucleotide
ugauuuguuucuggugagu

SEQ ID NO: 260579 - RNA, 19 nt, Artificial Sequence
  Description of Artificial Sequence: Synthetic oligonucleotide
guucgcagcgaagaucugc

SEQ ID NO: 260580 - RNA, 19 nt, Artificial Sequence
  Description of Artificial Sequence: Synthetic oligonucleotide
agguuaggaauaauuuaca

SEQ ID NO: 260581 - RNA, 19 nt, Artificial Sequence
  Description of Artificial Sequence: Synthetic oligonucleotide
ucugaacaacugugccucc

SEQ ID NO: 260582 - RNA, 19 nt, Artificial Sequence
  Description of Artificial Sequence: Synthetic oligonucleotide
aucauaccaguucccucug

SEQ ID NO: 260583 - RNA, 19 nt, Artificial Sequence
  Description of Artificial Sequence: Synthetic oligonucleotide
aguuauugaaagacuguuu

SEQ ID NO: 260584 - RNA, 19 nt, Artificial Sequence
  Description of Artificial Sequence: Synthetic oligonucleotide
cuuggagaucagugauuag

SEQ ID NO: 260585 - RNA, 19 nt, Artificial Sequence
  Description of Artificial Sequence: Synthetic oligonucleotide
acuggcagauauccaccug

SEQ ID NO: 260586 - RNA, 19 nt, Artificial Sequence
  Description of Artificial Sequence: Synthetic oligonucleotide
uuagugccuugcaaacaau

SEQ ID NO: 260587 - RNA, 19 nt, Artificial Sequence
  Description of Artificial Sequence: Synthetic oligonucleotide
caccucguagcgcuauugc

SEQ ID NO: 260588 - RNA, 19 nt, Artificial Sequence
  Description of Artificial Sequence: Synthetic oligonucleotide
uucuaguuguuugcagcgu

SEQ ID NO: 260589 - RNA, 19 nt, Artificial Sequence
  Description of Artificial Sequence: Synthetic oligonucleotide
gcagcuagguaauguaaac

SEQ ID NO: 260590 - RNA, 19 nt, Artificial Sequence
  Description of Artificial Sequence: Synthetic oligonucleotide
agagcuuacguagguugug

SEQ ID NO: 260591 - RNA, 19 nt, Artificial Sequence
  Description of Artificial Sequence: Synthetic oligonucleotide
uguaguuacucggcacagu

SEQ ID NO: 260592 - RNA, 19 nt, Artificial Sequence
  Description of Artificial Sequence: Synthetic oligonucleotide
uaguuguuugcagcguuuc

SEQ ID NO: 260593 - RNA, 19 nt, Artificial Sequence
  Description of Artificial Sequence: Synthetic oligonucleotide
agcagaguuuacaaggaua

SEQ ID NO: 260594 - RNA, 19 nt, Artificial Sequence
  Description of Artificial Sequence: Synthetic oligonucleotide
aggacggauggguuuugca

SEQ ID NO: 260595 - RNA, 19 nt, Artificial Sequence
  Description of Artificial Sequence: Synthetic oligonucleotide
uagcguuugcggucacgag

SEQ ID NO: 260596 - RNA, 19 nt, Artificial Sequence
  Description of Artificial Sequence: Synthetic oligonucleotide
ggagauacgaagcuggcau

SEQ ID NO: 260597 - RNA, 19 nt, Artificial Sequence
  Description of Artificial Sequence: Synthetic oligonucleotide
agcguuucaccaugguuuu

SEQ ID NO: 260598 - RNA, 19 nt, Artificial Sequence
  Description of Artificial Sequence: Synthetic oligonucleotide
aaaccaccuucaagauuuc

SEQ ID NO: 260599 - RNA, 19 nt, Artificial Sequence
  Description of Artificial Sequence: Synthetic oligonucleotide
guugggaaccagcagaguu

SEQ ID NO: 260600 - RNA, 19 nt, Artificial Sequence
  Description of Artificial Sequence: Synthetic oligonucleotide
ugcagcguuucaccauggu

SEQ ID NO: 260601 - RNA, 19 nt, Artificial Sequence
  Description of Artificial Sequence: Synthetic oligonucleotide
uuucaacaccugugaugug

SEQ ID NO: 260602 - RNA, 19 nt, Artificial Sequence
  Description of Artificial Sequence: Synthetic oligonucleotide
ggucacgagaugcauuuuc

SEQ ID NO: 260603 - RNA, 19 nt, Artificial Sequence
  Description of Artificial Sequence: Synthetic oligonucleotide
uuuauccgaucuacuucuu

SEQ ID NO: 260604 - RNA, 19 nt, Artificial Sequence
  Description of Artificial Sequence: Synthetic oligonucleotide
agcagcuagguaauguaaa

SEQ ID NO: 260605 - RNA, 19 nt, Artificial Sequence
  Description of Artificial Sequence: Synthetic oligonucleotide
caucucucaaacuacugau

SEQ ID NO: 260606 - RNA, 19 nt, Artificial Sequence
  Description of Artificial Sequence: Synthetic oligonucleotide
auagggcugcaguuguaaa

SEQ ID NO: 260607 - RNA, 19 nt, Artificial Sequence
  Description of Artificial Sequence: Synthetic oligonucleotide
gcugauagcguuugcgguc

SEQ ID NO: 260608 - RNA, 19 nt, Artificial Sequence
  Description of Artificial Sequence: Synthetic oligonucleotide
guggcauguaguauuguaa

SEQ ID NO: 260609 - RNA, 19 nt, Artificial Sequence
  Description of Artificial Sequence: Synthetic oligonucleotide
ugggaaccagcagaguuua

SEQ ID NO: 260610 - RNA, 19 nt, Artificial Sequence
  Description of Artificial Sequence: Synthetic oligonucleotide
cagcguuucaccaugguuu

SEQ ID NO: 260611 - RNA, 19 nt, Artificial Sequence
  Description of Artificial Sequence: Synthetic oligonucleotide
gcuaauguagagccuugca

SEQ ID NO: 260612 - RNA, 19 nt, Artificial Sequence
  Description of Artificial Sequence: Synthetic oligonucleotide
gcagcgaagaucugcauua

SEQ ID NO: 260613 - RNA, 19 nt, Artificial Sequence
  Description of Artificial Sequence: Synthetic oligonucleotide
cuucaucuaucauaccagu

SEQ ID NO: 260614 - RNA, 19 nt, Artificial Sequence
  Description of Artificial Sequence: Synthetic oligonucleotide
cuguuugauuuuauguccu

SEQ ID NO: 260615 - RNA, 19 nt, Artificial Sequence
  Description of Artificial Sequence: Synthetic oligonucleotide
aaccaagauuaaacacaca

SEQ ID NO: 260616 - RNA, 19 nt, Artificial Sequence
  Description of Artificial Sequence: Synthetic oligonucleotide
auauauacgcacaguucua

SEQ ID NO: 260617 - RNA, 19 nt, Artificial Sequence
  Description of Artificial Sequence: Synthetic oligonucleotide
gucguuucucuagcuuagg

SEQ ID NO: 260618 - RNA, 19 nt, Artificial Sequence
  Description of Artificial Sequence: Synthetic oligonucleotide
guagcucuaagucguuucu

SEQ ID NO: 260619 - RNA, 19 nt, Artificial Sequence
  Description of Artificial Sequence: Synthetic oligonucleotide
uuugaccugacugccucuu

SEQ ID NO: 260620 - RNA, 19 nt, Artificial Sequence
  Description of Artificial Sequence: Synthetic oligonucleotide
aguacucacugaccugaua

SEQ ID NO: 260621 - RNA, 19 nt, Artificial Sequence
  Description of Artificial Sequence: Synthetic oligonucleotide
gucuugcauaaccgugagc

SEQ ID NO: 260622 - RNA, 19 nt, Artificial Sequence
  Description of Artificial Sequence: Synthetic oligonucleotide
cugcucguuucuucuggug

SEQ ID NO: 260623 - RNA, 19 nt, Artificial Sequence
  Description of Artificial Sequence: Synthetic oligonucleotide
cuugcaacagugaacucuu

SEQ ID NO: 260624 - RNA, 19 nt, Artificial Sequence
  Description of Artificial Sequence: Synthetic oligonucleotide
ccucuuuuauccgaucuac

SEQ ID NO: 260625 - RNA, 19 nt, Artificial Sequence
  Description of Artificial Sequence: Synthetic oligonucleotide
ugcggucacgagaugcauu

SEQ ID NO: 260626 - RNA, 19 nt, Artificial Sequence
  Description of Artificial Sequence: Synthetic oligonucleotide
ggacggauggguuuugcaa

SEQ ID NO: 260627 - RNA, 19 nt, Artificial Sequence
  Description of Artificial Sequence: Synthetic oligonucleotide
agcuuacguagguugugua

SEQ ID NO: 260628 - RNA, 19 nt, Artificial Sequence
  Description of Artificial Sequence: Synthetic oligonucleotide
caguucuaauuauaaaauu

SEQ ID NO: 260629 - RNA, 19 nt, Artificial Sequence
  Description of Artificial Sequence: Synthetic oligonucleotide
aggcaaucacaaggagcac

SEQ ID NO: 260630 - RNA, 19 nt, Artificial Sequence
  Description of Artificial Sequence: Synthetic oligonucleotide
cucucgucugucuugcaua

SEQ ID NO: 260631 - RNA, 19 nt, Artificial Sequence
  Description of Artificial Sequence: Synthetic oligonucleotide
cugauagcguuugcgguca

SEQ ID NO: 260632 - RNA, 19 nt, Artificial Sequence
  Description of Artificial Sequence: Synthetic oligonucleotide
cuuaggaaguucgcagcga

SEQ ID NO: 260633 - RNA, 19 nt, Artificial Sequence
  Description of Artificial Sequence: Synthetic oligonucleotide
ccaaugcaauuauuuaaca

SEQ ID NO: 260634 - RNA, 19 nt, Artificial Sequence
  Description of Artificial Sequence: Synthetic oligonucleotide
uguugggaaccagcagagu

SEQ ID NO: 260635 - RNA, 19 nt, Artificial Sequence
  Description of Artificial Sequence: Synthetic oligonucleotide
gcuauugccugguuguucu

SEQ ID NO: 260636 - RNA, 19 nt, Artificial Sequence
  Description of Artificial Sequence: Synthetic oligonucleotide
uccaggacggauggguuuu

SEQ ID NO: 260637 - RNA, 19 nt, Artificial Sequence
  Description of Artificial Sequence: Synthetic oligonucleotide
cuuacguagguuguguaau

SEQ ID NO: 260638 - RNA, 19 nt, Artificial Sequence
  Description of Artificial Sequence: Synthetic oligonucleotide
gaccugacugccucuuuua

SEQ ID NO: 260639 - RNA, 19 nt, Artificial Sequence
  Description of Artificial Sequence: Synthetic oligonucleotide
accugaaaagugaguggca

SEQ ID NO: 260640 - RNA, 19 nt, Artificial Sequence
  Description of Artificial Sequence: Synthetic oligonucleotide
gcuuacguagguuguguaa

SEQ ID NO: 260641 - RNA, 19 nt, Artificial Sequence
  Description of Artificial Sequence: Synthetic oligonucleotide
gcaaggucuuuuaguaaug

SEQ ID NO: 260642 - RNA, 19 nt, Artificial Sequence
  Description of Artificial Sequence: Synthetic oligonucleotide
cacgagaugcauuuucuuu

SEQ ID NO: 260643 - RNA, 19 nt, Artificial Sequence
  Description of Artificial Sequence: Synthetic oligonucleotide
uugaccugacugccucuuu

SEQ ID NO: 260644 - RNA, 19 nt, Artificial Sequence
  Description of Artificial Sequence: Synthetic oligonucleotide
uuaugccugcuugccucca

SEQ ID NO: 260645 - RNA, 19 nt, Artificial Sequence
  Description of Artificial Sequence: Synthetic oligonucleotide
ccgaucuacuucuugcuga

SEQ ID NO: 260646 - RNA, 19 nt, Artificial Sequence
  Description of Artificial Sequence: Synthetic oligonucleotide
ggacaucaacauugcacuc

SEQ ID NO: 260647 - RNA, 19 nt, Artificial Sequence
  Description of Artificial Sequence: Synthetic oligonucleotide
cucuuuuauccgaucuacu

SEQ ID NO: 260648 - RNA, 19 nt, Artificial Sequence
  Description of Artificial Sequence: Synthetic oligonucleotide
ugauagcguuugcggucac

SEQ ID NO: 260649 - RNA, 19 nt, Artificial Sequence
  Description of Artificial Sequence: Synthetic oligonucleotide
gugucgucagagucaaccu

SEQ ID NO: 260650 - RNA, 19 nt, Artificial Sequence
  Description of Artificial Sequence: Synthetic oligonucleotide
guuugcagcguuucaccau

SEQ ID NO: 260651 - RNA, 19 nt, Artificial Sequence
  Description of Artificial Sequence: Synthetic oligonucleotide
aggauaggaaacagcugua

SEQ ID NO: 260652 - RNA, 19 nt, Artificial Sequence
  Description of Artificial Sequence: Synthetic oligonucleotide
gagcuuacguagguugugu

SEQ ID NO: 260653 - RNA, 19 nt, Artificial Sequence
  Description of Artificial Sequence: Synthetic oligonucleotide
gauacgaagcuggcaugcu

SEQ ID NO: 260654 - RNA, 19 nt, Artificial Sequence
  Description of Artificial Sequence: Synthetic oligonucleotide
gugcacuuuggugagcugu

SEQ ID NO: 260655 - RNA, 19 nt, Artificial Sequence
  Description of Artificial Sequence: Synthetic oligonucleotide
uugcggucacgagaugcau

SEQ ID NO: 260656 - RNA, 19 nt, Artificial Sequence
  Description of Artificial Sequence: Synthetic oligonucleotide
ucgcagcgaagaucugcau

SEQ ID NO: 260657 - RNA, 19 nt, Artificial Sequence
  Description of Artificial Sequence: Synthetic oligonucleotide
cuaguuguuugcagcguuu

SEQ ID NO: 260658 - RNA, 19 nt, Artificial Sequence
  Description of Artificial Sequence: Synthetic oligonucleotide
acgcacaguucuaauuaua

SEQ ID NO: 260659 - RNA, 19 nt, Artificial Sequence
  Description of Artificial Sequence: Synthetic oligonucleotide
cguagguuguguaaugucu

SEQ ID NO: 260660 - RNA, 19 nt, Artificial Sequence
  Description of Artificial Sequence: Synthetic oligonucleotide
gcagggugaguuggagagg

SEQ ID NO: 260661 - RNA, 19 nt, Artificial Sequence
  Description of Artificial Sequence: Synthetic oligonucleotide
cuuaggcgcuccugcucca

SEQ ID NO: 260662 - RNA, 19 nt, Artificial Sequence
  Description of Artificial Sequence: Synthetic oligonucleotide
aucagccaaugcaauuauu

SEQ ID NO: 260663 - RNA, 19 nt, Artificial Sequence
  Description of Artificial Sequence: Synthetic oligonucleotide
gggagauacgaagcuggca

SEQ ID NO: 260664 - RNA, 19 nt, Artificial Sequence
  Description of Artificial Sequence: Synthetic oligonucleotide
ccuugcaacagugaacucu

SEQ ID NO: 260665 - RNA, 19 nt, Artificial Sequence
  Description of Artificial Sequence: Synthetic oligonucleotide
cucgucugucuugcauaac

SEQ ID NO: 260666 - RNA, 19 nt, Artificial Sequence
  Description of Artificial Sequence: Synthetic oligonucleotide
ggaaguucgcagcgaagau

SEQ ID NO: 260667 - RNA, 19 nt, Artificial Sequence
  Description of Artificial Sequence: Synthetic oligonucleotide
aguucgcagcgaagaucug

SEQ ID NO: 260668 - RNA, 19 nt, Artificial Sequence
  Description of Artificial Sequence: Synthetic oligonucleotide
augaagcagggcaccucaa

SEQ ID NO: 260669 - RNA, 19 nt, Artificial Sequence
  Description of Artificial Sequence: Synthetic oligonucleotide
gcggucacgagaugcauuu

SEQ ID NO: 260670 - RNA, 19 nt, Artificial Sequence
  Description of Artificial Sequence: Synthetic oligonucleotide
cagugucgucagagucaac

SEQ ID NO: 260671 - RNA, 19 nt, Artificial Sequence
  Description of Artificial Sequence: Synthetic oligonucleotide
ccaccucguagcgcuauug

SEQ ID NO: 260672 - RNA, 19 nt, Artificial Sequence
  Description of Artificial Sequence: Synthetic oligonucleotide
gcguuugcggucacgagau

SEQ ID NO: 260673 - RNA, 19 nt, Artificial Sequence
  Description of Artificial Sequence: Synthetic oligonucleotide
gcucucgucugucuugcau

SEQ ID NO: 260674 - RNA, 19 nt, Artificial Sequence
  Description of Artificial Sequence: Synthetic oligonucleotide
gcauaaccgugagcucaug

SEQ ID NO: 260675 - RNA, 19 nt, Artificial Sequence
  Description of Artificial Sequence: Synthetic oligonucleotide
caccaccuguuucuuuuau

SEQ ID NO: 260676 - RNA, 19 nt, Artificial Sequence
  Description of Artificial Sequence: Synthetic oligonucleotide
cucccaggacaucaacauu

SEQ ID NO: 260677 - RNA, 19 nt, Artificial Sequence
  Description of Artificial Sequence: Synthetic oligonucleotide
gcacuauggccaacaauau

SEQ ID NO: 260678 - RNA, 19 nt, Artificial Sequence
  Description of Artificial Sequence: Synthetic oligonucleotide
guagcgcuauugccugguu

SEQ ID NO: 260679 - RNA, 19 nt, Artificial Sequence
  Description of Artificial Sequence: Synthetic oligonucleotide
gcaccucaaacuggcagau

SEQ ID NO: 260680 - RNA, 19 nt, Artificial Sequence
  Description of Artificial Sequence: Synthetic oligonucleotide
caccucaaacuggcagaua

SEQ ID NO: 260681 - RNA, 19 nt, Artificial Sequence
  Description of Artificial Sequence: Synthetic oligonucleotide
ggccaacaauauaacuuuu

SEQ ID NO: 260682 - RNA, 19 nt, Artificial Sequence
  Description of Artificial Sequence: Synthetic oligonucleotide
ccaggacggauggguuuug

SEQ ID NO: 260683 - RNA, 19 nt, Artificial Sequence
  Description of Artificial Sequence: Synthetic oligonucleotide
cagcgaagaucugcauuau

SEQ ID NO: 260684 - RNA, 19 nt, Artificial Sequence
  Description of Artificial Sequence: Synthetic oligonucleotide
caccaccucguagcgcuau

SEQ ID NO: 260685 - RNA, 19 nt, Artificial Sequence
  Description of Artificial Sequence: Synthetic oligonucleotide
cggucacgagaugcauuuu

SEQ ID NO: 260686 - RNA, 19 nt, Artificial Sequence
  Description of Artificial Sequence: Synthetic oligonucleotide
uguucaaccuguaagaggg

SEQ ID NO: 260687 - RNA, 19 nt, Artificial Sequence
  Description of Artificial Sequence: Synthetic oligonucleotide
uuauacuucaugcaguugg

SEQ ID NO: 260688 - RNA, 19 nt, Artificial Sequence
  Description of Artificial Sequence: Synthetic oligonucleotide
aaaaguaacgucaagagca

SEQ ID NO: 260689 - RNA, 19 nt, Artificial Sequence
  Description of Artificial Sequence: Synthetic oligonucleotide
uuagacaaggaucacagag

SEQ ID NO: 260690 - RNA, 19 nt, Artificial Sequence
  Description of Artificial Sequence: Synthetic oligonucleotide
aucuaucuaacauagcagc

SEQ ID NO: 260691 - RNA, 19 nt, Artificial Sequence
  Description of Artificial Sequence: Synthetic oligonucleotide
uacaauaaauagagcaucg

SEQ ID NO: 260692 - RNA, 19 nt, Artificial Sequence
  Description of Artificial Sequence: Synthetic oligonucleotide
aauuuggugacguugcugu

SEQ ID NO: 260693 - RNA, 19 nt, Artificial Sequence
  Description of Artificial Sequence: Synthetic oligonucleotide
aauaaauagagcaucgugu

SEQ ID NO: 260694 - RNA, 19 nt, Artificial Sequence
  Description of Artificial Sequence: Synthetic oligonucleotide
uaacuuacaaccauguccu

SEQ ID NO: 260695 - RNA, 19 nt, Artificial Sequence
  Description of Artificial Sequence: Synthetic oligonucleotide
gacgucauauuauaguagg

SEQ ID NO: 260696 - RNA, 19 nt, Artificial Sequence
  Description of Artificial Sequence: Synthetic oligonucleotide
auaaauagagcaucgugug

SEQ ID NO: 260697 - RNA, 19 nt, Artificial Sequence
  Description of Artificial Sequence: Synthetic oligonucleotide
auaauggagaguauaggcc

SEQ ID NO: 260698 - RNA, 19 nt, Artificial Sequence
  Description of Artificial Sequence: Synthetic oligonucleotide
uguaagaggguaucugugg

SEQ ID NO: 260699 - RNA, 19 nt, Artificial Sequence
  Description of Artificial Sequence: Synthetic oligonucleotide
gauuggucaacacugggcc

SEQ ID NO: 260700 - RNA, 19 nt, Artificial Sequence
  Description of Artificial Sequence: Synthetic oligonucleotide
ucccaaauguguaagaagu

SEQ ID NO: 260701 - RNA, 19 nt, Artificial Sequence
  Description of Artificial Sequence: Synthetic oligonucleotide
aauaagacgucauauuaua

SEQ ID NO: 260702 - RNA, 19 nt, Artificial Sequence
  Description of Artificial Sequence: Synthetic oligonucleotide
uuuaacuagaccacacugu

SEQ ID NO: 260703 - RNA, 19 nt, Artificial Sequence
  Description of Artificial Sequence: Synthetic oligonucleotide
agacaaggaucacagaguc

SEQ ID NO: 260704 - RNA, 19 nt, Artificial Sequence
  Description of Artificial Sequence: Synthetic oligonucleotide
uaagacgucauauuauagu

SEQ ID NO: 260705 - RNA, 19 nt, Artificial Sequence
  Description of Artificial Sequence: Synthetic oligonucleotide
aagacgucauauuauagua

SEQ ID NO: 260706 - RNA, 19 nt, Artificial Sequence
  Description of Artificial Sequence: Synthetic oligonucleotide
uccaauuugggugacucgg

SEQ ID NO: 260707 - RNA, 19 nt, Artificial Sequence
  Description of Artificial Sequence: Synthetic oligonucleotide
gaucauugcacggucauag

SEQ ID NO: 260708 - RNA, 19 nt, Artificial Sequence
  Description of Artificial Sequence: Synthetic oligonucleotide
uguaccgacuuucggaugc

SEQ ID NO: 260709 - RNA, 19 nt, Artificial Sequence
  Description of Artificial Sequence: Synthetic oligonucleotide
ugggaucaguaucagaacc

SEQ ID NO: 260710 - RNA, 19 nt, Artificial Sequence
  Description of Artificial Sequence: Synthetic oligonucleotide
gaaaggagagcgauguugg

SEQ ID NO: 260711 - RNA, 19 nt, Artificial Sequence
  Description of Artificial Sequence: Synthetic oligonucleotide
uaaacaauucuagaaggca

SEQ ID NO: 260712 - RNA, 19 nt, Artificial Sequence
  Description of Artificial Sequence: Synthetic oligonucleotide
cuuuaacuagaccacacug

SEQ ID NO: 260713 - RNA, 19 nt, Artificial Sequence
  Description of Artificial Sequence: Synthetic oligonucleotide
uuguucaaccuguaagagg

SEQ ID NO: 260714 - RNA, 19 nt, Artificial Sequence
  Description of Artificial Sequence: Synthetic oligonucleotide
gaagcgacgaaggaguggg

SEQ ID NO: 260715 - RNA, 19 nt, Artificial Sequence
  Description of Artificial Sequence: Synthetic oligonucleotide
caucgugugcuucacagcg

SEQ ID NO: 260716 - RNA, 19 nt, Artificial Sequence
  Description of Artificial Sequence: Synthetic oligonucleotide
ugauuggucaacacugggc

SEQ ID NO: 260717 - RNA, 19 nt, Artificial Sequence
  Description of Artificial Sequence: Synthetic oligonucleotide
ugaccaacuaccuggggag

SEQ ID NO: 260718 - RNA, 19 nt, Artificial Sequence
  Description of Artificial Sequence: Synthetic oligonucleotide
ucauauuauaguagguaaa

SEQ ID NO: 260719 - RNA, 19 nt, Artificial Sequence
  Description of Artificial Sequence: Synthetic oligonucleotide
gaacuuugucccuuggaag

SEQ ID NO: 260720 - RNA, 19 nt, Artificial Sequence
  Description of Artificial Sequence: Synthetic oligonucleotide
ucauugcacggucauaggc

SEQ ID NO: 260721 - RNA, 19 nt, Artificial Sequence
  Description of Artificial Sequence: Synthetic oligonucleotide
uaaauagagcaucgugugc

SEQ ID NO: 260722 - RNA, 19 nt, Artificial Sequence
  Description of Artificial Sequence: Synthetic oligonucleotide
uggaggguuccgauaaugg

SEQ ID NO: 260723 - RNA, 19 nt, Artificial Sequence
  Description of Artificial Sequence: Synthetic oligonucleotide
ucuaucuaacauagcagcu

SEQ ID NO: 260724 - RNA, 19 nt, Artificial Sequence
  Description of Artificial Sequence: Synthetic oligonucleotide
cauugcacggucauaggcc

SEQ ID NO: 260725 - RNA, 19 nt, Artificial Sequence
  Description of Artificial Sequence: Synthetic oligonucleotide
agaaaauaagacgucauau

SEQ ID NO: 260726 - RNA, 19 nt, Artificial Sequence
  Description of Artificial Sequence: Synthetic oligonucleotide
ggaucgaugaucaaggcag

SEQ ID NO: 260727 - RNA, 19 nt, Artificial Sequence
  Description of Artificial Sequence: Synthetic oligonucleotide
acuuguaccgacuuucgga

SEQ ID NO: 260728 - RNA, 19 nt, Artificial Sequence
  Description of Artificial Sequence: Synthetic oligonucleotide
ugacguugcugucaguuug

SEQ ID NO: 260729 - RNA, 19 nt, Artificial Sequence
  Description of Artificial Sequence: Synthetic oligonucleotide
aaaggagagcgauguuggg

SEQ ID NO: 260730 - RNA, 19 nt, Artificial Sequence
  Description of Artificial Sequence: Synthetic oligonucleotide
aaauaagacgucauauuau

SEQ ID NO: 260731 - RNA, 19 nt, Artificial Sequence
  Description of Artificial Sequence: Synthetic oligonucleotide
augauuggucaacacuggg

SEQ ID NO: 260732 - RNA, 19 nt, Artificial Sequence
  Description of Artificial Sequence: Synthetic oligonucleotide
gucauauuauaguagguaa

SEQ ID NO: 260733 - RNA, 19 nt, Artificial Sequence
  Description of Artificial Sequence: Synthetic oligonucleotide
agaguauaggccugaauaa

SEQ ID NO: 260734 - RNA, 19 nt, Artificial Sequence
  Description of Artificial Sequence: Synthetic oligonucleotide
agacgaggcuucuuaugcc

SEQ ID NO: 260735 - RNA, 19 nt, Artificial Sequence
  Description of Artificial Sequence: Synthetic oligonucleotide
caggggaaccacaugauug

SEQ ID NO: 260736 - RNA, 19 nt, Artificial Sequence
  Description of Artificial Sequence: Synthetic oligonucleotide
gaucgcuucuaccuguggc

SEQ ID NO: 260737 - RNA, 19 nt, Artificial Sequence
  Description of Artificial Sequence: Synthetic oligonucleotide
agaagucaaaaugccaauc

SEQ ID NO: 260738 - RNA, 19 nt, Artificial Sequence
  Description of Artificial Sequence: Synthetic oligonucleotide
cagacgaggcuucuuaugc

SEQ ID NO: 260739 - RNA, 19 nt, Artificial Sequence
  Description of Artificial Sequence: Synthetic oligonucleotide
ugcucgguggaaaauugug

SEQ ID NO: 260740 - RNA, 19 nt, Artificial Sequence
  Description of Artificial Sequence: Synthetic oligonucleotide
cuugggaucgaugaucaag

SEQ ID NO: 260741 - RNA, 19 nt, Artificial Sequence
  Description of Artificial Sequence: Synthetic oligonucleotide
aaaguugcguugguuuguc

SEQ ID NO: 260742 - RNA, 19 nt, Artificial Sequence
  Description of Artificial Sequence: Synthetic oligonucleotide
gucaguuuggcacaaggga

SEQ ID NO: 260743 - RNA, 19 nt, Artificial Sequence
  Description of Artificial Sequence: Synthetic oligonucleotide
uuugcgaaugagcucgauc

SEQ ID NO: 260744 - RNA, 19 nt, Artificial Sequence
  Description of Artificial Sequence: Synthetic oligonucleotide
ucgagguggaucauugcac

SEQ ID NO: 260745 - RNA, 19 nt, Artificial Sequence
  Description of Artificial Sequence: Synthetic oligonucleotide
aggagagcgauguugggga

SEQ ID NO: 260746 - RNA, 19 nt, Artificial Sequence
  Description of Artificial Sequence: Synthetic oligonucleotide
cuaucuaacauagcagcug

SEQ ID NO: 260747 - RNA, 19 nt, Artificial Sequence
  Description of Artificial Sequence: Synthetic oligonucleotide
cuucuuaugccucggggac

SEQ ID NO: 260748 - RNA, 19 nt, Artificial Sequence
  Description of Artificial Sequence: Synthetic oligonucleotide
aguggaauauccccaggga

SEQ ID NO: 260749 - RNA, 19 nt, Artificial Sequence
  Description of Artificial Sequence: Synthetic oligonucleotide
cucgguggaaaauuguguc

SEQ ID NO: 260750 - RNA, 19 nt, Artificial Sequence
  Description of Artificial Sequence: Synthetic oligonucleotide
auugcacggucauaggcca

SEQ ID NO: 260751 - RNA, 19 nt, Artificial Sequence
  Description of Artificial Sequence: Synthetic oligonucleotide
ccuuuugcgaaugagcucg

SEQ ID NO: 260752 - RNA, 19 nt, Artificial Sequence
  Description of Artificial Sequence: Synthetic oligonucleotide
acgagcaugccgcaggaug

SEQ ID NO: 260753 - RNA, 19 nt, Artificial Sequence
  Description of Artificial Sequence: Synthetic oligonucleotide
cuuguucaaccuguaagag

SEQ ID NO: 260754 - RNA, 19 nt, Artificial Sequence
  Description of Artificial Sequence: Synthetic oligonucleotide
agaaccgugaacggcauca

SEQ ID NO: 260755 - RNA, 19 nt, Artificial Sequence
  Description of Artificial Sequence: Synthetic oligonucleotide
auaagacgucauauuauag

SEQ ID NO: 260756 - RNA, 19 nt, Artificial Sequence
  Description of Artificial Sequence: Synthetic oligonucleotide
accccgagaucuuacaaca

SEQ ID NO: 260757 - RNA, 19 nt, Artificial Sequence
  Description of Artificial Sequence: Synthetic oligonucleotide
cuguaagaggguaucugug

SEQ ID NO: 260758 - RNA, 19 nt, Artificial Sequence
  Description of Artificial Sequence: Synthetic oligonucleotide
aguauaggccugaauaacu

SEQ ID NO: 260759 - RNA, 19 nt, Artificial Sequence
  Description of Artificial Sequence: Synthetic oligonucleotide
acagguagguggaagcgac

SEQ ID NO: 260760 - RNA, 19 nt, Artificial Sequence
  Description of Artificial Sequence: Synthetic oligonucleotide
uuuagacaaggaucacaga

SEQ ID NO: 260761 - RNA, 19 nt, Artificial Sequence
  Description of Artificial Sequence: Synthetic oligonucleotide
ugcgaaugagcucgaucag

SEQ ID NO: 260762 - RNA, 19 nt, Artificial Sequence
  Description of Artificial Sequence: Synthetic oligonucleotide
ugcuccgcguuucucuggg

SEQ ID NO: 260763 - RNA, 19 nt, Artificial Sequence
  Description of Artificial Sequence: Synthetic oligonucleotide
aucauugcacggucauagg

SEQ ID NO: 260764 - RNA, 19 nt, Artificial Sequence
  Description of Artificial Sequence: Synthetic oligonucleotide
caauuugggugacucgggc

SEQ ID NO: 260765 - RNA, 19 nt, Artificial Sequence
  Description of Artificial Sequence: Synthetic oligonucleotide
ucaauuuggugacguugcu

SEQ ID NO: 260766 - RNA, 19 nt, Artificial Sequence
  Description of Artificial Sequence: Synthetic oligonucleotide
ucgguggaaaauugugucu

SEQ ID NO: 260767 - RNA, 19 nt, Artificial Sequence
  Description of Artificial Sequence: Synthetic oligonucleotide
guuccgauaauggagagua

SEQ ID NO: 260768 - RNA, 19 nt, Artificial Sequence
  Description of Artificial Sequence: Synthetic oligonucleotide
gaguauaggccugaauaac

SEQ ID NO: 260769 - RNA, 19 nt, Artificial Sequence
  Description of Artificial Sequence: Synthetic oligonucleotide
cagaccacuacagaucuug

SEQ ID NO: 260770 - RNA, 19 nt, Artificial Sequence
  Description of Artificial Sequence: Synthetic oligonucleotide
ucaugccggaguuucugcc

SEQ ID NO: 260771 - RNA, 19 nt, Artificial Sequence
  Description of Artificial Sequence: Synthetic oligonucleotide
gguaaaauuaacucucgua

SEQ ID NO: 260772 - RNA, 19 nt, Artificial Sequence
  Description of Artificial Sequence: Synthetic oligonucleotide
gggaaaggauucuuacacg

SEQ ID NO: 260773 - RNA, 19 nt, Artificial Sequence
  Description of Artificial Sequence: Synthetic oligonucleotide
aaacuccccuaugaaaagu

SEQ ID NO: 260774 - RNA, 19 nt, Artificial Sequence
  Description of Artificial Sequence: Synthetic oligonucleotide
aguugugaagccucugcau

SEQ ID NO: 260775 - RNA, 19 nt, Artificial Sequence
  Description of Artificial Sequence: Synthetic oligonucleotide
uggaucauugcacggucau

SEQ ID NO: 260776 - RNA, 19 nt, Artificial Sequence
  Description of Artificial Sequence: Synthetic oligonucleotide
augaggggagcgccauucc

SEQ ID NO: 260777 - RNA, 19 nt, Artificial Sequence
  Description of Artificial Sequence: Synthetic oligonucleotide
uccgauaauggagaguaua

SEQ ID NO: 260778 - RNA, 19 nt, Artificial Sequence
  Description of Artificial Sequence: Synthetic oligonucleotide
agacgucauauuauaguag

SEQ ID NO: 260779 - RNA, 19 nt, Artificial Sequence
  Description of Artificial Sequence: Synthetic oligonucleotide
gacucgggcaagugggugc

SEQ ID NO: 260780 - RNA, 19 nt, Artificial Sequence
  Description of Artificial Sequence: Synthetic oligonucleotide
gaauaacuuacaaccaugu

SEQ ID NO: 260781 - RNA, 19 nt, Artificial Sequence
  Description of Artificial Sequence: Synthetic oligonucleotide
gaucgaugaucaaggcagg

SEQ ID NO: 260782 - RNA, 19 nt, Artificial Sequence
  Description of Artificial Sequence: Synthetic oligonucleotide
aguaacgucaagagcagaa

SEQ ID NO: 260783 - RNA, 19 nt, Artificial Sequence
  Description of Artificial Sequence: Synthetic oligonucleotide
gacagaccacuacagaucu

SEQ ID NO: 260784 - RNA, 19 nt, Artificial Sequence
  Description of Artificial Sequence: Synthetic oligonucleotide
auuaccucucuuauagcca

SEQ ID NO: 260785 - RNA, 19 nt, Artificial Sequence
  Description of Artificial Sequence: Synthetic oligonucleotide
agagacacgaggccccgug

SEQ ID NO: 260786 - RNA, 19 nt, Artificial Sequence
  Description of Artificial Sequence: Synthetic oligonucleotide
ucucccuuuugcgaaugag

SEQ ID NO: 260787 - RNA, 19 nt, Artificial Sequence
  Description of Artificial Sequence: Synthetic oligonucleotide
ccgauaauggagaguauag

SEQ ID NO: 260788 - RNA, 19 nt, Artificial Sequence
  Description of Artificial Sequence: Synthetic oligonucleotide
aguggguucccgagggacc

SEQ ID NO: 260789 - RNA, 19 nt, Artificial Sequence
  Description of Artificial Sequence: Synthetic oligonucleotide
aacaucggcagaacuuugu

SEQ ID NO: 260790 - RNA, 19 nt, Artificial Sequence
  Description of Artificial Sequence: Synthetic oligonucleotide
cugaccaacuaccugggga

SEQ ID NO: 260791 - RNA, 19 nt, Artificial Sequence
  Description of Artificial Sequence: Synthetic oligonucleotide
aagccucugaaaguugcgu

SEQ ID NO: 260792 - RNA, 19 nt, Artificial Sequence
  Description of Artificial Sequence: Synthetic oligonucleotide
uuaugccucggggacagga

SEQ ID NO: 260793 - RNA, 19 nt, Artificial Sequence
  Description of Artificial Sequence: Synthetic oligonucleotide
cacuuguaccgacuuucgg

SEQ ID NO: 260794 - RNA, 19 nt, Artificial Sequence
  Description of Artificial Sequence: Synthetic oligonucleotide
aggauucuuacacguggga

SEQ ID NO: 260795 - RNA, 19 nt, Artificial Sequence
  Description of Artificial Sequence: Synthetic oligonucleotide
accgugaacggcaucagcu

SEQ ID NO: 260796 - RNA, 19 nt, Artificial Sequence
  Description of Artificial Sequence: Synthetic oligonucleotide
ucuuacacgugggaucgcu

SEQ ID NO: 260797 - RNA, 19 nt, Artificial Sequence
  Description of Artificial Sequence: Synthetic oligonucleotide
agccuaggaccucuugcuc

SEQ ID NO: 260798 - RNA, 19 nt, Artificial Sequence
  Description of Artificial Sequence: Synthetic oligonucleotide
uacagguagguggaagcga

SEQ ID NO: 260799 - RNA, 19 nt, Artificial Sequence
  Description of Artificial Sequence: Synthetic oligonucleotide
cagcacguccaguggaggg

SEQ ID NO: 260800 - RNA, 19 nt, Artificial Sequence
  Description of Artificial Sequence: Synthetic oligonucleotide
cucgagguggaucauugca

SEQ ID NO: 260801 - RNA, 19 nt, Artificial Sequence
  Description of Artificial Sequence: Synthetic oligonucleotide
aagcucaguggguucccga

SEQ ID NO: 260802 - RNA, 19 nt, Artificial Sequence
  Description of Artificial Sequence: Synthetic oligonucleotide
ugcccaaaacuccccuaug

SEQ ID NO: 260803 - RNA, 19 nt, Artificial Sequence
  Description of Artificial Sequence: Synthetic oligonucleotide
gaucuuguucaaccuguaa

SEQ ID NO: 260804 - RNA, 19 nt, Artificial Sequence
  Description of Artificial Sequence: Synthetic oligonucleotide
ugagggagugacugcgagu

SEQ ID NO: 260805 - RNA, 19 nt, Artificial Sequence
  Description of Artificial Sequence: Synthetic oligonucleotide
accgacuuucggaugcugg

SEQ ID NO: 260806 - RNA, 19 nt, Artificial Sequence
  Description of Artificial Sequence: Synthetic oligonucleotide
uaggccacuuguaccgacu

SEQ ID NO: 260807 - RNA, 19 nt, Artificial Sequence
  Description of Artificial Sequence: Synthetic oligonucleotide
gggaucauagccgauguuc

SEQ ID NO: 260808 - RNA, 19 nt, Artificial Sequence
  Description of Artificial Sequence: Synthetic oligonucleotide
guagggagggguagccucg

SEQ ID NO: 260809 - RNA, 19 nt, Artificial Sequence
  Description of Artificial Sequence: Synthetic oligonucleotide
gacagaaucccgcccucuc

SEQ ID NO: 260810 - RNA, 19 nt, Artificial Sequence
  Description of Artificial Sequence: Synthetic oligonucleotide
uuguaccgacuuucggaug

SEQ ID NO: 260811 - RNA, 19 nt, Artificial Sequence
  Description of Artificial Sequence: Synthetic oligonucleotide
aacuccccuaugaaaaguu

SEQ ID NO: 260812 - RNA, 19 nt, Artificial Sequence
  Description of Artificial Sequence: Synthetic oligonucleotide
gaagcucaguggguucccg

SEQ ID NO: 260813 - RNA, 19 nt, Artificial Sequence
  Description of Artificial Sequence: Synthetic oligonucleotide
guacgucggcucgaggugg

SEQ ID NO: 260814 - RNA, 19 nt, Artificial Sequence
  Description of Artificial Sequence: Synthetic oligonucleotide
cucgggaucauagccgaug

SEQ ID NO: 260815 - RNA, 19 nt, Artificial Sequence
  Description of Artificial Sequence: Synthetic oligonucleotide
agguagguggaagcgacga

SEQ ID NO: 260816 - RNA, 19 nt, Artificial Sequence
  Description of Artificial Sequence: Synthetic oligonucleotide
guugguuggcuguauuuua

SEQ ID NO: 260817 - RNA, 19 nt, Artificial Sequence
  Description of Artificial Sequence: Synthetic oligonucleotide
ccucucgggaucauagccg

SEQ ID NO: 260818 - RNA, 19 nt, Artificial Sequence
  Description of Artificial Sequence: Synthetic oligonucleotide
uuugggugacucgggcaag

SEQ ID NO: 260819 - RNA, 19 nt, Artificial Sequence
  Description of Artificial Sequence: Synthetic oligonucleotide
gguuggggagaaaaccccg

SEQ ID NO: 260820 - RNA, 19 nt, Artificial Sequence
  Description of Artificial Sequence: Synthetic oligonucleotide
gacgcaucggcuccuuuaa

SEQ ID NO: 260821 - RNA, 19 nt, Artificial Sequence
  Description of Artificial Sequence: Synthetic oligonucleotide
acguugcugucaguuuggc

SEQ ID NO: 260822 - RNA, 19 nt, Artificial Sequence
  Description of Artificial Sequence: Synthetic oligonucleotide
cagguagguggaagcgacg

SEQ ID NO: 260823 - RNA, 19 nt, Artificial Sequence
  Description of Artificial Sequence: Synthetic oligonucleotide
cugaauaacuuacaaccau

SEQ ID NO: 260824 - RNA, 19 nt, Artificial Sequence
  Description of Artificial Sequence: Synthetic oligonucleotide
gacgaggcuucuuaugccu

SEQ ID NO: 260825 - RNA, 19 nt, Artificial Sequence
  Description of Artificial Sequence: Synthetic oligonucleotide
caaccuguaagaggguauc

SEQ ID NO: 260826 - RNA, 19 nt, Artificial Sequence
  Description of Artificial Sequence: Synthetic oligonucleotide
gccucugaaaguugcguug

SEQ ID NO: 260827 - RNA, 19 nt, Artificial Sequence
  Description of Artificial Sequence: Synthetic oligonucleotide
cuccgcguuucucugggac

SEQ ID NO: 260828 - RNA, 19 nt, Artificial Sequence
  Description of Artificial Sequence: Synthetic oligonucleotide
gacugcgagugagggaaag

SEQ ID NO: 260829 - RNA, 19 nt, Artificial Sequence
  Description of Artificial Sequence: Synthetic oligonucleotide
ccaauuugggugacucggg

SEQ ID NO: 260830 - RNA, 19 nt, Artificial Sequence
  Description of Artificial Sequence: Synthetic oligonucleotide
gacgcgacagagacacgag

SEQ ID NO: 260831 - RNA, 19 nt, Artificial Sequence
  Description of Artificial Sequence: Synthetic oligonucleotide
gguuuagacaaggaucaca

SEQ ID NO: 260832 - RNA, 19 nt, Artificial Sequence
  Description of Artificial Sequence: Synthetic oligonucleotide
cacagcggacgcgacagag

SEQ ID NO: 260833 - RNA, 19 nt, Artificial Sequence
  Description of Artificial Sequence: Synthetic oligonucleotide
guggaggguuccgauaaug

SEQ ID NO: 260834 - RNA, 19 nt, Artificial Sequence
  Description of Artificial Sequence: Synthetic oligonucleotide
gggugacucgggcaagugg

SEQ ID NO: 260835 - RNA, 19 nt, Artificial Sequence
  Description of Artificial Sequence: Synthetic oligonucleotide
cugaaaguugcguugguuu

SEQ ID NO: 260836 - RNA, 19 nt, Artificial Sequence
  Description of Artificial Sequence: Synthetic oligonucleotide
guccccguacgucggcucg

SEQ ID NO: 260837 - RNA, 19 nt, Artificial Sequence
  Description of Artificial Sequence: Synthetic oligonucleotide
gaaccgugaacggcaucag

SEQ ID NO: 260838 - RNA, 19 nt, Artificial Sequence
  Description of Artificial Sequence: Synthetic oligonucleotide
ccugaauaacuuacaacca

SEQ ID NO: 260839 - RNA, 19 nt, Artificial Sequence
  Description of Artificial Sequence: Synthetic oligonucleotide
agcgacgaaggaguggggu

SEQ ID NO: 260840 - RNA, 19 nt, Artificial Sequence
  Description of Artificial Sequence: Synthetic oligonucleotide
guggaagcgacgaaggagu

SEQ ID NO: 260841 - RNA, 19 nt, Artificial Sequence
  Description of Artificial Sequence: Synthetic oligonucleotide
ugcggccuuccaacaucgg

SEQ ID NO: 260842 - RNA, 19 nt, Artificial Sequence
  Description of Artificial Sequence: Synthetic oligonucleotide
acgucauauuauaguaggu

SEQ ID NO: 260843 - RNA, 19 nt, Artificial Sequence
  Description of Artificial Sequence: Synthetic oligonucleotide
caugccggaguuucugcca

SEQ ID NO: 260844 - RNA, 19 nt, Artificial Sequence
  Description of Artificial Sequence: Synthetic oligonucleotide
gcggacgcgacagagacac

SEQ ID NO: 260845 - RNA, 19 nt, Artificial Sequence
  Description of Artificial Sequence: Synthetic oligonucleotide
ccugccgacgagcaugccg

SEQ ID NO: 260846 - RNA, 19 nt, Artificial Sequence
  Description of Artificial Sequence: Synthetic oligonucleotide
ggagugggguccccguacg

SEQ ID NO: 260847 - RNA, 19 nt, Artificial Sequence
  Description of Artificial Sequence: Synthetic oligonucleotide
gaaaguugcguugguuugu

SEQ ID NO: 260848 - RNA, 19 nt, Artificial Sequence
  Description of Artificial Sequence: Synthetic oligonucleotide
gcagacgaggcuucuuaug

SEQ ID NO: 260849 - RNA, 19 nt, Artificial Sequence
  Description of Artificial Sequence: Synthetic oligonucleotide
guuugucagucagcauucc

SEQ ID NO: 260850 - RNA, 19 nt, Artificial Sequence
  Description of Artificial Sequence: Synthetic oligonucleotide
uuccgauaauggagaguau

SEQ ID NO: 260851 - RNA, 19 nt, Artificial Sequence
  Description of Artificial Sequence: Synthetic oligonucleotide
acggcacuugucuucucau

SEQ ID NO: 260852 - RNA, 19 nt, Artificial Sequence
  Description of Artificial Sequence: Synthetic oligonucleotide
caguggguucccgagggac

SEQ ID NO: 260853 - RNA, 19 nt, Artificial Sequence
  Description of Artificial Sequence: Synthetic oligonucleotide
uacgucggcucgaggugga

SEQ ID NO: 260854 - RNA, 19 nt, Artificial Sequence
  Description of Artificial Sequence: Synthetic oligonucleotide
acgaggcuucuuaugccuc

SEQ ID NO: 260855 - RNA, 19 nt, Artificial Sequence
  Description of Artificial Sequence: Synthetic oligonucleotide
ccacuuguaccgacuuucg

SEQ ID NO: 260856 - RNA, 19 nt, Artificial Sequence
  Description of Artificial Sequence: Synthetic oligonucleotide
agcacguccaguggaggga

SEQ ID NO: 260857 - RNA, 19 nt, Artificial Sequence
  Description of Artificial Sequence: Synthetic oligonucleotide
ggcaacuaugaugugugca

SEQ ID NO: 260858 - RNA, 19 nt, Artificial Sequence
  Description of Artificial Sequence: Synthetic oligonucleotide
cauuccuuauucacuaguu

SEQ ID NO: 260859 - RNA, 19 nt, Artificial Sequence
  Description of Artificial Sequence: Synthetic oligonucleotide
ggggagaaaaccccgagau

SEQ ID NO: 260860 - RNA, 19 nt, Artificial Sequence
  Description of Artificial Sequence: Synthetic oligonucleotide
guuggggagaaaaccccga

SEQ ID NO: 260861 - RNA, 19 nt, Artificial Sequence
  Description of Artificial Sequence: Synthetic oligonucleotide
ccaaaacuccccuaugaaa

SEQ ID NO: 260862 - RNA, 19 nt, Artificial Sequence
  Description of Artificial Sequence: Synthetic oligonucleotide
uugcacggucauaggccac

SEQ ID NO: 260863 - RNA, 19 nt, Artificial Sequence
  Description of Artificial Sequence: Synthetic oligonucleotide
ggguuggggagaaaacccc

SEQ ID NO: 260864 - RNA, 19 nt, Artificial Sequence
  Description of Artificial Sequence: Synthetic oligonucleotide
cacgugggaucgcuucuac

SEQ ID NO: 260865 - RNA, 19 nt, Artificial Sequence
  Description of Artificial Sequence: Synthetic oligonucleotide
cacggcacuugucuucuca

SEQ ID NO: 260866 - RNA, 19 nt, Artificial Sequence
  Description of Artificial Sequence: Synthetic oligonucleotide
gcggccuuccaacaucggc

SEQ ID NO: 260867 - RNA, 19 nt, Artificial Sequence
  Description of Artificial Sequence: Synthetic oligonucleotide
aguggaggguuccgauaau

SEQ ID NO: 260868 - RNA, 19 nt, Artificial Sequence
  Description of Artificial Sequence: Synthetic oligonucleotide
gagugcgagugcaggcgcc

SEQ ID NO: 260869 - RNA, 19 nt, Artificial Sequence
  Description of Artificial Sequence: Synthetic oligonucleotide
aaacccgcccgcggcuuug

SEQ ID NO: 260870 - RNA, 19 nt, Artificial Sequence
  Description of Artificial Sequence: Synthetic oligonucleotide
uuuugcgaaugagcucgau

SEQ ID NO: 260871 - RNA, 19 nt, Artificial Sequence
  Description of Artificial Sequence: Synthetic oligonucleotide
aggccacuuguaccgacuu

SEQ ID NO: 260872 - RNA, 19 nt, Artificial Sequence
  Description of Artificial Sequence: Synthetic oligonucleotide
uaccgacuuucggaugcug

SEQ ID NO: 260873 - RNA, 19 nt, Artificial Sequence
  Description of Artificial Sequence: Synthetic oligonucleotide
agggaccucgggugggagu

SEQ ID NO: 260874 - RNA, 19 nt, Artificial Sequence
  Description of Artificial Sequence: Synthetic oligonucleotide
cacuacagaucuuguucaa

SEQ ID NO: 260875 - RNA, 19 nt, Artificial Sequence
  Description of Artificial Sequence: Synthetic oligonucleotide
gggagaaaaccccgagauc

SEQ ID NO: 260876 - RNA, 19 nt, Artificial Sequence
  Description of Artificial Sequence: Synthetic oligonucleotide
agugcgagugcaggcgccu

SEQ ID NO: 260877 - RNA, 19 nt, Artificial Sequence
  Description of Artificial Sequence: Synthetic oligonucleotide
uucuuacacgugggaucgc

SEQ ID NO: 260878 - RNA, 19 nt, Artificial Sequence
  Description of Artificial Sequence: Synthetic oligonucleotide
ccgcccgcggcuuuggugc

SEQ ID NO: 260879 - RNA, 19 nt, Artificial Sequence
  Description of Artificial Sequence: Synthetic oligonucleotide
agaccacuacagaucuugu

SEQ ID NO: 260880 - RNA, 19 nt, Artificial Sequence
  Description of Artificial Sequence: Synthetic oligonucleotide
agggagugacugcgaguga

SEQ ID NO: 260881 - RNA, 19 nt, Artificial Sequence
  Description of Artificial Sequence: Synthetic oligonucleotide
cuuuugcgaaugagcucga

SEQ ID NO: 260882 - RNA, 19 nt, Artificial Sequence
  Description of Artificial Sequence: Synthetic oligonucleotide
ucucgggaucauagccgau

SEQ ID NO: 260883 - RNA, 19 nt, Artificial Sequence
  Description of Artificial Sequence: Synthetic oligonucleotide
gaccacuacagaucuuguu

SEQ ID NO: 260884 - RNA, 19 nt, Artificial Sequence
  Description of Artificial Sequence: Synthetic oligonucleotide
cacggucauaggccacuug

SEQ ID NO: 260885 - RNA, 19 nt, Artificial Sequence
  Description of Artificial Sequence: Synthetic oligonucleotide
ggaucauagccgauguucu

SEQ ID NO: 260886 - RNA, 19 nt, Artificial Sequence
  Description of Artificial Sequence: Synthetic oligonucleotide
acagcggacgcgacagaga

SEQ ID NO: 260887 - RNA, 19 nt, Artificial Sequence
  Description of Artificial Sequence: Synthetic oligonucleotide
gcgacgaaggagugggguc

SEQ ID NO: 260888 - RNA, 19 nt, Artificial Sequence
  Description of Artificial Sequence: Synthetic oligonucleotide
acuccccuaugaaaaguuu

SEQ ID NO: 260889 - RNA, 19 nt, Artificial Sequence
  Description of Artificial Sequence: Synthetic oligonucleotide
ccgugaacggcaucagcuc

SEQ ID NO: 260890 - RNA, 19 nt, Artificial Sequence
  Description of Artificial Sequence: Synthetic oligonucleotide
cccuuuugcgaaugagcuc

SEQ ID NO: 260891 - RNA, 19 nt, Artificial Sequence
  Description of Artificial Sequence: Synthetic oligonucleotide
cagaaccgugaacggcauc

SEQ ID NO: 260892 - RNA, 19 nt, Artificial Sequence
  Description of Artificial Sequence: Synthetic oligonucleotide
ggacgcaucggcuccuuua

SEQ ID NO: 260893 - RNA, 19 nt, Artificial Sequence
  Description of Artificial Sequence: Synthetic oligonucleotide
cauaggccacuuguaccga

SEQ ID NO: 260894 - RNA, 19 nt, Artificial Sequence
  Description of Artificial Sequence: Synthetic oligonucleotide
cuuaugccucggggacagg

SEQ ID NO: 260895 - RNA, 19 nt, Artificial Sequence
  Description of Artificial Sequence: Synthetic oligonucleotide
cguacgucggcucgaggug

SEQ ID NO: 260896 - RNA, 19 nt, Artificial Sequence
  Description of Artificial Sequence: Synthetic oligonucleotide
gagcucgaucagcagccgu

SEQ ID NO: 260897 - RNA, 19 nt, Artificial Sequence
  Description of Artificial Sequence: Synthetic oligonucleotide
cgucauauuauaguaggua

SEQ ID NO: 260898 - RNA, 19 nt, Artificial Sequence
  Description of Artificial Sequence: Synthetic oligonucleotide
uccccguacgucggcucga

SEQ ID NO: 260899 - RNA, 19 nt, Artificial Sequence
  Description of Artificial Sequence: Synthetic oligonucleotide
gccccagaaaagcagccua

SEQ ID NO: 260900 - RNA, 19 nt, Artificial Sequence
  Description of Artificial Sequence: Synthetic oligonucleotide
aggcggacagcugcucggu

SEQ ID NO: 260901 - RNA, 19 nt, Artificial Sequence
  Description of Artificial Sequence: Synthetic oligonucleotide
cggccuuccaacaucggca

SEQ ID NO: 260902 - RNA, 19 nt, Artificial Sequence
  Description of Artificial Sequence: Synthetic oligonucleotide
gggcagacgaggcuucuua

SEQ ID NO: 260903 - RNA, 19 nt, Artificial Sequence
  Description of Artificial Sequence: Synthetic oligonucleotide
cugcucgguggaaaauugu

SEQ ID NO: 260904 - RNA, 19 nt, Artificial Sequence
  Description of Artificial Sequence: Synthetic oligonucleotide
ucacggcacuugucuucuc

SEQ ID NO: 260905 - RNA, 19 nt, Artificial Sequence
  Description of Artificial Sequence: Synthetic oligonucleotide
ccccgagaucuuacaacac

SEQ ID NO: 260906 - RNA, 19 nt, Artificial Sequence
  Description of Artificial Sequence: Synthetic oligonucleotide
ccgcguuucucugggacug

SEQ ID NO: 260907 - RNA, 19 nt, Artificial Sequence
  Description of Artificial Sequence: Synthetic oligonucleotide
cagggaccucgggugggag

SEQ ID NO: 260908 - RNA, 19 nt, Artificial Sequence
  Description of Artificial Sequence: Synthetic oligonucleotide
gguuagcugggagaggcau

SEQ ID NO: 260909 - RNA, 19 nt, Artificial Sequence
  Description of Artificial Sequence: Synthetic oligonucleotide
ggugagggagugacugcga

SEQ ID NO: 260910 - RNA, 19 nt, Artificial Sequence
  Description of Artificial Sequence: Synthetic oligonucleotide
ccguacgucggcucgaggu

SEQ ID NO: 260911 - RNA, 19 nt, Artificial Sequence
  Description of Artificial Sequence: Synthetic oligonucleotide
cgaaggagugggguccccg

SEQ ID NO: 260912 - RNA, 19 nt, Artificial Sequence
  Description of Artificial Sequence: Synthetic oligonucleotide
guucaaccuguaagagggu

SEQ ID NO: 260913 - RNA, 19 nt, Artificial Sequence
  Description of Artificial Sequence: Synthetic oligonucleotide
gcggcccgcaaacccgccc

SEQ ID NO: 260914 - RNA, 19 nt, Artificial Sequence
  Description of Artificial Sequence: Synthetic oligonucleotide
ccgacuuucggaugcuggu

SEQ ID NO: 260915 - RNA, 19 nt, Artificial Sequence
  Description of Artificial Sequence: Synthetic oligonucleotide
gccgacgagcaugccgcag

SEQ ID NO: 260916 - RNA, 19 nt, Artificial Sequence
  Description of Artificial Sequence: Synthetic oligonucleotide
ggcccgcaaacccgcccgc

SEQ ID NO: 260917 - RNA, 19 nt, Artificial Sequence
  Description of Artificial Sequence: Synthetic oligonucleotide
cccgcccgcggcuuuggug

SEQ ID NO: 260918 - RNA, 19 nt, Artificial Sequence
  Description of Artificial Sequence: Synthetic oligonucleotide
guaccgacuuucggaugcu

SEQ ID NO: 260919 - RNA, 19 nt, Artificial Sequence
  Description of Artificial Sequence: Synthetic oligonucleotide
gcgccauuccgagccugcc

SEQ ID NO: 260920 - RNA, 19 nt, Artificial Sequence
  Description of Artificial Sequence: Synthetic oligonucleotide
acccgcccgcggcuuuggu

SEQ ID NO: 260921 - RNA, 19 nt, Artificial Sequence
  Description of Artificial Sequence: Synthetic oligonucleotide
cccguacgucggcucgagg

SEQ ID NO: 260922 - RNA, 19 nt, Artificial Sequence
  Description of Artificial Sequence: Synthetic oligonucleotide
ccgcuucaacagccaguag

SEQ ID NO: 260923 - RNA, 19 nt, Artificial Sequence
  Description of Artificial Sequence: Synthetic oligonucleotide
gaccucgggugggaguuuu

SEQ ID NO: 260924 - RNA, 19 nt, Artificial Sequence
  Description of Artificial Sequence: Synthetic oligonucleotide
ggacagaaucccgcccucu

SEQ ID NO: 260925 - RNA, 19 nt, Artificial Sequence
  Description of Artificial Sequence: Synthetic oligonucleotide
cacgcugcuccgcguuucu

SEQ ID NO: 260926 - RNA, 19 nt, Artificial Sequence
  Description of Artificial Sequence: Synthetic oligonucleotide
gcuccgcguuucucuggga

SEQ ID NO: 260927 - RNA, 19 nt, Artificial Sequence
  Description of Artificial Sequence: Synthetic oligonucleotide
ccccguacgucggcucgag

SEQ ID NO: 260928 - RNA, 19 nt, Artificial Sequence
  Description of Artificial Sequence: Synthetic oligonucleotide
cgacgagcaugccgcagga

SEQ ID NO: 260929 - RNA, 19 nt, Artificial Sequence
  Description of Artificial Sequence: Synthetic oligonucleotide
cgucggcucgagguggauc

SEQ ID NO: 260930 - RNA, 19 nt, Artificial Sequence
  Description of Artificial Sequence: Synthetic oligonucleotide
gcagaaccgugaacggcau

SEQ ID NO: 260931 - RNA, 19 nt, Artificial Sequence
  Description of Artificial Sequence: Synthetic oligonucleotide
caaacccgcccgcggcuuu

SEQ ID NO: 260932 - RNA, 19 nt, Artificial Sequence
  Description of Artificial Sequence: Synthetic oligonucleotide
gggacgcaucggcuccuuu

SEQ ID NO: 260933 - RNA, 19 nt, Artificial Sequence
  Description of Artificial Sequence: Synthetic oligonucleotide
ccgcaggcggacagcugcu

SEQ ID NO: 260934 - RNA, 19 nt, Artificial Sequence
  Description of Artificial Sequence: Synthetic oligonucleotide
gcacggucauaggccacuu

SEQ ID NO: 260935 - RNA, 19 nt, Artificial Sequence
  Description of Artificial Sequence: Synthetic oligonucleotide
cccgcggcuuuggugcuua

SEQ ID NO: 260936 - RNA, 19 nt, Artificial Sequence
  Description of Artificial Sequence: Synthetic oligonucleotide
ggggacgcaucggcuccuu

SEQ ID NO: 260937 - RNA, 19 nt, Artificial Sequence
  Description of Artificial Sequence: Synthetic oligonucleotide
cgggaucauagccgauguu

SEQ ID NO: 260938 - RNA, 19 nt, Artificial Sequence
  Description of Artificial Sequence: Synthetic oligonucleotide
cgcccgcggcuuuggugcu

SEQ ID NO: 260939 - RNA, 19 nt, Artificial Sequence
  Description of Artificial Sequence: Synthetic oligonucleotide
gcccgcggcuuuggugcuu

SEQ ID NO: 260940 - RNA, 19 nt, Artificial Sequence
  Description of Artificial Sequence: Synthetic oligonucleotide
uacaaguuaacauagcucg

SEQ ID NO: 260941 - RNA, 19 nt, Artificial Sequence
  Description of Artificial Sequence: Synthetic oligonucleotide
cuuauggacaacaugaucc

SEQ ID NO: 260942 - RNA, 19 nt, Artificial Sequence
  Description of Artificial Sequence: Synthetic oligonucleotide
aaguuauauaguuuaaaag

SEQ ID NO: 260943 - RNA, 19 nt, Artificial Sequence
  Description of Artificial Sequence: Synthetic oligonucleotide
augaccacugcauagaagc

SEQ ID NO: 260944 - RNA, 19 nt, Artificial Sequence
  Description of Artificial Sequence: Synthetic oligonucleotide
aacaccaauauauauauau

SEQ ID NO: 260945 - RNA, 19 nt, Artificial Sequence
  Description of Artificial Sequence: Synthetic oligonucleotide
uguuaauuagguuacagcu

SEQ ID NO: 260946 - RNA, 19 nt, Artificial Sequence
  Description of Artificial Sequence: Synthetic oligonucleotide
aaugggagauucuugagag

SEQ ID NO: 260947 - RNA, 19 nt, Artificial Sequence
  Description of Artificial Sequence: Synthetic oligonucleotide
uauaguauauguauuauau

SEQ ID NO: 260948 - RNA, 19 nt, Artificial Sequence
  Description of Artificial Sequence: Synthetic oligonucleotide
ugccccauaauucagagag

SEQ ID NO: 260949 - RNA, 19 nt, Artificial Sequence
  Description of Artificial Sequence: Synthetic oligonucleotide
gaaccuaaaagacaucugg

SEQ ID NO: 260950 - RNA, 19 nt, Artificial Sequence
  Description of Artificial Sequence: Synthetic oligonucleotide
uguauaucaaguuccaagc

SEQ ID NO: 260951 - RNA, 19 nt, Artificial Sequence
  Description of Artificial Sequence: Synthetic oligonucleotide
uuaaaagccacccaccaca

SEQ ID NO: 260952 - RNA, 19 nt, Artificial Sequence
  Description of Artificial Sequence: Synthetic oligonucleotide
ugcgauugaacuuuucucg

SEQ ID NO: 260953 - RNA, 19 nt, Artificial Sequence
  Description of Artificial Sequence: Synthetic oligonucleotide
gaauuugauuuacagaagc

SEQ ID NO: 260954 - RNA, 19 nt, Artificial Sequence
  Description of Artificial Sequence: Synthetic oligonucleotide
uaguauauguauuauauau

SEQ ID NO: 260955 - RNA, 19 nt, Artificial Sequence
  Description of Artificial Sequence: Synthetic oligonucleotide
uguguguguguguagaugg

SEQ ID NO: 260956 - RNA, 19 nt, Artificial Sequence
  Description of Artificial Sequence: Synthetic oligonucleotide
aaagugagaacugaggucu

SEQ ID NO: 260957 - RNA, 19 nt, Artificial Sequence
  Description of Artificial Sequence: Synthetic oligonucleotide
accgcaaucauuuccaccg

SEQ ID NO: 260958 - RNA, 19 nt, Artificial Sequence
  Description of Artificial Sequence: Synthetic oligonucleotide
aaagcuaaaaugcaaucau

SEQ ID NO: 260959 - RNA, 19 nt, Artificial Sequence
  Description of Artificial Sequence: Synthetic oligonucleotide
aacacauccguaaaccacc

SEQ ID NO: 260960 - RNA, 19 nt, Artificial Sequence
  Description of Artificial Sequence: Synthetic oligonucleotide
uauauaguuuaaaagccac

SEQ ID NO: 260961 - RNA, 19 nt, Artificial Sequence
  Description of Artificial Sequence: Synthetic oligonucleotide
uaaauaaccauggaggaga

SEQ ID NO: 260962 - RNA, 19 nt, Artificial Sequence
  Description of Artificial Sequence: Synthetic oligonucleotide
uauaucaaguuccaagcca

SEQ ID NO: 260963 - RNA, 19 nt, Artificial Sequence
  Description of Artificial Sequence: Synthetic oligonucleotide
acuaguguuaauuagguua

SEQ ID NO: 260964 - RNA, 19 nt, Artificial Sequence
  Description of Artificial Sequence: Synthetic oligonucleotide
aaaugauaacauuguagug

SEQ ID NO: 260965 - RNA, 19 nt, Artificial Sequence
  Description of Artificial Sequence: Synthetic oligonucleotide
uucuuagccaguuugggcc

SEQ ID NO: 260966 - RNA, 19 nt, Artificial Sequence
  Description of Artificial Sequence: Synthetic oligonucleotide
uauuguacgguuuaaggaa

SEQ ID NO: 260967 - RNA, 19 nt, Artificial Sequence
  Description of Artificial Sequence: Synthetic oligonucleotide
aauagcuguaggcuucuuc

SEQ ID NO: 260968 - RNA, 19 nt, Artificial Sequence
  Description of Artificial Sequence: Synthetic oligonucleotide
gagccaauuauuuuagaag

SEQ ID NO: 260969 - RNA, 19 nt, Artificial Sequence
  Description of Artificial Sequence: Synthetic oligonucleotide
ugauauucacaauagcugu

SEQ ID NO: 260970 - RNA, 19 nt, Artificial Sequence
  Description of Artificial Sequence: Synthetic oligonucleotide
uaauguaaugcuauucaga

SEQ ID NO: 260971 - RNA, 19 nt, Artificial Sequence
  Description of Artificial Sequence: Synthetic oligonucleotide
agaugauauucacaauagc

SEQ ID NO: 260972 - RNA, 19 nt, Artificial Sequence
  Description of Artificial Sequence: Synthetic oligonucleotide
uaguuuaaaagccacccac

SEQ ID NO: 260973 - RNA, 19 nt, Artificial Sequence
  Description of Artificial Sequence: Synthetic oligonucleotide
ggugguuacacacagaaug

SEQ ID NO: 260974 - RNA, 19 nt, Artificial Sequence
  Description of Artificial Sequence: Synthetic oligonucleotide
ucuaacugaacacauccgu

SEQ ID NO: 260975 - RNA, 19 nt, Artificial Sequence
  Description of Artificial Sequence: Synthetic oligonucleotide
uguacuggcauccuaagua

SEQ ID NO: 260976 - RNA, 19 nt, Artificial Sequence
  Description of Artificial Sequence: Synthetic oligonucleotide
aguacuaaugaccacugca

SEQ ID NO: 260977 - RNA, 19 nt, Artificial Sequence
  Description of Artificial Sequence: Synthetic oligonucleotide
aaaugggagauucuugaga

SEQ ID NO: 260978 - RNA, 19 nt, Artificial Sequence
  Description of Artificial Sequence: Synthetic oligonucleotide
agccaauuauuuuagaagu

SEQ ID NO: 260979 - RNA, 19 nt, Artificial Sequence
  Description of Artificial Sequence: Synthetic oligonucleotide
uuuaggaaggaugucagca

SEQ ID NO: 260980 - RNA, 19 nt, Artificial Sequence
  Description of Artificial Sequence: Synthetic oligonucleotide
ugagaugucugugagcacg

SEQ ID NO: 260981 - RNA, 19 nt, Artificial Sequence
  Description of Artificial Sequence: Synthetic oligonucleotide
ucuacagccucuaccaugc

SEQ ID NO: 260982 - RNA, 19 nt, Artificial Sequence
  Description of Artificial Sequence: Synthetic oligonucleotide
aagaaccuaaaagacaucu

SEQ ID NO: 260983 - RNA, 19 nt, Artificial Sequence
  Description of Artificial Sequence: Synthetic oligonucleotide
aaugcaaucaugacaauaa

SEQ ID NO: 260984 - RNA, 19 nt, Artificial Sequence
  Description of Artificial Sequence: Synthetic oligonucleotide
cugguguauaucaaguucc

SEQ ID NO: 260985 - RNA, 19 nt, Artificial Sequence
  Description of Artificial Sequence: Synthetic oligonucleotide
caauauauauauauuaaaa

SEQ ID NO: 260986 - RNA, 19 nt, Artificial Sequence
  Description of Artificial Sequence: Synthetic oligonucleotide
uuuacuagagagacuuuca

SEQ ID NO: 260987 - RNA, 19 nt, Artificial Sequence
  Description of Artificial Sequence: Synthetic oligonucleotide
gauuacugcaaguuccaag

SEQ ID NO: 260988 - RNA, 19 nt, Artificial Sequence
  Description of Artificial Sequence: Synthetic oligonucleotide
uggaggagauuucuuaucc

SEQ ID NO: 260989 - RNA, 19 nt, Artificial Sequence
  Description of Artificial Sequence: Synthetic oligonucleotide
aaugcuauucagaugcuug

SEQ ID NO: 260990 - RNA, 19 nt, Artificial Sequence
  Description of Artificial Sequence: Synthetic oligonucleotide
uccaugaguauuuaaaaua

SEQ ID NO: 260991 - RNA, 19 nt, Artificial Sequence
  Description of Artificial Sequence: Synthetic oligonucleotide
gaggacucaagcaugagcc

SEQ ID NO: 260992 - RNA, 19 nt, Artificial Sequence
  Description of Artificial Sequence: Synthetic oligonucleotide
uuuauugugugugugugug

SEQ ID NO: 260993 - RNA, 19 nt, Artificial Sequence
  Description of Artificial Sequence: Synthetic oligonucleotide
uaauucagagagcagugga

SEQ ID NO: 260994 - RNA, 19 nt, Artificial Sequence
  Description of Artificial Sequence: Synthetic oligonucleotide
gaacuuuuacuagagagac

SEQ ID NO: 260995 - RNA, 19 nt, Artificial Sequence
  Description of Artificial Sequence: Synthetic oligonucleotide
aauucagagagcaguggac

SEQ ID NO: 260996 - RNA, 19 nt, Artificial Sequence
  Description of Artificial Sequence: Synthetic oligonucleotide
gguauuguacgguuuaagg

SEQ ID NO: 260997 - RNA, 19 nt, Artificial Sequence
  Description of Artificial Sequence: Synthetic oligonucleotide
cuaguguuaauuagguuac

SEQ ID NO: 260998 - RNA, 19 nt, Artificial Sequence
  Description of Artificial Sequence: Synthetic oligonucleotide
agauucuugagaguucagc

SEQ ID NO: 260999 - RNA, 19 nt, Artificial Sequence
  Description of Artificial Sequence: Synthetic oligonucleotide
uaucugacgaugaugaguu

SEQ ID NO: 261000 - RNA, 19 nt, Artificial Sequence
  Description of Artificial Sequence: Synthetic oligonucleotide
cagaauuuuacacucccag

SEQ ID NO: 261001 - RNA, 19 nt, Artificial Sequence
  Description of Artificial Sequence: Synthetic oligonucleotide
aauguacuggcauccuaag

SEQ ID NO: 261002 - RNA, 19 nt, Artificial Sequence
  Description of Artificial Sequence: Synthetic oligonucleotide
uagaaguuaagcucuagau

SEQ ID NO: 261003 - RNA, 19 nt, Artificial Sequence
  Description of Artificial Sequence: Synthetic oligonucleotide
agcucuagaugauauucac

SEQ ID NO: 261004 - RNA, 19 nt, Artificial Sequence
  Description of Artificial Sequence: Synthetic oligonucleotide
uguagauggguguuguuga

SEQ ID NO: 261005 - RNA, 19 nt, Artificial Sequence
  Description of Artificial Sequence: Synthetic oligonucleotide
ucagucuggagaaagcuaa

SEQ ID NO: 261006 - RNA, 19 nt, Artificial Sequence
  Description of Artificial Sequence: Synthetic oligonucleotide
augcgauugaacuuuucuc

SEQ ID NO: 261007 - RNA, 19 nt, Artificial Sequence
  Description of Artificial Sequence: Synthetic oligonucleotide
uauucacaauagcuguagg

SEQ ID NO: 261008 - RNA, 19 nt, Artificial Sequence
  Description of Artificial Sequence: Synthetic oligonucleotide
ugauuaaccaggacacuca

SEQ ID NO: 261009 - RNA, 19 nt, Artificial Sequence
  Description of Artificial Sequence: Synthetic oligonucleotide
uauucgaugagaugucugu

SEQ ID NO: 261010 - RNA, 19 nt, Artificial Sequence
  Description of Artificial Sequence: Synthetic oligonucleotide
cauaauucagagagcagug

SEQ ID NO: 261011 - RNA, 19 nt, Artificial Sequence
  Description of Artificial Sequence: Synthetic oligonucleotide
aauaauucuacuaguguua

SEQ ID NO: 261012 - RNA, 19 nt, Artificial Sequence
  Description of Artificial Sequence: Synthetic oligonucleotide
uucagcaccgcaaucauuu

SEQ ID NO: 261013 - RNA, 19 nt, Artificial Sequence
  Description of Artificial Sequence: Synthetic oligonucleotide
gaauuuuacacucccagcu

SEQ ID NO: 261014 - RNA, 19 nt, Artificial Sequence
  Description of Artificial Sequence: Synthetic oligonucleotide
uguaucaaggggauuuuaa

SEQ ID NO: 261015 - RNA, 19 nt, Artificial Sequence
  Description of Artificial Sequence: Synthetic oligonucleotide
aagacuuuauugugugugu

SEQ ID NO: 261016 - RNA, 19 nt, Artificial Sequence
  Description of Artificial Sequence: Synthetic oligonucleotide
aaguuaacauagcucggcu

SEQ ID NO: 261017 - RNA, 19 nt, Artificial Sequence
  Description of Artificial Sequence: Synthetic oligonucleotide
auaaccauggaggagauuu

SEQ ID NO: 261018 - RNA, 19 nt, Artificial Sequence
  Description of Artificial Sequence: Synthetic oligonucleotide
guuaacauagcucggcuuc

SEQ ID NO: 261019 - RNA, 19 nt, Artificial Sequence
  Description of Artificial Sequence: Synthetic oligonucleotide
ugggugguuacacacagaa

SEQ ID NO: 261020 - RNA, 19 nt, Artificial Sequence
  Description of Artificial Sequence: Synthetic oligonucleotide
guauuguacgguuuaagga

SEQ ID NO: 261021 - RNA, 19 nt, Artificial Sequence
  Description of Artificial Sequence: Synthetic oligonucleotide
uaagcucuagaugauauuc

SEQ ID NO: 261022 - RNA, 19 nt, Artificial Sequence
  Description of Artificial Sequence: Synthetic oligonucleotide
guguuaauuagguuacagc

SEQ ID NO: 261023 - RNA, 19 nt, Artificial Sequence
  Description of Artificial Sequence: Synthetic oligonucleotide
aguuccgcgguuuucuggg

SEQ ID NO: 261024 - RNA, 19 nt, Artificial Sequence
  Description of Artificial Sequence: Synthetic oligonucleotide
ucucaccagaauuuuacac

SEQ ID NO: 261025 - RNA, 19 nt, Artificial Sequence
  Description of Artificial Sequence: Synthetic oligonucleotide
gaguuuaucgauucucuuc

SEQ ID NO: 261026 - RNA, 19 nt, Artificial Sequence
  Description of Artificial Sequence: Synthetic oligonucleotide
cucuagaugauauucacaa

SEQ ID NO: 261027 - RNA, 19 nt, Artificial Sequence
  Description of Artificial Sequence: Synthetic oligonucleotide
uuagguuacagcuuucauu

SEQ ID NO: 261028 - RNA, 19 nt, Artificial Sequence
  Description of Artificial Sequence: Synthetic oligonucleotide
ugcuguacaaguuaacaua

SEQ ID NO: 261029 - RNA, 19 nt, Artificial Sequence
  Description of Artificial Sequence: Synthetic oligonucleotide
accuaaaagacaucuggca

SEQ ID NO: 261030 - RNA, 19 nt, Artificial Sequence
  Description of Artificial Sequence: Synthetic oligonucleotide
aaaucugaaugaaugugcu

SEQ ID NO: 261031 - RNA, 19 nt, Artificial Sequence
  Description of Artificial Sequence: Synthetic oligonucleotide
gauuaaccaggacacucag

SEQ ID NO: 261032 - RNA, 19 nt, Artificial Sequence
  Description of Artificial Sequence: Synthetic oligonucleotide
guagucagaacuuuuacua

SEQ ID NO: 261033 - RNA, 19 nt, Artificial Sequence
  Description of Artificial Sequence: Synthetic oligonucleotide
cuaucuagauagaggcugg

SEQ ID NO: 261034 - RNA, 19 nt, Artificial Sequence
  Description of Artificial Sequence: Synthetic oligonucleotide
uaacugaacacauccguaa

SEQ ID NO: 261035 - RNA, 19 nt, Artificial Sequence
  Description of Artificial Sequence: Synthetic oligonucleotide
guauaucaaguuccaagcc

SEQ ID NO: 261036 - RNA, 19 nt, Artificial Sequence
  Description of Artificial Sequence: Synthetic oligonucleotide
agcccgaauguccacggcc

SEQ ID NO: 261037 - RNA, 19 nt, Artificial Sequence
  Description of Artificial Sequence: Synthetic oligonucleotide
ugaacacauccguaaacca

SEQ ID NO: 261038 - RNA, 19 nt, Artificial Sequence
  Description of Artificial Sequence: Synthetic oligonucleotide
ucggcuuagacaucugggc

SEQ ID NO: 261039 - RNA, 19 nt, Artificial Sequence
  Description of Artificial Sequence: Synthetic oligonucleotide
aguucuacccguugcaaga

SEQ ID NO: 261040 - RNA, 19 nt, Artificial Sequence
  Description of Artificial Sequence: Synthetic oligonucleotide
uauugugugugugugugug

SEQ ID NO: 261041 - RNA, 19 nt, Artificial Sequence
  Description of Artificial Sequence: Synthetic oligonucleotide
augaaugugcucugaagga

SEQ ID NO: 261042 - RNA, 19 nt, Artificial Sequence
  Description of Artificial Sequence: Synthetic oligonucleotide
uccguaaaccacccgggag

SEQ ID NO: 261043 - RNA, 19 nt, Artificial Sequence
  Description of Artificial Sequence: Synthetic oligonucleotide
ucuagagaccugaugguau

SEQ ID NO: 261044 - RNA, 19 nt, Artificial Sequence
  Description of Artificial Sequence: Synthetic oligonucleotide
uuacuagagagacuuucaa

SEQ ID NO: 261045 - RNA, 19 nt, Artificial Sequence
  Description of Artificial Sequence: Synthetic oligonucleotide
cuuguugcaauaacaauaa

SEQ ID NO: 261046 - RNA, 19 nt, Artificial Sequence
  Description of Artificial Sequence: Synthetic oligonucleotide
uucgugaauggccuuggca

SEQ ID NO: 261047 - RNA, 19 nt, Artificial Sequence
  Description of Artificial Sequence: Synthetic oligonucleotide
uuaucgauucucuucucaa

SEQ ID NO: 261048 - RNA, 19 nt, Artificial Sequence
  Description of Artificial Sequence: Synthetic oligonucleotide
gacacucagggguagucag

SEQ ID NO: 261049 - RNA, 19 nt, Artificial Sequence
  Description of Artificial Sequence: Synthetic oligonucleotide
uugauuaaccaggacacuc

SEQ ID NO: 261050 - RNA, 19 nt, Artificial Sequence
  Description of Artificial Sequence: Synthetic oligonucleotide
uuugcguggccccggagcc

SEQ ID NO: 261051 - RNA, 19 nt, Artificial Sequence
  Description of Artificial Sequence: Synthetic oligonucleotide
cucggcuuagacaucuggg

SEQ ID NO: 261052 - RNA, 19 nt, Artificial Sequence
  Description of Artificial Sequence: Synthetic oligonucleotide
gcaaucaugacaauaaaca

SEQ ID NO: 261053 - RNA, 19 nt, Artificial Sequence
  Description of Artificial Sequence: Synthetic oligonucleotide
uuagcuggucugaagaauu

SEQ ID NO: 261054 - RNA, 19 nt, Artificial Sequence
  Description of Artificial Sequence: Synthetic oligonucleotide
ucuacccguugcaagaggu

SEQ ID NO: 261055 - RNA, 19 nt, Artificial Sequence
  Description of Artificial Sequence: Synthetic oligonucleotide
ugaggucuaacugaacaca

SEQ ID NO: 261056 - RNA, 19 nt, Artificial Sequence
  Description of Artificial Sequence: Synthetic oligonucleotide
ucuugagaguucagcaugu

SEQ ID NO: 261057 - RNA, 19 nt, Artificial Sequence
  Description of Artificial Sequence: Synthetic oligonucleotide
caaguuaacauagcucggc

SEQ ID NO: 261058 - RNA, 19 nt, Artificial Sequence
  Description of Artificial Sequence: Synthetic oligonucleotide
uuggacaucccaucaguga

SEQ ID NO: 261059 - RNA, 19 nt, Artificial Sequence
  Description of Artificial Sequence: Synthetic oligonucleotide
uuuuaggaaggaugucagc

SEQ ID NO: 261060 - RNA, 19 nt, Artificial Sequence
  Description of Artificial Sequence: Synthetic oligonucleotide
uguggcccaaguacuaaug

SEQ ID NO: 261061 - RNA, 19 nt, Artificial Sequence
  Description of Artificial Sequence: Synthetic oligonucleotide
acuuuauugugugugugug

SEQ ID NO: 261062 - RNA, 19 nt, Artificial Sequence
  Description of Artificial Sequence: Synthetic oligonucleotide
caaguacuaaugaccacug

SEQ ID NO: 261063 - RNA, 19 nt, Artificial Sequence
  Description of Artificial Sequence: Synthetic oligonucleotide
aaggguuuuagcagcuauc

SEQ ID NO: 261064 - RNA, 19 nt, Artificial Sequence
  Description of Artificial Sequence: Synthetic oligonucleotide
aagcuaaaaugcaaucaug

SEQ ID NO: 261065 - RNA, 19 nt, Artificial Sequence
  Description of Artificial Sequence: Synthetic oligonucleotide
uuuagaaguuaagcucuag

SEQ ID NO: 261066 - RNA, 19 nt, Artificial Sequence
  Description of Artificial Sequence: Synthetic oligonucleotide
auaguauauguauuauaua

SEQ ID NO: 261067 - RNA, 19 nt, Artificial Sequence
  Description of Artificial Sequence: Synthetic oligonucleotide
uacacacagaaugugcgug

SEQ ID NO: 261068 - RNA, 19 nt, Artificial Sequence
  Description of Artificial Sequence: Synthetic oligonucleotide
gguaucugccuauauacac

SEQ ID NO: 261069 - RNA, 19 nt, Artificial Sequence
  Description of Artificial Sequence: Synthetic oligonucleotide
cauccguaaaccacccggg

SEQ ID NO: 261070 - RNA, 19 nt, Artificial Sequence
  Description of Artificial Sequence: Synthetic oligonucleotide
cuugccccauaauucagag

SEQ ID NO: 261071 - RNA, 19 nt, Artificial Sequence
  Description of Artificial Sequence: Synthetic oligonucleotide
accaauauauauauauuaa

SEQ ID NO: 261072 - RNA, 19 nt, Artificial Sequence
  Description of Artificial Sequence: Synthetic oligonucleotide
acacacuucuuccaugagu

SEQ ID NO: 261073 - RNA, 19 nt, Artificial Sequence
  Description of Artificial Sequence: Synthetic oligonucleotide
cugccuauauacaccacac

SEQ ID NO: 261074 - RNA, 19 nt, Artificial Sequence
  Description of Artificial Sequence: Synthetic oligonucleotide
caccaauauauauauauua

SEQ ID NO: 261075 - RNA, 19 nt, Artificial Sequence
  Description of Artificial Sequence: Synthetic oligonucleotide
accugaugguauuguacgg

SEQ ID NO: 261076 - RNA, 19 nt, Artificial Sequence
  Description of Artificial Sequence: Synthetic oligonucleotide
acaacaugaucccuguuuu

SEQ ID NO: 261077 - RNA, 19 nt, Artificial Sequence
  Description of Artificial Sequence: Synthetic oligonucleotide
ugguguauaucaaguucca

SEQ ID NO: 261078 - RNA, 19 nt, Artificial Sequence
  Description of Artificial Sequence: Synthetic oligonucleotide
ugguaucugccuauauaca

SEQ ID NO: 261079 - RNA, 19 nt, Artificial Sequence
  Description of Artificial Sequence: Synthetic oligonucleotide
uacacucccagcugggugu

SEQ ID NO: 261080 - RNA, 19 nt, Artificial Sequence
  Description of Artificial Sequence: Synthetic oligonucleotide
caugacaauaaacaaucaa

SEQ ID NO: 261081 - RNA, 19 nt, Artificial Sequence
  Description of Artificial Sequence: Synthetic oligonucleotide
gaggagauuucuuauccaa

SEQ ID NO: 261082 - RNA, 19 nt, Artificial Sequence
  Description of Artificial Sequence: Synthetic oligonucleotide
cauguguauacucuagaga

SEQ ID NO: 261083 - RNA, 19 nt, Artificial Sequence
  Description of Artificial Sequence: Synthetic oligonucleotide
augcuguacaaguuaacau

SEQ ID NO: 261084 - RNA, 19 nt, Artificial Sequence
  Description of Artificial Sequence: Synthetic oligonucleotide
cuauucgaugagaugucug

SEQ ID NO: 261085 - RNA, 19 nt, Artificial Sequence
  Description of Artificial Sequence: Synthetic oligonucleotide
uucuacccguugcaagagg

SEQ ID NO: 261086 - RNA, 19 nt, Artificial Sequence
  Description of Artificial Sequence: Synthetic oligonucleotide
auguaaugcuauucagaug

SEQ ID NO: 261087 - RNA, 19 nt, Artificial Sequence
  Description of Artificial Sequence: Synthetic oligonucleotide
gaugguauuguacgguuua

SEQ ID NO: 261088 - RNA, 19 nt, Artificial Sequence
  Description of Artificial Sequence: Synthetic oligonucleotide
gacaucccaucagugaugc

SEQ ID NO: 261089 - RNA, 19 nt, Artificial Sequence
  Description of Artificial Sequence: Synthetic oligonucleotide
auacaccuguaaucccagc

SEQ ID NO: 261090 - RNA, 19 nt, Artificial Sequence
  Description of Artificial Sequence: Synthetic oligonucleotide
ugaccacugcauagaagcc

SEQ ID NO: 261091 - RNA, 19 nt, Artificial Sequence
  Description of Artificial Sequence: Synthetic oligonucleotide
cuuugcguggccccggagc

SEQ ID NO: 261092 - RNA, 19 nt, Artificial Sequence
  Description of Artificial Sequence: Synthetic oligonucleotide
gcuaucuagauagaggcug

SEQ ID NO: 261093 - RNA, 19 nt, Artificial Sequence
  Description of Artificial Sequence: Synthetic oligonucleotide
gcaugcaauacaaucaccc

SEQ ID NO: 261094 - RNA, 19 nt, Artificial Sequence
  Description of Artificial Sequence: Synthetic oligonucleotide
aaugugcgugcccucggcu

SEQ ID NO: 261095 - RNA, 19 nt, Artificial Sequence
  Description of Artificial Sequence: Synthetic oligonucleotide
gaaguugccuuuccggcuc

SEQ ID NO: 261096 - RNA, 19 nt, Artificial Sequence
  Description of Artificial Sequence: Synthetic oligonucleotide
cuuggacaucccaucagug

SEQ ID NO: 261097 - RNA, 19 nt, Artificial Sequence
  Description of Artificial Sequence: Synthetic oligonucleotide
augcuauucagaugcuugu

SEQ ID NO: 261098 - RNA, 19 nt, Artificial Sequence
  Description of Artificial Sequence: Synthetic oligonucleotide
agcauguguauacucuaga

SEQ ID NO: 261099 - RNA, 19 nt, Artificial Sequence
  Description of Artificial Sequence: Synthetic oligonucleotide
cuuagccgaagaaggcagg

SEQ ID NO: 261100 - RNA, 19 nt, Artificial Sequence
  Description of Artificial Sequence: Synthetic oligonucleotide
guacaaguuaacauagcuc

SEQ ID NO: 261101 - RNA, 19 nt, Artificial Sequence
  Description of Artificial Sequence: Synthetic oligonucleotide
uuuucucggacgugggccu

SEQ ID NO: 261102 - RNA, 19 nt, Artificial Sequence
  Description of Artificial Sequence: Synthetic oligonucleotide
gcauguguauacucuagag

SEQ ID NO: 261103 - RNA, 19 nt, Artificial Sequence
  Description of Artificial Sequence: Synthetic oligonucleotide
aggguuuuagcagcuaucu

SEQ ID NO: 261104 - RNA, 19 nt, Artificial Sequence
  Description of Artificial Sequence: Synthetic oligonucleotide
uggcauccuaaguaacugc

SEQ ID NO: 261105 - RNA, 19 nt, Artificial Sequence
  Description of Artificial Sequence: Synthetic oligonucleotide
uugugugugugugugugug

SEQ ID NO: 261106 - RNA, 19 nt, Artificial Sequence
  Description of Artificial Sequence: Synthetic oligonucleotide
gucuacagccucuaccaug

SEQ ID NO: 261107 - RNA, 19 nt, Artificial Sequence
  Description of Artificial Sequence: Synthetic oligonucleotide
gggauuuuaaacacaaaca

SEQ ID NO: 261108 - RNA, 19 nt, Artificial Sequence
  Description of Artificial Sequence: Synthetic oligonucleotide
gcuuugauaguacuccagc

SEQ ID NO: 261109 - RNA, 19 nt, Artificial Sequence
  Description of Artificial Sequence: Synthetic oligonucleotide
gaaugugcucugaaggaac

SEQ ID NO: 261110 - RNA, 19 nt, Artificial Sequence
  Description of Artificial Sequence: Synthetic oligonucleotide
cuguacaaguuaacauagc

SEQ ID NO: 261111 - RNA, 19 nt, Artificial Sequence
  Description of Artificial Sequence: Synthetic oligonucleotide
agcagcuaucuagauagag

SEQ ID NO: 261112 - RNA, 19 nt, Artificial Sequence
  Description of Artificial Sequence: Synthetic oligonucleotide
ugcuuucccuugaaccucc

SEQ ID NO: 261113 - RNA, 19 nt, Artificial Sequence
  Description of Artificial Sequence: Synthetic oligonucleotide
cuuccuauucgaugagaug

SEQ ID NO: 261114 - RNA, 19 nt, Artificial Sequence
  Description of Artificial Sequence: Synthetic oligonucleotide
aagucuugauuaaccagga

SEQ ID NO: 261115 - RNA, 19 nt, Artificial Sequence
  Description of Artificial Sequence: Synthetic oligonucleotide
uguguguguguguguguag

SEQ ID NO: 261116 - RNA, 19 nt, Artificial Sequence
  Description of Artificial Sequence: Synthetic oligonucleotide
aucuggcaaagugagaacu

SEQ ID NO: 261117 - RNA, 19 nt, Artificial Sequence
  Description of Artificial Sequence: Synthetic oligonucleotide
acaaguuaacauagcucgg

SEQ ID NO: 261118 - RNA, 19 nt, Artificial Sequence
  Description of Artificial Sequence: Synthetic oligonucleotide
auaauucuacuaguguuaa

SEQ ID NO: 261119 - RNA, 19 nt, Artificial Sequence
  Description of Artificial Sequence: Synthetic oligonucleotide
uaucgauucucuucucaau

SEQ ID NO: 261120 - RNA, 19 nt, Artificial Sequence
  Description of Artificial Sequence: Synthetic oligonucleotide
ugcgcccaaaucugaauga

SEQ ID NO: 261121 - RNA, 19 nt, Artificial Sequence
  Description of Artificial Sequence: Synthetic oligonucleotide
gcagcuaucuagauagagg

SEQ ID NO: 261122 - RNA, 19 nt, Artificial Sequence
  Description of Artificial Sequence: Synthetic oligonucleotide
uguauacucuagagaccug

SEQ ID NO: 261123 - RNA, 19 nt, Artificial Sequence
  Description of Artificial Sequence: Synthetic oligonucleotide
caucccggcucuuucuucc

SEQ ID NO: 261124 - RNA, 19 nt, Artificial Sequence
  Description of Artificial Sequence: Synthetic oligonucleotide
guagauggguguuguugag

SEQ ID NO: 261125 - RNA, 19 nt, Artificial Sequence
  Description of Artificial Sequence: Synthetic oligonucleotide
gcgauugaacuuuucucgg

SEQ ID NO: 261126 - RNA, 19 nt, Artificial Sequence
  Description of Artificial Sequence: Synthetic oligonucleotide
acgaugaugaguucuccuu

SEQ ID NO: 261127 - RNA, 19 nt, Artificial Sequence
  Description of Artificial Sequence: Synthetic oligonucleotide
ugaguuuaucgauucucuu

SEQ ID NO: 261128 - RNA, 19 nt, Artificial Sequence
  Description of Artificial Sequence: Synthetic oligonucleotide
uuaacauagcucggcuucu

SEQ ID NO: 261129 - RNA, 19 nt, Artificial Sequence
  Description of Artificial Sequence: Synthetic oligonucleotide
auaacauuguagugcccaa

SEQ ID NO: 261130 - RNA, 19 nt, Artificial Sequence
  Description of Artificial Sequence: Synthetic oligonucleotide
uuaagcucuagaugauauu

SEQ ID NO: 261131 - RNA, 19 nt, Artificial Sequence
  Description of Artificial Sequence: Synthetic oligonucleotide
uuauugugugugugugugu

SEQ ID NO: 261132 - RNA, 19 nt, Artificial Sequence
  Description of Artificial Sequence: Synthetic oligonucleotide
cugcauagaagcccagaug

SEQ ID NO: 261133 - RNA, 19 nt, Artificial Sequence
  Description of Artificial Sequence: Synthetic oligonucleotide
gguuacacacagaaugugc

SEQ ID NO: 261134 - RNA, 19 nt, Artificial Sequence
  Description of Artificial Sequence: Synthetic oligonucleotide
aguuaacauagcucggcuu

SEQ ID NO: 261135 - RNA, 19 nt, Artificial Sequence
  Description of Artificial Sequence: Synthetic oligonucleotide
augugcucugaaggaaccc

SEQ ID NO: 261136 - RNA, 19 nt, Artificial Sequence
  Description of Artificial Sequence: Synthetic oligonucleotide
caauguacuggcauccuaa

SEQ ID NO: 261137 - RNA, 19 nt, Artificial Sequence
  Description of Artificial Sequence: Synthetic oligonucleotide
guauacucuagagaccuga

SEQ ID NO: 261138 - RNA, 19 nt, Artificial Sequence
  Description of Artificial Sequence: Synthetic oligonucleotide
caccccaaggguuuuagca

SEQ ID NO: 261139 - RNA, 19 nt, Artificial Sequence
  Description of Artificial Sequence: Synthetic oligonucleotide
gugcgcccaaaucugaaug

SEQ ID NO: 261140 - RNA, 19 nt, Artificial Sequence
  Description of Artificial Sequence: Synthetic oligonucleotide
cacggcugaagccggaggc

SEQ ID NO: 261141 - RNA, 19 nt, Artificial Sequence
  Description of Artificial Sequence: Synthetic oligonucleotide
ucagggguagucagaacuu

SEQ ID NO: 261142 - RNA, 19 nt, Artificial Sequence
  Description of Artificial Sequence: Synthetic oligonucleotide
cacccgggagauuaaaguc

SEQ ID NO: 261143 - RNA, 19 nt, Artificial Sequence
  Description of Artificial Sequence: Synthetic oligonucleotide
acauacuacagggcacagg

SEQ ID NO: 261144 - RNA, 19 nt, Artificial Sequence
  Description of Artificial Sequence: Synthetic oligonucleotide
uuguacgguuuaaggaaaa

SEQ ID NO: 261145 - RNA, 19 nt, Artificial Sequence
  Description of Artificial Sequence: Synthetic oligonucleotide
auuuccaccgccacgucca

SEQ ID NO: 261146 - RNA, 19 nt, Artificial Sequence
  Description of Artificial Sequence: Synthetic oligonucleotide
agaaccuaaaagacaucug

SEQ ID NO: 261147 - RNA, 19 nt, Artificial Sequence
  Description of Artificial Sequence: Synthetic oligonucleotide
gaaugugcgugcccucggc

SEQ ID NO: 261148 - RNA, 19 nt, Artificial Sequence
  Description of Artificial Sequence: Synthetic oligonucleotide
auguacuggcauccuaagu

SEQ ID NO: 261149 - RNA, 19 nt, Artificial Sequence
  Description of Artificial Sequence: Synthetic oligonucleotide
cuaaugaccacugcauaga

SEQ ID NO: 261150 - RNA, 19 nt, Artificial Sequence
  Description of Artificial Sequence: Synthetic oligonucleotide
uaccaugcgauugaacuuu

SEQ ID NO: 261151 - RNA, 19 nt, Artificial Sequence
  Description of Artificial Sequence: Synthetic oligonucleotide
ugaugguauuguacgguuu

SEQ ID NO: 261152 - RNA, 19 nt, Artificial Sequence
  Description of Artificial Sequence: Synthetic oligonucleotide
agacucagccuguucguga

SEQ ID NO: 261153 - RNA, 19 nt, Artificial Sequence
  Description of Artificial Sequence: Synthetic oligonucleotide
ggagcaugcaauacaauca

SEQ ID NO: 261154 - RNA, 19 nt, Artificial Sequence
  Description of Artificial Sequence: Synthetic oligonucleotide
uuccgcgguuuucugggcc

SEQ ID NO: 261155 - RNA, 19 nt, Artificial Sequence
  Description of Artificial Sequence: Synthetic oligonucleotide
auucgaugagaugucugug

SEQ ID NO: 261156 - RNA, 19 nt, Artificial Sequence
  Description of Artificial Sequence: Synthetic oligonucleotide
acgaaggcugcccggaccu

SEQ ID NO: 261157 - RNA, 19 nt, Artificial Sequence
  Description of Artificial Sequence: Synthetic oligonucleotide
auacaaucacccaguaaca

SEQ ID NO: 261158 - RNA, 19 nt, Artificial Sequence
  Description of Artificial Sequence: Synthetic oligonucleotide
cuacuaguguuaauuaggu

SEQ ID NO: 261159 - RNA, 19 nt, Artificial Sequence
  Description of Artificial Sequence: Synthetic oligonucleotide
cagcaccgcaaucauuucc

SEQ ID NO: 261160 - RNA, 19 nt, Artificial Sequence
  Description of Artificial Sequence: Synthetic oligonucleotide
augugcccuccucuggcac

SEQ ID NO: 261161 - RNA, 19 nt, Artificial Sequence
  Description of Artificial Sequence: Synthetic oligonucleotide
auugugugugugugugugu

SEQ ID NO: 261162 - RNA, 19 nt, Artificial Sequence
  Description of Artificial Sequence: Synthetic oligonucleotide
ccaauauauauauauuaaa

SEQ ID NO: 261163 - RNA, 19 nt, Artificial Sequence
  Description of Artificial Sequence: Synthetic oligonucleotide
caccgcaaucauuuccacc

SEQ ID NO: 261164 - RNA, 19 nt, Artificial Sequence
  Description of Artificial Sequence: Synthetic oligonucleotide
uaucuagauagaggcuggc

SEQ ID NO: 261165 - RNA, 19 nt, Artificial Sequence
  Description of Artificial Sequence: Synthetic oligonucleotide
agucaaaaguaagacuuua

SEQ ID NO: 261166 - RNA, 19 nt, Artificial Sequence
  Description of Artificial Sequence: Synthetic oligonucleotide
ggacgugggccucaaaagc

SEQ ID NO: 261167 - RNA, 19 nt, Artificial Sequence
  Description of Artificial Sequence: Synthetic oligonucleotide
aggugggugcgcccaaauc

SEQ ID NO: 261168 - RNA, 19 nt, Artificial Sequence
  Description of Artificial Sequence: Synthetic oligonucleotide
uguguguguguguguagau

SEQ ID NO: 261169 - RNA, 19 nt, Artificial Sequence
  Description of Artificial Sequence: Synthetic oligonucleotide
aggaggauuacugcaaguu

SEQ ID NO: 261170 - RNA, 19 nt, Artificial Sequence
  Description of Artificial Sequence: Synthetic oligonucleotide
ugguugaaugugacaacuu

SEQ ID NO: 261171 - RNA, 19 nt, Artificial Sequence
  Description of Artificial Sequence: Synthetic oligonucleotide
uacuaguguuaauuagguu

SEQ ID NO: 261172 - RNA, 19 nt, Artificial Sequence
  Description of Artificial Sequence: Synthetic oligonucleotide
agcaccgcaaucauuucca

SEQ ID NO: 261173 - RNA, 19 nt, Artificial Sequence
  Description of Artificial Sequence: Synthetic oligonucleotide
ugugugugugugugugugu

SEQ ID NO: 261174 - RNA, 19 nt, Artificial Sequence
  Description of Artificial Sequence: Synthetic oligonucleotide
caucuggcaaagugagaac

SEQ ID NO: 261175 - RNA, 19 nt, Artificial Sequence
  Description of Artificial Sequence: Synthetic oligonucleotide
uucggguccuuggagugcc

SEQ ID NO: 261176 - RNA, 19 nt, Artificial Sequence
  Description of Artificial Sequence: Synthetic oligonucleotide
ggaggauuacugcaaguuc

SEQ ID NO: 261177 - RNA, 19 nt, Artificial Sequence
  Description of Artificial Sequence: Synthetic oligonucleotide
agacugagccaauuauuuu

SEQ ID NO: 261178 - RNA, 19 nt, Artificial Sequence
  Description of Artificial Sequence: Synthetic oligonucleotide
ccaugaguauuuaaaauaa

SEQ ID NO: 261179 - RNA, 19 nt, Artificial Sequence
  Description of Artificial Sequence: Synthetic oligonucleotide
uuagacaucugggcuuccu

SEQ ID NO: 261180 - RNA, 19 nt, Artificial Sequence
  Description of Artificial Sequence: Synthetic oligonucleotide
ggugaguuuaucgauucuc

SEQ ID NO: 261181 - RNA, 19 nt, Artificial Sequence
  Description of Artificial Sequence: Synthetic oligonucleotide
uuguugcaauaacaauaau

SEQ ID NO: 261182 - RNA, 19 nt, Artificial Sequence
  Description of Artificial Sequence: Synthetic oligonucleotide
auuguacgguuuaaggaaa

SEQ ID NO: 261183 - RNA, 19 nt, Artificial Sequence
  Description of Artificial Sequence: Synthetic oligonucleotide
agcacgugcuugcuagugu

SEQ ID NO: 261184 - RNA, 19 nt, Artificial Sequence
  Description of Artificial Sequence: Synthetic oligonucleotide
uucagggcgcguucucgcc

SEQ ID NO: 261185 - RNA, 19 nt, Artificial Sequence
  Description of Artificial Sequence: Synthetic oligonucleotide
agucagcccgaauguccac

SEQ ID NO: 261186 - RNA, 19 nt, Artificial Sequence
  Description of Artificial Sequence: Synthetic oligonucleotide
augggagaugcuguacaag

SEQ ID NO: 261187 - RNA, 19 nt, Artificial Sequence
  Description of Artificial Sequence: Synthetic oligonucleotide
caugcgauugaacuuuucu

SEQ ID NO: 261188 - RNA, 19 nt, Artificial Sequence
  Description of Artificial Sequence: Synthetic oligonucleotide
gugugugugugugugugug

SEQ ID NO: 261189 - RNA, 19 nt, Artificial Sequence
  Description of Artificial Sequence: Synthetic oligonucleotide
acaccaauauauauauauu

SEQ ID NO: 261190 - RNA, 19 nt, Artificial Sequence
  Description of Artificial Sequence: Synthetic oligonucleotide
auccguaaaccacccggga

SEQ ID NO: 261191 - RNA, 19 nt, Artificial Sequence
  Description of Artificial Sequence: Synthetic oligonucleotide
guucuacccguugcaagag

SEQ ID NO: 261192 - RNA, 19 nt, Artificial Sequence
  Description of Artificial Sequence: Synthetic oligonucleotide
ucuguucagggcgcguucu

SEQ ID NO: 261193 - RNA, 19 nt, Artificial Sequence
  Description of Artificial Sequence: Synthetic oligonucleotide
uccgcgguuuucugggcca

SEQ ID NO: 261194 - RNA, 19 nt, Artificial Sequence
  Description of Artificial Sequence: Synthetic oligonucleotide
guguguguguguguagaug

SEQ ID NO: 261195 - RNA, 19 nt, Artificial Sequence
  Description of Artificial Sequence: Synthetic oligonucleotide
acccgggagauuaaagucu

SEQ ID NO: 261196 - RNA, 19 nt, Artificial Sequence
  Description of Artificial Sequence: Synthetic oligonucleotide
guggcccaaguacuaauga

SEQ ID NO: 261197 - RNA, 19 nt, Artificial Sequence
  Description of Artificial Sequence: Synthetic oligonucleotide
ugucuacagccucuaccau

SEQ ID NO: 261198 - RNA, 19 nt, Artificial Sequence
  Description of Artificial Sequence: Synthetic oligonucleotide
aucugacgaugaugaguuc

SEQ ID NO: 261199 - RNA, 19 nt, Artificial Sequence
  Description of Artificial Sequence: Synthetic oligonucleotide
guguguguguguagauggg

SEQ ID NO: 261200 - RNA, 19 nt, Artificial Sequence
  Description of Artificial Sequence: Synthetic oligonucleotide
gaaggaacccagaucugaa

SEQ ID NO: 261201 - RNA, 19 nt, Artificial Sequence
  Description of Artificial Sequence: Synthetic oligonucleotide
ugcacgaaggcugcccgga

SEQ ID NO: 261202 - RNA, 19 nt, Artificial Sequence
  Description of Artificial Sequence: Synthetic oligonucleotide
uugcuuucccuugaaccuc

SEQ ID NO: 261203 - RNA, 19 nt, Artificial Sequence
  Description of Artificial Sequence: Synthetic oligonucleotide
ugugcgugcccucggcuua

SEQ ID NO: 261204 - RNA, 19 nt, Artificial Sequence
  Description of Artificial Sequence: Synthetic oligonucleotide
gagacucagccuguucgug

SEQ ID NO: 261205 - RNA, 19 nt, Artificial Sequence
  Description of Artificial Sequence: Synthetic oligonucleotide
uugccccauaauucagaga

SEQ ID NO: 261206 - RNA, 19 nt, Artificial Sequence
  Description of Artificial Sequence: Synthetic oligonucleotide
guuaagcucuagaugauau

SEQ ID NO: 261207 - RNA, 19 nt, Artificial Sequence
  Description of Artificial Sequence: Synthetic oligonucleotide
gacucagccuguucgugaa

SEQ ID NO: 261208 - RNA, 19 nt, Artificial Sequence
  Description of Artificial Sequence: Synthetic oligonucleotide
ugggugcgcccaaaucuga

SEQ ID NO: 261209 - RNA, 19 nt, Artificial Sequence
  Description of Artificial Sequence: Synthetic oligonucleotide
aguuaagcucuagaugaua

SEQ ID NO: 261210 - RNA, 19 nt, Artificial Sequence
  Description of Artificial Sequence: Synthetic oligonucleotide
cacauccguaaaccacccg

SEQ ID NO: 261211 - RNA, 19 nt, Artificial Sequence
  Description of Artificial Sequence: Synthetic oligonucleotide
cauuccuugccccauaauu

SEQ ID NO: 261212 - RNA, 19 nt, Artificial Sequence
  Description of Artificial Sequence: Synthetic oligonucleotide
cugaaucaaagaaccuaaa

SEQ ID NO: 261213 - RNA, 19 nt, Artificial Sequence
  Description of Artificial Sequence: Synthetic oligonucleotide
gugcccucggcuuagacau

SEQ ID NO: 261214 - RNA, 19 nt, Artificial Sequence
  Description of Artificial Sequence: Synthetic oligonucleotide
caagcacuuggacauccca

SEQ ID NO: 261215 - RNA, 19 nt, Artificial Sequence
  Description of Artificial Sequence: Synthetic oligonucleotide
gagcacgugcuugcuagug

SEQ ID NO: 261216 - RNA, 19 nt, Artificial Sequence
  Description of Artificial Sequence: Synthetic oligonucleotide
gaacccagaucugaaucaa

SEQ ID NO: 261217 - RNA, 19 nt, Artificial Sequence
  Description of Artificial Sequence: Synthetic oligonucleotide
gugcuuagccgaagaaggc

SEQ ID NO: 261218 - RNA, 19 nt, Artificial Sequence
  Description of Artificial Sequence: Synthetic oligonucleotide
guacuaaugaccacugcau

SEQ ID NO: 261219 - RNA, 19 nt, Artificial Sequence
  Description of Artificial Sequence: Synthetic oligonucleotide
guuaauuagguuacagcuu

SEQ ID NO: 261220 - RNA, 19 nt, Artificial Sequence
  Description of Artificial Sequence: Synthetic oligonucleotide
ugcaucccggcucuuucuu

SEQ ID NO: 261221 - RNA, 19 nt, Artificial Sequence
  Description of Artificial Sequence: Synthetic oligonucleotide
augucagcauguguauacu

SEQ ID NO: 261222 - RNA, 19 nt, Artificial Sequence
  Description of Artificial Sequence: Synthetic oligonucleotide
aaacaccaauauauauaua

SEQ ID NO: 261223 - RNA, 19 nt, Artificial Sequence
  Description of Artificial Sequence: Synthetic oligonucleotide
ugagggugcggcgugcuua

SEQ ID NO: 261224 - RNA, 19 nt, Artificial Sequence
  Description of Artificial Sequence: Synthetic oligonucleotide
gugggugcgcccaaaucug

SEQ ID NO: 261225 - RNA, 19 nt, Artificial Sequence
  Description of Artificial Sequence: Synthetic oligonucleotide
agcuaucuagauagaggcu

SEQ ID NO: 261226 - RNA, 19 nt, Artificial Sequence
  Description of Artificial Sequence: Synthetic oligonucleotide
cuggcaaagugagaacuga

SEQ ID NO: 261227 - RNA, 19 nt, Artificial Sequence
  Description of Artificial Sequence: Synthetic oligonucleotide
guguguguguguguguaga

SEQ ID NO: 261228 - RNA, 19 nt, Artificial Sequence
  Description of Artificial Sequence: Synthetic oligonucleotide
cuuuauugugugugugugu

SEQ ID NO: 261229 - RNA, 19 nt, Artificial Sequence
  Description of Artificial Sequence: Synthetic oligonucleotide
gugaguuuaucgauucucu

SEQ ID NO: 261230 - RNA, 19 nt, Artificial Sequence
  Description of Artificial Sequence: Synthetic oligonucleotide
acauaggacacgggccucu

SEQ ID NO: 261231 - RNA, 19 nt, Artificial Sequence
  Description of Artificial Sequence: Synthetic oligonucleotide
ugaauggccuuggcaggcu

SEQ ID NO: 261232 - RNA, 19 nt, Artificial Sequence
  Description of Artificial Sequence: Synthetic oligonucleotide
acacuucuuccaugaguau

SEQ ID NO: 261233 - RNA, 19 nt, Artificial Sequence
  Description of Artificial Sequence: Synthetic oligonucleotide
guacacugcaugugcccuc

SEQ ID NO: 261234 - RNA, 19 nt, Artificial Sequence
  Description of Artificial Sequence: Synthetic oligonucleotide
cauccuaaguaacugcuuu

SEQ ID NO: 261235 - RNA, 19 nt, Artificial Sequence
  Description of Artificial Sequence: Synthetic oligonucleotide
cuguuuuaggaaggauguc

SEQ ID NO: 261236 - RNA, 19 nt, Artificial Sequence
  Description of Artificial Sequence: Synthetic oligonucleotide
augugcgugcccucggcuu

SEQ ID NO: 261237 - RNA, 19 nt, Artificial Sequence
  Description of Artificial Sequence: Synthetic oligonucleotide
cuugagaguucagcauguc

SEQ ID NO: 261238 - RNA, 19 nt, Artificial Sequence
  Description of Artificial Sequence: Synthetic oligonucleotide
aacccagaucugaaucaaa

SEQ ID NO: 261239 - RNA, 19 nt, Artificial Sequence
  Description of Artificial Sequence: Synthetic oligonucleotide
accgccacguccacuuguc

SEQ ID NO: 261240 - RNA, 19 nt, Artificial Sequence
  Description of Artificial Sequence: Synthetic oligonucleotide
augguauuguacgguuuaa

SEQ ID NO: 261241 - RNA, 19 nt, Artificial Sequence
  Description of Artificial Sequence: Synthetic oligonucleotide
gcaugagccuuuccaugag

SEQ ID NO: 261242 - RNA, 19 nt, Artificial Sequence
  Description of Artificial Sequence: Synthetic oligonucleotide
gcacuucaagcacuuggac

SEQ ID NO: 261243 - RNA, 19 nt, Artificial Sequence
  Description of Artificial Sequence: Synthetic oligonucleotide
cuccucggauugugugagg

SEQ ID NO: 261244 - RNA, 19 nt, Artificial Sequence
  Description of Artificial Sequence: Synthetic oligonucleotide
ccucggauugugugaggcg

SEQ ID NO: 261245 - RNA, 19 nt, Artificial Sequence
  Description of Artificial Sequence: Synthetic oligonucleotide
gaggucuaacugaacacau

SEQ ID NO: 261246 - RNA, 19 nt, Artificial Sequence
  Description of Artificial Sequence: Synthetic oligonucleotide
gccggggcuacauagcaga

SEQ ID NO: 261247 - RNA, 19 nt, Artificial Sequence
  Description of Artificial Sequence: Synthetic oligonucleotide
cacugcaugugcccuccuc

SEQ ID NO: 261248 - RNA, 19 nt, Artificial Sequence
  Description of Artificial Sequence: Synthetic oligonucleotide
guuccgcgguuuucugggc

SEQ ID NO: 261249 - RNA, 19 nt, Artificial Sequence
  Description of Artificial Sequence: Synthetic oligonucleotide
ugcggcgugcuuagccgaa

SEQ ID NO: 261250 - RNA, 19 nt, Artificial Sequence
  Description of Artificial Sequence: Synthetic oligonucleotide
gcacgugcuugcuaguguc

SEQ ID NO: 261251 - RNA, 19 nt, Artificial Sequence
  Description of Artificial Sequence: Synthetic oligonucleotide
ccccauaauucagagagca

SEQ ID NO: 261252 - RNA, 19 nt, Artificial Sequence
  Description of Artificial Sequence: Synthetic oligonucleotide
gucacggcugaagccggag

SEQ ID NO: 261253 - RNA, 19 nt, Artificial Sequence
  Description of Artificial Sequence: Synthetic oligonucleotide
aaccacccgggagauuaaa

SEQ ID NO: 261254 - RNA, 19 nt, Artificial Sequence
  Description of Artificial Sequence: Synthetic oligonucleotide
gcacuuggacaucccauca

SEQ ID NO: 261255 - RNA, 19 nt, Artificial Sequence
  Description of Artificial Sequence: Synthetic oligonucleotide
cucuagagaccugauggua

SEQ ID NO: 261256 - RNA, 19 nt, Artificial Sequence
  Description of Artificial Sequence: Synthetic oligonucleotide
cggaccuccaacaguuccg

SEQ ID NO: 261257 - RNA, 19 nt, Artificial Sequence
  Description of Artificial Sequence: Synthetic oligonucleotide
caaggguuuuagcagcuau

SEQ ID NO: 261258 - RNA, 19 nt, Artificial Sequence
  Description of Artificial Sequence: Synthetic oligonucleotide
gugugugugugugugugua

SEQ ID NO: 261259 - RNA, 19 nt, Artificial Sequence
  Description of Artificial Sequence: Synthetic oligonucleotide
caacaugaucccuguuuua

SEQ ID NO: 261260 - RNA, 19 nt, Artificial Sequence
  Description of Artificial Sequence: Synthetic oligonucleotide
cugaugguauuguacgguu

SEQ ID NO: 261261 - RNA, 19 nt, Artificial Sequence
  Description of Artificial Sequence: Synthetic oligonucleotide
ccaaguacuaaugaccacu

SEQ ID NO: 261262 - RNA, 19 nt, Artificial Sequence
  Description of Artificial Sequence: Synthetic oligonucleotide
gcuuagacaucugggcuuc

SEQ ID NO: 261263 - RNA, 19 nt, Artificial Sequence
  Description of Artificial Sequence: Synthetic oligonucleotide
aggcgcuguuucagcaccg

SEQ ID NO: 261264 - RNA, 19 nt, Artificial Sequence
  Description of Artificial Sequence: Synthetic oligonucleotide
accuuugcguggccccgga

SEQ ID NO: 261265 - RNA, 19 nt, Artificial Sequence
  Description of Artificial Sequence: Synthetic oligonucleotide
gcguucucgccucugaacu

SEQ ID NO: 261266 - RNA, 19 nt, Artificial Sequence
  Description of Artificial Sequence: Synthetic oligonucleotide
acacucagggguagucaga

SEQ ID NO: 261267 - RNA, 19 nt, Artificial Sequence
  Description of Artificial Sequence: Synthetic oligonucleotide
cuuagcuggucugaagaau

SEQ ID NO: 261268 - RNA, 19 nt, Artificial Sequence
  Description of Artificial Sequence: Synthetic oligonucleotide
ugggccucaaaagcaccuu

SEQ ID NO: 261269 - RNA, 19 nt, Artificial Sequence
  Description of Artificial Sequence: Synthetic oligonucleotide
ccggcucuuucuuccuugg

SEQ ID NO: 261270 - RNA, 19 nt, Artificial Sequence
  Description of Artificial Sequence: Synthetic oligonucleotide
cagcccgaauguccacggc

SEQ ID NO: 261271 - RNA, 19 nt, Artificial Sequence
  Description of Artificial Sequence: Synthetic oligonucleotide
ccaugggagaugcuguaca

SEQ ID NO: 261272 - RNA, 19 nt, Artificial Sequence
  Description of Artificial Sequence: Synthetic oligonucleotide
cauaggacacgggccucuc

SEQ ID NO: 261273 - RNA, 19 nt, Artificial Sequence
  Description of Artificial Sequence: Synthetic oligonucleotide
ggcauccuaaguaacugcu

SEQ ID NO: 261274 - RNA, 19 nt, Artificial Sequence
  Description of Artificial Sequence: Synthetic oligonucleotide
aaaccacccgggagauuaa

SEQ ID NO: 261275 - RNA, 19 nt, Artificial Sequence
  Description of Artificial Sequence: Synthetic oligonucleotide
ggucugcacauaggacacg

SEQ ID NO: 261276 - RNA, 19 nt, Artificial Sequence
  Description of Artificial Sequence: Synthetic oligonucleotide
augguccugucuacagccu

SEQ ID NO: 261277 - RNA, 19 nt, Artificial Sequence
  Description of Artificial Sequence: Synthetic oligonucleotide
cgugcuugcuagugucacg

SEQ ID NO: 261278 - RNA, 19 nt, Artificial Sequence
  Description of Artificial Sequence: Synthetic oligonucleotide
gguguauaucaaguuccaa

SEQ ID NO: 261279 - RNA, 19 nt, Artificial Sequence
  Description of Artificial Sequence: Synthetic oligonucleotide
gugcggcgugcuuagccga

SEQ ID NO: 261280 - RNA, 19 nt, Artificial Sequence
  Description of Artificial Sequence: Synthetic oligonucleotide
gggagauucuugagaguuc

SEQ ID NO: 261281 - RNA, 19 nt, Artificial Sequence
  Description of Artificial Sequence: Synthetic oligonucleotide
guagaaccucacagucaca

SEQ ID NO: 261282 - RNA, 19 nt, Artificial Sequence
  Description of Artificial Sequence: Synthetic oligonucleotide
ccuugccccauaauucaga

SEQ ID NO: 261283 - RNA, 19 nt, Artificial Sequence
  Description of Artificial Sequence: Synthetic oligonucleotide
guaaugcuauucagaugcu

SEQ ID NO: 261284 - RNA, 19 nt, Artificial Sequence
  Description of Artificial Sequence: Synthetic oligonucleotide
gggguagucagaacuuuua

SEQ ID NO: 261285 - RNA, 19 nt, Artificial Sequence
  Description of Artificial Sequence: Synthetic oligonucleotide
gccuugcuuucccuugaac

SEQ ID NO: 261286 - RNA, 19 nt, Artificial Sequence
  Description of Artificial Sequence: Synthetic oligonucleotide
cuuuuacuagagagacuuu

SEQ ID NO: 261287 - RNA, 19 nt, Artificial Sequence
  Description of Artificial Sequence: Synthetic oligonucleotide
gcaccgcaaucauuuccac

SEQ ID NO: 261288 - RNA, 19 nt, Artificial Sequence
  Description of Artificial Sequence: Synthetic oligonucleotide
gcuuccuauucgaugagau

SEQ ID NO: 261289 - RNA, 19 nt, Artificial Sequence
  Description of Artificial Sequence: Synthetic oligonucleotide
ccgcaaucauuuccaccgc

SEQ ID NO: 261290 - RNA, 19 nt, Artificial Sequence
  Description of Artificial Sequence: Synthetic oligonucleotide
gugcgugcccucggcuuag

SEQ ID NO: 261291 - RNA, 19 nt, Artificial Sequence
  Description of Artificial Sequence: Synthetic oligonucleotide
ggcgugcuuagccgaagaa

SEQ ID NO: 261292 - RNA, 19 nt, Artificial Sequence
  Description of Artificial Sequence: Synthetic oligonucleotide
ggcuuccuauucgaugaga

SEQ ID NO: 261293 - RNA, 19 nt, Artificial Sequence
  Description of Artificial Sequence: Synthetic oligonucleotide
gcaucccggcucuuucuuc

SEQ ID NO: 261294 - RNA, 19 nt, Artificial Sequence
  Description of Artificial Sequence: Synthetic oligonucleotide
ggcgcuguuucagcaccgc

SEQ ID NO: 261295 - RNA, 19 nt, Artificial Sequence
  Description of Artificial Sequence: Synthetic oligonucleotide
gccccauaauucagagagc

SEQ ID NO: 261296 - RNA, 19 nt, Artificial Sequence
  Description of Artificial Sequence: Synthetic oligonucleotide
cgcguucucgccucugaac

SEQ ID NO: 261297 - RNA, 19 nt, Artificial Sequence
  Description of Artificial Sequence: Synthetic oligonucleotide
ucucggacgugggccucaa

SEQ ID NO: 261298 - RNA, 19 nt, Artificial Sequence
  Description of Artificial Sequence: Synthetic oligonucleotide
ccggggcuacauagcagag

SEQ ID NO: 261299 - RNA, 19 nt, Artificial Sequence
  Description of Artificial Sequence: Synthetic oligonucleotide
ccaugcgauugaacuuuuc

SEQ ID NO: 261300 - RNA, 19 nt, Artificial Sequence
  Description of Artificial Sequence: Synthetic oligonucleotide
gccgcuuccaggaaauggu

SEQ ID NO: 261301 - RNA, 19 nt, Artificial Sequence
  Description of Artificial Sequence: Synthetic oligonucleotide
accaugcgauugaacuuuu

SEQ ID NO: 261302 - RNA, 19 nt, Artificial Sequence
  Description of Artificial Sequence: Synthetic oligonucleotide
cacucccagcugggugugg

SEQ ID NO: 261303 - RNA, 19 nt, Artificial Sequence
  Description of Artificial Sequence: Synthetic oligonucleotide
agggcgcguucucgccucu

SEQ ID NO: 261304 - RNA, 19 nt, Artificial Sequence
  Description of Artificial Sequence: Synthetic oligonucleotide
cgugcccucggcuuagaca

SEQ ID NO: 261305 - RNA, 19 nt, Artificial Sequence
  Description of Artificial Sequence: Synthetic oligonucleotide
uccccugcuuugggaguuc

SEQ ID NO: 261306 - RNA, 19 nt, Artificial Sequence
  Description of Artificial Sequence: Synthetic oligonucleotide
ggugcgcccaaaucugaau

SEQ ID NO: 261307 - RNA, 19 nt, Artificial Sequence
  Description of Artificial Sequence: Synthetic oligonucleotide
gccuguucgugaauggccu

SEQ ID NO: 261308 - RNA, 19 nt, Artificial Sequence
  Description of Artificial Sequence: Synthetic oligonucleotide
cugcucaccccaaggguuu

SEQ ID NO: 261309 - RNA, 19 nt, Artificial Sequence
  Description of Artificial Sequence: Synthetic oligonucleotide
gcgcuguuucagcaccgca

SEQ ID NO: 261310 - RNA, 19 nt, Artificial Sequence
  Description of Artificial Sequence: Synthetic oligonucleotide
ccugaugguauuguacggu

SEQ ID NO: 261311 - RNA, 19 nt, Artificial Sequence
  Description of Artificial Sequence: Synthetic oligonucleotide
ccaguuugggccugaaguu

SEQ ID NO: 261312 - RNA, 19 nt, Artificial Sequence
  Description of Artificial Sequence: Synthetic oligonucleotide
ugcgugcccucggcuuaga

SEQ ID NO: 261313 - RNA, 19 nt, Artificial Sequence
  Description of Artificial Sequence: Synthetic oligonucleotide
ccuuugcguggccccggag

SEQ ID NO: 261314 - RNA, 19 nt, Artificial Sequence
  Description of Artificial Sequence: Synthetic oligonucleotide
caccgccacguccacuugu

SEQ ID NO: 261315 - RNA, 19 nt, Artificial Sequence
  Description of Artificial Sequence: Synthetic oligonucleotide
cccguugcaagagguucuc

SEQ ID NO: 261316 - RNA, 19 nt, Artificial Sequence
  Description of Artificial Sequence: Synthetic oligonucleotide
ccuauucgaugagaugucu

SEQ ID NO: 261317 - RNA, 19 nt, Artificial Sequence
  Description of Artificial Sequence: Synthetic oligonucleotide
gcggcgugcuuagccgaag

SEQ ID NO: 261318 - RNA, 19 nt, Artificial Sequence
  Description of Artificial Sequence: Synthetic oligonucleotide
gggugcgcccaaaucugaa

SEQ ID NO: 261319 - RNA, 19 nt, Artificial Sequence
  Description of Artificial Sequence: Synthetic oligonucleotide
ggauugugugaggcgcugu

SEQ ID NO: 261320 - RNA, 19 nt, Artificial Sequence
  Description of Artificial Sequence: Synthetic oligonucleotide
gcauccuaaguaacugcuu

SEQ ID NO: 261321 - RNA, 19 nt, Artificial Sequence
  Description of Artificial Sequence: Synthetic oligonucleotide
cccgggagauuaaagucuu

SEQ ID NO: 261322 - RNA, 19 nt, Artificial Sequence
  Description of Artificial Sequence: Synthetic oligonucleotide
guaaaccacccgggagauu

SEQ ID NO: 261323 - RNA, 19 nt, Artificial Sequence
  Description of Artificial Sequence: Synthetic oligonucleotide
cucggacgugggccucaaa

SEQ ID NO: 261324 - RNA, 19 nt, Artificial Sequence
  Description of Artificial Sequence: Synthetic oligonucleotide
cgaauguccacggccgugu

SEQ ID NO: 261325 - RNA, 19 nt, Artificial Sequence
  Description of Artificial Sequence: Synthetic oligonucleotide
ggcccagaugcuccccuuu

SEQ ID NO: 261326 - RNA, 19 nt, Artificial Sequence
  Description of Artificial Sequence: Synthetic oligonucleotide
cggcgugcuuagccgaaga

SEQ ID NO: 261327 - RNA, 19 nt, Artificial Sequence
  Description of Artificial Sequence: Synthetic oligonucleotide
ccgcuuccaggaaaugguu

SEQ ID NO: 261328 - RNA, 19 nt, Artificial Sequence
  Description of Artificial Sequence: Synthetic oligonucleotide
ccguguaggucugcacaua

SEQ ID NO: 261329 - RNA, 19 nt, Artificial Sequence
  Description of Artificial Sequence: Synthetic oligonucleotide
cgcgguuuucugggccaac

SEQ ID NO: 261330 - RNA, 19 nt, Artificial Sequence
  Description of Artificial Sequence: Synthetic oligonucleotide
ccggaggccugcuggcuuu

SEQ ID NO: 261331 - RNA, 19 nt, Artificial Sequence
  Description of Artificial Sequence: Synthetic oligonucleotide
ccgccacguccacuugucu

SEQ ID NO: 261332 - RNA, 19 nt, Artificial Sequence
  Description of Artificial Sequence: Synthetic oligonucleotide
ccgcgguuuucugggccaa

SEQ ID NO: 261333 - RNA, 19 nt, Artificial Sequence
  Description of Artificial Sequence: Synthetic oligonucleotide
aaagaguggcuucuggccc

SEQ ID NO: 261334 - RNA, 19 nt, Artificial Sequence
  Description of Artificial Sequence: Synthetic oligonucleotide
agcguugacaaacagcucc

SEQ ID NO: 261335 - RNA, 19 nt, Artificial Sequence
  Description of Artificial Sequence: Synthetic oligonucleotide
ugcaaacuuauuuugaggc

SEQ ID NO: 261336 - RNA, 19 nt, Artificial Sequence
  Description of Artificial Sequence: Synthetic oligonucleotide
gaugcguucucuaacaucg

SEQ ID NO: 261337 - RNA, 19 nt, Artificial Sequence
  Description of Artificial Sequence: Synthetic oligonucleotide
ugagagacgaucagcagcg

SEQ ID NO: 261338 - RNA, 19 nt, Artificial Sequence
  Description of Artificial Sequence: Synthetic oligonucleotide
cacgauacaaauucgagag

SEQ ID NO: 261339 - RNA, 19 nt, Artificial Sequence
  Description of Artificial Sequence: Synthetic oligonucleotide
ugaagguaguuauugagcc

SEQ ID NO: 261340 - RNA, 19 nt, Artificial Sequence
  Description of Artificial Sequence: Synthetic oligonucleotide
uggcuaacaacaaucacag

SEQ ID NO: 261341 - RNA, 19 nt, Artificial Sequence
  Description of Artificial Sequence: Synthetic oligonucleotide
uuauugagccagaugacag

SEQ ID NO: 261342 - RNA, 19 nt, Artificial Sequence
  Description of Artificial Sequence: Synthetic oligonucleotide
ucuaacaucgccugccgcg

SEQ ID NO: 261343 - RNA, 19 nt, Artificial Sequence
  Description of Artificial Sequence: Synthetic oligonucleotide
uuuucuaauuucucggcag

SEQ ID NO: 261344 - RNA, 19 nt, Artificial Sequence
  Description of Artificial Sequence: Synthetic oligonucleotide
ucuguuaucugaaggagac

SEQ ID NO: 261345 - RNA, 19 nt, Artificial Sequence
  Description of Artificial Sequence: Synthetic oligonucleotide
ucugaaaggagacugcacu

SEQ ID NO: 261346 - RNA, 19 nt, Artificial Sequence
  Description of Artificial Sequence: Synthetic oligonucleotide
uuaaagaguggcuucuggc

SEQ ID NO: 261347 - RNA, 19 nt, Artificial Sequence
  Description of Artificial Sequence: Synthetic oligonucleotide
ucgcuuguagucaucaaag

SEQ ID NO: 261348 - RNA, 19 nt, Artificial Sequence
  Description of Artificial Sequence: Synthetic oligonucleotide
acaacucgggcuuucugcc

SEQ ID NO: 261349 - RNA, 19 nt, Artificial Sequence
  Description of Artificial Sequence: Synthetic oligonucleotide
ugaggacccuuccaaaagg

SEQ ID NO: 261350 - RNA, 19 nt, Artificial Sequence
  Description of Artificial Sequence: Synthetic oligonucleotide
gaauggaccacagcaaagg

SEQ ID NO: 261351 - RNA, 19 nt, Artificial Sequence
  Description of Artificial Sequence: Synthetic oligonucleotide
acgaagaacagcuugcacu

SEQ ID NO: 261352 - RNA, 19 nt, Artificial Sequence
  Description of Artificial Sequence: Synthetic oligonucleotide
agaauuucugggugggacg

SEQ ID NO: 261353 - RNA, 19 nt, Artificial Sequence
  Description of Artificial Sequence: Synthetic oligonucleotide
ugucgauuccaaaauccag

SEQ ID NO: 261354 - RNA, 19 nt, Artificial Sequence
  Description of Artificial Sequence: Synthetic oligonucleotide
acgauucugcaucucaggg

SEQ ID NO: 261355 - RNA, 19 nt, Artificial Sequence
  Description of Artificial Sequence: Synthetic oligonucleotide
uuuuccgcagcauuagcug

SEQ ID NO: 261356 - RNA, 19 nt, Artificial Sequence
  Description of Artificial Sequence: Synthetic oligonucleotide
acugucuagggcugcaaac

SEQ ID NO: 261357 - RNA, 19 nt, Artificial Sequence
  Description of Artificial Sequence: Synthetic oligonucleotide
gacccuuccaaaaggaggg

SEQ ID NO: 261358 - RNA, 19 nt, Artificial Sequence
  Description of Artificial Sequence: Synthetic oligonucleotide
caucaauagacucaauguc

SEQ ID NO: 261359 - RNA, 19 nt, Artificial Sequence
  Description of Artificial Sequence: Synthetic oligonucleotide
ucuaauuucucggcagccg

SEQ ID NO: 261360 - RNA, 19 nt, Artificial Sequence
  Description of Artificial Sequence: Synthetic oligonucleotide
auagacucaauguccaagu

SEQ ID NO: 261361 - RNA, 19 nt, Artificial Sequence
  Description of Artificial Sequence: Synthetic oligonucleotide
ugaagagugcccuggcuag

SEQ ID NO: 261362 - RNA, 19 nt, Artificial Sequence
  Description of Artificial Sequence: Synthetic oligonucleotide
cuuaaagaguggcuucugg

SEQ ID NO: 261363 - RNA, 19 nt, Artificial Sequence
  Description of Artificial Sequence: Synthetic oligonucleotide
ugucacacgcaucaaggca

SEQ ID NO: 261364 - RNA, 19 nt, Artificial Sequence
  Description of Artificial Sequence: Synthetic oligonucleotide
ucagaugcguucucuaaca

SEQ ID NO: 261365 - RNA, 19 nt, Artificial Sequence
  Description of Artificial Sequence: Synthetic oligonucleotide
aaacgcacgguguauuccu

SEQ ID NO: 261366 - RNA, 19 nt, Artificial Sequence
  Description of Artificial Sequence: Synthetic oligonucleotide
gacgauucugcaucucagg

SEQ ID NO: 261367 - RNA, 19 nt, Artificial Sequence
  Description of Artificial Sequence: Synthetic oligonucleotide
ugcgacgauguacagguca

SEQ ID NO: 261368 - RNA, 19 nt, Artificial Sequence
  Description of Artificial Sequence: Synthetic oligonucleotide
gacgauguacaggucagcg

SEQ ID NO: 261369 - RNA, 19 nt, Artificial Sequence
  Description of Artificial Sequence: Synthetic oligonucleotide
uccaacuugaugucagaug

SEQ ID NO: 261370 - RNA, 19 nt, Artificial Sequence
  Description of Artificial Sequence: Synthetic oligonucleotide
uucucguacugcuucacca

SEQ ID NO: 261371 - RNA, 19 nt, Artificial Sequence
  Description of Artificial Sequence: Synthetic oligonucleotide
gcagacgucguccagaaag

SEQ ID NO: 261372 - RNA, 19 nt, Artificial Sequence
  Description of Artificial Sequence: Synthetic oligonucleotide
uuuccgucggcacuucugc

SEQ ID NO: 261373 - RNA, 19 nt, Artificial Sequence
  Description of Artificial Sequence: Synthetic oligonucleotide
aacaccucucgcuuguagu

SEQ ID NO: 261374 - RNA, 19 nt, Artificial Sequence
  Description of Artificial Sequence: Synthetic oligonucleotide
guuauuggucggcucaucc

SEQ ID NO: 261375 - RNA, 19 nt, Artificial Sequence
  Description of Artificial Sequence: Synthetic oligonucleotide
acaaauucgagaguccaug

SEQ ID NO: 261376 - RNA, 19 nt, Artificial Sequence
  Description of Artificial Sequence: Synthetic oligonucleotide
agaugcguucucuaacauc

SEQ ID NO: 261377 - RNA, 19 nt, Artificial Sequence
  Description of Artificial Sequence: Synthetic oligonucleotide
uguaauugccccuguagua

SEQ ID NO: 261378 - RNA, 19 nt, Artificial Sequence
  Description of Artificial Sequence: Synthetic oligonucleotide
uguccaaguuauuggucgg

SEQ ID NO: 261379 - RNA, 19 nt, Artificial Sequence
  Description of Artificial Sequence: Synthetic oligonucleotide
caguucuguuaucugaagg

SEQ ID NO: 261380 - RNA, 19 nt, Artificial Sequence
  Description of Artificial Sequence: Synthetic oligonucleotide
guaauggagccucugggug

SEQ ID NO: 261381 - RNA, 19 nt, Artificial Sequence
  Description of Artificial Sequence: Synthetic oligonucleotide
uauuggucggcucauccaa

SEQ ID NO: 261382 - RNA, 19 nt, Artificial Sequence
  Description of Artificial Sequence: Synthetic oligonucleotide
uccaugucgauuccaaaau

SEQ ID NO: 261383 - RNA, 19 nt, Artificial Sequence
  Description of Artificial Sequence: Synthetic oligonucleotide
aacuugaugucagaugcgu

SEQ ID NO: 261384 - RNA, 19 nt, Artificial Sequence
  Description of Artificial Sequence: Synthetic oligonucleotide
uucccuacaccguuggggc

SEQ ID NO: 261385 - RNA, 19 nt, Artificial Sequence
  Description of Artificial Sequence: Synthetic oligonucleotide
uauuccuugggucgcuuca

SEQ ID NO: 261386 - RNA, 19 nt, Artificial Sequence
  Description of Artificial Sequence: Synthetic oligonucleotide
cacaacucgggcuuucugc

SEQ ID NO: 261387 - RNA, 19 nt, Artificial Sequence
  Description of Artificial Sequence: Synthetic oligonucleotide
gauacaaauucgagagucc

SEQ ID NO: 261388 - RNA, 19 nt, Artificial Sequence
  Description of Artificial Sequence: Synthetic oligonucleotide
acaagaggccaccuuaacu

SEQ ID NO: 261389 - RNA, 19 nt, Artificial Sequence
  Description of Artificial Sequence: Synthetic oligonucleotide
ugccccuguaguaauggag

SEQ ID NO: 261390 - RNA, 19 nt, Artificial Sequence
  Description of Artificial Sequence: Synthetic oligonucleotide
aagagcguggucuugccuu

SEQ ID NO: 261391 - RNA, 19 nt, Artificial Sequence
  Description of Artificial Sequence: Synthetic oligonucleotide
uuuuccgucggcacuucug

SEQ ID NO: 261392 - RNA, 19 nt, Artificial Sequence
  Description of Artificial Sequence: Synthetic oligonucleotide
guaguuauugagccagaug

SEQ ID NO: 261393 - RNA, 19 nt, Artificial Sequence
  Description of Artificial Sequence: Synthetic oligonucleotide
ugcguucucuaacaucgcc

SEQ ID NO: 261394 - RNA, 19 nt, Artificial Sequence
  Description of Artificial Sequence: Synthetic oligonucleotide
cuucccuacaccguugggg

SEQ ID NO: 261395 - RNA, 19 nt, Artificial Sequence
  Description of Artificial Sequence: Synthetic oligonucleotide
ucgccugccgcgaagacac

SEQ ID NO: 261396 - RNA, 19 nt, Artificial Sequence
  Description of Artificial Sequence: Synthetic oligonucleotide
ucuugagacaagaggccac

SEQ ID NO: 261397 - RNA, 19 nt, Artificial Sequence
  Description of Artificial Sequence: Synthetic oligonucleotide
agucgcuuggugucggcac

SEQ ID NO: 261398 - RNA, 19 nt, Artificial Sequence
  Description of Artificial Sequence: Synthetic oligonucleotide
uuagugggcucauccagca

SEQ ID NO: 261399 - RNA, 19 nt, Artificial Sequence
  Description of Artificial Sequence: Synthetic oligonucleotide
cucucgaggccaaagcggc

SEQ ID NO: 261400 - RNA, 19 nt, Artificial Sequence
  Description of Artificial Sequence: Synthetic oligonucleotide
caggaggggagcucaaucc

SEQ ID NO: 261401 - RNA, 19 nt, Artificial Sequence
  Description of Artificial Sequence: Synthetic oligonucleotide
ucaccaucgaucugacuga

SEQ ID NO: 261402 - RNA, 19 nt, Artificial Sequence
  Description of Artificial Sequence: Synthetic oligonucleotide
auacaaauucgagagucca

SEQ ID NO: 261403 - RNA, 19 nt, Artificial Sequence
  Description of Artificial Sequence: Synthetic oligonucleotide
acacgcaucaaggcaacac

SEQ ID NO: 261404 - RNA, 19 nt, Artificial Sequence
  Description of Artificial Sequence: Synthetic oligonucleotide
uggcguuucaucagccacc

SEQ ID NO: 261405 - RNA, 19 nt, Artificial Sequence
  Description of Artificial Sequence: Synthetic oligonucleotide
uaauuucucggcagccgug

SEQ ID NO: 261406 - RNA, 19 nt, Artificial Sequence
  Description of Artificial Sequence: Synthetic oligonucleotide
uucuaauuucucggcagcc

SEQ ID NO: 261407 - RNA, 19 nt, Artificial Sequence
  Description of Artificial Sequence: Synthetic oligonucleotide
auugccccuguaguaaugg

SEQ ID NO: 261408 - RNA, 19 nt, Artificial Sequence
  Description of Artificial Sequence: Synthetic oligonucleotide
gacacaauccacacggauc

SEQ ID NO: 261409 - RNA, 19 nt, Artificial Sequence
  Description of Artificial Sequence: Synthetic oligonucleotide
cugaacuuuuccaacuuga

SEQ ID NO: 261410 - RNA, 19 nt, Artificial Sequence
  Description of Artificial Sequence: Synthetic oligonucleotide
ucaaucccgaggccgguug

SEQ ID NO: 261411 - RNA, 19 nt, Artificial Sequence
  Description of Artificial Sequence: Synthetic oligonucleotide
ugacacaacaggucucaga

SEQ ID NO: 261412 - RNA, 19 nt, Artificial Sequence
  Description of Artificial Sequence: Synthetic oligonucleotide
aauuucucggcagccgugu

SEQ ID NO: 261413 - RNA, 19 nt, Artificial Sequence
  Description of Artificial Sequence: Synthetic oligonucleotide
uucaagagcguggucuugc

SEQ ID NO: 261414 - RNA, 19 nt, Artificial Sequence
  Description of Artificial Sequence: Synthetic oligonucleotide
caccuggcguucauaaucc

SEQ ID NO: 261415 - RNA, 19 nt, Artificial Sequence
  Description of Artificial Sequence: Synthetic oligonucleotide
gagcucaaucccgaggccg

SEQ ID NO: 261416 - RNA, 19 nt, Artificial Sequence
  Description of Artificial Sequence: Synthetic oligonucleotide
acgcgcaugcgccaacccc

SEQ ID NO: 261417 - RNA, 19 nt, Artificial Sequence
  Description of Artificial Sequence: Synthetic oligonucleotide
aacaucgccugccgcgaag

SEQ ID NO: 261418 - RNA, 19 nt, Artificial Sequence
  Description of Artificial Sequence: Synthetic oligonucleotide
guuauugagccagaugaca

SEQ ID NO: 261419 - RNA, 19 nt, Artificial Sequence
  Description of Artificial Sequence: Synthetic oligonucleotide
agacucaauguccaaguua

SEQ ID NO: 261420 - RNA, 19 nt, Artificial Sequence
  Description of Artificial Sequence: Synthetic oligonucleotide
ggagggaccaggcagaguc

SEQ ID NO: 261421 - RNA, 19 nt, Artificial Sequence
  Description of Artificial Sequence: Synthetic oligonucleotide
agggagacgcgcaugcgcc

SEQ ID NO: 261422 - RNA, 19 nt, Artificial Sequence
  Description of Artificial Sequence: Synthetic oligonucleotide
ugccuuugccauugggucc

SEQ ID NO: 261423 - RNA, 19 nt, Artificial Sequence
  Description of Artificial Sequence: Synthetic oligonucleotide
uccuuaccccgucugcucc

SEQ ID NO: 261424 - RNA, 19 nt, Artificial Sequence
  Description of Artificial Sequence: Synthetic oligonucleotide
gaaacgcacgguguauucc

SEQ ID NO: 261425 - RNA, 19 nt, Artificial Sequence
  Description of Artificial Sequence: Synthetic oligonucleotide
uguuuucgagucaggacuu

SEQ ID NO: 261426 - RNA, 19 nt, Artificial Sequence
  Description of Artificial Sequence: Synthetic oligonucleotide
cagacgucguccagaaagc

SEQ ID NO: 261427 - RNA, 19 nt, Artificial Sequence
  Description of Artificial Sequence: Synthetic oligonucleotide
ucuagcaacuugagucgcu

SEQ ID NO: 261428 - RNA, 19 nt, Artificial Sequence
  Description of Artificial Sequence: Synthetic oligonucleotide
cuugagacaagaggccacc

SEQ ID NO: 261429 - RNA, 19 nt, Artificial Sequence
  Description of Artificial Sequence: Synthetic oligonucleotide
gcagcccuagcacaggugg

SEQ ID NO: 261430 - RNA, 19 nt, Artificial Sequence
  Description of Artificial Sequence: Synthetic oligonucleotide
ugguuucugugaugagccg

SEQ ID NO: 261431 - RNA, 19 nt, Artificial Sequence
  Description of Artificial Sequence: Synthetic oligonucleotide
ucuucccuacaccguuggg

SEQ ID NO: 261432 - RNA, 19 nt, Artificial Sequence
  Description of Artificial Sequence: Synthetic oligonucleotide
cagagaauuucuggguggg

SEQ ID NO: 261433 - RNA, 19 nt, Artificial Sequence
  Description of Artificial Sequence: Synthetic oligonucleotide
agacgucguccagaaagcc

SEQ ID NO: 261434 - RNA, 19 nt, Artificial Sequence
  Description of Artificial Sequence: Synthetic oligonucleotide
uccuucggugggaaggaca

SEQ ID NO: 261435 - RNA, 19 nt, Artificial Sequence
  Description of Artificial Sequence: Synthetic oligonucleotide
ugguuagugggcucaucca

SEQ ID NO: 261436 - RNA, 19 nt, Artificial Sequence
  Description of Artificial Sequence: Synthetic oligonucleotide
agcccuagcacaggugggc

SEQ ID NO: 261437 - RNA, 19 nt, Artificial Sequence
  Description of Artificial Sequence: Synthetic oligonucleotide
caacaggucucagacacug

SEQ ID NO: 261438 - RNA, 19 nt, Artificial Sequence
  Description of Artificial Sequence: Synthetic oligonucleotide
ggacccuuccaaaaggagg

SEQ ID NO: 261439 - RNA, 19 nt, Artificial Sequence
  Description of Artificial Sequence: Synthetic oligonucleotide
uucggugggaaggacacaa

SEQ ID NO: 261440 - RNA, 19 nt, Artificial Sequence
  Description of Artificial Sequence: Synthetic oligonucleotide
gcuaagguuggcauagggg

SEQ ID NO: 261441 - RNA, 19 nt, Artificial Sequence
  Description of Artificial Sequence: Synthetic oligonucleotide
ggugggacgauucugcauc

SEQ ID NO: 261442 - RNA, 19 nt, Artificial Sequence
  Description of Artificial Sequence: Synthetic oligonucleotide
gacucaauguccaaguuau

SEQ ID NO: 261443 - RNA, 19 nt, Artificial Sequence
  Description of Artificial Sequence: Synthetic oligonucleotide
gucggcucauccaagauga

SEQ ID NO: 261444 - RNA, 19 nt, Artificial Sequence
  Description of Artificial Sequence: Synthetic oligonucleotide
agaauggaccacagcaaag

SEQ ID NO: 261445 - RNA, 19 nt, Artificial Sequence
  Description of Artificial Sequence: Synthetic oligonucleotide
ucaagagcguggucuugcc

SEQ ID NO: 261446 - RNA, 19 nt, Artificial Sequence
  Description of Artificial Sequence: Synthetic oligonucleotide
aaucccgaggccgguugac

SEQ ID NO: 261447 - RNA, 19 nt, Artificial Sequence
  Description of Artificial Sequence: Synthetic oligonucleotide
ugaggggcgguggaucugg

SEQ ID NO: 261448 - RNA, 19 nt, Artificial Sequence
  Description of Artificial Sequence: Synthetic oligonucleotide
cuggcguuucaucagccac

SEQ ID NO: 261449 - RNA, 19 nt, Artificial Sequence
  Description of Artificial Sequence: Synthetic oligonucleotide
ccaucgaucugacugacac

SEQ ID NO: 261450 - RNA, 19 nt, Artificial Sequence
  Description of Artificial Sequence: Synthetic oligonucleotide
agcccuggucgugagagac

SEQ ID NO: 261451 - RNA, 19 nt, Artificial Sequence
  Description of Artificial Sequence: Synthetic oligonucleotide
ucgcacagcaacacaucga

SEQ ID NO: 261452 - RNA, 19 nt, Artificial Sequence
  Description of Artificial Sequence: Synthetic oligonucleotide
cauuuuccgcagcauuagc

SEQ ID NO: 261453 - RNA, 19 nt, Artificial Sequence
  Description of Artificial Sequence: Synthetic oligonucleotide
guagcggcggccugcgacg

SEQ ID NO: 261454 - RNA, 19 nt, Artificial Sequence
  Description of Artificial Sequence: Synthetic oligonucleotide
caaaugucacaccgugcag

SEQ ID NO: 261455 - RNA, 19 nt, Artificial Sequence
  Description of Artificial Sequence: Synthetic oligonucleotide
gugucacacgcaucaaggc

SEQ ID NO: 261456 - RNA, 19 nt, Artificial Sequence
  Description of Artificial Sequence: Synthetic oligonucleotide
cugcaaguacucagugggg

SEQ ID NO: 261457 - RNA, 19 nt, Artificial Sequence
  Description of Artificial Sequence: Synthetic oligonucleotide
ucguagccaaaugucacac

SEQ ID NO: 261458 - RNA, 19 nt, Artificial Sequence
  Description of Artificial Sequence: Synthetic oligonucleotide
ucaaggcaacacuccaccu

SEQ ID NO: 261459 - RNA, 19 nt, Artificial Sequence
  Description of Artificial Sequence: Synthetic oligonucleotide
gguuucugugaugagccgg

SEQ ID NO: 261460 - RNA, 19 nt, Artificial Sequence
  Description of Artificial Sequence: Synthetic oligonucleotide
aguguggguuccaugaaga

SEQ ID NO: 261461 - RNA, 19 nt, Artificial Sequence
  Description of Artificial Sequence: Synthetic oligonucleotide
cacaagcaccagaucuugg

SEQ ID NO: 261462 - RNA, 19 nt, Artificial Sequence
  Description of Artificial Sequence: Synthetic oligonucleotide
gacgucguccagaaagccc

SEQ ID NO: 261463 - RNA, 19 nt, Artificial Sequence
  Description of Artificial Sequence: Synthetic oligonucleotide
uuggucggcucauccaaga

SEQ ID NO: 261464 - RNA, 19 nt, Artificial Sequence
  Description of Artificial Sequence: Synthetic oligonucleotide
cucuucccuacaccguugg

SEQ ID NO: 261465 - RNA, 19 nt, Artificial Sequence
  Description of Artificial Sequence: Synthetic oligonucleotide
acgauacaaauucgagagu

SEQ ID NO: 261466 - RNA, 19 nt, Artificial Sequence
  Description of Artificial Sequence: Synthetic oligonucleotide
gacaagaggccaccuuaac

SEQ ID NO: 261467 - RNA, 19 nt, Artificial Sequence
  Description of Artificial Sequence: Synthetic oligonucleotide
ugcgccaguagcccucagc

SEQ ID NO: 261468 - RNA, 19 nt, Artificial Sequence
  Description of Artificial Sequence: Synthetic oligonucleotide
ugagacaagaggccaccuu

SEQ ID NO: 261469 - RNA, 19 nt, Artificial Sequence
  Description of Artificial Sequence: Synthetic oligonucleotide
acgcaucaaggcaacacuc

SEQ ID NO: 261470 - RNA, 19 nt, Artificial Sequence
  Description of Artificial Sequence: Synthetic oligonucleotide
ucauguaauugccccugua

SEQ ID NO: 261471 - RNA, 19 nt, Artificial Sequence
  Description of Artificial Sequence: Synthetic oligonucleotide
ugguuugcuucucggccug

SEQ ID NO: 261472 - RNA, 19 nt, Artificial Sequence
  Description of Artificial Sequence: Synthetic oligonucleotide
gacagcguugagguccagg

SEQ ID NO: 261473 - RNA, 19 nt, Artificial Sequence
  Description of Artificial Sequence: Synthetic oligonucleotide
cagggcaucaauagacuca

SEQ ID NO: 261474 - RNA, 19 nt, Artificial Sequence
  Description of Artificial Sequence: Synthetic oligonucleotide
aggucauguaauugccccu

SEQ ID NO: 261475 - RNA, 19 nt, Artificial Sequence
  Description of Artificial Sequence: Synthetic oligonucleotide
cucggcagccgugucaucc

SEQ ID NO: 261476 - RNA, 19 nt, Artificial Sequence
  Description of Artificial Sequence: Synthetic oligonucleotide
accuuaacuuggcuugaga

SEQ ID NO: 261477 - RNA, 19 nt, Artificial Sequence
  Description of Artificial Sequence: Synthetic oligonucleotide
agccaauuuucagacgaug

SEQ ID NO: 261478 - RNA, 19 nt, Artificial Sequence
  Description of Artificial Sequence: Synthetic oligonucleotide
ugcuggcguuucaucagcc

SEQ ID NO: 261479 - RNA, 19 nt, Artificial Sequence
  Description of Artificial Sequence: Synthetic oligonucleotide
uagacucaauguccaaguu

SEQ ID NO: 261480 - RNA, 19 nt, Artificial Sequence
  Description of Artificial Sequence: Synthetic oligonucleotide
augucgauuccaaaaucca

SEQ ID NO: 261481 - RNA, 19 nt, Artificial Sequence
  Description of Artificial Sequence: Synthetic oligonucleotide
uugggucgcuucaggagcu

SEQ ID NO: 261482 - RNA, 19 nt, Artificial Sequence
  Description of Artificial Sequence: Synthetic oligonucleotide
gggucguuuggcuucgucc

SEQ ID NO: 261483 - RNA, 19 nt, Artificial Sequence
  Description of Artificial Sequence: Synthetic oligonucleotide
cagguugaagcugcgcugc

SEQ ID NO: 261484 - RNA, 19 nt, Artificial Sequence
  Description of Artificial Sequence: Synthetic oligonucleotide
acgucguccagaaagcccu

SEQ ID NO: 261485 - RNA, 19 nt, Artificial Sequence
  Description of Artificial Sequence: Synthetic oligonucleotide
ucacacgcaucaaggcaac

SEQ ID NO: 261486 - RNA, 19 nt, Artificial Sequence
  Description of Artificial Sequence: Synthetic oligonucleotide
gaagagugcccuggcuagg

SEQ ID NO: 261487 - RNA, 19 nt, Artificial Sequence
  Description of Artificial Sequence: Synthetic oligonucleotide
gccaaagcggcccaggcac

SEQ ID NO: 261488 - RNA, 19 nt, Artificial Sequence
  Description of Artificial Sequence: Synthetic oligonucleotide
ccaaaugucacaccgugca

SEQ ID NO: 261489 - RNA, 19 nt, Artificial Sequence
  Description of Artificial Sequence: Synthetic oligonucleotide
ccucugggugucaaggugg

SEQ ID NO: 261490 - RNA, 19 nt, Artificial Sequence
  Description of Artificial Sequence: Synthetic oligonucleotide
gcuguuuucgagucaggac

SEQ ID NO: 261491 - RNA, 19 nt, Artificial Sequence
  Description of Artificial Sequence: Synthetic oligonucleotide
aguuauuggucggcucauc

SEQ ID NO: 261492 - RNA, 19 nt, Artificial Sequence
  Description of Artificial Sequence: Synthetic oligonucleotide
aggccgguugaccaugacu

SEQ ID NO: 261493 - RNA, 19 nt, Artificial Sequence
  Description of Artificial Sequence: Synthetic oligonucleotide
auucgagaguccaugucga

SEQ ID NO: 261494 - RNA, 19 nt, Artificial Sequence
  Description of Artificial Sequence: Synthetic oligonucleotide
cucgaggccaaagcggccc

SEQ ID NO: 261495 - RNA, 19 nt, Artificial Sequence
  Description of Artificial Sequence: Synthetic oligonucleotide
agcucaaucccgaggccgg

SEQ ID NO: 261496 - RNA, 19 nt, Artificial Sequence
  Description of Artificial Sequence: Synthetic oligonucleotide
caacaccucucgcuuguag

SEQ ID NO: 261497 - RNA, 19 nt, Artificial Sequence
  Description of Artificial Sequence: Synthetic oligonucleotide
gcuagggagacgcgcaugc

SEQ ID NO: 261498 - RNA, 19 nt, Artificial Sequence
  Description of Artificial Sequence: Synthetic oligonucleotide
cccacgauacaaauucgag

SEQ ID NO: 261499 - RNA, 19 nt, Artificial Sequence
  Description of Artificial Sequence: Synthetic oligonucleotide
gaugcgccucgccuuggcc

SEQ ID NO: 261500 - RNA, 19 nt, Artificial Sequence
  Description of Artificial Sequence: Synthetic oligonucleotide
cucgcuuguagucaucaaa

SEQ ID NO: 261501 - RNA, 19 nt, Artificial Sequence
  Description of Artificial Sequence: Synthetic oligonucleotide
ucucgaggccaaagcggcc

SEQ ID NO: 261502 - RNA, 19 nt, Artificial Sequence
  Description of Artificial Sequence: Synthetic oligonucleotide
agacgcgcaugcgccaacc

SEQ ID NO: 261503 - RNA, 19 nt, Artificial Sequence
  Description of Artificial Sequence: Synthetic oligonucleotide
cacggauccugugucacac

SEQ ID NO: 261504 - RNA, 19 nt, Artificial Sequence
  Description of Artificial Sequence: Synthetic oligonucleotide
ggucggcucauccaagaug

SEQ ID NO: 261505 - RNA, 19 nt, Artificial Sequence
  Description of Artificial Sequence: Synthetic oligonucleotide
cucuagcaacuugagucgc

SEQ ID NO: 261506 - RNA, 19 nt, Artificial Sequence
  Description of Artificial Sequence: Synthetic oligonucleotide
cugcuggcguuucaucagc

SEQ ID NO: 261507 - RNA, 19 nt, Artificial Sequence
  Description of Artificial Sequence: Synthetic oligonucleotide
cucugucuggcaagagaug

SEQ ID NO: 261508 - RNA, 19 nt, Artificial Sequence
  Description of Artificial Sequence: Synthetic oligonucleotide
uaccccgucugcuccugag

SEQ ID NO: 261509 - RNA, 19 nt, Artificial Sequence
  Description of Artificial Sequence: Synthetic oligonucleotide
aggugaaacgcacggugua

SEQ ID NO: 261510 - RNA, 19 nt, Artificial Sequence
  Description of Artificial Sequence: Synthetic oligonucleotide
accguuggggcccacgaua

SEQ ID NO: 261511 - RNA, 19 nt, Artificial Sequence
  Description of Artificial Sequence: Synthetic oligonucleotide
gcaaaggucaccucugucu

SEQ ID NO: 261512 - RNA, 19 nt, Artificial Sequence
  Description of Artificial Sequence: Synthetic oligonucleotide
acaccguuggggcccacga

SEQ ID NO: 261513 - RNA, 19 nt, Artificial Sequence
  Description of Artificial Sequence: Synthetic oligonucleotide
ugggugggacgauucugca

SEQ ID NO: 261514 - RNA, 19 nt, Artificial Sequence
  Description of Artificial Sequence: Synthetic oligonucleotide
aguccaugucgauuccaaa

SEQ ID NO: 261515 - RNA, 19 nt, Artificial Sequence
  Description of Artificial Sequence: Synthetic oligonucleotide
cgagaguccaugucgauuc

SEQ ID NO: 261516 - RNA, 19 nt, Artificial Sequence
  Description of Artificial Sequence: Synthetic oligonucleotide
ggucauguaauugccccug

SEQ ID NO: 261517 - RNA, 19 nt, Artificial Sequence
  Description of Artificial Sequence: Synthetic oligonucleotide
uuuccccguugguuggugu

SEQ ID NO: 261518 - RNA, 19 nt, Artificial Sequence
  Description of Artificial Sequence: Synthetic oligonucleotide
ggggagcucaaucccgagg

SEQ ID NO: 261519 - RNA, 19 nt, Artificial Sequence
  Description of Artificial Sequence: Synthetic oligonucleotide
uugccccuguaguaaugga

SEQ ID NO: 261520 - RNA, 19 nt, Artificial Sequence
  Description of Artificial Sequence: Synthetic oligonucleotide
ccuuaacuuggcuugagaa

SEQ ID NO: 261521 - RNA, 19 nt, Artificial Sequence
  Description of Artificial Sequence: Synthetic oligonucleotide
augcguucucuaacaucgc

SEQ ID NO: 261522 - RNA, 19 nt, Artificial Sequence
  Description of Artificial Sequence: Synthetic oligonucleotide
accacccacaacuggcaau

SEQ ID NO: 261523 - RNA, 19 nt, Artificial Sequence
  Description of Artificial Sequence: Synthetic oligonucleotide
ucgagaguccaugucgauu

SEQ ID NO: 261524 - RNA, 19 nt, Artificial Sequence
  Description of Artificial Sequence: Synthetic oligonucleotide
gguguauuccuugggucgc

SEQ ID NO: 261525 - RNA, 19 nt, Artificial Sequence
  Description of Artificial Sequence: Synthetic oligonucleotide
ucggcucauccaagaugag

SEQ ID NO: 261526 - RNA, 19 nt, Artificial Sequence
  Description of Artificial Sequence: Synthetic oligonucleotide
auguacaggucagcguuga

SEQ ID NO: 261527 - RNA, 19 nt, Artificial Sequence
  Description of Artificial Sequence: Synthetic oligonucleotide
uuccccguugguugguguc

SEQ ID NO: 261528 - RNA, 19 nt, Artificial Sequence
  Description of Artificial Sequence: Synthetic oligonucleotide
ucccuacaccguuggggcc

SEQ ID NO: 261529 - RNA, 19 nt, Artificial Sequence
  Description of Artificial Sequence: Synthetic oligonucleotide
uggggcccacgauacaaau

SEQ ID NO: 261530 - RNA, 19 nt, Artificial Sequence
  Description of Artificial Sequence: Synthetic oligonucleotide
cuagggagacgcgcaugcg

SEQ ID NO: 261531 - RNA, 19 nt, Artificial Sequence
  Description of Artificial Sequence: Synthetic oligonucleotide
cuccuuaccccgucugcuc

SEQ ID NO: 261532 - RNA, 19 nt, Artificial Sequence
  Description of Artificial Sequence: Synthetic oligonucleotide
cuggcuagggagacgcgca

SEQ ID NO: 261533 - RNA, 19 nt, Artificial Sequence
  Description of Artificial Sequence: Synthetic oligonucleotide
gccccuguaguaauggagc

SEQ ID NO: 261534 - RNA, 19 nt, Artificial Sequence
  Description of Artificial Sequence: Synthetic oligonucleotide
ccacgauacaaauucgaga

SEQ ID NO: 261535 - RNA, 19 nt, Artificial Sequence
  Description of Artificial Sequence: Synthetic oligonucleotide
aagccaauuuucagacgau

SEQ ID NO: 261536 - RNA, 19 nt, Artificial Sequence
  Description of Artificial Sequence: Synthetic oligonucleotide
guauuccuugggucgcuuc

SEQ ID NO: 261537 - RNA, 19 nt, Artificial Sequence
  Description of Artificial Sequence: Synthetic oligonucleotide
ugccgcgaagacaccucug

SEQ ID NO: 261538 - RNA, 19 nt, Artificial Sequence
  Description of Artificial Sequence: Synthetic oligonucleotide
gacgcgcaugcgccaaccc

SEQ ID NO: 261539 - RNA, 19 nt, Artificial Sequence
  Description of Artificial Sequence: Synthetic oligonucleotide
cugcuugggacacggagaa

SEQ ID NO: 261540 - RNA, 19 nt, Artificial Sequence
  Description of Artificial Sequence: Synthetic oligonucleotide
acacggauccugugucaca

SEQ ID NO: 261541 - RNA, 19 nt, Artificial Sequence
  Description of Artificial Sequence: Synthetic oligonucleotide
ucgaggccaaagcggccca

SEQ ID NO: 261542 - RNA, 19 nt, Artificial Sequence
  Description of Artificial Sequence: Synthetic oligonucleotide
gggacgauucugcaucuca

SEQ ID NO: 261543 - RNA, 19 nt, Artificial Sequence
  Description of Artificial Sequence: Synthetic oligonucleotide
aagcccuggucgugagaga

SEQ ID NO: 261544 - RNA, 19 nt, Artificial Sequence
  Description of Artificial Sequence: Synthetic oligonucleotide
ggugacacaacaggucuca

SEQ ID NO: 261545 - RNA, 19 nt, Artificial Sequence
  Description of Artificial Sequence: Synthetic oligonucleotide
agagaauuucuggguggga

SEQ ID NO: 261546 - RNA, 19 nt, Artificial Sequence
  Description of Artificial Sequence: Synthetic oligonucleotide
guuggggcccacgauacaa

SEQ ID NO: 261547 - RNA, 19 nt, Artificial Sequence
  Description of Artificial Sequence: Synthetic oligonucleotide
gacgaugguucuuucucau

SEQ ID NO: 261548 - RNA, 19 nt, Artificial Sequence
  Description of Artificial Sequence: Synthetic oligonucleotide
ggcgcgguuggcaaugugc

SEQ ID NO: 261549 - RNA, 19 nt, Artificial Sequence
  Description of Artificial Sequence: Synthetic oligonucleotide
uuccgucggcacuucugcu

SEQ ID NO: 261550 - RNA, 19 nt, Artificial Sequence
  Description of Artificial Sequence: Synthetic oligonucleotide
ccugcgacgauguacaggu

SEQ ID NO: 261551 - RNA, 19 nt, Artificial Sequence
  Description of Artificial Sequence: Synthetic oligonucleotide
cacaccgugcagcccuagc

SEQ ID NO: 261552 - RNA, 19 nt, Artificial Sequence
  Description of Artificial Sequence: Synthetic oligonucleotide
cuaacaucgccugccgcga

SEQ ID NO: 261553 - RNA, 19 nt, Artificial Sequence
  Description of Artificial Sequence: Synthetic oligonucleotide
aagcugcgcugcaaguacu

SEQ ID NO: 261554 - RNA, 19 nt, Artificial Sequence
  Description of Artificial Sequence: Synthetic oligonucleotide
gcacgguguauuccuuggg

SEQ ID NO: 261555 - RNA, 19 nt, Artificial Sequence
  Description of Artificial Sequence: Synthetic oligonucleotide
accagcccguagcggcggc

SEQ ID NO: 261556 - RNA, 19 nt, Artificial Sequence
  Description of Artificial Sequence: Synthetic oligonucleotide
ugcgccucgccuuggccuc

SEQ ID NO: 261557 - RNA, 19 nt, Artificial Sequence
  Description of Artificial Sequence: Synthetic oligonucleotide
acgaugguucuuucucauu

SEQ ID NO: 261558 - RNA, 19 nt, Artificial Sequence
  Description of Artificial Sequence: Synthetic oligonucleotide
cucucgcuuguagucauca

SEQ ID NO: 261559 - RNA, 19 nt, Artificial Sequence
  Description of Artificial Sequence: Synthetic oligonucleotide
aucgccugccgcgaagaca

SEQ ID NO: 261560 - RNA, 19 nt, Artificial Sequence
  Description of Artificial Sequence: Synthetic oligonucleotide
ggguaagccaguucuguua

SEQ ID NO: 261561 - RNA, 19 nt, Artificial Sequence
  Description of Artificial Sequence: Synthetic oligonucleotide
cacgcaucaaggcaacacu

SEQ ID NO: 261562 - RNA, 19 nt, Artificial Sequence
  Description of Artificial Sequence: Synthetic oligonucleotide
gugucggcacgaagaacag

SEQ ID NO: 261563 - RNA, 19 nt, Artificial Sequence
  Description of Artificial Sequence: Synthetic oligonucleotide
ggugugggcauggcucucg

SEQ ID NO: 261564 - RNA, 19 nt, Artificial Sequence
  Description of Artificial Sequence: Synthetic oligonucleotide
ucggugggaaggacacaau

SEQ ID NO: 261565 - RNA, 19 nt, Artificial Sequence
  Description of Artificial Sequence: Synthetic oligonucleotide
guaagccaguucuguuauc

SEQ ID NO: 261566 - RNA, 19 nt, Artificial Sequence
  Description of Artificial Sequence: Synthetic oligonucleotide
auuuccccguugguuggug

SEQ ID NO: 261567 - RNA, 19 nt, Artificial Sequence
  Description of Artificial Sequence: Synthetic oligonucleotide
ucggccugcuugguggacu

SEQ ID NO: 261568 - RNA, 19 nt, Artificial Sequence
  Description of Artificial Sequence: Synthetic oligonucleotide
uggcuagggagacgcgcau

SEQ ID NO: 261569 - RNA, 19 nt, Artificial Sequence
  Description of Artificial Sequence: Synthetic oligonucleotide
gacacggagaagucauuuu

SEQ ID NO: 261570 - RNA, 19 nt, Artificial Sequence
  Description of Artificial Sequence: Synthetic oligonucleotide
uuaccccgucugcuccuga

SEQ ID NO: 261571 - RNA, 19 nt, Artificial Sequence
  Description of Artificial Sequence: Synthetic oligonucleotide
gcgacgauguacaggucag

SEQ ID NO: 261572 - RNA, 19 nt, Artificial Sequence
  Description of Artificial Sequence: Synthetic oligonucleotide
accuggcguucauaaucca

SEQ ID NO: 261573 - RNA, 19 nt, Artificial Sequence
  Description of Artificial Sequence: Synthetic oligonucleotide
aggucagcguugacaaaca

SEQ ID NO: 261574 - RNA, 19 nt, Artificial Sequence
  Description of Artificial Sequence: Synthetic oligonucleotide
uggugucggcacgaagaac

SEQ ID NO: 261575 - RNA, 19 nt, Artificial Sequence
  Description of Artificial Sequence: Synthetic oligonucleotide
gcaagagaugcugagggua

SEQ ID NO: 261576 - RNA, 19 nt, Artificial Sequence
  Description of Artificial Sequence: Synthetic oligonucleotide
gcgguuggcaaugugcuuc

SEQ ID NO: 261577 - RNA, 19 nt, Artificial Sequence
  Description of Artificial Sequence: Synthetic oligonucleotide
agccgugcugugguuccgg

SEQ ID NO: 261578 - RNA, 19 nt, Artificial Sequence
  Description of Artificial Sequence: Synthetic oligonucleotide
uguauuccuugggucgcuu

SEQ ID NO: 261579 - RNA, 19 nt, Artificial Sequence
  Description of Artificial Sequence: Synthetic oligonucleotide
cacgguguauuccuugggu

SEQ ID NO: 261580 - RNA, 19 nt, Artificial Sequence
  Description of Artificial Sequence: Synthetic oligonucleotide
ucgcuuggugucggcacga

SEQ ID NO: 261581 - RNA, 19 nt, Artificial Sequence
  Description of Artificial Sequence: Synthetic oligonucleotide
ggcccacgauacaaauucg

SEQ ID NO: 261582 - RNA, 19 nt, Artificial Sequence
  Description of Artificial Sequence: Synthetic oligonucleotide
caccaucgaucugacugac

SEQ ID NO: 261583 - RNA, 19 nt, Artificial Sequence
  Description of Artificial Sequence: Synthetic oligonucleotide
gagacgcgcaugcgccaac

SEQ ID NO: 261584 - RNA, 19 nt, Artificial Sequence
  Description of Artificial Sequence: Synthetic oligonucleotide
agcaaccccagugcuuuau

SEQ ID NO: 261585 - RNA, 19 nt, Artificial Sequence
  Description of Artificial Sequence: Synthetic oligonucleotide
ccccucugaaaggagacug

SEQ ID NO: 261586 - RNA, 19 nt, Artificial Sequence
  Description of Artificial Sequence: Synthetic oligonucleotide
cagugaggacccuuccaaa

SEQ ID NO: 261587 - RNA, 19 nt, Artificial Sequence
  Description of Artificial Sequence: Synthetic oligonucleotide
cacaggagcuugucucaga

SEQ ID NO: 261588 - RNA, 19 nt, Artificial Sequence
  Description of Artificial Sequence: Synthetic oligonucleotide
ccuggcuagggagacgcgc

SEQ ID NO: 261589 - RNA, 19 nt, Artificial Sequence
  Description of Artificial Sequence: Synthetic oligonucleotide
acuugcgggcauccuggua

SEQ ID NO: 261590 - RNA, 19 nt, Artificial Sequence
  Description of Artificial Sequence: Synthetic oligonucleotide
gccugcgacgauguacagg

SEQ ID NO: 261591 - RNA, 19 nt, Artificial Sequence
  Description of Artificial Sequence: Synthetic oligonucleotide
cuuaccccgucugcuccug

SEQ ID NO: 261592 - RNA, 19 nt, Artificial Sequence
  Description of Artificial Sequence: Synthetic oligonucleotide
cccucguagccaaauguca

SEQ ID NO: 261593 - RNA, 19 nt, Artificial Sequence
  Description of Artificial Sequence: Synthetic oligonucleotide
cuguuaucugaaggagaca

SEQ ID NO: 261594 - RNA, 19 nt, Artificial Sequence
  Description of Artificial Sequence: Synthetic oligonucleotide
aacgcacgguguauuccuu

SEQ ID NO: 261595 - RNA, 19 nt, Artificial Sequence
  Description of Artificial Sequence: Synthetic oligonucleotide
ggcguuucaucagccacca

SEQ ID NO: 261596 - RNA, 19 nt, Artificial Sequence
  Description of Artificial Sequence: Synthetic oligonucleotide
ccguuggggcccacgauac

SEQ ID NO: 261597 - RNA, 19 nt, Artificial Sequence
  Description of Artificial Sequence: Synthetic oligonucleotide
gaggccgguugaccaugac

SEQ ID NO: 261598 - RNA, 19 nt, Artificial Sequence
  Description of Artificial Sequence: Synthetic oligonucleotide
gcgcugcaaguacucagug

SEQ ID NO: 261599 - RNA, 19 nt, Artificial Sequence
  Description of Artificial Sequence: Synthetic oligonucleotide
gugguuccggcugcuugug

SEQ ID NO: 261600 - RNA, 19 nt, Artificial Sequence
  Description of Artificial Sequence: Synthetic oligonucleotide
aggacacaauccacacgga

SEQ ID NO: 261601 - RNA, 19 nt, Artificial Sequence
  Description of Artificial Sequence: Synthetic oligonucleotide
cugguuaaagaagccaauu

SEQ ID NO: 261602 - RNA, 19 nt, Artificial Sequence
  Description of Artificial Sequence: Synthetic oligonucleotide
gucuagggcugcaaacuua

SEQ ID NO: 261603 - RNA, 19 nt, Artificial Sequence
  Description of Artificial Sequence: Synthetic oligonucleotide
gucauguaauugccccugu

SEQ ID NO: 261604 - RNA, 19 nt, Artificial Sequence
  Description of Artificial Sequence: Synthetic oligonucleotide
cccuacaccguuggggccc

SEQ ID NO: 261605 - RNA, 19 nt, Artificial Sequence
  Description of Artificial Sequence: Synthetic oligonucleotide
caaugugcuucaagagcgu

SEQ ID NO: 261606 - RNA, 19 nt, Artificial Sequence
  Description of Artificial Sequence: Synthetic oligonucleotide
gcuggcguuucaucagcca

SEQ ID NO: 261607 - RNA, 19 nt, Artificial Sequence
  Description of Artificial Sequence: Synthetic oligonucleotide
caucgaucugacugacacu

SEQ ID NO: 261608 - RNA, 19 nt, Artificial Sequence
  Description of Artificial Sequence: Synthetic oligonucleotide
ugccgugggcugagaugcu

SEQ ID NO: 261609 - RNA, 19 nt, Artificial Sequence
  Description of Artificial Sequence: Synthetic oligonucleotide
gcguggucuugccuuugcc

SEQ ID NO: 261610 - RNA, 19 nt, Artificial Sequence
  Description of Artificial Sequence: Synthetic oligonucleotide
gcgccaguagcccucagcu

SEQ ID NO: 261611 - RNA, 19 nt, Artificial Sequence
  Description of Artificial Sequence: Synthetic oligonucleotide
caaucccgaggccgguuga

SEQ ID NO: 261612 - RNA, 19 nt, Artificial Sequence
  Description of Artificial Sequence: Synthetic oligonucleotide
agccagccaggaugcgccu

SEQ ID NO: 261613 - RNA, 19 nt, Artificial Sequence
  Description of Artificial Sequence: Synthetic oligonucleotide
cggcacgaagaacagcuug

SEQ ID NO: 261614 - RNA, 19 nt, Artificial Sequence
  Description of Artificial Sequence: Synthetic oligonucleotide
cccacaacuggcaauuggu

SEQ ID NO: 261615 - RNA, 19 nt, Artificial Sequence
  Description of Artificial Sequence: Synthetic oligonucleotide
cggcucauccaagaugagg

SEQ ID NO: 261616 - RNA, 19 nt, Artificial Sequence
  Description of Artificial Sequence: Synthetic oligonucleotide
ggaugcgccucgccuuggc

SEQ ID NO: 261617 - RNA, 19 nt, Artificial Sequence
  Description of Artificial Sequence: Synthetic oligonucleotide
ggccgguugaccaugacuu

SEQ ID NO: 261618 - RNA, 19 nt, Artificial Sequence
  Description of Artificial Sequence: Synthetic oligonucleotide
gcccucguagccaaauguc

SEQ ID NO: 261619 - RNA, 19 nt, Artificial Sequence
  Description of Artificial Sequence: Synthetic oligonucleotide
cguagcggcggccugcgac

SEQ ID NO: 261620 - RNA, 19 nt, Artificial Sequence
  Description of Artificial Sequence: Synthetic oligonucleotide
cacccacaacuggcaauug

SEQ ID NO: 261621 - RNA, 19 nt, Artificial Sequence
  Description of Artificial Sequence: Synthetic oligonucleotide
cugcgacgauguacagguc

SEQ ID NO: 261622 - RNA, 19 nt, Artificial Sequence
  Description of Artificial Sequence: Synthetic oligonucleotide
caaccccagugcuuuauuu

SEQ ID NO: 261623 - RNA, 19 nt, Artificial Sequence
  Description of Artificial Sequence: Synthetic oligonucleotide
gguaguuauugagccagau

SEQ ID NO: 261624 - RNA, 19 nt, Artificial Sequence
  Description of Artificial Sequence: Synthetic oligonucleotide
caagagcguggucuugccu

SEQ ID NO: 261625 - RNA, 19 nt, Artificial Sequence
  Description of Artificial Sequence: Synthetic oligonucleotide
uagcggcggccugcgacga

SEQ ID NO: 261626 - RNA, 19 nt, Artificial Sequence
  Description of Artificial Sequence: Synthetic oligonucleotide
ggcuagggagacgcgcaug

SEQ ID NO: 261627 - RNA, 19 nt, Artificial Sequence
  Description of Artificial Sequence: Synthetic oligonucleotide
cauggcccauguggcugag

SEQ ID NO: 261628 - RNA, 19 nt, Artificial Sequence
  Description of Artificial Sequence: Synthetic oligonucleotide
cuagcaacuugagucgcuu

SEQ ID NO: 261629 - RNA, 19 nt, Artificial Sequence
  Description of Artificial Sequence: Synthetic oligonucleotide
cuguaguaauggagccucu

SEQ ID NO: 261630 - RNA, 19 nt, Artificial Sequence
  Description of Artificial Sequence: Synthetic oligonucleotide
gccgguugaccaugacuuc

SEQ ID NO: 261631 - RNA, 19 nt, Artificial Sequence
  Description of Artificial Sequence: Synthetic oligonucleotide
caccacccacaacuggcaa

SEQ ID NO: 261632 - RNA, 19 nt, Artificial Sequence
  Description of Artificial Sequence: Synthetic oligonucleotide
cagcuugcacugcuggcgu

SEQ ID NO: 261633 - RNA, 19 nt, Artificial Sequence
  Description of Artificial Sequence: Synthetic oligonucleotide
cagaugcguucucuaacau

SEQ ID NO: 261634 - RNA, 19 nt, Artificial Sequence
  Description of Artificial Sequence: Synthetic oligonucleotide
gcguucucuaacaucgccu

SEQ ID NO: 261635 - RNA, 19 nt, Artificial Sequence
  Description of Artificial Sequence: Synthetic oligonucleotide
ugggucgcuucaggagcuc

SEQ ID NO: 261636 - RNA, 19 nt, Artificial Sequence
  Description of Artificial Sequence: Synthetic oligonucleotide
guccuucggugggaaggac

SEQ ID NO: 261637 - RNA, 19 nt, Artificial Sequence
  Description of Artificial Sequence: Synthetic oligonucleotide
ggggucguuuggcuucguc

SEQ ID NO: 261638 - RNA, 19 nt, Artificial Sequence
  Description of Artificial Sequence: Synthetic oligonucleotide
gcucgcacagcaacacauc

SEQ ID NO: 261639 - RNA, 19 nt, Artificial Sequence
  Description of Artificial Sequence: Synthetic oligonucleotide
ggaaggugaaacgcacggu

SEQ ID NO: 261640 - RNA, 19 nt, Artificial Sequence
  Description of Artificial Sequence: Synthetic oligonucleotide
ggccaccuuaacuuggcuu

SEQ ID NO: 261641 - RNA, 19 nt, Artificial Sequence
  Description of Artificial Sequence: Synthetic oligonucleotide
ggccugcgacgauguacag

SEQ ID NO: 261642 - RNA, 19 nt, Artificial Sequence
  Description of Artificial Sequence: Synthetic oligonucleotide
gguuugcuucucggccugc

SEQ ID NO: 261643 - RNA, 19 nt, Artificial Sequence
  Description of Artificial Sequence: Synthetic oligonucleotide
cacacgcaucaaggcaaca

SEQ ID NO: 261644 - RNA, 19 nt, Artificial Sequence
  Description of Artificial Sequence: Synthetic oligonucleotide
cugccgcgaagacaccucu

SEQ ID NO: 261645 - RNA, 19 nt, Artificial Sequence
  Description of Artificial Sequence: Synthetic oligonucleotide
gccgugggcugagaugcug

SEQ ID NO: 261646 - RNA, 19 nt, Artificial Sequence
  Description of Artificial Sequence: Synthetic oligonucleotide
ggacacggagaagucauuu

SEQ ID NO: 261647 - RNA, 19 nt, Artificial Sequence
  Description of Artificial Sequence: Synthetic oligonucleotide
guguauuccuugggucgcu

SEQ ID NO: 261648 - RNA, 19 nt, Artificial Sequence
  Description of Artificial Sequence: Synthetic oligonucleotide
gcguugacaaacagcuccu

SEQ ID NO: 261649 - RNA, 19 nt, Artificial Sequence
  Description of Artificial Sequence: Synthetic oligonucleotide
cugcgccaguagcccucag

SEQ ID NO: 261650 - RNA, 19 nt, Artificial Sequence
  Description of Artificial Sequence: Synthetic oligonucleotide
gcgcgguuggcaaugugcu

SEQ ID NO: 261651 - RNA, 19 nt, Artificial Sequence
  Description of Artificial Sequence: Synthetic oligonucleotide
ccuggcguucauaauccau

SEQ ID NO: 261652 - RNA, 19 nt, Artificial Sequence
  Description of Artificial Sequence: Synthetic oligonucleotide
gggcgcgguuggcaaugug

SEQ ID NO: 261653 - RNA, 19 nt, Artificial Sequence
  Description of Artificial Sequence: Synthetic oligonucleotide
ccucucgcuuguagucauc

SEQ ID NO: 261654 - RNA, 19 nt, Artificial Sequence
  Description of Artificial Sequence: Synthetic oligonucleotide
gggugggacgauucugcau

SEQ ID NO: 261655 - RNA, 19 nt, Artificial Sequence
  Description of Artificial Sequence: Synthetic oligonucleotide
cccguagcggcggccugcg

SEQ ID NO: 261656 - RNA, 19 nt, Artificial Sequence
  Description of Artificial Sequence: Synthetic oligonucleotide
ccgggcaucguggcuaaca

SEQ ID NO: 261657 - RNA, 19 nt, Artificial Sequence
  Description of Artificial Sequence: Synthetic oligonucleotide
gcccguagcggcggccugc

SEQ ID NO: 261658 - RNA, 19 nt, Artificial Sequence
  Description of Artificial Sequence: Synthetic oligonucleotide
cauuuccccguugguuggu

SEQ ID NO: 261659 - RNA, 19 nt, Artificial Sequence
  Description of Artificial Sequence: Synthetic oligonucleotide
gcguuucaucagccaccac

SEQ ID NO: 261660 - RNA, 19 nt, Artificial Sequence
  Description of Artificial Sequence: Synthetic oligonucleotide
gucacaccgugcagcccua

SEQ ID NO: 261661 - RNA, 19 nt, Artificial Sequence
  Description of Artificial Sequence: Synthetic oligonucleotide
cuggcccucguagccaaau

SEQ ID NO: 261662 - RNA, 19 nt, Artificial Sequence
  Description of Artificial Sequence: Synthetic oligonucleotide
cgcugcgccaguagcccuc

SEQ ID NO: 261663 - RNA, 19 nt, Artificial Sequence
  Description of Artificial Sequence: Synthetic oligonucleotide
cagcaaccccagugcuuua

SEQ ID NO: 261664 - RNA, 19 nt, Artificial Sequence
  Description of Artificial Sequence: Synthetic oligonucleotide
gcaaccccagugcuuuauu

SEQ ID NO: 261665 - RNA, 19 nt, Artificial Sequence
  Description of Artificial Sequence: Synthetic oligonucleotide
aggggucguuuggcuucgu

SEQ ID NO: 261666 - RNA, 19 nt, Artificial Sequence
  Description of Artificial Sequence: Synthetic oligonucleotide
ccgucggcacuucugcugu

SEQ ID NO: 261667 - RNA, 19 nt, Artificial Sequence
  Description of Artificial Sequence: Synthetic oligonucleotide
caccguuggggcccacgau

SEQ ID NO: 261668 - RNA, 19 nt, Artificial Sequence
  Description of Artificial Sequence: Synthetic oligonucleotide
ccacccacaacuggcaauu

SEQ ID NO: 261669 - RNA, 19 nt, Artificial Sequence
  Description of Artificial Sequence: Synthetic oligonucleotide
cgcgaagacaccucugcuu

SEQ ID NO: 261670 - RNA, 19 nt, Artificial Sequence
  Description of Artificial Sequence: Synthetic oligonucleotide
cucaaucccgaggccgguu

SEQ ID NO: 261671 - RNA, 19 nt, Artificial Sequence
  Description of Artificial Sequence: Synthetic oligonucleotide
gccugccgcgaagacaccu

SEQ ID NO: 261672 - RNA, 19 nt, Artificial Sequence
  Description of Artificial Sequence: Synthetic oligonucleotide
ccuuaccccgucugcuccu

SEQ ID NO: 261673 - RNA, 19 nt, Artificial Sequence
  Description of Artificial Sequence: Synthetic oligonucleotide
gcccuagcacaggugggcu

SEQ ID NO: 261674 - RNA, 19 nt, Artificial Sequence
  Description of Artificial Sequence: Synthetic oligonucleotide
ccgcgaagacaccucugcu

SEQ ID NO: 261675 - RNA, 19 nt, Artificial Sequence
  Description of Artificial Sequence: Synthetic oligonucleotide
cgaggccgguugaccauga

SEQ ID NO: 261676 - RNA, 19 nt, Artificial Sequence
  Description of Artificial Sequence: Synthetic oligonucleotide
gcucaaucccgaggccggu

SEQ ID NO: 261677 - RNA, 19 nt, Artificial Sequence
  Description of Artificial Sequence: Synthetic oligonucleotide
gggacacggagaagucauu

SEQ ID NO: 261678 - RNA, 19 nt, Artificial Sequence
  Description of Artificial Sequence: Synthetic oligonucleotide
cgccugccgcgaagacacc

SEQ ID NO: 261679 - RNA, 19 nt, Artificial Sequence
  Description of Artificial Sequence: Synthetic oligonucleotide
ccaacaccucucgcuugua

SEQ ID NO: 261680 - RNA, 19 nt, Artificial Sequence
  Description of Artificial Sequence: Synthetic oligonucleotide
cccgaggccgguugaccau

SEQ ID NO: 261681 - RNA, 19 nt, Artificial Sequence
  Description of Artificial Sequence: Synthetic oligonucleotide
gcgguggaucugggaaggu

SEQ ID NO: 261682 - RNA, 19 nt, Artificial Sequence
  Description of Artificial Sequence: Synthetic oligonucleotide
gccgggcaucguggcuaac

SEQ ID NO: 261683 - RNA, 19 nt, Artificial Sequence
  Description of Artificial Sequence: Synthetic oligonucleotide
ccgcugcgccaguagcccu

SEQ ID NO: 261684 - RNA, 19 nt, Artificial Sequence
  Description of Artificial Sequence: Synthetic oligonucleotide
cgcgguuggcaaugugcuu

SEQ ID NO: 261685 - RNA, 19 nt, Artificial Sequence
  Description of Artificial Sequence: Synthetic oligonucleotide
ccguagcggcggccugcga

SEQ ID NO: 261686 - RNA, 19 nt, Artificial Sequence
  Description of Artificial Sequence: Synthetic oligonucleotide
cgcuuggugucggcacgaa

SEQ ID NO: 261687 - RNA, 19 nt, Artificial Sequence
  Description of Artificial Sequence: Synthetic oligonucleotide
cgccucgccuuggccucug

SEQ ID NO: 261688 - RNA, 19 nt, Artificial Sequence
  Description of Artificial Sequence: Synthetic oligonucleotide
gcgccucgccuuggccucu

SEQ ID NO: 261689 - RNA, 19 nt, Artificial Sequence
  Description of Artificial Sequence: Synthetic oligonucleotide
agacaguuaaauaagaacc

SEQ ID NO: 261690 - RNA, 19 nt, Artificial Sequence
  Description of Artificial Sequence: Synthetic oligonucleotide
aagaccuuaauucagccag

SEQ ID NO: 261691 - RNA, 19 nt, Artificial Sequence
  Description of Artificial Sequence: Synthetic oligonucleotide
uauacaguaaauaaguauc

SEQ ID NO: 261692 - RNA, 19 nt, Artificial Sequence
  Description of Artificial Sequence: Synthetic oligonucleotide
augucaauauacuaguagc

SEQ ID NO: 261693 - RNA, 19 nt, Artificial Sequence
  Description of Artificial Sequence: Synthetic oligonucleotide
ugguaauucaucaaagagc

SEQ ID NO: 261694 - RNA, 19 nt, Artificial Sequence
  Description of Artificial Sequence: Synthetic oligonucleotide
aacauuaagaugucaauau

SEQ ID NO: 261695 - RNA, 19 nt, Artificial Sequence
  Description of Artificial Sequence: Synthetic oligonucleotide
aagguugucaaauucagaa

SEQ ID NO: 261696 - RNA, 19 nt, Artificial Sequence
  Description of Artificial Sequence: Synthetic oligonucleotide
aguaaauaaguaucaacag

SEQ ID NO: 261697 - RNA, 19 nt, Artificial Sequence
  Description of Artificial Sequence: Synthetic oligonucleotide
gaugucaauauacuaguag

SEQ ID NO: 261698 - RNA, 19 nt, Artificial Sequence
  Description of Artificial Sequence: Synthetic oligonucleotide
uacaguuaaaaccauaaau

SEQ ID NO: 261699 - RNA, 19 nt, Artificial Sequence
  Description of Artificial Sequence: Synthetic oligonucleotide
uauaguuugacuacugagu

SEQ ID NO: 261700 - RNA, 19 nt, Artificial Sequence
  Description of Artificial Sequence: Synthetic oligonucleotide
ugugcaaacgugcacaagc

SEQ ID NO: 261701 - RNA, 19 nt, Artificial Sequence
  Description of Artificial Sequence: Synthetic oligonucleotide
auaguuugacuacugaguc

SEQ ID NO: 261702 - RNA, 19 nt, Artificial Sequence
  Description of Artificial Sequence: Synthetic oligonucleotide
uagaccacuaaaauaauac

SEQ ID NO: 261703 - RNA, 19 nt, Artificial Sequence
  Description of Artificial Sequence: Synthetic oligonucleotide
cuuaacagugaguagagug

SEQ ID NO: 261704 - RNA, 19 nt, Artificial Sequence
  Description of Artificial Sequence: Synthetic oligonucleotide
aagaugucaauauacuagu

SEQ ID NO: 261705 - RNA, 19 nt, Artificial Sequence
  Description of Artificial Sequence: Synthetic oligonucleotide
uuaguuuuccauaaggcau

SEQ ID NO: 261706 - RNA, 19 nt, Artificial Sequence
  Description of Artificial Sequence: Synthetic oligonucleotide
aaauaugaaacuguacuca

SEQ ID NO: 261707 - RNA, 19 nt, Artificial Sequence
  Description of Artificial Sequence: Synthetic oligonucleotide
cuaauucaggauuuaauac

SEQ ID NO: 261708 - RNA, 19 nt, Artificial Sequence
  Description of Artificial Sequence: Synthetic oligonucleotide
uugacuacugagucaaacg

SEQ ID NO: 261709 - RNA, 19 nt, Artificial Sequence
  Description of Artificial Sequence: Synthetic oligonucleotide
uuaacagugaguagaguga

SEQ ID NO: 261710 - RNA, 19 nt, Artificial Sequence
  Description of Artificial Sequence: Synthetic oligonucleotide
uaauagggcagccagcugc

SEQ ID NO: 261711 - RNA, 19 nt, Artificial Sequence
  Description of Artificial Sequence: Synthetic oligonucleotide
aucccuaugugccagguac

SEQ ID NO: 261712 - RNA, 19 nt, Artificial Sequence
  Description of Artificial Sequence: Synthetic oligonucleotide
uuauacaguaaauaaguau

SEQ ID NO: 261713 - RNA, 19 nt, Artificial Sequence
  Description of Artificial Sequence: Synthetic oligonucleotide
auugaaauuacugaagagu

SEQ ID NO: 261714 - RNA, 19 nt, Artificial Sequence
  Description of Artificial Sequence: Synthetic oligonucleotide
uagacaguuaaauaagaac

SEQ ID NO: 261715 - RNA, 19 nt, Artificial Sequence
  Description of Artificial Sequence: Synthetic oligonucleotide
acaaaaugugcaaacgugc

SEQ ID NO: 261716 - RNA, 19 nt, Artificial Sequence
  Description of Artificial Sequence: Synthetic oligonucleotide
auaagaaccacauuauaaa

SEQ ID NO: 261717 - RNA, 19 nt, Artificial Sequence
  Description of Artificial Sequence: Synthetic oligonucleotide
auaaguaucaacagucaac

SEQ ID NO: 261718 - RNA, 19 nt, Artificial Sequence
  Description of Artificial Sequence: Synthetic oligonucleotide
agaaaagcaagucuguggu

SEQ ID NO: 261719 - RNA, 19 nt, Artificial Sequence
  Description of Artificial Sequence: Synthetic oligonucleotide
caguaaauaaguaucaaca

SEQ ID NO: 261720 - RNA, 19 nt, Artificial Sequence
  Description of Artificial Sequence: Synthetic oligonucleotide
uccaaaguaagauaugauc

SEQ ID NO: 261721 - RNA, 19 nt, Artificial Sequence
  Description of Artificial Sequence: Synthetic oligonucleotide
uaaauaagaaccacauuau

SEQ ID NO: 261722 - RNA, 19 nt, Artificial Sequence
  Description of Artificial Sequence: Synthetic oligonucleotide
uguguaaucaaauucuguu

SEQ ID NO: 261723 - RNA, 19 nt, Artificial Sequence
  Description of Artificial Sequence: Synthetic oligonucleotide
uguacucaacaaaaugugc

SEQ ID NO: 261724 - RNA, 19 nt, Artificial Sequence
  Description of Artificial Sequence: Synthetic oligonucleotide
uuuucguuccuguuggaag

SEQ ID NO: 261725 - RNA, 19 nt, Artificial Sequence
  Description of Artificial Sequence: Synthetic oligonucleotide
caaucugaaacacugcccc

SEQ ID NO: 261726 - RNA, 19 nt, Artificial Sequence
  Description of Artificial Sequence: Synthetic oligonucleotide
  modified_base (6)..(6): a, c, u, g, unknown or other
uuuucnggguaacagggca

SEQ ID NO: 261727 - RNA, 19 nt, Artificial Sequence
  Description of Artificial Sequence: Synthetic oligonucleotide
gacucucagacucaagagg

SEQ ID NO: 261728 - RNA, 19 nt, Artificial Sequence
  Description of Artificial Sequence: Synthetic oligonucleotide
ugaccuaugagcccagaag

SEQ ID NO: 261729 - RNA, 19 nt, Artificial Sequence
  Description of Artificial Sequence: Synthetic oligonucleotide
agauaugaucacuuccugg

SEQ ID NO: 261730 - RNA, 19 nt, Artificial Sequence
  Description of Artificial Sequence: Synthetic oligonucleotide
ucacacaaucucauuagcc

SEQ ID NO: 261731 - RNA, 19 nt, Artificial Sequence
  Description of Artificial Sequence: Synthetic oligonucleotide
aaguagguaguuaggaagg

SEQ ID NO: 261732 - RNA, 19 nt, Artificial Sequence
  Description of Artificial Sequence: Synthetic oligonucleotide
aacuagacaguuaaauaag

SEQ ID NO: 261733 - RNA, 19 nt, Artificial Sequence
  Description of Artificial Sequence: Synthetic oligonucleotide
uagauaauucugcaaacuc

SEQ ID NO: 261734 - RNA, 19 nt, Artificial Sequence
  Description of Artificial Sequence: Synthetic oligonucleotide
gaagggucaauagauuugg

SEQ ID NO: 261735 - RNA, 19 nt, Artificial Sequence
  Description of Artificial Sequence: Synthetic oligonucleotide
ugacuacugagucaaacgu

SEQ ID NO: 261736 - RNA, 19 nt, Artificial Sequence
  Description of Artificial Sequence: Synthetic oligonucleotide
ucaauauacuaguagcaaa

SEQ ID NO: 261737 - RNA, 19 nt, Artificial Sequence
  Description of Artificial Sequence: Synthetic oligonucleotide
  modified_base (8)..(8): a, c, u, g, unknown or other
aguuuucnggguaacaggg

SEQ ID NO: 261738 - RNA, 19 nt, Artificial Sequence
  Description of Artificial Sequence: Synthetic oligonucleotide
agguuuucguuccuguugg

SEQ ID NO: 261739 - RNA, 19 nt, Artificial Sequence
  Description of Artificial Sequence: Synthetic oligonucleotide
gacuuggucaauucuauca

SEQ ID NO: 261740 - RNA, 19 nt, Artificial Sequence
  Description of Artificial Sequence: Synthetic oligonucleotide
ugugcaguaaacacaaguu

SEQ ID NO: 261741 - RNA, 19 nt, Artificial Sequence
  Description of Artificial Sequence: Synthetic oligonucleotide
aaaguaagauaugaucacu

SEQ ID NO: 261742 - RNA, 19 nt, Artificial Sequence
  Description of Artificial Sequence: Synthetic oligonucleotide
ucuggugugcaguaaacac

SEQ ID NO: 261743 - RNA, 19 nt, Artificial Sequence
  Description of Artificial Sequence: Synthetic oligonucleotide
aaauaagaaccacauuaua

SEQ ID NO: 261744 - RNA, 19 nt, Artificial Sequence
  Description of Artificial Sequence: Synthetic oligonucleotide
uuaauucagccagacuugg

SEQ ID NO: 261745 - RNA, 19 nt, Artificial Sequence
  Description of Artificial Sequence: Synthetic oligonucleotide
uccuaacucagcuugggga

SEQ ID NO: 261746 - RNA, 19 nt, Artificial Sequence
  Description of Artificial Sequence: Synthetic oligonucleotide
cuagucaucagccuuccug

SEQ ID NO: 261747 - RNA, 19 nt, Artificial Sequence
  Description of Artificial Sequence: Synthetic oligonucleotide
uugaguauaguuugaguau

SEQ ID NO: 261748 - RNA, 19 nt, Artificial Sequence
  Description of Artificial Sequence: Synthetic oligonucleotide
caaacgugcacaagcacag

SEQ ID NO: 261749 - RNA, 19 nt, Artificial Sequence
  Description of Artificial Sequence: Synthetic oligonucleotide
cuugaguauaguuugagua

SEQ ID NO: 261750 - RNA, 19 nt, Artificial Sequence
  Description of Artificial Sequence: Synthetic oligonucleotide
aaauaaguaucaacaguca

SEQ ID NO: 261751 - RNA, 19 nt, Artificial Sequence
  Description of Artificial Sequence: Synthetic oligonucleotide
cacaaucaugcguuguucg

SEQ ID NO: 261752 - RNA, 19 nt, Artificial Sequence
  Description of Artificial Sequence: Synthetic oligonucleotide
guaccauugaaauuacuga

SEQ ID NO: 261753 - RNA, 19 nt, Artificial Sequence
  Description of Artificial Sequence: Synthetic oligonucleotide
  modified_base (9)..(9): a, c, u, g, unknown or other
caguuuucnggguaacagg

SEQ ID NO: 261754 - RNA, 19 nt, Artificial Sequence
  Description of Artificial Sequence: Synthetic oligonucleotide
auaagagaaauuagaccac

SEQ ID NO: 261755 - RNA, 19 nt, Artificial Sequence
  Description of Artificial Sequence: Synthetic oligonucleotide
gaccuaugagcccagaaga

SEQ ID NO: 261756 - RNA, 19 nt, Artificial Sequence
  Description of Artificial Sequence: Synthetic oligonucleotide
agaccacuaaaauaauaca

SEQ ID NO: 261757 - RNA, 19 nt, Artificial Sequence
  Description of Artificial Sequence: Synthetic oligonucleotide
ugcagcagaaucaccggcc

SEQ ID NO: 261758 - RNA, 19 nt, Artificial Sequence
  Description of Artificial Sequence: Synthetic oligonucleotide
gaaauuagaccacuaaaau

SEQ ID NO: 261759 - RNA, 19 nt, Artificial Sequence
  Description of Artificial Sequence: Synthetic oligonucleotide
ugauaauagggcagccagc

SEQ ID NO: 261760 - RNA, 19 nt, Artificial Sequence
  Description of Artificial Sequence: Synthetic oligonucleotide
aaaccuaccucuaggccuc

SEQ ID NO: 261761 - RNA, 19 nt, Artificial Sequence
  Description of Artificial Sequence: Synthetic oligonucleotide
agagcaucagugcacgucu

SEQ ID NO: 261762 - RNA, 19 nt, Artificial Sequence
  Description of Artificial Sequence: Synthetic oligonucleotide
uuagaccacuaaaauaaua

SEQ ID NO: 261763 - RNA, 19 nt, Artificial Sequence
  Description of Artificial Sequence: Synthetic oligonucleotide
ugugccagguacaaagaaa

SEQ ID NO: 261764 - RNA, 19 nt, Artificial Sequence
  Description of Artificial Sequence: Synthetic oligonucleotide
uaacagugaguagagugag

SEQ ID NO: 261765 - RNA, 19 nt, Artificial Sequence
  Description of Artificial Sequence: Synthetic oligonucleotide
guaucaacagucaacacaa

SEQ ID NO: 261766 - RNA, 19 nt, Artificial Sequence
  Description of Artificial Sequence: Synthetic oligonucleotide
uuuccuuaacagugaguag

SEQ ID NO: 261767 - RNA, 19 nt, Artificial Sequence
  Description of Artificial Sequence: Synthetic oligonucleotide
ucaagaccucacauguuca

SEQ ID NO: 261768 - RNA, 19 nt, Artificial Sequence
  Description of Artificial Sequence: Synthetic oligonucleotide
gguaacaccuccuuguuca

SEQ ID NO: 261769 - RNA, 19 nt, Artificial Sequence
  Description of Artificial Sequence: Synthetic oligonucleotide
aaucaugcguuguucguuu

SEQ ID NO: 261770 - RNA, 19 nt, Artificial Sequence
  Description of Artificial Sequence: Synthetic oligonucleotide
aguuugacuacugagucaa

SEQ ID NO: 261771 - RNA, 19 nt, Artificial Sequence
  Description of Artificial Sequence: Synthetic oligonucleotide
aggagccuagucaucagcc

SEQ ID NO: 261772 - RNA, 19 nt, Artificial Sequence
  Description of Artificial Sequence: Synthetic oligonucleotide
ugaagcucgaagguuguca

SEQ ID NO: 261773 - RNA, 19 nt, Artificial Sequence
  Description of Artificial Sequence: Synthetic oligonucleotide
gucauuguggaguggggcc

SEQ ID NO: 261774 - RNA, 19 nt, Artificial Sequence
  Description of Artificial Sequence: Synthetic oligonucleotide
gugugcaacacacauggca

SEQ ID NO: 261775 - RNA, 19 nt, Artificial Sequence
  Description of Artificial Sequence: Synthetic oligonucleotide
ucugaaacacugccccgcc

SEQ ID NO: 261776 - RNA, 19 nt, Artificial Sequence
  Description of Artificial Sequence: Synthetic oligonucleotide
ugaguauaguuugacuacu

SEQ ID NO: 261777 - RNA, 19 nt, Artificial Sequence
  Description of Artificial Sequence: Synthetic oligonucleotide
cuuuccuuaacagugagua

SEQ ID NO: 261778 - RNA, 19 nt, Artificial Sequence
  Description of Artificial Sequence: Synthetic oligonucleotide
caaaaugugcaaacgugca

SEQ ID NO: 261779 - RNA, 19 nt, Artificial Sequence
  Description of Artificial Sequence: Synthetic oligonucleotide
acaaucugaaggaaguaca

SEQ ID NO: 261780 - RNA, 19 nt, Artificial Sequence
  Description of Artificial Sequence: Synthetic oligonucleotide
uaguuugacuacugaguca

SEQ ID NO: 261781 - RNA, 19 nt, Artificial Sequence
  Description of Artificial Sequence: Synthetic oligonucleotide
ugagcaacacugguaacac

SEQ ID NO: 261782 - RNA, 19 nt, Artificial Sequence
  Description of Artificial Sequence: Synthetic oligonucleotide
aggcacuccccaugggucc

SEQ ID NO: 261783 - RNA, 19 nt, Artificial Sequence
  Description of Artificial Sequence: Synthetic oligonucleotide
agguaguuaggaagggccc

SEQ ID NO: 261784 - RNA, 19 nt, Artificial Sequence
  Description of Artificial Sequence: Synthetic oligonucleotide
gaguauaguuugaguauag

SEQ ID NO: 261785 - RNA, 19 nt, Artificial Sequence
  Description of Artificial Sequence: Synthetic oligonucleotide
uaaauccaauaaaguaguc

SEQ ID NO: 261786 - RNA, 19 nt, Artificial Sequence
  Description of Artificial Sequence: Synthetic oligonucleotide
agugaguagagugaggguu

SEQ ID NO: 261787 - RNA, 19 nt, Artificial Sequence
  Description of Artificial Sequence: Synthetic oligonucleotide
aagaaaggaaguaguaguu

SEQ ID NO: 261788 - RNA, 19 nt, Artificial Sequence
  Description of Artificial Sequence: Synthetic oligonucleotide
ugaguauaguuugaguaua

SEQ ID NO: 261789 - RNA, 19 nt, Artificial Sequence
  Description of Artificial Sequence: Synthetic oligonucleotide
acaaucaugcguuguucgu

SEQ ID NO: 261790 - RNA, 19 nt, Artificial Sequence
  Description of Artificial Sequence: Synthetic oligonucleotide
gacuacugagucaaacgug

SEQ ID NO: 261791 - RNA, 19 nt, Artificial Sequence
  Description of Artificial Sequence: Synthetic oligonucleotide
aggguacucaucgggaagg

SEQ ID NO: 261792 - RNA, 19 nt, Artificial Sequence
  Description of Artificial Sequence: Synthetic oligonucleotide
gauaauagggcagccagcu

SEQ ID NO: 261793 - RNA, 19 nt, Artificial Sequence
  Description of Artificial Sequence: Synthetic oligonucleotide
ugcaaacgugcacaagcac

SEQ ID NO: 261794 - RNA, 19 nt, Artificial Sequence
  Description of Artificial Sequence: Synthetic oligonucleotide
  modified_base (4)..(4): a, c, u, g, unknown or other
uucnggguaacagggcaug

SEQ ID NO: 261795 - RNA, 19 nt, Artificial Sequence
  Description of Artificial Sequence: Synthetic oligonucleotide
uuagacucccacgagucaa

SEQ ID NO: 261796 - RNA, 19 nt, Artificial Sequence
  Description of Artificial Sequence: Synthetic oligonucleotide
ugggugagaaaagagcauc

SEQ ID NO: 261797 - RNA, 19 nt, Artificial Sequence
  Description of Artificial Sequence: Synthetic oligonucleotide
ugagaaacagcuggaugac

SEQ ID NO: 261798 - RNA, 19 nt, Artificial Sequence
  Description of Artificial Sequence: Synthetic oligonucleotide
ucccaugaugucucuaccu

SEQ ID NO: 261799 - RNA, 19 nt, Artificial Sequence
  Description of Artificial Sequence: Synthetic oligonucleotide
cacacuagugguguuuacc

SEQ ID NO: 261800 - RNA, 19 nt, Artificial Sequence
  Description of Artificial Sequence: Synthetic oligonucleotide
  modified_base (5)..(5): a, c, u, g, unknown or other
uuucnggguaacagggcau

SEQ ID NO: 261801 - RNA, 19 nt, Artificial Sequence
  Description of Artificial Sequence: Synthetic oligonucleotide
acuagacaguuaaauaaga

SEQ ID NO: 261802 - RNA, 19 nt, Artificial Sequence
  Description of Artificial Sequence: Synthetic oligonucleotide
accuuagacucccacgagu

SEQ ID NO: 261803 - RNA, 19 nt, Artificial Sequence
  Description of Artificial Sequence: Synthetic oligonucleotide
agggucaauagauuuggua

SEQ ID NO: 261804 - RNA, 19 nt, Artificial Sequence
  Description of Artificial Sequence: Synthetic oligonucleotide
guguuuaccuuagacuccc

SEQ ID NO: 261805 - RNA, 19 nt, Artificial Sequence
  Description of Artificial Sequence: Synthetic oligonucleotide
guaacagggcaugagcgug

SEQ ID NO: 261806 - RNA, 19 nt, Artificial Sequence
  Description of Artificial Sequence: Synthetic oligonucleotide
cucaacagucauuguggag

SEQ ID NO: 261807 - RNA, 19 nt, Artificial Sequence
  Description of Artificial Sequence: Synthetic oligonucleotide
uccuuaggguacucaucgg

SEQ ID NO: 261808 - RNA, 19 nt, Artificial Sequence
  Description of Artificial Sequence: Synthetic oligonucleotide
ucccacgagucaaaggaaa

SEQ ID NO: 261809 - RNA, 19 nt, Artificial Sequence
  Description of Artificial Sequence: Synthetic oligonucleotide
acaugcgcugguauggccg

SEQ ID NO: 261810 - RNA, 19 nt, Artificial Sequence
  Description of Artificial Sequence: Synthetic oligonucleotide
  modified_base (7)..(7): a, c, u, g, unknown or other
guuuucnggguaacagggc

SEQ ID NO: 261811 - RNA, 19 nt, Artificial Sequence
  Description of Artificial Sequence: Synthetic oligonucleotide
gaccucacauguucauugc

SEQ ID NO: 261812 - RNA, 19 nt, Artificial Sequence
  Description of Artificial Sequence: Synthetic oligonucleotide
gaguauaguuugacuacug

SEQ ID NO: 261813 - RNA, 19 nt, Artificial Sequence
  Description of Artificial Sequence: Synthetic oligonucleotide
gguaccaaaugauggccag

SEQ ID NO: 261814 - RNA, 19 nt, Artificial Sequence
  Description of Artificial Sequence: Synthetic oligonucleotide
agguugucaaauucagaaa

SEQ ID NO: 261815 - RNA, 19 nt, Artificial Sequence
  Description of Artificial Sequence: Synthetic oligonucleotide
uaggcacuccccauggguc

SEQ ID NO: 261816 - RNA, 19 nt, Artificial Sequence
  Description of Artificial Sequence: Synthetic oligonucleotide
aguauaguuugaguauagu

SEQ ID NO: 261817 - RNA, 19 nt, Artificial Sequence
  Description of Artificial Sequence: Synthetic oligonucleotide
uaccucuaggccucuaguc

SEQ ID NO: 261818 - RNA, 19 nt, Artificial Sequence
  Description of Artificial Sequence: Synthetic oligonucleotide
caaaccuaccucuaggccu

SEQ ID NO: 261819 - RNA, 19 nt, Artificial Sequence
  Description of Artificial Sequence: Synthetic oligonucleotide
uguuccaccccagggguug

SEQ ID NO: 261820 - RNA, 19 nt, Artificial Sequence
  Description of Artificial Sequence: Synthetic oligonucleotide
cuggugugcaguaaacaca

SEQ ID NO: 261821 - RNA, 19 nt, Artificial Sequence
  Description of Artificial Sequence: Synthetic oligonucleotide
gucaauauacuaguagcaa

SEQ ID NO: 261822 - RNA, 19 nt, Artificial Sequence
  Description of Artificial Sequence: Synthetic oligonucleotide
aggcugaagggucaauaga

SEQ ID NO: 261823 - RNA, 19 nt, Artificial Sequence
  Description of Artificial Sequence: Synthetic oligonucleotide
uucuuacaguuaaaaccau

SEQ ID NO: 261824 - RNA, 19 nt, Artificial Sequence
  Description of Artificial Sequence: Synthetic oligonucleotide
cuacugaggucacgggugc

SEQ ID NO: 261825 - RNA, 19 nt, Artificial Sequence
  Description of Artificial Sequence: Synthetic oligonucleotide
auaauagggcagccagcug

SEQ ID NO: 261826 - RNA, 19 nt, Artificial Sequence
  Description of Artificial Sequence: Synthetic oligonucleotide
uacucaucgggaagggcau

SEQ ID NO: 261827 - RNA, 19 nt, Artificial Sequence
  Description of Artificial Sequence: Synthetic oligonucleotide
gguauggccgugugggagg

SEQ ID NO: 261828 - RNA, 19 nt, Artificial Sequence
  Description of Artificial Sequence: Synthetic oligonucleotide
uaacuguaccauugaaauu

SEQ ID NO: 261829 - RNA, 19 nt, Artificial Sequence
  Description of Artificial Sequence: Synthetic oligonucleotide
gaggucacgggugccacag

SEQ ID NO: 261830 - RNA, 19 nt, Artificial Sequence
  Description of Artificial Sequence: Synthetic oligonucleotide
ugguaacaccuccuuguuc

SEQ ID NO: 261831 - RNA, 19 nt, Artificial Sequence
  Description of Artificial Sequence: Synthetic oligonucleotide
gacaugcgcugguauggcc

SEQ ID NO: 261832 - RNA, 19 nt, Artificial Sequence
  Description of Artificial Sequence: Synthetic oligonucleotide
guggcuaguaggguggggc

SEQ ID NO: 261833 - RNA, 19 nt, Artificial Sequence
  Description of Artificial Sequence: Synthetic oligonucleotide
ugugugcaacacacauggc

SEQ ID NO: 261834 - RNA, 19 nt, Artificial Sequence
  Description of Artificial Sequence: Synthetic oligonucleotide
ccuaacucagcuuggggac

SEQ ID NO: 261835 - RNA, 19 nt, Artificial Sequence
  Description of Artificial Sequence: Synthetic oligonucleotide
agucaaacguggguguuga

SEQ ID NO: 261836 - RNA, 19 nt, Artificial Sequence
  Description of Artificial Sequence: Synthetic oligonucleotide
ggcaagucacaaucaugcg

SEQ ID NO: 261837 - RNA, 19 nt, Artificial Sequence
  Description of Artificial Sequence: Synthetic oligonucleotide
guaccaaaugauggccagg

SEQ ID NO: 261838 - RNA, 19 nt, Artificial Sequence
  Description of Artificial Sequence: Synthetic oligonucleotide
augugccagguacaaagaa

SEQ ID NO: 261839 - RNA, 19 nt, Artificial Sequence
  Description of Artificial Sequence: Synthetic oligonucleotide
ugguucagugucaguggcu

SEQ ID NO: 261840 - RNA, 19 nt, Artificial Sequence
  Description of Artificial Sequence: Synthetic oligonucleotide
aagagaaauuagaccacua

SEQ ID NO: 261841 - RNA, 19 nt, Artificial Sequence
  Description of Artificial Sequence: Synthetic oligonucleotide
accuaugagcccagaagag

SEQ ID NO: 261842 - RNA, 19 nt, Artificial Sequence
  Description of Artificial Sequence: Synthetic oligonucleotide
ucccuaugugccagguaca

SEQ ID NO: 261843 - RNA, 19 nt, Artificial Sequence
  Description of Artificial Sequence: Synthetic oligonucleotide
gagguugggugagaaaaga

SEQ ID NO: 261844 - RNA, 19 nt, Artificial Sequence
  Description of Artificial Sequence: Synthetic oligonucleotide
cuaacucagcuuggggacc

SEQ ID NO: 261845 - RNA, 19 nt, Artificial Sequence
  Description of Artificial Sequence: Synthetic oligonucleotide
caggggucuggguucuugg

SEQ ID NO: 261846 - RNA, 19 nt, Artificial Sequence
  Description of Artificial Sequence: Synthetic oligonucleotide
agcugcacuucuggugugc

SEQ ID NO: 261847 - RNA, 19 nt, Artificial Sequence
  Description of Artificial Sequence: Synthetic oligonucleotide
agccuagucaucagccuuc

SEQ ID NO: 261848 - RNA, 19 nt, Artificial Sequence
  Description of Artificial Sequence: Synthetic oligonucleotide
gaagguugucaaauucaga

SEQ ID NO: 261849 - RNA, 19 nt, Artificial Sequence
  Description of Artificial Sequence: Synthetic oligonucleotide
ucuaggccucuaguccugg

SEQ ID NO: 261850 - RNA, 19 nt, Artificial Sequence
  Description of Artificial Sequence: Synthetic oligonucleotide
gagucaaacguggguguug

SEQ ID NO: 261851 - RNA, 19 nt, Artificial Sequence
  Description of Artificial Sequence: Synthetic oligonucleotide
cuggucaacggccugagcu

SEQ ID NO: 261852 - RNA, 19 nt, Artificial Sequence
  Description of Artificial Sequence: Synthetic oligonucleotide
agcaucagugcacgucugu

SEQ ID NO: 261853 - RNA, 19 nt, Artificial Sequence
  Description of Artificial Sequence: Synthetic oligonucleotide
gucccaugaugucucuacc

SEQ ID NO: 261854 - RNA, 19 nt, Artificial Sequence
  Description of Artificial Sequence: Synthetic oligonucleotide
aaucccuaugugccaggua

SEQ ID NO: 261855 - RNA, 19 nt, Artificial Sequence
  Description of Artificial Sequence: Synthetic oligonucleotide
caugauaauagggcagcca

SEQ ID NO: 261856 - RNA, 19 nt, Artificial Sequence
  Description of Artificial Sequence: Synthetic oligonucleotide
cccaaaccuaccucuaggc

SEQ ID NO: 261857 - RNA, 19 nt, Artificial Sequence
  Description of Artificial Sequence: Synthetic oligonucleotide
ccuaugagcccagaagagg

SEQ ID NO: 261858 - RNA, 19 nt, Artificial Sequence
  Description of Artificial Sequence: Synthetic oligonucleotide
uacaugccaagaccuuaau

SEQ ID NO: 261859 - RNA, 19 nt, Artificial Sequence
  Description of Artificial Sequence: Synthetic oligonucleotide
cgaagguugucaaauucag

SEQ ID NO: 261860 - RNA, 19 nt, Artificial Sequence
  Description of Artificial Sequence: Synthetic oligonucleotide
ccuuaauucagccagacuu

SEQ ID NO: 261861 - RNA, 19 nt, Artificial Sequence
  Description of Artificial Sequence: Synthetic oligonucleotide
uguagggccuagugguguc

SEQ ID NO: 261862 - RNA, 19 nt, Artificial Sequence
  Description of Artificial Sequence: Synthetic oligonucleotide
gcuacugaggucacgggug

SEQ ID NO: 261863 - RNA, 19 nt, Artificial Sequence
  Description of Artificial Sequence: Synthetic oligonucleotide
acuucucaacagucauugu

SEQ ID NO: 261864 - RNA, 19 nt, Artificial Sequence
  Description of Artificial Sequence: Synthetic oligonucleotide
ccuuagacucccacgaguc

SEQ ID NO: 261865 - RNA, 19 nt, Artificial Sequence
  Description of Artificial Sequence: Synthetic oligonucleotide
ggucacgggugccacaggc

SEQ ID NO: 261866 - RNA, 19 nt, Artificial Sequence
  Description of Artificial Sequence: Synthetic oligonucleotide
  modified_base (2)..(2): a, c, u, g, unknown or other
cnggguaacagggcaugag

SEQ ID NO: 261867 - RNA, 19 nt, Artificial Sequence
  Description of Artificial Sequence: Synthetic oligonucleotide
  modified_base (3)..(3): a, c, u, g, unknown or other
ucnggguaacagggcauga

SEQ ID NO: 261868 - RNA, 19 nt, Artificial Sequence
  Description of Artificial Sequence: Synthetic oligonucleotide
aggggagguccuuucucug

SEQ ID NO: 261869 - RNA, 19 nt, Artificial Sequence
  Description of Artificial Sequence: Synthetic oligonucleotide
gugaguagagugaggguuc

SEQ ID NO: 261870 - RNA, 19 nt, Artificial Sequence
  Description of Artificial Sequence: Synthetic oligonucleotide
cagcuuggggaccaaccug

SEQ ID NO: 261871 - RNA, 19 nt, Artificial Sequence
  Description of Artificial Sequence: Synthetic oligonucleotide
uaguuaggaagggcccuug

SEQ ID NO: 261872 - RNA, 19 nt, Artificial Sequence
  Description of Artificial Sequence: Synthetic oligonucleotide
gaagccccacacuaguggu

SEQ ID NO: 261873 - RNA, 19 nt, Artificial Sequence
  Description of Artificial Sequence: Synthetic oligonucleotide
acacaugugacugccccaa

SEQ ID NO: 261874 - RNA, 19 nt, Artificial Sequence
  Description of Artificial Sequence: Synthetic oligonucleotide
aaacgugcacaagcacaga

SEQ ID NO: 261875 - RNA, 19 nt, Artificial Sequence
  Description of Artificial Sequence: Synthetic oligonucleotide
cuuagacucccacgaguca

SEQ ID NO: 261876 - RNA, 19 nt, Artificial Sequence
  Description of Artificial Sequence: Synthetic oligonucleotide
ggaccuggccuguacaauc

SEQ ID NO: 261877 - RNA, 19 nt, Artificial Sequence
  Description of Artificial Sequence: Synthetic oligonucleotide
gugcaaacgugcacaagca

SEQ ID NO: 261878 - RNA, 19 nt, Artificial Sequence
  Description of Artificial Sequence: Synthetic oligonucleotide
gccaagaccuuaauucagc

SEQ ID NO: 261879 - RNA, 19 nt, Artificial Sequence
  Description of Artificial Sequence: Synthetic oligonucleotide
acuuuccuuaacagugagu

SEQ ID NO: 261880 - RNA, 19 nt, Artificial Sequence
  Description of Artificial Sequence: Synthetic oligonucleotide
ggguuggucugguuagcag

SEQ ID NO: 261881 - RNA, 19 nt, Artificial Sequence
  Description of Artificial Sequence: Synthetic oligonucleotide
gagccuaggagcagcaugu

SEQ ID NO: 261882 - RNA, 19 nt, Artificial Sequence
  Description of Artificial Sequence: Synthetic oligonucleotide
gcaagucacaaucaugcgu

SEQ ID NO: 261883 - RNA, 19 nt, Artificial Sequence
  Description of Artificial Sequence: Synthetic oligonucleotide
ggucaacggccugagcugg

SEQ ID NO: 261884 - RNA, 19 nt, Artificial Sequence
  Description of Artificial Sequence: Synthetic oligonucleotide
aucccagaaucuugagcaa

SEQ ID NO: 261885 - RNA, 19 nt, Artificial Sequence
  Description of Artificial Sequence: Synthetic oligonucleotide
aguggcuaguagggugggg

SEQ ID NO: 261886 - RNA, 19 nt, Artificial Sequence
  Description of Artificial Sequence: Synthetic oligonucleotide
augugcaaacgugcacaag

SEQ ID NO: 261887 - RNA, 19 nt, Artificial Sequence
  Description of Artificial Sequence: Synthetic oligonucleotide
ugagucaaacguggguguu

SEQ ID NO: 261888 - RNA, 19 nt, Artificial Sequence
  Description of Artificial Sequence: Synthetic oligonucleotide
gugaccuaugagcccagaa

SEQ ID NO: 261889 - RNA, 19 nt, Artificial Sequence
  Description of Artificial Sequence: Synthetic oligonucleotide
gguggcaugugugcaacac

SEQ ID NO: 261890 - RNA, 19 nt, Artificial Sequence
  Description of Artificial Sequence: Synthetic oligonucleotide
caucagugcacgucuguua

SEQ ID NO: 261891 - RNA, 19 nt, Artificial Sequence
  Description of Artificial Sequence: Synthetic oligonucleotide
ggucaauagauuugguaau

SEQ ID NO: 261892 - RNA, 19 nt, Artificial Sequence
  Description of Artificial Sequence: Synthetic oligonucleotide
gcccuugacacagacugcc

SEQ ID NO: 261893 - RNA, 19 nt, Artificial Sequence
  Description of Artificial Sequence: Synthetic oligonucleotide
agaugucaauauacuagua

SEQ ID NO: 261894 - RNA, 19 nt, Artificial Sequence
  Description of Artificial Sequence: Synthetic oligonucleotide
gaguagagugaggguucag

SEQ ID NO: 261895 - RNA, 19 nt, Artificial Sequence
  Description of Artificial Sequence: Synthetic oligonucleotide
caucccuggaccagaccca

SEQ ID NO: 261896 - RNA, 19 nt, Artificial Sequence
  Description of Artificial Sequence: Synthetic oligonucleotide
agacucaagaggggcuuga

SEQ ID NO: 261897 - RNA, 19 nt, Artificial Sequence
  Description of Artificial Sequence: Synthetic oligonucleotide
ggccuaguggugucaauga

SEQ ID NO: 261898 - RNA, 19 nt, Artificial Sequence
  Description of Artificial Sequence: Synthetic oligonucleotide
gcugucuugggugguacug

SEQ ID NO: 261899 - RNA, 19 nt, Artificial Sequence
  Description of Artificial Sequence: Synthetic oligonucleotide
ucauuagccugagcaugau

SEQ ID NO: 261900 - RNA, 19 nt, Artificial Sequence
  Description of Artificial Sequence: Synthetic oligonucleotide
gggccuaguggugucaaug

SEQ ID NO: 261901 - RNA, 19 nt, Artificial Sequence
  Description of Artificial Sequence: Synthetic oligonucleotide
gcaaucccuaugugccagg

SEQ ID NO: 261902 - RNA, 19 nt, Artificial Sequence
  Description of Artificial Sequence: Synthetic oligonucleotide
cugagucaaacgugggugu

SEQ ID NO: 261903 - RNA, 19 nt, Artificial Sequence
  Description of Artificial Sequence: Synthetic oligonucleotide
ccuaccucuaggccucuag

SEQ ID NO: 261904 - RNA, 19 nt, Artificial Sequence
  Description of Artificial Sequence: Synthetic oligonucleotide
ggagguccuuucucugaag

SEQ ID NO: 261905 - RNA, 19 nt, Artificial Sequence
  Description of Artificial Sequence: Synthetic oligonucleotide
gguugacagggguugaggu

SEQ ID NO: 261906 - RNA, 19 nt, Artificial Sequence
  Description of Artificial Sequence: Synthetic oligonucleotide
ccaggaccaagaaggggag

SEQ ID NO: 261907 - RNA, 19 nt, Artificial Sequence
  Description of Artificial Sequence: Synthetic oligonucleotide
  modified_base (14)..(14): a, c, u, g, unknown or other
ggguucaguuuucngggua

SEQ ID NO: 261908 - RNA, 19 nt, Artificial Sequence
  Description of Artificial Sequence: Synthetic oligonucleotide
aggucacgggugccacagg

SEQ ID NO: 261909 - RNA, 19 nt, Artificial Sequence
  Description of Artificial Sequence: Synthetic oligonucleotide
gcaugugugcaacacacau

SEQ ID NO: 261910 - RNA, 19 nt, Artificial Sequence
  Description of Artificial Sequence: Synthetic oligonucleotide
ccaaaugauggccaggggu

SEQ ID NO: 261911 - RNA, 19 nt, Artificial Sequence
  Description of Artificial Sequence: Synthetic oligonucleotide
  modified_base (13)..(13): a, c, u, g, unknown or other
gguucaguuuucnggguaa

SEQ ID NO: 261912 - RNA, 19 nt, Artificial Sequence
  Description of Artificial Sequence: Synthetic oligonucleotide
aucaugcguuguucguuuu

SEQ ID NO: 261913 - RNA, 19 nt, Artificial Sequence
  Description of Artificial Sequence: Synthetic oligonucleotide
gcaugauaauagggcagcc

SEQ ID NO: 261914 - RNA, 19 nt, Artificial Sequence
  Description of Artificial Sequence: Synthetic oligonucleotide
gguacucaucgggaagggc

SEQ ID NO: 261915 - RNA, 19 nt, Artificial Sequence
  Description of Artificial Sequence: Synthetic oligonucleotide
ggguacucaucgggaaggg

SEQ ID NO: 261916 - RNA, 19 nt, Artificial Sequence
  Description of Artificial Sequence: Synthetic oligonucleotide
gcuugaguauaguuugagu

SEQ ID NO: 261917 - RNA, 19 nt, Artificial Sequence
  Description of Artificial Sequence: Synthetic oligonucleotide
gaggggcuugaguauaguu

SEQ ID NO: 261918 - RNA, 19 nt, Artificial Sequence
  Description of Artificial Sequence: Synthetic oligonucleotide
cagacucaagaggggcuug

SEQ ID NO: 261919 - RNA, 19 nt, Artificial Sequence
  Description of Artificial Sequence: Synthetic oligonucleotide
cucccacgagucaaaggaa

SEQ ID NO: 261920 - RNA, 19 nt, Artificial Sequence
  Description of Artificial Sequence: Synthetic oligonucleotide
ccuuguucaagaccucaca

SEQ ID NO: 261921 - RNA, 19 nt, Artificial Sequence
  Description of Artificial Sequence: Synthetic oligonucleotide
agaggggcuugaguauagu

SEQ ID NO: 261922 - RNA, 19 nt, Artificial Sequence
  Description of Artificial Sequence: Synthetic oligonucleotide
cagacccaaaggaugcacu

SEQ ID NO: 261923 - RNA, 19 nt, Artificial Sequence
  Description of Artificial Sequence: Synthetic oligonucleotide
acucaucgggaagggcaug

SEQ ID NO: 261924 - RNA, 19 nt, Artificial Sequence
  Description of Artificial Sequence: Synthetic oligonucleotide
gccgcuguuccaccccagg

SEQ ID NO: 261925 - RNA, 19 nt, Artificial Sequence
  Description of Artificial Sequence: Synthetic oligonucleotide
gcugugguaggcacucccc

SEQ ID NO: 261926 - RNA, 19 nt, Artificial Sequence
  Description of Artificial Sequence: Synthetic oligonucleotide
cauuagccugagcaugaua

SEQ ID NO: 261927 - RNA, 19 nt, Artificial Sequence
  Description of Artificial Sequence: Synthetic oligonucleotide
cuaccucuaggccucuagu

SEQ ID NO: 261928 - RNA, 19 nt, Artificial Sequence
  Description of Artificial Sequence: Synthetic oligonucleotide
ucguuccuguuggaaguuu

SEQ ID NO: 261929 - RNA, 19 nt, Artificial Sequence
  Description of Artificial Sequence: Synthetic oligonucleotide
caagaccucacauguucau

SEQ ID NO: 261930 - RNA, 19 nt, Artificial Sequence
  Description of Artificial Sequence: Synthetic oligonucleotide
ggacaugcgcugguauggc

SEQ ID NO: 261931 - RNA, 19 nt, Artificial Sequence
  Description of Artificial Sequence: Synthetic oligonucleotide
ggcuacugaggucacgggu

SEQ ID NO: 261932 - RNA, 19 nt, Artificial Sequence
  Description of Artificial Sequence: Synthetic oligonucleotide
ggaguggggccagagcuuc

SEQ ID NO: 261933 - RNA, 19 nt, Artificial Sequence
  Description of Artificial Sequence: Synthetic oligonucleotide
agggaacccaguggcuagu

SEQ ID NO: 261934 - RNA, 19 nt, Artificial Sequence
  Description of Artificial Sequence: Synthetic oligonucleotide
guauggccgugugggagga

SEQ ID NO: 261935 - RNA, 19 nt, Artificial Sequence
  Description of Artificial Sequence: Synthetic oligonucleotide
gguaguuaggaagggcccu

SEQ ID NO: 261936 - RNA, 19 nt, Artificial Sequence
  Description of Artificial Sequence: Synthetic oligonucleotide
guagggccuagugguguca

SEQ ID NO: 261937 - RNA, 19 nt, Artificial Sequence
  Description of Artificial Sequence: Synthetic oligonucleotide
cuguaccauugaaauuacu

SEQ ID NO: 261938 - RNA, 19 nt, Artificial Sequence
  Description of Artificial Sequence: Synthetic oligonucleotide
agggccuaguggugucaau

SEQ ID NO: 261939 - RNA, 19 nt, Artificial Sequence
  Description of Artificial Sequence: Synthetic oligonucleotide
gguuuucguuccuguugga

SEQ ID NO: 261940 - RNA, 19 nt, Artificial Sequence
  Description of Artificial Sequence: Synthetic oligonucleotide
cagugaguagagugagggu

SEQ ID NO: 261941 - RNA, 19 nt, Artificial Sequence
  Description of Artificial Sequence: Synthetic oligonucleotide
auuguggaguggggccaga

SEQ ID NO: 261942 - RNA, 19 nt, Artificial Sequence
  Description of Artificial Sequence: Synthetic oligonucleotide
gucaucagccuuccugauu

SEQ ID NO: 261943 - RNA, 19 nt, Artificial Sequence
  Description of Artificial Sequence: Synthetic oligonucleotide
gccuaguggugucaaugaa

SEQ ID NO: 261944 - RNA, 19 nt, Artificial Sequence
  Description of Artificial Sequence: Synthetic oligonucleotide
aacucagcuuggggaccaa

SEQ ID NO: 261945 - RNA, 19 nt, Artificial Sequence
  Description of Artificial Sequence: Synthetic oligonucleotide
caaucaugcguuguucguu

SEQ ID NO: 261946 - RNA, 19 nt, Artificial Sequence
  Description of Artificial Sequence: Synthetic oligonucleotide
ccgugugggaggagggaac

SEQ ID NO: 261947 - RNA, 19 nt, Artificial Sequence
  Description of Artificial Sequence: Synthetic oligonucleotide
gccuagucaucagccuucc

SEQ ID NO: 261948 - RNA, 19 nt, Artificial Sequence
  Description of Artificial Sequence: Synthetic oligonucleotide
guggggcacacaugugacu

SEQ ID NO: 261949 - RNA, 19 nt, Artificial Sequence
  Description of Artificial Sequence: Synthetic oligonucleotide
ggcacacaugugacugccc

SEQ ID NO: 261950 - RNA, 19 nt, Artificial Sequence
  Description of Artificial Sequence: Synthetic oligonucleotide
ccacacuagugguguuuac

SEQ ID NO: 261951 - RNA, 19 nt, Artificial Sequence
  Description of Artificial Sequence: Synthetic oligonucleotide
guuugacuacugagucaaa

SEQ ID NO: 261952 - RNA, 19 nt, Artificial Sequence
  Description of Artificial Sequence: Synthetic oligonucleotide
guaguuaggaagggcccuu

SEQ ID NO: 261953 - RNA, 19 nt, Artificial Sequence
  Description of Artificial Sequence: Synthetic oligonucleotide
ccucuaggccucuaguccu

SEQ ID NO: 261954 - RNA, 19 nt, Artificial Sequence
  Description of Artificial Sequence: Synthetic oligonucleotide
caaucccuaugugccaggu

SEQ ID NO: 261955 - RNA, 19 nt, Artificial Sequence
  Description of Artificial Sequence: Synthetic oligonucleotide
gggcuugaguauaguuuga

SEQ ID NO: 261956 - RNA, 19 nt, Artificial Sequence
  Description of Artificial Sequence: Synthetic oligonucleotide
cccaaguccugggcuagac

SEQ ID NO: 261957 - RNA, 19 nt, Artificial Sequence
  Description of Artificial Sequence: Synthetic oligonucleotide
gucaacggccugagcugga

SEQ ID NO: 261958 - RNA, 19 nt, Artificial Sequence
  Description of Artificial Sequence: Synthetic oligonucleotide
augcgcugguauggccgug

SEQ ID NO: 261959 - RNA, 19 nt, Artificial Sequence
  Description of Artificial Sequence: Synthetic oligonucleotide
gccgugugggaggagggaa

SEQ ID NO: 261960 - RNA, 19 nt, Artificial Sequence
  Description of Artificial Sequence: Synthetic oligonucleotide
gcucgaagguugucaaauu

SEQ ID NO: 261961 - RNA, 19 nt, Artificial Sequence
  Description of Artificial Sequence: Synthetic oligonucleotide
ggugaccuaugagcccaga

SEQ ID NO: 261962 - RNA, 19 nt, Artificial Sequence
  Description of Artificial Sequence: Synthetic oligonucleotide
ggggaccaaccuggugacc

SEQ ID NO: 261963 - RNA, 19 nt, Artificial Sequence
  Description of Artificial Sequence: Synthetic oligonucleotide
ggucagcuugaagccccac

SEQ ID NO: 261964 - RNA, 19 nt, Artificial Sequence
  Description of Artificial Sequence: Synthetic oligonucleotide
ggcuaguaggguggggccu

SEQ ID NO: 261965 - RNA, 19 nt, Artificial Sequence
  Description of Artificial Sequence: Synthetic oligonucleotide
cauugcuguagggccuagu

SEQ ID NO: 261966 - RNA, 19 nt, Artificial Sequence
  Description of Artificial Sequence: Synthetic oligonucleotide
cccacacuagugguguuua

SEQ ID NO: 261967 - RNA, 19 nt, Artificial Sequence
  Description of Artificial Sequence: Synthetic oligonucleotide
accuaccucuaggccucua

SEQ ID NO: 261968 - RNA, 19 nt, Artificial Sequence
  Description of Artificial Sequence: Synthetic oligonucleotide
ccacgagucaaaggaaaau

SEQ ID NO: 261969 - RNA, 19 nt, Artificial Sequence
  Description of Artificial Sequence: Synthetic oligonucleotide
gcuaguaggguggggccuu

SEQ ID NO: 261970 - RNA, 19 nt, Artificial Sequence
  Description of Artificial Sequence: Synthetic oligonucleotide
gccccacacuagugguguu

SEQ ID NO: 261971 - RNA, 19 nt, Artificial Sequence
  Description of Artificial Sequence: Synthetic oligonucleotide
guaauuaucauuuucagcc

SEQ ID NO: 261972 - RNA, 19 nt, Artificial Sequence
  Description of Artificial Sequence: Synthetic oligonucleotide
aacaucaguauuuuaaagg

SEQ ID NO: 261973 - RNA, 19 nt, Artificial Sequence
  Description of Artificial Sequence: Synthetic oligonucleotide
ucuaguagcaccuugaugu

SEQ ID NO: 261974 - RNA, 19 nt, Artificial Sequence
  Description of Artificial Sequence: Synthetic oligonucleotide
uguaaaagccugcagaagg

SEQ ID NO: 261975 - RNA, 19 nt, Artificial Sequence
  Description of Artificial Sequence: Synthetic oligonucleotide
ugaaacuucaauuuggagc

SEQ ID NO: 261976 - RNA, 19 nt, Artificial Sequence
  Description of Artificial Sequence: Synthetic oligonucleotide
uuaaaggauaauuauagga

SEQ ID NO: 261977 - RNA, 19 nt, Artificial Sequence
  Description of Artificial Sequence: Synthetic oligonucleotide
ugggauaugagguaguugg

SEQ ID NO: 261978 - RNA, 19 nt, Artificial Sequence
  Description of Artificial Sequence: Synthetic oligonucleotide
aacuauagguucuuaggcg

SEQ ID NO: 261979 - RNA, 19 nt, Artificial Sequence
  Description of Artificial Sequence: Synthetic oligonucleotide
uguuaacuaaaucauaacu

SEQ ID NO: 261980 - RNA, 19 nt, Artificial Sequence
  Description of Artificial Sequence: Synthetic oligonucleotide
aaauaguuaaauuccagaa

SEQ ID NO: 261981 - RNA, 19 nt, Artificial Sequence
  Description of Artificial Sequence: Synthetic oligonucleotide
uaccagaugacucagcggg

SEQ ID NO: 261982 - RNA, 19 nt, Artificial Sequence
  Description of Artificial Sequence: Synthetic oligonucleotide
cucauaaugguauaaauuc

SEQ ID NO: 261983 - RNA, 19 nt, Artificial Sequence
  Description of Artificial Sequence: Synthetic oligonucleotide
ucuucaacggcuuugcuag

SEQ ID NO: 261984 - RNA, 19 nt, Artificial Sequence
  Description of Artificial Sequence: Synthetic oligonucleotide
aauucuaagcgcugguaac

SEQ ID NO: 261985 - RNA, 19 nt, Artificial Sequence
  Description of Artificial Sequence: Synthetic oligonucleotide
uuaaauagcagcccagcag

SEQ ID NO: 261986 - RNA, 19 nt, Artificial Sequence
  Description of Artificial Sequence: Synthetic oligonucleotide
uucugaaugggauaugagg

SEQ ID NO: 261987 - RNA, 19 nt, Artificial Sequence
  Description of Artificial Sequence: Synthetic oligonucleotide
aaguaauucagcugauuuc

SEQ ID NO: 261988 - RNA, 19 nt, Artificial Sequence
  Description of Artificial Sequence: Synthetic oligonucleotide
uauaaauucugaaugggau

SEQ ID NO: 261989 - RNA, 19 nt, Artificial Sequence
  Description of Artificial Sequence: Synthetic oligonucleotide
ucagucaacaaauuucugc

SEQ ID NO: 261990 - RNA, 19 nt, Artificial Sequence
  Description of Artificial Sequence: Synthetic oligonucleotide
gauggucaaacauagcgag

SEQ ID NO: 261991 - RNA, 19 nt, Artificial Sequence
  Description of Artificial Sequence: Synthetic oligonucleotide
agcuuuaaaguacuugugg

SEQ ID NO: 261992 - RNA, 19 nt, Artificial Sequence
  Description of Artificial Sequence: Synthetic oligonucleotide
uuauaggaguguuagaggu

SEQ ID NO: 261993 - RNA, 19 nt, Artificial Sequence
  Description of Artificial Sequence: Synthetic oligonucleotide
ucuauugucagcggaaccg

SEQ ID NO: 261994 - RNA, 19 nt, Artificial Sequence
  Description of Artificial Sequence: Synthetic oligonucleotide
aguacauucauugcugggc

SEQ ID NO: 261995 - RNA, 19 nt, Artificial Sequence
  Description of Artificial Sequence: Synthetic oligonucleotide
aguagaguacauucauugc

SEQ ID NO: 261996 - RNA, 19 nt, Artificial Sequence
  Description of Artificial Sequence: Synthetic oligonucleotide
uuaauugcuguaagguccg

SEQ ID NO: 261997 - RNA, 19 nt, Artificial Sequence
  Description of Artificial Sequence: Synthetic oligonucleotide
cauaauuaaguguucaguc

SEQ ID NO: 261998 - RNA, 19 nt, Artificial Sequence
  Description of Artificial Sequence: Synthetic oligonucleotide
uguguuagcguuuccauca

SEQ ID NO: 261999 - RNA, 19 nt, Artificial Sequence
  Description of Artificial Sequence: Synthetic oligonucleotide
aggaguacccagcagaagg

SEQ ID NO: 262000 - RNA, 19 nt, Artificial Sequence
  Description of Artificial Sequence: Synthetic oligonucleotide
gaacuauagguucuuaggc

SEQ ID NO: 262001 - RNA, 19 nt, Artificial Sequence
  Description of Artificial Sequence: Synthetic oligonucleotide
ucaagcugaaacuagcaca

SEQ ID NO: 262002 - RNA, 19 nt, Artificial Sequence
  Description of Artificial Sequence: Synthetic oligonucleotide
aagccugaagaaucagucc

SEQ ID NO: 262003 - RNA, 19 nt, Artificial Sequence
  Description of Artificial Sequence: Synthetic oligonucleotide
agugacugcgcacaggaac

SEQ ID NO: 262004 - RNA, 19 nt, Artificial Sequence
  Description of Artificial Sequence: Synthetic oligonucleotide
aguccaaaaucgcaucucc

SEQ ID NO: 262005 - RNA, 19 nt, Artificial Sequence
  Description of Artificial Sequence: Synthetic oligonucleotide
aaauccucgaggucugagg

SEQ ID NO: 262006 - RNA, 19 nt, Artificial Sequence
  Description of Artificial Sequence: Synthetic oligonucleotide
uuugcuacagaaccagcag

SEQ ID NO: 262007 - RNA, 19 nt, Artificial Sequence
  Description of Artificial Sequence: Synthetic oligonucleotide
ucauuuucccugcuagugg

SEQ ID NO: 262008 - RNA, 19 nt, Artificial Sequence
  Description of Artificial Sequence: Synthetic oligonucleotide
uaacaugcugucuauaaac

SEQ ID NO: 262009 - RNA, 19 nt, Artificial Sequence
  Description of Artificial Sequence: Synthetic oligonucleotide
gaaacuucaauuuggagcu

SEQ ID NO: 262010 - RNA, 19 nt, Artificial Sequence
  Description of Artificial Sequence: Synthetic oligonucleotide
aagagauauguggugauag

SEQ ID NO: 262011 - RNA, 19 nt, Artificial Sequence
  Description of Artificial Sequence: Synthetic oligonucleotide
cauaaugguauaaauucug

SEQ ID NO: 262012 - RNA, 19 nt, Artificial Sequence
  Description of Artificial Sequence: Synthetic oligonucleotide
uaaguguucagucaacaaa

SEQ ID NO: 262013 - RNA, 19 nt, Artificial Sequence
  Description of Artificial Sequence: Synthetic oligonucleotide
auaauuaaguguucaguca

SEQ ID NO: 262014 - RNA, 19 nt, Artificial Sequence
  Description of Artificial Sequence: Synthetic oligonucleotide
ugaccacauaaccaggagg

SEQ ID NO: 262015 - RNA, 19 nt, Artificial Sequence
  Description of Artificial Sequence: Synthetic oligonucleotide
uccgcuaugcuuuugucag

SEQ ID NO: 262016 - RNA, 19 nt, Artificial Sequence
  Description of Artificial Sequence: Synthetic oligonucleotide
aaaucauaacugccauugg

SEQ ID NO: 262017 - RNA, 19 nt, Artificial Sequence
  Description of Artificial Sequence: Synthetic oligonucleotide
auccguaaggugcugaccg

SEQ ID NO: 262018 - RNA, 19 nt, Artificial Sequence
  Description of Artificial Sequence: Synthetic oligonucleotide
aaucgcaucucccaggaau

SEQ ID NO: 262019 - RNA, 19 nt, Artificial Sequence
  Description of Artificial Sequence: Synthetic oligonucleotide
uaaaaugucucauguacaa

SEQ ID NO: 262020 - RNA, 19 nt, Artificial Sequence
  Description of Artificial Sequence: Synthetic oligonucleotide
uagaguacauucauugcug

SEQ ID NO: 262021 - RNA, 19 nt, Artificial Sequence
  Description of Artificial Sequence: Synthetic oligonucleotide
cuaguuugccauuagccag

SEQ ID NO: 262022 - RNA, 19 nt, Artificial Sequence
  Description of Artificial Sequence: Synthetic oligonucleotide
uuaggcguuguuaagugac

SEQ ID NO: 262023 - RNA, 19 nt, Artificial Sequence
  Description of Artificial Sequence: Synthetic oligonucleotide
uaguuaaauuccagaagag

SEQ ID NO: 262024 - RNA, 19 nt, Artificial Sequence
  Description of Artificial Sequence: Synthetic oligonucleotide
ugucaaagccugaagaauc

SEQ ID NO: 262025 - RNA, 19 nt, Artificial Sequence
  Description of Artificial Sequence: Synthetic oligonucleotide
ucucuguuaacuaaaucau

SEQ ID NO: 262026 - RNA, 19 nt, Artificial Sequence
  Description of Artificial Sequence: Synthetic oligonucleotide
accuaguuugccauuagcc

SEQ ID NO: 262027 - RNA, 19 nt, Artificial Sequence
  Description of Artificial Sequence: Synthetic oligonucleotide
ucuugauugaccacauaac

SEQ ID NO: 262028 - RNA, 19 nt, Artificial Sequence
  Description of Artificial Sequence: Synthetic oligonucleotide
cagauaacacauugcaucc

SEQ ID NO: 262029 - RNA, 19 nt, Artificial Sequence
  Description of Artificial Sequence: Synthetic oligonucleotide
ggaacuauagguucuuagg

SEQ ID NO: 262030 - RNA, 19 nt, Artificial Sequence
  Description of Artificial Sequence: Synthetic oligonucleotide
auaauugugcugugcuuac

SEQ ID NO: 262031 - RNA, 19 nt, Artificial Sequence
  Description of Artificial Sequence: Synthetic oligonucleotide
agaguaaucagcagguggg

SEQ ID NO: 262032 - RNA, 19 nt, Artificial Sequence
  Description of Artificial Sequence: Synthetic oligonucleotide
auuacuucaguagaguaca

SEQ ID NO: 262033 - RNA, 19 nt, Artificial Sequence
  Description of Artificial Sequence: Synthetic oligonucleotide
auccagauaacacauugca

SEQ ID NO: 262034 - RNA, 19 nt, Artificial Sequence
  Description of Artificial Sequence: Synthetic oligonucleotide
auuaacaugcugucuauaa

SEQ ID NO: 262035 - RNA, 19 nt, Artificial Sequence
  Description of Artificial Sequence: Synthetic oligonucleotide
aaggauaauuauaggagug

SEQ ID NO: 262036 - RNA, 19 nt, Artificial Sequence
  Description of Artificial Sequence: Synthetic oligonucleotide
ugguagucauacuucacag

SEQ ID NO: 262037 - RNA, 19 nt, Artificial Sequence
  Description of Artificial Sequence: Synthetic oligonucleotide
aacgaugcaaagauggugu

SEQ ID NO: 262038 - RNA, 19 nt, Artificial Sequence
  Description of Artificial Sequence: Synthetic oligonucleotide
agaagguaagccuuauucu

SEQ ID NO: 262039 - RNA, 19 nt, Artificial Sequence
  Description of Artificial Sequence: Synthetic oligonucleotide
aggauuggggccaagaguc

SEQ ID NO: 262040 - RNA, 19 nt, Artificial Sequence
  Description of Artificial Sequence: Synthetic oligonucleotide
uuuauuacuucaguagagu

SEQ ID NO: 262041 - RNA, 19 nt, Artificial Sequence
  Description of Artificial Sequence: Synthetic oligonucleotide
uucaccuuagucauucccu

SEQ ID NO: 262042 - RNA, 19 nt, Artificial Sequence
  Description of Artificial Sequence: Synthetic oligonucleotide
ugaaugggauaugagguag

SEQ ID NO: 262043 - RNA, 19 nt, Artificial Sequence
  Description of Artificial Sequence: Synthetic oligonucleotide
guuagcguuuccaucaagg

SEQ ID NO: 262044 - RNA, 19 nt, Artificial Sequence
  Description of Artificial Sequence: Synthetic oligonucleotide
uucucaagcugaaacuagc

SEQ ID NO: 262045 - RNA, 19 nt, Artificial Sequence
  Description of Artificial Sequence: Synthetic oligonucleotide
agcauaauuaaguguucag

SEQ ID NO: 262046 - RNA, 19 nt, Artificial Sequence
  Description of Artificial Sequence: Synthetic oligonucleotide
gaaaacggcauacugccca

SEQ ID NO: 262047 - RNA, 19 nt, Artificial Sequence
  Description of Artificial Sequence: Synthetic oligonucleotide
agaguacauucauugcugg

SEQ ID NO: 262048 - RNA, 19 nt, Artificial Sequence
  Description of Artificial Sequence: Synthetic oligonucleotide
aaaagagauauguggugau

SEQ ID NO: 262049 - RNA, 19 nt, Artificial Sequence
  Description of Artificial Sequence: Synthetic oligonucleotide
cucccaggaauucuaagcg

SEQ ID NO: 262050 - RNA, 19 nt, Artificial Sequence
  Description of Artificial Sequence: Synthetic oligonucleotide
augaguaaaauaauauaug

SEQ ID NO: 262051 - RNA, 19 nt, Artificial Sequence
  Description of Artificial Sequence: Synthetic oligonucleotide
uucaguagaguacauucau

SEQ ID NO: 262052 - RNA, 19 nt, Artificial Sequence
  Description of Artificial Sequence: Synthetic oligonucleotide
ccauucauaagcagaaucg

SEQ ID NO: 262053 - RNA, 19 nt, Artificial Sequence
  Description of Artificial Sequence: Synthetic oligonucleotide
uguuaagugacugcgcaca

SEQ ID NO: 262054 - RNA, 19 nt, Artificial Sequence
  Description of Artificial Sequence: Synthetic oligonucleotide
aagguauuuauuacuucag

SEQ ID NO: 262055 - RNA, 19 nt, Artificial Sequence
  Description of Artificial Sequence: Synthetic oligonucleotide
auuuauuacuucaguagag

SEQ ID NO: 262056 - RNA, 19 nt, Artificial Sequence
  Description of Artificial Sequence: Synthetic oligonucleotide
uuauugagaaauaguuaaa

SEQ ID NO: 262057 - RNA, 19 nt, Artificial Sequence
  Description of Artificial Sequence: Synthetic oligonucleotide
ucuuaggcguuguuaagug

SEQ ID NO: 262058 - RNA, 19 nt, Artificial Sequence
  Description of Artificial Sequence: Synthetic oligonucleotide
uaacacauugcaucccaag

SEQ ID NO: 262059 - RNA, 19 nt, Artificial Sequence
  Description of Artificial Sequence: Synthetic oligonucleotide
uucagggacuauaauugug

SEQ ID NO: 262060 - RNA, 19 nt, Artificial Sequence
  Description of Artificial Sequence: Synthetic oligonucleotide
uaaugguauaaauucugaa

SEQ ID NO: 262061 - RNA, 19 nt, Artificial Sequence
  Description of Artificial Sequence: Synthetic oligonucleotide
uuaacaugcugucuauaaa

SEQ ID NO: 262062 - RNA, 19 nt, Artificial Sequence
  Description of Artificial Sequence: Synthetic oligonucleotide
auaguguuguagugguagg

SEQ ID NO: 262063 - RNA, 19 nt, Artificial Sequence
  Description of Artificial Sequence: Synthetic oligonucleotide
uccguugaaacuucaauuu

SEQ ID NO: 262064 - RNA, 19 nt, Artificial Sequence
  Description of Artificial Sequence: Synthetic oligonucleotide
uuaccagaugacucagcgg

SEQ ID NO: 262065 - RNA, 19 nt, Artificial Sequence
  Description of Artificial Sequence: Synthetic oligonucleotide
aaaaggagucgccaagcau

SEQ ID NO: 262066 - RNA, 19 nt, Artificial Sequence
  Description of Artificial Sequence: Synthetic oligonucleotide
ugggcugguucucauaaug

SEQ ID NO: 262067 - RNA, 19 nt, Artificial Sequence
  Description of Artificial Sequence: Synthetic oligonucleotide
aaacccaucacuagcauuu

SEQ ID NO: 262068 - RNA, 19 nt, Artificial Sequence
  Description of Artificial Sequence: Synthetic oligonucleotide
acuagcacaaaagucguca

SEQ ID NO: 262069 - RNA, 19 nt, Artificial Sequence
  Description of Artificial Sequence: Synthetic oligonucleotide
auaacugccauuggcuagg

SEQ ID NO: 262070 - RNA, 19 nt, Artificial Sequence
  Description of Artificial Sequence: Synthetic oligonucleotide
uuagcguuuccaucaaggu

SEQ ID NO: 262071 - RNA, 19 nt, Artificial Sequence
  Description of Artificial Sequence: Synthetic oligonucleotide
guuguuaagugacugcgca

SEQ ID NO: 262072 - RNA, 19 nt, Artificial Sequence
  Description of Artificial Sequence: Synthetic oligonucleotide
agugucaaagccugaagaa

SEQ ID NO: 262073 - RNA, 19 nt, Artificial Sequence
  Description of Artificial Sequence: Synthetic oligonucleotide
auguguuagcguuuccauc

SEQ ID NO: 262074 - RNA, 19 nt, Artificial Sequence
  Description of Artificial Sequence: Synthetic oligonucleotide
gaaucaguccaggauuggg

SEQ ID NO: 262075 - RNA, 19 nt, Artificial Sequence
  Description of Artificial Sequence: Synthetic oligonucleotide
aagaaucaguccaggauug

SEQ ID NO: 262076 - RNA, 19 nt, Artificial Sequence
  Description of Artificial Sequence: Synthetic oligonucleotide
cauaacugccauuggcuag

SEQ ID NO: 262077 - RNA, 19 nt, Artificial Sequence
  Description of Artificial Sequence: Synthetic oligonucleotide
uuaaguguucagucaacaa

SEQ ID NO: 262078 - RNA, 19 nt, Artificial Sequence
  Description of Artificial Sequence: Synthetic oligonucleotide
uggucuuaaaacauaucuu

SEQ ID NO: 262079 - RNA, 19 nt, Artificial Sequence
  Description of Artificial Sequence: Synthetic oligonucleotide
gucuugauugaccacauaa

SEQ ID NO: 262080 - RNA, 19 nt, Artificial Sequence
  Description of Artificial Sequence: Synthetic oligonucleotide
agauaacacauugcauccc

SEQ ID NO: 262081 - RNA, 19 nt, Artificial Sequence
  Description of Artificial Sequence: Synthetic oligonucleotide
gucccugaucaucagacag

SEQ ID NO: 262082 - RNA, 19 nt, Artificial Sequence
  Description of Artificial Sequence: Synthetic oligonucleotide
augugcacgaacuacguuu

SEQ ID NO: 262083 - RNA, 19 nt, Artificial Sequence
  Description of Artificial Sequence: Synthetic oligonucleotide
cuacguuucuuuaaaauua

SEQ ID NO: 262084 - RNA, 19 nt, Artificial Sequence
  Description of Artificial Sequence: Synthetic oligonucleotide
aguccuuaccuaguuugcc

SEQ ID NO: 262085 - RNA, 19 nt, Artificial Sequence
  Description of Artificial Sequence: Synthetic oligonucleotide
cuguuaacuaaaucauaac

SEQ ID NO: 262086 - RNA, 19 nt, Artificial Sequence
  Description of Artificial Sequence: Synthetic oligonucleotide
agaagaguaaucagcaggu

SEQ ID NO: 262087 - RNA, 19 nt, Artificial Sequence
  Description of Artificial Sequence: Synthetic oligonucleotide
aagguaagccuuauucuug

SEQ ID NO: 262088 - RNA, 19 nt, Artificial Sequence
  Description of Artificial Sequence: Synthetic oligonucleotide
ucgaggucugaggaaaacg

SEQ ID NO: 262089 - RNA, 19 nt, Artificial Sequence
  Description of Artificial Sequence: Synthetic oligonucleotide
guaaucagcaggugggaac

SEQ ID NO: 262090 - RNA, 19 nt, Artificial Sequence
  Description of Artificial Sequence: Synthetic oligonucleotide
agguuaaacccaucacuag

SEQ ID NO: 262091 - RNA, 19 nt, Artificial Sequence
  Description of Artificial Sequence: Synthetic oligonucleotide
agcguuuccaucaagguau

SEQ ID NO: 262092 - RNA, 19 nt, Artificial Sequence
  Description of Artificial Sequence: Synthetic oligonucleotide
gucgccaagcaucucaagc

SEQ ID NO: 262093 - RNA, 19 nt, Artificial Sequence
  Description of Artificial Sequence: Synthetic oligonucleotide
gaguguuagaggucauuug

SEQ ID NO: 262094 - RNA, 19 nt, Artificial Sequence
  Description of Artificial Sequence: Synthetic oligonucleotide
accccauuaacaugcuguc

SEQ ID NO: 262095 - RNA, 19 nt, Artificial Sequence
  Description of Artificial Sequence: Synthetic oligonucleotide
uaccuaguuugccauuagc

SEQ ID NO: 262096 - RNA, 19 nt, Artificial Sequence
  Description of Artificial Sequence: Synthetic oligonucleotide
gcuaguggacagcacaugg

SEQ ID NO: 262097 - RNA, 19 nt, Artificial Sequence
  Description of Artificial Sequence: Synthetic oligonucleotide
ugagugcucucccagcacu

SEQ ID NO: 262098 - RNA, 19 nt, Artificial Sequence
  Description of Artificial Sequence: Synthetic oligonucleotide
ugugcacgaacuacguuuc

SEQ ID NO: 262099 - RNA, 19 nt, Artificial Sequence
  Description of Artificial Sequence: Synthetic oligonucleotide
cucaucacggcaggcaucg

SEQ ID NO: 262100 - RNA, 19 nt, Artificial Sequence
  Description of Artificial Sequence: Synthetic oligonucleotide
uccagauaacacauugcau

SEQ ID NO: 262101 - RNA, 19 nt, Artificial Sequence
  Description of Artificial Sequence: Synthetic oligonucleotide
uucuuaggcguuguuaagu

SEQ ID NO: 262102 - RNA, 19 nt, Artificial Sequence
  Description of Artificial Sequence: Synthetic oligonucleotide
cacaaaagucgucaaugac

SEQ ID NO: 262103 - RNA, 19 nt, Artificial Sequence
  Description of Artificial Sequence: Synthetic oligonucleotide
uuaccuaguuugccauuag

SEQ ID NO: 262104 - RNA, 19 nt, Artificial Sequence
  Description of Artificial Sequence: Synthetic oligonucleotide
aucguggacaccgcggggc

SEQ ID NO: 262105 - RNA, 19 nt, Artificial Sequence
  Description of Artificial Sequence: Synthetic oligonucleotide
gauccagauaacacauugc

SEQ ID NO: 262106 - RNA, 19 nt, Artificial Sequence
  Description of Artificial Sequence: Synthetic oligonucleotide
agaguccuugaggaguacc

SEQ ID NO: 262107 - RNA, 19 nt, Artificial Sequence
  Description of Artificial Sequence: Synthetic oligonucleotide
uggggaaugcugccgcggg

SEQ ID NO: 262108 - RNA, 19 nt, Artificial Sequence
  Description of Artificial Sequence: Synthetic oligonucleotide
caaauaugcccucgugagc

SEQ ID NO: 262109 - RNA, 19 nt, Artificial Sequence
  Description of Artificial Sequence: Synthetic oligonucleotide
agaugacucagcggguagc

SEQ ID NO: 262110 - RNA, 19 nt, Artificial Sequence
  Description of Artificial Sequence: Synthetic oligonucleotide
uguuagcguuuccaucaag

SEQ ID NO: 262111 - RNA, 19 nt, Artificial Sequence
  Description of Artificial Sequence: Synthetic oligonucleotide
uuaacuauccuuggucuua

SEQ ID NO: 262112 - RNA, 19 nt, Artificial Sequence
  Description of Artificial Sequence: Synthetic oligonucleotide
acauaaccaggaggaagcc

SEQ ID NO: 262113 - RNA, 19 nt, Artificial Sequence
  Description of Artificial Sequence: Synthetic oligonucleotide
gugauagcauguuuuaaaa

SEQ ID NO: 262114 - RNA, 19 nt, Artificial Sequence
  Description of Artificial Sequence: Synthetic oligonucleotide
uccgugugcaagucguaag

SEQ ID NO: 262115 - RNA, 19 nt, Artificial Sequence
  Description of Artificial Sequence: Synthetic oligonucleotide
gacuauaauugugcugugc

SEQ ID NO: 262116 - RNA, 19 nt, Artificial Sequence
  Description of Artificial Sequence: Synthetic oligonucleotide
accgcagaucugcagugac

SEQ ID NO: 262117 - RNA, 19 nt, Artificial Sequence
  Description of Artificial Sequence: Synthetic oligonucleotide
aggauaauuauaggagugu

SEQ ID NO: 262118 - RNA, 19 nt, Artificial Sequence
  Description of Artificial Sequence: Synthetic oligonucleotide
agggacuauaauugugcug

SEQ ID NO: 262119 - RNA, 19 nt, Artificial Sequence
  Description of Artificial Sequence: Synthetic oligonucleotide
uagcguuuccaucaaggua

SEQ ID NO: 262120 - RNA, 19 nt, Artificial Sequence
  Description of Artificial Sequence: Synthetic oligonucleotide
caugugauggccauugucu

SEQ ID NO: 262121 - RNA, 19 nt, Artificial Sequence
  Description of Artificial Sequence: Synthetic oligonucleotide
auuuacagcaaaggcagau

SEQ ID NO: 262122 - RNA, 19 nt, Artificial Sequence
  Description of Artificial Sequence: Synthetic oligonucleotide
gagcuuaccagaugacuca

SEQ ID NO: 262123 - RNA, 19 nt, Artificial Sequence
  Description of Artificial Sequence: Synthetic oligonucleotide
agguaagccuuauucuuga

SEQ ID NO: 262124 - RNA, 19 nt, Artificial Sequence
  Description of Artificial Sequence: Synthetic oligonucleotide
agccaugugcacgaacuac

SEQ ID NO: 262125 - RNA, 19 nt, Artificial Sequence
  Description of Artificial Sequence: Synthetic oligonucleotide
aaguuaguuugagguguuc

SEQ ID NO: 262126 - RNA, 19 nt, Artificial Sequence
  Description of Artificial Sequence: Synthetic oligonucleotide
ucaguagaguacauucauu

SEQ ID NO: 262127 - RNA, 19 nt, Artificial Sequence
  Description of Artificial Sequence: Synthetic oligonucleotide
gggaacuauagguucuuag

SEQ ID NO: 262128 - RNA, 19 nt, Artificial Sequence
  Description of Artificial Sequence: Synthetic oligonucleotide
agauguguuagcguuucca

SEQ ID NO: 262129 - RNA, 19 nt, Artificial Sequence
  Description of Artificial Sequence: Synthetic oligonucleotide
uuguuaagugacugcgcac

SEQ ID NO: 262130 - RNA, 19 nt, Artificial Sequence
  Description of Artificial Sequence: Synthetic oligonucleotide
aaaacggcauacugcccaa

SEQ ID NO: 262131 - RNA, 19 nt, Artificial Sequence
  Description of Artificial Sequence: Synthetic oligonucleotide
aauuuggagcuuaccagau

SEQ ID NO: 262132 - RNA, 19 nt, Artificial Sequence
  Description of Artificial Sequence: Synthetic oligonucleotide
uugcuguaagguccguuga

SEQ ID NO: 262133 - RNA, 19 nt, Artificial Sequence
  Description of Artificial Sequence: Synthetic oligonucleotide
cauugucuauugucagcgg

SEQ ID NO: 262134 - RNA, 19 nt, Artificial Sequence
  Description of Artificial Sequence: Synthetic oligonucleotide
aggaucaaauaugcccucg

SEQ ID NO: 262135 - RNA, 19 nt, Artificial Sequence
  Description of Artificial Sequence: Synthetic oligonucleotide
auucuaagcgcugguaaca

SEQ ID NO: 262136 - RNA, 19 nt, Artificial Sequence
  Description of Artificial Sequence: Synthetic oligonucleotide
gccgcagcugguuaaauag

SEQ ID NO: 262137 - RNA, 19 nt, Artificial Sequence
  Description of Artificial Sequence: Synthetic oligonucleotide
cuucccucgugucaacgcc

SEQ ID NO: 262138 - RNA, 19 nt, Artificial Sequence
  Description of Artificial Sequence: Synthetic oligonucleotide
guucuuaggcguuguuaag

SEQ ID NO: 262139 - RNA, 19 nt, Artificial Sequence
  Description of Artificial Sequence: Synthetic oligonucleotide
caggaauucuaagcgcugg

SEQ ID NO: 262140 - RNA, 19 nt, Artificial Sequence
  Description of Artificial Sequence: Synthetic oligonucleotide
caacgaugcaaagauggug

SEQ ID NO: 262141 - RNA, 19 nt, Artificial Sequence
  Description of Artificial Sequence: Synthetic oligonucleotide
ggugauagcauguuuuaaa

SEQ ID NO: 262142 - RNA, 19 nt, Artificial Sequence
  Description of Artificial Sequence: Synthetic oligonucleotide
aaugggauaugagguaguu

SEQ ID NO: 262143 - RNA, 19 nt, Artificial Sequence
  Description of Artificial Sequence: Synthetic oligonucleotide
ugauccguaaggugcugac

SEQ ID NO: 262144 - RNA, 19 nt, Artificial Sequence
  Description of Artificial Sequence: Synthetic oligonucleotide
ucguaagagauggacugcu

SEQ ID NO: 262145 - RNA, 19 nt, Artificial Sequence
  Description of Artificial Sequence: Synthetic oligonucleotide
cugguuaaauagcagccca

SEQ ID NO: 262146 - RNA, 19 nt, Artificial Sequence
  Description of Artificial Sequence: Synthetic oligonucleotide
aguccgcuaugcuuuuguc

SEQ ID NO: 262147 - RNA, 19 nt, Artificial Sequence
  Description of Artificial Sequence: Synthetic oligonucleotide
cagugauaguguuguagug

SEQ ID NO: 262148 - RNA, 19 nt, Artificial Sequence
  Description of Artificial Sequence: Synthetic oligonucleotide
cauuuucccugcuagugga

SEQ ID NO: 262149 - RNA, 19 nt, Artificial Sequence
  Description of Artificial Sequence: Synthetic oligonucleotide
acgaacuacguuucuuuaa

SEQ ID NO: 262150 - RNA, 19 nt, Artificial Sequence
  Description of Artificial Sequence: Synthetic oligonucleotide
aacuagcacaaaagucguc

SEQ ID NO: 262151 - RNA, 19 nt, Artificial Sequence
  Description of Artificial Sequence: Synthetic oligonucleotide
ugucuauugucagcggaac

SEQ ID NO: 262152 - RNA, 19 nt, Artificial Sequence
  Description of Artificial Sequence: Synthetic oligonucleotide
agcaaugcacugcuccgug

SEQ ID NO: 262153 - RNA, 19 nt, Artificial Sequence
  Description of Artificial Sequence: Synthetic oligonucleotide
guuagaggucauuugaaau

SEQ ID NO: 262154 - RNA, 19 nt, Artificial Sequence
  Description of Artificial Sequence: Synthetic oligonucleotide
uaagguccguugaaacuuc

SEQ ID NO: 262155 - RNA, 19 nt, Artificial Sequence
  Description of Artificial Sequence: Synthetic oligonucleotide
cuaguagcaccuugaugug

SEQ ID NO: 262156 - RNA, 19 nt, Artificial Sequence
  Description of Artificial Sequence: Synthetic oligonucleotide
auaauauaugcaaguuagu

SEQ ID NO: 262157 - RNA, 19 nt, Artificial Sequence
  Description of Artificial Sequence: Synthetic oligonucleotide
uccuuaccuaguuugccau

SEQ ID NO: 262158 - RNA, 19 nt, Artificial Sequence
  Description of Artificial Sequence: Synthetic oligonucleotide
aaagagauauguggugaua

SEQ ID NO: 262159 - RNA, 19 nt, Artificial Sequence
  Description of Artificial Sequence: Synthetic oligonucleotide
gcaggcaucguggacaccg

SEQ ID NO: 262160 - RNA, 19 nt, Artificial Sequence
  Description of Artificial Sequence: Synthetic oligonucleotide
agauaucaggugguucagg

SEQ ID NO: 262161 - RNA, 19 nt, Artificial Sequence
  Description of Artificial Sequence: Synthetic oligonucleotide
gguucuuaggcguuguuaa

SEQ ID NO: 262162 - RNA, 19 nt, Artificial Sequence
  Description of Artificial Sequence: Synthetic oligonucleotide
uccgugguuguucuucaaa

SEQ ID NO: 262163 - RNA, 19 nt, Artificial Sequence
  Description of Artificial Sequence: Synthetic oligonucleotide
aggaauucuaagcgcuggu

SEQ ID NO: 262164 - RNA, 19 nt, Artificial Sequence
  Description of Artificial Sequence: Synthetic oligonucleotide
uugucuugauugaccacau

SEQ ID NO: 262165 - RNA, 19 nt, Artificial Sequence
  Description of Artificial Sequence: Synthetic oligonucleotide
aggaagucgucuucauacu

SEQ ID NO: 262166 - RNA, 19 nt, Artificial Sequence
  Description of Artificial Sequence: Synthetic oligonucleotide
agauauguggugauagcau

SEQ ID NO: 262167 - RNA, 19 nt, Artificial Sequence
  Description of Artificial Sequence: Synthetic oligonucleotide
ugugauggccauugucuau

SEQ ID NO: 262168 - RNA, 19 nt, Artificial Sequence
  Description of Artificial Sequence: Synthetic oligonucleotide
cagucugacuucaccuuag

SEQ ID NO: 262169 - RNA, 19 nt, Artificial Sequence
  Description of Artificial Sequence: Synthetic oligonucleotide
agaaucaguccaggauugg

SEQ ID NO: 262170 - RNA, 19 nt, Artificial Sequence
  Description of Artificial Sequence: Synthetic oligonucleotide
gcguuguuaagugacugcg

SEQ ID NO: 262171 - RNA, 19 nt, Artificial Sequence
  Description of Artificial Sequence: Synthetic oligonucleotide
auauguggugauagcaugu

SEQ ID NO: 262172 - RNA, 19 nt, Artificial Sequence
  Description of Artificial Sequence: Synthetic oligonucleotide
aagccgcuccagguuaaac

SEQ ID NO: 262173 - RNA, 19 nt, Artificial Sequence
  Description of Artificial Sequence: Synthetic oligonucleotide
uucaacggcuuugcuagga

SEQ ID NO: 262174 - RNA, 19 nt, Artificial Sequence
  Description of Artificial Sequence: Synthetic oligonucleotide
uucccucgugucaacgcca

SEQ ID NO: 262175 - RNA, 19 nt, Artificial Sequence
  Description of Artificial Sequence: Synthetic oligonucleotide
gauguguuagcguuuccau

SEQ ID NO: 262176 - RNA, 19 nt, Artificial Sequence
  Description of Artificial Sequence: Synthetic oligonucleotide
uaauauucucaagcugaaa

SEQ ID NO: 262177 - RNA, 19 nt, Artificial Sequence
  Description of Artificial Sequence: Synthetic oligonucleotide
uuugggagcccuccacguc

SEQ ID NO: 262178 - RNA, 19 nt, Artificial Sequence
  Description of Artificial Sequence: Synthetic oligonucleotide
caucaagguauuuauuacu

SEQ ID NO: 262179 - RNA, 19 nt, Artificial Sequence
  Description of Artificial Sequence: Synthetic oligonucleotide
gcgcaggucagucaggacc

SEQ ID NO: 262180 - RNA, 19 nt, Artificial Sequence
  Description of Artificial Sequence: Synthetic oligonucleotide
acggguuacugucaauaaa

SEQ ID NO: 262181 - RNA, 19 nt, Artificial Sequence
  Description of Artificial Sequence: Synthetic oligonucleotide
ucaacggcuuugcuaggau

SEQ ID NO: 262182 - RNA, 19 nt, Artificial Sequence
  Description of Artificial Sequence: Synthetic oligonucleotide
gggacuauaauugugcugu

SEQ ID NO: 262183 - RNA, 19 nt, Artificial Sequence
  Description of Artificial Sequence: Synthetic oligonucleotide
aaggcuccugaccccauua

SEQ ID NO: 262184 - RNA, 19 nt, Artificial Sequence
  Description of Artificial Sequence: Synthetic oligonucleotide
aauaugcccucgugagcau

SEQ ID NO: 262185 - RNA, 19 nt, Artificial Sequence
  Description of Artificial Sequence: Synthetic oligonucleotide
caaaagucucuguuaacua

SEQ ID NO: 262186 - RNA, 19 nt, Artificial Sequence
  Description of Artificial Sequence: Synthetic oligonucleotide
ucacaguccuuaccuaguu

SEQ ID NO: 262187 - RNA, 19 nt, Artificial Sequence
  Description of Artificial Sequence: Synthetic oligonucleotide
gggccaagaguccuugagg

SEQ ID NO: 262188 - RNA, 19 nt, Artificial Sequence
  Description of Artificial Sequence: Synthetic oligonucleotide
gauccguaaggugcugacc

SEQ ID NO: 262189 - RNA, 19 nt, Artificial Sequence
  Description of Artificial Sequence: Synthetic oligonucleotide
gugucaacgccacaguucu

SEQ ID NO: 262190 - RNA, 19 nt, Artificial Sequence
  Description of Artificial Sequence: Synthetic oligonucleotide
acggcauacugcccaagga

SEQ ID NO: 262191 - RNA, 19 nt, Artificial Sequence
  Description of Artificial Sequence: Synthetic oligonucleotide
cugagcggcccucucgccg

SEQ ID NO: 262192 - RNA, 19 nt, Artificial Sequence
  Description of Artificial Sequence: Synthetic oligonucleotide
uucuaagcgcugguaacaa

SEQ ID NO: 262193 - RNA, 19 nt, Artificial Sequence
  Description of Artificial Sequence: Synthetic oligonucleotide
gaaccgucagucugacuuc

SEQ ID NO: 262194 - RNA, 19 nt, Artificial Sequence
  Description of Artificial Sequence: Synthetic oligonucleotide
uccguaaggugcugaccgc

SEQ ID NO: 262195 - RNA, 19 nt, Artificial Sequence
  Description of Artificial Sequence: Synthetic oligonucleotide
cuguaacauuuaaacuguc

SEQ ID NO: 262196 - RNA, 19 nt, Artificial Sequence
  Description of Artificial Sequence: Synthetic oligonucleotide
cagcaugugauggccauug

SEQ ID NO: 262197 - RNA, 19 nt, Artificial Sequence
  Description of Artificial Sequence: Synthetic oligonucleotide
cucgugagcaucaggguaa

SEQ ID NO: 262198 - RNA, 19 nt, Artificial Sequence
  Description of Artificial Sequence: Synthetic oligonucleotide
ccaaaaucgcaucucccag

SEQ ID NO: 262199 - RNA, 19 nt, Artificial Sequence
  Description of Artificial Sequence: Synthetic oligonucleotide
gcaucguggacaccgcggg

SEQ ID NO: 262200 - RNA, 19 nt, Artificial Sequence
  Description of Artificial Sequence: Synthetic oligonucleotide
augugauggccauugucua

SEQ ID NO: 262201 - RNA, 19 nt, Artificial Sequence
  Description of Artificial Sequence: Synthetic oligonucleotide
guccgcuaugcuuuuguca

SEQ ID NO: 262202 - RNA, 19 nt, Artificial Sequence
  Description of Artificial Sequence: Synthetic oligonucleotide
gccaugugcacgaacuacg

SEQ ID NO: 262203 - RNA, 19 nt, Artificial Sequence
  Description of Artificial Sequence: Synthetic oligonucleotide
gaggaaaagcugagcggcc

SEQ ID NO: 262204 - RNA, 19 nt, Artificial Sequence
  Description of Artificial Sequence: Synthetic oligonucleotide
cauaagcagaaucggaggu

SEQ ID NO: 262205 - RNA, 19 nt, Artificial Sequence
  Description of Artificial Sequence: Synthetic oligonucleotide
cagaugacucagcggguag

SEQ ID NO: 262206 - RNA, 19 nt, Artificial Sequence
  Description of Artificial Sequence: Synthetic oligonucleotide
ucgugucaacgccacaguu

SEQ ID NO: 262207 - RNA, 19 nt, Artificial Sequence
  Description of Artificial Sequence: Synthetic oligonucleotide
augggauaugagguaguug

SEQ ID NO: 262208 - RNA, 19 nt, Artificial Sequence
  Description of Artificial Sequence: Synthetic oligonucleotide
cuggauggucaaacauagc

SEQ ID NO: 262209 - RNA, 19 nt, Artificial Sequence
  Description of Artificial Sequence: Synthetic oligonucleotide
ccuaguuugccauuagcca

SEQ ID NO: 262210 - RNA, 19 nt, Artificial Sequence
  Description of Artificial Sequence: Synthetic oligonucleotide
acggcaggcaucguggaca

SEQ ID NO: 262211 - RNA, 19 nt, Artificial Sequence
  Description of Artificial Sequence: Synthetic oligonucleotide
aaccgucagucugacuuca

SEQ ID NO: 262212 - RNA, 19 nt, Artificial Sequence
  Description of Artificial Sequence: Synthetic oligonucleotide
cuuaggcguuguuaaguga

SEQ ID NO: 262213 - RNA, 19 nt, Artificial Sequence
  Description of Artificial Sequence: Synthetic oligonucleotide
guccaaaaucgcaucuccc

SEQ ID NO: 262214 - RNA, 19 nt, Artificial Sequence
  Description of Artificial Sequence: Synthetic oligonucleotide
agucccugaucaucagaca

SEQ ID NO: 262215 - RNA, 19 nt, Artificial Sequence
  Description of Artificial Sequence: Synthetic oligonucleotide
gguuacugucaauaaaaua

SEQ ID NO: 262216 - RNA, 19 nt, Artificial Sequence
  Description of Artificial Sequence: Synthetic oligonucleotide
uaacuauccuuggucuuaa

SEQ ID NO: 262217 - RNA, 19 nt, Artificial Sequence
  Description of Artificial Sequence: Synthetic oligonucleotide
ucuaagcgcugguaacaau

SEQ ID NO: 262218 - RNA, 19 nt, Artificial Sequence
  Description of Artificial Sequence: Synthetic oligonucleotide
cucuuugggagcccuccac

SEQ ID NO: 262219 - RNA, 19 nt, Artificial Sequence
  Description of Artificial Sequence: Synthetic oligonucleotide
auacugcccaaggaggacu

SEQ ID NO: 262220 - RNA, 19 nt, Artificial Sequence
  Description of Artificial Sequence: Synthetic oligonucleotide
gcccucgugagcaucaggg

SEQ ID NO: 262221 - RNA, 19 nt, Artificial Sequence
  Description of Artificial Sequence: Synthetic oligonucleotide
uggugauagcauguuuuaa

SEQ ID NO: 262222 - RNA, 19 nt, Artificial Sequence
  Description of Artificial Sequence: Synthetic oligonucleotide
ugcuaguggacagcacaug

SEQ ID NO: 262223 - RNA, 19 nt, Artificial Sequence
  Description of Artificial Sequence: Synthetic oligonucleotide
ggcguuguuaagugacugc

SEQ ID NO: 262224 - RNA, 19 nt, Artificial Sequence
  Description of Artificial Sequence: Synthetic oligonucleotide
ugauaguguuguaguggua

SEQ ID NO: 262225 - RNA, 19 nt, Artificial Sequence
  Description of Artificial Sequence: Synthetic oligonucleotide
cuucaacggcuuugcuagg

SEQ ID NO: 262226 - RNA, 19 nt, Artificial Sequence
  Description of Artificial Sequence: Synthetic oligonucleotide
auaagcagaaucggagguu

SEQ ID NO: 262227 - RNA, 19 nt, Artificial Sequence
  Description of Artificial Sequence: Synthetic oligonucleotide
cagcggaaccgucagucug

SEQ ID NO: 262228 - RNA, 19 nt, Artificial Sequence
  Description of Artificial Sequence: Synthetic oligonucleotide
gagacagcuuuaaaguacu

SEQ ID NO: 262229 - RNA, 19 nt, Artificial Sequence
  Description of Artificial Sequence: Synthetic oligonucleotide
auaugcccucgugagcauc

SEQ ID NO: 262230 - RNA, 19 nt, Artificial Sequence
  Description of Artificial Sequence: Synthetic oligonucleotide
ccucacaguccuuaccuag

SEQ ID NO: 262231 - RNA, 19 nt, Artificial Sequence
  Description of Artificial Sequence: Synthetic oligonucleotide
gcacaaaagucgucaauga

SEQ ID NO: 262232 - RNA, 19 nt, Artificial Sequence
  Description of Artificial Sequence: Synthetic oligonucleotide
cauuuuaacuauccuuggu

SEQ ID NO: 262233 - RNA, 19 nt, Artificial Sequence
  Description of Artificial Sequence: Synthetic oligonucleotide
gaggaguacccagcagaag

SEQ ID NO: 262234 - RNA, 19 nt, Artificial Sequence
  Description of Artificial Sequence: Synthetic oligonucleotide
cauuuaaacuguccguggu

SEQ ID NO: 262235 - RNA, 19 nt, Artificial Sequence
  Description of Artificial Sequence: Synthetic oligonucleotide
uacuucaguagaguacauu

SEQ ID NO: 262236 - RNA, 19 nt, Artificial Sequence
  Description of Artificial Sequence: Synthetic oligonucleotide
ggauggucaaacauagcga

SEQ ID NO: 262237 - RNA, 19 nt, Artificial Sequence
  Description of Artificial Sequence: Synthetic oligonucleotide
cauacugcccaaggaggac

SEQ ID NO: 262238 - RNA, 19 nt, Artificial Sequence
  Description of Artificial Sequence: Synthetic oligonucleotide
ucccucgugucaacgccac

SEQ ID NO: 262239 - RNA, 19 nt, Artificial Sequence
  Description of Artificial Sequence: Synthetic oligonucleotide
guccguugaaacuucaauu

SEQ ID NO: 262240 - RNA, 19 nt, Artificial Sequence
  Description of Artificial Sequence: Synthetic oligonucleotide
ucaagccgcuccagguuaa

SEQ ID NO: 262241 - RNA, 19 nt, Artificial Sequence
  Description of Artificial Sequence: Synthetic oligonucleotide
guggugauagcauguuuua

SEQ ID NO: 262242 - RNA, 19 nt, Artificial Sequence
  Description of Artificial Sequence: Synthetic oligonucleotide
uugcuaggauccagauaac

SEQ ID NO: 262243 - RNA, 19 nt, Artificial Sequence
  Description of Artificial Sequence: Synthetic oligonucleotide
gcgcugguaacaaucagug

SEQ ID NO: 262244 - RNA, 19 nt, Artificial Sequence
  Description of Artificial Sequence: Synthetic oligonucleotide
cuagcacaaaagucgucaa

SEQ ID NO: 262245 - RNA, 19 nt, Artificial Sequence
  Description of Artificial Sequence: Synthetic oligonucleotide
cauagcgagcagaggaaaa

SEQ ID NO: 262246 - RNA, 19 nt, Artificial Sequence
  Description of Artificial Sequence: Synthetic oligonucleotide
auagguucuuaggcguugu

SEQ ID NO: 262247 - RNA, 19 nt, Artificial Sequence
  Description of Artificial Sequence: Synthetic oligonucleotide
ucccugcuaguggacagca

SEQ ID NO: 262248 - RNA, 19 nt, Artificial Sequence
  Description of Artificial Sequence: Synthetic oligonucleotide
caucguggacaccgcgggg

SEQ ID NO: 262249 - RNA, 19 nt, Artificial Sequence
  Description of Artificial Sequence: Synthetic oligonucleotide
cuguccgugguuguucuuc

SEQ ID NO: 262250 - RNA, 19 nt, Artificial Sequence
  Description of Artificial Sequence: Synthetic oligonucleotide
acauagcgagcagaggaaa

SEQ ID NO: 262251 - RNA, 19 nt, Artificial Sequence
  Description of Artificial Sequence: Synthetic oligonucleotide
cuuaccuaguuugccauua

SEQ ID NO: 262252 - RNA, 19 nt, Artificial Sequence
  Description of Artificial Sequence: Synthetic oligonucleotide
guaagguccguugaaacuu

SEQ ID NO: 262253 - RNA, 19 nt, Artificial Sequence
  Description of Artificial Sequence: Synthetic oligonucleotide
ucguggacaccgcggggcu

SEQ ID NO: 262254 - RNA, 19 nt, Artificial Sequence
  Description of Artificial Sequence: Synthetic oligonucleotide
guaaggugcugaccgcaga

SEQ ID NO: 262255 - RNA, 19 nt, Artificial Sequence
  Description of Artificial Sequence: Synthetic oligonucleotide
ucgugagcaucaggguaag

SEQ ID NO: 262256 - RNA, 19 nt, Artificial Sequence
  Description of Artificial Sequence: Synthetic oligonucleotide
agccaauucacaggaggau

SEQ ID NO: 262257 - RNA, 19 nt, Artificial Sequence
  Description of Artificial Sequence: Synthetic oligonucleotide
ccguugaaacuucaauuug

SEQ ID NO: 262258 - RNA, 19 nt, Artificial Sequence
  Description of Artificial Sequence: Synthetic oligonucleotide
gugcaagucguaagagaug

SEQ ID NO: 262259 - RNA, 19 nt, Artificial Sequence
  Description of Artificial Sequence: Synthetic oligonucleotide
ugucagcggaaccgucagu

SEQ ID NO: 262260 - RNA, 19 nt, Artificial Sequence
  Description of Artificial Sequence: Synthetic oligonucleotide
guaaaagccugcagaaggu

SEQ ID NO: 262261 - RNA, 19 nt, Artificial Sequence
  Description of Artificial Sequence: Synthetic oligonucleotide
gaggacggguuacugucaa

SEQ ID NO: 262262 - RNA, 19 nt, Artificial Sequence
  Description of Artificial Sequence: Synthetic oligonucleotide
gucaggacccuggggaaug

SEQ ID NO: 262263 - RNA, 19 nt, Artificial Sequence
  Description of Artificial Sequence: Synthetic oligonucleotide
uccucacaguccuuaccua

SEQ ID NO: 262264 - RNA, 19 nt, Artificial Sequence
  Description of Artificial Sequence: Synthetic oligonucleotide
caacgccacaguucucuuc

SEQ ID NO: 262265 - RNA, 19 nt, Artificial Sequence
  Description of Artificial Sequence: Synthetic oligonucleotide
ccaggauuggggccaagag

SEQ ID NO: 262266 - RNA, 19 nt, Artificial Sequence
  Description of Artificial Sequence: Synthetic oligonucleotide
acgaugcaaagaugguguu

SEQ ID NO: 262267 - RNA, 19 nt, Artificial Sequence
  Description of Artificial Sequence: Synthetic oligonucleotide
ccgcgggucuucauaaagg

SEQ ID NO: 262268 - RNA, 19 nt, Artificial Sequence
  Description of Artificial Sequence: Synthetic oligonucleotide
gucaacgccacaguucucu

SEQ ID NO: 262269 - RNA, 19 nt, Artificial Sequence
  Description of Artificial Sequence: Synthetic oligonucleotide
aagguccguugaaacuuca

SEQ ID NO: 262270 - RNA, 19 nt, Artificial Sequence
  Description of Artificial Sequence: Synthetic oligonucleotide
cuaugcuuuugucagcaau

SEQ ID NO: 262271 - RNA, 19 nt, Artificial Sequence
  Description of Artificial Sequence: Synthetic oligonucleotide
ucucgccgcagcugguuaa

SEQ ID NO: 262272 - RNA, 19 nt, Artificial Sequence
  Description of Artificial Sequence: Synthetic oligonucleotide
ccugcuaguggacagcaca

SEQ ID NO: 262273 - RNA, 19 nt, Artificial Sequence
  Description of Artificial Sequence: Synthetic oligonucleotide
ccucgugucaacgccacag

SEQ ID NO: 262274 - RNA, 19 nt, Artificial Sequence
  Description of Artificial Sequence: Synthetic oligonucleotide
gcuucccucgugucaacgc

SEQ ID NO: 262275 - RNA, 19 nt, Artificial Sequence
  Description of Artificial Sequence: Synthetic oligonucleotide
gccgcgggucuucauaaag

SEQ ID NO: 262276 - RNA, 19 nt, Artificial Sequence
  Description of Artificial Sequence: Synthetic oligonucleotide
aguguucagucaacaaauu

SEQ ID NO: 262277 - RNA, 19 nt, Artificial Sequence
  Description of Artificial Sequence: Synthetic oligonucleotide
auaacacauugcaucccaa

SEQ ID NO: 262278 - RNA, 19 nt, Artificial Sequence
  Description of Artificial Sequence: Synthetic oligonucleotide
gagcgcaggucagucagga

SEQ ID NO: 262279 - RNA, 19 nt, Artificial Sequence
  Description of Artificial Sequence: Synthetic oligonucleotide
agcggaaccgucagucuga

SEQ ID NO: 262280 - RNA, 19 nt, Artificial Sequence
  Description of Artificial Sequence: Synthetic oligonucleotide
ucaacgccacaguucucuu

SEQ ID NO: 262281 - RNA, 19 nt, Artificial Sequence
  Description of Artificial Sequence: Synthetic oligonucleotide
cguuguuaagugacugcgc

SEQ ID NO: 262282 - RNA, 19 nt, Artificial Sequence
  Description of Artificial Sequence: Synthetic oligonucleotide
ggacuauaauugugcugug

SEQ ID NO: 262283 - RNA, 19 nt, Artificial Sequence
  Description of Artificial Sequence: Synthetic oligonucleotide
caggauuggggccaagagu

SEQ ID NO: 262284 - RNA, 19 nt, Artificial Sequence
  Description of Artificial Sequence: Synthetic oligonucleotide
ggguaagugcaaaagagau

SEQ ID NO: 262285 - RNA, 19 nt, Artificial Sequence
  Description of Artificial Sequence: Synthetic oligonucleotide
cacgaacuacguuucuuua

SEQ ID NO: 262286 - RNA, 19 nt, Artificial Sequence
  Description of Artificial Sequence: Synthetic oligonucleotide
gccaauucacaggaggauc

SEQ ID NO: 262287 - RNA, 19 nt, Artificial Sequence
  Description of Artificial Sequence: Synthetic oligonucleotide
aucgcaucucccaggaauu

SEQ ID NO: 262288 - RNA, 19 nt, Artificial Sequence
  Description of Artificial Sequence: Synthetic oligonucleotide
aaacuucaauuuggagcuu

SEQ ID NO: 262289 - RNA, 19 nt, Artificial Sequence
  Description of Artificial Sequence: Synthetic oligonucleotide
cucaagccgcuccagguua

SEQ ID NO: 262290 - RNA, 19 nt, Artificial Sequence
  Description of Artificial Sequence: Synthetic oligonucleotide
agagcgcaggucagucagg

SEQ ID NO: 262291 - RNA, 19 nt, Artificial Sequence
  Description of Artificial Sequence: Synthetic oligonucleotide
ugucaacgccacaguucuc

SEQ ID NO: 262292 - RNA, 19 nt, Artificial Sequence
  Description of Artificial Sequence: Synthetic oligonucleotide
cgugucaacgccacaguuc

SEQ ID NO: 262293 - RNA, 19 nt, Artificial Sequence
  Description of Artificial Sequence: Synthetic oligonucleotide
ccaggaauucuaagcgcug

SEQ ID NO: 262294 - RNA, 19 nt, Artificial Sequence
  Description of Artificial Sequence: Synthetic oligonucleotide
cggguuacugucaauaaaa

SEQ ID NO: 262295 - RNA, 19 nt, Artificial Sequence
  Description of Artificial Sequence: Synthetic oligonucleotide
ucccagcacucaucacggc

SEQ ID NO: 262296 - RNA, 19 nt, Artificial Sequence
  Description of Artificial Sequence: Synthetic oligonucleotide
cuucacagccaacgaugca

SEQ ID NO: 262297 - RNA, 19 nt, Artificial Sequence
  Description of Artificial Sequence: Synthetic oligonucleotide
uaauugcuguaagguccgu

SEQ ID NO: 262298 - RNA, 19 nt, Artificial Sequence
  Description of Artificial Sequence: Synthetic oligonucleotide
aggcuccugaccccauuaa

SEQ ID NO: 262299 - RNA, 19 nt, Artificial Sequence
  Description of Artificial Sequence: Synthetic oligonucleotide
cuuugggagcccuccacgu

SEQ ID NO: 262300 - RNA, 19 nt, Artificial Sequence
  Description of Artificial Sequence: Synthetic oligonucleotide
agccaacgaugcaaagaug

SEQ ID NO: 262301 - RNA, 19 nt, Artificial Sequence
  Description of Artificial Sequence: Synthetic oligonucleotide
cacggcaggcaucguggac

SEQ ID NO: 262302 - RNA, 19 nt, Artificial Sequence
  Description of Artificial Sequence: Synthetic oligonucleotide
ugggaacuauagguucuua

SEQ ID NO: 262303 - RNA, 19 nt, Artificial Sequence
  Description of Artificial Sequence: Synthetic oligonucleotide
cagggacuauaauugugcu

SEQ ID NO: 262304 - RNA, 19 nt, Artificial Sequence
  Description of Artificial Sequence: Synthetic oligonucleotide
gguccguugaaacuucaau

SEQ ID NO: 262305 - RNA, 19 nt, Artificial Sequence
  Description of Artificial Sequence: Synthetic oligonucleotide
ccgcagcugguuaaauagc

SEQ ID NO: 262306 - RNA, 19 nt, Artificial Sequence
  Description of Artificial Sequence: Synthetic oligonucleotide
accgucagucugacuucac

SEQ ID NO: 262307 - RNA, 19 nt, Artificial Sequence
  Description of Artificial Sequence: Synthetic oligonucleotide
agucaggacccuggggaau

SEQ ID NO: 262308 - RNA, 19 nt, Artificial Sequence
  Description of Artificial Sequence: Synthetic oligonucleotide
cgaacuacguuucuuuaaa

SEQ ID NO: 262309 - RNA, 19 nt, Artificial Sequence
  Description of Artificial Sequence: Synthetic oligonucleotide
gaccgcagaucugcaguga

SEQ ID NO: 262310 - RNA, 19 nt, Artificial Sequence
  Description of Artificial Sequence: Synthetic oligonucleotide
cuauugucagcggaaccgu

SEQ ID NO: 262311 - RNA, 19 nt, Artificial Sequence
  Description of Artificial Sequence: Synthetic oligonucleotide
ggauaauuauaggaguguu

SEQ ID NO: 262312 - RNA, 19 nt, Artificial Sequence
  Description of Artificial Sequence: Synthetic oligonucleotide
aggacggguuacugucaau

SEQ ID NO: 262313 - RNA, 19 nt, Artificial Sequence
  Description of Artificial Sequence: Synthetic oligonucleotide
cagucaggacccuggggaa

SEQ ID NO: 262314 - RNA, 19 nt, Artificial Sequence
  Description of Artificial Sequence: Synthetic oligonucleotide
ggauuggggccaagagucc

SEQ ID NO: 262315 - RNA, 19 nt, Artificial Sequence
  Description of Artificial Sequence: Synthetic oligonucleotide
accgcggggcuuccaucug

SEQ ID NO: 262316 - RNA, 19 nt, Artificial Sequence
  Description of Artificial Sequence: Synthetic oligonucleotide
cguaaggugcugaccgcag

SEQ ID NO: 262317 - RNA, 19 nt, Artificial Sequence
  Description of Artificial Sequence: Synthetic oligonucleotide
acaguccgcuaugcuuuug

SEQ ID NO: 262318 - RNA, 19 nt, Artificial Sequence
  Description of Artificial Sequence: Synthetic oligonucleotide
gggaaugcugccgcggguc

SEQ ID NO: 262319 - RNA, 19 nt, Artificial Sequence
  Description of Artificial Sequence: Synthetic oligonucleotide
cugcuaguggacagcacau

SEQ ID NO: 262320 - RNA, 19 nt, Artificial Sequence
  Description of Artificial Sequence: Synthetic oligonucleotide
cucgggagagacagcuuua

SEQ ID NO: 262321 - RNA, 19 nt, Artificial Sequence
  Description of Artificial Sequence: Synthetic oligonucleotide
cucagcggguagccuucug

SEQ ID NO: 262322 - RNA, 19 nt, Artificial Sequence
  Description of Artificial Sequence: Synthetic oligonucleotide
gcuugguuaugagguaguc

SEQ ID NO: 262323 - RNA, 19 nt, Artificial Sequence
  Description of Artificial Sequence: Synthetic oligonucleotide
ggaguguuagaggucauuu

SEQ ID NO: 262324 - RNA, 19 nt, Artificial Sequence
  Description of Artificial Sequence: Synthetic oligonucleotide
gcagaaucggagguugaaa

SEQ ID NO: 262325 - RNA, 19 nt, Artificial Sequence
  Description of Artificial Sequence: Synthetic oligonucleotide
cccaggaauucuaagcgcu

SEQ ID NO: 262326 - RNA, 19 nt, Artificial Sequence
  Description of Artificial Sequence: Synthetic oligonucleotide
cuccgugugcaagucguaa

SEQ ID NO: 262327 - RNA, 19 nt, Artificial Sequence
  Description of Artificial Sequence: Synthetic oligonucleotide
gugcugugcuuacaguaau

SEQ ID NO: 262328 - RNA, 19 nt, Artificial Sequence
  Description of Artificial Sequence: Synthetic oligonucleotide
gugauggccauugucuauu

SEQ ID NO: 262329 - RNA, 19 nt, Artificial Sequence
  Description of Artificial Sequence: Synthetic oligonucleotide
cccagcacucaucacggca

SEQ ID NO: 262330 - RNA, 19 nt, Artificial Sequence
  Description of Artificial Sequence: Synthetic oligonucleotide
agguccguugaaacuucaa

SEQ ID NO: 262331 - RNA, 19 nt, Artificial Sequence
  Description of Artificial Sequence: Synthetic oligonucleotide
caguccgcuaugcuuuugu

SEQ ID NO: 262332 - RNA, 19 nt, Artificial Sequence
  Description of Artificial Sequence: Synthetic oligonucleotide
gacaccgcggggcuuccau

SEQ ID NO: 262333 - RNA, 19 nt, Artificial Sequence
  Description of Artificial Sequence: Synthetic oligonucleotide
caaguuaguuugagguguu

SEQ ID NO: 262334 - RNA, 19 nt, Artificial Sequence
  Description of Artificial Sequence: Synthetic oligonucleotide
gcacgaacuacguuucuuu

SEQ ID NO: 262335 - RNA, 19 nt, Artificial Sequence
  Description of Artificial Sequence: Synthetic oligonucleotide
cacgucagggccuccuccu

SEQ ID NO: 262336 - RNA, 19 nt, Artificial Sequence
  Description of Artificial Sequence: Synthetic oligonucleotide
ccaagaguccuugaggagu

SEQ ID NO: 262337 - RNA, 19 nt, Artificial Sequence
  Description of Artificial Sequence: Synthetic oligonucleotide
agacagcuuuaaaguacuu

SEQ ID NO: 262338 - RNA, 19 nt, Artificial Sequence
  Description of Artificial Sequence: Synthetic oligonucleotide
cucgugucaacgccacagu

SEQ ID NO: 262339 - RNA, 19 nt, Artificial Sequence
  Description of Artificial Sequence: Synthetic oligonucleotide
ccgcuaugcuuuugucagc

SEQ ID NO: 262340 - RNA, 19 nt, Artificial Sequence
  Description of Artificial Sequence: Synthetic oligonucleotide
ccucgugagcaucagggua

SEQ ID NO: 262341 - RNA, 19 nt, Artificial Sequence
  Description of Artificial Sequence: Synthetic oligonucleotide
gcggggcuuccaucugagg

SEQ ID NO: 262342 - RNA, 19 nt, Artificial Sequence
  Description of Artificial Sequence: Synthetic oligonucleotide
ucaucacggcaggcaucgu

SEQ ID NO: 262343 - RNA, 19 nt, Artificial Sequence
  Description of Artificial Sequence: Synthetic oligonucleotide
ggguuacugucaauaaaau

SEQ ID NO: 262344 - RNA, 19 nt, Artificial Sequence
  Description of Artificial Sequence: Synthetic oligonucleotide
gcugccgcgggucuucaua

SEQ ID NO: 262345 - RNA, 19 nt, Artificial Sequence
  Description of Artificial Sequence: Synthetic oligonucleotide
caugugcacgaacuacguu

SEQ ID NO: 262346 - RNA, 19 nt, Artificial Sequence
  Description of Artificial Sequence: Synthetic oligonucleotide
cucucgccgcagcugguua

SEQ ID NO: 262347 - RNA, 19 nt, Artificial Sequence
  Description of Artificial Sequence: Synthetic oligonucleotide
gugcacgaacuacguuucu

SEQ ID NO: 262348 - RNA, 19 nt, Artificial Sequence
  Description of Artificial Sequence: Synthetic oligonucleotide
ccaugugcacgaacuacgu

SEQ ID NO: 262349 - RNA, 19 nt, Artificial Sequence
  Description of Artificial Sequence: Synthetic oligonucleotide
gggauaugagguaguuggu

SEQ ID NO: 262350 - RNA, 19 nt, Artificial Sequence
  Description of Artificial Sequence: Synthetic oligonucleotide
gcaagucguaagagaugga

SEQ ID NO: 262351 - RNA, 19 nt, Artificial Sequence
  Description of Artificial Sequence: Synthetic oligonucleotide
ccguaaggugcugaccgca

SEQ ID NO: 262352 - RNA, 19 nt, Artificial Sequence
  Description of Artificial Sequence: Synthetic oligonucleotide
cccugcuaguggacagcac

SEQ ID NO: 262353 - RNA, 19 nt, Artificial Sequence
  Description of Artificial Sequence: Synthetic oligonucleotide
cucgccgcagcugguuaaa

SEQ ID NO: 262354 - RNA, 19 nt, Artificial Sequence
  Description of Artificial Sequence: Synthetic oligonucleotide
agcucgggagagacagcuu

SEQ ID NO: 262355 - RNA, 19 nt, Artificial Sequence
  Description of Artificial Sequence: Synthetic oligonucleotide
gcggaaccgucagucugac

SEQ ID NO: 262356 - RNA, 19 nt, Artificial Sequence
  Description of Artificial Sequence: Synthetic oligonucleotide
cgcgggucuucauaaaggu

SEQ ID NO: 262357 - RNA, 19 nt, Artificial Sequence
  Description of Artificial Sequence: Synthetic oligonucleotide
ggggaaugcugccgcgggu

SEQ ID NO: 262358 - RNA, 19 nt, Artificial Sequence
  Description of Artificial Sequence: Synthetic oligonucleotide
cacaguccgcuaugcuuuu

SEQ ID NO: 262359 - RNA, 19 nt, Artificial Sequence
  Description of Artificial Sequence: Synthetic oligonucleotide
ccgcggggcuuccaucuga

SEQ ID NO: 262360 - RNA, 19 nt, Artificial Sequence
  Description of Artificial Sequence: Synthetic oligonucleotide
ccuuaccuaguuugccauu

SEQ ID NO: 262361 - RNA, 19 nt, Artificial Sequence
  Description of Artificial Sequence: Synthetic oligonucleotide
ccccauuaacaugcugucu

SEQ ID NO: 262362 - RNA, 19 nt, Artificial Sequence
  Description of Artificial Sequence: Synthetic oligonucleotide
gcuccgugugcaagucgua

SEQ ID NO: 262363 - RNA, 19 nt, Artificial Sequence
  Description of Artificial Sequence: Synthetic oligonucleotide
cccucgugucaacgccaca

SEQ ID NO: 262364 - RNA, 19 nt, Artificial Sequence
  Description of Artificial Sequence: Synthetic oligonucleotide
gggguucuaguagcaccuu

SEQ ID NO: 262365 - RNA, 19 nt, Artificial Sequence
  Description of Artificial Sequence: Synthetic oligonucleotide
cggguagccuucugcaguu

SEQ ID NO: 262366 - RNA, 19 nt, Artificial Sequence
  Description of Artificial Sequence: Synthetic oligonucleotide
gcguuuccaucaagguauu

SEQ ID NO: 262367 - RNA, 19 nt, Artificial Sequence
  Description of Artificial Sequence: Synthetic oligonucleotide
cggaaccgucagucugacu

SEQ ID NO: 262368 - RNA, 19 nt, Artificial Sequence
  Description of Artificial Sequence: Synthetic oligonucleotide
uauacgauaauuaaaguac

SEQ ID NO: 262369 - RNA, 19 nt, Artificial Sequence
  Description of Artificial Sequence: Synthetic oligonucleotide
cauguaauaaguaagcagc

SEQ ID NO: 262370 - RNA, 19 nt, Artificial Sequence
  Description of Artificial Sequence: Synthetic oligonucleotide
uuaucuacuaaaauugucc

SEQ ID NO: 262371 - RNA, 19 nt, Artificial Sequence
  Description of Artificial Sequence: Synthetic oligonucleotide
aauaggguaaguagaaucc

SEQ ID NO: 262372 - RNA, 19 nt, Artificial Sequence
  Description of Artificial Sequence: Synthetic oligonucleotide
ugcagaucaaaauaguagg

SEQ ID NO: 262373 - RNA, 19 nt, Artificial Sequence
  Description of Artificial Sequence: Synthetic oligonucleotide
aaaaguacaugcuggucac

SEQ ID NO: 262374 - RNA, 19 nt, Artificial Sequence
  Description of Artificial Sequence: Synthetic oligonucleotide
ugaucaggaacacauaacc

SEQ ID NO: 262375 - RNA, 19 nt, Artificial Sequence
  Description of Artificial Sequence: Synthetic oligonucleotide
aauaugaguauuauuccac

SEQ ID NO: 262376 - RNA, 19 nt, Artificial Sequence
  Description of Artificial Sequence: Synthetic oligonucleotide
uaaaguacgggucaaacuc

SEQ ID NO: 262377 - RNA, 19 nt, Artificial Sequence
  Description of Artificial Sequence: Synthetic oligonucleotide
uguagaccugcccaaaucg

SEQ ID NO: 262378 - RNA, 19 nt, Artificial Sequence
  Description of Artificial Sequence: Synthetic oligonucleotide
aaugaauaacacagcagcc

SEQ ID NO: 262379 - RNA, 19 nt, Artificial Sequence
  Description of Artificial Sequence: Synthetic oligonucleotide
aauucuaaucccauccggc

SEQ ID NO: 262380 - RNA, 19 nt, Artificial Sequence
  Description of Artificial Sequence: Synthetic oligonucleotide
aggagaucugcauagaaag

SEQ ID NO: 262381 - RNA, 19 nt, Artificial Sequence
  Description of Artificial Sequence: Synthetic oligonucleotide
acauguaauaaguaagcag

SEQ ID NO: 262382 - RNA, 19 nt, Artificial Sequence
  Description of Artificial Sequence: Synthetic oligonucleotide
caguaggcuacauagaucc

SEQ ID NO: 262383 - RNA, 19 nt, Artificial Sequence
  Description of Artificial Sequence: Synthetic oligonucleotide
uccuuuaccuuguauaucc

SEQ ID NO: 262384 - RNA, 19 nt, Artificial Sequence
  Description of Artificial Sequence: Synthetic oligonucleotide
cagaucgagaaauauaccc

SEQ ID NO: 262385 - RNA, 19 nt, Artificial Sequence
  Description of Artificial Sequence: Synthetic oligonucleotide
cauugcaguaauuugguag

SEQ ID NO: 262386 - RNA, 19 nt, Artificial Sequence
  Description of Artificial Sequence: Synthetic oligonucleotide
auaauuaaaguacggguca

SEQ ID NO: 262387 - RNA, 19 nt, Artificial Sequence
  Description of Artificial Sequence: Synthetic oligonucleotide
guagaaauaagcaagggca

SEQ ID NO: 262388 - RNA, 19 nt, Artificial Sequence
  Description of Artificial Sequence: Synthetic oligonucleotide
gacgaagccaguaauaugc

SEQ ID NO: 262389 - RNA, 19 nt, Artificial Sequence
  Description of Artificial Sequence: Synthetic oligonucleotide
uauuaugcacccauuauau

SEQ ID NO: 262390 - RNA, 19 nt, Artificial Sequence
  Description of Artificial Sequence: Synthetic oligonucleotide
auaugacgcacucagugcg

SEQ ID NO: 262391 - RNA, 19 nt, Artificial Sequence
  Description of Artificial Sequence: Synthetic oligonucleotide
auaugaguauuauuccacg

SEQ ID NO: 262392 - RNA, 19 nt, Artificial Sequence
  Description of Artificial Sequence: Synthetic oligonucleotide
ucggaaaagaacuucaaau

SEQ ID NO: 262393 - RNA, 19 nt, Artificial Sequence
  Description of Artificial Sequence: Synthetic oligonucleotide
aguauugugacgaagccag

SEQ ID NO: 262394 - RNA, 19 nt, Artificial Sequence
  Description of Artificial Sequence: Synthetic oligonucleotide
uggaguauugugacgaagc

SEQ ID NO: 262395 - RNA, 19 nt, Artificial Sequence
  Description of Artificial Sequence: Synthetic oligonucleotide
aguugaaugaaaaguauag

SEQ ID NO: 262396 - RNA, 19 nt, Artificial Sequence
  Description of Artificial Sequence: Synthetic oligonucleotide
guacgggucaaacucaugg

SEQ ID NO: 262397 - RNA, 19 nt, Artificial Sequence
  Description of Artificial Sequence: Synthetic oligonucleotide
aaaauggaguacgugguag

SEQ ID NO: 262398 - RNA, 19 nt, Artificial Sequence
  Description of Artificial Sequence: Synthetic oligonucleotide
uauguaacgauggugguga

SEQ ID NO: 262399 - RNA, 19 nt, Artificial Sequence
  Description of Artificial Sequence: Synthetic oligonucleotide
auuaaaguacgggucaaac

SEQ ID NO: 262400 - RNA, 19 nt, Artificial Sequence
  Description of Artificial Sequence: Synthetic oligonucleotide
uucgaacacggucaaaacc

SEQ ID NO: 262401 - RNA, 19 nt, Artificial Sequence
  Description of Artificial Sequence: Synthetic oligonucleotide
gucugggcgacuuauaucc

SEQ ID NO: 262402 - RNA, 19 nt, Artificial Sequence
  Description of Artificial Sequence: Synthetic oligonucleotide
ucacugguuacccaaguug

SEQ ID NO: 262403 - RNA, 19 nt, Artificial Sequence
  Description of Artificial Sequence: Synthetic oligonucleotide
ucgagaaauauacccagga

SEQ ID NO: 262404 - RNA, 19 nt, Artificial Sequence
  Description of Artificial Sequence: Synthetic oligonucleotide
uccuucguuaucauaggag

SEQ ID NO: 262405 - RNA, 19 nt, Artificial Sequence
  Description of Artificial Sequence: Synthetic oligonucleotide
uuugguaaccugcucagaa

SEQ ID NO: 262406 - RNA, 19 nt, Artificial Sequence
  Description of Artificial Sequence: Synthetic oligonucleotide
aaaugauccuacugccauc

SEQ ID NO: 262407 - RNA, 19 nt, Artificial Sequence
  Description of Artificial Sequence: Synthetic oligonucleotide
caagccucgauuauccagg

SEQ ID NO: 262408 - RNA, 19 nt, Artificial Sequence
  Description of Artificial Sequence: Synthetic oligonucleotide
accauuacagcugaaaagu

SEQ ID NO: 262409 - RNA, 19 nt, Artificial Sequence
  Description of Artificial Sequence: Synthetic oligonucleotide
ugcgaagcauaucagggca

SEQ ID NO: 262410 - RNA, 19 nt, Artificial Sequence
  Description of Artificial Sequence: Synthetic oligonucleotide
gaaaaguauaggugaugag

SEQ ID NO: 262411 - RNA, 19 nt, Artificial Sequence
  Description of Artificial Sequence: Synthetic oligonucleotide
guauacgauaauuaaagua

SEQ ID NO: 262412 - RNA, 19 nt, Artificial Sequence
  Description of Artificial Sequence: Synthetic oligonucleotide
aaucgguaguaacacauuu

SEQ ID NO: 262413 - RNA, 19 nt, Artificial Sequence
  Description of Artificial Sequence: Synthetic oligonucleotide
aacuucaaauugcugugga

SEQ ID NO: 262414 - RNA, 19 nt, Artificial Sequence
  Description of Artificial Sequence: Synthetic oligonucleotide
agccgauuuaagucaaaac

SEQ ID NO: 262415 - RNA, 19 nt, Artificial Sequence
  Description of Artificial Sequence: Synthetic oligonucleotide
uguucugugguauaugcuu

SEQ ID NO: 262416 - RNA, 19 nt, Artificial Sequence
  Description of Artificial Sequence: Synthetic oligonucleotide
auacgauaauuaaaguacg

SEQ ID NO: 262417 - RNA, 19 nt, Artificial Sequence
  Description of Artificial Sequence: Synthetic oligonucleotide
aagccaaccagggagauaa

SEQ ID NO: 262418 - RNA, 19 nt, Artificial Sequence
  Description of Artificial Sequence: Synthetic oligonucleotide
caauucuaaucccauccgg

SEQ ID NO: 262419 - RNA, 19 nt, Artificial Sequence
  Description of Artificial Sequence: Synthetic oligonucleotide
aguaauaugcuucccggaa

SEQ ID NO: 262420 - RNA, 19 nt, Artificial Sequence
  Description of Artificial Sequence: Synthetic oligonucleotide
aaauggaguacgugguaga

SEQ ID NO: 262421 - RNA, 19 nt, Artificial Sequence
  Description of Artificial Sequence: Synthetic oligonucleotide
cuucguuaucauaggagcc

SEQ ID NO: 262422 - RNA, 19 nt, Artificial Sequence
  Description of Artificial Sequence: Synthetic oligonucleotide
caucaaaccaguuauggaa

SEQ ID NO: 262423 - RNA, 19 nt, Artificial Sequence
  Description of Artificial Sequence: Synthetic oligonucleotide
uacuaaaauuguccgauuu

SEQ ID NO: 262424 - RNA, 19 nt, Artificial Sequence
  Description of Artificial Sequence: Synthetic oligonucleotide
guaaucuacgaaggcaugg

SEQ ID NO: 262425 - RNA, 19 nt, Artificial Sequence
  Description of Artificial Sequence: Synthetic oligonucleotide
uugaucaggaacacauaac

SEQ ID NO: 262426 - RNA, 19 nt, Artificial Sequence
  Description of Artificial Sequence: Synthetic oligonucleotide
aaaacggccuguuaacauu

SEQ ID NO: 262427 - RNA, 19 nt, Artificial Sequence
  Description of Artificial Sequence: Synthetic oligonucleotide
aguaauuugguagccauaa

SEQ ID NO: 262428 - RNA, 19 nt, Artificial Sequence
  Description of Artificial Sequence: Synthetic oligonucleotide
agcaaugaguagaaacgcc

SEQ ID NO: 262429 - RNA, 19 nt, Artificial Sequence
  Description of Artificial Sequence: Synthetic oligonucleotide
gcgacuuauauccagauuc

SEQ ID NO: 262430 - RNA, 19 nt, Artificial Sequence
  Description of Artificial Sequence: Synthetic oligonucleotide
accaugacaugaccuuugc

SEQ ID NO: 262431 - RNA, 19 nt, Artificial Sequence
  Description of Artificial Sequence: Synthetic oligonucleotide
ucucaaaucagccgauuua

SEQ ID NO: 262432 - RNA, 19 nt, Artificial Sequence
  Description of Artificial Sequence: Synthetic oligonucleotide
auucuaaucccauccggcu

SEQ ID NO: 262433 - RNA, 19 nt, Artificial Sequence
  Description of Artificial Sequence: Synthetic oligonucleotide
gccgauuuaagucaaaaca

SEQ ID NO: 262434 - RNA, 19 nt, Artificial Sequence
  Description of Artificial Sequence: Synthetic oligonucleotide
auaacaggugccaacacca

SEQ ID NO: 262435 - RNA, 19 nt, Artificial Sequence
  Description of Artificial Sequence: Synthetic oligonucleotide
aaaccuggcggacgcuugg

SEQ ID NO: 262436 - RNA, 19 nt, Artificial Sequence
  Description of Artificial Sequence: Synthetic oligonucleotide
guaauaaguaagcagcaua

SEQ ID NO: 262437 - RNA, 19 nt, Artificial Sequence
  Description of Artificial Sequence: Synthetic oligonucleotide
gguaaguagaauccuguug

SEQ ID NO: 262438 - RNA, 19 nt, Artificial Sequence
  Description of Artificial Sequence: Synthetic oligonucleotide
auccggaccauccaaagaa

SEQ ID NO: 262439 - RNA, 19 nt, Artificial Sequence
  Description of Artificial Sequence: Synthetic oligonucleotide
gccucgauuauccaggucc

SEQ ID NO: 262440 - RNA, 19 nt, Artificial Sequence
  Description of Artificial Sequence: Synthetic oligonucleotide
auuucgaacacggucaaaa

SEQ ID NO: 262441 - RNA, 19 nt, Artificial Sequence
  Description of Artificial Sequence: Synthetic oligonucleotide
cauccauucacuucuguga

SEQ ID NO: 262442 - RNA, 19 nt, Artificial Sequence
  Description of Artificial Sequence: Synthetic oligonucleotide
cagcccaauagauggaacc

SEQ ID NO: 262443 - RNA, 19 nt, Artificial Sequence
  Description of Artificial Sequence: Synthetic oligonucleotide
agcauggauauggucuucc

SEQ ID NO: 262444 - RNA, 19 nt, Artificial Sequence
  Description of Artificial Sequence: Synthetic oligonucleotide
agcauuucgaacacgguca

SEQ ID NO: 262445 - RNA, 19 nt, Artificial Sequence
  Description of Artificial Sequence: Synthetic oligonucleotide
acagaucgagaaauauacc

SEQ ID NO: 262446 - RNA, 19 nt, Artificial Sequence
  Description of Artificial Sequence: Synthetic oligonucleotide
ccuucguuaucauaggagc

SEQ ID NO: 262447 - RNA, 19 nt, Artificial Sequence
  Description of Artificial Sequence: Synthetic oligonucleotide
ugaccaguaucauuccacu

SEQ ID NO: 262448 - RNA, 19 nt, Artificial Sequence
  Description of Artificial Sequence: Synthetic oligonucleotide
aaucuacgaaggcauggau

SEQ ID NO: 262449 - RNA, 19 nt, Artificial Sequence
  Description of Artificial Sequence: Synthetic oligonucleotide
gucaaaaccuggcggacgc

SEQ ID NO: 262450 - RNA, 19 nt, Artificial Sequence
  Description of Artificial Sequence: Synthetic oligonucleotide
ugguaaccugcucagaauu

SEQ ID NO: 262451 - RNA, 19 nt, Artificial Sequence
  Description of Artificial Sequence: Synthetic oligonucleotide
uuucgaacacggucaaaac

SEQ ID NO: 262452 - RNA, 19 nt, Artificial Sequence
  Description of Artificial Sequence: Synthetic oligonucleotide
cuuguauauccugaccagc

SEQ ID NO: 262453 - RNA, 19 nt, Artificial Sequence
  Description of Artificial Sequence: Synthetic oligonucleotide
uaaucuacgaaggcaugga

SEQ ID NO: 262454 - RNA, 19 nt, Artificial Sequence
  Description of Artificial Sequence: Synthetic oligonucleotide
ugugacgaagccaguaaua

SEQ ID NO: 262455 - RNA, 19 nt, Artificial Sequence
  Description of Artificial Sequence: Synthetic oligonucleotide
aaaguacgggucaaacuca

SEQ ID NO: 262456 - RNA, 19 nt, Artificial Sequence
  Description of Artificial Sequence: Synthetic oligonucleotide
guaauagaggccaacugga

SEQ ID NO: 262457 - RNA, 19 nt, Artificial Sequence
  Description of Artificial Sequence: Synthetic oligonucleotide
agaucgagaaauauaccca

SEQ ID NO: 262458 - RNA, 19 nt, Artificial Sequence
  Description of Artificial Sequence: Synthetic oligonucleotide
uccucaauaugacgcacuc

SEQ ID NO: 262459 - RNA, 19 nt, Artificial Sequence
  Description of Artificial Sequence: Synthetic oligonucleotide
ugguagauugcagcagagg

SEQ ID NO: 262460 - RNA, 19 nt, Artificial Sequence
  Description of Artificial Sequence: Synthetic oligonucleotide
ugauucggcccaaagggua

SEQ ID NO: 262461 - RNA, 19 nt, Artificial Sequence
  Description of Artificial Sequence: Synthetic oligonucleotide
uucucaaaucagccgauuu

SEQ ID NO: 262462 - RNA, 19 nt, Artificial Sequence
  Description of Artificial Sequence: Synthetic oligonucleotide
uauauccugaccagccaau

SEQ ID NO: 262463 - RNA, 19 nt, Artificial Sequence
  Description of Artificial Sequence: Synthetic oligonucleotide
auaguacccaggcaguaaa

SEQ ID NO: 262464 - RNA, 19 nt, Artificial Sequence
  Description of Artificial Sequence: Synthetic oligonucleotide
aauaguacccaggcaguaa

SEQ ID NO: 262465 - RNA, 19 nt, Artificial Sequence
  Description of Artificial Sequence: Synthetic oligonucleotide
aauuguccgauuugccauu

SEQ ID NO: 262466 - RNA, 19 nt, Artificial Sequence
  Description of Artificial Sequence: Synthetic oligonucleotide
caguaauagaggccaacug

SEQ ID NO: 262467 - RNA, 19 nt, Artificial Sequence
  Description of Artificial Sequence: Synthetic oligonucleotide
gccaguaauaugcuucccg

SEQ ID NO: 262468 - RNA, 19 nt, Artificial Sequence
  Description of Artificial Sequence: Synthetic oligonucleotide
caugacaugaccuuugcau

SEQ ID NO: 262469 - RNA, 19 nt, Artificial Sequence
  Description of Artificial Sequence: Synthetic oligonucleotide
agcaguaauagaggccaac

SEQ ID NO: 262470 - RNA, 19 nt, Artificial Sequence
  Description of Artificial Sequence: Synthetic oligonucleotide
agguuacuaaagcaguaau

SEQ ID NO: 262471 - RNA, 19 nt, Artificial Sequence
  Description of Artificial Sequence: Synthetic oligonucleotide
uacgggucaaacucaugga

SEQ ID NO: 262472 - RNA, 19 nt, Artificial Sequence
  Description of Artificial Sequence: Synthetic oligonucleotide
aauuaaaguacgggucaaa

SEQ ID NO: 262473 - RNA, 19 nt, Artificial Sequence
  Description of Artificial Sequence: Synthetic oligonucleotide
cagcaaugaguagaaacgc

SEQ ID NO: 262474 - RNA, 19 nt, Artificial Sequence
  Description of Artificial Sequence: Synthetic oligonucleotide
uccaauccggaccauccaa

SEQ ID NO: 262475 - RNA, 19 nt, Artificial Sequence
  Description of Artificial Sequence: Synthetic oligonucleotide
guagauugcagcagaggug

SEQ ID NO: 262476 - RNA, 19 nt, Artificial Sequence
  Description of Artificial Sequence: Synthetic oligonucleotide
ucguuaucauaggagccag

SEQ ID NO: 262477 - RNA, 19 nt, Artificial Sequence
  Description of Artificial Sequence: Synthetic oligonucleotide
agagacgaguagaaaauga

SEQ ID NO: 262478 - RNA, 19 nt, Artificial Sequence
  Description of Artificial Sequence: Synthetic oligonucleotide
ucuucggcguccucaauau

SEQ ID NO: 262479 - RNA, 19 nt, Artificial Sequence
  Description of Artificial Sequence: Synthetic oligonucleotide
acgggcagacaguacaaug

SEQ ID NO: 262480 - RNA, 19 nt, Artificial Sequence
  Description of Artificial Sequence: Synthetic oligonucleotide
gaccugcccaaaucgguag

SEQ ID NO: 262481 - RNA, 19 nt, Artificial Sequence
  Description of Artificial Sequence: Synthetic oligonucleotide
aauggaguacgugguagau

SEQ ID NO: 262482 - RNA, 19 nt, Artificial Sequence
  Description of Artificial Sequence: Synthetic oligonucleotide
gcuacauagauccgaugag

SEQ ID NO: 262483 - RNA, 19 nt, Artificial Sequence
  Description of Artificial Sequence: Synthetic oligonucleotide
ucaaauugcuguggauuca

SEQ ID NO: 262484 - RNA, 19 nt, Artificial Sequence
  Description of Artificial Sequence: Synthetic oligonucleotide
agaggaauacccaguaaga

SEQ ID NO: 262485 - RNA, 19 nt, Artificial Sequence
  Description of Artificial Sequence: Synthetic oligonucleotide
caauccggaccauccaaag

SEQ ID NO: 262486 - RNA, 19 nt, Artificial Sequence
  Description of Artificial Sequence: Synthetic oligonucleotide
cuggagaacccucacgauc

SEQ ID NO: 262487 - RNA, 19 nt, Artificial Sequence
  Description of Artificial Sequence: Synthetic oligonucleotide
uaugacgcacucagugcga

SEQ ID NO: 262488 - RNA, 19 nt, Artificial Sequence
  Description of Artificial Sequence: Synthetic oligonucleotide
uuaauaggguaaguagaau

SEQ ID NO: 262489 - RNA, 19 nt, Artificial Sequence
  Description of Artificial Sequence: Synthetic oligonucleotide
aucagaggaauacccagua

SEQ ID NO: 262490 - RNA, 19 nt, Artificial Sequence
  Description of Artificial Sequence: Synthetic oligonucleotide
ggaguauugugacgaagcc

SEQ ID NO: 262491 - RNA, 19 nt, Artificial Sequence
  Description of Artificial Sequence: Synthetic oligonucleotide
ugggcgacuuauauccaga

SEQ ID NO: 262492 - RNA, 19 nt, Artificial Sequence
  Description of Artificial Sequence: Synthetic oligonucleotide
uaauuaaaguacgggucaa

SEQ ID NO: 262493 - RNA, 19 nt, Artificial Sequence
  Description of Artificial Sequence: Synthetic oligonucleotide
augccauugccuguccuac

SEQ ID NO: 262494 - RNA, 19 nt, Artificial Sequence
  Description of Artificial Sequence: Synthetic oligonucleotide
guauguaacgaugguggug

SEQ ID NO: 262495 - RNA, 19 nt, Artificial Sequence
  Description of Artificial Sequence: Synthetic oligonucleotide
guagaccugcccaaaucgg

SEQ ID NO: 262496 - RNA, 19 nt, Artificial Sequence
  Description of Artificial Sequence: Synthetic oligonucleotide
guacaauggagggugaaga

SEQ ID NO: 262497 - RNA, 19 nt, Artificial Sequence
  Description of Artificial Sequence: Synthetic oligonucleotide
uuugguaaggugguaugua

SEQ ID NO: 262498 - RNA, 19 nt, Artificial Sequence
  Description of Artificial Sequence: Synthetic oligonucleotide
cacugguuacccaaguuga

SEQ ID NO: 262499 - RNA, 19 nt, Artificial Sequence
  Description of Artificial Sequence: Synthetic oligonucleotide
auaagcaagggcacacuug

SEQ ID NO: 262500 - RNA, 19 nt, Artificial Sequence
  Description of Artificial Sequence: Synthetic oligonucleotide
uguguagaccugcccaaau

SEQ ID NO: 262501 - RNA, 19 nt, Artificial Sequence
  Description of Artificial Sequence: Synthetic oligonucleotide
aucgagaaauauacccagg

SEQ ID NO: 262502 - RNA, 19 nt, Artificial Sequence
  Description of Artificial Sequence: Synthetic oligonucleotide
auaggguaaguagaauccu

SEQ ID NO: 262503 - RNA, 19 nt, Artificial Sequence
  Description of Artificial Sequence: Synthetic oligonucleotide
acgggucaaacucauggau

SEQ ID NO: 262504 - RNA, 19 nt, Artificial Sequence
  Description of Artificial Sequence: Synthetic oligonucleotide
gaguauugugacgaagcca

SEQ ID NO: 262505 - RNA, 19 nt, Artificial Sequence
  Description of Artificial Sequence: Synthetic oligonucleotide
uucuuauaaacugcauaua

SEQ ID NO: 262506 - RNA, 19 nt, Artificial Sequence
  Description of Artificial Sequence: Synthetic oligonucleotide
augauccuacugccauccc

SEQ ID NO: 262507 - RNA, 19 nt, Artificial Sequence
  Description of Artificial Sequence: Synthetic oligonucleotide
ucggcguccucaauaugac

SEQ ID NO: 262508 - RNA, 19 nt, Artificial Sequence
  Description of Artificial Sequence: Synthetic oligonucleotide
cugggcgacuuauauccag

SEQ ID NO: 262509 - RNA, 19 nt, Artificial Sequence
  Description of Artificial Sequence: Synthetic oligonucleotide
agaaaccggguauacgaua

SEQ ID NO: 262510 - RNA, 19 nt, Artificial Sequence
  Description of Artificial Sequence: Synthetic oligonucleotide
ggccuguuaacauuagcac

SEQ ID NO: 262511 - RNA, 19 nt, Artificial Sequence
  Description of Artificial Sequence: Synthetic oligonucleotide
aaccagggagauaacacuu

SEQ ID NO: 262512 - RNA, 19 nt, Artificial Sequence
  Description of Artificial Sequence: Synthetic oligonucleotide
guauauccugaccagccaa

SEQ ID NO: 262513 - RNA, 19 nt, Artificial Sequence
  Description of Artificial Sequence: Synthetic oligonucleotide
agaauaguacccaggcagu

SEQ ID NO: 262514 - RNA, 19 nt, Artificial Sequence
  Description of Artificial Sequence: Synthetic oligonucleotide
aauucuccaguuggaguau

SEQ ID NO: 262515 - RNA, 19 nt, Artificial Sequence
  Description of Artificial Sequence: Synthetic oligonucleotide
acguguuauuaucuacuaa

SEQ ID NO: 262516 - RNA, 19 nt, Artificial Sequence
  Description of Artificial Sequence: Synthetic oligonucleotide
ggauccagcaaugaguaga

SEQ ID NO: 262517 - RNA, 19 nt, Artificial Sequence
  Description of Artificial Sequence: Synthetic oligonucleotide
cagguaaucuacgaaggca

SEQ ID NO: 262518 - RNA, 19 nt, Artificial Sequence
  Description of Artificial Sequence: Synthetic oligonucleotide
cuacucgagaaauaugagu

SEQ ID NO: 262519 - RNA, 19 nt, Artificial Sequence
  Description of Artificial Sequence: Synthetic oligonucleotide
ccagaaaccggguauacga

SEQ ID NO: 262520 - RNA, 19 nt, Artificial Sequence
  Description of Artificial Sequence: Synthetic oligonucleotide
ucuugucugggcgacuuau

SEQ ID NO: 262521 - RNA, 19 nt, Artificial Sequence
  Description of Artificial Sequence: Synthetic oligonucleotide
aaccggguauacgauaauu

SEQ ID NO: 262522 - RNA, 19 nt, Artificial Sequence
  Description of Artificial Sequence: Synthetic oligonucleotide
guguuauuaucuacuaaaa

SEQ ID NO: 262523 - RNA, 19 nt, Artificial Sequence
  Description of Artificial Sequence: Synthetic oligonucleotide
ccgauuuaagucaaaacaa

SEQ ID NO: 262524 - RNA, 19 nt, Artificial Sequence
  Description of Artificial Sequence: Synthetic oligonucleotide
aaacggccuguuaacauua

SEQ ID NO: 262525 - RNA, 19 nt, Artificial Sequence
  Description of Artificial Sequence: Synthetic oligonucleotide
agacgcaccauuacagcug

SEQ ID NO: 262526 - RNA, 19 nt, Artificial Sequence
  Description of Artificial Sequence: Synthetic oligonucleotide
gguuacccaaguugaauga

SEQ ID NO: 262527 - RNA, 19 nt, Artificial Sequence
  Description of Artificial Sequence: Synthetic oligonucleotide
agccagaaaccggguauac

SEQ ID NO: 262528 - RNA, 19 nt, Artificial Sequence
  Description of Artificial Sequence: Synthetic oligonucleotide
ucugugguauaugcuuccu

SEQ ID NO: 262529 - RNA, 19 nt, Artificial Sequence
  Description of Artificial Sequence: Synthetic oligonucleotide
acgugaagagggaucaagu

SEQ ID NO: 262530 - RNA, 19 nt, Artificial Sequence
  Description of Artificial Sequence: Synthetic oligonucleotide
ggauucaacuugcugcgca

SEQ ID NO: 262531 - RNA, 19 nt, Artificial Sequence
  Description of Artificial Sequence: Synthetic oligonucleotide
ccuacucgagaaauaugag

SEQ ID NO: 262532 - RNA, 19 nt, Artificial Sequence
  Description of Artificial Sequence: Synthetic oligonucleotide
auccgagcaucagacaggu

SEQ ID NO: 262533 - RNA, 19 nt, Artificial Sequence
  Description of Artificial Sequence: Synthetic oligonucleotide
ugacgcacucagugcgaag

SEQ ID NO: 262534 - RNA, 19 nt, Artificial Sequence
  Description of Artificial Sequence: Synthetic oligonucleotide
acgugguagauugcagcag

SEQ ID NO: 262535 - RNA, 19 nt, Artificial Sequence
  Description of Artificial Sequence: Synthetic oligonucleotide
ccaauagauggaaccaguc

SEQ ID NO: 262536 - RNA, 19 nt, Artificial Sequence
  Description of Artificial Sequence: Synthetic oligonucleotide
cauugccuguccuacucga

SEQ ID NO: 262537 - RNA, 19 nt, Artificial Sequence
  Description of Artificial Sequence: Synthetic oligonucleotide
gugaucauuaagccugggu

SEQ ID NO: 262538 - RNA, 19 nt, Artificial Sequence
  Description of Artificial Sequence: Synthetic oligonucleotide
aacggccuguuaacauuag

SEQ ID NO: 262539 - RNA, 19 nt, Artificial Sequence
  Description of Artificial Sequence: Synthetic oligonucleotide
caccugggagacaccaaug

SEQ ID NO: 262540 - RNA, 19 nt, Artificial Sequence
  Description of Artificial Sequence: Synthetic oligonucleotide
cccaaaucgguaguaacac

SEQ ID NO: 262541 - RNA, 19 nt, Artificial Sequence
  Description of Artificial Sequence: Synthetic oligonucleotide
uggauucaacuugcugcgc

SEQ ID NO: 262542 - RNA, 19 nt, Artificial Sequence
  Description of Artificial Sequence: Synthetic oligonucleotide
gguauacgauaauuaaagu

SEQ ID NO: 262543 - RNA, 19 nt, Artificial Sequence
  Description of Artificial Sequence: Synthetic oligonucleotide
ucagccgauuuaagucaaa

SEQ ID NO: 262544 - RNA, 19 nt, Artificial Sequence
  Description of Artificial Sequence: Synthetic oligonucleotide
cacguguuauuaucuacua

SEQ ID NO: 262545 - RNA, 19 nt, Artificial Sequence
  Description of Artificial Sequence: Synthetic oligonucleotide
ggcccggucaucaaaccag

SEQ ID NO: 262546 - RNA, 19 nt, Artificial Sequence
  Description of Artificial Sequence: Synthetic oligonucleotide
aucgguaguaacacauuuu

SEQ ID NO: 262547 - RNA, 19 nt, Artificial Sequence
  Description of Artificial Sequence: Synthetic oligonucleotide
gguaaucuacgaaggcaug

SEQ ID NO: 262548 - RNA, 19 nt, Artificial Sequence
  Description of Artificial Sequence: Synthetic oligonucleotide
agggugcuauaaaacaaaa

SEQ ID NO: 262549 - RNA, 19 nt, Artificial Sequence
  Description of Artificial Sequence: Synthetic oligonucleotide
acgcacucagugcgaagca

SEQ ID NO: 262550 - RNA, 19 nt, Artificial Sequence
  Description of Artificial Sequence: Synthetic oligonucleotide
ccgagcaucagacagguua

SEQ ID NO: 262551 - RNA, 19 nt, Artificial Sequence
  Description of Artificial Sequence: Synthetic oligonucleotide
ggaauucuccaguuggagu

SEQ ID NO: 262552 - RNA, 19 nt, Artificial Sequence
  Description of Artificial Sequence: Synthetic oligonucleotide
agcaucagacagguuacua

SEQ ID NO: 262553 - RNA, 19 nt, Artificial Sequence
  Description of Artificial Sequence: Synthetic oligonucleotide
accugcccaaaucgguagu

SEQ ID NO: 262554 - RNA, 19 nt, Artificial Sequence
  Description of Artificial Sequence: Synthetic oligonucleotide
cucacgauccacucggaau

SEQ ID NO: 262555 - RNA, 19 nt, Artificial Sequence
  Description of Artificial Sequence: Synthetic oligonucleotide
uguccuugacaagccucga

SEQ ID NO: 262556 - RNA, 19 nt, Artificial Sequence
  Description of Artificial Sequence: Synthetic oligonucleotide
acgaagccaguaauaugcu

SEQ ID NO: 262557 - RNA, 19 nt, Artificial Sequence
  Description of Artificial Sequence: Synthetic oligonucleotide
gccagaaaccggguauacg

SEQ ID NO: 262558 - RNA, 19 nt, Artificial Sequence
  Description of Artificial Sequence: Synthetic oligonucleotide
ccuccaaugauucggccca

SEQ ID NO: 262559 - RNA, 19 nt, Artificial Sequence
  Description of Artificial Sequence: Synthetic oligonucleotide
gcccaauagauggaaccag

SEQ ID NO: 262560 - RNA, 19 nt, Artificial Sequence
  Description of Artificial Sequence: Synthetic oligonucleotide
uggaucugacagagaccaa

SEQ ID NO: 262561 - RNA, 19 nt, Artificial Sequence
  Description of Artificial Sequence: Synthetic oligonucleotide
gaagcauaucagggcacaa

SEQ ID NO: 262562 - RNA, 19 nt, Artificial Sequence
  Description of Artificial Sequence: Synthetic oligonucleotide
ucggcccaaaggguaccag

SEQ ID NO: 262563 - RNA, 19 nt, Artificial Sequence
  Description of Artificial Sequence: Synthetic oligonucleotide
cgagcaucagacagguuac

SEQ ID NO: 262564 - RNA, 19 nt, Artificial Sequence
  Description of Artificial Sequence: Synthetic oligonucleotide
gagaacccucacgauccac

SEQ ID NO: 262565 - RNA, 19 nt, Artificial Sequence
  Description of Artificial Sequence: Synthetic oligonucleotide
uccuccaauccggaccauc

SEQ ID NO: 262566 - RNA, 19 nt, Artificial Sequence
  Description of Artificial Sequence: Synthetic oligonucleotide
uucggcccaaaggguacca

SEQ ID NO: 262567 - RNA, 19 nt, Artificial Sequence
  Description of Artificial Sequence: Synthetic oligonucleotide
gggaccuagagcauggaua

SEQ ID NO: 262568 - RNA, 19 nt, Artificial Sequence
  Description of Artificial Sequence: Synthetic oligonucleotide
gcccaaaucgguaguaaca

SEQ ID NO: 262569 - RNA, 19 nt, Artificial Sequence
  Description of Artificial Sequence: Synthetic oligonucleotide
caguaauuugguagccaua

SEQ ID NO: 262570 - RNA, 19 nt, Artificial Sequence
  Description of Artificial Sequence: Synthetic oligonucleotide
acugguuacccaaguugaa

SEQ ID NO: 262571 - RNA, 19 nt, Artificial Sequence
  Description of Artificial Sequence: Synthetic oligonucleotide
ccccuuuaauugaccaaag

SEQ ID NO: 262572 - RNA, 19 nt, Artificial Sequence
  Description of Artificial Sequence: Synthetic oligonucleotide
aucagccgauuuaagucaa

SEQ ID NO: 262573 - RNA, 19 nt, Artificial Sequence
  Description of Artificial Sequence: Synthetic oligonucleotide
ccggguauacgauaauuaa

SEQ ID NO: 262574 - RNA, 19 nt, Artificial Sequence
  Description of Artificial Sequence: Synthetic oligonucleotide
ggggauguuguuuuagcau

SEQ ID NO: 262575 - RNA, 19 nt, Artificial Sequence
  Description of Artificial Sequence: Synthetic oligonucleotide
aagcaguaauagaggccaa

SEQ ID NO: 262576 - RNA, 19 nt, Artificial Sequence
  Description of Artificial Sequence: Synthetic oligonucleotide
acgauccacucggaauucu

SEQ ID NO: 262577 - RNA, 19 nt, Artificial Sequence
  Description of Artificial Sequence: Synthetic oligonucleotide
cuacgaaggcauggaucug

SEQ ID NO: 262578 - RNA, 19 nt, Artificial Sequence
  Description of Artificial Sequence: Synthetic oligonucleotide
cuugacaagccucgauuau

SEQ ID NO: 262579 - RNA, 19 nt, Artificial Sequence
  Description of Artificial Sequence: Synthetic oligonucleotide
cagccgauuuaagucaaaa

SEQ ID NO: 262580 - RNA, 19 nt, Artificial Sequence
  Description of Artificial Sequence: Synthetic oligonucleotide
augacgcacucagugcgaa

SEQ ID NO: 262581 - RNA, 19 nt, Artificial Sequence
  Description of Artificial Sequence: Synthetic oligonucleotide
cauuagcaccaggacguga

SEQ ID NO: 262582 - RNA, 19 nt, Artificial Sequence
  Description of Artificial Sequence: Synthetic oligonucleotide
ggugguauguaacgauggu

SEQ ID NO: 262583 - RNA, 19 nt, Artificial Sequence
  Description of Artificial Sequence: Synthetic oligonucleotide
acacuucggaaaagaacuu

SEQ ID NO: 262584 - RNA, 19 nt, Artificial Sequence
  Description of Artificial Sequence: Synthetic oligonucleotide
gaguauuauuccacguguu

SEQ ID NO: 262585 - RNA, 19 nt, Artificial Sequence
  Description of Artificial Sequence: Synthetic oligonucleotide
auguaacgaugguggugaa

SEQ ID NO: 262586 - RNA, 19 nt, Artificial Sequence
  Description of Artificial Sequence: Synthetic oligonucleotide
cuaaucccauccggcucug

SEQ ID NO: 262587 - RNA, 19 nt, Artificial Sequence
  Description of Artificial Sequence: Synthetic oligonucleotide
cacucagugcgaagcauau

SEQ ID NO: 262588 - RNA, 19 nt, Artificial Sequence
  Description of Artificial Sequence: Synthetic oligonucleotide
cuacuaaaauuguccgauu

SEQ ID NO: 262589 - RNA, 19 nt, Artificial Sequence
  Description of Artificial Sequence: Synthetic oligonucleotide
cgaacacggucaaaaccug

SEQ ID NO: 262590 - RNA, 19 nt, Artificial Sequence
  Description of Artificial Sequence: Synthetic oligonucleotide
ccacguguuauuaucuacu

SEQ ID NO: 262591 - RNA, 19 nt, Artificial Sequence
  Description of Artificial Sequence: Synthetic oligonucleotide
cagaaaccggguauacgau

SEQ ID NO: 262592 - RNA, 19 nt, Artificial Sequence
  Description of Artificial Sequence: Synthetic oligonucleotide
gcauuucgaacacggucaa

SEQ ID NO: 262593 - RNA, 19 nt, Artificial Sequence
  Description of Artificial Sequence: Synthetic oligonucleotide
ggaguacgugguagauugc

SEQ ID NO: 262594 - RNA, 19 nt, Artificial Sequence
  Description of Artificial Sequence: Synthetic oligonucleotide
uggcggacgcuuggcuucu

SEQ ID NO: 262595 - RNA, 19 nt, Artificial Sequence
  Description of Artificial Sequence: Synthetic oligonucleotide
ggugaagaguaggcuucac

SEQ ID NO: 262596 - RNA, 19 nt, Artificial Sequence
  Description of Artificial Sequence: Synthetic oligonucleotide
ccaauccggaccauccaaa

SEQ ID NO: 262597 - RNA, 19 nt, Artificial Sequence
  Description of Artificial Sequence: Synthetic oligonucleotide
gcgaagcauaucagggcac

SEQ ID NO: 262598 - RNA, 19 nt, Artificial Sequence
  Description of Artificial Sequence: Synthetic oligonucleotide
ggcagcccaauagauggaa

SEQ ID NO: 262599 - RNA, 19 nt, Artificial Sequence
  Description of Artificial Sequence: Synthetic oligonucleotide
ccucaugauuucauaggcu

SEQ ID NO: 262600 - RNA, 19 nt, Artificial Sequence
  Description of Artificial Sequence: Synthetic oligonucleotide
ccgauuugccauugcagua

SEQ ID NO: 262601 - RNA, 19 nt, Artificial Sequence
  Description of Artificial Sequence: Synthetic oligonucleotide
uccgagcaucagacagguu

SEQ ID NO: 262602 - RNA, 19 nt, Artificial Sequence
  Description of Artificial Sequence: Synthetic oligonucleotide
gagcaucagacagguuacu

SEQ ID NO: 262603 - RNA, 19 nt, Artificial Sequence
  Description of Artificial Sequence: Synthetic oligonucleotide
ggguaaguagaauccuguu

SEQ ID NO: 262604 - RNA, 19 nt, Artificial Sequence
  Description of Artificial Sequence: Synthetic oligonucleotide
cauuucgaacacggucaaa

SEQ ID NO: 262605 - RNA, 19 nt, Artificial Sequence
  Description of Artificial Sequence: Synthetic oligonucleotide
ccaugacaugaccuuugca

SEQ ID NO: 262606 - RNA, 19 nt, Artificial Sequence
  Description of Artificial Sequence: Synthetic oligonucleotide
acgaggagcugcagaucaa

SEQ ID NO: 262607 - RNA, 19 nt, Artificial Sequence
  Description of Artificial Sequence: Synthetic oligonucleotide
cgauuauccagguccuuua

SEQ ID NO: 262608 - RNA, 19 nt, Artificial Sequence
  Description of Artificial Sequence: Synthetic oligonucleotide
cgauuugccauugcaguaa

SEQ ID NO: 262609 - RNA, 19 nt, Artificial Sequence
  Description of Artificial Sequence: Synthetic oligonucleotide
cccuuuaauugaccaaagu

SEQ ID NO: 262610 - RNA, 19 nt, Artificial Sequence
  Description of Artificial Sequence: Synthetic oligonucleotide
ccucaauaugacgcacuca

SEQ ID NO: 262611 - RNA, 19 nt, Artificial Sequence
  Description of Artificial Sequence: Synthetic oligonucleotide
gggcgacuuauauccagau

SEQ ID NO: 262612 - RNA, 19 nt, Artificial Sequence
  Description of Artificial Sequence: Synthetic oligonucleotide
ggcgacuuauauccagauu

SEQ ID NO: 262613 - RNA, 19 nt, Artificial Sequence
  Description of Artificial Sequence: Synthetic oligonucleotide
ccucgauuauccagguccu

SEQ ID NO: 262614 - RNA, 19 nt, Artificial Sequence
  Description of Artificial Sequence: Synthetic oligonucleotide
ccucacgauccacucggaa

SEQ ID NO: 262615 - RNA, 19 nt, Artificial Sequence
  Description of Artificial Sequence: Synthetic oligonucleotide
ggacgugaagagggaucaa

SEQ ID NO: 262616 - RNA, 19 nt, Artificial Sequence
  Description of Artificial Sequence: Synthetic oligonucleotide
cacgggcagacaguacaau

SEQ ID NO: 262617 - RNA, 19 nt, Artificial Sequence
  Description of Artificial Sequence: Synthetic oligonucleotide
ccauccggcucuguucuua

SEQ ID NO: 262618 - RNA, 19 nt, Artificial Sequence
  Description of Artificial Sequence: Synthetic oligonucleotide
gcggacgcuuggcuucugu

SEQ ID NO: 262619 - RNA, 19 nt, Artificial Sequence
  Description of Artificial Sequence: Synthetic oligonucleotide
cccucacgauccacucgga

SEQ ID NO: 262620 - RNA, 19 nt, Artificial Sequence
  Description of Artificial Sequence: Synthetic oligonucleotide
ggguaccaggcccggucau

SEQ ID NO: 262621 - RNA, 19 nt, Artificial Sequence
  Description of Artificial Sequence: Synthetic oligonucleotide
ggcggacgcuuggcuucug

SEQ ID NO: 262622 - RNA, 19 nt, Artificial Sequence
  Description of Artificial Sequence: Synthetic oligonucleotide
ugugcauacacucauaccc

SEQ ID NO: 262623 - RNA, 19 nt, Artificial Sequence
  Description of Artificial Sequence: Synthetic oligonucleotide
aaguguacgccguaggucc

SEQ ID NO: 262624 - RNA, 19 nt, Artificial Sequence
  Description of Artificial Sequence: Synthetic oligonucleotide
aagccuagguguuauaaac

SEQ ID NO: 262625 - RNA, 19 nt, Artificial Sequence
  Description of Artificial Sequence: Synthetic oligonucleotide
aaagcgaguuuucaagugg

SEQ ID NO: 262626 - RNA, 19 nt, Artificial Sequence
  Description of Artificial Sequence: Synthetic oligonucleotide
aaauuaaccccgcagcgag

SEQ ID NO: 262627 - RNA, 19 nt, Artificial Sequence
  Description of Artificial Sequence: Synthetic oligonucleotide
uuuuccgaggguuuaaagg

SEQ ID NO: 262628 - RNA, 19 nt, Artificial Sequence
  Description of Artificial Sequence: Synthetic oligonucleotide
aaucuaacugcaaccagcc

SEQ ID NO: 262629 - RNA, 19 nt, Artificial Sequence
  Description of Artificial Sequence: Synthetic oligonucleotide
acuucugagagccagaccu

SEQ ID NO: 262630 - RNA, 19 nt, Artificial Sequence
  Description of Artificial Sequence: Synthetic oligonucleotide
auaaacauuaguguaagca

SEQ ID NO: 262631 - RNA, 19 nt, Artificial Sequence
  Description of Artificial Sequence: Synthetic oligonucleotide
uuacagucucccaagaccc

SEQ ID NO: 262632 - RNA, 19 nt, Artificial Sequence
  Description of Artificial Sequence: Synthetic oligonucleotide
aaaaucuaacugcaaccag

SEQ ID NO: 262633 - RNA, 19 nt, Artificial Sequence
  Description of Artificial Sequence: Synthetic oligonucleotide
aaucauagcccuccuuacg

SEQ ID NO: 262634 - RNA, 19 nt, Artificial Sequence
  Description of Artificial Sequence: Synthetic oligonucleotide
uaaacauuaguguaagcaa

SEQ ID NO: 262635 - RNA, 19 nt, Artificial Sequence
  Description of Artificial Sequence: Synthetic oligonucleotide
agagagaaagaacacuguc

SEQ ID NO: 262636 - RNA, 19 nt, Artificial Sequence
  Description of Artificial Sequence: Synthetic oligonucleotide
uuuccgaggguuuaaagga

SEQ ID NO: 262637 - RNA, 19 nt, Artificial Sequence
  Description of Artificial Sequence: Synthetic oligonucleotide
cuuacagucucccaagacc

SEQ ID NO: 262638 - RNA, 19 nt, Artificial Sequence
  Description of Artificial Sequence: Synthetic oligonucleotide
aaacauuaguguaagcaag

SEQ ID NO: 262639 - RNA, 19 nt, Artificial Sequence
  Description of Artificial Sequence: Synthetic oligonucleotide
aaagccuucguagaucggg

SEQ ID NO: 262640 - RNA, 19 nt, Artificial Sequence
  Description of Artificial Sequence: Synthetic oligonucleotide
auaaaggcuaagcacagcu

SEQ ID NO: 262641 - RNA, 19 nt, Artificial Sequence
  Description of Artificial Sequence: Synthetic oligonucleotide
aaaggccuagcugagaaag

SEQ ID NO: 262642 - RNA, 19 nt, Artificial Sequence
  Description of Artificial Sequence: Synthetic oligonucleotide
ugaccauaguuccacacag

SEQ ID NO: 262643 - RNA, 19 nt, Artificial Sequence
  Description of Artificial Sequence: Synthetic oligonucleotide
aggugagcuaguuaagcgc

SEQ ID NO: 262644 - RNA, 19 nt, Artificial Sequence
  Description of Artificial Sequence: Synthetic oligonucleotide
ucucgaagaaaacuucugc

SEQ ID NO: 262645 - RNA, 19 nt, Artificial Sequence
  Description of Artificial Sequence: Synthetic oligonucleotide
uucgcaugauagaaugugg

SEQ ID NO: 262646 - RNA, 19 nt, Artificial Sequence
  Description of Artificial Sequence: Synthetic oligonucleotide
cuugacgaugccauguucc

SEQ ID NO: 262647 - RNA, 19 nt, Artificial Sequence
  Description of Artificial Sequence: Synthetic oligonucleotide
aaaguguacgccguagguc

SEQ ID NO: 262648 - RNA, 19 nt, Artificial Sequence
  Description of Artificial Sequence: Synthetic oligonucleotide
ugguccuuagaauagacau

SEQ ID NO: 262649 - RNA, 19 nt, Artificial Sequence
  Description of Artificial Sequence: Synthetic oligonucleotide
gguaaauuaaccccgcagc

SEQ ID NO: 262650 - RNA, 19 nt, Artificial Sequence
  Description of Artificial Sequence: Synthetic oligonucleotide
ucaccaaucaagucuggcc

SEQ ID NO: 262651 - RNA, 19 nt, Artificial Sequence
  Description of Artificial Sequence: Synthetic oligonucleotide
cuaguuaagcgcacuacag

SEQ ID NO: 262652 - RNA, 19 nt, Artificial Sequence
  Description of Artificial Sequence: Synthetic oligonucleotide
uuaguguaagcaaggugcc

SEQ ID NO: 262653 - RNA, 19 nt, Artificial Sequence
  Description of Artificial Sequence: Synthetic oligonucleotide
acauguuuugggucugccc

SEQ ID NO: 262654 - RNA, 19 nt, Artificial Sequence
  Description of Artificial Sequence: Synthetic oligonucleotide
agcaaugucgauucgcaug

SEQ ID NO: 262655 - RNA, 19 nt, Artificial Sequence
  Description of Artificial Sequence: Synthetic oligonucleotide
ugacuaacccagaagggac

SEQ ID NO: 262656 - RNA, 19 nt, Artificial Sequence
  Description of Artificial Sequence: Synthetic oligonucleotide
aagcgagagacgucucggc

SEQ ID NO: 262657 - RNA, 19 nt, Artificial Sequence
  Description of Artificial Sequence: Synthetic oligonucleotide
cuuacaucuggcaggggcc

SEQ ID NO: 262658 - RNA, 19 nt, Artificial Sequence
  Description of Artificial Sequence: Synthetic oligonucleotide
uuaagcgcacuacaguccu

SEQ ID NO: 262659 - RNA, 19 nt, Artificial Sequence
  Description of Artificial Sequence: Synthetic oligonucleotide
uugacuaacccagaaggga

SEQ ID NO: 262660 - RNA, 19 nt, Artificial Sequence
  Description of Artificial Sequence: Synthetic oligonucleotide
gucuagaucuccaauacac

SEQ ID NO: 262661 - RNA, 19 nt, Artificial Sequence
  Description of Artificial Sequence: Synthetic oligonucleotide
aaagccuagguguuauaaa

SEQ ID NO: 262662 - RNA, 19 nt, Artificial Sequence
  Description of Artificial Sequence: Synthetic oligonucleotide
guagcggauagacagcagc

SEQ ID NO: 262663 - RNA, 19 nt, Artificial Sequence
  Description of Artificial Sequence: Synthetic oligonucleotide
agguguuauaaacauuagu

SEQ ID NO: 262664 - RNA, 19 nt, Artificial Sequence
  Description of Artificial Sequence: Synthetic oligonucleotide
uuggucauuggauggugag

SEQ ID NO: 262665 - RNA, 19 nt, Artificial Sequence
  Description of Artificial Sequence: Synthetic oligonucleotide
auuaaccccgcagcgagcg

SEQ ID NO: 262666 - RNA, 19 nt, Artificial Sequence
  Description of Artificial Sequence: Synthetic oligonucleotide
uaaauuaaccccgcagcga

SEQ ID NO: 262667 - RNA, 19 nt, Artificial Sequence
  Description of Artificial Sequence: Synthetic oligonucleotide
guuaguagucaaccccagg

SEQ ID NO: 262668 - RNA, 19 nt, Artificial Sequence
  Description of Artificial Sequence: Synthetic oligonucleotide
gaagcgagagacgucucgg

SEQ ID NO: 262669 - RNA, 19 nt, Artificial Sequence
  Description of Artificial Sequence: Synthetic oligonucleotide
agacauauugccagauacg

SEQ ID NO: 262670 - RNA, 19 nt, Artificial Sequence
  Description of Artificial Sequence: Synthetic oligonucleotide
accgugaguaguucaaugu

SEQ ID NO: 262671 - RNA, 19 nt, Artificial Sequence
  Description of Artificial Sequence: Synthetic oligonucleotide
ucauggauacccucacucu

SEQ ID NO: 262672 - RNA, 19 nt, Artificial Sequence
  Description of Artificial Sequence: Synthetic oligonucleotide
uguacugucuggguacaag

SEQ ID NO: 262673 - RNA, 19 nt, Artificial Sequence
  Description of Artificial Sequence: Synthetic oligonucleotide
ggaggaguggaaaucauag

SEQ ID NO: 262674 - RNA, 19 nt, Artificial Sequence
  Description of Artificial Sequence: Synthetic oligonucleotide
uaugcaaagccuagguguu

SEQ ID NO: 262675 - RNA, 19 nt, Artificial Sequence
  Description of Artificial Sequence: Synthetic oligonucleotide
aauuaaccccgcagcgagc

SEQ ID NO: 262676 - RNA, 19 nt, Artificial Sequence
  Description of Artificial Sequence: Synthetic oligonucleotide
acacgaacauguuuugggu

SEQ ID NO: 262677 - RNA, 19 nt, Artificial Sequence
  Description of Artificial Sequence: Synthetic oligonucleotide
aacucaagaaagcgaguuu

SEQ ID NO: 262678 - RNA, 19 nt, Artificial Sequence
  Description of Artificial Sequence: Synthetic oligonucleotide
guggaaaucauagcccucc

SEQ ID NO: 262679 - RNA, 19 nt, Artificial Sequence
  Description of Artificial Sequence: Synthetic oligonucleotide
agcuaguuaagcgcacuac

SEQ ID NO: 262680 - RNA, 19 nt, Artificial Sequence
  Description of Artificial Sequence: Synthetic oligonucleotide
agcagaaugacgggagggg

SEQ ID NO: 262681 - RNA, 19 nt, Artificial Sequence
  Description of Artificial Sequence: Synthetic oligonucleotide
agcggauagacagcagccc

SEQ ID NO: 262682 - RNA, 19 nt, Artificial Sequence
  Description of Artificial Sequence: Synthetic oligonucleotide
ggucauuggauggugagag

SEQ ID NO: 262683 - RNA, 19 nt, Artificial Sequence
  Description of Artificial Sequence: Synthetic oligonucleotide
ugucgauucgcaugauaga

SEQ ID NO: 262684 - RNA, 19 nt, Artificial Sequence
  Description of Artificial Sequence: Synthetic oligonucleotide
guagaucgggacugcgugg

SEQ ID NO: 262685 - RNA, 19 nt, Artificial Sequence
  Description of Artificial Sequence: Synthetic oligonucleotide
ggcaacguggcuuuucgag

SEQ ID NO: 262686 - RNA, 19 nt, Artificial Sequence
  Description of Artificial Sequence: Synthetic oligonucleotide
ggaauacagucucuccugg

SEQ ID NO: 262687 - RNA, 19 nt, Artificial Sequence
  Description of Artificial Sequence: Synthetic oligonucleotide
agaguccaacaccacaccu

SEQ ID NO: 262688 - RNA, 19 nt, Artificial Sequence
  Description of Artificial Sequence: Synthetic oligonucleotide
cauggauacccucacucuc

SEQ ID NO: 262689 - RNA, 19 nt, Artificial Sequence
  Description of Artificial Sequence: Synthetic oligonucleotide
guuaagcgcacuacagucc

SEQ ID NO: 262690 - RNA, 19 nt, Artificial Sequence
  Description of Artificial Sequence: Synthetic oligonucleotide
ggaagggccgaucucaaug

SEQ ID NO: 262691 - RNA, 19 nt, Artificial Sequence
  Description of Artificial Sequence: Synthetic oligonucleotide
guagugaccauaguuccac

SEQ ID NO: 262692 - RNA, 19 nt, Artificial Sequence
  Description of Artificial Sequence: Synthetic oligonucleotide
gacgcuaugcaaagccuag

SEQ ID NO: 262693 - RNA, 19 nt, Artificial Sequence
  Description of Artificial Sequence: Synthetic oligonucleotide
aagcgcacuacaguccuug

SEQ ID NO: 262694 - RNA, 19 nt, Artificial Sequence
  Description of Artificial Sequence: Synthetic oligonucleotide
guacacugggccccaacag

SEQ ID NO: 262695 - RNA, 19 nt, Artificial Sequence
  Description of Artificial Sequence: Synthetic oligonucleotide
augacacgaacauguuuug

SEQ ID NO: 262696 - RNA, 19 nt, Artificial Sequence
  Description of Artificial Sequence: Synthetic oligonucleotide
agacaugaguguacccugc

SEQ ID NO: 262697 - RNA, 19 nt, Artificial Sequence
  Description of Artificial Sequence: Synthetic oligonucleotide
caggcaacguggcuuuucg

SEQ ID NO: 262698 - RNA, 19 nt, Artificial Sequence
  Description of Artificial Sequence: Synthetic oligonucleotide
ucgaggcugugcaagggac

SEQ ID NO: 262699 - RNA, 19 nt, Artificial Sequence
  Description of Artificial Sequence: Synthetic oligonucleotide
ggcugguaaauuaaccccg

SEQ ID NO: 262700 - RNA, 19 nt, Artificial Sequence
  Description of Artificial Sequence: Synthetic oligonucleotide
uggacgcuaugcaaagccu

SEQ ID NO: 262701 - RNA, 19 nt, Artificial Sequence
  Description of Artificial Sequence: Synthetic oligonucleotide
gaguccaacaccacaccug

SEQ ID NO: 262702 - RNA, 19 nt, Artificial Sequence
  Description of Artificial Sequence: Synthetic oligonucleotide
ucgauucgcaugauagaau

SEQ ID NO: 262703 - RNA, 19 nt, Artificial Sequence
  Description of Artificial Sequence: Synthetic oligonucleotide
aagcgaguuuucaagugga

SEQ ID NO: 262704 - RNA, 19 nt, Artificial Sequence
  Description of Artificial Sequence: Synthetic oligonucleotide
ugggcuaagagaggugagc

SEQ ID NO: 262705 - RNA, 19 nt, Artificial Sequence
  Description of Artificial Sequence: Synthetic oligonucleotide
gcaacguggcuuuucgagg

SEQ ID NO: 262706 - RNA, 19 nt, Artificial Sequence
  Description of Artificial Sequence: Synthetic oligonucleotide
agggucuagaucuccaaua

SEQ ID NO: 262707 - RNA, 19 nt, Artificial Sequence
  Description of Artificial Sequence: Synthetic oligonucleotide
guaagcaaggugcccggug

SEQ ID NO: 262708 - RNA, 19 nt, Artificial Sequence
  Description of Artificial Sequence: Synthetic oligonucleotide
uguagucccuuuacccaac

SEQ ID NO: 262709 - RNA, 19 nt, Artificial Sequence
  Description of Artificial Sequence: Synthetic oligonucleotide
cagguagcaggcucuuucc

SEQ ID NO: 262710 - RNA, 19 nt, Artificial Sequence
  Description of Artificial Sequence: Synthetic oligonucleotide
ucauagcccuccuuacgga

SEQ ID NO: 262711 - RNA, 19 nt, Artificial Sequence
  Description of Artificial Sequence: Synthetic oligonucleotide
ggaguggaaaucauagccc

SEQ ID NO: 262712 - RNA, 19 nt, Artificial Sequence
  Description of Artificial Sequence: Synthetic oligonucleotide
acguggaauacagucucuc

SEQ ID NO: 262713 - RNA, 19 nt, Artificial Sequence
  Description of Artificial Sequence: Synthetic oligonucleotide
aguuuaccaucaggaaggg

SEQ ID NO: 262714 - RNA, 19 nt, Artificial Sequence
  Description of Artificial Sequence: Synthetic oligonucleotide
uuuacccaacaaacacuuc

SEQ ID NO: 262715 - RNA, 19 nt, Artificial Sequence
  Description of Artificial Sequence: Synthetic oligonucleotide
gugaccauaguuccacaca

SEQ ID NO: 262716 - RNA, 19 nt, Artificial Sequence
  Description of Artificial Sequence: Synthetic oligonucleotide
guacaaggcccuuggacca

SEQ ID NO: 262717 - RNA, 19 nt, Artificial Sequence
  Description of Artificial Sequence: Synthetic oligonucleotide
auagacauauugccagaua

SEQ ID NO: 262718 - RNA, 19 nt, Artificial Sequence
  Description of Artificial Sequence: Synthetic oligonucleotide
cuuacggagguagaggcga

SEQ ID NO: 262719 - RNA, 19 nt, Artificial Sequence
  Description of Artificial Sequence: Synthetic oligonucleotide
gcaaugucgauucgcauga

SEQ ID NO: 262720 - RNA, 19 nt, Artificial Sequence
  Description of Artificial Sequence: Synthetic oligonucleotide
gacugcgugggugacacca

SEQ ID NO: 262721 - RNA, 19 nt, Artificial Sequence
  Description of Artificial Sequence: Synthetic oligonucleotide
ccuggaaggggccaguuag

SEQ ID NO: 262722 - RNA, 19 nt, Artificial Sequence
  Description of Artificial Sequence: Synthetic oligonucleotide
cgugaguaguucaaugucc

SEQ ID NO: 262723 - RNA, 19 nt, Artificial Sequence
  Description of Artificial Sequence: Synthetic oligonucleotide
gucgauucgcaugauagaa

SEQ ID NO: 262724 - RNA, 19 nt, Artificial Sequence
  Description of Artificial Sequence: Synthetic oligonucleotide
agccagacaaaggccuagc

SEQ ID NO: 262725 - RNA, 19 nt, Artificial Sequence
  Description of Artificial Sequence: Synthetic oligonucleotide
gcuaguuaagcgcacuaca

SEQ ID NO: 262726 - RNA, 19 nt, Artificial Sequence
  Description of Artificial Sequence: Synthetic oligonucleotide
cucaccaaucaagucuggc

SEQ ID NO: 262727 - RNA, 19 nt, Artificial Sequence
  Description of Artificial Sequence: Synthetic oligonucleotide
ugagcuaguuaagcgcacu

SEQ ID NO: 262728 - RNA, 19 nt, Artificial Sequence
  Description of Artificial Sequence: Synthetic oligonucleotide
cauaaaggcuaagcacagc

SEQ ID NO: 262729 - RNA, 19 nt, Artificial Sequence
  Description of Artificial Sequence: Synthetic oligonucleotide
caugaguguacccugcucu

SEQ ID NO: 262730 - RNA, 19 nt, Artificial Sequence
  Description of Artificial Sequence: Synthetic oligonucleotide
aguggaaaucauagcccuc

SEQ ID NO: 262731 - RNA, 19 nt, Artificial Sequence
  Description of Artificial Sequence: Synthetic oligonucleotide
uaaccccgcagcgagcgcc

SEQ ID NO: 262732 - RNA, 19 nt, Artificial Sequence
  Description of Artificial Sequence: Synthetic oligonucleotide
aguuaguagucaaccccag

SEQ ID NO: 262733 - RNA, 19 nt, Artificial Sequence
  Description of Artificial Sequence: Synthetic oligonucleotide
ggaacgacuuuauuuaagu

SEQ ID NO: 262734 - RNA, 19 nt, Artificial Sequence
  Description of Artificial Sequence: Synthetic oligonucleotide
ugguuaacugcagcuuucu

SEQ ID NO: 262735 - RNA, 19 nt, Artificial Sequence
  Description of Artificial Sequence: Synthetic oligonucleotide
agacaggcuuacccuagcu

SEQ ID NO: 262736 - RNA, 19 nt, Artificial Sequence
  Description of Artificial Sequence: Synthetic oligonucleotide
cuagaguggugaaaagcaa

SEQ ID NO: 262737 - RNA, 19 nt, Artificial Sequence
  Description of Artificial Sequence: Synthetic oligonucleotide
aaugacgggaggggaggca

SEQ ID NO: 262738 - RNA, 19 nt, Artificial Sequence
  Description of Artificial Sequence: Synthetic oligonucleotide
cagugagcccucucuguag

SEQ ID NO: 262739 - RNA, 19 nt, Artificial Sequence
  Description of Artificial Sequence: Synthetic oligonucleotide
acuaacccagaagggaccu

SEQ ID NO: 262740 - RNA, 19 nt, Artificial Sequence
  Description of Artificial Sequence: Synthetic oligonucleotide
guccuuagaauagacauau

SEQ ID NO: 262741 - RNA, 19 nt, Artificial Sequence
  Description of Artificial Sequence: Synthetic oligonucleotide
cgauucgcaugauagaaug

SEQ ID NO: 262742 - RNA, 19 nt, Artificial Sequence
  Description of Artificial Sequence: Synthetic oligonucleotide
ccagauacguuccauguca

SEQ ID NO: 262743 - RNA, 19 nt, Artificial Sequence
  Description of Artificial Sequence: Synthetic oligonucleotide
gggcccggaaccuggaagg

SEQ ID NO: 262744 - RNA, 19 nt, Artificial Sequence
  Description of Artificial Sequence: Synthetic oligonucleotide
ggaaggggccaguuaguag

SEQ ID NO: 262745 - RNA, 19 nt, Artificial Sequence
  Description of Artificial Sequence: Synthetic oligonucleotide
gccccaacaggcaacgugg

SEQ ID NO: 262746 - RNA, 19 nt, Artificial Sequence
  Description of Artificial Sequence: Synthetic oligonucleotide
gucccuuaugugcagccuc

SEQ ID NO: 262747 - RNA, 19 nt, Artificial Sequence
  Description of Artificial Sequence: Synthetic oligonucleotide
agguagcaggcucuuuccu

SEQ ID NO: 262748 - RNA, 19 nt, Artificial Sequence
  Description of Artificial Sequence: Synthetic oligonucleotide
uucuuggcacuuugacuaa

SEQ ID NO: 262749 - RNA, 19 nt, Artificial Sequence
  Description of Artificial Sequence: Synthetic oligonucleotide
cugguccuuagaauagaca

SEQ ID NO: 262750 - RNA, 19 nt, Artificial Sequence
  Description of Artificial Sequence: Synthetic oligonucleotide
caccaaucaagucuggccu

SEQ ID NO: 262751 - RNA, 19 nt, Artificial Sequence
  Description of Artificial Sequence: Synthetic oligonucleotide
cucaguucucagucugauc

SEQ ID NO: 262752 - RNA, 19 nt, Artificial Sequence
  Description of Artificial Sequence: Synthetic oligonucleotide
acgcuaugcaaagccuagg

SEQ ID NO: 262753 - RNA, 19 nt, Artificial Sequence
  Description of Artificial Sequence: Synthetic oligonucleotide
gguccuuacagucucccaa

SEQ ID NO: 262754 - RNA, 19 nt, Artificial Sequence
  Description of Artificial Sequence: Synthetic oligonucleotide
ggugagcuaguuaagcgca

SEQ ID NO: 262755 - RNA, 19 nt, Artificial Sequence
  Description of Artificial Sequence: Synthetic oligonucleotide
ucggccagcaaugucgauu

SEQ ID NO: 262756 - RNA, 19 nt, Artificial Sequence
  Description of Artificial Sequence: Synthetic oligonucleotide
gggccgaucucaauggugc

SEQ ID NO: 262757 - RNA, 19 nt, Artificial Sequence
  Description of Artificial Sequence: Synthetic oligonucleotide
uuaaccccgcagcgagcgc

SEQ ID NO: 262758 - RNA, 19 nt, Artificial Sequence
  Description of Artificial Sequence: Synthetic oligonucleotide
cuucuccgucucuaguguc

SEQ ID NO: 262759 - RNA, 19 nt, Artificial Sequence
  Description of Artificial Sequence: Synthetic oligonucleotide
ucaccuucgagggcuccug

SEQ ID NO: 262760 - RNA, 19 nt, Artificial Sequence
  Description of Artificial Sequence: Synthetic oligonucleotide
ccgagcccagucuacaacc

SEQ ID NO: 262761 - RNA, 19 nt, Artificial Sequence
  Description of Artificial Sequence: Synthetic oligonucleotide
uucacgucuuuuggagcca

SEQ ID NO: 262762 - RNA, 19 nt, Artificial Sequence
  Description of Artificial Sequence: Synthetic oligonucleotide
agcgaguuuucaaguggag

SEQ ID NO: 262763 - RNA, 19 nt, Artificial Sequence
  Description of Artificial Sequence: Synthetic oligonucleotide
uccgucucuagugucucau

SEQ ID NO: 262764 - RNA, 19 nt, Artificial Sequence
  Description of Artificial Sequence: Synthetic oligonucleotide
aggguuuaaaggagccuca

SEQ ID NO: 262765 - RNA, 19 nt, Artificial Sequence
  Description of Artificial Sequence: Synthetic oligonucleotide
gagcuaguuaagcgcacua

SEQ ID NO: 262766 - RNA, 19 nt, Artificial Sequence
  Description of Artificial Sequence: Synthetic oligonucleotide
guagucaaccccaggccuc

SEQ ID NO: 262767 - RNA, 19 nt, Artificial Sequence
  Description of Artificial Sequence: Synthetic oligonucleotide
aggcuaagcacagcuugca

SEQ ID NO: 262768 - RNA, 19 nt, Artificial Sequence
  Description of Artificial Sequence: Synthetic oligonucleotide
ggccccaacaggcaacgug

SEQ ID NO: 262769 - RNA, 19 nt, Artificial Sequence
  Description of Artificial Sequence: Synthetic oligonucleotide
uccuuagaauagacauauu

SEQ ID NO: 262770 - RNA, 19 nt, Artificial Sequence
  Description of Artificial Sequence: Synthetic oligonucleotide
cuucguagaucgggacugc

SEQ ID NO: 262771 - RNA, 19 nt, Artificial Sequence
  Description of Artificial Sequence: Synthetic oligonucleotide
gacaugaguguacccugcu

SEQ ID NO: 262772 - RNA, 19 nt, Artificial Sequence
  Description of Artificial Sequence: Synthetic oligonucleotide
uguacgccguagguccaug

SEQ ID NO: 262773 - RNA, 19 nt, Artificial Sequence
  Description of Artificial Sequence: Synthetic oligonucleotide
cucgccaugugcauacacu

SEQ ID NO: 262774 - RNA, 19 nt, Artificial Sequence
  Description of Artificial Sequence: Synthetic oligonucleotide
guucccagguagacaugag

SEQ ID NO: 262775 - RNA, 19 nt, Artificial Sequence
  Description of Artificial Sequence: Synthetic oligonucleotide
ccgugaguaguucaauguc

SEQ ID NO: 262776 - RNA, 19 nt, Artificial Sequence
  Description of Artificial Sequence: Synthetic oligonucleotide
gaaggugcggucucagcuu

SEQ ID NO: 262777 - RNA, 19 nt, Artificial Sequence
  Description of Artificial Sequence: Synthetic oligonucleotide
gauggaccgggcaccaucu

SEQ ID NO: 262778 - RNA, 19 nt, Artificial Sequence
  Description of Artificial Sequence: Synthetic oligonucleotide
cucuaugguagugaccaua

SEQ ID NO: 262779 - RNA, 19 nt, Artificial Sequence
  Description of Artificial Sequence: Synthetic oligonucleotide
acguuccaugucauuccag

SEQ ID NO: 262780 - RNA, 19 nt, Artificial Sequence
  Description of Artificial Sequence: Synthetic oligonucleotide
aggcuuacccuagcuuugu

SEQ ID NO: 262781 - RNA, 19 nt, Artificial Sequence
  Description of Artificial Sequence: Synthetic oligonucleotide
cucaguagccugucaccaa

SEQ ID NO: 262782 - RNA, 19 nt, Artificial Sequence
  Description of Artificial Sequence: Synthetic oligonucleotide
uaagcgcacuacaguccuu

SEQ ID NO: 262783 - RNA, 19 nt, Artificial Sequence
  Description of Artificial Sequence: Synthetic oligonucleotide
caacucaagaaagcgaguu

SEQ ID NO: 262784 - RNA, 19 nt, Artificial Sequence
  Description of Artificial Sequence: Synthetic oligonucleotide
gugagcuaguuaagcgcac

SEQ ID NO: 262785 - RNA, 19 nt, Artificial Sequence
  Description of Artificial Sequence: Synthetic oligonucleotide
gccagauacguuccauguc

SEQ ID NO: 262786 - RNA, 19 nt, Artificial Sequence
  Description of Artificial Sequence: Synthetic oligonucleotide
gguagugaccauaguucca

SEQ ID NO: 262787 - RNA, 19 nt, Artificial Sequence
  Description of Artificial Sequence: Synthetic oligonucleotide
gucagcuagaguggugaaa

SEQ ID NO: 262788 - RNA, 19 nt, Artificial Sequence
  Description of Artificial Sequence: Synthetic oligonucleotide
cccuggacgcuaugcaaag

SEQ ID NO: 262789 - RNA, 19 nt, Artificial Sequence
  Description of Artificial Sequence: Synthetic oligonucleotide
agaggcgaaggaagcgaga

SEQ ID NO: 262790 - RNA, 19 nt, Artificial Sequence
  Description of Artificial Sequence: Synthetic oligonucleotide
ggguagcggauagacagca

SEQ ID NO: 262791 - RNA, 19 nt, Artificial Sequence
  Description of Artificial Sequence: Synthetic oligonucleotide
ccauaguuccacacagcca

SEQ ID NO: 262792 - RNA, 19 nt, Artificial Sequence
  Description of Artificial Sequence: Synthetic oligonucleotide
ugguucugccuguggcaua

SEQ ID NO: 262793 - RNA, 19 nt, Artificial Sequence
  Description of Artificial Sequence: Synthetic oligonucleotide
gcagaaugacgggagggga

SEQ ID NO: 262794 - RNA, 19 nt, Artificial Sequence
  Description of Artificial Sequence: Synthetic oligonucleotide
gcccuccuuacggagguag

SEQ ID NO: 262795 - RNA, 19 nt, Artificial Sequence
  Description of Artificial Sequence: Synthetic oligonucleotide
gguagcggauagacagcag

SEQ ID NO: 262796 - RNA, 19 nt, Artificial Sequence
  Description of Artificial Sequence: Synthetic oligonucleotide
aguguacgccguaggucca

SEQ ID NO: 262797 - RNA, 19 nt, Artificial Sequence
  Description of Artificial Sequence: Synthetic oligonucleotide
gguccuuagaauagacaua

SEQ ID NO: 262798 - RNA, 19 nt, Artificial Sequence
  Description of Artificial Sequence: Synthetic oligonucleotide
ggucucgaagaaaacuucu

SEQ ID NO: 262799 - RNA, 19 nt, Artificial Sequence
  Description of Artificial Sequence: Synthetic oligonucleotide
gguucugccuguggcauaa

SEQ ID NO: 262800 - RNA, 19 nt, Artificial Sequence
  Description of Artificial Sequence: Synthetic oligonucleotide
gaacaggguagaaccuccu

SEQ ID NO: 262801 - RNA, 19 nt, Artificial Sequence
  Description of Artificial Sequence: Synthetic oligonucleotide
augcaaagccuagguguua

SEQ ID NO: 262802 - RNA, 19 nt, Artificial Sequence
  Description of Artificial Sequence: Synthetic oligonucleotide
cucggugcuccucagcuuu

SEQ ID NO: 262803 - RNA, 19 nt, Artificial Sequence
  Description of Artificial Sequence: Synthetic oligonucleotide
ggacgcuaugcaaagccua

SEQ ID NO: 262804 - RNA, 19 nt, Artificial Sequence
  Description of Artificial Sequence: Synthetic oligonucleotide
gagaaaggagugggccucu

SEQ ID NO: 262805 - RNA, 19 nt, Artificial Sequence
  Description of Artificial Sequence: Synthetic oligonucleotide
cccgagcccagucuacaac

SEQ ID NO: 262806 - RNA, 19 nt, Artificial Sequence
  Description of Artificial Sequence: Synthetic oligonucleotide
cagauacguuccaugucau

SEQ ID NO: 262807 - RNA, 19 nt, Artificial Sequence
  Description of Artificial Sequence: Synthetic oligonucleotide
ccuucgagggcuccugcca

SEQ ID NO: 262808 - RNA, 19 nt, Artificial Sequence
  Description of Artificial Sequence: Synthetic oligonucleotide
acugcgugggugacaccau

SEQ ID NO: 262809 - RNA, 19 nt, Artificial Sequence
  Description of Artificial Sequence: Synthetic oligonucleotide
guacgccguagguccaugu

SEQ ID NO: 262810 - RNA, 19 nt, Artificial Sequence
  Description of Artificial Sequence: Synthetic oligonucleotide
cacguggaauacagucucu

SEQ ID NO: 262811 - RNA, 19 nt, Artificial Sequence
  Description of Artificial Sequence: Synthetic oligonucleotide
auggaccgggcaccaucuu

SEQ ID NO: 262812 - RNA, 19 nt, Artificial Sequence
  Description of Artificial Sequence: Synthetic oligonucleotide
ggaccgggcaccaucuucu

SEQ ID NO: 262813 - RNA, 19 nt, Artificial Sequence
  Description of Artificial Sequence: Synthetic oligonucleotide
caguguggaccuaccuggu

SEQ ID NO: 262814 - RNA, 19 nt, Artificial Sequence
  Description of Artificial Sequence: Synthetic oligonucleotide
gccagacaaaggccuagcu

SEQ ID NO: 262815 - RNA, 19 nt, Artificial Sequence
  Description of Artificial Sequence: Synthetic oligonucleotide
gcccggaaccuggaagggc

SEQ ID NO: 262816 - RNA, 19 nt, Artificial Sequence
  Description of Artificial Sequence: Synthetic oligonucleotide
ccgucucuagugucucauc

SEQ ID NO: 262817 - RNA, 19 nt, Artificial Sequence
  Description of Artificial Sequence: Synthetic oligonucleotide
cucccucgcaaggggccuc

SEQ ID NO: 262818 - RNA, 19 nt, Artificial Sequence
  Description of Artificial Sequence: Synthetic oligonucleotide
gcaaagccuagguguuaua

SEQ ID NO: 262819 - RNA, 19 nt, Artificial Sequence
  Description of Artificial Sequence: Synthetic oligonucleotide
ggcuuacccuagcuuugua

SEQ ID NO: 262820 - RNA, 19 nt, Artificial Sequence
  Description of Artificial Sequence: Synthetic oligonucleotide
gccggugaagacaggcuua

SEQ ID NO: 262821 - RNA, 19 nt, Artificial Sequence
  Description of Artificial Sequence: Synthetic oligonucleotide
cccuccuuacggagguaga

SEQ ID NO: 262822 - RNA, 19 nt, Artificial Sequence
  Description of Artificial Sequence: Synthetic oligonucleotide
aggugcggucucagcuuua

SEQ ID NO: 262823 - RNA, 19 nt, Artificial Sequence
  Description of Artificial Sequence: Synthetic oligonucleotide
guguacgccguagguccau

SEQ ID NO: 262824 - RNA, 19 nt, Artificial Sequence
  Description of Artificial Sequence: Synthetic oligonucleotide
ccaugggguagcggauaga

SEQ ID NO: 262825 - RNA, 19 nt, Artificial Sequence
  Description of Artificial Sequence: Synthetic oligonucleotide
gccaugacacgaacauguu

SEQ ID NO: 262826 - RNA, 19 nt, Artificial Sequence
  Description of Artificial Sequence: Synthetic oligonucleotide
cggaaccuggaagggccga

SEQ ID NO: 262827 - RNA, 19 nt, Artificial Sequence
  Description of Artificial Sequence: Synthetic oligonucleotide
gcucucucccgagcccagu

SEQ ID NO: 262828 - RNA, 19 nt, Artificial Sequence
  Description of Artificial Sequence: Synthetic oligonucleotide
gcccucucuguagucccuu

SEQ ID NO: 262829 - RNA, 19 nt, Artificial Sequence
  Description of Artificial Sequence: Synthetic oligonucleotide
uauaacgagauacacaugg

SEQ ID NO: 262830 - RNA, 19 nt, Artificial Sequence
  Description of Artificial Sequence: Synthetic oligonucleotide
uuugcuaacauuauugagg

SEQ ID NO: 262831 - RNA, 19 nt, Artificial Sequence
  Description of Artificial Sequence: Synthetic oligonucleotide
aauaguaccaaauaccaca

SEQ ID NO: 262832 - RNA, 19 nt, Artificial Sequence
  Description of Artificial Sequence: Synthetic oligonucleotide
ucaaaugagauucugaccu

SEQ ID NO: 262833 - RNA, 19 nt, Artificial Sequence
  Description of Artificial Sequence: Synthetic oligonucleotide
aaaauaaucccaaacccac

SEQ ID NO: 262834 - RNA, 19 nt, Artificial Sequence
  Description of Artificial Sequence: Synthetic oligonucleotide
ucuauaacgagauacacau

SEQ ID NO: 262835 - RNA, 19 nt, Artificial Sequence
  Description of Artificial Sequence: Synthetic oligonucleotide
uuugguaucaaaccacuag

SEQ ID NO: 262836 - RNA, 19 nt, Artificial Sequence
  Description of Artificial Sequence: Synthetic oligonucleotide
uauacauaaacuagcgaag

SEQ ID NO: 262837 - RNA, 19 nt, Artificial Sequence
  Description of Artificial Sequence: Synthetic oligonucleotide
ucugacucuacuagaaugg

SEQ ID NO: 262838 - RNA, 19 nt, Artificial Sequence
  Description of Artificial Sequence: Synthetic oligonucleotide
aaagauaccagcuuugguu

SEQ ID NO: 262839 - RNA, 19 nt, Artificial Sequence
  Description of Artificial Sequence: Synthetic oligonucleotide
uugcuaacauuauugaggg

SEQ ID NO: 262840 - RNA, 19 nt, Artificial Sequence
  Description of Artificial Sequence: Synthetic oligonucleotide
ugugaugauuccaaagacg

SEQ ID NO: 262841 - RNA, 19 nt, Artificial Sequence
  Description of Artificial Sequence: Synthetic oligonucleotide
uauaauccuauguauauac

SEQ ID NO: 262842 - RNA, 19 nt, Artificial Sequence
  Description of Artificial Sequence: Synthetic oligonucleotide
ucuaaagaguuaaauacac

SEQ ID NO: 262843 - RNA, 19 nt, Artificial Sequence
  Description of Artificial Sequence: Synthetic oligonucleotide
aaauugagcucuuuaauau

SEQ ID NO: 262844 - RNA, 19 nt, Artificial Sequence
  Description of Artificial Sequence: Synthetic oligonucleotide
agucauaacaccuuaacau

SEQ ID NO: 262845 - RNA, 19 nt, Artificial Sequence
  Description of Artificial Sequence: Synthetic oligonucleotide
ucuauuaccagcucaccag

SEQ ID NO: 262846 - RNA, 19 nt, Artificial Sequence
  Description of Artificial Sequence: Synthetic oligonucleotide
uucuaauaguaccaaauac

SEQ ID NO: 262847 - RNA, 19 nt, Artificial Sequence
  Description of Artificial Sequence: Synthetic oligonucleotide
auuauaagacagguaaggc

SEQ ID NO: 262848 - RNA, 19 nt, Artificial Sequence
  Description of Artificial Sequence: Synthetic oligonucleotide
gauaaccccauugagaacc

SEQ ID NO: 262849 - RNA, 19 nt, Artificial Sequence
  Description of Artificial Sequence: Synthetic oligonucleotide
acagauaccuguuuaguag

SEQ ID NO: 262850 - RNA, 19 nt, Artificial Sequence
  Description of Artificial Sequence: Synthetic oligonucleotide
auaacaccuuaacauaugg

SEQ ID NO: 262851 - RNA, 19 nt, Artificial Sequence
  Description of Artificial Sequence: Synthetic oligonucleotide
uuagcugucuauaacgaga

SEQ ID NO: 262852 - RNA, 19 nt, Artificial Sequence
  Description of Artificial Sequence: Synthetic oligonucleotide
uagauaaccccauugagaa

SEQ ID NO: 262853 - RNA, 19 nt, Artificial Sequence
  Description of Artificial Sequence: Synthetic oligonucleotide
aaucacauaacuaaggcua

SEQ ID NO: 262854 - RNA, 19 nt, Artificial Sequence
  Description of Artificial Sequence: Synthetic oligonucleotide
aacgagauacacauggcac

SEQ ID NO: 262855 - RNA, 19 nt, Artificial Sequence
  Description of Artificial Sequence: Synthetic oligonucleotide
aguaccaaauaccacaagu

SEQ ID NO: 262856 - RNA, 19 nt, Artificial Sequence
  Description of Artificial Sequence: Synthetic oligonucleotide
ucuaccuccccucagguca

SEQ ID NO: 262857 - RNA, 19 nt, Artificial Sequence
  Description of Artificial Sequence: Synthetic oligonucleotide
uuauuauacaaauguguac

SEQ ID NO: 262858 - RNA, 19 nt, Artificial Sequence
  Description of Artificial Sequence: Synthetic oligonucleotide
uauuaguccgccuaagcca

SEQ ID NO: 262859 - RNA, 19 nt, Artificial Sequence
  Description of Artificial Sequence: Synthetic oligonucleotide
uacauaaacuagcgaaggg

SEQ ID NO: 262860 - RNA, 19 nt, Artificial Sequence
  Description of Artificial Sequence: Synthetic oligonucleotide
acgagauacacauggcacc

SEQ ID NO: 262861 - RNA, 19 nt, Artificial Sequence
  Description of Artificial Sequence: Synthetic oligonucleotide
cuagcgaagggguagacag

SEQ ID NO: 262862 - RNA, 19 nt, Artificial Sequence
  Description of Artificial Sequence: Synthetic oligonucleotide
ucuucuaauaguaccaaau

SEQ ID NO: 262863 - RNA, 19 nt, Artificial Sequence
  Description of Artificial Sequence: Synthetic oligonucleotide
ucgagguuagcacuguggg

SEQ ID NO: 262864 - RNA, 19 nt, Artificial Sequence
  Description of Artificial Sequence: Synthetic oligonucleotide
aauggaaugaguccccuau

SEQ ID NO: 262865 - RNA, 19 nt, Artificial Sequence
  Description of Artificial Sequence: Synthetic oligonucleotide
cuuuuagacagacacgaag

SEQ ID NO: 262866 - RNA, 19 nt, Artificial Sequence
  Description of Artificial Sequence: Synthetic oligonucleotide
acauaaacuagcgaagggg

SEQ ID NO: 262867 - RNA, 19 nt, Artificial Sequence
  Description of Artificial Sequence: Synthetic oligonucleotide
aaauaguuuguagucagcu

SEQ ID NO: 262868 - RNA, 19 nt, Artificial Sequence
  Description of Artificial Sequence: Synthetic oligonucleotide
uacagauuauuauacaaau

SEQ ID NO: 262869 - RNA, 19 nt, Artificial Sequence
  Description of Artificial Sequence: Synthetic oligonucleotide
ugacaagucuguaugcucc

SEQ ID NO: 262870 - RNA, 19 nt, Artificial Sequence
  Description of Artificial Sequence: Synthetic oligonucleotide
uauauacauaaacuagcga

SEQ ID NO: 262871 - RNA, 19 nt, Artificial Sequence
  Description of Artificial Sequence: Synthetic oligonucleotide
agcugaacuaagaacaagc

SEQ ID NO: 262872 - RNA, 19 nt, Artificial Sequence
  Description of Artificial Sequence: Synthetic oligonucleotide
aaggcuaucagugguauca

SEQ ID NO: 262873 - RNA, 19 nt, Artificial Sequence
  Description of Artificial Sequence: Synthetic oligonucleotide
ucuuuaagccaucaggcuc

SEQ ID NO: 262874 - RNA, 19 nt, Artificial Sequence
  Description of Artificial Sequence: Synthetic oligonucleotide
ugagucaaauaguuuguag

SEQ ID NO: 262875 - RNA, 19 nt, Artificial Sequence
  Description of Artificial Sequence: Synthetic oligonucleotide
cuauuaguccgccuaagcc

SEQ ID NO: 262876 - RNA, 19 nt, Artificial Sequence
  Description of Artificial Sequence: Synthetic oligonucleotide
agaguaaagcaccuugcuc

SEQ ID NO: 262877 - RNA, 19 nt, Artificial Sequence
  Description of Artificial Sequence: Synthetic oligonucleotide
augacucugacucuacuag

SEQ ID NO: 262878 - RNA, 19 nt, Artificial Sequence
  Description of Artificial Sequence: Synthetic oligonucleotide
uauagaccaagccuucuug

SEQ ID NO: 262879 - RNA, 19 nt, Artificial Sequence
  Description of Artificial Sequence: Synthetic oligonucleotide
aauacaacagggcuagguu

SEQ ID NO: 262880 - RNA, 19 nt, Artificial Sequence
  Description of Artificial Sequence: Synthetic oligonucleotide
ugcccuaagaguaaagcac

SEQ ID NO: 262881 - RNA, 19 nt, Artificial Sequence
  Description of Artificial Sequence: Synthetic oligonucleotide
uaacgagauacacauggca

SEQ ID NO: 262882 - RNA, 19 nt, Artificial Sequence
  Description of Artificial Sequence: Synthetic oligonucleotide
uuugagucaaauaguuugu

SEQ ID NO: 262883 - RNA, 19 nt, Artificial Sequence
  Description of Artificial Sequence: Synthetic oligonucleotide
aacuaaggcuaucaguggu

SEQ ID NO: 262884 - RNA, 19 nt, Artificial Sequence
  Description of Artificial Sequence: Synthetic oligonucleotide
auacauaaacuagcgaagg

SEQ ID NO: 262885 - RNA, 19 nt, Artificial Sequence
  Description of Artificial Sequence: Synthetic oligonucleotide
aauccuauguauauacugu

SEQ ID NO: 262886 - RNA, 19 nt, Artificial Sequence
  Description of Artificial Sequence: Synthetic oligonucleotide
ucuugauucaguucccaca

SEQ ID NO: 262887 - RNA, 19 nt, Artificial Sequence
  Description of Artificial Sequence: Synthetic oligonucleotide
uguguacaaaucuuuaaua

SEQ ID NO: 262888 - RNA, 19 nt, Artificial Sequence
  Description of Artificial Sequence: Synthetic oligonucleotide
augaguccccuauuagucc

SEQ ID NO: 262889 - RNA, 19 nt, Artificial Sequence
  Description of Artificial Sequence: Synthetic oligonucleotide
aguccuguaacgucgaggu

SEQ ID NO: 262890 - RNA, 19 nt, Artificial Sequence
  Description of Artificial Sequence: Synthetic oligonucleotide
uucaacagguccauugcug

SEQ ID NO: 262891 - RNA, 19 nt, Artificial Sequence
  Description of Artificial Sequence: Synthetic oligonucleotide
ugacucuacuagaaugggg

SEQ ID NO: 262892 - RNA, 19 nt, Artificial Sequence
  Description of Artificial Sequence: Synthetic oligonucleotide
ucauaacaccuuaacauau

SEQ ID NO: 262893 - RNA, 19 nt, Artificial Sequence
  Description of Artificial Sequence: Synthetic oligonucleotide
aaauacaacagggcuaggu

SEQ ID NO: 262894 - RNA, 19 nt, Artificial Sequence
  Description of Artificial Sequence: Synthetic oligonucleotide
gcuaacauuauugagggcc

SEQ ID NO: 262895 - RNA, 19 nt, Artificial Sequence
  Description of Artificial Sequence: Synthetic oligonucleotide
gacacgaagaaaugacaag

SEQ ID NO: 262896 - RNA, 19 nt, Artificial Sequence
  Description of Artificial Sequence: Synthetic oligonucleotide
guaagauuugguaucaaac

SEQ ID NO: 262897 - RNA, 19 nt, Artificial Sequence
  Description of Artificial Sequence: Synthetic oligonucleotide
ugaguccccuauuaguccg

SEQ ID NO: 262898 - RNA, 19 nt, Artificial Sequence
  Description of Artificial Sequence: Synthetic oligonucleotide
ugacucugugguaacaaug

SEQ ID NO: 262899 - RNA, 19 nt, Artificial Sequence
  Description of Artificial Sequence: Synthetic oligonucleotide
acagacacgaagaaaugac

SEQ ID NO: 262900 - RNA, 19 nt, Artificial Sequence
  Description of Artificial Sequence: Synthetic oligonucleotide
aaaguaguuauaauccuau

SEQ ID NO: 262901 - RNA, 19 nt, Artificial Sequence
  Description of Artificial Sequence: Synthetic oligonucleotide
aaugacaagucuguaugcu

SEQ ID NO: 262902 - RNA, 19 nt, Artificial Sequence
  Description of Artificial Sequence: Synthetic oligonucleotide
uguaacgucgagguuagca

SEQ ID NO: 262903 - RNA, 19 nt, Artificial Sequence
  Description of Artificial Sequence: Synthetic oligonucleotide
aacccuugccauuucauaa

SEQ ID NO: 262904 - RNA, 19 nt, Artificial Sequence
  Description of Artificial Sequence: Synthetic oligonucleotide
uguaagauuugguaucaaa

SEQ ID NO: 262905 - RNA, 19 nt, Artificial Sequence
  Description of Artificial Sequence: Synthetic oligonucleotide
guaucaaugacucuguggu

SEQ ID NO: 262906 - RNA, 19 nt, Artificial Sequence
  Description of Artificial Sequence: Synthetic oligonucleotide
ggugauagcuuucaacagg

SEQ ID NO: 262907 - RNA, 19 nt, Artificial Sequence
  Description of Artificial Sequence: Synthetic oligonucleotide
uaauaguaccaaauaccac

SEQ ID NO: 262908 - RNA, 19 nt, Artificial Sequence
  Description of Artificial Sequence: Synthetic oligonucleotide
ugguaucaaaccacuagga

SEQ ID NO: 262909 - RNA, 19 nt, Artificial Sequence
  Description of Artificial Sequence: Synthetic oligonucleotide
ugagagaauaaguuucauc

SEQ ID NO: 262910 - RNA, 19 nt, Artificial Sequence
  Description of Artificial Sequence: Synthetic oligonucleotide
ugccaagaaucacauaacu

SEQ ID NO: 262911 - RNA, 19 nt, Artificial Sequence
  Description of Artificial Sequence: Synthetic oligonucleotide
agcuuuuagacagacacga

SEQ ID NO: 262912 - RNA, 19 nt, Artificial Sequence
  Description of Artificial Sequence: Synthetic oligonucleotide
caauguaggcucaaaggug

SEQ ID NO: 262913 - RNA, 19 nt, Artificial Sequence
  Description of Artificial Sequence: Synthetic oligonucleotide
cucugacucuacuagaaug

SEQ ID NO: 262914 - RNA, 19 nt, Artificial Sequence
  Description of Artificial Sequence: Synthetic oligonucleotide
uaccuguuuaguagaaaug

SEQ ID NO: 262915 - RNA, 19 nt, Artificial Sequence
  Description of Artificial Sequence: Synthetic oligonucleotide
acgaagaaaugacaagucu

SEQ ID NO: 262916 - RNA, 19 nt, Artificial Sequence
  Description of Artificial Sequence: Synthetic oligonucleotide
guaacaaugguuacaauaa

SEQ ID NO: 262917 - RNA, 19 nt, Artificial Sequence
  Description of Artificial Sequence: Synthetic oligonucleotide
gucaaguccuguaacgucg

SEQ ID NO: 262918 - RNA, 19 nt, Artificial Sequence
  Description of Artificial Sequence: Synthetic oligonucleotide
aauugagcucuuuaauaua

SEQ ID NO: 262919 - RNA, 19 nt, Artificial Sequence
  Description of Artificial Sequence: Synthetic oligonucleotide
agauuauuauacaaaugug

SEQ ID NO: 262920 - RNA, 19 nt, Artificial Sequence
  Description of Artificial Sequence: Synthetic oligonucleotide
ucuggaacagucauauaua

SEQ ID NO: 262921 - RNA, 19 nt, Artificial Sequence
  Description of Artificial Sequence: Synthetic oligonucleotide
uccuauguauauacuguac

SEQ ID NO: 262922 - RNA, 19 nt, Artificial Sequence
  Description of Artificial Sequence: Synthetic oligonucleotide
aucuauuaccagcucacca

SEQ ID NO: 262923 - RNA, 19 nt, Artificial Sequence
  Description of Artificial Sequence: Synthetic oligonucleotide
acagggcuagguuucagag

SEQ ID NO: 262924 - RNA, 19 nt, Artificial Sequence
  Description of Artificial Sequence: Synthetic oligonucleotide
gagauucugaccuguuagc

SEQ ID NO: 262925 - RNA, 19 nt, Artificial Sequence
  Description of Artificial Sequence: Synthetic oligonucleotide
cugaacuaagaacaagcug

SEQ ID NO: 262926 - RNA, 19 nt, Artificial Sequence
  Description of Artificial Sequence: Synthetic oligonucleotide
uuccaauuauaagacaggu

SEQ ID NO: 262927 - RNA, 19 nt, Artificial Sequence
  Description of Artificial Sequence: Synthetic oligonucleotide
cuggaacagucauauauac

SEQ ID NO: 262928 - RNA, 19 nt, Artificial Sequence
  Description of Artificial Sequence: Synthetic oligonucleotide
acacgaagaaaugacaagu

SEQ ID NO: 262929 - RNA, 19 nt, Artificial Sequence
  Description of Artificial Sequence: Synthetic oligonucleotide
uaacaccuuaacauaugga

SEQ ID NO: 262930 - RNA, 19 nt, Artificial Sequence
  Description of Artificial Sequence: Synthetic oligonucleotide
auagauaaccccauugaga

SEQ ID NO: 262931 - RNA, 19 nt, Artificial Sequence
  Description of Artificial Sequence: Synthetic oligonucleotide
cuaucagugguaucaauga

SEQ ID NO: 262932 - RNA, 19 nt, Artificial Sequence
  Description of Artificial Sequence: Synthetic oligonucleotide
auaacgagauacacauggc

SEQ ID NO: 262933 - RNA, 19 nt, Artificial Sequence
  Description of Artificial Sequence: Synthetic oligonucleotide
gagucaaauaguuuguagu

SEQ ID NO: 262934 - RNA, 19 nt, Artificial Sequence
  Description of Artificial Sequence: Synthetic oligonucleotide
guaacgucgagguuagcac

SEQ ID NO: 262935 - RNA, 19 nt, Artificial Sequence
  Description of Artificial Sequence: Synthetic oligonucleotide
acauagaguggcuucauuu

SEQ ID NO: 262936 - RNA, 19 nt, Artificial Sequence
  Description of Artificial Sequence: Synthetic oligonucleotide
aaaugagauucugaccugu

SEQ ID NO: 262937 - RNA, 19 nt, Artificial Sequence
  Description of Artificial Sequence: Synthetic oligonucleotide
ucuacuucacuuugcuaac

SEQ ID NO: 262938 - RNA, 19 nt, Artificial Sequence
  Description of Artificial Sequence: Synthetic oligonucleotide
cuuuaagccaucaggcuca

SEQ ID NO: 262939 - RNA, 19 nt, Artificial Sequence
  Description of Artificial Sequence: Synthetic oligonucleotide
aggugauagcuuucaacag

SEQ ID NO: 262940 - RNA, 19 nt, Artificial Sequence
  Description of Artificial Sequence: Synthetic oligonucleotide
agguaaggcaaauggucag

SEQ ID NO: 262941 - RNA, 19 nt, Artificial Sequence
  Description of Artificial Sequence: Synthetic oligonucleotide
uagucagcuggucuccucc

SEQ ID NO: 262942 - RNA, 19 nt, Artificial Sequence
  Description of Artificial Sequence: Synthetic oligonucleotide
caaauaguuuguagucagc

SEQ ID NO: 262943 - RNA, 19 nt, Artificial Sequence
  Description of Artificial Sequence: Synthetic oligonucleotide
uggagguacaaccaagcuu

SEQ ID NO: 262944 - RNA, 19 nt, Artificial Sequence
  Description of Artificial Sequence: Synthetic oligonucleotide
augaccuggagcuuuuaga

SEQ ID NO: 262945 - RNA, 19 nt, Artificial Sequence
  Description of Artificial Sequence: Synthetic oligonucleotide
uggaaugaguccccuauua

SEQ ID NO: 262946 - RNA, 19 nt, Artificial Sequence
  Description of Artificial Sequence: Synthetic oligonucleotide
gagccaauuucuuggagga

SEQ ID NO: 262947 - RNA, 19 nt, Artificial Sequence
  Description of Artificial Sequence: Synthetic oligonucleotide
gucuuugggaauaagggca

SEQ ID NO: 262948 - RNA, 19 nt, Artificial Sequence
  Description of Artificial Sequence: Synthetic oligonucleotide
aaugacucugugguaacaa

SEQ ID NO: 262949 - RNA, 19 nt, Artificial Sequence
  Description of Artificial Sequence: Synthetic oligonucleotide
agauaaccccauugagaac

SEQ ID NO: 262950 - RNA, 19 nt, Artificial Sequence
  Description of Artificial Sequence: Synthetic oligonucleotide
gaaucacauaacuaaggcu

SEQ ID NO: 262951 - RNA, 19 nt, Artificial Sequence
  Description of Artificial Sequence: Synthetic oligonucleotide
uugugucuauccuuguccu

SEQ ID NO: 262952 - RNA, 19 nt, Artificial Sequence
  Description of Artificial Sequence: Synthetic oligonucleotide
aaccuacacccagagauca

SEQ ID NO: 262953 - RNA, 19 nt, Artificial Sequence
  Description of Artificial Sequence: Synthetic oligonucleotide
aaucacauuuuagcugucu

SEQ ID NO: 262954 - RNA, 19 nt, Artificial Sequence
  Description of Artificial Sequence: Synthetic oligonucleotide
acagauuauuauacaaaug

SEQ ID NO: 262955 - RNA, 19 nt, Artificial Sequence
  Description of Artificial Sequence: Synthetic oligonucleotide
gcugucuauaacgagauac

SEQ ID NO: 262956 - RNA, 19 nt, Artificial Sequence
  Description of Artificial Sequence: Synthetic oligonucleotide
aaauguguacaaaucuuua

SEQ ID NO: 262957 - RNA, 19 nt, Artificial Sequence
  Description of Artificial Sequence: Synthetic oligonucleotide
cacgaagaaaugacaaguc

SEQ ID NO: 262958 - RNA, 19 nt, Artificial Sequence
  Description of Artificial Sequence: Synthetic oligonucleotide
gauuucucgguaagaauca

SEQ ID NO: 262959 - RNA, 19 nt, Artificial Sequence
  Description of Artificial Sequence: Synthetic oligonucleotide
ggaggcaucagccccacag

SEQ ID NO: 262960 - RNA, 19 nt, Artificial Sequence
  Description of Artificial Sequence: Synthetic oligonucleotide
cuuggccucuccuucacac

SEQ ID NO: 262961 - RNA, 19 nt, Artificial Sequence
  Description of Artificial Sequence: Synthetic oligonucleotide
uuauagaccaagccuucuu

SEQ ID NO: 262962 - RNA, 19 nt, Artificial Sequence
  Description of Artificial Sequence: Synthetic oligonucleotide
aauggggucaaguccugua

SEQ ID NO: 262963 - RNA, 19 nt, Artificial Sequence
  Description of Artificial Sequence: Synthetic oligonucleotide
uaacgucgagguuagcacu

SEQ ID NO: 262964 - RNA, 19 nt, Artificial Sequence
  Description of Artificial Sequence: Synthetic oligonucleotide
uauuaccagcucaccagcu

SEQ ID NO: 262965 - RNA, 19 nt, Artificial Sequence
  Description of Artificial Sequence: Synthetic oligonucleotide
auacaacagggcuagguuu

SEQ ID NO: 262966 - RNA, 19 nt, Artificial Sequence
  Description of Artificial Sequence: Synthetic oligonucleotide
ucuguaugcuccacaugcu

SEQ ID NO: 262967 - RNA, 19 nt, Artificial Sequence
  Description of Artificial Sequence: Synthetic oligonucleotide
uugggaauaagggcaguug

SEQ ID NO: 262968 - RNA, 19 nt, Artificial Sequence
  Description of Artificial Sequence: Synthetic oligonucleotide
ucacgaagagucagugucu

SEQ ID NO: 262969 - RNA, 19 nt, Artificial Sequence
  Description of Artificial Sequence: Synthetic oligonucleotide
agaauacaucucaacacug

SEQ ID NO: 262970 - RNA, 19 nt, Artificial Sequence
  Description of Artificial Sequence: Synthetic oligonucleotide
acacacauagauaacccca

SEQ ID NO: 262971 - RNA, 19 nt, Artificial Sequence
  Description of Artificial Sequence: Synthetic oligonucleotide
aaccccauugagaaccgag

SEQ ID NO: 262972 - RNA, 19 nt, Artificial Sequence
  Description of Artificial Sequence: Synthetic oligonucleotide
uaguaccaaauaccacaag

SEQ ID NO: 262973 - RNA, 19 nt, Artificial Sequence
  Description of Artificial Sequence: Synthetic oligonucleotide
guggccaaccaacaaaaca

SEQ ID NO: 262974 - RNA, 19 nt, Artificial Sequence
  Description of Artificial Sequence: Synthetic oligonucleotide
uucuugauucaguucccac

SEQ ID NO: 262975 - RNA, 19 nt, Artificial Sequence
  Description of Artificial Sequence: Synthetic oligonucleotide
gucauaacaccuuaacaua

SEQ ID NO: 262976 - RNA, 19 nt, Artificial Sequence
  Description of Artificial Sequence: Synthetic oligonucleotide
uagcugaaauuuaaauuuu

SEQ ID NO: 262977 - RNA, 19 nt, Artificial Sequence
  Description of Artificial Sequence: Synthetic oligonucleotide
gaaugaguccccuauuagu

SEQ ID NO: 262978 - RNA, 19 nt, Artificial Sequence
  Description of Artificial Sequence: Synthetic oligonucleotide
aacuaagaacaagcugcag

SEQ ID NO: 262979 - RNA, 19 nt, Artificial Sequence
  Description of Artificial Sequence: Synthetic oligonucleotide
agccaucaggcucacgaag

SEQ ID NO: 262980 - RNA, 19 nt, Artificial Sequence
  Description of Artificial Sequence: Synthetic oligonucleotide
aaaagccgguuaucaccag

SEQ ID NO: 262981 - RNA, 19 nt, Artificial Sequence
  Description of Artificial Sequence: Synthetic oligonucleotide
uuuauagaccaagccuucu

SEQ ID NO: 262982 - RNA, 19 nt, Artificial Sequence
  Description of Artificial Sequence: Synthetic oligonucleotide
ugacucugacucuacuaga

SEQ ID NO: 262983 - RNA, 19 nt, Artificial Sequence
  Description of Artificial Sequence: Synthetic oligonucleotide
cacuaugugugccuucuug

SEQ ID NO: 262984 - RNA, 19 nt, Artificial Sequence
  Description of Artificial Sequence: Synthetic oligonucleotide
aaaauuggagacacagaua

SEQ ID NO: 262985 - RNA, 19 nt, Artificial Sequence
  Description of Artificial Sequence: Synthetic oligonucleotide
caaucugcccaucagggga

SEQ ID NO: 262986 - RNA, 19 nt, Artificial Sequence
  Description of Artificial Sequence: Synthetic oligonucleotide
aggaguucacugcugucug

SEQ ID NO: 262987 - RNA, 19 nt, Artificial Sequence
  Description of Artificial Sequence: Synthetic oligonucleotide
uccaagcuauuucucugcu

SEQ ID NO: 262988 - RNA, 19 nt, Artificial Sequence
  Description of Artificial Sequence: Synthetic oligonucleotide
gacucuacuagaauggggu

SEQ ID NO: 262989 - RNA, 19 nt, Artificial Sequence
  Description of Artificial Sequence: Synthetic oligonucleotide
gucgagguuagcacugugg

SEQ ID NO: 262990 - RNA, 19 nt, Artificial Sequence
  Description of Artificial Sequence: Synthetic oligonucleotide
uccccuauuaguccgccua

SEQ ID NO: 262991 - RNA, 19 nt, Artificial Sequence
  Description of Artificial Sequence: Synthetic oligonucleotide
ggaaugaguccccuauuag

SEQ ID NO: 262992 - RNA, 19 nt, Artificial Sequence
  Description of Artificial Sequence: Synthetic oligonucleotide
cugucuauaacgagauaca

SEQ ID NO: 262993 - RNA, 19 nt, Artificial Sequence
  Description of Artificial Sequence: Synthetic oligonucleotide
guaucaaaccacuaggauu

SEQ ID NO: 262994 - RNA, 19 nt, Artificial Sequence
  Description of Artificial Sequence: Synthetic oligonucleotide
cauaaacuagcgaaggggu

SEQ ID NO: 262995 - RNA, 19 nt, Artificial Sequence
  Description of Artificial Sequence: Synthetic oligonucleotide
cauaacuaaggcuaucagu

SEQ ID NO: 262996 - RNA, 19 nt, Artificial Sequence
  Description of Artificial Sequence: Synthetic oligonucleotide
uccuuuuggugagagaaua

SEQ ID NO: 262997 - RNA, 19 nt, Artificial Sequence
  Description of Artificial Sequence: Synthetic oligonucleotide
aaucccaaacccacauuca

SEQ ID NO: 262998 - RNA, 19 nt, Artificial Sequence
  Description of Artificial Sequence: Synthetic oligonucleotide
uggguuugugcgcacugcu

SEQ ID NO: 262999 - RNA, 19 nt, Artificial Sequence
  Description of Artificial Sequence: Synthetic oligonucleotide
aacgucgagguuagcacug

SEQ ID NO: 263000 - RNA, 19 nt, Artificial Sequence
  Description of Artificial Sequence: Synthetic oligonucleotide
cugacucuacuagaauggg

SEQ ID NO: 263001 - RNA, 19 nt, Artificial Sequence
  Description of Artificial Sequence: Synthetic oligonucleotide
cagggcuagguuucagagg

SEQ ID NO: 263002 - RNA, 19 nt, Artificial Sequence
  Description of Artificial Sequence: Synthetic oligonucleotide
aacuagcgaagggguagac

SEQ ID NO: 263003 - RNA, 19 nt, Artificial Sequence
  Description of Artificial Sequence: Synthetic oligonucleotide
ggcaggauacugaaaagcc

SEQ ID NO: 263004 - RNA, 19 nt, Artificial Sequence
  Description of Artificial Sequence: Synthetic oligonucleotide
ggggucaaguccuguaacg

SEQ ID NO: 263005 - RNA, 19 nt, Artificial Sequence
  Description of Artificial Sequence: Synthetic oligonucleotide
aaccgaggguuccuuugug

SEQ ID NO: 263006 - RNA, 19 nt, Artificial Sequence
  Description of Artificial Sequence: Synthetic oligonucleotide
uucacacccuguuucuuaa

SEQ ID NO: 263007 - RNA, 19 nt, Artificial Sequence
  Description of Artificial Sequence: Synthetic oligonucleotide
guaaggcaaauggucagug

SEQ ID NO: 263008 - RNA, 19 nt, Artificial Sequence
  Description of Artificial Sequence: Synthetic oligonucleotide
gaauaagccccuagucccc

SEQ ID NO: 263009 - RNA, 19 nt, Artificial Sequence
  Description of Artificial Sequence: Synthetic oligonucleotide
uuugugcgcacugcugucc

SEQ ID NO: 263010 - RNA, 19 nt, Artificial Sequence
  Description of Artificial Sequence: Synthetic oligonucleotide
cuuguugggcaggauacug

SEQ ID NO: 263011 - RNA, 19 nt, Artificial Sequence
  Description of Artificial Sequence: Synthetic oligonucleotide
agacacgaagaaaugacaa

SEQ ID NO: 263012 - RNA, 19 nt, Artificial Sequence
  Description of Artificial Sequence: Synthetic oligonucleotide
ggaggugauagcuuucaac

SEQ ID NO: 263013 - RNA, 19 nt, Artificial Sequence
  Description of Artificial Sequence: Synthetic oligonucleotide
caugcuacugcugguggag

SEQ ID NO: 263014 - RNA, 19 nt, Artificial Sequence
  Description of Artificial Sequence: Synthetic oligonucleotide
cuauaacgagauacacaug

SEQ ID NO: 263015 - RNA, 19 nt, Artificial Sequence
  Description of Artificial Sequence: Synthetic oligonucleotide
aaacuagcgaagggguaga

SEQ ID NO: 263016 - RNA, 19 nt, Artificial Sequence
  Description of Artificial Sequence: Synthetic oligonucleotide
gugauccacaugugugagg

SEQ ID NO: 263017 - RNA, 19 nt, Artificial Sequence
  Description of Artificial Sequence: Synthetic oligonucleotide
cagauaccuguuuaguaga

SEQ ID NO: 263018 - RNA, 19 nt, Artificial Sequence
  Description of Artificial Sequence: Synthetic oligonucleotide
uuucuacuucacuuugcua

SEQ ID NO: 263019 - RNA, 19 nt, Artificial Sequence
  Description of Artificial Sequence: Synthetic oligonucleotide
cucaucccgagccaauuuc

SEQ ID NO: 263020 - RNA, 19 nt, Artificial Sequence
  Description of Artificial Sequence: Synthetic oligonucleotide
cugcccuaagaguaaagca

SEQ ID NO: 263021 - RNA, 19 nt, Artificial Sequence
  Description of Artificial Sequence: Synthetic oligonucleotide
cagacacgaagaaaugaca

SEQ ID NO: 263022 - RNA, 19 nt, Artificial Sequence
  Description of Artificial Sequence: Synthetic oligonucleotide
cagaauacaucucaacacu

SEQ ID NO: 263023 - RNA, 19 nt, Artificial Sequence
  Description of Artificial Sequence: Synthetic oligonucleotide
auaguaccaaauaccacaa

SEQ ID NO: 263024 - RNA, 19 nt, Artificial Sequence
  Description of Artificial Sequence: Synthetic oligonucleotide
gugguaacaaugguuacaa

SEQ ID NO: 263025 - RNA, 19 nt, Artificial Sequence
  Description of Artificial Sequence: Synthetic oligonucleotide
uuguagucagcuggucucc

SEQ ID NO: 263026 - RNA, 19 nt, Artificial Sequence
  Description of Artificial Sequence: Synthetic oligonucleotide
ggaauugugacauuucuuu

SEQ ID NO: 263027 - RNA, 19 nt, Artificial Sequence
  Description of Artificial Sequence: Synthetic oligonucleotide
agcgaagggguagacaggu

SEQ ID NO: 263028 - RNA, 19 nt, Artificial Sequence
  Description of Artificial Sequence: Synthetic oligonucleotide
accccauugagaaccgagg

SEQ ID NO: 263029 - RNA, 19 nt, Artificial Sequence
  Description of Artificial Sequence: Synthetic oligonucleotide
aggauuugguggccaacca

SEQ ID NO: 263030 - RNA, 19 nt, Artificial Sequence
  Description of Artificial Sequence: Synthetic oligonucleotide
gauuugguaucaaaccacu

SEQ ID NO: 263031 - RNA, 19 nt, Artificial Sequence
  Description of Artificial Sequence: Synthetic oligonucleotide
uccgccuaagccaucucua

SEQ ID NO: 263032 - RNA, 19 nt, Artificial Sequence
  Description of Artificial Sequence: Synthetic oligonucleotide
ugcuaacauuauugagggc

SEQ ID NO: 263033 - RNA, 19 nt, Artificial Sequence
  Description of Artificial Sequence: Synthetic oligonucleotide
agguuucugucccaggcuu

SEQ ID NO: 263034 - RNA, 19 nt, Artificial Sequence
  Description of Artificial Sequence: Synthetic oligonucleotide
auuaguccgccuaagccau

SEQ ID NO: 263035 - RNA, 19 nt, Artificial Sequence
  Description of Artificial Sequence: Synthetic oligonucleotide
uugagucaaauaguuugua

SEQ ID NO: 263036 - RNA, 19 nt, Artificial Sequence
  Description of Artificial Sequence: Synthetic oligonucleotide
uggccagccaauguaggcu

SEQ ID NO: 263037 - RNA, 19 nt, Artificial Sequence
  Description of Artificial Sequence: Synthetic oligonucleotide
cgagccaauuucuuggagg

SEQ ID NO: 263038 - RNA, 19 nt, Artificial Sequence
  Description of Artificial Sequence: Synthetic oligonucleotide
auaaccccauugagaaccg

SEQ ID NO: 263039 - RNA, 19 nt, Artificial Sequence
  Description of Artificial Sequence: Synthetic oligonucleotide
ugcugguggaggcuuguua

SEQ ID NO: 263040 - RNA, 19 nt, Artificial Sequence
  Description of Artificial Sequence: Synthetic oligonucleotide
uguaagcaauggagcuucu

SEQ ID NO: 263041 - RNA, 19 nt, Artificial Sequence
  Description of Artificial Sequence: Synthetic oligonucleotide
auaaucccaaacccacauu

SEQ ID NO: 263042 - RNA, 19 nt, Artificial Sequence
  Description of Artificial Sequence: Synthetic oligonucleotide
cacagauaccuguuuagua

SEQ ID NO: 263043 - RNA, 19 nt, Artificial Sequence
  Description of Artificial Sequence: Synthetic oligonucleotide
uugugcgcacugcuguccu

SEQ ID NO: 263044 - RNA, 19 nt, Artificial Sequence
  Description of Artificial Sequence: Synthetic oligonucleotide
acccuugccauuucauaaa

SEQ ID NO: 263045 - RNA, 19 nt, Artificial Sequence
  Description of Artificial Sequence: Synthetic oligonucleotide
ccuauuaguccgccuaagc

SEQ ID NO: 263046 - RNA, 19 nt, Artificial Sequence
  Description of Artificial Sequence: Synthetic oligonucleotide
cuugauucaguucccacau

SEQ ID NO: 263047 - RNA, 19 nt, Artificial Sequence
  Description of Artificial Sequence: Synthetic oligonucleotide
ucucaacacugcucugaac

SEQ ID NO: 263048 - RNA, 19 nt, Artificial Sequence
  Description of Artificial Sequence: Synthetic oligonucleotide
cucuacuagaaugggguca

SEQ ID NO: 263049 - RNA, 19 nt, Artificial Sequence
  Description of Artificial Sequence: Synthetic oligonucleotide
caacagguccauugcugug

SEQ ID NO: 263050 - RNA, 19 nt, Artificial Sequence
  Description of Artificial Sequence: Synthetic oligonucleotide
cuaaacccuugccauuuca

SEQ ID NO: 263051 - RNA, 19 nt, Artificial Sequence
  Description of Artificial Sequence: Synthetic oligonucleotide
agccaauuucuuggaggac

SEQ ID NO: 263052 - RNA, 19 nt, Artificial Sequence
  Description of Artificial Sequence: Synthetic oligonucleotide
ccucccauaaucuuuacua

SEQ ID NO: 263053 - RNA, 19 nt, Artificial Sequence
  Description of Artificial Sequence: Synthetic oligonucleotide
ccuaguccccaaauuacac

SEQ ID NO: 263054 - RNA, 19 nt, Artificial Sequence
  Description of Artificial Sequence: Synthetic oligonucleotide
agccgguuaucaccaggag

SEQ ID NO: 263055 - RNA, 19 nt, Artificial Sequence
  Description of Artificial Sequence: Synthetic oligonucleotide
gcugugucggcagacugcg

SEQ ID NO: 263056 - RNA, 19 nt, Artificial Sequence
  Description of Artificial Sequence: Synthetic oligonucleotide
cuugguccgggagugccgc

SEQ ID NO: 263057 - RNA, 19 nt, Artificial Sequence
  Description of Artificial Sequence: Synthetic oligonucleotide
ucacauaacuaaggcuauc

SEQ ID NO: 263058 - RNA, 19 nt, Artificial Sequence
  Description of Artificial Sequence: Synthetic oligonucleotide
agcuaaacccuugccauuu

SEQ ID NO: 263059 - RNA, 19 nt, Artificial Sequence
  Description of Artificial Sequence: Synthetic oligonucleotide
aggaugacucugacucuac

SEQ ID NO: 263060 - RNA, 19 nt, Artificial Sequence
  Description of Artificial Sequence: Synthetic oligonucleotide
acuagcgaagggguagaca

SEQ ID NO: 263061 - RNA, 19 nt, Artificial Sequence
  Description of Artificial Sequence: Synthetic oligonucleotide
ucaaaccacuaggauuuau

SEQ ID NO: 263062 - RNA, 19 nt, Artificial Sequence
  Description of Artificial Sequence: Synthetic oligonucleotide
caucucaacacugcucuga

SEQ ID NO: 263063 - RNA, 19 nt, Artificial Sequence
  Description of Artificial Sequence: Synthetic oligonucleotide
agagaucaguggaggaucu

SEQ ID NO: 263064 - RNA, 19 nt, Artificial Sequence
  Description of Artificial Sequence: Synthetic oligonucleotide
ccuguaacgucgagguuag

SEQ ID NO: 263065 - RNA, 19 nt, Artificial Sequence
  Description of Artificial Sequence: Synthetic oligonucleotide
aucacauaacuaaggcuau

SEQ ID NO: 263066 - RNA, 19 nt, Artificial Sequence
  Description of Artificial Sequence: Synthetic oligonucleotide
aagggcaguugggaauugu

SEQ ID NO: 263067 - RNA, 19 nt, Artificial Sequence
  Description of Artificial Sequence: Synthetic oligonucleotide
gcccuaagaguaaagcacc

SEQ ID NO: 263068 - RNA, 19 nt, Artificial Sequence
  Description of Artificial Sequence: Synthetic oligonucleotide
guuugugcgcacugcuguc

SEQ ID NO: 263069 - RNA, 19 nt, Artificial Sequence
  Description of Artificial Sequence: Synthetic oligonucleotide
cacgaagagucagugucuc

SEQ ID NO: 263070 - RNA, 19 nt, Artificial Sequence
  Description of Artificial Sequence: Synthetic oligonucleotide
auaaacuagcgaaggggua

SEQ ID NO: 263071 - RNA, 19 nt, Artificial Sequence
  Description of Artificial Sequence: Synthetic oligonucleotide
agggcaguugggaauugug

SEQ ID NO: 263072 - RNA, 19 nt, Artificial Sequence
  Description of Artificial Sequence: Synthetic oligonucleotide
agcuggucuccucccauaa

SEQ ID NO: 263073 - RNA, 19 nt, Artificial Sequence
  Description of Artificial Sequence: Synthetic oligonucleotide
auggaaugaguccccuauu

SEQ ID NO: 263074 - RNA, 19 nt, Artificial Sequence
  Description of Artificial Sequence: Synthetic oligonucleotide
agcaccuugcucaucccga

SEQ ID NO: 263075 - RNA, 19 nt, Artificial Sequence
  Description of Artificial Sequence: Synthetic oligonucleotide
acgaagagucagugucucu

SEQ ID NO: 263076 - RNA, 19 nt, Artificial Sequence
  Description of Artificial Sequence: Synthetic oligonucleotide
ccugcccuaagaguaaagc

SEQ ID NO: 263077 - RNA, 19 nt, Artificial Sequence
  Description of Artificial Sequence: Synthetic oligonucleotide
uguagucagcuggucuccu

SEQ ID NO: 263078 - RNA, 19 nt, Artificial Sequence
  Description of Artificial Sequence: Synthetic oligonucleotide
auaugcucacauacacaca

SEQ ID NO: 263079 - RNA, 19 nt, Artificial Sequence
  Description of Artificial Sequence: Synthetic oligonucleotide
uaacauuauugagggccau

SEQ ID NO: 263080 - RNA, 19 nt, Artificial Sequence
  Description of Artificial Sequence: Synthetic oligonucleotide
aagcuccuuucugagucau

SEQ ID NO: 263081 - RNA, 19 nt, Artificial Sequence
  Description of Artificial Sequence: Synthetic oligonucleotide
gguaucaaaccacuaggau

SEQ ID NO: 263082 - RNA, 19 nt, Artificial Sequence
  Description of Artificial Sequence: Synthetic oligonucleotide
cugagucauaacaccuuaa

SEQ ID NO: 263083 - RNA, 19 nt, Artificial Sequence
  Description of Artificial Sequence: Synthetic oligonucleotide
gagaucaguggaggaucug

SEQ ID NO: 263084 - RNA, 19 nt, Artificial Sequence
  Description of Artificial Sequence: Synthetic oligonucleotide
caaguccuguaacgucgag

SEQ ID NO: 263085 - RNA, 19 nt, Artificial Sequence
  Description of Artificial Sequence: Synthetic oligonucleotide
cuaccuccccucaggucac

SEQ ID NO: 263086 - RNA, 19 nt, Artificial Sequence
  Description of Artificial Sequence: Synthetic oligonucleotide
auuugguaucaaaccacua

SEQ ID NO: 263087 - RNA, 19 nt, Artificial Sequence
  Description of Artificial Sequence: Synthetic oligonucleotide
guagucagcuggucuccuc

SEQ ID NO: 263088 - RNA, 19 nt, Artificial Sequence
  Description of Artificial Sequence: Synthetic oligonucleotide
ggaucuggaacagucauau

SEQ ID NO: 263089 - RNA, 19 nt, Artificial Sequence
  Description of Artificial Sequence: Synthetic oligonucleotide
cuguaugcuccacaugcua

SEQ ID NO: 263090 - RNA, 19 nt, Artificial Sequence
  Description of Artificial Sequence: Synthetic oligonucleotide
gcaagaaggccugaaucca

SEQ ID NO: 263091 - RNA, 19 nt, Artificial Sequence
  Description of Artificial Sequence: Synthetic oligonucleotide
cagugaugggucuggaggu

SEQ ID NO: 263092 - RNA, 19 nt, Artificial Sequence
  Description of Artificial Sequence: Synthetic oligonucleotide
gguccauugcugugucggc

SEQ ID NO: 263093 - RNA, 19 nt, Artificial Sequence
  Description of Artificial Sequence: Synthetic oligonucleotide
gagauacacauggcaccca

SEQ ID NO: 263094 - RNA, 19 nt, Artificial Sequence
  Description of Artificial Sequence: Synthetic oligonucleotide
cgagauacacauggcaccc

SEQ ID NO: 263095 - RNA, 19 nt, Artificial Sequence
  Description of Artificial Sequence: Synthetic oligonucleotide
cuacuucacuuugcuaaca

SEQ ID NO: 263096 - RNA, 19 nt, Artificial Sequence
  Description of Artificial Sequence: Synthetic oligonucleotide
uuaguccgccuaagccauc

SEQ ID NO: 263097 - RNA, 19 nt, Artificial Sequence
  Description of Artificial Sequence: Synthetic oligonucleotide
agccccuaguccccaaauu

SEQ ID NO: 263098 - RNA, 19 nt, Artificial Sequence
  Description of Artificial Sequence: Synthetic oligonucleotide
agguuagcacugugggguu

SEQ ID NO: 263099 - RNA, 19 nt, Artificial Sequence
  Description of Artificial Sequence: Synthetic oligonucleotide
cgagguuagcacugugggg

SEQ ID NO: 263100 - RNA, 19 nt, Artificial Sequence
  Description of Artificial Sequence: Synthetic oligonucleotide
aucugcccaucaggggaac

SEQ ID NO: 263101 - RNA, 19 nt, Artificial Sequence
  Description of Artificial Sequence: Synthetic oligonucleotide
uaaccccauugagaaccga

SEQ ID NO: 263102 - RNA, 19 nt, Artificial Sequence
  Description of Artificial Sequence: Synthetic oligonucleotide
caggcaugauguaagcaau

SEQ ID NO: 263103 - RNA, 19 nt, Artificial Sequence
  Description of Artificial Sequence: Synthetic oligonucleotide
ggccagccaauguaggcuc

SEQ ID NO: 263104 - RNA, 19 nt, Artificial Sequence
  Description of Artificial Sequence: Synthetic oligonucleotide
caaugacucugugguaaca

SEQ ID NO: 263105 - RNA, 19 nt, Artificial Sequence
  Description of Artificial Sequence: Synthetic oligonucleotide
accuacacccagagaucag

SEQ ID NO: 263106 - RNA, 19 nt, Artificial Sequence
  Description of Artificial Sequence: Synthetic oligonucleotide
cucaggauuugguggccaa

SEQ ID NO: 263107 - RNA, 19 nt, Artificial Sequence
  Description of Artificial Sequence: Synthetic oligonucleotide
ggagugccgcuucuccuug

SEQ ID NO: 263108 - RNA, 19 nt, Artificial Sequence
  Description of Artificial Sequence: Synthetic oligonucleotide
gguggaggcuuguuauuaa

SEQ ID NO: 263109 - RNA, 19 nt, Artificial Sequence
  Description of Artificial Sequence: Synthetic oligonucleotide
uccccaccagaggaugacu

SEQ ID NO: 263110 - RNA, 19 nt, Artificial Sequence
  Description of Artificial Sequence: Synthetic oligonucleotide
ugugcgcacugcuguccuc

SEQ ID NO: 263111 - RNA, 19 nt, Artificial Sequence
  Description of Artificial Sequence: Synthetic oligonucleotide
cuacuagaauggggucaag

SEQ ID NO: 263112 - RNA, 19 nt, Artificial Sequence
  Description of Artificial Sequence: Synthetic oligonucleotide
ccgguuaucaccaggaguu

SEQ ID NO: 263113 - RNA, 19 nt, Artificial Sequence
  Description of Artificial Sequence: Synthetic oligonucleotide
guccgccuaagccaucucu

SEQ ID NO: 263114 - RNA, 19 nt, Artificial Sequence
  Description of Artificial Sequence: Synthetic oligonucleotide
aggcuaucagugguaucaa

SEQ ID NO: 263115 - RNA, 19 nt, Artificial Sequence
  Description of Artificial Sequence: Synthetic oligonucleotide
gggucuggagguacaacca

SEQ ID NO: 263116 - RNA, 19 nt, Artificial Sequence
  Description of Artificial Sequence: Synthetic oligonucleotide
ggguuugugcgcacugcug

SEQ ID NO: 263117 - RNA, 19 nt, Artificial Sequence
  Description of Artificial Sequence: Synthetic oligonucleotide
aggcucacgaagagucagu

SEQ ID NO: 263118 - RNA, 19 nt, Artificial Sequence
  Description of Artificial Sequence: Synthetic oligonucleotide
gcuagguuucagaggaaaa

SEQ ID NO: 263119 - RNA, 19 nt, Artificial Sequence
  Description of Artificial Sequence: Synthetic oligonucleotide
gccgguuaucaccaggagu

SEQ ID NO: 263120 - RNA, 19 nt, Artificial Sequence
  Description of Artificial Sequence: Synthetic oligonucleotide
uugguccgggagugccgcu

SEQ ID NO: 263121 - RNA, 19 nt, Artificial Sequence
  Description of Artificial Sequence: Synthetic oligonucleotide
ccgagccaauuucuuggag

SEQ ID NO: 263122 - RNA, 19 nt, Artificial Sequence
  Description of Artificial Sequence: Synthetic oligonucleotide
guugggcaggauacugaaa

SEQ ID NO: 263123 - RNA, 19 nt, Artificial Sequence
  Description of Artificial Sequence: Synthetic oligonucleotide
gguuucugucccaggcuuc

SEQ ID NO: 263124 - RNA, 19 nt, Artificial Sequence
  Description of Artificial Sequence: Synthetic oligonucleotide
uccgggagugccgcuucuc

SEQ ID NO: 263125 - RNA, 19 nt, Artificial Sequence
  Description of Artificial Sequence: Synthetic oligonucleotide
aucaaaccacuaggauuua

SEQ ID NO: 263126 - RNA, 19 nt, Artificial Sequence
  Description of Artificial Sequence: Synthetic oligonucleotide
cccuauuaguccgccuaag

SEQ ID NO: 263127 - RNA, 19 nt, Artificial Sequence
  Description of Artificial Sequence: Synthetic oligonucleotide
gugagagaauaaguuucau

SEQ ID NO: 263128 - RNA, 19 nt, Artificial Sequence
  Description of Artificial Sequence: Synthetic oligonucleotide
ccacuaggauuuauuuaaa

SEQ ID NO: 263129 - RNA, 19 nt, Artificial Sequence
  Description of Artificial Sequence: Synthetic oligonucleotide
cuguaacgucgagguuagc

SEQ ID NO: 263130 - RNA, 19 nt, Artificial Sequence
  Description of Artificial Sequence: Synthetic oligonucleotide
gggaggugauagcuuucaa

SEQ ID NO: 263131 - RNA, 19 nt, Artificial Sequence
  Description of Artificial Sequence: Synthetic oligonucleotide
ggaguucacugcugucugu

SEQ ID NO: 263132 - RNA, 19 nt, Artificial Sequence
  Description of Artificial Sequence: Synthetic oligonucleotide
gagugccgcuucuccuugu

SEQ ID NO: 263133 - RNA, 19 nt, Artificial Sequence
  Description of Artificial Sequence: Synthetic oligonucleotide
cagcuaaacccuugccauu

SEQ ID NO: 263134 - RNA, 19 nt, Artificial Sequence
  Description of Artificial Sequence: Synthetic oligonucleotide
cccgagccaauuucuugga

SEQ ID NO: 263135 - RNA, 19 nt, Artificial Sequence
  Description of Artificial Sequence: Synthetic oligonucleotide
ggcuaucagugguaucaau

SEQ ID NO: 263136 - RNA, 19 nt, Artificial Sequence
  Description of Artificial Sequence: Synthetic oligonucleotide
cccuaagaguaaagcaccu

SEQ ID NO: 263137 - RNA, 19 nt, Artificial Sequence
  Description of Artificial Sequence: Synthetic oligonucleotide
guccccuauuaguccgccu

SEQ ID NO: 263138 - RNA, 19 nt, Artificial Sequence
  Description of Artificial Sequence: Synthetic oligonucleotide
ccuacacccagagaucagu

SEQ ID NO: 263139 - RNA, 19 nt, Artificial Sequence
  Description of Artificial Sequence: Synthetic oligonucleotide
agcuccuuucugagucaua

SEQ ID NO: 263140 - RNA, 19 nt, Artificial Sequence
  Description of Artificial Sequence: Synthetic oligonucleotide
agacugcgggcuagauuuu

SEQ ID NO: 263141 - RNA, 19 nt, Artificial Sequence
  Description of Artificial Sequence: Synthetic oligonucleotide
ccccuauuaguccgccuaa

SEQ ID NO: 263142 - RNA, 19 nt, Artificial Sequence
  Description of Artificial Sequence: Synthetic oligonucleotide
guccuguaacgucgagguu

SEQ ID NO: 263143 - RNA, 19 nt, Artificial Sequence
  Description of Artificial Sequence: Synthetic oligonucleotide
cugugggguucuggaagcu

SEQ ID NO: 263144 - RNA, 19 nt, Artificial Sequence
  Description of Artificial Sequence: Synthetic oligonucleotide
cccucaggucacuuugagu

SEQ ID NO: 263145 - RNA, 19 nt, Artificial Sequence
  Description of Artificial Sequence: Synthetic oligonucleotide
ccagccaauguaggcucaa

SEQ ID NO: 263146 - RNA, 19 nt, Artificial Sequence
  Description of Artificial Sequence: Synthetic oligonucleotide
gcucuccaaauggcuugaa

SEQ ID NO: 263147 - RNA, 19 nt, Artificial Sequence
  Description of Artificial Sequence: Synthetic oligonucleotide
ccugcacuaugugugccuu

SEQ ID NO: 263148 - RNA, 19 nt, Artificial Sequence
  Description of Artificial Sequence: Synthetic oligonucleotide
gcgaagggguagacagguu

SEQ ID NO: 263149 - RNA, 19 nt, Artificial Sequence
  Description of Artificial Sequence: Synthetic oligonucleotide
aaaguaacauguuagcagc

SEQ ID NO: 263150 - RNA, 19 nt, Artificial Sequence
  Description of Artificial Sequence: Synthetic oligonucleotide
auaacuaaggaccaaaagg

SEQ ID NO: 263151 - RNA, 19 nt, Artificial Sequence
  Description of Artificial Sequence: Synthetic oligonucleotide
auuaggauaacuaaggacc

SEQ ID NO: 263152 - RNA, 19 nt, Artificial Sequence
  Description of Artificial Sequence: Synthetic oligonucleotide
auuauuagcugacaaaggc

SEQ ID NO: 263153 - RNA, 19 nt, Artificial Sequence
  Description of Artificial Sequence: Synthetic oligonucleotide
uaacuaaggaccaaaaggg

SEQ ID NO: 263154 - RNA, 19 nt, Artificial Sequence
  Description of Artificial Sequence: Synthetic oligonucleotide
uuuggcacaaacaaaaugc

SEQ ID NO: 263155 - RNA, 19 nt, Artificial Sequence
  Description of Artificial Sequence: Synthetic oligonucleotide
auugauacaauuuccugcc

SEQ ID NO: 263156 - RNA, 19 nt, Artificial Sequence
  Description of Artificial Sequence: Synthetic oligonucleotide
ucuuauaguagauaaaccc

SEQ ID NO: 263157 - RNA, 19 nt, Artificial Sequence
  Description of Artificial Sequence: Synthetic oligonucleotide
aaauaaaguagcugguuac

SEQ ID NO: 263158 - RNA, 19 nt, Artificial Sequence
  Description of Artificial Sequence: Synthetic oligonucleotide
aaagguauacagcaauggc

SEQ ID NO: 263159 - RNA, 19 nt, Artificial Sequence
  Description of Artificial Sequence: Synthetic oligonucleotide
uuuagaguggaucaaauga

SEQ ID NO: 263160 - RNA, 19 nt, Artificial Sequence
  Description of Artificial Sequence: Synthetic oligonucleotide
uuuacuaucuuauaguaga

SEQ ID NO: 263161 - RNA, 19 nt, Artificial Sequence
  Description of Artificial Sequence: Synthetic oligonucleotide
guuaauuugguauugcagg

SEQ ID NO: 263162 - RNA, 19 nt, Artificial Sequence
  Description of Artificial Sequence: Synthetic oligonucleotide
uuuauuaagcaccaaaggu

SEQ ID NO: 263163 - RNA, 19 nt, Artificial Sequence
  Description of Artificial Sequence: Synthetic oligonucleotide
aaauggaugaggcaaagug

SEQ ID NO: 263164 - RNA, 19 nt, Artificial Sequence
  Description of Artificial Sequence: Synthetic oligonucleotide
uacauuaggauaacuaagg

SEQ ID NO: 263165 - RNA, 19 nt, Artificial Sequence
  Description of Artificial Sequence: Synthetic oligonucleotide
uuaacuuggaaucagcuac

SEQ ID NO: 263166 - RNA, 19 nt, Artificial Sequence
  Description of Artificial Sequence: Synthetic oligonucleotide
aaugcuuugaacaccacac

SEQ ID NO: 263167 - RNA, 19 nt, Artificial Sequence
  Description of Artificial Sequence: Synthetic oligonucleotide
uaaacugcuaaacaaacac

SEQ ID NO: 263168 - RNA, 19 nt, Artificial Sequence
  Description of Artificial Sequence: Synthetic oligonucleotide
uuaccuaaaguuaauauuc

SEQ ID NO: 263169 - RNA, 19 nt, Artificial Sequence
  Description of Artificial Sequence: Synthetic oligonucleotide
ucuauuuccagugaggucc

SEQ ID NO: 263170 - RNA, 19 nt, Artificial Sequence
  Description of Artificial Sequence: Synthetic oligonucleotide
aaagacaauuuuaaacugc

SEQ ID NO: 263171 - RNA, 19 nt, Artificial Sequence
  Description of Artificial Sequence: Synthetic oligonucleotide
ucaaguaucauguuauuac

SEQ ID NO: 263172 - RNA, 19 nt, Artificial Sequence
  Description of Artificial Sequence: Synthetic oligonucleotide
aauauuggcuagaagagag

SEQ ID NO: 263173 - RNA, 19 nt, Artificial Sequence
  Description of Artificial Sequence: Synthetic oligonucleotide
uguuaauuugguauugcag

SEQ ID NO: 263174 - RNA, 19 nt, Artificial Sequence
  Description of Artificial Sequence: Synthetic oligonucleotide
uuacauuaggauaacuaag

SEQ ID NO: 263175 - RNA, 19 nt, Artificial Sequence
  Description of Artificial Sequence: Synthetic oligonucleotide
aaugcuuugauacaccuuu

SEQ ID NO: 263176 - RNA, 19 nt, Artificial Sequence
  Description of Artificial Sequence: Synthetic oligonucleotide
uugauaagcauuauuauuu

SEQ ID NO: 263177 - RNA, 19 nt, Artificial Sequence
  Description of Artificial Sequence: Synthetic oligonucleotide
ugcuaaacaaacacaaagc

SEQ ID NO: 263178 - RNA, 19 nt, Artificial Sequence
  Description of Artificial Sequence: Synthetic oligonucleotide
cuaaaagucucauuuacac

SEQ ID NO: 263179 - RNA, 19 nt, Artificial Sequence
  Description of Artificial Sequence: Synthetic oligonucleotide
uuauuaagcaccaaaggua

SEQ ID NO: 263180 - RNA, 19 nt, Artificial Sequence
  Description of Artificial Sequence: Synthetic oligonucleotide
aucgaaagcacucaggaug

SEQ ID NO: 263181 - RNA, 19 nt, Artificial Sequence
  Description of Artificial Sequence: Synthetic oligonucleotide
uuaauaaugcuuugaacac

SEQ ID NO: 263182 - RNA, 19 nt, Artificial Sequence
  Description of Artificial Sequence: Synthetic oligonucleotide
acauguuagcagcagaaac

SEQ ID NO: 263183 - RNA, 19 nt, Artificial Sequence
  Description of Artificial Sequence: Synthetic oligonucleotide
aaauugauaagcauuauua

SEQ ID NO: 263184 - RNA, 19 nt, Artificial Sequence
  Description of Artificial Sequence: Synthetic oligonucleotide
aauugauaagcauuauuau

SEQ ID NO: 263185 - RNA, 19 nt, Artificial Sequence
  Description of Artificial Sequence: Synthetic oligonucleotide
acuaucuuauaguagauaa

SEQ ID NO: 263186 - RNA, 19 nt, Artificial Sequence
  Description of Artificial Sequence: Synthetic oligonucleotide
auuaugacaaggacgacac

SEQ ID NO: 263187 - RNA, 19 nt, Artificial Sequence
  Description of Artificial Sequence: Synthetic oligonucleotide
uugauacaccuuuagagug

SEQ ID NO: 263188 - RNA, 19 nt, Artificial Sequence
  Description of Artificial Sequence: Synthetic oligonucleotide
cugcuaaacaaacacaaag

SEQ ID NO: 263189 - RNA, 19 nt, Artificial Sequence
  Description of Artificial Sequence: Synthetic oligonucleotide
uuauuagcugacaaaggca

SEQ ID NO: 263190 - RNA, 19 nt, Artificial Sequence
  Description of Artificial Sequence: Synthetic oligonucleotide
uuauaguagauaaacccaa

SEQ ID NO: 263191 - RNA, 19 nt, Artificial Sequence
  Description of Artificial Sequence: Synthetic oligonucleotide
agugagguccguuaagaac

SEQ ID NO: 263192 - RNA, 19 nt, Artificial Sequence
  Description of Artificial Sequence: Synthetic oligonucleotide
uauuaagcaccaaagguau

SEQ ID NO: 263193 - RNA, 19 nt, Artificial Sequence
  Description of Artificial Sequence: Synthetic oligonucleotide
uauagugaguuucacaaua

SEQ ID NO: 263194 - RNA, 19 nt, Artificial Sequence
  Description of Artificial Sequence: Synthetic oligonucleotide
gacaauuuuaaacugcuaa

SEQ ID NO: 263195 - RNA, 19 nt, Artificial Sequence
  Description of Artificial Sequence: Synthetic oligonucleotide
guuaauauucuuacuaccc

SEQ ID NO: 263196 - RNA, 19 nt, Artificial Sequence
  Description of Artificial Sequence: Synthetic oligonucleotide
ucuuaucaugacauggcag

SEQ ID NO: 263197 - RNA, 19 nt, Artificial Sequence
  Description of Artificial Sequence: Synthetic oligonucleotide
uuuucacguauuaugacaa

SEQ ID NO: 263198 - RNA, 19 nt, Artificial Sequence
  Description of Artificial Sequence: Synthetic oligonucleotide
ugauacaccuuuagagugg

SEQ ID NO: 263199 - RNA, 19 nt, Artificial Sequence
  Description of Artificial Sequence: Synthetic oligonucleotide
uaaaguccugauuucaucu

SEQ ID NO: 263200 - RNA, 19 nt, Artificial Sequence
  Description of Artificial Sequence: Synthetic oligonucleotide
aacuaaggaccaaaagggc

SEQ ID NO: 263201 - RNA, 19 nt, Artificial Sequence
  Description of Artificial Sequence: Synthetic oligonucleotide
uuaagguauucacugcuug

SEQ ID NO: 263202 - RNA, 19 nt, Artificial Sequence
  Description of Artificial Sequence: Synthetic oligonucleotide
aauucguguauaauacuuc

SEQ ID NO: 263203 - RNA, 19 nt, Artificial Sequence
  Description of Artificial Sequence: Synthetic oligonucleotide
agaguaauagcauccugag

SEQ ID NO: 263204 - RNA, 19 nt, Artificial Sequence
  Description of Artificial Sequence: Synthetic oligonucleotide
auaagcauuauuauuucag

SEQ ID NO: 263205 - RNA, 19 nt, Artificial Sequence
  Description of Artificial Sequence: Synthetic oligonucleotide
uuucacaauaggccaagcc

SEQ ID NO: 263206 - RNA, 19 nt, Artificial Sequence
  Description of Artificial Sequence: Synthetic oligonucleotide
uuagaguggaucaaaugaa

SEQ ID NO: 263207 - RNA, 19 nt, Artificial Sequence
  Description of Artificial Sequence: Synthetic oligonucleotide
uucaaugggccuccgacag

SEQ ID NO: 263208 - RNA, 19 nt, Artificial Sequence
  Description of Artificial Sequence: Synthetic oligonucleotide
ugaccucuaacucaugaca

SEQ ID NO: 263209 - RNA, 19 nt, Artificial Sequence
  Description of Artificial Sequence: Synthetic oligonucleotide
auuuggcacaaacaaaaug

SEQ ID NO: 263210 - RNA, 19 nt, Artificial Sequence
  Description of Artificial Sequence: Synthetic oligonucleotide
caaguaucauguuauuacc

SEQ ID NO: 263211 - RNA, 19 nt, Artificial Sequence
  Description of Artificial Sequence: Synthetic oligonucleotide
ucacaauaggccaagcccu

SEQ ID NO: 263212 - RNA, 19 nt, Artificial Sequence
  Description of Artificial Sequence: Synthetic oligonucleotide
uuaauuugguauugcaggu

SEQ ID NO: 263213 - RNA, 19 nt, Artificial Sequence
  Description of Artificial Sequence: Synthetic oligonucleotide
uucacguauuaugacaagg

SEQ ID NO: 263214 - RNA, 19 nt, Artificial Sequence
  Description of Artificial Sequence: Synthetic oligonucleotide
uucuuaaucccaaaagaau

SEQ ID NO: 263215 - RNA, 19 nt, Artificial Sequence
  Description of Artificial Sequence: Synthetic oligonucleotide
uaagcauuauuauuucaga

SEQ ID NO: 263216 - RNA, 19 nt, Artificial Sequence
  Description of Artificial Sequence: Synthetic oligonucleotide
ucacguauuaugacaagga

SEQ ID NO: 263217 - RNA, 19 nt, Artificial Sequence
  Description of Artificial Sequence: Synthetic oligonucleotide
uauuaugacaaggacgaca

SEQ ID NO: 263218 - RNA, 19 nt, Artificial Sequence
  Description of Artificial Sequence: Synthetic oligonucleotide
uuaggauaacuaaggacca

SEQ ID NO: 263219 - RNA, 19 nt, Artificial Sequence
  Description of Artificial Sequence: Synthetic oligonucleotide
uuuauggcaaagcaauaaa

SEQ ID NO: 263220 - RNA, 19 nt, Artificial Sequence
  Description of Artificial Sequence: Synthetic oligonucleotide
aguggaaauuucucauagc

SEQ ID NO: 263221 - RNA, 19 nt, Artificial Sequence
  Description of Artificial Sequence: Synthetic oligonucleotide
uaaaguagcugguuacaag

SEQ ID NO: 263222 - RNA, 19 nt, Artificial Sequence
  Description of Artificial Sequence: Synthetic oligonucleotide
ugugugaugacaugugaga

SEQ ID NO: 263223 - RNA, 19 nt, Artificial Sequence
  Description of Artificial Sequence: Synthetic oligonucleotide
ugacaugugagauggguca

SEQ ID NO: 263224 - RNA, 19 nt, Artificial Sequence
  Description of Artificial Sequence: Synthetic oligonucleotide
aagcauuauuauuucagau

SEQ ID NO: 263225 - RNA, 19 nt, Artificial Sequence
  Description of Artificial Sequence: Synthetic oligonucleotide
auugauaagcauuauuauu

SEQ ID NO: 263226 - RNA, 19 nt, Artificial Sequence
  Description of Artificial Sequence: Synthetic oligonucleotide
uuauuaccaagucacacuu

SEQ ID NO: 263227 - RNA, 19 nt, Artificial Sequence
  Description of Artificial Sequence: Synthetic oligonucleotide
aucuuauaguagauaaacc

SEQ ID NO: 263228 - RNA, 19 nt, Artificial Sequence
  Description of Artificial Sequence: Synthetic oligonucleotide
aagguauacagcaauggcu

SEQ ID NO: 263229 - RNA, 19 nt, Artificial Sequence
  Description of Artificial Sequence: Synthetic oligonucleotide
acuacuaugggagucacca

SEQ ID NO: 263230 - RNA, 19 nt, Artificial Sequence
  Description of Artificial Sequence: Synthetic oligonucleotide
ucauacuuuugcauaguga

SEQ ID NO: 263231 - RNA, 19 nt, Artificial Sequence
  Description of Artificial Sequence: Synthetic oligonucleotide
aaauagcugauuauaguga

SEQ ID NO: 263232 - RNA, 19 nt, Artificial Sequence
  Description of Artificial Sequence: Synthetic oligonucleotide
gguuguucaucaaugaugg

SEQ ID NO: 263233 - RNA, 19 nt, Artificial Sequence
  Description of Artificial Sequence: Synthetic oligonucleotide
acaaguacuuuaccaauug

SEQ ID NO: 263234 - RNA, 19 nt, Artificial Sequence
  Description of Artificial Sequence: Synthetic oligonucleotide
acuacaccaagucuuuguc

SEQ ID NO: 263235 - RNA, 19 nt, Artificial Sequence
  Description of Artificial Sequence: Synthetic oligonucleotide
ucuaaugcuuugauacacc

SEQ ID NO: 263236 - RNA, 19 nt, Artificial Sequence
  Description of Artificial Sequence: Synthetic oligonucleotide
caucuuaucaugacauggc

SEQ ID NO: 263237 - RNA, 19 nt, Artificial Sequence
  Description of Artificial Sequence: Synthetic oligonucleotide
ucgaaagcacucaggaugc

SEQ ID NO: 263238 - RNA, 19 nt, Artificial Sequence
  Description of Artificial Sequence: Synthetic oligonucleotide
acguauuaugacaaggacg

SEQ ID NO: 263239 - RNA, 19 nt, Artificial Sequence
  Description of Artificial Sequence: Synthetic oligonucleotide
auacgggucauucuugaag

SEQ ID NO: 263240 - RNA, 19 nt, Artificial Sequence
  Description of Artificial Sequence: Synthetic oligonucleotide
uuaagcaccaaagguauac

SEQ ID NO: 263241 - RNA, 19 nt, Artificial Sequence
  Description of Artificial Sequence: Synthetic oligonucleotide
guggaaauuucucauagca

SEQ ID NO: 263242 - RNA, 19 nt, Artificial Sequence
  Description of Artificial Sequence: Synthetic oligonucleotide
aagacaauuuuaaacugcu

SEQ ID NO: 263243 - RNA, 19 nt, Artificial Sequence
  Description of Artificial Sequence: Synthetic oligonucleotide
aauauucuuacuacccucu

SEQ ID NO: 263244 - RNA, 19 nt, Artificial Sequence
  Description of Artificial Sequence: Synthetic oligonucleotide
auaacgucauaauuaauuu

SEQ ID NO: 263245 - RNA, 19 nt, Artificial Sequence
  Description of Artificial Sequence: Synthetic oligonucleotide
uaccaauugagcucuuucc

SEQ ID NO: 263246 - RNA, 19 nt, Artificial Sequence
  Description of Artificial Sequence: Synthetic oligonucleotide
aauaaaguagcugguuaca

SEQ ID NO: 263247 - RNA, 19 nt, Artificial Sequence
  Description of Artificial Sequence: Synthetic oligonucleotide
cuaaggaccaaaagggcac

SEQ ID NO: 263248 - RNA, 19 nt, Artificial Sequence
  Description of Artificial Sequence: Synthetic oligonucleotide
uguaaaugcuugcuuuucu

SEQ ID NO: 263249 - RNA, 19 nt, Artificial Sequence
  Description of Artificial Sequence: Synthetic oligonucleotide
ugugcauaacgucauaauu

SEQ ID NO: 263250 - RNA, 19 nt, Artificial Sequence
  Description of Artificial Sequence: Synthetic oligonucleotide
cuuaucaugacauggcaga

SEQ ID NO: 263251 - RNA, 19 nt, Artificial Sequence
  Description of Artificial Sequence: Synthetic oligonucleotide
uaugacacgguugcagugg

SEQ ID NO: 263252 - RNA, 19 nt, Artificial Sequence
  Description of Artificial Sequence: Synthetic oligonucleotide
auucguguauaauacuuca

SEQ ID NO: 263253 - RNA, 19 nt, Artificial Sequence
  Description of Artificial Sequence: Synthetic oligonucleotide
caauugagcucuuuccagg

SEQ ID NO: 263254 - RNA, 19 nt, Artificial Sequence
  Description of Artificial Sequence: Synthetic oligonucleotide
uggaaauuucucauagcac

SEQ ID NO: 263255 - RNA, 19 nt, Artificial Sequence
  Description of Artificial Sequence: Synthetic oligonucleotide
aacugcuaaacaaacacaa

SEQ ID NO: 263256 - RNA, 19 nt, Artificial Sequence
  Description of Artificial Sequence: Synthetic oligonucleotide
cugagauauccuuuuagug

SEQ ID NO: 263257 - RNA, 19 nt, Artificial Sequence
  Description of Artificial Sequence: Synthetic oligonucleotide
uugcacuuaaaacucucca

SEQ ID NO: 263258 - RNA, 19 nt, Artificial Sequence
  Description of Artificial Sequence: Synthetic oligonucleotide
aaugauggcauggcauuuc

SEQ ID NO: 263259 - RNA, 19 nt, Artificial Sequence
  Description of Artificial Sequence: Synthetic oligonucleotide
augaaguaauauuggcuag

SEQ ID NO: 263260 - RNA, 19 nt, Artificial Sequence
  Description of Artificial Sequence: Synthetic oligonucleotide
uacuuuaccaauugagcuc

SEQ ID NO: 263261 - RNA, 19 nt, Artificial Sequence
  Description of Artificial Sequence: Synthetic oligonucleotide
ucucacaccguaaccuagg

SEQ ID NO: 263262 - RNA, 19 nt, Artificial Sequence
  Description of Artificial Sequence: Synthetic oligonucleotide
ugcauagugaguuuauaua

SEQ ID NO: 263263 - RNA, 19 nt, Artificial Sequence
  Description of Artificial Sequence: Synthetic oligonucleotide
agcauuauuauuucagauu

SEQ ID NO: 263264 - RNA, 19 nt, Artificial Sequence
  Description of Artificial Sequence: Synthetic oligonucleotide
aucuguguuuuacauagga

SEQ ID NO: 263265 - RNA, 19 nt, Artificial Sequence
  Description of Artificial Sequence: Synthetic oligonucleotide
aaauucguguauaauacuu

SEQ ID NO: 263266 - RNA, 19 nt, Artificial Sequence
  Description of Artificial Sequence: Synthetic oligonucleotide
cauggcauucacuacucgc

SEQ ID NO: 263267 - RNA, 19 nt, Artificial Sequence
  Description of Artificial Sequence: Synthetic oligonucleotide
uggcagaguaauagcaucc

SEQ ID NO: 263268 - RNA, 19 nt, Artificial Sequence
  Description of Artificial Sequence: Synthetic oligonucleotide
uucuaugacacgguugcag

SEQ ID NO: 263269 - RNA, 19 nt, Artificial Sequence
  Description of Artificial Sequence: Synthetic oligonucleotide
aaguguuaauaaugcuuug

SEQ ID NO: 263270 - RNA, 19 nt, Artificial Sequence
  Description of Artificial Sequence: Synthetic oligonucleotide
cuuuucacguauuaugaca

SEQ ID NO: 263271 - RNA, 19 nt, Artificial Sequence
  Description of Artificial Sequence: Synthetic oligonucleotide
uguaugugcauaacgucau

SEQ ID NO: 263272 - RNA, 19 nt, Artificial Sequence
  Description of Artificial Sequence: Synthetic oligonucleotide
aauggcgauguccaagaaa

SEQ ID NO: 263273 - RNA, 19 nt, Artificial Sequence
  Description of Artificial Sequence: Synthetic oligonucleotide
agguggaacaggcaaagca

SEQ ID NO: 263274 - RNA, 19 nt, Artificial Sequence
  Description of Artificial Sequence: Synthetic oligonucleotide
agcaguuagcuccuucccg

SEQ ID NO: 263275 - RNA, 19 nt, Artificial Sequence
  Description of Artificial Sequence: Synthetic oligonucleotide
uuaccaauugagcucuuuc

SEQ ID NO: 263276 - RNA, 19 nt, Artificial Sequence
  Description of Artificial Sequence: Synthetic oligonucleotide
ucuaugacacgguugcagu

SEQ ID NO: 263277 - RNA, 19 nt, Artificial Sequence
  Description of Artificial Sequence: Synthetic oligonucleotide
uaccuaaaguuaauauucu

SEQ ID NO: 263278 - RNA, 19 nt, Artificial Sequence
  Description of Artificial Sequence: Synthetic oligonucleotide
caguggaaauuucucauag

SEQ ID NO: 263279 - RNA, 19 nt, Artificial Sequence
  Description of Artificial Sequence: Synthetic oligonucleotide
ucucguaauggcgaugucc

SEQ ID NO: 263280 - RNA, 19 nt, Artificial Sequence
  Description of Artificial Sequence: Synthetic oligonucleotide
gaacuuauuuccuuccuaa

SEQ ID NO: 263281 - RNA, 19 nt, Artificial Sequence
  Description of Artificial Sequence: Synthetic oligonucleotide
cucucuauuuccagugagg

SEQ ID NO: 263282 - RNA, 19 nt, Artificial Sequence
  Description of Artificial Sequence: Synthetic oligonucleotide
gaucagagguuguucauca

SEQ ID NO: 263283 - RNA, 19 nt, Artificial Sequence
  Description of Artificial Sequence: Synthetic oligonucleotide
uacaaguuacacuugccua

SEQ ID NO: 263284 - RNA, 19 nt, Artificial Sequence
  Description of Artificial Sequence: Synthetic oligonucleotide
acacuugcaggaauauucc

SEQ ID NO: 263285 - RNA, 19 nt, Artificial Sequence
  Description of Artificial Sequence: Synthetic oligonucleotide
cagagguuguucaucaaug

SEQ ID NO: 263286 - RNA, 19 nt, Artificial Sequence
  Description of Artificial Sequence: Synthetic oligonucleotide
uugcauagugaguuuauau

SEQ ID NO: 263287 - RNA, 19 nt, Artificial Sequence
  Description of Artificial Sequence: Synthetic oligonucleotide
aaguaucauguuauuacca

SEQ ID NO: 263288 - RNA, 19 nt, Artificial Sequence
  Description of Artificial Sequence: Synthetic oligonucleotide
uuggguuggccacccaggg

SEQ ID NO: 263289 - RNA, 19 nt, Artificial Sequence
  Description of Artificial Sequence: Synthetic oligonucleotide
aguuagguuggguuggcca

SEQ ID NO: 263290 - RNA, 19 nt, Artificial Sequence
  Description of Artificial Sequence: Synthetic oligonucleotide
ugaaguaauauuggcuaga

SEQ ID NO: 263291 - RNA, 19 nt, Artificial Sequence
  Description of Artificial Sequence: Synthetic oligonucleotide
cccucuuucaaucuaaaag

SEQ ID NO: 263292 - RNA, 19 nt, Artificial Sequence
  Description of Artificial Sequence: Synthetic oligonucleotide
uuagcugacaaaggcacac

SEQ ID NO: 263293 - RNA, 19 nt, Artificial Sequence
  Description of Artificial Sequence: Synthetic oligonucleotide
cuaacucaugacaaccuuc

SEQ ID NO: 263294 - RNA, 19 nt, Artificial Sequence
  Description of Artificial Sequence: Synthetic oligonucleotide
aaagggcacuuagaaauug

SEQ ID NO: 263295 - RNA, 19 nt, Artificial Sequence
  Description of Artificial Sequence: Synthetic oligonucleotide
aguggaucaaaugaaguaa

SEQ ID NO: 263296 - RNA, 19 nt, Artificial Sequence
  Description of Artificial Sequence: Synthetic oligonucleotide
aucuuaucaugacauggca

SEQ ID NO: 263297 - RNA, 19 nt, Artificial Sequence
  Description of Artificial Sequence: Synthetic oligonucleotide
accaaauagcugauuauag

SEQ ID NO: 263298 - RNA, 19 nt, Artificial Sequence
  Description of Artificial Sequence: Synthetic oligonucleotide
caucaguuagguuggguug

SEQ ID NO: 263299 - RNA, 19 nt, Artificial Sequence
  Description of Artificial Sequence: Synthetic oligonucleotide
aguggucagggugauacgg

SEQ ID NO: 263300 - RNA, 19 nt, Artificial Sequence
  Description of Artificial Sequence: Synthetic oligonucleotide
uacuaugggagucaccaua

SEQ ID NO: 263301 - RNA, 19 nt, Artificial Sequence
  Description of Artificial Sequence: Synthetic oligonucleotide
uauuggcuagaagagagaa

SEQ ID NO: 263302 - RNA, 19 nt, Artificial Sequence
  Description of Artificial Sequence: Synthetic oligonucleotide
ucucuaaugcuuugauaca

SEQ ID NO: 263303 - RNA, 19 nt, Artificial Sequence
  Description of Artificial Sequence: Synthetic oligonucleotide
ugaagaggacugagcaaag

SEQ ID NO: 263304 - RNA, 19 nt, Artificial Sequence
  Description of Artificial Sequence: Synthetic oligonucleotide
ucagccuaugucaaaguuu

SEQ ID NO: 263305 - RNA, 19 nt, Artificial Sequence
  Description of Artificial Sequence: Synthetic oligonucleotide
ugccauugcuugcccaugg

SEQ ID NO: 263306 - RNA, 19 nt, Artificial Sequence
  Description of Artificial Sequence: Synthetic oligonucleotide
cagaguaauagcauccuga

SEQ ID NO: 263307 - RNA, 19 nt, Artificial Sequence
  Description of Artificial Sequence: Synthetic oligonucleotide
guagcugguuacaaguuag

SEQ ID NO: 263308 - RNA, 19 nt, Artificial Sequence
  Description of Artificial Sequence: Synthetic oligonucleotide
uggcaaauggaugaggcaa

SEQ ID NO: 263309 - RNA, 19 nt, Artificial Sequence
  Description of Artificial Sequence: Synthetic oligonucleotide
ugacaaacccuaugucugc

SEQ ID NO: 263310 - RNA, 19 nt, Artificial Sequence
  Description of Artificial Sequence: Synthetic oligonucleotide
uuacuacccucuuucaauc

SEQ ID NO: 263311 - RNA, 19 nt, Artificial Sequence
  Description of Artificial Sequence: Synthetic oligonucleotide
aguaacauguuagcagcag

SEQ ID NO: 263312 - RNA, 19 nt, Artificial Sequence
  Description of Artificial Sequence: Synthetic oligonucleotide
cacguauuaugacaaggac

SEQ ID NO: 263313 - RNA, 19 nt, Artificial Sequence
  Description of Artificial Sequence: Synthetic oligonucleotide
cugagaacccuuuauggca

SEQ ID NO: 263314 - RNA, 19 nt, Artificial Sequence
  Description of Artificial Sequence: Synthetic oligonucleotide
guacuuuaccaauugagcu

SEQ ID NO: 263315 - RNA, 19 nt, Artificial Sequence
  Description of Artificial Sequence: Synthetic oligonucleotide
ucuaacucaugacaaccuu

SEQ ID NO: 263316 - RNA, 19 nt, Artificial Sequence
  Description of Artificial Sequence: Synthetic oligonucleotide
uaauuugguauugcaggug

SEQ ID NO: 263317 - RNA, 19 nt, Artificial Sequence
  Description of Artificial Sequence: Synthetic oligonucleotide
cacuacucgcccuucaaug

SEQ ID NO: 263318 - RNA, 19 nt, Artificial Sequence
  Description of Artificial Sequence: Synthetic oligonucleotide
ggcaaaguguuaauaaugc

SEQ ID NO: 263319 - RNA, 19 nt, Artificial Sequence
  Description of Artificial Sequence: Synthetic oligonucleotide
acuaaggaccaaaagggca

SEQ ID NO: 263320 - RNA, 19 nt, Artificial Sequence
  Description of Artificial Sequence: Synthetic oligonucleotide
uuacuaucuuauaguagau

SEQ ID NO: 263321 - RNA, 19 nt, Artificial Sequence
  Description of Artificial Sequence: Synthetic oligonucleotide
ggcgauguccaagaaaugg

SEQ ID NO: 263322 - RNA, 19 nt, Artificial Sequence
  Description of Artificial Sequence: Synthetic oligonucleotide
ccaauuaugacauuugaaa

SEQ ID NO: 263323 - RNA, 19 nt, Artificial Sequence
  Description of Artificial Sequence: Synthetic oligonucleotide
agagaggugccaucucuag

SEQ ID NO: 263324 - RNA, 19 nt, Artificial Sequence
  Description of Artificial Sequence: Synthetic oligonucleotide
cucuaaugcuuugauacac

SEQ ID NO: 263325 - RNA, 19 nt, Artificial Sequence
  Description of Artificial Sequence: Synthetic oligonucleotide
gaguggaucaaaugaagua

SEQ ID NO: 263326 - RNA, 19 nt, Artificial Sequence
  Description of Artificial Sequence: Synthetic oligonucleotide
auggcgauguccaagaaau

SEQ ID NO: 263327 - RNA, 19 nt, Artificial Sequence
  Description of Artificial Sequence: Synthetic oligonucleotide
cucguaauggcgaugucca

SEQ ID NO: 263328 - RNA, 19 nt, Artificial Sequence
  Description of Artificial Sequence: Synthetic oligonucleotide
cuuauuuccuuccuaaggu

SEQ ID NO: 263329 - RNA, 19 nt, Artificial Sequence
  Description of Artificial Sequence: Synthetic oligonucleotide
uggugugacaaguacuuua

SEQ ID NO: 263330 - RNA, 19 nt, Artificial Sequence
  Description of Artificial Sequence: Synthetic oligonucleotide
aagaucagagguuguucau

SEQ ID NO: 263331 - RNA, 19 nt, Artificial Sequence
  Description of Artificial Sequence: Synthetic oligonucleotide
uuuuaauggcagaguaaua

SEQ ID NO: 263332 - RNA, 19 nt, Artificial Sequence
  Description of Artificial Sequence: Synthetic oligonucleotide
gaugaggcaaagugaccug

SEQ ID NO: 263333 - RNA, 19 nt, Artificial Sequence
  Description of Artificial Sequence: Synthetic oligonucleotide
uuggcaaauggaugaggca

SEQ ID NO: 263334 - RNA, 19 nt, Artificial Sequence
  Description of Artificial Sequence: Synthetic oligonucleotide
uuauagugaguuucacaau

SEQ ID NO: 263335 - RNA, 19 nt, Artificial Sequence
  Description of Artificial Sequence: Synthetic oligonucleotide
cuauuuccagugagguccg

SEQ ID NO: 263336 - RNA, 19 nt, Artificial Sequence
  Description of Artificial Sequence: Synthetic oligonucleotide
cugauuauagugaguuuca

SEQ ID NO: 263337 - RNA, 19 nt, Artificial Sequence
  Description of Artificial Sequence: Synthetic oligonucleotide
uggaucaaaugaaguaaua

SEQ ID NO: 263338 - RNA, 19 nt, Artificial Sequence
  Description of Artificial Sequence: Synthetic oligonucleotide
uuaccaagucacacuugca

SEQ ID NO: 263339 - RNA, 19 nt, Artificial Sequence
  Description of Artificial Sequence: Synthetic oligonucleotide
ucaaugggccuccgacagg

SEQ ID NO: 263340 - RNA, 19 nt, Artificial Sequence
  Description of Artificial Sequence: Synthetic oligonucleotide
agaacuuauuuccuuccua

SEQ ID NO: 263341 - RNA, 19 nt, Artificial Sequence
  Description of Artificial Sequence: Synthetic oligonucleotide
caauaggccaagcccuucc

SEQ ID NO: 263342 - RNA, 19 nt, Artificial Sequence
  Description of Artificial Sequence: Synthetic oligonucleotide
agggugauacgggucauuc

SEQ ID NO: 263343 - RNA, 19 nt, Artificial Sequence
  Description of Artificial Sequence: Synthetic oligonucleotide
guaacauguuagcagcaga

SEQ ID NO: 263344 - RNA, 19 nt, Artificial Sequence
  Description of Artificial Sequence: Synthetic oligonucleotide
uggaugaggcaaagugacc

SEQ ID NO: 263345 - RNA, 19 nt, Artificial Sequence
  Description of Artificial Sequence: Synthetic oligonucleotide
uaaggcuggugugacaagu

SEQ ID NO: 263346 - RNA, 19 nt, Artificial Sequence
  Description of Artificial Sequence: Synthetic oligonucleotide
gcauagugaguuuauauaa

SEQ ID NO: 263347 - RNA, 19 nt, Artificial Sequence
  Description of Artificial Sequence: Synthetic oligonucleotide
aggaacuacaccaagucuu

SEQ ID NO: 263348 - RNA, 19 nt, Artificial Sequence
  Description of Artificial Sequence: Synthetic oligonucleotide
ccaucuuaucaugacaugg

SEQ ID NO: 263349 - RNA, 19 nt, Artificial Sequence
  Description of Artificial Sequence: Synthetic oligonucleotide
uuaucaugacauggcagac

SEQ ID NO: 263350 - RNA, 19 nt, Artificial Sequence
  Description of Artificial Sequence: Synthetic oligonucleotide
accguaaccuaggaaugac

SEQ ID NO: 263351 - RNA, 19 nt, Artificial Sequence
  Description of Artificial Sequence: Synthetic oligonucleotide
ugauuauagugaguuucac

SEQ ID NO: 263352 - RNA, 19 nt, Artificial Sequence
  Description of Artificial Sequence: Synthetic oligonucleotide
ugcuuuucugcucucuauu

SEQ ID NO: 263353 - RNA, 19 nt, Artificial Sequence
  Description of Artificial Sequence: Synthetic oligonucleotide
acaggcucaggccauguau

SEQ ID NO: 263354 - RNA, 19 nt, Artificial Sequence
  Description of Artificial Sequence: Synthetic oligonucleotide
acuuaaaacucuccaucuu

SEQ ID NO: 263355 - RNA, 19 nt, Artificial Sequence
  Description of Artificial Sequence: Synthetic oligonucleotide
ucagcuacuuuggcaaaug

SEQ ID NO: 263356 - RNA, 19 nt, Artificial Sequence
  Description of Artificial Sequence: Synthetic oligonucleotide
cucaugacaaccuuccugu

SEQ ID NO: 263357 - RNA, 19 nt, Artificial Sequence
  Description of Artificial Sequence: Synthetic oligonucleotide
cuaugacacgguugcagug

SEQ ID NO: 263358 - RNA, 19 nt, Artificial Sequence
  Description of Artificial Sequence: Synthetic oligonucleotide
cauagugaguuuauauaaa

SEQ ID NO: 263359 - RNA, 19 nt, Artificial Sequence
  Description of Artificial Sequence: Synthetic oligonucleotide
gagaggugccaucucuagc

SEQ ID NO: 263360 - RNA, 19 nt, Artificial Sequence
  Description of Artificial Sequence: Synthetic oligonucleotide
agcauguaaaugcuugcuu

SEQ ID NO: 263361 - RNA, 19 nt, Artificial Sequence
  Description of Artificial Sequence: Synthetic oligonucleotide
agcucaaguaucauguuau

SEQ ID NO: 263362 - RNA, 19 nt, Artificial Sequence
  Description of Artificial Sequence: Synthetic oligonucleotide
gaauauuaucagccuaugu

SEQ ID NO: 263363 - RNA, 19 nt, Artificial Sequence
  Description of Artificial Sequence: Synthetic oligonucleotide
caaugggccuccgacaggc

SEQ ID NO: 263364 - RNA, 19 nt, Artificial Sequence
  Description of Artificial Sequence: Synthetic oligonucleotide
aaggacgacacaggugucu

SEQ ID NO: 263365 - RNA, 19 nt, Artificial Sequence
  Description of Artificial Sequence: Synthetic oligonucleotide
ucugcuuguggggaugucu

SEQ ID NO: 263366 - RNA, 19 nt, Artificial Sequence
  Description of Artificial Sequence: Synthetic oligonucleotide
cuccacgugccauugcuug

SEQ ID NO: 263367 - RNA, 19 nt, Artificial Sequence
  Description of Artificial Sequence: Synthetic oligonucleotide
auaaaguagcugguuacaa

SEQ ID NO: 263368 - RNA, 19 nt, Artificial Sequence
  Description of Artificial Sequence: Synthetic oligonucleotide
ccuaaauucguguauaaua

SEQ ID NO: 263369 - RNA, 19 nt, Artificial Sequence
  Description of Artificial Sequence: Synthetic oligonucleotide
uucacuacucgcccuucaa

SEQ ID NO: 263370 - RNA, 19 nt, Artificial Sequence
  Description of Artificial Sequence: Synthetic oligonucleotide
cuuuauggcaaagcaauaa

SEQ ID NO: 263371 - RNA, 19 nt, Artificial Sequence
  Description of Artificial Sequence: Synthetic oligonucleotide
cacaccguaaccuaggaau

SEQ ID NO: 263372 - RNA, 19 nt, Artificial Sequence
  Description of Artificial Sequence: Synthetic oligonucleotide
gugcauaacgucauaauua

SEQ ID NO: 263373 - RNA, 19 nt, Artificial Sequence
  Description of Artificial Sequence: Synthetic oligonucleotide
uaagcaccaaagguauaca

SEQ ID NO: 263374 - RNA, 19 nt, Artificial Sequence
  Description of Artificial Sequence: Synthetic oligonucleotide
cagcuacuuuggcaaaugg

SEQ ID NO: 263375 - RNA, 19 nt, Artificial Sequence
  Description of Artificial Sequence: Synthetic oligonucleotide
aucagccuaugucaaaguu

SEQ ID NO: 263376 - RNA, 19 nt, Artificial Sequence
  Description of Artificial Sequence: Synthetic oligonucleotide
gaguaauagcauccugaga

SEQ ID NO: 263377 - RNA, 19 nt, Artificial Sequence
  Description of Artificial Sequence: Synthetic oligonucleotide
aaguaacauguuagcagca

SEQ ID NO: 263378 - RNA, 19 nt, Artificial Sequence
  Description of Artificial Sequence: Synthetic oligonucleotide
cuaucuuauaguagauaaa

SEQ ID NO: 263379 - RNA, 19 nt, Artificial Sequence
  Description of Artificial Sequence: Synthetic oligonucleotide
uggcuagaagagagaacca

SEQ ID NO: 263380 - RNA, 19 nt, Artificial Sequence
  Description of Artificial Sequence: Synthetic oligonucleotide
ucacuacucgcccuucaau

SEQ ID NO: 263381 - RNA, 19 nt, Artificial Sequence
  Description of Artificial Sequence: Synthetic oligonucleotide
gcaguuagcuccuucccgc

SEQ ID NO: 263382 - RNA, 19 nt, Artificial Sequence
  Description of Artificial Sequence: Synthetic oligonucleotide
uccuaaggucucaucuagu

SEQ ID NO: 263383 - RNA, 19 nt, Artificial Sequence
  Description of Artificial Sequence: Synthetic oligonucleotide
gauacaccuuuagagugga

SEQ ID NO: 263384 - RNA, 19 nt, Artificial Sequence
  Description of Artificial Sequence: Synthetic oligonucleotide
gugagguccguuaagaacu

SEQ ID NO: 263385 - RNA, 19 nt, Artificial Sequence
  Description of Artificial Sequence: Synthetic oligonucleotide
ugucugccggcauucuuga

SEQ ID NO: 263386 - RNA, 19 nt, Artificial Sequence
  Description of Artificial Sequence: Synthetic oligonucleotide
agacuacuaugggagucac

SEQ ID NO: 263387 - RNA, 19 nt, Artificial Sequence
  Description of Artificial Sequence: Synthetic oligonucleotide
cuagacuacaaguuacacu

SEQ ID NO: 263388 - RNA, 19 nt, Artificial Sequence
  Description of Artificial Sequence: Synthetic oligonucleotide
cuuacuacccucuuucaau

SEQ ID NO: 263389 - RNA, 19 nt, Artificial Sequence
  Description of Artificial Sequence: Synthetic oligonucleotide
uuugcauagugaguuuaua

SEQ ID NO: 263390 - RNA, 19 nt, Artificial Sequence
  Description of Artificial Sequence: Synthetic oligonucleotide
gagacuacuaugggaguca

SEQ ID NO: 263391 - RNA, 19 nt, Artificial Sequence
  Description of Artificial Sequence: Synthetic oligonucleotide
auacacaucuugauaacuu

SEQ ID NO: 263392 - RNA, 19 nt, Artificial Sequence
  Description of Artificial Sequence: Synthetic oligonucleotide
agguccuaaggcuggugug

SEQ ID NO: 263393 - RNA, 19 nt, Artificial Sequence
  Description of Artificial Sequence: Synthetic oligonucleotide
acgacacaggugucugccg

SEQ ID NO: 263394 - RNA, 19 nt, Artificial Sequence
  Description of Artificial Sequence: Synthetic oligonucleotide
ucacaccguaaccuaggaa

SEQ ID NO: 263395 - RNA, 19 nt, Artificial Sequence
  Description of Artificial Sequence: Synthetic oligonucleotide
cuacaaguuacacuugccu

SEQ ID NO: 263396 - RNA, 19 nt, Artificial Sequence
  Description of Artificial Sequence: Synthetic oligonucleotide
agcuacuuuggcaaaugga

SEQ ID NO: 263397 - RNA, 19 nt, Artificial Sequence
  Description of Artificial Sequence: Synthetic oligonucleotide
cagcaguuagcuccuuccc

SEQ ID NO: 263398 - RNA, 19 nt, Artificial Sequence
  Description of Artificial Sequence: Synthetic oligonucleotide
cuccaaugacauccacacg

SEQ ID NO: 263399 - RNA, 19 nt, Artificial Sequence
  Description of Artificial Sequence: Synthetic oligonucleotide
agauguucacuggcaaaug

SEQ ID NO: 263400 - RNA, 19 nt, Artificial Sequence
  Description of Artificial Sequence: Synthetic oligonucleotide
uauucacugcuugccauua

SEQ ID NO: 263401 - RNA, 19 nt, Artificial Sequence
  Description of Artificial Sequence: Synthetic oligonucleotide
gcucucuauuuccagugag

SEQ ID NO: 263402 - RNA, 19 nt, Artificial Sequence
  Description of Artificial Sequence: Synthetic oligonucleotide
ggcuauauacacaucuuga

SEQ ID NO: 263403 - RNA, 19 nt, Artificial Sequence
  Description of Artificial Sequence: Synthetic oligonucleotide
acaauaggccaagcccuuc

SEQ ID NO: 263404 - RNA, 19 nt, Artificial Sequence
  Description of Artificial Sequence: Synthetic oligonucleotide
cuaugggagucaccauagc

SEQ ID NO: 263405 - RNA, 19 nt, Artificial Sequence
  Description of Artificial Sequence: Synthetic oligonucleotide
auaaugcuuugaacaccac

SEQ ID NO: 263406 - RNA, 19 nt, Artificial Sequence
  Description of Artificial Sequence: Synthetic oligonucleotide
gguuggguuggccacccag

SEQ ID NO: 263407 - RNA, 19 nt, Artificial Sequence
  Description of Artificial Sequence: Synthetic oligonucleotide
acaccguaaccuaggaaug

SEQ ID NO: 263408 - RNA, 19 nt, Artificial Sequence
  Description of Artificial Sequence: Synthetic oligonucleotide
uggcgauguccaagaaaug

SEQ ID NO: 263409 - RNA, 19 nt, Artificial Sequence
  Description of Artificial Sequence: Synthetic oligonucleotide
uguuggcuauauacacauc

SEQ ID NO: 263410 - RNA, 19 nt, Artificial Sequence
  Description of Artificial Sequence: Synthetic oligonucleotide
aucucacaccguaaccuag

SEQ ID NO: 263411 - RNA, 19 nt, Artificial Sequence
  Description of Artificial Sequence: Synthetic oligonucleotide
gucacaucgaaagcacuca

SEQ ID NO: 263412 - RNA, 19 nt, Artificial Sequence
  Description of Artificial Sequence: Synthetic oligonucleotide
acacuugccuaaauucgug

SEQ ID NO: 263413 - RNA, 19 nt, Artificial Sequence
  Description of Artificial Sequence: Synthetic oligonucleotide
auuucagauugccccuaaa

SEQ ID NO: 263414 - RNA, 19 nt, Artificial Sequence
  Description of Artificial Sequence: Synthetic oligonucleotide
agacccuagacuacaaguu

SEQ ID NO: 263415 - RNA, 19 nt, Artificial Sequence
  Description of Artificial Sequence: Synthetic oligonucleotide
uuuaccaauugagcucuuu

SEQ ID NO: 263416 - RNA, 19 nt, Artificial Sequence
  Description of Artificial Sequence: Synthetic oligonucleotide
cuugaguguuaauuuggua

SEQ ID NO: 263417 - RNA, 19 nt, Artificial Sequence
  Description of Artificial Sequence: Synthetic oligonucleotide
uggguuggccacccaggga

SEQ ID NO: 263418 - RNA, 19 nt, Artificial Sequence
  Description of Artificial Sequence: Synthetic oligonucleotide
acuuggaaucagcuacuuu

SEQ ID NO: 263419 - RNA, 19 nt, Artificial Sequence
  Description of Artificial Sequence: Synthetic oligonucleotide
gugauacgggucauucuug

SEQ ID NO: 263420 - RNA, 19 nt, Artificial Sequence
  Description of Artificial Sequence: Synthetic oligonucleotide
ccuuuucacguauuaugac

SEQ ID NO: 263421 - RNA, 19 nt, Artificial Sequence
  Description of Artificial Sequence: Synthetic oligonucleotide
ugguuacaaguuaguuauc

SEQ ID NO: 263422 - RNA, 19 nt, Artificial Sequence
  Description of Artificial Sequence: Synthetic oligonucleotide
gagguuguucaucaaugau

SEQ ID NO: 263423 - RNA, 19 nt, Artificial Sequence
  Description of Artificial Sequence: Synthetic oligonucleotide
auagcugauuauagugagu

SEQ ID NO: 263424 - RNA, 19 nt, Artificial Sequence
  Description of Artificial Sequence: Synthetic oligonucleotide
cagacuggcuucaugucaa

SEQ ID NO: 263425 - RNA, 19 nt, Artificial Sequence
  Description of Artificial Sequence: Synthetic oligonucleotide
acggagagaggugccaucu

SEQ ID NO: 263426 - RNA, 19 nt, Artificial Sequence
  Description of Artificial Sequence: Synthetic oligonucleotide
agcacauuauugauacaau

SEQ ID NO: 263427 - RNA, 19 nt, Artificial Sequence
  Description of Artificial Sequence: Synthetic oligonucleotide
aggacgacacaggugucug

SEQ ID NO: 263428 - RNA, 19 nt, Artificial Sequence
  Description of Artificial Sequence: Synthetic oligonucleotide
ggagucaccauagccagca

SEQ ID NO: 263429 - RNA, 19 nt, Artificial Sequence
  Description of Artificial Sequence: Synthetic oligonucleotide
gcgauguccaagaaauggc

SEQ ID NO: 263430 - RNA, 19 nt, Artificial Sequence
  Description of Artificial Sequence: Synthetic oligonucleotide
cagagaccacaucaccuuc

SEQ ID NO: 263431 - RNA, 19 nt, Artificial Sequence
  Description of Artificial Sequence: Synthetic oligonucleotide
ugagguccguuaagaacuu

SEQ ID NO: 263432 - RNA, 19 nt, Artificial Sequence
  Description of Artificial Sequence: Synthetic oligonucleotide
accuuuagaguggaucaaa

SEQ ID NO: 263433 - RNA, 19 nt, Artificial Sequence
  Description of Artificial Sequence: Synthetic oligonucleotide
ucaugacauggcagacagu

SEQ ID NO: 263434 - RNA, 19 nt, Artificial Sequence
  Description of Artificial Sequence: Synthetic oligonucleotide
agccuaugucaaaguuucc

SEQ ID NO: 263435 - RNA, 19 nt, Artificial Sequence
  Description of Artificial Sequence: Synthetic oligonucleotide
gccauuauuagcugacaaa

SEQ ID NO: 263436 - RNA, 19 nt, Artificial Sequence
  Description of Artificial Sequence: Synthetic oligonucleotide
uucuugcagacuggcuuca

SEQ ID NO: 263437 - RNA, 19 nt, Artificial Sequence
  Description of Artificial Sequence: Synthetic oligonucleotide
uagguuggguuggccaccc

SEQ ID NO: 263438 - RNA, 19 nt, Artificial Sequence
  Description of Artificial Sequence: Synthetic oligonucleotide
guuucacaauaggccaagc

SEQ ID NO: 263439 - RNA, 19 nt, Artificial Sequence
  Description of Artificial Sequence: Synthetic oligonucleotide
uccuaaggcuggugugaca

SEQ ID NO: 263440 - RNA, 19 nt, Artificial Sequence
  Description of Artificial Sequence: Synthetic oligonucleotide
guuaagaacuuagcaucaa

SEQ ID NO: 263441 - RNA, 19 nt, Artificial Sequence
  Description of Artificial Sequence: Synthetic oligonucleotide
aucugaaaacagaaaugua

SEQ ID NO: 263442 - RNA, 19 nt, Artificial Sequence
  Description of Artificial Sequence: Synthetic oligonucleotide
ccccauuacauuaggauaa

SEQ ID NO: 263443 - RNA, 19 nt, Artificial Sequence
  Description of Artificial Sequence: Synthetic oligonucleotide
auacagcaauggcugcuau

SEQ ID NO: 263444 - RNA, 19 nt, Artificial Sequence
  Description of Artificial Sequence: Synthetic oligonucleotide
gcuacuuuggcaaauggau

SEQ ID NO: 263445 - RNA, 19 nt, Artificial Sequence
  Description of Artificial Sequence: Synthetic oligonucleotide
auguaucuccagaguauga

SEQ ID NO: 263446 - RNA, 19 nt, Artificial Sequence
  Description of Artificial Sequence: Synthetic oligonucleotide
ggaugaggcaaagugaccu

SEQ ID NO: 263447 - RNA, 19 nt, Artificial Sequence
  Description of Artificial Sequence: Synthetic oligonucleotide
uuccucucguaauggcgau

SEQ ID NO: 263448 - RNA, 19 nt, Artificial Sequence
  Description of Artificial Sequence: Synthetic oligonucleotide
aguaugagggaagcaugua

SEQ ID NO: 263449 - RNA, 19 nt, Artificial Sequence
  Description of Artificial Sequence: Synthetic oligonucleotide
ggugauacgggucauucuu

SEQ ID NO: 263450 - RNA, 19 nt, Artificial Sequence
  Description of Artificial Sequence: Synthetic oligonucleotide
ucguaauggcgauguccaa

SEQ ID NO: 263451 - RNA, 19 nt, Artificial Sequence
  Description of Artificial Sequence: Synthetic oligonucleotide
ucuggccuuuucacguauu

SEQ ID NO: 263452 - RNA, 19 nt, Artificial Sequence
  Description of Artificial Sequence: Synthetic oligonucleotide
caucucacaccguaaccua

SEQ ID NO: 263453 - RNA, 19 nt, Artificial Sequence
  Description of Artificial Sequence: Synthetic oligonucleotide
cuacaccaagucuuugucu

SEQ ID NO: 263454 - RNA, 19 nt, Artificial Sequence
  Description of Artificial Sequence: Synthetic oligonucleotide
ucccgcaguuggcacaguu

SEQ ID NO: 263455 - RNA, 19 nt, Artificial Sequence
  Description of Artificial Sequence: Synthetic oligonucleotide
ucgcccuucaaugggccuc

SEQ ID NO: 263456 - RNA, 19 nt, Artificial Sequence
  Description of Artificial Sequence: Synthetic oligonucleotide
ccuagacuacaaguuacac

SEQ ID NO: 263457 - RNA, 19 nt, Artificial Sequence
  Description of Artificial Sequence: Synthetic oligonucleotide
gaaugaccucuaacucaug

SEQ ID NO: 263458 - RNA, 19 nt, Artificial Sequence
  Description of Artificial Sequence: Synthetic oligonucleotide
cucacaccguaaccuagga

SEQ ID NO: 263459 - RNA, 19 nt, Artificial Sequence
  Description of Artificial Sequence: Synthetic oligonucleotide
uccucucguaauggcgaug

SEQ ID NO: 263460 - RNA, 19 nt, Artificial Sequence
  Description of Artificial Sequence: Synthetic oligonucleotide
gcaaaguguuaauaaugcu

SEQ ID NO: 263461 - RNA, 19 nt, Artificial Sequence
  Description of Artificial Sequence: Synthetic oligonucleotide
agacaauuuuaaacugcua

SEQ ID NO: 263462 - RNA, 19 nt, Artificial Sequence
  Description of Artificial Sequence: Synthetic oligonucleotide
gccggcauucuugacaaac

SEQ ID NO: 263463 - RNA, 19 nt, Artificial Sequence
  Description of Artificial Sequence: Synthetic oligonucleotide
ggauaacuaaggaccaaaa

SEQ ID NO: 263464 - RNA, 19 nt, Artificial Sequence
  Description of Artificial Sequence: Synthetic oligonucleotide
accuaggaaugaccucuaa

SEQ ID NO: 263465 - RNA, 19 nt, Artificial Sequence
  Description of Artificial Sequence: Synthetic oligonucleotide
cguaauggcgauguccaag

SEQ ID NO: 263466 - RNA, 19 nt, Artificial Sequence
  Description of Artificial Sequence: Synthetic oligonucleotide
ggcuagaagagagaaccaa

SEQ ID NO: 263467 - RNA, 19 nt, Artificial Sequence
  Description of Artificial Sequence: Synthetic oligonucleotide
caggaacuacaccaagucu

SEQ ID NO: 263468 - RNA, 19 nt, Artificial Sequence
  Description of Artificial Sequence: Synthetic oligonucleotide
cccuuuauggcaaagcaau

SEQ ID NO: 263469 - RNA, 19 nt, Artificial Sequence
  Description of Artificial Sequence: Synthetic oligonucleotide
guggaucaaaugaaguaau

SEQ ID NO: 263470 - RNA, 19 nt, Artificial Sequence
  Description of Artificial Sequence: Synthetic oligonucleotide
uuccugccauuaagcuuac

SEQ ID NO: 263471 - RNA, 19 nt, Artificial Sequence
  Description of Artificial Sequence: Synthetic oligonucleotide
ccugagauauccuuuuagu

SEQ ID NO: 263472 - RNA, 19 nt, Artificial Sequence
  Description of Artificial Sequence: Synthetic oligonucleotide
cccaucuuaucaugacaug

SEQ ID NO: 263473 - RNA, 19 nt, Artificial Sequence
  Description of Artificial Sequence: Synthetic oligonucleotide
aaccuaggaaugaccucua

SEQ ID NO: 263474 - RNA, 19 nt, Artificial Sequence
  Description of Artificial Sequence: Synthetic oligonucleotide
cacuugccuaaauucgugu

SEQ ID NO: 263475 - RNA, 19 nt, Artificial Sequence
  Description of Artificial Sequence: Synthetic oligonucleotide
ggaaugaccucuaacucau

SEQ ID NO: 263476 - RNA, 19 nt, Artificial Sequence
  Description of Artificial Sequence: Synthetic oligonucleotide
caguuagcuccuucccgca

SEQ ID NO: 263477 - RNA, 19 nt, Artificial Sequence
  Description of Artificial Sequence: Synthetic oligonucleotide
cuaaggucucaucuaguuu

SEQ ID NO: 263478 - RNA, 19 nt, Artificial Sequence
  Description of Artificial Sequence: Synthetic oligonucleotide
caccguaaccuaggaauga

SEQ ID NO: 263479 - RNA, 19 nt, Artificial Sequence
  Description of Artificial Sequence: Synthetic oligonucleotide
caagugcugagacuacuau

SEQ ID NO: 263480 - RNA, 19 nt, Artificial Sequence
  Description of Artificial Sequence: Synthetic oligonucleotide
ccuuaacuuggaaucagcu

SEQ ID NO: 263481 - RNA, 19 nt, Artificial Sequence
  Description of Artificial Sequence: Synthetic oligonucleotide
ggacgacacaggugucugc

SEQ ID NO: 263482 - RNA, 19 nt, Artificial Sequence
  Description of Artificial Sequence: Synthetic oligonucleotide
cacuugcaggaauauuccu

SEQ ID NO: 263483 - RNA, 19 nt, Artificial Sequence
  Description of Artificial Sequence: Synthetic oligonucleotide
caucgaaagcacucaggau

SEQ ID NO: 263484 - RNA, 19 nt, Artificial Sequence
  Description of Artificial Sequence: Synthetic oligonucleotide
ccuaaggcuggugugacaa

SEQ ID NO: 263485 - RNA, 19 nt, Artificial Sequence
  Description of Artificial Sequence: Synthetic oligonucleotide
ucuugcagacuggcuucau

SEQ ID NO: 263486 - RNA, 19 nt, Artificial Sequence
  Description of Artificial Sequence: Synthetic oligonucleotide
cucucguaauggcgauguc

SEQ ID NO: 263487 - RNA, 19 nt, Artificial Sequence
  Description of Artificial Sequence: Synthetic oligonucleotide
cauuucuggcagauguauu

SEQ ID NO: 263488 - RNA, 19 nt, Artificial Sequence
  Description of Artificial Sequence: Synthetic oligonucleotide
cccuagacuacaaguuaca

SEQ ID NO: 263489 - RNA, 19 nt, Artificial Sequence
  Description of Artificial Sequence: Synthetic oligonucleotide
ccacgugccauugcuugcc

SEQ ID NO: 263490 - RNA, 19 nt, Artificial Sequence
  Description of Artificial Sequence: Synthetic oligonucleotide
ccauugcuugcccauggca

SEQ ID NO: 263491 - RNA, 19 nt, Artificial Sequence
  Description of Artificial Sequence: Synthetic oligonucleotide
cuucuaugacacgguugca

SEQ ID NO: 263492 - RNA, 19 nt, Artificial Sequence
  Description of Artificial Sequence: Synthetic oligonucleotide
caccuuuagaguggaucaa

SEQ ID NO: 263493 - RNA, 19 nt, Artificial Sequence
  Description of Artificial Sequence: Synthetic oligonucleotide
cuagcucaaguaucauguu

SEQ ID NO: 263494 - RNA, 19 nt, Artificial Sequence
  Description of Artificial Sequence: Synthetic oligonucleotide
ccaguggaaauuucucaua

SEQ ID NO: 263495 - RNA, 19 nt, Artificial Sequence
  Description of Artificial Sequence: Synthetic oligonucleotide
caccacagauagggacccc

SEQ ID NO: 263496 - RNA, 19 nt, Artificial Sequence
  Description of Artificial Sequence: Synthetic oligonucleotide
ccuuuauggcaaagcaaua

SEQ ID NO: 263497 - RNA, 19 nt, Artificial Sequence
  Description of Artificial Sequence: Synthetic oligonucleotide
ggcauucacuacucgcccu

SEQ ID NO: 263498 - RNA, 19 nt, Artificial Sequence
  Description of Artificial Sequence: Synthetic oligonucleotide
cacaauaggccaagcccuu

SEQ ID NO: 263499 - RNA, 19 nt, Artificial Sequence
  Description of Artificial Sequence: Synthetic oligonucleotide
cuacuaugggagucaccau

SEQ ID NO: 263500 - RNA, 19 nt, Artificial Sequence
  Description of Artificial Sequence: Synthetic oligonucleotide
gggugauacgggucauucu

SEQ ID NO: 263501 - RNA, 19 nt, Artificial Sequence
  Description of Artificial Sequence: Synthetic oligonucleotide
ugccggcauucuugacaaa

SEQ ID NO: 263502 - RNA, 19 nt, Artificial Sequence
  Description of Artificial Sequence: Synthetic oligonucleotide
ggcagaggucacaucgaaa

SEQ ID NO: 263503 - RNA, 19 nt, Artificial Sequence
  Description of Artificial Sequence: Synthetic oligonucleotide
auacaccuuuagaguggau

SEQ ID NO: 263504 - RNA, 19 nt, Artificial Sequence
  Description of Artificial Sequence: Synthetic oligonucleotide
gccuaaauucguguauaau

SEQ ID NO: 263505 - RNA, 19 nt, Artificial Sequence
  Description of Artificial Sequence: Synthetic oligonucleotide
ccucucguaauggcgaugu

SEQ ID NO: 263506 - RNA, 19 nt, Artificial Sequence
  Description of Artificial Sequence: Synthetic oligonucleotide
gcauggcauuucuggcaga

SEQ ID NO: 263507 - RNA, 19 nt, Artificial Sequence
  Description of Artificial Sequence: Synthetic oligonucleotide
gcucccgggcaucagcagu

SEQ ID NO: 263508 - RNA, 19 nt, Artificial Sequence
  Description of Artificial Sequence: Synthetic oligonucleotide
cucgcccuucaaugggccu

SEQ ID NO: 263509 - RNA, 19 nt, Artificial Sequence
  Description of Artificial Sequence: Synthetic oligonucleotide
gcucaaguaucauguuauu

SEQ ID NO: 263510 - RNA, 19 nt, Artificial Sequence
  Description of Artificial Sequence: Synthetic oligonucleotide
gcauccugagauauccuuu

SEQ ID NO: 263511 - RNA, 19 nt, Artificial Sequence
  Description of Artificial Sequence: Synthetic oligonucleotide
gccccugagaacccuuuau

SEQ ID NO: 263512 - RNA, 19 nt, Artificial Sequence
  Description of Artificial Sequence: Synthetic oligonucleotide
gcauaacgucauaauuaau

SEQ ID NO: 263513 - RNA, 19 nt, Artificial Sequence
  Description of Artificial Sequence: Synthetic oligonucleotide
cuuuaccaauugagcucuu

SEQ ID NO: 263514 - RNA, 19 nt, Artificial Sequence
  Description of Artificial Sequence: Synthetic oligonucleotide
cuggugugacaaguacuuu

SEQ ID NO: 263515 - RNA, 19 nt, Artificial Sequence
  Description of Artificial Sequence: Synthetic oligonucleotide
cagggugauacgggucauu

SEQ ID NO: 263516 - RNA, 19 nt, Artificial Sequence
  Description of Artificial Sequence: Synthetic oligonucleotide
gcacaggcucaggccaugu

SEQ ID NO: 263517 - RNA, 19 nt, Artificial Sequence
  Description of Artificial Sequence: Synthetic oligonucleotide
gcuccacgugccauugcuu

SEQ ID NO: 263518 - RNA, 19 nt, Artificial Sequence
  Description of Artificial Sequence: Synthetic oligonucleotide
aauacuauuccacugaguc

SEQ ID NO: 263519 - RNA, 19 nt, Artificial Sequence
  Description of Artificial Sequence: Synthetic oligonucleotide
gauuugaagaccuagcacg

SEQ ID NO: 263520 - RNA, 19 nt, Artificial Sequence
  Description of Artificial Sequence: Synthetic oligonucleotide
auuacaaccccacagcagc

SEQ ID NO: 263521 - RNA, 19 nt, Artificial Sequence
  Description of Artificial Sequence: Synthetic oligonucleotide
gaagaauuaauucacuacc

SEQ ID NO: 263522 - RNA, 19 nt, Artificial Sequence
  Description of Artificial Sequence: Synthetic oligonucleotide
acugauaacaaguuucuac

SEQ ID NO: 263523 - RNA, 19 nt, Artificial Sequence
  Description of Artificial Sequence: Synthetic oligonucleotide
aguauuacaaccccacagc

SEQ ID NO: 263524 - RNA, 19 nt, Artificial Sequence
  Description of Artificial Sequence: Synthetic oligonucleotide
uuucacaguaauuagauuc

SEQ ID NO: 263525 - RNA, 19 nt, Artificial Sequence
  Description of Artificial Sequence: Synthetic oligonucleotide
ucauagaugccgaauaaag

SEQ ID NO: 263526 - RNA, 19 nt, Artificial Sequence
  Description of Artificial Sequence: Synthetic oligonucleotide
uccugaaccgcauugaucc

SEQ ID NO: 263527 - RNA, 19 nt, Artificial Sequence
  Description of Artificial Sequence: Synthetic oligonucleotide
uaaaccaacgcauaugaga

SEQ ID NO: 263528 - RNA, 19 nt, Artificial Sequence
  Description of Artificial Sequence: Synthetic oligonucleotide
aauacauaaaugguuccuc

SEQ ID NO: 263529 - RNA, 19 nt, Artificial Sequence
  Description of Artificial Sequence: Synthetic oligonucleotide
uggacuacugauaacaagu

SEQ ID NO: 263530 - RNA, 19 nt, Artificial Sequence
  Description of Artificial Sequence: Synthetic oligonucleotide
cugauaacaaguuucuacc

SEQ ID NO: 263531 - RNA, 19 nt, Artificial Sequence
  Description of Artificial Sequence: Synthetic oligonucleotide
ucagcauaaaaccauggac

SEQ ID NO: 263532 - RNA, 19 nt, Artificial Sequence
  Description of Artificial Sequence: Synthetic oligonucleotide
aaauagaugaccauccugu

SEQ ID NO: 263533 - RNA, 19 nt, Artificial Sequence
  Description of Artificial Sequence: Synthetic oligonucleotide
uacuaugugaaacaccgug

SEQ ID NO: 263534 - RNA, 19 nt, Artificial Sequence
  Description of Artificial Sequence: Synthetic oligonucleotide
ucugauaauacugauuuga

SEQ ID NO: 263535 - RNA, 19 nt, Artificial Sequence
  Description of Artificial Sequence: Synthetic oligonucleotide
cauccugucacacaugugg

SEQ ID NO: 263536 - RNA, 19 nt, Artificial Sequence
  Description of Artificial Sequence: Synthetic oligonucleotide
uacuauuccacugagucag

SEQ ID NO: 263537 - RNA, 19 nt, Artificial Sequence
  Description of Artificial Sequence: Synthetic oligonucleotide
aaauggaaugaugccaucg

SEQ ID NO: 263538 - RNA, 19 nt, Artificial Sequence
  Description of Artificial Sequence: Synthetic oligonucleotide
uguguuaccgcacugacuu

SEQ ID NO: 263539 - RNA, 19 nt, Artificial Sequence
  Description of Artificial Sequence: Synthetic oligonucleotide
aagcaguaaaucaaacccc

SEQ ID NO: 263540 - RNA, 19 nt, Artificial Sequence
  Description of Artificial Sequence: Synthetic oligonucleotide
ugauaauacugauuugaag

SEQ ID NO: 263541 - RNA, 19 nt, Artificial Sequence
  Description of Artificial Sequence: Synthetic oligonucleotide
aaacgcuggaaucgauucc

SEQ ID NO: 263542 - RNA, 19 nt, Artificial Sequence
  Description of Artificial Sequence: Synthetic oligonucleotide
aauagaugaccauccuguc

SEQ ID NO: 263543 - RNA, 19 nt, Artificial Sequence
  Description of Artificial Sequence: Synthetic oligonucleotide
accaacgcauaugagaugc

SEQ ID NO: 263544 - RNA, 19 nt, Artificial Sequence
  Description of Artificial Sequence: Synthetic oligonucleotide
uucaacccaaguaacaacu

SEQ ID NO: 263545 - RNA, 19 nt, Artificial Sequence
  Description of Artificial Sequence: Synthetic oligonucleotide
guuagcagcauguucguag

SEQ ID NO: 263546 - RNA, 19 nt, Artificial Sequence
  Description of Artificial Sequence: Synthetic oligonucleotide
uuaaccauggaguguagga

SEQ ID NO: 263547 - RNA, 19 nt, Artificial Sequence
  Description of Artificial Sequence: Synthetic oligonucleotide
uagaugccgaauaaagucc

SEQ ID NO: 263548 - RNA, 19 nt, Artificial Sequence
  Description of Artificial Sequence: Synthetic oligonucleotide
uauaucuagucccacaauu

SEQ ID NO: 263549 - RNA, 19 nt, Artificial Sequence
  Description of Artificial Sequence: Synthetic oligonucleotide
caggucaaguauuacaacc

SEQ ID NO: 263550 - RNA, 19 nt, Artificial Sequence
  Description of Artificial Sequence: Synthetic oligonucleotide
gaaauagaugaccauccug

SEQ ID NO: 263551 - RNA, 19 nt, Artificial Sequence
  Description of Artificial Sequence: Synthetic oligonucleotide
aguauccucaacaauuuac

SEQ ID NO: 263552 - RNA, 19 nt, Artificial Sequence
  Description of Artificial Sequence: Synthetic oligonucleotide
acagguuauauuaacaucu

SEQ ID NO: 263553 - RNA, 19 nt, Artificial Sequence
  Description of Artificial Sequence: Synthetic oligonucleotide
ugauuugaagaccuagcac

SEQ ID NO: 263554 - RNA, 19 nt, Artificial Sequence
  Description of Artificial Sequence: Synthetic oligonucleotide
agugacuuaaccacgauga

SEQ ID NO: 263555 - RNA, 19 nt, Artificial Sequence
  Description of Artificial Sequence: Synthetic oligonucleotide
ugauacuaugugaaacacc

SEQ ID NO: 263556 - RNA, 19 nt, Artificial Sequence
  Description of Artificial Sequence: Synthetic oligonucleotide
uuaaccacgaugacugaac

SEQ ID NO: 263557 - RNA, 19 nt, Artificial Sequence
  Description of Artificial Sequence: Synthetic oligonucleotide
ugaacgggaaaagcgauag

SEQ ID NO: 263558 - RNA, 19 nt, Artificial Sequence
  Description of Artificial Sequence: Synthetic oligonucleotide
aaacaaugcuccaccgucc

SEQ ID NO: 263559 - RNA, 19 nt, Artificial Sequence
  Description of Artificial Sequence: Synthetic oligonucleotide
ugccgaauaaaguccgugg

SEQ ID NO: 263560 - RNA, 19 nt, Artificial Sequence
  Description of Artificial Sequence: Synthetic oligonucleotide
uccaccguccuuaaguggc

SEQ ID NO: 263561 - RNA, 19 nt, Artificial Sequence
  Description of Artificial Sequence: Synthetic oligonucleotide
aggucaaguauuacaaccc

SEQ ID NO: 263562 - RNA, 19 nt, Artificial Sequence
  Description of Artificial Sequence: Synthetic oligonucleotide
uugugagauagaagaaaag

SEQ ID NO: 263563 - RNA, 19 nt, Artificial Sequence
  Description of Artificial Sequence: Synthetic oligonucleotide
aaaccaacgcauaugagau

SEQ ID NO: 263564 - RNA, 19 nt, Artificial Sequence
  Description of Artificial Sequence: Synthetic oligonucleotide
ugagucagcauaaaaccau

SEQ ID NO: 263565 - RNA, 19 nt, Artificial Sequence
  Description of Artificial Sequence: Synthetic oligonucleotide
aaccgcauugauccuccgc

SEQ ID NO: 263566 - RNA, 19 nt, Artificial Sequence
  Description of Artificial Sequence: Synthetic oligonucleotide
aacgggaaaagcgauagaa

SEQ ID NO: 263567 - RNA, 19 nt, Artificial Sequence
  Description of Artificial Sequence: Synthetic oligonucleotide
gucagauauuggcagaaag

SEQ ID NO: 263568 - RNA, 19 nt, Artificial Sequence
  Description of Artificial Sequence: Synthetic oligonucleotide
uuauccuuggguacccuug

SEQ ID NO: 263569 - RNA, 19 nt, Artificial Sequence
  Description of Artificial Sequence: Synthetic oligonucleotide
augauacuaugugaaacac

SEQ ID NO: 263570 - RNA, 19 nt, Artificial Sequence
  Description of Artificial Sequence: Synthetic oligonucleotide
gaaacgcuggaaucgauuc

SEQ ID NO: 263571 - RNA, 19 nt, Artificial Sequence
  Description of Artificial Sequence: Synthetic oligonucleotide
acgcauaugagaugccagg

SEQ ID NO: 263572 - RNA, 19 nt, Artificial Sequence
  Description of Artificial Sequence: Synthetic oligonucleotide
uuuaaccauggaguguagg

SEQ ID NO: 263573 - RNA, 19 nt, Artificial Sequence
  Description of Artificial Sequence: Synthetic oligonucleotide
agcaaguaauacaucaauc

SEQ ID NO: 263574 - RNA, 19 nt, Artificial Sequence
  Description of Artificial Sequence: Synthetic oligonucleotide
caugauacuaugugaaaca

SEQ ID NO: 263575 - RNA, 19 nt, Artificial Sequence
  Description of Artificial Sequence: Synthetic oligonucleotide
acuaugugaaacaccgugg

SEQ ID NO: 263576 - RNA, 19 nt, Artificial Sequence
  Description of Artificial Sequence: Synthetic oligonucleotide
uggaaacaaugcuccaccg

SEQ ID NO: 263577 - RNA, 19 nt, Artificial Sequence
  Description of Artificial Sequence: Synthetic oligonucleotide
auauagaauggcccggcug

SEQ ID NO: 263578 - RNA, 19 nt, Artificial Sequence
  Description of Artificial Sequence: Synthetic oligonucleotide
auugauccuccgcuccucc

SEQ ID NO: 263579 - RNA, 19 nt, Artificial Sequence
  Description of Artificial Sequence: Synthetic oligonucleotide
uuagcagcauguucguagc

SEQ ID NO: 263580 - RNA, 19 nt, Artificial Sequence
  Description of Artificial Sequence: Synthetic oligonucleotide
ugauacaauaaaguucagu

SEQ ID NO: 263581 - RNA, 19 nt, Artificial Sequence
  Description of Artificial Sequence: Synthetic oligonucleotide
guggaaacaaugcuccacc

SEQ ID NO: 263582 - RNA, 19 nt, Artificial Sequence
  Description of Artificial Sequence: Synthetic oligonucleotide
uuucaacccaaguaacaac

SEQ ID NO: 263583 - RNA, 19 nt, Artificial Sequence
  Description of Artificial Sequence: Synthetic oligonucleotide
guguuauucauugauguca

SEQ ID NO: 263584 - RNA, 19 nt, Artificial Sequence
  Description of Artificial Sequence: Synthetic oligonucleotide
uucaugauaguggaaugga

SEQ ID NO: 263585 - RNA, 19 nt, Artificial Sequence
  Description of Artificial Sequence: Synthetic oligonucleotide
uaucuagucccacaauuua

SEQ ID NO: 263586 - RNA, 19 nt, Artificial Sequence
  Description of Artificial Sequence: Synthetic oligonucleotide
aggucaauggaguaguuuu

SEQ ID NO: 263587 - RNA, 19 nt, Artificial Sequence
  Description of Artificial Sequence: Synthetic oligonucleotide
gaaugcauguguguagcag

SEQ ID NO: 263588 - RNA, 19 nt, Artificial Sequence
  Description of Artificial Sequence: Synthetic oligonucleotide
aacaaugcuccaccguccu

SEQ ID NO: 263589 - RNA, 19 nt, Artificial Sequence
  Description of Artificial Sequence: Synthetic oligonucleotide
aucaugcauauagaauggc

SEQ ID NO: 263590 - RNA, 19 nt, Artificial Sequence
  Description of Artificial Sequence: Synthetic oligonucleotide
uacaaugguacagaauuuc

SEQ ID NO: 263591 - RNA, 19 nt, Artificial Sequence
  Description of Artificial Sequence: Synthetic oligonucleotide
aaagcgauagaaacaacuu

SEQ ID NO: 263592 - RNA, 19 nt, Artificial Sequence
  Description of Artificial Sequence: Synthetic oligonucleotide
gauuuaaccauggagugua

SEQ ID NO: 263593 - RNA, 19 nt, Artificial Sequence
  Description of Artificial Sequence: Synthetic oligonucleotide
caaguugguuuguagcggc

SEQ ID NO: 263594 - RNA, 19 nt, Artificial Sequence
  Description of Artificial Sequence: Synthetic oligonucleotide
aacgcuggaaucgauuccu

SEQ ID NO: 263595 - RNA, 19 nt, Artificial Sequence
  Description of Artificial Sequence: Synthetic oligonucleotide
cuuuacacagugaacggga

SEQ ID NO: 263596 - RNA, 19 nt, Artificial Sequence
  Description of Artificial Sequence: Synthetic oligonucleotide
augacugaacuguuggcca

SEQ ID NO: 263597 - RNA, 19 nt, Artificial Sequence
  Description of Artificial Sequence: Synthetic oligonucleotide
aacgcauaugagaugccag

SEQ ID NO: 263598 - RNA, 19 nt, Artificial Sequence
  Description of Artificial Sequence: Synthetic oligonucleotide
agcauaaaaccauggacua

SEQ ID NO: 263599 - RNA, 19 nt, Artificial Sequence
  Description of Artificial Sequence: Synthetic oligonucleotide
accgcauugauccuccgcu

SEQ ID NO: 263600 - RNA, 19 nt, Artificial Sequence
  Description of Artificial Sequence: Synthetic oligonucleotide
ucacggagauuuaaccaug

SEQ ID NO: 263601 - RNA, 19 nt, Artificial Sequence
  Description of Artificial Sequence: Synthetic oligonucleotide
gguuuguaaacaucaguug

SEQ ID NO: 263602 - RNA, 19 nt, Artificial Sequence
  Description of Artificial Sequence: Synthetic oligonucleotide
uuaugucaagaugaaacau

SEQ ID NO: 263603 - RNA, 19 nt, Artificial Sequence
  Description of Artificial Sequence: Synthetic oligonucleotide
uugaagaccuagcacggau

SEQ ID NO: 263604 - RNA, 19 nt, Artificial Sequence
  Description of Artificial Sequence: Synthetic oligonucleotide
uuauacuuucacaguaauu

SEQ ID NO: 263605 - RNA, 19 nt, Artificial Sequence
  Description of Artificial Sequence: Synthetic oligonucleotide
uauccuuggguacccuugc

SEQ ID NO: 263606 - RNA, 19 nt, Artificial Sequence
  Description of Artificial Sequence: Synthetic oligonucleotide
auacuauuccacugaguca

SEQ ID NO: 263607 - RNA, 19 nt, Artificial Sequence
  Description of Artificial Sequence: Synthetic oligonucleotide
ggccuaguaauuuagaaaa

SEQ ID NO: 263608 - RNA, 19 nt, Artificial Sequence
  Description of Artificial Sequence: Synthetic oligonucleotide
uggucauagaugccgaaua

SEQ ID NO: 263609 - RNA, 19 nt, Artificial Sequence
  Description of Artificial Sequence: Synthetic oligonucleotide
ucgguaaagguacuuccaa

SEQ ID NO: 263610 - RNA, 19 nt, Artificial Sequence
  Description of Artificial Sequence: Synthetic oligonucleotide
augacugaggaaccgugug

SEQ ID NO: 263611 - RNA, 19 nt, Artificial Sequence
  Description of Artificial Sequence: Synthetic oligonucleotide
aaagcaaguaauacaucaa

SEQ ID NO: 263612 - RNA, 19 nt, Artificial Sequence
  Description of Artificial Sequence: Synthetic oligonucleotide
uucuaaucuacagcacaag

SEQ ID NO: 263613 - RNA, 19 nt, Artificial Sequence
  Description of Artificial Sequence: Synthetic oligonucleotide
uguggaaacaaugcuccac

SEQ ID NO: 263614 - RNA, 19 nt, Artificial Sequence
  Description of Artificial Sequence: Synthetic oligonucleotide
aaguccgugggacuucggu

SEQ ID NO: 263615 - RNA, 19 nt, Artificial Sequence
  Description of Artificial Sequence: Synthetic oligonucleotide
uguuaccgcacugacuuug

SEQ ID NO: 263616 - RNA, 19 nt, Artificial Sequence
  Description of Artificial Sequence: Synthetic oligonucleotide
uaccuuauuuguuggcugu

SEQ ID NO: 263617 - RNA, 19 nt, Artificial Sequence
  Description of Artificial Sequence: Synthetic oligonucleotide
agguuauauuaacaucuga

SEQ ID NO: 263618 - RNA, 19 nt, Artificial Sequence
  Description of Artificial Sequence: Synthetic oligonucleotide
agaugccgaauaaaguccg

SEQ ID NO: 263619 - RNA, 19 nt, Artificial Sequence
  Description of Artificial Sequence: Synthetic oligonucleotide
uuuacacagugaacgggaa

SEQ ID NO: 263620 - RNA, 19 nt, Artificial Sequence
  Description of Artificial Sequence: Synthetic oligonucleotide
aaguugguuuguagcggcc

SEQ ID NO: 263621 - RNA, 19 nt, Artificial Sequence
  Description of Artificial Sequence: Synthetic oligonucleotide
cacggagauuuaaccaugg

SEQ ID NO: 263622 - RNA, 19 nt, Artificial Sequence
  Description of Artificial Sequence: Synthetic oligonucleotide
cuggaaucgauuccugaac

SEQ ID NO: 263623 - RNA, 19 nt, Artificial Sequence
  Description of Artificial Sequence: Synthetic oligonucleotide
acaauucaccauaauucag

SEQ ID NO: 263624 - RNA, 19 nt, Artificial Sequence
  Description of Artificial Sequence: Synthetic oligonucleotide
cagguuauauuaacaucug

SEQ ID NO: 263625 - RNA, 19 nt, Artificial Sequence
  Description of Artificial Sequence: Synthetic oligonucleotide
cagcauaaaaccauggacu

SEQ ID NO: 263626 - RNA, 19 nt, Artificial Sequence
  Description of Artificial Sequence: Synthetic oligonucleotide
ucaugagaagugucuggca

SEQ ID NO: 263627 - RNA, 19 nt, Artificial Sequence
  Description of Artificial Sequence: Synthetic oligonucleotide
aaccaacgcauaugagaug

SEQ ID NO: 263628 - RNA, 19 nt, Artificial Sequence
  Description of Artificial Sequence: Synthetic oligonucleotide
aacccaaguaacaacuuua

SEQ ID NO: 263629 - RNA, 19 nt, Artificial Sequence
  Description of Artificial Sequence: Synthetic oligonucleotide
uccaugauacuaugugaaa

SEQ ID NO: 263630 - RNA, 19 nt, Artificial Sequence
  Description of Artificial Sequence: Synthetic oligonucleotide
ugguguuauccuuggguac

SEQ ID NO: 263631 - RNA, 19 nt, Artificial Sequence
  Description of Artificial Sequence: Synthetic oligonucleotide
aagugacguugucugaaaa

SEQ ID NO: 263632 - RNA, 19 nt, Artificial Sequence
  Description of Artificial Sequence: Synthetic oligonucleotide
gccgaauaaaguccguggg

SEQ ID NO: 263633 - RNA, 19 nt, Artificial Sequence
  Description of Artificial Sequence: Synthetic oligonucleotide
auaugagaugccagggguc

SEQ ID NO: 263634 - RNA, 19 nt, Artificial Sequence
  Description of Artificial Sequence: Synthetic oligonucleotide
uuacaaccccacagcagca

SEQ ID NO: 263635 - RNA, 19 nt, Artificial Sequence
  Description of Artificial Sequence: Synthetic oligonucleotide
uaaccauggaguguaggaa

SEQ ID NO: 263636 - RNA, 19 nt, Artificial Sequence
  Description of Artificial Sequence: Synthetic oligonucleotide
cacucagcucugauaauac

SEQ ID NO: 263637 - RNA, 19 nt, Artificial Sequence
  Description of Artificial Sequence: Synthetic oligonucleotide
cagugacuuaaccacgaug

SEQ ID NO: 263638 - RNA, 19 nt, Artificial Sequence
  Description of Artificial Sequence: Synthetic oligonucleotide
aaacgaugaagagggcaca

SEQ ID NO: 263639 - RNA, 19 nt, Artificial Sequence
  Description of Artificial Sequence: Synthetic oligonucleotide
agcaaguauccucaacaau

SEQ ID NO: 263640 - RNA, 19 nt, Artificial Sequence
  Description of Artificial Sequence: Synthetic oligonucleotide
uuuccguuuccaugauucu

SEQ ID NO: 263641 - RNA, 19 nt, Artificial Sequence
  Description of Artificial Sequence: Synthetic oligonucleotide
ugaagaccuagcacggauu

SEQ ID NO: 263642 - RNA, 19 nt, Artificial Sequence
  Description of Artificial Sequence: Synthetic oligonucleotide
ucaacccaaguaacaacuu

SEQ ID NO: 263643 - RNA, 19 nt, Artificial Sequence
  Description of Artificial Sequence: Synthetic oligonucleotide
ugcuuaugggcagaguuua

SEQ ID NO: 263644 - RNA, 19 nt, Artificial Sequence
  Description of Artificial Sequence: Synthetic oligonucleotide
aaugaauaucaaacugaua

SEQ ID NO: 263645 - RNA, 19 nt, Artificial Sequence
  Description of Artificial Sequence: Synthetic oligonucleotide
aguccgucuguguuauuca

SEQ ID NO: 263646 - RNA, 19 nt, Artificial Sequence
  Description of Artificial Sequence: Synthetic oligonucleotide
acuuugacagccuggccua

SEQ ID NO: 263647 - RNA, 19 nt, Artificial Sequence
  Description of Artificial Sequence: Synthetic oligonucleotide
uguggaauguugaccgcuu

SEQ ID NO: 263648 - RNA, 19 nt, Artificial Sequence
  Description of Artificial Sequence: Synthetic oligonucleotide
cacgaugacugaacuguug

SEQ ID NO: 263649 - RNA, 19 nt, Artificial Sequence
  Description of Artificial Sequence: Synthetic oligonucleotide
cagugcaaguugcucauuc

SEQ ID NO: 263650 - RNA, 19 nt, Artificial Sequence
  Description of Artificial Sequence: Synthetic oligonucleotide
agucuacccagaguccuuc

SEQ ID NO: 263651 - RNA, 19 nt, Artificial Sequence
  Description of Artificial Sequence: Synthetic oligonucleotide
caguguugcuuaugggcag

SEQ ID NO: 263652 - RNA, 19 nt, Artificial Sequence
  Description of Artificial Sequence: Synthetic oligonucleotide
cauagaugccgaauaaagu

SEQ ID NO: 263653 - RNA, 19 nt, Artificial Sequence
  Description of Artificial Sequence: Synthetic oligonucleotide
cuuggguacccuugccuac

SEQ ID NO: 263654 - RNA, 19 nt, Artificial Sequence
  Description of Artificial Sequence: Synthetic oligonucleotide
gauuccugaaccgcauuga

SEQ ID NO: 263655 - RNA, 19 nt, Artificial Sequence
  Description of Artificial Sequence: Synthetic oligonucleotide
uuugaagaccuagcacgga

SEQ ID NO: 263656 - RNA, 19 nt, Artificial Sequence
  Description of Artificial Sequence: Synthetic oligonucleotide
cauaugagaugccaggggu

SEQ ID NO: 263657 - RNA, 19 nt, Artificial Sequence
  Description of Artificial Sequence: Synthetic oligonucleotide
cgggaaaagcgauagaaac

SEQ ID NO: 263658 - RNA, 19 nt, Artificial Sequence
  Description of Artificial Sequence: Synthetic oligonucleotide
ugaaguccgucuguguuau

SEQ ID NO: 263659 - RNA, 19 nt, Artificial Sequence
  Description of Artificial Sequence: Synthetic oligonucleotide
gguguuauccuuggguacc

SEQ ID NO: 263660 - RNA, 19 nt, Artificial Sequence
  Description of Artificial Sequence: Synthetic oligonucleotide
auaucuagucccacaauuu

SEQ ID NO: 263661 - RNA, 19 nt, Artificial Sequence
  Description of Artificial Sequence: Synthetic oligonucleotide
aaacaccguggaaacgaug

SEQ ID NO: 263662 - RNA, 19 nt, Artificial Sequence
  Description of Artificial Sequence: Synthetic oligonucleotide
gcauguucguagcaaguug

SEQ ID NO: 263663 - RNA, 19 nt, Artificial Sequence
  Description of Artificial Sequence: Synthetic oligonucleotide
ucacaguaauuagauucaa

SEQ ID NO: 263664 - RNA, 19 nt, Artificial Sequence
  Description of Artificial Sequence: Synthetic oligonucleotide
gcaaguugguuuguagcgg

SEQ ID NO: 263665 - RNA, 19 nt, Artificial Sequence
  Description of Artificial Sequence: Synthetic oligonucleotide
aguugguuuguagcggcca

SEQ ID NO: 263666 - RNA, 19 nt, Artificial Sequence
  Description of Artificial Sequence: Synthetic oligonucleotide
augccgaauaaaguccgug

SEQ ID NO: 263667 - RNA, 19 nt, Artificial Sequence
  Description of Artificial Sequence: Synthetic oligonucleotide
auguucaguaucaugcaua

SEQ ID NO: 263668 - RNA, 19 nt, Artificial Sequence
  Description of Artificial Sequence: Synthetic oligonucleotide
guacccuugccuacugaag

SEQ ID NO: 263669 - RNA, 19 nt, Artificial Sequence
  Description of Artificial Sequence: Synthetic oligonucleotide
uuaccgcacugacuuugac

SEQ ID NO: 263670 - RNA, 19 nt, Artificial Sequence
  Description of Artificial Sequence: Synthetic oligonucleotide
augggcaaauggaaugaug

SEQ ID NO: 263671 - RNA, 19 nt, Artificial Sequence
  Description of Artificial Sequence: Synthetic oligonucleotide
ugacagccuggccuaguaa

SEQ ID NO: 263672 - RNA, 19 nt, Artificial Sequence
  Description of Artificial Sequence: Synthetic oligonucleotide
gggaaaagcgauagaaaca

SEQ ID NO: 263673 - RNA, 19 nt, Artificial Sequence
  Description of Artificial Sequence: Synthetic oligonucleotide
cauggacuacugauaacaa

SEQ ID NO: 263674 - RNA, 19 nt, Artificial Sequence
  Description of Artificial Sequence: Synthetic oligonucleotide
aagccuauuucuagacaaa

SEQ ID NO: 263675 - RNA, 19 nt, Artificial Sequence
  Description of Artificial Sequence: Synthetic oligonucleotide
cuucaaucugacagcucca

SEQ ID NO: 263676 - RNA, 19 nt, Artificial Sequence
  Description of Artificial Sequence: Synthetic oligonucleotide
gugaauucauauaucuagu

SEQ ID NO: 263677 - RNA, 19 nt, Artificial Sequence
  Description of Artificial Sequence: Synthetic oligonucleotide
ccuucaugauaguggaaug

SEQ ID NO: 263678 - RNA, 19 nt, Artificial Sequence
  Description of Artificial Sequence: Synthetic oligonucleotide
gcgauagaaacaacuuuug

SEQ ID NO: 263679 - RNA, 19 nt, Artificial Sequence
  Description of Artificial Sequence: Synthetic oligonucleotide
auuuaaccauggaguguag

SEQ ID NO: 263680 - RNA, 19 nt, Artificial Sequence
  Description of Artificial Sequence: Synthetic oligonucleotide
ccauggacuacugauaaca

SEQ ID NO: 263681 - RNA, 19 nt, Artificial Sequence
  Description of Artificial Sequence: Synthetic oligonucleotide
acccuugccuacugaagaa

SEQ ID NO: 263682 - RNA, 19 nt, Artificial Sequence
  Description of Artificial Sequence: Synthetic oligonucleotide
accguccuuaaguggcucu

SEQ ID NO: 263683 - RNA, 19 nt, Artificial Sequence
  Description of Artificial Sequence: Synthetic oligonucleotide
cagcaaguauccucaacaa

SEQ ID NO: 263684 - RNA, 19 nt, Artificial Sequence
  Description of Artificial Sequence: Synthetic oligonucleotide
cugaaccgcauugauccuc

SEQ ID NO: 263685 - RNA, 19 nt, Artificial Sequence
  Description of Artificial Sequence: Synthetic oligonucleotide
gguggaccacaccagguca

SEQ ID NO: 263686 - RNA, 19 nt, Artificial Sequence
  Description of Artificial Sequence: Synthetic oligonucleotide
auguuaugucaagaugaaa

SEQ ID NO: 263687 - RNA, 19 nt, Artificial Sequence
  Description of Artificial Sequence: Synthetic oligonucleotide
caacgcauaugagaugcca

SEQ ID NO: 263688 - RNA, 19 nt, Artificial Sequence
  Description of Artificial Sequence: Synthetic oligonucleotide
aguguugcuuaugggcaga

SEQ ID NO: 263689 - RNA, 19 nt, Artificial Sequence
  Description of Artificial Sequence: Synthetic oligonucleotide
gaacgggaaaagcgauaga

SEQ ID NO: 263690 - RNA, 19 nt, Artificial Sequence
  Description of Artificial Sequence: Synthetic oligonucleotide
acgggaaaagcgauagaaa

SEQ ID NO: 263691 - RNA, 19 nt, Artificial Sequence
  Description of Artificial Sequence: Synthetic oligonucleotide
ucgauuccugaaccgcauu

SEQ ID NO: 263692 - RNA, 19 nt, Artificial Sequence
  Description of Artificial Sequence: Synthetic oligonucleotide
uguugcuuaugggcagagu

SEQ ID NO: 263693 - RNA, 19 nt, Artificial Sequence
  Description of Artificial Sequence: Synthetic oligonucleotide
gguacccuugccuacugaa

SEQ ID NO: 263694 - RNA, 19 nt, Artificial Sequence
  Description of Artificial Sequence: Synthetic oligonucleotide
ccaucccguaaauccaugc

SEQ ID NO: 263695 - RNA, 19 nt, Artificial Sequence
  Description of Artificial Sequence: Synthetic oligonucleotide
gcauauagaauggcccggc

SEQ ID NO: 263696 - RNA, 19 nt, Artificial Sequence
  Description of Artificial Sequence: Synthetic oligonucleotide
gcugguguuauccuugggu

SEQ ID NO: 263697 - RNA, 19 nt, Artificial Sequence
  Description of Artificial Sequence: Synthetic oligonucleotide
ccgaugguucaugaaacgc

SEQ ID NO: 263698 - RNA, 19 nt, Artificial Sequence
  Description of Artificial Sequence: Synthetic oligonucleotide
auacuaugugaaacaccgu

SEQ ID NO: 263699 - RNA, 19 nt, Artificial Sequence
  Description of Artificial Sequence: Synthetic oligonucleotide
cccaagcaguaaaucaaac

SEQ ID NO: 263700 - RNA, 19 nt, Artificial Sequence
  Description of Artificial Sequence: Synthetic oligonucleotide
ggcccgaugguucaugaaa

SEQ ID NO: 263701 - RNA, 19 nt, Artificial Sequence
  Description of Artificial Sequence: Synthetic oligonucleotide
ccaggucaaguauuacaac

SEQ ID NO: 263702 - RNA, 19 nt, Artificial Sequence
  Description of Artificial Sequence: Synthetic oligonucleotide
guguugcuuaugggcagag

SEQ ID NO: 263703 - RNA, 19 nt, Artificial Sequence
  Description of Artificial Sequence: Synthetic oligonucleotide
guaguguuccguuuccguu

SEQ ID NO: 263704 - RNA, 19 nt, Artificial Sequence
  Description of Artificial Sequence: Synthetic oligonucleotide
gcauaaaaccauggacuac

SEQ ID NO: 263705 - RNA, 19 nt, Artificial Sequence
  Description of Artificial Sequence: Synthetic oligonucleotide
aucgauuccugaaccgcau

SEQ ID NO: 263706 - RNA, 19 nt, Artificial Sequence
  Description of Artificial Sequence: Synthetic oligonucleotide
caucccguaaauccaugcu

SEQ ID NO: 263707 - RNA, 19 nt, Artificial Sequence
  Description of Artificial Sequence: Synthetic oligonucleotide
guuaccgcacugacuuuga

SEQ ID NO: 263708 - RNA, 19 nt, Artificial Sequence
  Description of Artificial Sequence: Synthetic oligonucleotide
ccguggaaacgaugaagag

SEQ ID NO: 263709 - RNA, 19 nt, Artificial Sequence
  Description of Artificial Sequence: Synthetic oligonucleotide
gaccuagcacggauugguc

SEQ ID NO: 263710 - RNA, 19 nt, Artificial Sequence
  Description of Artificial Sequence: Synthetic oligonucleotide
ccgaauaaaguccguggga

SEQ ID NO: 263711 - RNA, 19 nt, Artificial Sequence
  Description of Artificial Sequence: Synthetic oligonucleotide
cgauuccugaaccgcauug

SEQ ID NO: 263712 - RNA, 19 nt, Artificial Sequence
  Description of Artificial Sequence: Synthetic oligonucleotide
gcccgaugguucaugaaac

SEQ ID NO: 263713 - RNA, 19 nt, Artificial Sequence
  Description of Artificial Sequence: Synthetic oligonucleotide
guuauccuuggguacccuu

SEQ ID NO: 263714 - RNA, 19 nt, Artificial Sequence
  Description of Artificial Sequence: Synthetic oligonucleotide
ccaacgcauaugagaugcc

SEQ ID NO: 263715 - RNA, 19 nt, Artificial Sequence
  Description of Artificial Sequence: Synthetic oligonucleotide
uggggcccgaugguucaug

SEQ ID NO: 263716 - RNA, 19 nt, Artificial Sequence
  Description of Artificial Sequence: Synthetic oligonucleotide
gaaccgugugggugcaggu

SEQ ID NO: 263717 - RNA, 19 nt, Artificial Sequence
  Description of Artificial Sequence: Synthetic oligonucleotide
gaaacaccguggaaacgau

SEQ ID NO: 263718 - RNA, 19 nt, Artificial Sequence
  Description of Artificial Sequence: Synthetic oligonucleotide
gugaacgggaaaagcgaua

SEQ ID NO: 263719 - RNA, 19 nt, Artificial Sequence
  Description of Artificial Sequence: Synthetic oligonucleotide
gaugccgaauaaaguccgu

SEQ ID NO: 263720 - RNA, 19 nt, Artificial Sequence
  Description of Artificial Sequence: Synthetic oligonucleotide
cgucucgucugcaccggcg

SEQ ID NO: 263721 - RNA, 19 nt, Artificial Sequence
  Description of Artificial Sequence: Synthetic oligonucleotide
acgcuggaaucgauuccug

SEQ ID NO: 263722 - RNA, 19 nt, Artificial Sequence
  Description of Artificial Sequence: Synthetic oligonucleotide
ggccaccaaagugacagua

SEQ ID NO: 263723 - RNA, 19 nt, Artificial Sequence
  Description of Artificial Sequence: Synthetic oligonucleotide
guucaguaucaugcauaua

SEQ ID NO: 263724 - RNA, 19 nt, Artificial Sequence
  Description of Artificial Sequence: Synthetic oligonucleotide
ggccgggagcuccgucucg

SEQ ID NO: 263725 - RNA, 19 nt, Artificial Sequence
  Description of Artificial Sequence: Synthetic oligonucleotide
ccgcauugauccuccgcuc

SEQ ID NO: 263726 - RNA, 19 nt, Artificial Sequence
  Description of Artificial Sequence: Synthetic oligonucleotide
cuagcacggauuggucaua

SEQ ID NO: 263727 - RNA, 19 nt, Artificial Sequence
  Description of Artificial Sequence: Synthetic oligonucleotide
caugggcaaauggaaugau

SEQ ID NO: 263728 - RNA, 19 nt, Artificial Sequence
  Description of Artificial Sequence: Synthetic oligonucleotide
cgcuggaaucgauuccuga

SEQ ID NO: 263729 - RNA, 19 nt, Artificial Sequence
  Description of Artificial Sequence: Synthetic oligonucleotide
ccgucucgucugcaccggc

SEQ ID NO: 263730 - RNA, 19 nt, Artificial Sequence
  Description of Artificial Sequence: Synthetic oligonucleotide
ccacaaacaggugccaaau

SEQ ID NO: 263731 - RNA, 19 nt, Artificial Sequence
  Description of Artificial Sequence: Synthetic oligonucleotide
ggacuucgguaaagguacu

SEQ ID NO: 263732 - RNA, 19 nt, Artificial Sequence
  Description of Artificial Sequence: Synthetic oligonucleotide
ccugaaccgcauugauccu

SEQ ID NO: 263733 - RNA, 19 nt, Artificial Sequence
  Description of Artificial Sequence: Synthetic oligonucleotide
ccgugugggugcaggucaa

SEQ ID NO: 263734 - RNA, 19 nt, Artificial Sequence
  Description of Artificial Sequence: Synthetic oligonucleotide
gcccaucccguaaauccau

SEQ ID NO: 263735 - RNA, 19 nt, Artificial Sequence
  Description of Artificial Sequence: Synthetic oligonucleotide
gccgauggaggagggcacu

SEQ ID NO: 263736 - RNA, 19 nt, Artificial Sequence
  Description of Artificial Sequence: Synthetic oligonucleotide
ccagcccaacaauacuauu

SEQ ID NO: 263737 - RNA, 19 nt, Artificial Sequence
  Description of Artificial Sequence: Synthetic oligonucleotide
ccuccucgauguggaaaga

SEQ ID NO: 263738 - RNA, 19 nt, Artificial Sequence
  Description of Artificial Sequence: Synthetic oligonucleotide
ccguccuuaaguggcucuu

SEQ ID NO: 263739 - RNA, 19 nt, Artificial Sequence
  Description of Artificial Sequence: Synthetic oligonucleotide
uuaugggccaucaugaugg

SEQ ID NO: 263740 - RNA, 19 nt, Artificial Sequence
  Description of Artificial Sequence: Synthetic oligonucleotide
aaacauacuucccagcugg

SEQ ID NO: 263741 - RNA, 19 nt, Artificial Sequence
  Description of Artificial Sequence: Synthetic oligonucleotide
ucuacuauuguucaccagc

SEQ ID NO: 263742 - RNA, 19 nt, Artificial Sequence
  Description of Artificial Sequence: Synthetic oligonucleotide
aaaucggcacaucacagag

SEQ ID NO: 263743 - RNA, 19 nt, Artificial Sequence
  Description of Artificial Sequence: Synthetic oligonucleotide
ugugguguagcacagauua

SEQ ID NO: 263744 - RNA, 19 nt, Artificial Sequence
  Description of Artificial Sequence: Synthetic oligonucleotide
aaaacgcugcagcagccgc

SEQ ID NO: 263745 - RNA, 19 nt, Artificial Sequence
  Description of Artificial Sequence: Synthetic oligonucleotide
ugucuaugcgguuacacag

SEQ ID NO: 263746 - RNA, 19 nt, Artificial Sequence
  Description of Artificial Sequence: Synthetic oligonucleotide
ugacuagauacccaguuug

SEQ ID NO: 263747 - RNA, 19 nt, Artificial Sequence
  Description of Artificial Sequence: Synthetic oligonucleotide
agccucucgacccagagac

SEQ ID NO: 263748 - RNA, 19 nt, Artificial Sequence
  Description of Artificial Sequence: Synthetic oligonucleotide
uaugggaggucaaaguucu

SEQ ID NO: 263749 - RNA, 19 nt, Artificial Sequence
  Description of Artificial Sequence: Synthetic oligonucleotide
uuuaaggggcucaaugaca

SEQ ID NO: 263750 - RNA, 19 nt, Artificial Sequence
  Description of Artificial Sequence: Synthetic oligonucleotide
cuaaguacacgaaggggcg

SEQ ID NO: 263751 - RNA, 19 nt, Artificial Sequence
  Description of Artificial Sequence: Synthetic oligonucleotide
uauugagugucgaugggca

SEQ ID NO: 263752 - RNA, 19 nt, Artificial Sequence
  Description of Artificial Sequence: Synthetic oligonucleotide
ucugguuuaaggcccaacu

SEQ ID NO: 263753 - RNA, 19 nt, Artificial Sequence
  Description of Artificial Sequence: Synthetic oligonucleotide
auagccaguuaucacauca

SEQ ID NO: 263754 - RNA, 19 nt, Artificial Sequence
  Description of Artificial Sequence: Synthetic oligonucleotide
augacguccucaugcaagc

SEQ ID NO: 263755 - RNA, 19 nt, Artificial Sequence
  Description of Artificial Sequence: Synthetic oligonucleotide
caaugcaacaguugcggcg

SEQ ID NO: 263756 - RNA, 19 nt, Artificial Sequence
  Description of Artificial Sequence: Synthetic oligonucleotide
ucugagagaucuccaaaca

SEQ ID NO: 263757 - RNA, 19 nt, Artificial Sequence
  Description of Artificial Sequence: Synthetic oligonucleotide
auaguacccuuuaaggggc

SEQ ID NO: 263758 - RNA, 19 nt, Artificial Sequence
  Description of Artificial Sequence: Synthetic oligonucleotide
aacucgacccaccaugcug

SEQ ID NO: 263759 - RNA, 19 nt, Artificial Sequence
  Description of Artificial Sequence: Synthetic oligonucleotide
cagauuaugggccaucaug

SEQ ID NO: 263760 - RNA, 19 nt, Artificial Sequence
  Description of Artificial Sequence: Synthetic oligonucleotide
auauuauagccaguuauca

SEQ ID NO: 263761 - RNA, 19 nt, Artificial Sequence
  Description of Artificial Sequence: Synthetic oligonucleotide
ugcucauucccguucuagg

SEQ ID NO: 263762 - RNA, 19 nt, Artificial Sequence
  Description of Artificial Sequence: Synthetic oligonucleotide
gaucacauaggggacgcgg

SEQ ID NO: 263763 - RNA, 19 nt, Artificial Sequence
  Description of Artificial Sequence: Synthetic oligonucleotide
aguauugagugucgauggg

SEQ ID NO: 263764 - RNA, 19 nt, Artificial Sequence
  Description of Artificial Sequence: Synthetic oligonucleotide
gaugacguccucaugcaag

SEQ ID NO: 263765 - RNA, 19 nt, Artificial Sequence
  Description of Artificial Sequence: Synthetic oligonucleotide
gacgcggucacccaagcug

SEQ ID NO: 263766 - RNA, 19 nt, Artificial Sequence
  Description of Artificial Sequence: Synthetic oligonucleotide
cuuuaaggggcucaaugac

SEQ ID NO: 263767 - RNA, 19 nt, Artificial Sequence
  Description of Artificial Sequence: Synthetic oligonucleotide
caugaaccggaucucaaag

SEQ ID NO: 263768 - RNA, 19 nt, Artificial Sequence
  Description of Artificial Sequence: Synthetic oligonucleotide
ucuaugcgguuacacagca

SEQ ID NO: 263769 - RNA, 19 nt, Artificial Sequence
  Description of Artificial Sequence: Synthetic oligonucleotide
ucgaugucaaagcuaagua

SEQ ID NO: 263770 - RNA, 19 nt, Artificial Sequence
  Description of Artificial Sequence: Synthetic oligonucleotide
acaaggauucgucgcagag

SEQ ID NO: 263771 - RNA, 19 nt, Artificial Sequence
  Description of Artificial Sequence: Synthetic oligonucleotide
agccaguuaucacaucagg

SEQ ID NO: 263772 - RNA, 19 nt, Artificial Sequence
  Description of Artificial Sequence: Synthetic oligonucleotide
aaagggaagcgguccaccu

SEQ ID NO: 263773 - RNA, 19 nt, Artificial Sequence
  Description of Artificial Sequence: Synthetic oligonucleotide
agauuaugggccaucauga

SEQ ID NO: 263774 - RNA, 19 nt, Artificial Sequence
  Description of Artificial Sequence: Synthetic oligonucleotide
agaucuccaaacauggcag

SEQ ID NO: 263775 - RNA, 19 nt, Artificial Sequence
  Description of Artificial Sequence: Synthetic oligonucleotide
uugagugucgaugggcagg

SEQ ID NO: 263776 - RNA, 19 nt, Artificial Sequence
  Description of Artificial Sequence: Synthetic oligonucleotide
auaggggacgcggucaccc

SEQ ID NO: 263777 - RNA, 19 nt, Artificial Sequence
  Description of Artificial Sequence: Synthetic oligonucleotide
agcuaaguacacgaagggg

SEQ ID NO: 263778 - RNA, 19 nt, Artificial Sequence
  Description of Artificial Sequence: Synthetic oligonucleotide
gcuaaguacacgaaggggc

SEQ ID NO: 263779 - RNA, 19 nt, Artificial Sequence
  Description of Artificial Sequence: Synthetic oligonucleotide
ugcgcauguagaagauggg

SEQ ID NO: 263780 - RNA, 19 nt, Artificial Sequence
  Description of Artificial Sequence: Synthetic oligonucleotide
ugagcacgguuuugcagcg

SEQ ID NO: 263781 - RNA, 19 nt, Artificial Sequence
  Description of Artificial Sequence: Synthetic oligonucleotide
augucuaugcgguuacaca

SEQ ID NO: 263782 - RNA, 19 nt, Artificial Sequence
  Description of Artificial Sequence: Synthetic oligonucleotide
ucucgacccagagacauug

SEQ ID NO: 263783 - RNA, 19 nt, Artificial Sequence
  Description of Artificial Sequence: Synthetic oligonucleotide
agugugguguagcacagau

SEQ ID NO: 263784 - RNA, 19 nt, Artificial Sequence
  Description of Artificial Sequence: Synthetic oligonucleotide
acgaaggggcgcaauacgc

SEQ ID NO: 263785 - RNA, 19 nt, Artificial Sequence
  Description of Artificial Sequence: Synthetic oligonucleotide
uccacaugagccugcuugc

SEQ ID NO: 263786 - RNA, 19 nt, Artificial Sequence
  Description of Artificial Sequence: Synthetic oligonucleotide
accacaacacauccaccuc

SEQ ID NO: 263787 - RNA, 19 nt, Artificial Sequence
  Description of Artificial Sequence: Synthetic oligonucleotide
cugccguccauccaagacc

SEQ ID NO: 263788 - RNA, 19 nt, Artificial Sequence
  Description of Artificial Sequence: Synthetic oligonucleotide
gaugucuaugcgguuacac

SEQ ID NO: 263789 - RNA, 19 nt, Artificial Sequence
  Description of Artificial Sequence: Synthetic oligonucleotide
acaguugcggcgcuuggug

SEQ ID NO: 263790 - RNA, 19 nt, Artificial Sequence
  Description of Artificial Sequence: Synthetic oligonucleotide
ggagacaccaaaucggcac

SEQ ID NO: 263791 - RNA, 19 nt, Artificial Sequence
  Description of Artificial Sequence: Synthetic oligonucleotide
acauaggggacgcggucac

SEQ ID NO: 263792 - RNA, 19 nt, Artificial Sequence
  Description of Artificial Sequence: Synthetic oligonucleotide
uucgucgcagagaggaugu

SEQ ID NO: 263793 - RNA, 19 nt, Artificial Sequence
  Description of Artificial Sequence: Synthetic oligonucleotide
aaaauucgcagcaguggcu

SEQ ID NO: 263794 - RNA, 19 nt, Artificial Sequence
  Description of Artificial Sequence: Synthetic oligonucleotide
auagucugcggcugcucgg

SEQ ID NO: 263795 - RNA, 19 nt, Artificial Sequence
  Description of Artificial Sequence: Synthetic oligonucleotide
guauugagugucgaugggc

SEQ ID NO: 263796 - RNA, 19 nt, Artificial Sequence
  Description of Artificial Sequence: Synthetic oligonucleotide
cacgaccuugaccuguucg

SEQ ID NO: 263797 - RNA, 19 nt, Artificial Sequence
  Description of Artificial Sequence: Synthetic oligonucleotide
uggagcggagaccagucac

SEQ ID NO: 263798 - RNA, 19 nt, Artificial Sequence
  Description of Artificial Sequence: Synthetic oligonucleotide
uggagcaggguauccgaag

SEQ ID NO: 263799 - RNA, 19 nt, Artificial Sequence
  Description of Artificial Sequence: Synthetic oligonucleotide
agcguguguggucuccucg

SEQ ID NO: 263800 - RNA, 19 nt, Artificial Sequence
  Description of Artificial Sequence: Synthetic oligonucleotide
auugagugucgaugggcag

SEQ ID NO: 263801 - RNA, 19 nt, Artificial Sequence
  Description of Artificial Sequence: Synthetic oligonucleotide
cuacuauuguucaccagca

SEQ ID NO: 263802 - RNA, 19 nt, Artificial Sequence
  Description of Artificial Sequence: Synthetic oligonucleotide
augaaccggaucucaaagu

SEQ ID NO: 263803 - RNA, 19 nt, Artificial Sequence
  Description of Artificial Sequence: Synthetic oligonucleotide
caccuucaggguuugcgcg

SEQ ID NO: 263804 - RNA, 19 nt, Artificial Sequence
  Description of Artificial Sequence: Synthetic oligonucleotide
ucugcggcugcucggguca

SEQ ID NO: 263805 - RNA, 19 nt, Artificial Sequence
  Description of Artificial Sequence: Synthetic oligonucleotide
ucgucgagucaccaggccu

SEQ ID NO: 263806 - RNA, 19 nt, Artificial Sequence
  Description of Artificial Sequence: Synthetic oligonucleotide
caauacgcugccacugccc

SEQ ID NO: 263807 - RNA, 19 nt, Artificial Sequence
  Description of Artificial Sequence: Synthetic oligonucleotide
gagaugucuaugcgguuac

SEQ ID NO: 263808 - RNA, 19 nt, Artificial Sequence
  Description of Artificial Sequence: Synthetic oligonucleotide
agagaucuccaaacauggc

SEQ ID NO: 263809 - RNA, 19 nt, Artificial Sequence
  Description of Artificial Sequence: Synthetic oligonucleotide
cacgaaggggcgcaauacg

SEQ ID NO: 263810 - RNA, 19 nt, Artificial Sequence
  Description of Artificial Sequence: Synthetic oligonucleotide
uuuauuccgugucccucgu

SEQ ID NO: 263811 - RNA, 19 nt, Artificial Sequence
  Description of Artificial Sequence: Synthetic oligonucleotide
uacuauuguucaccagcac

SEQ ID NO: 263812 - RNA, 19 nt, Artificial Sequence
  Description of Artificial Sequence: Synthetic oligonucleotide
cacucgaugucaaagcuaa

SEQ ID NO: 263813 - RNA, 19 nt, Artificial Sequence
  Description of Artificial Sequence: Synthetic oligonucleotide
aaccaguugcagcccacga

SEQ ID NO: 263814 - RNA, 19 nt, Artificial Sequence
  Description of Artificial Sequence: Synthetic oligonucleotide
ugagugucgaugggcaggc

SEQ ID NO: 263815 - RNA, 19 nt, Artificial Sequence
  Description of Artificial Sequence: Synthetic oligonucleotide
uuccgcacagaugacuuca

SEQ ID NO: 263816 - RNA, 19 nt, Artificial Sequence
  Description of Artificial Sequence: Synthetic oligonucleotide
ugacacgcgccauuucuac

SEQ ID NO: 263817 - RNA, 19 nt, Artificial Sequence
  Description of Artificial Sequence: Synthetic oligonucleotide
caccaaaucggcacaucac

SEQ ID NO: 263818 - RNA, 19 nt, Artificial Sequence
  Description of Artificial Sequence: Synthetic oligonucleotide
uccauucugucauggguau

SEQ ID NO: 263819 - RNA, 19 nt, Artificial Sequence
  Description of Artificial Sequence: Synthetic oligonucleotide
caccuuacugucccgccgg

SEQ ID NO: 263820 - RNA, 19 nt, Artificial Sequence
  Description of Artificial Sequence: Synthetic oligonucleotide
auucgucgcagagaggaug

SEQ ID NO: 263821 - RNA, 19 nt, Artificial Sequence
  Description of Artificial Sequence: Synthetic oligonucleotide
uuuugcagcgugugugguc

SEQ ID NO: 263822 - RNA, 19 nt, Artificial Sequence
  Description of Artificial Sequence: Synthetic oligonucleotide
gggaucccgguccacaagg

SEQ ID NO: 263823 - RNA, 19 nt, Artificial Sequence
  Description of Artificial Sequence: Synthetic oligonucleotide
caagcugggcgcacugccg

SEQ ID NO: 263824 - RNA, 19 nt, Artificial Sequence
  Description of Artificial Sequence: Synthetic oligonucleotide
uagcacagauuaugggcca

SEQ ID NO: 263825 - RNA, 19 nt, Artificial Sequence
  Description of Artificial Sequence: Synthetic oligonucleotide
ucacauaggggacgcgguc

SEQ ID NO: 263826 - RNA, 19 nt, Artificial Sequence
  Description of Artificial Sequence: Synthetic oligonucleotide
ggcccggagguccaaaacg

SEQ ID NO: 263827 - RNA, 19 nt, Artificial Sequence
  Description of Artificial Sequence: Synthetic oligonucleotide
caaaacgcugcagcagccg

SEQ ID NO: 263828 - RNA, 19 nt, Artificial Sequence
  Description of Artificial Sequence: Synthetic oligonucleotide
ugcuagcugccguccaucc

SEQ ID NO: 263829 - RNA, 19 nt, Artificial Sequence
  Description of Artificial Sequence: Synthetic oligonucleotide
caaaucggcacaucacaga

SEQ ID NO: 263830 - RNA, 19 nt, Artificial Sequence
  Description of Artificial Sequence: Synthetic oligonucleotide
uaaguacacgaaggggcgc

SEQ ID NO: 263831 - RNA, 19 nt, Artificial Sequence
  Description of Artificial Sequence: Synthetic oligonucleotide
uucaggguuugcgcgcgcg

SEQ ID NO: 263832 - RNA, 19 nt, Artificial Sequence
  Description of Artificial Sequence: Synthetic oligonucleotide
caguccauucugucauggg

SEQ ID NO: 263833 - RNA, 19 nt, Artificial Sequence
  Description of Artificial Sequence: Synthetic oligonucleotide
agccaaugcaacaguugcg

SEQ ID NO: 263834 - RNA, 19 nt, Artificial Sequence
  Description of Artificial Sequence: Synthetic oligonucleotide
augcaagcugcccuggcaa

SEQ ID NO: 263835 - RNA, 19 nt, Artificial Sequence
  Description of Artificial Sequence: Synthetic oligonucleotide
guuugcgcgcgcgagauga

SEQ ID NO: 263836 - RNA, 19 nt, Artificial Sequence
  Description of Artificial Sequence: Synthetic oligonucleotide
acacgcgccauuucuacua

SEQ ID NO: 263837 - RNA, 19 nt, Artificial Sequence
  Description of Artificial Sequence: Synthetic oligonucleotide
agagaggauguaacaaggu

SEQ ID NO: 263838 - RNA, 19 nt, Artificial Sequence
  Description of Artificial Sequence: Synthetic oligonucleotide
uuacugucccgccggccca

SEQ ID NO: 263839 - RNA, 19 nt, Artificial Sequence
  Description of Artificial Sequence: Synthetic oligonucleotide
gacgucauaguacccuuua

SEQ ID NO: 263840 - RNA, 19 nt, Artificial Sequence
  Description of Artificial Sequence: Synthetic oligonucleotide
gucuaugcgguuacacagc

SEQ ID NO: 263841 - RNA, 19 nt, Artificial Sequence
  Description of Artificial Sequence: Synthetic oligonucleotide
accaaccuugcuggugagc

SEQ ID NO: 263842 - RNA, 19 nt, Artificial Sequence
  Description of Artificial Sequence: Synthetic oligonucleotide
ugcgguuacacagcagguc

SEQ ID NO: 263843 - RNA, 19 nt, Artificial Sequence
  Description of Artificial Sequence: Synthetic oligonucleotide
gggaagugacuagauaccc

SEQ ID NO: 263844 - RNA, 19 nt, Artificial Sequence
  Description of Artificial Sequence: Synthetic oligonucleotide
uucggccccggcuggagca

SEQ ID NO: 263845 - RNA, 19 nt, Artificial Sequence
  Description of Artificial Sequence: Synthetic oligonucleotide
aaucggcacaucacagagu

SEQ ID NO: 263846 - RNA, 19 nt, Artificial Sequence
  Description of Artificial Sequence: Synthetic oligonucleotide
cuaugcgguuacacagcag

SEQ ID NO: 263847 - RNA, 19 nt, Artificial Sequence
  Description of Artificial Sequence: Synthetic oligonucleotide
agaggcgcgagaagcguuc

SEQ ID NO: 263848 - RNA, 19 nt, Artificial Sequence
  Description of Artificial Sequence: Synthetic oligonucleotide
aguugcggcgcuuggugaa

SEQ ID NO: 263849 - RNA, 19 nt, Artificial Sequence
  Description of Artificial Sequence: Synthetic oligonucleotide
gccagcauagcgcuucuug

SEQ ID NO: 263850 - RNA, 19 nt, Artificial Sequence
  Description of Artificial Sequence: Synthetic oligonucleotide
ggcgugucugcucauuccc

SEQ ID NO: 263851 - RNA, 19 nt, Artificial Sequence
  Description of Artificial Sequence: Synthetic oligonucleotide
acagauuaugggccaucau

SEQ ID NO: 263852 - RNA, 19 nt, Artificial Sequence
  Description of Artificial Sequence: Synthetic oligonucleotide
cccuuuaaggggcucaaug

SEQ ID NO: 263853 - RNA, 19 nt, Artificial Sequence
  Description of Artificial Sequence: Synthetic oligonucleotide
aagugacuagauacccagu

SEQ ID NO: 263854 - RNA, 19 nt, Artificial Sequence
  Description of Artificial Sequence: Synthetic oligonucleotide
acgguuuugcagcgugugu

SEQ ID NO: 263855 - RNA, 19 nt, Artificial Sequence
  Description of Artificial Sequence: Synthetic oligonucleotide
caacgcuggcacugugucc

SEQ ID NO: 263856 - RNA, 19 nt, Artificial Sequence
  Description of Artificial Sequence: Synthetic oligonucleotide
caaccaguugcagcccacg

SEQ ID NO: 263857 - RNA, 19 nt, Artificial Sequence
  Description of Artificial Sequence: Synthetic oligonucleotide
gguacagagaggagaaauc

SEQ ID NO: 263858 - RNA, 19 nt, Artificial Sequence
  Description of Artificial Sequence: Synthetic oligonucleotide
cucgucgagucaccaggcc

SEQ ID NO: 263859 - RNA, 19 nt, Artificial Sequence
  Description of Artificial Sequence: Synthetic oligonucleotide
ggacaguugucccugcgca

SEQ ID NO: 263860 - RNA, 19 nt, Artificial Sequence
  Description of Artificial Sequence: Synthetic oligonucleotide
uacccaguuugcagccucu

SEQ ID NO: 263861 - RNA, 19 nt, Artificial Sequence
  Description of Artificial Sequence: Synthetic oligonucleotide
cacgguuuugcagcgugug

SEQ ID NO: 263862 - RNA, 19 nt, Artificial Sequence
  Description of Artificial Sequence: Synthetic oligonucleotide
ugaccuguucggccccggc

SEQ ID NO: 263863 - RNA, 19 nt, Artificial Sequence
  Description of Artificial Sequence: Synthetic oligonucleotide
ucccggggcugacagaauu

SEQ ID NO: 263864 - RNA, 19 nt, Artificial Sequence
  Description of Artificial Sequence: Synthetic oligonucleotide
gauuaugggccaucaugau

SEQ ID NO: 263865 - RNA, 19 nt, Artificial Sequence
  Description of Artificial Sequence: Synthetic oligonucleotide
aaggcguccuucaggcagu

SEQ ID NO: 263866 - RNA, 19 nt, Artificial Sequence
  Description of Artificial Sequence: Synthetic oligonucleotide
gagcggagaccagucacac

SEQ ID NO: 263867 - RNA, 19 nt, Artificial Sequence
  Description of Artificial Sequence: Synthetic oligonucleotide
gggucacgcuuccucaucc

SEQ ID NO: 263868 - RNA, 19 nt, Artificial Sequence
  Description of Artificial Sequence: Synthetic oligonucleotide
cuuccgcacagaugacuuc

SEQ ID NO: 263869 - RNA, 19 nt, Artificial Sequence
  Description of Artificial Sequence: Synthetic oligonucleotide
gcaauacgcugccacugcc

SEQ ID NO: 263870 - RNA, 19 nt, Artificial Sequence
  Description of Artificial Sequence: Synthetic oligonucleotide
ugcagcguguguggucucc

SEQ ID NO: 263871 - RNA, 19 nt, Artificial Sequence
  Description of Artificial Sequence: Synthetic oligonucleotide
caauggggacgucauagua

SEQ ID NO: 263872 - RNA, 19 nt, Artificial Sequence
  Description of Artificial Sequence: Synthetic oligonucleotide
caguugucccugcgcacag

SEQ ID NO: 263873 - RNA, 19 nt, Artificial Sequence
  Description of Artificial Sequence: Synthetic oligonucleotide
gcugccguccauccaagac

SEQ ID NO: 263874 - RNA, 19 nt, Artificial Sequence
  Description of Artificial Sequence: Synthetic oligonucleotide
caggccagcauagcgcuuc

SEQ ID NO: 263875 - RNA, 19 nt, Artificial Sequence
  Description of Artificial Sequence: Synthetic oligonucleotide
ggcuaggaggccaccaacc

SEQ ID NO: 263876 - RNA, 19 nt, Artificial Sequence
  Description of Artificial Sequence: Synthetic oligonucleotide
aggguuugcgcgcgcgaga

SEQ ID NO: 263877 - RNA, 19 nt, Artificial Sequence
  Description of Artificial Sequence: Synthetic oligonucleotide
gugucccucgucgagucac

SEQ ID NO: 263878 - RNA, 19 nt, Artificial Sequence
  Description of Artificial Sequence: Synthetic oligonucleotide
cacacucgaugucaaagcu

SEQ ID NO: 263879 - RNA, 19 nt, Artificial Sequence
  Description of Artificial Sequence: Synthetic oligonucleotide
uugaccuguucggccccgg

SEQ ID NO: 263880 - RNA, 19 nt, Artificial Sequence
  Description of Artificial Sequence: Synthetic oligonucleotide
cacaucacagagucagugu

SEQ ID NO: 263881 - RNA, 19 nt, Artificial Sequence
  Description of Artificial Sequence: Synthetic oligonucleotide
caggguuugcgcgcgcgag

SEQ ID NO: 263882 - RNA, 19 nt, Artificial Sequence
  Description of Artificial Sequence: Synthetic oligonucleotide
uaggggacgcggucaccca

SEQ ID NO: 263883 - RNA, 19 nt, Artificial Sequence
  Description of Artificial Sequence: Synthetic oligonucleotide
cacauaggggacgcgguca

SEQ ID NO: 263884 - RNA, 19 nt, Artificial Sequence
  Description of Artificial Sequence: Synthetic oligonucleotide
gcaccgacccgugacacgc

SEQ ID NO: 263885 - RNA, 19 nt, Artificial Sequence
  Description of Artificial Sequence: Synthetic oligonucleotide
aggagacaccaaaucggca

SEQ ID NO: 263886 - RNA, 19 nt, Artificial Sequence
  Description of Artificial Sequence: Synthetic oligonucleotide
cacaaggauucgucgcaga

SEQ ID NO: 263887 - RNA, 19 nt, Artificial Sequence
  Description of Artificial Sequence: Synthetic oligonucleotide
guugcggcgcuuggugaag

SEQ ID NO: 263888 - RNA, 19 nt, Artificial Sequence
  Description of Artificial Sequence: Synthetic oligonucleotide
cgcgccauuucuacuauug

SEQ ID NO: 263889 - RNA, 19 nt, Artificial Sequence
  Description of Artificial Sequence: Synthetic oligonucleotide
agccccgggccguagcagu

SEQ ID NO: 263890 - RNA, 19 nt, Artificial Sequence
  Description of Artificial Sequence: Synthetic oligonucleotide
gcgguuacacagcaggucu

SEQ ID NO: 263891 - RNA, 19 nt, Artificial Sequence
  Description of Artificial Sequence: Synthetic oligonucleotide
cgcgagaugagguauggga

SEQ ID NO: 263892 - RNA, 19 nt, Artificial Sequence
  Description of Artificial Sequence: Synthetic oligonucleotide
gugacuagauacccaguuu

SEQ ID NO: 263893 - RNA, 19 nt, Artificial Sequence
  Description of Artificial Sequence: Synthetic oligonucleotide
ggcacucacuuucagugcu

SEQ ID NO: 263894 - RNA, 19 nt, Artificial Sequence
  Description of Artificial Sequence: Synthetic oligonucleotide
ccguccauccaagaccugc

SEQ ID NO: 263895 - RNA, 19 nt, Artificial Sequence
  Description of Artificial Sequence: Synthetic oligonucleotide
gacacgcgccauuucuacu

SEQ ID NO: 263896 - RNA, 19 nt, Artificial Sequence
  Description of Artificial Sequence: Synthetic oligonucleotide
ggcaccgacccgugacacg

SEQ ID NO: 263897 - RNA, 19 nt, Artificial Sequence
  Description of Artificial Sequence: Synthetic oligonucleotide
ccaaccuugcuggugagca

SEQ ID NO: 263898 - RNA, 19 nt, Artificial Sequence
  Description of Artificial Sequence: Synthetic oligonucleotide
agaugucuaugcgguuaca

SEQ ID NO: 263899 - RNA, 19 nt, Artificial Sequence
  Description of Artificial Sequence: Synthetic oligonucleotide
guucggccccggcuggagc

SEQ ID NO: 263900 - RNA, 19 nt, Artificial Sequence
  Description of Artificial Sequence: Synthetic oligonucleotide
aggauucgucgcagagagg

SEQ ID NO: 263901 - RNA, 19 nt, Artificial Sequence
  Description of Artificial Sequence: Synthetic oligonucleotide
cauaggggacgcggucacc

SEQ ID NO: 263902 - RNA, 19 nt, Artificial Sequence
  Description of Artificial Sequence: Synthetic oligonucleotide
caguugcggcgcuugguga

SEQ ID NO: 263903 - RNA, 19 nt, Artificial Sequence
  Description of Artificial Sequence: Synthetic oligonucleotide
cuucaggguuugcgcgcgc

SEQ ID NO: 263904 - RNA, 19 nt, Artificial Sequence
  Description of Artificial Sequence: Synthetic oligonucleotide
aggggacgcggucacccaa

SEQ ID NO: 263905 - RNA, 19 nt, Artificial Sequence
  Description of Artificial Sequence: Synthetic oligonucleotide
ccucgucgagucaccaggc

SEQ ID NO: 263906 - RNA, 19 nt, Artificial Sequence
  Description of Artificial Sequence: Synthetic oligonucleotide
gaccuguucggccccggcu

SEQ ID NO: 263907 - RNA, 19 nt, Artificial Sequence
  Description of Artificial Sequence: Synthetic oligonucleotide
caccgacccgugacacgcg

SEQ ID NO: 263908 - RNA, 19 nt, Artificial Sequence
  Description of Artificial Sequence: Synthetic oligonucleotide
gccgcccgaacccagugac

SEQ ID NO: 263909 - RNA, 19 nt, Artificial Sequence
  Description of Artificial Sequence: Synthetic oligonucleotide
gcgcaauacgcugccacug

SEQ ID NO: 263910 - RNA, 19 nt, Artificial Sequence
  Description of Artificial Sequence: Synthetic oligonucleotide
aggccagcauagcgcuucu

SEQ ID NO: 263911 - RNA, 19 nt, Artificial Sequence
  Description of Artificial Sequence: Synthetic oligonucleotide
ccgaaguggcaggaaggcg

SEQ ID NO: 263912 - RNA, 19 nt, Artificial Sequence
  Description of Artificial Sequence: Synthetic oligonucleotide
cgcaauacgcugccacugc

SEQ ID NO: 263913 - RNA, 19 nt, Artificial Sequence
  Description of Artificial Sequence: Synthetic oligonucleotide
ggagcggagaccagucaca

SEQ ID NO: 263914 - RNA, 19 nt, Artificial Sequence
  Description of Artificial Sequence: Synthetic oligonucleotide
gcaccauaaggcgcucaag

SEQ ID NO: 263915 - RNA, 19 nt, Artificial Sequence
  Description of Artificial Sequence: Synthetic oligonucleotide
gcccacgaugucagcaucc

SEQ ID NO: 263916 - RNA, 19 nt, Artificial Sequence
  Description of Artificial Sequence: Synthetic oligonucleotide
acccgugacacgcgccauu

SEQ ID NO: 263917 - RNA, 19 nt, Artificial Sequence
  Description of Artificial Sequence: Synthetic oligonucleotide
gggacgcggucacccaagc

SEQ ID NO: 263918 - RNA, 19 nt, Artificial Sequence
  Description of Artificial Sequence: Synthetic oligonucleotide
cagccucucgacccagaga

SEQ ID NO: 263919 - RNA, 19 nt, Artificial Sequence
  Description of Artificial Sequence: Synthetic oligonucleotide
ccaaccaguugcagcccac

SEQ ID NO: 263920 - RNA, 19 nt, Artificial Sequence
  Description of Artificial Sequence: Synthetic oligonucleotide
gugacacgcgccauuucua

SEQ ID NO: 263921 - RNA, 19 nt, Artificial Sequence
  Description of Artificial Sequence: Synthetic oligonucleotide
ucggccccggcuggagcag

SEQ ID NO: 263922 - RNA, 19 nt, Artificial Sequence
  Description of Artificial Sequence: Synthetic oligonucleotide
guuuugcagcguguguggu

SEQ ID NO: 263923 - RNA, 19 nt, Artificial Sequence
  Description of Artificial Sequence: Synthetic oligonucleotide
ccgcaaggggucugucucc

SEQ ID NO: 263924 - RNA, 19 nt, Artificial Sequence
  Description of Artificial Sequence: Synthetic oligonucleotide
accugccgccgcaaggggu

SEQ ID NO: 263925 - RNA, 19 nt, Artificial Sequence
  Description of Artificial Sequence: Synthetic oligonucleotide
gcaauggggacgucauagu

SEQ ID NO: 263926 - RNA, 19 nt, Artificial Sequence
  Description of Artificial Sequence: Synthetic oligonucleotide
ggggacgcggucacccaag

SEQ ID NO: 263927 - RNA, 19 nt, Artificial Sequence
  Description of Artificial Sequence: Synthetic oligonucleotide
ggcgcucaagcagccgaag

SEQ ID NO: 263928 - RNA, 19 nt, Artificial Sequence
  Description of Artificial Sequence: Synthetic oligonucleotide
gcugggcgcacugccgggg

SEQ ID NO: 263929 - RNA, 19 nt, Artificial Sequence
  Description of Artificial Sequence: Synthetic oligonucleotide
acgcgccauuucuacuauu

SEQ ID NO: 263930 - RNA, 19 nt, Artificial Sequence
  Description of Artificial Sequence: Synthetic oligonucleotide
gguuugcgcgcgcgagaug

SEQ ID NO: 263931 - RNA, 19 nt, Artificial Sequence
  Description of Artificial Sequence: Synthetic oligonucleotide
cccggggcugacagaauuc

SEQ ID NO: 263932 - RNA, 19 nt, Artificial Sequence
  Description of Artificial Sequence: Synthetic oligonucleotide
ggggcaccgacccgugaca

SEQ ID NO: 263933 - RNA, 19 nt, Artificial Sequence
  Description of Artificial Sequence: Synthetic oligonucleotide
gcacagauuaugggccauc

SEQ ID NO: 263934 - RNA, 19 nt, Artificial Sequence
  Description of Artificial Sequence: Synthetic oligonucleotide
ccuuacugucccgccggcc

SEQ ID NO: 263935 - RNA, 19 nt, Artificial Sequence
  Description of Artificial Sequence: Synthetic oligonucleotide
gcgcgagaugagguauggg

SEQ ID NO: 263936 - RNA, 19 nt, Artificial Sequence
  Description of Artificial Sequence: Synthetic oligonucleotide
cauggguaucaggcuggga

SEQ ID NO: 263937 - RNA, 19 nt, Artificial Sequence
  Description of Artificial Sequence: Synthetic oligonucleotide
cgcccgaacccagugacac

SEQ ID NO: 263938 - RNA, 19 nt, Artificial Sequence
  Description of Artificial Sequence: Synthetic oligonucleotide
ucgucgcagagaggaugua

SEQ ID NO: 263939 - RNA, 19 nt, Artificial Sequence
  Description of Artificial Sequence: Synthetic oligonucleotide
cccguucuaggagcgcagc

SEQ ID NO: 263940 - RNA, 19 nt, Artificial Sequence
  Description of Artificial Sequence: Synthetic oligonucleotide
cugccccaucgggaucccg

SEQ ID NO: 263941 - RNA, 19 nt, Artificial Sequence
  Description of Artificial Sequence: Synthetic oligonucleotide
ccgggccguagcagugugg

SEQ ID NO: 263942 - RNA, 19 nt, Artificial Sequence
  Description of Artificial Sequence: Synthetic oligonucleotide
gggcaccgacccgugacac

SEQ ID NO: 263943 - RNA, 19 nt, Artificial Sequence
  Description of Artificial Sequence: Synthetic oligonucleotide
ccggggucacgcuuccuca

SEQ ID NO: 263944 - RNA, 19 nt, Artificial Sequence
  Description of Artificial Sequence: Synthetic oligonucleotide
ccuuccgcacagaugacuu

SEQ ID NO: 263945 - RNA, 19 nt, Artificial Sequence
  Description of Artificial Sequence: Synthetic oligonucleotide
gucgagucaccaggccucu

SEQ ID NO: 263946 - RNA, 19 nt, Artificial Sequence
  Description of Artificial Sequence: Synthetic oligonucleotide
ccucgacuggaaggaggag

SEQ ID NO: 263947 - RNA, 19 nt, Artificial Sequence
  Description of Artificial Sequence: Synthetic oligonucleotide
ccauucugucauggguauc

SEQ ID NO: 263948 - RNA, 19 nt, Artificial Sequence
  Description of Artificial Sequence: Synthetic oligonucleotide
cagaggcgcgagaagcguu

SEQ ID NO: 263949 - RNA, 19 nt, Artificial Sequence
  Description of Artificial Sequence: Synthetic oligonucleotide
gcgcgcgagaugagguaug

SEQ ID NO: 263950 - RNA, 19 nt, Artificial Sequence
  Description of Artificial Sequence: Synthetic oligonucleotide
cacgcgccauuucuacuau

SEQ ID NO: 263951 - RNA, 19 nt, Artificial Sequence
  Description of Artificial Sequence: Synthetic oligonucleotide
cgcgagaagcguuccucca

SEQ ID NO: 263952 - RNA, 19 nt, Artificial Sequence
  Description of Artificial Sequence: Synthetic oligonucleotide
cccgggccguagcagugug

SEQ ID NO: 263953 - RNA, 19 nt, Artificial Sequence
  Description of Artificial Sequence: Synthetic oligonucleotide
cgaaggggcgcaauacgcu

SEQ ID NO: 263954 - RNA, 19 nt, Artificial Sequence
  Description of Artificial Sequence: Synthetic oligonucleotide
ggacgcggucacccaagcu

SEQ ID NO: 263955 - RNA, 19 nt, Artificial Sequence
  Description of Artificial Sequence: Synthetic oligonucleotide
cgacccgugacacgcgcca

SEQ ID NO: 263956 - RNA, 19 nt, Artificial Sequence
  Description of Artificial Sequence: Synthetic oligonucleotide
ggguuugcgcgcgcgagau

SEQ ID NO: 263957 - RNA, 19 nt, Artificial Sequence
  Description of Artificial Sequence: Synthetic oligonucleotide
gagcacgguuuugcagcgu

SEQ ID NO: 263958 - RNA, 19 nt, Artificial Sequence
  Description of Artificial Sequence: Synthetic oligonucleotide
cuguucggccccggcugga

SEQ ID NO: 263959 - RNA, 19 nt, Artificial Sequence
  Description of Artificial Sequence: Synthetic oligonucleotide
ccgugacacgcgccauuuc

SEQ ID NO: 263960 - RNA, 19 nt, Artificial Sequence
  Description of Artificial Sequence: Synthetic oligonucleotide
ccccaucgggaucccgguc

SEQ ID NO: 263961 - RNA, 19 nt, Artificial Sequence
  Description of Artificial Sequence: Synthetic oligonucleotide
gacccgugacacgcgccau

SEQ ID NO: 263962 - RNA, 19 nt, Artificial Sequence
  Description of Artificial Sequence: Synthetic oligonucleotide
cgucgcagagaggauguaa

SEQ ID NO: 263963 - RNA, 19 nt, Artificial Sequence
  Description of Artificial Sequence: Synthetic oligonucleotide
cacugccggggucacgcuu

SEQ ID NO: 263964 - RNA, 19 nt, Artificial Sequence
  Description of Artificial Sequence: Synthetic oligonucleotide
gcgcgcgcgagaugaggua

SEQ ID NO: 263965 - RNA, 19 nt, Artificial Sequence
  Description of Artificial Sequence: Synthetic oligonucleotide
gcacgguuuugcagcgugu

SEQ ID NO: 263966 - RNA, 19 nt, Artificial Sequence
  Description of Artificial Sequence: Synthetic oligonucleotide
gcggcgcuuggugaaggcu

SEQ ID NO: 263967 - RNA, 19 nt, Artificial Sequence
  Description of Artificial Sequence: Synthetic oligonucleotide
ccgcccgaacccagugaca

SEQ ID NO: 263968 - RNA, 19 nt, Artificial Sequence
  Description of Artificial Sequence: Synthetic oligonucleotide
ccaugcugaccaccuuacu

SEQ ID NO: 263969 - RNA, 19 nt, Artificial Sequence
  Description of Artificial Sequence: Synthetic oligonucleotide
gcgcacugccggggucacg

SEQ ID NO: 263970 - RNA, 19 nt, Artificial Sequence
  Description of Artificial Sequence: Synthetic oligonucleotide
cccuuccgcacagaugacu

SEQ ID NO: 263971 - RNA, 19 nt, Artificial Sequence
  Description of Artificial Sequence: Synthetic oligonucleotide
ccgaacccagugacacucu

SEQ ID NO: 263972 - RNA, 19 nt, Artificial Sequence
  Description of Artificial Sequence: Synthetic oligonucleotide
cucccggggcugacagaau

SEQ ID NO: 263973 - RNA, 19 nt, Artificial Sequence
  Description of Artificial Sequence: Synthetic oligonucleotide
gccgccgcaaggggucugu

SEQ ID NO: 263974 - RNA, 19 nt, Artificial Sequence
  Description of Artificial Sequence: Synthetic oligonucleotide
cccgugacacgcgccauuu

SEQ ID NO: 263975 - RNA, 19 nt, Artificial Sequence
  Description of Artificial Sequence: Synthetic oligonucleotide
ccgccgcaaggggucuguc

SEQ ID NO: 263976 - RNA, 19 nt, Artificial Sequence
  Description of Artificial Sequence: Synthetic oligonucleotide
cgcgcgcgagaugagguau

SEQ ID NO: 263977 - RNA, 19 nt, Artificial Sequence
  Description of Artificial Sequence: Synthetic oligonucleotide
aaucuuaagucuuaaaggc

SEQ ID NO: 263978 - RNA, 19 nt, Artificial Sequence
  Description of Artificial Sequence: Synthetic oligonucleotide
uuaaucuuaagucuuaaag

SEQ ID NO: 263979 - RNA, 19 nt, Artificial Sequence
  Description of Artificial Sequence: Synthetic oligonucleotide
aauagaaucauaugcuggg

SEQ ID NO: 263980 - RNA, 19 nt, Artificial Sequence
  Description of Artificial Sequence: Synthetic oligonucleotide
aaguaaaaggccuaguuca

SEQ ID NO: 263981 - RNA, 19 nt, Artificial Sequence
  Description of Artificial Sequence: Synthetic oligonucleotide
uuuaauucuggccugcucc

SEQ ID NO: 263982 - RNA, 19 nt, Artificial Sequence
  Description of Artificial Sequence: Synthetic oligonucleotide
acaucuuuuagauucgugg

SEQ ID NO: 263983 - RNA, 19 nt, Artificial Sequence
  Description of Artificial Sequence: Synthetic oligonucleotide
auuaauuaguccuggucgc

SEQ ID NO: 263984 - RNA, 19 nt, Artificial Sequence
  Description of Artificial Sequence: Synthetic oligonucleotide
aaaucaaggucagaguggc

SEQ ID NO: 263985 - RNA, 19 nt, Artificial Sequence
  Description of Artificial Sequence: Synthetic oligonucleotide
uuccuauggaaacaaaggg

SEQ ID NO: 263986 - RNA, 19 nt, Artificial Sequence
  Description of Artificial Sequence: Synthetic oligonucleotide
agugagaagagccauggcg

SEQ ID NO: 263987 - RNA, 19 nt, Artificial Sequence
  Description of Artificial Sequence: Synthetic oligonucleotide
uacaguuuaaucuuaaguc

SEQ ID NO: 263988 - RNA, 19 nt, Artificial Sequence
  Description of Artificial Sequence: Synthetic oligonucleotide
ucuuaagucuuaaaggccc

SEQ ID NO: 263989 - RNA, 19 nt, Artificial Sequence
  Description of Artificial Sequence: Synthetic oligonucleotide
cauuaagucugauaaagcc

SEQ ID NO: 263990 - RNA, 19 nt, Artificial Sequence
  Description of Artificial Sequence: Synthetic oligonucleotide
uguacaugggaaaaggccc

SEQ ID NO: 263991 - RNA, 19 nt, Artificial Sequence
  Description of Artificial Sequence: Synthetic oligonucleotide
ugacuuaacaguuacccag

SEQ ID NO: 263992 - RNA, 19 nt, Artificial Sequence
  Description of Artificial Sequence: Synthetic oligonucleotide
uccuauggaaacaaagggg

SEQ ID NO: 263993 - RNA, 19 nt, Artificial Sequence
  Description of Artificial Sequence: Synthetic oligonucleotide
uguucugugugccagagca

SEQ ID NO: 263994 - RNA, 19 nt, Artificial Sequence
  Description of Artificial Sequence: Synthetic oligonucleotide
uaucagauugcucaguaca

SEQ ID NO: 263995 - RNA, 19 nt, Artificial Sequence
  Description of Artificial Sequence: Synthetic oligonucleotide
ucuuaaaggccccugaaac

SEQ ID NO: 263996 - RNA, 19 nt, Artificial Sequence
  Description of Artificial Sequence: Synthetic oligonucleotide
guggauuagaagcagaagc

SEQ ID NO: 263997 - RNA, 19 nt, Artificial Sequence
  Description of Artificial Sequence: Synthetic oligonucleotide
aaaccugugcaaauggggc

SEQ ID NO: 263998 - RNA, 19 nt, Artificial Sequence
  Description of Artificial Sequence: Synthetic oligonucleotide
aaguagaaggaccuagcag

SEQ ID NO: 263999 - RNA, 19 nt, Artificial Sequence
  Description of Artificial Sequence: Synthetic oligonucleotide
gaaggaaguagacacuucc

SEQ ID NO: 264000 - RNA, 19 nt, Artificial Sequence
  Description of Artificial Sequence: Synthetic oligonucleotide
acaguuuaaucuuaagucu

SEQ ID NO: 264001 - RNA, 19 nt, Artificial Sequence
  Description of Artificial Sequence: Synthetic oligonucleotide
aaaaccugugcaaaugggg

SEQ ID NO: 264002 - RNA, 19 nt, Artificial Sequence
  Description of Artificial Sequence: Synthetic oligonucleotide
cauauuaacaggagaaauc

SEQ ID NO: 264003 - RNA, 19 nt, Artificial Sequence
  Description of Artificial Sequence: Synthetic oligonucleotide
agucacaauaaauaccaug

SEQ ID NO: 264004 - RNA, 19 nt, Artificial Sequence
  Description of Artificial Sequence: Synthetic oligonucleotide
agagaaauagaaucauaug

SEQ ID NO: 264005 - RNA, 19 nt, Artificial Sequence
  Description of Artificial Sequence: Synthetic oligonucleotide
gaaguaaaaggccuaguuc

SEQ ID NO: 264006 - RNA, 19 nt, Artificial Sequence
  Description of Artificial Sequence: Synthetic oligonucleotide
ugacuuagaguccacaaau

SEQ ID NO: 264007 - RNA, 19 nt, Artificial Sequence
  Description of Artificial Sequence: Synthetic oligonucleotide
uucuuggcucccaagagcc

SEQ ID NO: 264008 - RNA, 19 nt, Artificial Sequence
  Description of Artificial Sequence: Synthetic oligonucleotide
agucacugaaaaccugugc

SEQ ID NO: 264009 - RNA, 19 nt, Artificial Sequence
  Description of Artificial Sequence: Synthetic oligonucleotide
ucuuuuagauucguggaag

SEQ ID NO: 264010 - RNA, 19 nt, Artificial Sequence
  Description of Artificial Sequence: Synthetic oligonucleotide
ugcuuugaccuaaacaaga

SEQ ID NO: 264011 - RNA, 19 nt, Artificial Sequence
  Description of Artificial Sequence: Synthetic oligonucleotide
uugaccuaaacaagaggag

SEQ ID NO: 264012 - RNA, 19 nt, Artificial Sequence
  Description of Artificial Sequence: Synthetic oligonucleotide
uccucauuuucuuauaguc

SEQ ID NO: 264013 - RNA, 19 nt, Artificial Sequence
  Description of Artificial Sequence: Synthetic oligonucleotide
uuuccuguaaccugcuuug

SEQ ID NO: 264014 - RNA, 19 nt, Artificial Sequence
  Description of Artificial Sequence: Synthetic oligonucleotide
uggugggcaacucauacca

SEQ ID NO: 264015 - RNA, 19 nt, Artificial Sequence
  Description of Artificial Sequence: Synthetic oligonucleotide
agaucuugcuaggaggugc

SEQ ID NO: 264016 - RNA, 19 nt, Artificial Sequence
  Description of Artificial Sequence: Synthetic oligonucleotide
uaucucaacccuuucucag

SEQ ID NO: 264017 - RNA, 19 nt, Artificial Sequence
  Description of Artificial Sequence: Synthetic oligonucleotide
cuuaugguaaccgauagca

SEQ ID NO: 264018 - RNA, 19 nt, Artificial Sequence
  Description of Artificial Sequence: Synthetic oligonucleotide
ggaauuuuggggcaagggg

SEQ ID NO: 264019 - RNA, 19 nt, Artificial Sequence
  Description of Artificial Sequence: Synthetic oligonucleotide
aguagacacuuccagaccu

SEQ ID NO: 264020 - RNA, 19 nt, Artificial Sequence
  Description of Artificial Sequence: Synthetic oligonucleotide
cuaaugacugggaagacca

SEQ ID NO: 264021 - RNA, 19 nt, Artificial Sequence
  Description of Artificial Sequence: Synthetic oligonucleotide
aacuccggaaccuggcggg

SEQ ID NO: 264022 - RNA, 19 nt, Artificial Sequence
  Description of Artificial Sequence: Synthetic oligonucleotide
agucugauaaagccuaaug

SEQ ID NO: 264023 - RNA, 19 nt, Artificial Sequence
  Description of Artificial Sequence: Synthetic oligonucleotide
uguguacaugggaaaaggc

SEQ ID NO: 264024 - RNA, 19 nt, Artificial Sequence
  Description of Artificial Sequence: Synthetic oligonucleotide
ugugccagagcauauuaac

SEQ ID NO: 264025 - RNA, 19 nt, Artificial Sequence
  Description of Artificial Sequence: Synthetic oligonucleotide
accagucacaauaaauacc

SEQ ID NO: 264026 - RNA, 19 nt, Artificial Sequence
  Description of Artificial Sequence: Synthetic oligonucleotide
aaagccuaaugacugggaa

SEQ ID NO: 264027 - RNA, 19 nt, Artificial Sequence
  Description of Artificial Sequence: Synthetic oligonucleotide
cuuugaccuaaacaagagg

SEQ ID NO: 264028 - RNA, 19 nt, Artificial Sequence
  Description of Artificial Sequence: Synthetic oligonucleotide
ggagaaaucaaggucagag

SEQ ID NO: 264029 - RNA, 19 nt, Artificial Sequence
  Description of Artificial Sequence: Synthetic oligonucleotide
uaugcuggguaccagucac

SEQ ID NO: 264030 - RNA, 19 nt, Artificial Sequence
  Description of Artificial Sequence: Synthetic oligonucleotide
ugaccuaaacaagaggagc

SEQ ID NO: 264031 - RNA, 19 nt, Artificial Sequence
  Description of Artificial Sequence: Synthetic oligonucleotide
uuuccagcuagccaacaga

SEQ ID NO: 264032 - RNA, 19 nt, Artificial Sequence
  Description of Artificial Sequence: Synthetic oligonucleotide
aaggggucgacuuuucuau

SEQ ID NO: 264033 - RNA, 19 nt, Artificial Sequence
  Description of Artificial Sequence: Synthetic oligonucleotide
uaccagucacaauaaauac

SEQ ID NO: 264034 - RNA, 19 nt, Artificial Sequence
  Description of Artificial Sequence: Synthetic oligonucleotide
agagcauauuaacaggaga

SEQ ID NO: 264035 - RNA, 19 nt, Artificial Sequence
  Description of Artificial Sequence: Synthetic oligonucleotide
aauuaguccuggucgcucu

SEQ ID NO: 264036 - RNA, 19 nt, Artificial Sequence
  Description of Artificial Sequence: Synthetic oligonucleotide
ucuaaccugaccacaugca

SEQ ID NO: 264037 - RNA, 19 nt, Artificial Sequence
  Description of Artificial Sequence: Synthetic oligonucleotide
uuauguuccauggaaguaa

SEQ ID NO: 264038 - RNA, 19 nt, Artificial Sequence
  Description of Artificial Sequence: Synthetic oligonucleotide
gugagaagagccauggcgg

SEQ ID NO: 264039 - RNA, 19 nt, Artificial Sequence
  Description of Artificial Sequence: Synthetic oligonucleotide
gaauucuuggcucccaaga

SEQ ID NO: 264040 - RNA, 19 nt, Artificial Sequence
  Description of Artificial Sequence: Synthetic oligonucleotide
auaaauaccaugccacuua

SEQ ID NO: 264041 - RNA, 19 nt, Artificial Sequence
  Description of Artificial Sequence: Synthetic oligonucleotide
ucccguuuuacccugacuu

SEQ ID NO: 264042 - RNA, 19 nt, Artificial Sequence
  Description of Artificial Sequence: Synthetic oligonucleotide
cauggcgggaccaacuccg

SEQ ID NO: 264043 - RNA, 19 nt, Artificial Sequence
  Description of Artificial Sequence: Synthetic oligonucleotide
auaaagccuaaugacuggg

SEQ ID NO: 264044 - RNA, 19 nt, Artificial Sequence
  Description of Artificial Sequence: Synthetic oligonucleotide
agauucguggaagaagcac

SEQ ID NO: 264045 - RNA, 19 nt, Artificial Sequence
  Description of Artificial Sequence: Synthetic oligonucleotide
uuacaguguguccaucuca

SEQ ID NO: 264046 - RNA, 19 nt, Artificial Sequence
  Description of Artificial Sequence: Synthetic oligonucleotide
uuaaaggccccugaaacaa

SEQ ID NO: 264047 - RNA, 19 nt, Artificial Sequence
  Description of Artificial Sequence: Synthetic oligonucleotide
uuuaaucuuaagucuuaaa

SEQ ID NO: 264048 - RNA, 19 nt, Artificial Sequence
  Description of Artificial Sequence: Synthetic oligonucleotide
acaacaggaguguaucuca

SEQ ID NO: 264049 - RNA, 19 nt, Artificial Sequence
  Description of Artificial Sequence: Synthetic oligonucleotide
aagucuuaaaggccccuga

SEQ ID NO: 264050 - RNA, 19 nt, Artificial Sequence
  Description of Artificial Sequence: Synthetic oligonucleotide
gacuuaacaguuacccagg

SEQ ID NO: 264051 - RNA, 19 nt, Artificial Sequence
  Description of Artificial Sequence: Synthetic oligonucleotide
agggguuuacagugugucc

SEQ ID NO: 264052 - RNA, 19 nt, Artificial Sequence
  Description of Artificial Sequence: Synthetic oligonucleotide
cucuaaccugaccacaugc

SEQ ID NO: 264053 - RNA, 19 nt, Artificial Sequence
  Description of Artificial Sequence: Synthetic oligonucleotide
uggcuuauguuccauggaa

SEQ ID NO: 264054 - RNA, 19 nt, Artificial Sequence
  Description of Artificial Sequence: Synthetic oligonucleotide
cuuaagucuuaaaggcccc

SEQ ID NO: 264055 - RNA, 19 nt, Artificial Sequence
  Description of Artificial Sequence: Synthetic oligonucleotide
aaucauaugcuggguacca

SEQ ID NO: 264056 - RNA, 19 nt, Artificial Sequence
  Description of Artificial Sequence: Synthetic oligonucleotide
gugggcaacucauaccagg

SEQ ID NO: 264057 - RNA, 19 nt, Artificial Sequence
  Description of Artificial Sequence: Synthetic oligonucleotide
aggaguguaucucaacccu

SEQ ID NO: 264058 - RNA, 19 nt, Artificial Sequence
  Description of Artificial Sequence: Synthetic oligonucleotide
guuacccagggguuuacag

SEQ ID NO: 264059 - RNA, 19 nt, Artificial Sequence
  Description of Artificial Sequence: Synthetic oligonucleotide
ucgcucuacaguugguggg

SEQ ID NO: 264060 - RNA, 19 nt, Artificial Sequence
  Description of Artificial Sequence: Synthetic oligonucleotide
caggaguguaucucaaccc

SEQ ID NO: 264061 - RNA, 19 nt, Artificial Sequence
  Description of Artificial Sequence: Synthetic oligonucleotide
aguaaaaggccuaguucac

SEQ ID NO: 264062 - RNA, 19 nt, Artificial Sequence
  Description of Artificial Sequence: Synthetic oligonucleotide
uaaagccuaaugacuggga

SEQ ID NO: 264063 - RNA, 19 nt, Artificial Sequence
  Description of Artificial Sequence: Synthetic oligonucleotide
uagaaucauaugcugggua

SEQ ID NO: 264064 - RNA, 19 nt, Artificial Sequence
  Description of Artificial Sequence: Synthetic oligonucleotide
gagcauauuaacaggagaa

SEQ ID NO: 264065 - RNA, 19 nt, Artificial Sequence
  Description of Artificial Sequence: Synthetic oligonucleotide
ucauaugcuggguaccagu

SEQ ID NO: 264066 - RNA, 19 nt, Artificial Sequence
  Description of Artificial Sequence: Synthetic oligonucleotide
gucgcucuacaguuggugg

SEQ ID NO: 264067 - RNA, 19 nt, Artificial Sequence
  Description of Artificial Sequence: Synthetic oligonucleotide
cacuuaugguaaccgauag

SEQ ID NO: 264068 - RNA, 19 nt, Artificial Sequence
  Description of Artificial Sequence: Synthetic oligonucleotide
agaccuucauuucaauggu

SEQ ID NO: 264069 - RNA, 19 nt, Artificial Sequence
  Description of Artificial Sequence: Synthetic oligonucleotide
aagugugguacugagguuu

SEQ ID NO: 264070 - RNA, 19 nt, Artificial Sequence
  Description of Artificial Sequence: Synthetic oligonucleotide
cugacacccaacaggauuc

SEQ ID NO: 264071 - RNA, 19 nt, Artificial Sequence
  Description of Artificial Sequence: Synthetic oligonucleotide
caucuuuuagauucgugga

SEQ ID NO: 264072 - RNA, 19 nt, Artificial Sequence
  Description of Artificial Sequence: Synthetic oligonucleotide
ccugcuaaguagaaggacc

SEQ ID NO: 264073 - RNA, 19 nt, Artificial Sequence
  Description of Artificial Sequence: Synthetic oligonucleotide
guuggugggcaacucauac

SEQ ID NO: 264074 - RNA, 19 nt, Artificial Sequence
  Description of Artificial Sequence: Synthetic oligonucleotide
gaaucauaugcuggguacc

SEQ ID NO: 264075 - RNA, 19 nt, Artificial Sequence
  Description of Artificial Sequence: Synthetic oligonucleotide
ucucagagaaaaggcagug

SEQ ID NO: 264076 - RNA, 19 nt, Artificial Sequence
  Description of Artificial Sequence: Synthetic oligonucleotide
uuccagcuagccaacagau

SEQ ID NO: 264077 - RNA, 19 nt, Artificial Sequence
  Description of Artificial Sequence: Synthetic oligonucleotide
aucuuuuagauucguggaa

SEQ ID NO: 264078 - RNA, 19 nt, Artificial Sequence
  Description of Artificial Sequence: Synthetic oligonucleotide
caacagaucuugcuaggag

SEQ ID NO: 264079 - RNA, 19 nt, Artificial Sequence
  Description of Artificial Sequence: Synthetic oligonucleotide
gccuaguucacauuaaguc

SEQ ID NO: 264080 - RNA, 19 nt, Artificial Sequence
  Description of Artificial Sequence: Synthetic oligonucleotide
aaccugcuuugaccuaaac

SEQ ID NO: 264081 - RNA, 19 nt, Artificial Sequence
  Description of Artificial Sequence: Synthetic oligonucleotide
cuuaaaggccccugaaaca

SEQ ID NO: 264082 - RNA, 19 nt, Artificial Sequence
  Description of Artificial Sequence: Synthetic oligonucleotide
ggaguuuccagcuagccaa

SEQ ID NO: 264083 - RNA, 19 nt, Artificial Sequence
  Description of Artificial Sequence: Synthetic oligonucleotide
gaagggagcgcggggagcg

SEQ ID NO: 264084 - RNA, 19 nt, Artificial Sequence
  Description of Artificial Sequence: Synthetic oligonucleotide
cccaacaggauuccuaugg

SEQ ID NO: 264085 - RNA, 19 nt, Artificial Sequence
  Description of Artificial Sequence: Synthetic oligonucleotide
ccggacagcaagaacaagg

SEQ ID NO: 264086 - RNA, 19 nt, Artificial Sequence
  Description of Artificial Sequence: Synthetic oligonucleotide
cauaugcuggguaccaguc

SEQ ID NO: 264087 - RNA, 19 nt, Artificial Sequence
  Description of Artificial Sequence: Synthetic oligonucleotide
uuaugguaaccgauagcau

SEQ ID NO: 264088 - RNA, 19 nt, Artificial Sequence
  Description of Artificial Sequence: Synthetic oligonucleotide
uccuguaaccugcuuugac

SEQ ID NO: 264089 - RNA, 19 nt, Artificial Sequence
  Description of Artificial Sequence: Synthetic oligonucleotide
accugcuaaguagaaggac

SEQ ID NO: 264090 - RNA, 19 nt, Artificial Sequence
  Description of Artificial Sequence: Synthetic oligonucleotide
cucgacacuccaaacagga

SEQ ID NO: 264091 - RNA, 19 nt, Artificial Sequence
  Description of Artificial Sequence: Synthetic oligonucleotide
ugaccacaugcauuaauua

SEQ ID NO: 264092 - RNA, 19 nt, Artificial Sequence
  Description of Artificial Sequence: Synthetic oligonucleotide
aggccuaguucacauuaag

SEQ ID NO: 264093 - RNA, 19 nt, Artificial Sequence
  Description of Artificial Sequence: Synthetic oligonucleotide
aggccccugaaacaaaaca

SEQ ID NO: 264094 - RNA, 19 nt, Artificial Sequence
  Description of Artificial Sequence: Synthetic oligonucleotide
aaggaaguagacacuucca

SEQ ID NO: 264095 - RNA, 19 nt, Artificial Sequence
  Description of Artificial Sequence: Synthetic oligonucleotide
uaagucuuaaaggccccug

SEQ ID NO: 264096 - RNA, 19 nt, Artificial Sequence
  Description of Artificial Sequence: Synthetic oligonucleotide
auggaaguaaaaggccuag

SEQ ID NO: 264097 - RNA, 19 nt, Artificial Sequence
  Description of Artificial Sequence: Synthetic oligonucleotide
ccuguaaccugcuuugacc

SEQ ID NO: 264098 - RNA, 19 nt, Artificial Sequence
  Description of Artificial Sequence: Synthetic oligonucleotide
uuaauuaguccuggucgcu

SEQ ID NO: 264099 - RNA, 19 nt, Artificial Sequence
  Description of Artificial Sequence: Synthetic oligonucleotide
cucagagaaaaggcagugg

SEQ ID NO: 264100 - RNA, 19 nt, Artificial Sequence
  Description of Artificial Sequence: Synthetic oligonucleotide
caacuccggaaccuggcgg

SEQ ID NO: 264101 - RNA, 19 nt, Artificial Sequence
  Description of Artificial Sequence: Synthetic oligonucleotide
guagaaggaccuagcagag

SEQ ID NO: 264102 - RNA, 19 nt, Artificial Sequence
  Description of Artificial Sequence: Synthetic oligonucleotide
aagaaaggcuagaaccccu

SEQ ID NO: 264103 - RNA, 19 nt, Artificial Sequence
  Description of Artificial Sequence: Synthetic oligonucleotide
cuaaacaagaggagccaga

SEQ ID NO: 264104 - RNA, 19 nt, Artificial Sequence
  Description of Artificial Sequence: Synthetic oligonucleotide
acaguuggugggcaacuca

SEQ ID NO: 264105 - RNA, 19 nt, Artificial Sequence
  Description of Artificial Sequence: Synthetic oligonucleotide
augccacuuaugguaaccg

SEQ ID NO: 264106 - RNA, 19 nt, Artificial Sequence
  Description of Artificial Sequence: Synthetic oligonucleotide
auaugcuggguaccaguca

SEQ ID NO: 264107 - RNA, 19 nt, Artificial Sequence
  Description of Artificial Sequence: Synthetic oligonucleotide
aguggagcauucugaguca

SEQ ID NO: 264108 - RNA, 19 nt, Artificial Sequence
  Description of Artificial Sequence: Synthetic oligonucleotide
uaacaguuacccagggguu

SEQ ID NO: 264109 - RNA, 19 nt, Artificial Sequence
  Description of Artificial Sequence: Synthetic oligonucleotide
ugcuuguguacaugggaaa

SEQ ID NO: 264110 - RNA, 19 nt, Artificial Sequence
  Description of Artificial Sequence: Synthetic oligonucleotide
guaucagauugcucaguac

SEQ ID NO: 264111 - RNA, 19 nt, Artificial Sequence
  Description of Artificial Sequence: Synthetic oligonucleotide
caugccacuuaugguaacc

SEQ ID NO: 264112 - RNA, 19 nt, Artificial Sequence
  Description of Artificial Sequence: Synthetic oligonucleotide
agucuuaaaggccccugaa

SEQ ID NO: 264113 - RNA, 19 nt, Artificial Sequence
  Description of Artificial Sequence: Synthetic oligonucleotide
acagaucuugcuaggaggu

SEQ ID NO: 264114 - RNA, 19 nt, Artificial Sequence
  Description of Artificial Sequence: Synthetic oligonucleotide
gaaggggucgacuuuucua

SEQ ID NO: 264115 - RNA, 19 nt, Artificial Sequence
  Description of Artificial Sequence: Synthetic oligonucleotide
aaggccccugaaacaaaac

SEQ ID NO: 264116 - RNA, 19 nt, Artificial Sequence
  Description of Artificial Sequence: Synthetic oligonucleotide
ugccacuuaugguaaccga

SEQ ID NO: 264117 - RNA, 19 nt, Artificial Sequence
  Description of Artificial Sequence: Synthetic oligonucleotide
agcauauuaacaggagaaa

SEQ ID NO: 264118 - RNA, 19 nt, Artificial Sequence
  Description of Artificial Sequence: Synthetic oligonucleotide
auagaaucauaugcugggu

SEQ ID NO: 264119 - RNA, 19 nt, Artificial Sequence
  Description of Artificial Sequence: Synthetic oligonucleotide
uccuggucgcucuacaguu

SEQ ID NO: 264120 - RNA, 19 nt, Artificial Sequence
  Description of Artificial Sequence: Synthetic oligonucleotide
uuaagucuuaaaggccccu

SEQ ID NO: 264121 - RNA, 19 nt, Artificial Sequence
  Description of Artificial Sequence: Synthetic oligonucleotide
uacccugacuuagagucca

SEQ ID NO: 264122 - RNA, 19 nt, Artificial Sequence
  Description of Artificial Sequence: Synthetic oligonucleotide
cuuccagaccuucauuuca

SEQ ID NO: 264123 - RNA, 19 nt, Artificial Sequence
  Description of Artificial Sequence: Synthetic oligonucleotide
uccggaaccuggcgggaag

SEQ ID NO: 264124 - RNA, 19 nt, Artificial Sequence
  Description of Artificial Sequence: Synthetic oligonucleotide
aagaacaaggcaggaugaa

SEQ ID NO: 264125 - RNA, 19 nt, Artificial Sequence
  Description of Artificial Sequence: Synthetic oligonucleotide
uaauuaguccuggucgcuc

SEQ ID NO: 264126 - RNA, 19 nt, Artificial Sequence
  Description of Artificial Sequence: Synthetic oligonucleotide
aacaguuacccagggguuu

SEQ ID NO: 264127 - RNA, 19 nt, Artificial Sequence
  Description of Artificial Sequence: Synthetic oligonucleotide
uagguuugacacagcugac

SEQ ID NO: 264128 - RNA, 19 nt, Artificial Sequence
  Description of Artificial Sequence: Synthetic oligonucleotide
aaaggccccugaaacaaaa

SEQ ID NO: 264129 - RNA, 19 nt, Artificial Sequence
  Description of Artificial Sequence: Synthetic oligonucleotide
ugcaaauggggcugcuaaa

SEQ ID NO: 264130 - RNA, 19 nt, Artificial Sequence
  Description of Artificial Sequence: Synthetic oligonucleotide
gcagguauaggaagucugg

SEQ ID NO: 264131 - RNA, 19 nt, Artificial Sequence
  Description of Artificial Sequence: Synthetic oligonucleotide
uaaaggccccugaaacaaa

SEQ ID NO: 264132 - RNA, 19 nt, Artificial Sequence
  Description of Artificial Sequence: Synthetic oligonucleotide
uugcucaguacaucuuuua

SEQ ID NO: 264133 - RNA, 19 nt, Artificial Sequence
  Description of Artificial Sequence: Synthetic oligonucleotide
cuuggguaucagauugcuc

SEQ ID NO: 264134 - RNA, 19 nt, Artificial Sequence
  Description of Artificial Sequence: Synthetic oligonucleotide
ugccggacagcaagaacaa

SEQ ID NO: 264135 - RNA, 19 nt, Artificial Sequence
  Description of Artificial Sequence: Synthetic oligonucleotide
aggggucgacuuuucuauc

SEQ ID NO: 264136 - RNA, 19 nt, Artificial Sequence
  Description of Artificial Sequence: Synthetic oligonucleotide
augaauucuuggcucccaa

SEQ ID NO: 264137 - RNA, 19 nt, Artificial Sequence
  Description of Artificial Sequence: Synthetic oligonucleotide
cugcuaaaacuguucaaaa

SEQ ID NO: 264138 - RNA, 19 nt, Artificial Sequence
  Description of Artificial Sequence: Synthetic oligonucleotide
acugagguuuggguuccac

SEQ ID NO: 264139 - RNA, 19 nt, Artificial Sequence
  Description of Artificial Sequence: Synthetic oligonucleotide
aagcacuggcaugccggac

SEQ ID NO: 264140 - RNA, 19 nt, Artificial Sequence
  Description of Artificial Sequence: Synthetic oligonucleotide
gcaacucauaccaggacug

SEQ ID NO: 264141 - RNA, 19 nt, Artificial Sequence
  Description of Artificial Sequence: Synthetic oligonucleotide
agaaaggcuagaaccccug

SEQ ID NO: 264142 - RNA, 19 nt, Artificial Sequence
  Description of Artificial Sequence: Synthetic oligonucleotide
uggaaguaaaaggccuagu

SEQ ID NO: 264143 - RNA, 19 nt, Artificial Sequence
  Description of Artificial Sequence: Synthetic oligonucleotide
gaugaauucuuggcuccca

SEQ ID NO: 264144 - RNA, 19 nt, Artificial Sequence
  Description of Artificial Sequence: Synthetic oligonucleotide
ggcuagaaccccugggacc

SEQ ID NO: 264145 - RNA, 19 nt, Artificial Sequence
  Description of Artificial Sequence: Synthetic oligonucleotide
cuguaaccugcuuugaccu

SEQ ID NO: 264146 - RNA, 19 nt, Artificial Sequence
  Description of Artificial Sequence: Synthetic oligonucleotide
cugacuuagaguccacaaa

SEQ ID NO: 264147 - RNA, 19 nt, Artificial Sequence
  Description of Artificial Sequence: Synthetic oligonucleotide
agaaaaggcaguggagcau

SEQ ID NO: 264148 - RNA, 19 nt, Artificial Sequence
  Description of Artificial Sequence: Synthetic oligonucleotide
gguggauuagaagcagaag

SEQ ID NO: 264149 - RNA, 19 nt, Artificial Sequence
  Description of Artificial Sequence: Synthetic oligonucleotide
ccacaugcauuaauuaguc

SEQ ID NO: 264150 - RNA, 19 nt, Artificial Sequence
  Description of Artificial Sequence: Synthetic oligonucleotide
uaccaggacuggugagggg

SEQ ID NO: 264151 - RNA, 19 nt, Artificial Sequence
  Description of Artificial Sequence: Synthetic oligonucleotide
aaacucaggcaggaauuuu

SEQ ID NO: 264152 - RNA, 19 nt, Artificial Sequence
  Description of Artificial Sequence: Synthetic oligonucleotide
cauggaaguaaaaggccua

SEQ ID NO: 264153 - RNA, 19 nt, Artificial Sequence
  Description of Artificial Sequence: Synthetic oligonucleotide
caggaauuuuggggcaagg

SEQ ID NO: 264154 - RNA, 19 nt, Artificial Sequence
  Description of Artificial Sequence: Synthetic oligonucleotide
ggcuuauguuccauggaag

SEQ ID NO: 264155 - RNA, 19 nt, Artificial Sequence
  Description of Artificial Sequence: Synthetic oligonucleotide
gaacaaggcaggaugaauu

SEQ ID NO: 264156 - RNA, 19 nt, Artificial Sequence
  Description of Artificial Sequence: Synthetic oligonucleotide
cugcagcuuuccuguaacc

SEQ ID NO: 264157 - RNA, 19 nt, Artificial Sequence
  Description of Artificial Sequence: Synthetic oligonucleotide
gaaccccugggaccagacc

SEQ ID NO: 264158 - RNA, 19 nt, Artificial Sequence
  Description of Artificial Sequence: Synthetic oligonucleotide
cagaccugcuaaguagaag

SEQ ID NO: 264159 - RNA, 19 nt, Artificial Sequence
  Description of Artificial Sequence: Synthetic oligonucleotide
ccuaaugacugggaagacc

SEQ ID NO: 264160 - RNA, 19 nt, Artificial Sequence
  Description of Artificial Sequence: Synthetic oligonucleotide
gguaucagauugcucagua

SEQ ID NO: 264161 - RNA, 19 nt, Artificial Sequence
  Description of Artificial Sequence: Synthetic oligonucleotide
gugaggggagaaggggucg

SEQ ID NO: 264162 - RNA, 19 nt, Artificial Sequence
  Description of Artificial Sequence: Synthetic oligonucleotide
ggaaaaggcccuagguuug

SEQ ID NO: 264163 - RNA, 19 nt, Artificial Sequence
  Description of Artificial Sequence: Synthetic oligonucleotide
ugacacccaacaggauucc

SEQ ID NO: 264164 - RNA, 19 nt, Artificial Sequence
  Description of Artificial Sequence: Synthetic oligonucleotide
cuaggacagggagacccag

SEQ ID NO: 264165 - RNA, 19 nt, Artificial Sequence
  Description of Artificial Sequence: Synthetic oligonucleotide
gaccaugaagaggcuggcc

SEQ ID NO: 264166 - RNA, 19 nt, Artificial Sequence
  Description of Artificial Sequence: Synthetic oligonucleotide
cuuauguuccauggaagua

SEQ ID NO: 264167 - RNA, 19 nt, Artificial Sequence
  Description of Artificial Sequence: Synthetic oligonucleotide
agugugguacugagguuug

SEQ ID NO: 264168 - RNA, 19 nt, Artificial Sequence
  Description of Artificial Sequence: Synthetic oligonucleotide
guguaucucaacccuuucu

SEQ ID NO: 264169 - RNA, 19 nt, Artificial Sequence
  Description of Artificial Sequence: Synthetic oligonucleotide
gaccugcuaaguagaagga

SEQ ID NO: 264170 - RNA, 19 nt, Artificial Sequence
  Description of Artificial Sequence: Synthetic oligonucleotide
ccuagguuugacacagcug

SEQ ID NO: 264171 - RNA, 19 nt, Artificial Sequence
  Description of Artificial Sequence: Synthetic oligonucleotide
gaaaaggcccuagguuuga

SEQ ID NO: 264172 - RNA, 19 nt, Artificial Sequence
  Description of Artificial Sequence: Synthetic oligonucleotide
acccaacaggauuccuaug

SEQ ID NO: 264173 - RNA, 19 nt, Artificial Sequence
  Description of Artificial Sequence: Synthetic oligonucleotide
caagaggagccagacucuc

SEQ ID NO: 264174 - RNA, 19 nt, Artificial Sequence
  Description of Artificial Sequence: Synthetic oligonucleotide
ggcaacucauaccaggacu

SEQ ID NO: 264175 - RNA, 19 nt, Artificial Sequence
  Description of Artificial Sequence: Synthetic oligonucleotide
acacuuccagaccuucauu

SEQ ID NO: 264176 - RNA, 19 nt, Artificial Sequence
  Description of Artificial Sequence: Synthetic oligonucleotide
cugaccacaugcauuaauu

SEQ ID NO: 264177 - RNA, 19 nt, Artificial Sequence
  Description of Artificial Sequence: Synthetic oligonucleotide
ccagcuagccaacagaucu

SEQ ID NO: 264178 - RNA, 19 nt, Artificial Sequence
  Description of Artificial Sequence: Synthetic oligonucleotide
cccaaucucccguuuuacc

SEQ ID NO: 264179 - RNA, 19 nt, Artificial Sequence
  Description of Artificial Sequence: Synthetic oligonucleotide
ggcuggccauuccugagcc

SEQ ID NO: 264180 - RNA, 19 nt, Artificial Sequence
  Description of Artificial Sequence: Synthetic oligonucleotide
ccuaaacaagaggagccag

SEQ ID NO: 264181 - RNA, 19 nt, Artificial Sequence
  Description of Artificial Sequence: Synthetic oligonucleotide
ccguuuuacccugacuuag

SEQ ID NO: 264182 - RNA, 19 nt, Artificial Sequence
  Description of Artificial Sequence: Synthetic oligonucleotide
ccaacuccggaaccuggcg

SEQ ID NO: 264183 - RNA, 19 nt, Artificial Sequence
  Description of Artificial Sequence: Synthetic oligonucleotide
ggucgcucuacaguuggug

SEQ ID NO: 264184 - RNA, 19 nt, Artificial Sequence
  Description of Artificial Sequence: Synthetic oligonucleotide
auuaguccuggucgcucua

SEQ ID NO: 264185 - RNA, 19 nt, Artificial Sequence
  Description of Artificial Sequence: Synthetic oligonucleotide
cuaaccugaccacaugcau

SEQ ID NO: 264186 - RNA, 19 nt, Artificial Sequence
  Description of Artificial Sequence: Synthetic oligonucleotide
aguuuccagcuagccaaca

SEQ ID NO: 264187 - RNA, 19 nt, Artificial Sequence
  Description of Artificial Sequence: Synthetic oligonucleotide
gacucucacucuggagaug

SEQ ID NO: 264188 - RNA, 19 nt, Artificial Sequence
  Description of Artificial Sequence: Synthetic oligonucleotide
uggucgcucuacaguuggu

SEQ ID NO: 264189 - RNA, 19 nt, Artificial Sequence
  Description of Artificial Sequence: Synthetic oligonucleotide
ugguaaccgauagcauaaa

SEQ ID NO: 264190 - RNA, 19 nt, Artificial Sequence
  Description of Artificial Sequence: Synthetic oligonucleotide
acacccaacaggauuccua

SEQ ID NO: 264191 - RNA, 19 nt, Artificial Sequence
  Description of Artificial Sequence: Synthetic oligonucleotide
uacaugggaaaaggcccua

SEQ ID NO: 264192 - RNA, 19 nt, Artificial Sequence
  Description of Artificial Sequence: Synthetic oligonucleotide
gcauauuaacaggagaaau

SEQ ID NO: 264193 - RNA, 19 nt, Artificial Sequence
  Description of Artificial Sequence: Synthetic oligonucleotide
ggcuuuaauucuggccugc

SEQ ID NO: 264194 - RNA, 19 nt, Artificial Sequence
  Description of Artificial Sequence: Synthetic oligonucleotide
ggccccugaaacaaaacaa

SEQ ID NO: 264195 - RNA, 19 nt, Artificial Sequence
  Description of Artificial Sequence: Synthetic oligonucleotide
accuggcgggaagggagcg

SEQ ID NO: 264196 - RNA, 19 nt, Artificial Sequence
  Description of Artificial Sequence: Synthetic oligonucleotide
guggagcauucugagucac

SEQ ID NO: 264197 - RNA, 19 nt, Artificial Sequence
  Description of Artificial Sequence: Synthetic oligonucleotide
guacaugggaaaaggcccu

SEQ ID NO: 264198 - RNA, 19 nt, Artificial Sequence
  Description of Artificial Sequence: Synthetic oligonucleotide
agauugcucaguacaucuu

SEQ ID NO: 264199 - RNA, 19 nt, Artificial Sequence
  Description of Artificial Sequence: Synthetic oligonucleotide
acagaccugcuaaguagaa

SEQ ID NO: 264200 - RNA, 19 nt, Artificial Sequence
  Description of Artificial Sequence: Synthetic oligonucleotide
gaguguaucucaacccuuu

SEQ ID NO: 264201 - RNA, 19 nt, Artificial Sequence
  Description of Artificial Sequence: Synthetic oligonucleotide
cacccaacaggauuccuau

SEQ ID NO: 264202 - RNA, 19 nt, Artificial Sequence
  Description of Artificial Sequence: Synthetic oligonucleotide
ggcgggaccaacuccggaa

SEQ ID NO: 264203 - RNA, 19 nt, Artificial Sequence
  Description of Artificial Sequence: Synthetic oligonucleotide
gcugacacccaacaggauu

SEQ ID NO: 264204 - RNA, 19 nt, Artificial Sequence
  Description of Artificial Sequence: Synthetic oligonucleotide
gcaggaauuuuggggcaag

SEQ ID NO: 264205 - RNA, 19 nt, Artificial Sequence
  Description of Artificial Sequence: Synthetic oligonucleotide
ggaaggaaguagacacuuc

SEQ ID NO: 264206 - RNA, 19 nt, Artificial Sequence
  Description of Artificial Sequence: Synthetic oligonucleotide
ggcugcuaaaacuguucaa

SEQ ID NO: 264207 - RNA, 19 nt, Artificial Sequence
  Description of Artificial Sequence: Synthetic oligonucleotide
ccauggcgggaccaacucc

SEQ ID NO: 264208 - RNA, 19 nt, Artificial Sequence
  Description of Artificial Sequence: Synthetic oligonucleotide
ccaacaggauuccuaugga

SEQ ID NO: 264209 - RNA, 19 nt, Artificial Sequence
  Description of Artificial Sequence: Synthetic oligonucleotide
ggggucgacuuuucuaucu

SEQ ID NO: 264210 - RNA, 19 nt, Artificial Sequence
  Description of Artificial Sequence: Synthetic oligonucleotide
ggugggcaacucauaccag

SEQ ID NO: 264211 - RNA, 19 nt, Artificial Sequence
  Description of Artificial Sequence: Synthetic oligonucleotide
uggcccuggccucgauggu

SEQ ID NO: 264212 - RNA, 19 nt, Artificial Sequence
  Description of Artificial Sequence: Synthetic oligonucleotide
gcgggaccaacuccggaac

SEQ ID NO: 264213 - RNA, 19 nt, Artificial Sequence
  Description of Artificial Sequence: Synthetic oligonucleotide
ccacuuaugguaaccgaua

SEQ ID NO: 264214 - RNA, 19 nt, Artificial Sequence
  Description of Artificial Sequence: Synthetic oligonucleotide
caguuacccagggguuuac

SEQ ID NO: 264215 - RNA, 19 nt, Artificial Sequence
  Description of Artificial Sequence: Synthetic oligonucleotide
cccagggguuuacagugug

SEQ ID NO: 264216 - RNA, 19 nt, Artificial Sequence
  Description of Artificial Sequence: Synthetic oligonucleotide
cauccucagcugaggcaca

SEQ ID NO: 264217 - RNA, 19 nt, Artificial Sequence
  Description of Artificial Sequence: Synthetic oligonucleotide
cuagaaccccugggaccag

SEQ ID NO: 264218 - RNA, 19 nt, Artificial Sequence
  Description of Artificial Sequence: Synthetic oligonucleotide
gguuuacaguguguccauc

SEQ ID NO: 264219 - RNA, 19 nt, Artificial Sequence
  Description of Artificial Sequence: Synthetic oligonucleotide
uacugagguuuggguucca

SEQ ID NO: 264220 - RNA, 19 nt, Artificial Sequence
  Description of Artificial Sequence: Synthetic oligonucleotide
ggccuaguucacauuaagu

SEQ ID NO: 264221 - RNA, 19 nt, Artificial Sequence
  Description of Artificial Sequence: Synthetic oligonucleotide
acccagggguuuacagugu

SEQ ID NO: 264222 - RNA, 19 nt, Artificial Sequence
  Description of Artificial Sequence: Synthetic oligonucleotide
ucccaagagccgggcugca

SEQ ID NO: 264223 - RNA, 19 nt, Artificial Sequence
  Description of Artificial Sequence: Synthetic oligonucleotide
ggguaccagucacaauaaa

SEQ ID NO: 264224 - RNA, 19 nt, Artificial Sequence
  Description of Artificial Sequence: Synthetic oligonucleotide
cgcucuacaguuggugggc

SEQ ID NO: 264225 - RNA, 19 nt, Artificial Sequence
  Description of Artificial Sequence: Synthetic oligonucleotide
cguuuuacccugacuuaga

SEQ ID NO: 264226 - RNA, 19 nt, Artificial Sequence
  Description of Artificial Sequence: Synthetic oligonucleotide
gccacuuaugguaaccgau

SEQ ID NO: 264227 - RNA, 19 nt, Artificial Sequence
  Description of Artificial Sequence: Synthetic oligonucleotide
gacacccaacaggauuccu

SEQ ID NO: 264228 - RNA, 19 nt, Artificial Sequence
  Description of Artificial Sequence: Synthetic oligonucleotide
gccuaaugacugggaagac

SEQ ID NO: 264229 - RNA, 19 nt, Artificial Sequence
  Description of Artificial Sequence: Synthetic oligonucleotide
ccggaaccuggcgggaagg

SEQ ID NO: 264230 - RNA, 19 nt, Artificial Sequence
  Description of Artificial Sequence: Synthetic oligonucleotide
gccggacagcaagaacaag

SEQ ID NO: 264231 - RNA, 19 nt, Artificial Sequence
  Description of Artificial Sequence: Synthetic oligonucleotide
ggucgacuuuucuaucuuu

SEQ ID NO: 264232 - RNA, 19 nt, Artificial Sequence
  Description of Artificial Sequence: Synthetic oligonucleotide
ccccaaucucccguuuuac

SEQ ID NO: 264233 - RNA, 19 nt, Artificial Sequence
  Description of Artificial Sequence: Synthetic oligonucleotide
ggagaaggggucgacuuuu

SEQ ID NO: 264234 - RNA, 19 nt, Artificial Sequence
  Description of Artificial Sequence: Synthetic oligonucleotide
gggaccaacuccggaaccu

SEQ ID NO: 264235 - RNA, 19 nt, Artificial Sequence
  Description of Artificial Sequence: Synthetic oligonucleotide
aucucccguuuuacccuga

SEQ ID NO: 264236 - RNA, 19 nt, Artificial Sequence
  Description of Artificial Sequence: Synthetic oligonucleotide
cucccguuuuacccugacu

SEQ ID NO: 264237 - RNA, 19 nt, Artificial Sequence
  Description of Artificial Sequence: Synthetic oligonucleotide
cccguuuuacccugacuua

SEQ ID NO: 264238 - RNA, 19 nt, Artificial Sequence
  Description of Artificial Sequence: Synthetic oligonucleotide
gccaaggaguuuccagcua

SEQ ID NO: 264239 - RNA, 19 nt, Artificial Sequence
  Description of Artificial Sequence: Synthetic oligonucleotide
cacggugaucuggccccac

SEQ ID NO: 264240 - RNA, 19 nt, Artificial Sequence
  Description of Artificial Sequence: Synthetic oligonucleotide
cgggaccaacuccggaacc

SEQ ID NO: 264241 - RNA, 19 nt, Artificial Sequence
  Description of Artificial Sequence: Synthetic oligonucleotide
cagcuagccaacagaucuu

SEQ ID NO: 264242 - RNA, 19 nt, Artificial Sequence
  Description of Artificial Sequence: Synthetic oligonucleotide
gcuuuaauucuggccugcu

SEQ ID NO: 264243 - RNA, 19 nt, Artificial Sequence
  Description of Artificial Sequence: Synthetic oligonucleotide
ggaguguaucucaacccuu

SEQ ID NO: 264244 - RNA, 19 nt, Artificial Sequence
  Description of Artificial Sequence: Synthetic oligonucleotide
gguuuggguuccacacaaa

SEQ ID NO: 264245 - RNA, 19 nt, Artificial Sequence
  Description of Artificial Sequence: Synthetic oligonucleotide
gcaugccggacagcaagaa

SEQ ID NO: 264246 - RNA, 19 nt, Artificial Sequence
  Description of Artificial Sequence: Synthetic oligonucleotide
ggguaucagauugcucagu

SEQ ID NO: 264247 - RNA, 19 nt, Artificial Sequence
  Description of Artificial Sequence: Synthetic oligonucleotide
ccuggcgggaagggagcgc

SEQ ID NO: 264248 - RNA, 19 nt, Artificial Sequence
  Description of Artificial Sequence: Synthetic oligonucleotide
cuccggaaccuggcgggaa

SEQ ID NO: 264249 - RNA, 19 nt, Artificial Sequence
  Description of Artificial Sequence: Synthetic oligonucleotide
gggcacaacaggaguguau

SEQ ID NO: 264250 - RNA, 19 nt, Artificial Sequence
  Description of Artificial Sequence: Synthetic oligonucleotide
gguguggaggcugguggau

SEQ ID NO: 264251 - RNA, 19 nt, Artificial Sequence
  Description of Artificial Sequence: Synthetic oligonucleotide
gcacacccagugcccucga

SEQ ID NO: 264252 - RNA, 19 nt, Artificial Sequence
  Description of Artificial Sequence: Synthetic oligonucleotide
ccacggugaucuggcccca

SEQ ID NO: 264253 - RNA, 19 nt, Artificial Sequence
  Description of Artificial Sequence: Synthetic oligonucleotide
aauuaaguccaacugggcc

SEQ ID NO: 264254 - RNA, 19 nt, Artificial Sequence
  Description of Artificial Sequence: Synthetic oligonucleotide
uguaauuaaguccaacugg

SEQ ID NO: 264255 - RNA, 19 nt, Artificial Sequence
  Description of Artificial Sequence: Synthetic oligonucleotide
uuugcuuucguaaauauga

SEQ ID NO: 264256 - RNA, 19 nt, Artificial Sequence
  Description of Artificial Sequence: Synthetic oligonucleotide
uguuggaagaaauuaagca

SEQ ID NO: 264257 - RNA, 19 nt, Artificial Sequence
  Description of Artificial Sequence: Synthetic oligonucleotide
auaaagaauucucacagug

SEQ ID NO: 264258 - RNA, 19 nt, Artificial Sequence
  Description of Artificial Sequence: Synthetic oligonucleotide
uguguguugauguuuaaug

SEQ ID NO: 264259 - RNA, 19 nt, Artificial Sequence
  Description of Artificial Sequence: Synthetic oligonucleotide
aagaugcggccacauaucc

SEQ ID NO: 264260 - RNA, 19 nt, Artificial Sequence
  Description of Artificial Sequence: Synthetic oligonucleotide
agaaauuaagcagaugagg

SEQ ID NO: 264261 - RNA, 19 nt, Artificial Sequence
  Description of Artificial Sequence: Synthetic oligonucleotide
uccaucguagaucacaggc

SEQ ID NO: 264262 - RNA, 19 nt, Artificial Sequence
  Description of Artificial Sequence: Synthetic oligonucleotide
uuguaugccaagcucagcc

SEQ ID NO: 264263 - RNA, 19 nt, Artificial Sequence
  Description of Artificial Sequence: Synthetic oligonucleotide
uguuuaaugagaugaguga

SEQ ID NO: 264264 - RNA, 19 nt, Artificial Sequence
  Description of Artificial Sequence: Synthetic oligonucleotide
aguaguuuguuauuaauau

SEQ ID NO: 264265 - RNA, 19 nt, Artificial Sequence
  Description of Artificial Sequence: Synthetic oligonucleotide
aauugcaucgggugguggg

SEQ ID NO: 264266 - RNA, 19 nt, Artificial Sequence
  Description of Artificial Sequence: Synthetic oligonucleotide
ugugcuaagauucuaucaa

SEQ ID NO: 264267 - RNA, 19 nt, Artificial Sequence
  Description of Artificial Sequence: Synthetic oligonucleotide
auacauuucucuucagcac

SEQ ID NO: 264268 - RNA, 19 nt, Artificial Sequence
  Description of Artificial Sequence: Synthetic oligonucleotide
ucccggaaaagaaugaccc

SEQ ID NO: 264269 - RNA, 19 nt, Artificial Sequence
  Description of Artificial Sequence: Synthetic oligonucleotide
ucggacuuuugccagagag

SEQ ID NO: 264270 - RNA, 19 nt, Artificial Sequence
  Description of Artificial Sequence: Synthetic oligonucleotide
cucugcaugcucuaggugg

SEQ ID NO: 264271 - RNA, 19 nt, Artificial Sequence
  Description of Artificial Sequence: Synthetic oligonucleotide
uuaaaauugggaacuacuu

SEQ ID NO: 264272 - RNA, 19 nt, Artificial Sequence
  Description of Artificial Sequence: Synthetic oligonucleotide
uuguuggaagaaauuaagc

SEQ ID NO: 264273 - RNA, 19 nt, Artificial Sequence
  Description of Artificial Sequence: Synthetic oligonucleotide
aaauuaagcagaugaggaa

SEQ ID NO: 264274 - RNA, 19 nt, Artificial Sequence
  Description of Artificial Sequence: Synthetic oligonucleotide
uaaugacuaaaccucauua

SEQ ID NO: 264275 - RNA, 19 nt, Artificial Sequence
  Description of Artificial Sequence: Synthetic oligonucleotide
agggguucgaaccuuuagc

SEQ ID NO: 264276 - RNA, 19 nt, Artificial Sequence
  Description of Artificial Sequence: Synthetic oligonucleotide
aauuaagcagaugaggaaa

SEQ ID NO: 264277 - RNA, 19 nt, Artificial Sequence
  Description of Artificial Sequence: Synthetic oligonucleotide
uuuguguugcauucccugg

SEQ ID NO: 264278 - RNA, 19 nt, Artificial Sequence
  Description of Artificial Sequence: Synthetic oligonucleotide
cuaaaagcaggccaucuag

SEQ ID NO: 264279 - RNA, 19 nt, Artificial Sequence
  Description of Artificial Sequence: Synthetic oligonucleotide
ucuagauuaaacacacauc

SEQ ID NO: 264280 - RNA, 19 nt, Artificial Sequence
  Description of Artificial Sequence: Synthetic oligonucleotide
gaguuagugaguuugaugu

SEQ ID NO: 264281 - RNA, 19 nt, Artificial Sequence
  Description of Artificial Sequence: Synthetic oligonucleotide
ugcagacugaguuugcucc

SEQ ID NO: 264282 - RNA, 19 nt, Artificial Sequence
  Description of Artificial Sequence: Synthetic oligonucleotide
acgugaaaggcacacuuac

SEQ ID NO: 264283 - RNA, 19 nt, Artificial Sequence
  Description of Artificial Sequence: Synthetic oligonucleotide
aagaaauuaagcagaugag

SEQ ID NO: 264284 - RNA, 19 nt, Artificial Sequence
  Description of Artificial Sequence: Synthetic oligonucleotide
guaguaacagaagaugcgg

SEQ ID NO: 264285 - RNA, 19 nt, Artificial Sequence
  Description of Artificial Sequence: Synthetic oligonucleotide
uuucguaaauaugagcagc

SEQ ID NO: 264286 - RNA, 19 nt, Artificial Sequence
  Description of Artificial Sequence: Synthetic oligonucleotide
gguucgaaccuuuagcugg

SEQ ID NO: 264287 - RNA, 19 nt, Artificial Sequence
  Description of Artificial Sequence: Synthetic oligonucleotide
uucguaaauaugagcagca

SEQ ID NO: 264288 - RNA, 19 nt, Artificial Sequence
  Description of Artificial Sequence: Synthetic oligonucleotide
cuaguagaggcuucagugg

SEQ ID NO: 264289 - RNA, 19 nt, Artificial Sequence
  Description of Artificial Sequence: Synthetic oligonucleotide
ugggaauugcaucgggugg

SEQ ID NO: 264290 - RNA, 19 nt, Artificial Sequence
  Description of Artificial Sequence: Synthetic oligonucleotide
ggugaagucuaguagaggc

SEQ ID NO: 264291 - RNA, 19 nt, Artificial Sequence
  Description of Artificial Sequence: Synthetic oligonucleotide
aaauaugagcagcacucga

SEQ ID NO: 264292 - RNA, 19 nt, Artificial Sequence
  Description of Artificial Sequence: Synthetic oligonucleotide
ucaggaguuagugaguuug

SEQ ID NO: 264293 - RNA, 19 nt, Artificial Sequence
  Description of Artificial Sequence: Synthetic oligonucleotide
caucguagaucacaggccg

SEQ ID NO: 264294 - RNA, 19 nt, Artificial Sequence
  Description of Artificial Sequence: Synthetic oligonucleotide
acuacuauggcugcuauga

SEQ ID NO: 264295 - RNA, 19 nt, Artificial Sequence
  Description of Artificial Sequence: Synthetic oligonucleotide
uaaaugcucucuaguagcc

SEQ ID NO: 264296 - RNA, 19 nt, Artificial Sequence
  Description of Artificial Sequence: Synthetic oligonucleotide
auauaagcaaguagaugcc

SEQ ID NO: 264297 - RNA, 19 nt, Artificial Sequence
  Description of Artificial Sequence: Synthetic oligonucleotide
acaacacuacuauggcugc

SEQ ID NO: 264298 - RNA, 19 nt, Artificial Sequence
  Description of Artificial Sequence: Synthetic oligonucleotide
uaaauaugagcagcacucg

SEQ ID NO: 264299 - RNA, 19 nt, Artificial Sequence
  Description of Artificial Sequence: Synthetic oligonucleotide
uuuagaguccuggagcucc

SEQ ID NO: 264300 - RNA, 19 nt, Artificial Sequence
  Description of Artificial Sequence: Synthetic oligonucleotide
uguagugcugccucuuuag

SEQ ID NO: 264301 - RNA, 19 nt, Artificial Sequence
  Description of Artificial Sequence: Synthetic oligonucleotide
cucucuaguagccuagugc

SEQ ID NO: 264302 - RNA, 19 nt, Artificial Sequence
  Description of Artificial Sequence: Synthetic oligonucleotide
ugcuaagauucuaucaagu

SEQ ID NO: 264303 - RNA, 19 nt, Artificial Sequence
  Description of Artificial Sequence: Synthetic oligonucleotide
gaagacccaacugauagug

SEQ ID NO: 264304 - RNA, 19 nt, Artificial Sequence
  Description of Artificial Sequence: Synthetic oligonucleotide
aacagucaggugguaaaac

SEQ ID NO: 264305 - RNA, 19 nt, Artificial Sequence
  Description of Artificial Sequence: Synthetic oligonucleotide
uugugcuaagauucuauca

SEQ ID NO: 264306 - RNA, 19 nt, Artificial Sequence
  Description of Artificial Sequence: Synthetic oligonucleotide
uuuaccuccuggcaguagu

SEQ ID NO: 264307 - RNA, 19 nt, Artificial Sequence
  Description of Artificial Sequence: Synthetic oligonucleotide
uaauuaaguccaacugggc

SEQ ID NO: 264308 - RNA, 19 nt, Artificial Sequence
  Description of Artificial Sequence: Synthetic oligonucleotide
ugaugugguguccuguuca

SEQ ID NO: 264309 - RNA, 19 nt, Artificial Sequence
  Description of Artificial Sequence: Synthetic oligonucleotide
cuuucguaaauaugagcag

SEQ ID NO: 264310 - RNA, 19 nt, Artificial Sequence
  Description of Artificial Sequence: Synthetic oligonucleotide
ugcuugagagggaaaagga

SEQ ID NO: 264311 - RNA, 19 nt, Artificial Sequence
  Description of Artificial Sequence: Synthetic oligonucleotide
uauaaagaauucucacagu

SEQ ID NO: 264312 - RNA, 19 nt, Artificial Sequence
  Description of Artificial Sequence: Synthetic oligonucleotide
ucacuuggagcuccaagcc

SEQ ID NO: 264313 - RNA, 19 nt, Artificial Sequence
  Description of Artificial Sequence: Synthetic oligonucleotide
cuggaauuccagugcaucg

SEQ ID NO: 264314 - RNA, 19 nt, Artificial Sequence
  Description of Artificial Sequence: Synthetic oligonucleotide
gguguuucaggcaaggagg

SEQ ID NO: 264315 - RNA, 19 nt, Artificial Sequence
  Description of Artificial Sequence: Synthetic oligonucleotide
aagguguugucaaauauaa

SEQ ID NO: 264316 - RNA, 19 nt, Artificial Sequence
  Description of Artificial Sequence: Synthetic oligonucleotide
acggugauggggaucaugc

SEQ ID NO: 264317 - RNA, 19 nt, Artificial Sequence
  Description of Artificial Sequence: Synthetic oligonucleotide
auaugagcagcacucgaug

SEQ ID NO: 264318 - RNA, 19 nt, Artificial Sequence
  Description of Artificial Sequence: Synthetic oligonucleotide
ugcuuucguaaauaugagc

SEQ ID NO: 264319 - RNA, 19 nt, Artificial Sequence
  Description of Artificial Sequence: Synthetic oligonucleotide
uggaauuccagugcaucgg

SEQ ID NO: 264320 - RNA, 19 nt, Artificial Sequence
  Description of Artificial Sequence: Synthetic oligonucleotide
auuggcaugucuucagugu

SEQ ID NO: 264321 - RNA, 19 nt, Artificial Sequence
  Description of Artificial Sequence: Synthetic oligonucleotide
aguagccuagugcucagag

SEQ ID NO: 264322 - RNA, 19 nt, Artificial Sequence
  Description of Artificial Sequence: Synthetic oligonucleotide
ugaguuugcuccuugguuu

SEQ ID NO: 264323 - RNA, 19 nt, Artificial Sequence
  Description of Artificial Sequence: Synthetic oligonucleotide
agaucagggaaugaacuag

SEQ ID NO: 264324 - RNA, 19 nt, Artificial Sequence
  Description of Artificial Sequence: Synthetic oligonucleotide
ucuaucaaguaguguuugc

SEQ ID NO: 264325 - RNA, 19 nt, Artificial Sequence
  Description of Artificial Sequence: Synthetic oligonucleotide
ucggcuacggugaugggga

SEQ ID NO: 264326 - RNA, 19 nt, Artificial Sequence
  Description of Artificial Sequence: Synthetic oligonucleotide
gagucauuagaggaggagc

SEQ ID NO: 264327 - RNA, 19 nt, Artificial Sequence
  Description of Artificial Sequence: Synthetic oligonucleotide
gaaaucgcuuccaucguag

SEQ ID NO: 264328 - RNA, 19 nt, Artificial Sequence
  Description of Artificial Sequence: Synthetic oligonucleotide
uuuggagauaaaucuggaa

SEQ ID NO: 264329 - RNA, 19 nt, Artificial Sequence
  Description of Artificial Sequence: Synthetic oligonucleotide
auuugaucaucagcucucc

SEQ ID NO: 264330 - RNA, 19 nt, Artificial Sequence
  Description of Artificial Sequence: Synthetic oligonucleotide
uccauugaaucaguuucgg

SEQ ID NO: 264331 - RNA, 19 nt, Artificial Sequence
  Description of Artificial Sequence: Synthetic oligonucleotide
agcauccugccccauuggc

SEQ ID NO: 264332 - RNA, 19 nt, Artificial Sequence
  Description of Artificial Sequence: Synthetic oligonucleotide
cugacaacacuacuauggc

SEQ ID NO: 264333 - RNA, 19 nt, Artificial Sequence
  Description of Artificial Sequence: Synthetic oligonucleotide
agugaguuugauguggugu

SEQ ID NO: 264334 - RNA, 19 nt, Artificial Sequence
  Description of Artificial Sequence: Synthetic oligonucleotide
gaguaguaguguuuccuug

SEQ ID NO: 264335 - RNA, 19 nt, Artificial Sequence
  Description of Artificial Sequence: Synthetic oligonucleotide
cuuagucacugcauaguug

SEQ ID NO: 264336 - RNA, 19 nt, Artificial Sequence
  Description of Artificial Sequence: Synthetic oligonucleotide
aggaaauugugcuaagauu

SEQ ID NO: 264337 - RNA, 19 nt, Artificial Sequence
  Description of Artificial Sequence: Synthetic oligonucleotide
aaaccucauuaaaauuggg

SEQ ID NO: 264338 - RNA, 19 nt, Artificial Sequence
  Description of Artificial Sequence: Synthetic oligonucleotide
agcuacacgugaaaggcac

SEQ ID NO: 264339 - RNA, 19 nt, Artificial Sequence
  Description of Artificial Sequence: Synthetic oligonucleotide
acuaaaccucauuaaaauu

SEQ ID NO: 264340 - RNA, 19 nt, Artificial Sequence
  Description of Artificial Sequence: Synthetic oligonucleotide
uguuacccuccccaaagcu

SEQ ID NO: 264341 - RNA, 19 nt, Artificial Sequence
  Description of Artificial Sequence: Synthetic oligonucleotide
uguugcauucccugguucu

SEQ ID NO: 264342 - RNA, 19 nt, Artificial Sequence
  Description of Artificial Sequence: Synthetic oligonucleotide
cucuuggaagaccacacug

SEQ ID NO: 264343 - RNA, 19 nt, Artificial Sequence
  Description of Artificial Sequence: Synthetic oligonucleotide
aauaugagcagcacucgau

SEQ ID NO: 264344 - RNA, 19 nt, Artificial Sequence
  Description of Artificial Sequence: Synthetic oligonucleotide
aaucaguuucggugggugu

SEQ ID NO: 264345 - RNA, 19 nt, Artificial Sequence
  Description of Artificial Sequence: Synthetic oligonucleotide
aauugugcuaagauucuau

SEQ ID NO: 264346 - RNA, 19 nt, Artificial Sequence
  Description of Artificial Sequence: Synthetic oligonucleotide
augggaaaucgcuuccauc

SEQ ID NO: 264347 - RNA, 19 nt, Artificial Sequence
  Description of Artificial Sequence: Synthetic oligonucleotide
gaaugaggaccuugcacug

SEQ ID NO: 264348 - RNA, 19 nt, Artificial Sequence
  Description of Artificial Sequence: Synthetic oligonucleotide
guuacucuaaugacuaaac

SEQ ID NO: 264349 - RNA, 19 nt, Artificial Sequence
  Description of Artificial Sequence: Synthetic oligonucleotide
ucuaaugacuaaaccucau

SEQ ID NO: 264350 - RNA, 19 nt, Artificial Sequence
  Description of Artificial Sequence: Synthetic oligonucleotide
auaagcaaguagaugccag

SEQ ID NO: 264351 - RNA, 19 nt, Artificial Sequence
  Description of Artificial Sequence: Synthetic oligonucleotide
ugcuaugggaaaucgcuuc

SEQ ID NO: 264352 - RNA, 19 nt, Artificial Sequence
  Description of Artificial Sequence: Synthetic oligonucleotide
guaguguuugcuuucguaa

SEQ ID NO: 264353 - RNA, 19 nt, Artificial Sequence
  Description of Artificial Sequence: Synthetic oligonucleotide
gcuuucguaaauaugagca

SEQ ID NO: 264354 - RNA, 19 nt, Artificial Sequence
  Description of Artificial Sequence: Synthetic oligonucleotide
gacuaaaccucauuaaaau

SEQ ID NO: 264355 - RNA, 19 nt, Artificial Sequence
  Description of Artificial Sequence: Synthetic oligonucleotide
uagguacuggaccucacaa

SEQ ID NO: 264356 - RNA, 19 nt, Artificial Sequence
  Description of Artificial Sequence: Synthetic oligonucleotide
uucuaucaaguaguguuug

SEQ ID NO: 264357 - RNA, 19 nt, Artificial Sequence
  Description of Artificial Sequence: Synthetic oligonucleotide
gaugugguguccuguucag

SEQ ID NO: 264358 - RNA, 19 nt, Artificial Sequence
  Description of Artificial Sequence: Synthetic oligonucleotide
gaugcuaugggaaaucgcu

SEQ ID NO: 264359 - RNA, 19 nt, Artificial Sequence
  Description of Artificial Sequence: Synthetic oligonucleotide
gugcuaagauucuaucaag

SEQ ID NO: 264360 - RNA, 19 nt, Artificial Sequence
  Description of Artificial Sequence: Synthetic oligonucleotide
ugugugugugugugugugg

SEQ ID NO: 264361 - RNA, 19 nt, Artificial Sequence
  Description of Artificial Sequence: Synthetic oligonucleotide
ucgauggucuuuguguugc

SEQ ID NO: 264362 - RNA, 19 nt, Artificial Sequence
  Description of Artificial Sequence: Synthetic oligonucleotide
gaaaccauggggcugggcu

SEQ ID NO: 264363 - RNA, 19 nt, Artificial Sequence
  Description of Artificial Sequence: Synthetic oligonucleotide
agggcuaaaugcucucuag

SEQ ID NO: 264364 - RNA, 19 nt, Artificial Sequence
  Description of Artificial Sequence: Synthetic oligonucleotide
cagugcaucggacuuuugc

SEQ ID NO: 264365 - RNA, 19 nt, Artificial Sequence
  Description of Artificial Sequence: Synthetic oligonucleotide
cucccggaaaagaaugacc

SEQ ID NO: 264366 - RNA, 19 nt, Artificial Sequence
  Description of Artificial Sequence: Synthetic oligonucleotide
ugcuaucaggggauccagg

SEQ ID NO: 264367 - RNA, 19 nt, Artificial Sequence
  Description of Artificial Sequence: Synthetic oligonucleotide
ccuugugggaauugcaucg

SEQ ID NO: 264368 - RNA, 19 nt, Artificial Sequence
  Description of Artificial Sequence: Synthetic oligonucleotide
ucggguggugggaaugagg

SEQ ID NO: 264369 - RNA, 19 nt, Artificial Sequence
  Description of Artificial Sequence: Synthetic oligonucleotide
gaaucaguuucggugggug

SEQ ID NO: 264370 - RNA, 19 nt, Artificial Sequence
  Description of Artificial Sequence: Synthetic oligonucleotide
aguuuguuauuaauauucu

SEQ ID NO: 264371 - RNA, 19 nt, Artificial Sequence
  Description of Artificial Sequence: Synthetic oligonucleotide
uaguguuugcuuucguaaa

SEQ ID NO: 264372 - RNA, 19 nt, Artificial Sequence
  Description of Artificial Sequence: Synthetic oligonucleotide
aaugaacuagcugcuuccu

SEQ ID NO: 264373 - RNA, 19 nt, Artificial Sequence
  Description of Artificial Sequence: Synthetic oligonucleotide
gaugagcuaucaaaaguuc

SEQ ID NO: 264374 - RNA, 19 nt, Artificial Sequence
  Description of Artificial Sequence: Synthetic oligonucleotide
cauuggcaugucuucagug

SEQ ID NO: 264375 - RNA, 19 nt, Artificial Sequence
  Description of Artificial Sequence: Synthetic oligonucleotide
cauuaaaauugggaacuac

SEQ ID NO: 264376 - RNA, 19 nt, Artificial Sequence
  Description of Artificial Sequence: Synthetic oligonucleotide
aguaguguuugcuuucgua

SEQ ID NO: 264377 - RNA, 19 nt, Artificial Sequence
  Description of Artificial Sequence: Synthetic oligonucleotide
ugaggaaauugugcuaaga

SEQ ID NO: 264378 - RNA, 19 nt, Artificial Sequence
  Description of Artificial Sequence: Synthetic oligonucleotide
guccauugaaucaguuucg

SEQ ID NO: 264379 - RNA, 19 nt, Artificial Sequence
  Description of Artificial Sequence: Synthetic oligonucleotide
ucuuuguguugcauucccu

SEQ ID NO: 264380 - RNA, 19 nt, Artificial Sequence
  Description of Artificial Sequence: Synthetic oligonucleotide
aguuacucuaaugacuaaa

SEQ ID NO: 264381 - RNA, 19 nt, Artificial Sequence
  Description of Artificial Sequence: Synthetic oligonucleotide
uccuugguuuccuaugguc

SEQ ID NO: 264382 - RNA, 19 nt, Artificial Sequence
  Description of Artificial Sequence: Synthetic oligonucleotide
acacgugaaaggcacacuu

SEQ ID NO: 264383 - RNA, 19 nt, Artificial Sequence
  Description of Artificial Sequence: Synthetic oligonucleotide
ggaguuagugaguuugaug

SEQ ID NO: 264384 - RNA, 19 nt, Artificial Sequence
  Description of Artificial Sequence: Synthetic oligonucleotide
uaugagggagcugagucau

SEQ ID NO: 264385 - RNA, 19 nt, Artificial Sequence
  Description of Artificial Sequence: Synthetic oligonucleotide
auauccugcaguggugccg

SEQ ID NO: 264386 - RNA, 19 nt, Artificial Sequence
  Description of Artificial Sequence: Synthetic oligonucleotide
ucgaaccuuuagcuggccc

SEQ ID NO: 264387 - RNA, 19 nt, Artificial Sequence
  Description of Artificial Sequence: Synthetic oligonucleotide
uagaucacaggccggucaa

SEQ ID NO: 264388 - RNA, 19 nt, Artificial Sequence
  Description of Artificial Sequence: Synthetic oligonucleotide
cuaucagccguuccucaag

SEQ ID NO: 264389 - RNA, 19 nt, Artificial Sequence
  Description of Artificial Sequence: Synthetic oligonucleotide
cuaucaggggauccagggc

SEQ ID NO: 264390 - RNA, 19 nt, Artificial Sequence
  Description of Artificial Sequence: Synthetic oligonucleotide
uuaaguccaacugggccac

SEQ ID NO: 264391 - RNA, 19 nt, Artificial Sequence
  Description of Artificial Sequence: Synthetic oligonucleotide
uuguuacagcaguaguaac

SEQ ID NO: 264392 - RNA, 19 nt, Artificial Sequence
  Description of Artificial Sequence: Synthetic oligonucleotide
ugggcuuagucacugcaua

SEQ ID NO: 264393 - RNA, 19 nt, Artificial Sequence
  Description of Artificial Sequence: Synthetic oligonucleotide
gaggaaauugugcuaagau

SEQ ID NO: 264394 - RNA, 19 nt, Artificial Sequence
  Description of Artificial Sequence: Synthetic oligonucleotide
aagucuaguagaggcuuca

SEQ ID NO: 264395 - RNA, 19 nt, Artificial Sequence
  Description of Artificial Sequence: Synthetic oligonucleotide
acuaaaagcaggccaucua

SEQ ID NO: 264396 - RNA, 19 nt, Artificial Sequence
  Description of Artificial Sequence: Synthetic oligonucleotide
ggccaucuagauuaaacac

SEQ ID NO: 264397 - RNA, 19 nt, Artificial Sequence
  Description of Artificial Sequence: Synthetic oligonucleotide
cucuaaugacuaaaccuca

SEQ ID NO: 264398 - RNA, 19 nt, Artificial Sequence
  Description of Artificial Sequence: Synthetic oligonucleotide
agaagacccaacugauagu

SEQ ID NO: 264399 - RNA, 19 nt, Artificial Sequence
  Description of Artificial Sequence: Synthetic oligonucleotide
ugugugugguguguguuga

SEQ ID NO: 264400 - RNA, 19 nt, Artificial Sequence
  Description of Artificial Sequence: Synthetic oligonucleotide
uuccaucguagaucacagg

SEQ ID NO: 264401 - RNA, 19 nt, Artificial Sequence
  Description of Artificial Sequence: Synthetic oligonucleotide
ucaguggcacuggaaaaca

SEQ ID NO: 264402 - RNA, 19 nt, Artificial Sequence
  Description of Artificial Sequence: Synthetic oligonucleotide
aaaugcucucuaguagccu

SEQ ID NO: 264403 - RNA, 19 nt, Artificial Sequence
  Description of Artificial Sequence: Synthetic oligonucleotide
ugaguuugauguggugucc

SEQ ID NO: 264404 - RNA, 19 nt, Artificial Sequence
  Description of Artificial Sequence: Synthetic oligonucleotide
ucuaucagccguuccucaa

SEQ ID NO: 264405 - RNA, 19 nt, Artificial Sequence
  Description of Artificial Sequence: Synthetic oligonucleotide
gagugugugugugugugug

SEQ ID NO: 264406 - RNA, 19 nt, Artificial Sequence
  Description of Artificial Sequence: Synthetic oligonucleotide
cauccuauccuucucagcu

SEQ ID NO: 264407 - RNA, 19 nt, Artificial Sequence
  Description of Artificial Sequence: Synthetic oligonucleotide
cucaaggaugucuccuuac

SEQ ID NO: 264408 - RNA, 19 nt, Artificial Sequence
  Description of Artificial Sequence: Synthetic oligonucleotide
aguuguuacagcaguagua

SEQ ID NO: 264409 - RNA, 19 nt, Artificial Sequence
  Description of Artificial Sequence: Synthetic oligonucleotide
agcugagucauuagaggag

SEQ ID NO: 264410 - RNA, 19 nt, Artificial Sequence
  Description of Artificial Sequence: Synthetic oligonucleotide
cuugugggaauugcaucgg

SEQ ID NO: 264411 - RNA, 19 nt, Artificial Sequence
  Description of Artificial Sequence: Synthetic oligonucleotide
ggaaugaacuagcugcuuc

SEQ ID NO: 264412 - RNA, 19 nt, Artificial Sequence
  Description of Artificial Sequence: Synthetic oligonucleotide
guagaucacaggccgguca

SEQ ID NO: 264413 - RNA, 19 nt, Artificial Sequence
  Description of Artificial Sequence: Synthetic oligonucleotide
uguguguguguguggugug

SEQ ID NO: 264414 - RNA, 19 nt, Artificial Sequence
  Description of Artificial Sequence: Synthetic oligonucleotide
cucggcuacggugaugggg

SEQ ID NO: 264415 - RNA, 19 nt, Artificial Sequence
  Description of Artificial Sequence: Synthetic oligonucleotide
cauauccugcaguggugcc

SEQ ID NO: 264416 - RNA, 19 nt, Artificial Sequence
  Description of Artificial Sequence: Synthetic oligonucleotide
ucucaaggaugucuccuua

SEQ ID NO: 264417 - RNA, 19 nt, Artificial Sequence
  Description of Artificial Sequence: Synthetic oligonucleotide
ucgucuaggucugccagca

SEQ ID NO: 264418 - RNA, 19 nt, Artificial Sequence
  Description of Artificial Sequence: Synthetic oligonucleotide
cacgauccagcugaacucc

SEQ ID NO: 264419 - RNA, 19 nt, Artificial Sequence
  Description of Artificial Sequence: Synthetic oligonucleotide
cuacacgugaaaggcacac

SEQ ID NO: 264420 - RNA, 19 nt, Artificial Sequence
  Description of Artificial Sequence: Synthetic oligonucleotide
ugccuguagaucagggaau

SEQ ID NO: 264421 - RNA, 19 nt, Artificial Sequence
  Description of Artificial Sequence: Synthetic oligonucleotide
cucagagugugugugugug

SEQ ID NO: 264422 - RNA, 19 nt, Artificial Sequence
  Description of Artificial Sequence: Synthetic oligonucleotide
uugaugugguguccuguuc

SEQ ID NO: 264423 - RNA, 19 nt, Artificial Sequence
  Description of Artificial Sequence: Synthetic oligonucleotide
gaagaugcggccacauauc

SEQ ID NO: 264424 - RNA, 19 nt, Artificial Sequence
  Description of Artificial Sequence: Synthetic oligonucleotide
cacauauccugcaguggug

SEQ ID NO: 264425 - RNA, 19 nt, Artificial Sequence
  Description of Artificial Sequence: Synthetic oligonucleotide
uguguugcauucccugguu

SEQ ID NO: 264426 - RNA, 19 nt, Artificial Sequence
  Description of Artificial Sequence: Synthetic oligonucleotide
uagugaguuugauguggug

SEQ ID NO: 264427 - RNA, 19 nt, Artificial Sequence
  Description of Artificial Sequence: Synthetic oligonucleotide
aggaugucuccuuacgauu

SEQ ID NO: 264428 - RNA, 19 nt, Artificial Sequence
  Description of Artificial Sequence: Synthetic oligonucleotide
uguguguguguggugugug

SEQ ID NO: 264429 - RNA, 19 nt, Artificial Sequence
  Description of Artificial Sequence: Synthetic oligonucleotide
uaguaguguuuccuuggau

SEQ ID NO: 264430 - RNA, 19 nt, Artificial Sequence
  Description of Artificial Sequence: Synthetic oligonucleotide
gaauugcaucggguggugg

SEQ ID NO: 264431 - RNA, 19 nt, Artificial Sequence
  Description of Artificial Sequence: Synthetic oligonucleotide
ucguaaauaugagcagcac

SEQ ID NO: 264432 - RNA, 19 nt, Artificial Sequence
  Description of Artificial Sequence: Synthetic oligonucleotide
gccuucgccaaacuucugg

SEQ ID NO: 264433 - RNA, 19 nt, Artificial Sequence
  Description of Artificial Sequence: Synthetic oligonucleotide
uguguguguguguguggug

SEQ ID NO: 264434 - RNA, 19 nt, Artificial Sequence
  Description of Artificial Sequence: Synthetic oligonucleotide
cagagugugugugugugug

SEQ ID NO: 264435 - RNA, 19 nt, Artificial Sequence
  Description of Artificial Sequence: Synthetic oligonucleotide
gagggagcugagucauuag

SEQ ID NO: 264436 - RNA, 19 nt, Artificial Sequence
  Description of Artificial Sequence: Synthetic oligonucleotide
guaguaguguuuccuugga

SEQ ID NO: 264437 - RNA, 19 nt, Artificial Sequence
  Description of Artificial Sequence: Synthetic oligonucleotide
caagaauguuuucucagua

SEQ ID NO: 264438 - RNA, 19 nt, Artificial Sequence
  Description of Artificial Sequence: Synthetic oligonucleotide
cuacuauggcugcuaugag

SEQ ID NO: 264439 - RNA, 19 nt, Artificial Sequence
  Description of Artificial Sequence: Synthetic oligonucleotide
guucagccauauuuggguc

SEQ ID NO: 264440 - RNA, 19 nt, Artificial Sequence
  Description of Artificial Sequence: Synthetic oligonucleotide
aggaccuugcacuggucga

SEQ ID NO: 264441 - RNA, 19 nt, Artificial Sequence
  Description of Artificial Sequence: Synthetic oligonucleotide
guagaucagggaaugaacu

SEQ ID NO: 264442 - RNA, 19 nt, Artificial Sequence
  Description of Artificial Sequence: Synthetic oligonucleotide
ucagagugugugugugugu

SEQ ID NO: 264443 - RNA, 19 nt, Artificial Sequence
  Description of Artificial Sequence: Synthetic oligonucleotide
gugugugugguguguguug

SEQ ID NO: 264444 - RNA, 19 nt, Artificial Sequence
  Description of Artificial Sequence: Synthetic oligonucleotide
ugugugugugugugugugu

SEQ ID NO: 264445 - RNA, 19 nt, Artificial Sequence
  Description of Artificial Sequence: Synthetic oligonucleotide
ggcucggcuacggugaugg

SEQ ID NO: 264446 - RNA, 19 nt, Artificial Sequence
  Description of Artificial Sequence: Synthetic oligonucleotide
caugcucuaggugggcucc

SEQ ID NO: 264447 - RNA, 19 nt, Artificial Sequence
  Description of Artificial Sequence: Synthetic oligonucleotide
uuagaguccuggagcuccu

SEQ ID NO: 264448 - RNA, 19 nt, Artificial Sequence
  Description of Artificial Sequence: Synthetic oligonucleotide
cuaguagccuagugcucag

SEQ ID NO: 264449 - RNA, 19 nt, Artificial Sequence
  Description of Artificial Sequence: Synthetic oligonucleotide
ccaucguagaucacaggcc

SEQ ID NO: 264450 - RNA, 19 nt, Artificial Sequence
  Description of Artificial Sequence: Synthetic oligonucleotide
ccuguuacccuccccaaag

SEQ ID NO: 264451 - RNA, 19 nt, Artificial Sequence
  Description of Artificial Sequence: Synthetic oligonucleotide
cuguuacccuccccaaagc

SEQ ID NO: 264452 - RNA, 19 nt, Artificial Sequence
  Description of Artificial Sequence: Synthetic oligonucleotide
uggugaaaccauggggcug

SEQ ID NO: 264453 - RNA, 19 nt, Artificial Sequence
  Description of Artificial Sequence: Synthetic oligonucleotide
ggaaauuuugaauuagcuu

SEQ ID NO: 264454 - RNA, 19 nt, Artificial Sequence
  Description of Artificial Sequence: Synthetic oligonucleotide
gugugugugugugugugug

SEQ ID NO: 264455 - RNA, 19 nt, Artificial Sequence
  Description of Artificial Sequence: Synthetic oligonucleotide
guagguacuggaccucaca

SEQ ID NO: 264456 - RNA, 19 nt, Artificial Sequence
  Description of Artificial Sequence: Synthetic oligonucleotide
agugugugugugugugugu

SEQ ID NO: 264457 - RNA, 19 nt, Artificial Sequence
  Description of Artificial Sequence: Synthetic oligonucleotide
gcaacagcguuccuucuug

SEQ ID NO: 264458 - RNA, 19 nt, Artificial Sequence
  Description of Artificial Sequence: Synthetic oligonucleotide
aagcuacacgugaaaggca

SEQ ID NO: 264459 - RNA, 19 nt, Artificial Sequence
  Description of Artificial Sequence: Synthetic oligonucleotide
ccggauacucuccuugugg

SEQ ID NO: 264460 - RNA, 19 nt, Artificial Sequence
  Description of Artificial Sequence: Synthetic oligonucleotide
agagugugugugugugugu

SEQ ID NO: 264461 - RNA, 19 nt, Artificial Sequence
  Description of Artificial Sequence: Synthetic oligonucleotide
uggcaguaguuuguuauua

SEQ ID NO: 264462 - RNA, 19 nt, Artificial Sequence
  Description of Artificial Sequence: Synthetic oligonucleotide
gcuaagauucuaucaagua

SEQ ID NO: 264463 - RNA, 19 nt, Artificial Sequence
  Description of Artificial Sequence: Synthetic oligonucleotide
ucacugcauaguuguuaca

SEQ ID NO: 264464 - RNA, 19 nt, Artificial Sequence
  Description of Artificial Sequence: Synthetic oligonucleotide
cauaguuguuacagcagua

SEQ ID NO: 264465 - RNA, 19 nt, Artificial Sequence
  Description of Artificial Sequence: Synthetic oligonucleotide
ugaaucaguuucggugggu

SEQ ID NO: 264466 - RNA, 19 nt, Artificial Sequence
  Description of Artificial Sequence: Synthetic oligonucleotide
guucgaaccuuuagcuggc

SEQ ID NO: 264467 - RNA, 19 nt, Artificial Sequence
  Description of Artificial Sequence: Synthetic oligonucleotide
auugcaucgggugguggga

SEQ ID NO: 264468 - RNA, 19 nt, Artificial Sequence
  Description of Artificial Sequence: Synthetic oligonucleotide
cucuaguagccuagugcuc

SEQ ID NO: 264469 - RNA, 19 nt, Artificial Sequence
  Description of Artificial Sequence: Synthetic oligonucleotide
aagacccaacugauaguga

SEQ ID NO: 264470 - RNA, 19 nt, Artificial Sequence
  Description of Artificial Sequence: Synthetic oligonucleotide
cuugcacuggucgagaggu

SEQ ID NO: 264471 - RNA, 19 nt, Artificial Sequence
  Description of Artificial Sequence: Synthetic oligonucleotide
cacuacuauggcugcuaug

SEQ ID NO: 264472 - RNA, 19 nt, Artificial Sequence
  Description of Artificial Sequence: Synthetic oligonucleotide
agucuaguagaggcuucag

SEQ ID NO: 264473 - RNA, 19 nt, Artificial Sequence
  Description of Artificial Sequence: Synthetic oligonucleotide
ggcuaaaugcucucuagua

SEQ ID NO: 264474 - RNA, 19 nt, Artificial Sequence
  Description of Artificial Sequence: Synthetic oligonucleotide
gaagucuaguagaggcuuc

SEQ ID NO: 264475 - RNA, 19 nt, Artificial Sequence
  Description of Artificial Sequence: Synthetic oligonucleotide
aucguagaucacaggccgg

SEQ ID NO: 264476 - RNA, 19 nt, Artificial Sequence
  Description of Artificial Sequence: Synthetic oligonucleotide
cgaaccuuuagcuggcccc

SEQ ID NO: 264477 - RNA, 19 nt, Artificial Sequence
  Description of Artificial Sequence: Synthetic oligonucleotide
ucgguggguguuucaggca

SEQ ID NO: 264478 - RNA, 19 nt, Artificial Sequence
  Description of Artificial Sequence: Synthetic oligonucleotide
ugugugugugguguguguu

SEQ ID NO: 264479 - RNA, 19 nt, Artificial Sequence
  Description of Artificial Sequence: Synthetic oligonucleotide
acgauccagcugaacuccc

SEQ ID NO: 264480 - RNA, 19 nt, Artificial Sequence
  Description of Artificial Sequence: Synthetic oligonucleotide
uacacgugaaaggcacacu

SEQ ID NO: 264481 - RNA, 19 nt, Artificial Sequence
  Description of Artificial Sequence: Synthetic oligonucleotide
auacucuccuugugggaau

SEQ ID NO: 264482 - RNA, 19 nt, Artificial Sequence
  Description of Artificial Sequence: Synthetic oligonucleotide
agaucacaggccggucaac

SEQ ID NO: 264483 - RNA, 19 nt, Artificial Sequence
  Description of Artificial Sequence: Synthetic oligonucleotide
cacacuuacacagggcuaa

SEQ ID NO: 264484 - RNA, 19 nt, Artificial Sequence
  Description of Artificial Sequence: Synthetic oligonucleotide
ccaacugauagugaggcca

SEQ ID NO: 264485 - RNA, 19 nt, Artificial Sequence
  Description of Artificial Sequence: Synthetic oligonucleotide
gguucugagcaccaaagau

SEQ ID NO: 264486 - RNA, 19 nt, Artificial Sequence
  Description of Artificial Sequence: Synthetic oligonucleotide
cacagggcuaaaugcucuc

SEQ ID NO: 264487 - RNA, 19 nt, Artificial Sequence
  Description of Artificial Sequence: Synthetic oligonucleotide
accucugagccaagaaugu

SEQ ID NO: 264488 - RNA, 19 nt, Artificial Sequence
  Description of Artificial Sequence: Synthetic oligonucleotide
gcuacggugauggggauca

SEQ ID NO: 264489 - RNA, 19 nt, Artificial Sequence
  Description of Artificial Sequence: Synthetic oligonucleotide
guguuucaggcaaggagga

SEQ ID NO: 264490 - RNA, 19 nt, Artificial Sequence
  Description of Artificial Sequence: Synthetic oligonucleotide
ggcucggugcagcuggucc

SEQ ID NO: 264491 - RNA, 19 nt, Artificial Sequence
  Description of Artificial Sequence: Synthetic oligonucleotide
uugcacuggucgagaggug

SEQ ID NO: 264492 - RNA, 19 nt, Artificial Sequence
  Description of Artificial Sequence: Synthetic oligonucleotide
guguugcauucccugguuc

SEQ ID NO: 264493 - RNA, 19 nt, Artificial Sequence
  Description of Artificial Sequence: Synthetic oligonucleotide
cugcuaucaggggauccag

SEQ ID NO: 264494 - RNA, 19 nt, Artificial Sequence
  Description of Artificial Sequence: Synthetic oligonucleotide
aggaguuagugaguuugau

SEQ ID NO: 264495 - RNA, 19 nt, Artificial Sequence
  Description of Artificial Sequence: Synthetic oligonucleotide
gcacgauccagcugaacuc

SEQ ID NO: 264496 - RNA, 19 nt, Artificial Sequence
  Description of Artificial Sequence: Synthetic oligonucleotide
cacugcuaucaggggaucc

SEQ ID NO: 264497 - RNA, 19 nt, Artificial Sequence
  Description of Artificial Sequence: Synthetic oligonucleotide
uggucgagaggugugucuu

SEQ ID NO: 264498 - RNA, 19 nt, Artificial Sequence
  Description of Artificial Sequence: Synthetic oligonucleotide
ucaguuucgguggguguuu

SEQ ID NO: 264499 - RNA, 19 nt, Artificial Sequence
  Description of Artificial Sequence: Synthetic oligonucleotide
gggguucgaaccuuuagcu

SEQ ID NO: 264500 - RNA, 19 nt, Artificial Sequence
  Description of Artificial Sequence: Synthetic oligonucleotide
ugaaaccauggggcugggc

SEQ ID NO: 264501 - RNA, 19 nt, Artificial Sequence
  Description of Artificial Sequence: Synthetic oligonucleotide
cuuuagaguccuggagcuc

SEQ ID NO: 264502 - RNA, 19 nt, Artificial Sequence
  Description of Artificial Sequence: Synthetic oligonucleotide
uucgaaccuuuagcuggcc

SEQ ID NO: 264503 - RNA, 19 nt, Artificial Sequence
  Description of Artificial Sequence: Synthetic oligonucleotide
cagugggugaagucuagua

SEQ ID NO: 264504 - RNA, 19 nt, Artificial Sequence
  Description of Artificial Sequence: Synthetic oligonucleotide
gggugaagucuaguagagg

SEQ ID NO: 264505 - RNA, 19 nt, Artificial Sequence
  Description of Artificial Sequence: Synthetic oligonucleotide
uguccuguucagccauauu

SEQ ID NO: 264506 - RNA, 19 nt, Artificial Sequence
  Description of Artificial Sequence: Synthetic oligonucleotide
cccauuggcaugucuucag

SEQ ID NO: 264507 - RNA, 19 nt, Artificial Sequence
  Description of Artificial Sequence: Synthetic oligonucleotide
augcucuaggugggcuccc

SEQ ID NO: 264508 - RNA, 19 nt, Artificial Sequence
  Description of Artificial Sequence: Synthetic oligonucleotide
cuucgccaaacuucuggaa

SEQ ID NO: 264509 - RNA, 19 nt, Artificial Sequence
  Description of Artificial Sequence: Synthetic oligonucleotide
ugcucucuaguagccuagu

SEQ ID NO: 264510 - RNA, 19 nt, Artificial Sequence
  Description of Artificial Sequence: Synthetic oligonucleotide
ggaccuugcacuggucgag

SEQ ID NO: 264511 - RNA, 19 nt, Artificial Sequence
  Description of Artificial Sequence: Synthetic oligonucleotide
aggcucggcaacagcguuc

SEQ ID NO: 264512 - RNA, 19 nt, Artificial Sequence
  Description of Artificial Sequence: Synthetic oligonucleotide
cucagccgugucuguguug

SEQ ID NO: 264513 - RNA, 19 nt, Artificial Sequence
  Description of Artificial Sequence: Synthetic oligonucleotide
guguguguguguguggugu

SEQ ID NO: 264514 - RNA, 19 nt, Artificial Sequence
  Description of Artificial Sequence: Synthetic oligonucleotide
cacgugaaaggcacacuua

SEQ ID NO: 264515 - RNA, 19 nt, Artificial Sequence
  Description of Artificial Sequence: Synthetic oligonucleotide
ugcaucggguggugggaau

SEQ ID NO: 264516 - RNA, 19 nt, Artificial Sequence
  Description of Artificial Sequence: Synthetic oligonucleotide
uaguagccuagugcucaga

SEQ ID NO: 264517 - RNA, 19 nt, Artificial Sequence
  Description of Artificial Sequence: Synthetic oligonucleotide
gcucucuaguagccuagug

SEQ ID NO: 264518 - RNA, 19 nt, Artificial Sequence
  Description of Artificial Sequence: Synthetic oligonucleotide
ggaaaucgcuuccaucgua

SEQ ID NO: 264519 - RNA, 19 nt, Artificial Sequence
  Description of Artificial Sequence: Synthetic oligonucleotide
gagugaggaguaguagugu

SEQ ID NO: 264520 - RNA, 19 nt, Artificial Sequence
  Description of Artificial Sequence: Synthetic oligonucleotide
guucaguuacugaugcuau

SEQ ID NO: 264521 - RNA, 19 nt, Artificial Sequence
  Description of Artificial Sequence: Synthetic oligonucleotide
uugcaucggguggugggaa

SEQ ID NO: 264522 - RNA, 19 nt, Artificial Sequence
  Description of Artificial Sequence: Synthetic oligonucleotide
cugaguuugcuccuugguu

SEQ ID NO: 264523 - RNA, 19 nt, Artificial Sequence
  Description of Artificial Sequence: Synthetic oligonucleotide
agcugaacucccgcuugca

SEQ ID NO: 264524 - RNA, 19 nt, Artificial Sequence
  Description of Artificial Sequence: Synthetic oligonucleotide
ggaauugcaucggguggug

SEQ ID NO: 264525 - RNA, 19 nt, Artificial Sequence
  Description of Artificial Sequence: Synthetic oligonucleotide
gccuagugcucagagugug

SEQ ID NO: 264526 - RNA, 19 nt, Artificial Sequence
  Description of Artificial Sequence: Synthetic oligonucleotide
gcaguaguuuguuauuaau

SEQ ID NO: 264527 - RNA, 19 nt, Artificial Sequence
  Description of Artificial Sequence: Synthetic oligonucleotide
gaccuugcacuggucgaga

SEQ ID NO: 264528 - RNA, 19 nt, Artificial Sequence
  Description of Artificial Sequence: Synthetic oligonucleotide
gcucugcaugcucuaggug

SEQ ID NO: 264529 - RNA, 19 nt, Artificial Sequence
  Description of Artificial Sequence: Synthetic oligonucleotide
uacucuccuugugggaauu

SEQ ID NO: 264530 - RNA, 19 nt, Artificial Sequence
  Description of Artificial Sequence: Synthetic oligonucleotide
uccuguagugcugccucuu

SEQ ID NO: 264531 - RNA, 19 nt, Artificial Sequence
  Description of Artificial Sequence: Synthetic oligonucleotide
caacagucaggugguaaaa

SEQ ID NO: 264532 - RNA, 19 nt, Artificial Sequence
  Description of Artificial Sequence: Synthetic oligonucleotide
agccuagugcucagagugu

SEQ ID NO: 264533 - RNA, 19 nt, Artificial Sequence
  Description of Artificial Sequence: Synthetic oligonucleotide
ugcucuaggugggcucccu

SEQ ID NO: 264534 - RNA, 19 nt, Artificial Sequence
  Description of Artificial Sequence: Synthetic oligonucleotide
agaccacacugaaggagau

SEQ ID NO: 264535 - RNA, 19 nt, Artificial Sequence
  Description of Artificial Sequence: Synthetic oligonucleotide
guguguguguguguguggu

SEQ ID NO: 264536 - RNA, 19 nt, Artificial Sequence
  Description of Artificial Sequence: Synthetic oligonucleotide
uggcugcuaugagggagcu

SEQ ID NO: 264537 - RNA, 19 nt, Artificial Sequence
  Description of Artificial Sequence: Synthetic oligonucleotide
cacuaaaagcaggccaucu

SEQ ID NO: 264538 - RNA, 19 nt, Artificial Sequence
  Description of Artificial Sequence: Synthetic oligonucleotide
ggaguaguaguguuuccuu

SEQ ID NO: 264539 - RNA, 19 nt, Artificial Sequence
  Description of Artificial Sequence: Synthetic oligonucleotide
ccaggcucggcuacgguga

SEQ ID NO: 264540 - RNA, 19 nt, Artificial Sequence
  Description of Artificial Sequence: Synthetic oligonucleotide
ccaagaauguuuucucagu

SEQ ID NO: 264541 - RNA, 19 nt, Artificial Sequence
  Description of Artificial Sequence: Synthetic oligonucleotide
gggcuaaaugcucucuagu

SEQ ID NO: 264542 - RNA, 19 nt, Artificial Sequence
  Description of Artificial Sequence: Synthetic oligonucleotide
gcuuagucacugcauaguu

SEQ ID NO: 264543 - RNA, 19 nt, Artificial Sequence
  Description of Artificial Sequence: Synthetic oligonucleotide
ccucccggaaaagaaugac

SEQ ID NO: 264544 - RNA, 19 nt, Artificial Sequence
  Description of Artificial Sequence: Synthetic oligonucleotide
caucggguggugggaauga

SEQ ID NO: 264545 - RNA, 19 nt, Artificial Sequence
  Description of Artificial Sequence: Synthetic oligonucleotide
gccccauuggcaugucuuc

SEQ ID NO: 264546 - RNA, 19 nt, Artificial Sequence
  Description of Artificial Sequence: Synthetic oligonucleotide
acacuuacacagggcuaaa

SEQ ID NO: 264547 - RNA, 19 nt, Artificial Sequence
  Description of Artificial Sequence: Synthetic oligonucleotide
guguguguguggugugugu

SEQ ID NO: 264548 - RNA, 19 nt, Artificial Sequence
  Description of Artificial Sequence: Synthetic oligonucleotide
ggucgagaggugugucuuc

SEQ ID NO: 264549 - RNA, 19 nt, Artificial Sequence
  Description of Artificial Sequence: Synthetic oligonucleotide
gcaucggguggugggaaug

SEQ ID NO: 264550 - RNA, 19 nt, Artificial Sequence
  Description of Artificial Sequence: Synthetic oligonucleotide
gaacucccgcuugcaguca

SEQ ID NO: 264551 - RNA, 19 nt, Artificial Sequence
  Description of Artificial Sequence: Synthetic oligonucleotide
gggaauugcaucggguggu

SEQ ID NO: 264552 - RNA, 19 nt, Artificial Sequence
  Description of Artificial Sequence: Synthetic oligonucleotide
cugggcuuagucacugcau

SEQ ID NO: 264553 - RNA, 19 nt, Artificial Sequence
  Description of Artificial Sequence: Synthetic oligonucleotide
caccaaagauggcuccucu

SEQ ID NO: 264554 - RNA, 19 nt, Artificial Sequence
  Description of Artificial Sequence: Synthetic oligonucleotide
ggugccgccgcacgaucca

SEQ ID NO: 264555 - RNA, 19 nt, Artificial Sequence
  Description of Artificial Sequence: Synthetic oligonucleotide
cagccgugucuguguuggc

SEQ ID NO: 264556 - RNA, 19 nt, Artificial Sequence
  Description of Artificial Sequence: Synthetic oligonucleotide
ggcuuagucacugcauagu

SEQ ID NO: 264557 - RNA, 19 nt, Artificial Sequence
  Description of Artificial Sequence: Synthetic oligonucleotide
cccggaaaagaaugaccca

SEQ ID NO: 264558 - RNA, 19 nt, Artificial Sequence
  Description of Artificial Sequence: Synthetic oligonucleotide
cccuuucguuccuguagug

SEQ ID NO: 264559 - RNA, 19 nt, Artificial Sequence
  Description of Artificial Sequence: Synthetic oligonucleotide
gggaaaucgcuuccaucgu

SEQ ID NO: 264560 - RNA, 19 nt, Artificial Sequence
  Description of Artificial Sequence: Synthetic oligonucleotide
ggguccauugaaucaguuu

SEQ ID NO: 264561 - RNA, 19 nt, Artificial Sequence
  Description of Artificial Sequence: Synthetic oligonucleotide
agccguuccucaagguauu

SEQ ID NO: 264562 - RNA, 19 nt, Artificial Sequence
  Description of Artificial Sequence: Synthetic oligonucleotide
gcagacugaguuugcuccu

SEQ ID NO: 264563 - RNA, 19 nt, Artificial Sequence
  Description of Artificial Sequence: Synthetic oligonucleotide
gcccuuucguuccuguagu

SEQ ID NO: 264564 - RNA, 19 nt, Artificial Sequence
  Description of Artificial Sequence: Synthetic oligonucleotide
cgcacgauccagcugaacu

SEQ ID NO: 264565 - RNA, 19 nt, Artificial Sequence
  Description of Artificial Sequence: Synthetic oligonucleotide
guguguguguguggugugu

SEQ ID NO: 264566 - RNA, 19 nt, Artificial Sequence
  Description of Artificial Sequence: Synthetic oligonucleotide
gugccgccgcacgauccag

SEQ ID NO: 264567 - RNA, 19 nt, Artificial Sequence
  Description of Artificial Sequence: Synthetic oligonucleotide
gacuuuugccagagagcau

SEQ ID NO: 264568 - RNA, 19 nt, Artificial Sequence
  Description of Artificial Sequence: Synthetic oligonucleotide
agcaggccaucuagauuaa

SEQ ID NO: 264569 - RNA, 19 nt, Artificial Sequence
  Description of Artificial Sequence: Synthetic oligonucleotide
ccauugaaucaguuucggu

SEQ ID NO: 264570 - RNA, 19 nt, Artificial Sequence
  Description of Artificial Sequence: Synthetic oligonucleotide
gcucggcuacggugauggg

SEQ ID NO: 264571 - RNA, 19 nt, Artificial Sequence
  Description of Artificial Sequence: Synthetic oligonucleotide
cccucccggaaaagaauga

SEQ ID NO: 264572 - RNA, 19 nt, Artificial Sequence
  Description of Artificial Sequence: Synthetic oligonucleotide
ggcaacagcguuccuucuu

SEQ ID NO: 264573 - RNA, 19 nt, Artificial Sequence
  Description of Artificial Sequence: Synthetic oligonucleotide
ggggaucaugcuguaggua

SEQ ID NO: 264574 - RNA, 19 nt, Artificial Sequence
  Description of Artificial Sequence: Synthetic oligonucleotide
gcucagagugugugugugu

SEQ ID NO: 264575 - RNA, 19 nt, Artificial Sequence
  Description of Artificial Sequence: Synthetic oligonucleotide
cacuggucgagaggugugu

SEQ ID NO: 264576 - RNA, 19 nt, Artificial Sequence
  Description of Artificial Sequence: Synthetic oligonucleotide
cacuuacacagggcuaaau

SEQ ID NO: 264577 - RNA, 19 nt, Artificial Sequence
  Description of Artificial Sequence: Synthetic oligonucleotide
gugugugguguguguugau

SEQ ID NO: 264578 - RNA, 19 nt, Artificial Sequence
  Description of Artificial Sequence: Synthetic oligonucleotide
uggugggaaugaggaccuu

SEQ ID NO: 264579 - RNA, 19 nt, Artificial Sequence
  Description of Artificial Sequence: Synthetic oligonucleotide
ccagugcaucggacuuuug

SEQ ID NO: 264580 - RNA, 19 nt, Artificial Sequence
  Description of Artificial Sequence: Synthetic oligonucleotide
ccauuggcaugucuucagu

SEQ ID NO: 264581 - RNA, 19 nt, Artificial Sequence
  Description of Artificial Sequence: Synthetic oligonucleotide
cagcaucaucugguggucu

SEQ ID NO: 264582 - RNA, 19 nt, Artificial Sequence
  Description of Artificial Sequence: Synthetic oligonucleotide
ccuagugcucagagugugu

SEQ ID NO: 264583 - RNA, 19 nt, Artificial Sequence
  Description of Artificial Sequence: Synthetic oligonucleotide
ggccuucgccaaacuucug

SEQ ID NO: 264584 - RNA, 19 nt, Artificial Sequence
  Description of Artificial Sequence: Synthetic oligonucleotide
gguguccuguucagccaua

SEQ ID NO: 264585 - RNA, 19 nt, Artificial Sequence
  Description of Artificial Sequence: Synthetic oligonucleotide
gcaggccaucuagauuaaa

SEQ ID NO: 264586 - RNA, 19 nt, Artificial Sequence
  Description of Artificial Sequence: Synthetic oligonucleotide
ccagggguucgaaccuuua

SEQ ID NO: 264587 - RNA, 19 nt, Artificial Sequence
  Description of Artificial Sequence: Synthetic oligonucleotide
ggucaacagucagguggua

SEQ ID NO: 264588 - RNA, 19 nt, Artificial Sequence
  Description of Artificial Sequence: Synthetic oligonucleotide
cuaggucugccagcaucuu

SEQ ID NO: 264589 - RNA, 19 nt, Artificial Sequence
  Description of Artificial Sequence: Synthetic oligonucleotide
caggcucggcuacggugau

SEQ ID NO: 264590 - RNA, 19 nt, Artificial Sequence
  Description of Artificial Sequence: Synthetic oligonucleotide
cggcuacggugauggggau

SEQ ID NO: 264591 - RNA, 19 nt, Artificial Sequence
  Description of Artificial Sequence: Synthetic oligonucleotide
aaaucagagauuuucugcc

SEQ ID NO: 264592 - RNA, 19 nt, Artificial Sequence
  Description of Artificial Sequence: Synthetic oligonucleotide
guauaaguaauuuaaagcc

SEQ ID NO: 264593 - RNA, 19 nt, Artificial Sequence
  Description of Artificial Sequence: Synthetic oligonucleotide
aaaucuaguaauuaaggca

SEQ ID NO: 264594 - RNA, 19 nt, Artificial Sequence
  Description of Artificial Sequence: Synthetic oligonucleotide
acugaauaauuucaggugc

SEQ ID NO: 264595 - RNA, 19 nt, Artificial Sequence
  Description of Artificial Sequence: Synthetic oligonucleotide
aauugguaaaguuuauuuc

SEQ ID NO: 264596 - RNA, 19 nt, Artificial Sequence
  Description of Artificial Sequence: Synthetic oligonucleotide
aguguagacauccuuauac

SEQ ID NO: 264597 - RNA, 19 nt, Artificial Sequence
  Description of Artificial Sequence: Synthetic oligonucleotide
acaguagucaaccuggccc

SEQ ID NO: 264598 - RNA, 19 nt, Artificial Sequence
  Description of Artificial Sequence: Synthetic oligonucleotide
acgaauaugcaucacuucc

SEQ ID NO: 264599 - RNA, 19 nt, Artificial Sequence
  Description of Artificial Sequence: Synthetic oligonucleotide
aagcauauggaaaugaggg

SEQ ID NO: 264600 - RNA, 19 nt, Artificial Sequence
  Description of Artificial Sequence: Synthetic oligonucleotide
uuauggaacacauuuagca

SEQ ID NO: 264601 - RNA, 19 nt, Artificial Sequence
  Description of Artificial Sequence: Synthetic oligonucleotide
auuacguuggaaugaaagc

SEQ ID NO: 264602 - RNA, 19 nt, Artificial Sequence
  Description of Artificial Sequence: Synthetic oligonucleotide
ugaaaugcaacugucaugc

SEQ ID NO: 264603 - RNA, 19 nt, Artificial Sequence
  Description of Artificial Sequence: Synthetic oligonucleotide
aacacugucaaguggaaug

SEQ ID NO: 264604 - RNA, 19 nt, Artificial Sequence
  Description of Artificial Sequence: Synthetic oligonucleotide
agcaacguaauuuaaaacu

SEQ ID NO: 264605 - RNA, 19 nt, Artificial Sequence
  Description of Artificial Sequence: Synthetic oligonucleotide
uaagcauauggaaaugagg

SEQ ID NO: 264606 - RNA, 19 nt, Artificial Sequence
  Description of Artificial Sequence: Synthetic oligonucleotide
ucucuuaguaguuagaaaa

SEQ ID NO: 264607 - RNA, 19 nt, Artificial Sequence
  Description of Artificial Sequence: Synthetic oligonucleotide
gaaaucuaguaauuaaggc

SEQ ID NO: 264608 - RNA, 19 nt, Artificial Sequence
  Description of Artificial Sequence: Synthetic oligonucleotide
uuagugauuugauugacug

SEQ ID NO: 264609 - RNA, 19 nt, Artificial Sequence
  Description of Artificial Sequence: Synthetic oligonucleotide
uuaauuucgucacaauggc

SEQ ID NO: 264610 - RNA, 19 nt, Artificial Sequence
  Description of Artificial Sequence: Synthetic oligonucleotide
ugucaguuuaccaaaacac

SEQ ID NO: 264611 - RNA, 19 nt, Artificial Sequence
  Description of Artificial Sequence: Synthetic oligonucleotide
aauuuaaagccauuuacua

SEQ ID NO: 264612 - RNA, 19 nt, Artificial Sequence
  Description of Artificial Sequence: Synthetic oligonucleotide
ugugccaacaucaacacuc

SEQ ID NO: 264613 - RNA, 19 nt, Artificial Sequence
  Description of Artificial Sequence: Synthetic oligonucleotide
uaagaccacgugaagaagg

SEQ ID NO: 264614 - RNA, 19 nt, Artificial Sequence
  Description of Artificial Sequence: Synthetic oligonucleotide
aauuacgcauugcagcagg

SEQ ID NO: 264615 - RNA, 19 nt, Artificial Sequence
  Description of Artificial Sequence: Synthetic oligonucleotide
cauggguauaaacagagcc

SEQ ID NO: 264616 - RNA, 19 nt, Artificial Sequence
  Description of Artificial Sequence: Synthetic oligonucleotide
uuuagcacugucauuacgu

SEQ ID NO: 264617 - RNA, 19 nt, Artificial Sequence
  Description of Artificial Sequence: Synthetic oligonucleotide
uacuaaucuauaaauuuca

SEQ ID NO: 264618 - RNA, 19 nt, Artificial Sequence
  Description of Artificial Sequence: Synthetic oligonucleotide
uguuacucugucuugaugu

SEQ ID NO: 264619 - RNA, 19 nt, Artificial Sequence
  Description of Artificial Sequence: Synthetic oligonucleotide
uuuucaauggaauggcgcc

SEQ ID NO: 264620 - RNA, 19 nt, Artificial Sequence
  Description of Artificial Sequence: Synthetic oligonucleotide
aauuucgucacaauggcca

SEQ ID NO: 264621 - RNA, 19 nt, Artificial Sequence
  Description of Artificial Sequence: Synthetic oligonucleotide
cauuacguuggaaugaaag

SEQ ID NO: 264622 - RNA, 19 nt, Artificial Sequence
  Description of Artificial Sequence: Synthetic oligonucleotide
caguauaaguaauuuaaag

SEQ ID NO: 264623 - RNA, 19 nt, Artificial Sequence
  Description of Artificial Sequence: Synthetic oligonucleotide
gggauuaaaagguaugugg

SEQ ID NO: 264624 - RNA, 19 nt, Artificial Sequence
  Description of Artificial Sequence: Synthetic oligonucleotide
agaacauugaggaacgaac

SEQ ID NO: 264625 - RNA, 19 nt, Artificial Sequence
  Description of Artificial Sequence: Synthetic oligonucleotide
aacguaauuuaaaacuuuc

SEQ ID NO: 264626 - RNA, 19 nt, Artificial Sequence
  Description of Artificial Sequence: Synthetic oligonucleotide
aaaugcaacugucaugccu

SEQ ID NO: 264627 - RNA, 19 nt, Artificial Sequence
  Description of Artificial Sequence: Synthetic oligonucleotide
agcaauacucugcuuacac

SEQ ID NO: 264628 - RNA, 19 nt, Artificial Sequence
  Description of Artificial Sequence: Synthetic oligonucleotide
agaaucaucagcaaggccu

SEQ ID NO: 264629 - RNA, 19 nt, Artificial Sequence
  Description of Artificial Sequence: Synthetic oligonucleotide
ucauaccuagcuaaaauaa

SEQ ID NO: 264630 - RNA, 19 nt, Artificial Sequence
  Description of Artificial Sequence: Synthetic oligonucleotide
ucuacacacaccuccauug

SEQ ID NO: 264631 - RNA, 19 nt, Artificial Sequence
  Description of Artificial Sequence: Synthetic oligonucleotide
ugcuaaaacuguaugagau

SEQ ID NO: 264632 - RNA, 19 nt, Artificial Sequence
  Description of Artificial Sequence: Synthetic oligonucleotide
aauuucgggaggcuucuuc

SEQ ID NO: 264633 - RNA, 19 nt, Artificial Sequence
  Description of Artificial Sequence: Synthetic oligonucleotide
gacauccuuauacuguugg

SEQ ID NO: 264634 - RNA, 19 nt, Artificial Sequence
  Description of Artificial Sequence: Synthetic oligonucleotide
aaacuggaguucuucaucu

SEQ ID NO: 264635 - RNA, 19 nt, Artificial Sequence
  Description of Artificial Sequence: Synthetic oligonucleotide
uguugcuaaaacuguauga

SEQ ID NO: 264636 - RNA, 19 nt, Artificial Sequence
  Description of Artificial Sequence: Synthetic oligonucleotide
uaugacuuacugcugagaa

SEQ ID NO: 264637 - RNA, 19 nt, Artificial Sequence
  Description of Artificial Sequence: Synthetic oligonucleotide
aaaaccuccguguucggca

SEQ ID NO: 264638 - RNA, 19 nt, Artificial Sequence
  Description of Artificial Sequence: Synthetic oligonucleotide
ucccuauucacacacacaa

SEQ ID NO: 264639 - RNA, 19 nt, Artificial Sequence
  Description of Artificial Sequence: Synthetic oligonucleotide
aagguauguggcaucauac

SEQ ID NO: 264640 - RNA, 19 nt, Artificial Sequence
  Description of Artificial Sequence: Synthetic oligonucleotide
aaaccuuacaaauuucaua

SEQ ID NO: 264641 - RNA, 19 nt, Artificial Sequence
  Description of Artificial Sequence: Synthetic oligonucleotide
ugccuuuuauuaaauggag

SEQ ID NO: 264642 - RNA, 19 nt, Artificial Sequence
  Description of Artificial Sequence: Synthetic oligonucleotide
acucuuauggaacacauuu

SEQ ID NO: 264643 - RNA, 19 nt, Artificial Sequence
  Description of Artificial Sequence: Synthetic oligonucleotide
aauuccucaagggagcgag

SEQ ID NO: 264644 - RNA, 19 nt, Artificial Sequence
  Description of Artificial Sequence: Synthetic oligonucleotide
ugacuuacugcugagaacu

SEQ ID NO: 264645 - RNA, 19 nt, Artificial Sequence
  Description of Artificial Sequence: Synthetic oligonucleotide
uuacguuggaaugaaagca

SEQ ID NO: 264646 - RNA, 19 nt, Artificial Sequence
  Description of Artificial Sequence: Synthetic oligonucleotide
cauaguaugugucacagga

SEQ ID NO: 264647 - RNA, 19 nt, Artificial Sequence
  Description of Artificial Sequence: Synthetic oligonucleotide
aaggaaaaccuccguguuc

SEQ ID NO: 264648 - RNA, 19 nt, Artificial Sequence
  Description of Artificial Sequence: Synthetic oligonucleotide
aacaauugcccuucaccag

SEQ ID NO: 264649 - RNA, 19 nt, Artificial Sequence
  Description of Artificial Sequence: Synthetic oligonucleotide
agguauguggcaucauacc

SEQ ID NO: 264650 - RNA, 19 nt, Artificial Sequence
  Description of Artificial Sequence: Synthetic oligonucleotide
ugugagacaguagucaacc

SEQ ID NO: 264651 - RNA, 19 nt, Artificial Sequence
  Description of Artificial Sequence: Synthetic oligonucleotide
uauggaacacauuuagcac

SEQ ID NO: 264652 - RNA, 19 nt, Artificial Sequence
  Description of Artificial Sequence: Synthetic oligonucleotide
ugauugacugguuauuucu

SEQ ID NO: 264653 - RNA, 19 nt, Artificial Sequence
  Description of Artificial Sequence: Synthetic oligonucleotide
aaacuguaugagauguagc

SEQ ID NO: 264654 - RNA, 19 nt, Artificial Sequence
  Description of Artificial Sequence: Synthetic oligonucleotide
guuuuaggcuuucugagug

SEQ ID NO: 264655 - RNA, 19 nt, Artificial Sequence
  Description of Artificial Sequence: Synthetic oligonucleotide
uuacaaauuucauaguguu

SEQ ID NO: 264656 - RNA, 19 nt, Artificial Sequence
  Description of Artificial Sequence: Synthetic oligonucleotide
uucggcaacagaagcagag

SEQ ID NO: 264657 - RNA, 19 nt, Artificial Sequence
  Description of Artificial Sequence: Synthetic oligonucleotide
uagaaaugacuacugcagc

SEQ ID NO: 264658 - RNA, 19 nt, Artificial Sequence
  Description of Artificial Sequence: Synthetic oligonucleotide
ucagaucucauugauaguc

SEQ ID NO: 264659 - RNA, 19 nt, Artificial Sequence
  Description of Artificial Sequence: Synthetic oligonucleotide
cuaagcauauggaaaugag

SEQ ID NO: 264660 - RNA, 19 nt, Artificial Sequence
  Description of Artificial Sequence: Synthetic oligonucleotide
ugucaauugaauguggaaa

SEQ ID NO: 264661 - RNA, 19 nt, Artificial Sequence
  Description of Artificial Sequence: Synthetic oligonucleotide
gcucagaucucauugauag

SEQ ID NO: 264662 - RNA, 19 nt, Artificial Sequence
  Description of Artificial Sequence: Synthetic oligonucleotide
aucaguauaaguaauuuaa

SEQ ID NO: 264663 - RNA, 19 nt, Artificial Sequence
  Description of Artificial Sequence: Synthetic oligonucleotide
agcacugucauuacguugg

SEQ ID NO: 264664 - RNA, 19 nt, Artificial Sequence
  Description of Artificial Sequence: Synthetic oligonucleotide
uacgcauugcagcagguca

SEQ ID NO: 264665 - RNA, 19 nt, Artificial Sequence
  Description of Artificial Sequence: Synthetic oligonucleotide
ucaggaaauuaugugaaga

SEQ ID NO: 264666 - RNA, 19 nt, Artificial Sequence
  Description of Artificial Sequence: Synthetic oligonucleotide
uugcagucuacacacaccu

SEQ ID NO: 264667 - RNA, 19 nt, Artificial Sequence
  Description of Artificial Sequence: Synthetic oligonucleotide
aagggcugagacuugaaau

SEQ ID NO: 264668 - RNA, 19 nt, Artificial Sequence
  Description of Artificial Sequence: Synthetic oligonucleotide
aaaugagcaacuggcugac

SEQ ID NO: 264669 - RNA, 19 nt, Artificial Sequence
  Description of Artificial Sequence: Synthetic oligonucleotide
augauuucggaaaugaacu

SEQ ID NO: 264670 - RNA, 19 nt, Artificial Sequence
  Description of Artificial Sequence: Synthetic oligonucleotide
auggaacacauuuagcacu

SEQ ID NO: 264671 - RNA, 19 nt, Artificial Sequence
  Description of Artificial Sequence: Synthetic oligonucleotide
gugaagaacauugaggaac

SEQ ID NO: 264672 - RNA, 19 nt, Artificial Sequence
  Description of Artificial Sequence: Synthetic oligonucleotide
uauguacauggauaggaac

SEQ ID NO: 264673 - RNA, 19 nt, Artificial Sequence
  Description of Artificial Sequence: Synthetic oligonucleotide
uagugauuugauugacugg

SEQ ID NO: 264674 - RNA, 19 nt, Artificial Sequence
  Description of Artificial Sequence: Synthetic oligonucleotide
uccuacauucagcuaaaug

SEQ ID NO: 264675 - RNA, 19 nt, Artificial Sequence
  Description of Artificial Sequence: Synthetic oligonucleotide
uccauuguacuccaauccu

SEQ ID NO: 264676 - RNA, 19 nt, Artificial Sequence
  Description of Artificial Sequence: Synthetic oligonucleotide
aaauguuacucugucuuga

SEQ ID NO: 264677 - RNA, 19 nt, Artificial Sequence
  Description of Artificial Sequence: Synthetic oligonucleotide
gaaauguuacucugucuug

SEQ ID NO: 264678 - RNA, 19 nt, Artificial Sequence
  Description of Artificial Sequence: Synthetic oligonucleotide
auucagcuaaaugucaguc

SEQ ID NO: 264679 - RNA, 19 nt, Artificial Sequence
  Description of Artificial Sequence: Synthetic oligonucleotide
gagaugggcaagaauuucg

SEQ ID NO: 264680 - RNA, 19 nt, Artificial Sequence
  Description of Artificial Sequence: Synthetic oligonucleotide
aaagguauguggcaucaua

SEQ ID NO: 264681 - RNA, 19 nt, Artificial Sequence
  Description of Artificial Sequence: Synthetic oligonucleotide
uuaucgguggugaccauga

SEQ ID NO: 264682 - RNA, 19 nt, Artificial Sequence
  Description of Artificial Sequence: Synthetic oligonucleotide
aguggaaugccaauaugac

SEQ ID NO: 264683 - RNA, 19 nt, Artificial Sequence
  Description of Artificial Sequence: Synthetic oligonucleotide
augacuuacugcugagaac

SEQ ID NO: 264684 - RNA, 19 nt, Artificial Sequence
  Description of Artificial Sequence: Synthetic oligonucleotide
ugucacaggaacugaauaa

SEQ ID NO: 264685 - RNA, 19 nt, Artificial Sequence
  Description of Artificial Sequence: Synthetic oligonucleotide
augccaauaugacuuacug

SEQ ID NO: 264686 - RNA, 19 nt, Artificial Sequence
  Description of Artificial Sequence: Synthetic oligonucleotide
gauacuucgaaguggccga

SEQ ID NO: 264687 - RNA, 19 nt, Artificial Sequence
  Description of Artificial Sequence: Synthetic oligonucleotide
aauagcaacguaauuuaaa

SEQ ID NO: 264688 - RNA, 19 nt, Artificial Sequence
  Description of Artificial Sequence: Synthetic oligonucleotide
uagaguggaauauggcuug

SEQ ID NO: 264689 - RNA, 19 nt, Artificial Sequence
  Description of Artificial Sequence: Synthetic oligonucleotide
ucuaguaauuaaggcauug

SEQ ID NO: 264690 - RNA, 19 nt, Artificial Sequence
  Description of Artificial Sequence: Synthetic oligonucleotide
ucaggugcacaacacuacc

SEQ ID NO: 264691 - RNA, 19 nt, Artificial Sequence
  Description of Artificial Sequence: Synthetic oligonucleotide
uguagcucuuuucuacggc

SEQ ID NO: 264692 - RNA, 19 nt, Artificial Sequence
  Description of Artificial Sequence: Synthetic oligonucleotide
uuaccaaaacacacuuagc

SEQ ID NO: 264693 - RNA, 19 nt, Artificial Sequence
  Description of Artificial Sequence: Synthetic oligonucleotide
cuuuagucaauugguaaag

SEQ ID NO: 264694 - RNA, 19 nt, Artificial Sequence
  Description of Artificial Sequence: Synthetic oligonucleotide
auuucgucacaauggccac

SEQ ID NO: 264695 - RNA, 19 nt, Artificial Sequence
  Description of Artificial Sequence: Synthetic oligonucleotide
gcauuauguacauggauag

SEQ ID NO: 264696 - RNA, 19 nt, Artificial Sequence
  Description of Artificial Sequence: Synthetic oligonucleotide
cacgugaagaaggaaaacc

SEQ ID NO: 264697 - RNA, 19 nt, Artificial Sequence
  Description of Artificial Sequence: Synthetic oligonucleotide
cuugaaaucuaguaauuaa

SEQ ID NO: 264698 - RNA, 19 nt, Artificial Sequence
  Description of Artificial Sequence: Synthetic oligonucleotide
ugucaaggaaaaccucugc

SEQ ID NO: 264699 - RNA, 19 nt, Artificial Sequence
  Description of Artificial Sequence: Synthetic oligonucleotide
guugguaugaaaugcaacu

SEQ ID NO: 264700 - RNA, 19 nt, Artificial Sequence
  Description of Artificial Sequence: Synthetic oligonucleotide
ugcuuuagucaauugguaa

SEQ ID NO: 264701 - RNA, 19 nt, Artificial Sequence
  Description of Artificial Sequence: Synthetic oligonucleotide
ugacgaauaugcaucacuu

SEQ ID NO: 264702 - RNA, 19 nt, Artificial Sequence
  Description of Artificial Sequence: Synthetic oligonucleotide
aggaacauucacaagauaa

SEQ ID NO: 264703 - RNA, 19 nt, Artificial Sequence
  Description of Artificial Sequence: Synthetic oligonucleotide
aaacagagccuugagucug

SEQ ID NO: 264704 - RNA, 19 nt, Artificial Sequence
  Description of Artificial Sequence: Synthetic oligonucleotide
aagccauuuacuaaucuau

SEQ ID NO: 264705 - RNA, 19 nt, Artificial Sequence
  Description of Artificial Sequence: Synthetic oligonucleotide
uaaaagguauguggcauca

SEQ ID NO: 264706 - RNA, 19 nt, Artificial Sequence
  Description of Artificial Sequence: Synthetic oligonucleotide
acaauugcccuucaccaga

SEQ ID NO: 264707 - RNA, 19 nt, Artificial Sequence
  Description of Artificial Sequence: Synthetic oligonucleotide
auuucuaagcauauggaaa

SEQ ID NO: 264708 - RNA, 19 nt, Artificial Sequence
  Description of Artificial Sequence: Synthetic oligonucleotide
ggaaauuaugugaagaaca

SEQ ID NO: 264709 - RNA, 19 nt, Artificial Sequence
  Description of Artificial Sequence: Synthetic oligonucleotide
uguacauggauaggaacac

SEQ ID NO: 264710 - RNA, 19 nt, Artificial Sequence
  Description of Artificial Sequence: Synthetic oligonucleotide
guaguaaccacacaccucu

SEQ ID NO: 264711 - RNA, 19 nt, Artificial Sequence
  Description of Artificial Sequence: Synthetic oligonucleotide
acugacagguguaagacca

SEQ ID NO: 264712 - RNA, 19 nt, Artificial Sequence
  Description of Artificial Sequence: Synthetic oligonucleotide
caguagucaaccuggcccg

SEQ ID NO: 264713 - RNA, 19 nt, Artificial Sequence
  Description of Artificial Sequence: Synthetic oligonucleotide
uugcuaaaacuguaugaga

SEQ ID NO: 264714 - RNA, 19 nt, Artificial Sequence
  Description of Artificial Sequence: Synthetic oligonucleotide
uugguaugaaaugcaacug

SEQ ID NO: 264715 - RNA, 19 nt, Artificial Sequence
  Description of Artificial Sequence: Synthetic oligonucleotide
augagcaacuggcugaccu

SEQ ID NO: 264716 - RNA, 19 nt, Artificial Sequence
  Description of Artificial Sequence: Synthetic oligonucleotide
ugcaaaugagcaacuggcu

SEQ ID NO: 264717 - RNA, 19 nt, Artificial Sequence
  Description of Artificial Sequence: Synthetic oligonucleotide
auguagcucuuuucuacgg

SEQ ID NO: 264718 - RNA, 19 nt, Artificial Sequence
  Description of Artificial Sequence: Synthetic oligonucleotide
ucaguccucucuuaguagu

SEQ ID NO: 264719 - RNA, 19 nt, Artificial Sequence
  Description of Artificial Sequence: Synthetic oligonucleotide
caacccauggguauaaaca

SEQ ID NO: 264720 - RNA, 19 nt, Artificial Sequence
  Description of Artificial Sequence: Synthetic oligonucleotide
caacaauugcccuucacca

SEQ ID NO: 264721 - RNA, 19 nt, Artificial Sequence
  Description of Artificial Sequence: Synthetic oligonucleotide
guagcucuuuucuacggcc

SEQ ID NO: 264722 - RNA, 19 nt, Artificial Sequence
  Description of Artificial Sequence: Synthetic oligonucleotide
ggauuaaaagguauguggc

SEQ ID NO: 264723 - RNA, 19 nt, Artificial Sequence
  Description of Artificial Sequence: Synthetic oligonucleotide
aauguuacucugucuugau

SEQ ID NO: 264724 - RNA, 19 nt, Artificial Sequence
  Description of Artificial Sequence: Synthetic oligonucleotide
uugaggaaaaccuggcgau

SEQ ID NO: 264725 - RNA, 19 nt, Artificial Sequence
  Description of Artificial Sequence: Synthetic oligonucleotide
ucaugccuuuuauuaaaug

SEQ ID NO: 264726 - RNA, 19 nt, Artificial Sequence
  Description of Artificial Sequence: Synthetic oligonucleotide
cugugguuaauuucgucac

SEQ ID NO: 264727 - RNA, 19 nt, Artificial Sequence
  Description of Artificial Sequence: Synthetic oligonucleotide
auguggaaauguuacucug

SEQ ID NO: 264728 - RNA, 19 nt, Artificial Sequence
  Description of Artificial Sequence: Synthetic oligonucleotide
uagcaacguaauuuaaaac

SEQ ID NO: 264729 - RNA, 19 nt, Artificial Sequence
  Description of Artificial Sequence: Synthetic oligonucleotide
aagggagcgagagcucugc

SEQ ID NO: 264730 - RNA, 19 nt, Artificial Sequence
  Description of Artificial Sequence: Synthetic oligonucleotide
accuagcuaaaauaaaaua

SEQ ID NO: 264731 - RNA, 19 nt, Artificial Sequence
  Description of Artificial Sequence: Synthetic oligonucleotide
acgcuauaaaguuauggaa

SEQ ID NO: 264732 - RNA, 19 nt, Artificial Sequence
  Description of Artificial Sequence: Synthetic oligonucleotide
agggacagcccauaguaug

SEQ ID NO: 264733 - RNA, 19 nt, Artificial Sequence
  Description of Artificial Sequence: Synthetic oligonucleotide
aaauuacgcauugcagcag

SEQ ID NO: 264734 - RNA, 19 nt, Artificial Sequence
  Description of Artificial Sequence: Synthetic oligonucleotide
uuuuaggcuuucugagugc

SEQ ID NO: 264735 - RNA, 19 nt, Artificial Sequence
  Description of Artificial Sequence: Synthetic oligonucleotide
ucuacggccucucuauggu

SEQ ID NO: 264736 - RNA, 19 nt, Artificial Sequence
  Description of Artificial Sequence: Synthetic oligonucleotide
ucaacccauggguauaaac

SEQ ID NO: 264737 - RNA, 19 nt, Artificial Sequence
  Description of Artificial Sequence: Synthetic oligonucleotide
ucugucagacugaauucac

SEQ ID NO: 264738 - RNA, 19 nt, Artificial Sequence
  Description of Artificial Sequence: Synthetic oligonucleotide
caaauagcaacguaauuua

SEQ ID NO: 264739 - RNA, 19 nt, Artificial Sequence
  Description of Artificial Sequence: Synthetic oligonucleotide
aaaccaguuugagacucag

SEQ ID NO: 264740 - RNA, 19 nt, Artificial Sequence
  Description of Artificial Sequence: Synthetic oligonucleotide
ugggauuaaaagguaugug

SEQ ID NO: 264741 - RNA, 19 nt, Artificial Sequence
  Description of Artificial Sequence: Synthetic oligonucleotide
ugugguuaauuucgucaca

SEQ ID NO: 264742 - RNA, 19 nt, Artificial Sequence
  Description of Artificial Sequence: Synthetic oligonucleotide
aauggcgccucuggggugg

SEQ ID NO: 264743 - RNA, 19 nt, Artificial Sequence
  Description of Artificial Sequence: Synthetic oligonucleotide
aggugcacaacacuaccug

SEQ ID NO: 264744 - RNA, 19 nt, Artificial Sequence
  Description of Artificial Sequence: Synthetic oligonucleotide
ccuuacaaauuucauagug

SEQ ID NO: 264745 - RNA, 19 nt, Artificial Sequence
  Description of Artificial Sequence: Synthetic oligonucleotide
uuuauuaaauggagcuguu

SEQ ID NO: 264746 - RNA, 19 nt, Artificial Sequence
  Description of Artificial Sequence: Synthetic oligonucleotide
ggucucauuguguagacca

SEQ ID NO: 264747 - RNA, 19 nt, Artificial Sequence
  Description of Artificial Sequence: Synthetic oligonucleotide
cauggauaggaacacuguc

SEQ ID NO: 264748 - RNA, 19 nt, Artificial Sequence
  Description of Artificial Sequence: Synthetic oligonucleotide
auugcccuucaccagaaau

SEQ ID NO: 264749 - RNA, 19 nt, Artificial Sequence
  Description of Artificial Sequence: Synthetic oligonucleotide
ugcacaacacuaccugcca

SEQ ID NO: 264750 - RNA, 19 nt, Artificial Sequence
  Description of Artificial Sequence: Synthetic oligonucleotide
uugauugacugguuauuuc

SEQ ID NO: 264751 - RNA, 19 nt, Artificial Sequence
  Description of Artificial Sequence: Synthetic oligonucleotide
caggaacugaauaauuuca

SEQ ID NO: 264752 - RNA, 19 nt, Artificial Sequence
  Description of Artificial Sequence: Synthetic oligonucleotide
uuaaggcauugcuuuaguc

SEQ ID NO: 264753 - RNA, 19 nt, Artificial Sequence
  Description of Artificial Sequence: Synthetic oligonucleotide
gcagucuacacacaccucc

SEQ ID NO: 264754 - RNA, 19 nt, Artificial Sequence
  Description of Artificial Sequence: Synthetic oligonucleotide
auuaaggcauugcuuuagu

SEQ ID NO: 264755 - RNA, 19 nt, Artificial Sequence
  Description of Artificial Sequence: Synthetic oligonucleotide
aggaacugaauaauuucag

SEQ ID NO: 264756 - RNA, 19 nt, Artificial Sequence
  Description of Artificial Sequence: Synthetic oligonucleotide
auugacugguuauuucuaa

SEQ ID NO: 264757 - RNA, 19 nt, Artificial Sequence
  Description of Artificial Sequence: Synthetic oligonucleotide
ugauuuugauuuugaggaa

SEQ ID NO: 264758 - RNA, 19 nt, Artificial Sequence
  Description of Artificial Sequence: Synthetic oligonucleotide
ccuacauucagcuaaaugu

SEQ ID NO: 264759 - RNA, 19 nt, Artificial Sequence
  Description of Artificial Sequence: Synthetic oligonucleotide
ugguccuucaauguguaaa

SEQ ID NO: 264760 - RNA, 19 nt, Artificial Sequence
  Description of Artificial Sequence: Synthetic oligonucleotide
agaugggcaagaauuucgg

SEQ ID NO: 264761 - RNA, 19 nt, Artificial Sequence
  Description of Artificial Sequence: Synthetic oligonucleotide
ccaacaauugcccuucacc

SEQ ID NO: 264762 - RNA, 19 nt, Artificial Sequence
  Description of Artificial Sequence: Synthetic oligonucleotide
ucggacaacuuucuccccu

SEQ ID NO: 264763 - RNA, 19 nt, Artificial Sequence
  Description of Artificial Sequence: Synthetic oligonucleotide
agcauuauguacauggaua

SEQ ID NO: 264764 - RNA, 19 nt, Artificial Sequence
  Description of Artificial Sequence: Synthetic oligonucleotide
cauugauaguccuuucuga

SEQ ID NO: 264765 - RNA, 19 nt, Artificial Sequence
  Description of Artificial Sequence: Synthetic oligonucleotide
uagcacugucauuacguug

SEQ ID NO: 264766 - RNA, 19 nt, Artificial Sequence
  Description of Artificial Sequence: Synthetic oligonucleotide
ugguuauuucuaagcauau

SEQ ID NO: 264767 - RNA, 19 nt, Artificial Sequence
  Description of Artificial Sequence: Synthetic oligonucleotide
uggcgauacuucgaagugg

SEQ ID NO: 264768 - RNA, 19 nt, Artificial Sequence
  Description of Artificial Sequence: Synthetic oligonucleotide
agauagguagaguggaaua

SEQ ID NO: 264769 - RNA, 19 nt, Artificial Sequence
  Description of Artificial Sequence: Synthetic oligonucleotide
agaaggucccaaugagaag

SEQ ID NO: 264770 - RNA, 19 nt, Artificial Sequence
  Description of Artificial Sequence: Synthetic oligonucleotide
uuuccuacauucagcuaaa

SEQ ID NO: 264771 - RNA, 19 nt, Artificial Sequence
  Description of Artificial Sequence: Synthetic oligonucleotide
auggccacgcuauaaaguu

SEQ ID NO: 264772 - RNA, 19 nt, Artificial Sequence
  Description of Artificial Sequence: Synthetic oligonucleotide
cauuauguacauggauagg

SEQ ID NO: 264773 - RNA, 19 nt, Artificial Sequence
  Description of Artificial Sequence: Synthetic oligonucleotide
agguagaguggaauauggc

SEQ ID NO: 264774 - RNA, 19 nt, Artificial Sequence
  Description of Artificial Sequence: Synthetic oligonucleotide
gacgaauaugcaucacuuc

SEQ ID NO: 264775 - RNA, 19 nt, Artificial Sequence
  Description of Artificial Sequence: Synthetic oligonucleotide
gaccugacgaauaugcauc

SEQ ID NO: 264776 - RNA, 19 nt, Artificial Sequence
  Description of Artificial Sequence: Synthetic oligonucleotide
acgugaagaaggaaaaccu

SEQ ID NO: 264777 - RNA, 19 nt, Artificial Sequence
  Description of Artificial Sequence: Synthetic oligonucleotide
aaugagcaacuggcugacc

SEQ ID NO: 264778 - RNA, 19 nt, Artificial Sequence
  Description of Artificial Sequence: Synthetic oligonucleotide
uucaaccgggcucuuuugu

SEQ ID NO: 264779 - RNA, 19 nt, Artificial Sequence
  Description of Artificial Sequence: Synthetic oligonucleotide
cagugguacagauuucuuc

SEQ ID NO: 264780 - RNA, 19 nt, Artificial Sequence
  Description of Artificial Sequence: Synthetic oligonucleotide
uggguauaaacagagccuu

SEQ ID NO: 264781 - RNA, 19 nt, Artificial Sequence
  Description of Artificial Sequence: Synthetic oligonucleotide
cugucaguuuaccaaaaca

SEQ ID NO: 264782 - RNA, 19 nt, Artificial Sequence
  Description of Artificial Sequence: Synthetic oligonucleotide
agcuaaaugucaguccucu

SEQ ID NO: 264783 - RNA, 19 nt, Artificial Sequence
  Description of Artificial Sequence: Synthetic oligonucleotide
auguuacucugucuugaug

SEQ ID NO: 264784 - RNA, 19 nt, Artificial Sequence
  Description of Artificial Sequence: Synthetic oligonucleotide
aaccuggcgauacuucgaa

SEQ ID NO: 264785 - RNA, 19 nt, Artificial Sequence
  Description of Artificial Sequence: Synthetic oligonucleotide
auggguauaaacagagccu

SEQ ID NO: 264786 - RNA, 19 nt, Artificial Sequence
  Description of Artificial Sequence: Synthetic oligonucleotide
uugagcugaugauuucgga

SEQ ID NO: 264787 - RNA, 19 nt, Artificial Sequence
  Description of Artificial Sequence: Synthetic oligonucleotide
gcuaaaacuguaugagaug

SEQ ID NO: 264788 - RNA, 19 nt, Artificial Sequence
  Description of Artificial Sequence: Synthetic oligonucleotide
acagaccagucagugguac

SEQ ID NO: 264789 - RNA, 19 nt, Artificial Sequence
  Description of Artificial Sequence: Synthetic oligonucleotide
gucaguuuaccaaaacaca

SEQ ID NO: 264790 - RNA, 19 nt, Artificial Sequence
  Description of Artificial Sequence: Synthetic oligonucleotide
ugagagccaggccacucca

SEQ ID NO: 264791 - RNA, 19 nt, Artificial Sequence
  Description of Artificial Sequence: Synthetic oligonucleotide
gguuugugcugugagacag

SEQ ID NO: 264792 - RNA, 19 nt, Artificial Sequence
  Description of Artificial Sequence: Synthetic oligonucleotide
ugauuucggaaaugaacuu

SEQ ID NO: 264793 - RNA, 19 nt, Artificial Sequence
  Description of Artificial Sequence: Synthetic oligonucleotide
acacacuuagcugcuugac

SEQ ID NO: 264794 - RNA, 19 nt, Artificial Sequence
  Description of Artificial Sequence: Synthetic oligonucleotide
uuauuaaauggagcuguua

SEQ ID NO: 264795 - RNA, 19 nt, Artificial Sequence
  Description of Artificial Sequence: Synthetic oligonucleotide
uuucaauggaauggcgccu

SEQ ID NO: 264796 - RNA, 19 nt, Artificial Sequence
  Description of Artificial Sequence: Synthetic oligonucleotide
aagaccacgugaagaagga

SEQ ID NO: 264797 - RNA, 19 nt, Artificial Sequence
  Description of Artificial Sequence: Synthetic oligonucleotide
agucaaccuggcccgcccc

SEQ ID NO: 264798 - RNA, 19 nt, Artificial Sequence
  Description of Artificial Sequence: Synthetic oligonucleotide
uuucgucacaauggccacg

SEQ ID NO: 264799 - RNA, 19 nt, Artificial Sequence
  Description of Artificial Sequence: Synthetic oligonucleotide
guccucucuuaguaguuag

SEQ ID NO: 264800 - RNA, 19 nt, Artificial Sequence
  Description of Artificial Sequence: Synthetic oligonucleotide
aaauagcaacguaauuuaa

SEQ ID NO: 264801 - RNA, 19 nt, Artificial Sequence
  Description of Artificial Sequence: Synthetic oligonucleotide
gacugaauucacacacaag

SEQ ID NO: 264802 - RNA, 19 nt, Artificial Sequence
  Description of Artificial Sequence: Synthetic oligonucleotide
aaaugucaguccucucuua

SEQ ID NO: 264803 - RNA, 19 nt, Artificial Sequence
  Description of Artificial Sequence: Synthetic oligonucleotide
cuggcgauacuucgaagug

SEQ ID NO: 264804 - RNA, 19 nt, Artificial Sequence
  Description of Artificial Sequence: Synthetic oligonucleotide
cauaccuagcuaaaauaaa

SEQ ID NO: 264805 - RNA, 19 nt, Artificial Sequence
  Description of Artificial Sequence: Synthetic oligonucleotide
gaaaaccuccguguucggc

SEQ ID NO: 264806 - RNA, 19 nt, Artificial Sequence
  Description of Artificial Sequence: Synthetic oligonucleotide
acguaauuuaaaacuuuca

SEQ ID NO: 264807 - RNA, 19 nt, Artificial Sequence
  Description of Artificial Sequence: Synthetic oligonucleotide
acauguagaaagacugugu

SEQ ID NO: 264808 - RNA, 19 nt, Artificial Sequence
  Description of Artificial Sequence: Synthetic oligonucleotide
uuauacuguugguacuuuu

SEQ ID NO: 264809 - RNA, 19 nt, Artificial Sequence
  Description of Artificial Sequence: Synthetic oligonucleotide
uuagcacugucauuacguu

SEQ ID NO: 264810 - RNA, 19 nt, Artificial Sequence
  Description of Artificial Sequence: Synthetic oligonucleotide
uucuccccuuugcaaagca

SEQ ID NO: 264811 - RNA, 19 nt, Artificial Sequence
  Description of Artificial Sequence: Synthetic oligonucleotide
uugugcugugagacaguag

SEQ ID NO: 264812 - RNA, 19 nt, Artificial Sequence
  Description of Artificial Sequence: Synthetic oligonucleotide
caauugguaaaguuuauuu

SEQ ID NO: 264813 - RNA, 19 nt, Artificial Sequence
  Description of Artificial Sequence: Synthetic oligonucleotide
acacaccucuucaacacag

SEQ ID NO: 264814 - RNA, 19 nt, Artificial Sequence
  Description of Artificial Sequence: Synthetic oligonucleotide
gaaaugcaacugucaugcc

SEQ ID NO: 264815 - RNA, 19 nt, Artificial Sequence
  Description of Artificial Sequence: Synthetic oligonucleotide
uagucaaccuggcccgccc

SEQ ID NO: 264816 - RNA, 19 nt, Artificial Sequence
  Description of Artificial Sequence: Synthetic oligonucleotide
gguagaguggaauauggcu

SEQ ID NO: 264817 - RNA, 19 nt, Artificial Sequence
  Description of Artificial Sequence: Synthetic oligonucleotide
cucucuauggucacggucu

SEQ ID NO: 264818 - RNA, 19 nt, Artificial Sequence
  Description of Artificial Sequence: Synthetic oligonucleotide
aaccaguuugagacucagg

SEQ ID NO: 264819 - RNA, 19 nt, Artificial Sequence
  Description of Artificial Sequence: Synthetic oligonucleotide
accuuacaaauuucauagu

SEQ ID NO: 264820 - RNA, 19 nt, Artificial Sequence
  Description of Artificial Sequence: Synthetic oligonucleotide
aaaccuccguguucggcaa

SEQ ID NO: 264821 - RNA, 19 nt, Artificial Sequence
  Description of Artificial Sequence: Synthetic oligonucleotide
ccucggacaacuuucuccc

SEQ ID NO: 264822 - RNA, 19 nt, Artificial Sequence
  Description of Artificial Sequence: Synthetic oligonucleotide
guuauggaaaauguugcua

SEQ ID NO: 264823 - RNA, 19 nt, Artificial Sequence
  Description of Artificial Sequence: Synthetic oligonucleotide
acugucaauugaaugugga

SEQ ID NO: 264824 - RNA, 19 nt, Artificial Sequence
  Description of Artificial Sequence: Synthetic oligonucleotide
accugacgaauaugcauca

SEQ ID NO: 264825 - RNA, 19 nt, Artificial Sequence
  Description of Artificial Sequence: Synthetic oligonucleotide
acaagauaacuagugcaaa

SEQ ID NO: 264826 - RNA, 19 nt, Artificial Sequence
  Description of Artificial Sequence: Synthetic oligonucleotide
uaaccacacaccucuucaa

SEQ ID NO: 264827 - RNA, 19 nt, Artificial Sequence
  Description of Artificial Sequence: Synthetic oligonucleotide
gaacauugaggaacgaacu

SEQ ID NO: 264828 - RNA, 19 nt, Artificial Sequence
  Description of Artificial Sequence: Synthetic oligonucleotide
auuucggaaaugaacuuuu

SEQ ID NO: 264829 - RNA, 19 nt, Artificial Sequence
  Description of Artificial Sequence: Synthetic oligonucleotide
guguaagaccacgugaaga

SEQ ID NO: 264830 - RNA, 19 nt, Artificial Sequence
  Description of Artificial Sequence: Synthetic oligonucleotide
caucaguauaaguaauuua

SEQ ID NO: 264831 - RNA, 19 nt, Artificial Sequence
  Description of Artificial Sequence: Synthetic oligonucleotide
gugcacaacacuaccugcc

SEQ ID NO: 264832 - RNA, 19 nt, Artificial Sequence
  Description of Artificial Sequence: Synthetic oligonucleotide
agaauuucgggaggcuucu

SEQ ID NO: 264833 - RNA, 19 nt, Artificial Sequence
  Description of Artificial Sequence: Synthetic oligonucleotide
ggugcacaacacuaccugc

SEQ ID NO: 264834 - RNA, 19 nt, Artificial Sequence
  Description of Artificial Sequence: Synthetic oligonucleotide
cugaggccgccucugaaac

SEQ ID NO: 264835 - RNA, 19 nt, Artificial Sequence
  Description of Artificial Sequence: Synthetic oligonucleotide
guuaucgguggugaccaug

SEQ ID NO: 264836 - RNA, 19 nt, Artificial Sequence
  Description of Artificial Sequence: Synthetic oligonucleotide
acugucaaguggaaugcca

SEQ ID NO: 264837 - RNA, 19 nt, Artificial Sequence
  Description of Artificial Sequence: Synthetic oligonucleotide
ccuuagucaggaaauuaug

SEQ ID NO: 264838 - RNA, 19 nt, Artificial Sequence
  Description of Artificial Sequence: Synthetic oligonucleotide
augagggacagcccauagu

SEQ ID NO: 264839 - RNA, 19 nt, Artificial Sequence
  Description of Artificial Sequence: Synthetic oligonucleotide
aaccuccguguucggcaac

SEQ ID NO: 264840 - RNA, 19 nt, Artificial Sequence
  Description of Artificial Sequence: Synthetic oligonucleotide
agguguaagaccacgugaa

SEQ ID NO: 264841 - RNA, 19 nt, Artificial Sequence
  Description of Artificial Sequence: Synthetic oligonucleotide
gccucggacaacuuucucc

SEQ ID NO: 264842 - RNA, 19 nt, Artificial Sequence
  Description of Artificial Sequence: Synthetic oligonucleotide
agggagcgagagcucugcc

SEQ ID NO: 264843 - RNA, 19 nt, Artificial Sequence
  Description of Artificial Sequence: Synthetic oligonucleotide
gucacggucugucaguuua

SEQ ID NO: 264844 - RNA, 19 nt, Artificial Sequence
  Description of Artificial Sequence: Synthetic oligonucleotide
uacuccaauccuccaugaa

SEQ ID NO: 264845 - RNA, 19 nt, Artificial Sequence
  Description of Artificial Sequence: Synthetic oligonucleotide
ugguuaauuucgucacaau

SEQ ID NO: 264846 - RNA, 19 nt, Artificial Sequence
  Description of Artificial Sequence: Synthetic oligonucleotide
gauagguagaguggaauau

SEQ ID NO: 264847 - RNA, 19 nt, Artificial Sequence
  Description of Artificial Sequence: Synthetic oligonucleotide
ucauuacguuggaaugaaa

SEQ ID NO: 264848 - RNA, 19 nt, Artificial Sequence
  Description of Artificial Sequence: Synthetic oligonucleotide
gaaugccaauaugacuuac

SEQ ID NO: 264849 - RNA, 19 nt, Artificial Sequence
  Description of Artificial Sequence: Synthetic oligonucleotide
gguguaagaccacgugaag

SEQ ID NO: 264850 - RNA, 19 nt, Artificial Sequence
  Description of Artificial Sequence: Synthetic oligonucleotide
acuuacugcugagaacugu

SEQ ID NO: 264851 - RNA, 19 nt, Artificial Sequence
  Description of Artificial Sequence: Synthetic oligonucleotide
agaguggaauauggcuugg

SEQ ID NO: 264852 - RNA, 19 nt, Artificial Sequence
  Description of Artificial Sequence: Synthetic oligonucleotide
ccucagugcagcacaaacc

SEQ ID NO: 264853 - RNA, 19 nt, Artificial Sequence
  Description of Artificial Sequence: Synthetic oligonucleotide
ucaaccgggcucuuuuguu

SEQ ID NO: 264854 - RNA, 19 nt, Artificial Sequence
  Description of Artificial Sequence: Synthetic oligonucleotide
cuguuaucgguggugacca

SEQ ID NO: 264855 - RNA, 19 nt, Artificial Sequence
  Description of Artificial Sequence: Synthetic oligonucleotide
ggcgauacuucgaaguggc

SEQ ID NO: 264856 - RNA, 19 nt, Artificial Sequence
  Description of Artificial Sequence: Synthetic oligonucleotide
ccacgcuauaaaguuaugg

SEQ ID NO: 264857 - RNA, 19 nt, Artificial Sequence
  Description of Artificial Sequence: Synthetic oligonucleotide
acggucugucaguuuacca

SEQ ID NO: 264858 - RNA, 19 nt, Artificial Sequence
  Description of Artificial Sequence: Synthetic oligonucleotide
uucaggaauuacugugauu

SEQ ID NO: 264859 - RNA, 19 nt, Artificial Sequence
  Description of Artificial Sequence: Synthetic oligonucleotide
uuugagacucagguaccaa

SEQ ID NO: 264860 - RNA, 19 nt, Artificial Sequence
  Description of Artificial Sequence: Synthetic oligonucleotide
uuaggcuuucugagugcaa

SEQ ID NO: 264861 - RNA, 19 nt, Artificial Sequence
  Description of Artificial Sequence: Synthetic oligonucleotide
uguuuccuacauucagcua

SEQ ID NO: 264862 - RNA, 19 nt, Artificial Sequence
  Description of Artificial Sequence: Synthetic oligonucleotide
gagcauuauguacauggau

SEQ ID NO: 264863 - RNA, 19 nt, Artificial Sequence
  Description of Artificial Sequence: Synthetic oligonucleotide
gcuguuaucgguggugacc

SEQ ID NO: 264864 - RNA, 19 nt, Artificial Sequence
  Description of Artificial Sequence: Synthetic oligonucleotide
guggaaugccaauaugacu

SEQ ID NO: 264865 - RNA, 19 nt, Artificial Sequence
  Description of Artificial Sequence: Synthetic oligonucleotide
cgauacuucgaaguggccg

SEQ ID NO: 264866 - RNA, 19 nt, Artificial Sequence
  Description of Artificial Sequence: Synthetic oligonucleotide
ucacguucguagguguuuc

SEQ ID NO: 264867 - RNA, 19 nt, Artificial Sequence
  Description of Artificial Sequence: Synthetic oligonucleotide
uuacgcauugcagcagguc

SEQ ID NO: 264868 - RNA, 19 nt, Artificial Sequence
  Description of Artificial Sequence: Synthetic oligonucleotide
gcuuacacaucuggaagcc

SEQ ID NO: 264869 - RNA, 19 nt, Artificial Sequence
  Description of Artificial Sequence: Synthetic oligonucleotide
gagacucagguaccaaacu

SEQ ID NO: 264870 - RNA, 19 nt, Artificial Sequence
  Description of Artificial Sequence: Synthetic oligonucleotide
ugcagucuacacacaccuc

SEQ ID NO: 264871 - RNA, 19 nt, Artificial Sequence
  Description of Artificial Sequence: Synthetic oligonucleotide
caucauaccuagcuaaaau

SEQ ID NO: 264872 - RNA, 19 nt, Artificial Sequence
  Description of Artificial Sequence: Synthetic oligonucleotide
cugacgaauaugcaucacu

SEQ ID NO: 264873 - RNA, 19 nt, Artificial Sequence
  Description of Artificial Sequence: Synthetic oligonucleotide
gcagauggagccugucaag

SEQ ID NO: 264874 - RNA, 19 nt, Artificial Sequence
  Description of Artificial Sequence: Synthetic oligonucleotide
accuggcgauacuucgaag

SEQ ID NO: 264875 - RNA, 19 nt, Artificial Sequence
  Description of Artificial Sequence: Synthetic oligonucleotide
ugaggccgccucugaaaca

SEQ ID NO: 264876 - RNA, 19 nt, Artificial Sequence
  Description of Artificial Sequence: Synthetic oligonucleotide
cacguucguagguguuucc

SEQ ID NO: 264877 - RNA, 19 nt, Artificial Sequence
  Description of Artificial Sequence: Synthetic oligonucleotide
uaucgguggugaccaugac

SEQ ID NO: 264878 - RNA, 19 nt, Artificial Sequence
  Description of Artificial Sequence: Synthetic oligonucleotide
ccaauaugacuuacugcug

SEQ ID NO: 264879 - RNA, 19 nt, Artificial Sequence
  Description of Artificial Sequence: Synthetic oligonucleotide
augagaugggcaagaauuu

SEQ ID NO: 264880 - RNA, 19 nt, Artificial Sequence
  Description of Artificial Sequence: Synthetic oligonucleotide
gacuuacugcugagaacug

SEQ ID NO: 264881 - RNA, 19 nt, Artificial Sequence
  Description of Artificial Sequence: Synthetic oligonucleotide
uuuucuggccucggacaac

SEQ ID NO: 264882 - RNA, 19 nt, Artificial Sequence
  Description of Artificial Sequence: Synthetic oligonucleotide
cagucuacacacaccucca

SEQ ID NO: 264883 - RNA, 19 nt, Artificial Sequence
  Description of Artificial Sequence: Synthetic oligonucleotide
uggccacgcuauaaaguua

SEQ ID NO: 264884 - RNA, 19 nt, Artificial Sequence
  Description of Artificial Sequence: Synthetic oligonucleotide
aucaaguuuuaggcuuucu

SEQ ID NO: 264885 - RNA, 19 nt, Artificial Sequence
  Description of Artificial Sequence: Synthetic oligonucleotide
ucccgucaacccaugggua

SEQ ID NO: 264886 - RNA, 19 nt, Artificial Sequence
  Description of Artificial Sequence: Synthetic oligonucleotide
uacuccgaggggcccgcug

SEQ ID NO: 264887 - RNA, 19 nt, Artificial Sequence
  Description of Artificial Sequence: Synthetic oligonucleotide
acguucguagguguuuccu

SEQ ID NO: 264888 - RNA, 19 nt, Artificial Sequence
  Description of Artificial Sequence: Synthetic oligonucleotide
gaacgaacuaaggaaguuu

SEQ ID NO: 264889 - RNA, 19 nt, Artificial Sequence
  Description of Artificial Sequence: Synthetic oligonucleotide
acacacaagaagggcucug

SEQ ID NO: 264890 - RNA, 19 nt, Artificial Sequence
  Description of Artificial Sequence: Synthetic oligonucleotide
cacggucugucaguuuacc

SEQ ID NO: 264891 - RNA, 19 nt, Artificial Sequence
  Description of Artificial Sequence: Synthetic oligonucleotide
gucccgucaacccaugggu

SEQ ID NO: 264892 - RNA, 19 nt, Artificial Sequence
  Description of Artificial Sequence: Synthetic oligonucleotide
cgcuauaaaguuauggaaa

SEQ ID NO: 264893 - RNA, 19 nt, Artificial Sequence
  Description of Artificial Sequence: Synthetic oligonucleotide
gguaguaaccacacaccuc

SEQ ID NO: 264894 - RNA, 19 nt, Artificial Sequence
  Description of Artificial Sequence: Synthetic oligonucleotide
uggcuucccuauucacaca

SEQ ID NO: 264895 - RNA, 19 nt, Artificial Sequence
  Description of Artificial Sequence: Synthetic oligonucleotide
gaagaacauugaggaacga

SEQ ID NO: 264896 - RNA, 19 nt, Artificial Sequence
  Description of Artificial Sequence: Synthetic oligonucleotide
ggaaaaccuccguguucgg

SEQ ID NO: 264897 - RNA, 19 nt, Artificial Sequence
  Description of Artificial Sequence: Synthetic oligonucleotide
ccauggguauaaacagagc

SEQ ID NO: 264898 - RNA, 19 nt, Artificial Sequence
  Description of Artificial Sequence: Synthetic oligonucleotide
auuacgcauugcagcaggu

SEQ ID NO: 264899 - RNA, 19 nt, Artificial Sequence
  Description of Artificial Sequence: Synthetic oligonucleotide
caacacucugucagacuga

SEQ ID NO: 264900 - RNA, 19 nt, Artificial Sequence
  Description of Artificial Sequence: Synthetic oligonucleotide
gaauuccucaagggagcga

SEQ ID NO: 264901 - RNA, 19 nt, Artificial Sequence
  Description of Artificial Sequence: Synthetic oligonucleotide
guagucaaccuggcccgcc

SEQ ID NO: 264902 - RNA, 19 nt, Artificial Sequence
  Description of Artificial Sequence: Synthetic oligonucleotide
gcauugcuuuagucaauug

SEQ ID NO: 264903 - RNA, 19 nt, Artificial Sequence
  Description of Artificial Sequence: Synthetic oligonucleotide
caauggaauggcgccucug

SEQ ID NO: 264904 - RNA, 19 nt, Artificial Sequence
  Description of Artificial Sequence: Synthetic oligonucleotide
caguacuccgaggggcccg

SEQ ID NO: 264905 - RNA, 19 nt, Artificial Sequence
  Description of Artificial Sequence: Synthetic oligonucleotide
acguuggaaugaaagcaau

SEQ ID NO: 264906 - RNA, 19 nt, Artificial Sequence
  Description of Artificial Sequence: Synthetic oligonucleotide
augugucacaggaacugaa

SEQ ID NO: 264907 - RNA, 19 nt, Artificial Sequence
  Description of Artificial Sequence: Synthetic oligonucleotide
guuuaccaaaacacacuua

SEQ ID NO: 264908 - RNA, 19 nt, Artificial Sequence
  Description of Artificial Sequence: Synthetic oligonucleotide
cugaggggcaguacuccga

SEQ ID NO: 264909 - RNA, 19 nt, Artificial Sequence
  Description of Artificial Sequence: Synthetic oligonucleotide
cuuacacaucuggaagcca

SEQ ID NO: 264910 - RNA, 19 nt, Artificial Sequence
  Description of Artificial Sequence: Synthetic oligonucleotide
ccgccucugaaacaacagc

SEQ ID NO: 264911 - RNA, 19 nt, Artificial Sequence
  Description of Artificial Sequence: Synthetic oligonucleotide
caauugcccuucaccagaa

SEQ ID NO: 264912 - RNA, 19 nt, Artificial Sequence
  Description of Artificial Sequence: Synthetic oligonucleotide
cguaauuuaaaacuuucau

SEQ ID NO: 264913 - RNA, 19 nt, Artificial Sequence
  Description of Artificial Sequence: Synthetic oligonucleotide
ggaauggcgccucuggggu

SEQ ID NO: 264914 - RNA, 19 nt, Artificial Sequence
  Description of Artificial Sequence: Synthetic oligonucleotide
ccguguucggcaacagaag

SEQ ID NO: 264915 - RNA, 19 nt, Artificial Sequence
  Description of Artificial Sequence: Synthetic oligonucleotide
ggaccugacgaauaugcau

SEQ ID NO: 264916 - RNA, 19 nt, Artificial Sequence
  Description of Artificial Sequence: Synthetic oligonucleotide
gcccgcugaggacauguag

SEQ ID NO: 264917 - RNA, 19 nt, Artificial Sequence
  Description of Artificial Sequence: Synthetic oligonucleotide
cccaaugagaagauaggua

SEQ ID NO: 264918 - RNA, 19 nt, Artificial Sequence
  Description of Artificial Sequence: Synthetic oligonucleotide
accuccguguucggcaaca

SEQ ID NO: 264919 - RNA, 19 nt, Artificial Sequence
  Description of Artificial Sequence: Synthetic oligonucleotide
uguuaucgguggugaccau

SEQ ID NO: 264920 - RNA, 19 nt, Artificial Sequence
  Description of Artificial Sequence: Synthetic oligonucleotide
gaaaugagggacagcccau

SEQ ID NO: 264921 - RNA, 19 nt, Artificial Sequence
  Description of Artificial Sequence: Synthetic oligonucleotide
ggcaguacuccgaggggcc

SEQ ID NO: 264922 - RNA, 19 nt, Artificial Sequence
  Description of Artificial Sequence: Synthetic oligonucleotide
ccucucuauggucacgguc

SEQ ID NO: 264923 - RNA, 19 nt, Artificial Sequence
  Description of Artificial Sequence: Synthetic oligonucleotide
cugugauugugccuucacu

SEQ ID NO: 264924 - RNA, 19 nt, Artificial Sequence
  Description of Artificial Sequence: Synthetic oligonucleotide
gccucuuacagaacugaca

SEQ ID NO: 264925 - RNA, 19 nt, Artificial Sequence
  Description of Artificial Sequence: Synthetic oligonucleotide
uggcccgccccagggagcc

SEQ ID NO: 264926 - RNA, 19 nt, Artificial Sequence
  Description of Artificial Sequence: Synthetic oligonucleotide
ucgucacaauggccacgcu

SEQ ID NO: 264927 - RNA, 19 nt, Artificial Sequence
  Description of Artificial Sequence: Synthetic oligonucleotide
gcuaaaugucaguccucuc

SEQ ID NO: 264928 - RNA, 19 nt, Artificial Sequence
  Description of Artificial Sequence: Synthetic oligonucleotide
cccgcugaggacauguaga

SEQ ID NO: 264929 - RNA, 19 nt, Artificial Sequence
  Description of Artificial Sequence: Synthetic oligonucleotide
caggugcacaacacuaccu

SEQ ID NO: 264930 - RNA, 19 nt, Artificial Sequence
  Description of Artificial Sequence: Synthetic oligonucleotide
agcgagagcucugccugga

SEQ ID NO: 264931 - RNA, 19 nt, Artificial Sequence
  Description of Artificial Sequence: Synthetic oligonucleotide
gccgauggugagcagugga

SEQ ID NO: 264932 - RNA, 19 nt, Artificial Sequence
  Description of Artificial Sequence: Synthetic oligonucleotide
agcuccgcuuucaccagga

SEQ ID NO: 264933 - RNA, 19 nt, Artificial Sequence
  Description of Artificial Sequence: Synthetic oligonucleotide
uuccuacauucagcuaaau

SEQ ID NO: 264934 - RNA, 19 nt, Artificial Sequence
  Description of Artificial Sequence: Synthetic oligonucleotide
gccgccucugaaacaacag

SEQ ID NO: 264935 - RNA, 19 nt, Artificial Sequence
  Description of Artificial Sequence: Synthetic oligonucleotide
gccaacaauugcccuucac

SEQ ID NO: 264936 - RNA, 19 nt, Artificial Sequence
  Description of Artificial Sequence: Synthetic oligonucleotide
ccacuggguagcagaauuc

SEQ ID NO: 264937 - RNA, 19 nt, Artificial Sequence
  Description of Artificial Sequence: Synthetic oligonucleotide
ccuggcgauacuucgaagu

SEQ ID NO: 264938 - RNA, 19 nt, Artificial Sequence
  Description of Artificial Sequence: Synthetic oligonucleotide
cuggcccgccccagggagc

SEQ ID NO: 264939 - RNA, 19 nt, Artificial Sequence
  Description of Artificial Sequence: Synthetic oligonucleotide
gauugugccuucacugauu

SEQ ID NO: 264940 - RNA, 19 nt, Artificial Sequence
  Description of Artificial Sequence: Synthetic oligonucleotide
caggaacauucacaagaua

SEQ ID NO: 264941 - RNA, 19 nt, Artificial Sequence
  Description of Artificial Sequence: Synthetic oligonucleotide
ggccuucuagguuugugcu

SEQ ID NO: 264942 - RNA, 19 nt, Artificial Sequence
  Description of Artificial Sequence: Synthetic oligonucleotide
cucagaucucauugauagu

SEQ ID NO: 264943 - RNA, 19 nt, Artificial Sequence
  Description of Artificial Sequence: Synthetic oligonucleotide
gugugccuagggcuuugga

SEQ ID NO: 264944 - RNA, 19 nt, Artificial Sequence
  Description of Artificial Sequence: Synthetic oligonucleotide
ggccucuuacagaacugac

SEQ ID NO: 264945 - RNA, 19 nt, Artificial Sequence
  Description of Artificial Sequence: Synthetic oligonucleotide
ggccucacguucguaggug

SEQ ID NO: 264946 - RNA, 19 nt, Artificial Sequence
  Description of Artificial Sequence: Synthetic oligonucleotide
ggcaucauaccuagcuaaa

SEQ ID NO: 264947 - RNA, 19 nt, Artificial Sequence
  Description of Artificial Sequence: Synthetic oligonucleotide
cggucugucaguuuaccaa

SEQ ID NO: 264948 - RNA, 19 nt, Artificial Sequence
  Description of Artificial Sequence: Synthetic oligonucleotide
gucaugccuuuuauuaaau

SEQ ID NO: 264949 - RNA, 19 nt, Artificial Sequence
  Description of Artificial Sequence: Synthetic oligonucleotide
ggcgccucuggggugguug

SEQ ID NO: 264950 - RNA, 19 nt, Artificial Sequence
  Description of Artificial Sequence: Synthetic oligonucleotide
gcacaacacuaccugccaa

SEQ ID NO: 264951 - RNA, 19 nt, Artificial Sequence
  Description of Artificial Sequence: Synthetic oligonucleotide
ccaugacaggguuucuuaa

SEQ ID NO: 264952 - RNA, 19 nt, Artificial Sequence
  Description of Artificial Sequence: Synthetic oligonucleotide
aggucccaaugagaagaua

SEQ ID NO: 264953 - RNA, 19 nt, Artificial Sequence
  Description of Artificial Sequence: Synthetic oligonucleotide
ggccacgcuauaaaguuau

SEQ ID NO: 264954 - RNA, 19 nt, Artificial Sequence
  Description of Artificial Sequence: Synthetic oligonucleotide
cuucgaaguggccgauggu

SEQ ID NO: 264955 - RNA, 19 nt, Artificial Sequence
  Description of Artificial Sequence: Synthetic oligonucleotide
gcaguacuccgaggggccc

SEQ ID NO: 264956 - RNA, 19 nt, Artificial Sequence
  Description of Artificial Sequence: Synthetic oligonucleotide
guuugugcugugagacagu

SEQ ID NO: 264957 - RNA, 19 nt, Artificial Sequence
  Description of Artificial Sequence: Synthetic oligonucleotide
cacugucauuacguuggaa

SEQ ID NO: 264958 - RNA, 19 nt, Artificial Sequence
  Description of Artificial Sequence: Synthetic oligonucleotide
gcgauacuucgaaguggcc

SEQ ID NO: 264959 - RNA, 19 nt, Artificial Sequence
  Description of Artificial Sequence: Synthetic oligonucleotide
ccuuugcaaagcagaaggu

SEQ ID NO: 264960 - RNA, 19 nt, Artificial Sequence
  Description of Artificial Sequence: Synthetic oligonucleotide
cccuauucacacacacaaa

SEQ ID NO: 264961 - RNA, 19 nt, Artificial Sequence
  Description of Artificial Sequence: Synthetic oligonucleotide
gggcucuuuuguuggccaa

SEQ ID NO: 264962 - RNA, 19 nt, Artificial Sequence
  Description of Artificial Sequence: Synthetic oligonucleotide
cucacguucguagguguuu

SEQ ID NO: 264963 - RNA, 19 nt, Artificial Sequence
  Description of Artificial Sequence: Synthetic oligonucleotide
gccacgcuauaaaguuaug

SEQ ID NO: 264964 - RNA, 19 nt, Artificial Sequence
  Description of Artificial Sequence: Synthetic oligonucleotide
gccucacguucguaggugu

SEQ ID NO: 264965 - RNA, 19 nt, Artificial Sequence
  Description of Artificial Sequence: Synthetic oligonucleotide
ccugccaacaauugcccuu

SEQ ID NO: 264966 - RNA, 19 nt, Artificial Sequence
  Description of Artificial Sequence: Synthetic oligonucleotide
gcccuucaccagaaauuca

SEQ ID NO: 264967 - RNA, 19 nt, Artificial Sequence
  Description of Artificial Sequence: Synthetic oligonucleotide
gcccgccccagggagccgg

SEQ ID NO: 264968 - RNA, 19 nt, Artificial Sequence
  Description of Artificial Sequence: Synthetic oligonucleotide
gaauuucgggaggcuucuu

SEQ ID NO: 264969 - RNA, 19 nt, Artificial Sequence
  Description of Artificial Sequence: Synthetic oligonucleotide
cucuauggucacggucugu

SEQ ID NO: 264970 - RNA, 19 nt, Artificial Sequence
  Description of Artificial Sequence: Synthetic oligonucleotide
cccgucaacccauggguau

SEQ ID NO: 264971 - RNA, 19 nt, Artificial Sequence
  Description of Artificial Sequence: Synthetic oligonucleotide
gugagcaguggaggauuuu

SEQ ID NO: 264972 - RNA, 19 nt, Artificial Sequence
  Description of Artificial Sequence: Synthetic oligonucleotide
ggugagcaguggaggauuu

SEQ ID NO: 264973 - RNA, 19 nt, Artificial Sequence
  Description of Artificial Sequence: Synthetic oligonucleotide
cgccggcuugagcugauga

SEQ ID NO: 264974 - RNA, 19 nt, Artificial Sequence
  Description of Artificial Sequence: Synthetic oligonucleotide
cggcuugagcugaugauuu

SEQ ID NO: 264975 - RNA, 19 nt, Artificial Sequence
  Description of Artificial Sequence: Synthetic oligonucleotide
cgucaacccauggguauaa

SEQ ID NO: 264976 - RNA, 19 nt, Artificial Sequence
  Description of Artificial Sequence: Synthetic oligonucleotide
ccggcuugagcugaugauu

SEQ ID NO: 264977 - RNA, 19 nt, Artificial Sequence
  Description of Artificial Sequence: Synthetic oligonucleotide
ccgucaacccauggguaua

SEQ ID NO: 264978 - RNA, 19 nt, Artificial Sequence
  Description of Artificial Sequence: Synthetic oligonucleotide
ccucacguucguagguguu

SEQ ID NO: 264979 - RNA, 19 nt, Artificial Sequence
  Description of Artificial Sequence: Synthetic oligonucleotide
cggugugccuagggcuuug

SEQ ID NO: 264980 - RNA, 19 nt, Artificial Sequence
  Description of Artificial Sequence: Synthetic oligonucleotide
guacuccgaggggcccgcu

SEQ ID NO: 264981 - RNA, 19 nt, Artificial Sequence
  Description of Artificial Sequence: Synthetic oligonucleotide
ccggugugccuagggcuuu

SEQ ID NO: 264982 - RNA, 19 nt, Artificial Sequence
  Description of Artificial Sequence: Synthetic oligonucleotide
auuguaaagaaguuccucc

SEQ ID NO: 264983 - RNA, 19 nt, Artificial Sequence
  Description of Artificial Sequence: Synthetic oligonucleotide
uucaaucggagucaaaacg

SEQ ID NO: 264984 - RNA, 19 nt, Artificial Sequence
  Description of Artificial Sequence: Synthetic oligonucleotide
acaguuaugccucauuuac

SEQ ID NO: 264985 - RNA, 19 nt, Artificial Sequence
  Description of Artificial Sequence: Synthetic oligonucleotide
aaauccccaaauuuggauc

SEQ ID NO: 264986 - RNA, 19 nt, Artificial Sequence
  Description of Artificial Sequence: Synthetic oligonucleotide
gaagaagucacuucauagg

SEQ ID NO: 264987 - RNA, 19 nt, Artificial Sequence
  Description of Artificial Sequence: Synthetic oligonucleotide
cagauuguaaagaaguucc

SEQ ID NO: 264988 - RNA, 19 nt, Artificial Sequence
  Description of Artificial Sequence: Synthetic oligonucleotide
auaaauacaguuaugccuc

SEQ ID NO: 264989 - RNA, 19 nt, Artificial Sequence
  Description of Artificial Sequence: Synthetic oligonucleotide
aacuggguuucacauuucc

SEQ ID NO: 264990 - RNA, 19 nt, Artificial Sequence
  Description of Artificial Sequence: Synthetic oligonucleotide
uuacucuugacaaaauuac

SEQ ID NO: 264991 - RNA, 19 nt, Artificial Sequence
  Description of Artificial Sequence: Synthetic oligonucleotide
uuguauagcauugugaaac

SEQ ID NO: 264992 - RNA, 19 nt, Artificial Sequence
  Description of Artificial Sequence: Synthetic oligonucleotide
auagcauugugaaacauac

SEQ ID NO: 264993 - RNA, 19 nt, Artificial Sequence
  Description of Artificial Sequence: Synthetic oligonucleotide
uccguagaaaccaacucgg

SEQ ID NO: 264994 - RNA, 19 nt, Artificial Sequence
  Description of Artificial Sequence: Synthetic oligonucleotide
acugacgcugcccacaggc

SEQ ID NO: 264995 - RNA, 19 nt, Artificial Sequence
  Description of Artificial Sequence: Synthetic oligonucleotide
ucugaauaggccagaauug

SEQ ID NO: 264996 - RNA, 19 nt, Artificial Sequence
  Description of Artificial Sequence: Synthetic oligonucleotide
uuaccuuagaaauucaaau

SEQ ID NO: 264997 - RNA, 19 nt, Artificial Sequence
  Description of Artificial Sequence: Synthetic oligonucleotide
auccguagaaaccaacucg

SEQ ID NO: 264998 - RNA, 19 nt, Artificial Sequence
  Description of Artificial Sequence: Synthetic oligonucleotide
ugugaaacauacuuuaaua

SEQ ID NO: 264999 - RNA, 19 nt, Artificial Sequence
  Description of Artificial Sequence: Synthetic oligonucleotide
uggaguuuaucuuuccucc

SEQ ID NO: 265000 - RNA, 19 nt, Artificial Sequence
  Description of Artificial Sequence: Synthetic oligonucleotide
aguuaugccucauuuaccu

SEQ ID NO: 265001 - RNA, 19 nt, Artificial Sequence
  Description of Artificial Sequence: Synthetic oligonucleotide
ucugaauauggguuuguag

SEQ ID NO: 265002 - RNA, 19 nt, Artificial Sequence
  Description of Artificial Sequence: Synthetic oligonucleotide
uuuugcuuguauagcauug

SEQ ID NO: 265003 - RNA, 19 nt, Artificial Sequence
  Description of Artificial Sequence: Synthetic oligonucleotide
aacugaaacgcaugaggag

SEQ ID NO: 265004 - RNA, 19 nt, Artificial Sequence
  Description of Artificial Sequence: Synthetic oligonucleotide
ugcaguaucuguauucaug

SEQ ID NO: 265005 - RNA, 19 nt, Artificial Sequence
  Description of Artificial Sequence: Synthetic oligonucleotide
uuaugguccuuguugauga

SEQ ID NO: 265006 - RNA, 19 nt, Artificial Sequence
  Description of Artificial Sequence: Synthetic oligonucleotide
agcauugugaaacauacuu

SEQ ID NO: 265007 - RNA, 19 nt, Artificial Sequence
  Description of Artificial Sequence: Synthetic oligonucleotide
guuaccugcaucuuuacuc

SEQ ID NO: 265008 - RNA, 19 nt, Artificial Sequence
  Description of Artificial Sequence: Synthetic oligonucleotide
ugacugucaauucugaaua

SEQ ID NO: 265009 - RNA, 19 nt, Artificial Sequence
  Description of Artificial Sequence: Synthetic oligonucleotide
ucuagucuaugugagaucu

SEQ ID NO: 265010 - RNA, 19 nt, Artificial Sequence
  Description of Artificial Sequence: Synthetic oligonucleotide
aaucccucuagucuaugug

SEQ ID NO: 265011 - RNA, 19 nt, Artificial Sequence
  Description of Artificial Sequence: Synthetic oligonucleotide
uuuggauccguagaaacca

SEQ ID NO: 265012 - RNA, 19 nt, Artificial Sequence
  Description of Artificial Sequence: Synthetic oligonucleotide
gucuaugugagaucucugg

SEQ ID NO: 265013 - RNA, 19 nt, Artificial Sequence
  Description of Artificial Sequence: Synthetic oligonucleotide
caaacauccucuuaugguc

SEQ ID NO: 265014 - RNA, 19 nt, Artificial Sequence
  Description of Artificial Sequence: Synthetic oligonucleotide
caacucggaaguaaguucc

SEQ ID NO: 265015 - RNA, 19 nt, Artificial Sequence
  Description of Artificial Sequence: Synthetic oligonucleotide
uuggcgauccuguacauga

SEQ ID NO: 265016 - RNA, 19 nt, Artificial Sequence
  Description of Artificial Sequence: Synthetic oligonucleotide
cuaugugcuuccaggaugg

SEQ ID NO: 265017 - RNA, 19 nt, Artificial Sequence
  Description of Artificial Sequence: Synthetic oligonucleotide
auuuggauccguagaaacc

SEQ ID NO: 265018 - RNA, 19 nt, Artificial Sequence
  Description of Artificial Sequence: Synthetic oligonucleotide
ucggaaguaaguuccaaac

SEQ ID NO: 265019 - RNA, 19 nt, Artificial Sequence
  Description of Artificial Sequence: Synthetic oligonucleotide
acagggugucgucagagac

SEQ ID NO: 265020 - RNA, 19 nt, Artificial Sequence
  Description of Artificial Sequence: Synthetic oligonucleotide
uugaagcauaaccucagcu

SEQ ID NO: 265021 - RNA, 19 nt, Artificial Sequence
  Description of Artificial Sequence: Synthetic oligonucleotide
aaacuggaucuguggaagg

SEQ ID NO: 265022 - RNA, 19 nt, Artificial Sequence
  Description of Artificial Sequence: Synthetic oligonucleotide
uccccuuccagaauccagg

SEQ ID NO: 265023 - RNA, 19 nt, Artificial Sequence
  Description of Artificial Sequence: Synthetic oligonucleotide
ucuuccguccacaauuuga

SEQ ID NO: 265024 - RNA, 19 nt, Artificial Sequence
  Description of Artificial Sequence: Synthetic oligonucleotide
guaaagaaguuccuccacc

SEQ ID NO: 265025 - RNA, 19 nt, Artificial Sequence
  Description of Artificial Sequence: Synthetic oligonucleotide
ugcuuguauagcauuguga

SEQ ID NO: 265026 - RNA, 19 nt, Artificial Sequence
  Description of Artificial Sequence: Synthetic oligonucleotide
uugacugucaauucugaau

SEQ ID NO: 265027 - RNA, 19 nt, Artificial Sequence
  Description of Artificial Sequence: Synthetic oligonucleotide
aaaugcaggucagaagaag

SEQ ID NO: 265028 - RNA, 19 nt, Artificial Sequence
  Description of Artificial Sequence: Synthetic oligonucleotide
augucgauagagcuuuggg

SEQ ID NO: 265029 - RNA, 19 nt, Artificial Sequence
  Description of Artificial Sequence: Synthetic oligonucleotide
acaaaauuacugguggcuc

SEQ ID NO: 265030 - RNA, 19 nt, Artificial Sequence
  Description of Artificial Sequence: Synthetic oligonucleotide
ugucgauagagcuuugggu

SEQ ID NO: 265031 - RNA, 19 nt, Artificial Sequence
  Description of Artificial Sequence: Synthetic oligonucleotide
auuccauggucauggacuc

SEQ ID NO: 265032 - RNA, 19 nt, Artificial Sequence
  Description of Artificial Sequence: Synthetic oligonucleotide
gucgauagagcuuuggguc

SEQ ID NO: 265033 - RNA, 19 nt, Artificial Sequence
  Description of Artificial Sequence: Synthetic oligonucleotide
ugguuuuauccacaggagu

SEQ ID NO: 265034 - RNA, 19 nt, Artificial Sequence
  Description of Artificial Sequence: Synthetic oligonucleotide
ugaagcauaaccucagcuu

SEQ ID NO: 265035 - RNA, 19 nt, Artificial Sequence
  Description of Artificial Sequence: Synthetic oligonucleotide
auuugaguuuaccuuagaa

SEQ ID NO: 265036 - RNA, 19 nt, Artificial Sequence
  Description of Artificial Sequence: Synthetic oligonucleotide
cacaaaagugaucuguaug

SEQ ID NO: 265037 - RNA, 19 nt, Artificial Sequence
  Description of Artificial Sequence: Synthetic oligonucleotide
cuuccguccacaauuugag

SEQ ID NO: 265038 - RNA, 19 nt, Artificial Sequence
  Description of Artificial Sequence: Synthetic oligonucleotide
ugguguacaugaaccuucg

SEQ ID NO: 265039 - RNA, 19 nt, Artificial Sequence
  Description of Artificial Sequence: Synthetic oligonucleotide
ugucauauaaaaugcuguu

SEQ ID NO: 265040 - RNA, 19 nt, Artificial Sequence
  Description of Artificial Sequence: Synthetic oligonucleotide
aaucggagucaaaacgaac

SEQ ID NO: 265041 - RNA, 19 nt, Artificial Sequence
  Description of Artificial Sequence: Synthetic oligonucleotide
aaauucaaaugcaggucag

SEQ ID NO: 265042 - RNA, 19 nt, Artificial Sequence
  Description of Artificial Sequence: Synthetic oligonucleotide
uuugucgugaguagagguc

SEQ ID NO: 265043 - RNA, 19 nt, Artificial Sequence
  Description of Artificial Sequence: Synthetic oligonucleotide
ugacaaaauuacugguggc

SEQ ID NO: 265044 - RNA, 19 nt, Artificial Sequence
  Description of Artificial Sequence: Synthetic oligonucleotide
aaacugacgcugcccacag

SEQ ID NO: 265045 - RNA, 19 nt, Artificial Sequence
  Description of Artificial Sequence: Synthetic oligonucleotide
aaccuucgaagguugaaau

SEQ ID NO: 265046 - RNA, 19 nt, Artificial Sequence
  Description of Artificial Sequence: Synthetic oligonucleotide
cuaccaaggaugcuagagc

SEQ ID NO: 265047 - RNA, 19 nt, Artificial Sequence
  Description of Artificial Sequence: Synthetic oligonucleotide
aaaccaacucggaaguaag

SEQ ID NO: 265048 - RNA, 19 nt, Artificial Sequence
  Description of Artificial Sequence: Synthetic oligonucleotide
ugaguagaggucagcuucc

SEQ ID NO: 265049 - RNA, 19 nt, Artificial Sequence
  Description of Artificial Sequence: Synthetic oligonucleotide
gucaggagacgcuugguag

SEQ ID NO: 265050 - RNA, 19 nt, Artificial Sequence
  Description of Artificial Sequence: Synthetic oligonucleotide
ucucuaugugcuuccagga

SEQ ID NO: 265051 - RNA, 19 nt, Artificial Sequence
  Description of Artificial Sequence: Synthetic oligonucleotide
guauguaggccuuguuagg

SEQ ID NO: 265052 - RNA, 19 nt, Artificial Sequence
  Description of Artificial Sequence: Synthetic oligonucleotide
gaaauucacuuggaauagg

SEQ ID NO: 265053 - RNA, 19 nt, Artificial Sequence
  Description of Artificial Sequence: Synthetic oligonucleotide
ucuuaguguguuucucugc

SEQ ID NO: 265054 - RNA, 19 nt, Artificial Sequence
  Description of Artificial Sequence: Synthetic oligonucleotide
gaugcuagagccaugguua

SEQ ID NO: 265055 - RNA, 19 nt, Artificial Sequence
  Description of Artificial Sequence: Synthetic oligonucleotide
ucaggagacgcuugguagc

SEQ ID NO: 265056 - RNA, 19 nt, Artificial Sequence
  Description of Artificial Sequence: Synthetic oligonucleotide
cuucaaucggagucaaaac

SEQ ID NO: 265057 - RNA, 19 nt, Artificial Sequence
  Description of Artificial Sequence: Synthetic oligonucleotide
gcgugaaccaggcacaugg

SEQ ID NO: 265058 - RNA, 19 nt, Artificial Sequence
  Description of Artificial Sequence: Synthetic oligonucleotide
aauuugaguuuaccuuaga

SEQ ID NO: 265059 - RNA, 19 nt, Artificial Sequence
  Description of Artificial Sequence: Synthetic oligonucleotide
gcugucauggaccagcgag

SEQ ID NO: 265060 - RNA, 19 nt, Artificial Sequence
  Description of Artificial Sequence: Synthetic oligonucleotide
aggucgaacauacuggcaa

SEQ ID NO: 265061 - RNA, 19 nt, Artificial Sequence
  Description of Artificial Sequence: Synthetic oligonucleotide
gauuguaaagaaguuccuc

SEQ ID NO: 265062 - RNA, 19 nt, Artificial Sequence
  Description of Artificial Sequence: Synthetic oligonucleotide
ucgcauuaugaacuccuug

SEQ ID NO: 265063 - RNA, 19 nt, Artificial Sequence
  Description of Artificial Sequence: Synthetic oligonucleotide
gugacguccaugcugcugc

SEQ ID NO: 265064 - RNA, 19 nt, Artificial Sequence
  Description of Artificial Sequence: Synthetic oligonucleotide
ugggauuuuccgcucaauc

SEQ ID NO: 265065 - RNA, 19 nt, Artificial Sequence
  Description of Artificial Sequence: Synthetic oligonucleotide
gauccguagaaaccaacuc

SEQ ID NO: 265066 - RNA, 19 nt, Artificial Sequence
  Description of Artificial Sequence: Synthetic oligonucleotide
cuggucuugauguagggga

SEQ ID NO: 265067 - RNA, 19 nt, Artificial Sequence
  Description of Artificial Sequence: Synthetic oligonucleotide
uguucgugcagcucucccc

SEQ ID NO: 265068 - RNA, 19 nt, Artificial Sequence
  Description of Artificial Sequence: Synthetic oligonucleotide
ucuccgugaaguaccgacc

SEQ ID NO: 265069 - RNA, 19 nt, Artificial Sequence
  Description of Artificial Sequence: Synthetic oligonucleotide
ugucgucagagacugcaga

SEQ ID NO: 265070 - RNA, 19 nt, Artificial Sequence
  Description of Artificial Sequence: Synthetic oligonucleotide
gacgcuugguagcucuugg

SEQ ID NO: 265071 - RNA, 19 nt, Artificial Sequence
  Description of Artificial Sequence: Synthetic oligonucleotide
aucggagucaaaacgaacu

SEQ ID NO: 265072 - RNA, 19 nt, Artificial Sequence
  Description of Artificial Sequence: Synthetic oligonucleotide
auuuuccgcucaaucaugg

SEQ ID NO: 265073 - RNA, 19 nt, Artificial Sequence
  Description of Artificial Sequence: Synthetic oligonucleotide
uccguccacaauuugaguu

SEQ ID NO: 265074 - RNA, 19 nt, Artificial Sequence
  Description of Artificial Sequence: Synthetic oligonucleotide
gaugucgauagagcuuugg

SEQ ID NO: 265075 - RNA, 19 nt, Artificial Sequence
  Description of Artificial Sequence: Synthetic oligonucleotide
uggguaucauuccaugguc

SEQ ID NO: 265076 - RNA, 19 nt, Artificial Sequence
  Description of Artificial Sequence: Synthetic oligonucleotide
uccauccccuuccagaauc

SEQ ID NO: 265077 - RNA, 19 nt, Artificial Sequence
  Description of Artificial Sequence: Synthetic oligonucleotide
aucccucuagucuauguga

SEQ ID NO: 265078 - RNA, 19 nt, Artificial Sequence
  Description of Artificial Sequence: Synthetic oligonucleotide
uugucgugaguagagguca

SEQ ID NO: 265079 - RNA, 19 nt, Artificial Sequence
  Description of Artificial Sequence: Synthetic oligonucleotide
caugaaccuucgaagguug

SEQ ID NO: 265080 - RNA, 19 nt, Artificial Sequence
  Description of Artificial Sequence: Synthetic oligonucleotide
agcacauuggaggaaauau

SEQ ID NO: 265081 - RNA, 19 nt, Artificial Sequence
  Description of Artificial Sequence: Synthetic oligonucleotide
uguaggggaaggcaugcau

SEQ ID NO: 265082 - RNA, 19 nt, Artificial Sequence
  Description of Artificial Sequence: Synthetic oligonucleotide
cucuccgugaaguaccgac

SEQ ID NO: 265083 - RNA, 19 nt, Artificial Sequence
  Description of Artificial Sequence: Synthetic oligonucleotide
guucagauuguaaagaagu

SEQ ID NO: 265084 - RNA, 19 nt, Artificial Sequence
  Description of Artificial Sequence: Synthetic oligonucleotide
ggucaggucgaacauacug

SEQ ID NO: 265085 - RNA, 19 nt, Artificial Sequence
  Description of Artificial Sequence: Synthetic oligonucleotide
caaggaccuucucaggugc

SEQ ID NO: 265086 - RNA, 19 nt, Artificial Sequence
  Description of Artificial Sequence: Synthetic oligonucleotide
gaaacgcaugaggagguag

SEQ ID NO: 265087 - RNA, 19 nt, Artificial Sequence
  Description of Artificial Sequence: Synthetic oligonucleotide
ugccuaccaaggaugcuag

SEQ ID NO: 265088 - RNA, 19 nt, Artificial Sequence
  Description of Artificial Sequence: Synthetic oligonucleotide
ucggagucaaaacgaacuc

SEQ ID NO: 265089 - RNA, 19 nt, Artificial Sequence
  Description of Artificial Sequence: Synthetic oligonucleotide
caguuaugccucauuuacc

SEQ ID NO: 265090 - RNA, 19 nt, Artificial Sequence
  Description of Artificial Sequence: Synthetic oligonucleotide
uguuugcauagccgugucc

SEQ ID NO: 265091 - RNA, 19 nt, Artificial Sequence
  Description of Artificial Sequence: Synthetic oligonucleotide
ucauuccauggucauggac

SEQ ID NO: 265092 - RNA, 19 nt, Artificial Sequence
  Description of Artificial Sequence: Synthetic oligonucleotide
guaguagggccucagucac

SEQ ID NO: 265093 - RNA, 19 nt, Artificial Sequence
  Description of Artificial Sequence: Synthetic oligonucleotide
uuugacugucaauucugaa

SEQ ID NO: 265094 - RNA, 19 nt, Artificial Sequence
  Description of Artificial Sequence: Synthetic oligonucleotide
guacuccggggucaggucg

SEQ ID NO: 265095 - RNA, 19 nt, Artificial Sequence
  Description of Artificial Sequence: Synthetic oligonucleotide
gcuuguauagcauugugaa

SEQ ID NO: 265096 - RNA, 19 nt, Artificial Sequence
  Description of Artificial Sequence: Synthetic oligonucleotide
uggugcaguaucuguauuc

SEQ ID NO: 265097 - RNA, 19 nt, Artificial Sequence
  Description of Artificial Sequence: Synthetic oligonucleotide
cuaugugagaucucuggga

SEQ ID NO: 265098 - RNA, 19 nt, Artificial Sequence
  Description of Artificial Sequence: Synthetic oligonucleotide
agcacuguguuccugcgau

SEQ ID NO: 265099 - RNA, 19 nt, Artificial Sequence
  Description of Artificial Sequence: Synthetic oligonucleotide
aauuacugguggcuccaaa

SEQ ID NO: 265100 - RNA, 19 nt, Artificial Sequence
  Description of Artificial Sequence: Synthetic oligonucleotide
ucacugugucauauaaaau

SEQ ID NO: 265101 - RNA, 19 nt, Artificial Sequence
  Description of Artificial Sequence: Synthetic oligonucleotide
acugucaauucugaauaug

SEQ ID NO: 265102 - RNA, 19 nt, Artificial Sequence
  Description of Artificial Sequence: Synthetic oligonucleotide
ugugaagaggagccccgug

SEQ ID NO: 265103 - RNA, 19 nt, Artificial Sequence
  Description of Artificial Sequence: Synthetic oligonucleotide
uccuggaaacuggagcagg

SEQ ID NO: 265104 - RNA, 19 nt, Artificial Sequence
  Description of Artificial Sequence: Synthetic oligonucleotide
uuacaguggcuccuacaga

SEQ ID NO: 265105 - RNA, 19 nt, Artificial Sequence
  Description of Artificial Sequence: Synthetic oligonucleotide
cauaaccucagcuuguugu

SEQ ID NO: 265106 - RNA, 19 nt, Artificial Sequence
  Description of Artificial Sequence: Synthetic oligonucleotide
gucauauaaaaugcuguuc

SEQ ID NO: 265107 - RNA, 19 nt, Artificial Sequence
  Description of Artificial Sequence: Synthetic oligonucleotide
acaucgcauuaugaacucc

SEQ ID NO: 265108 - RNA, 19 nt, Artificial Sequence
  Description of Artificial Sequence: Synthetic oligonucleotide
ucgaacauacuggcaaucu

SEQ ID NO: 265109 - RNA, 19 nt, Artificial Sequence
  Description of Artificial Sequence: Synthetic oligonucleotide
gugagcacuguguuccugc

SEQ ID NO: 265110 - RNA, 19 nt, Artificial Sequence
  Description of Artificial Sequence: Synthetic oligonucleotide
cucuuaugguccuuguuga

SEQ ID NO: 265111 - RNA, 19 nt, Artificial Sequence
  Description of Artificial Sequence: Synthetic oligonucleotide
uggguuuguagagcucugg

SEQ ID NO: 265112 - RNA, 19 nt, Artificial Sequence
  Description of Artificial Sequence: Synthetic oligonucleotide
auagccguguccucuucug

SEQ ID NO: 265113 - RNA, 19 nt, Artificial Sequence
  Description of Artificial Sequence: Synthetic oligonucleotide
uuuguagagcucugggauu

SEQ ID NO: 265114 - RNA, 19 nt, Artificial Sequence
  Description of Artificial Sequence: Synthetic oligonucleotide
ugaucuguauguaggccuu

SEQ ID NO: 265115 - RNA, 19 nt, Artificial Sequence
  Description of Artificial Sequence: Synthetic oligonucleotide
gacaaaauuacugguggcu

SEQ ID NO: 265116 - RNA, 19 nt, Artificial Sequence
  Description of Artificial Sequence: Synthetic oligonucleotide
gguaguagggccucaguca

SEQ ID NO: 265117 - RNA, 19 nt, Artificial Sequence
  Description of Artificial Sequence: Synthetic oligonucleotide
agggugucgucagagacug

SEQ ID NO: 265118 - RNA, 19 nt, Artificial Sequence
  Description of Artificial Sequence: Synthetic oligonucleotide
ucaaaacgaacuccuccuu

SEQ ID NO: 265119 - RNA, 19 nt, Artificial Sequence
  Description of Artificial Sequence: Synthetic oligonucleotide
ccucuuaugguccuuguug

SEQ ID NO: 265120 - RNA, 19 nt, Artificial Sequence
  Description of Artificial Sequence: Synthetic oligonucleotide
gucaaaacgaacuccuccu

SEQ ID NO: 265121 - RNA, 19 nt, Artificial Sequence
  Description of Artificial Sequence: Synthetic oligonucleotide
uggauccguagaaaccaac

SEQ ID NO: 265122 - RNA, 19 nt, Artificial Sequence
  Description of Artificial Sequence: Synthetic oligonucleotide
ucgugaguagaggucagcu

SEQ ID NO: 265123 - RNA, 19 nt, Artificial Sequence
  Description of Artificial Sequence: Synthetic oligonucleotide
ggguuuguagagcucuggg

SEQ ID NO: 265124 - RNA, 19 nt, Artificial Sequence
  Description of Artificial Sequence: Synthetic oligonucleotide
aaggcggcugcgugaacca

SEQ ID NO: 265125 - RNA, 19 nt, Artificial Sequence
  Description of Artificial Sequence: Synthetic oligonucleotide
uagcauugugaaacauacu

SEQ ID NO: 265126 - RNA, 19 nt, Artificial Sequence
  Description of Artificial Sequence: Synthetic oligonucleotide
aguaccgaccagagcacac

SEQ ID NO: 265127 - RNA, 19 nt, Artificial Sequence
  Description of Artificial Sequence: Synthetic oligonucleotide
uugccuaccaaggaugcua

SEQ ID NO: 265128 - RNA, 19 nt, Artificial Sequence
  Description of Artificial Sequence: Synthetic oligonucleotide
gugaucuguauguaggccu

SEQ ID NO: 265129 - RNA, 19 nt, Artificial Sequence
  Description of Artificial Sequence: Synthetic oligonucleotide
gacgcaggucaggagacgc

SEQ ID NO: 265130 - RNA, 19 nt, Artificial Sequence
  Description of Artificial Sequence: Synthetic oligonucleotide
auauuccagaauacacuug

SEQ ID NO: 265131 - RNA, 19 nt, Artificial Sequence
  Description of Artificial Sequence: Synthetic oligonucleotide
uuguuugcauagccguguc

SEQ ID NO: 265132 - RNA, 19 nt, Artificial Sequence
  Description of Artificial Sequence: Synthetic oligonucleotide
aacugacgcugcccacagg

SEQ ID NO: 265133 - RNA, 19 nt, Artificial Sequence
  Description of Artificial Sequence: Synthetic oligonucleotide
cacaucgcauuaugaacuc

SEQ ID NO: 265134 - RNA, 19 nt, Artificial Sequence
  Description of Artificial Sequence: Synthetic oligonucleotide
ucgccacaucgcauuauga

SEQ ID NO: 265135 - RNA, 19 nt, Artificial Sequence
  Description of Artificial Sequence: Synthetic oligonucleotide
ccuucgaagguugaaauuc

SEQ ID NO: 265136 - RNA, 19 nt, Artificial Sequence
  Description of Artificial Sequence: Synthetic oligonucleotide
ggaauaggccacaggacag

SEQ ID NO: 265137 - RNA, 19 nt, Artificial Sequence
  Description of Artificial Sequence: Synthetic oligonucleotide
gaaccuucgaagguugaaa

SEQ ID NO: 265138 - RNA, 19 nt, Artificial Sequence
  Description of Artificial Sequence: Synthetic oligonucleotide
acuguucgugcagcucucc

SEQ ID NO: 265139 - RNA, 19 nt, Artificial Sequence
  Description of Artificial Sequence: Synthetic oligonucleotide
ugaaccuucgaagguugaa

SEQ ID NO: 265140 - RNA, 19 nt, Artificial Sequence
  Description of Artificial Sequence: Synthetic oligonucleotide
guuugucgugaguagaggu

SEQ ID NO: 265141 - RNA, 19 nt, Artificial Sequence
  Description of Artificial Sequence: Synthetic oligonucleotide
ggcgauccuguacaugagg

SEQ ID NO: 265142 - RNA, 19 nt, Artificial Sequence
  Description of Artificial Sequence: Synthetic oligonucleotide
gaaguaccgaccagagcac

SEQ ID NO: 265143 - RNA, 19 nt, Artificial Sequence
  Description of Artificial Sequence: Synthetic oligonucleotide
uggcauggccaagauauuc

SEQ ID NO: 265144 - RNA, 19 nt, Artificial Sequence
  Description of Artificial Sequence: Synthetic oligonucleotide
uuguagagcucugggauuu

SEQ ID NO: 265145 - RNA, 19 nt, Artificial Sequence
  Description of Artificial Sequence: Synthetic oligonucleotide
ugucauggaccagcgaguc

SEQ ID NO: 265146 - RNA, 19 nt, Artificial Sequence
  Description of Artificial Sequence: Synthetic oligonucleotide
cugcaccaaaacacuggcc

SEQ ID NO: 265147 - RNA, 19 nt, Artificial Sequence
  Description of Artificial Sequence: Synthetic oligonucleotide
uuggauccguagaaaccaa

SEQ ID NO: 265148 - RNA, 19 nt, Artificial Sequence
  Description of Artificial Sequence: Synthetic oligonucleotide
ucccucuuuugacugucaa

SEQ ID NO: 265149 - RNA, 19 nt, Artificial Sequence
  Description of Artificial Sequence: Synthetic oligonucleotide
ggugacagggugucgucag

SEQ ID NO: 265150 - RNA, 19 nt, Artificial Sequence
  Description of Artificial Sequence: Synthetic oligonucleotide
agauuguaaagaaguuccu

SEQ ID NO: 265151 - RNA, 19 nt, Artificial Sequence
  Description of Artificial Sequence: Synthetic oligonucleotide
ucgugcagcucuccccgag

SEQ ID NO: 265152 - RNA, 19 nt, Artificial Sequence
  Description of Artificial Sequence: Synthetic oligonucleotide
cuuguauagcauugugaaa

SEQ ID NO: 265153 - RNA, 19 nt, Artificial Sequence
  Description of Artificial Sequence: Synthetic oligonucleotide
auugugaaacauacuuuaa

SEQ ID NO: 265154 - RNA, 19 nt, Artificial Sequence
  Description of Artificial Sequence: Synthetic oligonucleotide
agacauacuggaaaauguu

SEQ ID NO: 265155 - RNA, 19 nt, Artificial Sequence
  Description of Artificial Sequence: Synthetic oligonucleotide
agcacacuccguccucauc

SEQ ID NO: 265156 - RNA, 19 nt, Artificial Sequence
  Description of Artificial Sequence: Synthetic oligonucleotide
gugguguacaugaaccuuc

SEQ ID NO: 265157 - RNA, 19 nt, Artificial Sequence
  Description of Artificial Sequence: Synthetic oligonucleotide
cucuagucuaugugagauc

SEQ ID NO: 265158 - RNA, 19 nt, Artificial Sequence
  Description of Artificial Sequence: Synthetic oligonucleotide
uacuggcaaucuuuugguc

SEQ ID NO: 265159 - RNA, 19 nt, Artificial Sequence
  Description of Artificial Sequence: Synthetic oligonucleotide
uaccgaccagagcacacuc

SEQ ID NO: 265160 - RNA, 19 nt, Artificial Sequence
  Description of Artificial Sequence: Synthetic oligonucleotide
caaucuuuugguccuggaa

SEQ ID NO: 265161 - RNA, 19 nt, Artificial Sequence
  Description of Artificial Sequence: Synthetic oligonucleotide
gaauuguccucaaggaccu

SEQ ID NO: 265162 - RNA, 19 nt, Artificial Sequence
  Description of Artificial Sequence: Synthetic oligonucleotide
caaaguagggcuccacaaa

SEQ ID NO: 265163 - RNA, 19 nt, Artificial Sequence
  Description of Artificial Sequence: Synthetic oligonucleotide
acgcaugaggagguagagg

SEQ ID NO: 265164 - RNA, 19 nt, Artificial Sequence
  Description of Artificial Sequence: Synthetic oligonucleotide
cgugugacguccaugcugc

SEQ ID NO: 265165 - RNA, 19 nt, Artificial Sequence
  Description of Artificial Sequence: Synthetic oligonucleotide
ccuaccaaggaugcuagag

SEQ ID NO: 265166 - RNA, 19 nt, Artificial Sequence
  Description of Artificial Sequence: Synthetic oligonucleotide
aaguaccgaccagagcaca

SEQ ID NO: 265167 - RNA, 19 nt, Artificial Sequence
  Description of Artificial Sequence: Synthetic oligonucleotide
cuguucgugcagcucuccc

SEQ ID NO: 265168 - RNA, 19 nt, Artificial Sequence
  Description of Artificial Sequence: Synthetic oligonucleotide
ccaacucggaaguaaguuc

SEQ ID NO: 265169 - RNA, 19 nt, Artificial Sequence
  Description of Artificial Sequence: Synthetic oligonucleotide
uuccguccacaauuugagu

SEQ ID NO: 265170 - RNA, 19 nt, Artificial Sequence
  Description of Artificial Sequence: Synthetic oligonucleotide
caucgcauuaugaacuccu

SEQ ID NO: 265171 - RNA, 19 nt, Artificial Sequence
  Description of Artificial Sequence: Synthetic oligonucleotide
caaucggagucaaaacgaa

SEQ ID NO: 265172 - RNA, 19 nt, Artificial Sequence
  Description of Artificial Sequence: Synthetic oligonucleotide
uccucuuaugguccuuguu

SEQ ID NO: 265173 - RNA, 19 nt, Artificial Sequence
  Description of Artificial Sequence: Synthetic oligonucleotide
gucagacgcaggucaggag

SEQ ID NO: 265174 - RNA, 19 nt, Artificial Sequence
  Description of Artificial Sequence: Synthetic oligonucleotide
accuucgaagguugaaauu

SEQ ID NO: 265175 - RNA, 19 nt, Artificial Sequence
  Description of Artificial Sequence: Synthetic oligonucleotide
ugaugucgauagagcuuug

SEQ ID NO: 265176 - RNA, 19 nt, Artificial Sequence
  Description of Artificial Sequence: Synthetic oligonucleotide
ccgaccagagcacacuccg

SEQ ID NO: 265177 - RNA, 19 nt, Artificial Sequence
  Description of Artificial Sequence: Synthetic oligonucleotide
cacacuccguccucaucag

SEQ ID NO: 265178 - RNA, 19 nt, Artificial Sequence
  Description of Artificial Sequence: Synthetic oligonucleotide
accgcuaacugcagggucu

SEQ ID NO: 265179 - RNA, 19 nt, Artificial Sequence
  Description of Artificial Sequence: Synthetic oligonucleotide
cucggaaguaaguuccaaa

SEQ ID NO: 265180 - RNA, 19 nt, Artificial Sequence
  Description of Artificial Sequence: Synthetic oligonucleotide
ccagaauuguccucaagga

SEQ ID NO: 265181 - RNA, 19 nt, Artificial Sequence
  Description of Artificial Sequence: Synthetic oligonucleotide
cuccgugaaguaccgacca

SEQ ID NO: 265182 - RNA, 19 nt, Artificial Sequence
  Description of Artificial Sequence: Synthetic oligonucleotide
ggaaggagucccucuuuug

SEQ ID NO: 265183 - RNA, 19 nt, Artificial Sequence
  Description of Artificial Sequence: Synthetic oligonucleotide
aggcaugcaugguggugag

SEQ ID NO: 265184 - RNA, 19 nt, Artificial Sequence
  Description of Artificial Sequence: Synthetic oligonucleotide
uuugccuaccaaggaugcu

SEQ ID NO: 265185 - RNA, 19 nt, Artificial Sequence
  Description of Artificial Sequence: Synthetic oligonucleotide
caucaggugacaggguguc

SEQ ID NO: 265186 - RNA, 19 nt, Artificial Sequence
  Description of Artificial Sequence: Synthetic oligonucleotide
aggucagaagaagucacuu

SEQ ID NO: 265187 - RNA, 19 nt, Artificial Sequence
  Description of Artificial Sequence: Synthetic oligonucleotide
gaucuguauguaggccuug

SEQ ID NO: 265188 - RNA, 19 nt, Artificial Sequence
  Description of Artificial Sequence: Synthetic oligonucleotide
agucuaugugagaucucug

SEQ ID NO: 265189 - RNA, 19 nt, Artificial Sequence
  Description of Artificial Sequence: Synthetic oligonucleotide
cacuuuucuggaguuuauc

SEQ ID NO: 265190 - RNA, 19 nt, Artificial Sequence
  Description of Artificial Sequence: Synthetic oligonucleotide
gucauggaccagcgagucc

SEQ ID NO: 265191 - RNA, 19 nt, Artificial Sequence
  Description of Artificial Sequence: Synthetic oligonucleotide
ccaugagcaucucaggguc

SEQ ID NO: 265192 - RNA, 19 nt, Artificial Sequence
  Description of Artificial Sequence: Synthetic oligonucleotide
aaauuacugguggcuccaa

SEQ ID NO: 265193 - RNA, 19 nt, Artificial Sequence
  Description of Artificial Sequence: Synthetic oligonucleotide
uggcaacuucaaucggagu

SEQ ID NO: 265194 - RNA, 19 nt, Artificial Sequence
  Description of Artificial Sequence: Synthetic oligonucleotide
cuggcuccgugugacgucc

SEQ ID NO: 265195 - RNA, 19 nt, Artificial Sequence
  Description of Artificial Sequence: Synthetic oligonucleotide
cuacagagccuugcaguac

SEQ ID NO: 265196 - RNA, 19 nt, Artificial Sequence
  Description of Artificial Sequence: Synthetic oligonucleotide
ggaccagugaaauucacuu

SEQ ID NO: 265197 - RNA, 19 nt, Artificial Sequence
  Description of Artificial Sequence: Synthetic oligonucleotide
cuggcaaucuuuugguccu

SEQ ID NO: 265198 - RNA, 19 nt, Artificial Sequence
  Description of Artificial Sequence: Synthetic oligonucleotide
guuuugcuuguauagcauu

SEQ ID NO: 265199 - RNA, 19 nt, Artificial Sequence
  Description of Artificial Sequence: Synthetic oligonucleotide
cgugaaguaccgaccagag

SEQ ID NO: 265200 - RNA, 19 nt, Artificial Sequence
  Description of Artificial Sequence: Synthetic oligonucleotide
ccucauuuaccuaccccac

SEQ ID NO: 265201 - RNA, 19 nt, Artificial Sequence
  Description of Artificial Sequence: Synthetic oligonucleotide
cugaauaggccagaauugu

SEQ ID NO: 265202 - RNA, 19 nt, Artificial Sequence
  Description of Artificial Sequence: Synthetic oligonucleotide
ggggucaggucgaacauac

SEQ ID NO: 265203 - RNA, 19 nt, Artificial Sequence
  Description of Artificial Sequence: Synthetic oligonucleotide
gucgaacauacuggcaauc

SEQ ID NO: 265204 - RNA, 19 nt, Artificial Sequence
  Description of Artificial Sequence: Synthetic oligonucleotide
caccgcuaacugcaggguc

SEQ ID NO: 265205 - RNA, 19 nt, Artificial Sequence
  Description of Artificial Sequence: Synthetic oligonucleotide
cugaaacgcaugaggaggu

SEQ ID NO: 265206 - RNA, 19 nt, Artificial Sequence
  Description of Artificial Sequence: Synthetic oligonucleotide
guuaugccucauuuaccua

SEQ ID NO: 265207 - RNA, 19 nt, Artificial Sequence
  Description of Artificial Sequence: Synthetic oligonucleotide
uuccauccccuuccagaau

SEQ ID NO: 265208 - RNA, 19 nt, Artificial Sequence
  Description of Artificial Sequence: Synthetic oligonucleotide
gugucgucagagacugcag

SEQ ID NO: 265209 - RNA, 19 nt, Artificial Sequence
  Description of Artificial Sequence: Synthetic oligonucleotide
cuugguagcucuuggcgau

SEQ ID NO: 265210 - RNA, 19 nt, Artificial Sequence
  Description of Artificial Sequence: Synthetic oligonucleotide
aucccuggcauggccaaga

SEQ ID NO: 265211 - RNA, 19 nt, Artificial Sequence
  Description of Artificial Sequence: Synthetic oligonucleotide
cacggccucgccacaucgc

SEQ ID NO: 265212 - RNA, 19 nt, Artificial Sequence
  Description of Artificial Sequence: Synthetic oligonucleotide
ugaaacgcaugaggaggua

SEQ ID NO: 265213 - RNA, 19 nt, Artificial Sequence
  Description of Artificial Sequence: Synthetic oligonucleotide
agccucccgugcugaagag

SEQ ID NO: 265214 - RNA, 19 nt, Artificial Sequence
  Description of Artificial Sequence: Synthetic oligonucleotide
gucgugaguagaggucagc

SEQ ID NO: 265215 - RNA, 19 nt, Artificial Sequence
  Description of Artificial Sequence: Synthetic oligonucleotide
cuggaucuguggaaggagu

SEQ ID NO: 265216 - RNA, 19 nt, Artificial Sequence
  Description of Artificial Sequence: Synthetic oligonucleotide
ccgugugacguccaugcug

SEQ ID NO: 265217 - RNA, 19 nt, Artificial Sequence
  Description of Artificial Sequence: Synthetic oligonucleotide
ccacaucgcauuaugaacu

SEQ ID NO: 265218 - RNA, 19 nt, Artificial Sequence
  Description of Artificial Sequence: Synthetic oligonucleotide
gaauaggccacaggacagu

SEQ ID NO: 265219 - RNA, 19 nt, Artificial Sequence
  Description of Artificial Sequence: Synthetic oligonucleotide
ugcgugaaccaggcacaug

SEQ ID NO: 265220 - RNA, 19 nt, Artificial Sequence
  Description of Artificial Sequence: Synthetic oligonucleotide
uucgugcagcucuccccga

SEQ ID NO: 265221 - RNA, 19 nt, Artificial Sequence
  Description of Artificial Sequence: Synthetic oligonucleotide
gagcagggacuguguaguc

SEQ ID NO: 265222 - RNA, 19 nt, Artificial Sequence
  Description of Artificial Sequence: Synthetic oligonucleotide
ccggaaaucucuaugugcu

SEQ ID NO: 265223 - RNA, 19 nt, Artificial Sequence
  Description of Artificial Sequence: Synthetic oligonucleotide
gguaucauuccauggucau

SEQ ID NO: 265224 - RNA, 19 nt, Artificial Sequence
  Description of Artificial Sequence: Synthetic oligonucleotide
ggguaucauuccaugguca

SEQ ID NO: 265225 - RNA, 19 nt, Artificial Sequence
  Description of Artificial Sequence: Synthetic oligonucleotide
cuggaaucucagccaagaa

SEQ ID NO: 265226 - RNA, 19 nt, Artificial Sequence
  Description of Artificial Sequence: Synthetic oligonucleotide
aggagacgcuugguagcuc

SEQ ID NO: 265227 - RNA, 19 nt, Artificial Sequence
  Description of Artificial Sequence: Synthetic oligonucleotide
agaaaccaacucggaagua

SEQ ID NO: 265228 - RNA, 19 nt, Artificial Sequence
  Description of Artificial Sequence: Synthetic oligonucleotide
gagccccgugagaaagugc

SEQ ID NO: 265229 - RNA, 19 nt, Artificial Sequence
  Description of Artificial Sequence: Synthetic oligonucleotide
ggguuucacauuuccugaa

SEQ ID NO: 265230 - RNA, 19 nt, Artificial Sequence
  Description of Artificial Sequence: Synthetic oligonucleotide
acucuuccguccacaauuu

SEQ ID NO: 265231 - RNA, 19 nt, Artificial Sequence
  Description of Artificial Sequence: Synthetic oligonucleotide
aucgcauuaugaacuccuu

SEQ ID NO: 265232 - RNA, 19 nt, Artificial Sequence
  Description of Artificial Sequence: Synthetic oligonucleotide
ggucagacgcaggucagga

SEQ ID NO: 265233 - RNA, 19 nt, Artificial Sequence
  Description of Artificial Sequence: Synthetic oligonucleotide
ggauccguagaaaccaacu

SEQ ID NO: 265234 - RNA, 19 nt, Artificial Sequence
  Description of Artificial Sequence: Synthetic oligonucleotide
ggagacgcuugguagcucu

SEQ ID NO: 265235 - RNA, 19 nt, Artificial Sequence
  Description of Artificial Sequence: Synthetic oligonucleotide
cugaguuccugcugauacu

SEQ ID NO: 265236 - RNA, 19 nt, Artificial Sequence
  Description of Artificial Sequence: Synthetic oligonucleotide
caccaaggcggcugcguga

SEQ ID NO: 265237 - RNA, 19 nt, Artificial Sequence
  Description of Artificial Sequence: Synthetic oligonucleotide
cagggugucgucagagacu

SEQ ID NO: 265238 - RNA, 19 nt, Artificial Sequence
  Description of Artificial Sequence: Synthetic oligonucleotide
gcugcgugaaccaggcaca

SEQ ID NO: 265239 - RNA, 19 nt, Artificial Sequence
  Description of Artificial Sequence: Synthetic oligonucleotide
cuuccggguaguagggccu

SEQ ID NO: 265240 - RNA, 19 nt, Artificial Sequence
  Description of Artificial Sequence: Synthetic oligonucleotide
cguagaaaccaacucggaa

SEQ ID NO: 265241 - RNA, 19 nt, Artificial Sequence
  Description of Artificial Sequence: Synthetic oligonucleotide
ccuacagagccuugcagua

SEQ ID NO: 265242 - RNA, 19 nt, Artificial Sequence
  Description of Artificial Sequence: Synthetic oligonucleotide
cucuaugugcuuccaggau

SEQ ID NO: 265243 - RNA, 19 nt, Artificial Sequence
  Description of Artificial Sequence: Synthetic oligonucleotide
ccacggccucgccacaucg

SEQ ID NO: 265244 - RNA, 19 nt, Artificial Sequence
  Description of Artificial Sequence: Synthetic oligonucleotide
ccaaucccuggcauggcca

SEQ ID NO: 265245 - RNA, 19 nt, Artificial Sequence
  Description of Artificial Sequence: Synthetic oligonucleotide
cauagccguguccucuucu

SEQ ID NO: 265246 - RNA, 19 nt, Artificial Sequence
  Description of Artificial Sequence: Synthetic oligonucleotide
gccccuccagggugaaggg

SEQ ID NO: 265247 - RNA, 19 nt, Artificial Sequence
  Description of Artificial Sequence: Synthetic oligonucleotide
uggcuccgugugacgucca

SEQ ID NO: 265248 - RNA, 19 nt, Artificial Sequence
  Description of Artificial Sequence: Synthetic oligonucleotide
cucccgugcugaagagcuc

SEQ ID NO: 265249 - RNA, 19 nt, Artificial Sequence
  Description of Artificial Sequence: Synthetic oligonucleotide
guaccgaccagagcacacu

SEQ ID NO: 265250 - RNA, 19 nt, Artificial Sequence
  Description of Artificial Sequence: Synthetic oligonucleotide
cugguuuacaguggcuccu

SEQ ID NO: 265251 - RNA, 19 nt, Artificial Sequence
  Description of Artificial Sequence: Synthetic oligonucleotide
gcggcugcgugaaccaggc

SEQ ID NO: 265252 - RNA, 19 nt, Artificial Sequence
  Description of Artificial Sequence: Synthetic oligonucleotide
acgcaggucaggagacgcu

SEQ ID NO: 265253 - RNA, 19 nt, Artificial Sequence
  Description of Artificial Sequence: Synthetic oligonucleotide
ggucgaacauacuggcaau

SEQ ID NO: 265254 - RNA, 19 nt, Artificial Sequence
  Description of Artificial Sequence: Synthetic oligonucleotide
gcauugugaaacauacuuu

SEQ ID NO: 265255 - RNA, 19 nt, Artificial Sequence
  Description of Artificial Sequence: Synthetic oligonucleotide
gcgauccuguacaugaggu

SEQ ID NO: 265256 - RNA, 19 nt, Artificial Sequence
  Description of Artificial Sequence: Synthetic oligonucleotide
gugcaguaucuguauucau

SEQ ID NO: 265257 - RNA, 19 nt, Artificial Sequence
  Description of Artificial Sequence: Synthetic oligonucleotide
ccucaaacagcaagucucu

SEQ ID NO: 265258 - RNA, 19 nt, Artificial Sequence
  Description of Artificial Sequence: Synthetic oligonucleotide
cgauagagcuuugggucag

SEQ ID NO: 265259 - RNA, 19 nt, Artificial Sequence
  Description of Artificial Sequence: Synthetic oligonucleotide
cacuucauagguggacagu

SEQ ID NO: 265260 - RNA, 19 nt, Artificial Sequence
  Description of Artificial Sequence: Synthetic oligonucleotide
caggagacgcuugguagcu

SEQ ID NO: 265261 - RNA, 19 nt, Artificial Sequence
  Description of Artificial Sequence: Synthetic oligonucleotide
cgccacaucgcauuaugaa

SEQ ID NO: 265262 - RNA, 19 nt, Artificial Sequence
  Description of Artificial Sequence: Synthetic oligonucleotide
ggugguguacaugaaccuu

SEQ ID NO: 265263 - RNA, 19 nt, Artificial Sequence
  Description of Artificial Sequence: Synthetic oligonucleotide
ccgugcugaagagcucugc

SEQ ID NO: 265264 - RNA, 19 nt, Artificial Sequence
  Description of Artificial Sequence: Synthetic oligonucleotide
gcacauuggaggaaauauu

SEQ ID NO: 265265 - RNA, 19 nt, Artificial Sequence
  Description of Artificial Sequence: Synthetic oligonucleotide
gccucccgugcugaagagc

SEQ ID NO: 265266 - RNA, 19 nt, Artificial Sequence
  Description of Artificial Sequence: Synthetic oligonucleotide
ccucagcuuguugugaugu

SEQ ID NO: 265267 - RNA, 19 nt, Artificial Sequence
  Description of Artificial Sequence: Synthetic oligonucleotide
gccuaccaaggaugcuaga

SEQ ID NO: 265268 - RNA, 19 nt, Artificial Sequence
  Description of Artificial Sequence: Synthetic oligonucleotide
ccggguaguagggccucag

SEQ ID NO: 265269 - RNA, 19 nt, Artificial Sequence
  Description of Artificial Sequence: Synthetic oligonucleotide
cugcugauuccauccccuu

SEQ ID NO: 265270 - RNA, 19 nt, Artificial Sequence
  Description of Artificial Sequence: Synthetic oligonucleotide
ccguguccucuucugaaua

SEQ ID NO: 265271 - RNA, 19 nt, Artificial Sequence
  Description of Artificial Sequence: Synthetic oligonucleotide
gccccgugagaaagugcug

SEQ ID NO: 265272 - RNA, 19 nt, Artificial Sequence
  Description of Artificial Sequence: Synthetic oligonucleotide
ggccucgccacaucgcauu

SEQ ID NO: 265273 - RNA, 19 nt, Artificial Sequence
  Description of Artificial Sequence: Synthetic oligonucleotide
gcacuguguuccugcgaua

SEQ ID NO: 265274 - RNA, 19 nt, Artificial Sequence
  Description of Artificial Sequence: Synthetic oligonucleotide
gagacgcuugguagcucuu

SEQ ID NO: 265275 - RNA, 19 nt, Artificial Sequence
  Description of Artificial Sequence: Synthetic oligonucleotide
gugugacguccaugcugcu

SEQ ID NO: 265276 - RNA, 19 nt, Artificial Sequence
  Description of Artificial Sequence: Synthetic oligonucleotide
gccucgccacaucgcauua

SEQ ID NO: 265277 - RNA, 19 nt, Artificial Sequence
  Description of Artificial Sequence: Synthetic oligonucleotide
ccgcucaaucaugggccug

SEQ ID NO: 265278 - RNA, 19 nt, Artificial Sequence
  Description of Artificial Sequence: Synthetic oligonucleotide
cgaacauacuggcaaucuu

SEQ ID NO: 265279 - RNA, 19 nt, Artificial Sequence
  Description of Artificial Sequence: Synthetic oligonucleotide
cugcgugaaccaggcacau

SEQ ID NO: 265280 - RNA, 19 nt, Artificial Sequence
  Description of Artificial Sequence: Synthetic oligonucleotide
ggcuccgugugacguccau

SEQ ID NO: 265281 - RNA, 19 nt, Artificial Sequence
  Description of Artificial Sequence: Synthetic oligonucleotide
cuccacggccucgccacau

SEQ ID NO: 265282 - RNA, 19 nt, Artificial Sequence
  Description of Artificial Sequence: Synthetic oligonucleotide
ccggggucaggucgaacau

SEQ ID NO: 265283 - RNA, 19 nt, Artificial Sequence
  Description of Artificial Sequence: Synthetic oligonucleotide
ccaccgcuaacugcagggu

SEQ ID NO: 265284 - RNA, 19 nt, Artificial Sequence
  Description of Artificial Sequence: Synthetic oligonucleotide
cggggucaggucgaacaua

SEQ ID NO: 265285 - RNA, 19 nt, Artificial Sequence
  Description of Artificial Sequence: Synthetic oligonucleotide
ccgccccuccagggugaag

SEQ ID NO: 265286 - RNA, 19 nt, Artificial Sequence
  Description of Artificial Sequence: Synthetic oligonucleotide
ccucgccacaucgcauuau

SEQ ID NO: 265287 - RNA, 19 nt, Artificial Sequence
  Description of Artificial Sequence: Synthetic oligonucleotide
ccgcuaacugcagggucuu

SEQ ID NO: 265288 - RNA, 19 nt, Artificial Sequence
  Description of Artificial Sequence: Synthetic oligonucleotide
gccgccccuccagggugaa

SEQ ID NO: 265289 - RNA, 19 nt, Artificial Sequence
  Description of Artificial Sequence: Synthetic oligonucleotide
cggccucgccacaucgcau

SEQ ID NO: 265290 - RNA, 19 nt, Artificial Sequence
  Description of Artificial Sequence: Synthetic oligonucleotide
aaauccaaccucuauaggc

SEQ ID NO: 265291 - RNA, 19 nt, Artificial Sequence
  Description of Artificial Sequence: Synthetic oligonucleotide
agucauaucauuucuaugg

SEQ ID NO: 265292 - RNA, 19 nt, Artificial Sequence
  Description of Artificial Sequence: Synthetic oligonucleotide
auuauggcaaacuggaacc

SEQ ID NO: 265293 - RNA, 19 nt, Artificial Sequence
  Description of Artificial Sequence: Synthetic oligonucleotide
uauuauagcguuuugguca

SEQ ID NO: 265294 - RNA, 19 nt, Artificial Sequence
  Description of Artificial Sequence: Synthetic oligonucleotide
agagucaacaacuuuagag

SEQ ID NO: 265295 - RNA, 19 nt, Artificial Sequence
  Description of Artificial Sequence: Synthetic oligonucleotide
aacacaugcgguugggucc

SEQ ID NO: 265296 - RNA, 19 nt, Artificial Sequence
  Description of Artificial Sequence: Synthetic oligonucleotide
aucgcaauacacuugcugc

SEQ ID NO: 265297 - RNA, 19 nt, Artificial Sequence
  Description of Artificial Sequence: Synthetic oligonucleotide
uuaguggucugauaaaggg

SEQ ID NO: 265298 - RNA, 19 nt, Artificial Sequence
  Description of Artificial Sequence: Synthetic oligonucleotide
agucaacaacuuuagaggc

SEQ ID NO: 265299 - RNA, 19 nt, Artificial Sequence
  Description of Artificial Sequence: Synthetic oligonucleotide
ugucacucugcuauuaugg

SEQ ID NO: 265300 - RNA, 19 nt, Artificial Sequence
  Description of Artificial Sequence: Synthetic oligonucleotide
agcaccuacaaacuuagac

SEQ ID NO: 265301 - RNA, 19 nt, Artificial Sequence
  Description of Artificial Sequence: Synthetic oligonucleotide
uguguaaggacaaaguuau

SEQ ID NO: 265302 - RNA, 19 nt, Artificial Sequence
  Description of Artificial Sequence: Synthetic oligonucleotide
gacuauuuguuguauauug

SEQ ID NO: 265303 - RNA, 19 nt, Artificial Sequence
  Description of Artificial Sequence: Synthetic oligonucleotide
acuuauuaggugccaagcc

SEQ ID NO: 265304 - RNA, 19 nt, Artificial Sequence
  Description of Artificial Sequence: Synthetic oligonucleotide
uguggcggaauuuuguucg

SEQ ID NO: 265305 - RNA, 19 nt, Artificial Sequence
  Description of Artificial Sequence: Synthetic oligonucleotide
uguauauugauaccaaaau

SEQ ID NO: 265306 - RNA, 19 nt, Artificial Sequence
  Description of Artificial Sequence: Synthetic oligonucleotide
uguuugaaacccuagaguc

SEQ ID NO: 265307 - RNA, 19 nt, Artificial Sequence
  Description of Artificial Sequence: Synthetic oligonucleotide
aacuuauuaggugccaagc

SEQ ID NO: 265308 - RNA, 19 nt, Artificial Sequence
  Description of Artificial Sequence: Synthetic oligonucleotide
ucuauuauagcguuuuggu

SEQ ID NO: 265309 - RNA, 19 nt, Artificial Sequence
  Description of Artificial Sequence: Synthetic oligonucleotide
cauuugaugguucuuagag

SEQ ID NO: 265310 - RNA, 19 nt, Artificial Sequence
  Description of Artificial Sequence: Synthetic oligonucleotide
ugcuauuauggcaaacugg

SEQ ID NO: 265311 - RNA, 19 nt, Artificial Sequence
  Description of Artificial Sequence: Synthetic oligonucleotide
cauagucucucauauaacc

SEQ ID NO: 265312 - RNA, 19 nt, Artificial Sequence
  Description of Artificial Sequence: Synthetic oligonucleotide
cucacuuuauaacucaggg

SEQ ID NO: 265313 - RNA, 19 nt, Artificial Sequence
  Description of Artificial Sequence: Synthetic oligonucleotide
aaacguagguucugaacac

SEQ ID NO: 265314 - RNA, 19 nt, Artificial Sequence
  Description of Artificial Sequence: Synthetic oligonucleotide
agaagaaucucucucucuc

SEQ ID NO: 265315 - RNA, 19 nt, Artificial Sequence
  Description of Artificial Sequence: Synthetic oligonucleotide
uuuaagaaucccaaaggaa

SEQ ID NO: 265316 - RNA, 19 nt, Artificial Sequence
  Description of Artificial Sequence: Synthetic oligonucleotide
aauguguaaggacaaaguu

SEQ ID NO: 265317 - RNA, 19 nt, Artificial Sequence
  Description of Artificial Sequence: Synthetic oligonucleotide
aaaccauugucacugucug

SEQ ID NO: 265318 - RNA, 19 nt, Artificial Sequence
  Description of Artificial Sequence: Synthetic oligonucleotide
aaacuuauuaggugccaag

SEQ ID NO: 265319 - RNA, 19 nt, Artificial Sequence
  Description of Artificial Sequence: Synthetic oligonucleotide
agugcauuaaaugaagcag

SEQ ID NO: 265320 - RNA, 19 nt, Artificial Sequence
  Description of Artificial Sequence: Synthetic oligonucleotide
agagacuaaaguucgaagu

SEQ ID NO: 265321 - RNA, 19 nt, Artificial Sequence
  Description of Artificial Sequence: Synthetic oligonucleotide
aagaaucucucucucucuc

SEQ ID NO: 265322 - RNA, 19 nt, Artificial Sequence
  Description of Artificial Sequence: Synthetic oligonucleotide
augauugcaccauagguug

SEQ ID NO: 265323 - RNA, 19 nt, Artificial Sequence
  Description of Artificial Sequence: Synthetic oligonucleotide
uucuauuauagcguuuugg

SEQ ID NO: 265324 - RNA, 19 nt, Artificial Sequence
  Description of Artificial Sequence: Synthetic oligonucleotide
uacauuacuuaaagggucc

SEQ ID NO: 265325 - RNA, 19 nt, Artificial Sequence
  Description of Artificial Sequence: Synthetic oligonucleotide
aaagauucacagugcacug

SEQ ID NO: 265326 - RNA, 19 nt, Artificial Sequence
  Description of Artificial Sequence: Synthetic oligonucleotide
ucgaagaccucucuggcag

SEQ ID NO: 265327 - RNA, 19 nt, Artificial Sequence
  Description of Artificial Sequence: Synthetic oligonucleotide
aaucuaguuagaucuuuca

SEQ ID NO: 265328 - RNA, 19 nt, Artificial Sequence
  Description of Artificial Sequence: Synthetic oligonucleotide
ucgaaguuaccauaauugc

SEQ ID NO: 265329 - RNA, 19 nt, Artificial Sequence
  Description of Artificial Sequence: Synthetic oligonucleotide
ugacccuuguaaaauagca

SEQ ID NO: 265330 - RNA, 19 nt, Artificial Sequence
  Description of Artificial Sequence: Synthetic oligonucleotide
uuacccacuggucacuagg

SEQ ID NO: 265331 - RNA, 19 nt, Artificial Sequence
  Description of Artificial Sequence: Synthetic oligonucleotide
agaaugauugcaccauagg

SEQ ID NO: 265332 - RNA, 19 nt, Artificial Sequence
  Description of Artificial Sequence: Synthetic oligonucleotide
ucucucucucuucucagcg

SEQ ID NO: 265333 - RNA, 19 nt, Artificial Sequence
  Description of Artificial Sequence: Synthetic oligonucleotide
guaacaacgucacuuuugc

SEQ ID NO: 265334 - RNA, 19 nt, Artificial Sequence
  Description of Artificial Sequence: Synthetic oligonucleotide
ugaaacgguaaauccauac

SEQ ID NO: 265335 - RNA, 19 nt, Artificial Sequence
  Description of Artificial Sequence: Synthetic oligonucleotide
ugagcuaaguacauuacuu

SEQ ID NO: 265336 - RNA, 19 nt, Artificial Sequence
  Description of Artificial Sequence: Synthetic oligonucleotide
aaccaguuuccucgaagac

SEQ ID NO: 265337 - RNA, 19 nt, Artificial Sequence
  Description of Artificial Sequence: Synthetic oligonucleotide
uuuucguggaugcagcuuc

SEQ ID NO: 265338 - RNA, 19 nt, Artificial Sequence
  Description of Artificial Sequence: Synthetic oligonucleotide
uucgaaguucaauauaauc

SEQ ID NO: 265339 - RNA, 19 nt, Artificial Sequence
  Description of Artificial Sequence: Synthetic oligonucleotide
gaaguuuucguggaugcag

SEQ ID NO: 265340 - RNA, 19 nt, Artificial Sequence
  Description of Artificial Sequence: Synthetic oligonucleotide
agugagagacuaaaguucg

SEQ ID NO: 265341 - RNA, 19 nt, Artificial Sequence
  Description of Artificial Sequence: Synthetic oligonucleotide
aaaugcgcaugucucagga

SEQ ID NO: 265342 - RNA, 19 nt, Artificial Sequence
  Description of Artificial Sequence: Synthetic oligonucleotide
aaguuuucguggaugcagc

SEQ ID NO: 265343 - RNA, 19 nt, Artificial Sequence
  Description of Artificial Sequence: Synthetic oligonucleotide
aaugauugcaccauagguu

SEQ ID NO: 265344 - RNA, 19 nt, Artificial Sequence
  Description of Artificial Sequence: Synthetic oligonucleotide
uccugugcuaaccauaguc

SEQ ID NO: 265345 - RNA, 19 nt, Artificial Sequence
  Description of Artificial Sequence: Synthetic oligonucleotide
cuaauuaguauuuaauaua

SEQ ID NO: 265346 - RNA, 19 nt, Artificial Sequence
  Description of Artificial Sequence: Synthetic oligonucleotide
gaucgcaauacacuugcug

SEQ ID NO: 265347 - RNA, 19 nt, Artificial Sequence
  Description of Artificial Sequence: Synthetic oligonucleotide
cuaccaaugggucuucacc

SEQ ID NO: 265348 - RNA, 19 nt, Artificial Sequence
  Description of Artificial Sequence: Synthetic oligonucleotide
uauuuauuuguaccgggua

SEQ ID NO: 265349 - RNA, 19 nt, Artificial Sequence
  Description of Artificial Sequence: Synthetic oligonucleotide
ucucaggacggaaucacug

SEQ ID NO: 265350 - RNA, 19 nt, Artificial Sequence
  Description of Artificial Sequence: Synthetic oligonucleotide
ucccuuaguggucugauaa

SEQ ID NO: 265351 - RNA, 19 nt, Artificial Sequence
  Description of Artificial Sequence: Synthetic oligonucleotide
aauccaaccucuauaggca

SEQ ID NO: 265352 - RNA, 19 nt, Artificial Sequence
  Description of Artificial Sequence: Synthetic oligonucleotide
augcuaacacaguucagag

SEQ ID NO: 265353 - RNA, 19 nt, Artificial Sequence
  Description of Artificial Sequence: Synthetic oligonucleotide
uugcuuuuagcuugguuga

SEQ ID NO: 265354 - RNA, 19 nt, Artificial Sequence
  Description of Artificial Sequence: Synthetic oligonucleotide
auauaaucauccuuacaaa

SEQ ID NO: 265355 - RNA, 19 nt, Artificial Sequence
  Description of Artificial Sequence: Synthetic oligonucleotide
auaauugcaucccaaccau

SEQ ID NO: 265356 - RNA, 19 nt, Artificial Sequence
  Description of Artificial Sequence: Synthetic oligonucleotide
ggguauauugcauaacccc

SEQ ID NO: 265357 - RNA, 19 nt, Artificial Sequence
  Description of Artificial Sequence: Synthetic oligonucleotide
ugcgguuggguccuaaaga

SEQ ID NO: 265358 - RNA, 19 nt, Artificial Sequence
  Description of Artificial Sequence: Synthetic oligonucleotide
uguguuuuacccacugguc

SEQ ID NO: 265359 - RNA, 19 nt, Artificial Sequence
  Description of Artificial Sequence: Synthetic oligonucleotide
gaaugauugcaccauaggu

SEQ ID NO: 265360 - RNA, 19 nt, Artificial Sequence
  Description of Artificial Sequence: Synthetic oligonucleotide
uuugaaacccuagagucau

SEQ ID NO: 265361 - RNA, 19 nt, Artificial Sequence
  Description of Artificial Sequence: Synthetic oligonucleotide
ugauaccaaaaucuaguua

SEQ ID NO: 265362 - RNA, 19 nt, Artificial Sequence
  Description of Artificial Sequence: Synthetic oligonucleotide
uauugcauaaccccuucuu

SEQ ID NO: 265363 - RNA, 19 nt, Artificial Sequence
  Description of Artificial Sequence: Synthetic oligonucleotide
uuugggguuaaauuuugua

SEQ ID NO: 265364 - RNA, 19 nt, Artificial Sequence
  Description of Artificial Sequence: Synthetic oligonucleotide
aauugcaucccaaccauau

SEQ ID NO: 265365 - RNA, 19 nt, Artificial Sequence
  Description of Artificial Sequence: Synthetic oligonucleotide
uuaccauaauugcauccca

SEQ ID NO: 265366 - RNA, 19 nt, Artificial Sequence
  Description of Artificial Sequence: Synthetic oligonucleotide
guaaacuguauucuuuguc

SEQ ID NO: 265367 - RNA, 19 nt, Artificial Sequence
  Description of Artificial Sequence: Synthetic oligonucleotide
cuuauuaggugccaagcca

SEQ ID NO: 265368 - RNA, 19 nt, Artificial Sequence
  Description of Artificial Sequence: Synthetic oligonucleotide
cacuaggagaaccuucagg

SEQ ID NO: 265369 - RNA, 19 nt, Artificial Sequence
  Description of Artificial Sequence: Synthetic oligonucleotide
ugcgcaugucucaggacgg

SEQ ID NO: 265370 - RNA, 19 nt, Artificial Sequence
  Description of Artificial Sequence: Synthetic oligonucleotide
uggucauugauucgaaguu

SEQ ID NO: 265371 - RNA, 19 nt, Artificial Sequence
  Description of Artificial Sequence: Synthetic oligonucleotide
cuucugguaacaacgucac

SEQ ID NO: 265372 - RNA, 19 nt, Artificial Sequence
  Description of Artificial Sequence: Synthetic oligonucleotide
ugggagucauaucauuucu

SEQ ID NO: 265373 - RNA, 19 nt, Artificial Sequence
  Description of Artificial Sequence: Synthetic oligonucleotide
uuuguaucuuuuggaaccc

SEQ ID NO: 265374 - RNA, 19 nt, Artificial Sequence
  Description of Artificial Sequence: Synthetic oligonucleotide
uuucuauuauagcguuuug

SEQ ID NO: 265375 - RNA, 19 nt, Artificial Sequence
  Description of Artificial Sequence: Synthetic oligonucleotide
aagaaucccaaaggaagca

SEQ ID NO: 265376 - RNA, 19 nt, Artificial Sequence
  Description of Artificial Sequence: Synthetic oligonucleotide
agggcaauuucucaaugga

SEQ ID NO: 265377 - RNA, 19 nt, Artificial Sequence
  Description of Artificial Sequence: Synthetic oligonucleotide
ucaaaugcaacaggucucu

SEQ ID NO: 265378 - RNA, 19 nt, Artificial Sequence
  Description of Artificial Sequence: Synthetic oligonucleotide
auugcaucccaaccauauc

SEQ ID NO: 265379 - RNA, 19 nt, Artificial Sequence
  Description of Artificial Sequence: Synthetic oligonucleotide
aaaacuuauuaggugccaa

SEQ ID NO: 265380 - RNA, 19 nt, Artificial Sequence
  Description of Artificial Sequence: Synthetic oligonucleotide
gaacacaugcgguuggguc

SEQ ID NO: 265381 - RNA, 19 nt, Artificial Sequence
  Description of Artificial Sequence: Synthetic oligonucleotide
auccaaccucuauaggcac

SEQ ID NO: 265382 - RNA, 19 nt, Artificial Sequence
  Description of Artificial Sequence: Synthetic oligonucleotide
agcguuuuggucaaacuug

SEQ ID NO: 265383 - RNA, 19 nt, Artificial Sequence
  Description of Artificial Sequence: Synthetic oligonucleotide
accucuauaggcaccagag

SEQ ID NO: 265384 - RNA, 19 nt, Artificial Sequence
  Description of Artificial Sequence: Synthetic oligonucleotide
ucucucauauaaccugaac

SEQ ID NO: 265385 - RNA, 19 nt, Artificial Sequence
  Description of Artificial Sequence: Synthetic oligonucleotide
uuagcuugguugacuguga

SEQ ID NO: 265386 - RNA, 19 nt, Artificial Sequence
  Description of Artificial Sequence: Synthetic oligonucleotide
uuuugauuaggugaaucuu

SEQ ID NO: 265387 - RNA, 19 nt, Artificial Sequence
  Description of Artificial Sequence: Synthetic oligonucleotide
guacauuacuuaaaggguc

SEQ ID NO: 265388 - RNA, 19 nt, Artificial Sequence
  Description of Artificial Sequence: Synthetic oligonucleotide
uugggagucauaucauuuc

SEQ ID NO: 265389 - RNA, 19 nt, Artificial Sequence
  Description of Artificial Sequence: Synthetic oligonucleotide
ugcauaaccccuucuuuuc

SEQ ID NO: 265390 - RNA, 19 nt, Artificial Sequence
  Description of Artificial Sequence: Synthetic oligonucleotide
auaccccugaaccagcagu

SEQ ID NO: 265391 - RNA, 19 nt, Artificial Sequence
  Description of Artificial Sequence: Synthetic oligonucleotide
acgcuguauuuauuuguac

SEQ ID NO: 265392 - RNA, 19 nt, Artificial Sequence
  Description of Artificial Sequence: Synthetic oligonucleotide
auauaaccugaacagugaa

SEQ ID NO: 265393 - RNA, 19 nt, Artificial Sequence
  Description of Artificial Sequence: Synthetic oligonucleotide
aucucucucucucucucuc

SEQ ID NO: 265394 - RNA, 19 nt, Artificial Sequence
  Description of Artificial Sequence: Synthetic oligonucleotide
auuauagcguuuuggucaa

SEQ ID NO: 265395 - RNA, 19 nt, Artificial Sequence
  Description of Artificial Sequence: Synthetic oligonucleotide
uuaggugaaucuugauacu

SEQ ID NO: 265396 - RNA, 19 nt, Artificial Sequence
  Description of Artificial Sequence: Synthetic oligonucleotide
cauauaaccugaacaguga

SEQ ID NO: 265397 - RNA, 19 nt, Artificial Sequence
  Description of Artificial Sequence: Synthetic oligonucleotide
aggacggaaucacuguuug

SEQ ID NO: 265398 - RNA, 19 nt, Artificial Sequence
  Description of Artificial Sequence: Synthetic oligonucleotide
aauuacuaauuaguauuua

SEQ ID NO: 265399 - RNA, 19 nt, Artificial Sequence
  Description of Artificial Sequence: Synthetic oligonucleotide
uacauucuuaggugugagc

SEQ ID NO: 265400 - RNA, 19 nt, Artificial Sequence
  Description of Artificial Sequence: Synthetic oligonucleotide
uugaugguucuuagaguca

SEQ ID NO: 265401 - RNA, 19 nt, Artificial Sequence
  Description of Artificial Sequence: Synthetic oligonucleotide
gaaccuaauguaacaucag

SEQ ID NO: 265402 - RNA, 19 nt, Artificial Sequence
  Description of Artificial Sequence: Synthetic oligonucleotide
aaucucucucucucucucu

SEQ ID NO: 265403 - RNA, 19 nt, Artificial Sequence
  Description of Artificial Sequence: Synthetic oligonucleotide
uggaaccuaauguaacauc

SEQ ID NO: 265404 - RNA, 19 nt, Artificial Sequence
  Description of Artificial Sequence: Synthetic oligonucleotide
gaaguuaccauaauugcau

SEQ ID NO: 265405 - RNA, 19 nt, Artificial Sequence
  Description of Artificial Sequence: Synthetic oligonucleotide
agugaagugagagacuaaa

SEQ ID NO: 265406 - RNA, 19 nt, Artificial Sequence
  Description of Artificial Sequence: Synthetic oligonucleotide
ugagagacuaaaguucgaa

SEQ ID NO: 265407 - RNA, 19 nt, Artificial Sequence
  Description of Artificial Sequence: Synthetic oligonucleotide
gaaucuugauacuguuuuc

SEQ ID NO: 265408 - RNA, 19 nt, Artificial Sequence
  Description of Artificial Sequence: Synthetic oligonucleotide
uguaccggguauauugcau

SEQ ID NO: 265409 - RNA, 19 nt, Artificial Sequence
  Description of Artificial Sequence: Synthetic oligonucleotide
uauagcguuuuggucaaac

SEQ ID NO: 265410 - RNA, 19 nt, Artificial Sequence
  Description of Artificial Sequence: Synthetic oligonucleotide
auagcguuuuggucaaacu

SEQ ID NO: 265411 - RNA, 19 nt, Artificial Sequence
  Description of Artificial Sequence: Synthetic oligonucleotide
ucucucucucucuucucag

SEQ ID NO: 265412 - RNA, 19 nt, Artificial Sequence
  Description of Artificial Sequence: Synthetic oligonucleotide
gcuauuauggcaaacugga

SEQ ID NO: 265413 - RNA, 19 nt, Artificial Sequence
  Description of Artificial Sequence: Synthetic oligonucleotide
gagaaccacucaauguucc

SEQ ID NO: 265414 - RNA, 19 nt, Artificial Sequence
  Description of Artificial Sequence: Synthetic oligonucleotide
gaaucucucucucucucuc

SEQ ID NO: 265415 - RNA, 19 nt, Artificial Sequence
  Description of Artificial Sequence: Synthetic oligonucleotide
cacugaaacgguaaaucca

SEQ ID NO: 265416 - RNA, 19 nt, Artificial Sequence
  Description of Artificial Sequence: Synthetic oligonucleotide
ucgcaauacacuugcugcu

SEQ ID NO: 265417 - RNA, 19 nt, Artificial Sequence
  Description of Artificial Sequence: Synthetic oligonucleotide
agcaacacgcuguauuuau

SEQ ID NO: 265418 - RNA, 19 nt, Artificial Sequence
  Description of Artificial Sequence: Synthetic oligonucleotide
auagucucucauauaaccu

SEQ ID NO: 265419 - RNA, 19 nt, Artificial Sequence
  Description of Artificial Sequence: Synthetic oligonucleotide
ucuaccaaugggucuucac

SEQ ID NO: 265420 - RNA, 19 nt, Artificial Sequence
  Description of Artificial Sequence: Synthetic oligonucleotide
aauguccguugcaugccac

SEQ ID NO: 265421 - RNA, 19 nt, Artificial Sequence
  Description of Artificial Sequence: Synthetic oligonucleotide
uccaaccucuauaggcacc

SEQ ID NO: 265422 - RNA, 19 nt, Artificial Sequence
  Description of Artificial Sequence: Synthetic oligonucleotide
ggaaccuaauguaacauca

SEQ ID NO: 265423 - RNA, 19 nt, Artificial Sequence
  Description of Artificial Sequence: Synthetic oligonucleotide
ucacuaggagaaccuucag

SEQ ID NO: 265424 - RNA, 19 nt, Artificial Sequence
  Description of Artificial Sequence: Synthetic oligonucleotide
augcgguuggguccuaaag

SEQ ID NO: 265425 - RNA, 19 nt, Artificial Sequence
  Description of Artificial Sequence: Synthetic oligonucleotide
agaaucucucucucucucu

SEQ ID NO: 265426 - RNA, 19 nt, Artificial Sequence
  Description of Artificial Sequence: Synthetic oligonucleotide
cugugcuaaccauagucuc

SEQ ID NO: 265427 - RNA, 19 nt, Artificial Sequence
  Description of Artificial Sequence: Synthetic oligonucleotide
cauuacuuaaagggucccc

SEQ ID NO: 265428 - RNA, 19 nt, Artificial Sequence
  Description of Artificial Sequence: Synthetic oligonucleotide
caaaugcgcaugucucagg

SEQ ID NO: 265429 - RNA, 19 nt, Artificial Sequence
  Description of Artificial Sequence: Synthetic oligonucleotide
uuuacccacuggucacuag

SEQ ID NO: 265430 - RNA, 19 nt, Artificial Sequence
  Description of Artificial Sequence: Synthetic oligonucleotide
gauguacaagcgagcaagc

SEQ ID NO: 265431 - RNA, 19 nt, Artificial Sequence
  Description of Artificial Sequence: Synthetic oligonucleotide
uugcaauguccguugcaug

SEQ ID NO: 265432 - RNA, 19 nt, Artificial Sequence
  Description of Artificial Sequence: Synthetic oligonucleotide
auauugcauaaccccuucu

SEQ ID NO: 265433 - RNA, 19 nt, Artificial Sequence
  Description of Artificial Sequence: Synthetic oligonucleotide
gguaacaacgucacuuuug

SEQ ID NO: 265434 - RNA, 19 nt, Artificial Sequence
  Description of Artificial Sequence: Synthetic oligonucleotide
aacguagguucugaacacu

SEQ ID NO: 265435 - RNA, 19 nt, Artificial Sequence
  Description of Artificial Sequence: Synthetic oligonucleotide
ccggguauauugcauaacc

SEQ ID NO: 265436 - RNA, 19 nt, Artificial Sequence
  Description of Artificial Sequence: Synthetic oligonucleotide
cuaaccauagucucucaua

SEQ ID NO: 265437 - RNA, 19 nt, Artificial Sequence
  Description of Artificial Sequence: Synthetic oligonucleotide
aguuuucguggaugcagcu

SEQ ID NO: 265438 - RNA, 19 nt, Artificial Sequence
  Description of Artificial Sequence: Synthetic oligonucleotide
auaugguuacugugaggcu

SEQ ID NO: 265439 - RNA, 19 nt, Artificial Sequence
  Description of Artificial Sequence: Synthetic oligonucleotide
aagucauaugcagcaucug

SEQ ID NO: 265440 - RNA, 19 nt, Artificial Sequence
  Description of Artificial Sequence: Synthetic oligonucleotide
uuauaacucaggggcuuca

SEQ ID NO: 265441 - RNA, 19 nt, Artificial Sequence
  Description of Artificial Sequence: Synthetic oligonucleotide
guaaggcuugaggagacac

SEQ ID NO: 265442 - RNA, 19 nt, Artificial Sequence
  Description of Artificial Sequence: Synthetic oligonucleotide
gucucugaucgcaauacac

SEQ ID NO: 265443 - RNA, 19 nt, Artificial Sequence
  Description of Artificial Sequence: Synthetic oligonucleotide
gagacuaaaguucgaaguu

SEQ ID NO: 265444 - RNA, 19 nt, Artificial Sequence
  Description of Artificial Sequence: Synthetic oligonucleotide
aaaaugcuauuugccuccu

SEQ ID NO: 265445 - RNA, 19 nt, Artificial Sequence
  Description of Artificial Sequence: Synthetic oligonucleotide
cucucucucucuucucagc

SEQ ID NO: 265446 - RNA, 19 nt, Artificial Sequence
  Description of Artificial Sequence: Synthetic oligonucleotide
uggugauuguccucaguua

SEQ ID NO: 265447 - RNA, 19 nt, Artificial Sequence
  Description of Artificial Sequence: Synthetic oligonucleotide
cagaaaguauguaaacugu

SEQ ID NO: 265448 - RNA, 19 nt, Artificial Sequence
  Description of Artificial Sequence: Synthetic oligonucleotide
aagguccaaguauuuucua

SEQ ID NO: 265449 - RNA, 19 nt, Artificial Sequence
  Description of Artificial Sequence: Synthetic oligonucleotide
cuuuaguauugagagcuga

SEQ ID NO: 265450 - RNA, 19 nt, Artificial Sequence
  Description of Artificial Sequence: Synthetic oligonucleotide
cgcuguauuuauuuguacc

SEQ ID NO: 265451 - RNA, 19 nt, Artificial Sequence
  Description of Artificial Sequence: Synthetic oligonucleotide
uaccggguauauugcauaa

SEQ ID NO: 265452 - RNA, 19 nt, Artificial Sequence
  Description of Artificial Sequence: Synthetic oligonucleotide
agucucucauauaaccuga

SEQ ID NO: 265453 - RNA, 19 nt, Artificial Sequence
  Description of Artificial Sequence: Synthetic oligonucleotide
uaauugcaucccaaccaua

SEQ ID NO: 265454 - RNA, 19 nt, Artificial Sequence
  Description of Artificial Sequence: Synthetic oligonucleotide
aacaacuuuagaggccaua

SEQ ID NO: 265455 - RNA, 19 nt, Artificial Sequence
  Description of Artificial Sequence: Synthetic oligonucleotide
gaagaaucucucucucucu

SEQ ID NO: 265456 - RNA, 19 nt, Artificial Sequence
  Description of Artificial Sequence: Synthetic oligonucleotide
cagauaccccugaaccagc

SEQ ID NO: 265457 - RNA, 19 nt, Artificial Sequence
  Description of Artificial Sequence: Synthetic oligonucleotide
gcgauuucaaagucccacc

SEQ ID NO: 265458 - RNA, 19 nt, Artificial Sequence
  Description of Artificial Sequence: Synthetic oligonucleotide
auacuucugguaacaacgu

SEQ ID NO: 265459 - RNA, 19 nt, Artificial Sequence
  Description of Artificial Sequence: Synthetic oligonucleotide
uucuauggcagggcaauuu

SEQ ID NO: 265460 - RNA, 19 nt, Artificial Sequence
  Description of Artificial Sequence: Synthetic oligonucleotide
ggucaaaacagcaagcagu

SEQ ID NO: 265461 - RNA, 19 nt, Artificial Sequence
  Description of Artificial Sequence: Synthetic oligonucleotide
ugguaacaacgucacuuuu

SEQ ID NO: 265462 - RNA, 19 nt, Artificial Sequence
  Description of Artificial Sequence: Synthetic oligonucleotide
ucucucucucucucucucu

SEQ ID NO: 265463 - RNA, 19 nt, Artificial Sequence
  Description of Artificial Sequence: Synthetic oligonucleotide
ggacaaugauugaagaguc

SEQ ID NO: 265464 - RNA, 19 nt, Artificial Sequence
  Description of Artificial Sequence: Synthetic oligonucleotide
ugaucgcaauacacuugcu

SEQ ID NO: 265465 - RNA, 19 nt, Artificial Sequence
  Description of Artificial Sequence: Synthetic oligonucleotide
gcaccuacaaacuuagacu

SEQ ID NO: 265466 - RNA, 19 nt, Artificial Sequence
  Description of Artificial Sequence: Synthetic oligonucleotide
auguacaagcgagcaagcu

SEQ ID NO: 265467 - RNA, 19 nt, Artificial Sequence
  Description of Artificial Sequence: Synthetic oligonucleotide
acguagguucugaacacug

SEQ ID NO: 265468 - RNA, 19 nt, Artificial Sequence
  Description of Artificial Sequence: Synthetic oligonucleotide
cucucucucucucucucuc

SEQ ID NO: 265469 - RNA, 19 nt, Artificial Sequence
  Description of Artificial Sequence: Synthetic oligonucleotide
ucguggaugcagcuucuuu

SEQ ID NO: 265470 - RNA, 19 nt, Artificial Sequence
  Description of Artificial Sequence: Synthetic oligonucleotide
cucucucucucucuucuca

SEQ ID NO: 265471 - RNA, 19 nt, Artificial Sequence
  Description of Artificial Sequence: Synthetic oligonucleotide
gugcuaaccauagucucuc

SEQ ID NO: 265472 - RNA, 19 nt, Artificial Sequence
  Description of Artificial Sequence: Synthetic oligonucleotide
gcggaauuuuguucgacuc

SEQ ID NO: 265473 - RNA, 19 nt, Artificial Sequence
  Description of Artificial Sequence: Synthetic oligonucleotide
ccagauaccccugaaccag

SEQ ID NO: 265474 - RNA, 19 nt, Artificial Sequence
  Description of Artificial Sequence: Synthetic oligonucleotide
ugcuaaccauagucucuca

SEQ ID NO: 265475 - RNA, 19 nt, Artificial Sequence
  Description of Artificial Sequence: Synthetic oligonucleotide
guauuuauuuguaccgggu

SEQ ID NO: 265476 - RNA, 19 nt, Artificial Sequence
  Description of Artificial Sequence: Synthetic oligonucleotide
ucucucucucucucucuuc

SEQ ID NO: 265477 - RNA, 19 nt, Artificial Sequence
  Description of Artificial Sequence: Synthetic oligonucleotide
ugacaguguugggagacua

SEQ ID NO: 265478 - RNA, 19 nt, Artificial Sequence
  Description of Artificial Sequence: Synthetic oligonucleotide
guaccggguauauugcaua

SEQ ID NO: 265479 - RNA, 19 nt, Artificial Sequence
  Description of Artificial Sequence: Synthetic oligonucleotide
cucgaagaccucucuggca

SEQ ID NO: 265480 - RNA, 19 nt, Artificial Sequence
  Description of Artificial Sequence: Synthetic oligonucleotide
gaugguucuuagagucaac

SEQ ID NO: 265481 - RNA, 19 nt, Artificial Sequence
  Description of Artificial Sequence: Synthetic oligonucleotide
auucgaaguucaauauaau

SEQ ID NO: 265482 - RNA, 19 nt, Artificial Sequence
  Description of Artificial Sequence: Synthetic oligonucleotide
ggucauugauucgaaguuc

SEQ ID NO: 265483 - RNA, 19 nt, Artificial Sequence
  Description of Artificial Sequence: Synthetic oligonucleotide
ggagucauaucauuucuau

SEQ ID NO: 265484 - RNA, 19 nt, Artificial Sequence
  Description of Artificial Sequence: Synthetic oligonucleotide
cggguauauugcauaaccc

SEQ ID NO: 265485 - RNA, 19 nt, Artificial Sequence
  Description of Artificial Sequence: Synthetic oligonucleotide
ucucucucucucucuucuc

SEQ ID NO: 265486 - RNA, 19 nt, Artificial Sequence
  Description of Artificial Sequence: Synthetic oligonucleotide
cuugggagucauaucauuu

SEQ ID NO: 265487 - RNA, 19 nt, Artificial Sequence
  Description of Artificial Sequence: Synthetic oligonucleotide
auauagucuuugauaucaa

SEQ ID NO: 265488 - RNA, 19 nt, Artificial Sequence
  Description of Artificial Sequence: Synthetic oligonucleotide
acacaugcgguuggguccu

SEQ ID NO: 265489 - RNA, 19 nt, Artificial Sequence
  Description of Artificial Sequence: Synthetic oligonucleotide
ccaaaugcgcaugucucag

SEQ ID NO: 265490 - RNA, 19 nt, Artificial Sequence
  Description of Artificial Sequence: Synthetic oligonucleotide
cucugaucgcaauacacuu

SEQ ID NO: 265491 - RNA, 19 nt, Artificial Sequence
  Description of Artificial Sequence: Synthetic oligonucleotide
caauguccguugcaugcca

SEQ ID NO: 265492 - RNA, 19 nt, Artificial Sequence
  Description of Artificial Sequence: Synthetic oligonucleotide
uucuaccaaugggucuuca

SEQ ID NO: 265493 - RNA, 19 nt, Artificial Sequence
  Description of Artificial Sequence: Synthetic oligonucleotide
ggggcuucaagauauuaau

SEQ ID NO: 265494 - RNA, 19 nt, Artificial Sequence
  Description of Artificial Sequence: Synthetic oligonucleotide
caacacgcuguauuuauuu

SEQ ID NO: 265495 - RNA, 19 nt, Artificial Sequence
  Description of Artificial Sequence: Synthetic oligonucleotide
acgucacuuuugcuuuagu

SEQ ID NO: 265496 - RNA, 19 nt, Artificial Sequence
  Description of Artificial Sequence: Synthetic oligonucleotide
uggcggaauuuuguucgac

SEQ ID NO: 265497 - RNA, 19 nt, Artificial Sequence
  Description of Artificial Sequence: Synthetic oligonucleotide
gcaauguccguugcaugcc

SEQ ID NO: 265498 - RNA, 19 nt, Artificial Sequence
  Description of Artificial Sequence: Synthetic oligonucleotide
cagauaccugagaaaggua

SEQ ID NO: 265499 - RNA, 19 nt, Artificial Sequence
  Description of Artificial Sequence: Synthetic oligonucleotide
cucucucucucucucuucu

SEQ ID NO: 265500 - RNA, 19 nt, Artificial Sequence
  Description of Artificial Sequence: Synthetic oligonucleotide
aagcaccuacaaacuuaga

SEQ ID NO: 265501 - RNA, 19 nt, Artificial Sequence
  Description of Artificial Sequence: Synthetic oligonucleotide
ggucucugaucgcaauaca

SEQ ID NO: 265502 - RNA, 19 nt, Artificial Sequence
  Description of Artificial Sequence: Synthetic oligonucleotide
cuuuauaacucaggggcuu

SEQ ID NO: 265503 - RNA, 19 nt, Artificial Sequence
  Description of Artificial Sequence: Synthetic oligonucleotide
gugagagacuaaaguucga

SEQ ID NO: 265504 - RNA, 19 nt, Artificial Sequence
  Description of Artificial Sequence: Synthetic oligonucleotide
ggcggaauuuuguucgacu

SEQ ID NO: 265505 - RNA, 19 nt, Artificial Sequence
  Description of Artificial Sequence: Synthetic oligonucleotide
caaccucuauaggcaccag

SEQ ID NO: 265506 - RNA, 19 nt, Artificial Sequence
  Description of Artificial Sequence: Synthetic oligonucleotide
cuggaaccuaauguaacau

SEQ ID NO: 265507 - RNA, 19 nt, Artificial Sequence
  Description of Artificial Sequence: Synthetic oligonucleotide
ccaccccacaaauacaaua

SEQ ID NO: 265508 - RNA, 19 nt, Artificial Sequence
  Description of Artificial Sequence: Synthetic oligonucleotide
ggacggaaucacuguuuga

SEQ ID NO: 265509 - RNA, 19 nt, Artificial Sequence
  Description of Artificial Sequence: Synthetic oligonucleotide
uuauagcguuuuggucaaa

SEQ ID NO: 265510 - RNA, 19 nt, Artificial Sequence
  Description of Artificial Sequence: Synthetic oligonucleotide
gcgguuggguccuaaagau

SEQ ID NO: 265511 - RNA, 19 nt, Artificial Sequence
  Description of Artificial Sequence: Synthetic oligonucleotide
gccaagcuuggacuuggga

SEQ ID NO: 265512 - RNA, 19 nt, Artificial Sequence
  Description of Artificial Sequence: Synthetic oligonucleotide
ccaaccucuauaggcacca

SEQ ID NO: 265513 - RNA, 19 nt, Artificial Sequence
  Description of Artificial Sequence: Synthetic oligonucleotide
gcauaaccccuucuuuucu

SEQ ID NO: 265514 - RNA, 19 nt, Artificial Sequence
  Description of Artificial Sequence: Synthetic oligonucleotide
ccucuauaggcaccagaga

SEQ ID NO: 265515 - RNA, 19 nt, Artificial Sequence
  Description of Artificial Sequence: Synthetic oligonucleotide
ccuccaaaugcgcaugucu

SEQ ID NO: 265516 - RNA, 19 nt, Artificial Sequence
  Description of Artificial Sequence: Synthetic oligonucleotide
gcuaaccauagucucucau

SEQ ID NO: 265517 - RNA, 19 nt, Artificial Sequence
  Description of Artificial Sequence: Synthetic oligonucleotide
cucucucucucucucucuu

SEQ ID NO: 265518 - RNA, 19 nt, Artificial Sequence
  Description of Artificial Sequence: Synthetic oligonucleotide
guccugugcuaaccauagu

SEQ ID NO: 265519 - RNA, 19 nt, Artificial Sequence
  Description of Artificial Sequence: Synthetic oligonucleotide
gggagacuauuuguuguau

SEQ ID NO: 265520 - RNA, 19 nt, Artificial Sequence
  Description of Artificial Sequence: Synthetic oligonucleotide
gcaugucucaggacggaau

SEQ ID NO: 265521 - RNA, 19 nt, Artificial Sequence
  Description of Artificial Sequence: Synthetic oligonucleotide
ccaguccugugcuaaccau

SEQ ID NO: 265522 - RNA, 19 nt, Artificial Sequence
  Description of Artificial Sequence: Synthetic oligonucleotide
gcaacacgcuguauuuauu

SEQ ID NO: 265523 - RNA, 19 nt, Artificial Sequence
  Description of Artificial Sequence: Synthetic oligonucleotide
ccguugcaugccacagagu

SEQ ID NO: 265524 - RNA, 19 nt, Artificial Sequence
  Description of Artificial Sequence: Synthetic oligonucleotide
ccaagcuaccuggucuauu

SEQ ID NO: 265525 - RNA, 19 nt, Artificial Sequence
  Description of Artificial Sequence: Synthetic oligonucleotide
cacaugcgguuggguccua

SEQ ID NO: 265526 - RNA, 19 nt, Artificial Sequence
  Description of Artificial Sequence: Synthetic oligonucleotide
aauuaauagaguugaaggg

SEQ ID NO: 265527 - RNA, 19 nt, Artificial Sequence
  Description of Artificial Sequence: Synthetic oligonucleotide
aauaagaacuacucaacag

SEQ ID NO: 265528 - RNA, 19 nt, Artificial Sequence
  Description of Artificial Sequence: Synthetic oligonucleotide
aaagucauacucuuaucac

SEQ ID NO: 265529 - RNA, 19 nt, Artificial Sequence
  Description of Artificial Sequence: Synthetic oligonucleotide
ucaaucaacacaauaguga

SEQ ID NO: 265530 - RNA, 19 nt, Artificial Sequence
  Description of Artificial Sequence: Synthetic oligonucleotide
auuucaaucaacacaauag

SEQ ID NO: 265531 - RNA, 19 nt, Artificial Sequence
  Description of Artificial Sequence: Synthetic oligonucleotide
accauguauacucuaauuc

SEQ ID NO: 265532 - RNA, 19 nt, Artificial Sequence
  Description of Artificial Sequence: Synthetic oligonucleotide
ugcuaauucacagaauugg

SEQ ID NO: 265533 - RNA, 19 nt, Artificial Sequence
  Description of Artificial Sequence: Synthetic oligonucleotide
agcgauaccaccaagucgc

SEQ ID NO: 265534 - RNA, 19 nt, Artificial Sequence
  Description of Artificial Sequence: Synthetic oligonucleotide
agaacuacucaacaguguc

SEQ ID NO: 265535 - RNA, 19 nt, Artificial Sequence
  Description of Artificial Sequence: Synthetic oligonucleotide
acagauagacacuagccuc

SEQ ID NO: 265536 - RNA, 19 nt, Artificial Sequence
  Description of Artificial Sequence: Synthetic oligonucleotide
uuuccugcccaauuaauag

SEQ ID NO: 265537 - RNA, 19 nt, Artificial Sequence
  Description of Artificial Sequence: Synthetic oligonucleotide
uucaaucaacacaauagug

SEQ ID NO: 265538 - RNA, 19 nt, Artificial Sequence
  Description of Artificial Sequence: Synthetic oligonucleotide
agaguuagugaaaauauag

SEQ ID NO: 265539 - RNA, 19 nt, Artificial Sequence
  Description of Artificial Sequence: Synthetic oligonucleotide
uucaacaaacuacacacuc

SEQ ID NO: 265540 - RNA, 19 nt, Artificial Sequence
  Description of Artificial Sequence: Synthetic oligonucleotide
aaacuacacacucccuuac

SEQ ID NO: 265541 - RNA, 19 nt, Artificial Sequence
  Description of Artificial Sequence: Synthetic oligonucleotide
aagucauacucuuaucaca

SEQ ID NO: 265542 - RNA, 19 nt, Artificial Sequence
  Description of Artificial Sequence: Synthetic oligonucleotide
ucaacaaacuacacacucc

SEQ ID NO: 265543 - RNA, 19 nt, Artificial Sequence
  Description of Artificial Sequence: Synthetic oligonucleotide
auuaauagaguugaagggu

SEQ ID NO: 265544 - RNA, 19 nt, Artificial Sequence
  Description of Artificial Sequence: Synthetic oligonucleotide
aacugcucgcgcgagaagc

SEQ ID NO: 265545 - RNA, 19 nt, Artificial Sequence
  Description of Artificial Sequence: Synthetic oligonucleotide
aggaauugaggcucggugg

SEQ ID NO: 265546 - RNA, 19 nt, Artificial Sequence
  Description of Artificial Sequence: Synthetic oligonucleotide
ugucuaaggagugaaaacu

SEQ ID NO: 265547 - RNA, 19 nt, Artificial Sequence
  Description of Artificial Sequence: Synthetic oligonucleotide
ugacaacugaaguaaaccu

SEQ ID NO: 265548 - RNA, 19 nt, Artificial Sequence
  Description of Artificial Sequence: Synthetic oligonucleotide
cuuaucacaccauguauac

SEQ ID NO: 265549 - RNA, 19 nt, Artificial Sequence
  Description of Artificial Sequence: Synthetic oligonucleotide
uccugcccaauuaauagag

SEQ ID NO: 265550 - RNA, 19 nt, Artificial Sequence
  Description of Artificial Sequence: Synthetic oligonucleotide
gagccuaccagaaaagucc

SEQ ID NO: 265551 - RNA, 19 nt, Artificial Sequence
  Description of Artificial Sequence: Synthetic oligonucleotide
uuaauagaguugaaggguu

SEQ ID NO: 265552 - RNA, 19 nt, Artificial Sequence
  Description of Artificial Sequence: Synthetic oligonucleotide
uguguagggguaauccugc

SEQ ID NO: 265553 - RNA, 19 nt, Artificial Sequence
  Description of Artificial Sequence: Synthetic oligonucleotide
cucaugacgucuuuccugc

SEQ ID NO: 265554 - RNA, 19 nt, Artificial Sequence
  Description of Artificial Sequence: Synthetic oligonucleotide
ugagguuucgagacaggcc

SEQ ID NO: 265555 - RNA, 19 nt, Artificial Sequence
  Description of Artificial Sequence: Synthetic oligonucleotide
ugugcugcacgcucgcugg

SEQ ID NO: 265556 - RNA, 19 nt, Artificial Sequence
  Description of Artificial Sequence: Synthetic oligonucleotide
uguaccaagggcccacuga

SEQ ID NO: 265557 - RNA, 19 nt, Artificial Sequence
  Description of Artificial Sequence: Synthetic oligonucleotide
auacucuuaucacaccaug

SEQ ID NO: 265558 - RNA, 19 nt, Artificial Sequence
  Description of Artificial Sequence: Synthetic oligonucleotide
uacucuuaucacaccaugu

SEQ ID NO: 265559 - RNA, 19 nt, Artificial Sequence
  Description of Artificial Sequence: Synthetic oligonucleotide
uacauguaaguugugugca

SEQ ID NO: 265560 - RNA, 19 nt, Artificial Sequence
  Description of Artificial Sequence: Synthetic oligonucleotide
acggcagacuaccaguccg

SEQ ID NO: 265561 - RNA, 19 nt, Artificial Sequence
  Description of Artificial Sequence: Synthetic oligonucleotide
cuuccgcgcaccaucaugc

SEQ ID NO: 265562 - RNA, 19 nt, Artificial Sequence
  Description of Artificial Sequence: Synthetic oligonucleotide
caucugagucucuacagug

SEQ ID NO: 265563 - RNA, 19 nt, Artificial Sequence
  Description of Artificial Sequence: Synthetic oligonucleotide
auguauacucuaauucaac

SEQ ID NO: 265564 - RNA, 19 nt, Artificial Sequence
  Description of Artificial Sequence: Synthetic oligonucleotide
agcuugaacugcucgcgcg

SEQ ID NO: 265565 - RNA, 19 nt, Artificial Sequence
  Description of Artificial Sequence: Synthetic oligonucleotide
gagauagcagggugcagcc

SEQ ID NO: 265566 - RNA, 19 nt, Artificial Sequence
  Description of Artificial Sequence: Synthetic oligonucleotide
ucgaagagcaccgggcgcg

SEQ ID NO: 265567 - RNA, 19 nt, Artificial Sequence
  Description of Artificial Sequence: Synthetic oligonucleotide
ugcucaugcacuugacgcc

SEQ ID NO: 265568 - RNA, 19 nt, Artificial Sequence
  Description of Artificial Sequence: Synthetic oligonucleotide
augucuacccaaaagacaa

SEQ ID NO: 265569 - RNA, 19 nt, Artificial Sequence
  Description of Artificial Sequence: Synthetic oligonucleotide
aacauaaacgauacauuua

SEQ ID NO: 265570 - RNA, 19 nt, Artificial Sequence
  Description of Artificial Sequence: Synthetic oligonucleotide
gcagugaucacagauagac

SEQ ID NO: 265571 - RNA, 19 nt, Artificial Sequence
  Description of Artificial Sequence: Synthetic oligonucleotide
ucggucagcgauaccacca

SEQ ID NO: 265572 - RNA, 19 nt, Artificial Sequence
  Description of Artificial Sequence: Synthetic oligonucleotide
aguguguagggguaauccu

SEQ ID NO: 265573 - RNA, 19 nt, Artificial Sequence
  Description of Artificial Sequence: Synthetic oligonucleotide
gaagccgccucaccagugg

SEQ ID NO: 265574 - RNA, 19 nt, Artificial Sequence
  Description of Artificial Sequence: Synthetic oligonucleotide
caggaauugaggcucggug

SEQ ID NO: 265575 - RNA, 19 nt, Artificial Sequence
  Description of Artificial Sequence: Synthetic oligonucleotide
ugugguccgacaucuuggc

SEQ ID NO: 265576 - RNA, 19 nt, Artificial Sequence
  Description of Artificial Sequence: Synthetic oligonucleotide
acacacucccuuacaaccc

SEQ ID NO: 265577 - RNA, 19 nt, Artificial Sequence
  Description of Artificial Sequence: Synthetic oligonucleotide
uguaaguugugugcauggc

SEQ ID NO: 265578 - RNA, 19 nt, Artificial Sequence
  Description of Artificial Sequence: Synthetic oligonucleotide
aacuugagguuucgagaca

SEQ ID NO: 265579 - RNA, 19 nt, Artificial Sequence
  Description of Artificial Sequence: Synthetic oligonucleotide
uccccaaucccuuuauguc

SEQ ID NO: 265580 - RNA, 19 nt, Artificial Sequence
  Description of Artificial Sequence: Synthetic oligonucleotide
uuccugcccaauuaauaga

SEQ ID NO: 265581 - RNA, 19 nt, Artificial Sequence
  Description of Artificial Sequence: Synthetic oligonucleotide
uuuagccugggguggaaaa

SEQ ID NO: 265582 - RNA, 19 nt, Artificial Sequence
  Description of Artificial Sequence: Synthetic oligonucleotide
uaaauagguuugucauucu

SEQ ID NO: 265583 - RNA, 19 nt, Artificial Sequence
  Description of Artificial Sequence: Synthetic oligonucleotide
cucgccacgagccuaccag

SEQ ID NO: 265584 - RNA, 19 nt, Artificial Sequence
  Description of Artificial Sequence: Synthetic oligonucleotide
ucccuuuaugucuacccaa

SEQ ID NO: 265585 - RNA, 19 nt, Artificial Sequence
  Description of Artificial Sequence: Synthetic oligonucleotide
uaaagacuguaggaguccu

SEQ ID NO: 265586 - RNA, 19 nt, Artificial Sequence
  Description of Artificial Sequence: Synthetic oligonucleotide
cucuauaguguaaauuaaa

SEQ ID NO: 265587 - RNA, 19 nt, Artificial Sequence
  Description of Artificial Sequence: Synthetic oligonucleotide
aaacuaccaugacaugauu

SEQ ID NO: 265588 - RNA, 19 nt, Artificial Sequence
  Description of Artificial Sequence: Synthetic oligonucleotide
cauguaaguugugugcaug

SEQ ID NO: 265589 - RNA, 19 nt, Artificial Sequence
  Description of Artificial Sequence: Synthetic oligonucleotide
aaugaacucaugacgucuu

SEQ ID NO: 265590 - RNA, 19 nt, Artificial Sequence
  Description of Artificial Sequence: Synthetic oligonucleotide
ugcacgcucgcuggaaccg

SEQ ID NO: 265591 - RNA, 19 nt, Artificial Sequence
  Description of Artificial Sequence: Synthetic oligonucleotide
ucaccucgcgcacgcaugc

SEQ ID NO: 265592 - RNA, 19 nt, Artificial Sequence
  Description of Artificial Sequence: Synthetic oligonucleotide
agggguaauccugcagccc

SEQ ID NO: 265593 - RNA, 19 nt, Artificial Sequence
  Description of Artificial Sequence: Synthetic oligonucleotide
gagcccacuaccaccgccg

SEQ ID NO: 265594 - RNA, 19 nt, Artificial Sequence
  Description of Artificial Sequence: Synthetic oligonucleotide
cacacucccuuacaacccc

SEQ ID NO: 265595 - RNA, 19 nt, Artificial Sequence
  Description of Artificial Sequence: Synthetic oligonucleotide
gucauacucuuaucacacc

SEQ ID NO: 265596 - RNA, 19 nt, Artificial Sequence
  Description of Artificial Sequence: Synthetic oligonucleotide
acaccauguauacucuaau

SEQ ID NO: 265597 - RNA, 19 nt, Artificial Sequence
  Description of Artificial Sequence: Synthetic oligonucleotide
ccauguauacucuaauuca

SEQ ID NO: 265598 - RNA, 19 nt, Artificial Sequence
  Description of Artificial Sequence: Synthetic oligonucleotide
gucuacccaaaagacaaac

SEQ ID NO: 265599 - RNA, 19 nt, Artificial Sequence
  Description of Artificial Sequence: Synthetic oligonucleotide
guaauccugcagcccacag

SEQ ID NO: 265600 - RNA, 19 nt, Artificial Sequence
  Description of Artificial Sequence: Synthetic oligonucleotide
caugucuaaggagugaaaa

SEQ ID NO: 265601 - RNA, 19 nt, Artificial Sequence
  Description of Artificial Sequence: Synthetic oligonucleotide
cacuugacaacugaaguaa

SEQ ID NO: 265602 - RNA, 19 nt, Artificial Sequence
  Description of Artificial Sequence: Synthetic oligonucleotide
cacgagccuaccagaaaag

SEQ ID NO: 265603 - RNA, 19 nt, Artificial Sequence
  Description of Artificial Sequence: Synthetic oligonucleotide
ucccuuaaagccugagaua

SEQ ID NO: 265604 - RNA, 19 nt, Artificial Sequence
  Description of Artificial Sequence: Synthetic oligonucleotide
uuaucacaccauguauacu

SEQ ID NO: 265605 - RNA, 19 nt, Artificial Sequence
  Description of Artificial Sequence: Synthetic oligonucleotide
gaagcggucccgugacuug

SEQ ID NO: 265606 - RNA, 19 nt, Artificial Sequence
  Description of Artificial Sequence: Synthetic oligonucleotide
cuucagacacggcgcaggc

SEQ ID NO: 265607 - RNA, 19 nt, Artificial Sequence
  Description of Artificial Sequence: Synthetic oligonucleotide
cacucggucagcgauacca

SEQ ID NO: 265608 - RNA, 19 nt, Artificial Sequence
  Description of Artificial Sequence: Synthetic oligonucleotide
ccuaccagaaaaguccccg

SEQ ID NO: 265609 - RNA, 19 nt, Artificial Sequence
  Description of Artificial Sequence: Synthetic oligonucleotide
guaccaagggcccacugaa

SEQ ID NO: 265610 - RNA, 19 nt, Artificial Sequence
  Description of Artificial Sequence: Synthetic oligonucleotide
acgcucacaguagcuuucc

SEQ ID NO: 265611 - RNA, 19 nt, Artificial Sequence
  Description of Artificial Sequence: Synthetic oligonucleotide
agugggcugguagacaccu

SEQ ID NO: 265612 - RNA, 19 nt, Artificial Sequence
  Description of Artificial Sequence: Synthetic oligonucleotide
cucggucagcgauaccacc

SEQ ID NO: 265613 - RNA, 19 nt, Artificial Sequence
  Description of Artificial Sequence: Synthetic oligonucleotide
auagaguugaaggguugga

SEQ ID NO: 265614 - RNA, 19 nt, Artificial Sequence
  Description of Artificial Sequence: Synthetic oligonucleotide
uuccacgagacuguccccu

SEQ ID NO: 265615 - RNA, 19 nt, Artificial Sequence
  Description of Artificial Sequence: Synthetic oligonucleotide
ggugcuaauucacagaauu

SEQ ID NO: 265616 - RNA, 19 nt, Artificial Sequence
  Description of Artificial Sequence: Synthetic oligonucleotide
ccuucgaagagcaccgggc

SEQ ID NO: 265617 - RNA, 19 nt, Artificial Sequence
  Description of Artificial Sequence: Synthetic oligonucleotide
cacagauagacacuagccu

SEQ ID NO: 265618 - RNA, 19 nt, Artificial Sequence
  Description of Artificial Sequence: Synthetic oligonucleotide
uccgcgcaccaucaugcca

SEQ ID NO: 265619 - RNA, 19 nt, Artificial Sequence
  Description of Artificial Sequence: Synthetic oligonucleotide
acucggucagcgauaccac

SEQ ID NO: 265620 - RNA, 19 nt, Artificial Sequence
  Description of Artificial Sequence: Synthetic oligonucleotide
cacaccauguauacucuaa

SEQ ID NO: 265621 - RNA, 19 nt, Artificial Sequence
  Description of Artificial Sequence: Synthetic oligonucleotide
gugguccgacaucuuggcg

SEQ ID NO: 265622 - RNA, 19 nt, Artificial Sequence
  Description of Artificial Sequence: Synthetic oligonucleotide
cagaguuagugaaaauaua

SEQ ID NO: 265623 - RNA, 19 nt, Artificial Sequence
  Description of Artificial Sequence: Synthetic oligonucleotide
gugggugcuaauucacaga

SEQ ID NO: 265624 - RNA, 19 nt, Artificial Sequence
  Description of Artificial Sequence: Synthetic oligonucleotide
ugccuuccgcgcaccauca

SEQ ID NO: 265625 - RNA, 19 nt, Artificial Sequence
  Description of Artificial Sequence: Synthetic oligonucleotide
cuugaacugcucgcgcgag

SEQ ID NO: 265626 - RNA, 19 nt, Artificial Sequence
  Description of Artificial Sequence: Synthetic oligonucleotide
cacggcagacuaccagucc

SEQ ID NO: 265627 - RNA, 19 nt, Artificial Sequence
  Description of Artificial Sequence: Synthetic oligonucleotide
ugccgcuagccaucgcgcc

SEQ ID NO: 265628 - RNA, 19 nt, Artificial Sequence
  Description of Artificial Sequence: Synthetic oligonucleotide
cugagguaaccuuucuuua

SEQ ID NO: 265629 - RNA, 19 nt, Artificial Sequence
  Description of Artificial Sequence: Synthetic oligonucleotide
cagauagacacuagccucu

SEQ ID NO: 265630 - RNA, 19 nt, Artificial Sequence
  Description of Artificial Sequence: Synthetic oligonucleotide
aagcggucccgugacuugu

SEQ ID NO: 265631 - RNA, 19 nt, Artificial Sequence
  Description of Artificial Sequence: Synthetic oligonucleotide
ucgccacgagccuaccaga

SEQ ID NO: 265632 - RNA, 19 nt, Artificial Sequence
  Description of Artificial Sequence: Synthetic oligonucleotide
ggcuucaagacuguaaaua

SEQ ID NO: 265633 - RNA, 19 nt, Artificial Sequence
  Description of Artificial Sequence: Synthetic oligonucleotide
agccuucagacacggcgca

SEQ ID NO: 265634 - RNA, 19 nt, Artificial Sequence
  Description of Artificial Sequence: Synthetic oligonucleotide
gacucggcaccagcgcccg

SEQ ID NO: 265635 - RNA, 19 nt, Artificial Sequence
  Description of Artificial Sequence: Synthetic oligonucleotide
uuccgcgcaccaucaugcc

SEQ ID NO: 265636 - RNA, 19 nt, Artificial Sequence
  Description of Artificial Sequence: Synthetic oligonucleotide
gccuucgaagagcaccggg

SEQ ID NO: 265637 - RNA, 19 nt, Artificial Sequence
  Description of Artificial Sequence: Synthetic oligonucleotide
gacgcccagcuugaacugc

SEQ ID NO: 265638 - RNA, 19 nt, Artificial Sequence
  Description of Artificial Sequence: Synthetic oligonucleotide
gaauugaggcucgguggca

SEQ ID NO: 265639 - RNA, 19 nt, Artificial Sequence
  Description of Artificial Sequence: Synthetic oligonucleotide
ucugcaccgccuugccuuc

SEQ ID NO: 265640 - RNA, 19 nt, Artificial Sequence
  Description of Artificial Sequence: Synthetic oligonucleotide
gagggcgggacggggaggc

SEQ ID NO: 265641 - RNA, 19 nt, Artificial Sequence
  Description of Artificial Sequence: Synthetic oligonucleotide
ugggcaccggggauucacu

SEQ ID NO: 265642 - RNA, 19 nt, Artificial Sequence
  Description of Artificial Sequence: Synthetic oligonucleotide
cucuuaucacaccauguau

SEQ ID NO: 265643 - RNA, 19 nt, Artificial Sequence
  Description of Artificial Sequence: Synthetic oligonucleotide
accacgcucauggcgccuc

SEQ ID NO: 265644 - RNA, 19 nt, Artificial Sequence
  Description of Artificial Sequence: Synthetic oligonucleotide
agccggagaagccgccuca

SEQ ID NO: 265645 - RNA, 19 nt, Artificial Sequence
  Description of Artificial Sequence: Synthetic oligonucleotide
ccuuaaagccugagauagc

SEQ ID NO: 265646 - RNA, 19 nt, Artificial Sequence
  Description of Artificial Sequence: Synthetic oligonucleotide
ggugcagccuucagacacg

SEQ ID NO: 265647 - RNA, 19 nt, Artificial Sequence
  Description of Artificial Sequence: Synthetic oligonucleotide
cauacucuuaucacaccau

SEQ ID NO: 265648 - RNA, 19 nt, Artificial Sequence
  Description of Artificial Sequence: Synthetic oligonucleotide
acuaccaguccgcgccccu

SEQ ID NO: 265649 - RNA, 19 nt, Artificial Sequence
  Description of Artificial Sequence: Synthetic oligonucleotide
guggguuucccggcgcugc

SEQ ID NO: 265650 - RNA, 19 nt, Artificial Sequence
  Description of Artificial Sequence: Synthetic oligonucleotide
caagagcacacaggcggac

SEQ ID NO: 265651 - RNA, 19 nt, Artificial Sequence
  Description of Artificial Sequence: Synthetic oligonucleotide
guuucgagacaggcccugc

SEQ ID NO: 265652 - RNA, 19 nt, Artificial Sequence
  Description of Artificial Sequence: Synthetic oligonucleotide
gcggggucaugucagccag

SEQ ID NO: 265653 - RNA, 19 nt, Artificial Sequence
  Description of Artificial Sequence: Synthetic oligonucleotide
gcccgcgacaagcucuucg

SEQ ID NO: 265654 - RNA, 19 nt, Artificial Sequence
  Description of Artificial Sequence: Synthetic oligonucleotide
gcacgcguccgucaggaac

SEQ ID NO: 265655 - RNA, 19 nt, Artificial Sequence
  Description of Artificial Sequence: Synthetic oligonucleotide
guccccugccucuccgaag

SEQ ID NO: 265656 - RNA, 19 nt, Artificial Sequence
  Description of Artificial Sequence: Synthetic oligonucleotide
ccgcgcaccaucaugccac

SEQ ID NO: 265657 - RNA, 19 nt, Artificial Sequence
  Description of Artificial Sequence: Synthetic oligonucleotide
uaggccgcaugugcagagc

SEQ ID NO: 265658 - RNA, 19 nt, Artificial Sequence
  Description of Artificial Sequence: Synthetic oligonucleotide
gcaccggggauucacuuga

SEQ ID NO: 265659 - RNA, 19 nt, Artificial Sequence
  Description of Artificial Sequence: Synthetic oligonucleotide
gguuucccggcgcugccgc

SEQ ID NO: 265660 - RNA, 19 nt, Artificial Sequence
  Description of Artificial Sequence: Synthetic oligonucleotide
gucagcgauaccaccaagu

SEQ ID NO: 265661 - RNA, 19 nt, Artificial Sequence
  Description of Artificial Sequence: Synthetic oligonucleotide
caagcccgcgacaagcucu

SEQ ID NO: 265662 - RNA, 19 nt, Artificial Sequence
  Description of Artificial Sequence: Synthetic oligonucleotide
ggcagacuaccaguccgcg

SEQ ID NO: 265663 - RNA, 19 nt, Artificial Sequence
  Description of Artificial Sequence: Synthetic oligonucleotide
cacgcguccgucaggaacu

SEQ ID NO: 265664 - RNA, 19 nt, Artificial Sequence
  Description of Artificial Sequence: Synthetic oligonucleotide
agaagccgccucaccagug

SEQ ID NO: 265665 - RNA, 19 nt, Artificial Sequence
  Description of Artificial Sequence: Synthetic oligonucleotide
uggaguguguagggguaau

SEQ ID NO: 265666 - RNA, 19 nt, Artificial Sequence
  Description of Artificial Sequence: Synthetic oligonucleotide
aguggguuucccggcgcug

SEQ ID NO: 265667 - RNA, 19 nt, Artificial Sequence
  Description of Artificial Sequence: Synthetic oligonucleotide
gagaagccgccucaccagu

SEQ ID NO: 265668 - RNA, 19 nt, Artificial Sequence
  Description of Artificial Sequence: Synthetic oligonucleotide
cccgugacuugucacuggc

SEQ ID NO: 265669 - RNA, 19 nt, Artificial Sequence
  Description of Artificial Sequence: Synthetic oligonucleotide
gccugagauagcagggugc

SEQ ID NO: 265670 - RNA, 19 nt, Artificial Sequence
  Description of Artificial Sequence: Synthetic oligonucleotide
ggagucaccuaugauuucu

SEQ ID NO: 265671 - RNA, 19 nt, Artificial Sequence
  Description of Artificial Sequence: Synthetic oligonucleotide
cugcacgacccaggaauug

SEQ ID NO: 265672 - RNA, 19 nt, Artificial Sequence
  Description of Artificial Sequence: Synthetic oligonucleotide
uggcuagggcgcacgcguc

SEQ ID NO: 265673 - RNA, 19 nt, Artificial Sequence
  Description of Artificial Sequence: Synthetic oligonucleotide
ugccacccaccgcggcggg

SEQ ID NO: 265674 - RNA, 19 nt, Artificial Sequence
  Description of Artificial Sequence: Synthetic oligonucleotide
cuggcuagggcgcacgcgu

SEQ ID NO: 265675 - RNA, 19 nt, Artificial Sequence
  Description of Artificial Sequence: Synthetic oligonucleotide
caccauguauacucuaauu

SEQ ID NO: 265676 - RNA, 19 nt, Artificial Sequence
  Description of Artificial Sequence: Synthetic oligonucleotide
agggcgcacgcguccguca

SEQ ID NO: 265677 - RNA, 19 nt, Artificial Sequence
  Description of Artificial Sequence: Synthetic oligonucleotide
ccuuccgcgcaccaucaug

SEQ ID NO: 265678 - RNA, 19 nt, Artificial Sequence
  Description of Artificial Sequence: Synthetic oligonucleotide
gcgugucacacgguagcgg

SEQ ID NO: 265679 - RNA, 19 nt, Artificial Sequence
  Description of Artificial Sequence: Synthetic oligonucleotide
ggccgggcgucuuggggcg

SEQ ID NO: 265680 - RNA, 19 nt, Artificial Sequence
  Description of Artificial Sequence: Synthetic oligonucleotide
ccacgagccuaccagaaaa

SEQ ID NO: 265681 - RNA, 19 nt, Artificial Sequence
  Description of Artificial Sequence: Synthetic oligonucleotide
ggugcgcgcgaugauggug

SEQ ID NO: 265682 - RNA, 19 nt, Artificial Sequence
  Description of Artificial Sequence: Synthetic oligonucleotide
ggcacggcagacuaccagu

SEQ ID NO: 265683 - RNA, 19 nt, Artificial Sequence
  Description of Artificial Sequence: Synthetic oligonucleotide
gcuagggcgcacgcguccg

SEQ ID NO: 265684 - RNA, 19 nt, Artificial Sequence
  Description of Artificial Sequence: Synthetic oligonucleotide
gcggcccauguugagcugg

SEQ ID NO: 265685 - RNA, 19 nt, Artificial Sequence
  Description of Artificial Sequence: Synthetic oligonucleotide
gccgcuagccaucgcgccc

SEQ ID NO: 265686 - RNA, 19 nt, Artificial Sequence
  Description of Artificial Sequence: Synthetic oligonucleotide
cccaucggggugcugcgcc

SEQ ID NO: 265687 - RNA, 19 nt, Artificial Sequence
  Description of Artificial Sequence: Synthetic oligonucleotide
gcccaagcccgcgacaagc

SEQ ID NO: 265688 - RNA, 19 nt, Artificial Sequence
  Description of Artificial Sequence: Synthetic oligonucleotide
aggcccuuggugcgcgcga

SEQ ID NO: 265689 - RNA, 19 nt, Artificial Sequence
  Description of Artificial Sequence: Synthetic oligonucleotide
caucggggugcugcgccag

SEQ ID NO: 265690 - RNA, 19 nt, Artificial Sequence
  Description of Artificial Sequence: Synthetic oligonucleotide
agguuucgagacaggcccu

SEQ ID NO: 265691 - RNA, 19 nt, Artificial Sequence
  Description of Artificial Sequence: Synthetic oligonucleotide
ggucccgugacuugucacu

SEQ ID NO: 265692 - RNA, 19 nt, Artificial Sequence
  Description of Artificial Sequence: Synthetic oligonucleotide
cucguggcggcagcguguc

SEQ ID NO: 265693 - RNA, 19 nt, Artificial Sequence
  Description of Artificial Sequence: Synthetic oligonucleotide
aagcccgcgacaagcucuu

SEQ ID NO: 265694 - RNA, 19 nt, Artificial Sequence
  Description of Artificial Sequence: Synthetic oligonucleotide
caccggggauucacuugac

SEQ ID NO: 265695 - RNA, 19 nt, Artificial Sequence
  Description of Artificial Sequence: Synthetic oligonucleotide
agcggucccgugacuuguc

SEQ ID NO: 265696 - RNA, 19 nt, Artificial Sequence
  Description of Artificial Sequence: Synthetic oligonucleotide
ggcgggacggggaggcugg

SEQ ID NO: 265697 - RNA, 19 nt, Artificial Sequence
  Description of Artificial Sequence: Synthetic oligonucleotide
guggcggcagcgugucaca

SEQ ID NO: 265698 - RNA, 19 nt, Artificial Sequence
  Description of Artificial Sequence: Synthetic oligonucleotide
ggaguguguagggguaauc

SEQ ID NO: 265699 - RNA, 19 nt, Artificial Sequence
  Description of Artificial Sequence: Synthetic oligonucleotide
cgccucgcuagacagcagc

SEQ ID NO: 265700 - RNA, 19 nt, Artificial Sequence
  Description of Artificial Sequence: Synthetic oligonucleotide
uagggcgcacgcguccguc

SEQ ID NO: 265701 - RNA, 19 nt, Artificial Sequence
  Description of Artificial Sequence: Synthetic oligonucleotide
gggagucaccuaugauuuc

SEQ ID NO: 265702 - RNA, 19 nt, Artificial Sequence
  Description of Artificial Sequence: Synthetic oligonucleotide
cacgcucauggcgccuccc

SEQ ID NO: 265703 - RNA, 19 nt, Artificial Sequence
  Description of Artificial Sequence: Synthetic oligonucleotide
gugcgcgcgaugauggugu

SEQ ID NO: 265704 - RNA, 19 nt, Artificial Sequence
  Description of Artificial Sequence: Synthetic oligonucleotide
gugucacacgguagcgguc

SEQ ID NO: 265705 - RNA, 19 nt, Artificial Sequence
  Description of Artificial Sequence: Synthetic oligonucleotide
ggguuucccggcgcugccg

SEQ ID NO: 265706 - RNA, 19 nt, Artificial Sequence
  Description of Artificial Sequence: Synthetic oligonucleotide
ggcgcacgcguccgucagg

SEQ ID NO: 265707 - RNA, 19 nt, Artificial Sequence
  Description of Artificial Sequence: Synthetic oligonucleotide
cuucaccucgcgcacgcau

SEQ ID NO: 265708 - RNA, 19 nt, Artificial Sequence
  Description of Artificial Sequence: Synthetic oligonucleotide
aggcggacaccacgcucau

SEQ ID NO: 265709 - RNA, 19 nt, Artificial Sequence
  Description of Artificial Sequence: Synthetic oligonucleotide
ucguggcggcagcguguca

SEQ ID NO: 265710 - RNA, 19 nt, Artificial Sequence
  Description of Artificial Sequence: Synthetic oligonucleotide
cggcagacuaccaguccgc

SEQ ID NO: 265711 - RNA, 19 nt, Artificial Sequence
  Description of Artificial Sequence: Synthetic oligonucleotide
caccucgcgcacgcaugcc

SEQ ID NO: 265712 - RNA, 19 nt, Artificial Sequence
  Description of Artificial Sequence: Synthetic oligonucleotide
cccaauuaauagaguugaa

SEQ ID NO: 265713 - RNA, 19 nt, Artificial Sequence
  Description of Artificial Sequence: Synthetic oligonucleotide
ggccuucgaagagcaccgg

SEQ ID NO: 265714 - RNA, 19 nt, Artificial Sequence
  Description of Artificial Sequence: Synthetic oligonucleotide
gcgcaggccgaguuccuca

SEQ ID NO: 265715 - RNA, 19 nt, Artificial Sequence
  Description of Artificial Sequence: Synthetic oligonucleotide
cagggccgcgcugccuucc

SEQ ID NO: 265716 - RNA, 19 nt, Artificial Sequence
  Description of Artificial Sequence: Synthetic oligonucleotide
ccaugucuaaggagugaaa

SEQ ID NO: 265717 - RNA, 19 nt, Artificial Sequence
  Description of Artificial Sequence: Synthetic oligonucleotide
acgcucgcuggaaccguga

SEQ ID NO: 265718 - RNA, 19 nt, Artificial Sequence
  Description of Artificial Sequence: Synthetic oligonucleotide
gcgcgaugauggugucccg

SEQ ID NO: 265719 - RNA, 19 nt, Artificial Sequence
  Description of Artificial Sequence: Synthetic oligonucleotide
gccacgagccuaccagaaa

SEQ ID NO: 265720 - RNA, 19 nt, Artificial Sequence
  Description of Artificial Sequence: Synthetic oligonucleotide
gcacccggcguggccacgg

SEQ ID NO: 265721 - RNA, 19 nt, Artificial Sequence
  Description of Artificial Sequence: Synthetic oligonucleotide
ggcgcugccgcuagccauc

SEQ ID NO: 265722 - RNA, 19 nt, Artificial Sequence
  Description of Artificial Sequence: Synthetic oligonucleotide
cacccggcguggccacggc

SEQ ID NO: 265723 - RNA, 19 nt, Artificial Sequence
  Description of Artificial Sequence: Synthetic oligonucleotide
ccgacggcgcucccaggag

SEQ ID NO: 265724 - RNA, 19 nt, Artificial Sequence
  Description of Artificial Sequence: Synthetic oligonucleotide
gccucgcuagacagcagca

SEQ ID NO: 265725 - RNA, 19 nt, Artificial Sequence
  Description of Artificial Sequence: Synthetic oligonucleotide
cgcacgcaugccagcagug

SEQ ID NO: 265726 - RNA, 19 nt, Artificial Sequence
  Description of Artificial Sequence: Synthetic oligonucleotide
cgugucacacgguagcggu

SEQ ID NO: 265727 - RNA, 19 nt, Artificial Sequence
  Description of Artificial Sequence: Synthetic oligonucleotide
agcccgcgacaagcucuuc

SEQ ID NO: 265728 - RNA, 19 nt, Artificial Sequence
  Description of Artificial Sequence: Synthetic oligonucleotide
gcggucccgugacuuguca

SEQ ID NO: 265729 - RNA, 19 nt, Artificial Sequence
  Description of Artificial Sequence: Synthetic oligonucleotide
gcuagccaucgcgcccagg

SEQ ID NO: 265730 - RNA, 19 nt, Artificial Sequence
  Description of Artificial Sequence: Synthetic oligonucleotide
gcgcacgcguccgucagga

SEQ ID NO: 265731 - RNA, 19 nt, Artificial Sequence
  Description of Artificial Sequence: Synthetic oligonucleotide
gcgggcccaagcccgcgac

SEQ ID NO: 265732 - RNA, 19 nt, Artificial Sequence
  Description of Artificial Sequence: Synthetic oligonucleotide
gggcgcgccucgcuagaca

SEQ ID NO: 265733 - RNA, 19 nt, Artificial Sequence
  Description of Artificial Sequence: Synthetic oligonucleotide
ccacgcucauggcgccucc

SEQ ID NO: 265734 - RNA, 19 nt, Artificial Sequence
  Description of Artificial Sequence: Synthetic oligonucleotide
ccgaguuccucagccucuc

SEQ ID NO: 265735 - RNA, 19 nt, Artificial Sequence
  Description of Artificial Sequence: Synthetic oligonucleotide
gcacucggucagcgauacc

SEQ ID NO: 265736 - RNA, 19 nt, Artificial Sequence
  Description of Artificial Sequence: Synthetic oligonucleotide
cgccucaccaguggguuuc

SEQ ID NO: 265737 - RNA, 19 nt, Artificial Sequence
  Description of Artificial Sequence: Synthetic oligonucleotide
ggcgcaggccgaguuccuc

SEQ ID NO: 265738 - RNA, 19 nt, Artificial Sequence
  Description of Artificial Sequence: Synthetic oligonucleotide
cgcgagaagcggucccgug

SEQ ID NO: 265739 - RNA, 19 nt, Artificial Sequence
  Description of Artificial Sequence: Synthetic oligonucleotide
ccgccagguaggccgcaug

SEQ ID NO: 265740 - RNA, 19 nt, Artificial Sequence
  Description of Artificial Sequence: Synthetic oligonucleotide
acgcguccgucaggaacuu

SEQ ID NO: 265741 - RNA, 19 nt, Artificial Sequence
  Description of Artificial Sequence: Synthetic oligonucleotide
cuccgaagcggcccauguu

SEQ ID NO: 265742 - RNA, 19 nt, Artificial Sequence
  Description of Artificial Sequence: Synthetic oligonucleotide
ggcggacaccacgcucaug

SEQ ID NO: 265743 - RNA, 19 nt, Artificial Sequence
  Description of Artificial Sequence: Synthetic oligonucleotide
ggcgggcccaagcccgcga

SEQ ID NO: 265744 - RNA, 19 nt, Artificial Sequence
  Description of Artificial Sequence: Synthetic oligonucleotide
cuagggcgcacgcguccgu

SEQ ID NO: 265745 - RNA, 19 nt, Artificial Sequence
  Description of Artificial Sequence: Synthetic oligonucleotide
cgcgcacgcaugccagcag

SEQ ID NO: 265746 - RNA, 19 nt, Artificial Sequence
  Description of Artificial Sequence: Synthetic oligonucleotide
gccgaguuccucagccucu

SEQ ID NO: 265747 - RNA, 19 nt, Artificial Sequence
  Description of Artificial Sequence: Synthetic oligonucleotide
gggugcuaauucacagaau

SEQ ID NO: 265748 - RNA, 19 nt, Artificial Sequence
  Description of Artificial Sequence: Synthetic oligonucleotide
ccucgccacgagccuacca

SEQ ID NO: 265749 - RNA, 19 nt, Artificial Sequence
  Description of Artificial Sequence: Synthetic oligonucleotide
gggcaccggggauucacuu

SEQ ID NO: 265750 - RNA, 19 nt, Artificial Sequence
  Description of Artificial Sequence: Synthetic oligonucleotide
cggucagcgauaccaccaa

SEQ ID NO: 265751 - RNA, 19 nt, Artificial Sequence
  Description of Artificial Sequence: Synthetic oligonucleotide
cgcgccccucgccacgagc

SEQ ID NO: 265752 - RNA, 19 nt, Artificial Sequence
  Description of Artificial Sequence: Synthetic oligonucleotide
ccccaucggggugcugcgc

SEQ ID NO: 265753 - RNA, 19 nt, Artificial Sequence
  Description of Artificial Sequence: Synthetic oligonucleotide
ccucguggcggcagcgugu

SEQ ID NO: 265754 - RNA, 19 nt, Artificial Sequence
  Description of Artificial Sequence: Synthetic oligonucleotide
ccgugacuugucacuggcu

SEQ ID NO: 265755 - RNA, 19 nt, Artificial Sequence
  Description of Artificial Sequence: Synthetic oligonucleotide
caccucguggcggcagcgu

SEQ ID NO: 265756 - RNA, 19 nt, Artificial Sequence
  Description of Artificial Sequence: Synthetic oligonucleotide
cccucgccacgagccuacc

SEQ ID NO: 265757 - RNA, 19 nt, Artificial Sequence
  Description of Artificial Sequence: Synthetic oligonucleotide
caccacgcucauggcgccu

SEQ ID NO: 265758 - RNA, 19 nt, Artificial Sequence
  Description of Artificial Sequence: Synthetic oligonucleotide
gggcaccaccaagguuuaa

SEQ ID NO: 265759 - RNA, 19 nt, Artificial Sequence
  Description of Artificial Sequence: Synthetic oligonucleotide
cagggcgcucacggccugu

SEQ ID NO: 265760 - RNA, 19 nt, Artificial Sequence
  Description of Artificial Sequence: Synthetic oligonucleotide
cgggcgcgccucgcuagac

SEQ ID NO: 265761 - RNA, 19 nt, Artificial Sequence
  Description of Artificial Sequence: Synthetic oligonucleotide
ccgccucaccaguggguuu

SEQ ID NO: 265762 - RNA, 19 nt, Artificial Sequence
  Description of Artificial Sequence: Synthetic oligonucleotide
cggcgcaggccgaguuccu

SEQ ID NO: 265763 - RNA, 19 nt, Artificial Sequence
  Description of Artificial Sequence: Synthetic oligonucleotide
auaggugaaaacuaagacc

SEQ ID NO: 265764 - RNA, 19 nt, Artificial Sequence
  Description of Artificial Sequence: Synthetic oligonucleotide
uuuaggacaaacauuagcu

SEQ ID NO: 265765 - RNA, 19 nt, Artificial Sequence
  Description of Artificial Sequence: Synthetic oligonucleotide
auaacagcaaaguaccacc

SEQ ID NO: 265766 - RNA, 19 nt, Artificial Sequence
  Description of Artificial Sequence: Synthetic oligonucleotide
uaaaguguuacugugacag

SEQ ID NO: 265767 - RNA, 19 nt, Artificial Sequence
  Description of Artificial Sequence: Synthetic oligonucleotide
aagagcaaccaauaagugg

SEQ ID NO: 265768 - RNA, 19 nt, Artificial Sequence
  Description of Artificial Sequence: Synthetic oligonucleotide
aaaugaacccauaaagggc

SEQ ID NO: 265769 - RNA, 19 nt, Artificial Sequence
  Description of Artificial Sequence: Synthetic oligonucleotide
aagauguauaauaaaacag

SEQ ID NO: 265770 - RNA, 19 nt, Artificial Sequence
  Description of Artificial Sequence: Synthetic oligonucleotide
aaagaauagugguauaaga

SEQ ID NO: 265771 - RNA, 19 nt, Artificial Sequence
  Description of Artificial Sequence: Synthetic oligonucleotide
auuuaaucauagugaaugc

SEQ ID NO: 265772 - RNA, 19 nt, Artificial Sequence
  Description of Artificial Sequence: Synthetic oligonucleotide
agaauagugguauaagaag

SEQ ID NO: 265773 - RNA, 19 nt, Artificial Sequence
  Description of Artificial Sequence: Synthetic oligonucleotide
aaugaguuacauauauagc

SEQ ID NO: 265774 - RNA, 19 nt, Artificial Sequence
  Description of Artificial Sequence: Synthetic oligonucleotide
auaaccgcaugauaaacac

SEQ ID NO: 265775 - RNA, 19 nt, Artificial Sequence
  Description of Artificial Sequence: Synthetic oligonucleotide
agugcaucugcguuaaggc

SEQ ID NO: 265776 - RNA, 19 nt, Artificial Sequence
  Description of Artificial Sequence: Synthetic oligonucleotide
agaacauaggcucugacca

SEQ ID NO: 265777 - RNA, 19 nt, Artificial Sequence
  Description of Artificial Sequence: Synthetic oligonucleotide
uagauuauguauucaagug

SEQ ID NO: 265778 - RNA, 19 nt, Artificial Sequence
  Description of Artificial Sequence: Synthetic oligonucleotide
aagaugguauucuuauuuc

SEQ ID NO: 265779 - RNA, 19 nt, Artificial Sequence
  Description of Artificial Sequence: Synthetic oligonucleotide
agagcaaccaauaaguggg

SEQ ID NO: 265780 - RNA, 19 nt, Artificial Sequence
  Description of Artificial Sequence: Synthetic oligonucleotide
ugagguauaagaagaagcu

SEQ ID NO: 265781 - RNA, 19 nt, Artificial Sequence
  Description of Artificial Sequence: Synthetic oligonucleotide
ucuaacagagcuauugcug

SEQ ID NO: 265782 - RNA, 19 nt, Artificial Sequence
  Description of Artificial Sequence: Synthetic oligonucleotide
agaugguauucuuauuucc

SEQ ID NO: 265783 - RNA, 19 nt, Artificial Sequence
  Description of Artificial Sequence: Synthetic oligonucleotide
aagcuauccccauacacuc

SEQ ID NO: 265784 - RNA, 19 nt, Artificial Sequence
  Description of Artificial Sequence: Synthetic oligonucleotide
ucgaucaucacacauuugu

SEQ ID NO: 265785 - RNA, 19 nt, Artificial Sequence
  Description of Artificial Sequence: Synthetic oligonucleotide
cuuaaauuaguauguuccg

SEQ ID NO: 265786 - RNA, 19 nt, Artificial Sequence
  Description of Artificial Sequence: Synthetic oligonucleotide
uccggaauaaacaaggcaa

SEQ ID NO: 265787 - RNA, 19 nt, Artificial Sequence
  Description of Artificial Sequence: Synthetic oligonucleotide
aaagaugacaauaaccgca

SEQ ID NO: 265788 - RNA, 19 nt, Artificial Sequence
  Description of Artificial Sequence: Synthetic oligonucleotide
aaaagaauagugguauaag

SEQ ID NO: 265789 - RNA, 19 nt, Artificial Sequence
  Description of Artificial Sequence: Synthetic oligonucleotide
uuaggcaguaaccacacac

SEQ ID NO: 265790 - RNA, 19 nt, Artificial Sequence
  Description of Artificial Sequence: Synthetic oligonucleotide
aaggccacuauauauauuu

SEQ ID NO: 265791 - RNA, 19 nt, Artificial Sequence
  Description of Artificial Sequence: Synthetic oligonucleotide
ugucugagguauaagaaga

SEQ ID NO: 265792 - RNA, 19 nt, Artificial Sequence
  Description of Artificial Sequence: Synthetic oligonucleotide
ugaguuacauauauagccu

SEQ ID NO: 265793 - RNA, 19 nt, Artificial Sequence
  Description of Artificial Sequence: Synthetic oligonucleotide
uuugagaccuuauuuaauc

SEQ ID NO: 265794 - RNA, 19 nt, Artificial Sequence
  Description of Artificial Sequence: Synthetic oligonucleotide
aguaauuguauaaagcucu

SEQ ID NO: 265795 - RNA, 19 nt, Artificial Sequence
  Description of Artificial Sequence: Synthetic oligonucleotide
cacuauggaaucuuggccc

SEQ ID NO: 265796 - RNA, 19 nt, Artificial Sequence
  Description of Artificial Sequence: Synthetic oligonucleotide
ugcuacauaugcaaauacc

SEQ ID NO: 265797 - RNA, 19 nt, Artificial Sequence
  Description of Artificial Sequence: Synthetic oligonucleotide
uaggacaaacauuagcucu

SEQ ID NO: 265798 - RNA, 19 nt, Artificial Sequence
  Description of Artificial Sequence: Synthetic oligonucleotide
aguauguuccggaauaaac

SEQ ID NO: 265799 - RNA, 19 nt, Artificial Sequence
  Description of Artificial Sequence: Synthetic oligonucleotide
aauguauguuuagggaagg

SEQ ID NO: 265800 - RNA, 19 nt, Artificial Sequence
  Description of Artificial Sequence: Synthetic oligonucleotide
uuaaagaugcaaagggguc

SEQ ID NO: 265801 - RNA, 19 nt, Artificial Sequence
  Description of Artificial Sequence: Synthetic oligonucleotide
uccaauugaucucaugagu

SEQ ID NO: 265802 - RNA, 19 nt, Artificial Sequence
  Description of Artificial Sequence: Synthetic oligonucleotide
aagacuauggucugugcaa

SEQ ID NO: 265803 - RNA, 19 nt, Artificial Sequence
  Description of Artificial Sequence: Synthetic oligonucleotide
uuccaauugaucucaugag

SEQ ID NO: 265804 - RNA, 19 nt, Artificial Sequence
  Description of Artificial Sequence: Synthetic oligonucleotide
uauguuccggaauaaacaa

SEQ ID NO: 265805 - RNA, 19 nt, Artificial Sequence
  Description of Artificial Sequence: Synthetic oligonucleotide
ugucuaacagagcuauugc

SEQ ID NO: 265806 - RNA, 19 nt, Artificial Sequence
  Description of Artificial Sequence: Synthetic oligonucleotide
aagaauagugguauaagaa

SEQ ID NO: 265807 - RNA, 19 nt, Artificial Sequence
  Description of Artificial Sequence: Synthetic oligonucleotide
gacaauaaccgcaugauaa

SEQ ID NO: 265808 - RNA, 19 nt, Artificial Sequence
  Description of Artificial Sequence: Synthetic oligonucleotide
aacaguagugaauaauguu

SEQ ID NO: 265809 - RNA, 19 nt, Artificial Sequence
  Description of Artificial Sequence: Synthetic oligonucleotide
uuauguauucaaguguuga

SEQ ID NO: 265810 - RNA, 19 nt, Artificial Sequence
  Description of Artificial Sequence: Synthetic oligonucleotide
agcaaaguaccaccagggc

SEQ ID NO: 265811 - RNA, 19 nt, Artificial Sequence
  Description of Artificial Sequence: Synthetic oligonucleotide
ugauuggcaguucuuuaag

SEQ ID NO: 265812 - RNA, 19 nt, Artificial Sequence
  Description of Artificial Sequence: Synthetic oligonucleotide
uuggugcuaauaaacaaaa

SEQ ID NO: 265813 - RNA, 19 nt, Artificial Sequence
  Description of Artificial Sequence: Synthetic oligonucleotide
aauaaguggggcacugagg

SEQ ID NO: 265814 - RNA, 19 nt, Artificial Sequence
  Description of Artificial Sequence: Synthetic oligonucleotide
uagugaauaauguuuuaaa

SEQ ID NO: 265815 - RNA, 19 nt, Artificial Sequence
  Description of Artificial Sequence: Synthetic oligonucleotide
caauaauggacagaaugcc

SEQ ID NO: 265816 - RNA, 19 nt, Artificial Sequence
  Description of Artificial Sequence: Synthetic oligonucleotide
aauaaccgcaugauaaaca

SEQ ID NO: 265817 - RNA, 19 nt, Artificial Sequence
  Description of Artificial Sequence: Synthetic oligonucleotide
uacauauauagccuuuaau

SEQ ID NO: 265818 - RNA, 19 nt, Artificial Sequence
  Description of Artificial Sequence: Synthetic oligonucleotide
aauaauggacagaaugcca

SEQ ID NO: 265819 - RNA, 19 nt, Artificial Sequence
  Description of Artificial Sequence: Synthetic oligonucleotide
uagugcaucugcguuaagg

SEQ ID NO: 265820 - RNA, 19 nt, Artificial Sequence
  Description of Artificial Sequence: Synthetic oligonucleotide
uauguuuagggaagguuuc

SEQ ID NO: 265821 - RNA, 19 nt, Artificial Sequence
  Description of Artificial Sequence: Synthetic oligonucleotide
cagcaaaguaccaccaggg

SEQ ID NO: 265822 - RNA, 19 nt, Artificial Sequence
  Description of Artificial Sequence: Synthetic oligonucleotide
agcaguucgugaaacaagg

SEQ ID NO: 265823 - RNA, 19 nt, Artificial Sequence
  Description of Artificial Sequence: Synthetic oligonucleotide
gcaugauaaacacuagggg

SEQ ID NO: 265824 - RNA, 19 nt, Artificial Sequence
  Description of Artificial Sequence: Synthetic oligonucleotide
uuugaauuauuugacccaa

SEQ ID NO: 265825 - RNA, 19 nt, Artificial Sequence
  Description of Artificial Sequence: Synthetic oligonucleotide
uugagaccuuauuuaauca

SEQ ID NO: 265826 - RNA, 19 nt, Artificial Sequence
  Description of Artificial Sequence: Synthetic oligonucleotide
gauacugcgguucgcggcc

SEQ ID NO: 265827 - RNA, 19 nt, Artificial Sequence
  Description of Artificial Sequence: Synthetic oligonucleotide
cuauaggugaaaacuaaga

SEQ ID NO: 265828 - RNA, 19 nt, Artificial Sequence
  Description of Artificial Sequence: Synthetic oligonucleotide
augucuaacagagcuauug

SEQ ID NO: 265829 - RNA, 19 nt, Artificial Sequence
  Description of Artificial Sequence: Synthetic oligonucleotide
auggaaauggaauguacau

SEQ ID NO: 265830 - RNA, 19 nt, Artificial Sequence
  Description of Artificial Sequence: Synthetic oligonucleotide
uuaguucccacggaguuca

SEQ ID NO: 265831 - RNA, 19 nt, Artificial Sequence
  Description of Artificial Sequence: Synthetic oligonucleotide
caaugacucugguacagcc

SEQ ID NO: 265832 - RNA, 19 nt, Artificial Sequence
  Description of Artificial Sequence: Synthetic oligonucleotide
ucuuuauccuagugcaucu

SEQ ID NO: 265833 - RNA, 19 nt, Artificial Sequence
  Description of Artificial Sequence: Synthetic oligonucleotide
gagguccuuaugauuaugg

SEQ ID NO: 265834 - RNA, 19 nt, Artificial Sequence
  Description of Artificial Sequence: Synthetic oligonucleotide
aguucgugaaacaagggca

SEQ ID NO: 265835 - RNA, 19 nt, Artificial Sequence
  Description of Artificial Sequence: Synthetic oligonucleotide
uccugaaaggccacuauau

SEQ ID NO: 265836 - RNA, 19 nt, Artificial Sequence
  Description of Artificial Sequence: Synthetic oligonucleotide
agcaugauacugcgguucg

SEQ ID NO: 265837 - RNA, 19 nt, Artificial Sequence
  Description of Artificial Sequence: Synthetic oligonucleotide
uagugaaugcuccaaguuu

SEQ ID NO: 265838 - RNA, 19 nt, Artificial Sequence
  Description of Artificial Sequence: Synthetic oligonucleotide
gguuucaugcaauaccacc

SEQ ID NO: 265839 - RNA, 19 nt, Artificial Sequence
  Description of Artificial Sequence: Synthetic oligonucleotide
ugagaccuuauuuaaucau

SEQ ID NO: 265840 - RNA, 19 nt, Artificial Sequence
  Description of Artificial Sequence: Synthetic oligonucleotide
agaccuuauuuaaucauag

SEQ ID NO: 265841 - RNA, 19 nt, Artificial Sequence
  Description of Artificial Sequence: Synthetic oligonucleotide
ugauacugcgguucgcggc

SEQ ID NO: 265842 - RNA, 19 nt, Artificial Sequence
  Description of Artificial Sequence: Synthetic oligonucleotide
uuucaugcaauaccaccaa

SEQ ID NO: 265843 - RNA, 19 nt, Artificial Sequence
  Description of Artificial Sequence: Synthetic oligonucleotide
caugauacugcgguucgcg

SEQ ID NO: 265844 - RNA, 19 nt, Artificial Sequence
  Description of Artificial Sequence: Synthetic oligonucleotide
aggauuuccggcccaaaca

SEQ ID NO: 265845 - RNA, 19 nt, Artificial Sequence
  Description of Artificial Sequence: Synthetic oligonucleotide
ccuuauuuaaucauaguga

SEQ ID NO: 265846 - RNA, 19 nt, Artificial Sequence
  Description of Artificial Sequence: Synthetic oligonucleotide
uccuuaugauuauggaaac

SEQ ID NO: 265847 - RNA, 19 nt, Artificial Sequence
  Description of Artificial Sequence: Synthetic oligonucleotide
acaauaaccgcaugauaaa

SEQ ID NO: 265848 - RNA, 19 nt, Artificial Sequence
  Description of Artificial Sequence: Synthetic oligonucleotide
uuaccauccucgacucccg

SEQ ID NO: 265849 - RNA, 19 nt, Artificial Sequence
  Description of Artificial Sequence: Synthetic oligonucleotide
acuauaggugaaaacuaag

SEQ ID NO: 265850 - RNA, 19 nt, Artificial Sequence
  Description of Artificial Sequence: Synthetic oligonucleotide
cugucaguaguccccaagc

SEQ ID NO: 265851 - RNA, 19 nt, Artificial Sequence
  Description of Artificial Sequence: Synthetic oligonucleotide
agggcuagaucuucauuag

SEQ ID NO: 265852 - RNA, 19 nt, Artificial Sequence
  Description of Artificial Sequence: Synthetic oligonucleotide
guccuuaugauuauggaaa

SEQ ID NO: 265853 - RNA, 19 nt, Artificial Sequence
  Description of Artificial Sequence: Synthetic oligonucleotide
guuucaugcaauaccacca

SEQ ID NO: 265854 - RNA, 19 nt, Artificial Sequence
  Description of Artificial Sequence: Synthetic oligonucleotide
uauccuagugcaucugcgu

SEQ ID NO: 265855 - RNA, 19 nt, Artificial Sequence
  Description of Artificial Sequence: Synthetic oligonucleotide
augauacugcgguucgcgg

SEQ ID NO: 265856 - RNA, 19 nt, Artificial Sequence
  Description of Artificial Sequence: Synthetic oligonucleotide
gcaagaaggauuuccggcc

SEQ ID NO: 265857 - RNA, 19 nt, Artificial Sequence
  Description of Artificial Sequence: Synthetic oligonucleotide
cuuguguacugugaggaug

SEQ ID NO: 265858 - RNA, 19 nt, Artificial Sequence
  Description of Artificial Sequence: Synthetic oligonucleotide
aaacuuaaauuaguauguu

SEQ ID NO: 265859 - RNA, 19 nt, Artificial Sequence
  Description of Artificial Sequence: Synthetic oligonucleotide
agcaaccaauaaguggggc

SEQ ID NO: 265860 - RNA, 19 nt, Artificial Sequence
  Description of Artificial Sequence: Synthetic oligonucleotide
acuauggaaucuuggccca

SEQ ID NO: 265861 - RNA, 19 nt, Artificial Sequence
  Description of Artificial Sequence: Synthetic oligonucleotide
uuaucugucugagguauaa

SEQ ID NO: 265862 - RNA, 19 nt, Artificial Sequence
  Description of Artificial Sequence: Synthetic oligonucleotide
auuuccggcccaaacauca

SEQ ID NO: 265863 - RNA, 19 nt, Artificial Sequence
  Description of Artificial Sequence: Synthetic oligonucleotide
aaugacucugguacagcca

SEQ ID NO: 265864 - RNA, 19 nt, Artificial Sequence
  Description of Artificial Sequence: Synthetic oligonucleotide
cacaucaguaauuguauaa

SEQ ID NO: 265865 - RNA, 19 nt, Artificial Sequence
  Description of Artificial Sequence: Synthetic oligonucleotide
caauaaccgcaugauaaac

SEQ ID NO: 265866 - RNA, 19 nt, Artificial Sequence
  Description of Artificial Sequence: Synthetic oligonucleotide
cuuuaaguuccacauggaa

SEQ ID NO: 265867 - RNA, 19 nt, Artificial Sequence
  Description of Artificial Sequence: Synthetic oligonucleotide
gauuauguauucaaguguu

SEQ ID NO: 265868 - RNA, 19 nt, Artificial Sequence
  Description of Artificial Sequence: Synthetic oligonucleotide
aggacaaacauuagcucug

SEQ ID NO: 265869 - RNA, 19 nt, Artificial Sequence
  Description of Artificial Sequence: Synthetic oligonucleotide
uaaccgcaugauaaacacu

SEQ ID NO: 265870 - RNA, 19 nt, Artificial Sequence
  Description of Artificial Sequence: Synthetic oligonucleotide
agguccuuaugauuaugga

SEQ ID NO: 265871 - RNA, 19 nt, Artificial Sequence
  Description of Artificial Sequence: Synthetic oligonucleotide
cauuguagauggaaaugga

SEQ ID NO: 265872 - RNA, 19 nt, Artificial Sequence
  Description of Artificial Sequence: Synthetic oligonucleotide
caagacuauggucugugca

SEQ ID NO: 265873 - RNA, 19 nt, Artificial Sequence
  Description of Artificial Sequence: Synthetic oligonucleotide
ccagcaguacugaacaggc

SEQ ID NO: 265874 - RNA, 19 nt, Artificial Sequence
  Description of Artificial Sequence: Synthetic oligonucleotide
agugcggucccgccacuac

SEQ ID NO: 265875 - RNA, 19 nt, Artificial Sequence
  Description of Artificial Sequence: Synthetic oligonucleotide
uuuaguucccacggaguuc

SEQ ID NO: 265876 - RNA, 19 nt, Artificial Sequence
  Description of Artificial Sequence: Synthetic oligonucleotide
aguagugaauaauguuuua

SEQ ID NO: 265877 - RNA, 19 nt, Artificial Sequence
  Description of Artificial Sequence: Synthetic oligonucleotide
aggccauucaucagaaaug

SEQ ID NO: 265878 - RNA, 19 nt, Artificial Sequence
  Description of Artificial Sequence: Synthetic oligonucleotide
gauuucgaucaucacacau

SEQ ID NO: 265879 - RNA, 19 nt, Artificial Sequence
  Description of Artificial Sequence: Synthetic oligonucleotide
cucaagacuauggucugug

SEQ ID NO: 265880 - RNA, 19 nt, Artificial Sequence
  Description of Artificial Sequence: Synthetic oligonucleotide
aagcuccaauagcagggcu

SEQ ID NO: 265881 - RNA, 19 nt, Artificial Sequence
  Description of Artificial Sequence: Synthetic oligonucleotide
augauuauggaaacaucaa

SEQ ID NO: 265882 - RNA, 19 nt, Artificial Sequence
  Description of Artificial Sequence: Synthetic oligonucleotide
auuucgaucaucacacauu

SEQ ID NO: 265883 - RNA, 19 nt, Artificial Sequence
  Description of Artificial Sequence: Synthetic oligonucleotide
caagcuauccccauacacu

SEQ ID NO: 265884 - RNA, 19 nt, Artificial Sequence
  Description of Artificial Sequence: Synthetic oligonucleotide
guucgugaaacaagggcac

SEQ ID NO: 265885 - RNA, 19 nt, Artificial Sequence
  Description of Artificial Sequence: Synthetic oligonucleotide
uucaugcaauaccaccaau

SEQ ID NO: 265886 - RNA, 19 nt, Artificial Sequence
  Description of Artificial Sequence: Synthetic oligonucleotide
caauugaucucaugaguaa

SEQ ID NO: 265887 - RNA, 19 nt, Artificial Sequence
  Description of Artificial Sequence: Synthetic oligonucleotide
gugauuggcaguucuuuaa

SEQ ID NO: 265888 - RNA, 19 nt, Artificial Sequence
  Description of Artificial Sequence: Synthetic oligonucleotide
aucagcaguucgugaaaca

SEQ ID NO: 265889 - RNA, 19 nt, Artificial Sequence
  Description of Artificial Sequence: Synthetic oligonucleotide
uaaacacuaggggagccua

SEQ ID NO: 265890 - RNA, 19 nt, Artificial Sequence
  Description of Artificial Sequence: Synthetic oligonucleotide
uuccggcccaaacaucaga

SEQ ID NO: 265891 - RNA, 19 nt, Artificial Sequence
  Description of Artificial Sequence: Synthetic oligonucleotide
uguuuagggaagguuucau

SEQ ID NO: 265892 - RNA, 19 nt, Artificial Sequence
  Description of Artificial Sequence: Synthetic oligonucleotide
uauggaaucuuggcccacu

SEQ ID NO: 265893 - RNA, 19 nt, Artificial Sequence
  Description of Artificial Sequence: Synthetic oligonucleotide
accagcuuuacuauauaau

SEQ ID NO: 265894 - RNA, 19 nt, Artificial Sequence
  Description of Artificial Sequence: Synthetic oligonucleotide
augccaaggacugcuauaa

SEQ ID NO: 265895 - RNA, 19 nt, Artificial Sequence
  Description of Artificial Sequence: Synthetic oligonucleotide
agguuucaugcaauaccac

SEQ ID NO: 265896 - RNA, 19 nt, Artificial Sequence
  Description of Artificial Sequence: Synthetic oligonucleotide
ugagguccuuaugauuaug

SEQ ID NO: 265897 - RNA, 19 nt, Artificial Sequence
  Description of Artificial Sequence: Synthetic oligonucleotide
aaccaauaaguggggcacu

SEQ ID NO: 265898 - RNA, 19 nt, Artificial Sequence
  Description of Artificial Sequence: Synthetic oligonucleotide
gcaaccaauaaguggggca

SEQ ID NO: 265899 - RNA, 19 nt, Artificial Sequence
  Description of Artificial Sequence: Synthetic oligonucleotide
guauguuuagggaagguuu

SEQ ID NO: 265900 - RNA, 19 nt, Artificial Sequence
  Description of Artificial Sequence: Synthetic oligonucleotide
ccgcaugauaaacacuagg

SEQ ID NO: 265901 - RNA, 19 nt, Artificial Sequence
  Description of Artificial Sequence: Synthetic oligonucleotide
aacacuaggggagccuauu

SEQ ID NO: 265902 - RNA, 19 nt, Artificial Sequence
  Description of Artificial Sequence: Synthetic oligonucleotide
acuaacagcuggaaaggua

SEQ ID NO: 265903 - RNA, 19 nt, Artificial Sequence
  Description of Artificial Sequence: Synthetic oligonucleotide
gaguuacauauauagccuu

SEQ ID NO: 265904 - RNA, 19 nt, Artificial Sequence
  Description of Artificial Sequence: Synthetic oligonucleotide
ucgugaaacaagggcacua

SEQ ID NO: 265905 - RNA, 19 nt, Artificial Sequence
  Description of Artificial Sequence: Synthetic oligonucleotide
uucgugaaacaagggcacu

SEQ ID NO: 265906 - RNA, 19 nt, Artificial Sequence
  Description of Artificial Sequence: Synthetic oligonucleotide
auuaggcaguaaccacaca

SEQ ID NO: 265907 - RNA, 19 nt, Artificial Sequence
  Description of Artificial Sequence: Synthetic oligonucleotide
ccggaauaaacaaggcaac

SEQ ID NO: 265908 - RNA, 19 nt, Artificial Sequence
  Description of Artificial Sequence: Synthetic oligonucleotide
cugcgacugccccagcagc

SEQ ID NO: 265909 - RNA, 19 nt, Artificial Sequence
  Description of Artificial Sequence: Synthetic oligonucleotide
ccuccgguagguaggagag

SEQ ID NO: 265910 - RNA, 19 nt, Artificial Sequence
  Description of Artificial Sequence: Synthetic oligonucleotide
ccaauugaucucaugagua

SEQ ID NO: 265911 - RNA, 19 nt, Artificial Sequence
  Description of Artificial Sequence: Synthetic oligonucleotide
gaguacuggccugccuccg

SEQ ID NO: 265912 - RNA, 19 nt, Artificial Sequence
  Description of Artificial Sequence: Synthetic oligonucleotide
auccucggauuccuguuau

SEQ ID NO: 265913 - RNA, 19 nt, Artificial Sequence
  Description of Artificial Sequence: Synthetic oligonucleotide
agacuauggucugugcaau

SEQ ID NO: 265914 - RNA, 19 nt, Artificial Sequence
  Description of Artificial Sequence: Synthetic oligonucleotide
aucccagacccaauaagau

SEQ ID NO: 265915 - RNA, 19 nt, Artificial Sequence
  Description of Artificial Sequence: Synthetic oligonucleotide
gauuuccggcccaaacauc

SEQ ID NO: 265916 - RNA, 19 nt, Artificial Sequence
  Description of Artificial Sequence: Synthetic oligonucleotide
gggucauuuuaccauccuc

SEQ ID NO: 265917 - RNA, 19 nt, Artificial Sequence
  Description of Artificial Sequence: Synthetic oligonucleotide
caguagugaauaauguuuu

SEQ ID NO: 265918 - RNA, 19 nt, Artificial Sequence
  Description of Artificial Sequence: Synthetic oligonucleotide
auacugcgguucgcggccc

SEQ ID NO: 265919 - RNA, 19 nt, Artificial Sequence
  Description of Artificial Sequence: Synthetic oligonucleotide
aaacacuaggggagccuau

SEQ ID NO: 265920 - RNA, 19 nt, Artificial Sequence
  Description of Artificial Sequence: Synthetic oligonucleotide
cuuuaguucccacggaguu

SEQ ID NO: 265921 - RNA, 19 nt, Artificial Sequence
  Description of Artificial Sequence: Synthetic oligonucleotide
ucccagaccauugcacaau

SEQ ID NO: 265922 - RNA, 19 nt, Artificial Sequence
  Description of Artificial Sequence: Synthetic oligonucleotide
auggaaucuuggcccacuu

SEQ ID NO: 265923 - RNA, 19 nt, Artificial Sequence
  Description of Artificial Sequence: Synthetic oligonucleotide
cgugccuccguccuuaaug

SEQ ID NO: 265924 - RNA, 19 nt, Artificial Sequence
  Description of Artificial Sequence: Synthetic oligonucleotide
gacuauggucugugcaaua

SEQ ID NO: 265925 - RNA, 19 nt, Artificial Sequence
  Description of Artificial Sequence: Synthetic oligonucleotide
cuauccccauacacucguc

SEQ ID NO: 265926 - RNA, 19 nt, Artificial Sequence
  Description of Artificial Sequence: Synthetic oligonucleotide
auccucgacucccggcgcu

SEQ ID NO: 265927 - RNA, 19 nt, Artificial Sequence
  Description of Artificial Sequence: Synthetic oligonucleotide
augaacccauaaagggcug

SEQ ID NO: 265928 - RNA, 19 nt, Artificial Sequence
  Description of Artificial Sequence: Synthetic oligonucleotide
gagauaucacauugacauu

SEQ ID NO: 265929 - RNA, 19 nt, Artificial Sequence
  Description of Artificial Sequence: Synthetic oligonucleotide
uggcaagagauuggugcua

SEQ ID NO: 265930 - RNA, 19 nt, Artificial Sequence
  Description of Artificial Sequence: Synthetic oligonucleotide
gggaugauggaauucuguu

SEQ ID NO: 265931 - RNA, 19 nt, Artificial Sequence
  Description of Artificial Sequence: Synthetic oligonucleotide
ggccacuauauauauuuau

SEQ ID NO: 265932 - RNA, 19 nt, Artificial Sequence
  Description of Artificial Sequence: Synthetic oligonucleotide
gcaaugacucugguacagc

SEQ ID NO: 265933 - RNA, 19 nt, Artificial Sequence
  Description of Artificial Sequence: Synthetic oligonucleotide
agggcacuaacagcuggaa

SEQ ID NO: 265934 - RNA, 19 nt, Artificial Sequence
  Description of Artificial Sequence: Synthetic oligonucleotide
gccuccgguagguaggaga

SEQ ID NO: 265935 - RNA, 19 nt, Artificial Sequence
  Description of Artificial Sequence: Synthetic oligonucleotide
gguucugaaccaaagccau

SEQ ID NO: 265936 - RNA, 19 nt, Artificial Sequence
  Description of Artificial Sequence: Synthetic oligonucleotide
gcguuaaggcuuugaauua

SEQ ID NO: 265937 - RNA, 19 nt, Artificial Sequence
  Description of Artificial Sequence: Synthetic oligonucleotide
cguggcugaaaccagccca

SEQ ID NO: 265938 - RNA, 19 nt, Artificial Sequence
  Description of Artificial Sequence: Synthetic oligonucleotide
gggcuagaucuucauuaga

SEQ ID NO: 265939 - RNA, 19 nt, Artificial Sequence
  Description of Artificial Sequence: Synthetic oligonucleotide
gggucggccugcucccagg

SEQ ID NO: 265940 - RNA, 19 nt, Artificial Sequence
  Description of Artificial Sequence: Synthetic oligonucleotide
ccuuaugauuauggaaaca

SEQ ID NO: 265941 - RNA, 19 nt, Artificial Sequence
  Description of Artificial Sequence: Synthetic oligonucleotide
aggccacuauauauauuua

SEQ ID NO: 265942 - RNA, 19 nt, Artificial Sequence
  Description of Artificial Sequence: Synthetic oligonucleotide
cccagaccauugcacaauc

SEQ ID NO: 265943 - RNA, 19 nt, Artificial Sequence
  Description of Artificial Sequence: Synthetic oligonucleotide
accugggugcugauagaaa

SEQ ID NO: 265944 - RNA, 19 nt, Artificial Sequence
  Description of Artificial Sequence: Synthetic oligonucleotide
guguacugugaggauggcu

SEQ ID NO: 265945 - RNA, 19 nt, Artificial Sequence
  Description of Artificial Sequence: Synthetic oligonucleotide
gggcacuaacagcuggaaa

SEQ ID NO: 265946 - RNA, 19 nt, Artificial Sequence
  Description of Artificial Sequence: Synthetic oligonucleotide
gcaugauacugcgguucgc

SEQ ID NO: 265947 - RNA, 19 nt, Artificial Sequence
  Description of Artificial Sequence: Synthetic oligonucleotide
cccgccacuacugccgggc

SEQ ID NO: 265948 - RNA, 19 nt, Artificial Sequence
  Description of Artificial Sequence: Synthetic oligonucleotide
ggcgagugcggucccgcca

SEQ ID NO: 265949 - RNA, 19 nt, Artificial Sequence
  Description of Artificial Sequence: Synthetic oligonucleotide
gccacuacugccgggccga

SEQ ID NO: 265950 - RNA, 19 nt, Artificial Sequence
  Description of Artificial Sequence: Synthetic oligonucleotide
ggggucggccugcucccag

SEQ ID NO: 265951 - RNA, 19 nt, Artificial Sequence
  Description of Artificial Sequence: Synthetic oligonucleotide
acugcgguucgcggcccgu

SEQ ID NO: 265952 - RNA, 19 nt, Artificial Sequence
  Description of Artificial Sequence: Synthetic oligonucleotide
ggaccagggaugauggaau

SEQ ID NO: 265953 - RNA, 19 nt, Artificial Sequence
  Description of Artificial Sequence: Synthetic oligonucleotide
ccuagugcaucugcguuaa

SEQ ID NO: 265954 - RNA, 19 nt, Artificial Sequence
  Description of Artificial Sequence: Synthetic oligonucleotide
gaugucuaacagagcuauu

SEQ ID NO: 265955 - RNA, 19 nt, Artificial Sequence
  Description of Artificial Sequence: Synthetic oligonucleotide
cgccacuacugccgggccg

SEQ ID NO: 265956 - RNA, 19 nt, Artificial Sequence
  Description of Artificial Sequence: Synthetic oligonucleotide
gcgguucgcggcccguuuc

SEQ ID NO: 265957 - RNA, 19 nt, Artificial Sequence
  Description of Artificial Sequence: Synthetic oligonucleotide
gagugcggucccgccacua

SEQ ID NO: 265958 - RNA, 19 nt, Artificial Sequence
  Description of Artificial Sequence: Synthetic oligonucleotide
gugcaauaauggacagaau

SEQ ID NO: 265959 - RNA, 19 nt, Artificial Sequence
  Description of Artificial Sequence: Synthetic oligonucleotide
ccgccacuacugccgggcc

SEQ ID NO: 265960 - RNA, 19 nt, Artificial Sequence
  Description of Artificial Sequence: Synthetic oligonucleotide
gaggcgugccuccguccuu

SEQ ID NO: 265961 - RNA, 19 nt, Artificial Sequence
  Description of Artificial Sequence: Synthetic oligonucleotide
cuccgggcgcacgccgcca

SEQ ID NO: 265962 - RNA, 19 nt, Artificial Sequence
  Description of Artificial Sequence: Synthetic oligonucleotide
cuccguccuuaaugaugau

SEQ ID NO: 265963 - RNA, 19 nt, Artificial Sequence
  Description of Artificial Sequence: Synthetic oligonucleotide
ggcgugccuccguccuuaa

SEQ ID NO: 265964 - RNA, 19 nt, Artificial Sequence
  Description of Artificial Sequence: Synthetic oligonucleotide
ccgggcgcacgccgccauc

SEQ ID NO: 265965 - RNA, 19 nt, Artificial Sequence
  Description of Artificial Sequence: Synthetic oligonucleotide
gguucgcggcccguuucuu

SEQ ID NO: 265966 - RNA, 19 nt, Artificial Sequence
  Description of Artificial Sequence: Synthetic oligonucleotide
cugcgguucgcggcccguu

SEQ ID NO: 265967 - RNA, 19 nt, Artificial Sequence
  Description of Artificial Sequence: Synthetic oligonucleotide
gcgugccuccguccuuaau

SEQ ID NO: 265968 - RNA, 19 nt, Artificial Sequence
  Description of Artificial Sequence: Synthetic oligonucleotide
cgguucgcggcccguuucu

SEQ ID NO: 265969 - RNA, 19 nt, Artificial Sequence
  Description of Artificial Sequence: Synthetic oligonucleotide
cgagugcggucccgccacu

SEQ ID NO: 265970 - RNA, 19 nt, Artificial Sequence
  Description of Artificial Sequence: Synthetic oligonucleotide
augauuaucagauauuagc

SEQ ID NO: 265971 - RNA, 19 nt, Artificial Sequence
  Description of Artificial Sequence: Synthetic oligonucleotide
aaugugagcaaccagugug

SEQ ID NO: 265972 - RNA, 19 nt, Artificial Sequence
  Description of Artificial Sequence: Synthetic oligonucleotide
aaccuaacaacggaaaggc

SEQ ID NO: 265973 - RNA, 19 nt, Artificial Sequence
  Description of Artificial Sequence: Synthetic oligonucleotide
guaaucaaaccccacagcg

SEQ ID NO: 265974 - RNA, 19 nt, Artificial Sequence
  Description of Artificial Sequence: Synthetic oligonucleotide
ugauuaucagauauuagca

SEQ ID NO: 265975 - RNA, 19 nt, Artificial Sequence
  Description of Artificial Sequence: Synthetic oligonucleotide
aagagaucucaucaucgcc

SEQ ID NO: 265976 - RNA, 19 nt, Artificial Sequence
  Description of Artificial Sequence: Synthetic oligonucleotide
ucgaucauuucuauguugg

SEQ ID NO: 265977 - RNA, 19 nt, Artificial Sequence
  Description of Artificial Sequence: Synthetic oligonucleotide
aaucaaucaagcaugcuuc

SEQ ID NO: 265978 - RNA, 19 nt, Artificial Sequence
  Description of Artificial Sequence: Synthetic oligonucleotide
aaaauuccguaucuaauga

SEQ ID NO: 265979 - RNA, 19 nt, Artificial Sequence
  Description of Artificial Sequence: Synthetic oligonucleotide
ucaagcaugcuucuggaag

SEQ ID NO: 265980 - RNA, 19 nt, Artificial Sequence
  Description of Artificial Sequence: Synthetic oligonucleotide
agauuuucaaaguuagcuc

SEQ ID NO: 265981 - RNA, 19 nt, Artificial Sequence
  Description of Artificial Sequence: Synthetic oligonucleotide
agaauagucuuucugggag

SEQ ID NO: 265982 - RNA, 19 nt, Artificial Sequence
  Description of Artificial Sequence: Synthetic oligonucleotide
agaagguaacacuucaagg

SEQ ID NO: 265983 - RNA, 19 nt, Artificial Sequence
  Description of Artificial Sequence: Synthetic oligonucleotide
aauuccguaucuaaugagg

SEQ ID NO: 265984 - RNA, 19 nt, Artificial Sequence
  Description of Artificial Sequence: Synthetic oligonucleotide
aaggcaauauguauauccc

SEQ ID NO: 265985 - RNA, 19 nt, Artificial Sequence
  Description of Artificial Sequence: Synthetic oligonucleotide
gaauuugccaccgaagccg

SEQ ID NO: 265986 - RNA, 19 nt, Artificial Sequence
  Description of Artificial Sequence: Synthetic oligonucleotide
aaucaaaccccacagcgga

SEQ ID NO: 265987 - RNA, 19 nt, Artificial Sequence
  Description of Artificial Sequence: Synthetic oligonucleotide
ugccuugauacucaaagcc

SEQ ID NO: 265988 - RNA, 19 nt, Artificial Sequence
  Description of Artificial Sequence: Synthetic oligonucleotide
guagucaaagcccacggcg

SEQ ID NO: 265989 - RNA, 19 nt, Artificial Sequence
  Description of Artificial Sequence: Synthetic oligonucleotide
aaaguuagcucggauauca

SEQ ID NO: 265990 - RNA, 19 nt, Artificial Sequence
  Description of Artificial Sequence: Synthetic oligonucleotide
aaauuccguaucuaaugag

SEQ ID NO: 265991 - RNA, 19 nt, Artificial Sequence
  Description of Artificial Sequence: Synthetic oligonucleotide
aaccaacucaaaugugcgc

SEQ ID NO: 265992 - RNA, 19 nt, Artificial Sequence
  Description of Artificial Sequence: Synthetic oligonucleotide
uuucauauccaucguaggu

SEQ ID NO: 265993 - RNA, 19 nt, Artificial Sequence
  Description of Artificial Sequence: Synthetic oligonucleotide
gagaagguaacacuucaag

SEQ ID NO: 265994 - RNA, 19 nt, Artificial Sequence
  Description of Artificial Sequence: Synthetic oligonucleotide
ugugaaugaacccucugcu

SEQ ID NO: 265995 - RNA, 19 nt, Artificial Sequence
  Description of Artificial Sequence: Synthetic oligonucleotide
uccgaacccagucuuauag

SEQ ID NO: 265996 - RNA, 19 nt, Artificial Sequence
  Description of Artificial Sequence: Synthetic oligonucleotide
cuuagaaaguuuugacugg

SEQ ID NO: 265997 - RNA, 19 nt, Artificial Sequence
  Description of Artificial Sequence: Synthetic oligonucleotide
ucgucgaucauuucuaugu

SEQ ID NO: 265998 - RNA, 19 nt, Artificial Sequence
  Description of Artificial Sequence: Synthetic oligonucleotide
ugugcuacagaauuccaga

SEQ ID NO: 265999 - RNA, 19 nt, Artificial Sequence
  Description of Artificial Sequence: Synthetic oligonucleotide
ugagcaaccaguguggccc

SEQ ID NO: 266000 - RNA, 19 nt, Artificial Sequence
  Description of Artificial Sequence: Synthetic oligonucleotide
ugugcuaugggucuugaau

SEQ ID NO: 266001 - RNA, 19 nt, Artificial Sequence
  Description of Artificial Sequence: Synthetic oligonucleotide
auuucuauguuggugauga

SEQ ID NO: 266002 - RNA, 19 nt, Artificial Sequence
  Description of Artificial Sequence: Synthetic oligonucleotide
aaaccaacucaaaugugcg

SEQ ID NO: 266003 - RNA, 19 nt, Artificial Sequence
  Description of Artificial Sequence: Synthetic oligonucleotide
uugaaugcagauaggagaa

SEQ ID NO: 266004 - RNA, 19 nt, Artificial Sequence
  Description of Artificial Sequence: Synthetic oligonucleotide
cuugaaugcagauaggaga

SEQ ID NO: 266005 - RNA, 19 nt, Artificial Sequence
  Description of Artificial Sequence: Synthetic oligonucleotide
aggcaauauguauaucccc

SEQ ID NO: 266006 - RNA, 19 nt, Artificial Sequence
  Description of Artificial Sequence: Synthetic oligonucleotide
ugaagcaucagcagaagua

SEQ ID NO: 266007 - RNA, 19 nt, Artificial Sequence
  Description of Artificial Sequence: Synthetic oligonucleotide
agacugaucuacccugucc

SEQ ID NO: 266008 - RNA, 19 nt, Artificial Sequence
  Description of Artificial Sequence: Synthetic oligonucleotide
agucuaucugaauccaagg

SEQ ID NO: 266009 - RNA, 19 nt, Artificial Sequence
  Description of Artificial Sequence: Synthetic oligonucleotide
auguauauccccuccccac

SEQ ID NO: 266010 - RNA, 19 nt, Artificial Sequence
  Description of Artificial Sequence: Synthetic oligonucleotide
ugccuagcuagccaagugg

SEQ ID NO: 266011 - RNA, 19 nt, Artificial Sequence
  Description of Artificial Sequence: Synthetic oligonucleotide
uugucgauuccauauuugc

SEQ ID NO: 266012 - RNA, 19 nt, Artificial Sequence
  Description of Artificial Sequence: Synthetic oligonucleotide
ucacagucuaucugaaucc

SEQ ID NO: 266013 - RNA, 19 nt, Artificial Sequence
  Description of Artificial Sequence: Synthetic oligonucleotide
ugcuuagaaaguuuugacu

SEQ ID NO: 266014 - RNA, 19 nt, Artificial Sequence
  Description of Artificial Sequence: Synthetic oligonucleotide
gaagcuugcaguggaaagg

SEQ ID NO: 266015 - RNA, 19 nt, Artificial Sequence
  Description of Artificial Sequence: Synthetic oligonucleotide
uaguuggccgggaagagcc

SEQ ID NO: 266016 - RNA, 19 nt, Artificial Sequence
  Description of Artificial Sequence: Synthetic oligonucleotide
gaauagucuuucugggagg

SEQ ID NO: 266017 - RNA, 19 nt, Artificial Sequence
  Description of Artificial Sequence: Synthetic oligonucleotide
ugggcaucaguucucaugu

SEQ ID NO: 266018 - RNA, 19 nt, Artificial Sequence
  Description of Artificial Sequence: Synthetic oligonucleotide
ucauucacaaaaucagggu

SEQ ID NO: 266019 - RNA, 19 nt, Artificial Sequence
  Description of Artificial Sequence: Synthetic oligonucleotide
ugaacaccaaauuugccuc

SEQ ID NO: 266020 - RNA, 19 nt, Artificial Sequence
  Description of Artificial Sequence: Synthetic oligonucleotide
ugguagucaaagcccacgg

SEQ ID NO: 266021 - RNA, 19 nt, Artificial Sequence
  Description of Artificial Sequence: Synthetic oligonucleotide
uucacauagaaaacccaac

SEQ ID NO: 266022 - RNA, 19 nt, Artificial Sequence
  Description of Artificial Sequence: Synthetic oligonucleotide
uuagcucggauaucacugg

SEQ ID NO: 266023 - RNA, 19 nt, Artificial Sequence
  Description of Artificial Sequence: Synthetic oligonucleotide
cuaugaacaugauuaucag

SEQ ID NO: 266024 - RNA, 19 nt, Artificial Sequence
  Description of Artificial Sequence: Synthetic oligonucleotide
aaucaagcaugcuucugga

SEQ ID NO: 266025 - RNA, 19 nt, Artificial Sequence
  Description of Artificial Sequence: Synthetic oligonucleotide
gggucuugaaugcagauag

SEQ ID NO: 266026 - RNA, 19 nt, Artificial Sequence
  Description of Artificial Sequence: Synthetic oligonucleotide
cuuucauauccaucguagg

SEQ ID NO: 266027 - RNA, 19 nt, Artificial Sequence
  Description of Artificial Sequence: Synthetic oligonucleotide
acuuucauauccaucguag

SEQ ID NO: 266028 - RNA, 19 nt, Artificial Sequence
  Description of Artificial Sequence: Synthetic oligonucleotide
ugauacucacaucauucac

SEQ ID NO: 266029 - RNA, 19 nt, Artificial Sequence
  Description of Artificial Sequence: Synthetic oligonucleotide
cuaucugccugaaugugag

SEQ ID NO: 266030 - RNA, 19 nt, Artificial Sequence
  Description of Artificial Sequence: Synthetic oligonucleotide
aggugugcuacagaauucc

SEQ ID NO: 266031 - RNA, 19 nt, Artificial Sequence
  Description of Artificial Sequence: Synthetic oligonucleotide
uauguauauccccucccca

SEQ ID NO: 266032 - RNA, 19 nt, Artificial Sequence
  Description of Artificial Sequence: Synthetic oligonucleotide
caaccuaacaacggaaagg

SEQ ID NO: 266033 - RNA, 19 nt, Artificial Sequence
  Description of Artificial Sequence: Synthetic oligonucleotide
uguuuugccuugauacuca

SEQ ID NO: 266034 - RNA, 19 nt, Artificial Sequence
  Description of Artificial Sequence: Synthetic oligonucleotide
gagaacuaggagaugcagg

SEQ ID NO: 266035 - RNA, 19 nt, Artificial Sequence
  Description of Artificial Sequence: Synthetic oligonucleotide
uccguaucuaaugaggugu

SEQ ID NO: 266036 - RNA, 19 nt, Artificial Sequence
  Description of Artificial Sequence: Synthetic oligonucleotide
acccuguccaucuggacac

SEQ ID NO: 266037 - RNA, 19 nt, Artificial Sequence
  Description of Artificial Sequence: Synthetic oligonucleotide
caauauguauauccccucc

SEQ ID NO: 266038 - RNA, 19 nt, Artificial Sequence
  Description of Artificial Sequence: Synthetic oligonucleotide
caagcaugcuucuggaagc

SEQ ID NO: 266039 - RNA, 19 nt, Artificial Sequence
  Description of Artificial Sequence: Synthetic oligonucleotide
guuagcucggauaucacug

SEQ ID NO: 266040 - RNA, 19 nt, Artificial Sequence
  Description of Artificial Sequence: Synthetic oligonucleotide
aacccaaccuaacaacgga

SEQ ID NO: 266041 - RNA, 19 nt, Artificial Sequence
  Description of Artificial Sequence: Synthetic oligonucleotide
aaauuugccuccgaaccca

SEQ ID NO: 266042 - RNA, 19 nt, Artificial Sequence
  Description of Artificial Sequence: Synthetic oligonucleotide
gguuuugcuggucacagcc

SEQ ID NO: 266043 - RNA, 19 nt, Artificial Sequence
  Description of Artificial Sequence: Synthetic oligonucleotide
acauaccacagucaacuug

SEQ ID NO: 266044 - RNA, 19 nt, Artificial Sequence
  Description of Artificial Sequence: Synthetic oligonucleotide
aacagcugauacucacauc

SEQ ID NO: 266045 - RNA, 19 nt, Artificial Sequence
  Description of Artificial Sequence: Synthetic oligonucleotide
uacccuguccaucuggaca

SEQ ID NO: 266046 - RNA, 19 nt, Artificial Sequence
  Description of Artificial Sequence: Synthetic oligonucleotide
auacucacaucauucacaa

SEQ ID NO: 266047 - RNA, 19 nt, Artificial Sequence
  Description of Artificial Sequence: Synthetic oligonucleotide
cagucuaucugaauccaag

SEQ ID NO: 266048 - RNA, 19 nt, Artificial Sequence
  Description of Artificial Sequence: Synthetic oligonucleotide
ugcagugugaaugaacccu

SEQ ID NO: 266049 - RNA, 19 nt, Artificial Sequence
  Description of Artificial Sequence: Synthetic oligonucleotide
aagguggaugcauucuugu

SEQ ID NO: 266050 - RNA, 19 nt, Artificial Sequence
  Description of Artificial Sequence: Synthetic oligonucleotide
uaacacuucaaggcaaggc

SEQ ID NO: 266051 - RNA, 19 nt, Artificial Sequence
  Description of Artificial Sequence: Synthetic oligonucleotide
ugcacaccgaauuugccac

SEQ ID NO: 266052 - RNA, 19 nt, Artificial Sequence
  Description of Artificial Sequence: Synthetic oligonucleotide
gugugaaugaacccucugc

SEQ ID NO: 266053 - RNA, 19 nt, Artificial Sequence
  Description of Artificial Sequence: Synthetic oligonucleotide
uguccauucgauccuucug

SEQ ID NO: 266054 - RNA, 19 nt, Artificial Sequence
  Description of Artificial Sequence: Synthetic oligonucleotide
gucgcuaagacaugcuuug

SEQ ID NO: 266055 - RNA, 19 nt, Artificial Sequence
  Description of Artificial Sequence: Synthetic oligonucleotide
caaaaucagggucagucuc

SEQ ID NO: 266056 - RNA, 19 nt, Artificial Sequence
  Description of Artificial Sequence: Synthetic oligonucleotide
acucaaagcccacagcgcu

SEQ ID NO: 266057 - RNA, 19 nt, Artificial Sequence
  Description of Artificial Sequence: Synthetic oligonucleotide
uugcacaccgaauuugcca

SEQ ID NO: 266058 - RNA, 19 nt, Artificial Sequence
  Description of Artificial Sequence: Synthetic oligonucleotide
agccacaucaaucaaucaa

SEQ ID NO: 266059 - RNA, 19 nt, Artificial Sequence
  Description of Artificial Sequence: Synthetic oligonucleotide
gacugaucuacccugucca

SEQ ID NO: 266060 - RNA, 19 nt, Artificial Sequence
  Description of Artificial Sequence: Synthetic oligonucleotide
ucuaaugaggugugcuaca

SEQ ID NO: 266061 - RNA, 19 nt, Artificial Sequence
  Description of Artificial Sequence: Synthetic oligonucleotide
guggcuacauaccacaguc

SEQ ID NO: 266062 - RNA, 19 nt, Artificial Sequence
  Description of Artificial Sequence: Synthetic oligonucleotide
uuagaaaguuuugacuggu

SEQ ID NO: 266063 - RNA, 19 nt, Artificial Sequence
  Description of Artificial Sequence: Synthetic oligonucleotide
aagcagagacccugaagug

SEQ ID NO: 266064 - RNA, 19 nt, Artificial Sequence
  Description of Artificial Sequence: Synthetic oligonucleotide
uaugggucuugaaugcaga

SEQ ID NO: 266065 - RNA, 19 nt, Artificial Sequence
  Description of Artificial Sequence: Synthetic oligonucleotide
ugggugauagacacggcgu

SEQ ID NO: 266066 - RNA, 19 nt, Artificial Sequence
  Description of Artificial Sequence: Synthetic oligonucleotide
aaugugcgcagauggucug

SEQ ID NO: 266067 - RNA, 19 nt, Artificial Sequence
  Description of Artificial Sequence: Synthetic oligonucleotide
cagcuugguagucauacag

SEQ ID NO: 266068 - RNA, 19 nt, Artificial Sequence
  Description of Artificial Sequence: Synthetic oligonucleotide
gaccgaguccacuugugag

SEQ ID NO: 266069 - RNA, 19 nt, Artificial Sequence
  Description of Artificial Sequence: Synthetic oligonucleotide
aguuagcucggauaucacu

SEQ ID NO: 266070 - RNA, 19 nt, Artificial Sequence
  Description of Artificial Sequence: Synthetic oligonucleotide
ugggauucaugcuucucug

SEQ ID NO: 266071 - RNA, 19 nt, Artificial Sequence
  Description of Artificial Sequence: Synthetic oligonucleotide
aaugaacccucugcugggg

SEQ ID NO: 266072 - RNA, 19 nt, Artificial Sequence
  Description of Artificial Sequence: Synthetic oligonucleotide
gcuugguagucauacagag

SEQ ID NO: 266073 - RNA, 19 nt, Artificial Sequence
  Description of Artificial Sequence: Synthetic oligonucleotide
ucuacccuguccaucugga

SEQ ID NO: 266074 - RNA, 19 nt, Artificial Sequence
  Description of Artificial Sequence: Synthetic oligonucleotide
cuugucgauuccauauuug

SEQ ID NO: 266075 - RNA, 19 nt, Artificial Sequence
  Description of Artificial Sequence: Synthetic oligonucleotide
aucguccugggugauagac

SEQ ID NO: 266076 - RNA, 19 nt, Artificial Sequence
  Description of Artificial Sequence: Synthetic oligonucleotide
uuccguaucuaaugaggug

SEQ ID NO: 266077 - RNA, 19 nt, Artificial Sequence
  Description of Artificial Sequence: Synthetic oligonucleotide
acaacggaaaggcaaggau

SEQ ID NO: 266078 - RNA, 19 nt, Artificial Sequence
  Description of Artificial Sequence: Synthetic oligonucleotide
gauuccauauuugccacca

SEQ ID NO: 266079 - RNA, 19 nt, Artificial Sequence
  Description of Artificial Sequence: Synthetic oligonucleotide
aaacccuuucacauagucu

SEQ ID NO: 266080 - RNA, 19 nt, Artificial Sequence
  Description of Artificial Sequence: Synthetic oligonucleotide
ugcuuugugcuaugggucu

SEQ ID NO: 266081 - RNA, 19 nt, Artificial Sequence
  Description of Artificial Sequence: Synthetic oligonucleotide
accaacucaaaugugcgca

SEQ ID NO: 266082 - RNA, 19 nt, Artificial Sequence
  Description of Artificial Sequence: Synthetic oligonucleotide
ucaauggggacagucuucu

SEQ ID NO: 266083 - RNA, 19 nt, Artificial Sequence
  Description of Artificial Sequence: Synthetic oligonucleotide
ucgauuccauauuugccac

SEQ ID NO: 266084 - RNA, 19 nt, Artificial Sequence
  Description of Artificial Sequence: Synthetic oligonucleotide
uaaaagcaucuuagggaca

SEQ ID NO: 266085 - RNA, 19 nt, Artificial Sequence
  Description of Artificial Sequence: Synthetic oligonucleotide
cucugucuugcccugguag

SEQ ID NO: 266086 - RNA, 19 nt, Artificial Sequence
  Description of Artificial Sequence: Synthetic oligonucleotide
aagcuugcaguggaaaggu

SEQ ID NO: 266087 - RNA, 19 nt, Artificial Sequence
  Description of Artificial Sequence: Synthetic oligonucleotide
ugucgcuaagacaugcuuu

SEQ ID NO: 266088 - RNA, 19 nt, Artificial Sequence
  Description of Artificial Sequence: Synthetic oligonucleotide
agauauuagcaaauucugu

SEQ ID NO: 266089 - RNA, 19 nt, Artificial Sequence
  Description of Artificial Sequence: Synthetic oligonucleotide
gaggaguccugccucucgg

SEQ ID NO: 266090 - RNA, 19 nt, Artificial Sequence
  Description of Artificial Sequence: Synthetic oligonucleotide
gucgaucauuucuauguug

SEQ ID NO: 266091 - RNA, 19 nt, Artificial Sequence
  Description of Artificial Sequence: Synthetic oligonucleotide
ggacugaacaccaaauuug

SEQ ID NO: 266092 - RNA, 19 nt, Artificial Sequence
  Description of Artificial Sequence: Synthetic oligonucleotide
agguggaugcauucuuguc

SEQ ID NO: 266093 - RNA, 19 nt, Artificial Sequence
  Description of Artificial Sequence: Synthetic oligonucleotide
aagcccacagcgcucuugu

SEQ ID NO: 266094 - RNA, 19 nt, Artificial Sequence
  Description of Artificial Sequence: Synthetic oligonucleotide
ucugguacgcagagggcac

SEQ ID NO: 266095 - RNA, 19 nt, Artificial Sequence
  Description of Artificial Sequence: Synthetic oligonucleotide
cuaaugaggugugcuacag

SEQ ID NO: 266096 - RNA, 19 nt, Artificial Sequence
  Description of Artificial Sequence: Synthetic oligonucleotide
cuugcacaccgaauuugcc

SEQ ID NO: 266097 - RNA, 19 nt, Artificial Sequence
  Description of Artificial Sequence: Synthetic oligonucleotide
agugugaaugaacccucug

SEQ ID NO: 266098 - RNA, 19 nt, Artificial Sequence
  Description of Artificial Sequence: Synthetic oligonucleotide
cuagcuagccaaguggcug

SEQ ID NO: 266099 - RNA, 19 nt, Artificial Sequence
  Description of Artificial Sequence: Synthetic oligonucleotide
ugcgcagauggucugcagu

SEQ ID NO: 266100 - RNA, 19 nt, Artificial Sequence
  Description of Artificial Sequence: Synthetic oligonucleotide
aucaaucaagcaugcuucu

SEQ ID NO: 266101 - RNA, 19 nt, Artificial Sequence
  Description of Artificial Sequence: Synthetic oligonucleotide
cagauuuucaaaguuagcu

SEQ ID NO: 266102 - RNA, 19 nt, Artificial Sequence
  Description of Artificial Sequence: Synthetic oligonucleotide
agcggaggaguccugccuc

SEQ ID NO: 266103 - RNA, 19 nt, Artificial Sequence
  Description of Artificial Sequence: Synthetic oligonucleotide
uucccgccaaauccuuugg

SEQ ID NO: 266104 - RNA, 19 nt, Artificial Sequence
  Description of Artificial Sequence: Synthetic oligonucleotide
ugauagacacggcguggcc

SEQ ID NO: 266105 - RNA, 19 nt, Artificial Sequence
  Description of Artificial Sequence: Synthetic oligonucleotide
guacgcagagggcaccugg

SEQ ID NO: 266106 - RNA, 19 nt, Artificial Sequence
  Description of Artificial Sequence: Synthetic oligonucleotide
ugguacucauggccaacag

SEQ ID NO: 266107 - RNA, 19 nt, Artificial Sequence
  Description of Artificial Sequence: Synthetic oligonucleotide
auccaucguagguaucauc

SEQ ID NO: 266108 - RNA, 19 nt, Artificial Sequence
  Description of Artificial Sequence: Synthetic oligonucleotide
gacaccaaacuugccuccg

SEQ ID NO: 266109 - RNA, 19 nt, Artificial Sequence
  Description of Artificial Sequence: Synthetic oligonucleotide
cuucuguaccccauacuuc

SEQ ID NO: 266110 - RNA, 19 nt, Artificial Sequence
  Description of Artificial Sequence: Synthetic oligonucleotide
auuccguaucuaaugaggu

SEQ ID NO: 266111 - RNA, 19 nt, Artificial Sequence
  Description of Artificial Sequence: Synthetic oligonucleotide
gcaagacaugcccugaagc

SEQ ID NO: 266112 - RNA, 19 nt, Artificial Sequence
  Description of Artificial Sequence: Synthetic oligonucleotide
ggaaagguaucuaucugcc

SEQ ID NO: 266113 - RNA, 19 nt, Artificial Sequence
  Description of Artificial Sequence: Synthetic oligonucleotide
gaacuaggagaugcagggg

SEQ ID NO: 266114 - RNA, 19 nt, Artificial Sequence
  Description of Artificial Sequence: Synthetic oligonucleotide
gucuugaaugcagauagga

SEQ ID NO: 266115 - RNA, 19 nt, Artificial Sequence
  Description of Artificial Sequence: Synthetic oligonucleotide
caaaugugcgcagaugguc

SEQ ID NO: 266116 - RNA, 19 nt, Artificial Sequence
  Description of Artificial Sequence: Synthetic oligonucleotide
cuucccgccaaauccuuug

SEQ ID NO: 266117 - RNA, 19 nt, Artificial Sequence
  Description of Artificial Sequence: Synthetic oligonucleotide
cugguagucaaagcccacg

SEQ ID NO: 266118 - RNA, 19 nt, Artificial Sequence
  Description of Artificial Sequence: Synthetic oligonucleotide
cuguuuugccuugauacuc

SEQ ID NO: 266119 - RNA, 19 nt, Artificial Sequence
  Description of Artificial Sequence: Synthetic oligonucleotide
aucgucgaucauuucuaug

SEQ ID NO: 266120 - RNA, 19 nt, Artificial Sequence
  Description of Artificial Sequence: Synthetic oligonucleotide
caacuuggcagaaaaggaa

SEQ ID NO: 266121 - RNA, 19 nt, Artificial Sequence
  Description of Artificial Sequence: Synthetic oligonucleotide
aagccgcuagaauagucuu

SEQ ID NO: 266122 - RNA, 19 nt, Artificial Sequence
  Description of Artificial Sequence: Synthetic oligonucleotide
cacaucaaucaaucaagca

SEQ ID NO: 266123 - RNA, 19 nt, Artificial Sequence
  Description of Artificial Sequence: Synthetic oligonucleotide
guggagacuugucuacaag

SEQ ID NO: 266124 - RNA, 19 nt, Artificial Sequence
  Description of Artificial Sequence: Synthetic oligonucleotide
caugcuuugugcuaugggu

SEQ ID NO: 266125 - RNA, 19 nt, Artificial Sequence
  Description of Artificial Sequence: Synthetic oligonucleotide
aaguuuugacugguacuca

SEQ ID NO: 266126 - RNA, 19 nt, Artificial Sequence
  Description of Artificial Sequence: Synthetic oligonucleotide
guaacacuucaaggcaagg

SEQ ID NO: 266127 - RNA, 19 nt, Artificial Sequence
  Description of Artificial Sequence: Synthetic oligonucleotide
cacaggcucaggucgguag

SEQ ID NO: 266128 - RNA, 19 nt, Artificial Sequence
  Description of Artificial Sequence: Synthetic oligonucleotide
gugugcuacagaauuccag

SEQ ID NO: 266129 - RNA, 19 nt, Artificial Sequence
  Description of Artificial Sequence: Synthetic oligonucleotide
uaccccauacuucccgcca

SEQ ID NO: 266130 - RNA, 19 nt, Artificial Sequence
  Description of Artificial Sequence: Synthetic oligonucleotide
aagggcacacuugucuugu

SEQ ID NO: 266131 - RNA, 19 nt, Artificial Sequence
  Description of Artificial Sequence: Synthetic oligonucleotide
ucguccugggugauagaca

SEQ ID NO: 266132 - RNA, 19 nt, Artificial Sequence
  Description of Artificial Sequence: Synthetic oligonucleotide
agcagaaguauuaaauaua

SEQ ID NO: 266133 - RNA, 19 nt, Artificial Sequence
  Description of Artificial Sequence: Synthetic oligonucleotide
ucguagguaucauccucug

SEQ ID NO: 266134 - RNA, 19 nt, Artificial Sequence
  Description of Artificial Sequence: Synthetic oligonucleotide
agucaaagcccacggcgcu

SEQ ID NO: 266135 - RNA, 19 nt, Artificial Sequence
  Description of Artificial Sequence: Synthetic oligonucleotide
aucuaucugccuagcuagc

SEQ ID NO: 266136 - RNA, 19 nt, Artificial Sequence
  Description of Artificial Sequence: Synthetic oligonucleotide
aguggagacuugucuacaa

SEQ ID NO: 266137 - RNA, 19 nt, Artificial Sequence
  Description of Artificial Sequence: Synthetic oligonucleotide
ucugccugaaugugagcaa

SEQ ID NO: 266138 - RNA, 19 nt, Artificial Sequence
  Description of Artificial Sequence: Synthetic oligonucleotide
gguacucauggccaacagc

SEQ ID NO: 266139 - RNA, 19 nt, Artificial Sequence
  Description of Artificial Sequence: Synthetic oligonucleotide
agguaucuaucugccuagc

SEQ ID NO: 266140 - RNA, 19 nt, Artificial Sequence
  Description of Artificial Sequence: Synthetic oligonucleotide
ugguagucauacagagcga

SEQ ID NO: 266141 - RNA, 19 nt, Artificial Sequence
  Description of Artificial Sequence: Synthetic oligonucleotide
caaucaaucaagcaugcuu

SEQ ID NO: 266142 - RNA, 19 nt, Artificial Sequence
  Description of Artificial Sequence: Synthetic oligonucleotide
ucaaucaaucaagcaugcu

SEQ ID NO: 266143 - RNA, 19 nt, Artificial Sequence
  Description of Artificial Sequence: Synthetic oligonucleotide
ccuaacaacggaaaggcaa

SEQ ID NO: 266144 - RNA, 19 nt, Artificial Sequence
  Description of Artificial Sequence: Synthetic oligonucleotide
aucguagguaucauccucu

SEQ ID NO: 266145 - RNA, 19 nt, Artificial Sequence
  Description of Artificial Sequence: Synthetic oligonucleotide
accgaauuugccaccgaag

SEQ ID NO: 266146 - RNA, 19 nt, Artificial Sequence
  Description of Artificial Sequence: Synthetic oligonucleotide
cccugaaguggcuacauac

SEQ ID NO: 266147 - RNA, 19 nt, Artificial Sequence
  Description of Artificial Sequence: Synthetic oligonucleotide
aauuugccuccgaacccag

SEQ ID NO: 266148 - RNA, 19 nt, Artificial Sequence
  Description of Artificial Sequence: Synthetic oligonucleotide
gugauagacacggcguggc

SEQ ID NO: 266149 - RNA, 19 nt, Artificial Sequence
  Description of Artificial Sequence: Synthetic oligonucleotide
uacagagcgauggcuguga

SEQ ID NO: 266150 - RNA, 19 nt, Artificial Sequence
  Description of Artificial Sequence: Synthetic oligonucleotide
caaccaguguggcccagcc

SEQ ID NO: 266151 - RNA, 19 nt, Artificial Sequence
  Description of Artificial Sequence: Synthetic oligonucleotide
gguguaagcuaaguuuugc

SEQ ID NO: 266152 - RNA, 19 nt, Artificial Sequence
  Description of Artificial Sequence: Synthetic oligonucleotide
acucaaaugugcgcagaug

SEQ ID NO: 266153 - RNA, 19 nt, Artificial Sequence
  Description of Artificial Sequence: Synthetic oligonucleotide
uggugucucagagacuuaa

SEQ ID NO: 266154 - RNA, 19 nt, Artificial Sequence
  Description of Artificial Sequence: Synthetic oligonucleotide
ucccgccaaauccuuuggc

SEQ ID NO: 266155 - RNA, 19 nt, Artificial Sequence
  Description of Artificial Sequence: Synthetic oligonucleotide
ugccucucggacugaacac

SEQ ID NO: 266156 - RNA, 19 nt, Artificial Sequence
  Description of Artificial Sequence: Synthetic oligonucleotide
augucgcuaagacaugcuu

SEQ ID NO: 266157 - RNA, 19 nt, Artificial Sequence
  Description of Artificial Sequence: Synthetic oligonucleotide
uccuugucgauuccauauu

SEQ ID NO: 266158 - RNA, 19 nt, Artificial Sequence
  Description of Artificial Sequence: Synthetic oligonucleotide
ugucuugcccugguaguca

SEQ ID NO: 266159 - RNA, 19 nt, Artificial Sequence
  Description of Artificial Sequence: Synthetic oligonucleotide
gcacaccaaauuuuccucc

SEQ ID NO: 266160 - RNA, 19 nt, Artificial Sequence
  Description of Artificial Sequence: Synthetic oligonucleotide
ccacaucaaucaaucaagc

SEQ ID NO: 266161 - RNA, 19 nt, Artificial Sequence
  Description of Artificial Sequence: Synthetic oligonucleotide
uccuauuuucagccacauc

SEQ ID NO: 266162 - RNA, 19 nt, Artificial Sequence
  Description of Artificial Sequence: Synthetic oligonucleotide
ugguuuugcuggucacagc

SEQ ID NO: 266163 - RNA, 19 nt, Artificial Sequence
  Description of Artificial Sequence: Synthetic oligonucleotide
ggugauagacacggcgugg

SEQ ID NO: 266164 - RNA, 19 nt, Artificial Sequence
  Description of Artificial Sequence: Synthetic oligonucleotide
gugagcaaccaguguggcc

SEQ ID NO: 266165 - RNA, 19 nt, Artificial Sequence
  Description of Artificial Sequence: Synthetic oligonucleotide
uugcacaccccacgccacc

SEQ ID NO: 266166 - RNA, 19 nt, Artificial Sequence
  Description of Artificial Sequence: Synthetic oligonucleotide
ccaaccuaacaacggaaag

SEQ ID NO: 266167 - RNA, 19 nt, Artificial Sequence
  Description of Artificial Sequence: Synthetic oligonucleotide
uggccaaucucuccuugua

SEQ ID NO: 266168 - RNA, 19 nt, Artificial Sequence
  Description of Artificial Sequence: Synthetic oligonucleotide
gaagccgcuagaauagucu

SEQ ID NO: 266169 - RNA, 19 nt, Artificial Sequence
  Description of Artificial Sequence: Synthetic oligonucleotide
auacuucccgccaaauccu

SEQ ID NO: 266170 - RNA, 19 nt, Artificial Sequence
  Description of Artificial Sequence: Synthetic oligonucleotide
uucgauccuucuguacccc

SEQ ID NO: 266171 - RNA, 19 nt, Artificial Sequence
  Description of Artificial Sequence: Synthetic oligonucleotide
aucaccccaaguucucuau

SEQ ID NO: 266172 - RNA, 19 nt, Artificial Sequence
  Description of Artificial Sequence: Synthetic oligonucleotide
gccuacagcagacugaucu

SEQ ID NO: 266173 - RNA, 19 nt, Artificial Sequence
  Description of Artificial Sequence: Synthetic oligonucleotide
ucgauccuucuguacccca

SEQ ID NO: 266174 - RNA, 19 nt, Artificial Sequence
  Description of Artificial Sequence: Synthetic oligonucleotide
uggacccuagagagccucc

SEQ ID NO: 266175 - RNA, 19 nt, Artificial Sequence
  Description of Artificial Sequence: Synthetic oligonucleotide
guagcuuggcuccgccuug

SEQ ID NO: 266176 - RNA, 19 nt, Artificial Sequence
  Description of Artificial Sequence: Synthetic oligonucleotide
accugggauggcucaaagu

SEQ ID NO: 266177 - RNA, 19 nt, Artificial Sequence
  Description of Artificial Sequence: Synthetic oligonucleotide
guaccccauacuucccgcc

SEQ ID NO: 266178 - RNA, 19 nt, Artificial Sequence
  Description of Artificial Sequence: Synthetic oligonucleotide
cuuagggacagcugcugaa

SEQ ID NO: 266179 - RNA, 19 nt, Artificial Sequence
  Description of Artificial Sequence: Synthetic oligonucleotide
guaucuaaugaggugugcu

SEQ ID NO: 266180 - RNA, 19 nt, Artificial Sequence
  Description of Artificial Sequence: Synthetic oligonucleotide
agcuugguagucauacaga

SEQ ID NO: 266181 - RNA, 19 nt, Artificial Sequence
  Description of Artificial Sequence: Synthetic oligonucleotide
ugggucuugaaugcagaua

SEQ ID NO: 266182 - RNA, 19 nt, Artificial Sequence
  Description of Artificial Sequence: Synthetic oligonucleotide
agaugauaauucacauaga

SEQ ID NO: 266183 - RNA, 19 nt, Artificial Sequence
  Description of Artificial Sequence: Synthetic oligonucleotide
cuugccuccgaagccccgg

SEQ ID NO: 266184 - RNA, 19 nt, Artificial Sequence
  Description of Artificial Sequence: Synthetic oligonucleotide
caccccaaguucucuauga

SEQ ID NO: 266185 - RNA, 19 nt, Artificial Sequence
  Description of Artificial Sequence: Synthetic oligonucleotide
ggauucugcaggaaagcac

SEQ ID NO: 266186 - RNA, 19 nt, Artificial Sequence
  Description of Artificial Sequence: Synthetic oligonucleotide
cugccuagcuagccaagug

SEQ ID NO: 266187 - RNA, 19 nt, Artificial Sequence
  Description of Artificial Sequence: Synthetic oligonucleotide
gggugauagacacggcgug

SEQ ID NO: 266188 - RNA, 19 nt, Artificial Sequence
  Description of Artificial Sequence: Synthetic oligonucleotide
aagccccggaccgagucca

SEQ ID NO: 266189 - RNA, 19 nt, Artificial Sequence
  Description of Artificial Sequence: Synthetic oligonucleotide
cuuugugcuaugggucuug

SEQ ID NO: 266190 - RNA, 19 nt, Artificial Sequence
  Description of Artificial Sequence: Synthetic oligonucleotide
acaccaaacuugccuccga

SEQ ID NO: 266191 - RNA, 19 nt, Artificial Sequence
  Description of Artificial Sequence: Synthetic oligonucleotide
cugguauucaaagccuaca

SEQ ID NO: 266192 - RNA, 19 nt, Artificial Sequence
  Description of Artificial Sequence: Synthetic oligonucleotide
guaaucaccccaaguucuc

SEQ ID NO: 266193 - RNA, 19 nt, Artificial Sequence
  Description of Artificial Sequence: Synthetic oligonucleotide
gguucugagguguaagcua

SEQ ID NO: 266194 - RNA, 19 nt, Artificial Sequence
  Description of Artificial Sequence: Synthetic oligonucleotide
agcccguaucugcccuugc

SEQ ID NO: 266195 - RNA, 19 nt, Artificial Sequence
  Description of Artificial Sequence: Synthetic oligonucleotide
gauagacacggcguggccu

SEQ ID NO: 266196 - RNA, 19 nt, Artificial Sequence
  Description of Artificial Sequence: Synthetic oligonucleotide
auacagagcgauggcugug

SEQ ID NO: 266197 - RNA, 19 nt, Artificial Sequence
  Description of Artificial Sequence: Synthetic oligonucleotide
gcuugcacaccgaauuugc

SEQ ID NO: 266198 - RNA, 19 nt, Artificial Sequence
  Description of Artificial Sequence: Synthetic oligonucleotide
uagucuugcugggacucgu

SEQ ID NO: 266199 - RNA, 19 nt, Artificial Sequence
  Description of Artificial Sequence: Synthetic oligonucleotide
gucuacaaggacaugcuau

SEQ ID NO: 266200 - RNA, 19 nt, Artificial Sequence
  Description of Artificial Sequence: Synthetic oligonucleotide
caaaguuagcucggauauc

SEQ ID NO: 266201 - RNA, 19 nt, Artificial Sequence
  Description of Artificial Sequence: Synthetic oligonucleotide
cgaauuugccaccgaagcc

SEQ ID NO: 266202 - RNA, 19 nt, Artificial Sequence
  Description of Artificial Sequence: Synthetic oligonucleotide
uauauccccuccccaccuu

SEQ ID NO: 266203 - RNA, 19 nt, Artificial Sequence
  Description of Artificial Sequence: Synthetic oligonucleotide
uauccaucguagguaucau

SEQ ID NO: 266204 - RNA, 19 nt, Artificial Sequence
  Description of Artificial Sequence: Synthetic oligonucleotide
ggcaauauguauauccccu

SEQ ID NO: 266205 - RNA, 19 nt, Artificial Sequence
  Description of Artificial Sequence: Synthetic oligonucleotide
cguccugggugauagacac

SEQ ID NO: 266206 - RNA, 19 nt, Artificial Sequence
  Description of Artificial Sequence: Synthetic oligonucleotide
ccuccgaagccccggaccg

SEQ ID NO: 266207 - RNA, 19 nt, Artificial Sequence
  Description of Artificial Sequence: Synthetic oligonucleotide
ccugguauucaaagccuac

SEQ ID NO: 266208 - RNA, 19 nt, Artificial Sequence
  Description of Artificial Sequence: Synthetic oligonucleotide
ggacaugcuaucugccuga

SEQ ID NO: 266209 - RNA, 19 nt, Artificial Sequence
  Description of Artificial Sequence: Synthetic oligonucleotide
uuccaaacacuggacccua

SEQ ID NO: 266210 - RNA, 19 nt, Artificial Sequence
  Description of Artificial Sequence: Synthetic oligonucleotide
aggcgugcuucucuguuuu

SEQ ID NO: 266211 - RNA, 19 nt, Artificial Sequence
  Description of Artificial Sequence: Synthetic oligonucleotide
ccuugaacggcgcugcauc

SEQ ID NO: 266212 - RNA, 19 nt, Artificial Sequence
  Description of Artificial Sequence: Synthetic oligonucleotide
uacuucccgccaaauccuu

SEQ ID NO: 266213 - RNA, 19 nt, Artificial Sequence
  Description of Artificial Sequence: Synthetic oligonucleotide
cucagagacuuaaaagcau

SEQ ID NO: 266214 - RNA, 19 nt, Artificial Sequence
  Description of Artificial Sequence: Synthetic oligonucleotide
caacggaaaggcaaggauu

SEQ ID NO: 266215 - RNA, 19 nt, Artificial Sequence
  Description of Artificial Sequence: Synthetic oligonucleotide
gcaugucgcuaagacaugc

SEQ ID NO: 266216 - RNA, 19 nt, Artificial Sequence
  Description of Artificial Sequence: Synthetic oligonucleotide
uacucacaucauucacaaa

SEQ ID NO: 266217 - RNA, 19 nt, Artificial Sequence
  Description of Artificial Sequence: Synthetic oligonucleotide
aucaaaccccacagcggag

SEQ ID NO: 266218 - RNA, 19 nt, Artificial Sequence
  Description of Artificial Sequence: Synthetic oligonucleotide
uggccugcggaagcuuucc

SEQ ID NO: 266219 - RNA, 19 nt, Artificial Sequence
  Description of Artificial Sequence: Synthetic oligonucleotide
ggucuugaaugcagauagg

SEQ ID NO: 266220 - RNA, 19 nt, Artificial Sequence
  Description of Artificial Sequence: Synthetic oligonucleotide
ccaucguccugggugauag

SEQ ID NO: 266221 - RNA, 19 nt, Artificial Sequence
  Description of Artificial Sequence: Synthetic oligonucleotide
ucgcuaagacaugcuuugu

SEQ ID NO: 266222 - RNA, 19 nt, Artificial Sequence
  Description of Artificial Sequence: Synthetic oligonucleotide
cugucugcacaccaaauuu

SEQ ID NO: 266223 - RNA, 19 nt, Artificial Sequence
  Description of Artificial Sequence: Synthetic oligonucleotide
cuacugccgcagcuccacg

SEQ ID NO: 266224 - RNA, 19 nt, Artificial Sequence
  Description of Artificial Sequence: Synthetic oligonucleotide
ccuuguaaucaaaccccac

SEQ ID NO: 266225 - RNA, 19 nt, Artificial Sequence
  Description of Artificial Sequence: Synthetic oligonucleotide
ucagggguuugaguuccuc

SEQ ID NO: 266226 - RNA, 19 nt, Artificial Sequence
  Description of Artificial Sequence: Synthetic oligonucleotide
gccaucgucgaucauuucu

SEQ ID NO: 266227 - RNA, 19 nt, Artificial Sequence
  Description of Artificial Sequence: Synthetic oligonucleotide
cugccgcagcuccacguag

SEQ ID NO: 266228 - RNA, 19 nt, Artificial Sequence
  Description of Artificial Sequence: Synthetic oligonucleotide
ugguacgcagagggcaccu

SEQ ID NO: 266229 - RNA, 19 nt, Artificial Sequence
  Description of Artificial Sequence: Synthetic oligonucleotide
cgcuagaauagucuuucug

SEQ ID NO: 266230 - RNA, 19 nt, Artificial Sequence
  Description of Artificial Sequence: Synthetic oligonucleotide
accccauacuucccgccaa

SEQ ID NO: 266231 - RNA, 19 nt, Artificial Sequence
  Description of Artificial Sequence: Synthetic oligonucleotide
caucuuagggacagcugcu

SEQ ID NO: 266232 - RNA, 19 nt, Artificial Sequence
  Description of Artificial Sequence: Synthetic oligonucleotide
gcuaucugccugaauguga

SEQ ID NO: 266233 - RNA, 19 nt, Artificial Sequence
  Description of Artificial Sequence: Synthetic oligonucleotide
caccgaauuugccaccgaa

SEQ ID NO: 266234 - RNA, 19 nt, Artificial Sequence
  Description of Artificial Sequence: Synthetic oligonucleotide
acccaaccuaacaacggaa

SEQ ID NO: 266235 - RNA, 19 nt, Artificial Sequence
  Description of Artificial Sequence: Synthetic oligonucleotide
acaccgaauuugccaccga

SEQ ID NO: 266236 - RNA, 19 nt, Artificial Sequence
  Description of Artificial Sequence: Synthetic oligonucleotide
accuaacaacggaaaggca

SEQ ID NO: 266237 - RNA, 19 nt, Artificial Sequence
  Description of Artificial Sequence: Synthetic oligonucleotide
ccauucgauccuucuguac

SEQ ID NO: 266238 - RNA, 19 nt, Artificial Sequence
  Description of Artificial Sequence: Synthetic oligonucleotide
acaugcuaucugccugaau

SEQ ID NO: 266239 - RNA, 19 nt, Artificial Sequence
  Description of Artificial Sequence: Synthetic oligonucleotide
ccauacuucccgccaaauc

SEQ ID NO: 266240 - RNA, 19 nt, Artificial Sequence
  Description of Artificial Sequence: Synthetic oligonucleotide
cugguacgcagagggcacc

SEQ ID NO: 266241 - RNA, 19 nt, Artificial Sequence
  Description of Artificial Sequence: Synthetic oligonucleotide
auuugccaccaaaaccuuu

SEQ ID NO: 266242 - RNA, 19 nt, Artificial Sequence
  Description of Artificial Sequence: Synthetic oligonucleotide
ccguaucuaaugaggugug

SEQ ID NO: 266243 - RNA, 19 nt, Artificial Sequence
  Description of Artificial Sequence: Synthetic oligonucleotide
gagcccguaucugcccuug

SEQ ID NO: 266244 - RNA, 19 nt, Artificial Sequence
  Description of Artificial Sequence: Synthetic oligonucleotide
cuccaaacccuuucacaua

SEQ ID NO: 266245 - RNA, 19 nt, Artificial Sequence
  Description of Artificial Sequence: Synthetic oligonucleotide
uagcuuggcuccgccuuga

SEQ ID NO: 266246 - RNA, 19 nt, Artificial Sequence
  Description of Artificial Sequence: Synthetic oligonucleotide
ggaccgaguccacuuguga

SEQ ID NO: 266247 - RNA, 19 nt, Artificial Sequence
  Description of Artificial Sequence: Synthetic oligonucleotide
gccuccgaagccccggacc

SEQ ID NO: 266248 - RNA, 19 nt, Artificial Sequence
  Description of Artificial Sequence: Synthetic oligonucleotide
gccucucggacugaacacc

SEQ ID NO: 266249 - RNA, 19 nt, Artificial Sequence
  Description of Artificial Sequence: Synthetic oligonucleotide
cgcuaagacaugcuuugug

SEQ ID NO: 266250 - RNA, 19 nt, Artificial Sequence
  Description of Artificial Sequence: Synthetic oligonucleotide
caccagccaucgucgauca

SEQ ID NO: 266251 - RNA, 19 nt, Artificial Sequence
  Description of Artificial Sequence: Synthetic oligonucleotide
gguaucuaucugccuagcu

SEQ ID NO: 266252 - RNA, 19 nt, Artificial Sequence
  Description of Artificial Sequence: Synthetic oligonucleotide
gacucgugcuuggccaauc

SEQ ID NO: 266253 - RNA, 19 nt, Artificial Sequence
  Description of Artificial Sequence: Synthetic oligonucleotide
cugagguguaagcuaaguu

SEQ ID NO: 266254 - RNA, 19 nt, Artificial Sequence
  Description of Artificial Sequence: Synthetic oligonucleotide
ggauucaugcuucucuguu

SEQ ID NO: 266255 - RNA, 19 nt, Artificial Sequence
  Description of Artificial Sequence: Synthetic oligonucleotide
gccgggaagagcccguauc

SEQ ID NO: 266256 - RNA, 19 nt, Artificial Sequence
  Description of Artificial Sequence: Synthetic oligonucleotide
ccaucgucgaucauuucua

SEQ ID NO: 266257 - RNA, 19 nt, Artificial Sequence
  Description of Artificial Sequence: Synthetic oligonucleotide
gcccuacugccgcagcucc

SEQ ID NO: 266258 - RNA, 19 nt, Artificial Sequence
  Description of Artificial Sequence: Synthetic oligonucleotide
gccaaucucuccuuguaau

SEQ ID NO: 266259 - RNA, 19 nt, Artificial Sequence
  Description of Artificial Sequence: Synthetic oligonucleotide
ggagaagguaacacuucaa

SEQ ID NO: 266260 - RNA, 19 nt, Artificial Sequence
  Description of Artificial Sequence: Synthetic oligonucleotide
gucgguagcuuggcuccgc

SEQ ID NO: 266261 - RNA, 19 nt, Artificial Sequence
  Description of Artificial Sequence: Synthetic oligonucleotide
ccuccaaacccuuucacau

SEQ ID NO: 266262 - RNA, 19 nt, Artificial Sequence
  Description of Artificial Sequence: Synthetic oligonucleotide
ccugaagcaucagcagaag

SEQ ID NO: 266263 - RNA, 19 nt, Artificial Sequence
  Description of Artificial Sequence: Synthetic oligonucleotide
gacaugcuaucugccugaa

SEQ ID NO: 266264 - RNA, 19 nt, Artificial Sequence
  Description of Artificial Sequence: Synthetic oligonucleotide
cccaaccuaacaacggaaa

SEQ ID NO: 266265 - RNA, 19 nt, Artificial Sequence
  Description of Artificial Sequence: Synthetic oligonucleotide
agagcccguaucugcccuu

SEQ ID NO: 266266 - RNA, 19 nt, Artificial Sequence
  Description of Artificial Sequence: Synthetic oligonucleotide
cgauuccauauuugccacc

SEQ ID NO: 266267 - RNA, 19 nt, Artificial Sequence
  Description of Artificial Sequence: Synthetic oligonucleotide
cuggaagcuugcaguggaa

SEQ ID NO: 266268 - RNA, 19 nt, Artificial Sequence
  Description of Artificial Sequence: Synthetic oligonucleotide
gcucggauaucacugguuu

SEQ ID NO: 266269 - RNA, 19 nt, Artificial Sequence
  Description of Artificial Sequence: Synthetic oligonucleotide
gguagcuuggcuccgccuu

SEQ ID NO: 266270 - RNA, 19 nt, Artificial Sequence
  Description of Artificial Sequence: Synthetic oligonucleotide
cuacagaauuccagaugau

SEQ ID NO: 266271 - RNA, 19 nt, Artificial Sequence
  Description of Artificial Sequence: Synthetic oligonucleotide
ccuacugccgcagcuccac

SEQ ID NO: 266272 - RNA, 19 nt, Artificial Sequence
  Description of Artificial Sequence: Synthetic oligonucleotide
cguaucuaaugaggugugc

SEQ ID NO: 266273 - RNA, 19 nt, Artificial Sequence
  Description of Artificial Sequence: Synthetic oligonucleotide
agcaaccaguguggcccag

SEQ ID NO: 266274 - RNA, 19 nt, Artificial Sequence
  Description of Artificial Sequence: Synthetic oligonucleotide
cagugugaaugaacccucu

SEQ ID NO: 266275 - RNA, 19 nt, Artificial Sequence
  Description of Artificial Sequence: Synthetic oligonucleotide
gaggcgugcuucucuguuu

SEQ ID NO: 266276 - RNA, 19 nt, Artificial Sequence
  Description of Artificial Sequence: Synthetic oligonucleotide
ccucucggacugaacacca

SEQ ID NO: 266277 - RNA, 19 nt, Artificial Sequence
  Description of Artificial Sequence: Synthetic oligonucleotide
cgaagccgcuagaauaguc

SEQ ID NO: 266278 - RNA, 19 nt, Artificial Sequence
  Description of Artificial Sequence: Synthetic oligonucleotide
cucucggacugaacaccaa

SEQ ID NO: 266279 - RNA, 19 nt, Artificial Sequence
  Description of Artificial Sequence: Synthetic oligonucleotide
gggauucaugcuucucugu

SEQ ID NO: 266280 - RNA, 19 nt, Artificial Sequence
  Description of Artificial Sequence: Synthetic oligonucleotide
ugguaguggccaggggcuu

SEQ ID NO: 266281 - RNA, 19 nt, Artificial Sequence
  Description of Artificial Sequence: Synthetic oligonucleotide
agccuacagcagacugauc

SEQ ID NO: 266282 - RNA, 19 nt, Artificial Sequence
  Description of Artificial Sequence: Synthetic oligonucleotide
caucgucgaucauuucuau

SEQ ID NO: 266283 - RNA, 19 nt, Artificial Sequence
  Description of Artificial Sequence: Synthetic oligonucleotide
gaugggcaucaguucucau

SEQ ID NO: 266284 - RNA, 19 nt, Artificial Sequence
  Description of Artificial Sequence: Synthetic oligonucleotide
gcccguaucugcccuugca

SEQ ID NO: 266285 - RNA, 19 nt, Artificial Sequence
  Description of Artificial Sequence: Synthetic oligonucleotide
acuucccgccaaauccuuu

SEQ ID NO: 266286 - RNA, 19 nt, Artificial Sequence
  Description of Artificial Sequence: Synthetic oligonucleotide
gcugcccuacugccgcagc

SEQ ID NO: 266287 - RNA, 19 nt, Artificial Sequence
  Description of Artificial Sequence: Synthetic oligonucleotide
ccuacagcagacugaucua

SEQ ID NO: 266288 - RNA, 19 nt, Artificial Sequence
  Description of Artificial Sequence: Synthetic oligonucleotide
cuccgaacccagucuuaua

SEQ ID NO: 266289 - RNA, 19 nt, Artificial Sequence
  Description of Artificial Sequence: Synthetic oligonucleotide
gguacgcagagggcaccug

SEQ ID NO: 266290 - RNA, 19 nt, Artificial Sequence
  Description of Artificial Sequence: Synthetic oligonucleotide
gcauucuuguccauucgau

SEQ ID NO: 266291 - RNA, 19 nt, Artificial Sequence
  Description of Artificial Sequence: Synthetic oligonucleotide
ccgaguccacuugugagca

SEQ ID NO: 266292 - RNA, 19 nt, Artificial Sequence
  Description of Artificial Sequence: Synthetic oligonucleotide
cuuucugggaggcgugcuu

SEQ ID NO: 266293 - RNA, 19 nt, Artificial Sequence
  Description of Artificial Sequence: Synthetic oligonucleotide
caucguccugggugauaga

SEQ ID NO: 266294 - RNA, 19 nt, Artificial Sequence
  Description of Artificial Sequence: Synthetic oligonucleotide
gggacucgugcuuggccaa

SEQ ID NO: 266295 - RNA, 19 nt, Artificial Sequence
  Description of Artificial Sequence: Synthetic oligonucleotide
gccaccgaagccgcuagaa

SEQ ID NO: 266296 - RNA, 19 nt, Artificial Sequence
  Description of Artificial Sequence: Synthetic oligonucleotide
cccugguauucaaagccua

SEQ ID NO: 266297 - RNA, 19 nt, Artificial Sequence
  Description of Artificial Sequence: Synthetic oligonucleotide
ggcgugcuucucuguuuuc

SEQ ID NO: 266298 - RNA, 19 nt, Artificial Sequence
  Description of Artificial Sequence: Synthetic oligonucleotide
cacggcgcucuuguccaca

SEQ ID NO: 266299 - RNA, 19 nt, Artificial Sequence
  Description of Artificial Sequence: Synthetic oligonucleotide
cccggaccgaguccacuug

SEQ ID NO: 266300 - RNA, 19 nt, Artificial Sequence
  Description of Artificial Sequence: Synthetic oligonucleotide
cugcccuacugccgcagcu

SEQ ID NO: 266301 - RNA, 19 nt, Artificial Sequence
  Description of Artificial Sequence: Synthetic oligonucleotide
agccccggaccgaguccac

SEQ ID NO: 266302 - RNA, 19 nt, Artificial Sequence
  Description of Artificial Sequence: Synthetic oligonucleotide
ggccaagcccaggauagcu

SEQ ID NO: 266303 - RNA, 19 nt, Artificial Sequence
  Description of Artificial Sequence: Synthetic oligonucleotide
cggaccgaguccacuugug

SEQ ID NO: 266304 - RNA, 19 nt, Artificial Sequence
  Description of Artificial Sequence: Synthetic oligonucleotide
ccuugucgauuccauauuu

SEQ ID NO: 266305 - RNA, 19 nt, Artificial Sequence
  Description of Artificial Sequence: Synthetic oligonucleotide
ccuagcuagccaaguggcu

SEQ ID NO: 266306 - RNA, 19 nt, Artificial Sequence
  Description of Artificial Sequence: Synthetic oligonucleotide
ccgccaaauccuuuggcau

SEQ ID NO: 266307 - RNA, 19 nt, Artificial Sequence
  Description of Artificial Sequence: Synthetic oligonucleotide
caucgccagcagcuuggua

SEQ ID NO: 266308 - RNA, 19 nt, Artificial Sequence
  Description of Artificial Sequence: Synthetic oligonucleotide
ccgaacccagucuuauagu

SEQ ID NO: 266309 - RNA, 19 nt, Artificial Sequence
  Description of Artificial Sequence: Synthetic oligonucleotide
ccagccaucgucgaucauu

SEQ ID NO: 266310 - RNA, 19 nt, Artificial Sequence
  Description of Artificial Sequence: Synthetic oligonucleotide
cggcguggccugcggaagc

SEQ ID NO: 266311 - RNA, 19 nt, Artificial Sequence
  Description of Artificial Sequence: Synthetic oligonucleotide
gcuuugugcuaugggucuu

SEQ ID NO: 266312 - RNA, 19 nt, Artificial Sequence
  Description of Artificial Sequence: Synthetic oligonucleotide
ccuccgaacccagucuuau

SEQ ID NO: 266313 - RNA, 19 nt, Artificial Sequence
  Description of Artificial Sequence: Synthetic oligonucleotide
ccgcuagaauagucuuucu

SEQ ID NO: 266314 - RNA, 19 nt, Artificial Sequence
  Description of Artificial Sequence: Synthetic oligonucleotide
ccggaccgaguccacuugu

SEQ ID NO: 266315 - RNA, 19 nt, Artificial Sequence
  Description of Artificial Sequence: Synthetic oligonucleotide
cgucgaucauuucuauguu

SEQ ID NO: 266316 - RNA, 19 nt, Artificial Sequence
  Description of Artificial Sequence: Synthetic oligonucleotide
ggacucgugcuuggccaau

SEQ ID NO: 266317 - RNA, 19 nt, Artificial Sequence
  Description of Artificial Sequence: Synthetic oligonucleotide
ccgaagccgcuagaauagu

SEQ ID NO: 266318 - RNA, 19 nt, Artificial Sequence
  Description of Artificial Sequence: Synthetic oligonucleotide
gccccggaccgaguccacu

SEQ ID NO: 266319 - RNA, 19 nt, Artificial Sequence
  Description of Artificial Sequence: Synthetic oligonucleotide
ccccaucguccugggugau

SEQ ID NO: 266320 - RNA, 19 nt, Artificial Sequence
  Description of Artificial Sequence: Synthetic oligonucleotide
aaaagcaaagucuaggacc

SEQ ID NO: 266321 - RNA, 19 nt, Artificial Sequence
  Description of Artificial Sequence: Synthetic oligonucleotide
uugaguauaaugcaaaucc

SEQ ID NO: 266322 - RNA, 19 nt, Artificial Sequence
  Description of Artificial Sequence: Synthetic oligonucleotide
aauacuuaucaccauacag

SEQ ID NO: 266323 - RNA, 19 nt, Artificial Sequence
  Description of Artificial Sequence: Synthetic oligonucleotide
uauauucuaaccaaccacg

SEQ ID NO: 266324 - RNA, 19 nt, Artificial Sequence
  Description of Artificial Sequence: Synthetic oligonucleotide
aaaguuuaaccucuccucc

SEQ ID NO: 266325 - RNA, 19 nt, Artificial Sequence
  Description of Artificial Sequence: Synthetic oligonucleotide
uugaaauccacaccaaucg

SEQ ID NO: 266326 - RNA, 19 nt, Artificial Sequence
  Description of Artificial Sequence: Synthetic oligonucleotide
aacaugugcagucuugugg

SEQ ID NO: 266327 - RNA, 19 nt, Artificial Sequence
  Description of Artificial Sequence: Synthetic oligonucleotide
ucuauuacuagaaagcaaa

SEQ ID NO: 266328 - RNA, 19 nt, Artificial Sequence
  Description of Artificial Sequence: Synthetic oligonucleotide
agaucuuacauauaacguc

SEQ ID NO: 266329 - RNA, 19 nt, Artificial Sequence
  Description of Artificial Sequence: Synthetic oligonucleotide
aacgguaagaaucuguugu

SEQ ID NO: 266330 - RNA, 19 nt, Artificial Sequence
  Description of Artificial Sequence: Synthetic oligonucleotide
ugugcuauuauuagauagg

SEQ ID NO: 266331 - RNA, 19 nt, Artificial Sequence
  Description of Artificial Sequence: Synthetic oligonucleotide
uacuagaaagcaaauacug

SEQ ID NO: 266332 - RNA, 19 nt, Artificial Sequence
  Description of Artificial Sequence: Synthetic oligonucleotide
agaaucgccaaucagaagu

SEQ ID NO: 266333 - RNA, 19 nt, Artificial Sequence
  Description of Artificial Sequence: Synthetic oligonucleotide
uuucccuuuaaccauaaga

SEQ ID NO: 266334 - RNA, 19 nt, Artificial Sequence
  Description of Artificial Sequence: Synthetic oligonucleotide
aauugacagacacugguug

SEQ ID NO: 266335 - RNA, 19 nt, Artificial Sequence
  Description of Artificial Sequence: Synthetic oligonucleotide
ucuacaaggaagaacuagc

SEQ ID NO: 266336 - RNA, 19 nt, Artificial Sequence
  Description of Artificial Sequence: Synthetic oligonucleotide
uauaacgucucacuaaacu

SEQ ID NO: 266337 - RNA, 19 nt, Artificial Sequence
  Description of Artificial Sequence: Synthetic oligonucleotide
agaacuagcaaaucagauc

SEQ ID NO: 266338 - RNA, 19 nt, Artificial Sequence
  Description of Artificial Sequence: Synthetic oligonucleotide
cucuaggucacuuagcagg

SEQ ID NO: 266339 - RNA, 19 nt, Artificial Sequence
  Description of Artificial Sequence: Synthetic oligonucleotide
ugauauuacuuccaauaag

SEQ ID NO: 266340 - RNA, 19 nt, Artificial Sequence
  Description of Artificial Sequence: Synthetic oligonucleotide
aaagucuaggaccuugaag

SEQ ID NO: 266341 - RNA, 19 nt, Artificial Sequence
  Description of Artificial Sequence: Synthetic oligonucleotide
uguuguguaaucuacuacu

SEQ ID NO: 266342 - RNA, 19 nt, Artificial Sequence
  Description of Artificial Sequence: Synthetic oligonucleotide
aaugcuagcgucugaaaga

SEQ ID NO: 266343 - RNA, 19 nt, Artificial Sequence
  Description of Artificial Sequence: Synthetic oligonucleotide
uccaauaaguacaauauuu

SEQ ID NO: 266344 - RNA, 19 nt, Artificial Sequence
  Description of Artificial Sequence: Synthetic oligonucleotide
aucauucccaucuagcauc

SEQ ID NO: 266345 - RNA, 19 nt, Artificial Sequence
  Description of Artificial Sequence: Synthetic oligonucleotide
aauuugguucagucuacac

SEQ ID NO: 266346 - RNA, 19 nt, Artificial Sequence
  Description of Artificial Sequence: Synthetic oligonucleotide
ucagaaguaacuugaauaa

SEQ ID NO: 266347 - RNA, 19 nt, Artificial Sequence
  Description of Artificial Sequence: Synthetic oligonucleotide
uuuaucauuaaagacccca

SEQ ID NO: 266348 - RNA, 19 nt, Artificial Sequence
  Description of Artificial Sequence: Synthetic oligonucleotide
ucuaaacaugccaauauaa

SEQ ID NO: 266349 - RNA, 19 nt, Artificial Sequence
  Description of Artificial Sequence: Synthetic oligonucleotide
ugcuuguuuaaaccaaagg

SEQ ID NO: 266350 - RNA, 19 nt, Artificial Sequence
  Description of Artificial Sequence: Synthetic oligonucleotide
uauuagauaggucuacagu

SEQ ID NO: 266351 - RNA, 19 nt, Artificial Sequence
  Description of Artificial Sequence: Synthetic oligonucleotide
acaaggauuacacacauua

SEQ ID NO: 266352 - RNA, 19 nt, Artificial Sequence
  Description of Artificial Sequence: Synthetic oligonucleotide
uuagauaggucuacagugc

SEQ ID NO: 266353 - RNA, 19 nt, Artificial Sequence
  Description of Artificial Sequence: Synthetic oligonucleotide
uauucuaaccaaccacggg

SEQ ID NO: 266354 - RNA, 19 nt, Artificial Sequence
  Description of Artificial Sequence: Synthetic oligonucleotide
uuauuagauaggucuacag

SEQ ID NO: 266355 - RNA, 19 nt, Artificial Sequence
  Description of Artificial Sequence: Synthetic oligonucleotide
uauucgggauucaugcugg

SEQ ID NO: 266356 - RNA, 19 nt, Artificial Sequence
  Description of Artificial Sequence: Synthetic oligonucleotide
uauaguucggaucuugaaa

SEQ ID NO: 266357 - RNA, 19 nt, Artificial Sequence
  Description of Artificial Sequence: Synthetic oligonucleotide
uuacuagaaagcaaauacu

SEQ ID NO: 266358 - RNA, 19 nt, Artificial Sequence
  Description of Artificial Sequence: Synthetic oligonucleotide
ugaguauaaugcaaauccc

SEQ ID NO: 266359 - RNA, 19 nt, Artificial Sequence
  Description of Artificial Sequence: Synthetic oligonucleotide
uucccuaccaacaacuugu

SEQ ID NO: 266360 - RNA, 19 nt, Artificial Sequence
  Description of Artificial Sequence: Synthetic oligonucleotide
ugcagcuacauacaguaca

SEQ ID NO: 266361 - RNA, 19 nt, Artificial Sequence
  Description of Artificial Sequence: Synthetic oligonucleotide
uaaaguuuaaccucuccuc

SEQ ID NO: 266362 - RNA, 19 nt, Artificial Sequence
  Description of Artificial Sequence: Synthetic oligonucleotide
aucagaaguaacuugaaua

SEQ ID NO: 266363 - RNA, 19 nt, Artificial Sequence
  Description of Artificial Sequence: Synthetic oligonucleotide
ucucacuaaacuuuaugca

SEQ ID NO: 266364 - RNA, 19 nt, Artificial Sequence
  Description of Artificial Sequence: Synthetic oligonucleotide
uuaaagaccccauaauaaa

SEQ ID NO: 266365 - RNA, 19 nt, Artificial Sequence
  Description of Artificial Sequence: Synthetic oligonucleotide
guaagaaucuguuguagug

SEQ ID NO: 266366 - RNA, 19 nt, Artificial Sequence
  Description of Artificial Sequence: Synthetic oligonucleotide
gacuguucuacauucguug

SEQ ID NO: 266367 - RNA, 19 nt, Artificial Sequence
  Description of Artificial Sequence: Synthetic oligonucleotide
uuacauauaacgucucacu

SEQ ID NO: 266368 - RNA, 19 nt, Artificial Sequence
  Description of Artificial Sequence: Synthetic oligonucleotide
gaaaguuugagugaagcca

SEQ ID NO: 266369 - RNA, 19 nt, Artificial Sequence
  Description of Artificial Sequence: Synthetic oligonucleotide
cuauuaaucagauagugua

SEQ ID NO: 266370 - RNA, 19 nt, Artificial Sequence
  Description of Artificial Sequence: Synthetic oligonucleotide
ugaccauuuacaaucucug

SEQ ID NO: 266371 - RNA, 19 nt, Artificial Sequence
  Description of Artificial Sequence: Synthetic oligonucleotide
aagagacuugguuucccac

SEQ ID NO: 266372 - RNA, 19 nt, Artificial Sequence
  Description of Artificial Sequence: Synthetic oligonucleotide
acaccaaucgugcugaugu

SEQ ID NO: 266373 - RNA, 19 nt, Artificial Sequence
  Description of Artificial Sequence: Synthetic oligonucleotide
ucuacaauuagggcaauca

SEQ ID NO: 266374 - RNA, 19 nt, Artificial Sequence
  Description of Artificial Sequence: Synthetic oligonucleotide
uaacauuggacuucucugc

SEQ ID NO: 266375 - RNA, 19 nt, Artificial Sequence
  Description of Artificial Sequence: Synthetic oligonucleotide
cuugguuucccacagugag

SEQ ID NO: 266376 - RNA, 19 nt, Artificial Sequence
  Description of Artificial Sequence: Synthetic oligonucleotide
gaagacuaaacccaacauc

SEQ ID NO: 266377 - RNA, 19 nt, Artificial Sequence
  Description of Artificial Sequence: Synthetic oligonucleotide
uaauuucuacaauuagggc

SEQ ID NO: 266378 - RNA, 19 nt, Artificial Sequence
  Description of Artificial Sequence: Synthetic oligonucleotide
ucuaaaguuuaaccucucc

SEQ ID NO: 266379 - RNA, 19 nt, Artificial Sequence
  Description of Artificial Sequence: Synthetic oligonucleotide
caaucugguaucaggaaag

SEQ ID NO: 266380 - RNA, 19 nt, Artificial Sequence
  Description of Artificial Sequence: Synthetic oligonucleotide
aauaaucauauucgggauu

SEQ ID NO: 266381 - RNA, 19 nt, Artificial Sequence
  Description of Artificial Sequence: Synthetic oligonucleotide
gucaguauugaccauuuac

SEQ ID NO: 266382 - RNA, 19 nt, Artificial Sequence
  Description of Artificial Sequence: Synthetic oligonucleotide
gaauuugaggccucuugag

SEQ ID NO: 266383 - RNA, 19 nt, Artificial Sequence
  Description of Artificial Sequence: Synthetic oligonucleotide
uaaagaccccauaauaaaa

SEQ ID NO: 266384 - RNA, 19 nt, Artificial Sequence
  Description of Artificial Sequence: Synthetic oligonucleotide
ugauuguucgaaaucuuuc

SEQ ID NO: 266385 - RNA, 19 nt, Artificial Sequence
  Description of Artificial Sequence: Synthetic oligonucleotide
gucaccuuaaaugcuagcg

SEQ ID NO: 266386 - RNA, 19 nt, Artificial Sequence
  Description of Artificial Sequence: Synthetic oligonucleotide
gauacaaaauggcugaacu

SEQ ID NO: 266387 - RNA, 19 nt, Artificial Sequence
  Description of Artificial Sequence: Synthetic oligonucleotide
caggucuauuacuagaaag

SEQ ID NO: 266388 - RNA, 19 nt, Artificial Sequence
  Description of Artificial Sequence: Synthetic oligonucleotide
ucgggauucaugcuggaca

SEQ ID NO: 266389 - RNA, 19 nt, Artificial Sequence
  Description of Artificial Sequence: Synthetic oligonucleotide
acuuccaauaaguacaaua

SEQ ID NO: 266390 - RNA, 19 nt, Artificial Sequence
  Description of Artificial Sequence: Synthetic oligonucleotide
uuuaaccucuccuccaaca

SEQ ID NO: 266391 - RNA, 19 nt, Artificial Sequence
  Description of Artificial Sequence: Synthetic oligonucleotide
uacacaacuaugaugccau

SEQ ID NO: 266392 - RNA, 19 nt, Artificial Sequence
  Description of Artificial Sequence: Synthetic oligonucleotide
cacuaaacuuuaugcaugg

SEQ ID NO: 266393 - RNA, 19 nt, Artificial Sequence
  Description of Artificial Sequence: Synthetic oligonucleotide
aaacaaucugguaucagga

SEQ ID NO: 266394 - RNA, 19 nt, Artificial Sequence
  Description of Artificial Sequence: Synthetic oligonucleotide
ucccuauuucccuuuaacc

SEQ ID NO: 266395 - RNA, 19 nt, Artificial Sequence
  Description of Artificial Sequence: Synthetic oligonucleotide
auaaaauguguugucagca

SEQ ID NO: 266396 - RNA, 19 nt, Artificial Sequence
  Description of Artificial Sequence: Synthetic oligonucleotide
auuuauaacucuacaagga

SEQ ID NO: 266397 - RNA, 19 nt, Artificial Sequence
  Description of Artificial Sequence: Synthetic oligonucleotide
aaguuagcugucuuugagu

SEQ ID NO: 266398 - RNA, 19 nt, Artificial Sequence
  Description of Artificial Sequence: Synthetic oligonucleotide
aaacgguaagaaucuguug

SEQ ID NO: 266399 - RNA, 19 nt, Artificial Sequence
  Description of Artificial Sequence: Synthetic oligonucleotide
cagauugcgaauucauugc

SEQ ID NO: 266400 - RNA, 19 nt, Artificial Sequence
  Description of Artificial Sequence: Synthetic oligonucleotide
gagugaagccacuucagug

SEQ ID NO: 266401 - RNA, 19 nt, Artificial Sequence
  Description of Artificial Sequence: Synthetic oligonucleotide
cuaaacccaacaucuaaac

SEQ ID NO: 266402 - RNA, 19 nt, Artificial Sequence
  Description of Artificial Sequence: Synthetic oligonucleotide
auacuuaucaccauacagu

SEQ ID NO: 266403 - RNA, 19 nt, Artificial Sequence
  Description of Artificial Sequence: Synthetic oligonucleotide
uguagugcagcuacauaca

SEQ ID NO: 266404 - RNA, 19 nt, Artificial Sequence
  Description of Artificial Sequence: Synthetic oligonucleotide
ucuuacauauaacgucuca

SEQ ID NO: 266405 - RNA, 19 nt, Artificial Sequence
  Description of Artificial Sequence: Synthetic oligonucleotide
cacauacuaaguugcaggc

SEQ ID NO: 266406 - RNA, 19 nt, Artificial Sequence
  Description of Artificial Sequence: Synthetic oligonucleotide
uuguucgaaaucuuuccug

SEQ ID NO: 266407 - RNA, 19 nt, Artificial Sequence
  Description of Artificial Sequence: Synthetic oligonucleotide
acgggaaacaaucugguau

SEQ ID NO: 266408 - RNA, 19 nt, Artificial Sequence
  Description of Artificial Sequence: Synthetic oligonucleotide
aacuaugaugccaugggcu

SEQ ID NO: 266409 - RNA, 19 nt, Artificial Sequence
  Description of Artificial Sequence: Synthetic oligonucleotide
uucccgucuaacucuauag

SEQ ID NO: 266410 - RNA, 19 nt, Artificial Sequence
  Description of Artificial Sequence: Synthetic oligonucleotide
ugcugcacauacuaaguug

SEQ ID NO: 266411 - RNA, 19 nt, Artificial Sequence
  Description of Artificial Sequence: Synthetic oligonucleotide
ucuauaguucggaucuuga

SEQ ID NO: 266412 - RNA, 19 nt, Artificial Sequence
  Description of Artificial Sequence: Synthetic oligonucleotide
ucgccaaucagaaguaacu

SEQ ID NO: 266413 - RNA, 19 nt, Artificial Sequence
  Description of Artificial Sequence: Synthetic oligonucleotide
gaaauugacagacacuggu

SEQ ID NO: 266414 - RNA, 19 nt, Artificial Sequence
  Description of Artificial Sequence: Synthetic oligonucleotide
ugguugugcuguuugauac

SEQ ID NO: 266415 - RNA, 19 nt, Artificial Sequence
  Description of Artificial Sequence: Synthetic oligonucleotide
aacaucuaaacaugccaau

SEQ ID NO: 266416 - RNA, 19 nt, Artificial Sequence
  Description of Artificial Sequence: Synthetic oligonucleotide
gaaucuguuguagugcagc

SEQ ID NO: 266417 - RNA, 19 nt, Artificial Sequence
  Description of Artificial Sequence: Synthetic oligonucleotide
ucuagcauccauguuuuca

SEQ ID NO: 266418 - RNA, 19 nt, Artificial Sequence
  Description of Artificial Sequence: Synthetic oligonucleotide
uuaucauuaaagaccccau

SEQ ID NO: 266419 - RNA, 19 nt, Artificial Sequence
  Description of Artificial Sequence: Synthetic oligonucleotide
gauaguguaaucuuuccau

SEQ ID NO: 266420 - RNA, 19 nt, Artificial Sequence
  Description of Artificial Sequence: Synthetic oligonucleotide
uacuuaucaccauacaguu

SEQ ID NO: 266421 - RNA, 19 nt, Artificial Sequence
  Description of Artificial Sequence: Synthetic oligonucleotide
aaauggaauuccaagggaa

SEQ ID NO: 266422 - RNA, 19 nt, Artificial Sequence
  Description of Artificial Sequence: Synthetic oligonucleotide
uuugccugcuuguuuaaac

SEQ ID NO: 266423 - RNA, 19 nt, Artificial Sequence
  Description of Artificial Sequence: Synthetic oligonucleotide
aaccacgggaaacaaucug

SEQ ID NO: 266424 - RNA, 19 nt, Artificial Sequence
  Description of Artificial Sequence: Synthetic oligonucleotide
uacaauuggaaagaauaaa

SEQ ID NO: 266425 - RNA, 19 nt, Artificial Sequence
  Description of Artificial Sequence: Synthetic oligonucleotide
gacggaggcaaauuuuagc

SEQ ID NO: 266426 - RNA, 19 nt, Artificial Sequence
  Description of Artificial Sequence: Synthetic oligonucleotide
acaaccucugaccucuguc

SEQ ID NO: 266427 - RNA, 19 nt, Artificial Sequence
  Description of Artificial Sequence: Synthetic oligonucleotide
acauauaacgucucacuaa

SEQ ID NO: 266428 - RNA, 19 nt, Artificial Sequence
  Description of Artificial Sequence: Synthetic oligonucleotide
auaacgucucacuaaacuu

SEQ ID NO: 266429 - RNA, 19 nt, Artificial Sequence
  Description of Artificial Sequence: Synthetic oligonucleotide
gagacuugguuucccacag

SEQ ID NO: 266430 - RNA, 19 nt, Artificial Sequence
  Description of Artificial Sequence: Synthetic oligonucleotide
cuuacauauaacgucucac

SEQ ID NO: 266431 - RNA, 19 nt, Artificial Sequence
  Description of Artificial Sequence: Synthetic oligonucleotide
gcacauacuaaguugcagg

SEQ ID NO: 266432 - RNA, 19 nt, Artificial Sequence
  Description of Artificial Sequence: Synthetic oligonucleotide
gacaccuagaaguggaguc

SEQ ID NO: 266433 - RNA, 19 nt, Artificial Sequence
  Description of Artificial Sequence: Synthetic oligonucleotide
uaacgucucacuaaacuuu

SEQ ID NO: 266434 - RNA, 19 nt, Artificial Sequence
  Description of Artificial Sequence: Synthetic oligonucleotide
ucuaacucuauaguucgga

SEQ ID NO: 266435 - RNA, 19 nt, Artificial Sequence
  Description of Artificial Sequence: Synthetic oligonucleotide
aaaggacggaggcaaauuu

SEQ ID NO: 266436 - RNA, 19 nt, Artificial Sequence
  Description of Artificial Sequence: Synthetic oligonucleotide
aaacaugugcagucuugug

SEQ ID NO: 266437 - RNA, 19 nt, Artificial Sequence
  Description of Artificial Sequence: Synthetic oligonucleotide
aaagacuguucuacauucg

SEQ ID NO: 266438 - RNA, 19 nt, Artificial Sequence
  Description of Artificial Sequence: Synthetic oligonucleotide
cuaccaacaacuuguugac

SEQ ID NO: 266439 - RNA, 19 nt, Artificial Sequence
  Description of Artificial Sequence: Synthetic oligonucleotide
auuagggcaaucaacauuu

SEQ ID NO: 266440 - RNA, 19 nt, Artificial Sequence
  Description of Artificial Sequence: Synthetic oligonucleotide
uaccauguauuucaaucgu

SEQ ID NO: 266441 - RNA, 19 nt, Artificial Sequence
  Description of Artificial Sequence: Synthetic oligonucleotide
uauugaccauuuacaaucu

SEQ ID NO: 266442 - RNA, 19 nt, Artificial Sequence
  Description of Artificial Sequence: Synthetic oligonucleotide
uuaaaugcuagcgucugaa

SEQ ID NO: 266443 - RNA, 19 nt, Artificial Sequence
  Description of Artificial Sequence: Synthetic oligonucleotide
cauuggacuucucugcacc

SEQ ID NO: 266444 - RNA, 19 nt, Artificial Sequence
  Description of Artificial Sequence: Synthetic oligonucleotide
aaagaccccauaauaaaau

SEQ ID NO: 266445 - RNA, 19 nt, Artificial Sequence
  Description of Artificial Sequence: Synthetic oligonucleotide
aacuaugauuuuauuguga

SEQ ID NO: 266446 - RNA, 19 nt, Artificial Sequence
  Description of Artificial Sequence: Synthetic oligonucleotide
aaguaaacuaugauuuuau

SEQ ID NO: 266447 - RNA, 19 nt, Artificial Sequence
  Description of Artificial Sequence: Synthetic oligonucleotide
acaaucugguaucaggaaa

SEQ ID NO: 266448 - RNA, 19 nt, Artificial Sequence
  Description of Artificial Sequence: Synthetic oligonucleotide
accgaaauaaauauauuau

SEQ ID NO: 266449 - RNA, 19 nt, Artificial Sequence
  Description of Artificial Sequence: Synthetic oligonucleotide
agaagacuaaacccaacau

SEQ ID NO: 266450 - RNA, 19 nt, Artificial Sequence
  Description of Artificial Sequence: Synthetic oligonucleotide
auauucuaaccaaccacgg

SEQ ID NO: 266451 - RNA, 19 nt, Artificial Sequence
  Description of Artificial Sequence: Synthetic oligonucleotide
aacccaacaucuaaacaug

SEQ ID NO: 266452 - RNA, 19 nt, Artificial Sequence
  Description of Artificial Sequence: Synthetic oligonucleotide
ugcgaauucauugcuguga

SEQ ID NO: 266453 - RNA, 19 nt, Artificial Sequence
  Description of Artificial Sequence: Synthetic oligonucleotide
uucguugcauucuuagcac

SEQ ID NO: 266454 - RNA, 19 nt, Artificial Sequence
  Description of Artificial Sequence: Synthetic oligonucleotide
agucaacaaaacuuccaca

SEQ ID NO: 266455 - RNA, 19 nt, Artificial Sequence
  Description of Artificial Sequence: Synthetic oligonucleotide
ugagugaagccacuucagu

SEQ ID NO: 266456 - RNA, 19 nt, Artificial Sequence
  Description of Artificial Sequence: Synthetic oligonucleotide
auucuaaaguuuaaccucu

SEQ ID NO: 266457 - RNA, 19 nt, Artificial Sequence
  Description of Artificial Sequence: Synthetic oligonucleotide
uaacucuauaguucggauc

SEQ ID NO: 266458 - RNA, 19 nt, Artificial Sequence
  Description of Artificial Sequence: Synthetic oligonucleotide
ggaggcaaauuuuagcagc

SEQ ID NO: 266459 - RNA, 19 nt, Artificial Sequence
  Description of Artificial Sequence: Synthetic oligonucleotide
uauuacuagaaagcaaaua

SEQ ID NO: 266460 - RNA, 19 nt, Artificial Sequence
  Description of Artificial Sequence: Synthetic oligonucleotide
ucggcugccaucgucauga

SEQ ID NO: 266461 - RNA, 19 nt, Artificial Sequence
  Description of Artificial Sequence: Synthetic oligonucleotide
uggaauuccaagggaaucu

SEQ ID NO: 266462 - RNA, 19 nt, Artificial Sequence
  Description of Artificial Sequence: Synthetic oligonucleotide
uuucuauucuaaaguuuaa

SEQ ID NO: 266463 - RNA, 19 nt, Artificial Sequence
  Description of Artificial Sequence: Synthetic oligonucleotide
agaauguuugccugcuugu

SEQ ID NO: 266464 - RNA, 19 nt, Artificial Sequence
  Description of Artificial Sequence: Synthetic oligonucleotide
auugacagacacugguugu

SEQ ID NO: 266465 - RNA, 19 nt, Artificial Sequence
  Description of Artificial Sequence: Synthetic oligonucleotide
uuuccaaccccagaaucgc

SEQ ID NO: 266466 - RNA, 19 nt, Artificial Sequence
  Description of Artificial Sequence: Synthetic oligonucleotide
auuuuaacauuggacuucu

SEQ ID NO: 266467 - RNA, 19 nt, Artificial Sequence
  Description of Artificial Sequence: Synthetic oligonucleotide
uagcuuuccguguacgugu

SEQ ID NO: 266468 - RNA, 19 nt, Artificial Sequence
  Description of Artificial Sequence: Synthetic oligonucleotide
ugcacauacuaaguugcag

SEQ ID NO: 266469 - RNA, 19 nt, Artificial Sequence
  Description of Artificial Sequence: Synthetic oligonucleotide
gacuaaacccaacaucuaa

SEQ ID NO: 266470 - RNA, 19 nt, Artificial Sequence
  Description of Artificial Sequence: Synthetic oligonucleotide
accacgggaaacaaucugg

SEQ ID NO: 266471 - RNA, 19 nt, Artificial Sequence
  Description of Artificial Sequence: Synthetic oligonucleotide
cacaacuaugaugccaugg

SEQ ID NO: 266472 - RNA, 19 nt, Artificial Sequence
  Description of Artificial Sequence: Synthetic oligonucleotide
agagacuugguuucccaca

SEQ ID NO: 266473 - RNA, 19 nt, Artificial Sequence
  Description of Artificial Sequence: Synthetic oligonucleotide
cauauaacgucucacuaaa

SEQ ID NO: 266474 - RNA, 19 nt, Artificial Sequence
  Description of Artificial Sequence: Synthetic oligonucleotide
acuauuaaucagauagugu

SEQ ID NO: 266475 - RNA, 19 nt, Artificial Sequence
  Description of Artificial Sequence: Synthetic oligonucleotide
augaaagacuguucuacau

SEQ ID NO: 266476 - RNA, 19 nt, Artificial Sequence
  Description of Artificial Sequence: Synthetic oligonucleotide
agggcaaucaacauuuccu

SEQ ID NO: 266477 - RNA, 19 nt, Artificial Sequence
  Description of Artificial Sequence: Synthetic oligonucleotide
ugcagccacaaauuauaug

SEQ ID NO: 266478 - RNA, 19 nt, Artificial Sequence
  Description of Artificial Sequence: Synthetic oligonucleotide
caccgaaauaaauauauua

SEQ ID NO: 266479 - RNA, 19 nt, Artificial Sequence
  Description of Artificial Sequence: Synthetic oligonucleotide
guagugcagcuacauacag

SEQ ID NO: 266480 - RNA, 19 nt, Artificial Sequence
  Description of Artificial Sequence: Synthetic oligonucleotide
caacuaugaugccaugggc

SEQ ID NO: 266481 - RNA, 19 nt, Artificial Sequence
  Description of Artificial Sequence: Synthetic oligonucleotide
uuucaccgaaauaaauaua

SEQ ID NO: 266482 - RNA, 19 nt, Artificial Sequence
  Description of Artificial Sequence: Synthetic oligonucleotide
acuuagcaggucuauuacu

SEQ ID NO: 266483 - RNA, 19 nt, Artificial Sequence
  Description of Artificial Sequence: Synthetic oligonucleotide
ugcuauuauuagauagguc

SEQ ID NO: 266484 - RNA, 19 nt, Artificial Sequence
  Description of Artificial Sequence: Synthetic oligonucleotide
cauagauggaaaauuaaau

SEQ ID NO: 266485 - RNA, 19 nt, Artificial Sequence
  Description of Artificial Sequence: Synthetic oligonucleotide
ugccugcuuguuuaaacca

SEQ ID NO: 266486 - RNA, 19 nt, Artificial Sequence
  Description of Artificial Sequence: Synthetic oligonucleotide
gaggugauuguucgaaauc

SEQ ID NO: 266487 - RNA, 19 nt, Artificial Sequence
  Description of Artificial Sequence: Synthetic oligonucleotide
ugaauagucuguccauuuu

SEQ ID NO: 266488 - RNA, 19 nt, Artificial Sequence
  Description of Artificial Sequence: Synthetic oligonucleotide
ugauacaaaauggcugaac

SEQ ID NO: 266489 - RNA, 19 nt, Artificial Sequence
  Description of Artificial Sequence: Synthetic oligonucleotide
uaguguaaucuuuccauuu

SEQ ID NO: 266490 - RNA, 19 nt, Artificial Sequence
  Description of Artificial Sequence: Synthetic oligonucleotide
ccuaccaacaacuuguuga

SEQ ID NO: 266491 - RNA, 19 nt, Artificial Sequence
  Description of Artificial Sequence: Synthetic oligonucleotide
guugcauucuuagcacugg

SEQ ID NO: 266492 - RNA, 19 nt, Artificial Sequence
  Description of Artificial Sequence: Synthetic oligonucleotide
uucugcagccacaaauuau

SEQ ID NO: 266493 - RNA, 19 nt, Artificial Sequence
  Description of Artificial Sequence: Synthetic oligonucleotide
aauccacaccaaucgugcu

SEQ ID NO: 266494 - RNA, 19 nt, Artificial Sequence
  Description of Artificial Sequence: Synthetic oligonucleotide
uugaauagucuguccauuu

SEQ ID NO: 266495 - RNA, 19 nt, Artificial Sequence
  Description of Artificial Sequence: Synthetic oligonucleotide
ucgcuguuguguaaucuac

SEQ ID NO: 266496 - RNA, 19 nt, Artificial Sequence
  Description of Artificial Sequence: Synthetic oligonucleotide
cuuagcaggucuauuacua

SEQ ID NO: 266497 - RNA, 19 nt, Artificial Sequence
  Description of Artificial Sequence: Synthetic oligonucleotide
gaaacaaccucugaccucu

SEQ ID NO: 266498 - RNA, 19 nt, Artificial Sequence
  Description of Artificial Sequence: Synthetic oligonucleotide
gauugcgaauucauugcug

SEQ ID NO: 266499 - RNA, 19 nt, Artificial Sequence
  Description of Artificial Sequence: Synthetic oligonucleotide
uuucaaucgucuguuuagu

SEQ ID NO: 266500 - RNA, 19 nt, Artificial Sequence
  Description of Artificial Sequence: Synthetic oligonucleotide
uaaagcaugugcugcucuc

SEQ ID NO: 266501 - RNA, 19 nt, Artificial Sequence
  Description of Artificial Sequence: Synthetic oligonucleotide
aguugacaccuagaagugg

SEQ ID NO: 266502 - RNA, 19 nt, Artificial Sequence
  Description of Artificial Sequence: Synthetic oligonucleotide
ggucaggucacauuuguuc

SEQ ID NO: 266503 - RNA, 19 nt, Artificial Sequence
  Description of Artificial Sequence: Synthetic oligonucleotide
aucgccaaucagaaguaac

SEQ ID NO: 266504 - RNA, 19 nt, Artificial Sequence
  Description of Artificial Sequence: Synthetic oligonucleotide
ugacugcuugacuggagug

SEQ ID NO: 266505 - RNA, 19 nt, Artificial Sequence
  Description of Artificial Sequence: Synthetic oligonucleotide
auccacaccaaucgugcug

SEQ ID NO: 266506 - RNA, 19 nt, Artificial Sequence
  Description of Artificial Sequence: Synthetic oligonucleotide
ucccgucuaacucuauagu

SEQ ID NO: 266507 - RNA, 19 nt, Artificial Sequence
  Description of Artificial Sequence: Synthetic oligonucleotide
gaaagagacuugguuuccc

SEQ ID NO: 266508 - RNA, 19 nt, Artificial Sequence
  Description of Artificial Sequence: Synthetic oligonucleotide
uccacaccaaucgugcuga

SEQ ID NO: 266509 - RNA, 19 nt, Artificial Sequence
  Description of Artificial Sequence: Synthetic oligonucleotide
augcuagcgucugaaagag

SEQ ID NO: 266510 - RNA, 19 nt, Artificial Sequence
  Description of Artificial Sequence: Synthetic oligonucleotide
ugaccuuguggaaacggua

SEQ ID NO: 266511 - RNA, 19 nt, Artificial Sequence
  Description of Artificial Sequence: Synthetic oligonucleotide
cacuuagcaggucuauuac

SEQ ID NO: 266512 - RNA, 19 nt, Artificial Sequence
  Description of Artificial Sequence: Synthetic oligonucleotide
uucgcuguuguguaaucua

SEQ ID NO: 266513 - RNA, 19 nt, Artificial Sequence
  Description of Artificial Sequence: Synthetic oligonucleotide
aaauugacagacacugguu

SEQ ID NO: 266514 - RNA, 19 nt, Artificial Sequence
  Description of Artificial Sequence: Synthetic oligonucleotide
aguuuaaccucuccuccaa

SEQ ID NO: 266515 - RNA, 19 nt, Artificial Sequence
  Description of Artificial Sequence: Synthetic oligonucleotide
aguauaaugcaaaucccua

SEQ ID NO: 266516 - RNA, 19 nt, Artificial Sequence
  Description of Artificial Sequence: Synthetic oligonucleotide
uagugcagcuacauacagu

SEQ ID NO: 266517 - RNA, 19 nt, Artificial Sequence
  Description of Artificial Sequence: Synthetic oligonucleotide
ucgucaugaaagacuguuc

SEQ ID NO: 266518 - RNA, 19 nt, Artificial Sequence
  Description of Artificial Sequence: Synthetic oligonucleotide
ccaaccacgggaaacaauc

SEQ ID NO: 266519 - RNA, 19 nt, Artificial Sequence
  Description of Artificial Sequence: Synthetic oligonucleotide
uuaucaccauacaguuuga

SEQ ID NO: 266520 - RNA, 19 nt, Artificial Sequence
  Description of Artificial Sequence: Synthetic oligonucleotide
ugagcuccuugaaccaaug

SEQ ID NO: 266521 - RNA, 19 nt, Artificial Sequence
  Description of Artificial Sequence: Synthetic oligonucleotide
gaccauuuacaaucucuga

SEQ ID NO: 266522 - RNA, 19 nt, Artificial Sequence
  Description of Artificial Sequence: Synthetic oligonucleotide
ggaguaaagcaugugcugc

SEQ ID NO: 266523 - RNA, 19 nt, Artificial Sequence
  Description of Artificial Sequence: Synthetic oligonucleotide
uauuucccuuuaaccauaa

SEQ ID NO: 266524 - RNA, 19 nt, Artificial Sequence
  Description of Artificial Sequence: Synthetic oligonucleotide
caaaacuuccacacaugca

SEQ ID NO: 266525 - RNA, 19 nt, Artificial Sequence
  Description of Artificial Sequence: Synthetic oligonucleotide
accauguauuucaaucguc

SEQ ID NO: 266526 - RNA, 19 nt, Artificial Sequence
  Description of Artificial Sequence: Synthetic oligonucleotide
ugucaccuuaaaugcuagc

SEQ ID NO: 266527 - RNA, 19 nt, Artificial Sequence
  Description of Artificial Sequence: Synthetic oligonucleotide
acaaaauggcugaacuuca

SEQ ID NO: 266528 - RNA, 19 nt, Artificial Sequence
  Description of Artificial Sequence: Synthetic oligonucleotide
ucugaccucugucaccuua

SEQ ID NO: 266529 - RNA, 19 nt, Artificial Sequence
  Description of Artificial Sequence: Synthetic oligonucleotide
auauaacgucucacuaaac

SEQ ID NO: 266530 - RNA, 19 nt, Artificial Sequence
  Description of Artificial Sequence: Synthetic oligonucleotide
ucaccgaaauaaauauauu

SEQ ID NO: 266531 - RNA, 19 nt, Artificial Sequence
  Description of Artificial Sequence: Synthetic oligonucleotide
uucuaaaguuuaaccucuc

SEQ ID NO: 266532 - RNA, 19 nt, Artificial Sequence
  Description of Artificial Sequence: Synthetic oligonucleotide
accaaucgugcugauguag

SEQ ID NO: 266533 - RNA, 19 nt, Artificial Sequence
  Description of Artificial Sequence: Synthetic oligonucleotide
uguuguagugcagcuacau

SEQ ID NO: 266534 - RNA, 19 nt, Artificial Sequence
  Description of Artificial Sequence: Synthetic oligonucleotide
aucgucaugaaagacuguu

SEQ ID NO: 266535 - RNA, 19 nt, Artificial Sequence
  Description of Artificial Sequence: Synthetic oligonucleotide
aaucccuauuucccuuuaa

SEQ ID NO: 266536 - RNA, 19 nt, Artificial Sequence
  Description of Artificial Sequence: Synthetic oligonucleotide
uuuguggucaggucacauu

SEQ ID NO: 266537 - RNA, 19 nt, Artificial Sequence
  Description of Artificial Sequence: Synthetic oligonucleotide
uugcgaauucauugcugug

SEQ ID NO: 266538 - RNA, 19 nt, Artificial Sequence
  Description of Artificial Sequence: Synthetic oligonucleotide
gcuagcgucugaaagagac

SEQ ID NO: 266539 - RNA, 19 nt, Artificial Sequence
  Description of Artificial Sequence: Synthetic oligonucleotide
acuaaacccaacaucuaaa

SEQ ID NO: 266540 - RNA, 19 nt, Artificial Sequence
  Description of Artificial Sequence: Synthetic oligonucleotide
cuguugaguauaaugcaaa

SEQ ID NO: 266541 - RNA, 19 nt, Artificial Sequence
  Description of Artificial Sequence: Synthetic oligonucleotide
gggcaaucaacauuuccug

SEQ ID NO: 266542 - RNA, 19 nt, Artificial Sequence
  Description of Artificial Sequence: Synthetic oligonucleotide
cucacuaaacuuuaugcau

SEQ ID NO: 266543 - RNA, 19 nt, Artificial Sequence
  Description of Artificial Sequence: Synthetic oligonucleotide
auuccuucgcuguugugua

SEQ ID NO: 266544 - RNA, 19 nt, Artificial Sequence
  Description of Artificial Sequence: Synthetic oligonucleotide
uccauguuuucaguuaauu

SEQ ID NO: 266545 - RNA, 19 nt, Artificial Sequence
  Description of Artificial Sequence: Synthetic oligonucleotide
cagaucuuacauauaacgu

SEQ ID NO: 266546 - RNA, 19 nt, Artificial Sequence
  Description of Artificial Sequence: Synthetic oligonucleotide
gauaggucuacagugcccu

SEQ ID NO: 266547 - RNA, 19 nt, Artificial Sequence
  Description of Artificial Sequence: Synthetic oligonucleotide
acuagcaaaucagaucuua

SEQ ID NO: 266548 - RNA, 19 nt, Artificial Sequence
  Description of Artificial Sequence: Synthetic oligonucleotide
aucuuacauauaacgucuc

SEQ ID NO: 266549 - RNA, 19 nt, Artificial Sequence
  Description of Artificial Sequence: Synthetic oligonucleotide
auguagcuuuccguguacg

SEQ ID NO: 266550 - RNA, 19 nt, Artificial Sequence
  Description of Artificial Sequence: Synthetic oligonucleotide
cucuauaguucggaucuug

SEQ ID NO: 266551 - RNA, 19 nt, Artificial Sequence
  Description of Artificial Sequence: Synthetic oligonucleotide
ggucuauuacuagaaagca

SEQ ID NO: 266552 - RNA, 19 nt, Artificial Sequence
  Description of Artificial Sequence: Synthetic oligonucleotide
aggucuacagugcccuugu

SEQ ID NO: 266553 - RNA, 19 nt, Artificial Sequence
  Description of Artificial Sequence: Synthetic oligonucleotide
cuauaguucggaucuugaa

SEQ ID NO: 266554 - RNA, 19 nt, Artificial Sequence
  Description of Artificial Sequence: Synthetic oligonucleotide
ggaaauugacagacacugg

SEQ ID NO: 266555 - RNA, 19 nt, Artificial Sequence
  Description of Artificial Sequence: Synthetic oligonucleotide
cuaugaugccaugggcucc

SEQ ID NO: 266556 - RNA, 19 nt, Artificial Sequence
  Description of Artificial Sequence: Synthetic oligonucleotide
aacgucucacuaaacuuua

SEQ ID NO: 266557 - RNA, 19 nt, Artificial Sequence
  Description of Artificial Sequence: Synthetic oligonucleotide
guauaaugcaaaucccuau

SEQ ID NO: 266558 - RNA, 19 nt, Artificial Sequence
  Description of Artificial Sequence: Synthetic oligonucleotide
aagucaguauugaccauuu

SEQ ID NO: 266559 - RNA, 19 nt, Artificial Sequence
  Description of Artificial Sequence: Synthetic oligonucleotide
acgguaagaaucuguugua

SEQ ID NO: 266560 - RNA, 19 nt, Artificial Sequence
  Description of Artificial Sequence: Synthetic oligonucleotide
caauacuuaucaccauaca

SEQ ID NO: 266561 - RNA, 19 nt, Artificial Sequence
  Description of Artificial Sequence: Synthetic oligonucleotide
uacuaaguugcaggccagc

SEQ ID NO: 266562 - RNA, 19 nt, Artificial Sequence
  Description of Artificial Sequence: Synthetic oligonucleotide
acaauauucugcagccaca

SEQ ID NO: 266563 - RNA, 19 nt, Artificial Sequence
  Description of Artificial Sequence: Synthetic oligonucleotide
guuacauagugugcaacaa

SEQ ID NO: 266564 - RNA, 19 nt, Artificial Sequence
  Description of Artificial Sequence: Synthetic oligonucleotide
ccaaucgugcugauguagc

SEQ ID NO: 266565 - RNA, 19 nt, Artificial Sequence
  Description of Artificial Sequence: Synthetic oligonucleotide
cagaaucgccaaucagaag

SEQ ID NO: 266566 - RNA, 19 nt, Artificial Sequence
  Description of Artificial Sequence: Synthetic oligonucleotide
uccguguacgugucaucug

SEQ ID NO: 266567 - RNA, 19 nt, Artificial Sequence
  Description of Artificial Sequence: Synthetic oligonucleotide
ccgucuaacucuauaguuc

SEQ ID NO: 266568 - RNA, 19 nt, Artificial Sequence
  Description of Artificial Sequence: Synthetic oligonucleotide
cuugguuacaagugaauuu

SEQ ID NO: 266569 - RNA, 19 nt, Artificial Sequence
  Description of Artificial Sequence: Synthetic oligonucleotide
gauugucuucccgucuaac

SEQ ID NO: 266570 - RNA, 19 nt, Artificial Sequence
  Description of Artificial Sequence: Synthetic oligonucleotide
aaggacggaggcaaauuuu

SEQ ID NO: 266571 - RNA, 19 nt, Artificial Sequence
  Description of Artificial Sequence: Synthetic oligonucleotide
uggaggugauuguucgaaa

SEQ ID NO: 266572 - RNA, 19 nt, Artificial Sequence
  Description of Artificial Sequence: Synthetic oligonucleotide
aaucgccaaucagaaguaa

SEQ ID NO: 266573 - RNA, 19 nt, Artificial Sequence
  Description of Artificial Sequence: Synthetic oligonucleotide
aucuagcauccauguuuuc

SEQ ID NO: 266574 - RNA, 19 nt, Artificial Sequence
  Description of Artificial Sequence: Synthetic oligonucleotide
uuagggcaaucaacauuuc

SEQ ID NO: 266575 - RNA, 19 nt, Artificial Sequence
  Description of Artificial Sequence: Synthetic oligonucleotide
ccuuuaaccauaagaauua

SEQ ID NO: 266576 - RNA, 19 nt, Artificial Sequence
  Description of Artificial Sequence: Synthetic oligonucleotide
caucuaaacaugccaauau

SEQ ID NO: 266577 - RNA, 19 nt, Artificial Sequence
  Description of Artificial Sequence: Synthetic oligonucleotide
uuuuaacauuggacuucuc

SEQ ID NO: 266578 - RNA, 19 nt, Artificial Sequence
  Description of Artificial Sequence: Synthetic oligonucleotide
uggaaacgguaagaaucug

SEQ ID NO: 266579 - RNA, 19 nt, Artificial Sequence
  Description of Artificial Sequence: Synthetic oligonucleotide
cuuaaaugcuagcgucuga

SEQ ID NO: 266580 - RNA, 19 nt, Artificial Sequence
  Description of Artificial Sequence: Synthetic oligonucleotide
auacuaaguugcaggccag

SEQ ID NO: 266581 - RNA, 19 nt, Artificial Sequence
  Description of Artificial Sequence: Synthetic oligonucleotide
acgugucaucugcaaaccu

SEQ ID NO: 266582 - RNA, 19 nt, Artificial Sequence
  Description of Artificial Sequence: Synthetic oligonucleotide
aucgucuguuuagugaaaa

SEQ ID NO: 266583 - RNA, 19 nt, Artificial Sequence
  Description of Artificial Sequence: Synthetic oligonucleotide
aauuggcuguugaguauaa

SEQ ID NO: 266584 - RNA, 19 nt, Artificial Sequence
  Description of Artificial Sequence: Synthetic oligonucleotide
gcaaaucagaucuuacaua

SEQ ID NO: 266585 - RNA, 19 nt, Artificial Sequence
  Description of Artificial Sequence: Synthetic oligonucleotide
gcaaucaacauuuccugcu

SEQ ID NO: 266586 - RNA, 19 nt, Artificial Sequence
  Description of Artificial Sequence: Synthetic oligonucleotide
accccagaaucgccaauca

SEQ ID NO: 266587 - RNA, 19 nt, Artificial Sequence
  Description of Artificial Sequence: Synthetic oligonucleotide
acacaacuaugaugccaug

SEQ ID NO: 266588 - RNA, 19 nt, Artificial Sequence
  Description of Artificial Sequence: Synthetic oligonucleotide
gguaagaaucuguuguagu

SEQ ID NO: 266589 - RNA, 19 nt, Artificial Sequence
  Description of Artificial Sequence: Synthetic oligonucleotide
uucuacaauuagggcaauc

SEQ ID NO: 266590 - RNA, 19 nt, Artificial Sequence
  Description of Artificial Sequence: Synthetic oligonucleotide
acuaaacuuuaugcaugga

SEQ ID NO: 266591 - RNA, 19 nt, Artificial Sequence
  Description of Artificial Sequence: Synthetic oligonucleotide
ugaccucugucaccuuaaa

SEQ ID NO: 266592 - RNA, 19 nt, Artificial Sequence
  Description of Artificial Sequence: Synthetic oligonucleotide
ccguguacgugucaucugc

SEQ ID NO: 266593 - RNA, 19 nt, Artificial Sequence
  Description of Artificial Sequence: Synthetic oligonucleotide
guggaaacgguaagaaucu

SEQ ID NO: 266594 - RNA, 19 nt, Artificial Sequence
  Description of Artificial Sequence: Synthetic oligonucleotide
guuguagugcagcuacaua

SEQ ID NO: 266595 - RNA, 19 nt, Artificial Sequence
  Description of Artificial Sequence: Synthetic oligonucleotide
ugcuagcgucugaaagaga

SEQ ID NO: 266596 - RNA, 19 nt, Artificial Sequence
  Description of Artificial Sequence: Synthetic oligonucleotide
acuugguuucccacaguga

SEQ ID NO: 266597 - RNA, 19 nt, Artificial Sequence
  Description of Artificial Sequence: Synthetic oligonucleotide
aaucgucuguuuagugaaa

SEQ ID NO: 266598 - RNA, 19 nt, Artificial Sequence
  Description of Artificial Sequence: Synthetic oligonucleotide
gaaucgccaaucagaagua

SEQ ID NO: 266599 - RNA, 19 nt, Artificial Sequence
  Description of Artificial Sequence: Synthetic oligonucleotide
aggucccagucaacaaaac

SEQ ID NO: 266600 - RNA, 19 nt, Artificial Sequence
  Description of Artificial Sequence: Synthetic oligonucleotide
aggacggaggcaaauuuua

SEQ ID NO: 266601 - RNA, 19 nt, Artificial Sequence
  Description of Artificial Sequence: Synthetic oligonucleotide
gcuguuguguaaucuacua

SEQ ID NO: 266602 - RNA, 19 nt, Artificial Sequence
  Description of Artificial Sequence: Synthetic oligonucleotide
ccagaaucgccaaucagaa

SEQ ID NO: 266603 - RNA, 19 nt, Artificial Sequence
  Description of Artificial Sequence: Synthetic oligonucleotide
cuaacucuauaguucggau

SEQ ID NO: 266604 - RNA, 19 nt, Artificial Sequence
  Description of Artificial Sequence: Synthetic oligonucleotide
aacaaggauuacacacauu

SEQ ID NO: 266605 - RNA, 19 nt, Artificial Sequence
  Description of Artificial Sequence: Synthetic oligonucleotide
agcuuuccguguacguguc

SEQ ID NO: 266606 - RNA, 19 nt, Artificial Sequence
  Description of Artificial Sequence: Synthetic oligonucleotide
guggucaggucacauuugu

SEQ ID NO: 266607 - RNA, 19 nt, Artificial Sequence
  Description of Artificial Sequence: Synthetic oligonucleotide
cagaaguaacuugaauaaa

SEQ ID NO: 266608 - RNA, 19 nt, Artificial Sequence
  Description of Artificial Sequence: Synthetic oligonucleotide
ccuuaaaugcuagcgucug

SEQ ID NO: 266609 - RNA, 19 nt, Artificial Sequence
  Description of Artificial Sequence: Synthetic oligonucleotide
cuuguugcacacacaaauu

SEQ ID NO: 266610 - RNA, 19 nt, Artificial Sequence
  Description of Artificial Sequence: Synthetic oligonucleotide
agacuguucuacauucguu

SEQ ID NO: 266611 - RNA, 19 nt, Artificial Sequence
  Description of Artificial Sequence: Synthetic oligonucleotide
ucccuaccaacaacuuguu

SEQ ID NO: 266612 - RNA, 19 nt, Artificial Sequence
  Description of Artificial Sequence: Synthetic oligonucleotide
aacuagcaaaucagaucuu

SEQ ID NO: 266613 - RNA, 19 nt, Artificial Sequence
  Description of Artificial Sequence: Synthetic oligonucleotide
agucaguauugaccauuua

SEQ ID NO: 266614 - RNA, 19 nt, Artificial Sequence
  Description of Artificial Sequence: Synthetic oligonucleotide
caaagucuaggaccuugaa

SEQ ID NO: 266615 - RNA, 19 nt, Artificial Sequence
  Description of Artificial Sequence: Synthetic oligonucleotide
ggacggaggcaaauuuuag

SEQ ID NO: 266616 - RNA, 19 nt, Artificial Sequence
  Description of Artificial Sequence: Synthetic oligonucleotide
caucuagcauccauguuuu

SEQ ID NO: 266617 - RNA, 19 nt, Artificial Sequence
  Description of Artificial Sequence: Synthetic oligonucleotide
cucugaccuuguggaaacg

SEQ ID NO: 266618 - RNA, 19 nt, Artificial Sequence
  Description of Artificial Sequence: Synthetic oligonucleotide
cccuuuaaccauaagaauu

SEQ ID NO: 266619 - RNA, 19 nt, Artificial Sequence
  Description of Artificial Sequence: Synthetic oligonucleotide
caucauucccaucuagcau

SEQ ID NO: 266620 - RNA, 19 nt, Artificial Sequence
  Description of Artificial Sequence: Synthetic oligonucleotide
uuccuucgcuguuguguaa

SEQ ID NO: 266621 - RNA, 19 nt, Artificial Sequence
  Description of Artificial Sequence: Synthetic oligonucleotide
agugaauuugaggccucuu

SEQ ID NO: 266622 - RNA, 19 nt, Artificial Sequence
  Description of Artificial Sequence: Synthetic oligonucleotide
cgucucacuaaacuuuaug

SEQ ID NO: 266623 - RNA, 19 nt, Artificial Sequence
  Description of Artificial Sequence: Synthetic oligonucleotide
cguugcauucuuagcacug

SEQ ID NO: 266624 - RNA, 19 nt, Artificial Sequence
  Description of Artificial Sequence: Synthetic oligonucleotide
gaucucuguuaggggccag

SEQ ID NO: 266625 - RNA, 19 nt, Artificial Sequence
  Description of Artificial Sequence: Synthetic oligonucleotide
aaacaaccucugaccucug

SEQ ID NO: 266626 - RNA, 19 nt, Artificial Sequence
  Description of Artificial Sequence: Synthetic oligonucleotide
ccuagaaguggagucagga

SEQ ID NO: 266627 - RNA, 19 nt, Artificial Sequence
  Description of Artificial Sequence: Synthetic oligonucleotide
gcagaguaugaagaaacua

SEQ ID NO: 266628 - RNA, 19 nt, Artificial Sequence
  Description of Artificial Sequence: Synthetic oligonucleotide
auuggcuguugaguauaau

SEQ ID NO: 266629 - RNA, 19 nt, Artificial Sequence
  Description of Artificial Sequence: Synthetic oligonucleotide
ucuucccgucuaacucuau

SEQ ID NO: 266630 - RNA, 19 nt, Artificial Sequence
  Description of Artificial Sequence: Synthetic oligonucleotide
cuucccgucuaacucuaua

SEQ ID NO: 266631 - RNA, 19 nt, Artificial Sequence
  Description of Artificial Sequence: Synthetic oligonucleotide
ggaaacgguaagaaucugu

SEQ ID NO: 266632 - RNA, 19 nt, Artificial Sequence
  Description of Artificial Sequence: Synthetic oligonucleotide
gcagcuacauacaguacaa

SEQ ID NO: 266633 - RNA, 19 nt, Artificial Sequence
  Description of Artificial Sequence: Synthetic oligonucleotide
cuguuguagugcagcuaca

SEQ ID NO: 266634 - RNA, 19 nt, Artificial Sequence
  Description of Artificial Sequence: Synthetic oligonucleotide
ccgaaauaaauauauuauu

SEQ ID NO: 266635 - RNA, 19 nt, Artificial Sequence
  Description of Artificial Sequence: Synthetic oligonucleotide
uacuuccaauaaguacaau

SEQ ID NO: 266636 - RNA, 19 nt, Artificial Sequence
  Description of Artificial Sequence: Synthetic oligonucleotide
ggaggugauuguucgaaau

SEQ ID NO: 266637 - RNA, 19 nt, Artificial Sequence
  Description of Artificial Sequence: Synthetic oligonucleotide
auaggucuacagugcccuu

SEQ ID NO: 266638 - RNA, 19 nt, Artificial Sequence
  Description of Artificial Sequence: Synthetic oligonucleotide
cuagcgucugaaagagacu

SEQ ID NO: 266639 - RNA, 19 nt, Artificial Sequence
  Description of Artificial Sequence: Synthetic oligonucleotide
gaauguuugccugcuuguu

SEQ ID NO: 266640 - RNA, 19 nt, Artificial Sequence
  Description of Artificial Sequence: Synthetic oligonucleotide
caaccacgggaaacaaucu

SEQ ID NO: 266641 - RNA, 19 nt, Artificial Sequence
  Description of Artificial Sequence: Synthetic oligonucleotide
gcaggucuauuacuagaaa

SEQ ID NO: 266642 - RNA, 19 nt, Artificial Sequence
  Description of Artificial Sequence: Synthetic oligonucleotide
gcaagacuuuccaacccca

SEQ ID NO: 266643 - RNA, 19 nt, Artificial Sequence
  Description of Artificial Sequence: Synthetic oligonucleotide
cucggcugccaucgucaug

SEQ ID NO: 266644 - RNA, 19 nt, Artificial Sequence
  Description of Artificial Sequence: Synthetic oligonucleotide
cuacauucguugcauucuu

SEQ ID NO: 266645 - RNA, 19 nt, Artificial Sequence
  Description of Artificial Sequence: Synthetic oligonucleotide
ccccagaaucgccaaucag

SEQ ID NO: 266646 - RNA, 19 nt, Artificial Sequence
  Description of Artificial Sequence: Synthetic oligonucleotide
gcugugcuauuauuagaua

SEQ ID NO: 266647 - RNA, 19 nt, Artificial Sequence
  Description of Artificial Sequence: Synthetic oligonucleotide
cuucgcuguuguguaaucu

SEQ ID NO: 266648 - RNA, 19 nt, Artificial Sequence
  Description of Artificial Sequence: Synthetic oligonucleotide
caugugcagucuuguggua

SEQ ID NO: 266649 - RNA, 19 nt, Artificial Sequence
  Description of Artificial Sequence: Synthetic oligonucleotide
cccuaccaacaacuuguug

SEQ ID NO: 266650 - RNA, 19 nt, Artificial Sequence
  Description of Artificial Sequence: Synthetic oligonucleotide
ggaucucuguuaggggcca

SEQ ID NO: 266651 - RNA, 19 nt, Artificial Sequence
  Description of Artificial Sequence: Synthetic oligonucleotide
acgucucacuaaacuuuau

SEQ ID NO: 266652 - RNA, 19 nt, Artificial Sequence
  Description of Artificial Sequence: Synthetic oligonucleotide
ccugaucugucacaucaua

SEQ ID NO: 266653 - RNA, 19 nt, Artificial Sequence
  Description of Artificial Sequence: Synthetic oligonucleotide
gccugcuuguuuaaaccaa

SEQ ID NO: 266654 - RNA, 19 nt, Artificial Sequence
  Description of Artificial Sequence: Synthetic oligonucleotide
caccaaucgugcugaugua

SEQ ID NO: 266655 - RNA, 19 nt, Artificial Sequence
  Description of Artificial Sequence: Synthetic oligonucleotide
gacacugguugugcuguuu

SEQ ID NO: 266656 - RNA, 19 nt, Artificial Sequence
  Description of Artificial Sequence: Synthetic oligonucleotide
cccgucuaacucuauaguu

SEQ ID NO: 266657 - RNA, 19 nt, Artificial Sequence
  Description of Artificial Sequence: Synthetic oligonucleotide
gcuuuccguguacguguca

SEQ ID NO: 266658 - RNA, 19 nt, Artificial Sequence
  Description of Artificial Sequence: Synthetic oligonucleotide
ccacgggaaacaaucuggu

SEQ ID NO: 266659 - RNA, 19 nt, Artificial Sequence
  Description of Artificial Sequence: Synthetic oligonucleotide
ccuugguuacaagugaauu

SEQ ID NO: 266660 - RNA, 19 nt, Artificial Sequence
  Description of Artificial Sequence: Synthetic oligonucleotide
caguacaauucaggcaauu

SEQ ID NO: 266661 - RNA, 19 nt, Artificial Sequence
  Description of Artificial Sequence: Synthetic oligonucleotide
cagcuacauacaguacaau

SEQ ID NO: 266662 - RNA, 19 nt, Artificial Sequence
  Description of Artificial Sequence: Synthetic oligonucleotide
cuggagugcucuggauuuu

SEQ ID NO: 266663 - RNA, 19 nt, Artificial Sequence
  Description of Artificial Sequence: Synthetic oligonucleotide
uaucauaaaaccaagaguc

SEQ ID NO: 266664 - RNA, 19 nt, Artificial Sequence
  Description of Artificial Sequence: Synthetic oligonucleotide
uugaguauuagccaggcgg

SEQ ID NO: 266665 - RNA, 19 nt, Artificial Sequence
  Description of Artificial Sequence: Synthetic oligonucleotide
aagucuguaacacagaaca

SEQ ID NO: 266666 - RNA, 19 nt, Artificial Sequence
  Description of Artificial Sequence: Synthetic oligonucleotide
ugacauuguacucagacag

SEQ ID NO: 266667 - RNA, 19 nt, Artificial Sequence
  Description of Artificial Sequence: Synthetic oligonucleotide
aauagcugacgguaaaucg

SEQ ID NO: 266668 - RNA, 19 nt, Artificial Sequence
  Description of Artificial Sequence: Synthetic oligonucleotide
uaaauuacaggccuaaacu

SEQ ID NO: 266669 - RNA, 19 nt, Artificial Sequence
  Description of Artificial Sequence: Synthetic oligonucleotide
uaaacuacgaaauuuugca

SEQ ID NO: 266670 - RNA, 19 nt, Artificial Sequence
  Description of Artificial Sequence: Synthetic oligonucleotide
uugacuauagcauucuucc

SEQ ID NO: 266671 - RNA, 19 nt, Artificial Sequence
  Description of Artificial Sequence: Synthetic oligonucleotide
aacgauuucaaaaucguuc

SEQ ID NO: 266672 - RNA, 19 nt, Artificial Sequence
  Description of Artificial Sequence: Synthetic oligonucleotide
auaucaaucggaucaggcc

SEQ ID NO: 266673 - RNA, 19 nt, Artificial Sequence
  Description of Artificial Sequence: Synthetic oligonucleotide
ucaaauugggauuucagca

SEQ ID NO: 266674 - RNA, 19 nt, Artificial Sequence
  Description of Artificial Sequence: Synthetic oligonucleotide
uagaacgauuucaaaaucg

SEQ ID NO: 266675 - RNA, 19 nt, Artificial Sequence
  Description of Artificial Sequence: Synthetic oligonucleotide
aaugauuggagcaaugguc

SEQ ID NO: 266676 - RNA, 19 nt, Artificial Sequence
  Description of Artificial Sequence: Synthetic oligonucleotide
uucgaaacaacugagaaac

SEQ ID NO: 266677 - RNA, 19 nt, Artificial Sequence
  Description of Artificial Sequence: Synthetic oligonucleotide
gucauaaugaagcauagug

SEQ ID NO: 266678 - RNA, 19 nt, Artificial Sequence
  Description of Artificial Sequence: Synthetic oligonucleotide
agaaacaucaguuucgccu

SEQ ID NO: 266679 - RNA, 19 nt, Artificial Sequence
  Description of Artificial Sequence: Synthetic oligonucleotide
aaagggguagacaaaaccg

SEQ ID NO: 266680 - RNA, 19 nt, Artificial Sequence
  Description of Artificial Sequence: Synthetic oligonucleotide
ucuggauuaauguuuaacu

SEQ ID NO: 266681 - RNA, 19 nt, Artificial Sequence
  Description of Artificial Sequence: Synthetic oligonucleotide
gaacacgcaagauuggugg

SEQ ID NO: 266682 - RNA, 19 nt, Artificial Sequence
  Description of Artificial Sequence: Synthetic oligonucleotide
ugcaucugaaaucugagga

SEQ ID NO: 266683 - RNA, 19 nt, Artificial Sequence
  Description of Artificial Sequence: Synthetic oligonucleotide
auaauuuucgaccucauua

SEQ ID NO: 266684 - RNA, 19 nt, Artificial Sequence
  Description of Artificial Sequence: Synthetic oligonucleotide
aagauaggcaaugugaucu

SEQ ID NO: 266685 - RNA, 19 nt, Artificial Sequence
  Description of Artificial Sequence: Synthetic oligonucleotide
uguguagcggcucugacca

SEQ ID NO: 266686 - RNA, 19 nt, Artificial Sequence
  Description of Artificial Sequence: Synthetic oligonucleotide
acuacgaaauuuugcaaac

SEQ ID NO: 266687 - RNA, 19 nt, Artificial Sequence
  Description of Artificial Sequence: Synthetic oligonucleotide
ugaguauuagccaggcggg

SEQ ID NO: 266688 - RNA, 19 nt, Artificial Sequence
  Description of Artificial Sequence: Synthetic oligonucleotide
gacaccacuaguuugaaga

SEQ ID NO: 266689 - RNA, 19 nt, Artificial Sequence
  Description of Artificial Sequence: Synthetic oligonucleotide
uuauaaucaacuccucucu

SEQ ID NO: 266690 - RNA, 19 nt, Artificial Sequence
  Description of Artificial Sequence: Synthetic oligonucleotide
agugauucgauucuguccu

SEQ ID NO: 266691 - RNA, 19 nt, Artificial Sequence
  Description of Artificial Sequence: Synthetic oligonucleotide
aagauuagcccuuguguag

SEQ ID NO: 266692 - RNA, 19 nt, Artificial Sequence
  Description of Artificial Sequence: Synthetic oligonucleotide
auuuggagucugcacaacc

SEQ ID NO: 266693 - RNA, 19 nt, Artificial Sequence
  Description of Artificial Sequence: Synthetic oligonucleotide
gaaagggguagacaaaacc

SEQ ID NO: 266694 - RNA, 19 nt, Artificial Sequence
  Description of Artificial Sequence: Synthetic oligonucleotide
auugguagcaaauccagca

SEQ ID NO: 266695 - RNA, 19 nt, Artificial Sequence
  Description of Artificial Sequence: Synthetic oligonucleotide
aguucgugauuccagacuc

SEQ ID NO: 266696 - RNA, 19 nt, Artificial Sequence
  Description of Artificial Sequence: Synthetic oligonucleotide
ucaaaaucguucuuaggug

SEQ ID NO: 266697 - RNA, 19 nt, Artificial Sequence
  Description of Artificial Sequence: Synthetic oligonucleotide
ugucguaacuuccugaagu

SEQ ID NO: 266698 - RNA, 19 nt, Artificial Sequence
  Description of Artificial Sequence: Synthetic oligonucleotide
aagugcguagcucuaagug

SEQ ID NO: 266699 - RNA, 19 nt, Artificial Sequence
  Description of Artificial Sequence: Synthetic oligonucleotide
auaggggugaugaagaagg

SEQ ID NO: 266700 - RNA, 19 nt, Artificial Sequence
  Description of Artificial Sequence: Synthetic oligonucleotide
uccaucaagauccugcugu

SEQ ID NO: 266701 - RNA, 19 nt, Artificial Sequence
  Description of Artificial Sequence: Synthetic oligonucleotide
uuaaaggucuuaaaauagu

SEQ ID NO: 266702 - RNA, 19 nt, Artificial Sequence
  Description of Artificial Sequence: Synthetic oligonucleotide
aaucggaucaggccgagcu

SEQ ID NO: 266703 - RNA, 19 nt, Artificial Sequence
  Description of Artificial Sequence: Synthetic oligonucleotide
uguaacacagaacacgcaa

SEQ ID NO: 266704 - RNA, 19 nt, Artificial Sequence
  Description of Artificial Sequence: Synthetic oligonucleotide
aacuacgaaauuuugcaaa

SEQ ID NO: 266705 - RNA, 19 nt, Artificial Sequence
  Description of Artificial Sequence: Synthetic oligonucleotide
auuuacuucagacggucuc

SEQ ID NO: 266706 - RNA, 19 nt, Artificial Sequence
  Description of Artificial Sequence: Synthetic oligonucleotide
acuauagcauucuucccac

SEQ ID NO: 266707 - RNA, 19 nt, Artificial Sequence
  Description of Artificial Sequence: Synthetic oligonucleotide
caaaaucguucuuaggugc

SEQ ID NO: 266708 - RNA, 19 nt, Artificial Sequence
  Description of Artificial Sequence: Synthetic oligonucleotide
acggagauguucucgagac

SEQ ID NO: 266709 - RNA, 19 nt, Artificial Sequence
  Description of Artificial Sequence: Synthetic oligonucleotide
ucugcaaaucuguuagagg

SEQ ID NO: 266710 - RNA, 19 nt, Artificial Sequence
  Description of Artificial Sequence: Synthetic oligonucleotide
agggcuaugcucaagauag

SEQ ID NO: 266711 - RNA, 19 nt, Artificial Sequence
  Description of Artificial Sequence: Synthetic oligonucleotide
aaaagugcguagcucuaag

SEQ ID NO: 266712 - RNA, 19 nt, Artificial Sequence
  Description of Artificial Sequence: Synthetic oligonucleotide
agacggucucgguagaucc

SEQ ID NO: 266713 - RNA, 19 nt, Artificial Sequence
  Description of Artificial Sequence: Synthetic oligonucleotide
uuucuaugccagcugcucg

SEQ ID NO: 266714 - RNA, 19 nt, Artificial Sequence
  Description of Artificial Sequence: Synthetic oligonucleotide
cagguuuaagcuuucgggg

SEQ ID NO: 266715 - RNA, 19 nt, Artificial Sequence
  Description of Artificial Sequence: Synthetic oligonucleotide
aagguuuacucacaggcaa

SEQ ID NO: 266716 - RNA, 19 nt, Artificial Sequence
  Description of Artificial Sequence: Synthetic oligonucleotide
ucuggauaauuuucgaccu

SEQ ID NO: 266717 - RNA, 19 nt, Artificial Sequence
  Description of Artificial Sequence: Synthetic oligonucleotide
cauaucaaucggaucaggc

SEQ ID NO: 266718 - RNA, 19 nt, Artificial Sequence
  Description of Artificial Sequence: Synthetic oligonucleotide
cauaaaaccaagagucuug

SEQ ID NO: 266719 - RNA, 19 nt, Artificial Sequence
  Description of Artificial Sequence: Synthetic oligonucleotide
ucucauaagggcuaugcuc

SEQ ID NO: 266720 - RNA, 19 nt, Artificial Sequence
  Description of Artificial Sequence: Synthetic oligonucleotide
ugguagaacgauuucaaaa

SEQ ID NO: 266721 - RNA, 19 nt, Artificial Sequence
  Description of Artificial Sequence: Synthetic oligonucleotide
acgauuucaaaaucguucu

SEQ ID NO: 266722 - RNA, 19 nt, Artificial Sequence
  Description of Artificial Sequence: Synthetic oligonucleotide
uaauuuucgaccucauuau

SEQ ID NO: 266723 - RNA, 19 nt, Artificial Sequence
  Description of Artificial Sequence: Synthetic oligonucleotide
gugguucuacauuuaaagg

SEQ ID NO: 266724 - RNA, 19 nt, Artificial Sequence
  Description of Artificial Sequence: Synthetic oligonucleotide
cagcauuauaaucaacucc

SEQ ID NO: 266725 - RNA, 19 nt, Artificial Sequence
  Description of Artificial Sequence: Synthetic oligonucleotide
gacuauagcauucuuccca

SEQ ID NO: 266726 - RNA, 19 nt, Artificial Sequence
  Description of Artificial Sequence: Synthetic oligonucleotide
cucuuguaccaacacaucc

SEQ ID NO: 266727 - RNA, 19 nt, Artificial Sequence
  Description of Artificial Sequence: Synthetic oligonucleotide
agaaugagcgucuggauaa

SEQ ID NO: 266728 - RNA, 19 nt, Artificial Sequence
  Description of Artificial Sequence: Synthetic oligonucleotide
ucuuccuuuagacacucaa

SEQ ID NO: 266729 - RNA, 19 nt, Artificial Sequence
  Description of Artificial Sequence: Synthetic oligonucleotide
uuuucgaccucauuauccu

SEQ ID NO: 266730 - RNA, 19 nt, Artificial Sequence
  Description of Artificial Sequence: Synthetic oligonucleotide
ugaagaauagcugacggua

SEQ ID NO: 266731 - RNA, 19 nt, Artificial Sequence
  Description of Artificial Sequence: Synthetic oligonucleotide
uccuuuagacacucaagcc

SEQ ID NO: 266732 - RNA, 19 nt, Artificial Sequence
  Description of Artificial Sequence: Synthetic oligonucleotide
agaucuuagcucuccauca

SEQ ID NO: 266733 - RNA, 19 nt, Artificial Sequence
  Description of Artificial Sequence: Synthetic oligonucleotide
uucugcaaaucuguuagag

SEQ ID NO: 266734 - RNA, 19 nt, Artificial Sequence
  Description of Artificial Sequence: Synthetic oligonucleotide
agccauucauaccaucugg

SEQ ID NO: 266735 - RNA, 19 nt, Artificial Sequence
  Description of Artificial Sequence: Synthetic oligonucleotide
aagaaugagcgucuggaua

SEQ ID NO: 266736 - RNA, 19 nt, Artificial Sequence
  Description of Artificial Sequence: Synthetic oligonucleotide
auagcugacgguaaaucgg

SEQ ID NO: 266737 - RNA, 19 nt, Artificial Sequence
  Description of Artificial Sequence: Synthetic oligonucleotide
guagacaaaaccguauuug

SEQ ID NO: 266738 - RNA, 19 nt, Artificial Sequence
  Description of Artificial Sequence: Synthetic oligonucleotide
agacacucaagccuccggg

SEQ ID NO: 266739 - RNA, 19 nt, Artificial Sequence
  Description of Artificial Sequence: Synthetic oligonucleotide
aaacuacgaaauuuugcaa

SEQ ID NO: 266740 - RNA, 19 nt, Artificial Sequence
  Description of Artificial Sequence: Synthetic oligonucleotide
ucauucgaaacaacugaga

SEQ ID NO: 266741 - RNA, 19 nt, Artificial Sequence
  Description of Artificial Sequence: Synthetic oligonucleotide
agauuagcccuuguguagc

SEQ ID NO: 266742 - RNA, 19 nt, Artificial Sequence
  Description of Artificial Sequence: Synthetic oligonucleotide
ucgucuuuucugaagggca

SEQ ID NO: 266743 - RNA, 19 nt, Artificial Sequence
  Description of Artificial Sequence: Synthetic oligonucleotide
uauuucacguucuuccagu

SEQ ID NO: 266744 - RNA, 19 nt, Artificial Sequence
  Description of Artificial Sequence: Synthetic oligonucleotide
auaagggcuaugcucaaga

SEQ ID NO: 266745 - RNA, 19 nt, Artificial Sequence
  Description of Artificial Sequence: Synthetic oligonucleotide
agacugguaaccgccaagc

SEQ ID NO: 266746 - RNA, 19 nt, Artificial Sequence
  Description of Artificial Sequence: Synthetic oligonucleotide
ugucaugugaccccgguuu

SEQ ID NO: 266747 - RNA, 19 nt, Artificial Sequence
  Description of Artificial Sequence: Synthetic oligonucleotide
auuagaaggaguccugaaa

SEQ ID NO: 266748 - RNA, 19 nt, Artificial Sequence
  Description of Artificial Sequence: Synthetic oligonucleotide
cugacgguaaaucggauuc

SEQ ID NO: 266749 - RNA, 19 nt, Artificial Sequence
  Description of Artificial Sequence: Synthetic oligonucleotide
gagucagcccuucagcucc

SEQ ID NO: 266750 - RNA, 19 nt, Artificial Sequence
  Description of Artificial Sequence: Synthetic oligonucleotide
acaaaaccguauuuggagu

SEQ ID NO: 266751 - RNA, 19 nt, Artificial Sequence
  Description of Artificial Sequence: Synthetic oligonucleotide
aacuucuuggagcucugca

SEQ ID NO: 266752 - RNA, 19 nt, Artificial Sequence
  Description of Artificial Sequence: Synthetic oligonucleotide
auuauugguagcaaaucca

SEQ ID NO: 266753 - RNA, 19 nt, Artificial Sequence
  Description of Artificial Sequence: Synthetic oligonucleotide
aaauugggauuucagcauu

SEQ ID NO: 266754 - RNA, 19 nt, Artificial Sequence
  Description of Artificial Sequence: Synthetic oligonucleotide
guaucauucgaaacaacug

SEQ ID NO: 266755 - RNA, 19 nt, Artificial Sequence
  Description of Artificial Sequence: Synthetic oligonucleotide
ugucaucuauuucacguuc

SEQ ID NO: 266756 - RNA, 19 nt, Artificial Sequence
  Description of Artificial Sequence: Synthetic oligonucleotide
cucuaagugguguucuacc

SEQ ID NO: 266757 - RNA, 19 nt, Artificial Sequence
  Description of Artificial Sequence: Synthetic oligonucleotide
agugcguagcucuaaguga

SEQ ID NO: 266758 - RNA, 19 nt, Artificial Sequence
  Description of Artificial Sequence: Synthetic oligonucleotide
uuccaucugcuucacauaa

SEQ ID NO: 266759 - RNA, 19 nt, Artificial Sequence
  Description of Artificial Sequence: Synthetic oligonucleotide
aggaggaauucauagugcu

SEQ ID NO: 266760 - RNA, 19 nt, Artificial Sequence
  Description of Artificial Sequence: Synthetic oligonucleotide
aaagugcguagcucuaagu

SEQ ID NO: 266761 - RNA, 19 nt, Artificial Sequence
  Description of Artificial Sequence: Synthetic oligonucleotide
agcaagauuagcccuugug

SEQ ID NO: 266762 - RNA, 19 nt, Artificial Sequence
  Description of Artificial Sequence: Synthetic oligonucleotide
gaauagcagagucuucgug

SEQ ID NO: 266763 - RNA, 19 nt, Artificial Sequence
  Description of Artificial Sequence: Synthetic oligonucleotide
aaucguucuuaggugcagg

SEQ ID NO: 266764 - RNA, 19 nt, Artificial Sequence
  Description of Artificial Sequence: Synthetic oligonucleotide
augacgugggcaaagaaug

SEQ ID NO: 266765 - RNA, 19 nt, Artificial Sequence
  Description of Artificial Sequence: Synthetic oligonucleotide
ugucucuggauuugggucu

SEQ ID NO: 266766 - RNA, 19 nt, Artificial Sequence
  Description of Artificial Sequence: Synthetic oligonucleotide
aagaauagcugacgguaaa

SEQ ID NO: 266767 - RNA, 19 nt, Artificial Sequence
  Description of Artificial Sequence: Synthetic oligonucleotide
guaucauaaaaccaagagu

SEQ ID NO: 266768 - RNA, 19 nt, Artificial Sequence
  Description of Artificial Sequence: Synthetic oligonucleotide
uagacacucaagccuccgg

SEQ ID NO: 266769 - RNA, 19 nt, Artificial Sequence
  Description of Artificial Sequence: Synthetic oligonucleotide
uccauuagaaggaguccug

SEQ ID NO: 266770 - RNA, 19 nt, Artificial Sequence
  Description of Artificial Sequence: Synthetic oligonucleotide
uuagcccuuguguagcggc

SEQ ID NO: 266771 - RNA, 19 nt, Artificial Sequence
  Description of Artificial Sequence: Synthetic oligonucleotide
uucucuagaccacucuagu

SEQ ID NO: 266772 - RNA, 19 nt, Artificial Sequence
  Description of Artificial Sequence: Synthetic oligonucleotide
cauagcacgagacugguaa

SEQ ID NO: 266773 - RNA, 19 nt, Artificial Sequence
  Description of Artificial Sequence: Synthetic oligonucleotide
cuuaggugcagggaggccc

SEQ ID NO: 266774 - RNA, 19 nt, Artificial Sequence
  Description of Artificial Sequence: Synthetic oligonucleotide
cacgagacugguaaccgcc

SEQ ID NO: 266775 - RNA, 19 nt, Artificial Sequence
  Description of Artificial Sequence: Synthetic oligonucleotide
aaagguuuacucacaggca

SEQ ID NO: 266776 - RNA, 19 nt, Artificial Sequence
  Description of Artificial Sequence: Synthetic oligonucleotide
uuagaggugguucuacauu

SEQ ID NO: 266777 - RNA, 19 nt, Artificial Sequence
  Description of Artificial Sequence: Synthetic oligonucleotide
gauuagcccuuguguagcg

SEQ ID NO: 266778 - RNA, 19 nt, Artificial Sequence
  Description of Artificial Sequence: Synthetic oligonucleotide
uucauuuacuucagacggu

SEQ ID NO: 266779 - RNA, 19 nt, Artificial Sequence
  Description of Artificial Sequence: Synthetic oligonucleotide
acuucggggagucagcccu

SEQ ID NO: 266780 - RNA, 19 nt, Artificial Sequence
  Description of Artificial Sequence: Synthetic oligonucleotide
uaaccgccaagcaaaauuu

SEQ ID NO: 266781 - RNA, 19 nt, Artificial Sequence
  Description of Artificial Sequence: Synthetic oligonucleotide
ugggguagcauuagugacu

SEQ ID NO: 266782 - RNA, 19 nt, Artificial Sequence
  Description of Artificial Sequence: Synthetic oligonucleotide
uucuccagguuuaagcuuu

SEQ ID NO: 266783 - RNA, 19 nt, Artificial Sequence
  Description of Artificial Sequence: Synthetic oligonucleotide
auagcacgagacugguaac

SEQ ID NO: 266784 - RNA, 19 nt, Artificial Sequence
  Description of Artificial Sequence: Synthetic oligonucleotide
uagcugacgguaaaucgga

SEQ ID NO: 266785 - RNA, 19 nt, Artificial Sequence
  Description of Artificial Sequence: Synthetic oligonucleotide
caaaaccguauuuggaguc

SEQ ID NO: 266786 - RNA, 19 nt, Artificial Sequence
  Description of Artificial Sequence: Synthetic oligonucleotide
guagcucuaagugagccug

SEQ ID NO: 266787 - RNA, 19 nt, Artificial Sequence
  Description of Artificial Sequence: Synthetic oligonucleotide
auaaugaagcauagugauc

SEQ ID NO: 266788 - RNA, 19 nt, Artificial Sequence
  Description of Artificial Sequence: Synthetic oligonucleotide
aaaaccguauuuggagucu

SEQ ID NO: 266789 - RNA, 19 nt, Artificial Sequence
  Description of Artificial Sequence: Synthetic oligonucleotide
aacaacccuagacggagau

SEQ ID NO: 266790 - RNA, 19 nt, Artificial Sequence
  Description of Artificial Sequence: Synthetic oligonucleotide
ucggaucaggccgagcugg

SEQ ID NO: 266791 - RNA, 19 nt, Artificial Sequence
  Description of Artificial Sequence: Synthetic oligonucleotide
uuacaggccuaaacuacga

SEQ ID NO: 266792 - RNA, 19 nt, Artificial Sequence
  Description of Artificial Sequence: Synthetic oligonucleotide
gacauuguacucagacagg

SEQ ID NO: 266793 - RNA, 19 nt, Artificial Sequence
  Description of Artificial Sequence: Synthetic oligonucleotide
uuucgagcguccacgucag

SEQ ID NO: 266794 - RNA, 19 nt, Artificial Sequence
  Description of Artificial Sequence: Synthetic oligonucleotide
aaaucguucuuaggugcag

SEQ ID NO: 266795 - RNA, 19 nt, Artificial Sequence
  Description of Artificial Sequence: Synthetic oligonucleotide
uagaggugguucuacauuu

SEQ ID NO: 266796 - RNA, 19 nt, Artificial Sequence
  Description of Artificial Sequence: Synthetic oligonucleotide
ugacuauagcauucuuccc

SEQ ID NO: 266797 - RNA, 19 nt, Artificial Sequence
  Description of Artificial Sequence: Synthetic oligonucleotide
uucuaugccagcugcucga

SEQ ID NO: 266798 - RNA, 19 nt, Artificial Sequence
  Description of Artificial Sequence: Synthetic oligonucleotide
cugcaaaucuguuagaggu

SEQ ID NO: 266799 - RNA, 19 nt, Artificial Sequence
  Description of Artificial Sequence: Synthetic oligonucleotide
aagggguagacaaaaccgu

SEQ ID NO: 266800 - RNA, 19 nt, Artificial Sequence
  Description of Artificial Sequence: Synthetic oligonucleotide
aaaaucguucuuaggugca

SEQ ID NO: 266801 - RNA, 19 nt, Artificial Sequence
  Description of Artificial Sequence: Synthetic oligonucleotide
agaacgauuucaaaaucgu

SEQ ID NO: 266802 - RNA, 19 nt, Artificial Sequence
  Description of Artificial Sequence: Synthetic oligonucleotide
caguauccugucuugggag

SEQ ID NO: 266803 - RNA, 19 nt, Artificial Sequence
  Description of Artificial Sequence: Synthetic oligonucleotide
aagggcuaugcucaagaua

SEQ ID NO: 266804 - RNA, 19 nt, Artificial Sequence
  Description of Artificial Sequence: Synthetic oligonucleotide
cuagacggagauguucucg

SEQ ID NO: 266805 - RNA, 19 nt, Artificial Sequence
  Description of Artificial Sequence: Synthetic oligonucleotide
guagaacgauuucaaaauc

SEQ ID NO: 266806 - RNA, 19 nt, Artificial Sequence
  Description of Artificial Sequence: Synthetic oligonucleotide
ucuagaccacucuaguuuu

SEQ ID NO: 266807 - RNA, 19 nt, Artificial Sequence
  Description of Artificial Sequence: Synthetic oligonucleotide
uauaaucaacuccucucuu

SEQ ID NO: 266808 - RNA, 19 nt, Artificial Sequence
  Description of Artificial Sequence: Synthetic oligonucleotide
uuacuucagacggucucgg

SEQ ID NO: 266809 - RNA, 19 nt, Artificial Sequence
  Description of Artificial Sequence: Synthetic oligonucleotide
uccauaucaaucggaucag

SEQ ID NO: 266810 - RNA, 19 nt, Artificial Sequence
  Description of Artificial Sequence: Synthetic oligonucleotide
aacacgcaagauugguggu

SEQ ID NO: 266811 - RNA, 19 nt, Artificial Sequence
  Description of Artificial Sequence: Synthetic oligonucleotide
acaggccuaaacuacgaaa

SEQ ID NO: 266812 - RNA, 19 nt, Artificial Sequence
  Description of Artificial Sequence: Synthetic oligonucleotide
cuugcggacaugaacccuc

SEQ ID NO: 266813 - RNA, 19 nt, Artificial Sequence
  Description of Artificial Sequence: Synthetic oligonucleotide
auugagcccaccuuucaau

SEQ ID NO: 266814 - RNA, 19 nt, Artificial Sequence
  Description of Artificial Sequence: Synthetic oligonucleotide
uucuugcuagcaagauuag

SEQ ID NO: 266815 - RNA, 19 nt, Artificial Sequence
  Description of Artificial Sequence: Synthetic oligonucleotide
ucaguuucgccuugcggac

SEQ ID NO: 266816 - RNA, 19 nt, Artificial Sequence
  Description of Artificial Sequence: Synthetic oligonucleotide
aaccguauuuggagucugc

SEQ ID NO: 266817 - RNA, 19 nt, Artificial Sequence
  Description of Artificial Sequence: Synthetic oligonucleotide
cagaucuuagcucuccauc

SEQ ID NO: 266818 - RNA, 19 nt, Artificial Sequence
  Description of Artificial Sequence: Synthetic oligonucleotide
uuagacacucaagccuccg

SEQ ID NO: 266819 - RNA, 19 nt, Artificial Sequence
  Description of Artificial Sequence: Synthetic oligonucleotide
ucuaagugagccuguucaa

SEQ ID NO: 266820 - RNA, 19 nt, Artificial Sequence
  Description of Artificial Sequence: Synthetic oligonucleotide
cugguaaccgccaagcaaa

SEQ ID NO: 266821 - RNA, 19 nt, Artificial Sequence
  Description of Artificial Sequence: Synthetic oligonucleotide
cucuggauuaauguuuaac

SEQ ID NO: 266822 - RNA, 19 nt, Artificial Sequence
  Description of Artificial Sequence: Synthetic oligonucleotide
ucugaauuauugguagcaa

SEQ ID NO: 266823 - RNA, 19 nt, Artificial Sequence
  Description of Artificial Sequence: Synthetic oligonucleotide
uugcaaacaugacgugggc

SEQ ID NO: 266824 - RNA, 19 nt, Artificial Sequence
  Description of Artificial Sequence: Synthetic oligonucleotide
agcacgagacugguaaccg

SEQ ID NO: 266825 - RNA, 19 nt, Artificial Sequence
  Description of Artificial Sequence: Synthetic oligonucleotide
cacuaguuugaagaauagc

SEQ ID NO: 266826 - RNA, 19 nt, Artificial Sequence
  Description of Artificial Sequence: Synthetic oligonucleotide
acgaaauuuugcaaacaug

SEQ ID NO: 266827 - RNA, 19 nt, Artificial Sequence
  Description of Artificial Sequence: Synthetic oligonucleotide
ugcgugcuucagaacuugg

SEQ ID NO: 266828 - RNA, 19 nt, Artificial Sequence
  Description of Artificial Sequence: Synthetic oligonucleotide
cuugaguauuagccaggcg

SEQ ID NO: 266829 - RNA, 19 nt, Artificial Sequence
  Description of Artificial Sequence: Synthetic oligonucleotide
uccggggaauagcagaguc

SEQ ID NO: 266830 - RNA, 19 nt, Artificial Sequence
  Description of Artificial Sequence: Synthetic oligonucleotide
auaagaggggucacuguag

SEQ ID NO: 266831 - RNA, 19 nt, Artificial Sequence
  Description of Artificial Sequence: Synthetic oligonucleotide
caagauaggcaaugugauc

SEQ ID NO: 266832 - RNA, 19 nt, Artificial Sequence
  Description of Artificial Sequence: Synthetic oligonucleotide
uuaggugcagggaggccca

SEQ ID NO: 266833 - RNA, 19 nt, Artificial Sequence
  Description of Artificial Sequence: Synthetic oligonucleotide
ugagcgucuggauaauuuu

SEQ ID NO: 266834 - RNA, 19 nt, Artificial Sequence
  Description of Artificial Sequence: Synthetic oligonucleotide
gugcguagcucuaagugag

SEQ ID NO: 266835 - RNA, 19 nt, Artificial Sequence
  Description of Artificial Sequence: Synthetic oligonucleotide
ggagaacuucucauaaggg

SEQ ID NO: 266836 - RNA, 19 nt, Artificial Sequence
  Description of Artificial Sequence: Synthetic oligonucleotide
ugacgugggcaaagaauga

SEQ ID NO: 266837 - RNA, 19 nt, Artificial Sequence
  Description of Artificial Sequence: Synthetic oligonucleotide
ucgccuugcggacaugaac

SEQ ID NO: 266838 - RNA, 19 nt, Artificial Sequence
  Description of Artificial Sequence: Synthetic oligonucleotide
ugucccuuugggcaguuuu

SEQ ID NO: 266839 - RNA, 19 nt, Artificial Sequence
  Description of Artificial Sequence: Synthetic oligonucleotide
uuucgaccucauuauccug

SEQ ID NO: 266840 - RNA, 19 nt, Artificial Sequence
  Description of Artificial Sequence: Synthetic oligonucleotide
ugcacaaccugccgcugug

SEQ ID NO: 266841 - RNA, 19 nt, Artificial Sequence
  Description of Artificial Sequence: Synthetic oligonucleotide
ugcaaacaugacgugggca

SEQ ID NO: 266842 - RNA, 19 nt, Artificial Sequence
  Description of Artificial Sequence: Synthetic oligonucleotide
cacauaagaggggucacug

SEQ ID NO: 266843 - RNA, 19 nt, Artificial Sequence
  Description of Artificial Sequence: Synthetic oligonucleotide
guacucagacaggagagug

SEQ ID NO: 266844 - RNA, 19 nt, Artificial Sequence
  Description of Artificial Sequence: Synthetic oligonucleotide
ugcugucguaacuuccuga

SEQ ID NO: 266845 - RNA, 19 nt, Artificial Sequence
  Description of Artificial Sequence: Synthetic oligonucleotide
accgccaagcaaaauuuuc

SEQ ID NO: 266846 - RNA, 19 nt, Artificial Sequence
  Description of Artificial Sequence: Synthetic oligonucleotide
ggcaaugugaucugaauua

SEQ ID NO: 266847 - RNA, 19 nt, Artificial Sequence
  Description of Artificial Sequence: Synthetic oligonucleotide
gguagaacgauuucaaaau

SEQ ID NO: 266848 - RNA, 19 nt, Artificial Sequence
  Description of Artificial Sequence: Synthetic oligonucleotide
uucgugauuccagacuccu

SEQ ID NO: 266849 - RNA, 19 nt, Artificial Sequence
  Description of Artificial Sequence: Synthetic oligonucleotide
acauaagaggggucacugu

SEQ ID NO: 266850 - RNA, 19 nt, Artificial Sequence
  Description of Artificial Sequence: Synthetic oligonucleotide
uguaguccgccauuccauc

SEQ ID NO: 266851 - RNA, 19 nt, Artificial Sequence
  Description of Artificial Sequence: Synthetic oligonucleotide
gucguaacuuccugaaguc

SEQ ID NO: 266852 - RNA, 19 nt, Artificial Sequence
  Description of Artificial Sequence: Synthetic oligonucleotide
uacucacaggcaauauuua

SEQ ID NO: 266853 - RNA, 19 nt, Artificial Sequence
  Description of Artificial Sequence: Synthetic oligonucleotide
ucgagcguccacgucagca

SEQ ID NO: 266854 - RNA, 19 nt, Artificial Sequence
  Description of Artificial Sequence: Synthetic oligonucleotide
ggcaauauuuaaagucagg

SEQ ID NO: 266855 - RNA, 19 nt, Artificial Sequence
  Description of Artificial Sequence: Synthetic oligonucleotide
ucucuagaccacucuaguu

SEQ ID NO: 266856 - RNA, 19 nt, Artificial Sequence
  Description of Artificial Sequence: Synthetic oligonucleotide
gcccaacaacccuagacgg

SEQ ID NO: 266857 - RNA, 19 nt, Artificial Sequence
  Description of Artificial Sequence: Synthetic oligonucleotide
guaguccgccauuccaucc

SEQ ID NO: 266858 - RNA, 19 nt, Artificial Sequence
  Description of Artificial Sequence: Synthetic oligonucleotide
ggacaugaacccucaagug

SEQ ID NO: 266859 - RNA, 19 nt, Artificial Sequence
  Description of Artificial Sequence: Synthetic oligonucleotide
aguauuagccaggcgggcu

SEQ ID NO: 266860 - RNA, 19 nt, Artificial Sequence
  Description of Artificial Sequence: Synthetic oligonucleotide
ccaaugauuggagcaaugg

SEQ ID NO: 266861 - RNA, 19 nt, Artificial Sequence
  Description of Artificial Sequence: Synthetic oligonucleotide
agaacacgcaagauuggug

SEQ ID NO: 266862 - RNA, 19 nt, Artificial Sequence
  Description of Artificial Sequence: Synthetic oligonucleotide
ucguuucauuuccuuuaca

SEQ ID NO: 266863 - RNA, 19 nt, Artificial Sequence
  Description of Artificial Sequence: Synthetic oligonucleotide
cauaagaggggucacugua

SEQ ID NO: 266864 - RNA, 19 nt, Artificial Sequence
  Description of Artificial Sequence: Synthetic oligonucleotide
uccuuuacacgcucagcau

SEQ ID NO: 266865 - RNA, 19 nt, Artificial Sequence
  Description of Artificial Sequence: Synthetic oligonucleotide
acccuagacggagauguuc

SEQ ID NO: 266866 - RNA, 19 nt, Artificial Sequence
  Description of Artificial Sequence: Synthetic oligonucleotide
accacuaguuugaagaaua

SEQ ID NO: 266867 - RNA, 19 nt, Artificial Sequence
  Description of Artificial Sequence: Synthetic oligonucleotide
cagcaaggcgccuugcuuc

SEQ ID NO: 266868 - RNA, 19 nt, Artificial Sequence
  Description of Artificial Sequence: Synthetic oligonucleotide
ccuaaacuacgaaauuuug

SEQ ID NO: 266869 - RNA, 19 nt, Artificial Sequence
  Description of Artificial Sequence: Synthetic oligonucleotide
uuucgccuugcggacauga

SEQ ID NO: 266870 - RNA, 19 nt, Artificial Sequence
  Description of Artificial Sequence: Synthetic oligonucleotide
uacaggccuaaacuacgaa

SEQ ID NO: 266871 - RNA, 19 nt, Artificial Sequence
  Description of Artificial Sequence: Synthetic oligonucleotide
agacaccacuaguuugaag

SEQ ID NO: 266872 - RNA, 19 nt, Artificial Sequence
  Description of Artificial Sequence: Synthetic oligonucleotide
accgucaggucugcguacc

SEQ ID NO: 266873 - RNA, 19 nt, Artificial Sequence
  Description of Artificial Sequence: Synthetic oligonucleotide
aacccucaagugguucuuc

SEQ ID NO: 266874 - RNA, 19 nt, Artificial Sequence
  Description of Artificial Sequence: Synthetic oligonucleotide
aggaauucauagugcucca

SEQ ID NO: 266875 - RNA, 19 nt, Artificial Sequence
  Description of Artificial Sequence: Synthetic oligonucleotide
acaccacuaguuugaagaa

SEQ ID NO: 266876 - RNA, 19 nt, Artificial Sequence
  Description of Artificial Sequence: Synthetic oligonucleotide
guaaccgccaagcaaaauu

SEQ ID NO: 266877 - RNA, 19 nt, Artificial Sequence
  Description of Artificial Sequence: Synthetic oligonucleotide
ucguaacuuccugaagucu

SEQ ID NO: 266878 - RNA, 19 nt, Artificial Sequence
  Description of Artificial Sequence: Synthetic oligonucleotide
auacaggacuugacuauag

SEQ ID NO: 266879 - RNA, 19 nt, Artificial Sequence
  Description of Artificial Sequence: Synthetic oligonucleotide
caucucuuguaccaacaca

SEQ ID NO: 266880 - RNA, 19 nt, Artificial Sequence
  Description of Artificial Sequence: Synthetic oligonucleotide
ucacauaagaggggucacu

SEQ ID NO: 266881 - RNA, 19 nt, Artificial Sequence
  Description of Artificial Sequence: Synthetic oligonucleotide
gaucuuagcucuccaucaa

SEQ ID NO: 266882 - RNA, 19 nt, Artificial Sequence
  Description of Artificial Sequence: Synthetic oligonucleotide
caccuuucaauggaguguc

SEQ ID NO: 266883 - RNA, 19 nt, Artificial Sequence
  Description of Artificial Sequence: Synthetic oligonucleotide
augugaccccgguuuaucu

SEQ ID NO: 266884 - RNA, 19 nt, Artificial Sequence
  Description of Artificial Sequence: Synthetic oligonucleotide
uucacauaagaggggucac

SEQ ID NO: 266885 - RNA, 19 nt, Artificial Sequence
  Description of Artificial Sequence: Synthetic oligonucleotide
uaagggcuaugcucaagau

SEQ ID NO: 266886 - RNA, 19 nt, Artificial Sequence
  Description of Artificial Sequence: Synthetic oligonucleotide
agcgaugcuguuguuggug

SEQ ID NO: 266887 - RNA, 19 nt, Artificial Sequence
  Description of Artificial Sequence: Synthetic oligonucleotide
acugcguuggcaucagcuu

SEQ ID NO: 266888 - RNA, 19 nt, Artificial Sequence
  Description of Artificial Sequence: Synthetic oligonucleotide
auuagcccuuguguagcgg

SEQ ID NO: 266889 - RNA, 19 nt, Artificial Sequence
  Description of Artificial Sequence: Synthetic oligonucleotide
ugcguagcucuaagugagc

SEQ ID NO: 266890 - RNA, 19 nt, Artificial Sequence
  Description of Artificial Sequence: Synthetic oligonucleotide
accccgguuuaucucaagu

SEQ ID NO: 266891 - RNA, 19 nt, Artificial Sequence
  Description of Artificial Sequence: Synthetic oligonucleotide
ucaagauccugcugucgua

SEQ ID NO: 266892 - RNA, 19 nt, Artificial Sequence
  Description of Artificial Sequence: Synthetic oligonucleotide
aguccgccauuccauccuc

SEQ ID NO: 266893 - RNA, 19 nt, Artificial Sequence
  Description of Artificial Sequence: Synthetic oligonucleotide
cuuuacacgcucagcaucu

SEQ ID NO: 266894 - RNA, 19 nt, Artificial Sequence
  Description of Artificial Sequence: Synthetic oligonucleotide
uccugucuugggaggccgg

SEQ ID NO: 266895 - RNA, 19 nt, Artificial Sequence
  Description of Artificial Sequence: Synthetic oligonucleotide
aagccuccggggaauagca

SEQ ID NO: 266896 - RNA, 19 nt, Artificial Sequence
  Description of Artificial Sequence: Synthetic oligonucleotide
agaauagcugacgguaaau

SEQ ID NO: 266897 - RNA, 19 nt, Artificial Sequence
  Description of Artificial Sequence: Synthetic oligonucleotide
ugcguaccucugcuggagc

SEQ ID NO: 266898 - RNA, 19 nt, Artificial Sequence
  Description of Artificial Sequence: Synthetic oligonucleotide
cugucguaacuuccugaag

SEQ ID NO: 266899 - RNA, 19 nt, Artificial Sequence
  Description of Artificial Sequence: Synthetic oligonucleotide
ucauuauccuggaguccaa

SEQ ID NO: 266900 - RNA, 19 nt, Artificial Sequence
  Description of Artificial Sequence: Synthetic oligonucleotide
ugauucgauucuguccuuc

SEQ ID NO: 266901 - RNA, 19 nt, Artificial Sequence
  Description of Artificial Sequence: Synthetic oligonucleotide
gaguucgugauuccagacu

SEQ ID NO: 266902 - RNA, 19 nt, Artificial Sequence
  Description of Artificial Sequence: Synthetic oligonucleotide
gcggacaugaacccucaag

SEQ ID NO: 266903 - RNA, 19 nt, Artificial Sequence
  Description of Artificial Sequence: Synthetic oligonucleotide
ggguaaaugugucaaugaa

SEQ ID NO: 266904 - RNA, 19 nt, Artificial Sequence
  Description of Artificial Sequence: Synthetic oligonucleotide
auagugcuccaaacacugg

SEQ ID NO: 266905 - RNA, 19 nt, Artificial Sequence
  Description of Artificial Sequence: Synthetic oligonucleotide
uucagacggucucgguaga

SEQ ID NO: 266906 - RNA, 19 nt, Artificial Sequence
  Description of Artificial Sequence: Synthetic oligonucleotide
gcaagauuagcccuugugu

SEQ ID NO: 266907 - RNA, 19 nt, Artificial Sequence
  Description of Artificial Sequence: Synthetic oligonucleotide
uauuuggagucugcacaac

SEQ ID NO: 266908 - RNA, 19 nt, Artificial Sequence
  Description of Artificial Sequence: Synthetic oligonucleotide
cagaguucgugauuccaga

SEQ ID NO: 266909 - RNA, 19 nt, Artificial Sequence
  Description of Artificial Sequence: Synthetic oligonucleotide
agccccauagcacgagacu

SEQ ID NO: 266910 - RNA, 19 nt, Artificial Sequence
  Description of Artificial Sequence: Synthetic oligonucleotide
ggcuaugcucaagauaggc

SEQ ID NO: 266911 - RNA, 19 nt, Artificial Sequence
  Description of Artificial Sequence: Synthetic oligonucleotide
guggcucauuccuuguuuc

SEQ ID NO: 266912 - RNA, 19 nt, Artificial Sequence
  Description of Artificial Sequence: Synthetic oligonucleotide
ugacgguaaaucggauucu

SEQ ID NO: 266913 - RNA, 19 nt, Artificial Sequence
  Description of Artificial Sequence: Synthetic oligonucleotide
cuggauaauuuucgaccuc

SEQ ID NO: 266914 - RNA, 19 nt, Artificial Sequence
  Description of Artificial Sequence: Synthetic oligonucleotide
cuagcaagauuagcccuug

SEQ ID NO: 266915 - RNA, 19 nt, Artificial Sequence
  Description of Artificial Sequence: Synthetic oligonucleotide
caaauugggauuucagcau

SEQ ID NO: 266916 - RNA, 19 nt, Artificial Sequence
  Description of Artificial Sequence: Synthetic oligonucleotide
cgugcuucagaacuuggcc

SEQ ID NO: 266917 - RNA, 19 nt, Artificial Sequence
  Description of Artificial Sequence: Synthetic oligonucleotide
ucccuuugggcaguuuugu

SEQ ID NO: 266918 - RNA, 19 nt, Artificial Sequence
  Description of Artificial Sequence: Synthetic oligonucleotide
acccucaagugguucuucu

SEQ ID NO: 266919 - RNA, 19 nt, Artificial Sequence
  Description of Artificial Sequence: Synthetic oligonucleotide
acaugacgugggcaaagaa

SEQ ID NO: 266920 - RNA, 19 nt, Artificial Sequence
  Description of Artificial Sequence: Synthetic oligonucleotide
cauuagaaggaguccugaa

SEQ ID NO: 266921 - RNA, 19 nt, Artificial Sequence
  Description of Artificial Sequence: Synthetic oligonucleotide
aacuucucauaagggcuau

SEQ ID NO: 266922 - RNA, 19 nt, Artificial Sequence
  Description of Artificial Sequence: Synthetic oligonucleotide
auccugucuugggaggccg

SEQ ID NO: 266923 - RNA, 19 nt, Artificial Sequence
  Description of Artificial Sequence: Synthetic oligonucleotide
cugcaguauccugucuugg

SEQ ID NO: 266924 - RNA, 19 nt, Artificial Sequence
  Description of Artificial Sequence: Synthetic oligonucleotide
ggggucaucuguuguuucc

SEQ ID NO: 266925 - RNA, 19 nt, Artificial Sequence
  Description of Artificial Sequence: Synthetic oligonucleotide
ugguaaccgccaagcaaaa

SEQ ID NO: 266926 - RNA, 19 nt, Artificial Sequence
  Description of Artificial Sequence: Synthetic oligonucleotide
caaugauuggagcaauggu

SEQ ID NO: 266927 - RNA, 19 nt, Artificial Sequence
  Description of Artificial Sequence: Synthetic oligonucleotide
cucuagaccacucuaguuu

SEQ ID NO: 266928 - RNA, 19 nt, Artificial Sequence
  Description of Artificial Sequence: Synthetic oligonucleotide
caacccuagacggagaugu

SEQ ID NO: 266929 - RNA, 19 nt, Artificial Sequence
  Description of Artificial Sequence: Synthetic oligonucleotide
caggccuaaacuacgaaau

SEQ ID NO: 266930 - RNA, 19 nt, Artificial Sequence
  Description of Artificial Sequence: Synthetic oligonucleotide
ugguguucucagagcgaug

SEQ ID NO: 266931 - RNA, 19 nt, Artificial Sequence
  Description of Artificial Sequence: Synthetic oligonucleotide
ucaaucggaucaggccgag

SEQ ID NO: 266932 - RNA, 19 nt, Artificial Sequence
  Description of Artificial Sequence: Synthetic oligonucleotide
gucguuccacuucggggag

SEQ ID NO: 266933 - RNA, 19 nt, Artificial Sequence
  Description of Artificial Sequence: Synthetic oligonucleotide
cuugguguucucagagcga

SEQ ID NO: 266934 - RNA, 19 nt, Artificial Sequence
  Description of Artificial Sequence: Synthetic oligonucleotide
cacuguaguccgccauucc

SEQ ID NO: 266935 - RNA, 19 nt, Artificial Sequence
  Description of Artificial Sequence: Synthetic oligonucleotide
aaccugccgcugugggguc

SEQ ID NO: 266936 - RNA, 19 nt, Artificial Sequence
  Description of Artificial Sequence: Synthetic oligonucleotide
aggccuaaacuacgaaauu

SEQ ID NO: 266937 - RNA, 19 nt, Artificial Sequence
  Description of Artificial Sequence: Synthetic oligonucleotide
aaugagcgucuggauaauu

SEQ ID NO: 266938 - RNA, 19 nt, Artificial Sequence
  Description of Artificial Sequence: Synthetic oligonucleotide
aucaaucggaucaggccga

SEQ ID NO: 266939 - RNA, 19 nt, Artificial Sequence
  Description of Artificial Sequence: Synthetic oligonucleotide
ucgugauuccagacuccuc

SEQ ID NO: 266940 - RNA, 19 nt, Artificial Sequence
  Description of Artificial Sequence: Synthetic oligonucleotide
ggaagauacaggacuugac

SEQ ID NO: 266941 - RNA, 19 nt, Artificial Sequence
  Description of Artificial Sequence: Synthetic oligonucleotide
cucagagcgaugcuguugu

SEQ ID NO: 266942 - RNA, 19 nt, Artificial Sequence
  Description of Artificial Sequence: Synthetic oligonucleotide
uacuucagacggucucggu

SEQ ID NO: 266943 - RNA, 19 nt, Artificial Sequence
  Description of Artificial Sequence: Synthetic oligonucleotide
accuuucaauggagugucc

SEQ ID NO: 266944 - RNA, 19 nt, Artificial Sequence
  Description of Artificial Sequence: Synthetic oligonucleotide
acgcaagauuggugguauc

SEQ ID NO: 266945 - RNA, 19 nt, Artificial Sequence
  Description of Artificial Sequence: Synthetic oligonucleotide
ccuuuacacgcucagcauc

SEQ ID NO: 266946 - RNA, 19 nt, Artificial Sequence
  Description of Artificial Sequence: Synthetic oligonucleotide
cucgguagauccuucugua

SEQ ID NO: 266947 - RNA, 19 nt, Artificial Sequence
  Description of Artificial Sequence: Synthetic oligonucleotide
cacuucggggagucagccc

SEQ ID NO: 266948 - RNA, 19 nt, Artificial Sequence
  Description of Artificial Sequence: Synthetic oligonucleotide
augagcgucuggauaauuu

SEQ ID NO: 266949 - RNA, 19 nt, Artificial Sequence
  Description of Artificial Sequence: Synthetic oligonucleotide
gucccuuugggcaguuuug

SEQ ID NO: 266950 - RNA, 19 nt, Artificial Sequence
  Description of Artificial Sequence: Synthetic oligonucleotide
agagugccugcugugcgug

SEQ ID NO: 266951 - RNA, 19 nt, Artificial Sequence
  Description of Artificial Sequence: Synthetic oligonucleotide
guucgugauuccagacucc

SEQ ID NO: 266952 - RNA, 19 nt, Artificial Sequence
  Description of Artificial Sequence: Synthetic oligonucleotide
uucgccuugcggacaugaa

SEQ ID NO: 266953 - RNA, 19 nt, Artificial Sequence
  Description of Artificial Sequence: Synthetic oligonucleotide
cuaccugggguagcauuag

SEQ ID NO: 266954 - RNA, 19 nt, Artificial Sequence
  Description of Artificial Sequence: Synthetic oligonucleotide
ggauggccugcuuucgagc

SEQ ID NO: 266955 - RNA, 19 nt, Artificial Sequence
  Description of Artificial Sequence: Synthetic oligonucleotide
cauagugaucauuucuuuu

SEQ ID NO: 266956 - RNA, 19 nt, Artificial Sequence
  Description of Artificial Sequence: Synthetic oligonucleotide
aucaggccgagcugguuuu

SEQ ID NO: 266957 - RNA, 19 nt, Artificial Sequence
  Description of Artificial Sequence: Synthetic oligonucleotide
acaacccuagacggagaug

SEQ ID NO: 266958 - RNA, 19 nt, Artificial Sequence
  Description of Artificial Sequence: Synthetic oligonucleotide
cugguagaacgauuucaaa

SEQ ID NO: 266959 - RNA, 19 nt, Artificial Sequence
  Description of Artificial Sequence: Synthetic oligonucleotide
cugcugucguaacuuccug

SEQ ID NO: 266960 - RNA, 19 nt, Artificial Sequence
  Description of Artificial Sequence: Synthetic oligonucleotide
agugggguauugagcccac

SEQ ID NO: 266961 - RNA, 19 nt, Artificial Sequence
  Description of Artificial Sequence: Synthetic oligonucleotide
ccgguuuaucucaagucuc

SEQ ID NO: 266962 - RNA, 19 nt, Artificial Sequence
  Description of Artificial Sequence: Synthetic oligonucleotide
caaggcgccuugcuucuuc

SEQ ID NO: 266963 - RNA, 19 nt, Artificial Sequence
  Description of Artificial Sequence: Synthetic oligonucleotide
gcuaugcucaagauaggca

SEQ ID NO: 266964 - RNA, 19 nt, Artificial Sequence
  Description of Artificial Sequence: Synthetic oligonucleotide
ucuaugccagcugcucgaa

SEQ ID NO: 266965 - RNA, 19 nt, Artificial Sequence
  Description of Artificial Sequence: Synthetic oligonucleotide
ucaugugaccccgguuuau

SEQ ID NO: 266966 - RNA, 19 nt, Artificial Sequence
  Description of Artificial Sequence: Synthetic oligonucleotide
gggcuugguaauuuuccuc

SEQ ID NO: 266967 - RNA, 19 nt, Artificial Sequence
  Description of Artificial Sequence: Synthetic oligonucleotide
cacugcguuggcaucagcu

SEQ ID NO: 266968 - RNA, 19 nt, Artificial Sequence
  Description of Artificial Sequence: Synthetic oligonucleotide
uuuacacgcucagcaucuc

SEQ ID NO: 266969 - RNA, 19 nt, Artificial Sequence
  Description of Artificial Sequence: Synthetic oligonucleotide
auggccugcuuucgagcgu

SEQ ID NO: 266970 - RNA, 19 nt, Artificial Sequence
  Description of Artificial Sequence: Synthetic oligonucleotide
gccccauagcacgagacug

SEQ ID NO: 266971 - RNA, 19 nt, Artificial Sequence
  Description of Artificial Sequence: Synthetic oligonucleotide
ggagcucugcaucugaaau

SEQ ID NO: 266972 - RNA, 19 nt, Artificial Sequence
  Description of Artificial Sequence: Synthetic oligonucleotide
uggccugcuuucgagcguc

SEQ ID NO: 266973 - RNA, 19 nt, Artificial Sequence
  Description of Artificial Sequence: Synthetic oligonucleotide
aaccgccaagcaaaauuuu

SEQ ID NO: 266974 - RNA, 19 nt, Artificial Sequence
  Description of Artificial Sequence: Synthetic oligonucleotide
gcguagcucuaagugagcc

SEQ ID NO: 266975 - RNA, 19 nt, Artificial Sequence
  Description of Artificial Sequence: Synthetic oligonucleotide
caagauccugcugucguaa

SEQ ID NO: 266976 - RNA, 19 nt, Artificial Sequence
  Description of Artificial Sequence: Synthetic oligonucleotide
gccaaguguaacuaguuuu

SEQ ID NO: 266977 - RNA, 19 nt, Artificial Sequence
  Description of Artificial Sequence: Synthetic oligonucleotide
gugcgugcuucagaacuug

SEQ ID NO: 266978 - RNA, 19 nt, Artificial Sequence
  Description of Artificial Sequence: Synthetic oligonucleotide
agggguagacaaaaccgua

SEQ ID NO: 266979 - RNA, 19 nt, Artificial Sequence
  Description of Artificial Sequence: Synthetic oligonucleotide
cagacggucucgguagauc

SEQ ID NO: 266980 - RNA, 19 nt, Artificial Sequence
  Description of Artificial Sequence: Synthetic oligonucleotide
ucggggagucagcccuuca

SEQ ID NO: 266981 - RNA, 19 nt, Artificial Sequence
  Description of Artificial Sequence: Synthetic oligonucleotide
ccgccaagcaaaauuuuca

SEQ ID NO: 266982 - RNA, 19 nt, Artificial Sequence
  Description of Artificial Sequence: Synthetic oligonucleotide
agguuuacucacaggcaau

SEQ ID NO: 266983 - RNA, 19 nt, Artificial Sequence
  Description of Artificial Sequence: Synthetic oligonucleotide
caccgucaggucugcguac

SEQ ID NO: 266984 - RNA, 19 nt, Artificial Sequence
  Description of Artificial Sequence: Synthetic oligonucleotide
gcacgagacugguaaccgc

SEQ ID NO: 266985 - RNA, 19 nt, Artificial Sequence
  Description of Artificial Sequence: Synthetic oligonucleotide
ccauaucaaucggaucagg

SEQ ID NO: 266986 - RNA, 19 nt, Artificial Sequence
  Description of Artificial Sequence: Synthetic oligonucleotide
acacgcaagauugguggua

SEQ ID NO: 266987 - RNA, 19 nt, Artificial Sequence
  Description of Artificial Sequence: Synthetic oligonucleotide
ucagacggucucgguagau

SEQ ID NO: 266988 - RNA, 19 nt, Artificial Sequence
  Description of Artificial Sequence: Synthetic oligonucleotide
gccuugcggacaugaaccc

SEQ ID NO: 266989 - RNA, 19 nt, Artificial Sequence
  Description of Artificial Sequence: Synthetic oligonucleotide
aggugcagggaggcccaac

SEQ ID NO: 266990 - RNA, 19 nt, Artificial Sequence
  Description of Artificial Sequence: Synthetic oligonucleotide
uucgagcguccacgucagc

SEQ ID NO: 266991 - RNA, 19 nt, Artificial Sequence
  Description of Artificial Sequence: Synthetic oligonucleotide
gucaugugaccccgguuua

SEQ ID NO: 266992 - RNA, 19 nt, Artificial Sequence
  Description of Artificial Sequence: Synthetic oligonucleotide
ugcggacaugaacccucaa

SEQ ID NO: 266993 - RNA, 19 nt, Artificial Sequence
  Description of Artificial Sequence: Synthetic oligonucleotide
gggcaguuuuguccaggag

SEQ ID NO: 266994 - RNA, 19 nt, Artificial Sequence
  Description of Artificial Sequence: Synthetic oligonucleotide
caacaacccuagacggaga

SEQ ID NO: 266995 - RNA, 19 nt, Artificial Sequence
  Description of Artificial Sequence: Synthetic oligonucleotide
cuguaguccgccauuccau

SEQ ID NO: 266996 - RNA, 19 nt, Artificial Sequence
  Description of Artificial Sequence: Synthetic oligonucleotide
acgagacugguaaccgcca

SEQ ID NO: 266997 - RNA, 19 nt, Artificial Sequence
  Description of Artificial Sequence: Synthetic oligonucleotide
gguucauaggggugaugaa

SEQ ID NO: 266998 - RNA, 19 nt, Artificial Sequence
  Description of Artificial Sequence: Synthetic oligonucleotide
gcgugcuucagaacuuggc

SEQ ID NO: 266999 - RNA, 19 nt, Artificial Sequence
  Description of Artificial Sequence: Synthetic oligonucleotide
caaccugccgcuguggggu

SEQ ID NO: 267000 - RNA, 19 nt, Artificial Sequence
  Description of Artificial Sequence: Synthetic oligonucleotide
caaucggaucaggccgagc

SEQ ID NO: 267001 - RNA, 19 nt, Artificial Sequence
  Description of Artificial Sequence: Synthetic oligonucleotide
ccucauuauccuggagucc

SEQ ID NO: 267002 - RNA, 19 nt, Artificial Sequence
  Description of Artificial Sequence: Synthetic oligonucleotide
ggucugcguaccucugcug

SEQ ID NO: 267003 - RNA, 19 nt, Artificial Sequence
  Description of Artificial Sequence: Synthetic oligonucleotide
gcagcacuaacuugcuucu

SEQ ID NO: 267004 - RNA, 19 nt, Artificial Sequence
  Description of Artificial Sequence: Synthetic oligonucleotide
cagaacacgcaagauuggu

SEQ ID NO: 267005 - RNA, 19 nt, Artificial Sequence
  Description of Artificial Sequence: Synthetic oligonucleotide
gacgguaaaucggauucuu

SEQ ID NO: 267006 - RNA, 19 nt, Artificial Sequence
  Description of Artificial Sequence: Synthetic oligonucleotide
guagcggcucugaccagga

SEQ ID NO: 267007 - RNA, 19 nt, Artificial Sequence
  Description of Artificial Sequence: Synthetic oligonucleotide
gcaacuucacuggccuggc

SEQ ID NO: 267008 - RNA, 19 nt, Artificial Sequence
  Description of Artificial Sequence: Synthetic oligonucleotide
cccgguuuaucucaagucu

SEQ ID NO: 267009 - RNA, 19 nt, Artificial Sequence
  Description of Artificial Sequence: Synthetic oligonucleotide
uucggggagucagcccuuc

SEQ ID NO: 267010 - RNA, 19 nt, Artificial Sequence
  Description of Artificial Sequence: Synthetic oligonucleotide
ucguuccacuucggggagu

SEQ ID NO: 267011 - RNA, 19 nt, Artificial Sequence
  Description of Artificial Sequence: Synthetic oligonucleotide
ggguagacaaaaccguauu

SEQ ID NO: 267012 - RNA, 19 nt, Artificial Sequence
  Description of Artificial Sequence: Synthetic oligonucleotide
aacccuagacggagauguu

SEQ ID NO: 267013 - RNA, 19 nt, Artificial Sequence
  Description of Artificial Sequence: Synthetic oligonucleotide
ccacuucggggagucagcc

SEQ ID NO: 267014 - RNA, 19 nt, Artificial Sequence
  Description of Artificial Sequence: Synthetic oligonucleotide
ccuagacggagauguucuc

SEQ ID NO: 267015 - RNA, 19 nt, Artificial Sequence
  Description of Artificial Sequence: Synthetic oligonucleotide
ggccuaaacuacgaaauuu

SEQ ID NO: 267016 - RNA, 19 nt, Artificial Sequence
  Description of Artificial Sequence: Synthetic oligonucleotide
ccugaaagggguagacaaa

SEQ ID NO: 267017 - RNA, 19 nt, Artificial Sequence
  Description of Artificial Sequence: Synthetic oligonucleotide
cggauggccugcuuucgag

SEQ ID NO: 267018 - RNA, 19 nt, Artificial Sequence
  Description of Artificial Sequence: Synthetic oligonucleotide
ccauuagaaggaguccuga

SEQ ID NO: 267019 - RNA, 19 nt, Artificial Sequence
  Description of Artificial Sequence: Synthetic oligonucleotide
gagcgaugcuguuguuggu

SEQ ID NO: 267020 - RNA, 19 nt, Artificial Sequence
  Description of Artificial Sequence: Synthetic oligonucleotide
cccuagacggagauguucu

SEQ ID NO: 267021 - RNA, 19 nt, Artificial Sequence
  Description of Artificial Sequence: Synthetic oligonucleotide
gugggguauugagcccacc

SEQ ID NO: 267022 - RNA, 19 nt, Artificial Sequence
  Description of Artificial Sequence: Synthetic oligonucleotide
agcugacgguaaaucggau

SEQ ID NO: 267023 - RNA, 19 nt, Artificial Sequence
  Description of Artificial Sequence: Synthetic oligonucleotide
gcaaugugaucugaauuau

SEQ ID NO: 267024 - RNA, 19 nt, Artificial Sequence
  Description of Artificial Sequence: Synthetic oligonucleotide
aggaguccugaaaggggua

SEQ ID NO: 267025 - RNA, 19 nt, Artificial Sequence
  Description of Artificial Sequence: Synthetic oligonucleotide
ggccgagcugguuuugucu

SEQ ID NO: 267026 - RNA, 19 nt, Artificial Sequence
  Description of Artificial Sequence: Synthetic oligonucleotide
cacgcaagauuggugguau

SEQ ID NO: 267027 - RNA, 19 nt, Artificial Sequence
  Description of Artificial Sequence: Synthetic oligonucleotide
gacggucucgguagauccu

SEQ ID NO: 267028 - RNA, 19 nt, Artificial Sequence
  Description of Artificial Sequence: Synthetic oligonucleotide
cgcaagauuggugguauca

SEQ ID NO: 267029 - RNA, 19 nt, Artificial Sequence
  Description of Artificial Sequence: Synthetic oligonucleotide
gcugacgguaaaucggauu

SEQ ID NO: 267030 - RNA, 19 nt, Artificial Sequence
  Description of Artificial Sequence: Synthetic oligonucleotide
caguuucgccuugcggaca

SEQ ID NO: 267031 - RNA, 19 nt, Artificial Sequence
  Description of Artificial Sequence: Synthetic oligonucleotide
ggccuaccuugacaacuuc

SEQ ID NO: 267032 - RNA, 19 nt, Artificial Sequence
  Description of Artificial Sequence: Synthetic oligonucleotide
ccuggccuaccuugacaac

SEQ ID NO: 267033 - RNA, 19 nt, Artificial Sequence
  Description of Artificial Sequence: Synthetic oligonucleotide
gaacccucaagugguucuu

SEQ ID NO: 267034 - RNA, 19 nt, Artificial Sequence
  Description of Artificial Sequence: Synthetic oligonucleotide
guuucgccuugcggacaug

SEQ ID NO: 267035 - RNA, 19 nt, Artificial Sequence
  Description of Artificial Sequence: Synthetic oligonucleotide
cugcacaaccugccgcugu

SEQ ID NO: 267036 - RNA, 19 nt, Artificial Sequence
  Description of Artificial Sequence: Synthetic oligonucleotide
caugaacccucaagugguu

SEQ ID NO: 267037 - RNA, 19 nt, Artificial Sequence
  Description of Artificial Sequence: Synthetic oligonucleotide
caccacuaguuugaagaau

SEQ ID NO: 267038 - RNA, 19 nt, Artificial Sequence
  Description of Artificial Sequence: Synthetic oligonucleotide
ggguagcauuagugacuug

SEQ ID NO: 267039 - RNA, 19 nt, Artificial Sequence
  Description of Artificial Sequence: Synthetic oligonucleotide
cgagcaacuucacuggccu

SEQ ID NO: 267040 - RNA, 19 nt, Artificial Sequence
  Description of Artificial Sequence: Synthetic oligonucleotide
gcacuaacuugcuucucuu

SEQ ID NO: 267041 - RNA, 19 nt, Artificial Sequence
  Description of Artificial Sequence: Synthetic oligonucleotide
cacgcucagcaucucggau

SEQ ID NO: 267042 - RNA, 19 nt, Artificial Sequence
  Description of Artificial Sequence: Synthetic oligonucleotide
gcguaccucugcuggagcu

SEQ ID NO: 267043 - RNA, 19 nt, Artificial Sequence
  Description of Artificial Sequence: Synthetic oligonucleotide
ggauaauuuucgaccucau

SEQ ID NO: 267044 - RNA, 19 nt, Artificial Sequence
  Description of Artificial Sequence: Synthetic oligonucleotide
cgagacucucuuuccaucu

SEQ ID NO: 267045 - RNA, 19 nt, Artificial Sequence
  Description of Artificial Sequence: Synthetic oligonucleotide
ccaccgucaggucugcgua

SEQ ID NO: 267046 - RNA, 19 nt, Artificial Sequence
  Description of Artificial Sequence: Synthetic oligonucleotide
gugauucgauucuguccuu

SEQ ID NO: 267047 - RNA, 19 nt, Artificial Sequence
  Description of Artificial Sequence: Synthetic oligonucleotide
gcguuggcaucagcuuggc

SEQ ID NO: 267048 - RNA, 19 nt, Artificial Sequence
  Description of Artificial Sequence: Synthetic oligonucleotide
ccggggaauagcagagucu

SEQ ID NO: 267049 - RNA, 19 nt, Artificial Sequence
  Description of Artificial Sequence: Synthetic oligonucleotide
cucaagccuccggggaaua

SEQ ID NO: 267050 - RNA, 19 nt, Artificial Sequence
  Description of Artificial Sequence: Synthetic oligonucleotide
ccacugcguuggcaucagc

SEQ ID NO: 267051 - RNA, 19 nt, Artificial Sequence
  Description of Artificial Sequence: Synthetic oligonucleotide
cguagcucuaagugagccu

SEQ ID NO: 267052 - RNA, 19 nt, Artificial Sequence
  Description of Artificial Sequence: Synthetic oligonucleotide
gguaaccgccaagcaaaau

SEQ ID NO: 267053 - RNA, 19 nt, Artificial Sequence
  Description of Artificial Sequence: Synthetic oligonucleotide
ggccugcuuucgagcgucc

SEQ ID NO: 267054 - RNA, 19 nt, Artificial Sequence
  Description of Artificial Sequence: Synthetic oligonucleotide
cggggaauagcagagucuu

SEQ ID NO: 267055 - RNA, 19 nt, Artificial Sequence
  Description of Artificial Sequence: Synthetic oligonucleotide
ccuugcggacaugaacccu

SEQ ID NO: 267056 - RNA, 19 nt, Artificial Sequence
  Description of Artificial Sequence: Synthetic oligonucleotide
ccgucaggucugcguaccu

SEQ ID NO: 267057 - RNA, 19 nt, Artificial Sequence
  Description of Artificial Sequence: Synthetic oligonucleotide
ccguggcucauuccuuguu

SEQ ID NO: 267058 - RNA, 19 nt, Artificial Sequence
  Description of Artificial Sequence: Synthetic oligonucleotide
augauuucgaauuaacagc

SEQ ID NO: 267059 - RNA, 19 nt, Artificial Sequence
  Description of Artificial Sequence: Synthetic oligonucleotide
acuggauacaauuaggagg

SEQ ID NO: 267060 - RNA, 19 nt, Artificial Sequence
  Description of Artificial Sequence: Synthetic oligonucleotide
uaauaaacccucuacagcc

SEQ ID NO: 267061 - RNA, 19 nt, Artificial Sequence
  Description of Artificial Sequence: Synthetic oligonucleotide
uauaccaagaaccuuauuc

SEQ ID NO: 267062 - RNA, 19 nt, Artificial Sequence
  Description of Artificial Sequence: Synthetic oligonucleotide
auuucgaauuaacagcucc

SEQ ID NO: 267063 - RNA, 19 nt, Artificial Sequence
  Description of Artificial Sequence: Synthetic oligonucleotide
aaggaugcggccuauuuac

SEQ ID NO: 267064 - RNA, 19 nt, Artificial Sequence
  Description of Artificial Sequence: Synthetic oligonucleotide
ucgacauucaauuaggcac

SEQ ID NO: 267065 - RNA, 19 nt, Artificial Sequence
  Description of Artificial Sequence: Synthetic oligonucleotide
ucuggaaugagcauuaauc

SEQ ID NO: 267066 - RNA, 19 nt, Artificial Sequence
  Description of Artificial Sequence: Synthetic oligonucleotide
uuaacuggauacaauuagg

SEQ ID NO: 267067 - RNA, 19 nt, Artificial Sequence
  Description of Artificial Sequence: Synthetic oligonucleotide
ucuuagaguacccuuguag

SEQ ID NO: 267068 - RNA, 19 nt, Artificial Sequence
  Description of Artificial Sequence: Synthetic oligonucleotide
gaaugcaucauaaaguuug

SEQ ID NO: 267069 - RNA, 19 nt, Artificial Sequence
  Description of Artificial Sequence: Synthetic oligonucleotide
aaucaaucaacagcugugc

SEQ ID NO: 267070 - RNA, 19 nt, Artificial Sequence
  Description of Artificial Sequence: Synthetic oligonucleotide
cuuaaguauuccuuguugg

SEQ ID NO: 267071 - RNA, 19 nt, Artificial Sequence
  Description of Artificial Sequence: Synthetic oligonucleotide
aaugguauagauucaccca

SEQ ID NO: 267072 - RNA, 19 nt, Artificial Sequence
  Description of Artificial Sequence: Synthetic oligonucleotide
gaaugguauagauucaccc

SEQ ID NO: 267073 - RNA, 19 nt, Artificial Sequence
  Description of Artificial Sequence: Synthetic oligonucleotide
uuuuaguaccaagaggugg

SEQ ID NO: 267074 - RNA, 19 nt, Artificial Sequence
  Description of Artificial Sequence: Synthetic oligonucleotide
auaccuguagguuacugcg

SEQ ID NO: 267075 - RNA, 19 nt, Artificial Sequence
  Description of Artificial Sequence: Synthetic oligonucleotide
aaaaccuuguuaugagguc

SEQ ID NO: 267076 - RNA, 19 nt, Artificial Sequence
  Description of Artificial Sequence: Synthetic oligonucleotide
ucuuaaguauuccuuguug

SEQ ID NO: 267077 - RNA, 19 nt, Artificial Sequence
  Description of Artificial Sequence: Synthetic oligonucleotide
cuuaacuggauacaauuag

SEQ ID NO: 267078 - RNA, 19 nt, Artificial Sequence
  Description of Artificial Sequence: Synthetic oligonucleotide
uguuaaccaaaugauuucg

SEQ ID NO: 267079 - RNA, 19 nt, Artificial Sequence
  Description of Artificial Sequence: Synthetic oligonucleotide
cuggaaugagcauuaaucc

SEQ ID NO: 267080 - RNA, 19 nt, Artificial Sequence
  Description of Artificial Sequence: Synthetic oligonucleotide
aaggaaaggcgcuaaauau

SEQ ID NO: 267081 - RNA, 19 nt, Artificial Sequence
  Description of Artificial Sequence: Synthetic oligonucleotide
aaaggcgcuaaauauuuga

SEQ ID NO: 267082 - RNA, 19 nt, Artificial Sequence
  Description of Artificial Sequence: Synthetic oligonucleotide
auuugcauagguuuaguga

SEQ ID NO: 267083 - RNA, 19 nt, Artificial Sequence
  Description of Artificial Sequence: Synthetic oligonucleotide
ugguggaauagcauguagg

SEQ ID NO: 267084 - RNA, 19 nt, Artificial Sequence
  Description of Artificial Sequence: Synthetic oligonucleotide
acuaacagugcaaugaguc

SEQ ID NO: 267085 - RNA, 19 nt, Artificial Sequence
  Description of Artificial Sequence: Synthetic oligonucleotide
uacuacaaccuccaaaaga

SEQ ID NO: 267086 - RNA, 19 nt, Artificial Sequence
  Description of Artificial Sequence: Synthetic oligonucleotide
ugcguugauaagcuggagg

SEQ ID NO: 267087 - RNA, 19 nt, Artificial Sequence
  Description of Artificial Sequence: Synthetic oligonucleotide
acacccgagaaccaaaggg

SEQ ID NO: 267088 - RNA, 19 nt, Artificial Sequence
  Description of Artificial Sequence: Synthetic oligonucleotide
cuaauaaacccucuacagc

SEQ ID NO: 267089 - RNA, 19 nt, Artificial Sequence
  Description of Artificial Sequence: Synthetic oligonucleotide
agcacgaucaaucauugcu

SEQ ID NO: 267090 - RNA, 19 nt, Artificial Sequence
  Description of Artificial Sequence: Synthetic oligonucleotide
cauagguuuagugaguucc

SEQ ID NO: 267091 - RNA, 19 nt, Artificial Sequence
  Description of Artificial Sequence: Synthetic oligonucleotide
ugagucccuacauagagca

SEQ ID NO: 267092 - RNA, 19 nt, Artificial Sequence
  Description of Artificial Sequence: Synthetic oligonucleotide
acggccauguaguuuaagc

SEQ ID NO: 267093 - RNA, 19 nt, Artificial Sequence
  Description of Artificial Sequence: Synthetic oligonucleotide
uauugcugcauguuaacca

SEQ ID NO: 267094 - RNA, 19 nt, Artificial Sequence
  Description of Artificial Sequence: Synthetic oligonucleotide
uaacagugcaaugagucgg

SEQ ID NO: 267095 - RNA, 19 nt, Artificial Sequence
  Description of Artificial Sequence: Synthetic oligonucleotide
uuagaguacccuuguagag

SEQ ID NO: 267096 - RNA, 19 nt, Artificial Sequence
  Description of Artificial Sequence: Synthetic oligonucleotide
ucaaugguauggaauaggu

SEQ ID NO: 267097 - RNA, 19 nt, Artificial Sequence
  Description of Artificial Sequence: Synthetic oligonucleotide
uacuauaccaagaaccuua

SEQ ID NO: 267098 - RNA, 19 nt, Artificial Sequence
  Description of Artificial Sequence: Synthetic oligonucleotide
gaggguuucaaugguaugg

SEQ ID NO: 267099 - RNA, 19 nt, Artificial Sequence
  Description of Artificial Sequence: Synthetic oligonucleotide
uccgacagaaaagugacag

SEQ ID NO: 267100 - RNA, 19 nt, Artificial Sequence
  Description of Artificial Sequence: Synthetic oligonucleotide
cauugacugagcuagauga

SEQ ID NO: 267101 - RNA, 19 nt, Artificial Sequence
  Description of Artificial Sequence: Synthetic oligonucleotide
agucccuacauagagcacc

SEQ ID NO: 267102 - RNA, 19 nt, Artificial Sequence
  Description of Artificial Sequence: Synthetic oligonucleotide
gaaguagugaguguggcug

SEQ ID NO: 267103 - RNA, 19 nt, Artificial Sequence
  Description of Artificial Sequence: Synthetic oligonucleotide
aucuaacuggcaccggucc

SEQ ID NO: 267104 - RNA, 19 nt, Artificial Sequence
  Description of Artificial Sequence: Synthetic oligonucleotide
aaaugccacggccauguag

SEQ ID NO: 267105 - RNA, 19 nt, Artificial Sequence
  Description of Artificial Sequence: Synthetic oligonucleotide
aaagauaccggcccucggu

SEQ ID NO: 267106 - RNA, 19 nt, Artificial Sequence
  Description of Artificial Sequence: Synthetic oligonucleotide
cuaacagugcaaugagucg

SEQ ID NO: 267107 - RNA, 19 nt, Artificial Sequence
  Description of Artificial Sequence: Synthetic oligonucleotide
cacuacuuccaucagcugg

SEQ ID NO: 267108 - RNA, 19 nt, Artificial Sequence
  Description of Artificial Sequence: Synthetic oligonucleotide
uauaucgcagcaauagguc

SEQ ID NO: 267109 - RNA, 19 nt, Artificial Sequence
  Description of Artificial Sequence: Synthetic oligonucleotide
uaaggaaaggcgcuaaaua

SEQ ID NO: 267110 - RNA, 19 nt, Artificial Sequence
  Description of Artificial Sequence: Synthetic oligonucleotide
ucauauugcugcauguuaa

SEQ ID NO: 267111 - RNA, 19 nt, Artificial Sequence
  Description of Artificial Sequence: Synthetic oligonucleotide
aaugagucggacaaaggca

SEQ ID NO: 267112 - RNA, 19 nt, Artificial Sequence
  Description of Artificial Sequence: Synthetic oligonucleotide
aguuuaugaacuuggucca

SEQ ID NO: 267113 - RNA, 19 nt, Artificial Sequence
  Description of Artificial Sequence: Synthetic oligonucleotide
cugagcuagaugaagauca

SEQ ID NO: 267114 - RNA, 19 nt, Artificial Sequence
  Description of Artificial Sequence: Synthetic oligonucleotide
uuucgaauuaacagcucca

SEQ ID NO: 267115 - RNA, 19 nt, Artificial Sequence
  Description of Artificial Sequence: Synthetic oligonucleotide
uuaaguauuccuuguuggu

SEQ ID NO: 267116 - RNA, 19 nt, Artificial Sequence
  Description of Artificial Sequence: Synthetic oligonucleotide
ccaacaaacgcagagaacg

SEQ ID NO: 267117 - RNA, 19 nt, Artificial Sequence
  Description of Artificial Sequence: Synthetic oligonucleotide
aaaagauaccggcccucgg

SEQ ID NO: 267118 - RNA, 19 nt, Artificial Sequence
  Description of Artificial Sequence: Synthetic oligonucleotide
uguaggagaacucccacua

SEQ ID NO: 267119 - RNA, 19 nt, Artificial Sequence
  Description of Artificial Sequence: Synthetic oligonucleotide
guaguuuaagccauucucc

SEQ ID NO: 267120 - RNA, 19 nt, Artificial Sequence
  Description of Artificial Sequence: Synthetic oligonucleotide
ucgaguuuuaagauaggaa

SEQ ID NO: 267121 - RNA, 19 nt, Artificial Sequence
  Description of Artificial Sequence: Synthetic oligonucleotide
agcacgauaacugauuuca

SEQ ID NO: 267122 - RNA, 19 nt, Artificial Sequence
  Description of Artificial Sequence: Synthetic oligonucleotide
uuuaagccauucuccauug

SEQ ID NO: 267123 - RNA, 19 nt, Artificial Sequence
  Description of Artificial Sequence: Synthetic oligonucleotide
uccacguuucuaaggaaag

SEQ ID NO: 267124 - RNA, 19 nt, Artificial Sequence
  Description of Artificial Sequence: Synthetic oligonucleotide
gaucgcacuacuuccauca

SEQ ID NO: 267125 - RNA, 19 nt, Artificial Sequence
  Description of Artificial Sequence: Synthetic oligonucleotide
aaugcaucauaaaguuugg

SEQ ID NO: 267126 - RNA, 19 nt, Artificial Sequence
  Description of Artificial Sequence: Synthetic oligonucleotide
aaugccacggccauguagu

SEQ ID NO: 267127 - RNA, 19 nt, Artificial Sequence
  Description of Artificial Sequence: Synthetic oligonucleotide
ucagaagauacucugccuu

SEQ ID NO: 267128 - RNA, 19 nt, Artificial Sequence
  Description of Artificial Sequence: Synthetic oligonucleotide
gauauggaauguauugcag

SEQ ID NO: 267129 - RNA, 19 nt, Artificial Sequence
  Description of Artificial Sequence: Synthetic oligonucleotide
guuggaucgcacuacuucc

SEQ ID NO: 267130 - RNA, 19 nt, Artificial Sequence
  Description of Artificial Sequence: Synthetic oligonucleotide
cagugcguugauaagcugg

SEQ ID NO: 267131 - RNA, 19 nt, Artificial Sequence
  Description of Artificial Sequence: Synthetic oligonucleotide
agaauuccgagacaauacu

SEQ ID NO: 267132 - RNA, 19 nt, Artificial Sequence
  Description of Artificial Sequence: Synthetic oligonucleotide
uccgagacaauacuacaac

SEQ ID NO: 267133 - RNA, 19 nt, Artificial Sequence
  Description of Artificial Sequence: Synthetic oligonucleotide
gauacaauuaggagggauc

SEQ ID NO: 267134 - RNA, 19 nt, Artificial Sequence
  Description of Artificial Sequence: Synthetic oligonucleotide
ugcucaggugcauugagcu

SEQ ID NO: 267135 - RNA, 19 nt, Artificial Sequence
  Description of Artificial Sequence: Synthetic oligonucleotide
ucaucuaacuggcaccggu

SEQ ID NO: 267136 - RNA, 19 nt, Artificial Sequence
  Description of Artificial Sequence: Synthetic oligonucleotide
aagauaccggcccucggug

SEQ ID NO: 267137 - RNA, 19 nt, Artificial Sequence
  Description of Artificial Sequence: Synthetic oligonucleotide
gauggugcucauugaaggc

SEQ ID NO: 267138 - RNA, 19 nt, Artificial Sequence
  Description of Artificial Sequence: Synthetic oligonucleotide
gaaaagauaccggcccucg

SEQ ID NO: 267139 - RNA, 19 nt, Artificial Sequence
  Description of Artificial Sequence: Synthetic oligonucleotide
cuuagaguacccuuguaga

SEQ ID NO: 267140 - RNA, 19 nt, Artificial Sequence
  Description of Artificial Sequence: Synthetic oligonucleotide
auaaagauccgaugcgaga

SEQ ID NO: 267141 - RNA, 19 nt, Artificial Sequence
  Description of Artificial Sequence: Synthetic oligonucleotide
cuacauagagcaccagugc

SEQ ID NO: 267142 - RNA, 19 nt, Artificial Sequence
  Description of Artificial Sequence: Synthetic oligonucleotide
uaaagauccgaugcgagau

SEQ ID NO: 267143 - RNA, 19 nt, Artificial Sequence
  Description of Artificial Sequence: Synthetic oligonucleotide
augguauagauucacccau

SEQ ID NO: 267144 - RNA, 19 nt, Artificial Sequence
  Description of Artificial Sequence: Synthetic oligonucleotide
acuacuauaccaagaaccu

SEQ ID NO: 267145 - RNA, 19 nt, Artificial Sequence
  Description of Artificial Sequence: Synthetic oligonucleotide
aaucaacagcugugcguac

SEQ ID NO: 267146 - RNA, 19 nt, Artificial Sequence
  Description of Artificial Sequence: Synthetic oligonucleotide
gagaauuccgagacaauac

SEQ ID NO: 267147 - RNA, 19 nt, Artificial Sequence
  Description of Artificial Sequence: Synthetic oligonucleotide
ucgaauuaacagcuccaca

SEQ ID NO: 267148 - RNA, 19 nt, Artificial Sequence
  Description of Artificial Sequence: Synthetic oligonucleotide
uuucaaugguauggaauag

SEQ ID NO: 267149 - RNA, 19 nt, Artificial Sequence
  Description of Artificial Sequence: Synthetic oligonucleotide
agguugugauaacacuugg

SEQ ID NO: 267150 - RNA, 19 nt, Artificial Sequence
  Description of Artificial Sequence: Synthetic oligonucleotide
gcagagaacgcuuugguac

SEQ ID NO: 267151 - RNA, 19 nt, Artificial Sequence
  Description of Artificial Sequence: Synthetic oligonucleotide
auacaauuaggagggauca

SEQ ID NO: 267152 - RNA, 19 nt, Artificial Sequence
  Description of Artificial Sequence: Synthetic oligonucleotide
uuaggagugaaugggucug

SEQ ID NO: 267153 - RNA, 19 nt, Artificial Sequence
  Description of Artificial Sequence: Synthetic oligonucleotide
guauagauucacccauucc

SEQ ID NO: 267154 - RNA, 19 nt, Artificial Sequence
  Description of Artificial Sequence: Synthetic oligonucleotide
aauuuuggccaagagucaa

SEQ ID NO: 267155 - RNA, 19 nt, Artificial Sequence
  Description of Artificial Sequence: Synthetic oligonucleotide
augcggccuauuuacaauc

SEQ ID NO: 267156 - RNA, 19 nt, Artificial Sequence
  Description of Artificial Sequence: Synthetic oligonucleotide
ucucgacauucaauuaggc

SEQ ID NO: 267157 - RNA, 19 nt, Artificial Sequence
  Description of Artificial Sequence: Synthetic oligonucleotide
cgaauuaacagcuccacag

SEQ ID NO: 267158 - RNA, 19 nt, Artificial Sequence
  Description of Artificial Sequence: Synthetic oligonucleotide
cucauugaaggcgugcugc

SEQ ID NO: 267159 - RNA, 19 nt, Artificial Sequence
  Description of Artificial Sequence: Synthetic oligonucleotide
agcuagaugaagaucauau

SEQ ID NO: 267160 - RNA, 19 nt, Artificial Sequence
  Description of Artificial Sequence: Synthetic oligonucleotide
ucuaacuggcaccgguccc

SEQ ID NO: 267161 - RNA, 19 nt, Artificial Sequence
  Description of Artificial Sequence: Synthetic oligonucleotide
ugaaggugauaagaagacc

SEQ ID NO: 267162 - RNA, 19 nt, Artificial Sequence
  Description of Artificial Sequence: Synthetic oligonucleotide
gacaauacuacaaccucca

SEQ ID NO: 267163 - RNA, 19 nt, Artificial Sequence
  Description of Artificial Sequence: Synthetic oligonucleotide
uuagugaguuccacguuuc

SEQ ID NO: 267164 - RNA, 19 nt, Artificial Sequence
  Description of Artificial Sequence: Synthetic oligonucleotide
aaguuugggccuccaugag

SEQ ID NO: 267165 - RNA, 19 nt, Artificial Sequence
  Description of Artificial Sequence: Synthetic oligonucleotide
aucucgacauucaauuagg

SEQ ID NO: 267166 - RNA, 19 nt, Artificial Sequence
  Description of Artificial Sequence: Synthetic oligonucleotide
aagauccgaugcgagauca

SEQ ID NO: 267167 - RNA, 19 nt, Artificial Sequence
  Description of Artificial Sequence: Synthetic oligonucleotide
uaucgcaucucgagaauuc

SEQ ID NO: 267168 - RNA, 19 nt, Artificial Sequence
  Description of Artificial Sequence: Synthetic oligonucleotide
cagagugcuucacuaacag

SEQ ID NO: 267169 - RNA, 19 nt, Artificial Sequence
  Description of Artificial Sequence: Synthetic oligonucleotide
ggauauacaguucaucuaa

SEQ ID NO: 267170 - RNA, 19 nt, Artificial Sequence
  Description of Artificial Sequence: Synthetic oligonucleotide
ucauugaaggcgugcugcc

SEQ ID NO: 267171 - RNA, 19 nt, Artificial Sequence
  Description of Artificial Sequence: Synthetic oligonucleotide
uucgaauuaacagcuccac

SEQ ID NO: 267172 - RNA, 19 nt, Artificial Sequence
  Description of Artificial Sequence: Synthetic oligonucleotide
aaauuuuggccaagaguca

SEQ ID NO: 267173 - RNA, 19 nt, Artificial Sequence
  Description of Artificial Sequence: Synthetic oligonucleotide
caacaaacgcagagaacgc

SEQ ID NO: 267174 - RNA, 19 nt, Artificial Sequence
  Description of Artificial Sequence: Synthetic oligonucleotide
caaccccaccaguugaugg

SEQ ID NO: 267175 - RNA, 19 nt, Artificial Sequence
  Description of Artificial Sequence: Synthetic oligonucleotide
auaguuggaucgcacuacu

SEQ ID NO: 267176 - RNA, 19 nt, Artificial Sequence
  Description of Artificial Sequence: Synthetic oligonucleotide
gaauaggucugccucagua

SEQ ID NO: 267177 - RNA, 19 nt, Artificial Sequence
  Description of Artificial Sequence: Synthetic oligonucleotide
caaccuccaaaagacuucg

SEQ ID NO: 267178 - RNA, 19 nt, Artificial Sequence
  Description of Artificial Sequence: Synthetic oligonucleotide
ugagcacgauaacugauuu

SEQ ID NO: 267179 - RNA, 19 nt, Artificial Sequence
  Description of Artificial Sequence: Synthetic oligonucleotide
gauugccucaguguuugcc

SEQ ID NO: 267180 - RNA, 19 nt, Artificial Sequence
  Description of Artificial Sequence: Synthetic oligonucleotide
aauaaacccucuacagccu

SEQ ID NO: 267181 - RNA, 19 nt, Artificial Sequence
  Description of Artificial Sequence: Synthetic oligonucleotide
agguuguagcgauugccag

SEQ ID NO: 267182 - RNA, 19 nt, Artificial Sequence
  Description of Artificial Sequence: Synthetic oligonucleotide
agaacgcuuugguacuguc

SEQ ID NO: 267183 - RNA, 19 nt, Artificial Sequence
  Description of Artificial Sequence: Synthetic oligonucleotide
agcugugcguacauaggcc

SEQ ID NO: 267184 - RNA, 19 nt, Artificial Sequence
  Description of Artificial Sequence: Synthetic oligonucleotide
agcuaucgcaucucgagaa

SEQ ID NO: 267185 - RNA, 19 nt, Artificial Sequence
  Description of Artificial Sequence: Synthetic oligonucleotide
gacacccgagaaccaaagg

SEQ ID NO: 267186 - RNA, 19 nt, Artificial Sequence
  Description of Artificial Sequence: Synthetic oligonucleotide
caggggaucgaguuuuaag

SEQ ID NO: 267187 - RNA, 19 nt, Artificial Sequence
  Description of Artificial Sequence: Synthetic oligonucleotide
aucgaguuuuaagauagga

SEQ ID NO: 267188 - RNA, 19 nt, Artificial Sequence
  Description of Artificial Sequence: Synthetic oligonucleotide
cuauaucgcagcaauaggu

SEQ ID NO: 267189 - RNA, 19 nt, Artificial Sequence
  Description of Artificial Sequence: Synthetic oligonucleotide
gguuguagcgauugccagg

SEQ ID NO: 267190 - RNA, 19 nt, Artificial Sequence
  Description of Artificial Sequence: Synthetic oligonucleotide
ucccacuacuauaccaaga

SEQ ID NO: 267191 - RNA, 19 nt, Artificial Sequence
  Description of Artificial Sequence: Synthetic oligonucleotide
auggaauaggucugccuca

SEQ ID NO: 267192 - RNA, 19 nt, Artificial Sequence
  Description of Artificial Sequence: Synthetic oligonucleotide
ugaggguuucaaugguaug

SEQ ID NO: 267193 - RNA, 19 nt, Artificial Sequence
  Description of Artificial Sequence: Synthetic oligonucleotide
uguagguuacugcgcagau

SEQ ID NO: 267194 - RNA, 19 nt, Artificial Sequence
  Description of Artificial Sequence: Synthetic oligonucleotide
accuguagguuacugcgca

SEQ ID NO: 267195 - RNA, 19 nt, Artificial Sequence
  Description of Artificial Sequence: Synthetic oligonucleotide
acucuuagaguacccuugu

SEQ ID NO: 267196 - RNA, 19 nt, Artificial Sequence
  Description of Artificial Sequence: Synthetic oligonucleotide
uaccuguagguuacugcgc

SEQ ID NO: 267197 - RNA, 19 nt, Artificial Sequence
  Description of Artificial Sequence: Synthetic oligonucleotide
cugagucccuacauagagc

SEQ ID NO: 267198 - RNA, 19 nt, Artificial Sequence
  Description of Artificial Sequence: Synthetic oligonucleotide
caaugguauggaauagguc

SEQ ID NO: 267199 - RNA, 19 nt, Artificial Sequence
  Description of Artificial Sequence: Synthetic oligonucleotide
ucaacagauugaucuuggu

SEQ ID NO: 267200 - RNA, 19 nt, Artificial Sequence
  Description of Artificial Sequence: Synthetic oligonucleotide
cucgacauucaauuaggca

SEQ ID NO: 267201 - RNA, 19 nt, Artificial Sequence
  Description of Artificial Sequence: Synthetic oligonucleotide
ggcgcuaaauauuugaaua

SEQ ID NO: 267202 - RNA, 19 nt, Artificial Sequence
  Description of Artificial Sequence: Synthetic oligonucleotide
cacgaucaaucauugcuuc

SEQ ID NO: 267203 - RNA, 19 nt, Artificial Sequence
  Description of Artificial Sequence: Synthetic oligonucleotide
uggaauaggucugccucag

SEQ ID NO: 267204 - RNA, 19 nt, Artificial Sequence
  Description of Artificial Sequence: Synthetic oligonucleotide
gaaugagcauuaauccuca

SEQ ID NO: 267205 - RNA, 19 nt, Artificial Sequence
  Description of Artificial Sequence: Synthetic oligonucleotide
ugcggccuauuuacaauca

SEQ ID NO: 267206 - RNA, 19 nt, Artificial Sequence
  Description of Artificial Sequence: Synthetic oligonucleotide
cuuguagaguauuugcaua

SEQ ID NO: 267207 - RNA, 19 nt, Artificial Sequence
  Description of Artificial Sequence: Synthetic oligonucleotide
ugugcguacauaggccacc

SEQ ID NO: 267208 - RNA, 19 nt, Artificial Sequence
  Description of Artificial Sequence: Synthetic oligonucleotide
uuaagccauucuccauuga

SEQ ID NO: 267209 - RNA, 19 nt, Artificial Sequence
  Description of Artificial Sequence: Synthetic oligonucleotide
ccucauauuucuugggaag

SEQ ID NO: 267210 - RNA, 19 nt, Artificial Sequence
  Description of Artificial Sequence: Synthetic oligonucleotide
gaucgaguuuuaagauagg

SEQ ID NO: 267211 - RNA, 19 nt, Artificial Sequence
  Description of Artificial Sequence: Synthetic oligonucleotide
gagguuguagcgauugcca

SEQ ID NO: 267212 - RNA, 19 nt, Artificial Sequence
  Description of Artificial Sequence: Synthetic oligonucleotide
gaacccuugugaucuguuc

SEQ ID NO: 267213 - RNA, 19 nt, Artificial Sequence
  Description of Artificial Sequence: Synthetic oligonucleotide
auaaaucaaucaacagcug

SEQ ID NO: 267214 - RNA, 19 nt, Artificial Sequence
  Description of Artificial Sequence: Synthetic oligonucleotide
cguuucuaaggaaaggcgc

SEQ ID NO: 267215 - RNA, 19 nt, Artificial Sequence
  Description of Artificial Sequence: Synthetic oligonucleotide
aggcgcuaaauauuugaau

SEQ ID NO: 267216 - RNA, 19 nt, Artificial Sequence
  Description of Artificial Sequence: Synthetic oligonucleotide
agagugcuucacuaacagu

SEQ ID NO: 267217 - RNA, 19 nt, Artificial Sequence
  Description of Artificial Sequence: Synthetic oligonucleotide
ugcuucauaguuggaucgc

SEQ ID NO: 267218 - RNA, 19 nt, Artificial Sequence
  Description of Artificial Sequence: Synthetic oligonucleotide
aaggcgcuaaauauuugaa

SEQ ID NO: 267219 - RNA, 19 nt, Artificial Sequence
  Description of Artificial Sequence: Synthetic oligonucleotide
ggccauguaguuuaagcca

SEQ ID NO: 267220 - RNA, 19 nt, Artificial Sequence
  Description of Artificial Sequence: Synthetic oligonucleotide
ccuauaucgcagcaauagg

SEQ ID NO: 267221 - RNA, 19 nt, Artificial Sequence
  Description of Artificial Sequence: Synthetic oligonucleotide
gguauagauucacccauuc

SEQ ID NO: 267222 - RNA, 19 nt, Artificial Sequence
  Description of Artificial Sequence: Synthetic oligonucleotide
agauuaggagugaaugggu

SEQ ID NO: 267223 - RNA, 19 nt, Artificial Sequence
  Description of Artificial Sequence: Synthetic oligonucleotide
gcgagaucaauucaagcca

SEQ ID NO: 267224 - RNA, 19 nt, Artificial Sequence
  Description of Artificial Sequence: Synthetic oligonucleotide
caucuaacuggcaccgguc

SEQ ID NO: 267225 - RNA, 19 nt, Artificial Sequence
  Description of Artificial Sequence: Synthetic oligonucleotide
auaaaguuugggccuccau

SEQ ID NO: 267226 - RNA, 19 nt, Artificial Sequence
  Description of Artificial Sequence: Synthetic oligonucleotide
ucguaucauggugggauug

SEQ ID NO: 267227 - RNA, 19 nt, Artificial Sequence
  Description of Artificial Sequence: Synthetic oligonucleotide
uguggcguaugugccagca

SEQ ID NO: 267228 - RNA, 19 nt, Artificial Sequence
  Description of Artificial Sequence: Synthetic oligonucleotide
guuuuaagauaggaaucca

SEQ ID NO: 267229 - RNA, 19 nt, Artificial Sequence
  Description of Artificial Sequence: Synthetic oligonucleotide
caauuaggcaccuugugau

SEQ ID NO: 267230 - RNA, 19 nt, Artificial Sequence
  Description of Artificial Sequence: Synthetic oligonucleotide
cuccgcuugagcacgauaa

SEQ ID NO: 267231 - RNA, 19 nt, Artificial Sequence
  Description of Artificial Sequence: Synthetic oligonucleotide
gaaaggcgcuaaauauuug

SEQ ID NO: 267232 - RNA, 19 nt, Artificial Sequence
  Description of Artificial Sequence: Synthetic oligonucleotide
gauugugcugcugcuccgc

SEQ ID NO: 267233 - RNA, 19 nt, Artificial Sequence
  Description of Artificial Sequence: Synthetic oligonucleotide
augagucggacaaaggcau

SEQ ID NO: 267234 - RNA, 19 nt, Artificial Sequence
  Description of Artificial Sequence: Synthetic oligonucleotide
uccgcuugagcacgauaac

SEQ ID NO: 267235 - RNA, 19 nt, Artificial Sequence
  Description of Artificial Sequence: Synthetic oligonucleotide
cccuauaucgcagcaauag

SEQ ID NO: 267236 - RNA, 19 nt, Artificial Sequence
  Description of Artificial Sequence: Synthetic oligonucleotide
acgcagagaacgcuuuggu

SEQ ID NO: 267237 - RNA, 19 nt, Artificial Sequence
  Description of Artificial Sequence: Synthetic oligonucleotide
aggguuucaaugguaugga

SEQ ID NO: 267238 - RNA, 19 nt, Artificial Sequence
  Description of Artificial Sequence: Synthetic oligonucleotide
agcagcacucuuagaguac

SEQ ID NO: 267239 - RNA, 19 nt, Artificial Sequence
  Description of Artificial Sequence: Synthetic oligonucleotide
guaagagucuggaaauuaa

SEQ ID NO: 267240 - RNA, 19 nt, Artificial Sequence
  Description of Artificial Sequence: Synthetic oligonucleotide
ccgagacaauacuacaacc

SEQ ID NO: 267241 - RNA, 19 nt, Artificial Sequence
  Description of Artificial Sequence: Synthetic oligonucleotide
caucucgagaauuccgaga

SEQ ID NO: 267242 - RNA, 19 nt, Artificial Sequence
  Description of Artificial Sequence: Synthetic oligonucleotide
agauaccuguagguuacug

SEQ ID NO: 267243 - RNA, 19 nt, Artificial Sequence
  Description of Artificial Sequence: Synthetic oligonucleotide
uguuguggaugugugcaau

SEQ ID NO: 267244 - RNA, 19 nt, Artificial Sequence
  Description of Artificial Sequence: Synthetic oligonucleotide
ggagguuguagcgauugcc

SEQ ID NO: 267245 - RNA, 19 nt, Artificial Sequence
  Description of Artificial Sequence: Synthetic oligonucleotide
agugcguugauaagcugga

SEQ ID NO: 267246 - RNA, 19 nt, Artificial Sequence
  Description of Artificial Sequence: Synthetic oligonucleotide
gauaccggcccucgguguc

SEQ ID NO: 267247 - RNA, 19 nt, Artificial Sequence
  Description of Artificial Sequence: Synthetic oligonucleotide
gauuucgaauuaacagcuc

SEQ ID NO: 267248 - RNA, 19 nt, Artificial Sequence
  Description of Artificial Sequence: Synthetic oligonucleotide
gagcacgauaacugauuuc

SEQ ID NO: 267249 - RNA, 19 nt, Artificial Sequence
  Description of Artificial Sequence: Synthetic oligonucleotide
accagugcguugauaagcu

SEQ ID NO: 267250 - RNA, 19 nt, Artificial Sequence
  Description of Artificial Sequence: Synthetic oligonucleotide
uggaucgcacuacuuccau

SEQ ID NO: 267251 - RNA, 19 nt, Artificial Sequence
  Description of Artificial Sequence: Synthetic oligonucleotide
ugaacugagguggcaucac

SEQ ID NO: 267252 - RNA, 19 nt, Artificial Sequence
  Description of Artificial Sequence: Synthetic oligonucleotide
uguggcuguuuggguaccg

SEQ ID NO: 267253 - RNA, 19 nt, Artificial Sequence
  Description of Artificial Sequence: Synthetic oligonucleotide
gguugugauaacacuuggc

SEQ ID NO: 267254 - RNA, 19 nt, Artificial Sequence
  Description of Artificial Sequence: Synthetic oligonucleotide
guaggagaacucccacuac

SEQ ID NO: 267255 - RNA, 19 nt, Artificial Sequence
  Description of Artificial Sequence: Synthetic oligonucleotide
agcacucuuagaguacccu

SEQ ID NO: 267256 - RNA, 19 nt, Artificial Sequence
  Description of Artificial Sequence: Synthetic oligonucleotide
gagcacgaucaaucauugc

SEQ ID NO: 267257 - RNA, 19 nt, Artificial Sequence
  Description of Artificial Sequence: Synthetic oligonucleotide
aucaaccguuccaagagaa

SEQ ID NO: 267258 - RNA, 19 nt, Artificial Sequence
  Description of Artificial Sequence: Synthetic oligonucleotide
aucaacagcugugcguaca

SEQ ID NO: 267259 - RNA, 19 nt, Artificial Sequence
  Description of Artificial Sequence: Synthetic oligonucleotide
guacauaggccaccccuuc

SEQ ID NO: 267260 - RNA, 19 nt, Artificial Sequence
  Description of Artificial Sequence: Synthetic oligonucleotide
aggaaaggcgcuaaauauu

SEQ ID NO: 267261 - RNA, 19 nt, Artificial Sequence
  Description of Artificial Sequence: Synthetic oligonucleotide
acaauacuacaaccuccaa

SEQ ID NO: 267262 - RNA, 19 nt, Artificial Sequence
  Description of Artificial Sequence: Synthetic oligonucleotide
ugccgaacaucaugauccu

SEQ ID NO: 267263 - RNA, 19 nt, Artificial Sequence
  Description of Artificial Sequence: Synthetic oligonucleotide
guaccaagagguggcauuc

SEQ ID NO: 267264 - RNA, 19 nt, Artificial Sequence
  Description of Artificial Sequence: Synthetic oligonucleotide
aaacccucuacagccuuuu

SEQ ID NO: 267265 - RNA, 19 nt, Artificial Sequence
  Description of Artificial Sequence: Synthetic oligonucleotide
ugcguacauaggccacccc

SEQ ID NO: 267266 - RNA, 19 nt, Artificial Sequence
  Description of Artificial Sequence: Synthetic oligonucleotide
cugugcguacauaggccac

SEQ ID NO: 267267 - RNA, 19 nt, Artificial Sequence
  Description of Artificial Sequence: Synthetic oligonucleotide
augugugcaauggccugag

SEQ ID NO: 267268 - RNA, 19 nt, Artificial Sequence
  Description of Artificial Sequence: Synthetic oligonucleotide
gaugcggccuauuuacaau

SEQ ID NO: 267269 - RNA, 19 nt, Artificial Sequence
  Description of Artificial Sequence: Synthetic oligonucleotide
agugaguuccacguuucua

SEQ ID NO: 267270 - RNA, 19 nt, Artificial Sequence
  Description of Artificial Sequence: Synthetic oligonucleotide
ucccuauaucgcagcaaua

SEQ ID NO: 267271 - RNA, 19 nt, Artificial Sequence
  Description of Artificial Sequence: Synthetic oligonucleotide
gcugugcguacauaggcca

SEQ ID NO: 267272 - RNA, 19 nt, Artificial Sequence
  Description of Artificial Sequence: Synthetic oligonucleotide
gcguugauaagcuggaggu

SEQ ID NO: 267273 - RNA, 19 nt, Artificial Sequence
  Description of Artificial Sequence: Synthetic oligonucleotide
agagaacccuugugaucug

SEQ ID NO: 267274 - RNA, 19 nt, Artificial Sequence
  Description of Artificial Sequence: Synthetic oligonucleotide
auugacugagcuagaugaa

SEQ ID NO: 267275 - RNA, 19 nt, Artificial Sequence
  Description of Artificial Sequence: Synthetic oligonucleotide
agaaugcaucauaaaguuu

SEQ ID NO: 267276 - RNA, 19 nt, Artificial Sequence
  Description of Artificial Sequence: Synthetic oligonucleotide
uuggugcaucuguccaaca

SEQ ID NO: 267277 - RNA, 19 nt, Artificial Sequence
  Description of Artificial Sequence: Synthetic oligonucleotide
agagaacgcuuugguacug

SEQ ID NO: 267278 - RNA, 19 nt, Artificial Sequence
  Description of Artificial Sequence: Synthetic oligonucleotide
gggauauacaguucaucua

SEQ ID NO: 267279 - RNA, 19 nt, Artificial Sequence
  Description of Artificial Sequence: Synthetic oligonucleotide
uuggguaccgcagcugguu

SEQ ID NO: 267280 - RNA, 19 nt, Artificial Sequence
  Description of Artificial Sequence: Synthetic oligonucleotide
auucccuauaucgcagcaa

SEQ ID NO: 267281 - RNA, 19 nt, Artificial Sequence
  Description of Artificial Sequence: Synthetic oligonucleotide
uccgaggugcaauguuaau

SEQ ID NO: 267282 - RNA, 19 nt, Artificial Sequence
  Description of Artificial Sequence: Synthetic oligonucleotide
aauccucaugaggguuuca

SEQ ID NO: 267283 - RNA, 19 nt, Artificial Sequence
  Description of Artificial Sequence: Synthetic oligonucleotide
gcauucccuauaucgcagc

SEQ ID NO: 267284 - RNA, 19 nt, Artificial Sequence
  Description of Artificial Sequence: Synthetic oligonucleotide
accuuguuaugaggucauc

SEQ ID NO: 267285 - RNA, 19 nt, Artificial Sequence
  Description of Artificial Sequence: Synthetic oligonucleotide
cuugaggauucauggccaa

SEQ ID NO: 267286 - RNA, 19 nt, Artificial Sequence
  Description of Artificial Sequence: Synthetic oligonucleotide
ugcgcagauccgacagaaa

SEQ ID NO: 267287 - RNA, 19 nt, Artificial Sequence
  Description of Artificial Sequence: Synthetic oligonucleotide
gguacugucacggccagcu

SEQ ID NO: 267288 - RNA, 19 nt, Artificial Sequence
  Description of Artificial Sequence: Synthetic oligonucleotide
gugcguacauaggccaccc

SEQ ID NO: 267289 - RNA, 19 nt, Artificial Sequence
  Description of Artificial Sequence: Synthetic oligonucleotide
gcaucuaauaaacccucua

SEQ ID NO: 267290 - RNA, 19 nt, Artificial Sequence
  Description of Artificial Sequence: Synthetic oligonucleotide
cagaacuuaaaugcugggu

SEQ ID NO: 267291 - RNA, 19 nt, Artificial Sequence
  Description of Artificial Sequence: Synthetic oligonucleotide
cagcuaucgcaucucgaga

SEQ ID NO: 267292 - RNA, 19 nt, Artificial Sequence
  Description of Artificial Sequence: Synthetic oligonucleotide
ccacguuucuaaggaaagg

SEQ ID NO: 267293 - RNA, 19 nt, Artificial Sequence
  Description of Artificial Sequence: Synthetic oligonucleotide
ggaugcggccuauuuacaa

SEQ ID NO: 267294 - RNA, 19 nt, Artificial Sequence
  Description of Artificial Sequence: Synthetic oligonucleotide
cccuuguagaguauuugca

SEQ ID NO: 267295 - RNA, 19 nt, Artificial Sequence
  Description of Artificial Sequence: Synthetic oligonucleotide
gggcaauccuuccggagca

SEQ ID NO: 267296 - RNA, 19 nt, Artificial Sequence
  Description of Artificial Sequence: Synthetic oligonucleotide
aggauccgaggugcaaugu

SEQ ID NO: 267297 - RNA, 19 nt, Artificial Sequence
  Description of Artificial Sequence: Synthetic oligonucleotide
gauugaucuuggugacagu

SEQ ID NO: 267298 - RNA, 19 nt, Artificial Sequence
  Description of Artificial Sequence: Synthetic oligonucleotide
cuguaggagaacucccacu

SEQ ID NO: 267299 - RNA, 19 nt, Artificial Sequence
  Description of Artificial Sequence: Synthetic oligonucleotide
agcagcuaucgcaucucga

SEQ ID NO: 267300 - RNA, 19 nt, Artificial Sequence
  Description of Artificial Sequence: Synthetic oligonucleotide
gucuuaaguauuccuuguu

SEQ ID NO: 267301 - RNA, 19 nt, Artificial Sequence
  Description of Artificial Sequence: Synthetic oligonucleotide
ucccuacauagagcaccag

SEQ ID NO: 267302 - RNA, 19 nt, Artificial Sequence
  Description of Artificial Sequence: Synthetic oligonucleotide
cggccuauuuacaaucaac

SEQ ID NO: 267303 - RNA, 19 nt, Artificial Sequence
  Description of Artificial Sequence: Synthetic oligonucleotide
gauccgaugcgagaucaau

SEQ ID NO: 267304 - RNA, 19 nt, Artificial Sequence
  Description of Artificial Sequence: Synthetic oligonucleotide
ccuuguuaugaggucauca

SEQ ID NO: 267305 - RNA, 19 nt, Artificial Sequence
  Description of Artificial Sequence: Synthetic oligonucleotide
cacuaacagugcaaugagu

SEQ ID NO: 267306 - RNA, 19 nt, Artificial Sequence
  Description of Artificial Sequence: Synthetic oligonucleotide
ggaaaggcgcuaaauauuu

SEQ ID NO: 267307 - RNA, 19 nt, Artificial Sequence
  Description of Artificial Sequence: Synthetic oligonucleotide
gagcuagaugaagaucaua

SEQ ID NO: 267308 - RNA, 19 nt, Artificial Sequence
  Description of Artificial Sequence: Synthetic oligonucleotide
ggguaccgcagcugguuug

SEQ ID NO: 267309 - RNA, 19 nt, Artificial Sequence
  Description of Artificial Sequence: Synthetic oligonucleotide
aaaagacuucggagagcuu

SEQ ID NO: 267310 - RNA, 19 nt, Artificial Sequence
  Description of Artificial Sequence: Synthetic oligonucleotide
gugcaacagacuggaauaa

SEQ ID NO: 267311 - RNA, 19 nt, Artificial Sequence
  Description of Artificial Sequence: Synthetic oligonucleotide
gugcguugauaagcuggag

SEQ ID NO: 267312 - RNA, 19 nt, Artificial Sequence
  Description of Artificial Sequence: Synthetic oligonucleotide
gacauucaauuaggcaccu

SEQ ID NO: 267313 - RNA, 19 nt, Artificial Sequence
  Description of Artificial Sequence: Synthetic oligonucleotide
ccaugagcacgaucaauca

SEQ ID NO: 267314 - RNA, 19 nt, Artificial Sequence
  Description of Artificial Sequence: Synthetic oligonucleotide
ggaucgcacuacuuccauc

SEQ ID NO: 267315 - RNA, 19 nt, Artificial Sequence
  Description of Artificial Sequence: Synthetic oligonucleotide
caugagcacgaucaaucau

SEQ ID NO: 267316 - RNA, 19 nt, Artificial Sequence
  Description of Artificial Sequence: Synthetic oligonucleotide
gcguacauaggccaccccu

SEQ ID NO: 267317 - RNA, 19 nt, Artificial Sequence
  Description of Artificial Sequence: Synthetic oligonucleotide
agaacccuugugaucuguu

SEQ ID NO: 267318 - RNA, 19 nt, Artificial Sequence
  Description of Artificial Sequence: Synthetic oligonucleotide
ccuguagguuacugcgcag

SEQ ID NO: 267319 - RNA, 19 nt, Artificial Sequence
  Description of Artificial Sequence: Synthetic oligonucleotide
ggagauccauaugcccugc

SEQ ID NO: 267320 - RNA, 19 nt, Artificial Sequence
  Description of Artificial Sequence: Synthetic oligonucleotide
aggaugcggccuauuuaca

SEQ ID NO: 267321 - RNA, 19 nt, Artificial Sequence
  Description of Artificial Sequence: Synthetic oligonucleotide
acaggggaucgaguuuuaa

SEQ ID NO: 267322 - RNA, 19 nt, Artificial Sequence
  Description of Artificial Sequence: Synthetic oligonucleotide
gcucguaucauggugggau

SEQ ID NO: 267323 - RNA, 19 nt, Artificial Sequence
  Description of Artificial Sequence: Synthetic oligonucleotide
ggccaaccccaccaguuga

SEQ ID NO: 267324 - RNA, 19 nt, Artificial Sequence
  Description of Artificial Sequence: Synthetic oligonucleotide
aggagcuuugguaggccuu

SEQ ID NO: 267325 - RNA, 19 nt, Artificial Sequence
  Description of Artificial Sequence: Synthetic oligonucleotide
ugccacggccauguaguuu

SEQ ID NO: 267326 - RNA, 19 nt, Artificial Sequence
  Description of Artificial Sequence: Synthetic oligonucleotide
ggauacaauuaggagggau

SEQ ID NO: 267327 - RNA, 19 nt, Artificial Sequence
  Description of Artificial Sequence: Synthetic oligonucleotide
cuccauugacugagcuaga

SEQ ID NO: 267328 - RNA, 19 nt, Artificial Sequence
  Description of Artificial Sequence: Synthetic oligonucleotide
caccggucccuuccaucac

SEQ ID NO: 267329 - RNA, 19 nt, Artificial Sequence
  Description of Artificial Sequence: Synthetic oligonucleotide
cuucggagagcuugggcuu

SEQ ID NO: 267330 - RNA, 19 nt, Artificial Sequence
  Description of Artificial Sequence: Synthetic oligonucleotide
gaggccaaccccaccaguu

SEQ ID NO: 267331 - RNA, 19 nt, Artificial Sequence
  Description of Artificial Sequence: Synthetic oligonucleotide
gugauaacacuuggcucgu

SEQ ID NO: 267332 - RNA, 19 nt, Artificial Sequence
  Description of Artificial Sequence: Synthetic oligonucleotide
cgagaauuccgagacaaua

SEQ ID NO: 267333 - RNA, 19 nt, Artificial Sequence
  Description of Artificial Sequence: Synthetic oligonucleotide
cuaucgcaucucgagaauu

SEQ ID NO: 267334 - RNA, 19 nt, Artificial Sequence
  Description of Artificial Sequence: Synthetic oligonucleotide
cuacuauaccaagaaccuu

SEQ ID NO: 267335 - RNA, 19 nt, Artificial Sequence
  Description of Artificial Sequence: Synthetic oligonucleotide
gcggccuauuuacaaucaa

SEQ ID NO: 267336 - RNA, 19 nt, Artificial Sequence
  Description of Artificial Sequence: Synthetic oligonucleotide
cccuacauagagcaccagu

SEQ ID NO: 267337 - RNA, 19 nt, Artificial Sequence
  Description of Artificial Sequence: Synthetic oligonucleotide
cucguaucauggugggauu

SEQ ID NO: 267338 - RNA, 19 nt, Artificial Sequence
  Description of Artificial Sequence: Synthetic oligonucleotide
gcacgaucaaucauugcuu

SEQ ID NO: 267339 - RNA, 19 nt, Artificial Sequence
  Description of Artificial Sequence: Synthetic oligonucleotide
ggcaucuaauaaacccucu

SEQ ID NO: 267340 - RNA, 19 nt, Artificial Sequence
  Description of Artificial Sequence: Synthetic oligonucleotide
gcacgauaacugauuucaa

SEQ ID NO: 267341 - RNA, 19 nt, Artificial Sequence
  Description of Artificial Sequence: Synthetic oligonucleotide
cucugccgaacaucaugau

SEQ ID NO: 267342 - RNA, 19 nt, Artificial Sequence
  Description of Artificial Sequence: Synthetic oligonucleotide
ggaauaggucugccucagu

SEQ ID NO: 267343 - RNA, 19 nt, Artificial Sequence
  Description of Artificial Sequence: Synthetic oligonucleotide
ccccagagugcuucacuaa

SEQ ID NO: 267344 - RNA, 19 nt, Artificial Sequence
  Description of Artificial Sequence: Synthetic oligonucleotide
ggcucguaucaugguggga

SEQ ID NO: 267345 - RNA, 19 nt, Artificial Sequence
  Description of Artificial Sequence: Synthetic oligonucleotide
ccgcuugagcacgauaacu

SEQ ID NO: 267346 - RNA, 19 nt, Artificial Sequence
  Description of Artificial Sequence: Synthetic oligonucleotide
cguacauaggccaccccuu

SEQ ID NO: 267347 - RNA, 19 nt, Artificial Sequence
  Description of Artificial Sequence: Synthetic oligonucleotide
gccaaccccaccaguugau

SEQ ID NO: 267348 - RNA, 19 nt, Artificial Sequence
  Description of Artificial Sequence: Synthetic oligonucleotide
auuaagaugacacaugccc

SEQ ID NO: 267349 - RNA, 19 nt, Artificial Sequence
  Description of Artificial Sequence: Synthetic oligonucleotide
ucuaguuaagggaagaugg

SEQ ID NO: 267350 - RNA, 19 nt, Artificial Sequence
  Description of Artificial Sequence: Synthetic oligonucleotide
uguacggaggucuugaucg

SEQ ID NO: 267351 - RNA, 19 nt, Artificial Sequence
  Description of Artificial Sequence: Synthetic oligonucleotide
uuaauuggcaaucaguucu

SEQ ID NO: 267352 - RNA, 19 nt, Artificial Sequence
  Description of Artificial Sequence: Synthetic oligonucleotide
uauaccaucuaguagacac

SEQ ID NO: 267353 - RNA, 19 nt, Artificial Sequence
  Description of Artificial Sequence: Synthetic oligonucleotide
auacggggaaaucagaggc

SEQ ID NO: 267354 - RNA, 19 nt, Artificial Sequence
  Description of Artificial Sequence: Synthetic oligonucleotide
uuuacuucccgucauuugc

SEQ ID NO: 267355 - RNA, 19 nt, Artificial Sequence
  Description of Artificial Sequence: Synthetic oligonucleotide
uucuaaucaaaaucagugg

SEQ ID NO: 267356 - RNA, 19 nt, Artificial Sequence
  Description of Artificial Sequence: Synthetic oligonucleotide
auaaacauauugcuucugg

SEQ ID NO: 267357 - RNA, 19 nt, Artificial Sequence
  Description of Artificial Sequence: Synthetic oligonucleotide
uggaauuagagucuuuaag

SEQ ID NO: 267358 - RNA, 19 nt, Artificial Sequence
  Description of Artificial Sequence: Synthetic oligonucleotide
guaaccuccagucaguccg

SEQ ID NO: 267359 - RNA, 19 nt, Artificial Sequence
  Description of Artificial Sequence: Synthetic oligonucleotide
uacaaaagaggguauugcg

SEQ ID NO: 267360 - RNA, 19 nt, Artificial Sequence
  Description of Artificial Sequence: Synthetic oligonucleotide
aguaaggauaccgaagugc

SEQ ID NO: 267361 - RNA, 19 nt, Artificial Sequence
  Description of Artificial Sequence: Synthetic oligonucleotide
aaaguccuugccuggauuc

SEQ ID NO: 267362 - RNA, 19 nt, Artificial Sequence
  Description of Artificial Sequence: Synthetic oligonucleotide
uguagggguacacaaaaug

SEQ ID NO: 267363 - RNA, 19 nt, Artificial Sequence
  Description of Artificial Sequence: Synthetic oligonucleotide
aauuuacuugagcagguca

SEQ ID NO: 267364 - RNA, 19 nt, Artificial Sequence
  Description of Artificial Sequence: Synthetic oligonucleotide
uuguaaguuuauuugggag

SEQ ID NO: 267365 - RNA, 19 nt, Artificial Sequence
  Description of Artificial Sequence: Synthetic oligonucleotide
ucuuacauuuauuccaggc

SEQ ID NO: 267366 - RNA, 19 nt, Artificial Sequence
  Description of Artificial Sequence: Synthetic oligonucleotide
uguaaguuuauuugggagu

SEQ ID NO: 267367 - RNA, 19 nt, Artificial Sequence
  Description of Artificial Sequence: Synthetic oligonucleotide
ucuugaucggauuucucgg

SEQ ID NO: 267368 - RNA, 19 nt, Artificial Sequence
  Description of Artificial Sequence: Synthetic oligonucleotide
uuaagaugacacaugcccc

SEQ ID NO: 267369 - RNA, 19 nt, Artificial Sequence
  Description of Artificial Sequence: Synthetic oligonucleotide
uaaguuauuggguaugcac

SEQ ID NO: 267370 - RNA, 19 nt, Artificial Sequence
  Description of Artificial Sequence: Synthetic oligonucleotide
cuauccuggugaaagaggg

SEQ ID NO: 267371 - RNA, 19 nt, Artificial Sequence
  Description of Artificial Sequence: Synthetic oligonucleotide
agaggcgucagcuguaccc

SEQ ID NO: 267372 - RNA, 19 nt, Artificial Sequence
  Description of Artificial Sequence: Synthetic oligonucleotide
uguccaaucuggaaguaag

SEQ ID NO: 267373 - RNA, 19 nt, Artificial Sequence
  Description of Artificial Sequence: Synthetic oligonucleotide
uucuuauugugaagggacg

SEQ ID NO: 267374 - RNA, 19 nt, Artificial Sequence
  Description of Artificial Sequence: Synthetic oligonucleotide
aacuucuuaggagagacca

SEQ ID NO: 267375 - RNA, 19 nt, Artificial Sequence
  Description of Artificial Sequence: Synthetic oligonucleotide
gauacggggaaaucagagg

SEQ ID NO: 267376 - RNA, 19 nt, Artificial Sequence
  Description of Artificial Sequence: Synthetic oligonucleotide
uuuguagggguacacaaaa

SEQ ID NO: 267377 - RNA, 19 nt, Artificial Sequence
  Description of Artificial Sequence: Synthetic oligonucleotide
ucacuacugauacuguucc

SEQ ID NO: 267378 - RNA, 19 nt, Artificial Sequence
  Description of Artificial Sequence: Synthetic oligonucleotide
ugaagauucuuauugugaa

SEQ ID NO: 267379 - RNA, 19 nt, Artificial Sequence
  Description of Artificial Sequence: Synthetic oligonucleotide
ucugucgggacacucaucu

SEQ ID NO: 267380 - RNA, 19 nt, Artificial Sequence
  Description of Artificial Sequence: Synthetic oligonucleotide
uuaaacaaacacauugcua

SEQ ID NO: 267381 - RNA, 19 nt, Artificial Sequence
  Description of Artificial Sequence: Synthetic oligonucleotide
uguacccucugcauaacag

SEQ ID NO: 267382 - RNA, 19 nt, Artificial Sequence
  Description of Artificial Sequence: Synthetic oligonucleotide
aagaccagucuauccugcc

SEQ ID NO: 267383 - RNA, 19 nt, Artificial Sequence
  Description of Artificial Sequence: Synthetic oligonucleotide
ucuuauugugaagggacgg

SEQ ID NO: 267384 - RNA, 19 nt, Artificial Sequence
  Description of Artificial Sequence: Synthetic oligonucleotide
aggguauugcgucaaauca

SEQ ID NO: 267385 - RNA, 19 nt, Artificial Sequence
  Description of Artificial Sequence: Synthetic oligonucleotide
cauagcacucgacagcugg

SEQ ID NO: 267386 - RNA, 19 nt, Artificial Sequence
  Description of Artificial Sequence: Synthetic oligonucleotide
cuaguuaagggaagauggg

SEQ ID NO: 267387 - RNA, 19 nt, Artificial Sequence
  Description of Artificial Sequence: Synthetic oligonucleotide
aguuguaaguuuauuuggg

SEQ ID NO: 267388 - RNA, 19 nt, Artificial Sequence
  Description of Artificial Sequence: Synthetic oligonucleotide
aguuauuggguaugcacug

SEQ ID NO: 267389 - RNA, 19 nt, Artificial Sequence
  Description of Artificial Sequence: Synthetic oligonucleotide
uugccuucuaguuaaggga

SEQ ID NO: 267390 - RNA, 19 nt, Artificial Sequence
  Description of Artificial Sequence: Synthetic oligonucleotide
uuuaauuggcaaucaguuc

SEQ ID NO: 267391 - RNA, 19 nt, Artificial Sequence
  Description of Artificial Sequence: Synthetic oligonucleotide
uagguaaguuuccauauau

SEQ ID NO: 267392 - RNA, 19 nt, Artificial Sequence
  Description of Artificial Sequence: Synthetic oligonucleotide
uauuggguaugcacugggg

SEQ ID NO: 267393 - RNA, 19 nt, Artificial Sequence
  Description of Artificial Sequence: Synthetic oligonucleotide
caguggauguccaaucugg

SEQ ID NO: 267394 - RNA, 19 nt, Artificial Sequence
  Description of Artificial Sequence: Synthetic oligonucleotide
aguagguaaguuuccauau

SEQ ID NO: 267395 - RNA, 19 nt, Artificial Sequence
  Description of Artificial Sequence: Synthetic oligonucleotide
ugugacgcugcccagugga

SEQ ID NO: 267396 - RNA, 19 nt, Artificial Sequence
  Description of Artificial Sequence: Synthetic oligonucleotide
aauggcuucgcugcuagca

SEQ ID NO: 267397 - RNA, 19 nt, Artificial Sequence
  Description of Artificial Sequence: Synthetic oligonucleotide
acauagucuguguacggag

SEQ ID NO: 267398 - RNA, 19 nt, Artificial Sequence
  Description of Artificial Sequence: Synthetic oligonucleotide
guaucuauucaugaugcgc

SEQ ID NO: 267399 - RNA, 19 nt, Artificial Sequence
  Description of Artificial Sequence: Synthetic oligonucleotide
auacagugauuuuagaaua

SEQ ID NO: 267400 - RNA, 19 nt, Artificial Sequence
  Description of Artificial Sequence: Synthetic oligonucleotide
guaaggauaccgaagugcc

SEQ ID NO: 267401 - RNA, 19 nt, Artificial Sequence
  Description of Artificial Sequence: Synthetic oligonucleotide
aacgugauuaucucccaaa

SEQ ID NO: 267402 - RNA, 19 nt, Artificial Sequence
  Description of Artificial Sequence: Synthetic oligonucleotide
guguaugugccuugguugg

SEQ ID NO: 267403 - RNA, 19 nt, Artificial Sequence
  Description of Artificial Sequence: Synthetic oligonucleotide
uucuaguuaagggaagaug

SEQ ID NO: 267404 - RNA, 19 nt, Artificial Sequence
  Description of Artificial Sequence: Synthetic oligonucleotide
auuagagucuuuaaguuau

SEQ ID NO: 267405 - RNA, 19 nt, Artificial Sequence
  Description of Artificial Sequence: Synthetic oligonucleotide
auucuguacugagauacgg

SEQ ID NO: 267406 - RNA, 19 nt, Artificial Sequence
  Description of Artificial Sequence: Synthetic oligonucleotide
caguaugcuuaaaacaaug

SEQ ID NO: 267407 - RNA, 19 nt, Artificial Sequence
  Description of Artificial Sequence: Synthetic oligonucleotide
uaagcuugggugcuuuuac

SEQ ID NO: 267408 - RNA, 19 nt, Artificial Sequence
  Description of Artificial Sequence: Synthetic oligonucleotide
uucgcugcuagcauuugga

SEQ ID NO: 267409 - RNA, 19 nt, Artificial Sequence
  Description of Artificial Sequence: Synthetic oligonucleotide
cuugaucggauuucucggg

SEQ ID NO: 267410 - RNA, 19 nt, Artificial Sequence
  Description of Artificial Sequence: Synthetic oligonucleotide
guagggguacacaaaaugc

SEQ ID NO: 267411 - RNA, 19 nt, Artificial Sequence
  Description of Artificial Sequence: Synthetic oligonucleotide
gaggucguggaaucaaccc

SEQ ID NO: 267412 - RNA, 19 nt, Artificial Sequence
  Description of Artificial Sequence: Synthetic oligonucleotide
agcuguaguugguagaccu

SEQ ID NO: 267413 - RNA, 19 nt, Artificial Sequence
  Description of Artificial Sequence: Synthetic oligonucleotide
uuuuguagggguacacaaa

SEQ ID NO: 267414 - RNA, 19 nt, Artificial Sequence
  Description of Artificial Sequence: Synthetic oligonucleotide
guuaguucagaacagcugu

SEQ ID NO: 267415 - RNA, 19 nt, Artificial Sequence
  Description of Artificial Sequence: Synthetic oligonucleotide
gagaucaagucacauuguc

SEQ ID NO: 267416 - RNA, 19 nt, Artificial Sequence
  Description of Artificial Sequence: Synthetic oligonucleotide
uugaucggauuucucgggc

SEQ ID NO: 267417 - RNA, 19 nt, Artificial Sequence
  Description of Artificial Sequence: Synthetic oligonucleotide
cucacuacugauacuguuc

SEQ ID NO: 267418 - RNA, 19 nt, Artificial Sequence
  Description of Artificial Sequence: Synthetic oligonucleotide
uccaaucuggaaguaagga

SEQ ID NO: 267419 - RNA, 19 nt, Artificial Sequence
  Description of Artificial Sequence: Synthetic oligonucleotide
agguauucaauagaacgug

SEQ ID NO: 267420 - RNA, 19 nt, Artificial Sequence
  Description of Artificial Sequence: Synthetic oligonucleotide
uguaaguaggcaguccugu

SEQ ID NO: 267421 - RNA, 19 nt, Artificial Sequence
  Description of Artificial Sequence: Synthetic oligonucleotide
caggcaaguagcgagagug

SEQ ID NO: 267422 - RNA, 19 nt, Artificial Sequence
  Description of Artificial Sequence: Synthetic oligonucleotide
gauuucucgggccaaucca

SEQ ID NO: 267423 - RNA, 19 nt, Artificial Sequence
  Description of Artificial Sequence: Synthetic oligonucleotide
uuuucgauggcagcaccag

SEQ ID NO: 267424 - RNA, 19 nt, Artificial Sequence
  Description of Artificial Sequence: Synthetic oligonucleotide
gaucguuguguaucuauuc

SEQ ID NO: 267425 - RNA, 19 nt, Artificial Sequence
  Description of Artificial Sequence: Synthetic oligonucleotide
uuugccgcagaccgcuggg

SEQ ID NO: 267426 - RNA, 19 nt, Artificial Sequence
  Description of Artificial Sequence: Synthetic oligonucleotide
gaggguauugcgucaaauc

SEQ ID NO: 267427 - RNA, 19 nt, Artificial Sequence
  Description of Artificial Sequence: Synthetic oligonucleotide
accgaagugccugacuagc

SEQ ID NO: 267428 - RNA, 19 nt, Artificial Sequence
  Description of Artificial Sequence: Synthetic oligonucleotide
uacccaccggcucggaugg

SEQ ID NO: 267429 - RNA, 19 nt, Artificial Sequence
  Description of Artificial Sequence: Synthetic oligonucleotide
uggucgugaagaaaucagu

SEQ ID NO: 267430 - RNA, 19 nt, Artificial Sequence
  Description of Artificial Sequence: Synthetic oligonucleotide
agaccagucuauccugccg

SEQ ID NO: 267431 - RNA, 19 nt, Artificial Sequence
  Description of Artificial Sequence: Synthetic oligonucleotide
uuauugugaagggacggga

SEQ ID NO: 267432 - RNA, 19 nt, Artificial Sequence
  Description of Artificial Sequence: Synthetic oligonucleotide
agauacggggaaaucagag

SEQ ID NO: 267433 - RNA, 19 nt, Artificial Sequence
  Description of Artificial Sequence: Synthetic oligonucleotide
caggcggagaucaagucac

SEQ ID NO: 267434 - RNA, 19 nt, Artificial Sequence
  Description of Artificial Sequence: Synthetic oligonucleotide
aguggaacuagaccaaauu

SEQ ID NO: 267435 - RNA, 19 nt, Artificial Sequence
  Description of Artificial Sequence: Synthetic oligonucleotide
ugaugcgccugcucugucg

SEQ ID NO: 267436 - RNA, 19 nt, Artificial Sequence
  Description of Artificial Sequence: Synthetic oligonucleotide
uugaucguuguguaucuau

SEQ ID NO: 267437 - RNA, 19 nt, Artificial Sequence
  Description of Artificial Sequence: Synthetic oligonucleotide
uaguuaagggaagaugggu

SEQ ID NO: 267438 - RNA, 19 nt, Artificial Sequence
  Description of Artificial Sequence: Synthetic oligonucleotide
cauacagugauuuuagaau

SEQ ID NO: 267439 - RNA, 19 nt, Artificial Sequence
  Description of Artificial Sequence: Synthetic oligonucleotide
ugaucggauuucucgggcc

SEQ ID NO: 267440 - RNA, 19 nt, Artificial Sequence
  Description of Artificial Sequence: Synthetic oligonucleotide
aaguccgcccaaucgucag

SEQ ID NO: 267441 - RNA, 19 nt, Artificial Sequence
  Description of Artificial Sequence: Synthetic oligonucleotide
uaauuggcaaucaguucuc

SEQ ID NO: 267442 - RNA, 19 nt, Artificial Sequence
  Description of Artificial Sequence: Synthetic oligonucleotide
acaugccccuauuuuaucu

SEQ ID NO: 267443 - RNA, 19 nt, Artificial Sequence
  Description of Artificial Sequence: Synthetic oligonucleotide
gguacaacggaaucagcug

SEQ ID NO: 267444 - RNA, 19 nt, Artificial Sequence
  Description of Artificial Sequence: Synthetic oligonucleotide
auucaugaugcgccugcuc

SEQ ID NO: 267445 - RNA, 19 nt, Artificial Sequence
  Description of Artificial Sequence: Synthetic oligonucleotide
auaccgaagugccugacua

SEQ ID NO: 267446 - RNA, 19 nt, Artificial Sequence
  Description of Artificial Sequence: Synthetic oligonucleotide
gaaccauaggucccauccc

SEQ ID NO: 267447 - RNA, 19 nt, Artificial Sequence
  Description of Artificial Sequence: Synthetic oligonucleotide
caaguagugcugcuuugcc

SEQ ID NO: 267448 - RNA, 19 nt, Artificial Sequence
  Description of Artificial Sequence: Synthetic oligonucleotide
cuuuuguagggguacacaa

SEQ ID NO: 267449 - RNA, 19 nt, Artificial Sequence
  Description of Artificial Sequence: Synthetic oligonucleotide
uucuuaggagagaccauuc

SEQ ID NO: 267450 - RNA, 19 nt, Artificial Sequence
  Description of Artificial Sequence: Synthetic oligonucleotide
aguaugcuuaaaacaauga

SEQ ID NO: 267451 - RNA, 19 nt, Artificial Sequence
  Description of Artificial Sequence: Synthetic oligonucleotide
ugcuugaucguuguguauc

SEQ ID NO: 267452 - RNA, 19 nt, Artificial Sequence
  Description of Artificial Sequence: Synthetic oligonucleotide
ggugcuuuuacaccaccag

SEQ ID NO: 267453 - RNA, 19 nt, Artificial Sequence
  Description of Artificial Sequence: Synthetic oligonucleotide
ucuauccugccgugcacag

SEQ ID NO: 267454 - RNA, 19 nt, Artificial Sequence
  Description of Artificial Sequence: Synthetic oligonucleotide
guacaacggaaucagcuga

SEQ ID NO: 267455 - RNA, 19 nt, Artificial Sequence
  Description of Artificial Sequence: Synthetic oligonucleotide
aggucguggaaucaaccca

SEQ ID NO: 267456 - RNA, 19 nt, Artificial Sequence
  Description of Artificial Sequence: Synthetic oligonucleotide
guagcgagagugcuucaag

SEQ ID NO: 267457 - RNA, 19 nt, Artificial Sequence
  Description of Artificial Sequence: Synthetic oligonucleotide
ugaucguuguguaucuauu

SEQ ID NO: 267458 - RNA, 19 nt, Artificial Sequence
  Description of Artificial Sequence: Synthetic oligonucleotide
agucuauccugccgugcac

SEQ ID NO: 267459 - RNA, 19 nt, Artificial Sequence
  Description of Artificial Sequence: Synthetic oligonucleotide
uaaggauaccgaagugccu

SEQ ID NO: 267460 - RNA, 19 nt, Artificial Sequence
  Description of Artificial Sequence: Synthetic oligonucleotide
aucgucagaacccuuuguu

SEQ ID NO: 267461 - RNA, 19 nt, Artificial Sequence
  Description of Artificial Sequence: Synthetic oligonucleotide
uacaacggaaucagcugaa

SEQ ID NO: 267462 - RNA, 19 nt, Artificial Sequence
  Description of Artificial Sequence: Synthetic oligonucleotide
gagcaggucaucccaauaa

SEQ ID NO: 267463 - RNA, 19 nt, Artificial Sequence
  Description of Artificial Sequence: Synthetic oligonucleotide
ucagaacccuuuguugacc

SEQ ID NO: 267464 - RNA, 19 nt, Artificial Sequence
  Description of Artificial Sequence: Synthetic oligonucleotide
ucuauucaugaugcgccug

SEQ ID NO: 267465 - RNA, 19 nt, Artificial Sequence
  Description of Artificial Sequence: Synthetic oligonucleotide
guacccaccggcucggaug

SEQ ID NO: 267466 - RNA, 19 nt, Artificial Sequence
  Description of Artificial Sequence: Synthetic oligonucleotide
ggaagauggguuucuaauc

SEQ ID NO: 267467 - RNA, 19 nt, Artificial Sequence
  Description of Artificial Sequence: Synthetic oligonucleotide
aagccguguuuaugaauga

SEQ ID NO: 267468 - RNA, 19 nt, Artificial Sequence
  Description of Artificial Sequence: Synthetic oligonucleotide
uaccgaagugccugacuag

SEQ ID NO: 267469 - RNA, 19 nt, Artificial Sequence
  Description of Artificial Sequence: Synthetic oligonucleotide
uggauucgggagcacgcca

SEQ ID NO: 267470 - RNA, 19 nt, Artificial Sequence
  Description of Artificial Sequence: Synthetic oligonucleotide
aaagaggguauugcgucaa

SEQ ID NO: 267471 - RNA, 19 nt, Artificial Sequence
  Description of Artificial Sequence: Synthetic oligonucleotide
acgugauuaucucccaaau

SEQ ID NO: 267472 - RNA, 19 nt, Artificial Sequence
  Description of Artificial Sequence: Synthetic oligonucleotide
ucguggaaucaacccagga

SEQ ID NO: 267473 - RNA, 19 nt, Artificial Sequence
  Description of Artificial Sequence: Synthetic oligonucleotide
uuugcucacuacugauacu

SEQ ID NO: 267474 - RNA, 19 nt, Artificial Sequence
  Description of Artificial Sequence: Synthetic oligonucleotide
guaugugccuugguugggg

SEQ ID NO: 267475 - RNA, 19 nt, Artificial Sequence
  Description of Artificial Sequence: Synthetic oligonucleotide
gcgagagugcuucaaguag

SEQ ID NO: 267476 - RNA, 19 nt, Artificial Sequence
  Description of Artificial Sequence: Synthetic oligonucleotide
caaucgucagaacccuuug

SEQ ID NO: 267477 - RNA, 19 nt, Artificial Sequence
  Description of Artificial Sequence: Synthetic oligonucleotide
ggucgugaagaaaucagug

SEQ ID NO: 267478 - RNA, 19 nt, Artificial Sequence
  Description of Artificial Sequence: Synthetic oligonucleotide
ugcuuugccgcagaccgcu

SEQ ID NO: 267479 - RNA, 19 nt, Artificial Sequence
  Description of Artificial Sequence: Synthetic oligonucleotide
agaagccguguuuaugaau

SEQ ID NO: 267480 - RNA, 19 nt, Artificial Sequence
  Description of Artificial Sequence: Synthetic oligonucleotide
uuguagggguacacaaaau

SEQ ID NO: 267481 - RNA, 19 nt, Artificial Sequence
  Description of Artificial Sequence: Synthetic oligonucleotide
ugggugcuuuuacaccacc

SEQ ID NO: 267482 - RNA, 19 nt, Artificial Sequence
  Description of Artificial Sequence: Synthetic oligonucleotide
cucugcauaacagaaccga

SEQ ID NO: 267483 - RNA, 19 nt, Artificial Sequence
  Description of Artificial Sequence: Synthetic oligonucleotide
agcgagagugcuucaagua

SEQ ID NO: 267484 - RNA, 19 nt, Artificial Sequence
  Description of Artificial Sequence: Synthetic oligonucleotide
guacccucugcauaacaga

SEQ ID NO: 267485 - RNA, 19 nt, Artificial Sequence
  Description of Artificial Sequence: Synthetic oligonucleotide
aggcaaguagcgagagugc

SEQ ID NO: 267486 - RNA, 19 nt, Artificial Sequence
  Description of Artificial Sequence: Synthetic oligonucleotide
ggauuucucgggccaaucc

SEQ ID NO: 267487 - RNA, 19 nt, Artificial Sequence
  Description of Artificial Sequence: Synthetic oligonucleotide
guacaccucugccaugaug

SEQ ID NO: 267488 - RNA, 19 nt, Artificial Sequence
  Description of Artificial Sequence: Synthetic oligonucleotide
ggccucggggcuuugacag

SEQ ID NO: 267489 - RNA, 19 nt, Artificial Sequence
  Description of Artificial Sequence: Synthetic oligonucleotide
gagcacgccauuucuuaca

SEQ ID NO: 267490 - RNA, 19 nt, Artificial Sequence
  Description of Artificial Sequence: Synthetic oligonucleotide
guaaguaggcaguccuguc

SEQ ID NO: 267491 - RNA, 19 nt, Artificial Sequence
  Description of Artificial Sequence: Synthetic oligonucleotide
gaaucaacccaggagugcu

SEQ ID NO: 267492 - RNA, 19 nt, Artificial Sequence
  Description of Artificial Sequence: Synthetic oligonucleotide
gucgugaagaaaucagugu

SEQ ID NO: 267493 - RNA, 19 nt, Artificial Sequence
  Description of Artificial Sequence: Synthetic oligonucleotide
ggucguggaaucaacccag

SEQ ID NO: 267494 - RNA, 19 nt, Artificial Sequence
  Description of Artificial Sequence: Synthetic oligonucleotide
agcacgccauuucuuacau

SEQ ID NO: 267495 - RNA, 19 nt, Artificial Sequence
  Description of Artificial Sequence: Synthetic oligonucleotide
ugagacacucguuccugua

SEQ ID NO: 267496 - RNA, 19 nt, Artificial Sequence
  Description of Artificial Sequence: Synthetic oligonucleotide
ucguuccuguacccaccgg

SEQ ID NO: 267497 - RNA, 19 nt, Artificial Sequence
  Description of Artificial Sequence: Synthetic oligonucleotide
ggaaguucauagcacucga

SEQ ID NO: 267498 - RNA, 19 nt, Artificial Sequence
  Description of Artificial Sequence: Synthetic oligonucleotide
ugagccaacugaaguuauu

SEQ ID NO: 267499 - RNA, 19 nt, Artificial Sequence
  Description of Artificial Sequence: Synthetic oligonucleotide
gaacgugauuaucucccaa

SEQ ID NO: 267500 - RNA, 19 nt, Artificial Sequence
  Description of Artificial Sequence: Synthetic oligonucleotide
gaggucuugaucggauuuc

SEQ ID NO: 267501 - RNA, 19 nt, Artificial Sequence
  Description of Artificial Sequence: Synthetic oligonucleotide
acccucugcauaacagaac

SEQ ID NO: 267502 - RNA, 19 nt, Artificial Sequence
  Description of Artificial Sequence: Synthetic oligonucleotide
cagguacaacggaaucagc

SEQ ID NO: 267503 - RNA, 19 nt, Artificial Sequence
  Description of Artificial Sequence: Synthetic oligonucleotide
aagaggguauugcgucaaa

SEQ ID NO: 267504 - RNA, 19 nt, Artificial Sequence
  Description of Artificial Sequence: Synthetic oligonucleotide
accagucuauccugccgug

SEQ ID NO: 267505 - RNA, 19 nt, Artificial Sequence
  Description of Artificial Sequence: Synthetic oligonucleotide
aggauaccgaagugccuga

SEQ ID NO: 267506 - RNA, 19 nt, Artificial Sequence
  Description of Artificial Sequence: Synthetic oligonucleotide
gccguuggccguuucuugg

SEQ ID NO: 267507 - RNA, 19 nt, Artificial Sequence
  Description of Artificial Sequence: Synthetic oligonucleotide
ucgcugcuagcauuuggaa

SEQ ID NO: 267508 - RNA, 19 nt, Artificial Sequence
  Description of Artificial Sequence: Synthetic oligonucleotide
gauaccgaagugccugacu

SEQ ID NO: 267509 - RNA, 19 nt, Artificial Sequence
  Description of Artificial Sequence: Synthetic oligonucleotide
ucggggcuuugacagucac

SEQ ID NO: 267510 - RNA, 19 nt, Artificial Sequence
  Description of Artificial Sequence: Synthetic oligonucleotide
acacaugccccuauuuuau

SEQ ID NO: 267511 - RNA, 19 nt, Artificial Sequence
  Description of Artificial Sequence: Synthetic oligonucleotide
gagauacggggaaaucaga

SEQ ID NO: 267512 - RNA, 19 nt, Artificial Sequence
  Description of Artificial Sequence: Synthetic oligonucleotide
cuggauucgggagcacgcc

SEQ ID NO: 267513 - RNA, 19 nt, Artificial Sequence
  Description of Artificial Sequence: Synthetic oligonucleotide
ccuauaccaucuaguagac

SEQ ID NO: 267514 - RNA, 19 nt, Artificial Sequence
  Description of Artificial Sequence: Synthetic oligonucleotide
gguauucaauagaacguga

SEQ ID NO: 267515 - RNA, 19 nt, Artificial Sequence
  Description of Artificial Sequence: Synthetic oligonucleotide
agaggguauugcgucaaau

SEQ ID NO: 267516 - RNA, 19 nt, Artificial Sequence
  Description of Artificial Sequence: Synthetic oligonucleotide
uguacccaccggcucggau

SEQ ID NO: 267517 - RNA, 19 nt, Artificial Sequence
  Description of Artificial Sequence: Synthetic oligonucleotide
cagucuauccugccgugca

SEQ ID NO: 267518 - RNA, 19 nt, Artificial Sequence
  Description of Artificial Sequence: Synthetic oligonucleotide
ccgcccaaucgucagaacc

SEQ ID NO: 267519 - RNA, 19 nt, Artificial Sequence
  Description of Artificial Sequence: Synthetic oligonucleotide
agaccgcuggguuggcgug

SEQ ID NO: 267520 - RNA, 19 nt, Artificial Sequence
  Description of Artificial Sequence: Synthetic oligonucleotide
cacaugccccuauuuuauc

SEQ ID NO: 267521 - RNA, 19 nt, Artificial Sequence
  Description of Artificial Sequence: Synthetic oligonucleotide
uacggaggucuugaucgga

SEQ ID NO: 267522 - RNA, 19 nt, Artificial Sequence
  Description of Artificial Sequence: Synthetic oligonucleotide
aguagcgagagugcuucaa

SEQ ID NO: 267523 - RNA, 19 nt, Artificial Sequence
  Description of Artificial Sequence: Synthetic oligonucleotide
guuuggucgugaagaaauc

SEQ ID NO: 267524 - RNA, 19 nt, Artificial Sequence
  Description of Artificial Sequence: Synthetic oligonucleotide
ccucugcauaacagaaccg

SEQ ID NO: 267525 - RNA, 19 nt, Artificial Sequence
  Description of Artificial Sequence: Synthetic oligonucleotide
guauucaauagaacgugau

SEQ ID NO: 267526 - RNA, 19 nt, Artificial Sequence
  Description of Artificial Sequence: Synthetic oligonucleotide
aggcgucagcuguacccuc

SEQ ID NO: 267527 - RNA, 19 nt, Artificial Sequence
  Description of Artificial Sequence: Synthetic oligonucleotide
ugguagaccucaggaggac

SEQ ID NO: 267528 - RNA, 19 nt, Artificial Sequence
  Description of Artificial Sequence: Synthetic oligonucleotide
ggacagaaccauagguccc

SEQ ID NO: 267529 - RNA, 19 nt, Artificial Sequence
  Description of Artificial Sequence: Synthetic oligonucleotide
caaguccgcccaaucguca

SEQ ID NO: 267530 - RNA, 19 nt, Artificial Sequence
  Description of Artificial Sequence: Synthetic oligonucleotide
caucuaguagacacauagu

SEQ ID NO: 267531 - RNA, 19 nt, Artificial Sequence
  Description of Artificial Sequence: Synthetic oligonucleotide
auagcacucgacagcuggu

SEQ ID NO: 267532 - RNA, 19 nt, Artificial Sequence
  Description of Artificial Sequence: Synthetic oligonucleotide
gggacgggaagagcguugg

SEQ ID NO: 267533 - RNA, 19 nt, Artificial Sequence
  Description of Artificial Sequence: Synthetic oligonucleotide
aguccgcccaaucgucaga

SEQ ID NO: 267534 - RNA, 19 nt, Artificial Sequence
  Description of Artificial Sequence: Synthetic oligonucleotide
uguacaccucugccaugau

SEQ ID NO: 267535 - RNA, 19 nt, Artificial Sequence
  Description of Artificial Sequence: Synthetic oligonucleotide
cccgucauuugccuucuag

SEQ ID NO: 267536 - RNA, 19 nt, Artificial Sequence
  Description of Artificial Sequence: Synthetic oligonucleotide
gucuauccugccgugcaca

SEQ ID NO: 267537 - RNA, 19 nt, Artificial Sequence
  Description of Artificial Sequence: Synthetic oligonucleotide
guaagcuugggugcuuuua

SEQ ID NO: 267538 - RNA, 19 nt, Artificial Sequence
  Description of Artificial Sequence: Synthetic oligonucleotide
uagcacucgacagcuggua

SEQ ID NO: 267539 - RNA, 19 nt, Artificial Sequence
  Description of Artificial Sequence: Synthetic oligonucleotide
gagccaacugaaguuauuu

SEQ ID NO: 267540 - RNA, 19 nt, Artificial Sequence
  Description of Artificial Sequence: Synthetic oligonucleotide
ugccgcagaccgcuggguu

SEQ ID NO: 267541 - RNA, 19 nt, Artificial Sequence
  Description of Artificial Sequence: Synthetic oligonucleotide
uuuacaccaccaggugguu

SEQ ID NO: 267542 - RNA, 19 nt, Artificial Sequence
  Description of Artificial Sequence: Synthetic oligonucleotide
guacauuugguuggaaauu

SEQ ID NO: 267543 - RNA, 19 nt, Artificial Sequence
  Description of Artificial Sequence: Synthetic oligonucleotide
cuucaccuuuuguaggggu

SEQ ID NO: 267544 - RNA, 19 nt, Artificial Sequence
  Description of Artificial Sequence: Synthetic oligonucleotide
ggguauugcgucaaaucaa

SEQ ID NO: 267545 - RNA, 19 nt, Artificial Sequence
  Description of Artificial Sequence: Synthetic oligonucleotide
cugacuagccguuggccgu

SEQ ID NO: 267546 - RNA, 19 nt, Artificial Sequence
  Description of Artificial Sequence: Synthetic oligonucleotide
cucugucgggacacucauc

SEQ ID NO: 267547 - RNA, 19 nt, Artificial Sequence
  Description of Artificial Sequence: Synthetic oligonucleotide
gauguccaaucuggaagua

SEQ ID NO: 267548 - RNA, 19 nt, Artificial Sequence
  Description of Artificial Sequence: Synthetic oligonucleotide
cuauaccaucuaguagaca

SEQ ID NO: 267549 - RNA, 19 nt, Artificial Sequence
  Description of Artificial Sequence: Synthetic oligonucleotide
uccgcccaaucgucagaac

SEQ ID NO: 267550 - RNA, 19 nt, Artificial Sequence
  Description of Artificial Sequence: Synthetic oligonucleotide
caguguaugugccuugguu

SEQ ID NO: 267551 - RNA, 19 nt, Artificial Sequence
  Description of Artificial Sequence: Synthetic oligonucleotide
gccuucuaguuaagggaag

SEQ ID NO: 267552 - RNA, 19 nt, Artificial Sequence
  Description of Artificial Sequence: Synthetic oligonucleotide
aagccugcguugagacacu

SEQ ID NO: 267553 - RNA, 19 nt, Artificial Sequence
  Description of Artificial Sequence: Synthetic oligonucleotide
gccgcagaccgcuggguug

SEQ ID NO: 267554 - RNA, 19 nt, Artificial Sequence
  Description of Artificial Sequence: Synthetic oligonucleotide
agggccgagguggaucagu

SEQ ID NO: 267555 - RNA, 19 nt, Artificial Sequence
  Description of Artificial Sequence: Synthetic oligonucleotide
acggaggucuugaucggau

SEQ ID NO: 267556 - RNA, 19 nt, Artificial Sequence
  Description of Artificial Sequence: Synthetic oligonucleotide
gucaccgaugggaugggua

SEQ ID NO: 267557 - RNA, 19 nt, Artificial Sequence
  Description of Artificial Sequence: Synthetic oligonucleotide
ggacgggaagagcguuggg

SEQ ID NO: 267558 - RNA, 19 nt, Artificial Sequence
  Description of Artificial Sequence: Synthetic oligonucleotide
ccaggcggagaucaaguca

SEQ ID NO: 267559 - RNA, 19 nt, Artificial Sequence
  Description of Artificial Sequence: Synthetic oligonucleotide
ggcgagaggcgucagcugu

SEQ ID NO: 267560 - RNA, 19 nt, Artificial Sequence
  Description of Artificial Sequence: Synthetic oligonucleotide
ugacuagccguuggccguu

SEQ ID NO: 267561 - RNA, 19 nt, Artificial Sequence
  Description of Artificial Sequence: Synthetic oligonucleotide
guacugagauacggggaaa

SEQ ID NO: 267562 - RNA, 19 nt, Artificial Sequence
  Description of Artificial Sequence: Synthetic oligonucleotide
accuacccacauauauuaa

SEQ ID NO: 267563 - RNA, 19 nt, Artificial Sequence
  Description of Artificial Sequence: Synthetic oligonucleotide
cuggaggucguggaaucaa

SEQ ID NO: 267564 - RNA, 19 nt, Artificial Sequence
  Description of Artificial Sequence: Synthetic oligonucleotide
gguggaagaagccguguuu

SEQ ID NO: 267565 - RNA, 19 nt, Artificial Sequence
  Description of Artificial Sequence: Synthetic oligonucleotide
ggaggucuugaucggauuu

SEQ ID NO: 267566 - RNA, 19 nt, Artificial Sequence
  Description of Artificial Sequence: Synthetic oligonucleotide
agucaccgaugggaugggu

SEQ ID NO: 267567 - RNA, 19 nt, Artificial Sequence
  Description of Artificial Sequence: Synthetic oligonucleotide
guuggccguuucuugggau

SEQ ID NO: 267568 - RNA, 19 nt, Artificial Sequence
  Description of Artificial Sequence: Synthetic oligonucleotide
gcuguaguugguagaccuc

SEQ ID NO: 267569 - RNA, 19 nt, Artificial Sequence
  Description of Artificial Sequence: Synthetic oligonucleotide
ccagucuauccugccgugc

SEQ ID NO: 267570 - RNA, 19 nt, Artificial Sequence
  Description of Artificial Sequence: Synthetic oligonucleotide
caguggaacuagaccaaau

SEQ ID NO: 267571 - RNA, 19 nt, Artificial Sequence
  Description of Artificial Sequence: Synthetic oligonucleotide
ggcaaguagcgagagugcu

SEQ ID NO: 267572 - RNA, 19 nt, Artificial Sequence
  Description of Artificial Sequence: Synthetic oligonucleotide
acucgacagcugguagccu

SEQ ID NO: 267573 - RNA, 19 nt, Artificial Sequence
  Description of Artificial Sequence: Synthetic oligonucleotide
cugagccaacugaaguuau

SEQ ID NO: 267574 - RNA, 19 nt, Artificial Sequence
  Description of Artificial Sequence: Synthetic oligonucleotide
ccgcagaccgcuggguugg

SEQ ID NO: 267575 - RNA, 19 nt, Artificial Sequence
  Description of Artificial Sequence: Synthetic oligonucleotide
gauucgggagcacgccauu

SEQ ID NO: 267576 - RNA, 19 nt, Artificial Sequence
  Description of Artificial Sequence: Synthetic oligonucleotide
gaagagcguugggcuuggc

SEQ ID NO: 267577 - RNA, 19 nt, Artificial Sequence
  Description of Artificial Sequence: Synthetic oligonucleotide
ggucuugaucggauuucuc

SEQ ID NO: 267578 - RNA, 19 nt, Artificial Sequence
  Description of Artificial Sequence: Synthetic oligonucleotide
ggauaccgaagugccugac

SEQ ID NO: 267579 - RNA, 19 nt, Artificial Sequence
  Description of Artificial Sequence: Synthetic oligonucleotide
cuucaggccagucggucuu

SEQ ID NO: 267580 - RNA, 19 nt, Artificial Sequence
  Description of Artificial Sequence: Synthetic oligonucleotide
ccgucauuugccuucuagu

SEQ ID NO: 267581 - RNA, 19 nt, Artificial Sequence
  Description of Artificial Sequence: Synthetic oligonucleotide
ccagacuguaaccaguauu

SEQ ID NO: 267582 - RNA, 19 nt, Artificial Sequence
  Description of Artificial Sequence: Synthetic oligonucleotide
cugaauccugugugacgcu

SEQ ID NO: 267583 - RNA, 19 nt, Artificial Sequence
  Description of Artificial Sequence: Synthetic oligonucleotide
aggcggagaucaagucaca

SEQ ID NO: 267584 - RNA, 19 nt, Artificial Sequence
  Description of Artificial Sequence: Synthetic oligonucleotide
cgugauuaucucccaaaua

SEQ ID NO: 267585 - RNA, 19 nt, Artificial Sequence
  Description of Artificial Sequence: Synthetic oligonucleotide
cgagagugcuucaaguagu

SEQ ID NO: 267586 - RNA, 19 nt, Artificial Sequence
  Description of Artificial Sequence: Synthetic oligonucleotide
ccaaucgucagaacccuuu

SEQ ID NO: 267587 - RNA, 19 nt, Artificial Sequence
  Description of Artificial Sequence: Synthetic oligonucleotide
ggcuggcuugauguaagua

SEQ ID NO: 267588 - RNA, 19 nt, Artificial Sequence
  Description of Artificial Sequence: Synthetic oligonucleotide
gcggggucggcgagaggcg

SEQ ID NO: 267589 - RNA, 19 nt, Artificial Sequence
  Description of Artificial Sequence: Synthetic oligonucleotide
gcucugucgggacacucau

SEQ ID NO: 267590 - RNA, 19 nt, Artificial Sequence
  Description of Artificial Sequence: Synthetic oligonucleotide
ccccgggugaggucucaug

SEQ ID NO: 267591 - RNA, 19 nt, Artificial Sequence
  Description of Artificial Sequence: Synthetic oligonucleotide
gggucgucacucugucucu

SEQ ID NO: 267592 - RNA, 19 nt, Artificial Sequence
  Description of Artificial Sequence: Synthetic oligonucleotide
ggauucgggagcacgccau

SEQ ID NO: 267593 - RNA, 19 nt, Artificial Sequence
  Description of Artificial Sequence: Synthetic oligonucleotide
cugcguugagacacucguu

SEQ ID NO: 267594 - RNA, 19 nt, Artificial Sequence
  Description of Artificial Sequence: Synthetic oligonucleotide
gaccgcuggguuggcgugu

SEQ ID NO: 267595 - RNA, 19 nt, Artificial Sequence
  Description of Artificial Sequence: Synthetic oligonucleotide
ggcggagaucaagucacau

SEQ ID NO: 267596 - RNA, 19 nt, Artificial Sequence
  Description of Artificial Sequence: Synthetic oligonucleotide
gcaaguagcgagagugcuu

SEQ ID NO: 267597 - RNA, 19 nt, Artificial Sequence
  Description of Artificial Sequence: Synthetic oligonucleotide
cguuggccguuucuuggga

SEQ ID NO: 267598 - RNA, 19 nt, Artificial Sequence
  Description of Artificial Sequence: Synthetic oligonucleotide
cgcugcuagcauuuggaau

SEQ ID NO: 267599 - RNA, 19 nt, Artificial Sequence
  Description of Artificial Sequence: Synthetic oligonucleotide
ggggucggcgagaggcguc

SEQ ID NO: 267600 - RNA, 19 nt, Artificial Sequence
  Description of Artificial Sequence: Synthetic oligonucleotide
ggguuggcgugucucucuu

SEQ ID NO: 267601 - RNA, 19 nt, Artificial Sequence
  Description of Artificial Sequence: Synthetic oligonucleotide
cuguacccaccggcucgga

SEQ ID NO: 267602 - RNA, 19 nt, Artificial Sequence
  Description of Artificial Sequence: Synthetic oligonucleotide
gacuagccguuggccguuu

SEQ ID NO: 267603 - RNA, 19 nt, Artificial Sequence
  Description of Artificial Sequence: Synthetic oligonucleotide
cggaggucuugaucggauu

SEQ ID NO: 267604 - RNA, 19 nt, Artificial Sequence
  Description of Artificial Sequence: Synthetic oligonucleotide
gccccgggugaggucucau

SEQ ID NO: 267605 - RNA, 19 nt, Artificial Sequence
  Description of Artificial Sequence: Synthetic oligonucleotide
cggggucggcgagaggcgu

SEQ ID NO: 267606 - RNA, 19 nt, Artificial Sequence
  Description of Artificial Sequence: Synthetic oligonucleotide
uggauaaggagccugagcc

SEQ ID NO: 267607 - RNA, 19 nt, Artificial Sequence
  Description of Artificial Sequence: Synthetic oligonucleotide
aagucacucaguuuauugg

SEQ ID NO: 267608 - RNA, 19 nt, Artificial Sequence
  Description of Artificial Sequence: Synthetic oligonucleotide
aaccauaggggcuauuccg

SEQ ID NO: 267609 - RNA, 19 nt, Artificial Sequence
  Description of Artificial Sequence: Synthetic oligonucleotide
uguaaggccaggcagcggg

SEQ ID NO: 267610 - RNA, 19 nt, Artificial Sequence
  Description of Artificial Sequence: Synthetic oligonucleotide
aaagucacucaguuuauug

SEQ ID NO: 267611 - RNA, 19 nt, Artificial Sequence
  Description of Artificial Sequence: Synthetic oligonucleotide
ugucgugaaaaucucgcgg

SEQ ID NO: 267612 - RNA, 19 nt, Artificial Sequence
  Description of Artificial Sequence: Synthetic oligonucleotide
ucauaguugagacucucgc

SEQ ID NO: 267613 - RNA, 19 nt, Artificial Sequence
  Description of Artificial Sequence: Synthetic oligonucleotide
acggugcccaucuugagcc

SEQ ID NO: 267614 - RNA, 19 nt, Artificial Sequence
  Description of Artificial Sequence: Synthetic oligonucleotide
uugagacucucgcaaaggg

SEQ ID NO: 267615 - RNA, 19 nt, Artificial Sequence
  Description of Artificial Sequence: Synthetic oligonucleotide
agcaacagugauucugugc

SEQ ID NO: 267616 - RNA, 19 nt, Artificial Sequence
  Description of Artificial Sequence: Synthetic oligonucleotide
aaugacucccauaggcucc

SEQ ID NO: 267617 - RNA, 19 nt, Artificial Sequence
  Description of Artificial Sequence: Synthetic oligonucleotide
aacccuguuaccugcagug

SEQ ID NO: 267618 - RNA, 19 nt, Artificial Sequence
  Description of Artificial Sequence: Synthetic oligonucleotide
uuugccugaagaauccuga

SEQ ID NO: 267619 - RNA, 19 nt, Artificial Sequence
  Description of Artificial Sequence: Synthetic oligonucleotide
gaacaggguggcuauaucc

SEQ ID NO: 267620 - RNA, 19 nt, Artificial Sequence
  Description of Artificial Sequence: Synthetic oligonucleotide
cuagguacuaagaccacag

SEQ ID NO: 267621 - RNA, 19 nt, Artificial Sequence
  Description of Artificial Sequence: Synthetic oligonucleotide
agugucgugaaaaucucgc

SEQ ID NO: 267622 - RNA, 19 nt, Artificial Sequence
  Description of Artificial Sequence: Synthetic oligonucleotide
gaccgcaugguacugaagc

SEQ ID NO: 267623 - RNA, 19 nt, Artificial Sequence
  Description of Artificial Sequence: Synthetic oligonucleotide
ugguuguucggaaagggga

SEQ ID NO: 267624 - RNA, 19 nt, Artificial Sequence
  Description of Artificial Sequence: Synthetic oligonucleotide
agauuccuggauaaggagc

SEQ ID NO: 267625 - RNA, 19 nt, Artificial Sequence
  Description of Artificial Sequence: Synthetic oligonucleotide
gaaagaaguuggcaggaug

SEQ ID NO: 267626 - RNA, 19 nt, Artificial Sequence
  Description of Artificial Sequence: Synthetic oligonucleotide
auaggggcuauuccguggc

SEQ ID NO: 267627 - RNA, 19 nt, Artificial Sequence
  Description of Artificial Sequence: Synthetic oligonucleotide
gucgugaaaaucucgcggg

SEQ ID NO: 267628 - RNA, 19 nt, Artificial Sequence
  Description of Artificial Sequence: Synthetic oligonucleotide
uugguuguucggaaagggg

SEQ ID NO: 267629 - RNA, 19 nt, Artificial Sequence
  Description of Artificial Sequence: Synthetic oligonucleotide
aaaagccgagcuccccugc

SEQ ID NO: 267630 - RNA, 19 nt, Artificial Sequence
  Description of Artificial Sequence: Synthetic oligonucleotide
auaguugagacucucgcaa

SEQ ID NO: 267631 - RNA, 19 nt, Artificial Sequence
  Description of Artificial Sequence: Synthetic oligonucleotide
aaggccaaacgugucauag

SEQ ID NO: 267632 - RNA, 19 nt, Artificial Sequence
  Description of Artificial Sequence: Synthetic oligonucleotide
gaaaccaugggaaaucuga

SEQ ID NO: 267633 - RNA, 19 nt, Artificial Sequence
  Description of Artificial Sequence: Synthetic oligonucleotide
agguacuaagaccacagca

SEQ ID NO: 267634 - RNA, 19 nt, Artificial Sequence
  Description of Artificial Sequence: Synthetic oligonucleotide
aaacgugucauaguugaga

SEQ ID NO: 267635 - RNA, 19 nt, Artificial Sequence
  Description of Artificial Sequence: Synthetic oligonucleotide
ugagucuacaucugcugag

SEQ ID NO: 267636 - RNA, 19 nt, Artificial Sequence
  Description of Artificial Sequence: Synthetic oligonucleotide
ugggcaugcgccuggaccg

SEQ ID NO: 267637 - RNA, 19 nt, Artificial Sequence
  Description of Artificial Sequence: Synthetic oligonucleotide
gguggcuauauccugacag

SEQ ID NO: 267638 - RNA, 19 nt, Artificial Sequence
  Description of Artificial Sequence: Synthetic oligonucleotide
uucggaaaggggaagccac

SEQ ID NO: 267639 - RNA, 19 nt, Artificial Sequence
  Description of Artificial Sequence: Synthetic oligonucleotide
cuugguucgugcugcaugc

SEQ ID NO: 267640 - RNA, 19 nt, Artificial Sequence
  Description of Artificial Sequence: Synthetic oligonucleotide
aaaucucgcgggcgcaagg

SEQ ID NO: 267641 - RNA, 19 nt, Artificial Sequence
  Description of Artificial Sequence: Synthetic oligonucleotide
auccgggcacaccacagcc

SEQ ID NO: 267642 - RNA, 19 nt, Artificial Sequence
  Description of Artificial Sequence: Synthetic oligonucleotide
cauacagaccauccgggcc

SEQ ID NO: 267643 - RNA, 19 nt, Artificial Sequence
  Description of Artificial Sequence: Synthetic oligonucleotide
uccaaguggcucucgaagc

SEQ ID NO: 267644 - RNA, 19 nt, Artificial Sequence
  Description of Artificial Sequence: Synthetic oligonucleotide
agccucucacuccacacac

SEQ ID NO: 267645 - RNA, 19 nt, Artificial Sequence
  Description of Artificial Sequence: Synthetic oligonucleotide
ugaaguuugccugaagaau

SEQ ID NO: 267646 - RNA, 19 nt, Artificial Sequence
  Description of Artificial Sequence: Synthetic oligonucleotide
ucggccugggcacaugggg

SEQ ID NO: 267647 - RNA, 19 nt, Artificial Sequence
  Description of Artificial Sequence: Synthetic oligonucleotide
cuaguugugaggccagagc

SEQ ID NO: 267648 - RNA, 19 nt, Artificial Sequence
  Description of Artificial Sequence: Synthetic oligonucleotide
ucgccgaacgccuuccacg

SEQ ID NO: 267649 - RNA, 19 nt, Artificial Sequence
  Description of Artificial Sequence: Synthetic oligonucleotide
augggcauugauccauacg

SEQ ID NO: 267650 - RNA, 19 nt, Artificial Sequence
  Description of Artificial Sequence: Synthetic oligonucleotide
cuaguccucguccacuccg

SEQ ID NO: 267651 - RNA, 19 nt, Artificial Sequence
  Description of Artificial Sequence: Synthetic oligonucleotide
uccucguccacuccgcagc

SEQ ID NO: 267652 - RNA, 19 nt, Artificial Sequence
  Description of Artificial Sequence: Synthetic oligonucleotide
uacggugcccaucuugagc

SEQ ID NO: 267653 - RNA, 19 nt, Artificial Sequence
  Description of Artificial Sequence: Synthetic oligonucleotide
agccacauuccauugacau

SEQ ID NO: 267654 - RNA, 19 nt, Artificial Sequence
  Description of Artificial Sequence: Synthetic oligonucleotide
ugggcagacccgaaguacc

SEQ ID NO: 267655 - RNA, 19 nt, Artificial Sequence
  Description of Artificial Sequence: Synthetic oligonucleotide
cucgcaaagggcaggcucc

SEQ ID NO: 267656 - RNA, 19 nt, Artificial Sequence
  Description of Artificial Sequence: Synthetic oligonucleotide
auaguggcccaagaggcgg

SEQ ID NO: 267657 - RNA, 19 nt, Artificial Sequence
  Description of Artificial Sequence: Synthetic oligonucleotide
uaggauccuggcaaggcac

SEQ ID NO: 267658 - RNA, 19 nt, Artificial Sequence
  Description of Artificial Sequence: Synthetic oligonucleotide
cauaggggcuauuccgugg

SEQ ID NO: 267659 - RNA, 19 nt, Artificial Sequence
  Description of Artificial Sequence: Synthetic oligonucleotide
ugacagaccuccagggcug

SEQ ID NO: 267660 - RNA, 19 nt, Artificial Sequence
  Description of Artificial Sequence: Synthetic oligonucleotide
gugucgugaaaaucucgcg

SEQ ID NO: 267661 - RNA, 19 nt, Artificial Sequence
  Description of Artificial Sequence: Synthetic oligonucleotide
ucuaguugugaggccagag

SEQ ID NO: 267662 - RNA, 19 nt, Artificial Sequence
  Description of Artificial Sequence: Synthetic oligonucleotide
aucaccagccuggaauacc

SEQ ID NO: 267663 - RNA, 19 nt, Artificial Sequence
  Description of Artificial Sequence: Synthetic oligonucleotide
ugggcuaggucucgggcag

SEQ ID NO: 267664 - RNA, 19 nt, Artificial Sequence
  Description of Artificial Sequence: Synthetic oligonucleotide
agacccacucucuuugcag

SEQ ID NO: 267665 - RNA, 19 nt, Artificial Sequence
  Description of Artificial Sequence: Synthetic oligonucleotide
auaggauccuggcaaggca

SEQ ID NO: 267666 - RNA, 19 nt, Artificial Sequence
  Description of Artificial Sequence: Synthetic oligonucleotide
acuacguucaccagaccag

SEQ ID NO: 267667 - RNA, 19 nt, Artificial Sequence
  Description of Artificial Sequence: Synthetic oligonucleotide
auccauacggugcccaucu

SEQ ID NO: 267668 - RNA, 19 nt, Artificial Sequence
  Description of Artificial Sequence: Synthetic oligonucleotide
guuaccugcagugucuggc

SEQ ID NO: 267669 - RNA, 19 nt, Artificial Sequence
  Description of Artificial Sequence: Synthetic oligonucleotide
ucggccuuugccugaaggc

SEQ ID NO: 267670 - RNA, 19 nt, Artificial Sequence
  Description of Artificial Sequence: Synthetic oligonucleotide
ucucuaguugugaggccag

SEQ ID NO: 267671 - RNA, 19 nt, Artificial Sequence
  Description of Artificial Sequence: Synthetic oligonucleotide
uuaccugcagugucuggcc

SEQ ID NO: 267672 - RNA, 19 nt, Artificial Sequence
  Description of Artificial Sequence: Synthetic oligonucleotide
uccgucgcagagcacgucc

SEQ ID NO: 267673 - RNA, 19 nt, Artificial Sequence
  Description of Artificial Sequence: Synthetic oligonucleotide
guugagacucucgcaaagg

SEQ ID NO: 267674 - RNA, 19 nt, Artificial Sequence
  Description of Artificial Sequence: Synthetic oligonucleotide
ucucgcgggcgcaaggucc

SEQ ID NO: 267675 - RNA, 19 nt, Artificial Sequence
  Description of Artificial Sequence: Synthetic oligonucleotide
ucgugaaaaucucgcgggc

SEQ ID NO: 267676 - RNA, 19 nt, Artificial Sequence
  Description of Artificial Sequence: Synthetic oligonucleotide
ugguucgugcugcaugcag

SEQ ID NO: 267677 - RNA, 19 nt, Artificial Sequence
  Description of Artificial Sequence: Synthetic oligonucleotide
uagguacuaagaccacagc

SEQ ID NO: 267678 - RNA, 19 nt, Artificial Sequence
  Description of Artificial Sequence: Synthetic oligonucleotide
uuggagggcacaucaccag

SEQ ID NO: 267679 - RNA, 19 nt, Artificial Sequence
  Description of Artificial Sequence: Synthetic oligonucleotide
ugauaggauccuggcaagg

SEQ ID NO: 267680 - RNA, 19 nt, Artificial Sequence
  Description of Artificial Sequence: Synthetic oligonucleotide
acguucaccagaccagcag

SEQ ID NO: 267681 - RNA, 19 nt, Artificial Sequence
  Description of Artificial Sequence: Synthetic oligonucleotide
caaccauaggggcuauucc

SEQ ID NO: 267682 - RNA, 19 nt, Artificial Sequence
  Description of Artificial Sequence: Synthetic oligonucleotide
uggcucucuaguugugagg

SEQ ID NO: 267683 - RNA, 19 nt, Artificial Sequence
  Description of Artificial Sequence: Synthetic oligonucleotide
cacggcaaggccaaacgug

SEQ ID NO: 267684 - RNA, 19 nt, Artificial Sequence
  Description of Artificial Sequence: Synthetic oligonucleotide
acacgcguuaccgccaucg

SEQ ID NO: 267685 - RNA, 19 nt, Artificial Sequence
  Description of Artificial Sequence: Synthetic oligonucleotide
uuccaaacaucugguaucu

SEQ ID NO: 267686 - RNA, 19 nt, Artificial Sequence
  Description of Artificial Sequence: Synthetic oligonucleotide
uuguggguauccagccagg

SEQ ID NO: 267687 - RNA, 19 nt, Artificial Sequence
  Description of Artificial Sequence: Synthetic oligonucleotide
uggagggcacaucaccagc

SEQ ID NO: 267688 - RNA, 19 nt, Artificial Sequence
  Description of Artificial Sequence: Synthetic oligonucleotide
ucccacacgcguuaccgcc

SEQ ID NO: 267689 - RNA, 19 nt, Artificial Sequence
  Description of Artificial Sequence: Synthetic oligonucleotide
cagugucgugaaaaucucg

SEQ ID NO: 267690 - RNA, 19 nt, Artificial Sequence
  Description of Artificial Sequence: Synthetic oligonucleotide
ucaccagaccagcagggaa

SEQ ID NO: 267691 - RNA, 19 nt, Artificial Sequence
  Description of Artificial Sequence: Synthetic oligonucleotide
uguucggaaaggggaagcc

SEQ ID NO: 267692 - RNA, 19 nt, Artificial Sequence
  Description of Artificial Sequence: Synthetic oligonucleotide
aaaaucucgcgggcgcaag

SEQ ID NO: 267693 - RNA, 19 nt, Artificial Sequence
  Description of Artificial Sequence: Synthetic oligonucleotide
gucauaguugagacucucg

SEQ ID NO: 267694 - RNA, 19 nt, Artificial Sequence
  Description of Artificial Sequence: Synthetic oligonucleotide
uccuacgcuccacugcagc

SEQ ID NO: 267695 - RNA, 19 nt, Artificial Sequence
  Description of Artificial Sequence: Synthetic oligonucleotide
gucacuacguucaccagac

SEQ ID NO: 267696 - RNA, 19 nt, Artificial Sequence
  Description of Artificial Sequence: Synthetic oligonucleotide
cuaagaccacagcauugcc

SEQ ID NO: 267697 - RNA, 19 nt, Artificial Sequence
  Description of Artificial Sequence: Synthetic oligonucleotide
cauacggugcccaucuuga

SEQ ID NO: 267698 - RNA, 19 nt, Artificial Sequence
  Description of Artificial Sequence: Synthetic oligonucleotide
cccacuagguacuaagacc

SEQ ID NO: 267699 - RNA, 19 nt, Artificial Sequence
  Description of Artificial Sequence: Synthetic oligonucleotide
gaacagcccgcccagugac

SEQ ID NO: 267700 - RNA, 19 nt, Artificial Sequence
  Description of Artificial Sequence: Synthetic oligonucleotide
cauaguugagacucucgca

SEQ ID NO: 267701 - RNA, 19 nt, Artificial Sequence
  Description of Artificial Sequence: Synthetic oligonucleotide
ugcggucugaccagauggc

SEQ ID NO: 267702 - RNA, 19 nt, Artificial Sequence
  Description of Artificial Sequence: Synthetic oligonucleotide
acucucgcaaagggcaggc

SEQ ID NO: 267703 - RNA, 19 nt, Artificial Sequence
  Description of Artificial Sequence: Synthetic oligonucleotide
cuagccucucacuccacac

SEQ ID NO: 267704 - RNA, 19 nt, Artificial Sequence
  Description of Artificial Sequence: Synthetic oligonucleotide
cucggccuuugccugaagg

SEQ ID NO: 267705 - RNA, 19 nt, Artificial Sequence
  Description of Artificial Sequence: Synthetic oligonucleotide
gaagccccuguuuacccac

SEQ ID NO: 267706 - RNA, 19 nt, Artificial Sequence
  Description of Artificial Sequence: Synthetic oligonucleotide
ucuaguccucguccacucc

SEQ ID NO: 267707 - RNA, 19 nt, Artificial Sequence
  Description of Artificial Sequence: Synthetic oligonucleotide
uuguucggaaaggggaagc

SEQ ID NO: 267708 - RNA, 19 nt, Artificial Sequence
  Description of Artificial Sequence: Synthetic oligonucleotide
accacggugcagcccauag

SEQ ID NO: 267709 - RNA, 19 nt, Artificial Sequence
  Description of Artificial Sequence: Synthetic oligonucleotide
uuaccgccaucgcucgccg

SEQ ID NO: 267710 - RNA, 19 nt, Artificial Sequence
  Description of Artificial Sequence: Synthetic oligonucleotide
ggcgcaaggucccacacgc

SEQ ID NO: 267711 - RNA, 19 nt, Artificial Sequence
  Description of Artificial Sequence: Synthetic oligonucleotide
ugccugcuaagguccgucg

SEQ ID NO: 267712 - RNA, 19 nt, Artificial Sequence
  Description of Artificial Sequence: Synthetic oligonucleotide
agucucuacagcaccucgg

SEQ ID NO: 267713 - RNA, 19 nt, Artificial Sequence
  Description of Artificial Sequence: Synthetic oligonucleotide
cuuccuacgcuccacugca

SEQ ID NO: 267714 - RNA, 19 nt, Artificial Sequence
  Description of Artificial Sequence: Synthetic oligonucleotide
gcuauauccugacagaccu

SEQ ID NO: 267715 - RNA, 19 nt, Artificial Sequence
  Description of Artificial Sequence: Synthetic oligonucleotide
ucggaaaggggaagccaca

SEQ ID NO: 267716 - RNA, 19 nt, Artificial Sequence
  Description of Artificial Sequence: Synthetic oligonucleotide
acuagguacuaagaccaca

SEQ ID NO: 267717 - RNA, 19 nt, Artificial Sequence
  Description of Artificial Sequence: Synthetic oligonucleotide
uacguucaccagaccagca

SEQ ID NO: 267718 - RNA, 19 nt, Artificial Sequence
  Description of Artificial Sequence: Synthetic oligonucleotide
uugccugaaggcaguuggc

SEQ ID NO: 267719 - RNA, 19 nt, Artificial Sequence
  Description of Artificial Sequence: Synthetic oligonucleotide
caaacgugucauaguugag

SEQ ID NO: 267720 - RNA, 19 nt, Artificial Sequence
  Description of Artificial Sequence: Synthetic oligonucleotide
augcguggcucuccggcac

SEQ ID NO: 267721 - RNA, 19 nt, Artificial Sequence
  Description of Artificial Sequence: Synthetic oligonucleotide
cauccuagcccggagucgc

SEQ ID NO: 267722 - RNA, 19 nt, Artificial Sequence
  Description of Artificial Sequence: Synthetic oligonucleotide
cuacguucaccagaccagc

SEQ ID NO: 267723 - RNA, 19 nt, Artificial Sequence
  Description of Artificial Sequence: Synthetic oligonucleotide
uugggaagccccuguuuac

SEQ ID NO: 267724 - RNA, 19 nt, Artificial Sequence
  Description of Artificial Sequence: Synthetic oligonucleotide
agcaccucggauauccuug

SEQ ID NO: 267725 - RNA, 19 nt, Artificial Sequence
  Description of Artificial Sequence: Synthetic oligonucleotide
guuugccugaagaauccug

SEQ ID NO: 267726 - RNA, 19 nt, Artificial Sequence
  Description of Artificial Sequence: Synthetic oligonucleotide
aguaccacagggccugaau

SEQ ID NO: 267727 - RNA, 19 nt, Artificial Sequence
  Description of Artificial Sequence: Synthetic oligonucleotide
aaucucgcgggcgcaaggu

SEQ ID NO: 267728 - RNA, 19 nt, Artificial Sequence
  Description of Artificial Sequence: Synthetic oligonucleotide
aaccggcuuagguguuggg

SEQ ID NO: 267729 - RNA, 19 nt, Artificial Sequence
  Description of Artificial Sequence: Synthetic oligonucleotide
agaauccugaaugggccug

SEQ ID NO: 267730 - RNA, 19 nt, Artificial Sequence
  Description of Artificial Sequence: Synthetic oligonucleotide
ccaaacgugucauaguuga

SEQ ID NO: 267731 - RNA, 19 nt, Artificial Sequence
  Description of Artificial Sequence: Synthetic oligonucleotide
gugggacaucuccaucucg

SEQ ID NO: 267732 - RNA, 19 nt, Artificial Sequence
  Description of Artificial Sequence: Synthetic oligonucleotide
ugggaagccccuguuuacc

SEQ ID NO: 267733 - RNA, 19 nt, Artificial Sequence
  Description of Artificial Sequence: Synthetic oligonucleotide
ggcacggcaaggccaaacg

SEQ ID NO: 267734 - RNA, 19 nt, Artificial Sequence
  Description of Artificial Sequence: Synthetic oligonucleotide
cuaagguccgucgcagagc

SEQ ID NO: 267735 - RNA, 19 nt, Artificial Sequence
  Description of Artificial Sequence: Synthetic oligonucleotide
guuguucggaaaggggaag

SEQ ID NO: 267736 - RNA, 19 nt, Artificial Sequence
  Description of Artificial Sequence: Synthetic oligonucleotide
ggcucucuaguugugaggc

SEQ ID NO: 267737 - RNA, 19 nt, Artificial Sequence
  Description of Artificial Sequence: Synthetic oligonucleotide
gcuaagguccgucgcagag

SEQ ID NO: 267738 - RNA, 19 nt, Artificial Sequence
  Description of Artificial Sequence: Synthetic oligonucleotide
uccugauguaaggccaggc

SEQ ID NO: 267739 - RNA, 19 nt, Artificial Sequence
  Description of Artificial Sequence: Synthetic oligonucleotide
uguggguauccagccaggc

SEQ ID NO: 267740 - RNA, 19 nt, Artificial Sequence
  Description of Artificial Sequence: Synthetic oligonucleotide
cacucauccgggcacacca

SEQ ID NO: 267741 - RNA, 19 nt, Artificial Sequence
  Description of Artificial Sequence: Synthetic oligonucleotide
ggagucgccucauagcuuc

SEQ ID NO: 267742 - RNA, 19 nt, Artificial Sequence
  Description of Artificial Sequence: Synthetic oligonucleotide
cccgaaguaccacagggcc

SEQ ID NO: 267743 - RNA, 19 nt, Artificial Sequence
  Description of Artificial Sequence: Synthetic oligonucleotide
gacucucgcaaagggcagg

SEQ ID NO: 267744 - RNA, 19 nt, Artificial Sequence
  Description of Artificial Sequence: Synthetic oligonucleotide
gccacauaccacauugagg

SEQ ID NO: 267745 - RNA, 19 nt, Artificial Sequence
  Description of Artificial Sequence: Synthetic oligonucleotide
aacagcccgcccagugacc

SEQ ID NO: 267746 - RNA, 19 nt, Artificial Sequence
  Description of Artificial Sequence: Synthetic oligonucleotide
cugagucuacaucugcuga

SEQ ID NO: 267747 - RNA, 19 nt, Artificial Sequence
  Description of Artificial Sequence: Synthetic oligonucleotide
uugccauccuagcccggag

SEQ ID NO: 267748 - RNA, 19 nt, Artificial Sequence
  Description of Artificial Sequence: Synthetic oligonucleotide
auacggugcccaucuugag

SEQ ID NO: 267749 - RNA, 19 nt, Artificial Sequence
  Description of Artificial Sequence: Synthetic oligonucleotide
augcgccuggaccgcaugg

SEQ ID NO: 267750 - RNA, 19 nt, Artificial Sequence
  Description of Artificial Sequence: Synthetic oligonucleotide
guacugcagggucucggag

SEQ ID NO: 267751 - RNA, 19 nt, Artificial Sequence
  Description of Artificial Sequence: Synthetic oligonucleotide
guuggagggcacaucacca

SEQ ID NO: 267752 - RNA, 19 nt, Artificial Sequence
  Description of Artificial Sequence: Synthetic oligonucleotide
ggucccacacgcguuaccg

SEQ ID NO: 267753 - RNA, 19 nt, Artificial Sequence
  Description of Artificial Sequence: Synthetic oligonucleotide
gguaccucggccugggcac

SEQ ID NO: 267754 - RNA, 19 nt, Artificial Sequence
  Description of Artificial Sequence: Synthetic oligonucleotide
ucguccacuccgcagcuuu

SEQ ID NO: 267755 - RNA, 19 nt, Artificial Sequence
  Description of Artificial Sequence: Synthetic oligonucleotide
aucucgcgggcgcaagguc

SEQ ID NO: 267756 - RNA, 19 nt, Artificial Sequence
  Description of Artificial Sequence: Synthetic oligonucleotide
ugccauccuagcccggagu

SEQ ID NO: 267757 - RNA, 19 nt, Artificial Sequence
  Description of Artificial Sequence: Synthetic oligonucleotide
caaaucuggagccgccuca

SEQ ID NO: 267758 - RNA, 19 nt, Artificial Sequence
  Description of Artificial Sequence: Synthetic oligonucleotide
uggaccgcaugguacugaa

SEQ ID NO: 267759 - RNA, 19 nt, Artificial Sequence
  Description of Artificial Sequence: Synthetic oligonucleotide
cauugaggaucccugggaa

SEQ ID NO: 267760 - RNA, 19 nt, Artificial Sequence
  Description of Artificial Sequence: Synthetic oligonucleotide
cucucuaguugugaggcca

SEQ ID NO: 267761 - RNA, 19 nt, Artificial Sequence
  Description of Artificial Sequence: Synthetic oligonucleotide
cugcaugcagacucagcuc

SEQ ID NO: 267762 - RNA, 19 nt, Artificial Sequence
  Description of Artificial Sequence: Synthetic oligonucleotide
caucucguacuucccgaac

SEQ ID NO: 267763 - RNA, 19 nt, Artificial Sequence
  Description of Artificial Sequence: Synthetic oligonucleotide
cauccgggcacaccacagc

SEQ ID NO: 267764 - RNA, 19 nt, Artificial Sequence
  Description of Artificial Sequence: Synthetic oligonucleotide
acggcaaggccaaacgugu

SEQ ID NO: 267765 - RNA, 19 nt, Artificial Sequence
  Description of Artificial Sequence: Synthetic oligonucleotide
cuauauccugacagaccuc

SEQ ID NO: 267766 - RNA, 19 nt, Artificial Sequence
  Description of Artificial Sequence: Synthetic oligonucleotide
aggggcuauuccguggcuc

SEQ ID NO: 267767 - RNA, 19 nt, Artificial Sequence
  Description of Artificial Sequence: Synthetic oligonucleotide
aggccaaacgugucauagu

SEQ ID NO: 267768 - RNA, 19 nt, Artificial Sequence
  Description of Artificial Sequence: Synthetic oligonucleotide
acgcguuaccgccaucgcu

SEQ ID NO: 267769 - RNA, 19 nt, Artificial Sequence
  Description of Artificial Sequence: Synthetic oligonucleotide
acgugucauaguugagacu

SEQ ID NO: 267770 - RNA, 19 nt, Artificial Sequence
  Description of Artificial Sequence: Synthetic oligonucleotide
ucacuacguucaccagacc

SEQ ID NO: 267771 - RNA, 19 nt, Artificial Sequence
  Description of Artificial Sequence: Synthetic oligonucleotide
ccucggauauccuuggcuc

SEQ ID NO: 267772 - RNA, 19 nt, Artificial Sequence
  Description of Artificial Sequence: Synthetic oligonucleotide
gaggcgguuguggguaucc

SEQ ID NO: 267773 - RNA, 19 nt, Artificial Sequence
  Description of Artificial Sequence: Synthetic oligonucleotide
cugggcagacccgaaguac

SEQ ID NO: 267774 - RNA, 19 nt, Artificial Sequence
  Description of Artificial Sequence: Synthetic oligonucleotide
ugcuaagguccgucgcaga

SEQ ID NO: 267775 - RNA, 19 nt, Artificial Sequence
  Description of Artificial Sequence: Synthetic oligonucleotide
cacuagguacuaagaccac

SEQ ID NO: 267776 - RNA, 19 nt, Artificial Sequence
  Description of Artificial Sequence: Synthetic oligonucleotide
ggcuauauccugacagacc

SEQ ID NO: 267777 - RNA, 19 nt, Artificial Sequence
  Description of Artificial Sequence: Synthetic oligonucleotide
cuggagccgccucacacuc

SEQ ID NO: 267778 - RNA, 19 nt, Artificial Sequence
  Description of Artificial Sequence: Synthetic oligonucleotide
cucgcgggcgcaagguccc

SEQ ID NO: 267779 - RNA, 19 nt, Artificial Sequence
  Description of Artificial Sequence: Synthetic oligonucleotide
gcaugcguggcucuccggc

SEQ ID NO: 267780 - RNA, 19 nt, Artificial Sequence
  Description of Artificial Sequence: Synthetic oligonucleotide
cuacgcuccacugcagcug

SEQ ID NO: 267781 - RNA, 19 nt, Artificial Sequence
  Description of Artificial Sequence: Synthetic oligonucleotide
cagccugaugagcagucuc

SEQ ID NO: 267782 - RNA, 19 nt, Artificial Sequence
  Description of Artificial Sequence: Synthetic oligonucleotide
cagcgggucaggugguccc

SEQ ID NO: 267783 - RNA, 19 nt, Artificial Sequence
  Description of Artificial Sequence: Synthetic oligonucleotide
cugggcuaggucucgggca

SEQ ID NO: 267784 - RNA, 19 nt, Artificial Sequence
  Description of Artificial Sequence: Synthetic oligonucleotide
gguugggaggccagaacag

SEQ ID NO: 267785 - RNA, 19 nt, Artificial Sequence
  Description of Artificial Sequence: Synthetic oligonucleotide
guauccagccaggccagug

SEQ ID NO: 267786 - RNA, 19 nt, Artificial Sequence
  Description of Artificial Sequence: Synthetic oligonucleotide
acccaagauggaguggaca

SEQ ID NO: 267787 - RNA, 19 nt, Artificial Sequence
  Description of Artificial Sequence: Synthetic oligonucleotide
caguaaaagucacucaguu

SEQ ID NO: 267788 - RNA, 19 nt, Artificial Sequence
  Description of Artificial Sequence: Synthetic oligonucleotide
ggagguucgggacccagga

SEQ ID NO: 267789 - RNA, 19 nt, Artificial Sequence
  Description of Artificial Sequence: Synthetic oligonucleotide
aguuugccugaagaauccu

SEQ ID NO: 267790 - RNA, 19 nt, Artificial Sequence
  Description of Artificial Sequence: Synthetic oligonucleotide
guacuaagaccacagcauu

SEQ ID NO: 267791 - RNA, 19 nt, Artificial Sequence
  Description of Artificial Sequence: Synthetic oligonucleotide
gucugaccagauggcaucc

SEQ ID NO: 267792 - RNA, 19 nt, Artificial Sequence
  Description of Artificial Sequence: Synthetic oligonucleotide
guucggaaaggggaagcca

SEQ ID NO: 267793 - RNA, 19 nt, Artificial Sequence
  Description of Artificial Sequence: Synthetic oligonucleotide
gguacuaagaccacagcau

SEQ ID NO: 267794 - RNA, 19 nt, Artificial Sequence
  Description of Artificial Sequence: Synthetic oligonucleotide
cucggccugggcacauggg

SEQ ID NO: 267795 - RNA, 19 nt, Artificial Sequence
  Description of Artificial Sequence: Synthetic oligonucleotide
agugcgcaugcguggcucu

SEQ ID NO: 267796 - RNA, 19 nt, Artificial Sequence
  Description of Artificial Sequence: Synthetic oligonucleotide
agacucucgcaaagggcag

SEQ ID NO: 267797 - RNA, 19 nt, Artificial Sequence
  Description of Artificial Sequence: Synthetic oligonucleotide
ggcaaggccaaacguguca

SEQ ID NO: 267798 - RNA, 19 nt, Artificial Sequence
  Description of Artificial Sequence: Synthetic oligonucleotide
ccuugguucgugcugcaug

SEQ ID NO: 267799 - RNA, 19 nt, Artificial Sequence
  Description of Artificial Sequence: Synthetic oligonucleotide
cacagccccaucuaguccu

SEQ ID NO: 267800 - RNA, 19 nt, Artificial Sequence
  Description of Artificial Sequence: Synthetic oligonucleotide
agucuuggccaaccggcuu

SEQ ID NO: 267801 - RNA, 19 nt, Artificial Sequence
  Description of Artificial Sequence: Synthetic oligonucleotide
gcaaccauaggggcuauuc

SEQ ID NO: 267802 - RNA, 19 nt, Artificial Sequence
  Description of Artificial Sequence: Synthetic oligonucleotide
cuccagugucgugaaaauc

SEQ ID NO: 267803 - RNA, 19 nt, Artificial Sequence
  Description of Artificial Sequence: Synthetic oligonucleotide
ggccugaauguccugaugu

SEQ ID NO: 267804 - RNA, 19 nt, Artificial Sequence
  Description of Artificial Sequence: Synthetic oligonucleotide
gaaaaucucgcgggcgcaa

SEQ ID NO: 267805 - RNA, 19 nt, Artificial Sequence
  Description of Artificial Sequence: Synthetic oligonucleotide
cugggcugagccccguuuc

SEQ ID NO: 267806 - RNA, 19 nt, Artificial Sequence
  Description of Artificial Sequence: Synthetic oligonucleotide
cuguuuacccacacagacu

SEQ ID NO: 267807 - RNA, 19 nt, Artificial Sequence
  Description of Artificial Sequence: Synthetic oligonucleotide
ugcgcaugcguggcucucc

SEQ ID NO: 267808 - RNA, 19 nt, Artificial Sequence
  Description of Artificial Sequence: Synthetic oligonucleotide
ucgcaaagggcaggcuccc

SEQ ID NO: 267809 - RNA, 19 nt, Artificial Sequence
  Description of Artificial Sequence: Synthetic oligonucleotide
gguucgggacccaggagcc

SEQ ID NO: 267810 - RNA, 19 nt, Artificial Sequence
  Description of Artificial Sequence: Synthetic oligonucleotide
acugggcugagccccguuu

SEQ ID NO: 267811 - RNA, 19 nt, Artificial Sequence
  Description of Artificial Sequence: Synthetic oligonucleotide
cucgccgaacgccuuccac

SEQ ID NO: 267812 - RNA, 19 nt, Artificial Sequence
  Description of Artificial Sequence: Synthetic oligonucleotide
uacagaccauccgggcccc

SEQ ID NO: 267813 - RNA, 19 nt, Artificial Sequence
  Description of Artificial Sequence: Synthetic oligonucleotide
ggccagugcgcaugcgugg

SEQ ID NO: 267814 - RNA, 19 nt, Artificial Sequence
  Description of Artificial Sequence: Synthetic oligonucleotide
cacgcguuaccgccaucgc

SEQ ID NO: 267815 - RNA, 19 nt, Artificial Sequence
  Description of Artificial Sequence: Synthetic oligonucleotide
uugccugcuaagguccguc

SEQ ID NO: 267816 - RNA, 19 nt, Artificial Sequence
  Description of Artificial Sequence: Synthetic oligonucleotide
cuucccgaacagcccgccc

SEQ ID NO: 267817 - RNA, 19 nt, Artificial Sequence
  Description of Artificial Sequence: Synthetic oligonucleotide
ccccacuagguacuaagac

SEQ ID NO: 267818 - RNA, 19 nt, Artificial Sequence
  Description of Artificial Sequence: Synthetic oligonucleotide
acccuccacagcugagucu

SEQ ID NO: 267819 - RNA, 19 nt, Artificial Sequence
  Description of Artificial Sequence: Synthetic oligonucleotide
uaggggcuauuccguggcu

SEQ ID NO: 267820 - RNA, 19 nt, Artificial Sequence
  Description of Artificial Sequence: Synthetic oligonucleotide
ccauacggugcccaucuug

SEQ ID NO: 267821 - RNA, 19 nt, Artificial Sequence
  Description of Artificial Sequence: Synthetic oligonucleotide
aggccagugcgcaugcgug

SEQ ID NO: 267822 - RNA, 19 nt, Artificial Sequence
  Description of Artificial Sequence: Synthetic oligonucleotide
cacgguaccucggccuggg

SEQ ID NO: 267823 - RNA, 19 nt, Artificial Sequence
  Description of Artificial Sequence: Synthetic oligonucleotide
caugcguggcucuccggca

SEQ ID NO: 267824 - RNA, 19 nt, Artificial Sequence
  Description of Artificial Sequence: Synthetic oligonucleotide
ccgcccagugaccagagac

SEQ ID NO: 267825 - RNA, 19 nt, Artificial Sequence
  Description of Artificial Sequence: Synthetic oligonucleotide
cauaggcucccagccugcc

SEQ ID NO: 267826 - RNA, 19 nt, Artificial Sequence
  Description of Artificial Sequence: Synthetic oligonucleotide
acgguaccucggccugggc

SEQ ID NO: 267827 - RNA, 19 nt, Artificial Sequence
  Description of Artificial Sequence: Synthetic oligonucleotide
gagucuacaucugcugagu

SEQ ID NO: 267828 - RNA, 19 nt, Artificial Sequence
  Description of Artificial Sequence: Synthetic oligonucleotide
cgugaaaaucucgcgggcg

SEQ ID NO: 267829 - RNA, 19 nt, Artificial Sequence
  Description of Artificial Sequence: Synthetic oligonucleotide
ggcuuagguguugggcucg

SEQ ID NO: 267830 - RNA, 19 nt, Artificial Sequence
  Description of Artificial Sequence: Synthetic oligonucleotide
acgggcccguacuccagug

SEQ ID NO: 267831 - RNA, 19 nt, Artificial Sequence
  Description of Artificial Sequence: Synthetic oligonucleotide
gcguuaccgccaucgcucg

SEQ ID NO: 267832 - RNA, 19 nt, Artificial Sequence
  Description of Artificial Sequence: Synthetic oligonucleotide
gcagacccgaaguaccaca

SEQ ID NO: 267833 - RNA, 19 nt, Artificial Sequence
  Description of Artificial Sequence: Synthetic oligonucleotide
uugguucgugcugcaugca

SEQ ID NO: 267834 - RNA, 19 nt, Artificial Sequence
  Description of Artificial Sequence: Synthetic oligonucleotide
cccgugguguuccauuggc

SEQ ID NO: 267835 - RNA, 19 nt, Artificial Sequence
  Description of Artificial Sequence: Synthetic oligonucleotide
ggaacaggguggcuauauc

SEQ ID NO: 267836 - RNA, 19 nt, Artificial Sequence
  Description of Artificial Sequence: Synthetic oligonucleotide
cgcguuaccgccaucgcuc

SEQ ID NO: 267837 - RNA, 19 nt, Artificial Sequence
  Description of Artificial Sequence: Synthetic oligonucleotide
agcgggucagguggucccg

SEQ ID NO: 267838 - RNA, 19 nt, Artificial Sequence
  Description of Artificial Sequence: Synthetic oligonucleotide
ggccagaaaccaagacugg

SEQ ID NO: 267839 - RNA, 19 nt, Artificial Sequence
  Description of Artificial Sequence: Synthetic oligonucleotide
auccuagcccggagucgcc

SEQ ID NO: 267840 - RNA, 19 nt, Artificial Sequence
  Description of Artificial Sequence: Synthetic oligonucleotide
gguuguucggaaaggggaa

SEQ ID NO: 267841 - RNA, 19 nt, Artificial Sequence
  Description of Artificial Sequence: Synthetic oligonucleotide
ugccuccccgugguguucc

SEQ ID NO: 267842 - RNA, 19 nt, Artificial Sequence
  Description of Artificial Sequence: Synthetic oligonucleotide
caccucggauauccuuggc

SEQ ID NO: 267843 - RNA, 19 nt, Artificial Sequence
  Description of Artificial Sequence: Synthetic oligonucleotide
cccggagucgccucauagc

SEQ ID NO: 267844 - RNA, 19 nt, Artificial Sequence
  Description of Artificial Sequence: Synthetic oligonucleotide
ggucccgaucuccugucac

SEQ ID NO: 267845 - RNA, 19 nt, Artificial Sequence
  Description of Artificial Sequence: Synthetic oligonucleotide
caugcgccuggaccgcaug

SEQ ID NO: 267846 - RNA, 19 nt, Artificial Sequence
  Description of Artificial Sequence: Synthetic oligonucleotide
guggucccgaucuccuguc

SEQ ID NO: 267847 - RNA, 19 nt, Artificial Sequence
  Description of Artificial Sequence: Synthetic oligonucleotide
aagguccgucgcagagcac

SEQ ID NO: 267848 - RNA, 19 nt, Artificial Sequence
  Description of Artificial Sequence: Synthetic oligonucleotide
acccuguuaccugcagugu

SEQ ID NO: 267849 - RNA, 19 nt, Artificial Sequence
  Description of Artificial Sequence: Synthetic oligonucleotide
ggcuuccuacgcuccacug

SEQ ID NO: 267850 - RNA, 19 nt, Artificial Sequence
  Description of Artificial Sequence: Synthetic oligonucleotide
gguucgugcugcaugcaga

SEQ ID NO: 267851 - RNA, 19 nt, Artificial Sequence
  Description of Artificial Sequence: Synthetic oligonucleotide
gccauccuagcccggaguc

SEQ ID NO: 267852 - RNA, 19 nt, Artificial Sequence
  Description of Artificial Sequence: Synthetic oligonucleotide
gcccaucuugagcccauag

SEQ ID NO: 267853 - RNA, 19 nt, Artificial Sequence
  Description of Artificial Sequence: Synthetic oligonucleotide
cuuagguguugggcucgag

SEQ ID NO: 267854 - RNA, 19 nt, Artificial Sequence
  Description of Artificial Sequence: Synthetic oligonucleotide
gcccggagucgccucauag

SEQ ID NO: 267855 - RNA, 19 nt, Artificial Sequence
  Description of Artificial Sequence: Synthetic oligonucleotide
gacucagcucugguccuuc

SEQ ID NO: 267856 - RNA, 19 nt, Artificial Sequence
  Description of Artificial Sequence: Synthetic oligonucleotide
uccaaacaucugguaucuc

SEQ ID NO: 267857 - RNA, 19 nt, Artificial Sequence
  Description of Artificial Sequence: Synthetic oligonucleotide
cucauagcuucaucccaua

SEQ ID NO: 267858 - RNA, 19 nt, Artificial Sequence
  Description of Artificial Sequence: Synthetic oligonucleotide
ccauaggggcuauuccgug

SEQ ID NO: 267859 - RNA, 19 nt, Artificial Sequence
  Description of Artificial Sequence: Synthetic oligonucleotide
ucgcucgccgaacgccuuc

SEQ ID NO: 267860 - RNA, 19 nt, Artificial Sequence
  Description of Artificial Sequence: Synthetic oligonucleotide
gcucucuaguugugaggcc

SEQ ID NO: 267861 - RNA, 19 nt, Artificial Sequence
  Description of Artificial Sequence: Synthetic oligonucleotide
ggccaaccggcuuaggugu

SEQ ID NO: 267862 - RNA, 19 nt, Artificial Sequence
  Description of Artificial Sequence: Synthetic oligonucleotide
caacauagcugugaaguuu

SEQ ID NO: 267863 - RNA, 19 nt, Artificial Sequence
  Description of Artificial Sequence: Synthetic oligonucleotide
gagggccaaagguauucau

SEQ ID NO: 267864 - RNA, 19 nt, Artificial Sequence
  Description of Artificial Sequence: Synthetic oligonucleotide
ccuugccugcuaagguccg

SEQ ID NO: 267865 - RNA, 19 nt, Artificial Sequence
  Description of Artificial Sequence: Synthetic oligonucleotide
ccaaaucuggagccgccuc

SEQ ID NO: 267866 - RNA, 19 nt, Artificial Sequence
  Description of Artificial Sequence: Synthetic oligonucleotide
gggcccguacuccaguguc

SEQ ID NO: 267867 - RNA, 19 nt, Artificial Sequence
  Description of Artificial Sequence: Synthetic oligonucleotide
ggagagaagaauggacugu

SEQ ID NO: 267868 - RNA, 19 nt, Artificial Sequence
  Description of Artificial Sequence: Synthetic oligonucleotide
cagugcgcaugcguggcuc

SEQ ID NO: 267869 - RNA, 19 nt, Artificial Sequence
  Description of Artificial Sequence: Synthetic oligonucleotide
ggcccguacuccagugucg

SEQ ID NO: 267870 - RNA, 19 nt, Artificial Sequence
  Description of Artificial Sequence: Synthetic oligonucleotide
ccacagccccaucuagucc

SEQ ID NO: 267871 - RNA, 19 nt, Artificial Sequence
  Description of Artificial Sequence: Synthetic oligonucleotide
cacagggccuugguucgug

SEQ ID NO: 267872 - RNA, 19 nt, Artificial Sequence
  Description of Artificial Sequence: Synthetic oligonucleotide
ccaucgcucgccgaacgcc

SEQ ID NO: 267873 - RNA, 19 nt, Artificial Sequence
  Description of Artificial Sequence: Synthetic oligonucleotide
gcgcaugcguggcucuccg

SEQ ID NO: 267874 - RNA, 19 nt, Artificial Sequence
  Description of Artificial Sequence: Synthetic oligonucleotide
cccagugaccagagacucc

SEQ ID NO: 267875 - RNA, 19 nt, Artificial Sequence
  Description of Artificial Sequence: Synthetic oligonucleotide
cagcacuccaaguggcucu

SEQ ID NO: 267876 - RNA, 19 nt, Artificial Sequence
  Description of Artificial Sequence: Synthetic oligonucleotide
gggccacucauccgggcac

SEQ ID NO: 267877 - RNA, 19 nt, Artificial Sequence
  Description of Artificial Sequence: Synthetic oligonucleotide
gagucuuggccaaccggcu

SEQ ID NO: 267878 - RNA, 19 nt, Artificial Sequence
  Description of Artificial Sequence: Synthetic oligonucleotide
gaucuccugucacuacguu

SEQ ID NO: 267879 - RNA, 19 nt, Artificial Sequence
  Description of Artificial Sequence: Synthetic oligonucleotide
agcccgcccagugaccaga

SEQ ID NO: 267880 - RNA, 19 nt, Artificial Sequence
  Description of Artificial Sequence: Synthetic oligonucleotide
gguggucccgaucuccugu

SEQ ID NO: 267881 - RNA, 19 nt, Artificial Sequence
  Description of Artificial Sequence: Synthetic oligonucleotide
agucgccucauagcuucau

SEQ ID NO: 267882 - RNA, 19 nt, Artificial Sequence
  Description of Artificial Sequence: Synthetic oligonucleotide
gccaucgcucgccgaacgc

SEQ ID NO: 267883 - RNA, 19 nt, Artificial Sequence
  Description of Artificial Sequence: Synthetic oligonucleotide
ggcacgggcccguacucca

SEQ ID NO: 267884 - RNA, 19 nt, Artificial Sequence
  Description of Artificial Sequence: Synthetic oligonucleotide
caucuaguccucguccacu

SEQ ID NO: 267885 - RNA, 19 nt, Artificial Sequence
  Description of Artificial Sequence: Synthetic oligonucleotide
caacccuguuaccugcagu

SEQ ID NO: 267886 - RNA, 19 nt, Artificial Sequence
  Description of Artificial Sequence: Synthetic oligonucleotide
ggggcuauuccguggcucu

SEQ ID NO: 267887 - RNA, 19 nt, Artificial Sequence
  Description of Artificial Sequence: Synthetic oligonucleotide
ccguacuccagugucguga

SEQ ID NO: 267888 - RNA, 19 nt, Artificial Sequence
  Description of Artificial Sequence: Synthetic oligonucleotide
gccagugcgcaugcguggc

SEQ ID NO: 267889 - RNA, 19 nt, Artificial Sequence
  Description of Artificial Sequence: Synthetic oligonucleotide
cucuaguugugaggccaga

SEQ ID NO: 267890 - RNA, 19 nt, Artificial Sequence
  Description of Artificial Sequence: Synthetic oligonucleotide
aggcgguuguggguaucca

SEQ ID NO: 267891 - RNA, 19 nt, Artificial Sequence
  Description of Artificial Sequence: Synthetic oligonucleotide
gcaacauagcugugaaguu

SEQ ID NO: 267892 - RNA, 19 nt, Artificial Sequence
  Description of Artificial Sequence: Synthetic oligonucleotide
ccgagggccaaagguauuc

SEQ ID NO: 267893 - RNA, 19 nt, Artificial Sequence
  Description of Artificial Sequence: Synthetic oligonucleotide
cagacucagcucugguccu

SEQ ID NO: 267894 - RNA, 19 nt, Artificial Sequence
  Description of Artificial Sequence: Synthetic oligonucleotide
gcccugggcagacccgaag

SEQ ID NO: 267895 - RNA, 19 nt, Artificial Sequence
  Description of Artificial Sequence: Synthetic oligonucleotide
ggacaggccccacuaggua

SEQ ID NO: 267896 - RNA, 19 nt, Artificial Sequence
  Description of Artificial Sequence: Synthetic oligonucleotide
ggcagacccgaaguaccac

SEQ ID NO: 267897 - RNA, 19 nt, Artificial Sequence
  Description of Artificial Sequence: Synthetic oligonucleotide
cagcccgcccagugaccag

SEQ ID NO: 267898 - RNA, 19 nt, Artificial Sequence
  Description of Artificial Sequence: Synthetic oligonucleotide
gcaugcagacucagcucug

SEQ ID NO: 267899 - RNA, 19 nt, Artificial Sequence
  Description of Artificial Sequence: Synthetic oligonucleotide
ccuagccucucacuccaca

SEQ ID NO: 267900 - RNA, 19 nt, Artificial Sequence
  Description of Artificial Sequence: Synthetic oligonucleotide
aggcccuugggaagccccu

SEQ ID NO: 267901 - RNA, 19 nt, Artificial Sequence
  Description of Artificial Sequence: Synthetic oligonucleotide
cccgaucuccugucacuac

SEQ ID NO: 267902 - RNA, 19 nt, Artificial Sequence
  Description of Artificial Sequence: Synthetic oligonucleotide
ggccaugggcauugaucca

SEQ ID NO: 267903 - RNA, 19 nt, Artificial Sequence
  Description of Artificial Sequence: Synthetic oligonucleotide
gagucgccucauagcuuca

SEQ ID NO: 267904 - RNA, 19 nt, Artificial Sequence
  Description of Artificial Sequence: Synthetic oligonucleotide
ggaccgcaugguacugaag

SEQ ID NO: 267905 - RNA, 19 nt, Artificial Sequence
  Description of Artificial Sequence: Synthetic oligonucleotide
gggucagguggucccgauc

SEQ ID NO: 267906 - RNA, 19 nt, Artificial Sequence
  Description of Artificial Sequence: Synthetic oligonucleotide
ccggagucgccucauagcu

SEQ ID NO: 267907 - RNA, 19 nt, Artificial Sequence
  Description of Artificial Sequence: Synthetic oligonucleotide
ggguuagugccuccuuggu

SEQ ID NO: 267908 - RNA, 19 nt, Artificial Sequence
  Description of Artificial Sequence: Synthetic oligonucleotide
gggcagacccgaaguacca

SEQ ID NO: 267909 - RNA, 19 nt, Artificial Sequence
  Description of Artificial Sequence: Synthetic oligonucleotide
gcggucugaccagauggca

SEQ ID NO: 267910 - RNA, 19 nt, Artificial Sequence
  Description of Artificial Sequence: Synthetic oligonucleotide
cuacagcaccucggauauc

SEQ ID NO: 267911 - RNA, 19 nt, Artificial Sequence
  Description of Artificial Sequence: Synthetic oligonucleotide
gggcacggcaaggccaaac

SEQ ID NO: 267912 - RNA, 19 nt, Artificial Sequence
  Description of Artificial Sequence: Synthetic oligonucleotide
ccucauagcuucaucccau

SEQ ID NO: 267913 - RNA, 19 nt, Artificial Sequence
  Description of Artificial Sequence: Synthetic oligonucleotide
gcacggcaaggccaaacgu

SEQ ID NO: 267914 - RNA, 19 nt, Artificial Sequence
  Description of Artificial Sequence: Synthetic oligonucleotide
aggcugcggucugaccaga

SEQ ID NO: 267915 - RNA, 19 nt, Artificial Sequence
  Description of Artificial Sequence: Synthetic oligonucleotide
gccccacuagguacuaaga

SEQ ID NO: 267916 - RNA, 19 nt, Artificial Sequence
  Description of Artificial Sequence: Synthetic oligonucleotide
guaccucggccugggcaca

SEQ ID NO: 267917 - RNA, 19 nt, Artificial Sequence
  Description of Artificial Sequence: Synthetic oligonucleotide
ggcccaagaggcgguugug

SEQ ID NO: 267918 - RNA, 19 nt, Artificial Sequence
  Description of Artificial Sequence: Synthetic oligonucleotide
ccuagcccggagucgccuc

SEQ ID NO: 267919 - RNA, 19 nt, Artificial Sequence
  Description of Artificial Sequence: Synthetic oligonucleotide
cuccggcacgggcccguac

SEQ ID NO: 267920 - RNA, 19 nt, Artificial Sequence
  Description of Artificial Sequence: Synthetic oligonucleotide
ccaaccggcuuagguguug

SEQ ID NO: 267921 - RNA, 19 nt, Artificial Sequence
  Description of Artificial Sequence: Synthetic oligonucleotide
cacacgcguuaccgccauc

SEQ ID NO: 267922 - RNA, 19 nt, Artificial Sequence
  Description of Artificial Sequence: Synthetic oligonucleotide
cacaaccacaggccacggu

SEQ ID NO: 267923 - RNA, 19 nt, Artificial Sequence
  Description of Artificial Sequence: Synthetic oligonucleotide
gcgcaaggucccacacgcg

SEQ ID NO: 267924 - RNA, 19 nt, Artificial Sequence
  Description of Artificial Sequence: Synthetic oligonucleotide
gggcauugauccauacggu

SEQ ID NO: 267925 - RNA, 19 nt, Artificial Sequence
  Description of Artificial Sequence: Synthetic oligonucleotide
cggcuuagguguugggcuc

SEQ ID NO: 267926 - RNA, 19 nt, Artificial Sequence
  Description of Artificial Sequence: Synthetic oligonucleotide
cgccaucgcucgccgaacg

SEQ ID NO: 267927 - RNA, 19 nt, Artificial Sequence
  Description of Artificial Sequence: Synthetic oligonucleotide
gcguggcucuccggcacgg

SEQ ID NO: 267928 - RNA, 19 nt, Artificial Sequence
  Description of Artificial Sequence: Synthetic oligonucleotide
ccacucauccgggcacacc

SEQ ID NO: 267929 - RNA, 19 nt, Artificial Sequence
  Description of Artificial Sequence: Synthetic oligonucleotide
guaaggccaggcagcgggu

SEQ ID NO: 267930 - RNA, 19 nt, Artificial Sequence
  Description of Artificial Sequence: Synthetic oligonucleotide
agggaacaggguggcuaua

SEQ ID NO: 267931 - RNA, 19 nt, Artificial Sequence
  Description of Artificial Sequence: Synthetic oligonucleotide
gugcgcaugcguggcucuc

SEQ ID NO: 267932 - RNA, 19 nt, Artificial Sequence
  Description of Artificial Sequence: Synthetic oligonucleotide
ccuacgcuccacugcagcu

SEQ ID NO: 267933 - RNA, 19 nt, Artificial Sequence
  Description of Artificial Sequence: Synthetic oligonucleotide
gcaaggccaaacgugucau

SEQ ID NO: 267934 - RNA, 19 nt, Artificial Sequence
  Description of Artificial Sequence: Synthetic oligonucleotide
cguacuccagugucgugaa

SEQ ID NO: 267935 - RNA, 19 nt, Artificial Sequence
  Description of Artificial Sequence: Synthetic oligonucleotide
ggcuauuccguggcucucu

SEQ ID NO: 267936 - RNA, 19 nt, Artificial Sequence
  Description of Artificial Sequence: Synthetic oligonucleotide
guccgucgcagagcacguc

SEQ ID NO: 267937 - RNA, 19 nt, Artificial Sequence
  Description of Artificial Sequence: Synthetic oligonucleotide
cgccgaacgccuuccacga

SEQ ID NO: 267938 - RNA, 19 nt, Artificial Sequence
  Description of Artificial Sequence: Synthetic oligonucleotide
gcgggcgcaaggucccaca

SEQ ID NO: 267939 - RNA, 19 nt, Artificial Sequence
  Description of Artificial Sequence: Synthetic oligonucleotide
cccacacgcguuaccgcca

SEQ ID NO: 267940 - RNA, 19 nt, Artificial Sequence
  Description of Artificial Sequence: Synthetic oligonucleotide
aucgcucgccgaacgccuu

SEQ ID NO: 267941 - RNA, 19 nt, Artificial Sequence
  Description of Artificial Sequence: Synthetic oligonucleotide
gggcaugcgccuggaccgc

SEQ ID NO: 267942 - RNA, 19 nt, Artificial Sequence
  Description of Artificial Sequence: Synthetic oligonucleotide
ccccguuucuggcccugac

SEQ ID NO: 267943 - RNA, 19 nt, Artificial Sequence
  Description of Artificial Sequence: Synthetic oligonucleotide
cggccuuugccugaaggca

SEQ ID NO: 267944 - RNA, 19 nt, Artificial Sequence
  Description of Artificial Sequence: Synthetic oligonucleotide
cuugccugcuaagguccgu

SEQ ID NO: 267945 - RNA, 19 nt, Artificial Sequence
  Description of Artificial Sequence: Synthetic oligonucleotide
ggccacucauccgggcaca

SEQ ID NO: 267946 - RNA, 19 nt, Artificial Sequence
  Description of Artificial Sequence: Synthetic oligonucleotide
cguccacuccgcagcuuug

SEQ ID NO: 267947 - RNA, 19 nt, Artificial Sequence
  Description of Artificial Sequence: Synthetic oligonucleotide
gggcuauuccguggcucuc

SEQ ID NO: 267948 - RNA, 19 nt, Artificial Sequence
  Description of Artificial Sequence: Synthetic oligonucleotide
cgcaugcguggcucuccgg

SEQ ID NO: 267949 - RNA, 19 nt, Artificial Sequence
  Description of Artificial Sequence: Synthetic oligonucleotide
cacgggcccguacuccagu

SEQ ID NO: 267950 - RNA, 19 nt, Artificial Sequence
  Description of Artificial Sequence: Synthetic oligonucleotide
gccacucauccgggcacac

SEQ ID NO: 267951 - RNA, 19 nt, Artificial Sequence
  Description of Artificial Sequence: Synthetic oligonucleotide
cguuaccgccaucgcucgc

SEQ ID NO: 267952 - RNA, 19 nt, Artificial Sequence
  Description of Artificial Sequence: Synthetic oligonucleotide
cccauacagauuccuggau

SEQ ID NO: 267953 - RNA, 19 nt, Artificial Sequence
  Description of Artificial Sequence: Synthetic oligonucleotide
gcgccuggaccgcauggua

SEQ ID NO: 267954 - RNA, 19 nt, Artificial Sequence
  Description of Artificial Sequence: Synthetic oligonucleotide
cgaucuccugucacuacgu

SEQ ID NO: 267955 - RNA, 19 nt, Artificial Sequence
  Description of Artificial Sequence: Synthetic oligonucleotide
gcucgccgaacgccuucca

SEQ ID NO: 267956 - RNA, 19 nt, Artificial Sequence
  Description of Artificial Sequence: Synthetic oligonucleotide
cgggcgcaaggucccacac

SEQ ID NO: 267957 - RNA, 19 nt, Artificial Sequence
  Description of Artificial Sequence: Synthetic oligonucleotide
gcccgcccagugaccagag

SEQ ID NO: 267958 - RNA, 19 nt, Artificial Sequence
  Description of Artificial Sequence: Synthetic oligonucleotide
gcccguacuccagugucgu

SEQ ID NO: 267959 - RNA, 19 nt, Artificial Sequence
  Description of Artificial Sequence: Synthetic oligonucleotide
aggcgugcucgggccccug

SEQ ID NO: 267960 - RNA, 19 nt, Artificial Sequence
  Description of Artificial Sequence: Synthetic oligonucleotide
cucucgcaaagggcaggcu

SEQ ID NO: 267961 - RNA, 19 nt, Artificial Sequence
  Description of Artificial Sequence: Synthetic oligonucleotide
ggcaugcgccuggaccgca

SEQ ID NO: 267962 - RNA, 19 nt, Artificial Sequence
  Description of Artificial Sequence: Synthetic oligonucleotide
cgcucgccgaacgccuucc

SEQ ID NO: 267963 - RNA, 19 nt, Artificial Sequence
  Description of Artificial Sequence: Synthetic oligonucleotide
cuccgcagaaggccaccuu

SEQ ID NO: 267964 - RNA, 19 nt, Artificial Sequence
  Description of Artificial Sequence: Synthetic oligonucleotide
ccgccaucgcucgccgaac

SEQ ID NO: 267965 - RNA, 19 nt, Artificial Sequence
  Description of Artificial Sequence: Synthetic oligonucleotide
cggcacgggcccguacucc

SEQ ID NO: 267966 - RNA, 19 nt, Artificial Sequence
  Description of Artificial Sequence: Synthetic oligonucleotide
cccaaaucuggagccgccu

SEQ ID NO: 267967 - RNA, 19 nt, Artificial Sequence
  Description of Artificial Sequence: Synthetic oligonucleotide
ccgucgcagagcacguccu

SEQ ID NO: 267968 - RNA, 19 nt, Artificial Sequence
  Description of Artificial Sequence: Synthetic oligonucleotide
cccugacaccaggcuggag

SEQ ID NO: 267969 - RNA, 19 nt, Artificial Sequence
  Description of Artificial Sequence: Synthetic oligonucleotide
cucggaggccaugggcauu

SEQ ID NO: 267970 - RNA, 19 nt, Artificial Sequence
  Description of Artificial Sequence: Synthetic oligonucleotide
ccucguccacuccgcagcu

SEQ ID NO: 267971 - RNA, 19 nt, Artificial Sequence
  Description of Artificial Sequence: Synthetic oligonucleotide
ccagugcgcaugcguggcu

SEQ ID NO: 267972 - RNA, 19 nt, Artificial Sequence
  Description of Artificial Sequence: Synthetic oligonucleotide
ccacacgcguuaccgccau

SEQ ID NO: 267973 - RNA, 19 nt, Artificial Sequence
  Description of Artificial Sequence: Synthetic oligonucleotide
cgcgggcgcaaggucccac

SEQ ID NO: 267974 - RNA, 19 nt, Artificial Sequence
  Description of Artificial Sequence: Synthetic oligonucleotide
gcaugcgccuggaccgcau

SEQ ID NO: 267975 - RNA, 19 nt, Artificial Sequence
  Description of Artificial Sequence: Synthetic oligonucleotide
ggcaaccauaggggcuauu

SEQ ID NO: 267976 - RNA, 19 nt, Artificial Sequence
  Description of Artificial Sequence: Synthetic oligonucleotide
cccgagggccaaagguauu

SEQ ID NO: 267977 - RNA, 19 nt, Artificial Sequence
  Description of Artificial Sequence: Synthetic oligonucleotide
cggagucgccucauagcuu

SEQ ID NO: 267978 - RNA, 19 nt, Artificial Sequence
  Description of Artificial Sequence: Synthetic oligonucleotide
gccaaccggcuuagguguu

SEQ ID NO: 267979 - RNA, 19 nt, Artificial Sequence
  Description of Artificial Sequence: Synthetic oligonucleotide
cgggcccguacuccagugu

SEQ ID NO: 267980 - RNA, 19 nt, Artificial Sequence
  Description of Artificial Sequence: Synthetic oligonucleotide
cccgaacagcccgcccagu

SEQ ID NO: 267981 - RNA, 19 nt, Artificial Sequence
  Description of Artificial Sequence: Synthetic oligonucleotide
aauauuucugaccagcagc

SEQ ID NO: 267982 - RNA, 19 nt, Artificial Sequence
  Description of Artificial Sequence: Synthetic oligonucleotide
aaagagacgcugcaguucc

SEQ ID NO: 267983 - RNA, 19 nt, Artificial Sequence
  Description of Artificial Sequence: Synthetic oligonucleotide
agagaaaugaacuacuaug

SEQ ID NO: 267984 - RNA, 19 nt, Artificial Sequence
  Description of Artificial Sequence: Synthetic oligonucleotide
aacuacuaugcacugguuc

SEQ ID NO: 267985 - RNA, 19 nt, Artificial Sequence
  Description of Artificial Sequence: Synthetic oligonucleotide
aaugcgaagaacuugccaa

SEQ ID NO: 267986 - RNA, 19 nt, Artificial Sequence
  Description of Artificial Sequence: Synthetic oligonucleotide
aaucgagagugccuguugc

SEQ ID NO: 267987 - RNA, 19 nt, Artificial Sequence
  Description of Artificial Sequence: Synthetic oligonucleotide
gauaugaccaagaacauca

SEQ ID NO: 267988 - RNA, 19 nt, Artificial Sequence
  Description of Artificial Sequence: Synthetic oligonucleotide
uguaguacgucucaucgug

SEQ ID NO: 267989 - RNA, 19 nt, Artificial Sequence
  Description of Artificial Sequence: Synthetic oligonucleotide
uuacgggcugacaagaggg

SEQ ID NO: 267990 - RNA, 19 nt, Artificial Sequence
  Description of Artificial Sequence: Synthetic oligonucleotide
aaaugaacuacuaugcacu

SEQ ID NO: 267991 - RNA, 19 nt, Artificial Sequence
  Description of Artificial Sequence: Synthetic oligonucleotide
ugaacuacuaugcacuggu

SEQ ID NO: 267992 - RNA, 19 nt, Artificial Sequence
  Description of Artificial Sequence: Synthetic oligonucleotide
gagaaaugaacuacuaugc

SEQ ID NO: 267993 - RNA, 19 nt, Artificial Sequence
  Description of Artificial Sequence: Synthetic oligonucleotide
cauuuggcgugcaagaggg

SEQ ID NO: 267994 - RNA, 19 nt, Artificial Sequence
  Description of Artificial Sequence: Synthetic oligonucleotide
aacaguuuucaagugugcg

SEQ ID NO: 267995 - RNA, 19 nt, Artificial Sequence
  Description of Artificial Sequence: Synthetic oligonucleotide
uuuagagcuaggugcaucc

SEQ ID NO: 267996 - RNA, 19 nt, Artificial Sequence
  Description of Artificial Sequence: Synthetic oligonucleotide
ucgaggaacaguuuucaag

SEQ ID NO: 267997 - RNA, 19 nt, Artificial Sequence
  Description of Artificial Sequence: Synthetic oligonucleotide
aacuguucguucuccauug

SEQ ID NO: 267998 - RNA, 19 nt, Artificial Sequence
  Description of Artificial Sequence: Synthetic oligonucleotide
uacuauucgagcccgagaa

SEQ ID NO: 267999 - RNA, 19 nt, Artificial Sequence
  Description of Artificial Sequence: Synthetic oligonucleotide
caaaacagaguaaggcugg

SEQ ID NO: 268000 - RNA, 19 nt, Artificial Sequence
  Description of Artificial Sequence: Synthetic oligonucleotide
aacacauggagacuccacu

SEQ ID NO: 268001 - RNA, 19 nt, Artificial Sequence
  Description of Artificial Sequence: Synthetic oligonucleotide
acuacuaugcacugguucu

SEQ ID NO: 268002 - RNA, 19 nt, Artificial Sequence
  Description of Artificial Sequence: Synthetic oligonucleotide
uccugguaggcuuuuagag

SEQ ID NO: 268003 - RNA, 19 nt, Artificial Sequence
  Description of Artificial Sequence: Synthetic oligonucleotide
ucccacuacauccugaccu

SEQ ID NO: 268004 - RNA, 19 nt, Artificial Sequence
  Description of Artificial Sequence: Synthetic oligonucleotide
guugacucaaagcagcggc

SEQ ID NO: 268005 - RNA, 19 nt, Artificial Sequence
  Description of Artificial Sequence: Synthetic oligonucleotide
aaacacaaugguuggugug

SEQ ID NO: 268006 - RNA, 19 nt, Artificial Sequence
  Description of Artificial Sequence: Synthetic oligonucleotide
aacggacagcuccuggggc

SEQ ID NO: 268007 - RNA, 19 nt, Artificial Sequence
  Description of Artificial Sequence: Synthetic oligonucleotide
uugucuacuauucgagccc

SEQ ID NO: 268008 - RNA, 19 nt, Artificial Sequence
  Description of Artificial Sequence: Synthetic oligonucleotide
guugacggcagccaaugcg

SEQ ID NO: 268009 - RNA, 19 nt, Artificial Sequence
  Description of Artificial Sequence: Synthetic oligonucleotide
acuccgaaagucuucucac

SEQ ID NO: 268010 - RNA, 19 nt, Artificial Sequence
  Description of Artificial Sequence: Synthetic oligonucleotide
cucagcagccuauaaagag

SEQ ID NO: 268011 - RNA, 19 nt, Artificial Sequence
  Description of Artificial Sequence: Synthetic oligonucleotide
agcaagauccguucaauca

SEQ ID NO: 268012 - RNA, 19 nt, Artificial Sequence
  Description of Artificial Sequence: Synthetic oligonucleotide
cuauucgagcccgagaacg

SEQ ID NO: 268013 - RNA, 19 nt, Artificial Sequence
  Description of Artificial Sequence: Synthetic oligonucleotide
uccgaaagucuucucacug

SEQ ID NO: 268014 - RNA, 19 nt, Artificial Sequence
  Description of Artificial Sequence: Synthetic oligonucleotide
uguucguucuccauugcgu

SEQ ID NO: 268015 - RNA, 19 nt, Artificial Sequence
  Description of Artificial Sequence: Synthetic oligonucleotide
ucggagauugugaaggccu

SEQ ID NO: 268016 - RNA, 19 nt, Artificial Sequence
  Description of Artificial Sequence: Synthetic oligonucleotide
aaaucgagagugccuguug

SEQ ID NO: 268017 - RNA, 19 nt, Artificial Sequence
  Description of Artificial Sequence: Synthetic oligonucleotide
cucucagggccuuagcucg

SEQ ID NO: 268018 - RNA, 19 nt, Artificial Sequence
  Description of Artificial Sequence: Synthetic oligonucleotide
guugccgccgcucagacac

SEQ ID NO: 268019 - RNA, 19 nt, Artificial Sequence
  Description of Artificial Sequence: Synthetic oligonucleotide
uccacgaaguggaagguac

SEQ ID NO: 268020 - RNA, 19 nt, Artificial Sequence
  Description of Artificial Sequence: Synthetic oligonucleotide
gaaauggugccgcacacca

SEQ ID NO: 268021 - RNA, 19 nt, Artificial Sequence
  Description of Artificial Sequence: Synthetic oligonucleotide
  modified_base (9)..(9): a, c, u, g, unknown or other
gaggcagcncgguugaaag

SEQ ID NO: 268022 - RNA, 19 nt, Artificial Sequence
  Description of Artificial Sequence: Synthetic oligonucleotide
ucgaagagaggcuuguccu

SEQ ID NO: 268023 - RNA, 19 nt, Artificial Sequence
  Description of Artificial Sequence: Synthetic oligonucleotide
uccucuuacgggcugacaa

SEQ ID NO: 268024 - RNA, 19 nt, Artificial Sequence
  Description of Artificial Sequence: Synthetic oligonucleotide
uuaugggcgagguauaguu

SEQ ID NO: 268025 - RNA, 19 nt, Artificial Sequence
  Description of Artificial Sequence: Synthetic oligonucleotide
aucgagagugccuguugcc

SEQ ID NO: 268026 - RNA, 19 nt, Artificial Sequence
  Description of Artificial Sequence: Synthetic oligonucleotide
caaguagcggaucaggguc

SEQ ID NO: 268027 - RNA, 19 nt, Artificial Sequence
  Description of Artificial Sequence: Synthetic oligonucleotide
uccugcuagcuguucaggg

SEQ ID NO: 268028 - RNA, 19 nt, Artificial Sequence
  Description of Artificial Sequence: Synthetic oligonucleotide
uggaugaccugccugcgug

SEQ ID NO: 268029 - RNA, 19 nt, Artificial Sequence
  Description of Artificial Sequence: Synthetic oligonucleotide
gagggugccacuuucuuuc

SEQ ID NO: 268030 - RNA, 19 nt, Artificial Sequence
  Description of Artificial Sequence: Synthetic oligonucleotide
agaacguuuggucugugau

SEQ ID NO: 268031 - RNA, 19 nt, Artificial Sequence
  Description of Artificial Sequence: Synthetic oligonucleotide
cagccugauaacagcaucg

SEQ ID NO: 268032 - RNA, 19 nt, Artificial Sequence
  Description of Artificial Sequence: Synthetic oligonucleotide
ugucgagggagccguaucc

SEQ ID NO: 268033 - RNA, 19 nt, Artificial Sequence
  Description of Artificial Sequence: Synthetic oligonucleotide
cuuacgggcugacaagagg

SEQ ID NO: 268034 - RNA, 19 nt, Artificial Sequence
  Description of Artificial Sequence: Synthetic oligonucleotide
ucaaucagcaaguuaucuu

SEQ ID NO: 268035 - RNA, 19 nt, Artificial Sequence
  Description of Artificial Sequence: Synthetic oligonucleotide
uugacucaaagcagcggcc

SEQ ID NO: 268036 - RNA, 19 nt, Artificial Sequence
  Description of Artificial Sequence: Synthetic oligonucleotide
uuccguaucuuccugccaa

SEQ ID NO: 268037 - RNA, 19 nt, Artificial Sequence
  Description of Artificial Sequence: Synthetic oligonucleotide
uguucgaggaacaguuuuc

SEQ ID NO: 268038 - RNA, 19 nt, Artificial Sequence
  Description of Artificial Sequence: Synthetic oligonucleotide
cucuucaucgggacggugc

SEQ ID NO: 268039 - RNA, 19 nt, Artificial Sequence
  Description of Artificial Sequence: Synthetic oligonucleotide
agagccucacguugagggc

SEQ ID NO: 268040 - RNA, 19 nt, Artificial Sequence
  Description of Artificial Sequence: Synthetic oligonucleotide
guuugucuacuauucgagc

SEQ ID NO: 268041 - RNA, 19 nt, Artificial Sequence
  Description of Artificial Sequence: Synthetic oligonucleotide
ucucggaacauaagggaaa

SEQ ID NO: 268042 - RNA, 19 nt, Artificial Sequence
  Description of Artificial Sequence: Synthetic oligonucleotide
ucuuccguaucuuccugcc

SEQ ID NO: 268043 - RNA, 19 nt, Artificial Sequence
  Description of Artificial Sequence: Synthetic oligonucleotide
uucuucaugauaugaccaa

SEQ ID NO: 268044 - RNA, 19 nt, Artificial Sequence
  Description of Artificial Sequence: Synthetic oligonucleotide
uuuggcgugcaagagggug

SEQ ID NO: 268045 - RNA, 19 nt, Artificial Sequence
  Description of Artificial Sequence: Synthetic oligonucleotide
gacucuucggcacccuccg

SEQ ID NO: 268046 - RNA, 19 nt, Artificial Sequence
  Description of Artificial Sequence: Synthetic oligonucleotide
acuauucgagcccgagaac

SEQ ID NO: 268047 - RNA, 19 nt, Artificial Sequence
  Description of Artificial Sequence: Synthetic oligonucleotide
caugaguggguuguaacag

SEQ ID NO: 268048 - RNA, 19 nt, Artificial Sequence
  Description of Artificial Sequence: Synthetic oligonucleotide
uucaaucagcaaguuaucu

SEQ ID NO: 268049 - RNA, 19 nt, Artificial Sequence
  Description of Artificial Sequence: Synthetic oligonucleotide
aagucguccaugccaagaa

SEQ ID NO: 268050 - RNA, 19 nt, Artificial Sequence
  Description of Artificial Sequence: Synthetic oligonucleotide
agcccgagaacguuugguc

SEQ ID NO: 268051 - RNA, 19 nt, Artificial Sequence
  Description of Artificial Sequence: Synthetic oligonucleotide
ucuuacgggcugacaagag

SEQ ID NO: 268052 - RNA, 19 nt, Artificial Sequence
  Description of Artificial Sequence: Synthetic oligonucleotide
aguuucggagauugugaag

SEQ ID NO: 268053 - RNA, 19 nt, Artificial Sequence
  Description of Artificial Sequence: Synthetic oligonucleotide
ucuucaucgggacggugcu

SEQ ID NO: 268054 - RNA, 19 nt, Artificial Sequence
  Description of Artificial Sequence: Synthetic oligonucleotide
uuggcgugcaagagggugc

SEQ ID NO: 268055 - RNA, 19 nt, Artificial Sequence
  Description of Artificial Sequence: Synthetic oligonucleotide
cuugccaaggauguauuug

SEQ ID NO: 268056 - RNA, 19 nt, Artificial Sequence
  Description of Artificial Sequence: Synthetic oligonucleotide
gacuccgaaagucuucuca

SEQ ID NO: 268057 - RNA, 19 nt, Artificial Sequence
  Description of Artificial Sequence: Synthetic oligonucleotide
uaguaguuggugagguucu

SEQ ID NO: 268058 - RNA, 19 nt, Artificial Sequence
  Description of Artificial Sequence: Synthetic oligonucleotide
ucuucggcacccuccgggg

SEQ ID NO: 268059 - RNA, 19 nt, Artificial Sequence
  Description of Artificial Sequence: Synthetic oligonucleotide
agcgacugcucucucucac

SEQ ID NO: 268060 - RNA, 19 nt, Artificial Sequence
  Description of Artificial Sequence: Synthetic oligonucleotide
ccaagaauauuucugacca

SEQ ID NO: 268061 - RNA, 19 nt, Artificial Sequence
  Description of Artificial Sequence: Synthetic oligonucleotide
augcgaagaacuugccaag

SEQ ID NO: 268062 - RNA, 19 nt, Artificial Sequence
  Description of Artificial Sequence: Synthetic oligonucleotide
uaguuucggagauugugaa

SEQ ID NO: 268063 - RNA, 19 nt, Artificial Sequence
  Description of Artificial Sequence: Synthetic oligonucleotide
cacgcaguggcucugugac

SEQ ID NO: 268064 - RNA, 19 nt, Artificial Sequence
  Description of Artificial Sequence: Synthetic oligonucleotide
uuaggcacgccgccaaaac

SEQ ID NO: 268065 - RNA, 19 nt, Artificial Sequence
  Description of Artificial Sequence: Synthetic oligonucleotide
uauucgagcccgagaacgu

SEQ ID NO: 268066 - RNA, 19 nt, Artificial Sequence
  Description of Artificial Sequence: Synthetic oligonucleotide
uuucggagauugugaaggc

SEQ ID NO: 268067 - RNA, 19 nt, Artificial Sequence
  Description of Artificial Sequence: Synthetic oligonucleotide
cauucccaaggucaugggc

SEQ ID NO: 268068 - RNA, 19 nt, Artificial Sequence
  Description of Artificial Sequence: Synthetic oligonucleotide
gacacgccuccauuuggcg

SEQ ID NO: 268069 - RNA, 19 nt, Artificial Sequence
  Description of Artificial Sequence: Synthetic oligonucleotide
cacgucucucgucucaucc

SEQ ID NO: 268070 - RNA, 19 nt, Artificial Sequence
  Description of Artificial Sequence: Synthetic oligonucleotide
uugccgaucaucugccgca

SEQ ID NO: 268071 - RNA, 19 nt, Artificial Sequence
  Description of Artificial Sequence: Synthetic oligonucleotide
uucguucuccauugcgucc

SEQ ID NO: 268072 - RNA, 19 nt, Artificial Sequence
  Description of Artificial Sequence: Synthetic oligonucleotide
ucaugccgcaaguagcgga

SEQ ID NO: 268073 - RNA, 19 nt, Artificial Sequence
  Description of Artificial Sequence: Synthetic oligonucleotide
gugagcgcuguucugccgg

SEQ ID NO: 268074 - RNA, 19 nt, Artificial Sequence
  Description of Artificial Sequence: Synthetic oligonucleotide
gagccucacguugagggcg

SEQ ID NO: 268075 - RNA, 19 nt, Artificial Sequence
  Description of Artificial Sequence: Synthetic oligonucleotide
gccaagaauauuucugacc

SEQ ID NO: 268076 - RNA, 19 nt, Artificial Sequence
  Description of Artificial Sequence: Synthetic oligonucleotide
cuugccgaucaucugccgc

SEQ ID NO: 268077 - RNA, 19 nt, Artificial Sequence
  Description of Artificial Sequence: Synthetic oligonucleotide
uuucacugaggacuccgaa

SEQ ID NO: 268078 - RNA, 19 nt, Artificial Sequence
  Description of Artificial Sequence: Synthetic oligonucleotide
gaacucggagcagaagucc

SEQ ID NO: 268079 - RNA, 19 nt, Artificial Sequence
  Description of Artificial Sequence: Synthetic oligonucleotide
ugauaugaccaagaacauc

SEQ ID NO: 268080 - RNA, 19 nt, Artificial Sequence
  Description of Artificial Sequence: Synthetic oligonucleotide
gacuucaaccccuggacaa

SEQ ID NO: 268081 - RNA, 19 nt, Artificial Sequence
  Description of Artificial Sequence: Synthetic oligonucleotide
ggaucccuagcuuucguag

SEQ ID NO: 268082 - RNA, 19 nt, Artificial Sequence
  Description of Artificial Sequence: Synthetic oligonucleotide
guauuuggcaaaagucacc

SEQ ID NO: 268083 - RNA, 19 nt, Artificial Sequence
  Description of Artificial Sequence: Synthetic oligonucleotide
acguugagggcggagcggc

SEQ ID NO: 268084 - RNA, 19 nt, Artificial Sequence
  Description of Artificial Sequence: Synthetic oligonucleotide
gaacauaagggaaacaauu

SEQ ID NO: 268085 - RNA, 19 nt, Artificial Sequence
  Description of Artificial Sequence: Synthetic oligonucleotide
uuagagcuaggugcauccg

SEQ ID NO: 268086 - RNA, 19 nt, Artificial Sequence
  Description of Artificial Sequence: Synthetic oligonucleotide
agcgucccugcccuacucc

SEQ ID NO: 268087 - RNA, 19 nt, Artificial Sequence
  Description of Artificial Sequence: Synthetic oligonucleotide
uucaucgggacggugcucu

SEQ ID NO: 268088 - RNA, 19 nt, Artificial Sequence
  Description of Artificial Sequence: Synthetic oligonucleotide
aggguccuuaggcacgccg

SEQ ID NO: 268089 - RNA, 19 nt, Artificial Sequence
  Description of Artificial Sequence: Synthetic oligonucleotide
uuuuagagcuaggugcauc

SEQ ID NO: 268090 - RNA, 19 nt, Artificial Sequence
  Description of Artificial Sequence: Synthetic oligonucleotide
uuuucaagugugcgaggau

SEQ ID NO: 268091 - RNA, 19 nt, Artificial Sequence
  Description of Artificial Sequence: Synthetic oligonucleotide
guaguuucggagauuguga

SEQ ID NO: 268092 - RNA, 19 nt, Artificial Sequence
  Description of Artificial Sequence: Synthetic oligonucleotide
cacgaaguggaagguacgg

SEQ ID NO: 268093 - RNA, 19 nt, Artificial Sequence
  Description of Artificial Sequence: Synthetic oligonucleotide
caguguucuuccagaacag

SEQ ID NO: 268094 - RNA, 19 nt, Artificial Sequence
  Description of Artificial Sequence: Synthetic oligonucleotide
acaagacaaucuggguccc

SEQ ID NO: 268095 - RNA, 19 nt, Artificial Sequence
  Description of Artificial Sequence: Synthetic oligonucleotide
ccauaaagaaggccaaagc

SEQ ID NO: 268096 - RNA, 19 nt, Artificial Sequence
  Description of Artificial Sequence: Synthetic oligonucleotide
  modified_base (7)..(7): a, c, u, g, unknown or other
ggcagcncgguugaaaggc

SEQ ID NO: 268097 - RNA, 19 nt, Artificial Sequence
  Description of Artificial Sequence: Synthetic oligonucleotide
ugugagcgcuguucugccg

SEQ ID NO: 268098 - RNA, 19 nt, Artificial Sequence
  Description of Artificial Sequence: Synthetic oligonucleotide
uucggagauugugaaggcc

SEQ ID NO: 268099 - RNA, 19 nt, Artificial Sequence
  Description of Artificial Sequence: Synthetic oligonucleotide
uaugggcgagguauaguuc

SEQ ID NO: 268100 - RNA, 19 nt, Artificial Sequence
  Description of Artificial Sequence: Synthetic oligonucleotide
agucaucucucgaaccacg

SEQ ID NO: 268101 - RNA, 19 nt, Artificial Sequence
  Description of Artificial Sequence: Synthetic oligonucleotide
gagcuaggugcauccggcg

SEQ ID NO: 268102 - RNA, 19 nt, Artificial Sequence
  Description of Artificial Sequence: Synthetic oligonucleotide
ugacucaaagcagcggcca

SEQ ID NO: 268103 - RNA, 19 nt, Artificial Sequence
  Description of Artificial Sequence: Synthetic oligonucleotide
guucguucuccauugcguc

SEQ ID NO: 268104 - RNA, 19 nt, Artificial Sequence
  Description of Artificial Sequence: Synthetic oligonucleotide
aagcgucccugcccuacuc

SEQ ID NO: 268105 - RNA, 19 nt, Artificial Sequence
  Description of Artificial Sequence: Synthetic oligonucleotide
ugccgcacgucucucgucu

SEQ ID NO: 268106 - RNA, 19 nt, Artificial Sequence
  Description of Artificial Sequence: Synthetic oligonucleotide
ucuugccgaucaucugccg

SEQ ID NO: 268107 - RNA, 19 nt, Artificial Sequence
  Description of Artificial Sequence: Synthetic oligonucleotide
caacacauggagacuccac

SEQ ID NO: 268108 - RNA, 19 nt, Artificial Sequence
  Description of Artificial Sequence: Synthetic oligonucleotide
cauccgcaccagauggugg

SEQ ID NO: 268109 - RNA, 19 nt, Artificial Sequence
  Description of Artificial Sequence: Synthetic oligonucleotide
uuucuccguuucuuguaca

SEQ ID NO: 268110 - RNA, 19 nt, Artificial Sequence
  Description of Artificial Sequence: Synthetic oligonucleotide
gucucaucgugcuguuggg

SEQ ID NO: 268111 - RNA, 19 nt, Artificial Sequence
  Description of Artificial Sequence: Synthetic oligonucleotide
agauucaccaucagccuga

SEQ ID NO: 268112 - RNA, 19 nt, Artificial Sequence
  Description of Artificial Sequence: Synthetic oligonucleotide
gaggaugguucccacuaca

SEQ ID NO: 268113 - RNA, 19 nt, Artificial Sequence
  Description of Artificial Sequence: Synthetic oligonucleotide
cugguaggcuuuuagagcu

SEQ ID NO: 268114 - RNA, 19 nt, Artificial Sequence
  Description of Artificial Sequence: Synthetic oligonucleotide
agcgcuguucugccgguag

SEQ ID NO: 268115 - RNA, 19 nt, Artificial Sequence
  Description of Artificial Sequence: Synthetic oligonucleotide
uccguaucuuccugccaag

SEQ ID NO: 268116 - RNA, 19 nt, Artificial Sequence
  Description of Artificial Sequence: Synthetic oligonucleotide
  modified_base (8)..(8): a, c, u, g, unknown or other
aggcagcncgguugaaagg

SEQ ID NO: 268117 - RNA, 19 nt, Artificial Sequence
  Description of Artificial Sequence: Synthetic oligonucleotide
aggcacgccgccaaaacag

SEQ ID NO: 268118 - RNA, 19 nt, Artificial Sequence
  Description of Artificial Sequence: Synthetic oligonucleotide
uggaagguacggacacuca

SEQ ID NO: 268119 - RNA, 19 nt, Artificial Sequence
  Description of Artificial Sequence: Synthetic oligonucleotide
gaaggucuccugcccuggg

SEQ ID NO: 268120 - RNA, 19 nt, Artificial Sequence
  Description of Artificial Sequence: Synthetic oligonucleotide
ucgagagugccuguugccu

SEQ ID NO: 268121 - RNA, 19 nt, Artificial Sequence
  Description of Artificial Sequence: Synthetic oligonucleotide
gccgccaaaacagaguaag

SEQ ID NO: 268122 - RNA, 19 nt, Artificial Sequence
  Description of Artificial Sequence: Synthetic oligonucleotide
cucggaacauaagggaaac

SEQ ID NO: 268123 - RNA, 19 nt, Artificial Sequence
  Description of Artificial Sequence: Synthetic oligonucleotide
gaacguuuggucugugaua

SEQ ID NO: 268124 - RNA, 19 nt, Artificial Sequence
  Description of Artificial Sequence: Synthetic oligonucleotide
agggccuuagcucggugcu

SEQ ID NO: 268125 - RNA, 19 nt, Artificial Sequence
  Description of Artificial Sequence: Synthetic oligonucleotide
gcggugaacggacagcucc

SEQ ID NO: 268126 - RNA, 19 nt, Artificial Sequence
  Description of Artificial Sequence: Synthetic oligonucleotide
uguucaggguucuggucuc

SEQ ID NO: 268127 - RNA, 19 nt, Artificial Sequence
  Description of Artificial Sequence: Synthetic oligonucleotide
agggacacgccuccauuug

SEQ ID NO: 268128 - RNA, 19 nt, Artificial Sequence
  Description of Artificial Sequence: Synthetic oligonucleotide
gguuucacugaggacuccg

SEQ ID NO: 268129 - RNA, 19 nt, Artificial Sequence
  Description of Artificial Sequence: Synthetic oligonucleotide
aauguccaucucauuuacu

SEQ ID NO: 268130 - RNA, 19 nt, Artificial Sequence
  Description of Artificial Sequence: Synthetic oligonucleotide
ugggauucgccagaagguc

SEQ ID NO: 268131 - RNA, 19 nt, Artificial Sequence
  Description of Artificial Sequence: Synthetic oligonucleotide
uucggcacccuccggggcu

SEQ ID NO: 268132 - RNA, 19 nt, Artificial Sequence
  Description of Artificial Sequence: Synthetic oligonucleotide
ucggugcucuucaucggga

SEQ ID NO: 268133 - RNA, 19 nt, Artificial Sequence
  Description of Artificial Sequence: Synthetic oligonucleotide
ccacaagacaaucuggguc

SEQ ID NO: 268134 - RNA, 19 nt, Artificial Sequence
  Description of Artificial Sequence: Synthetic oligonucleotide
uucgaggaacaguuuucaa

SEQ ID NO: 268135 - RNA, 19 nt, Artificial Sequence
  Description of Artificial Sequence: Synthetic oligonucleotide
guaucccugagucaucucu

SEQ ID NO: 268136 - RNA, 19 nt, Artificial Sequence
  Description of Artificial Sequence: Synthetic oligonucleotide
agccaaugcgaagaacuug

SEQ ID NO: 268137 - RNA, 19 nt, Artificial Sequence
  Description of Artificial Sequence: Synthetic oligonucleotide
uccauugcguccucauuuu

SEQ ID NO: 268138 - RNA, 19 nt, Artificial Sequence
  Description of Artificial Sequence: Synthetic oligonucleotide
agcuaggugcauccggcgu

SEQ ID NO: 268139 - RNA, 19 nt, Artificial Sequence
  Description of Artificial Sequence: Synthetic oligonucleotide
aaauggugccgcacaccag

SEQ ID NO: 268140 - RNA, 19 nt, Artificial Sequence
  Description of Artificial Sequence: Synthetic oligonucleotide
gagaacguuuggucuguga

SEQ ID NO: 268141 - RNA, 19 nt, Artificial Sequence
  Description of Artificial Sequence: Synthetic oligonucleotide
ggugcucuucaucgggacg

SEQ ID NO: 268142 - RNA, 19 nt, Artificial Sequence
  Description of Artificial Sequence: Synthetic oligonucleotide
cagcaagauccguucaauc

SEQ ID NO: 268143 - RNA, 19 nt, Artificial Sequence
  Description of Artificial Sequence: Synthetic oligonucleotide
ugcguguucgaggaacagu

SEQ ID NO: 268144 - RNA, 19 nt, Artificial Sequence
  Description of Artificial Sequence: Synthetic oligonucleotide
ccgaaagucuucucacugg

SEQ ID NO: 268145 - RNA, 19 nt, Artificial Sequence
  Description of Artificial Sequence: Synthetic oligonucleotide
agccaagcgucccugcccu

SEQ ID NO: 268146 - RNA, 19 nt, Artificial Sequence
  Description of Artificial Sequence: Synthetic oligonucleotide
ucaggguucuggucucgga

SEQ ID NO: 268147 - RNA, 19 nt, Artificial Sequence
  Description of Artificial Sequence: Synthetic oligonucleotide
ucgagggagccguaucccu

SEQ ID NO: 268148 - RNA, 19 nt, Artificial Sequence
  Description of Artificial Sequence: Synthetic oligonucleotide
aucgggacggugcucucca

SEQ ID NO: 268149 - RNA, 19 nt, Artificial Sequence
  Description of Artificial Sequence: Synthetic oligonucleotide
agccguaucccugagucau

SEQ ID NO: 268150 - RNA, 19 nt, Artificial Sequence
  Description of Artificial Sequence: Synthetic oligonucleotide
acgccgccaaaacagagua

SEQ ID NO: 268151 - RNA, 19 nt, Artificial Sequence
  Description of Artificial Sequence: Synthetic oligonucleotide
gaaagaggagcaagucguc

SEQ ID NO: 268152 - RNA, 19 nt, Artificial Sequence
  Description of Artificial Sequence: Synthetic oligonucleotide
guggaagguacggacacuc

SEQ ID NO: 268153 - RNA, 19 nt, Artificial Sequence
  Description of Artificial Sequence: Synthetic oligonucleotide
agcggcggugaacggacag

SEQ ID NO: 268154 - RNA, 19 nt, Artificial Sequence
  Description of Artificial Sequence: Synthetic oligonucleotide
guugagggcggagcggcgg

SEQ ID NO: 268155 - RNA, 19 nt, Artificial Sequence
  Description of Artificial Sequence: Synthetic oligonucleotide
guaucuuccugccaaggau

SEQ ID NO: 268156 - RNA, 19 nt, Artificial Sequence
  Description of Artificial Sequence: Synthetic oligonucleotide
gagggcgcgaguucucuuc

SEQ ID NO: 268157 - RNA, 19 nt, Artificial Sequence
  Description of Artificial Sequence: Synthetic oligonucleotide
cuacuaugcacugguucug

SEQ ID NO: 268158 - RNA, 19 nt, Artificial Sequence
  Description of Artificial Sequence: Synthetic oligonucleotide
gugguccuugacugcaccc

SEQ ID NO: 268159 - RNA, 19 nt, Artificial Sequence
  Description of Artificial Sequence: Synthetic oligonucleotide
uucgagcccgagaacguuu

SEQ ID NO: 268160 - RNA, 19 nt, Artificial Sequence
  Description of Artificial Sequence: Synthetic oligonucleotide
aagacccacugucgaggga

SEQ ID NO: 268161 - RNA, 19 nt, Artificial Sequence
  Description of Artificial Sequence: Synthetic oligonucleotide
ugcacccaugaguggguug

SEQ ID NO: 268162 - RNA, 19 nt, Artificial Sequence
  Description of Artificial Sequence: Synthetic oligonucleotide
aggauguauuuggcaaaag

SEQ ID NO: 268163 - RNA, 19 nt, Artificial Sequence
  Description of Artificial Sequence: Synthetic oligonucleotide
gugugagcgcuguucugcc

SEQ ID NO: 268164 - RNA, 19 nt, Artificial Sequence
  Description of Artificial Sequence: Synthetic oligonucleotide
ugggcggccggaucccuag

SEQ ID NO: 268165 - RNA, 19 nt, Artificial Sequence
  Description of Artificial Sequence: Synthetic oligonucleotide
ugcccuacuccugcuagcu

SEQ ID NO: 268166 - RNA, 19 nt, Artificial Sequence
  Description of Artificial Sequence: Synthetic oligonucleotide
guaguacgucucaucgugc

SEQ ID NO: 268167 - RNA, 19 nt, Artificial Sequence
  Description of Artificial Sequence: Synthetic oligonucleotide
acgucucucgucucauccu

SEQ ID NO: 268168 - RNA, 19 nt, Artificial Sequence
  Description of Artificial Sequence: Synthetic oligonucleotide
gagggagccguaucccuga

SEQ ID NO: 268169 - RNA, 19 nt, Artificial Sequence
  Description of Artificial Sequence: Synthetic oligonucleotide
ugcgaggaugguucccacu

SEQ ID NO: 268170 - RNA, 19 nt, Artificial Sequence
  Description of Artificial Sequence: Synthetic oligonucleotide
cuucaaccccuggacaaug

SEQ ID NO: 268171 - RNA, 19 nt, Artificial Sequence
  Description of Artificial Sequence: Synthetic oligonucleotide
cuggcgacucuucggcacc

SEQ ID NO: 268172 - RNA, 19 nt, Artificial Sequence
  Description of Artificial Sequence: Synthetic oligonucleotide
agcaagucguccaugccaa

SEQ ID NO: 268173 - RNA, 19 nt, Artificial Sequence
  Description of Artificial Sequence: Synthetic oligonucleotide
augauaugaccaagaacau

SEQ ID NO: 268174 - RNA, 19 nt, Artificial Sequence
  Description of Artificial Sequence: Synthetic oligonucleotide
cuacuauucgagcccgaga

SEQ ID NO: 268175 - RNA, 19 nt, Artificial Sequence
  Description of Artificial Sequence: Synthetic oligonucleotide
agucguccaugccaagaau

SEQ ID NO: 268176 - RNA, 19 nt, Artificial Sequence
  Description of Artificial Sequence: Synthetic oligonucleotide
ucgaaccacggcaguguuc

SEQ ID NO: 268177 - RNA, 19 nt, Artificial Sequence
  Description of Artificial Sequence: Synthetic oligonucleotide
agccugauaacagcaucga

SEQ ID NO: 268178 - RNA, 19 nt, Artificial Sequence
  Description of Artificial Sequence: Synthetic oligonucleotide
gcuaggugcauccggcgug

SEQ ID NO: 268179 - RNA, 19 nt, Artificial Sequence
  Description of Artificial Sequence: Synthetic oligonucleotide
ucggaacauaagggaaaca

SEQ ID NO: 268180 - RNA, 19 nt, Artificial Sequence
  Description of Artificial Sequence: Synthetic oligonucleotide
agcuuuugguugacggcag

SEQ ID NO: 268181 - RNA, 19 nt, Artificial Sequence
  Description of Artificial Sequence: Synthetic oligonucleotide
cguucaaucagcaaguuau

SEQ ID NO: 268182 - RNA, 19 nt, Artificial Sequence
  Description of Artificial Sequence: Synthetic oligonucleotide
cauugcguccucauuuucu

SEQ ID NO: 268183 - RNA, 19 nt, Artificial Sequence
  Description of Artificial Sequence: Synthetic oligonucleotide
cucagacaccaaccccagg

SEQ ID NO: 268184 - RNA, 19 nt, Artificial Sequence
  Description of Artificial Sequence: Synthetic oligonucleotide
gucucggaacauaagggaa

SEQ ID NO: 268185 - RNA, 19 nt, Artificial Sequence
  Description of Artificial Sequence: Synthetic oligonucleotide
cgccaaaacagaguaaggc

SEQ ID NO: 268186 - RNA, 19 nt, Artificial Sequence
  Description of Artificial Sequence: Synthetic oligonucleotide
uggcgugcaagagggugcc

SEQ ID NO: 268187 - RNA, 19 nt, Artificial Sequence
  Description of Artificial Sequence: Synthetic oligonucleotide
cuucgcuccugagccaagc

SEQ ID NO: 268188 - RNA, 19 nt, Artificial Sequence
  Description of Artificial Sequence: Synthetic oligonucleotide
cucucgaaccacggcagug

SEQ ID NO: 268189 - RNA, 19 nt, Artificial Sequence
  Description of Artificial Sequence: Synthetic oligonucleotide
ggcgcgaguucucuucucc

SEQ ID NO: 268190 - RNA, 19 nt, Artificial Sequence
  Description of Artificial Sequence: Synthetic oligonucleotide
acucuucggcacccuccgg

SEQ ID NO: 268191 - RNA, 19 nt, Artificial Sequence
  Description of Artificial Sequence: Synthetic oligonucleotide
uccacgcaguggcucugug

SEQ ID NO: 268192 - RNA, 19 nt, Artificial Sequence
  Description of Artificial Sequence: Synthetic oligonucleotide
cucaugccgcaaguagcgg

SEQ ID NO: 268193 - RNA, 19 nt, Artificial Sequence
  Description of Artificial Sequence: Synthetic oligonucleotide
  modified_base (16)..(16): a, c, u, g, unknown or other
ggcgaaggaggcagcncgg

SEQ ID NO: 268194 - RNA, 19 nt, Artificial Sequence
  Description of Artificial Sequence: Synthetic oligonucleotide
cucuuacgggcugacaaga

SEQ ID NO: 268195 - RNA, 19 nt, Artificial Sequence
  Description of Artificial Sequence: Synthetic oligonucleotide
gccgcucagacaccaaccc

SEQ ID NO: 268196 - RNA, 19 nt, Artificial Sequence
  Description of Artificial Sequence: Synthetic oligonucleotide
cugcccuacuccugcuagc

SEQ ID NO: 268197 - RNA, 19 nt, Artificial Sequence
  Description of Artificial Sequence: Synthetic oligonucleotide
gucgagggagccguauccc

SEQ ID NO: 268198 - RNA, 19 nt, Artificial Sequence
  Description of Artificial Sequence: Synthetic oligonucleotide
uuagcucggugcucuucau

SEQ ID NO: 268199 - RNA, 19 nt, Artificial Sequence
  Description of Artificial Sequence: Synthetic oligonucleotide
ggugguccuugacugcacc

SEQ ID NO: 268200 - RNA, 19 nt, Artificial Sequence
  Description of Artificial Sequence: Synthetic oligonucleotide
ccucuuacgggcugacaag

SEQ ID NO: 268201 - RNA, 19 nt, Artificial Sequence
  Description of Artificial Sequence: Synthetic oligonucleotide
agggcgcgaguucucuucu

SEQ ID NO: 268202 - RNA, 19 nt, Artificial Sequence
  Description of Artificial Sequence: Synthetic oligonucleotide
ggaaauggugccgcacacc

SEQ ID NO: 268203 - RNA, 19 nt, Artificial Sequence
  Description of Artificial Sequence: Synthetic oligonucleotide
ugagcgcuguucugccggu

SEQ ID NO: 268204 - RNA, 19 nt, Artificial Sequence
  Description of Artificial Sequence: Synthetic oligonucleotide
ccugccaaggauccuucag

SEQ ID NO: 268205 - RNA, 19 nt, Artificial Sequence
  Description of Artificial Sequence: Synthetic oligonucleotide
cucggagcagaagucccug

SEQ ID NO: 268206 - RNA, 19 nt, Artificial Sequence
  Description of Artificial Sequence: Synthetic oligonucleotide
cacauccuuaugggcgagg

SEQ ID NO: 268207 - RNA, 19 nt, Artificial Sequence
  Description of Artificial Sequence: Synthetic oligonucleotide
cuucggcacccuccggggc

SEQ ID NO: 268208 - RNA, 19 nt, Artificial Sequence
  Description of Artificial Sequence: Synthetic oligonucleotide
ccaugaguggguuguaaca

SEQ ID NO: 268209 - RNA, 19 nt, Artificial Sequence
  Description of Artificial Sequence: Synthetic oligonucleotide
ccacgaaguggaagguacg

SEQ ID NO: 268210 - RNA, 19 nt, Artificial Sequence
  Description of Artificial Sequence: Synthetic oligonucleotide
gagccguaucccugaguca

SEQ ID NO: 268211 - RNA, 19 nt, Artificial Sequence
  Description of Artificial Sequence: Synthetic oligonucleotide
ugguaggcuuuuagagcua

SEQ ID NO: 268212 - RNA, 19 nt, Artificial Sequence
  Description of Artificial Sequence: Synthetic oligonucleotide
cugucgagggagccguauc

SEQ ID NO: 268213 - RNA, 19 nt, Artificial Sequence
  Description of Artificial Sequence: Synthetic oligonucleotide
  modified_base (5)..(5): a, c, u, g, unknown or other
cagcncgguugaaaggcca

SEQ ID NO: 268214 - RNA, 19 nt, Artificial Sequence
  Description of Artificial Sequence: Synthetic oligonucleotide
cccgagaacguuuggucug

SEQ ID NO: 268215 - RNA, 19 nt, Artificial Sequence
  Description of Artificial Sequence: Synthetic oligonucleotide
ggaacucggagcagaaguc

SEQ ID NO: 268216 - RNA, 19 nt, Artificial Sequence
  Description of Artificial Sequence: Synthetic oligonucleotide
guguucgaggaacaguuuu

SEQ ID NO: 268217 - RNA, 19 nt, Artificial Sequence
  Description of Artificial Sequence: Synthetic oligonucleotide
gcgcgaguucucuucuccg

SEQ ID NO: 268218 - RNA, 19 nt, Artificial Sequence
  Description of Artificial Sequence: Synthetic oligonucleotide
caucgggacggugcucucc

SEQ ID NO: 268219 - RNA, 19 nt, Artificial Sequence
  Description of Artificial Sequence: Synthetic oligonucleotide
caggguucuggucucggaa

SEQ ID NO: 268220 - RNA, 19 nt, Artificial Sequence
  Description of Artificial Sequence: Synthetic oligonucleotide
cguuucuuguacaguugcc

SEQ ID NO: 268221 - RNA, 19 nt, Artificial Sequence
  Description of Artificial Sequence: Synthetic oligonucleotide
cguuuggucugugauauuc

SEQ ID NO: 268222 - RNA, 19 nt, Artificial Sequence
  Description of Artificial Sequence: Synthetic oligonucleotide
cauccggcgugcccaggag

SEQ ID NO: 268223 - RNA, 19 nt, Artificial Sequence
  Description of Artificial Sequence: Synthetic oligonucleotide
uggagggcgcgaguucucu

SEQ ID NO: 268224 - RNA, 19 nt, Artificial Sequence
  Description of Artificial Sequence: Synthetic oligonucleotide
  modified_base (2)..(2): a, c, u, g, unknown or other
cncgguugaaaggccauaa

SEQ ID NO: 268225 - RNA, 19 nt, Artificial Sequence
  Description of Artificial Sequence: Synthetic oligonucleotide
agggugccacuuucuuucu

SEQ ID NO: 268226 - RNA, 19 nt, Artificial Sequence
  Description of Artificial Sequence: Synthetic oligonucleotide
cuccauugcguccucauuu

SEQ ID NO: 268227 - RNA, 19 nt, Artificial Sequence
  Description of Artificial Sequence: Synthetic oligonucleotide
agggagccguaucccugag

SEQ ID NO: 268228 - RNA, 19 nt, Artificial Sequence
  Description of Artificial Sequence: Synthetic oligonucleotide
ggcgagguauaguuccuga

SEQ ID NO: 268229 - RNA, 19 nt, Artificial Sequence
  Description of Artificial Sequence: Synthetic oligonucleotide
cuuccguaucuuccugcca

SEQ ID NO: 268230 - RNA, 19 nt, Artificial Sequence
  Description of Artificial Sequence: Synthetic oligonucleotide
aguugccgccgcucagaca

SEQ ID NO: 268231 - RNA, 19 nt, Artificial Sequence
  Description of Artificial Sequence: Synthetic oligonucleotide
acucggagcagaagucccu

SEQ ID NO: 268232 - RNA, 19 nt, Artificial Sequence
  Description of Artificial Sequence: Synthetic oligonucleotide
caucgugcuguuggggcuc

SEQ ID NO: 268233 - RNA, 19 nt, Artificial Sequence
  Description of Artificial Sequence: Synthetic oligonucleotide
gguugacggcagccaaugc

SEQ ID NO: 268234 - RNA, 19 nt, Artificial Sequence
  Description of Artificial Sequence: Synthetic oligonucleotide
uccguucaaucagcaaguu

SEQ ID NO: 268235 - RNA, 19 nt, Artificial Sequence
  Description of Artificial Sequence: Synthetic oligonucleotide
  modified_base (4)..(4): a, c, u, g, unknown or other
agcncgguugaaaggccau

SEQ ID NO: 268236 - RNA, 19 nt, Artificial Sequence
  Description of Artificial Sequence: Synthetic oligonucleotide
uacgucucaucgugcuguu

SEQ ID NO: 268237 - RNA, 19 nt, Artificial Sequence
  Description of Artificial Sequence: Synthetic oligonucleotide
gcaaguagcggaucagggu

SEQ ID NO: 268238 - RNA, 19 nt, Artificial Sequence
  Description of Artificial Sequence: Synthetic oligonucleotide
ccuggcgacucuucggcac

SEQ ID NO: 268239 - RNA, 19 nt, Artificial Sequence
  Description of Artificial Sequence: Synthetic oligonucleotide
cugcguguucgaggaacag

SEQ ID NO: 268240 - RNA, 19 nt, Artificial Sequence
  Description of Artificial Sequence: Synthetic oligonucleotide
acggugcucuccaggagcu

SEQ ID NO: 268241 - RNA, 19 nt, Artificial Sequence
  Description of Artificial Sequence: Synthetic oligonucleotide
acugucgagggagccguau

SEQ ID NO: 268242 - RNA, 19 nt, Artificial Sequence
  Description of Artificial Sequence: Synthetic oligonucleotide
acgcaguggcucugugacu

SEQ ID NO: 268243 - RNA, 19 nt, Artificial Sequence
  Description of Artificial Sequence: Synthetic oligonucleotide
ggguccuuaggcacgccgc

SEQ ID NO: 268244 - RNA, 19 nt, Artificial Sequence
  Description of Artificial Sequence: Synthetic oligonucleotide
ucgggacggugcucuccag

SEQ ID NO: 268245 - RNA, 19 nt, Artificial Sequence
  Description of Artificial Sequence: Synthetic oligonucleotide
ugccgaucaucugccgcac

SEQ ID NO: 268246 - RNA, 19 nt, Artificial Sequence
  Description of Artificial Sequence: Synthetic oligonucleotide
caucgaagagaggcuuguc

SEQ ID NO: 268247 - RNA, 19 nt, Artificial Sequence
  Description of Artificial Sequence: Synthetic oligonucleotide
ggauucgccagaaggucuc

SEQ ID NO: 268248 - RNA, 19 nt, Artificial Sequence
  Description of Artificial Sequence: Synthetic oligonucleotide
agcuuucguagaagauucu

SEQ ID NO: 268249 - RNA, 19 nt, Artificial Sequence
  Description of Artificial Sequence: Synthetic oligonucleotide
auucgagcccgagaacguu

SEQ ID NO: 268250 - RNA, 19 nt, Artificial Sequence
  Description of Artificial Sequence: Synthetic oligonucleotide
ccuuaugggcgagguauag

SEQ ID NO: 268251 - RNA, 19 nt, Artificial Sequence
  Description of Artificial Sequence: Synthetic oligonucleotide
ggagcggcggugaacggac

SEQ ID NO: 268252 - RNA, 19 nt, Artificial Sequence
  Description of Artificial Sequence: Synthetic oligonucleotide
  modified_base (10)..(10): a, c, u, g, unknown or other
ggaggcagcncgguugaaa

SEQ ID NO: 268253 - RNA, 19 nt, Artificial Sequence
  Description of Artificial Sequence: Synthetic oligonucleotide
cagaucugaacuguaguuu

SEQ ID NO: 268254 - RNA, 19 nt, Artificial Sequence
  Description of Artificial Sequence: Synthetic oligonucleotide
cggaacauaagggaaacaa

SEQ ID NO: 268255 - RNA, 19 nt, Artificial Sequence
  Description of Artificial Sequence: Synthetic oligonucleotide
gcucugaccaagguuucca

SEQ ID NO: 268256 - RNA, 19 nt, Artificial Sequence
  Description of Artificial Sequence: Synthetic oligonucleotide
caugccgcaaguagcggau

SEQ ID NO: 268257 - RNA, 19 nt, Artificial Sequence
  Description of Artificial Sequence: Synthetic oligonucleotide
cuccgaaagucuucucacu

SEQ ID NO: 268258 - RNA, 19 nt, Artificial Sequence
  Description of Artificial Sequence: Synthetic oligonucleotide
gugugcgaggaugguuccc

SEQ ID NO: 268259 - RNA, 19 nt, Artificial Sequence
  Description of Artificial Sequence: Synthetic oligonucleotide
ucaucgggacggugcucuc

SEQ ID NO: 268260 - RNA, 19 nt, Artificial Sequence
  Description of Artificial Sequence: Synthetic oligonucleotide
gugcauccggcgugcccag

SEQ ID NO: 268261 - RNA, 19 nt, Artificial Sequence
  Description of Artificial Sequence: Synthetic oligonucleotide
gugcgaggaugguucccac

SEQ ID NO: 268262 - RNA, 19 nt, Artificial Sequence
  Description of Artificial Sequence: Synthetic oligonucleotide
cguagaagauucuggaacu

SEQ ID NO: 268263 - RNA, 19 nt, Artificial Sequence
  Description of Artificial Sequence: Synthetic oligonucleotide
ggugaacggacagcuccug

SEQ ID NO: 268264 - RNA, 19 nt, Artificial Sequence
  Description of Artificial Sequence: Synthetic oligonucleotide
  modified_base (6)..(6): a, c, u, g, unknown or other
gcagcncgguugaaaggcc

SEQ ID NO: 268265 - RNA, 19 nt, Artificial Sequence
  Description of Artificial Sequence: Synthetic oligonucleotide
cuaugcacugguucugcuu

SEQ ID NO: 268266 - RNA, 19 nt, Artificial Sequence
  Description of Artificial Sequence: Synthetic oligonucleotide
cacgccgccaaaacagagu

SEQ ID NO: 268267 - RNA, 19 nt, Artificial Sequence
  Description of Artificial Sequence: Synthetic oligonucleotide
gccugcguguucgaggaac

SEQ ID NO: 268268 - RNA, 19 nt, Artificial Sequence
  Description of Artificial Sequence: Synthetic oligonucleotide
gagcccgagaacguuuggu

SEQ ID NO: 268269 - RNA, 19 nt, Artificial Sequence
  Description of Artificial Sequence: Synthetic oligonucleotide
cgcgaguucucuucuccgc

SEQ ID NO: 268270 - RNA, 19 nt, Artificial Sequence
  Description of Artificial Sequence: Synthetic oligonucleotide
cgcaguggcucugugacug

SEQ ID NO: 268271 - RNA, 19 nt, Artificial Sequence
  Description of Artificial Sequence: Synthetic oligonucleotide
guacggacacucagggucu

SEQ ID NO: 268272 - RNA, 19 nt, Artificial Sequence
  Description of Artificial Sequence: Synthetic oligonucleotide
cggagcuggauggagcucc

SEQ ID NO: 268273 - RNA, 19 nt, Artificial Sequence
  Description of Artificial Sequence: Synthetic oligonucleotide
ccguaucuuccugccaagg

SEQ ID NO: 268274 - RNA, 19 nt, Artificial Sequence
  Description of Artificial Sequence: Synthetic oligonucleotide
ccgcucagacaccaacccc

SEQ ID NO: 268275 - RNA, 19 nt, Artificial Sequence
  Description of Artificial Sequence: Synthetic oligonucleotide
gcgagguauaguuccugaa

SEQ ID NO: 268276 - RNA, 19 nt, Artificial Sequence
  Description of Artificial Sequence: Synthetic oligonucleotide
ucggcacccuccggggcug

SEQ ID NO: 268277 - RNA, 19 nt, Artificial Sequence
  Description of Artificial Sequence: Synthetic oligonucleotide
ggcuuccauucccaagguc

SEQ ID NO: 268278 - RNA, 19 nt, Artificial Sequence
  Description of Artificial Sequence: Synthetic oligonucleotide
cuuaugggcgagguauagu

SEQ ID NO: 268279 - RNA, 19 nt, Artificial Sequence
  Description of Artificial Sequence: Synthetic oligonucleotide
gcgugcaagagggugccac

SEQ ID NO: 268280 - RNA, 19 nt, Artificial Sequence
  Description of Artificial Sequence: Synthetic oligonucleotide
acgucucaucgugcuguug

SEQ ID NO: 268281 - RNA, 19 nt, Artificial Sequence
  Description of Artificial Sequence: Synthetic oligonucleotide
auuuggcgugcaagagggu

SEQ ID NO: 268282 - RNA, 19 nt, Artificial Sequence
  Description of Artificial Sequence: Synthetic oligonucleotide
gccggaucccuagcuuucg

SEQ ID NO: 268283 - RNA, 19 nt, Artificial Sequence
  Description of Artificial Sequence: Synthetic oligonucleotide
gcacgccgccaaaacagag

SEQ ID NO: 268284 - RNA, 19 nt, Artificial Sequence
  Description of Artificial Sequence: Synthetic oligonucleotide
uacggacacucagggucuc

SEQ ID NO: 268285 - RNA, 19 nt, Artificial Sequence
  Description of Artificial Sequence: Synthetic oligonucleotide
ccauccgcaccagauggug

SEQ ID NO: 268286 - RNA, 19 nt, Artificial Sequence
  Description of Artificial Sequence: Synthetic oligonucleotide
ccgaucaucugccgcacga

SEQ ID NO: 268287 - RNA, 19 nt, Artificial Sequence
  Description of Artificial Sequence: Synthetic oligonucleotide
cguaucuuccugccaagga

SEQ ID NO: 268288 - RNA, 19 nt, Artificial Sequence
  Description of Artificial Sequence: Synthetic oligonucleotide
gccgguagcgacugcucuc

SEQ ID NO: 268289 - RNA, 19 nt, Artificial Sequence
  Description of Artificial Sequence: Synthetic oligonucleotide
acguuuggucugugauauu

SEQ ID NO: 268290 - RNA, 19 nt, Artificial Sequence
  Description of Artificial Sequence: Synthetic oligonucleotide
gcgcuguucugccgguagc

SEQ ID NO: 268291 - RNA, 19 nt, Artificial Sequence
  Description of Artificial Sequence: Synthetic oligonucleotide
aucgugcuguuggggcucu

SEQ ID NO: 268292 - RNA, 19 nt, Artificial Sequence
  Description of Artificial Sequence: Synthetic oligonucleotide
cgagagugccuguugccuc

SEQ ID NO: 268293 - RNA, 19 nt, Artificial Sequence
  Description of Artificial Sequence: Synthetic oligonucleotide
cgagggagccguaucccug

SEQ ID NO: 268294 - RNA, 19 nt, Artificial Sequence
  Description of Artificial Sequence: Synthetic oligonucleotide
guggaugaccugccugcgu

SEQ ID NO: 268295 - RNA, 19 nt, Artificial Sequence
  Description of Artificial Sequence: Synthetic oligonucleotide
gcccgagaacguuuggucu

SEQ ID NO: 268296 - RNA, 19 nt, Artificial Sequence
  Description of Artificial Sequence: Synthetic oligonucleotide
gcauccggcgugcccagga

SEQ ID NO: 268297 - RNA, 19 nt, Artificial Sequence
  Description of Artificial Sequence: Synthetic oligonucleotide
aggccaaagcccacaugua

SEQ ID NO: 268298 - RNA, 19 nt, Artificial Sequence
  Description of Artificial Sequence: Synthetic oligonucleotide
ccauugcguccucauuuuc

SEQ ID NO: 268299 - RNA, 19 nt, Artificial Sequence
  Description of Artificial Sequence: Synthetic oligonucleotide
gagcuggauggagcuccac

SEQ ID NO: 268300 - RNA, 19 nt, Artificial Sequence
  Description of Artificial Sequence: Synthetic oligonucleotide
ccugcguguucgaggaaca

SEQ ID NO: 268301 - RNA, 19 nt, Artificial Sequence
  Description of Artificial Sequence: Synthetic oligonucleotide
cgucucucgucucauccuc

SEQ ID NO: 268302 - RNA, 19 nt, Artificial Sequence
  Description of Artificial Sequence: Synthetic oligonucleotide
cccuacuccugcuagcugu

SEQ ID NO: 268303 - RNA, 19 nt, Artificial Sequence
  Description of Artificial Sequence: Synthetic oligonucleotide
cuugacacugucggccagu

SEQ ID NO: 268304 - RNA, 19 nt, Artificial Sequence
  Description of Artificial Sequence: Synthetic oligonucleotide
ccaucucccgcuggcguag

SEQ ID NO: 268305 - RNA, 19 nt, Artificial Sequence
  Description of Artificial Sequence: Synthetic oligonucleotide
ccaagcgucccugcccuac

SEQ ID NO: 268306 - RNA, 19 nt, Artificial Sequence
  Description of Artificial Sequence: Synthetic oligonucleotide
caucucccgcuggcguagc

SEQ ID NO: 268307 - RNA, 19 nt, Artificial Sequence
  Description of Artificial Sequence: Synthetic oligonucleotide
gcguguucgaggaacaguu

SEQ ID NO: 268308 - RNA, 19 nt, Artificial Sequence
  Description of Artificial Sequence: Synthetic oligonucleotide
ugcggucagucagcaucau

SEQ ID NO: 268309 - RNA, 19 nt, Artificial Sequence
  Description of Artificial Sequence: Synthetic oligonucleotide
gggauucgccagaaggucu

SEQ ID NO: 268310 - RNA, 19 nt, Artificial Sequence
  Description of Artificial Sequence: Synthetic oligonucleotide
gaacuacuaugcacugguu

SEQ ID NO: 268311 - RNA, 19 nt, Artificial Sequence
  Description of Artificial Sequence: Synthetic oligonucleotide
ccacuuggcugggauucgc

SEQ ID NO: 268312 - RNA, 19 nt, Artificial Sequence
  Description of Artificial Sequence: Synthetic oligonucleotide
gggugccacuuucuuucuc

SEQ ID NO: 268313 - RNA, 19 nt, Artificial Sequence
  Description of Artificial Sequence: Synthetic oligonucleotide
gcggcggugaacggacagc

SEQ ID NO: 268314 - RNA, 19 nt, Artificial Sequence
  Description of Artificial Sequence: Synthetic oligonucleotide
caagugugcgaggaugguu

SEQ ID NO: 268315 - RNA, 19 nt, Artificial Sequence
  Description of Artificial Sequence: Synthetic oligonucleotide
ggcacgccgccaaaacaga

SEQ ID NO: 268316 - RNA, 19 nt, Artificial Sequence
  Description of Artificial Sequence: Synthetic oligonucleotide
ggccggaucccuagcuuuc

SEQ ID NO: 268317 - RNA, 19 nt, Artificial Sequence
  Description of Artificial Sequence: Synthetic oligonucleotide
ccacgcaguggcucuguga

SEQ ID NO: 268318 - RNA, 19 nt, Artificial Sequence
  Description of Artificial Sequence: Synthetic oligonucleotide
agagugccuguugccucuu

SEQ ID NO: 268319 - RNA, 19 nt, Artificial Sequence
  Description of Artificial Sequence: Synthetic oligonucleotide
cucuuuggagggcgcgagu

SEQ ID NO: 268320 - RNA, 19 nt, Artificial Sequence
  Description of Artificial Sequence: Synthetic oligonucleotide
ccguucaaucagcaaguua

SEQ ID NO: 268321 - RNA, 19 nt, Artificial Sequence
  Description of Artificial Sequence: Synthetic oligonucleotide
ggccuuagcucggugcucu

SEQ ID NO: 268322 - RNA, 19 nt, Artificial Sequence
  Description of Artificial Sequence: Synthetic oligonucleotide
caagcgucccugcccuacu

SEQ ID NO: 268323 - RNA, 19 nt, Artificial Sequence
  Description of Artificial Sequence: Synthetic oligonucleotide
cgagcccgagaacguuugg

SEQ ID NO: 268324 - RNA, 19 nt, Artificial Sequence
  Description of Artificial Sequence: Synthetic oligonucleotide
cucgaaccacggcaguguu

SEQ ID NO: 268325 - RNA, 19 nt, Artificial Sequence
  Description of Artificial Sequence: Synthetic oligonucleotide
gcuucgcuccugagccaag

SEQ ID NO: 268326 - RNA, 19 nt, Artificial Sequence
  Description of Artificial Sequence: Synthetic oligonucleotide
gccuggcgacucuucggca

SEQ ID NO: 268327 - RNA, 19 nt, Artificial Sequence
  Description of Artificial Sequence: Synthetic oligonucleotide
gagcggcggugaacggaca

SEQ ID NO: 268328 - RNA, 19 nt, Artificial Sequence
  Description of Artificial Sequence: Synthetic oligonucleotide
ccucacguugagggcggag

SEQ ID NO: 268329 - RNA, 19 nt, Artificial Sequence
  Description of Artificial Sequence: Synthetic oligonucleotide
gggcgcgaguucucuucuc

SEQ ID NO: 268330 - RNA, 19 nt, Artificial Sequence
  Description of Artificial Sequence: Synthetic oligonucleotide
cugcugccgcacgucucuc

SEQ ID NO: 268331 - RNA, 19 nt, Artificial Sequence
  Description of Artificial Sequence: Synthetic oligonucleotide
ccccaaaucgagagugccu

SEQ ID NO: 268332 - RNA, 19 nt, Artificial Sequence
  Description of Artificial Sequence: Synthetic oligonucleotide
gcgucccugcccuacuccu

SEQ ID NO: 268333 - RNA, 19 nt, Artificial Sequence
  Description of Artificial Sequence: Synthetic oligonucleotide
ggcggugaacggacagcuc

SEQ ID NO: 268334 - RNA, 19 nt, Artificial Sequence
  Description of Artificial Sequence: Synthetic oligonucleotide
  modified_base (3)..(3): a, c, u, g, unknown or other
gcncgguugaaaggccaua

SEQ ID NO: 268335 - RNA, 19 nt, Artificial Sequence
  Description of Artificial Sequence: Synthetic oligonucleotide
gagcgcuguucugccggua

SEQ ID NO: 268336 - RNA, 19 nt, Artificial Sequence
  Description of Artificial Sequence: Synthetic oligonucleotide
gggcggccggaucccuagc

SEQ ID NO: 268337 - RNA, 19 nt, Artificial Sequence
  Description of Artificial Sequence: Synthetic oligonucleotide
gggccuuagcucggugcuc

SEQ ID NO: 268338 - RNA, 19 nt, Artificial Sequence
  Description of Artificial Sequence: Synthetic oligonucleotide
gccgcacgucucucgucuc

SEQ ID NO: 268339 - RNA, 19 nt, Artificial Sequence
  Description of Artificial Sequence: Synthetic oligonucleotide
ucgugcuguuggggcucuc

SEQ ID NO: 268340 - RNA, 19 nt, Artificial Sequence
  Description of Artificial Sequence: Synthetic oligonucleotide
gccguaucccugagucauc

SEQ ID NO: 268341 - RNA, 19 nt, Artificial Sequence
  Description of Artificial Sequence: Synthetic oligonucleotide
gggagccguaucccugagu

SEQ ID NO: 268342 - RNA, 19 nt, Artificial Sequence
  Description of Artificial Sequence: Synthetic oligonucleotide
ccgcacgucucucgucuca

SEQ ID NO: 268343 - RNA, 19 nt, Artificial Sequence
  Description of Artificial Sequence: Synthetic oligonucleotide
cacugucgagggagccgua

SEQ ID NO: 268344 - RNA, 19 nt, Artificial Sequence
  Description of Artificial Sequence: Synthetic oligonucleotide
ccggcgugcccaggaggcg

SEQ ID NO: 268345 - RNA, 19 nt, Artificial Sequence
  Description of Artificial Sequence: Synthetic oligonucleotide
ccguaucccugagucaucu

SEQ ID NO: 268346 - RNA, 19 nt, Artificial Sequence
  Description of Artificial Sequence: Synthetic oligonucleotide
cggaucccuagcuuucgua

SEQ ID NO: 268347 - RNA, 19 nt, Artificial Sequence
  Description of Artificial Sequence: Synthetic oligonucleotide
  modified_base (15)..(15): a, c, u, g, unknown or other
gcgaaggaggcagcncggu

SEQ ID NO: 268348 - RNA, 19 nt, Artificial Sequence
  Description of Artificial Sequence: Synthetic oligonucleotide
cgagaacguuuggucugug

SEQ ID NO: 268349 - RNA, 19 nt, Artificial Sequence
  Description of Artificial Sequence: Synthetic oligonucleotide
ccuacuccugcuagcuguu

SEQ ID NO: 268350 - RNA, 19 nt, Artificial Sequence
  Description of Artificial Sequence: Synthetic oligonucleotide
cccauccgcaccagauggu

SEQ ID NO: 268351 - RNA, 19 nt, Artificial Sequence
  Description of Artificial Sequence: Synthetic oligonucleotide
ggcgugcaagagggugcca

SEQ ID NO: 268352 - RNA, 19 nt, Artificial Sequence
  Description of Artificial Sequence: Synthetic oligonucleotide
ccgagaacguuuggucugu

SEQ ID NO: 268353 - RNA, 19 nt, Artificial Sequence
  Description of Artificial Sequence: Synthetic oligonucleotide
gcgugcccaggaggcggcc

SEQ ID NO: 268354 - RNA, 19 nt, Artificial Sequence
  Description of Artificial Sequence: Synthetic oligonucleotide
cugcacccaugaguggguu

SEQ ID NO: 268355 - RNA, 19 nt, Artificial Sequence
  Description of Artificial Sequence: Synthetic oligonucleotide
gcggccggaucccuagcuu

SEQ ID NO: 268356 - RNA, 19 nt, Artificial Sequence
  Description of Artificial Sequence: Synthetic oligonucleotide
cgccgccaaaacagaguaa

SEQ ID NO: 268357 - RNA, 19 nt, Artificial Sequence
  Description of Artificial Sequence: Synthetic oligonucleotide
cggagauugugaaggccuu

SEQ ID NO: 268358 - RNA, 19 nt, Artificial Sequence
  Description of Artificial Sequence: Synthetic oligonucleotide
gccaagcgucccugcccua

SEQ ID NO: 268359 - RNA, 19 nt, Artificial Sequence
  Description of Artificial Sequence: Synthetic oligonucleotide
ccggaucccuagcuuucgu

SEQ ID NO: 268360 - RNA, 19 nt, Artificial Sequence
  Description of Artificial Sequence: Synthetic oligonucleotide
cguguucgaggaacaguuu

SEQ ID NO: 268361 - RNA, 19 nt, Artificial Sequence
  Description of Artificial Sequence: Synthetic oligonucleotide
ggugggcggccggaucccu

SEQ ID NO: 268362 - RNA, 19 nt, Artificial Sequence
  Description of Artificial Sequence: Synthetic oligonucleotide
gccucacguugagggcgga

SEQ ID NO: 268363 - RNA, 19 nt, Artificial Sequence
  Description of Artificial Sequence: Synthetic oligonucleotide
gccuuagcucggugcucuu

SEQ ID NO: 268364 - RNA, 19 nt, Artificial Sequence
  Description of Artificial Sequence: Synthetic oligonucleotide
ccgcacgaaccaggcaguu

SEQ ID NO: 268365 - RNA, 19 nt, Artificial Sequence
  Description of Artificial Sequence: Synthetic oligonucleotide
cgccuccauuuggcgugca

SEQ ID NO: 268366 - RNA, 19 nt, Artificial Sequence
  Description of Artificial Sequence: Synthetic oligonucleotide
auuuuauauauauauauac

SEQ ID NO: 268367 - RNA, 19 nt, Artificial Sequence
  Description of Artificial Sequence: Synthetic oligonucleotide
aauacaccgauacagguac

SEQ ID NO: 268368 - RNA, 19 nt, Artificial Sequence
  Description of Artificial Sequence: Synthetic oligonucleotide
uaaguuaugauuuagguaa

SEQ ID NO: 268369 - RNA, 19 nt, Artificial Sequence
  Description of Artificial Sequence: Synthetic oligonucleotide
uauucguuaauucaaaaca

SEQ ID NO: 268370 - RNA, 19 nt, Artificial Sequence
  Description of Artificial Sequence: Synthetic oligonucleotide
aguguaguuacauacauug

SEQ ID NO: 268371 - RNA, 19 nt, Artificial Sequence
  Description of Artificial Sequence: Synthetic oligonucleotide
uauauauauauauacuucu

SEQ ID NO: 268372 - RNA, 19 nt, Artificial Sequence
  Description of Artificial Sequence: Synthetic oligonucleotide
aagaucgagguacaauucc

SEQ ID NO: 268373 - RNA, 19 nt, Artificial Sequence
  Description of Artificial Sequence: Synthetic oligonucleotide
uuuuauauauauauauacu

SEQ ID NO: 268374 - RNA, 19 nt, Artificial Sequence
  Description of Artificial Sequence: Synthetic oligonucleotide
auauuuuauauauauauau

SEQ ID NO: 268375 - RNA, 19 nt, Artificial Sequence
  Description of Artificial Sequence: Synthetic oligonucleotide
uuuauauauauauauacuu

SEQ ID NO: 268376 - RNA, 19 nt, Artificial Sequence
  Description of Artificial Sequence: Synthetic oligonucleotide
uuauauauauauauacuuc

SEQ ID NO: 268377 - RNA, 19 nt, Artificial Sequence
  Description of Artificial Sequence: Synthetic oligonucleotide
uuuaagauugccuaccgac

SEQ ID NO: 268378 - RNA, 19 nt, Artificial Sequence
  Description of Artificial Sequence: Synthetic oligonucleotide
uaugucaggaguaaaacuc

SEQ ID NO: 268379 - RNA, 19 nt, Artificial Sequence
  Description of Artificial Sequence: Synthetic oligonucleotide
uucgcaaauagaaaaggcc

SEQ ID NO: 268380 - RNA, 19 nt, Artificial Sequence
  Description of Artificial Sequence: Synthetic oligonucleotide
aaauagaaaaggcccacug

SEQ ID NO: 268381 - RNA, 19 nt, Artificial Sequence
  Description of Artificial Sequence: Synthetic oligonucleotide
auuaaguuaugauuuaggu

SEQ ID NO: 268382 - RNA, 19 nt, Artificial Sequence
  Description of Artificial Sequence: Synthetic oligonucleotide
ucaggaguaaaacucaaga

SEQ ID NO: 268383 - RNA, 19 nt, Artificial Sequence
  Description of Artificial Sequence: Synthetic oligonucleotide
uauauauauauacuucuuc

SEQ ID NO: 268384 - RNA, 19 nt, Artificial Sequence
  Description of Artificial Sequence: Synthetic oligonucleotide
uccuacaaggaucaugccg

SEQ ID NO: 268385 - RNA, 19 nt, Artificial Sequence
  Description of Artificial Sequence: Synthetic oligonucleotide
guacucuuaauucacaccc

SEQ ID NO: 268386 - RNA, 19 nt, Artificial Sequence
  Description of Artificial Sequence: Synthetic oligonucleotide
ugaaaugcaugccagguac

SEQ ID NO: 268387 - RNA, 19 nt, Artificial Sequence
  Description of Artificial Sequence: Synthetic oligonucleotide
uguaagauaucaguauacg

SEQ ID NO: 268388 - RNA, 19 nt, Artificial Sequence
  Description of Artificial Sequence: Synthetic oligonucleotide
ucauggacgaccgagauca

SEQ ID NO: 268389 - RNA, 19 nt, Artificial Sequence
  Description of Artificial Sequence: Synthetic oligonucleotide
aggaguaaaacucaagagu

SEQ ID NO: 268390 - RNA, 19 nt, Artificial Sequence
  Description of Artificial Sequence: Synthetic oligonucleotide
aguucuuagcacuucggac

SEQ ID NO: 268391 - RNA, 19 nt, Artificial Sequence
  Description of Artificial Sequence: Synthetic oligonucleotide
uguuaugugucguuuacca

SEQ ID NO: 268392 - RNA, 19 nt, Artificial Sequence
  Description of Artificial Sequence: Synthetic oligonucleotide
uauuuuauauauauauaua

SEQ ID NO: 268393 - RNA, 19 nt, Artificial Sequence
  Description of Artificial Sequence: Synthetic oligonucleotide
uuauugguguccaacgcag

SEQ ID NO: 268394 - RNA, 19 nt, Artificial Sequence
  Description of Artificial Sequence: Synthetic oligonucleotide
agauaauagcaguagggag

SEQ ID NO: 268395 - RNA, 19 nt, Artificial Sequence
  Description of Artificial Sequence: Synthetic oligonucleotide
uuucgcaaauagaaaaggc

SEQ ID NO: 268396 - RNA, 19 nt, Artificial Sequence
  Description of Artificial Sequence: Synthetic oligonucleotide
uuuauugguguccaacgca

SEQ ID NO: 268397 - RNA, 19 nt, Artificial Sequence
  Description of Artificial Sequence: Synthetic oligonucleotide
guuaauuucgcaaauagaa

SEQ ID NO: 268398 - RNA, 19 nt, Artificial Sequence
  Description of Artificial Sequence: Synthetic oligonucleotide
uucguucuuagaaaacuag

SEQ ID NO: 268399 - RNA, 19 nt, Artificial Sequence
  Description of Artificial Sequence: Synthetic oligonucleotide
ugaaaaguauguuuuccca

SEQ ID NO: 268400 - RNA, 19 nt, Artificial Sequence
  Description of Artificial Sequence: Synthetic oligonucleotide
aagauaauagcaguaggga

SEQ ID NO: 268401 - RNA, 19 nt, Artificial Sequence
  Description of Artificial Sequence: Synthetic oligonucleotide
uuaauuucgcaaauagaaa

SEQ ID NO: 268402 - RNA, 19 nt, Artificial Sequence
  Description of Artificial Sequence: Synthetic oligonucleotide
uucaaaguacugaaauggc

SEQ ID NO: 268403 - RNA, 19 nt, Artificial Sequence
  Description of Artificial Sequence: Synthetic oligonucleotide
cuauucguuaauucaaaac

SEQ ID NO: 268404 - RNA, 19 nt, Artificial Sequence
  Description of Artificial Sequence: Synthetic oligonucleotide
uaagauugccuaccgacca

SEQ ID NO: 268405 - RNA, 19 nt, Artificial Sequence
  Description of Artificial Sequence: Synthetic oligonucleotide
aauagcaguagggaggugu

SEQ ID NO: 268406 - RNA, 19 nt, Artificial Sequence
  Description of Artificial Sequence: Synthetic oligonucleotide
cacacacacacacacaugc

SEQ ID NO: 268407 - RNA, 19 nt, Artificial Sequence
  Description of Artificial Sequence: Synthetic oligonucleotide
aaauguguacagugcauga

SEQ ID NO: 268408 - RNA, 19 nt, Artificial Sequence
  Description of Artificial Sequence: Synthetic oligonucleotide
ucaguauacgcucuggaau

SEQ ID NO: 268409 - RNA, 19 nt, Artificial Sequence
  Description of Artificial Sequence: Synthetic oligonucleotide
aguauggauaacuaguuua

SEQ ID NO: 268410 - RNA, 19 nt, Artificial Sequence
  Description of Artificial Sequence: Synthetic oligonucleotide
auuucgcaaauagaaaagg

SEQ ID NO: 268411 - RNA, 19 nt, Artificial Sequence
  Description of Artificial Sequence: Synthetic oligonucleotide
ugugucguuuaccaaccgg

SEQ ID NO: 268412 - RNA, 19 nt, Artificial Sequence
  Description of Artificial Sequence: Synthetic oligonucleotide
uuuagcuauaaaugcaaaa

SEQ ID NO: 268413 - RNA, 19 nt, Artificial Sequence
  Description of Artificial Sequence: Synthetic oligonucleotide
auagaugaaauaauuucag

SEQ ID NO: 268414 - RNA, 19 nt, Artificial Sequence
  Description of Artificial Sequence: Synthetic oligonucleotide
gauuccaacgacgcuaagg

SEQ ID NO: 268415 - RNA, 19 nt, Artificial Sequence
  Description of Artificial Sequence: Synthetic oligonucleotide
aguaguuaaaacugaacua

SEQ ID NO: 268416 - RNA, 19 nt, Artificial Sequence
  Description of Artificial Sequence: Synthetic oligonucleotide
gaguaguuaaaacugaacu

SEQ ID NO: 268417 - RNA, 19 nt, Artificial Sequence
  Description of Artificial Sequence: Synthetic oligonucleotide
gugagcguuagcaugaccg

SEQ ID NO: 268418 - RNA, 19 nt, Artificial Sequence
  Description of Artificial Sequence: Synthetic oligonucleotide
uuaacuugccuaccaaggu

SEQ ID NO: 268419 - RNA, 19 nt, Artificial Sequence
  Description of Artificial Sequence: Synthetic oligonucleotide
uaugauauggaagcgcaca

SEQ ID NO: 268420 - RNA, 19 nt, Artificial Sequence
  Description of Artificial Sequence: Synthetic oligonucleotide
uugccuaccgaccauacaa

SEQ ID NO: 268421 - RNA, 19 nt, Artificial Sequence
  Description of Artificial Sequence: Synthetic oligonucleotide
ucggagaacaguugaaaug

SEQ ID NO: 268422 - RNA, 19 nt, Artificial Sequence
  Description of Artificial Sequence: Synthetic oligonucleotide
ugaguaguuaaaacugaac

SEQ ID NO: 268423 - RNA, 19 nt, Artificial Sequence
  Description of Artificial Sequence: Synthetic oligonucleotide
aauucacaccccuauucgu

SEQ ID NO: 268424 - RNA, 19 nt, Artificial Sequence
  Description of Artificial Sequence: Synthetic oligonucleotide
ugauuaaguuaugauuuag

SEQ ID NO: 268425 - RNA, 19 nt, Artificial Sequence
  Description of Artificial Sequence: Synthetic oligonucleotide
acguacucuuaauucacac

SEQ ID NO: 268426 - RNA, 19 nt, Artificial Sequence
  Description of Artificial Sequence: Synthetic oligonucleotide
aaacguguccgguagugga

SEQ ID NO: 268427 - RNA, 19 nt, Artificial Sequence
  Description of Artificial Sequence: Synthetic oligonucleotide
caggaguaaaacucaagag

SEQ ID NO: 268428 - RNA, 19 nt, Artificial Sequence
  Description of Artificial Sequence: Synthetic oligonucleotide
aauaggugagcguuagcau

SEQ ID NO: 268429 - RNA, 19 nt, Artificial Sequence
  Description of Artificial Sequence: Synthetic oligonucleotide
cuggauuacacagaggaac

SEQ ID NO: 268430 - RNA, 19 nt, Artificial Sequence
  Description of Artificial Sequence: Synthetic oligonucleotide
acugcacccgguuaaaaug

SEQ ID NO: 268431 - RNA, 19 nt, Artificial Sequence
  Description of Artificial Sequence: Synthetic oligonucleotide
acaaccguaugucaggagu

SEQ ID NO: 268432 - RNA, 19 nt, Artificial Sequence
  Description of Artificial Sequence: Synthetic oligonucleotide
cuuaugauauggaagcgca

SEQ ID NO: 268433 - RNA, 19 nt, Artificial Sequence
  Description of Artificial Sequence: Synthetic oligonucleotide
uuguagagcuguuaugugu

SEQ ID NO: 268434 - RNA, 19 nt, Artificial Sequence
  Description of Artificial Sequence: Synthetic oligonucleotide
uacagcgugccaacuaugc

SEQ ID NO: 268435 - RNA, 19 nt, Artificial Sequence
  Description of Artificial Sequence: Synthetic oligonucleotide
ucguucuuagaaaacuagu

SEQ ID NO: 268436 - RNA, 19 nt, Artificial Sequence
  Description of Artificial Sequence: Synthetic oligonucleotide
uaucaguauacgcucugga

SEQ ID NO: 268437 - RNA, 19 nt, Artificial Sequence
  Description of Artificial Sequence: Synthetic oligonucleotide
auaaauaggugagcguuag

SEQ ID NO: 268438 - RNA, 19 nt, Artificial Sequence
  Description of Artificial Sequence: Synthetic oligonucleotide
aaaacguguccgguagugg

SEQ ID NO: 268439 - RNA, 19 nt, Artificial Sequence
  Description of Artificial Sequence: Synthetic oligonucleotide
accggcuauauuuaacuug

SEQ ID NO: 268440 - RNA, 19 nt, Artificial Sequence
  Description of Artificial Sequence: Synthetic oligonucleotide
uaauacaccgauacaggua

SEQ ID NO: 268441 - RNA, 19 nt, Artificial Sequence
  Description of Artificial Sequence: Synthetic oligonucleotide
gauauuuuauauauauaua

SEQ ID NO: 268442 - RNA, 19 nt, Artificial Sequence
  Description of Artificial Sequence: Synthetic oligonucleotide
ucguuuaccaaccggcuau

SEQ ID NO: 268443 - RNA, 19 nt, Artificial Sequence
  Description of Artificial Sequence: Synthetic oligonucleotide
cacuguauagauagucccc

SEQ ID NO: 268444 - RNA, 19 nt, Artificial Sequence
  Description of Artificial Sequence: Synthetic oligonucleotide
auaauagacuuguauuuua

SEQ ID NO: 268445 - RNA, 19 nt, Artificial Sequence
  Description of Artificial Sequence: Synthetic oligonucleotide
uacucguucauggacgacc

SEQ ID NO: 268446 - RNA, 19 nt, Artificial Sequence
  Description of Artificial Sequence: Synthetic oligonucleotide
gauacaccaucucugcuga

SEQ ID NO: 268447 - RNA, 19 nt, Artificial Sequence
  Description of Artificial Sequence: Synthetic oligonucleotide
cauugugugauaccaccag

SEQ ID NO: 268448 - RNA, 19 nt, Artificial Sequence
  Description of Artificial Sequence: Synthetic oligonucleotide
cugcacccgguuaaaaugg

SEQ ID NO: 268449 - RNA, 19 nt, Artificial Sequence
  Description of Artificial Sequence: Synthetic oligonucleotide
aacgacgcuaaggagccag

SEQ ID NO: 268450 - RNA, 19 nt, Artificial Sequence
  Description of Artificial Sequence: Synthetic oligonucleotide
aaaaccuacagaagguaau

SEQ ID NO: 268451 - RNA, 19 nt, Artificial Sequence
  Description of Artificial Sequence: Synthetic oligonucleotide
cugaacuaccaaauagaug

SEQ ID NO: 268452 - RNA, 19 nt, Artificial Sequence
  Description of Artificial Sequence: Synthetic oligonucleotide
auaauagcaguagggaggu

SEQ ID NO: 268453 - RNA, 19 nt, Artificial Sequence
  Description of Artificial Sequence: Synthetic oligonucleotide
accccuauucguuaauuca

SEQ ID NO: 268454 - RNA, 19 nt, Artificial Sequence
  Description of Artificial Sequence: Synthetic oligonucleotide
gguuaagucaagguaacug

SEQ ID NO: 268455 - RNA, 19 nt, Artificial Sequence
  Description of Artificial Sequence: Synthetic oligonucleotide
acuaccaaauagaugaaau

SEQ ID NO: 268456 - RNA, 19 nt, Artificial Sequence
  Description of Artificial Sequence: Synthetic oligonucleotide
auuuaagauugccuaccga

SEQ ID NO: 268457 - RNA, 19 nt, Artificial Sequence
  Description of Artificial Sequence: Synthetic oligonucleotide
uuaugauauggaagcgcac

SEQ ID NO: 268458 - RNA, 19 nt, Artificial Sequence
  Description of Artificial Sequence: Synthetic oligonucleotide
auugugugauaccaccaga

SEQ ID NO: 268459 - RNA, 19 nt, Artificial Sequence
  Description of Artificial Sequence: Synthetic oligonucleotide
auaucaguauacgcucugg

SEQ ID NO: 268460 - RNA, 19 nt, Artificial Sequence
  Description of Artificial Sequence: Synthetic oligonucleotide
ugcucacaaucugugauug

SEQ ID NO: 268461 - RNA, 19 nt, Artificial Sequence
  Description of Artificial Sequence: Synthetic oligonucleotide
ugucguuuaccaaccggcu

SEQ ID NO: 268462 - RNA, 19 nt, Artificial Sequence
  Description of Artificial Sequence: Synthetic oligonucleotide
uugccuaccaagguggacu

SEQ ID NO: 268463 - RNA, 19 nt, Artificial Sequence
  Description of Artificial Sequence: Synthetic oligonucleotide
aucaguauacgcucuggaa

SEQ ID NO: 268464 - RNA, 19 nt, Artificial Sequence
  Description of Artificial Sequence: Synthetic oligonucleotide
uacaccgauacagguacag

SEQ ID NO: 268465 - RNA, 19 nt, Artificial Sequence
  Description of Artificial Sequence: Synthetic oligonucleotide
acacacacacacaugcuuc

SEQ ID NO: 268466 - RNA, 19 nt, Artificial Sequence
  Description of Artificial Sequence: Synthetic oligonucleotide
ucggggaauacucuuugau

SEQ ID NO: 268467 - RNA, 19 nt, Artificial Sequence
  Description of Artificial Sequence: Synthetic oligonucleotide
gugucguuuaccaaccggc

SEQ ID NO: 268468 - RNA, 19 nt, Artificial Sequence
  Description of Artificial Sequence: Synthetic oligonucleotide
uugauacaccaucucugcu

SEQ ID NO: 268469 - RNA, 19 nt, Artificial Sequence
  Description of Artificial Sequence: Synthetic oligonucleotide
guauagaguagaauacuuc

SEQ ID NO: 268470 - RNA, 19 nt, Artificial Sequence
  Description of Artificial Sequence: Synthetic oligonucleotide
cauagagacauuugcuaga

SEQ ID NO: 268471 - RNA, 19 nt, Artificial Sequence
  Description of Artificial Sequence: Synthetic oligonucleotide
ggggaauacucuuugauaa

SEQ ID NO: 268472 - RNA, 19 nt, Artificial Sequence
  Description of Artificial Sequence: Synthetic oligonucleotide
aaaccuacagaagguaauu

SEQ ID NO: 268473 - RNA, 19 nt, Artificial Sequence
  Description of Artificial Sequence: Synthetic oligonucleotide
acgaccgagaucaucacug

SEQ ID NO: 268474 - RNA, 19 nt, Artificial Sequence
  Description of Artificial Sequence: Synthetic oligonucleotide
ccggcuauauuuaacuugc

SEQ ID NO: 268475 - RNA, 19 nt, Artificial Sequence
  Description of Artificial Sequence: Synthetic oligonucleotide
guaagaucgagguacaauu

SEQ ID NO: 268476 - RNA, 19 nt, Artificial Sequence
  Description of Artificial Sequence: Synthetic oligonucleotide
gugcauuuugauuaaguua

SEQ ID NO: 268477 - RNA, 19 nt, Artificial Sequence
  Description of Artificial Sequence: Synthetic oligonucleotide
auuucugaaccaaacccca

SEQ ID NO: 268478 - RNA, 19 nt, Artificial Sequence
  Description of Artificial Sequence: Synthetic oligonucleotide
uacgcucuggaauaauaau

SEQ ID NO: 268479 - RNA, 19 nt, Artificial Sequence
  Description of Artificial Sequence: Synthetic oligonucleotide
aacuaccaaauagaugaaa

SEQ ID NO: 268480 - RNA, 19 nt, Artificial Sequence
  Description of Artificial Sequence: Synthetic oligonucleotide
acucaauagguuaagucaa

SEQ ID NO: 268481 - RNA, 19 nt, Artificial Sequence
  Description of Artificial Sequence: Synthetic oligonucleotide
ucuuuccuauacccauuug

SEQ ID NO: 268482 - RNA, 19 nt, Artificial Sequence
  Description of Artificial Sequence: Synthetic oligonucleotide
ggagguguuuauuuauggc

SEQ ID NO: 268483 - RNA, 19 nt, Artificial Sequence
  Description of Artificial Sequence: Synthetic oligonucleotide
caugccguuaauuucgcaa

SEQ ID NO: 268484 - RNA, 19 nt, Artificial Sequence
  Description of Artificial Sequence: Synthetic oligonucleotide
agcaaugagcuucauuauu

SEQ ID NO: 268485 - RNA, 19 nt, Artificial Sequence
  Description of Artificial Sequence: Synthetic oligonucleotide
agcuuaugauauggaagcg

SEQ ID NO: 268486 - RNA, 19 nt, Artificial Sequence
  Description of Artificial Sequence: Synthetic oligonucleotide
cuuaggagguacucguuca

SEQ ID NO: 268487 - RNA, 19 nt, Artificial Sequence
  Description of Artificial Sequence: Synthetic oligonucleotide
gaguagaauacuuccccaa

SEQ ID NO: 268488 - RNA, 19 nt, Artificial Sequence
  Description of Artificial Sequence: Synthetic oligonucleotide
aguauagaguagaauacuu

SEQ ID NO: 268489 - RNA, 19 nt, Artificial Sequence
  Description of Artificial Sequence: Synthetic oligonucleotide
guacugggaguguaguuac

SEQ ID NO: 268490 - RNA, 19 nt, Artificial Sequence
  Description of Artificial Sequence: Synthetic oligonucleotide
uuggccauugugugauacc

SEQ ID NO: 268491 - RNA, 19 nt, Artificial Sequence
  Description of Artificial Sequence: Synthetic oligonucleotide
acugaacuaccaaauagau

SEQ ID NO: 268492 - RNA, 19 nt, Artificial Sequence
  Description of Artificial Sequence: Synthetic oligonucleotide
caaauccagugguaccacc

SEQ ID NO: 268493 - RNA, 19 nt, Artificial Sequence
  Description of Artificial Sequence: Synthetic oligonucleotide
cacgcgcacacacacacac

SEQ ID NO: 268494 - RNA, 19 nt, Artificial Sequence
  Description of Artificial Sequence: Synthetic oligonucleotide
auauauauauauacuucuu

SEQ ID NO: 268495 - RNA, 19 nt, Artificial Sequence
  Description of Artificial Sequence: Synthetic oligonucleotide
ccguuaauuucgcaaauag

SEQ ID NO: 268496 - RNA, 19 nt, Artificial Sequence
  Description of Artificial Sequence: Synthetic oligonucleotide
ccacuguauagauaguccc

SEQ ID NO: 268497 - RNA, 19 nt, Artificial Sequence
  Description of Artificial Sequence: Synthetic oligonucleotide
guaauacaccgauacaggu

SEQ ID NO: 268498 - RNA, 19 nt, Artificial Sequence
  Description of Artificial Sequence: Synthetic oligonucleotide
aaccggcuauauuuaacuu

SEQ ID NO: 268499 - RNA, 19 nt, Artificial Sequence
  Description of Artificial Sequence: Synthetic oligonucleotide
ucggacaguuccucauucc

SEQ ID NO: 268500 - RNA, 19 nt, Artificial Sequence
  Description of Artificial Sequence: Synthetic oligonucleotide
aagauugccuaccgaccau

SEQ ID NO: 268501 - RNA, 19 nt, Artificial Sequence
  Description of Artificial Sequence: Synthetic oligonucleotide
cacccgguuaaaaugguca

SEQ ID NO: 268502 - RNA, 19 nt, Artificial Sequence
  Description of Artificial Sequence: Synthetic oligonucleotide
gccauugugugauaccacc

SEQ ID NO: 268503 - RNA, 19 nt, Artificial Sequence
  Description of Artificial Sequence: Synthetic oligonucleotide
aacguguccgguaguggag

SEQ ID NO: 268504 - RNA, 19 nt, Artificial Sequence
  Description of Artificial Sequence: Synthetic oligonucleotide
agagcuucggagaacaguu

SEQ ID NO: 268505 - RNA, 19 nt, Artificial Sequence
  Description of Artificial Sequence: Synthetic oligonucleotide
augcgcuaagagaauacag

SEQ ID NO: 268506 - RNA, 19 nt, Artificial Sequence
  Description of Artificial Sequence: Synthetic oligonucleotide
aagauuccaacgacgcuaa

SEQ ID NO: 268507 - RNA, 19 nt, Artificial Sequence
  Description of Artificial Sequence: Synthetic oligonucleotide
cagguaacucaauagguua

SEQ ID NO: 268508 - RNA, 19 nt, Artificial Sequence
  Description of Artificial Sequence: Synthetic oligonucleotide
cuaccaagguggacuacug

SEQ ID NO: 268509 - RNA, 19 nt, Artificial Sequence
  Description of Artificial Sequence: Synthetic oligonucleotide
agguguuuauuuauggcau

SEQ ID NO: 268510 - RNA, 19 nt, Artificial Sequence
  Description of Artificial Sequence: Synthetic oligonucleotide
agaguauggauaacuaguu

SEQ ID NO: 268511 - RNA, 19 nt, Artificial Sequence
  Description of Artificial Sequence: Synthetic oligonucleotide
augugucguuuaccaaccg

SEQ ID NO: 268512 - RNA, 19 nt, Artificial Sequence
  Description of Artificial Sequence: Synthetic oligonucleotide
aucaugccguuaauuucgc

SEQ ID NO: 268513 - RNA, 19 nt, Artificial Sequence
  Description of Artificial Sequence: Synthetic oligonucleotide
cuaccgaccauacaaucaa

SEQ ID NO: 268514 - RNA, 19 nt, Artificial Sequence
  Description of Artificial Sequence: Synthetic oligonucleotide
cuccaaagagcuucggaga

SEQ ID NO: 268515 - RNA, 19 nt, Artificial Sequence
  Description of Artificial Sequence: Synthetic oligonucleotide
uucacaccccuauucguua

SEQ ID NO: 268516 - RNA, 19 nt, Artificial Sequence
  Description of Artificial Sequence: Synthetic oligonucleotide
agaucgagguacaauuccu

SEQ ID NO: 268517 - RNA, 19 nt, Artificial Sequence
  Description of Artificial Sequence: Synthetic oligonucleotide
ggaucaugccguuaauuuc

SEQ ID NO: 268518 - RNA, 19 nt, Artificial Sequence
  Description of Artificial Sequence: Synthetic oligonucleotide
cuguuaugugucguuuacc

SEQ ID NO: 268519 - RNA, 19 nt, Artificial Sequence
  Description of Artificial Sequence: Synthetic oligonucleotide
gcuuaugauauggaagcgc

SEQ ID NO: 268520 - RNA, 19 nt, Artificial Sequence
  Description of Artificial Sequence: Synthetic oligonucleotide
aaauggcuuacagcccugu

SEQ ID NO: 268521 - RNA, 19 nt, Artificial Sequence
  Description of Artificial Sequence: Synthetic oligonucleotide
gucaggaguaaaacucaag

SEQ ID NO: 268522 - RNA, 19 nt, Artificial Sequence
  Description of Artificial Sequence: Synthetic oligonucleotide
uggcaaguauagaguagaa

SEQ ID NO: 268523 - RNA, 19 nt, Artificial Sequence
  Description of Artificial Sequence: Synthetic oligonucleotide
cacguccacaguguagugg

SEQ ID NO: 268524 - RNA, 19 nt, Artificial Sequence
  Description of Artificial Sequence: Synthetic oligonucleotide
cagagcuuaugauauggaa

SEQ ID NO: 268525 - RNA, 19 nt, Artificial Sequence
  Description of Artificial Sequence: Synthetic oligonucleotide
auugccuaccgaccauaca

SEQ ID NO: 268526 - RNA, 19 nt, Artificial Sequence
  Description of Artificial Sequence: Synthetic oligonucleotide
ugccguuaauuucgcaaau

SEQ ID NO: 268527 - RNA, 19 nt, Artificial Sequence
  Description of Artificial Sequence: Synthetic oligonucleotide
caguauacgcucuggaaua

SEQ ID NO: 268528 - RNA, 19 nt, Artificial Sequence
  Description of Artificial Sequence: Synthetic oligonucleotide
caccccuauucguuaauuc

SEQ ID NO: 268529 - RNA, 19 nt, Artificial Sequence
  Description of Artificial Sequence: Synthetic oligonucleotide
ccaagguggacuacuggcc

SEQ ID NO: 268530 - RNA, 19 nt, Artificial Sequence
  Description of Artificial Sequence: Synthetic oligonucleotide
ugcuaauaauagacuugua

SEQ ID NO: 268531 - RNA, 19 nt, Artificial Sequence
  Description of Artificial Sequence: Synthetic oligonucleotide
aaccguaugucaggaguaa

SEQ ID NO: 268532 - RNA, 19 nt, Artificial Sequence
  Description of Artificial Sequence: Synthetic oligonucleotide
ugccuaccgaccauacaau

SEQ ID NO: 268533 - RNA, 19 nt, Artificial Sequence
  Description of Artificial Sequence: Synthetic oligonucleotide
ugcacccgguuaaaauggu

SEQ ID NO: 268534 - RNA, 19 nt, Artificial Sequence
  Description of Artificial Sequence: Synthetic oligonucleotide
acugggaguguaguuacau

SEQ ID NO: 268535 - RNA, 19 nt, Artificial Sequence
  Description of Artificial Sequence: Synthetic oligonucleotide
agcguuagcaugaccgugu

SEQ ID NO: 268536 - RNA, 19 nt, Artificial Sequence
  Description of Artificial Sequence: Synthetic oligonucleotide
auggacgaccgagaucauc

SEQ ID NO: 268537 - RNA, 19 nt, Artificial Sequence
  Description of Artificial Sequence: Synthetic oligonucleotide
acguguccgguaguggagg

SEQ ID NO: 268538 - RNA, 19 nt, Artificial Sequence
  Description of Artificial Sequence: Synthetic oligonucleotide
agaccauuagcagucuuuu

SEQ ID NO: 268539 - RNA, 19 nt, Artificial Sequence
  Description of Artificial Sequence: Synthetic oligonucleotide
gagcguuagcaugaccgug

SEQ ID NO: 268540 - RNA, 19 nt, Artificial Sequence
  Description of Artificial Sequence: Synthetic oligonucleotide
uguaguggucaugcgcuaa

SEQ ID NO: 268541 - RNA, 19 nt, Artificial Sequence
  Description of Artificial Sequence: Synthetic oligonucleotide
gauugccuaccgaccauac

SEQ ID NO: 268542 - RNA, 19 nt, Artificial Sequence
  Description of Artificial Sequence: Synthetic oligonucleotide
accgaccauacaaucaaga

SEQ ID NO: 268543 - RNA, 19 nt, Artificial Sequence
  Description of Artificial Sequence: Synthetic oligonucleotide
acccgguuaaaauggucaa

SEQ ID NO: 268544 - RNA, 19 nt, Artificial Sequence
  Description of Artificial Sequence: Synthetic oligonucleotide
uuagcacuucggacaguuc

SEQ ID NO: 268545 - RNA, 19 nt, Artificial Sequence
  Description of Artificial Sequence: Synthetic oligonucleotide
ccgaccauacaaucaagac

SEQ ID NO: 268546 - RNA, 19 nt, Artificial Sequence
  Description of Artificial Sequence: Synthetic oligonucleotide
ggaguucuuagcacuucgg

SEQ ID NO: 268547 - RNA, 19 nt, Artificial Sequence
  Description of Artificial Sequence: Synthetic oligonucleotide
caugggguacugagagcgc

SEQ ID NO: 268548 - RNA, 19 nt, Artificial Sequence
  Description of Artificial Sequence: Synthetic oligonucleotide
ucaugccguuaauuucgca

SEQ ID NO: 268549 - RNA, 19 nt, Artificial Sequence
  Description of Artificial Sequence: Synthetic oligonucleotide
agcuguuaugugucguuua

SEQ ID NO: 268550 - RNA, 19 nt, Artificial Sequence
  Description of Artificial Sequence: Synthetic oligonucleotide
cacgguggcugcugguuag

SEQ ID NO: 268551 - RNA, 19 nt, Artificial Sequence
  Description of Artificial Sequence: Synthetic oligonucleotide
acgcucuggaauaauaauu

SEQ ID NO: 268552 - RNA, 19 nt, Artificial Sequence
  Description of Artificial Sequence: Synthetic oligonucleotide
ggaguaaaacucaagaguu

SEQ ID NO: 268553 - RNA, 19 nt, Artificial Sequence
  Description of Artificial Sequence: Synthetic oligonucleotide
agguaacucaauagguuaa

SEQ ID NO: 268554 - RNA, 19 nt, Artificial Sequence
  Description of Artificial Sequence: Synthetic oligonucleotide
gcgcuaagagaauacagaa

SEQ ID NO: 268555 - RNA, 19 nt, Artificial Sequence
  Description of Artificial Sequence: Synthetic oligonucleotide
gcaaauagaaaaggcccac

SEQ ID NO: 268556 - RNA, 19 nt, Artificial Sequence
  Description of Artificial Sequence: Synthetic oligonucleotide
accaaccggcuauauuuaa

SEQ ID NO: 268557 - RNA, 19 nt, Artificial Sequence
  Description of Artificial Sequence: Synthetic oligonucleotide
uaguggucaugcgcuaaga

SEQ ID NO: 268558 - RNA, 19 nt, Artificial Sequence
  Description of Artificial Sequence: Synthetic oligonucleotide
caugcgcuaagagaauaca

SEQ ID NO: 268559 - RNA, 19 nt, Artificial Sequence
  Description of Artificial Sequence: Synthetic oligonucleotide
agcgugccaacuaugcaga

SEQ ID NO: 268560 - RNA, 19 nt, Artificial Sequence
  Description of Artificial Sequence: Synthetic oligonucleotide
agcacuucggacaguuccu

SEQ ID NO: 268561 - RNA, 19 nt, Artificial Sequence
  Description of Artificial Sequence: Synthetic oligonucleotide
agguuaagucaagguaacu

SEQ ID NO: 268562 - RNA, 19 nt, Artificial Sequence
  Description of Artificial Sequence: Synthetic oligonucleotide
agauuccaacgacgcuaag

SEQ ID NO: 268563 - RNA, 19 nt, Artificial Sequence
  Description of Artificial Sequence: Synthetic oligonucleotide
gaguauggauaacuaguuu

SEQ ID NO: 268564 - RNA, 19 nt, Artificial Sequence
  Description of Artificial Sequence: Synthetic oligonucleotide
acgacgcuaaggagccagc

SEQ ID NO: 268565 - RNA, 19 nt, Artificial Sequence
  Description of Artificial Sequence: Synthetic oligonucleotide
caaccguaugucaggagua

SEQ ID NO: 268566 - RNA, 19 nt, Artificial Sequence
  Description of Artificial Sequence: Synthetic oligonucleotide
ccgcacuugagcuucccag

SEQ ID NO: 268567 - RNA, 19 nt, Artificial Sequence
  Description of Artificial Sequence: Synthetic oligonucleotide
cuauacccauuuggcauuc

SEQ ID NO: 268568 - RNA, 19 nt, Artificial Sequence
  Description of Artificial Sequence: Synthetic oligonucleotide
ccaaccggcuauauuuaac

SEQ ID NO: 268569 - RNA, 19 nt, Artificial Sequence
  Description of Artificial Sequence: Synthetic oligonucleotide
ccuaccgaccauacaauca

SEQ ID NO: 268570 - RNA, 19 nt, Artificial Sequence
  Description of Artificial Sequence: Synthetic oligonucleotide
gucguuuaccaaccggcua

SEQ ID NO: 268571 - RNA, 19 nt, Artificial Sequence
  Description of Artificial Sequence: Synthetic oligonucleotide
augguaagaucgagguaca

SEQ ID NO: 268572 - RNA, 19 nt, Artificial Sequence
  Description of Artificial Sequence: Synthetic oligonucleotide
acacacacacacacaugcu

SEQ ID NO: 268573 - RNA, 19 nt, Artificial Sequence
  Description of Artificial Sequence: Synthetic oligonucleotide
gggaagggccaaugguaag

SEQ ID NO: 268574 - RNA, 19 nt, Artificial Sequence
  Description of Artificial Sequence: Synthetic oligonucleotide
guacagcgugccaacuaug

SEQ ID NO: 268575 - RNA, 19 nt, Artificial Sequence
  Description of Artificial Sequence: Synthetic oligonucleotide
ugguaagaucgagguacaa

SEQ ID NO: 268576 - RNA, 19 nt, Artificial Sequence
  Description of Artificial Sequence: Synthetic oligonucleotide
auagcaguagggagguguu

SEQ ID NO: 268577 - RNA, 19 nt, Artificial Sequence
  Description of Artificial Sequence: Synthetic oligonucleotide
gacgaccgagaucaucacu

SEQ ID NO: 268578 - RNA, 19 nt, Artificial Sequence
  Description of Artificial Sequence: Synthetic oligonucleotide
gaccgagaucaucacugua

SEQ ID NO: 268579 - RNA, 19 nt, Artificial Sequence
  Description of Artificial Sequence: Synthetic oligonucleotide
agauugccuaccgaccaua

SEQ ID NO: 268580 - RNA, 19 nt, Artificial Sequence
  Description of Artificial Sequence: Synthetic oligonucleotide
ccauacaaucaagacaaga

SEQ ID NO: 268581 - RNA, 19 nt, Artificial Sequence
  Description of Artificial Sequence: Synthetic oligonucleotide
ggugagcguuagcaugacc

SEQ ID NO: 268582 - RNA, 19 nt, Artificial Sequence
  Description of Artificial Sequence: Synthetic oligonucleotide
cucggggaauacucuuuga

SEQ ID NO: 268583 - RNA, 19 nt, Artificial Sequence
  Description of Artificial Sequence: Synthetic oligonucleotide
cacacacacacaugcuucu

SEQ ID NO: 268584 - RNA, 19 nt, Artificial Sequence
  Description of Artificial Sequence: Synthetic oligonucleotide
cgcgcacacacacacacac

SEQ ID NO: 268585 - RNA, 19 nt, Artificial Sequence
  Description of Artificial Sequence: Synthetic oligonucleotide
gucaugcgcuaagagaaua

SEQ ID NO: 268586 - RNA, 19 nt, Artificial Sequence
  Description of Artificial Sequence: Synthetic oligonucleotide
guacugagagcgcucuggu

SEQ ID NO: 268587 - RNA, 19 nt, Artificial Sequence
  Description of Artificial Sequence: Synthetic oligonucleotide
ggccaaugguaagaucgag

SEQ ID NO: 268588 - RNA, 19 nt, Artificial Sequence
  Description of Artificial Sequence: Synthetic oligonucleotide
ccuauucguuaauucaaaa

SEQ ID NO: 268589 - RNA, 19 nt, Artificial Sequence
  Description of Artificial Sequence: Synthetic oligonucleotide
gguacagcgugccaacuau

SEQ ID NO: 268590 - RNA, 19 nt, Artificial Sequence
  Description of Artificial Sequence: Synthetic oligonucleotide
cacacacacacacaugcuu

SEQ ID NO: 268591 - RNA, 19 nt, Artificial Sequence
  Description of Artificial Sequence: Synthetic oligonucleotide
ccauugugugauaccacca

SEQ ID NO: 268592 - RNA, 19 nt, Artificial Sequence
  Description of Artificial Sequence: Synthetic oligonucleotide
gagaagccccagguuuaac

SEQ ID NO: 268593 - RNA, 19 nt, Artificial Sequence
  Description of Artificial Sequence: Synthetic oligonucleotide
acaccccuauucguuaauu

SEQ ID NO: 268594 - RNA, 19 nt, Artificial Sequence
  Description of Artificial Sequence: Synthetic oligonucleotide
gccuaccgaccauacaauc

SEQ ID NO: 268595 - RNA, 19 nt, Artificial Sequence
  Description of Artificial Sequence: Synthetic oligonucleotide
ccccuauucguuaauucaa

SEQ ID NO: 268596 - RNA, 19 nt, Artificial Sequence
  Description of Artificial Sequence: Synthetic oligonucleotide
gguaagaucgagguacaau

SEQ ID NO: 268597 - RNA, 19 nt, Artificial Sequence
  Description of Artificial Sequence: Synthetic oligonucleotide
gcguuagcaugaccgugug

SEQ ID NO: 268598 - RNA, 19 nt, Artificial Sequence
  Description of Artificial Sequence: Synthetic oligonucleotide
ggacgaccgagaucaucac

SEQ ID NO: 268599 - RNA, 19 nt, Artificial Sequence
  Description of Artificial Sequence: Synthetic oligonucleotide
cccaagaaaauaacacacu

SEQ ID NO: 268600 - RNA, 19 nt, Artificial Sequence
  Description of Artificial Sequence: Synthetic oligonucleotide
caugaccguguggccacug

SEQ ID NO: 268601 - RNA, 19 nt, Artificial Sequence
  Description of Artificial Sequence: Synthetic oligonucleotide
auacaccgauacagguaca

SEQ ID NO: 268602 - RNA, 19 nt, Artificial Sequence
  Description of Artificial Sequence: Synthetic oligonucleotide
cccuauucguuaauucaaa

SEQ ID NO: 268603 - RNA, 19 nt, Artificial Sequence
  Description of Artificial Sequence: Synthetic oligonucleotide
gcacacacacacacacaug

SEQ ID NO: 268604 - RNA, 19 nt, Artificial Sequence
  Description of Artificial Sequence: Synthetic oligonucleotide
cguuagcaugaccgugugg

SEQ ID NO: 268605 - RNA, 19 nt, Artificial Sequence
  Description of Artificial Sequence: Synthetic oligonucleotide
ggccauugugugauaccac

SEQ ID NO: 268606 - RNA, 19 nt, Artificial Sequence
  Description of Artificial Sequence: Synthetic oligonucleotide
gagcuguuaugugucguuu

SEQ ID NO: 268607 - RNA, 19 nt, Artificial Sequence
  Description of Artificial Sequence: Synthetic oligonucleotide
ccccaagugagcagaccuc

SEQ ID NO: 268608 - RNA, 19 nt, Artificial Sequence
  Description of Artificial Sequence: Synthetic oligonucleotide
gcuggauuacacagaggaa

SEQ ID NO: 268609 - RNA, 19 nt, Artificial Sequence
  Description of Artificial Sequence: Synthetic oligonucleotide
ccagguaacucaauagguu

SEQ ID NO: 268610 - RNA, 19 nt, Artificial Sequence
  Description of Artificial Sequence: Synthetic oligonucleotide
cucguucauggacgaccga

SEQ ID NO: 268611 - RNA, 19 nt, Artificial Sequence
  Description of Artificial Sequence: Synthetic oligonucleotide
acgcgcacacacacacaca

SEQ ID NO: 268612 - RNA, 19 nt, Artificial Sequence
  Description of Artificial Sequence: Synthetic oligonucleotide
gccguuaauuucgcaaaua

SEQ ID NO: 268613 - RNA, 19 nt, Artificial Sequence
  Description of Artificial Sequence: Synthetic oligonucleotide
ggacuacuggccaggggaa

SEQ ID NO: 268614 - RNA, 19 nt, Artificial Sequence
  Description of Artificial Sequence: Synthetic oligonucleotide
ggcaugugucauggcugcc

SEQ ID NO: 268615 - RNA, 19 nt, Artificial Sequence
  Description of Artificial Sequence: Synthetic oligonucleotide
gcacccgguuaaaaugguc

SEQ ID NO: 268616 - RNA, 19 nt, Artificial Sequence
  Description of Artificial Sequence: Synthetic oligonucleotide
ccacguccacaguguagug

SEQ ID NO: 268617 - RNA, 19 nt, Artificial Sequence
  Description of Artificial Sequence: Synthetic oligonucleotide
ccuaccaagguggacuacu

SEQ ID NO: 268618 - RNA, 19 nt, Artificial Sequence
  Description of Artificial Sequence: Synthetic oligonucleotide
ccuauacccauuuggcauu

SEQ ID NO: 268619 - RNA, 19 nt, Artificial Sequence
  Description of Artificial Sequence: Synthetic oligonucleotide
cgcacacacacacacacau

SEQ ID NO: 268620 - RNA, 19 nt, Artificial Sequence
  Description of Artificial Sequence: Synthetic oligonucleotide
ccccuacuuuguagagcug

SEQ ID NO: 268621 - RNA, 19 nt, Artificial Sequence
  Description of Artificial Sequence: Synthetic oligonucleotide
cccgguuaaaauggucaaa

SEQ ID NO: 268622 - RNA, 19 nt, Artificial Sequence
  Description of Artificial Sequence: Synthetic oligonucleotide
gcgcacacacacacacaca

SEQ ID NO: 268623 - RNA, 19 nt, Artificial Sequence
  Description of Artificial Sequence: Synthetic oligonucleotide
caacgacgcuaaggagcca

SEQ ID NO: 268624 - RNA, 19 nt, Artificial Sequence
  Description of Artificial Sequence: Synthetic oligonucleotide
ggucaugcgcuaagagaau

SEQ ID NO: 268625 - RNA, 19 nt, Artificial Sequence
  Description of Artificial Sequence: Synthetic oligonucleotide
gccuaccaagguggacuac

SEQ ID NO: 268626 - RNA, 19 nt, Artificial Sequence
  Description of Artificial Sequence: Synthetic oligonucleotide
gcacgcgcacacacacaca

SEQ ID NO: 268627 - RNA, 19 nt, Artificial Sequence
  Description of Artificial Sequence: Synthetic oligonucleotide
cauggacgaccgagaucau

SEQ ID NO: 268628 - RNA, 19 nt, Artificial Sequence
  Description of Artificial Sequence: Synthetic oligonucleotide
gguguccaacgcagguccu

SEQ ID NO: 268629 - RNA, 19 nt, Artificial Sequence
  Description of Artificial Sequence: Synthetic oligonucleotide
ccacugcacccgguuaaaa

SEQ ID NO: 268630 - RNA, 19 nt, Artificial Sequence
  Description of Artificial Sequence: Synthetic oligonucleotide
cguuuaccaaccggcuaua

SEQ ID NO: 268631 - RNA, 19 nt, Artificial Sequence
  Description of Artificial Sequence: Synthetic oligonucleotide
aagaauagagcauggauac

SEQ ID NO: 268632 - RNA, 19 nt, Artificial Sequence
  Description of Artificial Sequence: Synthetic oligonucleotide
ugguauaucguacauaagg

SEQ ID NO: 268633 - RNA, 19 nt, Artificial Sequence
  Description of Artificial Sequence: Synthetic oligonucleotide
uucgauaguacacacagcg

SEQ ID NO: 268634 - RNA, 19 nt, Artificial Sequence
  Description of Artificial Sequence: Synthetic oligonucleotide
uuuuguacgagucaaguug

SEQ ID NO: 268635 - RNA, 19 nt, Artificial Sequence
  Description of Artificial Sequence: Synthetic oligonucleotide
caguguauuguuaacaucg

SEQ ID NO: 268636 - RNA, 19 nt, Artificial Sequence
  Description of Artificial Sequence: Synthetic oligonucleotide
uuugagcucuucaagacgg

SEQ ID NO: 268637 - RNA, 19 nt, Artificial Sequence
  Description of Artificial Sequence: Synthetic oligonucleotide
aaagcgaucccacaauguc

SEQ ID NO: 268638 - RNA, 19 nt, Artificial Sequence
  Description of Artificial Sequence: Synthetic oligonucleotide
aacucuggaacuuguacgg

SEQ ID NO: 268639 - RNA, 19 nt, Artificial Sequence
  Description of Artificial Sequence: Synthetic oligonucleotide
uauaaccacugcaugauag

SEQ ID NO: 268640 - RNA, 19 nt, Artificial Sequence
  Description of Artificial Sequence: Synthetic oligonucleotide
uauaucguacauaagggac

SEQ ID NO: 268641 - RNA, 19 nt, Artificial Sequence
  Description of Artificial Sequence: Synthetic oligonucleotide
uuaacaucgaaaguaagug

SEQ ID NO: 268642 - RNA, 19 nt, Artificial Sequence
  Description of Artificial Sequence: Synthetic oligonucleotide
auagcuuccguauaagguc

SEQ ID NO: 268643 - RNA, 19 nt, Artificial Sequence
  Description of Artificial Sequence: Synthetic oligonucleotide
uacauaagggaccucgacg

SEQ ID NO: 268644 - RNA, 19 nt, Artificial Sequence
  Description of Artificial Sequence: Synthetic oligonucleotide
cuuucgauaguacacacag

SEQ ID NO: 268645 - RNA, 19 nt, Artificial Sequence
  Description of Artificial Sequence: Synthetic oligonucleotide
accuacacgauucuggugg

SEQ ID NO: 268646 - RNA, 19 nt, Artificial Sequence
  Description of Artificial Sequence: Synthetic oligonucleotide
aucauaacggcucugacgu

SEQ ID NO: 268647 - RNA, 19 nt, Artificial Sequence
  Description of Artificial Sequence: Synthetic oligonucleotide
agcuguaugauucugucag

SEQ ID NO: 268648 - RNA, 19 nt, Artificial Sequence
  Description of Artificial Sequence: Synthetic oligonucleotide
aaaguaaguggauguggac

SEQ ID NO: 268649 - RNA, 19 nt, Artificial Sequence
  Description of Artificial Sequence: Synthetic oligonucleotide
aaauaccaaacuuggcuag

SEQ ID NO: 268650 - RNA, 19 nt, Artificial Sequence
  Description of Artificial Sequence: Synthetic oligonucleotide
uguccauucuugauuauag

SEQ ID NO: 268651 - RNA, 19 nt, Artificial Sequence
  Description of Artificial Sequence: Synthetic oligonucleotide
ugcagaguguguucgaugg

SEQ ID NO: 268652 - RNA, 19 nt, Artificial Sequence
  Description of Artificial Sequence: Synthetic oligonucleotide
auuuagguuccaaagaagg

SEQ ID NO: 268653 - RNA, 19 nt, Artificial Sequence
  Description of Artificial Sequence: Synthetic oligonucleotide
augggguacaucuuaaauc

SEQ ID NO: 268654 - RNA, 19 nt, Artificial Sequence
  Description of Artificial Sequence: Synthetic oligonucleotide
uaacaucgaaaguaagugg

SEQ ID NO: 268655 - RNA, 19 nt, Artificial Sequence
  Description of Artificial Sequence: Synthetic oligonucleotide
aacuucgugacaucccagg

SEQ ID NO: 268656 - RNA, 19 nt, Artificial Sequence
  Description of Artificial Sequence: Synthetic oligonucleotide
cuugucacuugaaugaaag

SEQ ID NO: 268657 - RNA, 19 nt, Artificial Sequence
  Description of Artificial Sequence: Synthetic oligonucleotide
ucugucuuaaaguaaucga

SEQ ID NO: 268658 - RNA, 19 nt, Artificial Sequence
  Description of Artificial Sequence: Synthetic oligonucleotide
aucagcgaaugguauaucg

SEQ ID NO: 268659 - RNA, 19 nt, Artificial Sequence
  Description of Artificial Sequence: Synthetic oligonucleotide
uucgugacaucccagggcc

SEQ ID NO: 268660 - RNA, 19 nt, Artificial Sequence
  Description of Artificial Sequence: Synthetic oligonucleotide
uauacaugcgagcaucuac

SEQ ID NO: 268661 - RNA, 19 nt, Artificial Sequence
  Description of Artificial Sequence: Synthetic oligonucleotide
aauagagcauggauacacc

SEQ ID NO: 268662 - RNA, 19 nt, Artificial Sequence
  Description of Artificial Sequence: Synthetic oligonucleotide
ugaacuaccuuguacaguu

SEQ ID NO: 268663 - RNA, 19 nt, Artificial Sequence
  Description of Artificial Sequence: Synthetic oligonucleotide
aaugggguacaucuuaaau

SEQ ID NO: 268664 - RNA, 19 nt, Artificial Sequence
  Description of Artificial Sequence: Synthetic oligonucleotide
aaacuuggcuagauggacc

SEQ ID NO: 268665 - RNA, 19 nt, Artificial Sequence
  Description of Artificial Sequence: Synthetic oligonucleotide
aacaucgaaaguaagugga

SEQ ID NO: 268666 - RNA, 19 nt, Artificial Sequence
  Description of Artificial Sequence: Synthetic oligonucleotide
auaucguacauaagggacc

SEQ ID NO: 268667 - RNA, 19 nt, Artificial Sequence
  Description of Artificial Sequence: Synthetic oligonucleotide
auccugauaacuugucugg

SEQ ID NO: 268668 - RNA, 19 nt, Artificial Sequence
  Description of Artificial Sequence: Synthetic oligonucleotide
ugacacacggcucacaauc

SEQ ID NO: 268669 - RNA, 19 nt, Artificial Sequence
  Description of Artificial Sequence: Synthetic oligonucleotide
cuugauuauaguacuggug

SEQ ID NO: 268670 - RNA, 19 nt, Artificial Sequence
  Description of Artificial Sequence: Synthetic oligonucleotide
acgugggaggcacuuaucc

SEQ ID NO: 268671 - RNA, 19 nt, Artificial Sequence
  Description of Artificial Sequence: Synthetic oligonucleotide
ugaacucuggaacuuguac

SEQ ID NO: 268672 - RNA, 19 nt, Artificial Sequence
  Description of Artificial Sequence: Synthetic oligonucleotide
acauaagggaccucgacgu

SEQ ID NO: 268673 - RNA, 19 nt, Artificial Sequence
  Description of Artificial Sequence: Synthetic oligonucleotide
ucguacauaagggaccucg

SEQ ID NO: 268674 - RNA, 19 nt, Artificial Sequence
  Description of Artificial Sequence: Synthetic oligonucleotide
uuuguacgagucaaguugu

SEQ ID NO: 268675 - RNA, 19 nt, Artificial Sequence
  Description of Artificial Sequence: Synthetic oligonucleotide
gauaacuugucugggcugg

SEQ ID NO: 268676 - RNA, 19 nt, Artificial Sequence
  Description of Artificial Sequence: Synthetic oligonucleotide
uguuaacaucgaaaguaag

SEQ ID NO: 268677 - RNA, 19 nt, Artificial Sequence
  Description of Artificial Sequence: Synthetic oligonucleotide
aagcgaucccacaaugucc

SEQ ID NO: 268678 - RNA, 19 nt, Artificial Sequence
  Description of Artificial Sequence: Synthetic oligonucleotide
aucgaaaguaaguggaugu

SEQ ID NO: 268679 - RNA, 19 nt, Artificial Sequence
  Description of Artificial Sequence: Synthetic oligonucleotide
ucagcccgaagauuggacg

SEQ ID NO: 268680 - RNA, 19 nt, Artificial Sequence
  Description of Artificial Sequence: Synthetic oligonucleotide
gauaguacacacagcggcg

SEQ ID NO: 268681 - RNA, 19 nt, Artificial Sequence
  Description of Artificial Sequence: Synthetic oligonucleotide
auguggacaacguuuaggu

SEQ ID NO: 268682 - RNA, 19 nt, Artificial Sequence
  Description of Artificial Sequence: Synthetic oligonucleotide
gguauaucguacauaaggg

SEQ ID NO: 268683 - RNA, 19 nt, Artificial Sequence
  Description of Artificial Sequence: Synthetic oligonucleotide
auaagggaccucgacgucc

SEQ ID NO: 268684 - RNA, 19 nt, Artificial Sequence
  Description of Artificial Sequence: Synthetic oligonucleotide
ucaaagcgaucccacaaug

SEQ ID NO: 268685 - RNA, 19 nt, Artificial Sequence
  Description of Artificial Sequence: Synthetic oligonucleotide
uuuccugcaaucagcuugc

SEQ ID NO: 268686 - RNA, 19 nt, Artificial Sequence
  Description of Artificial Sequence: Synthetic oligonucleotide
aaggguucaucugucgaac

SEQ ID NO: 268687 - RNA, 19 nt, Artificial Sequence
  Description of Artificial Sequence: Synthetic oligonucleotide
acuuugacuugacugacga

SEQ ID NO: 268688 - RNA, 19 nt, Artificial Sequence
  Description of Artificial Sequence: Synthetic oligonucleotide
gauccauauacaugcgagc

SEQ ID NO: 268689 - RNA, 19 nt, Artificial Sequence
  Description of Artificial Sequence: Synthetic oligonucleotide
uuuucagcccgaagauugg

SEQ ID NO: 268690 - RNA, 19 nt, Artificial Sequence
  Description of Artificial Sequence: Synthetic oligonucleotide
auuauaguacuggugacga

SEQ ID NO: 268691 - RNA, 19 nt, Artificial Sequence
  Description of Artificial Sequence: Synthetic oligonucleotide
aaaggguucaucugucgaa

SEQ ID NO: 268692 - RNA, 19 nt, Artificial Sequence
  Description of Artificial Sequence: Synthetic oligonucleotide
acgauuuaaagcuaaucuu

SEQ ID NO: 268693 - RNA, 19 nt, Artificial Sequence
  Description of Artificial Sequence: Synthetic oligonucleotide
ccguauaaggucuucaucc

SEQ ID NO: 268694 - RNA, 19 nt, Artificial Sequence
  Description of Artificial Sequence: Synthetic oligonucleotide
guugcuggaugguaaauac

SEQ ID NO: 268695 - RNA, 19 nt, Artificial Sequence
  Description of Artificial Sequence: Synthetic oligonucleotide
aguaaguggauguggacaa

SEQ ID NO: 268696 - RNA, 19 nt, Artificial Sequence
  Description of Artificial Sequence: Synthetic oligonucleotide
uuauugggauuuagguucc

SEQ ID NO: 268697 - RNA, 19 nt, Artificial Sequence
  Description of Artificial Sequence: Synthetic oligonucleotide
agaagguacaaagcagugg

SEQ ID NO: 268698 - RNA, 19 nt, Artificial Sequence
  Description of Artificial Sequence: Synthetic oligonucleotide
uacuuugacuugacugacg

SEQ ID NO: 268699 - RNA, 19 nt, Artificial Sequence
  Description of Artificial Sequence: Synthetic oligonucleotide
ggaccgagcauucauagcc

SEQ ID NO: 268700 - RNA, 19 nt, Artificial Sequence
  Description of Artificial Sequence: Synthetic oligonucleotide
ucgguuaugcugagcacag

SEQ ID NO: 268701 - RNA, 19 nt, Artificial Sequence
  Description of Artificial Sequence: Synthetic oligonucleotide
uguacggacugcagaagug

SEQ ID NO: 268702 - RNA, 19 nt, Artificial Sequence
  Description of Artificial Sequence: Synthetic oligonucleotide
uucguggucgagguggucg

SEQ ID NO: 268703 - RNA, 19 nt, Artificial Sequence
  Description of Artificial Sequence: Synthetic oligonucleotide
ucagcgaaugguauaucgu

SEQ ID NO: 268704 - RNA, 19 nt, Artificial Sequence
  Description of Artificial Sequence: Synthetic oligonucleotide
gagggucuaggguugcugg

SEQ ID NO: 268705 - RNA, 19 nt, Artificial Sequence
  Description of Artificial Sequence: Synthetic oligonucleotide
aacauggaucuugacacca

SEQ ID NO: 268706 - RNA, 19 nt, Artificial Sequence
  Description of Artificial Sequence: Synthetic oligonucleotide
acuucgugacaucccaggg

SEQ ID NO: 268707 - RNA, 19 nt, Artificial Sequence
  Description of Artificial Sequence: Synthetic oligonucleotide
caacauaagauagcuuccg

SEQ ID NO: 268708 - RNA, 19 nt, Artificial Sequence
  Description of Artificial Sequence: Synthetic oligonucleotide
cauaacggcucugacgugg

SEQ ID NO: 268709 - RNA, 19 nt, Artificial Sequence
  Description of Artificial Sequence: Synthetic oligonucleotide
ugcaguguauuguuaacau

SEQ ID NO: 268710 - RNA, 19 nt, Artificial Sequence
  Description of Artificial Sequence: Synthetic oligonucleotide
acuuguacggacugcagaa

SEQ ID NO: 268711 - RNA, 19 nt, Artificial Sequence
  Description of Artificial Sequence: Synthetic oligonucleotide
gacgaggugcagcaagagg

SEQ ID NO: 268712 - RNA, 19 nt, Artificial Sequence
  Description of Artificial Sequence: Synthetic oligonucleotide
guauaucguacauaaggga

SEQ ID NO: 268713 - RNA, 19 nt, Artificial Sequence
  Description of Artificial Sequence: Synthetic oligonucleotide
guaugauucugucaggaaa

SEQ ID NO: 268714 - RNA, 19 nt, Artificial Sequence
  Description of Artificial Sequence: Synthetic oligonucleotide
ugauaacuugucugggcug

SEQ ID NO: 268715 - RNA, 19 nt, Artificial Sequence
  Description of Artificial Sequence: Synthetic oligonucleotide
gaugguaaauaccaaacuu

SEQ ID NO: 268716 - RNA, 19 nt, Artificial Sequence
  Description of Artificial Sequence: Synthetic oligonucleotide
ugaucucuaauuugugcuc

SEQ ID NO: 268717 - RNA, 19 nt, Artificial Sequence
  Description of Artificial Sequence: Synthetic oligonucleotide
cuccucaccauuaggcugc

SEQ ID NO: 268718 - RNA, 19 nt, Artificial Sequence
  Description of Artificial Sequence: Synthetic oligonucleotide
gaugcaguguauuguuaac

SEQ ID NO: 268719 - RNA, 19 nt, Artificial Sequence
  Description of Artificial Sequence: Synthetic oligonucleotide
uuucgauaguacacacagc

SEQ ID NO: 268720 - RNA, 19 nt, Artificial Sequence
  Description of Artificial Sequence: Synthetic oligonucleotide
aucauagaugcguuccgug

SEQ ID NO: 268721 - RNA, 19 nt, Artificial Sequence
  Description of Artificial Sequence: Synthetic oligonucleotide
ugcguuccgugucaggacc

SEQ ID NO: 268722 - RNA, 19 nt, Artificial Sequence
  Description of Artificial Sequence: Synthetic oligonucleotide
gaugcugccaacgauuuaa

SEQ ID NO: 268723 - RNA, 19 nt, Artificial Sequence
  Description of Artificial Sequence: Synthetic oligonucleotide
agcauggauacacccuggg

SEQ ID NO: 268724 - RNA, 19 nt, Artificial Sequence
  Description of Artificial Sequence: Synthetic oligonucleotide
agugcccgcacauggcggc

SEQ ID NO: 268725 - RNA, 19 nt, Artificial Sequence
  Description of Artificial Sequence: Synthetic oligonucleotide
auccauauacaugcgagca

SEQ ID NO: 268726 - RNA, 19 nt, Artificial Sequence
  Description of Artificial Sequence: Synthetic oligonucleotide
agcgaaugguauaucguac

SEQ ID NO: 268727 - RNA, 19 nt, Artificial Sequence
  Description of Artificial Sequence: Synthetic oligonucleotide
uacggacugcagaagugag

SEQ ID NO: 268728 - RNA, 19 nt, Artificial Sequence
  Description of Artificial Sequence: Synthetic oligonucleotide
cacuuauccucuguaagag

SEQ ID NO: 268729 - RNA, 19 nt, Artificial Sequence
  Description of Artificial Sequence: Synthetic oligonucleotide
uguacgagucaaguuguug

SEQ ID NO: 268730 - RNA, 19 nt, Artificial Sequence
  Description of Artificial Sequence: Synthetic oligonucleotide
aguauaaccacugcaugau

SEQ ID NO: 268731 - RNA, 19 nt, Artificial Sequence
  Description of Artificial Sequence: Synthetic oligonucleotide
ugucgguucagauuugauu

SEQ ID NO: 268732 - RNA, 19 nt, Artificial Sequence
  Description of Artificial Sequence: Synthetic oligonucleotide
uccguauaaggucuucauc

SEQ ID NO: 268733 - RNA, 19 nt, Artificial Sequence
  Description of Artificial Sequence: Synthetic oligonucleotide
agggcgagaaaacuuggca

SEQ ID NO: 268734 - RNA, 19 nt, Artificial Sequence
  Description of Artificial Sequence: Synthetic oligonucleotide
cuucgugacaucccagggc

SEQ ID NO: 268735 - RNA, 19 nt, Artificial Sequence
  Description of Artificial Sequence: Synthetic oligonucleotide
aguguguucgauggcauug

SEQ ID NO: 268736 - RNA, 19 nt, Artificial Sequence
  Description of Artificial Sequence: Synthetic oligonucleotide
ucgggaggaaaguugugca

SEQ ID NO: 268737 - RNA, 19 nt, Artificial Sequence
  Description of Artificial Sequence: Synthetic oligonucleotide
cugccaacgauuuaaagcu

SEQ ID NO: 268738 - RNA, 19 nt, Artificial Sequence
  Description of Artificial Sequence: Synthetic oligonucleotide
ugucccugaacuaccuugu

SEQ ID NO: 268739 - RNA, 19 nt, Artificial Sequence
  Description of Artificial Sequence: Synthetic oligonucleotide
uuauaguacuggugacgag

SEQ ID NO: 268740 - RNA, 19 nt, Artificial Sequence
  Description of Artificial Sequence: Synthetic oligonucleotide
aauaccaaacuuggcuaga

SEQ ID NO: 268741 - RNA, 19 nt, Artificial Sequence
  Description of Artificial Sequence: Synthetic oligonucleotide
uaacuucgugacaucccag

SEQ ID NO: 268742 - RNA, 19 nt, Artificial Sequence
  Description of Artificial Sequence: Synthetic oligonucleotide
uacugggugugccaguggu

SEQ ID NO: 268743 - RNA, 19 nt, Artificial Sequence
  Description of Artificial Sequence: Synthetic oligonucleotide
uccugauaacuugucuggg

SEQ ID NO: 268744 - RNA, 19 nt, Artificial Sequence
  Description of Artificial Sequence: Synthetic oligonucleotide
aauggcuggguacccgcca

SEQ ID NO: 268745 - RNA, 19 nt, Artificial Sequence
  Description of Artificial Sequence: Synthetic oligonucleotide
ucgaaaguaaguggaugug

SEQ ID NO: 268746 - RNA, 19 nt, Artificial Sequence
  Description of Artificial Sequence: Synthetic oligonucleotide
gucuaggguugcuggaugg

SEQ ID NO: 268747 - RNA, 19 nt, Artificial Sequence
  Description of Artificial Sequence: Synthetic oligonucleotide
acuugacugacgaugccuc

SEQ ID NO: 268748 - RNA, 19 nt, Artificial Sequence
  Description of Artificial Sequence: Synthetic oligonucleotide
gauagcuuccguauaaggu

SEQ ID NO: 268749 - RNA, 19 nt, Artificial Sequence
  Description of Artificial Sequence: Synthetic oligonucleotide
uaccaaacuuggcuagaug

SEQ ID NO: 268750 - RNA, 19 nt, Artificial Sequence
  Description of Artificial Sequence: Synthetic oligonucleotide
aacccauaggucugggcaa

SEQ ID NO: 268751 - RNA, 19 nt, Artificial Sequence
  Description of Artificial Sequence: Synthetic oligonucleotide
ggcacuuauccucuguaag

SEQ ID NO: 268752 - RNA, 19 nt, Artificial Sequence
  Description of Artificial Sequence: Synthetic oligonucleotide
caagguccguuccacaaac

SEQ ID NO: 268753 - RNA, 19 nt, Artificial Sequence
  Description of Artificial Sequence: Synthetic oligonucleotide
uccauauacaugcgagcau

SEQ ID NO: 268754 - RNA, 19 nt, Artificial Sequence
  Description of Artificial Sequence: Synthetic oligonucleotide
guacccgccagccgcaagg

SEQ ID NO: 268755 - RNA, 19 nt, Artificial Sequence
  Description of Artificial Sequence: Synthetic oligonucleotide
auacaugcgagcaucuaca

SEQ ID NO: 268756 - RNA, 19 nt, Artificial Sequence
  Description of Artificial Sequence: Synthetic oligonucleotide
auaagauagcuuccguaua

SEQ ID NO: 268757 - RNA, 19 nt, Artificial Sequence
  Description of Artificial Sequence: Synthetic oligonucleotide
acacacggcucacaaucuc

SEQ ID NO: 268758 - RNA, 19 nt, Artificial Sequence
  Description of Artificial Sequence: Synthetic oligonucleotide
cauaagauagcuuccguau

SEQ ID NO: 268759 - RNA, 19 nt, Artificial Sequence
  Description of Artificial Sequence: Synthetic oligonucleotide
uuccguauaaggucuucau

SEQ ID NO: 268760 - RNA, 19 nt, Artificial Sequence
  Description of Artificial Sequence: Synthetic oligonucleotide
guacauaagggaccucgac

SEQ ID NO: 268761 - RNA, 19 nt, Artificial Sequence
  Description of Artificial Sequence: Synthetic oligonucleotide
uccgugucaggaccuacac

SEQ ID NO: 268762 - RNA, 19 nt, Artificial Sequence
  Description of Artificial Sequence: Synthetic oligonucleotide
cuggucgggaggaaaguug

SEQ ID NO: 268763 - RNA, 19 nt, Artificial Sequence
  Description of Artificial Sequence: Synthetic oligonucleotide
ucguggucgagguggucgg

SEQ ID NO: 268764 - RNA, 19 nt, Artificial Sequence
  Description of Artificial Sequence: Synthetic oligonucleotide
gucgguucagauuugauuu

SEQ ID NO: 268765 - RNA, 19 nt, Artificial Sequence
  Description of Artificial Sequence: Synthetic oligonucleotide
cgauaguacacacagcggc

SEQ ID NO: 268766 - RNA, 19 nt, Artificial Sequence
  Description of Artificial Sequence: Synthetic oligonucleotide
cuugacugacgaugccucc

SEQ ID NO: 268767 - RNA, 19 nt, Artificial Sequence
  Description of Artificial Sequence: Synthetic oligonucleotide
ugacuugacugacgaugcc

SEQ ID NO: 268768 - RNA, 19 nt, Artificial Sequence
  Description of Artificial Sequence: Synthetic oligonucleotide
ucaacccauaggucugggc

SEQ ID NO: 268769 - RNA, 19 nt, Artificial Sequence
  Description of Artificial Sequence: Synthetic oligonucleotide
acaagugcccgcacauggc

SEQ ID NO: 268770 - RNA, 19 nt, Artificial Sequence
  Description of Artificial Sequence: Synthetic oligonucleotide
cucugucaucggcugaucc

SEQ ID NO: 268771 - RNA, 19 nt, Artificial Sequence
  Description of Artificial Sequence: Synthetic oligonucleotide
caacgauuuaaagcuaauc

SEQ ID NO: 268772 - RNA, 19 nt, Artificial Sequence
  Description of Artificial Sequence: Synthetic oligonucleotide
agggccggaaaagaaacug

SEQ ID NO: 268773 - RNA, 19 nt, Artificial Sequence
  Description of Artificial Sequence: Synthetic oligonucleotide
cagcccgaagauuggacgc

SEQ ID NO: 268774 - RNA, 19 nt, Artificial Sequence
  Description of Artificial Sequence: Synthetic oligonucleotide
augcaguguauuguuaaca

SEQ ID NO: 268775 - RNA, 19 nt, Artificial Sequence
  Description of Artificial Sequence: Synthetic oligonucleotide
cagaauggggccccugagc

SEQ ID NO: 268776 - RNA, 19 nt, Artificial Sequence
  Description of Artificial Sequence: Synthetic oligonucleotide
aaggcauuuaugggugcca

SEQ ID NO: 268777 - RNA, 19 nt, Artificial Sequence
  Description of Artificial Sequence: Synthetic oligonucleotide
auucuugauuauaguacug

SEQ ID NO: 268778 - RNA, 19 nt, Artificial Sequence
  Description of Artificial Sequence: Synthetic oligonucleotide
aguacacacagcggcgauc

SEQ ID NO: 268779 - RNA, 19 nt, Artificial Sequence
  Description of Artificial Sequence: Synthetic oligonucleotide
aaguggauguggacaacgu

SEQ ID NO: 268780 - RNA, 19 nt, Artificial Sequence
  Description of Artificial Sequence: Synthetic oligonucleotide
aagugcccgcacauggcgg

SEQ ID NO: 268781 - RNA, 19 nt, Artificial Sequence
  Description of Artificial Sequence: Synthetic oligonucleotide
guguguucgauggcauugg

SEQ ID NO: 268782 - RNA, 19 nt, Artificial Sequence
  Description of Artificial Sequence: Synthetic oligonucleotide
cggcgauccauauacaugc

SEQ ID NO: 268783 - RNA, 19 nt, Artificial Sequence
  Description of Artificial Sequence: Synthetic oligonucleotide
ucgugacaucccagggccg

SEQ ID NO: 268784 - RNA, 19 nt, Artificial Sequence
  Description of Artificial Sequence: Synthetic oligonucleotide
ugguggauccuggcuagag

SEQ ID NO: 268785 - RNA, 19 nt, Artificial Sequence
  Description of Artificial Sequence: Synthetic oligonucleotide
gucgguuaugcugagcaca

SEQ ID NO: 268786 - RNA, 19 nt, Artificial Sequence
  Description of Artificial Sequence: Synthetic oligonucleotide
acagccuagcccaaucaug

SEQ ID NO: 268787 - RNA, 19 nt, Artificial Sequence
  Description of Artificial Sequence: Synthetic oligonucleotide
gcaacauaagauagcuucc

SEQ ID NO: 268788 - RNA, 19 nt, Artificial Sequence
  Description of Artificial Sequence: Synthetic oligonucleotide
cugauaacuugucugggcu

SEQ ID NO: 268789 - RNA, 19 nt, Artificial Sequence
  Description of Artificial Sequence: Synthetic oligonucleotide
gcacuuauccucuguaaga

SEQ ID NO: 268790 - RNA, 19 nt, Artificial Sequence
  Description of Artificial Sequence: Synthetic oligonucleotide
auaacuugucugggcuggg

SEQ ID NO: 268791 - RNA, 19 nt, Artificial Sequence
  Description of Artificial Sequence: Synthetic oligonucleotide
auaacggcucugacguggg

SEQ ID NO: 268792 - RNA, 19 nt, Artificial Sequence
  Description of Artificial Sequence: Synthetic oligonucleotide
cauugccagaggccaaaug

SEQ ID NO: 268793 - RNA, 19 nt, Artificial Sequence
  Description of Artificial Sequence: Synthetic oligonucleotide
gggaggaaaguugugcagc

SEQ ID NO: 268794 - RNA, 19 nt, Artificial Sequence
  Description of Artificial Sequence: Synthetic oligonucleotide
caauggcuggguacccgcc

SEQ ID NO: 268795 - RNA, 19 nt, Artificial Sequence
  Description of Artificial Sequence: Synthetic oligonucleotide
gccggaaaagaaacugucg

SEQ ID NO: 268796 - RNA, 19 nt, Artificial Sequence
  Description of Artificial Sequence: Synthetic oligonucleotide
aggcacuuauccucuguaa

SEQ ID NO: 268797 - RNA, 19 nt, Artificial Sequence
  Description of Artificial Sequence: Synthetic oligonucleotide
aggguucaucugucgaaca

SEQ ID NO: 268798 - RNA, 19 nt, Artificial Sequence
  Description of Artificial Sequence: Synthetic oligonucleotide
ucauaacggcucugacgug

SEQ ID NO: 268799 - RNA, 19 nt, Artificial Sequence
  Description of Artificial Sequence: Synthetic oligonucleotide
ccugaacuaccuuguacag

SEQ ID NO: 268800 - RNA, 19 nt, Artificial Sequence
  Description of Artificial Sequence: Synthetic oligonucleotide
ucggcugauccaaccguuc

SEQ ID NO: 268801 - RNA, 19 nt, Artificial Sequence
  Description of Artificial Sequence: Synthetic oligonucleotide
cagcgaaugguauaucgua

SEQ ID NO: 268802 - RNA, 19 nt, Artificial Sequence
  Description of Artificial Sequence: Synthetic oligonucleotide
acuaccuuguacaguucca

SEQ ID NO: 268803 - RNA, 19 nt, Artificial Sequence
  Description of Artificial Sequence: Synthetic oligonucleotide
uaguacacacagcggcgau

SEQ ID NO: 268804 - RNA, 19 nt, Artificial Sequence
  Description of Artificial Sequence: Synthetic oligonucleotide
ugucaucggcugauccaac

SEQ ID NO: 268805 - RNA, 19 nt, Artificial Sequence
  Description of Artificial Sequence: Synthetic oligonucleotide
guacggacugcagaaguga

SEQ ID NO: 268806 - RNA, 19 nt, Artificial Sequence
  Description of Artificial Sequence: Synthetic oligonucleotide
ggcgagaaaacuuggcaaa

SEQ ID NO: 268807 - RNA, 19 nt, Artificial Sequence
  Description of Artificial Sequence: Synthetic oligonucleotide
guuguacugcagaugggga

SEQ ID NO: 268808 - RNA, 19 nt, Artificial Sequence
  Description of Artificial Sequence: Synthetic oligonucleotide
ccgaagauuggacgcagcc

SEQ ID NO: 268809 - RNA, 19 nt, Artificial Sequence
  Description of Artificial Sequence: Synthetic oligonucleotide
ugccaacgauuuaaagcua

SEQ ID NO: 268810 - RNA, 19 nt, Artificial Sequence
  Description of Artificial Sequence: Synthetic oligonucleotide
augguauaucguacauaag

SEQ ID NO: 268811 - RNA, 19 nt, Artificial Sequence
  Description of Artificial Sequence: Synthetic oligonucleotide
uccucauuucguggucgag

SEQ ID NO: 268812 - RNA, 19 nt, Artificial Sequence
  Description of Artificial Sequence: Synthetic oligonucleotide
ccucauuucguggucgagg

SEQ ID NO: 268813 - RNA, 19 nt, Artificial Sequence
  Description of Artificial Sequence: Synthetic oligonucleotide
cuugugccgguccgcgggg

SEQ ID NO: 268814 - RNA, 19 nt, Artificial Sequence
  Description of Artificial Sequence: Synthetic oligonucleotide
gcgaaugguauaucguaca

SEQ ID NO: 268815 - RNA, 19 nt, Artificial Sequence
  Description of Artificial Sequence: Synthetic oligonucleotide
cauaagggaccucgacguc

SEQ ID NO: 268816 - RNA, 19 nt, Artificial Sequence
  Description of Artificial Sequence: Synthetic oligonucleotide
gacuugacugacgaugccu

SEQ ID NO: 268817 - RNA, 19 nt, Artificial Sequence
  Description of Artificial Sequence: Synthetic oligonucleotide
ucgccacucucgucguugc

SEQ ID NO: 268818 - RNA, 19 nt, Artificial Sequence
  Description of Artificial Sequence: Synthetic oligonucleotide
ggcuuucgauaguacacac

SEQ ID NO: 268819 - RNA, 19 nt, Artificial Sequence
  Description of Artificial Sequence: Synthetic oligonucleotide
uuguacgagucaaguuguu

SEQ ID NO: 268820 - RNA, 19 nt, Artificial Sequence
  Description of Artificial Sequence: Synthetic oligonucleotide
gggcgagaaaacuuggcaa

SEQ ID NO: 268821 - RNA, 19 nt, Artificial Sequence
  Description of Artificial Sequence: Synthetic oligonucleotide
acguuuagguccagaccag

SEQ ID NO: 268822 - RNA, 19 nt, Artificial Sequence
  Description of Artificial Sequence: Synthetic oligonucleotide
cuuccguauaaggucuuca

SEQ ID NO: 268823 - RNA, 19 nt, Artificial Sequence
  Description of Artificial Sequence: Synthetic oligonucleotide
cacagccaucagcgaaugg

SEQ ID NO: 268824 - RNA, 19 nt, Artificial Sequence
  Description of Artificial Sequence: Synthetic oligonucleotide
ccaauggcuggguacccgc

SEQ ID NO: 268825 - RNA, 19 nt, Artificial Sequence
  Description of Artificial Sequence: Synthetic oligonucleotide
uggucgagguggucgguua

SEQ ID NO: 268826 - RNA, 19 nt, Artificial Sequence
  Description of Artificial Sequence: Synthetic oligonucleotide
uauugggauuuagguucca

SEQ ID NO: 268827 - RNA, 19 nt, Artificial Sequence
  Description of Artificial Sequence: Synthetic oligonucleotide
uaacggcucugacguggga

SEQ ID NO: 268828 - RNA, 19 nt, Artificial Sequence
  Description of Artificial Sequence: Synthetic oligonucleotide
ccguuccacaaacuugggg

SEQ ID NO: 268829 - RNA, 19 nt, Artificial Sequence
  Description of Artificial Sequence: Synthetic oligonucleotide
aagguccguuccacaaacu

SEQ ID NO: 268830 - RNA, 19 nt, Artificial Sequence
  Description of Artificial Sequence: Synthetic oligonucleotide
cguugcagcacaacucaag

SEQ ID NO: 268831 - RNA, 19 nt, Artificial Sequence
  Description of Artificial Sequence: Synthetic oligonucleotide
ggaaaagaaacugucgguu

SEQ ID NO: 268832 - RNA, 19 nt, Artificial Sequence
  Description of Artificial Sequence: Synthetic oligonucleotide
cugucaucggcugauccaa

SEQ ID NO: 268833 - RNA, 19 nt, Artificial Sequence
  Description of Artificial Sequence: Synthetic oligonucleotide
gggaccgagcauucauagc

SEQ ID NO: 268834 - RNA, 19 nt, Artificial Sequence
  Description of Artificial Sequence: Synthetic oligonucleotide
gagguucagaaaacccaaa

SEQ ID NO: 268835 - RNA, 19 nt, Artificial Sequence
  Description of Artificial Sequence: Synthetic oligonucleotide
cucgacguccucgccacuc

SEQ ID NO: 268836 - RNA, 19 nt, Artificial Sequence
  Description of Artificial Sequence: Synthetic oligonucleotide
ggccggaaaagaaacuguc

SEQ ID NO: 268837 - RNA, 19 nt, Artificial Sequence
  Description of Artificial Sequence: Synthetic oligonucleotide
gaacuaccuuguacaguuc

SEQ ID NO: 268838 - RNA, 19 nt, Artificial Sequence
  Description of Artificial Sequence: Synthetic oligonucleotide
gcgauccauauacaugcga

SEQ ID NO: 268839 - RNA, 19 nt, Artificial Sequence
  Description of Artificial Sequence: Synthetic oligonucleotide
ggcgauccauauacaugcg

SEQ ID NO: 268840 - RNA, 19 nt, Artificial Sequence
  Description of Artificial Sequence: Synthetic oligonucleotide
gucgagguggucgguuaug

SEQ ID NO: 268841 - RNA, 19 nt, Artificial Sequence
  Description of Artificial Sequence: Synthetic oligonucleotide
gauggggaccgagcauuca

SEQ ID NO: 268842 - RNA, 19 nt, Artificial Sequence
  Description of Artificial Sequence: Synthetic oligonucleotide
ggucgguuaugcugagcac

SEQ ID NO: 268843 - RNA, 19 nt, Artificial Sequence
  Description of Artificial Sequence: Synthetic oligonucleotide
agcuggucgggaggaaagu

SEQ ID NO: 268844 - RNA, 19 nt, Artificial Sequence
  Description of Artificial Sequence: Synthetic oligonucleotide
cgucguugcagcacaacuc

SEQ ID NO: 268845 - RNA, 19 nt, Artificial Sequence
  Description of Artificial Sequence: Synthetic oligonucleotide
ggaccuacacgauucuggu

SEQ ID NO: 268846 - RNA, 19 nt, Artificial Sequence
  Description of Artificial Sequence: Synthetic oligonucleotide
agccaucagcgaaugguau

SEQ ID NO: 268847 - RNA, 19 nt, Artificial Sequence
  Description of Artificial Sequence: Synthetic oligonucleotide
caucagcgaaugguauauc

SEQ ID NO: 268848 - RNA, 19 nt, Artificial Sequence
  Description of Artificial Sequence: Synthetic oligonucleotide
gacacacggcucacaaucu

SEQ ID NO: 268849 - RNA, 19 nt, Artificial Sequence
  Description of Artificial Sequence: Synthetic oligonucleotide
ccgugucaggaccuacacg

SEQ ID NO: 268850 - RNA, 19 nt, Artificial Sequence
  Description of Artificial Sequence: Synthetic oligonucleotide
ggcauuuaugggugccaga

SEQ ID NO: 268851 - RNA, 19 nt, Artificial Sequence
  Description of Artificial Sequence: Synthetic oligonucleotide
cgauuuaaagcuaaucuuu

SEQ ID NO: 268852 - RNA, 19 nt, Artificial Sequence
  Description of Artificial Sequence: Synthetic oligonucleotide
cacauggcggcccagcuuu

SEQ ID NO: 268853 - RNA, 19 nt, Artificial Sequence
  Description of Artificial Sequence: Synthetic oligonucleotide
gcauuuaugggugccagau

SEQ ID NO: 268854 - RNA, 19 nt, Artificial Sequence
  Description of Artificial Sequence: Synthetic oligonucleotide
gccaacgauuuaaagcuaa

SEQ ID NO: 268855 - RNA, 19 nt, Artificial Sequence
  Description of Artificial Sequence: Synthetic oligonucleotide
gcuuucgauaguacacaca

SEQ ID NO: 268856 - RNA, 19 nt, Artificial Sequence
  Description of Artificial Sequence: Synthetic oligonucleotide
gggccccugagcugguaag

SEQ ID NO: 268857 - RNA, 19 nt, Artificial Sequence
  Description of Artificial Sequence: Synthetic oligonucleotide
gguggcuugucacuugaau

SEQ ID NO: 268858 - RNA, 19 nt, Artificial Sequence
  Description of Artificial Sequence: Synthetic oligonucleotide
ugcccgcacauggcggccc

SEQ ID NO: 268859 - RNA, 19 nt, Artificial Sequence
  Description of Artificial Sequence: Synthetic oligonucleotide
gauuggacgcagccacaau

SEQ ID NO: 268860 - RNA, 19 nt, Artificial Sequence
  Description of Artificial Sequence: Synthetic oligonucleotide
cugaacuaccuuguacagu

SEQ ID NO: 268861 - RNA, 19 nt, Artificial Sequence
  Description of Artificial Sequence: Synthetic oligonucleotide
cgugacaucccagggccgg

SEQ ID NO: 268862 - RNA, 19 nt, Artificial Sequence
  Description of Artificial Sequence: Synthetic oligonucleotide
uuucguggucgaggugguc

SEQ ID NO: 268863 - RNA, 19 nt, Artificial Sequence
  Description of Artificial Sequence: Synthetic oligonucleotide
cuggcuagagcuguaugau

SEQ ID NO: 268864 - RNA, 19 nt, Artificial Sequence
  Description of Artificial Sequence: Synthetic oligonucleotide
gcacaagugcccgcacaug

SEQ ID NO: 268865 - RNA, 19 nt, Artificial Sequence
  Description of Artificial Sequence: Synthetic oligonucleotide
ggucgggaggaaaguugug

SEQ ID NO: 268866 - RNA, 19 nt, Artificial Sequence
  Description of Artificial Sequence: Synthetic oligonucleotide
cuccacggauguagucaga

SEQ ID NO: 268867 - RNA, 19 nt, Artificial Sequence
  Description of Artificial Sequence: Synthetic oligonucleotide
gcuugucacuugaaugaaa

SEQ ID NO: 268868 - RNA, 19 nt, Artificial Sequence
  Description of Artificial Sequence: Synthetic oligonucleotide
cguacauaagggaccucga

SEQ ID NO: 268869 - RNA, 19 nt, Artificial Sequence
  Description of Artificial Sequence: Synthetic oligonucleotide
cccagggccggaaaagaaa

SEQ ID NO: 268870 - RNA, 19 nt, Artificial Sequence
  Description of Artificial Sequence: Synthetic oligonucleotide
cacagcggcgauccauaua

SEQ ID NO: 268871 - RNA, 19 nt, Artificial Sequence
  Description of Artificial Sequence: Synthetic oligonucleotide
cagcauggugaucucuaau

SEQ ID NO: 268872 - RNA, 19 nt, Artificial Sequence
  Description of Artificial Sequence: Synthetic oligonucleotide
cagcggcgauccauauaca

SEQ ID NO: 268873 - RNA, 19 nt, Artificial Sequence
  Description of Artificial Sequence: Synthetic oligonucleotide
gugcccgcacauggcggcc

SEQ ID NO: 268874 - RNA, 19 nt, Artificial Sequence
  Description of Artificial Sequence: Synthetic oligonucleotide
ccaucagcgaaugguauau

SEQ ID NO: 268875 - RNA, 19 nt, Artificial Sequence
  Description of Artificial Sequence: Synthetic oligonucleotide
auacacccugggacagcau

SEQ ID NO: 268876 - RNA, 19 nt, Artificial Sequence
  Description of Artificial Sequence: Synthetic oligonucleotide
ggucacgcagucaccccaa

SEQ ID NO: 268877 - RNA, 19 nt, Artificial Sequence
  Description of Artificial Sequence: Synthetic oligonucleotide
ccaacgauuuaaagcuaau

SEQ ID NO: 268878 - RNA, 19 nt, Artificial Sequence
  Description of Artificial Sequence: Synthetic oligonucleotide
gggguacaucuuaaauccu

SEQ ID NO: 268879 - RNA, 19 nt, Artificial Sequence
  Description of Artificial Sequence: Synthetic oligonucleotide
cgaaugguauaucguacau

SEQ ID NO: 268880 - RNA, 19 nt, Artificial Sequence
  Description of Artificial Sequence: Synthetic oligonucleotide
ccccaaugaaggcauuuau

SEQ ID NO: 268881 - RNA, 19 nt, Artificial Sequence
  Description of Artificial Sequence: Synthetic oligonucleotide
ggucgagguggucgguuau

SEQ ID NO: 268882 - RNA, 19 nt, Artificial Sequence
  Description of Artificial Sequence: Synthetic oligonucleotide
guggucgagguggucgguu

SEQ ID NO: 268883 - RNA, 19 nt, Artificial Sequence
  Description of Artificial Sequence: Synthetic oligonucleotide
gcuggucgggaggaaaguu

SEQ ID NO: 268884 - RNA, 19 nt, Artificial Sequence
  Description of Artificial Sequence: Synthetic oligonucleotide
cgguucagauuugauuucu

SEQ ID NO: 268885 - RNA, 19 nt, Artificial Sequence
  Description of Artificial Sequence: Synthetic oligonucleotide
gggagacauucaagagcau

SEQ ID NO: 268886 - RNA, 19 nt, Artificial Sequence
  Description of Artificial Sequence: Synthetic oligonucleotide
gcgaucccacaauguccau

SEQ ID NO: 268887 - RNA, 19 nt, Artificial Sequence
  Description of Artificial Sequence: Synthetic oligonucleotide
ggguacccgccagccgcaa

SEQ ID NO: 268888 - RNA, 19 nt, Artificial Sequence
  Description of Artificial Sequence: Synthetic oligonucleotide
ccucgacguccucgccacu

SEQ ID NO: 268889 - RNA, 19 nt, Artificial Sequence
  Description of Artificial Sequence: Synthetic oligonucleotide
ccucgccacucucgucguu

SEQ ID NO: 268890 - RNA, 19 nt, Artificial Sequence
  Description of Artificial Sequence: Synthetic oligonucleotide
agaaaagugagcuaaguag

SEQ ID NO: 268891 - RNA, 19 nt, Artificial Sequence
  Description of Artificial Sequence: Synthetic oligonucleotide
aaaggaagcguauaaaacu

SEQ ID NO: 268892 - RNA, 19 nt, Artificial Sequence
  Description of Artificial Sequence: Synthetic oligonucleotide
uacauguuacucaacagcg

SEQ ID NO: 268893 - RNA, 19 nt, Artificial Sequence
  Description of Artificial Sequence: Synthetic oligonucleotide
aacaagcuaaugcacuucc

SEQ ID NO: 268894 - RNA, 19 nt, Artificial Sequence
  Description of Artificial Sequence: Synthetic oligonucleotide
auaucaaugcuccuguccc

SEQ ID NO: 268895 - RNA, 19 nt, Artificial Sequence
  Description of Artificial Sequence: Synthetic oligonucleotide
acaauuaugaauucauauc

SEQ ID NO: 268896 - RNA, 19 nt, Artificial Sequence
  Description of Artificial Sequence: Synthetic oligonucleotide
ucuggguuaaccuuguagg

SEQ ID NO: 268897 - RNA, 19 nt, Artificial Sequence
  Description of Artificial Sequence: Synthetic oligonucleotide
aaugacauauaucaaugcu

SEQ ID NO: 268898 - RNA, 19 nt, Artificial Sequence
  Description of Artificial Sequence: Synthetic oligonucleotide
uuaaagagccuacacagca

SEQ ID NO: 268899 - RNA, 19 nt, Artificial Sequence
  Description of Artificial Sequence: Synthetic oligonucleotide
ugaggcaacaagcuaaugc

SEQ ID NO: 268900 - RNA, 19 nt, Artificial Sequence
  Description of Artificial Sequence: Synthetic oligonucleotide
caucuuaugaaacaccacc

SEQ ID NO: 268901 - RNA, 19 nt, Artificial Sequence
  Description of Artificial Sequence: Synthetic oligonucleotide
aaauaaagcuaagauggag

SEQ ID NO: 268902 - RNA, 19 nt, Artificial Sequence
  Description of Artificial Sequence: Synthetic oligonucleotide
uggauaacugguaucaucu

SEQ ID NO: 268903 - RNA, 19 nt, Artificial Sequence
  Description of Artificial Sequence: Synthetic oligonucleotide
uuauugauacccauuuuac

SEQ ID NO: 268904 - RNA, 19 nt, Artificial Sequence
  Description of Artificial Sequence: Synthetic oligonucleotide
uaagaaugcaaaccagugc

SEQ ID NO: 268905 - RNA, 19 nt, Artificial Sequence
  Description of Artificial Sequence: Synthetic oligonucleotide
augcuagucaaauaaagcu

SEQ ID NO: 268906 - RNA, 19 nt, Artificial Sequence
  Description of Artificial Sequence: Synthetic oligonucleotide
ugagcuaaguaguucagug

SEQ ID NO: 268907 - RNA, 19 nt, Artificial Sequence
  Description of Artificial Sequence: Synthetic oligonucleotide
ucuuuagacacuacucaag

SEQ ID NO: 268908 - RNA, 19 nt, Artificial Sequence
  Description of Artificial Sequence: Synthetic oligonucleotide
aagugagcuaaguaguuca

SEQ ID NO: 268909 - RNA, 19 nt, Artificial Sequence
  Description of Artificial Sequence: Synthetic oligonucleotide
uagguuacagaccugagua

SEQ ID NO: 268910 - RNA, 19 nt, Artificial Sequence
  Description of Artificial Sequence: Synthetic oligonucleotide
aaggaagcguauaaaacuc

SEQ ID NO: 268911 - RNA, 19 nt, Artificial Sequence
  Description of Artificial Sequence: Synthetic oligonucleotide
uuccuauuguuuuaggcug

SEQ ID NO: 268912 - RNA, 19 nt, Artificial Sequence
  Description of Artificial Sequence: Synthetic oligonucleotide
uagaacguaagcaaagcaa

SEQ ID NO: 268913 - RNA, 19 nt, Artificial Sequence
  Description of Artificial Sequence: Synthetic oligonucleotide
uuagaacguaagcaaagca

SEQ ID NO: 268914 - RNA, 19 nt, Artificial Sequence
  Description of Artificial Sequence: Synthetic oligonucleotide
ucauggauagcuuuucgga

SEQ ID NO: 268915 - RNA, 19 nt, Artificial Sequence
  Description of Artificial Sequence: Synthetic oligonucleotide
gacacuacucaagugaaag

SEQ ID NO: 268916 - RNA, 19 nt, Artificial Sequence
  Description of Artificial Sequence: Synthetic oligonucleotide
aaagcuaagauggagcuuu

SEQ ID NO: 268917 - RNA, 19 nt, Artificial Sequence
  Description of Artificial Sequence: Synthetic oligonucleotide
ucccuaagaaugcaaacca

SEQ ID NO: 268918 - RNA, 19 nt, Artificial Sequence
  Description of Artificial Sequence: Synthetic oligonucleotide
gaugcuagucaaauaaagc

SEQ ID NO: 268919 - RNA, 19 nt, Artificial Sequence
  Description of Artificial Sequence: Synthetic oligonucleotide
uacuccaacuauuuaaggu

SEQ ID NO: 268920 - RNA, 19 nt, Artificial Sequence
  Description of Artificial Sequence: Synthetic oligonucleotide
augacauauaucaaugcuc

SEQ ID NO: 268921 - RNA, 19 nt, Artificial Sequence
  Description of Artificial Sequence: Synthetic oligonucleotide
uauugauacccauuuuaca

SEQ ID NO: 268922 - RNA, 19 nt, Artificial Sequence
  Description of Artificial Sequence: Synthetic oligonucleotide
aauacucaagagucaguca

SEQ ID NO: 268923 - RNA, 19 nt, Artificial Sequence
  Description of Artificial Sequence: Synthetic oligonucleotide
aguacauguuacucaacag

SEQ ID NO: 268924 - RNA, 19 nt, Artificial Sequence
  Description of Artificial Sequence: Synthetic oligonucleotide
aagcguauaaaacucgguu

SEQ ID NO: 268925 - RNA, 19 nt, Artificial Sequence
  Description of Artificial Sequence: Synthetic oligonucleotide
uuuggaguaaauacauuua

SEQ ID NO: 268926 - RNA, 19 nt, Artificial Sequence
  Description of Artificial Sequence: Synthetic oligonucleotide
aaagagauaguagcuucag

SEQ ID NO: 268927 - RNA, 19 nt, Artificial Sequence
  Description of Artificial Sequence: Synthetic oligonucleotide
uuacuccaacuauuuaagg

SEQ ID NO: 268928 - RNA, 19 nt, Artificial Sequence
  Description of Artificial Sequence: Synthetic oligonucleotide
auauugaguggucauagau

SEQ ID NO: 268929 - RNA, 19 nt, Artificial Sequence
  Description of Artificial Sequence: Synthetic oligonucleotide
agugaaagccuaaaggaag

SEQ ID NO: 268930 - RNA, 19 nt, Artificial Sequence
  Description of Artificial Sequence: Synthetic oligonucleotide
auacucaagagucagucau

SEQ ID NO: 268931 - RNA, 19 nt, Artificial Sequence
  Description of Artificial Sequence: Synthetic oligonucleotide
aggcuucaaauauugagug

SEQ ID NO: 268932 - RNA, 19 nt, Artificial Sequence
  Description of Artificial Sequence: Synthetic oligonucleotide
acguaagcaaagcaagguc

SEQ ID NO: 268933 - RNA, 19 nt, Artificial Sequence
  Description of Artificial Sequence: Synthetic oligonucleotide
aaaugacgagagcgcaucg

SEQ ID NO: 268934 - RNA, 19 nt, Artificial Sequence
  Description of Artificial Sequence: Synthetic oligonucleotide
cacuacucaagugaaagcc

SEQ ID NO: 268935 - RNA, 19 nt, Artificial Sequence
  Description of Artificial Sequence: Synthetic oligonucleotide
agaacguaagcaaagcaag

SEQ ID NO: 268936 - RNA, 19 nt, Artificial Sequence
  Description of Artificial Sequence: Synthetic oligonucleotide
gcgucaaugacauauauca

SEQ ID NO: 268937 - RNA, 19 nt, Artificial Sequence
  Description of Artificial Sequence: Synthetic oligonucleotide
aacaguaaugugaagucgu

SEQ ID NO: 268938 - RNA, 19 nt, Artificial Sequence
  Description of Artificial Sequence: Synthetic oligonucleotide
uuuagacacuacucaagug

SEQ ID NO: 268939 - RNA, 19 nt, Artificial Sequence
  Description of Artificial Sequence: Synthetic oligonucleotide
uucccuaagaaugcaaacc

SEQ ID NO: 268940 - RNA, 19 nt, Artificial Sequence
  Description of Artificial Sequence: Synthetic oligonucleotide
cagaccaucaacuuuguga

SEQ ID NO: 268941 - RNA, 19 nt, Artificial Sequence
  Description of Artificial Sequence: Synthetic oligonucleotide
caaugacauauaucaaugc

SEQ ID NO: 268942 - RNA, 19 nt, Artificial Sequence
  Description of Artificial Sequence: Synthetic oligonucleotide
aauauugaguggucauaga

SEQ ID NO: 268943 - RNA, 19 nt, Artificial Sequence
  Description of Artificial Sequence: Synthetic oligonucleotide
ucguguuaaagccuccaug

SEQ ID NO: 268944 - RNA, 19 nt, Artificial Sequence
  Description of Artificial Sequence: Synthetic oligonucleotide
uccuauuguuuuaggcugg

SEQ ID NO: 268945 - RNA, 19 nt, Artificial Sequence
  Description of Artificial Sequence: Synthetic oligonucleotide
uuacucaacagcgacgcug

SEQ ID NO: 268946 - RNA, 19 nt, Artificial Sequence
  Description of Artificial Sequence: Synthetic oligonucleotide
acauauaucaaugcuccug

SEQ ID NO: 268947 - RNA, 19 nt, Artificial Sequence
  Description of Artificial Sequence: Synthetic oligonucleotide
aguucauaagacugcauau

SEQ ID NO: 268948 - RNA, 19 nt, Artificial Sequence
  Description of Artificial Sequence: Synthetic oligonucleotide
uggugucagaauaccagag

SEQ ID NO: 268949 - RNA, 19 nt, Artificial Sequence
  Description of Artificial Sequence: Synthetic oligonucleotide
aaaauucaugucuggguua

SEQ ID NO: 268950 - RNA, 19 nt, Artificial Sequence
  Description of Artificial Sequence: Synthetic oligonucleotide
gaucaaaugacgagagcgc

SEQ ID NO: 268951 - RNA, 19 nt, Artificial Sequence
  Description of Artificial Sequence: Synthetic oligonucleotide
ucccuuugcgacauugugc

SEQ ID NO: 268952 - RNA, 19 nt, Artificial Sequence
  Description of Artificial Sequence: Synthetic oligonucleotide
agaugcuagucaaauaaag

SEQ ID NO: 268953 - RNA, 19 nt, Artificial Sequence
  Description of Artificial Sequence: Synthetic oligonucleotide
ugaagucguguuaaagccu

SEQ ID NO: 268954 - RNA, 19 nt, Artificial Sequence
  Description of Artificial Sequence: Synthetic oligonucleotide
gugacuacugggcaugugc

SEQ ID NO: 268955 - RNA, 19 nt, Artificial Sequence
  Description of Artificial Sequence: Synthetic oligonucleotide
augacgagagcgcaucguc

SEQ ID NO: 268956 - RNA, 19 nt, Artificial Sequence
  Description of Artificial Sequence: Synthetic oligonucleotide
uuguccccucacuauaggg

SEQ ID NO: 268957 - RNA, 19 nt, Artificial Sequence
  Description of Artificial Sequence: Synthetic oligonucleotide
guugcaauguagauuuugc

SEQ ID NO: 268958 - RNA, 19 nt, Artificial Sequence
  Description of Artificial Sequence: Synthetic oligonucleotide
aauaccagagacaggguau

SEQ ID NO: 268959 - RNA, 19 nt, Artificial Sequence
  Description of Artificial Sequence: Synthetic oligonucleotide
uggggaacgagucggcugc

SEQ ID NO: 268960 - RNA, 19 nt, Artificial Sequence
  Description of Artificial Sequence: Synthetic oligonucleotide
uugugccguaguuuaaaag

SEQ ID NO: 268961 - RNA, 19 nt, Artificial Sequence
  Description of Artificial Sequence: Synthetic oligonucleotide
guuguagucuaucaaaccu

SEQ ID NO: 268962 - RNA, 19 nt, Artificial Sequence
  Description of Artificial Sequence: Synthetic oligonucleotide
aggucuuuagacacuacuc

SEQ ID NO: 268963 - RNA, 19 nt, Artificial Sequence
  Description of Artificial Sequence: Synthetic oligonucleotide
ugacuacugggcaugugca

SEQ ID NO: 268964 - RNA, 19 nt, Artificial Sequence
  Description of Artificial Sequence: Synthetic oligonucleotide
ucuuaugaaacaccaccuu

SEQ ID NO: 268965 - RNA, 19 nt, Artificial Sequence
  Description of Artificial Sequence: Synthetic oligonucleotide
ugggaaagguaucagccau

SEQ ID NO: 268966 - RNA, 19 nt, Artificial Sequence
  Description of Artificial Sequence: Synthetic oligonucleotide
guuagaacguaagcaaagc

SEQ ID NO: 268967 - RNA, 19 nt, Artificial Sequence
  Description of Artificial Sequence: Synthetic oligonucleotide
agcguauaaaacucgguuu

SEQ ID NO: 268968 - RNA, 19 nt, Artificial Sequence
  Description of Artificial Sequence: Synthetic oligonucleotide
uggauagcuuuucggaaac

SEQ ID NO: 268969 - RNA, 19 nt, Artificial Sequence
  Description of Artificial Sequence: Synthetic oligonucleotide
uugcaauguagauuuugcu

SEQ ID NO: 268970 - RNA, 19 nt, Artificial Sequence
  Description of Artificial Sequence: Synthetic oligonucleotide
ucggaaacaguggaaguug

SEQ ID NO: 268971 - RNA, 19 nt, Artificial Sequence
  Description of Artificial Sequence: Synthetic oligonucleotide
gaaaagugagcuaaguagu

SEQ ID NO: 268972 - RNA, 19 nt, Artificial Sequence
  Description of Artificial Sequence: Synthetic oligonucleotide
ucgauugcugagauucaca

SEQ ID NO: 268973 - RNA, 19 nt, Artificial Sequence
  Description of Artificial Sequence: Synthetic oligonucleotide
uccaaaguuggcaguugug

SEQ ID NO: 268974 - RNA, 19 nt, Artificial Sequence
  Description of Artificial Sequence: Synthetic oligonucleotide
cacaccguagccgaagucc

SEQ ID NO: 268975 - RNA, 19 nt, Artificial Sequence
  Description of Artificial Sequence: Synthetic oligonucleotide
auaaugaguuuguccccuc

SEQ ID NO: 268976 - RNA, 19 nt, Artificial Sequence
  Description of Artificial Sequence: Synthetic oligonucleotide
cuucccuaagaaugcaaac

SEQ ID NO: 268977 - RNA, 19 nt, Artificial Sequence
  Description of Artificial Sequence: Synthetic oligonucleotide
ugcuagguuacagaccuga

SEQ ID NO: 268978 - RNA, 19 nt, Artificial Sequence
  Description of Artificial Sequence: Synthetic oligonucleotide
gacgagagcgcaucgucug

SEQ ID NO: 268979 - RNA, 19 nt, Artificial Sequence
  Description of Artificial Sequence: Synthetic oligonucleotide
uauaggggacgcuggggag

SEQ ID NO: 268980 - RNA, 19 nt, Artificial Sequence
  Description of Artificial Sequence: Synthetic oligonucleotide
aguucugaggucucuguaa

SEQ ID NO: 268981 - RNA, 19 nt, Artificial Sequence
  Description of Artificial Sequence: Synthetic oligonucleotide
cuuugcgacauugugcaug

SEQ ID NO: 268982 - RNA, 19 nt, Artificial Sequence
  Description of Artificial Sequence: Synthetic oligonucleotide
ugcgucaaugacauauauc

SEQ ID NO: 268983 - RNA, 19 nt, Artificial Sequence
  Description of Artificial Sequence: Synthetic oligonucleotide
auggauagcuuuucggaaa

SEQ ID NO: 268984 - RNA, 19 nt, Artificial Sequence
  Description of Artificial Sequence: Synthetic oligonucleotide
caaucaugucacagcaaag

SEQ ID NO: 268985 - RNA, 19 nt, Artificial Sequence
  Description of Artificial Sequence: Synthetic oligonucleotide
accugaguacauguuacuc

SEQ ID NO: 268986 - RNA, 19 nt, Artificial Sequence
  Description of Artificial Sequence: Synthetic oligonucleotide
uuaaccuuguaggcuuuag

SEQ ID NO: 268987 - RNA, 19 nt, Artificial Sequence
  Description of Artificial Sequence: Synthetic oligonucleotide
uaacauacacuguccccug

SEQ ID NO: 268988 - RNA, 19 nt, Artificial Sequence
  Description of Artificial Sequence: Synthetic oligonucleotide
aucuuaugaaacaccaccu

SEQ ID NO: 268989 - RNA, 19 nt, Artificial Sequence
  Description of Artificial Sequence: Synthetic oligonucleotide
guaggacccaaagagaaga

SEQ ID NO: 268990 - RNA, 19 nt, Artificial Sequence
  Description of Artificial Sequence: Synthetic oligonucleotide
uggguuaaccuuguaggcu

SEQ ID NO: 268991 - RNA, 19 nt, Artificial Sequence
  Description of Artificial Sequence: Synthetic oligonucleotide
aaugacgagagcgcaucgu

SEQ ID NO: 268992 - RNA, 19 nt, Artificial Sequence
  Description of Artificial Sequence: Synthetic oligonucleotide
gagauucacacuagauggc

SEQ ID NO: 268993 - RNA, 19 nt, Artificial Sequence
  Description of Artificial Sequence: Synthetic oligonucleotide
agauucacacuagauggca

SEQ ID NO: 268994 - RNA, 19 nt, Artificial Sequence
  Description of Artificial Sequence: Synthetic oligonucleotide
uuugugccguaguuuaaaa

SEQ ID NO: 268995 - RNA, 19 nt, Artificial Sequence
  Description of Artificial Sequence: Synthetic oligonucleotide
aggaagcguauaaaacucg

SEQ ID NO: 268996 - RNA, 19 nt, Artificial Sequence
  Description of Artificial Sequence: Synthetic oligonucleotide
uuuugugccguaguuuaaa

SEQ ID NO: 268997 - RNA, 19 nt, Artificial Sequence
  Description of Artificial Sequence: Synthetic oligonucleotide
ugacgagagcgcaucgucu

SEQ ID NO: 268998 - RNA, 19 nt, Artificial Sequence
  Description of Artificial Sequence: Synthetic oligonucleotide
guaggcuuuagaaacagua

SEQ ID NO: 268999 - RNA, 19 nt, Artificial Sequence
  Description of Artificial Sequence: Synthetic oligonucleotide
acgagagcgcaucgucugc

SEQ ID NO: 269000 - RNA, 19 nt, Artificial Sequence
  Description of Artificial Sequence: Synthetic oligonucleotide
ucauugggugacaucuuau

SEQ ID NO: 269001 - RNA, 19 nt, Artificial Sequence
  Description of Artificial Sequence: Synthetic oligonucleotide
acgcugaugcgcucgagug

SEQ ID NO: 269002 - RNA, 19 nt, Artificial Sequence
  Description of Artificial Sequence: Synthetic oligonucleotide
gugccguaguuuaaaagag

SEQ ID NO: 269003 - RNA, 19 nt, Artificial Sequence
  Description of Artificial Sequence: Synthetic oligonucleotide
cuaagauggagcuuuucua

SEQ ID NO: 269004 - RNA, 19 nt, Artificial Sequence
  Description of Artificial Sequence: Synthetic oligonucleotide
ggaagcguauaaaacucgg

SEQ ID NO: 269005 - RNA, 19 nt, Artificial Sequence
  Description of Artificial Sequence: Synthetic oligonucleotide
aauucaugucuggguuaac

SEQ ID NO: 269006 - RNA, 19 nt, Artificial Sequence
  Description of Artificial Sequence: Synthetic oligonucleotide
auguuacucaacagcgacg

SEQ ID NO: 269007 - RNA, 19 nt, Artificial Sequence
  Description of Artificial Sequence: Synthetic oligonucleotide
aagagccuacacagcauag

SEQ ID NO: 269008 - RNA, 19 nt, Artificial Sequence
  Description of Artificial Sequence: Synthetic oligonucleotide
uacucaagagucagucauc

SEQ ID NO: 269009 - RNA, 19 nt, Artificial Sequence
  Description of Artificial Sequence: Synthetic oligonucleotide
cacuauaggggacgcuggg

SEQ ID NO: 269010 - RNA, 19 nt, Artificial Sequence
  Description of Artificial Sequence: Synthetic oligonucleotide
cauauaucaaugcuccugu

SEQ ID NO: 269011 - RNA, 19 nt, Artificial Sequence
  Description of Artificial Sequence: Synthetic oligonucleotide
agagcgcaucgucugccac

SEQ ID NO: 269012 - RNA, 19 nt, Artificial Sequence
  Description of Artificial Sequence: Synthetic oligonucleotide
uacucaagugaaagccuaa

SEQ ID NO: 269013 - RNA, 19 nt, Artificial Sequence
  Description of Artificial Sequence: Synthetic oligonucleotide
ugugcgucaaugacauaua

SEQ ID NO: 269014 - RNA, 19 nt, Artificial Sequence
  Description of Artificial Sequence: Synthetic oligonucleotide
uucacacuagauggcauuc

SEQ ID NO: 269015 - RNA, 19 nt, Artificial Sequence
  Description of Artificial Sequence: Synthetic oligonucleotide
acuacucaagugaaagccu

SEQ ID NO: 269016 - RNA, 19 nt, Artificial Sequence
  Description of Artificial Sequence: Synthetic oligonucleotide
cucggcgugccauugugug

SEQ ID NO: 269017 - RNA, 19 nt, Artificial Sequence
  Description of Artificial Sequence: Synthetic oligonucleotide
ucuaagcgagaaacuccac

SEQ ID NO: 269018 - RNA, 19 nt, Artificial Sequence
  Description of Artificial Sequence: Synthetic oligonucleotide
gguaucagccaugaacaag

SEQ ID NO: 269019 - RNA, 19 nt, Artificial Sequence
  Description of Artificial Sequence: Synthetic oligonucleotide
cauggauagcuuuucggaa

SEQ ID NO: 269020 - RNA, 19 nt, Artificial Sequence
  Description of Artificial Sequence: Synthetic oligonucleotide
gagagucucauugggugac

SEQ ID NO: 269021 - RNA, 19 nt, Artificial Sequence
  Description of Artificial Sequence: Synthetic oligonucleotide
auaccagagacaggguaug

SEQ ID NO: 269022 - RNA, 19 nt, Artificial Sequence
  Description of Artificial Sequence: Synthetic oligonucleotide
cuagcccagcaucugcaag

SEQ ID NO: 269023 - RNA, 19 nt, Artificial Sequence
  Description of Artificial Sequence: Synthetic oligonucleotide
gauaauggccaucgauucu

SEQ ID NO: 269024 - RNA, 19 nt, Artificial Sequence
  Description of Artificial Sequence: Synthetic oligonucleotide
uccguaacugccggccagg

SEQ ID NO: 269025 - RNA, 19 nt, Artificial Sequence
  Description of Artificial Sequence: Synthetic oligonucleotide
uccacaccguagccgaagu

SEQ ID NO: 269026 - RNA, 19 nt, Artificial Sequence
  Description of Artificial Sequence: Synthetic oligonucleotide
agugagcuaaguaguucag

SEQ ID NO: 269027 - RNA, 19 nt, Artificial Sequence
  Description of Artificial Sequence: Synthetic oligonucleotide
gccucgauugcugagauuc

SEQ ID NO: 269028 - RNA, 19 nt, Artificial Sequence
  Description of Artificial Sequence: Synthetic oligonucleotide
aguggucauagaugcuagu

SEQ ID NO: 269029 - RNA, 19 nt, Artificial Sequence
  Description of Artificial Sequence: Synthetic oligonucleotide
aagccuaaaggaagcguau

SEQ ID NO: 269030 - RNA, 19 nt, Artificial Sequence
  Description of Artificial Sequence: Synthetic oligonucleotide
guuuuaggcuggaauugac

SEQ ID NO: 269031 - RNA, 19 nt, Artificial Sequence
  Description of Artificial Sequence: Synthetic oligonucleotide
guccccucacuauagggga

SEQ ID NO: 269032 - RNA, 19 nt, Artificial Sequence
  Description of Artificial Sequence: Synthetic oligonucleotide
cucgauugcugagauucac

SEQ ID NO: 269033 - RNA, 19 nt, Artificial Sequence
  Description of Artificial Sequence: Synthetic oligonucleotide
ggaacgagucggcugcucc

SEQ ID NO: 269034 - RNA, 19 nt, Artificial Sequence
  Description of Artificial Sequence: Synthetic oligonucleotide
acagaccaucaacuuugug

SEQ ID NO: 269035 - RNA, 19 nt, Artificial Sequence
  Description of Artificial Sequence: Synthetic oligonucleotide
agagccuacacagcauaga

SEQ ID NO: 269036 - RNA, 19 nt, Artificial Sequence
  Description of Artificial Sequence: Synthetic oligonucleotide
gcuagucaaauaaagcuaa

SEQ ID NO: 269037 - RNA, 19 nt, Artificial Sequence
  Description of Artificial Sequence: Synthetic oligonucleotide
ucggcgugccauugugugc

SEQ ID NO: 269038 - RNA, 19 nt, Artificial Sequence
  Description of Artificial Sequence: Synthetic oligonucleotide
aacgagucggcugcuccgu

SEQ ID NO: 269039 - RNA, 19 nt, Artificial Sequence
  Description of Artificial Sequence: Synthetic oligonucleotide
cucaacagcgacgcugaug

SEQ ID NO: 269040 - RNA, 19 nt, Artificial Sequence
  Description of Artificial Sequence: Synthetic oligonucleotide
cugcauauccacaggggaa

SEQ ID NO: 269041 - RNA, 19 nt, Artificial Sequence
  Description of Artificial Sequence: Synthetic oligonucleotide
accaugguccauguaaaua

SEQ ID NO: 269042 - RNA, 19 nt, Artificial Sequence
  Description of Artificial Sequence: Synthetic oligonucleotide
ucucauugggugacaucuu

SEQ ID NO: 269043 - RNA, 19 nt, Artificial Sequence
  Description of Artificial Sequence: Synthetic oligonucleotide
gcuaagauggagcuuuucu

SEQ ID NO: 269044 - RNA, 19 nt, Artificial Sequence
  Description of Artificial Sequence: Synthetic oligonucleotide
ccugaguacauguuacuca

SEQ ID NO: 269045 - RNA, 19 nt, Artificial Sequence
  Description of Artificial Sequence: Synthetic oligonucleotide
gaaagccuaaaggaagcgu

SEQ ID NO: 269046 - RNA, 19 nt, Artificial Sequence
  Description of Artificial Sequence: Synthetic oligonucleotide
auccugugcgucaaugaca

SEQ ID NO: 269047 - RNA, 19 nt, Artificial Sequence
  Description of Artificial Sequence: Synthetic oligonucleotide
cgauugcugagauucacac

SEQ ID NO: 269048 - RNA, 19 nt, Artificial Sequence
  Description of Artificial Sequence: Synthetic oligonucleotide
agguaucagccaugaacaa

SEQ ID NO: 269049 - RNA, 19 nt, Artificial Sequence
  Description of Artificial Sequence: Synthetic oligonucleotide
cuuucaucuaagcgagaaa

SEQ ID NO: 269050 - RNA, 19 nt, Artificial Sequence
  Description of Artificial Sequence: Synthetic oligonucleotide
gaugcgcucgaguggccca

SEQ ID NO: 269051 - RNA, 19 nt, Artificial Sequence
  Description of Artificial Sequence: Synthetic oligonucleotide
ggaaagguaucagccauga

SEQ ID NO: 269052 - RNA, 19 nt, Artificial Sequence
  Description of Artificial Sequence: Synthetic oligonucleotide
cggucugagagguacagug

SEQ ID NO: 269053 - RNA, 19 nt, Artificial Sequence
  Description of Artificial Sequence: Synthetic oligonucleotide
uccccucacuauaggggac

SEQ ID NO: 269054 - RNA, 19 nt, Artificial Sequence
  Description of Artificial Sequence: Synthetic oligonucleotide
cgauucuuugucauaagca

SEQ ID NO: 269055 - RNA, 19 nt, Artificial Sequence
  Description of Artificial Sequence: Synthetic oligonucleotide
acagcgacgcugaugcgcu

SEQ ID NO: 269056 - RNA, 19 nt, Artificial Sequence
  Description of Artificial Sequence: Synthetic oligonucleotide
gacauauaucaaugcuccu

SEQ ID NO: 269057 - RNA, 19 nt, Artificial Sequence
  Description of Artificial Sequence: Synthetic oligonucleotide
ggauccguggcuuggagcu

SEQ ID NO: 269058 - RNA, 19 nt, Artificial Sequence
  Description of Artificial Sequence: Synthetic oligonucleotide
guggaaguuguagucuauc

SEQ ID NO: 269059 - RNA, 19 nt, Artificial Sequence
  Description of Artificial Sequence: Synthetic oligonucleotide
gaagcguauaaaacucggu

SEQ ID NO: 269060 - RNA, 19 nt, Artificial Sequence
  Description of Artificial Sequence: Synthetic oligonucleotide
cugugcgucaaugacauau

SEQ ID NO: 269061 - RNA, 19 nt, Artificial Sequence
  Description of Artificial Sequence: Synthetic oligonucleotide
cucauugggugacaucuua

SEQ ID NO: 269062 - RNA, 19 nt, Artificial Sequence
  Description of Artificial Sequence: Synthetic oligonucleotide
ccauguagucauccugugc

SEQ ID NO: 269063 - RNA, 19 nt, Artificial Sequence
  Description of Artificial Sequence: Synthetic oligonucleotide
cauaaugaguuuguccccu

SEQ ID NO: 269064 - RNA, 19 nt, Artificial Sequence
  Description of Artificial Sequence: Synthetic oligonucleotide
acaccguagccgaaguccu

SEQ ID NO: 269065 - RNA, 19 nt, Artificial Sequence
  Description of Artificial Sequence: Synthetic oligonucleotide
auuuaagguaggacccaaa

SEQ ID NO: 269066 - RNA, 19 nt, Artificial Sequence
  Description of Artificial Sequence: Synthetic oligonucleotide
gaccugaguacauguuacu

SEQ ID NO: 269067 - RNA, 19 nt, Artificial Sequence
  Description of Artificial Sequence: Synthetic oligonucleotide
cuuuugugccguaguuuaa

SEQ ID NO: 269068 - RNA, 19 nt, Artificial Sequence
  Description of Artificial Sequence: Synthetic oligonucleotide
ccuaagaaugcaaaccagu

SEQ ID NO: 269069 - RNA, 19 nt, Artificial Sequence
  Description of Artificial Sequence: Synthetic oligonucleotide
caugguccauguaaauacu

SEQ ID NO: 269070 - RNA, 19 nt, Artificial Sequence
  Description of Artificial Sequence: Synthetic oligonucleotide
cugacacuuggugucagaa

SEQ ID NO: 269071 - RNA, 19 nt, Artificial Sequence
  Description of Artificial Sequence: Synthetic oligonucleotide
gaggcaguguuagaacgua

SEQ ID NO: 269072 - RNA, 19 nt, Artificial Sequence
  Description of Artificial Sequence: Synthetic oligonucleotide
cugaugcgcucgaguggcc

SEQ ID NO: 269073 - RNA, 19 nt, Artificial Sequence
  Description of Artificial Sequence: Synthetic oligonucleotide
cugucagcgccgcccgggc

SEQ ID NO: 269074 - RNA, 19 nt, Artificial Sequence
  Description of Artificial Sequence: Synthetic oligonucleotide
gacgccgcgcacacacacc

SEQ ID NO: 269075 - RNA, 19 nt, Artificial Sequence
  Description of Artificial Sequence: Synthetic oligonucleotide
ggagcuuuucuagcccagc

SEQ ID NO: 269076 - RNA, 19 nt, Artificial Sequence
  Description of Artificial Sequence: Synthetic oligonucleotide
gauccguggcuuggagcug

SEQ ID NO: 269077 - RNA, 19 nt, Artificial Sequence
  Description of Artificial Sequence: Synthetic oligonucleotide
agccuaaaggaagcguaua

SEQ ID NO: 269078 - RNA, 19 nt, Artificial Sequence
  Description of Artificial Sequence: Synthetic oligonucleotide
gcguauaaaacucgguuuu

SEQ ID NO: 269079 - RNA, 19 nt, Artificial Sequence
  Description of Artificial Sequence: Synthetic oligonucleotide
gcuagguuacagaccugag

SEQ ID NO: 269080 - RNA, 19 nt, Artificial Sequence
  Description of Artificial Sequence: Synthetic oligonucleotide
agacacuacucaagugaaa

SEQ ID NO: 269081 - RNA, 19 nt, Artificial Sequence
  Description of Artificial Sequence: Synthetic oligonucleotide
ggguuaaccuuguaggcuu

SEQ ID NO: 269082 - RNA, 19 nt, Artificial Sequence
  Description of Artificial Sequence: Synthetic oligonucleotide
ggucugagagguacaguga

SEQ ID NO: 269083 - RNA, 19 nt, Artificial Sequence
  Description of Artificial Sequence: Synthetic oligonucleotide
gugcaugaucaugaucaaa

SEQ ID NO: 269084 - RNA, 19 nt, Artificial Sequence
  Description of Artificial Sequence: Synthetic oligonucleotide
gugcgucaaugacauauau

SEQ ID NO: 269085 - RNA, 19 nt, Artificial Sequence
  Description of Artificial Sequence: Synthetic oligonucleotide
acggucugagagguacagu

SEQ ID NO: 269086 - RNA, 19 nt, Artificial Sequence
  Description of Artificial Sequence: Synthetic oligonucleotide
ccacccaaacccaggugug

SEQ ID NO: 269087 - RNA, 19 nt, Artificial Sequence
  Description of Artificial Sequence: Synthetic oligonucleotide
gugagcuaaguaguucagu

SEQ ID NO: 269088 - RNA, 19 nt, Artificial Sequence
  Description of Artificial Sequence: Synthetic oligonucleotide
gccguaguuuaaaagagau

SEQ ID NO: 269089 - RNA, 19 nt, Artificial Sequence
  Description of Artificial Sequence: Synthetic oligonucleotide
acacaccgccucuuuucuu

SEQ ID NO: 269090 - RNA, 19 nt, Artificial Sequence
  Description of Artificial Sequence: Synthetic oligonucleotide
ccccucacuauaggggacg

SEQ ID NO: 269091 - RNA, 19 nt, Artificial Sequence
  Description of Artificial Sequence: Synthetic oligonucleotide
cacacaccgccucuuuucu

SEQ ID NO: 269092 - RNA, 19 nt, Artificial Sequence
  Description of Artificial Sequence: Synthetic oligonucleotide
guuaaccuuguaggcuuua

SEQ ID NO: 269093 - RNA, 19 nt, Artificial Sequence
  Description of Artificial Sequence: Synthetic oligonucleotide
aggcaguguuagaacguaa

SEQ ID NO: 269094 - RNA, 19 nt, Artificial Sequence
  Description of Artificial Sequence: Synthetic oligonucleotide
acucaacagcgacgcugau

SEQ ID NO: 269095 - RNA, 19 nt, Artificial Sequence
  Description of Artificial Sequence: Synthetic oligonucleotide
guuacucaacagcgacgcu

SEQ ID NO: 269096 - RNA, 19 nt, Artificial Sequence
  Description of Artificial Sequence: Synthetic oligonucleotide
cugcgccgcagucccauga

SEQ ID NO: 269097 - RNA, 19 nt, Artificial Sequence
  Description of Artificial Sequence: Synthetic oligonucleotide
cguaacugccggccagggg

SEQ ID NO: 269098 - RNA, 19 nt, Artificial Sequence
  Description of Artificial Sequence: Synthetic oligonucleotide
cgcucgaguggcccagugg

SEQ ID NO: 269099 - RNA, 19 nt, Artificial Sequence
  Description of Artificial Sequence: Synthetic oligonucleotide
cuuggggaacgagucggcu

SEQ ID NO: 269100 - RNA, 19 nt, Artificial Sequence
  Description of Artificial Sequence: Synthetic oligonucleotide
gagccggccgaagagcuuu

SEQ ID NO: 269101 - RNA, 19 nt, Artificial Sequence
  Description of Artificial Sequence: Synthetic oligonucleotide
cucgaguggcccaguggcu

SEQ ID NO: 269102 - RNA, 19 nt, Artificial Sequence
  Description of Artificial Sequence: Synthetic oligonucleotide
gucucacugcuagguuaca

SEQ ID NO: 269103 - RNA, 19 nt, Artificial Sequence
  Description of Artificial Sequence: Synthetic oligonucleotide
guagucuaucaaaccuuuu

SEQ ID NO: 269104 - RNA, 19 nt, Artificial Sequence
  Description of Artificial Sequence: Synthetic oligonucleotide
gacuugccgcugcgccgca

SEQ ID NO: 269105 - RNA, 19 nt, Artificial Sequence
  Description of Artificial Sequence: Synthetic oligonucleotide
cauuggcccucugaugaau

SEQ ID NO: 269106 - RNA, 19 nt, Artificial Sequence
  Description of Artificial Sequence: Synthetic oligonucleotide
uugcgacauugugcaugau

SEQ ID NO: 269107 - RNA, 19 nt, Artificial Sequence
  Description of Artificial Sequence: Synthetic oligonucleotide
gcgacgcugaugcgcucga

SEQ ID NO: 269108 - RNA, 19 nt, Artificial Sequence
  Description of Artificial Sequence: Synthetic oligonucleotide
ggcgugccauugugugcca

SEQ ID NO: 269109 - RNA, 19 nt, Artificial Sequence
  Description of Artificial Sequence: Synthetic oligonucleotide
cgucugccacccaaaccca

SEQ ID NO: 269110 - RNA, 19 nt, Artificial Sequence
  Description of Artificial Sequence: Synthetic oligonucleotide
gguuaaccuuguaggcuuu

SEQ ID NO: 269111 - RNA, 19 nt, Artificial Sequence
  Description of Artificial Sequence: Synthetic oligonucleotide
gcgcccugacaggccaggc

SEQ ID NO: 269112 - RNA, 19 nt, Artificial Sequence
  Description of Artificial Sequence: Synthetic oligonucleotide
cgcgcccugacaggccagg

SEQ ID NO: 269113 - RNA, 19 nt, Artificial Sequence
  Description of Artificial Sequence: Synthetic oligonucleotide
ccucggcgugccauugugu

SEQ ID NO: 269114 - RNA, 19 nt, Artificial Sequence
  Description of Artificial Sequence: Synthetic oligonucleotide
ccuuugcgacauugugcau

SEQ ID NO: 269115 - RNA, 19 nt, Artificial Sequence
  Description of Artificial Sequence: Synthetic oligonucleotide
aauauggccaacucuaagc

SEQ ID NO: 269116 - RNA, 19 nt, Artificial Sequence
  Description of Artificial Sequence: Synthetic oligonucleotide
uguuaggacacauugaggc

SEQ ID NO: 269117 - RNA, 19 nt, Artificial Sequence
  Description of Artificial Sequence: Synthetic oligonucleotide
caucauagcacaaauagac

SEQ ID NO: 269118 - RNA, 19 nt, Artificial Sequence
  Description of Artificial Sequence: Synthetic oligonucleotide
ucauagcacaaauagaccc

SEQ ID NO: 269119 - RNA, 19 nt, Artificial Sequence
  Description of Artificial Sequence: Synthetic oligonucleotide
ugauagaugguauuuauau

SEQ ID NO: 269120 - RNA, 19 nt, Artificial Sequence
  Description of Artificial Sequence: Synthetic oligonucleotide
uccugaacugcccagagcc

SEQ ID NO: 269121 - RNA, 19 nt, Artificial Sequence
  Description of Artificial Sequence: Synthetic oligonucleotide
aaauagacccugccaaagg

SEQ ID NO: 269122 - RNA, 19 nt, Artificial Sequence
  Description of Artificial Sequence: Synthetic oligonucleotide
auccuaaggcucuucaugc

SEQ ID NO: 269123 - RNA, 19 nt, Artificial Sequence
  Description of Artificial Sequence: Synthetic oligonucleotide
agcacuaggagauuugguc

SEQ ID NO: 269124 - RNA, 19 nt, Artificial Sequence
  Description of Artificial Sequence: Synthetic oligonucleotide
aaguucacguccugugucc

SEQ ID NO: 269125 - RNA, 19 nt, Artificial Sequence
  Description of Artificial Sequence: Synthetic oligonucleotide
ugaggaucuucucagcacg

SEQ ID NO: 269126 - RNA, 19 nt, Artificial Sequence
  Description of Artificial Sequence: Synthetic oligonucleotide
acugguaugguuucuaucu

SEQ ID NO: 269127 - RNA, 19 nt, Artificial Sequence
  Description of Artificial Sequence: Synthetic oligonucleotide
uuuaccucaggcuugcagc

SEQ ID NO: 269128 - RNA, 19 nt, Artificial Sequence
  Description of Artificial Sequence: Synthetic oligonucleotide
ugucaauugcuuuaucgag

SEQ ID NO: 269129 - RNA, 19 nt, Artificial Sequence
  Description of Artificial Sequence: Synthetic oligonucleotide
caugcuugagcuucuaucc

SEQ ID NO: 269130 - RNA, 19 nt, Artificial Sequence
  Description of Artificial Sequence: Synthetic oligonucleotide
gaauagguugccuugcgcc

SEQ ID NO: 269131 - RNA, 19 nt, Artificial Sequence
  Description of Artificial Sequence: Synthetic oligonucleotide
gucccugacaugcagaugg

SEQ ID NO: 269132 - RNA, 19 nt, Artificial Sequence
  Description of Artificial Sequence: Synthetic oligonucleotide
uacaguacagcccaggcuc

SEQ ID NO: 269133 - RNA, 19 nt, Artificial Sequence
  Description of Artificial Sequence: Synthetic oligonucleotide
uauccuaaggcucuucaug

SEQ ID NO: 269134 - RNA, 19 nt, Artificial Sequence
  Description of Artificial Sequence: Synthetic oligonucleotide
agaugguauuuauaucccc

SEQ ID NO: 269135 - RNA, 19 nt, Artificial Sequence
  Description of Artificial Sequence: Synthetic oligonucleotide
uaacaguaguauccuaagg

SEQ ID NO: 269136 - RNA, 19 nt, Artificial Sequence
  Description of Artificial Sequence: Synthetic oligonucleotide
uuauauccccugcagacug

SEQ ID NO: 269137 - RNA, 19 nt, Artificial Sequence
  Description of Artificial Sequence: Synthetic oligonucleotide
ucuaucuugggauaacagu

SEQ ID NO: 269138 - RNA, 19 nt, Artificial Sequence
  Description of Artificial Sequence: Synthetic oligonucleotide
acuguugaugcuuguauag

SEQ ID NO: 269139 - RNA, 19 nt, Artificial Sequence
  Description of Artificial Sequence: Synthetic oligonucleotide
auaagagugacuccgacuu

SEQ ID NO: 269140 - RNA, 19 nt, Artificial Sequence
  Description of Artificial Sequence: Synthetic oligonucleotide
auaacaguaguauccuaag

SEQ ID NO: 269141 - RNA, 19 nt, Artificial Sequence
  Description of Artificial Sequence: Synthetic oligonucleotide
acuugaggggaccagagug

SEQ ID NO: 269142 - RNA, 19 nt, Artificial Sequence
  Description of Artificial Sequence: Synthetic oligonucleotide
aacuggaccugcuuagaag

SEQ ID NO: 269143 - RNA, 19 nt, Artificial Sequence
  Description of Artificial Sequence: Synthetic oligonucleotide
uauaggauccccugccggg

SEQ ID NO: 269144 - RNA, 19 nt, Artificial Sequence
  Description of Artificial Sequence: Synthetic oligonucleotide
uguugaugcuuguauagga

SEQ ID NO: 269145 - RNA, 19 nt, Artificial Sequence
  Description of Artificial Sequence: Synthetic oligonucleotide
uacguaaccagguggagga

SEQ ID NO: 269146 - RNA, 19 nt, Artificial Sequence
  Description of Artificial Sequence: Synthetic oligonucleotide
auccccaagcuucacauuc

SEQ ID NO: 269147 - RNA, 19 nt, Artificial Sequence
  Description of Artificial Sequence: Synthetic oligonucleotide
uagaugguauuuauauccc

SEQ ID NO: 269148 - RNA, 19 nt, Artificial Sequence
  Description of Artificial Sequence: Synthetic oligonucleotide
acugggaacagcauaagag

SEQ ID NO: 269149 - RNA, 19 nt, Artificial Sequence
  Description of Artificial Sequence: Synthetic oligonucleotide
uaguacugcacaaugcgcu

SEQ ID NO: 269150 - RNA, 19 nt, Artificial Sequence
  Description of Artificial Sequence: Synthetic oligonucleotide
uugcauacuguucccagcc

SEQ ID NO: 269151 - RNA, 19 nt, Artificial Sequence
  Description of Artificial Sequence: Synthetic oligonucleotide
gucuguagacguuugcugg

SEQ ID NO: 269152 - RNA, 19 nt, Artificial Sequence
  Description of Artificial Sequence: Synthetic oligonucleotide
acagcauaagagugacucc

SEQ ID NO: 269153 - RNA, 19 nt, Artificial Sequence
  Description of Artificial Sequence: Synthetic oligonucleotide
ggaagaaaggaccagcgcc

SEQ ID NO: 269154 - RNA, 19 nt, Artificial Sequence
  Description of Artificial Sequence: Synthetic oligonucleotide
ucgccauuugugcucaagg

SEQ ID NO: 269155 - RNA, 19 nt, Artificial Sequence
  Description of Artificial Sequence: Synthetic oligonucleotide
uaugcugggcuuuaccuca

SEQ ID NO: 269156 - RNA, 19 nt, Artificial Sequence
  Description of Artificial Sequence: Synthetic oligonucleotide
uccagucuagcccaaggcc

SEQ ID NO: 269157 - RNA, 19 nt, Artificial Sequence
  Description of Artificial Sequence: Synthetic oligonucleotide
cuggaagaaaggaccagcg

SEQ ID NO: 269158 - RNA, 19 nt, Artificial Sequence
  Description of Artificial Sequence: Synthetic oligonucleotide
acuauucauacccuugagu

SEQ ID NO: 269159 - RNA, 19 nt, Artificial Sequence
  Description of Artificial Sequence: Synthetic oligonucleotide
auauggccaacucuaagcu

SEQ ID NO: 269160 - RNA, 19 nt, Artificial Sequence
  Description of Artificial Sequence: Synthetic oligonucleotide
guggcgaucuugaaaaugg

SEQ ID NO: 269161 - RNA, 19 nt, Artificial Sequence
  Description of Artificial Sequence: Synthetic oligonucleotide
guuagcaucuccacuacag

SEQ ID NO: 269162 - RNA, 19 nt, Artificial Sequence
  Description of Artificial Sequence: Synthetic oligonucleotide
ugccuaacuucucugcucc

SEQ ID NO: 269163 - RNA, 19 nt, Artificial Sequence
  Description of Artificial Sequence: Synthetic oligonucleotide
uuaggacacauugaggcca

SEQ ID NO: 269164 - RNA, 19 nt, Artificial Sequence
  Description of Artificial Sequence: Synthetic oligonucleotide
ucuugcauacuguucccag

SEQ ID NO: 269165 - RNA, 19 nt, Artificial Sequence
  Description of Artificial Sequence: Synthetic oligonucleotide
cuuugagucccagugacag

SEQ ID NO: 269166 - RNA, 19 nt, Artificial Sequence
  Description of Artificial Sequence: Synthetic oligonucleotide
aaucggggaaauguucuuc

SEQ ID NO: 269167 - RNA, 19 nt, Artificial Sequence
  Description of Artificial Sequence: Synthetic oligonucleotide
gacaaacaaugacuggacc

SEQ ID NO: 269168 - RNA, 19 nt, Artificial Sequence
  Description of Artificial Sequence: Synthetic oligonucleotide
uuagaagcaaguucacguc

SEQ ID NO: 269169 - RNA, 19 nt, Artificial Sequence
  Description of Artificial Sequence: Synthetic oligonucleotide
ugaauagguugccuugcgc

SEQ ID NO: 269170 - RNA, 19 nt, Artificial Sequence
  Description of Artificial Sequence: Synthetic oligonucleotide
caaggaaugaggcugagaa

SEQ ID NO: 269171 - RNA, 19 nt, Artificial Sequence
  Description of Artificial Sequence: Synthetic oligonucleotide
agguauugcacagcuacac

SEQ ID NO: 269172 - RNA, 19 nt, Artificial Sequence
  Description of Artificial Sequence: Synthetic oligonucleotide
ucuccacuacaguacagcc

SEQ ID NO: 269173 - RNA, 19 nt, Artificial Sequence
  Description of Artificial Sequence: Synthetic oligonucleotide
cuuguauaggauccccugc

SEQ ID NO: 269174 - RNA, 19 nt, Artificial Sequence
  Description of Artificial Sequence: Synthetic oligonucleotide
uucaguaacuggaucucac

SEQ ID NO: 269175 - RNA, 19 nt, Artificial Sequence
  Description of Artificial Sequence: Synthetic oligonucleotide
cagcauaagagugacuccg

SEQ ID NO: 269176 - RNA, 19 nt, Artificial Sequence
  Description of Artificial Sequence: Synthetic oligonucleotide
gauaacaguaguauccuaa

SEQ ID NO: 269177 - RNA, 19 nt, Artificial Sequence
  Description of Artificial Sequence: Synthetic oligonucleotide
uccacaucauagcacaaau

SEQ ID NO: 269178 - RNA, 19 nt, Artificial Sequence
  Description of Artificial Sequence: Synthetic oligonucleotide
ugagaugcagauagccuga

SEQ ID NO: 269179 - RNA, 19 nt, Artificial Sequence
  Description of Artificial Sequence: Synthetic oligonucleotide
aaugggaguuggaagggag

SEQ ID NO: 269180 - RNA, 19 nt, Artificial Sequence
  Description of Artificial Sequence: Synthetic oligonucleotide
gagugaauagguugccuug

SEQ ID NO: 269181 - RNA, 19 nt, Artificial Sequence
  Description of Artificial Sequence: Synthetic oligonucleotide
augguauuuauauccccug

SEQ ID NO: 269182 - RNA, 19 nt, Artificial Sequence
  Description of Artificial Sequence: Synthetic oligonucleotide
cacuaggagauuuggucgg

SEQ ID NO: 269183 - RNA, 19 nt, Artificial Sequence
  Description of Artificial Sequence: Synthetic oligonucleotide
auuuggucggcacauuccu

SEQ ID NO: 269184 - RNA, 19 nt, Artificial Sequence
  Description of Artificial Sequence: Synthetic oligonucleotide
acucuaagcugcuuggagu

SEQ ID NO: 269185 - RNA, 19 nt, Artificial Sequence
  Description of Artificial Sequence: Synthetic oligonucleotide
uauacuugcgagucacacu

SEQ ID NO: 269186 - RNA, 19 nt, Artificial Sequence
  Description of Artificial Sequence: Synthetic oligonucleotide
ucuguagacguuugcuggc

SEQ ID NO: 269187 - RNA, 19 nt, Artificial Sequence
  Description of Artificial Sequence: Synthetic oligonucleotide
uuccagucuagcccaaggc

SEQ ID NO: 269188 - RNA, 19 nt, Artificial Sequence
  Description of Artificial Sequence: Synthetic oligonucleotide
ugggcuuuaccucaggcuu

SEQ ID NO: 269189 - RNA, 19 nt, Artificial Sequence
  Description of Artificial Sequence: Synthetic oligonucleotide
cuguccuuagccuugccug

SEQ ID NO: 269190 - RNA, 19 nt, Artificial Sequence
  Description of Artificial Sequence: Synthetic oligonucleotide
guuaggacacauugaggcc

SEQ ID NO: 269191 - RNA, 19 nt, Artificial Sequence
  Description of Artificial Sequence: Synthetic oligonucleotide
acacuauucauacccuuga

SEQ ID NO: 269192 - RNA, 19 nt, Artificial Sequence
  Description of Artificial Sequence: Synthetic oligonucleotide
aguauccuaaggcucuuca

SEQ ID NO: 269193 - RNA, 19 nt, Artificial Sequence
  Description of Artificial Sequence: Synthetic oligonucleotide
aagacaggccuggcaaagc

SEQ ID NO: 269194 - RNA, 19 nt, Artificial Sequence
  Description of Artificial Sequence: Synthetic oligonucleotide
ucaguaacuggaucucaca

SEQ ID NO: 269195 - RNA, 19 nt, Artificial Sequence
  Description of Artificial Sequence: Synthetic oligonucleotide
aucugccggguauacuugc

SEQ ID NO: 269196 - RNA, 19 nt, Artificial Sequence
  Description of Artificial Sequence: Synthetic oligonucleotide
aaagcacaccuggaggcuc

SEQ ID NO: 269197 - RNA, 19 nt, Artificial Sequence
  Description of Artificial Sequence: Synthetic oligonucleotide
aguagggugugccggugac

SEQ ID NO: 269198 - RNA, 19 nt, Artificial Sequence
  Description of Artificial Sequence: Synthetic oligonucleotide
agccuugccuggaagaagc

SEQ ID NO: 269199 - RNA, 19 nt, Artificial Sequence
  Description of Artificial Sequence: Synthetic oligonucleotide
ugcuuauggggccaggcuc

SEQ ID NO: 269200 - RNA, 19 nt, Artificial Sequence
  Description of Artificial Sequence: Synthetic oligonucleotide
cuugcauacuguucccagc

SEQ ID NO: 269201 - RNA, 19 nt, Artificial Sequence
  Description of Artificial Sequence: Synthetic oligonucleotide
aaugcgcucugcaaguucu

SEQ ID NO: 269202 - RNA, 19 nt, Artificial Sequence
  Description of Artificial Sequence: Synthetic oligonucleotide
uugucguucggguacguaa

SEQ ID NO: 269203 - RNA, 19 nt, Artificial Sequence
  Description of Artificial Sequence: Synthetic oligonucleotide
guagcaauaggcacauuug

SEQ ID NO: 269204 - RNA, 19 nt, Artificial Sequence
  Description of Artificial Sequence: Synthetic oligonucleotide
auugaugggagcacuagga

SEQ ID NO: 269205 - RNA, 19 nt, Artificial Sequence
  Description of Artificial Sequence: Synthetic oligonucleotide
uugauccgaaccugccugg

SEQ ID NO: 269206 - RNA, 19 nt, Artificial Sequence
  Description of Artificial Sequence: Synthetic oligonucleotide
cucuaagcugcuuggaguc

SEQ ID NO: 269207 - RNA, 19 nt, Artificial Sequence
  Description of Artificial Sequence: Synthetic oligonucleotide
caguaacuggaucucacac

SEQ ID NO: 269208 - RNA, 19 nt, Artificial Sequence
  Description of Artificial Sequence: Synthetic oligonucleotide
aaaugcgccucaggaaguc

SEQ ID NO: 269209 - RNA, 19 nt, Artificial Sequence
  Description of Artificial Sequence: Synthetic oligonucleotide
ucugccggguauacuugcg

SEQ ID NO: 269210 - RNA, 19 nt, Artificial Sequence
  Description of Artificial Sequence: Synthetic oligonucleotide
cucucuacccaguggagug

SEQ ID NO: 269211 - RNA, 19 nt, Artificial Sequence
  Description of Artificial Sequence: Synthetic oligonucleotide
uugggauaacaguaguauc

SEQ ID NO: 269212 - RNA, 19 nt, Artificial Sequence
  Description of Artificial Sequence: Synthetic oligonucleotide
ugucguucggguacguaac

SEQ ID NO: 269213 - RNA, 19 nt, Artificial Sequence
  Description of Artificial Sequence: Synthetic oligonucleotide
acacgucugccuuccuucc

SEQ ID NO: 269214 - RNA, 19 nt, Artificial Sequence
  Description of Artificial Sequence: Synthetic oligonucleotide
ucaaaguaacacucugaau

SEQ ID NO: 269215 - RNA, 19 nt, Artificial Sequence
  Description of Artificial Sequence: Synthetic oligonucleotide
agagugaauagguugccuu

SEQ ID NO: 269216 - RNA, 19 nt, Artificial Sequence
  Description of Artificial Sequence: Synthetic oligonucleotide
gacuccgacuuguaaaaca

SEQ ID NO: 269217 - RNA, 19 nt, Artificial Sequence
  Description of Artificial Sequence: Synthetic oligonucleotide
uucggguacguaaccaggu

SEQ ID NO: 269218 - RNA, 19 nt, Artificial Sequence
  Description of Artificial Sequence: Synthetic oligonucleotide
caaauagacccugccaaag

SEQ ID NO: 269219 - RNA, 19 nt, Artificial Sequence
  Description of Artificial Sequence: Synthetic oligonucleotide
ggauugguaggcugggugg

SEQ ID NO: 269220 - RNA, 19 nt, Artificial Sequence
  Description of Artificial Sequence: Synthetic oligonucleotide
ugacaagacuggaucuccc

SEQ ID NO: 269221 - RNA, 19 nt, Artificial Sequence
  Description of Artificial Sequence: Synthetic oligonucleotide
ucuagcccaaggcccaagc

SEQ ID NO: 269222 - RNA, 19 nt, Artificial Sequence
  Description of Artificial Sequence: Synthetic oligonucleotide
gugaauagguugccuugcg

SEQ ID NO: 269223 - RNA, 19 nt, Artificial Sequence
  Description of Artificial Sequence: Synthetic oligonucleotide
agcuacacccauguucucg

SEQ ID NO: 269224 - RNA, 19 nt, Artificial Sequence
  Description of Artificial Sequence: Synthetic oligonucleotide
acuccgacuuguaaaacag

SEQ ID NO: 269225 - RNA, 19 nt, Artificial Sequence
  Description of Artificial Sequence: Synthetic oligonucleotide
acguccuguguccacauca

SEQ ID NO: 269226 - RNA, 19 nt, Artificial Sequence
  Description of Artificial Sequence: Synthetic oligonucleotide
cacgagcugugcaaagugg

SEQ ID NO: 269227 - RNA, 19 nt, Artificial Sequence
  Description of Artificial Sequence: Synthetic oligonucleotide
cuccacuacaguacagccc

SEQ ID NO: 269228 - RNA, 19 nt, Artificial Sequence
  Description of Artificial Sequence: Synthetic oligonucleotide
aacuucacugagccugaca

SEQ ID NO: 269229 - RNA, 19 nt, Artificial Sequence
  Description of Artificial Sequence: Synthetic oligonucleotide
uugacccagaagcuucccc

SEQ ID NO: 269230 - RNA, 19 nt, Artificial Sequence
  Description of Artificial Sequence: Synthetic oligonucleotide
uguagacguuugcuggccc

SEQ ID NO: 269231 - RNA, 19 nt, Artificial Sequence
  Description of Artificial Sequence: Synthetic oligonucleotide
acacgagcugugcaaagug

SEQ ID NO: 269232 - RNA, 19 nt, Artificial Sequence
  Description of Artificial Sequence: Synthetic oligonucleotide
ucgcuucauacucugccca

SEQ ID NO: 269233 - RNA, 19 nt, Artificial Sequence
  Description of Artificial Sequence: Synthetic oligonucleotide
agacugggaaggcuugauc

SEQ ID NO: 269234 - RNA, 19 nt, Artificial Sequence
  Description of Artificial Sequence: Synthetic oligonucleotide
ugccuugcgccguaaucgg

SEQ ID NO: 269235 - RNA, 19 nt, Artificial Sequence
  Description of Artificial Sequence: Synthetic oligonucleotide
guaugacaugcccuccagg

SEQ ID NO: 269236 - RNA, 19 nt, Artificial Sequence
  Description of Artificial Sequence: Synthetic oligonucleotide
gcgaucuugaaaauggcag

SEQ ID NO: 269237 - RNA, 19 nt, Artificial Sequence
  Description of Artificial Sequence: Synthetic oligonucleotide
ugccggguauacuugcgag

SEQ ID NO: 269238 - RNA, 19 nt, Artificial Sequence
  Description of Artificial Sequence: Synthetic oligonucleotide
auagcacaaauagacccug

SEQ ID NO: 269239 - RNA, 19 nt, Artificial Sequence
  Description of Artificial Sequence: Synthetic oligonucleotide
gaugcuuguauaggauccc

SEQ ID NO: 269240 - RNA, 19 nt, Artificial Sequence
  Description of Artificial Sequence: Synthetic oligonucleotide
guauacuugcgagucacac

SEQ ID NO: 269241 - RNA, 19 nt, Artificial Sequence
  Description of Artificial Sequence: Synthetic oligonucleotide
gacacuccagaguggggag

SEQ ID NO: 269242 - RNA, 19 nt, Artificial Sequence
  Description of Artificial Sequence: Synthetic oligonucleotide
acuguccuuagccuugccu

SEQ ID NO: 269243 - RNA, 19 nt, Artificial Sequence
  Description of Artificial Sequence: Synthetic oligonucleotide
gacgccaauugaugggagc

SEQ ID NO: 269244 - RNA, 19 nt, Artificial Sequence
  Description of Artificial Sequence: Synthetic oligonucleotide
caaguucacguccuguguc

SEQ ID NO: 269245 - RNA, 19 nt, Artificial Sequence
  Description of Artificial Sequence: Synthetic oligonucleotide
ucggguacguaaccaggug

SEQ ID NO: 269246 - RNA, 19 nt, Artificial Sequence
  Description of Artificial Sequence: Synthetic oligonucleotide
guaguacugcacaaugcgc

SEQ ID NO: 269247 - RNA, 19 nt, Artificial Sequence
  Description of Artificial Sequence: Synthetic oligonucleotide
acacucucgauggugagga

SEQ ID NO: 269248 - RNA, 19 nt, Artificial Sequence
  Description of Artificial Sequence: Synthetic oligonucleotide
ugauugcauugacaagacu

SEQ ID NO: 269249 - RNA, 19 nt, Artificial Sequence
  Description of Artificial Sequence: Synthetic oligonucleotide
aacucgccuucacuguuga

SEQ ID NO: 269250 - RNA, 19 nt, Artificial Sequence
  Description of Artificial Sequence: Synthetic oligonucleotide
uguccgcucagcagguggc

SEQ ID NO: 269251 - RNA, 19 nt, Artificial Sequence
  Description of Artificial Sequence: Synthetic oligonucleotide
uggcgaucuugaaaauggc

SEQ ID NO: 269252 - RNA, 19 nt, Artificial Sequence
  Description of Artificial Sequence: Synthetic oligonucleotide
uccccaagcuucacauucc

SEQ ID NO: 269253 - RNA, 19 nt, Artificial Sequence
  Description of Artificial Sequence: Synthetic oligonucleotide
ugcuuagaagcaaguucac

SEQ ID NO: 269254 - RNA, 19 nt, Artificial Sequence
  Description of Artificial Sequence: Synthetic oligonucleotide
caauugaugggagcacuag

SEQ ID NO: 269255 - RNA, 19 nt, Artificial Sequence
  Description of Artificial Sequence: Synthetic oligonucleotide
aaaugggaguuggaaggga

SEQ ID NO: 269256 - RNA, 19 nt, Artificial Sequence
  Description of Artificial Sequence: Synthetic oligonucleotide
uuuccugcacagagagggc

SEQ ID NO: 269257 - RNA, 19 nt, Artificial Sequence
  Description of Artificial Sequence: Synthetic oligonucleotide
cacuauucauacccuugag

SEQ ID NO: 269258 - RNA, 19 nt, Artificial Sequence
  Description of Artificial Sequence: Synthetic oligonucleotide
gauugguaggcuggguggc

SEQ ID NO: 269259 - RNA, 19 nt, Artificial Sequence
  Description of Artificial Sequence: Synthetic oligonucleotide
guaagggcagcccacaccu

SEQ ID NO: 269260 - RNA, 19 nt, Artificial Sequence
  Description of Artificial Sequence: Synthetic oligonucleotide
cacacgucugccuuccuuc

SEQ ID NO: 269261 - RNA, 19 nt, Artificial Sequence
  Description of Artificial Sequence: Synthetic oligonucleotide
agcuaucccauccuggcuu

SEQ ID NO: 269262 - RNA, 19 nt, Artificial Sequence
  Description of Artificial Sequence: Synthetic oligonucleotide
cuucacugagccugacagc

SEQ ID NO: 269263 - RNA, 19 nt, Artificial Sequence
  Description of Artificial Sequence: Synthetic oligonucleotide
uagcacaaauagacccugc

SEQ ID NO: 269264 - RNA, 19 nt, Artificial Sequence
  Description of Artificial Sequence: Synthetic oligonucleotide
gugugccggugacagagcg

SEQ ID NO: 269265 - RNA, 19 nt, Artificial Sequence
  Description of Artificial Sequence: Synthetic oligonucleotide
guucggguacguaaccagg

SEQ ID NO: 269266 - RNA, 19 nt, Artificial Sequence
  Description of Artificial Sequence: Synthetic oligonucleotide
cucaggagcuugauagaug

SEQ ID NO: 269267 - RNA, 19 nt, Artificial Sequence
  Description of Artificial Sequence: Synthetic oligonucleotide
cgacuuguaaaacagauga

SEQ ID NO: 269268 - RNA, 19 nt, Artificial Sequence
  Description of Artificial Sequence: Synthetic oligonucleotide
aaaaugcgccucaggaagu

SEQ ID NO: 269269 - RNA, 19 nt, Artificial Sequence
  Description of Artificial Sequence: Synthetic oligonucleotide
agcaauaggcacauuugga

SEQ ID NO: 269270 - RNA, 19 nt, Artificial Sequence
  Description of Artificial Sequence: Synthetic oligonucleotide
guagacguuugcuggcccc

SEQ ID NO: 269271 - RNA, 19 nt, Artificial Sequence
  Description of Artificial Sequence: Synthetic oligonucleotide
cucuaccagaauucugaug

SEQ ID NO: 269272 - RNA, 19 nt, Artificial Sequence
  Description of Artificial Sequence: Synthetic oligonucleotide
uucacauucccagcugagu

SEQ ID NO: 269273 - RNA, 19 nt, Artificial Sequence
  Description of Artificial Sequence: Synthetic oligonucleotide
cucggaggauauuggcucc

SEQ ID NO: 269274 - RNA, 19 nt, Artificial Sequence
  Description of Artificial Sequence: Synthetic oligonucleotide
aguaacacucugaaugaaa

SEQ ID NO: 269275 - RNA, 19 nt, Artificial Sequence
  Description of Artificial Sequence: Synthetic oligonucleotide
uccgaaccugccuggacac

SEQ ID NO: 269276 - RNA, 19 nt, Artificial Sequence
  Description of Artificial Sequence: Synthetic oligonucleotide
cuagcccaaggcccaagcc

SEQ ID NO: 269277 - RNA, 19 nt, Artificial Sequence
  Description of Artificial Sequence: Synthetic oligonucleotide
gcuuguauaggauccccug

SEQ ID NO: 269278 - RNA, 19 nt, Artificial Sequence
  Description of Artificial Sequence: Synthetic oligonucleotide
gcuugagaugcagauagcc

SEQ ID NO: 269279 - RNA, 19 nt, Artificial Sequence
  Description of Artificial Sequence: Synthetic oligonucleotide
ucagcacggucccgaaggc

SEQ ID NO: 269280 - RNA, 19 nt, Artificial Sequence
  Description of Artificial Sequence: Synthetic oligonucleotide
agcacggucccgaaggcag

SEQ ID NO: 269281 - RNA, 19 nt, Artificial Sequence
  Description of Artificial Sequence: Synthetic oligonucleotide
cacaaaugggcagggcagg

SEQ ID NO: 269282 - RNA, 19 nt, Artificial Sequence
  Description of Artificial Sequence: Synthetic oligonucleotide
gugacuccgacuuguaaaa

SEQ ID NO: 269283 - RNA, 19 nt, Artificial Sequence
  Description of Artificial Sequence: Synthetic oligonucleotide
uccuaaggcucuucaugcu

SEQ ID NO: 269284 - RNA, 19 nt, Artificial Sequence
  Description of Artificial Sequence: Synthetic oligonucleotide
gccuggacacuccagagug

SEQ ID NO: 269285 - RNA, 19 nt, Artificial Sequence
  Description of Artificial Sequence: Synthetic oligonucleotide
gaggccauccuaucagcuc

SEQ ID NO: 269286 - RNA, 19 nt, Artificial Sequence
  Description of Artificial Sequence: Synthetic oligonucleotide
aagcaaguucacguccugu

SEQ ID NO: 269287 - RNA, 19 nt, Artificial Sequence
  Description of Artificial Sequence: Synthetic oligonucleotide
uacacgagcugugcaaagu

SEQ ID NO: 269288 - RNA, 19 nt, Artificial Sequence
  Description of Artificial Sequence: Synthetic oligonucleotide
ugugccggugacagagcgc

SEQ ID NO: 269289 - RNA, 19 nt, Artificial Sequence
  Description of Artificial Sequence: Synthetic oligonucleotide
ucaaccccuguuggcaucc

SEQ ID NO: 269290 - RNA, 19 nt, Artificial Sequence
  Description of Artificial Sequence: Synthetic oligonucleotide
uccccugccgggcaaugug

SEQ ID NO: 269291 - RNA, 19 nt, Artificial Sequence
  Description of Artificial Sequence: Synthetic oligonucleotide
agagggaagcugaggauug

SEQ ID NO: 269292 - RNA, 19 nt, Artificial Sequence
  Description of Artificial Sequence: Synthetic oligonucleotide
guacacgagcugugcaaag

SEQ ID NO: 269293 - RNA, 19 nt, Artificial Sequence
  Description of Artificial Sequence: Synthetic oligonucleotide
uugggucuuacaggcuggg

SEQ ID NO: 269294 - RNA, 19 nt, Artificial Sequence
  Description of Artificial Sequence: Synthetic oligonucleotide
auugguaggcuggguggcg

SEQ ID NO: 269295 - RNA, 19 nt, Artificial Sequence
  Description of Artificial Sequence: Synthetic oligonucleotide
ucugacgagcuuccacaaa

SEQ ID NO: 269296 - RNA, 19 nt, Artificial Sequence
  Description of Artificial Sequence: Synthetic oligonucleotide
aucccauccuggcuuugag

SEQ ID NO: 269297 - RNA, 19 nt, Artificial Sequence
  Description of Artificial Sequence: Synthetic oligonucleotide
ccacgagacauucuggcag

SEQ ID NO: 269298 - RNA, 19 nt, Artificial Sequence
  Description of Artificial Sequence: Synthetic oligonucleotide
gagcucaguacacgagcug

SEQ ID NO: 269299 - RNA, 19 nt, Artificial Sequence
  Description of Artificial Sequence: Synthetic oligonucleotide
gguaugacaugcccuccag

SEQ ID NO: 269300 - RNA, 19 nt, Artificial Sequence
  Description of Artificial Sequence: Synthetic oligonucleotide
auaaggcagcauaacauuu

SEQ ID NO: 269301 - RNA, 19 nt, Artificial Sequence
  Description of Artificial Sequence: Synthetic oligonucleotide
ucuugaugccacagcuauc

SEQ ID NO: 269302 - RNA, 19 nt, Artificial Sequence
  Description of Artificial Sequence: Synthetic oligonucleotide
acgccaauugaugggagca

SEQ ID NO: 269303 - RNA, 19 nt, Artificial Sequence
  Description of Artificial Sequence: Synthetic oligonucleotide
cuaagaaaugggaguugga

SEQ ID NO: 269304 - RNA, 19 nt, Artificial Sequence
  Description of Artificial Sequence: Synthetic oligonucleotide
cucagagggcaaagucucc

SEQ ID NO: 269305 - RNA, 19 nt, Artificial Sequence
  Description of Artificial Sequence: Synthetic oligonucleotide
ggaacagcauaagagugac

SEQ ID NO: 269306 - RNA, 19 nt, Artificial Sequence
  Description of Artificial Sequence: Synthetic oligonucleotide
cauagcacaaauagacccu

SEQ ID NO: 269307 - RNA, 19 nt, Artificial Sequence
  Description of Artificial Sequence: Synthetic oligonucleotide
gcuacacccauguucucgc

SEQ ID NO: 269308 - RNA, 19 nt, Artificial Sequence
  Description of Artificial Sequence: Synthetic oligonucleotide
ugguuucuaucuugggaua

SEQ ID NO: 269309 - RNA, 19 nt, Artificial Sequence
  Description of Artificial Sequence: Synthetic oligonucleotide
uacccaguggagugggcac

SEQ ID NO: 269310 - RNA, 19 nt, Artificial Sequence
  Description of Artificial Sequence: Synthetic oligonucleotide
agcuugauagaugguauuu

SEQ ID NO: 269311 - RNA, 19 nt, Artificial Sequence
  Description of Artificial Sequence: Synthetic oligonucleotide
cugccuaacuucucugcuc

SEQ ID NO: 269312 - RNA, 19 nt, Artificial Sequence
  Description of Artificial Sequence: Synthetic oligonucleotide
uaaucggggaaauguucuu

SEQ ID NO: 269313 - RNA, 19 nt, Artificial Sequence
  Description of Artificial Sequence: Synthetic oligonucleotide
aaggagcgacuugagggga

SEQ ID NO: 269314 - RNA, 19 nt, Artificial Sequence
  Description of Artificial Sequence: Synthetic oligonucleotide
gcagguaugacaugcccuc

SEQ ID NO: 269315 - RNA, 19 nt, Artificial Sequence
  Description of Artificial Sequence: Synthetic oligonucleotide
uagccuugccuggaagaag

SEQ ID NO: 269316 - RNA, 19 nt, Artificial Sequence
  Description of Artificial Sequence: Synthetic oligonucleotide
uucacuguugaugcuugua

SEQ ID NO: 269317 - RNA, 19 nt, Artificial Sequence
  Description of Artificial Sequence: Synthetic oligonucleotide
augacaugcccuccaggau

SEQ ID NO: 269318 - RNA, 19 nt, Artificial Sequence
  Description of Artificial Sequence: Synthetic oligonucleotide
agauagccugagacauucc

SEQ ID NO: 269319 - RNA, 19 nt, Artificial Sequence
  Description of Artificial Sequence: Synthetic oligonucleotide
gucuugaugccacagcuau

SEQ ID NO: 269320 - RNA, 19 nt, Artificial Sequence
  Description of Artificial Sequence: Synthetic oligonucleotide
gccguaguacugcacaaug

SEQ ID NO: 269321 - RNA, 19 nt, Artificial Sequence
  Description of Artificial Sequence: Synthetic oligonucleotide
cugagguaaauauggccaa

SEQ ID NO: 269322 - RNA, 19 nt, Artificial Sequence
  Description of Artificial Sequence: Synthetic oligonucleotide
cuguagacguuugcuggcc

SEQ ID NO: 269323 - RNA, 19 nt, Artificial Sequence
  Description of Artificial Sequence: Synthetic oligonucleotide
ucguucggguacguaacca

SEQ ID NO: 269324 - RNA, 19 nt, Artificial Sequence
  Description of Artificial Sequence: Synthetic oligonucleotide
cuugggauaacaguaguau

SEQ ID NO: 269325 - RNA, 19 nt, Artificial Sequence
  Description of Artificial Sequence: Synthetic oligonucleotide
ucggcacauuccuuuccug

SEQ ID NO: 269326 - RNA, 19 nt, Artificial Sequence
  Description of Artificial Sequence: Synthetic oligonucleotide
aguacagcccaggcuccac

SEQ ID NO: 269327 - RNA, 19 nt, Artificial Sequence
  Description of Artificial Sequence: Synthetic oligonucleotide
gucguucggguacguaacc

SEQ ID NO: 269328 - RNA, 19 nt, Artificial Sequence
  Description of Artificial Sequence: Synthetic oligonucleotide
uggcugucuugcauacugu

SEQ ID NO: 269329 - RNA, 19 nt, Artificial Sequence
  Description of Artificial Sequence: Synthetic oligonucleotide
guaacacucugaaugaaau

SEQ ID NO: 269330 - RNA, 19 nt, Artificial Sequence
  Description of Artificial Sequence: Synthetic oligonucleotide
guaaucggggaaauguucu

SEQ ID NO: 269331 - RNA, 19 nt, Artificial Sequence
  Description of Artificial Sequence: Synthetic oligonucleotide
ggcauucucacuaucugca

SEQ ID NO: 269332 - RNA, 19 nt, Artificial Sequence
  Description of Artificial Sequence: Synthetic oligonucleotide
ucccauccuggcuuugagu

SEQ ID NO: 269333 - RNA, 19 nt, Artificial Sequence
  Description of Artificial Sequence: Synthetic oligonucleotide
gggugugccggugacagag

SEQ ID NO: 269334 - RNA, 19 nt, Artificial Sequence
  Description of Artificial Sequence: Synthetic oligonucleotide
uggacccaagcuccacugu

SEQ ID NO: 269335 - RNA, 19 nt, Artificial Sequence
  Description of Artificial Sequence: Synthetic oligonucleotide
ccuugugcugccuaacuuc

SEQ ID NO: 269336 - RNA, 19 nt, Artificial Sequence
  Description of Artificial Sequence: Synthetic oligonucleotide
uucucgccauuugugcuca

SEQ ID NO: 269337 - RNA, 19 nt, Artificial Sequence
  Description of Artificial Sequence: Synthetic oligonucleotide
uuuggucggcacauuccuu

SEQ ID NO: 269338 - RNA, 19 nt, Artificial Sequence
  Description of Artificial Sequence: Synthetic oligonucleotide
ccuugcgccguaaucgggg

SEQ ID NO: 269339 - RNA, 19 nt, Artificial Sequence
  Description of Artificial Sequence: Synthetic oligonucleotide
uccuuccacauugugcuua

SEQ ID NO: 269340 - RNA, 19 nt, Artificial Sequence
  Description of Artificial Sequence: Synthetic oligonucleotide
agacccugccaaaggcacc

SEQ ID NO: 269341 - RNA, 19 nt, Artificial Sequence
  Description of Artificial Sequence: Synthetic oligonucleotide
acguuugcuggccccaaaa

SEQ ID NO: 269342 - RNA, 19 nt, Artificial Sequence
  Description of Artificial Sequence: Synthetic oligonucleotide
uagacguuugcuggcccca

SEQ ID NO: 269343 - RNA, 19 nt, Artificial Sequence
  Description of Artificial Sequence: Synthetic oligonucleotide
ugccauguucugagaugug

SEQ ID NO: 269344 - RNA, 19 nt, Artificial Sequence
  Description of Artificial Sequence: Synthetic oligonucleotide
uacuugcgagucacacucu

SEQ ID NO: 269345 - RNA, 19 nt, Artificial Sequence
  Description of Artificial Sequence: Synthetic oligonucleotide
ccgcugaugacuucagggc

SEQ ID NO: 269346 - RNA, 19 nt, Artificial Sequence
  Description of Artificial Sequence: Synthetic oligonucleotide
ugcgccguaaucggggaaa

SEQ ID NO: 269347 - RNA, 19 nt, Artificial Sequence
  Description of Artificial Sequence: Synthetic oligonucleotide
ugugcucaaggagcgacuu

SEQ ID NO: 269348 - RNA, 19 nt, Artificial Sequence
  Description of Artificial Sequence: Synthetic oligonucleotide
caaugcgcucugcaaguuc

SEQ ID NO: 269349 - RNA, 19 nt, Artificial Sequence
  Description of Artificial Sequence: Synthetic oligonucleotide
cacgucugccuuccuuccg

SEQ ID NO: 269350 - RNA, 19 nt, Artificial Sequence
  Description of Artificial Sequence: Synthetic oligonucleotide
gguggcgaucuugaaaaug

SEQ ID NO: 269351 - RNA, 19 nt, Artificial Sequence
  Description of Artificial Sequence: Synthetic oligonucleotide
cauucccagcugagucucg

SEQ ID NO: 269352 - RNA, 19 nt, Artificial Sequence
  Description of Artificial Sequence: Synthetic oligonucleotide
ggacuuuccucucuaccca

SEQ ID NO: 269353 - RNA, 19 nt, Artificial Sequence
  Description of Artificial Sequence: Synthetic oligonucleotide
ugcgccucaggaagucccu

SEQ ID NO: 269354 - RNA, 19 nt, Artificial Sequence
  Description of Artificial Sequence: Synthetic oligonucleotide
ccguaguacugcacaaugc

SEQ ID NO: 269355 - RNA, 19 nt, Artificial Sequence
  Description of Artificial Sequence: Synthetic oligonucleotide
cuguugucguucggguacg

SEQ ID NO: 269356 - RNA, 19 nt, Artificial Sequence
  Description of Artificial Sequence: Synthetic oligonucleotide
ugacuccgacuuguaaaac

SEQ ID NO: 269357 - RNA, 19 nt, Artificial Sequence
  Description of Artificial Sequence: Synthetic oligonucleotide
ggaaauguucuucugccau

SEQ ID NO: 269358 - RNA, 19 nt, Artificial Sequence
  Description of Artificial Sequence: Synthetic oligonucleotide
ggcagcauaacauuugcuu

SEQ ID NO: 269359 - RNA, 19 nt, Artificial Sequence
  Description of Artificial Sequence: Synthetic oligonucleotide
gcccacgagacauucuggc

SEQ ID NO: 269360 - RNA, 19 nt, Artificial Sequence
  Description of Artificial Sequence: Synthetic oligonucleotide
gugccggugacagagcgca

SEQ ID NO: 269361 - RNA, 19 nt, Artificial Sequence
  Description of Artificial Sequence: Synthetic oligonucleotide
ucgccgcugaugacuucag

SEQ ID NO: 269362 - RNA, 19 nt, Artificial Sequence
  Description of Artificial Sequence: Synthetic oligonucleotide
ccgacuuguaaaacagaug

SEQ ID NO: 269363 - RNA, 19 nt, Artificial Sequence
  Description of Artificial Sequence: Synthetic oligonucleotide
gagcgcaugccugucccug

SEQ ID NO: 269364 - RNA, 19 nt, Artificial Sequence
  Description of Artificial Sequence: Synthetic oligonucleotide
uauccccugcagacuggga

SEQ ID NO: 269365 - RNA, 19 nt, Artificial Sequence
  Description of Artificial Sequence: Synthetic oligonucleotide
uccuuccguagcccucgcc

SEQ ID NO: 269366 - RNA, 19 nt, Artificial Sequence
  Description of Artificial Sequence: Synthetic oligonucleotide
gcuuauggggccaggcucc

SEQ ID NO: 269367 - RNA, 19 nt, Artificial Sequence
  Description of Artificial Sequence: Synthetic oligonucleotide
ggcacauuuggaggggaag

SEQ ID NO: 269368 - RNA, 19 nt, Artificial Sequence
  Description of Artificial Sequence: Synthetic oligonucleotide
agcauaagagugacuccga

SEQ ID NO: 269369 - RNA, 19 nt, Artificial Sequence
  Description of Artificial Sequence: Synthetic oligonucleotide
aggagcgacuugaggggac

SEQ ID NO: 269370 - RNA, 19 nt, Artificial Sequence
  Description of Artificial Sequence: Synthetic oligonucleotide
ggggaccagagugaauagg

SEQ ID NO: 269371 - RNA, 19 nt, Artificial Sequence
  Description of Artificial Sequence: Synthetic oligonucleotide
cagguauugcacagcuaca

SEQ ID NO: 269372 - RNA, 19 nt, Artificial Sequence
  Description of Artificial Sequence: Synthetic oligonucleotide
agcccacaccucuaccaga

SEQ ID NO: 269373 - RNA, 19 nt, Artificial Sequence
  Description of Artificial Sequence: Synthetic oligonucleotide
ugggagcacuaggagauuu

SEQ ID NO: 269374 - RNA, 19 nt, Artificial Sequence
  Description of Artificial Sequence: Synthetic oligonucleotide
cguaaucggggaaauguuc

SEQ ID NO: 269375 - RNA, 19 nt, Artificial Sequence
  Description of Artificial Sequence: Synthetic oligonucleotide
cuaccagaauucugaugga

SEQ ID NO: 269376 - RNA, 19 nt, Artificial Sequence
  Description of Artificial Sequence: Synthetic oligonucleotide
guuacuggaggcagcccca

SEQ ID NO: 269377 - RNA, 19 nt, Artificial Sequence
  Description of Artificial Sequence: Synthetic oligonucleotide
agcgacuugaggggaccag

SEQ ID NO: 269378 - RNA, 19 nt, Artificial Sequence
  Description of Artificial Sequence: Synthetic oligonucleotide
cagcccaacaggcuugaga

SEQ ID NO: 269379 - RNA, 19 nt, Artificial Sequence
  Description of Artificial Sequence: Synthetic oligonucleotide
acgagacauucuggcaguc

SEQ ID NO: 269380 - RNA, 19 nt, Artificial Sequence
  Description of Artificial Sequence: Synthetic oligonucleotide
gggaaauguucuucugcca

SEQ ID NO: 269381 - RNA, 19 nt, Artificial Sequence
  Description of Artificial Sequence: Synthetic oligonucleotide
ggacacuccagagugggga

SEQ ID NO: 269382 - RNA, 19 nt, Artificial Sequence
  Description of Artificial Sequence: Synthetic oligonucleotide
cccgacgccaauugauggg

SEQ ID NO: 269383 - RNA, 19 nt, Artificial Sequence
  Description of Artificial Sequence: Synthetic oligonucleotide
ugggucuuacaggcugggc

SEQ ID NO: 269384 - RNA, 19 nt, Artificial Sequence
  Description of Artificial Sequence: Synthetic oligonucleotide
cucaaccccuguuggcauc

SEQ ID NO: 269385 - RNA, 19 nt, Artificial Sequence
  Description of Artificial Sequence: Synthetic oligonucleotide
gggucuuacaggcugggcu

SEQ ID NO: 269386 - RNA, 19 nt, Artificial Sequence
  Description of Artificial Sequence: Synthetic oligonucleotide
gguacguaaccagguggag

SEQ ID NO: 269387 - RNA, 19 nt, Artificial Sequence
  Description of Artificial Sequence: Synthetic oligonucleotide
guucacguccuguguccac

SEQ ID NO: 269388 - RNA, 19 nt, Artificial Sequence
  Description of Artificial Sequence: Synthetic oligonucleotide
cuccgacuuguaaaacaga

SEQ ID NO: 269389 - RNA, 19 nt, Artificial Sequence
  Description of Artificial Sequence: Synthetic oligonucleotide
uuuguccgcucagcaggug

SEQ ID NO: 269390 - RNA, 19 nt, Artificial Sequence
  Description of Artificial Sequence: Synthetic oligonucleotide
gcagauggucuguagacgu

SEQ ID NO: 269391 - RNA, 19 nt, Artificial Sequence
  Description of Artificial Sequence: Synthetic oligonucleotide
ucacguccuguguccacau

SEQ ID NO: 269392 - RNA, 19 nt, Artificial Sequence
  Description of Artificial Sequence: Synthetic oligonucleotide
ggugacagagcgcaugccu

SEQ ID NO: 269393 - RNA, 19 nt, Artificial Sequence
  Description of Artificial Sequence: Synthetic oligonucleotide
cuacccaguggagugggca

SEQ ID NO: 269394 - RNA, 19 nt, Artificial Sequence
  Description of Artificial Sequence: Synthetic oligonucleotide
cggguacguaaccaggugg

SEQ ID NO: 269395 - RNA, 19 nt, Artificial Sequence
  Description of Artificial Sequence: Synthetic oligonucleotide
ggucggcacauuccuuucc

SEQ ID NO: 269396 - RNA, 19 nt, Artificial Sequence
  Description of Artificial Sequence: Synthetic oligonucleotide
guugaugcuuguauaggau

SEQ ID NO: 269397 - RNA, 19 nt, Artificial Sequence
  Description of Artificial Sequence: Synthetic oligonucleotide
cuaacuucucugcuccagu

SEQ ID NO: 269398 - RNA, 19 nt, Artificial Sequence
  Description of Artificial Sequence: Synthetic oligonucleotide
ccccgacgccaauugaugg

SEQ ID NO: 269399 - RNA, 19 nt, Artificial Sequence
  Description of Artificial Sequence: Synthetic oligonucleotide
uaguauccuaaggcucuuc

SEQ ID NO: 269400 - RNA, 19 nt, Artificial Sequence
  Description of Artificial Sequence: Synthetic oligonucleotide
cuugcgccguaaucgggga

SEQ ID NO: 269401 - RNA, 19 nt, Artificial Sequence
  Description of Artificial Sequence: Synthetic oligonucleotide
ggaaugaggcugagaacac

SEQ ID NO: 269402 - RNA, 19 nt, Artificial Sequence
  Description of Artificial Sequence: Synthetic oligonucleotide
aggcccaagcccacauggg

SEQ ID NO: 269403 - RNA, 19 nt, Artificial Sequence
  Description of Artificial Sequence: Synthetic oligonucleotide
cguucggguacguaaccag

SEQ ID NO: 269404 - RNA, 19 nt, Artificial Sequence
  Description of Artificial Sequence: Synthetic oligonucleotide
uggcucccuugaugucucg

SEQ ID NO: 269405 - RNA, 19 nt, Artificial Sequence
  Description of Artificial Sequence: Synthetic oligonucleotide
caagcccacaugggucucc

SEQ ID NO: 269406 - RNA, 19 nt, Artificial Sequence
  Description of Artificial Sequence: Synthetic oligonucleotide
cacggucccgaaggcagcc

SEQ ID NO: 269407 - RNA, 19 nt, Artificial Sequence
  Description of Artificial Sequence: Synthetic oligonucleotide
guauccuaaggcucuucau

SEQ ID NO: 269408 - RNA, 19 nt, Artificial Sequence
  Description of Artificial Sequence: Synthetic oligonucleotide
uugcgccguaaucggggaa

SEQ ID NO: 269409 - RNA, 19 nt, Artificial Sequence
  Description of Artificial Sequence: Synthetic oligonucleotide
ggguacguaaccaggugga

SEQ ID NO: 269410 - RNA, 19 nt, Artificial Sequence
  Description of Artificial Sequence: Synthetic oligonucleotide
ggcuuuaccucaggcuugc

SEQ ID NO: 269411 - RNA, 19 nt, Artificial Sequence
  Description of Artificial Sequence: Synthetic oligonucleotide
auacucugcccaagguggu

SEQ ID NO: 269412 - RNA, 19 nt, Artificial Sequence
  Description of Artificial Sequence: Synthetic oligonucleotide
uagguugccuugcgccgua

SEQ ID NO: 269413 - RNA, 19 nt, Artificial Sequence
  Description of Artificial Sequence: Synthetic oligonucleotide
gucggcacauuccuuuccu

SEQ ID NO: 269414 - RNA, 19 nt, Artificial Sequence
  Description of Artificial Sequence: Synthetic oligonucleotide
acuuuccucucuacccagu

SEQ ID NO: 269415 - RNA, 19 nt, Artificial Sequence
  Description of Artificial Sequence: Synthetic oligonucleotide
gagcuugauagaugguauu

SEQ ID NO: 269416 - RNA, 19 nt, Artificial Sequence
  Description of Artificial Sequence: Synthetic oligonucleotide
cugggaaggcuugauccga

SEQ ID NO: 269417 - RNA, 19 nt, Artificial Sequence
  Description of Artificial Sequence: Synthetic oligonucleotide
cucgccgcugaugacuuca

SEQ ID NO: 269418 - RNA, 19 nt, Artificial Sequence
  Description of Artificial Sequence: Synthetic oligonucleotide
gacagagcgcaugccuguc

SEQ ID NO: 269419 - RNA, 19 nt, Artificial Sequence
  Description of Artificial Sequence: Synthetic oligonucleotide
gccguaaucggggaaaugu

SEQ ID NO: 269420 - RNA, 19 nt, Artificial Sequence
  Description of Artificial Sequence: Synthetic oligonucleotide
caguuacuggaggcagccc

SEQ ID NO: 269421 - RNA, 19 nt, Artificial Sequence
  Description of Artificial Sequence: Synthetic oligonucleotide
cuaggagauuuggucggca

SEQ ID NO: 269422 - RNA, 19 nt, Artificial Sequence
  Description of Artificial Sequence: Synthetic oligonucleotide
gagguaugcugggcuuuac

SEQ ID NO: 269423 - RNA, 19 nt, Artificial Sequence
  Description of Artificial Sequence: Synthetic oligonucleotide
ccggguauacuugcgaguc

SEQ ID NO: 269424 - RNA, 19 nt, Artificial Sequence
  Description of Artificial Sequence: Synthetic oligonucleotide
ccuuagccuugccuggaag

SEQ ID NO: 269425 - RNA, 19 nt, Artificial Sequence
  Description of Artificial Sequence: Synthetic oligonucleotide
cccaguuacuggaggcagc

SEQ ID NO: 269426 - RNA, 19 nt, Artificial Sequence
  Description of Artificial Sequence: Synthetic oligonucleotide
uguugucguucggguacgu

SEQ ID NO: 269427 - RNA, 19 nt, Artificial Sequence
  Description of Artificial Sequence: Synthetic oligonucleotide
ccagagugaauagguugcc

SEQ ID NO: 269428 - RNA, 19 nt, Artificial Sequence
  Description of Artificial Sequence: Synthetic oligonucleotide
cacuccgcaggcgcccacg

SEQ ID NO: 269429 - RNA, 19 nt, Artificial Sequence
  Description of Artificial Sequence: Synthetic oligonucleotide
ccugcuuauggggccaggc

SEQ ID NO: 269430 - RNA, 19 nt, Artificial Sequence
  Description of Artificial Sequence: Synthetic oligonucleotide
gacguuugcuggccccaaa

SEQ ID NO: 269431 - RNA, 19 nt, Artificial Sequence
  Description of Artificial Sequence: Synthetic oligonucleotide
ggauaacaguaguauccua

SEQ ID NO: 269432 - RNA, 19 nt, Artificial Sequence
  Description of Artificial Sequence: Synthetic oligonucleotide
cacgagacauucuggcagu

SEQ ID NO: 269433 - RNA, 19 nt, Artificial Sequence
  Description of Artificial Sequence: Synthetic oligonucleotide
cgacuugaggggaccagag

SEQ ID NO: 269434 - RNA, 19 nt, Artificial Sequence
  Description of Artificial Sequence: Synthetic oligonucleotide
acaaugcgcucugcaaguu

SEQ ID NO: 269435 - RNA, 19 nt, Artificial Sequence
  Description of Artificial Sequence: Synthetic oligonucleotide
accagcgcccaggcugagg

SEQ ID NO: 269436 - RNA, 19 nt, Artificial Sequence
  Description of Artificial Sequence: Synthetic oligonucleotide
cuccuaagaaaugggaguu

SEQ ID NO: 269437 - RNA, 19 nt, Artificial Sequence
  Description of Artificial Sequence: Synthetic oligonucleotide
gagcacuaggagauuuggu

SEQ ID NO: 269438 - RNA, 19 nt, Artificial Sequence
  Description of Artificial Sequence: Synthetic oligonucleotide
ccuugccuggaagaagcag

SEQ ID NO: 269439 - RNA, 19 nt, Artificial Sequence
  Description of Artificial Sequence: Synthetic oligonucleotide
guaggcuggguggcgaucu

SEQ ID NO: 269440 - RNA, 19 nt, Artificial Sequence
  Description of Artificial Sequence: Synthetic oligonucleotide
gggcuuuaccucaggcuug

SEQ ID NO: 269441 - RNA, 19 nt, Artificial Sequence
  Description of Artificial Sequence: Synthetic oligonucleotide
ccccuguuggcauccuccc

SEQ ID NO: 269442 - RNA, 19 nt, Artificial Sequence
  Description of Artificial Sequence: Synthetic oligonucleotide
ccaucgcuucauacucugc

SEQ ID NO: 269443 - RNA, 19 nt, Artificial Sequence
  Description of Artificial Sequence: Synthetic oligonucleotide
cagccguaguacugcacaa

SEQ ID NO: 269444 - RNA, 19 nt, Artificial Sequence
  Description of Artificial Sequence: Synthetic oligonucleotide
ggagcucuugggucuuaca

SEQ ID NO: 269445 - RNA, 19 nt, Artificial Sequence
  Description of Artificial Sequence: Synthetic oligonucleotide
ggaacugguaugguuucua

SEQ ID NO: 269446 - RNA, 19 nt, Artificial Sequence
  Description of Artificial Sequence: Synthetic oligonucleotide
aggauccccugccgggcaa

SEQ ID NO: 269447 - RNA, 19 nt, Artificial Sequence
  Description of Artificial Sequence: Synthetic oligonucleotide
agcggcccuuuguccgcuc

SEQ ID NO: 269448 - RNA, 19 nt, Artificial Sequence
  Description of Artificial Sequence: Synthetic oligonucleotide
ggagcuugauagaugguau

SEQ ID NO: 269449 - RNA, 19 nt, Artificial Sequence
  Description of Artificial Sequence: Synthetic oligonucleotide
cugcuuauggggccaggcu

SEQ ID NO: 269450 - RNA, 19 nt, Artificial Sequence
  Description of Artificial Sequence: Synthetic oligonucleotide
gcugccuaacuucucugcu

SEQ ID NO: 269451 - RNA, 19 nt, Artificial Sequence
  Description of Artificial Sequence: Synthetic oligonucleotide
caacuucacugagccugac

SEQ ID NO: 269452 - RNA, 19 nt, Artificial Sequence
  Description of Artificial Sequence: Synthetic oligonucleotide
gagcgacuugaggggacca

SEQ ID NO: 269453 - RNA, 19 nt, Artificial Sequence
  Description of Artificial Sequence: Synthetic oligonucleotide
gccggugacagagcgcaug

SEQ ID NO: 269454 - RNA, 19 nt, Artificial Sequence
  Description of Artificial Sequence: Synthetic oligonucleotide
gacauuccccugaacuuuu

SEQ ID NO: 269455 - RNA, 19 nt, Artificial Sequence
  Description of Artificial Sequence: Synthetic oligonucleotide
ccauccuaucagcucuuuc

SEQ ID NO: 269456 - RNA, 19 nt, Artificial Sequence
  Description of Artificial Sequence: Synthetic oligonucleotide
cacguccuguguccacauc

SEQ ID NO: 269457 - RNA, 19 nt, Artificial Sequence
  Description of Artificial Sequence: Synthetic oligonucleotide
ggagugggcacagcccaac

SEQ ID NO: 269458 - RNA, 19 nt, Artificial Sequence
  Description of Artificial Sequence: Synthetic oligonucleotide
ccccaguuacuggaggcag

SEQ ID NO: 269459 - RNA, 19 nt, Artificial Sequence
  Description of Artificial Sequence: Synthetic oligonucleotide
cagcuacacccauguucuc

SEQ ID NO: 269460 - RNA, 19 nt, Artificial Sequence
  Description of Artificial Sequence: Synthetic oligonucleotide
cagccccuuuccuuccaca

SEQ ID NO: 269461 - RNA, 19 nt, Artificial Sequence
  Description of Artificial Sequence: Synthetic oligonucleotide
agacguuugcuggccccaa

SEQ ID NO: 269462 - RNA, 19 nt, Artificial Sequence
  Description of Artificial Sequence: Synthetic oligonucleotide
cccacgagacauucuggca

SEQ ID NO: 269463 - RNA, 19 nt, Artificial Sequence
  Description of Artificial Sequence: Synthetic oligonucleotide
ccaauugaugggagcacua

SEQ ID NO: 269464 - RNA, 19 nt, Artificial Sequence
  Description of Artificial Sequence: Synthetic oligonucleotide
ggacugucugggucaaacu

SEQ ID NO: 269465 - RNA, 19 nt, Artificial Sequence
  Description of Artificial Sequence: Synthetic oligonucleotide
cagagugaauagguugccu

SEQ ID NO: 269466 - RNA, 19 nt, Artificial Sequence
  Description of Artificial Sequence: Synthetic oligonucleotide
gccuugcgccguaaucggg

SEQ ID NO: 269467 - RNA, 19 nt, Artificial Sequence
  Description of Artificial Sequence: Synthetic oligonucleotide
guugucguucggguacgua

SEQ ID NO: 269468 - RNA, 19 nt, Artificial Sequence
  Description of Artificial Sequence: Synthetic oligonucleotide
cucgaugcacaaucauguu

SEQ ID NO: 269469 - RNA, 19 nt, Artificial Sequence
  Description of Artificial Sequence: Synthetic oligonucleotide
gcgacuugaggggaccaga

SEQ ID NO: 269470 - RNA, 19 nt, Artificial Sequence
  Description of Artificial Sequence: Synthetic oligonucleotide
ugccggugacagagcgcau

SEQ ID NO: 269471 - RNA, 19 nt, Artificial Sequence
  Description of Artificial Sequence: Synthetic oligonucleotide
ucucgccauuugugcucaa

SEQ ID NO: 269472 - RNA, 19 nt, Artificial Sequence
  Description of Artificial Sequence: Synthetic oligonucleotide
gcagcacaaggacuuuccu

SEQ ID NO: 269473 - RNA, 19 nt, Artificial Sequence
  Description of Artificial Sequence: Synthetic oligonucleotide
cagcacggucccgaaggca

SEQ ID NO: 269474 - RNA, 19 nt, Artificial Sequence
  Description of Artificial Sequence: Synthetic oligonucleotide
guccgcucagcagguggca

SEQ ID NO: 269475 - RNA, 19 nt, Artificial Sequence
  Description of Artificial Sequence: Synthetic oligonucleotide
cgacgccaauugaugggag

SEQ ID NO: 269476 - RNA, 19 nt, Artificial Sequence
  Description of Artificial Sequence: Synthetic oligonucleotide
gcucaggagcuugauagau

SEQ ID NO: 269477 - RNA, 19 nt, Artificial Sequence
  Description of Artificial Sequence: Synthetic oligonucleotide
gccggguauacuugcgagu

SEQ ID NO: 269478 - RNA, 19 nt, Artificial Sequence
  Description of Artificial Sequence: Synthetic oligonucleotide
gcgcaugccugucccugac

SEQ ID NO: 269479 - RNA, 19 nt, Artificial Sequence
  Description of Artificial Sequence: Synthetic oligonucleotide
ccgacgccaauugauggga

SEQ ID NO: 269480 - RNA, 19 nt, Artificial Sequence
  Description of Artificial Sequence: Synthetic oligonucleotide
cguaaccagguggaggaga

SEQ ID NO: 269481 - RNA, 19 nt, Artificial Sequence
  Description of Artificial Sequence: Synthetic oligonucleotide
ccccauuucucaggcccug

SEQ ID NO: 269482 - RNA, 19 nt, Artificial Sequence
  Description of Artificial Sequence: Synthetic oligonucleotide
augcgcucugcaaguucuu

SEQ ID NO: 269483 - RNA, 19 nt, Artificial Sequence
  Description of Artificial Sequence: Synthetic oligonucleotide
ggaggauauuggcucccuu

SEQ ID NO: 269484 - RNA, 19 nt, Artificial Sequence
  Description of Artificial Sequence: Synthetic oligonucleotide
gcuaucccauccuggcuuu

SEQ ID NO: 269485 - RNA, 19 nt, Artificial Sequence
  Description of Artificial Sequence: Synthetic oligonucleotide
gcaaugugcuguugucguu

SEQ ID NO: 269486 - RNA, 19 nt, Artificial Sequence
  Description of Artificial Sequence: Synthetic oligonucleotide
agguugccuugcgccguaa

SEQ ID NO: 269487 - RNA, 19 nt, Artificial Sequence
  Description of Artificial Sequence: Synthetic oligonucleotide
gcggcccuuuguccgcuca

SEQ ID NO: 269488 - RNA, 19 nt, Artificial Sequence
  Description of Artificial Sequence: Synthetic oligonucleotide
ccguaaucggggaaauguu

SEQ ID NO: 269489 - RNA, 19 nt, Artificial Sequence
  Description of Artificial Sequence: Synthetic oligonucleotide
ccucucuacccaguggagu

SEQ ID NO: 269490 - RNA, 19 nt, Artificial Sequence
  Description of Artificial Sequence: Synthetic oligonucleotide
cggguauacuugcgaguca

SEQ ID NO: 269491 - RNA, 19 nt, Artificial Sequence
  Description of Artificial Sequence: Synthetic oligonucleotide
cggcccuuuguccgcucag

SEQ ID NO: 269492 - RNA, 19 nt, Artificial Sequence
  Description of Artificial Sequence: Synthetic oligonucleotide
gccgggcaaugugcuguug

SEQ ID NO: 269493 - RNA, 19 nt, Artificial Sequence
  Description of Artificial Sequence: Synthetic oligonucleotide
ggguggcgaucuugaaaau

SEQ ID NO: 269494 - RNA, 19 nt, Artificial Sequence
  Description of Artificial Sequence: Synthetic oligonucleotide
gcuuuaccucaggcuugca

SEQ ID NO: 269495 - RNA, 19 nt, Artificial Sequence
  Description of Artificial Sequence: Synthetic oligonucleotide
ccucaaccccuguuggcau

SEQ ID NO: 269496 - RNA, 19 nt, Artificial Sequence
  Description of Artificial Sequence: Synthetic oligonucleotide
cguuugcuggccccaaaau

SEQ ID NO: 269497 - RNA, 19 nt, Artificial Sequence
  Description of Artificial Sequence: Synthetic oligonucleotide
cgccguaaucggggaaaug

SEQ ID NO: 269498 - RNA, 19 nt, Artificial Sequence
  Description of Artificial Sequence: Synthetic oligonucleotide
cgcaugccugucccugaca

SEQ ID NO: 269499 - RNA, 19 nt, Artificial Sequence
  Description of Artificial Sequence: Synthetic oligonucleotide
gcgccguaaucggggaaau

SEQ ID NO: 269500 - RNA, 19 nt, Artificial Sequence
  Description of Artificial Sequence: Synthetic oligonucleotide
gccauccuaucagcucuuu

SEQ ID NO: 269501 - RNA, 19 nt, Artificial Sequence
  Description of Artificial Sequence: Synthetic oligonucleotide
ccgaaccugccuggacacu

SEQ ID NO: 269502 - RNA, 19 nt, Artificial Sequence
  Description of Artificial Sequence: Synthetic oligonucleotide
uuaauuguccauaacacac

SEQ ID NO: 269503 - RNA, 19 nt, Artificial Sequence
  Description of Artificial Sequence: Synthetic oligonucleotide
aaagguaucaucgaauuug

SEQ ID NO: 269504 - RNA, 19 nt, Artificial Sequence
  Description of Artificial Sequence: Synthetic oligonucleotide
uuuaagacgauccauuagu

SEQ ID NO: 269505 - RNA, 19 nt, Artificial Sequence
  Description of Artificial Sequence: Synthetic oligonucleotide
aaauguaugacugucgucu

SEQ ID NO: 269506 - RNA, 19 nt, Artificial Sequence
  Description of Artificial Sequence: Synthetic oligonucleotide
ugauuggaaagcaaacugg

SEQ ID NO: 269507 - RNA, 19 nt, Artificial Sequence
  Description of Artificial Sequence: Synthetic oligonucleotide
aagacgauccauuaguacu

SEQ ID NO: 269508 - RNA, 19 nt, Artificial Sequence
  Description of Artificial Sequence: Synthetic oligonucleotide
aauagcguuacuguaaugu

SEQ ID NO: 269509 - RNA, 19 nt, Artificial Sequence
  Description of Artificial Sequence: Synthetic oligonucleotide
auauccaauaggucuaucg

SEQ ID NO: 269510 - RNA, 19 nt, Artificial Sequence
  Description of Artificial Sequence: Synthetic oligonucleotide
ucuugcgccacaaagagac

SEQ ID NO: 269511 - RNA, 19 nt, Artificial Sequence
  Description of Artificial Sequence: Synthetic oligonucleotide
aaacgcccaaauuugguuc

SEQ ID NO: 269512 - RNA, 19 nt, Artificial Sequence
  Description of Artificial Sequence: Synthetic oligonucleotide
uagaccacuuuuaagacga

SEQ ID NO: 269513 - RNA, 19 nt, Artificial Sequence
  Description of Artificial Sequence: Synthetic oligonucleotide
ugcggguugaugcagagag

SEQ ID NO: 269514 - RNA, 19 nt, Artificial Sequence
  Description of Artificial Sequence: Synthetic oligonucleotide
uauucuucggcccaguagu

SEQ ID NO: 269515 - RNA, 19 nt, Artificial Sequence
  Description of Artificial Sequence: Synthetic oligonucleotide
aauacaucagcguguggag

SEQ ID NO: 269516 - RNA, 19 nt, Artificial Sequence
  Description of Artificial Sequence: Synthetic oligonucleotide
agagacgauaauuuuaugu

SEQ ID NO: 269517 - RNA, 19 nt, Artificial Sequence
  Description of Artificial Sequence: Synthetic oligonucleotide
uuacugaccagacaacacc

SEQ ID NO: 269518 - RNA, 19 nt, Artificial Sequence
  Description of Artificial Sequence: Synthetic oligonucleotide
uccaauaggucuaucgggc

SEQ ID NO: 269519 - RNA, 19 nt, Artificial Sequence
  Description of Artificial Sequence: Synthetic oligonucleotide
uagcguuacuguaaugucg

SEQ ID NO: 269520 - RNA, 19 nt, Artificial Sequence
  Description of Artificial Sequence: Synthetic oligonucleotide
acaagcaugauuaacucuc

SEQ ID NO: 269521 - RNA, 19 nt, Artificial Sequence
  Description of Artificial Sequence: Synthetic oligonucleotide
gacgauaauuuuauguagg

SEQ ID NO: 269522 - RNA, 19 nt, Artificial Sequence
  Description of Artificial Sequence: Synthetic oligonucleotide
uguaccgccauuguaagcc

SEQ ID NO: 269523 - RNA, 19 nt, Artificial Sequence
  Description of Artificial Sequence: Synthetic oligonucleotide
gacgguggaacuaauaaag

SEQ ID NO: 269524 - RNA, 19 nt, Artificial Sequence
  Description of Artificial Sequence: Synthetic oligonucleotide
uuuauguaggucacucugc

SEQ ID NO: 269525 - RNA, 19 nt, Artificial Sequence
  Description of Artificial Sequence: Synthetic oligonucleotide
guaugugugccuuagcacc

SEQ ID NO: 269526 - RNA, 19 nt, Artificial Sequence
  Description of Artificial Sequence: Synthetic oligonucleotide
aagacguaugcuguuguac

SEQ ID NO: 269527 - RNA, 19 nt, Artificial Sequence
  Description of Artificial Sequence: Synthetic oligonucleotide
agacgauaauuuuauguag

SEQ ID NO: 269528 - RNA, 19 nt, Artificial Sequence
  Description of Artificial Sequence: Synthetic oligonucleotide
ucacaagccguccucauug

SEQ ID NO: 269529 - RNA, 19 nt, Artificial Sequence
  Description of Artificial Sequence: Synthetic oligonucleotide
aaacauaacuuaauagucu

SEQ ID NO: 269530 - RNA, 19 nt, Artificial Sequence
  Description of Artificial Sequence: Synthetic oligonucleotide
aauguaugacugucgucuc

SEQ ID NO: 269531 - RNA, 19 nt, Artificial Sequence
  Description of Artificial Sequence: Synthetic oligonucleotide
ucgcucaagaugaaaauac

SEQ ID NO: 269532 - RNA, 19 nt, Artificial Sequence
  Description of Artificial Sequence: Synthetic oligonucleotide
ucuaucgggcucaaugucc

SEQ ID NO: 269533 - RNA, 19 nt, Artificial Sequence
  Description of Artificial Sequence: Synthetic oligonucleotide
aggcgagccauacagcugc

SEQ ID NO: 269534 - RNA, 19 nt, Artificial Sequence
  Description of Artificial Sequence: Synthetic oligonucleotide
ucgaauuugggguuuguga

SEQ ID NO: 269535 - RNA, 19 nt, Artificial Sequence
  Description of Artificial Sequence: Synthetic oligonucleotide
auuacaucuucaguaguac

SEQ ID NO: 269536 - RNA, 19 nt, Artificial Sequence
  Description of Artificial Sequence: Synthetic oligonucleotide
aacuuacaauaacuuuaac

SEQ ID NO: 269537 - RNA, 19 nt, Artificial Sequence
  Description of Artificial Sequence: Synthetic oligonucleotide
uggaguaugucaagggcag

SEQ ID NO: 269538 - RNA, 19 nt, Artificial Sequence
  Description of Artificial Sequence: Synthetic oligonucleotide
accucguaaaaucugauaa

SEQ ID NO: 269539 - RNA, 19 nt, Artificial Sequence
  Description of Artificial Sequence: Synthetic oligonucleotide
cugguauagacucuucccg

SEQ ID NO: 269540 - RNA, 19 nt, Artificial Sequence
  Description of Artificial Sequence: Synthetic oligonucleotide
uucaaaccucguaaaaucu

SEQ ID NO: 269541 - RNA, 19 nt, Artificial Sequence
  Description of Artificial Sequence: Synthetic oligonucleotide
auagcguuacuguaauguc

SEQ ID NO: 269542 - RNA, 19 nt, Artificial Sequence
  Description of Artificial Sequence: Synthetic oligonucleotide
uuugauuggaaagcaaacu

SEQ ID NO: 269543 - RNA, 19 nt, Artificial Sequence
  Description of Artificial Sequence: Synthetic oligonucleotide
gaccagacaacaccaaaag

SEQ ID NO: 269544 - RNA, 19 nt, Artificial Sequence
  Description of Artificial Sequence: Synthetic oligonucleotide
cucguaaaaucugauaaag

SEQ ID NO: 269545 - RNA, 19 nt, Artificial Sequence
  Description of Artificial Sequence: Synthetic oligonucleotide
aagguaucaucgaauuugg

SEQ ID NO: 269546 - RNA, 19 nt, Artificial Sequence
  Description of Artificial Sequence: Synthetic oligonucleotide
agucuaguaacauuucuaa

SEQ ID NO: 269547 - RNA, 19 nt, Artificial Sequence
  Description of Artificial Sequence: Synthetic oligonucleotide
ugaggagagacgauaauuu

SEQ ID NO: 269548 - RNA, 19 nt, Artificial Sequence
  Description of Artificial Sequence: Synthetic oligonucleotide
aggucuaucgggcucaaug

SEQ ID NO: 269549 - RNA, 19 nt, Artificial Sequence
  Description of Artificial Sequence: Synthetic oligonucleotide
cuagaccacuuuuaagacg

SEQ ID NO: 269550 - RNA, 19 nt, Artificial Sequence
  Description of Artificial Sequence: Synthetic oligonucleotide
cauaugacgagauucaucu

SEQ ID NO: 269551 - RNA, 19 nt, Artificial Sequence
  Description of Artificial Sequence: Synthetic oligonucleotide
auaacuuaauagucuucag

SEQ ID NO: 269552 - RNA, 19 nt, Artificial Sequence
  Description of Artificial Sequence: Synthetic oligonucleotide
gagacgauaauuuuaugua

SEQ ID NO: 269553 - RNA, 19 nt, Artificial Sequence
  Description of Artificial Sequence: Synthetic oligonucleotide
uugagugcuacucucuuuc

SEQ ID NO: 269554 - RNA, 19 nt, Artificial Sequence
  Description of Artificial Sequence: Synthetic oligonucleotide
uuuaaccugucggacagag

SEQ ID NO: 269555 - RNA, 19 nt, Artificial Sequence
  Description of Artificial Sequence: Synthetic oligonucleotide
uuuugcguuggcucuugcg

SEQ ID NO: 269556 - RNA, 19 nt, Artificial Sequence
  Description of Artificial Sequence: Synthetic oligonucleotide
uacacgugugguaucuuag

SEQ ID NO: 269557 - RNA, 19 nt, Artificial Sequence
  Description of Artificial Sequence: Synthetic oligonucleotide
ucaaagguaucaucgaauu

SEQ ID NO: 269558 - RNA, 19 nt, Artificial Sequence
  Description of Artificial Sequence: Synthetic oligonucleotide
uuaugaggaccccugagua

SEQ ID NO: 269559 - RNA, 19 nt, Artificial Sequence
  Description of Artificial Sequence: Synthetic oligonucleotide
gacgguggcaucucagacg

SEQ ID NO: 269560 - RNA, 19 nt, Artificial Sequence
  Description of Artificial Sequence: Synthetic oligonucleotide
guuaauuguccauaacaca

SEQ ID NO: 269561 - RNA, 19 nt, Artificial Sequence
  Description of Artificial Sequence: Synthetic oligonucleotide
uuccugagucauaugacga

SEQ ID NO: 269562 - RNA, 19 nt, Artificial Sequence
  Description of Artificial Sequence: Synthetic oligonucleotide
ucaauagcguuacuguaau

SEQ ID NO: 269563 - RNA, 19 nt, Artificial Sequence
  Description of Artificial Sequence: Synthetic oligonucleotide
guugcuauucacaaggaga

SEQ ID NO: 269564 - RNA, 19 nt, Artificial Sequence
  Description of Artificial Sequence: Synthetic oligonucleotide
guaucaucgaauuuggggu

SEQ ID NO: 269565 - RNA, 19 nt, Artificial Sequence
  Description of Artificial Sequence: Synthetic oligonucleotide
acgauaauuuuauguaggu

SEQ ID NO: 269566 - RNA, 19 nt, Artificial Sequence
  Description of Artificial Sequence: Synthetic oligonucleotide
uaagacgauccauuaguac

SEQ ID NO: 269567 - RNA, 19 nt, Artificial Sequence
  Description of Artificial Sequence: Synthetic oligonucleotide
guauagacucuucccgucg

SEQ ID NO: 269568 - RNA, 19 nt, Artificial Sequence
  Description of Artificial Sequence: Synthetic oligonucleotide
ugcgccuuaacuguagcag

SEQ ID NO: 269569 - RNA, 19 nt, Artificial Sequence
  Description of Artificial Sequence: Synthetic oligonucleotide
uaguacaauacaucagcgu

SEQ ID NO: 269570 - RNA, 19 nt, Artificial Sequence
  Description of Artificial Sequence: Synthetic oligonucleotide
gaaauacggcuguuguugc

SEQ ID NO: 269571 - RNA, 19 nt, Artificial Sequence
  Description of Artificial Sequence: Synthetic oligonucleotide
uuacaguacaagcaugauu

SEQ ID NO: 269572 - RNA, 19 nt, Artificial Sequence
  Description of Artificial Sequence: Synthetic oligonucleotide
uacugaguaacaacuuccu

SEQ ID NO: 269573 - RNA, 19 nt, Artificial Sequence
  Description of Artificial Sequence: Synthetic oligonucleotide
aauaggucuaucgggcuca

SEQ ID NO: 269574 - RNA, 19 nt, Artificial Sequence
  Description of Artificial Sequence: Synthetic oligonucleotide
agauauuucaaaccucgua

SEQ ID NO: 269575 - RNA, 19 nt, Artificial Sequence
  Description of Artificial Sequence: Synthetic oligonucleotide
uuaagacgauccauuagua

SEQ ID NO: 269576 - RNA, 19 nt, Artificial Sequence
  Description of Artificial Sequence: Synthetic oligonucleotide
agacguaugcuguuguacu

SEQ ID NO: 269577 - RNA, 19 nt, Artificial Sequence
  Description of Artificial Sequence: Synthetic oligonucleotide
uacaucagcguguggaggu

SEQ ID NO: 269578 - RNA, 19 nt, Artificial Sequence
  Description of Artificial Sequence: Synthetic oligonucleotide
uggcuguuuaugaggaccc

SEQ ID NO: 269579 - RNA, 19 nt, Artificial Sequence
  Description of Artificial Sequence: Synthetic oligonucleotide
aacgcccaaauuugguuca

SEQ ID NO: 269580 - RNA, 19 nt, Artificial Sequence
  Description of Artificial Sequence: Synthetic oligonucleotide
uccugagucauaugacgag

SEQ ID NO: 269581 - RNA, 19 nt, Artificial Sequence
  Description of Artificial Sequence: Synthetic oligonucleotide
aguacaggaagagauggcu

SEQ ID NO: 269582 - RNA, 19 nt, Artificial Sequence
  Description of Artificial Sequence: Synthetic oligonucleotide
ucauuuguucugaggcgag

SEQ ID NO: 269583 - RNA, 19 nt, Artificial Sequence
  Description of Artificial Sequence: Synthetic oligonucleotide
ugguggugcgccuuaacug

SEQ ID NO: 269584 - RNA, 19 nt, Artificial Sequence
  Description of Artificial Sequence: Synthetic oligonucleotide
uauagacucuucccgucga

SEQ ID NO: 269585 - RNA, 19 nt, Artificial Sequence
  Description of Artificial Sequence: Synthetic oligonucleotide
uaugugugccuuagcaccu

SEQ ID NO: 269586 - RNA, 19 nt, Artificial Sequence
  Description of Artificial Sequence: Synthetic oligonucleotide
caauacaucagcgugugga

SEQ ID NO: 269587 - RNA, 19 nt, Artificial Sequence
  Description of Artificial Sequence: Synthetic oligonucleotide
agacgauccauuaguacuc

SEQ ID NO: 269588 - RNA, 19 nt, Artificial Sequence
  Description of Artificial Sequence: Synthetic oligonucleotide
ugguauagacucuucccgu

SEQ ID NO: 269589 - RNA, 19 nt, Artificial Sequence
  Description of Artificial Sequence: Synthetic oligonucleotide
agugaaagcuacauuacau

SEQ ID NO: 269590 - RNA, 19 nt, Artificial Sequence
  Description of Artificial Sequence: Synthetic oligonucleotide
ugucaauagcguuacugua

SEQ ID NO: 269591 - RNA, 19 nt, Artificial Sequence
  Description of Artificial Sequence: Synthetic oligonucleotide
gaagacucuuuugcaagag

SEQ ID NO: 269592 - RNA, 19 nt, Artificial Sequence
  Description of Artificial Sequence: Synthetic oligonucleotide
gacguaugcuguuguacug

SEQ ID NO: 269593 - RNA, 19 nt, Artificial Sequence
  Description of Artificial Sequence: Synthetic oligonucleotide
acgguggaacuaauaaagc

SEQ ID NO: 269594 - RNA, 19 nt, Artificial Sequence
  Description of Artificial Sequence: Synthetic oligonucleotide
auguaccgccauuguaagc

SEQ ID NO: 269595 - RNA, 19 nt, Artificial Sequence
  Description of Artificial Sequence: Synthetic oligonucleotide
cugccgaagacguaugcug

SEQ ID NO: 269596 - RNA, 19 nt, Artificial Sequence
  Description of Artificial Sequence: Synthetic oligonucleotide
agauguaccgccauuguaa

SEQ ID NO: 269597 - RNA, 19 nt, Artificial Sequence
  Description of Artificial Sequence: Synthetic oligonucleotide
aaccucguaaaaucugaua

SEQ ID NO: 269598 - RNA, 19 nt, Artificial Sequence
  Description of Artificial Sequence: Synthetic oligonucleotide
gacucuuuugcaagagacc

SEQ ID NO: 269599 - RNA, 19 nt, Artificial Sequence
  Description of Artificial Sequence: Synthetic oligonucleotide
agcugccgaagacguaugc

SEQ ID NO: 269600 - RNA, 19 nt, Artificial Sequence
  Description of Artificial Sequence: Synthetic oligonucleotide
agacucuucccgucgaggu

SEQ ID NO: 269601 - RNA, 19 nt, Artificial Sequence
  Description of Artificial Sequence: Synthetic oligonucleotide
agauaacuuacaauaacuu

SEQ ID NO: 269602 - RNA, 19 nt, Artificial Sequence
  Description of Artificial Sequence: Synthetic oligonucleotide
gggucaagcugucauuugg

SEQ ID NO: 269603 - RNA, 19 nt, Artificial Sequence
  Description of Artificial Sequence: Synthetic oligonucleotide
augaugcgaguggugaugg

SEQ ID NO: 269604 - RNA, 19 nt, Artificial Sequence
  Description of Artificial Sequence: Synthetic oligonucleotide
ugccgaagacguaugcugu

SEQ ID NO: 269605 - RNA, 19 nt, Artificial Sequence
  Description of Artificial Sequence: Synthetic oligonucleotide
uagacucuucccgucgagg

SEQ ID NO: 269606 - RNA, 19 nt, Artificial Sequence
  Description of Artificial Sequence: Synthetic oligonucleotide
uguaugacugucgucucuc

SEQ ID NO: 269607 - RNA, 19 nt, Artificial Sequence
  Description of Artificial Sequence: Synthetic oligonucleotide
agucaauguguggagguug

SEQ ID NO: 269608 - RNA, 19 nt, Artificial Sequence
  Description of Artificial Sequence: Synthetic oligonucleotide
accccugaguaugugugcc

SEQ ID NO: 269609 - RNA, 19 nt, Artificial Sequence
  Description of Artificial Sequence: Synthetic oligonucleotide
gguggaacuaauaaagcuc

SEQ ID NO: 269610 - RNA, 19 nt, Artificial Sequence
  Description of Artificial Sequence: Synthetic oligonucleotide
caauguguggagguuggag

SEQ ID NO: 269611 - RNA, 19 nt, Artificial Sequence
  Description of Artificial Sequence: Synthetic oligonucleotide
uuaaccugucggacagagc

SEQ ID NO: 269612 - RNA, 19 nt, Artificial Sequence
  Description of Artificial Sequence: Synthetic oligonucleotide
ugagugcuacucucuuucc

SEQ ID NO: 269613 - RNA, 19 nt, Artificial Sequence
  Description of Artificial Sequence: Synthetic oligonucleotide
uaucaucgaauuugggguu

SEQ ID NO: 269614 - RNA, 19 nt, Artificial Sequence
  Description of Artificial Sequence: Synthetic oligonucleotide
gcucuugcgccacaaagag

SEQ ID NO: 269615 - RNA, 19 nt, Artificial Sequence
  Description of Artificial Sequence: Synthetic oligonucleotide
gagagacgauaauuuuaug

SEQ ID NO: 269616 - RNA, 19 nt, Artificial Sequence
  Description of Artificial Sequence: Synthetic oligonucleotide
ugucucgauguagaaugcc

SEQ ID NO: 269617 - RNA, 19 nt, Artificial Sequence
  Description of Artificial Sequence: Synthetic oligonucleotide
agaucgcucaagaugaaaa

SEQ ID NO: 269618 - RNA, 19 nt, Artificial Sequence
  Description of Artificial Sequence: Synthetic oligonucleotide
auccauuaguacuccuugu

SEQ ID NO: 269619 - RNA, 19 nt, Artificial Sequence
  Description of Artificial Sequence: Synthetic oligonucleotide
gguaucuuagucucccuuc

SEQ ID NO: 269620 - RNA, 19 nt, Artificial Sequence
  Description of Artificial Sequence: Synthetic oligonucleotide
cuuuagaacacaguugcua

SEQ ID NO: 269621 - RNA, 19 nt, Artificial Sequence
  Description of Artificial Sequence: Synthetic oligonucleotide
uaaugucggcugcccauca

SEQ ID NO: 269622 - RNA, 19 nt, Artificial Sequence
  Description of Artificial Sequence: Synthetic oligonucleotide
agaccagauucuggaagac

SEQ ID NO: 269623 - RNA, 19 nt, Artificial Sequence
  Description of Artificial Sequence: Synthetic oligonucleotide
caauaggucuaucgggcuc

SEQ ID NO: 269624 - RNA, 19 nt, Artificial Sequence
  Description of Artificial Sequence: Synthetic oligonucleotide
uucccgucgagguggaaaa

SEQ ID NO: 269625 - RNA, 19 nt, Artificial Sequence
  Description of Artificial Sequence: Synthetic oligonucleotide
gagcguaacuggcuuuaug

SEQ ID NO: 269626 - RNA, 19 nt, Artificial Sequence
  Description of Artificial Sequence: Synthetic oligonucleotide
aucuguuacugaccagaca

SEQ ID NO: 269627 - RNA, 19 nt, Artificial Sequence
  Description of Artificial Sequence: Synthetic oligonucleotide
uggugcgccuuaacuguag

SEQ ID NO: 269628 - RNA, 19 nt, Artificial Sequence
  Description of Artificial Sequence: Synthetic oligonucleotide
auguaugacugucgucucu

SEQ ID NO: 269629 - RNA, 19 nt, Artificial Sequence
  Description of Artificial Sequence: Synthetic oligonucleotide
uacuguaaugucggcugcc

SEQ ID NO: 269630 - RNA, 19 nt, Artificial Sequence
  Description of Artificial Sequence: Synthetic oligonucleotide
caguacaagcaugauuaac

SEQ ID NO: 269631 - RNA, 19 nt, Artificial Sequence
  Description of Artificial Sequence: Synthetic oligonucleotide
guaccgccauuguaagccg

SEQ ID NO: 269632 - RNA, 19 nt, Artificial Sequence
  Description of Artificial Sequence: Synthetic oligonucleotide
cgaauuugggguuugugac

SEQ ID NO: 269633 - RNA, 19 nt, Artificial Sequence
  Description of Artificial Sequence: Synthetic oligonucleotide
auacacgugugguaucuua

SEQ ID NO: 269634 - RNA, 19 nt, Artificial Sequence
  Description of Artificial Sequence: Synthetic oligonucleotide
gacgauccauuaguacucc

SEQ ID NO: 269635 - RNA, 19 nt, Artificial Sequence
  Description of Artificial Sequence: Synthetic oligonucleotide
gaccccugaguaugugugc

SEQ ID NO: 269636 - RNA, 19 nt, Artificial Sequence
  Description of Artificial Sequence: Synthetic oligonucleotide
cuaucgggcucaaugucca

SEQ ID NO: 269637 - RNA, 19 nt, Artificial Sequence
  Description of Artificial Sequence: Synthetic oligonucleotide
aguaugucaagggcagaga

SEQ ID NO: 269638 - RNA, 19 nt, Artificial Sequence
  Description of Artificial Sequence: Synthetic oligonucleotide
aaaccucguaaaaucugau

SEQ ID NO: 269639 - RNA, 19 nt, Artificial Sequence
  Description of Artificial Sequence: Synthetic oligonucleotide
cagugaaagcuacauuaca

SEQ ID NO: 269640 - RNA, 19 nt, Artificial Sequence
  Description of Artificial Sequence: Synthetic oligonucleotide
ccuagaccacuuuuaagac

SEQ ID NO: 269641 - RNA, 19 nt, Artificial Sequence
  Description of Artificial Sequence: Synthetic oligonucleotide
ucgucucucuguguguaug

SEQ ID NO: 269642 - RNA, 19 nt, Artificial Sequence
  Description of Artificial Sequence: Synthetic oligonucleotide
uucacaagccguccucauu

SEQ ID NO: 269643 - RNA, 19 nt, Artificial Sequence
  Description of Artificial Sequence: Synthetic oligonucleotide
ccauuaguacuccuuguac

SEQ ID NO: 269644 - RNA, 19 nt, Artificial Sequence
  Description of Artificial Sequence: Synthetic oligonucleotide
auaaaccccaaacgcccaa

SEQ ID NO: 269645 - RNA, 19 nt, Artificial Sequence
  Description of Artificial Sequence: Synthetic oligonucleotide
uugcgccacaaagagacau

SEQ ID NO: 269646 - RNA, 19 nt, Artificial Sequence
  Description of Artificial Sequence: Synthetic oligonucleotide
acauagagcguaacuggcu

SEQ ID NO: 269647 - RNA, 19 nt, Artificial Sequence
  Description of Artificial Sequence: Synthetic oligonucleotide
aucgcucaagaugaaaaua

SEQ ID NO: 269648 - RNA, 19 nt, Artificial Sequence
  Description of Artificial Sequence: Synthetic oligonucleotide
cugaggcgagccauacagc

SEQ ID NO: 269649 - RNA, 19 nt, Artificial Sequence
  Description of Artificial Sequence: Synthetic oligonucleotide
cauuuguucugaggcgagc

SEQ ID NO: 269650 - RNA, 19 nt, Artificial Sequence
  Description of Artificial Sequence: Synthetic oligonucleotide
uaccgccauuguaagccgc

SEQ ID NO: 269651 - RNA, 19 nt, Artificial Sequence
  Description of Artificial Sequence: Synthetic oligonucleotide
aggaccccugaguaugugu

SEQ ID NO: 269652 - RNA, 19 nt, Artificial Sequence
  Description of Artificial Sequence: Synthetic oligonucleotide
ucucagacggcugggcgac

SEQ ID NO: 269653 - RNA, 19 nt, Artificial Sequence
  Description of Artificial Sequence: Synthetic oligonucleotide
acaguacaagcaugauuaa

SEQ ID NO: 269654 - RNA, 19 nt, Artificial Sequence
  Description of Artificial Sequence: Synthetic oligonucleotide
gaucgcucaagaugaaaau

SEQ ID NO: 269655 - RNA, 19 nt, Artificial Sequence
  Description of Artificial Sequence: Synthetic oligonucleotide
gguauagacucuucccguc

SEQ ID NO: 269656 - RNA, 19 nt, Artificial Sequence
  Description of Artificial Sequence: Synthetic oligonucleotide
gaugguggugcgccuuaac

SEQ ID NO: 269657 - RNA, 19 nt, Artificial Sequence
  Description of Artificial Sequence: Synthetic oligonucleotide
caauagcguuacuguaaug

SEQ ID NO: 269658 - RNA, 19 nt, Artificial Sequence
  Description of Artificial Sequence: Synthetic oligonucleotide
augguggugguggugguga

SEQ ID NO: 269659 - RNA, 19 nt, Artificial Sequence
  Description of Artificial Sequence: Synthetic oligonucleotide
auacucagcuacauacaga

SEQ ID NO: 269660 - RNA, 19 nt, Artificial Sequence
  Description of Artificial Sequence: Synthetic oligonucleotide
auagagcguaacuggcuuu

SEQ ID NO: 269661 - RNA, 19 nt, Artificial Sequence
  Description of Artificial Sequence: Synthetic oligonucleotide
ugugcaacucuggguaaaa

SEQ ID NO: 269662 - RNA, 19 nt, Artificial Sequence
  Description of Artificial Sequence: Synthetic oligonucleotide
uagagcguaacuggcuuua

SEQ ID NO: 269663 - RNA, 19 nt, Artificial Sequence
  Description of Artificial Sequence: Synthetic oligonucleotide
cugucggacagagcugagg

SEQ ID NO: 269664 - RNA, 19 nt, Artificial Sequence
  Description of Artificial Sequence: Synthetic oligonucleotide
uggaacuaauaaagcucuu

SEQ ID NO: 269665 - RNA, 19 nt, Artificial Sequence
  Description of Artificial Sequence: Synthetic oligonucleotide
gaagacguaugcuguugua

SEQ ID NO: 269666 - RNA, 19 nt, Artificial Sequence
  Description of Artificial Sequence: Synthetic oligonucleotide
cagauucagcucagaucgc

SEQ ID NO: 269667 - RNA, 19 nt, Artificial Sequence
  Description of Artificial Sequence: Synthetic oligonucleotide
cuuuaaccaugugcaacuc

SEQ ID NO: 269668 - RNA, 19 nt, Artificial Sequence
  Description of Artificial Sequence: Synthetic oligonucleotide
cuugacccggggcagguga

SEQ ID NO: 269669 - RNA, 19 nt, Artificial Sequence
  Description of Artificial Sequence: Synthetic oligonucleotide
aaggcauccuuagcggaua

SEQ ID NO: 269670 - RNA, 19 nt, Artificial Sequence
  Description of Artificial Sequence: Synthetic oligonucleotide
uguaagccgccaucauuuu

SEQ ID NO: 269671 - RNA, 19 nt, Artificial Sequence
  Description of Artificial Sequence: Synthetic oligonucleotide
ccuuaacuguagcagccgc

SEQ ID NO: 269672 - RNA, 19 nt, Artificial Sequence
  Description of Artificial Sequence: Synthetic oligonucleotide
gauggugguggugguggug

SEQ ID NO: 269673 - RNA, 19 nt, Artificial Sequence
  Description of Artificial Sequence: Synthetic oligonucleotide
guacaauacaucagcgugu

SEQ ID NO: 269674 - RNA, 19 nt, Artificial Sequence
  Description of Artificial Sequence: Synthetic oligonucleotide
ugucgucucucugugugua

SEQ ID NO: 269675 - RNA, 19 nt, Artificial Sequence
  Description of Artificial Sequence: Synthetic oligonucleotide
cacauacacgugugguauc

SEQ ID NO: 269676 - RNA, 19 nt, Artificial Sequence
  Description of Artificial Sequence: Synthetic oligonucleotide
gguguagaguacaggaaga

SEQ ID NO: 269677 - RNA, 19 nt, Artificial Sequence
  Description of Artificial Sequence: Synthetic oligonucleotide
acgauccauuaguacuccu

SEQ ID NO: 269678 - RNA, 19 nt, Artificial Sequence
  Description of Artificial Sequence: Synthetic oligonucleotide
gcgacgguggaacuaauaa

SEQ ID NO: 269679 - RNA, 19 nt, Artificial Sequence
  Description of Artificial Sequence: Synthetic oligonucleotide
uugcaccaucuuuguuuag

SEQ ID NO: 269680 - RNA, 19 nt, Artificial Sequence
  Description of Artificial Sequence: Synthetic oligonucleotide
uagucaauguguggagguu

SEQ ID NO: 269681 - RNA, 19 nt, Artificial Sequence
  Description of Artificial Sequence: Synthetic oligonucleotide
cguaugcuguuguacuggg

SEQ ID NO: 269682 - RNA, 19 nt, Artificial Sequence
  Description of Artificial Sequence: Synthetic oligonucleotide
ugaugcgaguggugauggu

SEQ ID NO: 269683 - RNA, 19 nt, Artificial Sequence
  Description of Artificial Sequence: Synthetic oligonucleotide
ggucuaucgggcucaaugu

SEQ ID NO: 269684 - RNA, 19 nt, Artificial Sequence
  Description of Artificial Sequence: Synthetic oligonucleotide
cuccuuguacaggugaaaa

SEQ ID NO: 269685 - RNA, 19 nt, Artificial Sequence
  Description of Artificial Sequence: Synthetic oligonucleotide
gguggugcgccuuaacugu

SEQ ID NO: 269686 - RNA, 19 nt, Artificial Sequence
  Description of Artificial Sequence: Synthetic oligonucleotide
cggguugaugcagagaggc

SEQ ID NO: 269687 - RNA, 19 nt, Artificial Sequence
  Description of Artificial Sequence: Synthetic oligonucleotide
agccgaccccggaugaagg

SEQ ID NO: 269688 - RNA, 19 nt, Artificial Sequence
  Description of Artificial Sequence: Synthetic oligonucleotide
aucaucgaauuugggguuu

SEQ ID NO: 269689 - RNA, 19 nt, Artificial Sequence
  Description of Artificial Sequence: Synthetic oligonucleotide
auggcgugcccaacagauc

SEQ ID NO: 269690 - RNA, 19 nt, Artificial Sequence
  Description of Artificial Sequence: Synthetic oligonucleotide
aauucccggaagacucuuu

SEQ ID NO: 269691 - RNA, 19 nt, Artificial Sequence
  Description of Artificial Sequence: Synthetic oligonucleotide
ugcauccgacagaccagau

SEQ ID NO: 269692 - RNA, 19 nt, Artificial Sequence
  Description of Artificial Sequence: Synthetic oligonucleotide
cagauguaccgccauugua

SEQ ID NO: 269693 - RNA, 19 nt, Artificial Sequence
  Description of Artificial Sequence: Synthetic oligonucleotide
cuguaaugucggcugccca

SEQ ID NO: 269694 - RNA, 19 nt, Artificial Sequence
  Description of Artificial Sequence: Synthetic oligonucleotide
cauagagcguaacuggcuu

SEQ ID NO: 269695 - RNA, 19 nt, Artificial Sequence
  Description of Artificial Sequence: Synthetic oligonucleotide
caugugcaacucuggguaa

SEQ ID NO: 269696 - RNA, 19 nt, Artificial Sequence
  Description of Artificial Sequence: Synthetic oligonucleotide
cugagucauaugacgagau

SEQ ID NO: 269697 - RNA, 19 nt, Artificial Sequence
  Description of Artificial Sequence: Synthetic oligonucleotide
ucccgucgagguggaaaag

SEQ ID NO: 269698 - RNA, 19 nt, Artificial Sequence
  Description of Artificial Sequence: Synthetic oligonucleotide
cuucccgucgagguggaaa

SEQ ID NO: 269699 - RNA, 19 nt, Artificial Sequence
  Description of Artificial Sequence: Synthetic oligonucleotide
uggugguggugguggugac

SEQ ID NO: 269700 - RNA, 19 nt, Artificial Sequence
  Description of Artificial Sequence: Synthetic oligonucleotide
cgauguagaaugccagcug

SEQ ID NO: 269701 - RNA, 19 nt, Artificial Sequence
  Description of Artificial Sequence: Synthetic oligonucleotide
ugaugguggugcgccuuaa

SEQ ID NO: 269702 - RNA, 19 nt, Artificial Sequence
  Description of Artificial Sequence: Synthetic oligonucleotide
cuugcgccacaaagagaca

SEQ ID NO: 269703 - RNA, 19 nt, Artificial Sequence
  Description of Artificial Sequence: Synthetic oligonucleotide
cccgucgagguggaaaagc

SEQ ID NO: 269704 - RNA, 19 nt, Artificial Sequence
  Description of Artificial Sequence: Synthetic oligonucleotide
ccauuguaagccgccauca

SEQ ID NO: 269705 - RNA, 19 nt, Artificial Sequence
  Description of Artificial Sequence: Synthetic oligonucleotide
agagcguaacuggcuuuau

SEQ ID NO: 269706 - RNA, 19 nt, Artificial Sequence
  Description of Artificial Sequence: Synthetic oligonucleotide
gcgccacaaagagacauuc

SEQ ID NO: 269707 - RNA, 19 nt, Artificial Sequence
  Description of Artificial Sequence: Synthetic oligonucleotide
ggcuguuuaugaggacccc

SEQ ID NO: 269708 - RNA, 19 nt, Artificial Sequence
  Description of Artificial Sequence: Synthetic oligonucleotide
ggcugggcgacgguggaac

SEQ ID NO: 269709 - RNA, 19 nt, Artificial Sequence
  Description of Artificial Sequence: Synthetic oligonucleotide
ccgucgagguggaaaagca

SEQ ID NO: 269710 - RNA, 19 nt, Artificial Sequence
  Description of Artificial Sequence: Synthetic oligonucleotide
ccugagucauaugacgaga

SEQ ID NO: 269711 - RNA, 19 nt, Artificial Sequence
  Description of Artificial Sequence: Synthetic oligonucleotide
guuggcucuugcgccacaa

SEQ ID NO: 269712 - RNA, 19 nt, Artificial Sequence
  Description of Artificial Sequence: Synthetic oligonucleotide
gcguuacuguaaugucggc

SEQ ID NO: 269713 - RNA, 19 nt, Artificial Sequence
  Description of Artificial Sequence: Synthetic oligonucleotide
ccgaagacguaugcuguug

SEQ ID NO: 269714 - RNA, 19 nt, Artificial Sequence
  Description of Artificial Sequence: Synthetic oligonucleotide
cuuuaaccugucggacaga

SEQ ID NO: 269715 - RNA, 19 nt, Artificial Sequence
  Description of Artificial Sequence: Synthetic oligonucleotide
cauuguaagccgccaucau

SEQ ID NO: 269716 - RNA, 19 nt, Artificial Sequence
  Description of Artificial Sequence: Synthetic oligonucleotide
auaggucuaucgggcucaa

SEQ ID NO: 269717 - RNA, 19 nt, Artificial Sequence
  Description of Artificial Sequence: Synthetic oligonucleotide
cgguggaacuaauaaagcu

SEQ ID NO: 269718 - RNA, 19 nt, Artificial Sequence
  Description of Artificial Sequence: Synthetic oligonucleotide
cucagacggcugggcgacg

SEQ ID NO: 269719 - RNA, 19 nt, Artificial Sequence
  Description of Artificial Sequence: Synthetic oligonucleotide
cgacgguggaacuaauaaa

SEQ ID NO: 269720 - RNA, 19 nt, Artificial Sequence
  Description of Artificial Sequence: Synthetic oligonucleotide
uaggucuaucgggcucaau

SEQ ID NO: 269721 - RNA, 19 nt, Artificial Sequence
  Description of Artificial Sequence: Synthetic oligonucleotide
acgcccaaauuugguucaa

SEQ ID NO: 269722 - RNA, 19 nt, Artificial Sequence
  Description of Artificial Sequence: Synthetic oligonucleotide
gucggacagagcugagguu

SEQ ID NO: 269723 - RNA, 19 nt, Artificial Sequence
  Description of Artificial Sequence: Synthetic oligonucleotide
cugcggguugaugcagaga

SEQ ID NO: 269724 - RNA, 19 nt, Artificial Sequence
  Description of Artificial Sequence: Synthetic oligonucleotide
gcugaggagagacgauaau

SEQ ID NO: 269725 - RNA, 19 nt, Artificial Sequence
  Description of Artificial Sequence: Synthetic oligonucleotide
gcugccgaagacguaugcu

SEQ ID NO: 269726 - RNA, 19 nt, Artificial Sequence
  Description of Artificial Sequence: Synthetic oligonucleotide
gucgucucucuguguguau

SEQ ID NO: 269727 - RNA, 19 nt, Artificial Sequence
  Description of Artificial Sequence: Synthetic oligonucleotide
cugggcgacgguggaacua

SEQ ID NO: 269728 - RNA, 19 nt, Artificial Sequence
  Description of Artificial Sequence: Synthetic oligonucleotide
ccacucuggccaauccaaa

SEQ ID NO: 269729 - RNA, 19 nt, Artificial Sequence
  Description of Artificial Sequence: Synthetic oligonucleotide
ccugaguaugugugccuua

SEQ ID NO: 269730 - RNA, 19 nt, Artificial Sequence
  Description of Artificial Sequence: Synthetic oligonucleotide
ccuuagcggauauucuuuu

SEQ ID NO: 269731 - RNA, 19 nt, Artificial Sequence
  Description of Artificial Sequence: Synthetic oligonucleotide
cguuacuguaaugucggcu

SEQ ID NO: 269732 - RNA, 19 nt, Artificial Sequence
  Description of Artificial Sequence: Synthetic oligonucleotide
caauucccggaagacucuu

SEQ ID NO: 269733 - RNA, 19 nt, Artificial Sequence
  Description of Artificial Sequence: Synthetic oligonucleotide
gaccccggaugaagguggu

SEQ ID NO: 269734 - RNA, 19 nt, Artificial Sequence
  Description of Artificial Sequence: Synthetic oligonucleotide
cgauccauuaguacuccuu

SEQ ID NO: 269735 - RNA, 19 nt, Artificial Sequence
  Description of Artificial Sequence: Synthetic oligonucleotide
cgaagacguaugcuguugu

SEQ ID NO: 269736 - RNA, 19 nt, Artificial Sequence
  Description of Artificial Sequence: Synthetic oligonucleotide
gccgaagacguaugcuguu

SEQ ID NO: 269737 - RNA, 19 nt, Artificial Sequence
  Description of Artificial Sequence: Synthetic oligonucleotide
gcguuggcucuugcgccac

SEQ ID NO: 269738 - RNA, 19 nt, Artificial Sequence
  Description of Artificial Sequence: Synthetic oligonucleotide
ggcauccuuagcggauauu

SEQ ID NO: 269739 - RNA, 19 nt, Artificial Sequence
  Description of Artificial Sequence: Synthetic oligonucleotide
cgccauuguaagccgccau

SEQ ID NO: 269740 - RNA, 19 nt, Artificial Sequence
  Description of Artificial Sequence: Synthetic oligonucleotide
aaagcuugacuuuuguucc

SEQ ID NO: 269741 - RNA, 19 nt, Artificial Sequence
  Description of Artificial Sequence: Synthetic oligonucleotide
ugaacgaacaagcaaagcg

SEQ ID NO: 269742 - RNA, 19 nt, Artificial Sequence
  Description of Artificial Sequence: Synthetic oligonucleotide
aaugauuugacaccgacca

SEQ ID NO: 269743 - RNA, 19 nt, Artificial Sequence
  Description of Artificial Sequence: Synthetic oligonucleotide
aagaguucgguuuuguggc

SEQ ID NO: 269744 - RNA, 19 nt, Artificial Sequence
  Description of Artificial Sequence: Synthetic oligonucleotide
uuuaacccgaacaaggucg

SEQ ID NO: 269745 - RNA, 19 nt, Artificial Sequence
  Description of Artificial Sequence: Synthetic oligonucleotide
aacacauaguacuauguac

SEQ ID NO: 269746 - RNA, 19 nt, Artificial Sequence
  Description of Artificial Sequence: Synthetic oligonucleotide
aauaauacccggcaacugg

SEQ ID NO: 269747 - RNA, 19 nt, Artificial Sequence
  Description of Artificial Sequence: Synthetic oligonucleotide
aucauaaugccccagacgg

SEQ ID NO: 269748 - RNA, 19 nt, Artificial Sequence
  Description of Artificial Sequence: Synthetic oligonucleotide
gauacgaugcuucucagcg

SEQ ID NO: 269749 - RNA, 19 nt, Artificial Sequence
  Description of Artificial Sequence: Synthetic oligonucleotide
aagaucuagagaccggacc

SEQ ID NO: 269750 - RNA, 19 nt, Artificial Sequence
  Description of Artificial Sequence: Synthetic oligonucleotide
agagguaaaagguuggagg

SEQ ID NO: 269751 - RNA, 19 nt, Artificial Sequence
  Description of Artificial Sequence: Synthetic oligonucleotide
uaaaguuauggaaugaggu

SEQ ID NO: 269752 - RNA, 19 nt, Artificial Sequence
  Description of Artificial Sequence: Synthetic oligonucleotide
cauaguacuauguacacac

SEQ ID NO: 269753 - RNA, 19 nt, Artificial Sequence
  Description of Artificial Sequence: Synthetic oligonucleotide
agaucuagagaccggaccc

SEQ ID NO: 269754 - RNA, 19 nt, Artificial Sequence
  Description of Artificial Sequence: Synthetic oligonucleotide
auccuauuauuauaaacac

SEQ ID NO: 269755 - RNA, 19 nt, Artificial Sequence
  Description of Artificial Sequence: Synthetic oligonucleotide
auuagaaagaggucucuac

SEQ ID NO: 269756 - RNA, 19 nt, Artificial Sequence
  Description of Artificial Sequence: Synthetic oligonucleotide
aucacguucuauuaaacag

SEQ ID NO: 269757 - RNA, 19 nt, Artificial Sequence
  Description of Artificial Sequence: Synthetic oligonucleotide
uauuaaacagcgguaaugc

SEQ ID NO: 269758 - RNA, 19 nt, Artificial Sequence
  Description of Artificial Sequence: Synthetic oligonucleotide
aauccaagccuccuuuugg

SEQ ID NO: 269759 - RNA, 19 nt, Artificial Sequence
  Description of Artificial Sequence: Synthetic oligonucleotide
gagguaauaucauaaugcc

SEQ ID NO: 269760 - RNA, 19 nt, Artificial Sequence
  Description of Artificial Sequence: Synthetic oligonucleotide
aacucgacuacacaagugu

SEQ ID NO: 269761 - RNA, 19 nt, Artificial Sequence
  Description of Artificial Sequence: Synthetic oligonucleotide
auaaacgcugucuaaagcu

SEQ ID NO: 269762 - RNA, 19 nt, Artificial Sequence
  Description of Artificial Sequence: Synthetic oligonucleotide
uaauaugccuucuucccgg

SEQ ID NO: 269763 - RNA, 19 nt, Artificial Sequence
  Description of Artificial Sequence: Synthetic oligonucleotide
aaucacguucuauuaaaca

SEQ ID NO: 269764 - RNA, 19 nt, Artificial Sequence
  Description of Artificial Sequence: Synthetic oligonucleotide
auuuaaagugacgacacag

SEQ ID NO: 269765 - RNA, 19 nt, Artificial Sequence
  Description of Artificial Sequence: Synthetic oligonucleotide
gacaccgaccaucauaggg

SEQ ID NO: 269766 - RNA, 19 nt, Artificial Sequence
  Description of Artificial Sequence: Synthetic oligonucleotide
ucacguucuauuaaacagc

SEQ ID NO: 269767 - RNA, 19 nt, Artificial Sequence
  Description of Artificial Sequence: Synthetic oligonucleotide
uuuaaagugacgacacagu

SEQ ID NO: 269768 - RNA, 19 nt, Artificial Sequence
  Description of Artificial Sequence: Synthetic oligonucleotide
aaaauaggccaugacagcu

SEQ ID NO: 269769 - RNA, 19 nt, Artificial Sequence
  Description of Artificial Sequence: Synthetic oligonucleotide
cucagacuaacuuucaaac

SEQ ID NO: 269770 - RNA, 19 nt, Artificial Sequence
  Description of Artificial Sequence: Synthetic oligonucleotide
uaugacagugaauuuagaa

SEQ ID NO: 269771 - RNA, 19 nt, Artificial Sequence
  Description of Artificial Sequence: Synthetic oligonucleotide
uucuaugugucuaggcagg

SEQ ID NO: 269772 - RNA, 19 nt, Artificial Sequence
  Description of Artificial Sequence: Synthetic oligonucleotide
uuuggagcauacuugagaa

SEQ ID NO: 269773 - RNA, 19 nt, Artificial Sequence
  Description of Artificial Sequence: Synthetic oligonucleotide
uacuaaauuaugacaguga

SEQ ID NO: 269774 - RNA, 19 nt, Artificial Sequence
  Description of Artificial Sequence: Synthetic oligonucleotide
aaaguuauggaaugaggua

SEQ ID NO: 269775 - RNA, 19 nt, Artificial Sequence
  Description of Artificial Sequence: Synthetic oligonucleotide
aacaaggucgcaugaacga

SEQ ID NO: 269776 - RNA, 19 nt, Artificial Sequence
  Description of Artificial Sequence: Synthetic oligonucleotide
auuuaacccgaacaagguc

SEQ ID NO: 269777 - RNA, 19 nt, Artificial Sequence
  Description of Artificial Sequence: Synthetic oligonucleotide
uauuuaacccgaacaaggu

SEQ ID NO: 269778 - RNA, 19 nt, Artificial Sequence
  Description of Artificial Sequence: Synthetic oligonucleotide
gauaaacgcugucuaaagc

SEQ ID NO: 269779 - RNA, 19 nt, Artificial Sequence
  Description of Artificial Sequence: Synthetic oligonucleotide
ugauuuaugccgucaagcu

SEQ ID NO: 269780 - RNA, 19 nt, Artificial Sequence
  Description of Artificial Sequence: Synthetic oligonucleotide
uaaagugacgacacaguga

SEQ ID NO: 269781 - RNA, 19 nt, Artificial Sequence
  Description of Artificial Sequence: Synthetic oligonucleotide
aucccugagcacucgaugc

SEQ ID NO: 269782 - RNA, 19 nt, Artificial Sequence
  Description of Artificial Sequence: Synthetic oligonucleotide
caucauaggggcuucagac

SEQ ID NO: 269783 - RNA, 19 nt, Artificial Sequence
  Description of Artificial Sequence: Synthetic oligonucleotide
augagguaauaucauaaug

SEQ ID NO: 269784 - RNA, 19 nt, Artificial Sequence
  Description of Artificial Sequence: Synthetic oligonucleotide
cacguucuauuaaacagcg

SEQ ID NO: 269785 - RNA, 19 nt, Artificial Sequence
  Description of Artificial Sequence: Synthetic oligonucleotide
ucagacuaacuuucaaacc

SEQ ID NO: 269786 - RNA, 19 nt, Artificial Sequence
  Description of Artificial Sequence: Synthetic oligonucleotide
aaguuauggaaugagguaa

SEQ ID NO: 269787 - RNA, 19 nt, Artificial Sequence
  Description of Artificial Sequence: Synthetic oligonucleotide
auaaaguuauggaaugagg

SEQ ID NO: 269788 - RNA, 19 nt, Artificial Sequence
  Description of Artificial Sequence: Synthetic oligonucleotide
ugacacuuggggaugccgg

SEQ ID NO: 269789 - RNA, 19 nt, Artificial Sequence
  Description of Artificial Sequence: Synthetic oligonucleotide
auuagcuccaaaugauuug

SEQ ID NO: 269790 - RNA, 19 nt, Artificial Sequence
  Description of Artificial Sequence: Synthetic oligonucleotide
ugcgaguucccucucaugu

SEQ ID NO: 269791 - RNA, 19 nt, Artificial Sequence
  Description of Artificial Sequence: Synthetic oligonucleotide
aacaacccagcguagggcu

SEQ ID NO: 269792 - RNA, 19 nt, Artificial Sequence
  Description of Artificial Sequence: Synthetic oligonucleotide
ucaaguaggcuccccuagg

SEQ ID NO: 269793 - RNA, 19 nt, Artificial Sequence
  Description of Artificial Sequence: Synthetic oligonucleotide
ugaugacuaaucacguucu

SEQ ID NO: 269794 - RNA, 19 nt, Artificial Sequence
  Description of Artificial Sequence: Synthetic oligonucleotide
uacgaugcuucucagcgca

SEQ ID NO: 269795 - RNA, 19 nt, Artificial Sequence
  Description of Artificial Sequence: Synthetic oligonucleotide
uuacggauggacugcagug

SEQ ID NO: 269796 - RNA, 19 nt, Artificial Sequence
  Description of Artificial Sequence: Synthetic oligonucleotide
uguuggccaacucauuccc

SEQ ID NO: 269797 - RNA, 19 nt, Artificial Sequence
  Description of Artificial Sequence: Synthetic oligonucleotide
uaugccgucaagcucccca

SEQ ID NO: 269798 - RNA, 19 nt, Artificial Sequence
  Description of Artificial Sequence: Synthetic oligonucleotide
ugcuuaacugccaguuagg

SEQ ID NO: 269799 - RNA, 19 nt, Artificial Sequence
  Description of Artificial Sequence: Synthetic oligonucleotide
aguuaggggaagaugcccc

SEQ ID NO: 269800 - RNA, 19 nt, Artificial Sequence
  Description of Artificial Sequence: Synthetic oligonucleotide
uuuuguccguccuuggcug

SEQ ID NO: 269801 - RNA, 19 nt, Artificial Sequence
  Description of Artificial Sequence: Synthetic oligonucleotide
uucuauuaaacagcgguaa

SEQ ID NO: 269802 - RNA, 19 nt, Artificial Sequence
  Description of Artificial Sequence: Synthetic oligonucleotide
ucucagacuaacuuucaaa

SEQ ID NO: 269803 - RNA, 19 nt, Artificial Sequence
  Description of Artificial Sequence: Synthetic oligonucleotide
agacggaccacucaccucu

SEQ ID NO: 269804 - RNA, 19 nt, Artificial Sequence
  Description of Artificial Sequence: Synthetic oligonucleotide
ugacuuccggagcaggcgg

SEQ ID NO: 269805 - RNA, 19 nt, Artificial Sequence
  Description of Artificial Sequence: Synthetic oligonucleotide
aaauaauacccggcaacug

SEQ ID NO: 269806 - RNA, 19 nt, Artificial Sequence
  Description of Artificial Sequence: Synthetic oligonucleotide
uaaucacguucuauuaaac

SEQ ID NO: 269807 - RNA, 19 nt, Artificial Sequence
  Description of Artificial Sequence: Synthetic oligonucleotide
ugggaugauacgaugcuuc

SEQ ID NO: 269808 - RNA, 19 nt, Artificial Sequence
  Description of Artificial Sequence: Synthetic oligonucleotide
cuuagaauacuguacaccu

SEQ ID NO: 269809 - RNA, 19 nt, Artificial Sequence
  Description of Artificial Sequence: Synthetic oligonucleotide
gcuugagugacacuugggg

SEQ ID NO: 269810 - RNA, 19 nt, Artificial Sequence
  Description of Artificial Sequence: Synthetic oligonucleotide
acccgagacagaugggugc

SEQ ID NO: 269811 - RNA, 19 nt, Artificial Sequence
  Description of Artificial Sequence: Synthetic oligonucleotide
caugaacgaacaagcaaag

SEQ ID NO: 269812 - RNA, 19 nt, Artificial Sequence
  Description of Artificial Sequence: Synthetic oligonucleotide
auacgaugcuucucagcgc

SEQ ID NO: 269813 - RNA, 19 nt, Artificial Sequence
  Description of Artificial Sequence: Synthetic oligonucleotide
gauuuaugccgucaagcuc

SEQ ID NO: 269814 - RNA, 19 nt, Artificial Sequence
  Description of Artificial Sequence: Synthetic oligonucleotide
ggugacgugagacaaggag

SEQ ID NO: 269815 - RNA, 19 nt, Artificial Sequence
  Description of Artificial Sequence: Synthetic oligonucleotide
gauugcagucaaauaauac

SEQ ID NO: 269816 - RNA, 19 nt, Artificial Sequence
  Description of Artificial Sequence: Synthetic oligonucleotide
ugauuugacaccgaccauc

SEQ ID NO: 269817 - RNA, 19 nt, Artificial Sequence
  Description of Artificial Sequence: Synthetic oligonucleotide
ugacacauccauuguggcc

SEQ ID NO: 269818 - RNA, 19 nt, Artificial Sequence
  Description of Artificial Sequence: Synthetic oligonucleotide
ugaaauccaagccuccuuu

SEQ ID NO: 269819 - RNA, 19 nt, Artificial Sequence
  Description of Artificial Sequence: Synthetic oligonucleotide
gaacgaacaagcaaagcga

SEQ ID NO: 269820 - RNA, 19 nt, Artificial Sequence
  Description of Artificial Sequence: Synthetic oligonucleotide
uuaacccgaacaaggucgc

SEQ ID NO: 269821 - RNA, 19 nt, Artificial Sequence
  Description of Artificial Sequence: Synthetic oligonucleotide
gaggucucuacacuauagc

SEQ ID NO: 269822 - RNA, 19 nt, Artificial Sequence
  Description of Artificial Sequence: Synthetic oligonucleotide
uuagucgggacuuauucuu

SEQ ID NO: 269823 - RNA, 19 nt, Artificial Sequence
  Description of Artificial Sequence: Synthetic oligonucleotide
gucauucgggaaaauaucc

SEQ ID NO: 269824 - RNA, 19 nt, Artificial Sequence
  Description of Artificial Sequence: Synthetic oligonucleotide
ucuagugggaauugaccac

SEQ ID NO: 269825 - RNA, 19 nt, Artificial Sequence
  Description of Artificial Sequence: Synthetic oligonucleotide
ucuauuaaacagcgguaau

SEQ ID NO: 269826 - RNA, 19 nt, Artificial Sequence
  Description of Artificial Sequence: Synthetic oligonucleotide
gucgcaugaacgaacaagc

SEQ ID NO: 269827 - RNA, 19 nt, Artificial Sequence
  Description of Artificial Sequence: Synthetic oligonucleotide
acuaaucacguucuauuaa

SEQ ID NO: 269828 - RNA, 19 nt, Artificial Sequence
  Description of Artificial Sequence: Synthetic oligonucleotide
uggaaugagguaauaucau

SEQ ID NO: 269829 - RNA, 19 nt, Artificial Sequence
  Description of Artificial Sequence: Synthetic oligonucleotide
agucauucgggaaaauauc

SEQ ID NO: 269830 - RNA, 19 nt, Artificial Sequence
  Description of Artificial Sequence: Synthetic oligonucleotide
  modified_base (7)..(7): a, c, u, g, unknown or other
ugagggnucccaaguucag

SEQ ID NO: 269831 - RNA, 19 nt, Artificial Sequence
  Description of Artificial Sequence: Synthetic oligonucleotide
acaccgaccaucauagggg

SEQ ID NO: 269832 - RNA, 19 nt, Artificial Sequence
  Description of Artificial Sequence: Synthetic oligonucleotide
ucuaugguaaaggcuacgu

SEQ ID NO: 269833 - RNA, 19 nt, Artificial Sequence
  Description of Artificial Sequence: Synthetic oligonucleotide
gucgaggugaaauguacug

SEQ ID NO: 269834 - RNA, 19 nt, Artificial Sequence
  Description of Artificial Sequence: Synthetic oligonucleotide
aaucuguguucucuauaga

SEQ ID NO: 269835 - RNA, 19 nt, Artificial Sequence
  Description of Artificial Sequence: Synthetic oligonucleotide
gacuuuuguucccaucuac

SEQ ID NO: 269836 - RNA, 19 nt, Artificial Sequence
  Description of Artificial Sequence: Synthetic oligonucleotide
auuaaacagcgguaaugcu

SEQ ID NO: 269837 - RNA, 19 nt, Artificial Sequence
  Description of Artificial Sequence: Synthetic oligonucleotide
ccggugaugacuaaucacg

SEQ ID NO: 269838 - RNA, 19 nt, Artificial Sequence
  Description of Artificial Sequence: Synthetic oligonucleotide
uaggguuuugggcaucaca

SEQ ID NO: 269839 - RNA, 19 nt, Artificial Sequence
  Description of Artificial Sequence: Synthetic oligonucleotide
agaguucgguuuuguggcc

SEQ ID NO: 269840 - RNA, 19 nt, Artificial Sequence
  Description of Artificial Sequence: Synthetic oligonucleotide
agcgaaaugucuguguaug

SEQ ID NO: 269841 - RNA, 19 nt, Artificial Sequence
  Description of Artificial Sequence: Synthetic oligonucleotide
aguacuauguacacacuca

SEQ ID NO: 269842 - RNA, 19 nt, Artificial Sequence
  Description of Artificial Sequence: Synthetic oligonucleotide
ugauacgaugcuucucagc

SEQ ID NO: 269843 - RNA, 19 nt, Artificial Sequence
  Description of Artificial Sequence: Synthetic oligonucleotide
aggaugaacaacccagcgu

SEQ ID NO: 269844 - RNA, 19 nt, Artificial Sequence
  Description of Artificial Sequence: Synthetic oligonucleotide
agcaaagcgaaaugucugu

SEQ ID NO: 269845 - RNA, 19 nt, Artificial Sequence
  Description of Artificial Sequence: Synthetic oligonucleotide
gcgcacugcaaucacaucg

SEQ ID NO: 269846 - RNA, 19 nt, Artificial Sequence
  Description of Artificial Sequence: Synthetic oligonucleotide
ucgggacuuauucuugcug

SEQ ID NO: 269847 - RNA, 19 nt, Artificial Sequence
  Description of Artificial Sequence: Synthetic oligonucleotide
uaaacgcugucuaaagcuu

SEQ ID NO: 269848 - RNA, 19 nt, Artificial Sequence
  Description of Artificial Sequence: Synthetic oligonucleotide
uggucgaggugaaauguac

SEQ ID NO: 269849 - RNA, 19 nt, Artificial Sequence
  Description of Artificial Sequence: Synthetic oligonucleotide
gagaccggacccgagacag

SEQ ID NO: 269850 - RNA, 19 nt, Artificial Sequence
  Description of Artificial Sequence: Synthetic oligonucleotide
ccugacacauccauugugg

SEQ ID NO: 269851 - RNA, 19 nt, Artificial Sequence
  Description of Artificial Sequence: Synthetic oligonucleotide
agggugacgugagacaagg

SEQ ID NO: 269852 - RNA, 19 nt, Artificial Sequence
  Description of Artificial Sequence: Synthetic oligonucleotide
  modified_base (3)..(3): a, c, u, g, unknown or other
ggnucccaaguucagacug

SEQ ID NO: 269853 - RNA, 19 nt, Artificial Sequence
  Description of Artificial Sequence: Synthetic oligonucleotide
uacaccccgaagagaagcc

SEQ ID NO: 269854 - RNA, 19 nt, Artificial Sequence
  Description of Artificial Sequence: Synthetic oligonucleotide
uuuugguauacugguuggc

SEQ ID NO: 269855 - RNA, 19 nt, Artificial Sequence
  Description of Artificial Sequence: Synthetic oligonucleotide
gaucuagagaccggacccg

SEQ ID NO: 269856 - RNA, 19 nt, Artificial Sequence
  Description of Artificial Sequence: Synthetic oligonucleotide
cuccacgagacgcucaccc

SEQ ID NO: 269857 - RNA, 19 nt, Artificial Sequence
  Description of Artificial Sequence: Synthetic oligonucleotide
auacuugagaagcuauuuu

SEQ ID NO: 269858 - RNA, 19 nt, Artificial Sequence
  Description of Artificial Sequence: Synthetic oligonucleotide
  modified_base (2)..(2): a, c, u, g, unknown or other
gnucccaaguucagacugg

SEQ ID NO: 269859 - RNA, 19 nt, Artificial Sequence
  Description of Artificial Sequence: Synthetic oligonucleotide
cuugagugacacuugggga

SEQ ID NO: 269860 - RNA, 19 nt, Artificial Sequence
  Description of Artificial Sequence: Synthetic oligonucleotide
ucccuuguggaguccaaug

SEQ ID NO: 269861 - RNA, 19 nt, Artificial Sequence
  Description of Artificial Sequence: Synthetic oligonucleotide
  modified_base (9)..(9): a, c, u, g, unknown or other
caugagggnucccaaguuc

SEQ ID NO: 269862 - RNA, 19 nt, Artificial Sequence
  Description of Artificial Sequence: Synthetic oligonucleotide
caucuuaggcuugagugac

SEQ ID NO: 269863 - RNA, 19 nt, Artificial Sequence
  Description of Artificial Sequence: Synthetic oligonucleotide
uuggagcauacuugagaag

SEQ ID NO: 269864 - RNA, 19 nt, Artificial Sequence
  Description of Artificial Sequence: Synthetic oligonucleotide
gacgugaaauccaagccuc

SEQ ID NO: 269865 - RNA, 19 nt, Artificial Sequence
  Description of Artificial Sequence: Synthetic oligonucleotide
ucauaaugccccagacgga

SEQ ID NO: 269866 - RNA, 19 nt, Artificial Sequence
  Description of Artificial Sequence: Synthetic oligonucleotide
gguuuuguggccuccaguc

SEQ ID NO: 269867 - RNA, 19 nt, Artificial Sequence
  Description of Artificial Sequence: Synthetic oligonucleotide
uggaagcggacucggguug

SEQ ID NO: 269868 - RNA, 19 nt, Artificial Sequence
  Description of Artificial Sequence: Synthetic oligonucleotide
cuccccuaggauaaaagca

SEQ ID NO: 269869 - RNA, 19 nt, Artificial Sequence
  Description of Artificial Sequence: Synthetic oligonucleotide
aacgaacaagcaaagcgaa

SEQ ID NO: 269870 - RNA, 19 nt, Artificial Sequence
  Description of Artificial Sequence: Synthetic oligonucleotide
caaggucgcaugaacgaac

SEQ ID NO: 269871 - RNA, 19 nt, Artificial Sequence
  Description of Artificial Sequence: Synthetic oligonucleotide
gacccaugcgucucgcucc

SEQ ID NO: 269872 - RNA, 19 nt, Artificial Sequence
  Description of Artificial Sequence: Synthetic oligonucleotide
agugcagccgucucagacu

SEQ ID NO: 269873 - RNA, 19 nt, Artificial Sequence
  Description of Artificial Sequence: Synthetic oligonucleotide
gauuugacaccgaccauca

SEQ ID NO: 269874 - RNA, 19 nt, Artificial Sequence
  Description of Artificial Sequence: Synthetic oligonucleotide
uucccucucauguuacgga

SEQ ID NO: 269875 - RNA, 19 nt, Artificial Sequence
  Description of Artificial Sequence: Synthetic oligonucleotide
gaacugagggacucacgug

SEQ ID NO: 269876 - RNA, 19 nt, Artificial Sequence
  Description of Artificial Sequence: Synthetic oligonucleotide
gugccguguaacuaccucc

SEQ ID NO: 269877 - RNA, 19 nt, Artificial Sequence
  Description of Artificial Sequence: Synthetic oligonucleotide
aguucccucucauguuacg

SEQ ID NO: 269878 - RNA, 19 nt, Artificial Sequence
  Description of Artificial Sequence: Synthetic oligonucleotide
aguaggcuccccuaggaua

SEQ ID NO: 269879 - RNA, 19 nt, Artificial Sequence
  Description of Artificial Sequence: Synthetic oligonucleotide
guucccucucauguuacgg

SEQ ID NO: 269880 - RNA, 19 nt, Artificial Sequence
  Description of Artificial Sequence: Synthetic oligonucleotide
gacgacacagugauggaca

SEQ ID NO: 269881 - RNA, 19 nt, Artificial Sequence
  Description of Artificial Sequence: Synthetic oligonucleotide
agcggacucggguugcagg

SEQ ID NO: 269882 - RNA, 19 nt, Artificial Sequence
  Description of Artificial Sequence: Synthetic oligonucleotide
ucgaucgugugcuauccuc

SEQ ID NO: 269883 - RNA, 19 nt, Artificial Sequence
  Description of Artificial Sequence: Synthetic oligonucleotide
augauacgaugcuucucag

SEQ ID NO: 269884 - RNA, 19 nt, Artificial Sequence
  Description of Artificial Sequence: Synthetic oligonucleotide
uuuaugccgucaagcuccc

SEQ ID NO: 269885 - RNA, 19 nt, Artificial Sequence
  Description of Artificial Sequence: Synthetic oligonucleotide
guaauaucauaaugcccca

SEQ ID NO: 269886 - RNA, 19 nt, Artificial Sequence
  Description of Artificial Sequence: Synthetic oligonucleotide
ucgacuacacaaguguaau

SEQ ID NO: 269887 - RNA, 19 nt, Artificial Sequence
  Description of Artificial Sequence: Synthetic oligonucleotide
aaagaggucucuacacuau

SEQ ID NO: 269888 - RNA, 19 nt, Artificial Sequence
  Description of Artificial Sequence: Synthetic oligonucleotide
aaguguaaugaagccagua

SEQ ID NO: 269889 - RNA, 19 nt, Artificial Sequence
  Description of Artificial Sequence: Synthetic oligonucleotide
ucccggugaugacuaauca

SEQ ID NO: 269890 - RNA, 19 nt, Artificial Sequence
  Description of Artificial Sequence: Synthetic oligonucleotide
aggaacucgacuacacaag

SEQ ID NO: 269891 - RNA, 19 nt, Artificial Sequence
  Description of Artificial Sequence: Synthetic oligonucleotide
aguucgguuuuguggccuc

SEQ ID NO: 269892 - RNA, 19 nt, Artificial Sequence
  Description of Artificial Sequence: Synthetic oligonucleotide
  modified_base (13)..(13): a, c, u, g, unknown or other
ugcacaugagggnucccaa

SEQ ID NO: 269893 - RNA, 19 nt, Artificial Sequence
  Description of Artificial Sequence: Synthetic oligonucleotide
gguaaaggcuacguggaag

SEQ ID NO: 269894 - RNA, 19 nt, Artificial Sequence
  Description of Artificial Sequence: Synthetic oligonucleotide
uccucggcuaauaugccuu

SEQ ID NO: 269895 - RNA, 19 nt, Artificial Sequence
  Description of Artificial Sequence: Synthetic oligonucleotide
gguuuggagauuucuugug

SEQ ID NO: 269896 - RNA, 19 nt, Artificial Sequence
  Description of Artificial Sequence: Synthetic oligonucleotide
gaugaacaacccagcguag

SEQ ID NO: 269897 - RNA, 19 nt, Artificial Sequence
  Description of Artificial Sequence: Synthetic oligonucleotide
acaguccacacagugcgag

SEQ ID NO: 269898 - RNA, 19 nt, Artificial Sequence
  Description of Artificial Sequence: Synthetic oligonucleotide
agaugggugccaagauucc

SEQ ID NO: 269899 - RNA, 19 nt, Artificial Sequence
  Description of Artificial Sequence: Synthetic oligonucleotide
ggucgcaugaacgaacaag

SEQ ID NO: 269900 - RNA, 19 nt, Artificial Sequence
  Description of Artificial Sequence: Synthetic oligonucleotide
gaacucgacuacacaagug

SEQ ID NO: 269901 - RNA, 19 nt, Artificial Sequence
  Description of Artificial Sequence: Synthetic oligonucleotide
gagcgugccguguaacuac

SEQ ID NO: 269902 - RNA, 19 nt, Artificial Sequence
  Description of Artificial Sequence: Synthetic oligonucleotide
auaauacccggcaacuggu

SEQ ID NO: 269903 - RNA, 19 nt, Artificial Sequence
  Description of Artificial Sequence: Synthetic oligonucleotide
gagacgcucacccacagau

SEQ ID NO: 269904 - RNA, 19 nt, Artificial Sequence
  Description of Artificial Sequence: Synthetic oligonucleotide
auaaugccccagacggacc

SEQ ID NO: 269905 - RNA, 19 nt, Artificial Sequence
  Description of Artificial Sequence: Synthetic oligonucleotide
acccgaacaaggucgcaug

SEQ ID NO: 269906 - RNA, 19 nt, Artificial Sequence
  Description of Artificial Sequence: Synthetic oligonucleotide
uucucagcgcacugcaauc

SEQ ID NO: 269907 - RNA, 19 nt, Artificial Sequence
  Description of Artificial Sequence: Synthetic oligonucleotide
accugacaaacugugcuug

SEQ ID NO: 269908 - RNA, 19 nt, Artificial Sequence
  Description of Artificial Sequence: Synthetic oligonucleotide
aaggagucauucgggaaaa

SEQ ID NO: 269909 - RNA, 19 nt, Artificial Sequence
  Description of Artificial Sequence: Synthetic oligonucleotide
caccgaccaucauaggggc

SEQ ID NO: 269910 - RNA, 19 nt, Artificial Sequence
  Description of Artificial Sequence: Synthetic oligonucleotide
gcuuaacugccaguuaggg

SEQ ID NO: 269911 - RNA, 19 nt, Artificial Sequence
  Description of Artificial Sequence: Synthetic oligonucleotide
  modified_base (14)..(14): a, c, u, g, unknown or other
augcacaugagggnuccca

SEQ ID NO: 269912 - RNA, 19 nt, Artificial Sequence
  Description of Artificial Sequence: Synthetic oligonucleotide
aacgcugucuaaagcuuga

SEQ ID NO: 269913 - RNA, 19 nt, Artificial Sequence
  Description of Artificial Sequence: Synthetic oligonucleotide
ucucagcgcacugcaauca

SEQ ID NO: 269914 - RNA, 19 nt, Artificial Sequence
  Description of Artificial Sequence: Synthetic oligonucleotide
uuuguccguccuuggcugc

SEQ ID NO: 269915 - RNA, 19 nt, Artificial Sequence
  Description of Artificial Sequence: Synthetic oligonucleotide
ucucuacacuauagccacc

SEQ ID NO: 269916 - RNA, 19 nt, Artificial Sequence
  Description of Artificial Sequence: Synthetic oligonucleotide
  modified_base (8)..(8): a, c, u, g, unknown or other
augagggnucccaaguuca

SEQ ID NO: 269917 - RNA, 19 nt, Artificial Sequence
  Description of Artificial Sequence: Synthetic oligonucleotide
acgugaaauccaagccucc

SEQ ID NO: 269918 - RNA, 19 nt, Artificial Sequence
  Description of Artificial Sequence: Synthetic oligonucleotide
cauucgggaaaauauccua

SEQ ID NO: 269919 - RNA, 19 nt, Artificial Sequence
  Description of Artificial Sequence: Synthetic oligonucleotide
aacccgaacaaggucgcau

SEQ ID NO: 269920 - RNA, 19 nt, Artificial Sequence
  Description of Artificial Sequence: Synthetic oligonucleotide
augccgucaagcuccccag

SEQ ID NO: 269921 - RNA, 19 nt, Artificial Sequence
  Description of Artificial Sequence: Synthetic oligonucleotide
gucuaugguaaaggcuacg

SEQ ID NO: 269922 - RNA, 19 nt, Artificial Sequence
  Description of Artificial Sequence: Synthetic oligonucleotide
auucgggaaaauauccuau

SEQ ID NO: 269923 - RNA, 19 nt, Artificial Sequence
  Description of Artificial Sequence: Synthetic oligonucleotide
aaauaggccaugacagcuu

SEQ ID NO: 269924 - RNA, 19 nt, Artificial Sequence
  Description of Artificial Sequence: Synthetic oligonucleotide
guuuuguccguccuuggcu

SEQ ID NO: 269925 - RNA, 19 nt, Artificial Sequence
  Description of Artificial Sequence: Synthetic oligonucleotide
ugcgucucgcuccucguau

SEQ ID NO: 269926 - RNA, 19 nt, Artificial Sequence
  Description of Artificial Sequence: Synthetic oligonucleotide
gcaugaacgaacaagcaaa

SEQ ID NO: 269927 - RNA, 19 nt, Artificial Sequence
  Description of Artificial Sequence: Synthetic oligonucleotide
uagugggaauugaccacac

SEQ ID NO: 269928 - RNA, 19 nt, Artificial Sequence
  Description of Artificial Sequence: Synthetic oligonucleotide
ugguaaaggcuacguggaa

SEQ ID NO: 269929 - RNA, 19 nt, Artificial Sequence
  Description of Artificial Sequence: Synthetic oligonucleotide
  modified_base (17)..(17): a, c, u, g, unknown or other
ucgaugcacaugagggnuc

SEQ ID NO: 269930 - RNA, 19 nt, Artificial Sequence
  Description of Artificial Sequence: Synthetic oligonucleotide
gguuuuguccguccuuggc

SEQ ID NO: 269931 - RNA, 19 nt, Artificial Sequence
  Description of Artificial Sequence: Synthetic oligonucleotide
uggacagauuagcuccaaa

SEQ ID NO: 269932 - RNA, 19 nt, Artificial Sequence
  Description of Artificial Sequence: Synthetic oligonucleotide
agaggagacgugaaaucca

SEQ ID NO: 269933 - RNA, 19 nt, Artificial Sequence
  Description of Artificial Sequence: Synthetic oligonucleotide
ucuacacuauagccaccuc

SEQ ID NO: 269934 - RNA, 19 nt, Artificial Sequence
  Description of Artificial Sequence: Synthetic oligonucleotide
cucgacuacacaaguguaa

SEQ ID NO: 269935 - RNA, 19 nt, Artificial Sequence
  Description of Artificial Sequence: Synthetic oligonucleotide
gcgaaaugucuguguaugg

SEQ ID NO: 269936 - RNA, 19 nt, Artificial Sequence
  Description of Artificial Sequence: Synthetic oligonucleotide
agugcgaguucccucucau

SEQ ID NO: 269937 - RNA, 19 nt, Artificial Sequence
  Description of Artificial Sequence: Synthetic oligonucleotide
ccagcguagggcuuguggc

SEQ ID NO: 269938 - RNA, 19 nt, Artificial Sequence
  Description of Artificial Sequence: Synthetic oligonucleotide
ucuaugugucuaggcaggu

SEQ ID NO: 269939 - RNA, 19 nt, Artificial Sequence
  Description of Artificial Sequence: Synthetic oligonucleotide
guuagucgggacuuauucu

SEQ ID NO: 269940 - RNA, 19 nt, Artificial Sequence
  Description of Artificial Sequence: Synthetic oligonucleotide
ccguguaacuaccuccucg

SEQ ID NO: 269941 - RNA, 19 nt, Artificial Sequence
  Description of Artificial Sequence: Synthetic oligonucleotide
agugggaauugaccacacu

SEQ ID NO: 269942 - RNA, 19 nt, Artificial Sequence
  Description of Artificial Sequence: Synthetic oligonucleotide
aguuauggaaugagguaau

SEQ ID NO: 269943 - RNA, 19 nt, Artificial Sequence
  Description of Artificial Sequence: Synthetic oligonucleotide
gagauugcagucaaauaau

SEQ ID NO: 269944 - RNA, 19 nt, Artificial Sequence
  Description of Artificial Sequence: Synthetic oligonucleotide
uaauacccggcaacugguu

SEQ ID NO: 269945 - RNA, 19 nt, Artificial Sequence
  Description of Artificial Sequence: Synthetic oligonucleotide
agcgugccguguaacuacc

SEQ ID NO: 269946 - RNA, 19 nt, Artificial Sequence
  Description of Artificial Sequence: Synthetic oligonucleotide
ggaacugagggacucacgu

SEQ ID NO: 269947 - RNA, 19 nt, Artificial Sequence
  Description of Artificial Sequence: Synthetic oligonucleotide
gcugucuaaagcuugacuu

SEQ ID NO: 269948 - RNA, 19 nt, Artificial Sequence
  Description of Artificial Sequence: Synthetic oligonucleotide
accaucauaggggcuucag

SEQ ID NO: 269949 - RNA, 19 nt, Artificial Sequence
  Description of Artificial Sequence: Synthetic oligonucleotide
acgagacgcucacccacag

SEQ ID NO: 269950 - RNA, 19 nt, Artificial Sequence
  Description of Artificial Sequence: Synthetic oligonucleotide
cauauacaccccgaagaga

SEQ ID NO: 269951 - RNA, 19 nt, Artificial Sequence
  Description of Artificial Sequence: Synthetic oligonucleotide
uggucggucccuccugcgu

SEQ ID NO: 269952 - RNA, 19 nt, Artificial Sequence
  Description of Artificial Sequence: Synthetic oligonucleotide
augauuugacaccgaccau

SEQ ID NO: 269953 - RNA, 19 nt, Artificial Sequence
  Description of Artificial Sequence: Synthetic oligonucleotide
gucggucccuccugcgugg

SEQ ID NO: 269954 - RNA, 19 nt, Artificial Sequence
  Description of Artificial Sequence: Synthetic oligonucleotide
agccuugcaaaggauccca

SEQ ID NO: 269955 - RNA, 19 nt, Artificial Sequence
  Description of Artificial Sequence: Synthetic oligonucleotide
agauugcagucaaauaaua

SEQ ID NO: 269956 - RNA, 19 nt, Artificial Sequence
  Description of Artificial Sequence: Synthetic oligonucleotide
acaaggucgcaugaacgaa

SEQ ID NO: 269957 - RNA, 19 nt, Artificial Sequence
  Description of Artificial Sequence: Synthetic oligonucleotide
cgggacuuauucuugcugc

SEQ ID NO: 269958 - RNA, 19 nt, Artificial Sequence
  Description of Artificial Sequence: Synthetic oligonucleotide
acguucuauuaaacagcgg

SEQ ID NO: 269959 - RNA, 19 nt, Artificial Sequence
  Description of Artificial Sequence: Synthetic oligonucleotide
cauaggggcuucagaccug

SEQ ID NO: 269960 - RNA, 19 nt, Artificial Sequence
  Description of Artificial Sequence: Synthetic oligonucleotide
ugguuagucgggacuuauu

SEQ ID NO: 269961 - RNA, 19 nt, Artificial Sequence
  Description of Artificial Sequence: Synthetic oligonucleotide
auaguacuauguacacacu

SEQ ID NO: 269962 - RNA, 19 nt, Artificial Sequence
  Description of Artificial Sequence: Synthetic oligonucleotide
gaggcagagcgagcaacug

SEQ ID NO: 269963 - RNA, 19 nt, Artificial Sequence
  Description of Artificial Sequence: Synthetic oligonucleotide
acgcugucuaaagcuugac

SEQ ID NO: 269964 - RNA, 19 nt, Artificial Sequence
  Description of Artificial Sequence: Synthetic oligonucleotide
aagcggacucggguugcag

SEQ ID NO: 269965 - RNA, 19 nt, Artificial Sequence
  Description of Artificial Sequence: Synthetic oligonucleotide
caagauuccggugaucccu

SEQ ID NO: 269966 - RNA, 19 nt, Artificial Sequence
  Description of Artificial Sequence: Synthetic oligonucleotide
cguucuauuaaacagcggu

SEQ ID NO: 269967 - RNA, 19 nt, Artificial Sequence
  Description of Artificial Sequence: Synthetic oligonucleotide
  modified_base (11)..(11): a, c, u, g, unknown or other
cacaugagggnucccaagu

SEQ ID NO: 269968 - RNA, 19 nt, Artificial Sequence
  Description of Artificial Sequence: Synthetic oligonucleotide
aucuagagaccggacccga

SEQ ID NO: 269969 - RNA, 19 nt, Artificial Sequence
  Description of Artificial Sequence: Synthetic oligonucleotide
guggucggucccuccugcg

SEQ ID NO: 269970 - RNA, 19 nt, Artificial Sequence
  Description of Artificial Sequence: Synthetic oligonucleotide
  modified_base (6)..(6): a, c, u, g, unknown or other
gagggnucccaaguucaga

SEQ ID NO: 269971 - RNA, 19 nt, Artificial Sequence
  Description of Artificial Sequence: Synthetic oligonucleotide
gccgucaagcuccccagag

SEQ ID NO: 269972 - RNA, 19 nt, Artificial Sequence
  Description of Artificial Sequence: Synthetic oligonucleotide
uuugggcaucacaguccac

SEQ ID NO: 269973 - RNA, 19 nt, Artificial Sequence
  Description of Artificial Sequence: Synthetic oligonucleotide
ucgauggcuuggacccaug

SEQ ID NO: 269974 - RNA, 19 nt, Artificial Sequence
  Description of Artificial Sequence: Synthetic oligonucleotide
ggcccaguuaggguuuugg

SEQ ID NO: 269975 - RNA, 19 nt, Artificial Sequence
  Description of Artificial Sequence: Synthetic oligonucleotide
cccagcguagggcuugugg

SEQ ID NO: 269976 - RNA, 19 nt, Artificial Sequence
  Description of Artificial Sequence: Synthetic oligonucleotide
ugccgucaagcuccccaga

SEQ ID NO: 269977 - RNA, 19 nt, Artificial Sequence
  Description of Artificial Sequence: Synthetic oligonucleotide
agagcgugccguguaacua

SEQ ID NO: 269978 - RNA, 19 nt, Artificial Sequence
  Description of Artificial Sequence: Synthetic oligonucleotide
uguugcgacuggagaucuc

SEQ ID NO: 269979 - RNA, 19 nt, Artificial Sequence
  Description of Artificial Sequence: Synthetic oligonucleotide
cccggugaugacuaaucac

SEQ ID NO: 269980 - RNA, 19 nt, Artificial Sequence
  Description of Artificial Sequence: Synthetic oligonucleotide
ucguaugugguggcuucaa

SEQ ID NO: 269981 - RNA, 19 nt, Artificial Sequence
  Description of Artificial Sequence: Synthetic oligonucleotide
aggagacgugaaauccaag

SEQ ID NO: 269982 - RNA, 19 nt, Artificial Sequence
  Description of Artificial Sequence: Synthetic oligonucleotide
ccaugcgucucgcuccucg

SEQ ID NO: 269983 - RNA, 19 nt, Artificial Sequence
  Description of Artificial Sequence: Synthetic oligonucleotide
ggaacucgacuacacaagu

SEQ ID NO: 269984 - RNA, 19 nt, Artificial Sequence
  Description of Artificial Sequence: Synthetic oligonucleotide
ggacccaugcgucucgcuc

SEQ ID NO: 269985 - RNA, 19 nt, Artificial Sequence
  Description of Artificial Sequence: Synthetic oligonucleotide
ggucggucccuccugcgug

SEQ ID NO: 269986 - RNA, 19 nt, Artificial Sequence
  Description of Artificial Sequence: Synthetic oligonucleotide
auuugacaccgaccaucau

SEQ ID NO: 269987 - RNA, 19 nt, Artificial Sequence
  Description of Artificial Sequence: Synthetic oligonucleotide
gugacgacacagugaugga

SEQ ID NO: 269988 - RNA, 19 nt, Artificial Sequence
  Description of Artificial Sequence: Synthetic oligonucleotide
guggaguccaaugaggguu

SEQ ID NO: 269989 - RNA, 19 nt, Artificial Sequence
  Description of Artificial Sequence: Synthetic oligonucleotide
acuaccuccucggcuaaua

SEQ ID NO: 269990 - RNA, 19 nt, Artificial Sequence
  Description of Artificial Sequence: Synthetic oligonucleotide
ggcuugagugacacuuggg

SEQ ID NO: 269991 - RNA, 19 nt, Artificial Sequence
  Description of Artificial Sequence: Synthetic oligonucleotide
gugcgaguucccucucaug

SEQ ID NO: 269992 - RNA, 19 nt, Artificial Sequence
  Description of Artificial Sequence: Synthetic oligonucleotide
cuaaagcuugacuuuuguu

SEQ ID NO: 269993 - RNA, 19 nt, Artificial Sequence
  Description of Artificial Sequence: Synthetic oligonucleotide
cucauucccgauggaugac

SEQ ID NO: 269994 - RNA, 19 nt, Artificial Sequence
  Description of Artificial Sequence: Synthetic oligonucleotide
guuauggaaugagguaaua

SEQ ID NO: 269995 - RNA, 19 nt, Artificial Sequence
  Description of Artificial Sequence: Synthetic oligonucleotide
gacgugagacaaggaguca

SEQ ID NO: 269996 - RNA, 19 nt, Artificial Sequence
  Description of Artificial Sequence: Synthetic oligonucleotide
gcucacccacagauaaacg

SEQ ID NO: 269997 - RNA, 19 nt, Artificial Sequence
  Description of Artificial Sequence: Synthetic oligonucleotide
gaccugacaaacugugcuu

SEQ ID NO: 269998 - RNA, 19 nt, Artificial Sequence
  Description of Artificial Sequence: Synthetic oligonucleotide
cacgagacgcucacccaca

SEQ ID NO: 269999 - RNA, 19 nt, Artificial Sequence
  Description of Artificial Sequence: Synthetic oligonucleotide
cccuaggauaaaagcacuc

SEQ ID NO: 270000 - RNA, 19 nt, Artificial Sequence
  Description of Artificial Sequence: Synthetic oligonucleotide
acgaacaagcaaagcgaaa

SEQ ID NO: 270001 - RNA, 19 nt, Artificial Sequence
  Description of Artificial Sequence: Synthetic oligonucleotide
uaacccgaacaaggucgca

SEQ ID NO: 270002 - RNA, 19 nt, Artificial Sequence
  Description of Artificial Sequence: Synthetic oligonucleotide
ccacgagacgcucacccac

SEQ ID NO: 270003 - RNA, 19 nt, Artificial Sequence
  Description of Artificial Sequence: Synthetic oligonucleotide
gggaacugagggacucacg

SEQ ID NO: 270004 - RNA, 19 nt, Artificial Sequence
  Description of Artificial Sequence: Synthetic oligonucleotide
acgaugcuucucagcgcac

SEQ ID NO: 270005 - RNA, 19 nt, Artificial Sequence
  Description of Artificial Sequence: Synthetic oligonucleotide
ggagucauucgggaaaaua

SEQ ID NO: 270006 - RNA, 19 nt, Artificial Sequence
  Description of Artificial Sequence: Synthetic oligonucleotide
gugaucccugagcacucga

SEQ ID NO: 270007 - RNA, 19 nt, Artificial Sequence
  Description of Artificial Sequence: Synthetic oligonucleotide
  modified_base (18)..(18): a, c, u, g, unknown or other
cucgaugcacaugagggnu

SEQ ID NO: 270008 - RNA, 19 nt, Artificial Sequence
  Description of Artificial Sequence: Synthetic oligonucleotide
  modified_base (16)..(16): a, c, u, g, unknown or other
cgaugcacaugagggnucc

SEQ ID NO: 270009 - RNA, 19 nt, Artificial Sequence
  Description of Artificial Sequence: Synthetic oligonucleotide
gagcgagcaacugagcauu

SEQ ID NO: 270010 - RNA, 19 nt, Artificial Sequence
  Description of Artificial Sequence: Synthetic oligonucleotide
agggacucacgugcuguga

SEQ ID NO: 270011 - RNA, 19 nt, Artificial Sequence
  Description of Artificial Sequence: Synthetic oligonucleotide
aggucgcaugaacgaacaa

SEQ ID NO: 270012 - RNA, 19 nt, Artificial Sequence
  Description of Artificial Sequence: Synthetic oligonucleotide
gagguggucggucccuccu

SEQ ID NO: 270013 - RNA, 19 nt, Artificial Sequence
  Description of Artificial Sequence: Synthetic oligonucleotide
aacuaccuccucggcuaau

SEQ ID NO: 270014 - RNA, 19 nt, Artificial Sequence
  Description of Artificial Sequence: Synthetic oligonucleotide
ccccagacggaccacucac

SEQ ID NO: 270015 - RNA, 19 nt, Artificial Sequence
  Description of Artificial Sequence: Synthetic oligonucleotide
aacccagcguagggcuugu

SEQ ID NO: 270016 - RNA, 19 nt, Artificial Sequence
  Description of Artificial Sequence: Synthetic oligonucleotide
uuaugccgucaagcucccc

SEQ ID NO: 270017 - RNA, 19 nt, Artificial Sequence
  Description of Artificial Sequence: Synthetic oligonucleotide
ccuccucggcuaauaugcc

SEQ ID NO: 270018 - RNA, 19 nt, Artificial Sequence
  Description of Artificial Sequence: Synthetic oligonucleotide
cgacuacacaaguguaaug

SEQ ID NO: 270019 - RNA, 19 nt, Artificial Sequence
  Description of Artificial Sequence: Synthetic oligonucleotide
cccgagacagaugggugcc

SEQ ID NO: 270020 - RNA, 19 nt, Artificial Sequence
  Description of Artificial Sequence: Synthetic oligonucleotide
gaagcggacucggguugca

SEQ ID NO: 270021 - RNA, 19 nt, Artificial Sequence
  Description of Artificial Sequence: Synthetic oligonucleotide
ugccaagauuccggugauc

SEQ ID NO: 270022 - RNA, 19 nt, Artificial Sequence
  Description of Artificial Sequence: Synthetic oligonucleotide
ggaagcggacucggguugc

SEQ ID NO: 270023 - RNA, 19 nt, Artificial Sequence
  Description of Artificial Sequence: Synthetic oligonucleotide
gggugccaagauuccggug

SEQ ID NO: 270024 - RNA, 19 nt, Artificial Sequence
  Description of Artificial Sequence: Synthetic oligonucleotide
gguguccagguuuggagau

SEQ ID NO: 270025 - RNA, 19 nt, Artificial Sequence
  Description of Artificial Sequence: Synthetic oligonucleotide
gguauacugguuggcccca

SEQ ID NO: 270026 - RNA, 19 nt, Artificial Sequence
  Description of Artificial Sequence: Synthetic oligonucleotide
ugcagccgucucagacuaa

SEQ ID NO: 270027 - RNA, 19 nt, Artificial Sequence
  Description of Artificial Sequence: Synthetic oligonucleotide
gggacuuauucuugcugcu

SEQ ID NO: 270028 - RNA, 19 nt, Artificial Sequence
  Description of Artificial Sequence: Synthetic oligonucleotide
gaccggacccgagacagau

SEQ ID NO: 270029 - RNA, 19 nt, Artificial Sequence
  Description of Artificial Sequence: Synthetic oligonucleotide
ggcuuucggagugugggaa

SEQ ID NO: 270030 - RNA, 19 nt, Artificial Sequence
  Description of Artificial Sequence: Synthetic oligonucleotide
gaccaucauaggggcuuca

SEQ ID NO: 270031 - RNA, 19 nt, Artificial Sequence
  Description of Artificial Sequence: Synthetic oligonucleotide
  modified_base (4)..(4): a, c, u, g, unknown or other
gggnucccaaguucagacu

SEQ ID NO: 270032 - RNA, 19 nt, Artificial Sequence
  Description of Artificial Sequence: Synthetic oligonucleotide
cgaucgugugcuauccuca

SEQ ID NO: 270033 - RNA, 19 nt, Artificial Sequence
  Description of Artificial Sequence: Synthetic oligonucleotide
cgucgaucgugugcuaucc

SEQ ID NO: 270034 - RNA, 19 nt, Artificial Sequence
  Description of Artificial Sequence: Synthetic oligonucleotide
guguugcgacuggagaucu

SEQ ID NO: 270035 - RNA, 19 nt, Artificial Sequence
  Description of Artificial Sequence: Synthetic oligonucleotide
gcgucucgcuccucguaug

SEQ ID NO: 270036 - RNA, 19 nt, Artificial Sequence
  Description of Artificial Sequence: Synthetic oligonucleotide
accgaccaucauaggggcu

SEQ ID NO: 270037 - RNA, 19 nt, Artificial Sequence
  Description of Artificial Sequence: Synthetic oligonucleotide
ccgucgaucgugugcuauc

SEQ ID NO: 270038 - RNA, 19 nt, Artificial Sequence
  Description of Artificial Sequence: Synthetic oligonucleotide
gucgaucgugugcuauccu

SEQ ID NO: 270039 - RNA, 19 nt, Artificial Sequence
  Description of Artificial Sequence: Synthetic oligonucleotide
agacgcucacccacagaua

SEQ ID NO: 270040 - RNA, 19 nt, Artificial Sequence
  Description of Artificial Sequence: Synthetic oligonucleotide
cgugccguguaacuaccuc

SEQ ID NO: 270041 - RNA, 19 nt, Artificial Sequence
  Description of Artificial Sequence: Synthetic oligonucleotide
acaacccagcguagggcuu

SEQ ID NO: 270042 - RNA, 19 nt, Artificial Sequence
  Description of Artificial Sequence: Synthetic oligonucleotide
ggucgaggugaaauguacu

SEQ ID NO: 270043 - RNA, 19 nt, Artificial Sequence
  Description of Artificial Sequence: Synthetic oligonucleotide
ccaguauauuuaacccgaa

SEQ ID NO: 270044 - RNA, 19 nt, Artificial Sequence
  Description of Artificial Sequence: Synthetic oligonucleotide
accggacccgagacagaug

SEQ ID NO: 270045 - RNA, 19 nt, Artificial Sequence
  Description of Artificial Sequence: Synthetic oligonucleotide
cuaccuccucggcuaauau

SEQ ID NO: 270046 - RNA, 19 nt, Artificial Sequence
  Description of Artificial Sequence: Synthetic oligonucleotide
ggacucggguugcagggcu

SEQ ID NO: 270047 - RNA, 19 nt, Artificial Sequence
  Description of Artificial Sequence: Synthetic oligonucleotide
caacugguuuccucucuuu

SEQ ID NO: 270048 - RNA, 19 nt, Artificial Sequence
  Description of Artificial Sequence: Synthetic oligonucleotide
cgggaaaauauccuauuau

SEQ ID NO: 270049 - RNA, 19 nt, Artificial Sequence
  Description of Artificial Sequence: Synthetic oligonucleotide
cgggagagcagugcuuagc

SEQ ID NO: 270050 - RNA, 19 nt, Artificial Sequence
  Description of Artificial Sequence: Synthetic oligonucleotide
gccguguaacuaccuccuc

SEQ ID NO: 270051 - RNA, 19 nt, Artificial Sequence
  Description of Artificial Sequence: Synthetic oligonucleotide
ccccgaagagaagccuugc

SEQ ID NO: 270052 - RNA, 19 nt, Artificial Sequence
  Description of Artificial Sequence: Synthetic oligonucleotide
ccagacggaccacucaccu

SEQ ID NO: 270053 - RNA, 19 nt, Artificial Sequence
  Description of Artificial Sequence: Synthetic oligonucleotide
cugguuagucgggacuuau

SEQ ID NO: 270054 - RNA, 19 nt, Artificial Sequence
  Description of Artificial Sequence: Synthetic oligonucleotide
gcaggcggguuccuuuucu

SEQ ID NO: 270055 - RNA, 19 nt, Artificial Sequence
  Description of Artificial Sequence: Synthetic oligonucleotide
cgucucagacuaacuuuca

SEQ ID NO: 270056 - RNA, 19 nt, Artificial Sequence
  Description of Artificial Sequence: Synthetic oligonucleotide
ccaacucauucccgaugga

SEQ ID NO: 270057 - RNA, 19 nt, Artificial Sequence
  Description of Artificial Sequence: Synthetic oligonucleotide
cucgauggcuuggacccau

SEQ ID NO: 270058 - RNA, 19 nt, Artificial Sequence
  Description of Artificial Sequence: Synthetic oligonucleotide
gccucgcucuggcugguua

SEQ ID NO: 270059 - RNA, 19 nt, Artificial Sequence
  Description of Artificial Sequence: Synthetic oligonucleotide
ccgaacaaggucgcaugaa

SEQ ID NO: 270060 - RNA, 19 nt, Artificial Sequence
  Description of Artificial Sequence: Synthetic oligonucleotide
acccagcguagggcuugug

SEQ ID NO: 270061 - RNA, 19 nt, Artificial Sequence
  Description of Artificial Sequence: Synthetic oligonucleotide
gggugacgugagacaagga

SEQ ID NO: 270062 - RNA, 19 nt, Artificial Sequence
  Description of Artificial Sequence: Synthetic oligonucleotide
gcuccccagaggagacgug

SEQ ID NO: 270063 - RNA, 19 nt, Artificial Sequence
  Description of Artificial Sequence: Synthetic oligonucleotide
gcugguuagucgggacuua

SEQ ID NO: 270064 - RNA, 19 nt, Artificial Sequence
  Description of Artificial Sequence: Synthetic oligonucleotide
cgaccaucauaggggcuuc

SEQ ID NO: 270065 - RNA, 19 nt, Artificial Sequence
  Description of Artificial Sequence: Synthetic oligonucleotide
cgugagacaaggagucauu

SEQ ID NO: 270066 - RNA, 19 nt, Artificial Sequence
  Description of Artificial Sequence: Synthetic oligonucleotide
ccgagacagaugggugcca

SEQ ID NO: 270067 - RNA, 19 nt, Artificial Sequence
  Description of Artificial Sequence: Synthetic oligonucleotide
gcgugccguguaacuaccu

SEQ ID NO: 270068 - RNA, 19 nt, Artificial Sequence
  Description of Artificial Sequence: Synthetic oligonucleotide
cccgucgaucgugugcuau

SEQ ID NO: 270069 - RNA, 19 nt, Artificial Sequence
  Description of Artificial Sequence: Synthetic oligonucleotide
cccaugcgucucgcuccuc

SEQ ID NO: 270070 - RNA, 19 nt, Artificial Sequence
  Description of Artificial Sequence: Synthetic oligonucleotide
ccccgucgaucgugugcua

SEQ ID NO: 270071 - RNA, 19 nt, Artificial Sequence
  Description of Artificial Sequence: Synthetic oligonucleotide
  modified_base (1)..(1): a, c, u, g, unknown or other
nucccaaguucagacuggc

SEQ ID NO: 270072 - RNA, 19 nt, Artificial Sequence
  Description of Artificial Sequence: Synthetic oligonucleotide
uaaguuuucaaccuugagg

SEQ ID NO: 270073 - RNA, 19 nt, Artificial Sequence
  Description of Artificial Sequence: Synthetic oligonucleotide
aaguuuucaaccuugaggu

SEQ ID NO: 270074 - RNA, 19 nt, Artificial Sequence
  Description of Artificial Sequence: Synthetic oligonucleotide
auaagauacagcccagugc

SEQ ID NO: 270075 - RNA, 19 nt, Artificial Sequence
  Description of Artificial Sequence: Synthetic oligonucleotide
aaaucuaucaccugccaca

SEQ ID NO: 270076 - RNA, 19 nt, Artificial Sequence
  Description of Artificial Sequence: Synthetic oligonucleotide
aauuauguacagaugauug

SEQ ID NO: 270077 - RNA, 19 nt, Artificial Sequence
  Description of Artificial Sequence: Synthetic oligonucleotide
auuauguacagaugauugg

SEQ ID NO: 270078 - RNA, 19 nt, Artificial Sequence
  Description of Artificial Sequence: Synthetic oligonucleotide
aaacucagaccaugcaucg

SEQ ID NO: 270079 - RNA, 19 nt, Artificial Sequence
  Description of Artificial Sequence: Synthetic oligonucleotide
agaccuucggcuuuugggc

SEQ ID NO: 270080 - RNA, 19 nt, Artificial Sequence
  Description of Artificial Sequence: Synthetic oligonucleotide
aaaggaugcugccggaaac

SEQ ID NO: 270081 - RNA, 19 nt, Artificial Sequence
  Description of Artificial Sequence: Synthetic oligonucleotide
gcagguauaagauacagcc

SEQ ID NO: 270082 - RNA, 19 nt, Artificial Sequence
  Description of Artificial Sequence: Synthetic oligonucleotide
acgaauaaggucaugaaag

SEQ ID NO: 270083 - RNA, 19 nt, Artificial Sequence
  Description of Artificial Sequence: Synthetic oligonucleotide
uguguaacgagugucauuc

SEQ ID NO: 270084 - RNA, 19 nt, Artificial Sequence
  Description of Artificial Sequence: Synthetic oligonucleotide
cuauccgaaguuuugcucc

SEQ ID NO: 270085 - RNA, 19 nt, Artificial Sequence
  Description of Artificial Sequence: Synthetic oligonucleotide
aagugguugguguccgugc

SEQ ID NO: 270086 - RNA, 19 nt, Artificial Sequence
  Description of Artificial Sequence: Synthetic oligonucleotide
gagaccuucggcuuuuggg

SEQ ID NO: 270087 - RNA, 19 nt, Artificial Sequence
  Description of Artificial Sequence: Synthetic oligonucleotide
cucaaaaggaugcugccgg

SEQ ID NO: 270088 - RNA, 19 nt, Artificial Sequence
  Description of Artificial Sequence: Synthetic oligonucleotide
agagguaacagucaccaga

SEQ ID NO: 270089 - RNA, 19 nt, Artificial Sequence
  Description of Artificial Sequence: Synthetic oligonucleotide
agauuugaagaagugacag

SEQ ID NO: 270090 - RNA, 19 nt, Artificial Sequence
  Description of Artificial Sequence: Synthetic oligonucleotide
gaugcugccggaaacacag

SEQ ID NO: 270091 - RNA, 19 nt, Artificial Sequence
  Description of Artificial Sequence: Synthetic oligonucleotide
aauaucagaucugaggaau

SEQ ID NO: 270092 - RNA, 19 nt, Artificial Sequence
  Description of Artificial Sequence: Synthetic oligonucleotide
cauggcacgaauaagguca

SEQ ID NO: 270093 - RNA, 19 nt, Artificial Sequence
  Description of Artificial Sequence: Synthetic oligonucleotide
uuaggagaggaauugucug

SEQ ID NO: 270094 - RNA, 19 nt, Artificial Sequence
  Description of Artificial Sequence: Synthetic oligonucleotide
agaggguaccuucugguac

SEQ ID NO: 270095 - RNA, 19 nt, Artificial Sequence
  Description of Artificial Sequence: Synthetic oligonucleotide
aucagaugguucaagaagg

SEQ ID NO: 270096 - RNA, 19 nt, Artificial Sequence
  Description of Artificial Sequence: Synthetic oligonucleotide
gagaucgacacccucuucc

SEQ ID NO: 270097 - RNA, 19 nt, Artificial Sequence
  Description of Artificial Sequence: Synthetic oligonucleotide
gaggcuagagcugagauca

SEQ ID NO: 270098 - RNA, 19 nt, Artificial Sequence
  Description of Artificial Sequence: Synthetic oligonucleotide
acuauccgaaguuuugcuc

SEQ ID NO: 270099 - RNA, 19 nt, Artificial Sequence
  Description of Artificial Sequence: Synthetic oligonucleotide
ucuguccgcaaucaggaca

SEQ ID NO: 270100 - RNA, 19 nt, Artificial Sequence
  Description of Artificial Sequence: Synthetic oligonucleotide
uagagcugagaucacugag

SEQ ID NO: 270101 - RNA, 19 nt, Artificial Sequence
  Description of Artificial Sequence: Synthetic oligonucleotide
uugacuauccgaaguuuug

SEQ ID NO: 270102 - RNA, 19 nt, Artificial Sequence
  Description of Artificial Sequence: Synthetic oligonucleotide
aucgacacccucuuccugg

SEQ ID NO: 270103 - RNA, 19 nt, Artificial Sequence
  Description of Artificial Sequence: Synthetic oligonucleotide
cuugguaugucuucuccag

SEQ ID NO: 270104 - RNA, 19 nt, Artificial Sequence
  Description of Artificial Sequence: Synthetic oligonucleotide
auaaggucaugaaagacug

SEQ ID NO: 270105 - RNA, 19 nt, Artificial Sequence
  Description of Artificial Sequence: Synthetic oligonucleotide
uguaacgagugucauucac

SEQ ID NO: 270106 - RNA, 19 nt, Artificial Sequence
  Description of Artificial Sequence: Synthetic oligonucleotide
uguaccauucaagagguaa

SEQ ID NO: 270107 - RNA, 19 nt, Artificial Sequence
  Description of Artificial Sequence: Synthetic oligonucleotide
ucuggcaagguccuguuuc

SEQ ID NO: 270108 - RNA, 19 nt, Artificial Sequence
  Description of Artificial Sequence: Synthetic oligonucleotide
cagcgugugaagaaagugg

SEQ ID NO: 270109 - RNA, 19 nt, Artificial Sequence
  Description of Artificial Sequence: Synthetic oligonucleotide
agaggaauugucugcacca

SEQ ID NO: 270110 - RNA, 19 nt, Artificial Sequence
  Description of Artificial Sequence: Synthetic oligonucleotide
aaagacuguguaacgagug

SEQ ID NO: 270111 - RNA, 19 nt, Artificial Sequence
  Description of Artificial Sequence: Synthetic oligonucleotide
uaaugggagaugguugugg

SEQ ID NO: 270112 - RNA, 19 nt, Artificial Sequence
  Description of Artificial Sequence: Synthetic oligonucleotide
ugcccuguggccuuauccg

SEQ ID NO: 270113 - RNA, 19 nt, Artificial Sequence
  Description of Artificial Sequence: Synthetic oligonucleotide
aaugguauuuguccaugau

SEQ ID NO: 270114 - RNA, 19 nt, Artificial Sequence
  Description of Artificial Sequence: Synthetic oligonucleotide
gauggaguacuuuccguug

SEQ ID NO: 270115 - RNA, 19 nt, Artificial Sequence
  Description of Artificial Sequence: Synthetic oligonucleotide
uagggugggaacccguagg

SEQ ID NO: 270116 - RNA, 19 nt, Artificial Sequence
  Description of Artificial Sequence: Synthetic oligonucleotide
uucagcaauggacagucuc

SEQ ID NO: 270117 - RNA, 19 nt, Artificial Sequence
  Description of Artificial Sequence: Synthetic oligonucleotide
uuguugggagcuuugcacc

SEQ ID NO: 270118 - RNA, 19 nt, Artificial Sequence
  Description of Artificial Sequence: Synthetic oligonucleotide
aagacuguguaacgagugu

SEQ ID NO: 270119 - RNA, 19 nt, Artificial Sequence
  Description of Artificial Sequence: Synthetic oligonucleotide
caugggacgacuugucugc

SEQ ID NO: 270120 - RNA, 19 nt, Artificial Sequence
  Description of Artificial Sequence: Synthetic oligonucleotide
uggggaaguuggaauacag

SEQ ID NO: 270121 - RNA, 19 nt, Artificial Sequence
  Description of Artificial Sequence: Synthetic oligonucleotide
uuggaauacaggucuacaa

SEQ ID NO: 270122 - RNA, 19 nt, Artificial Sequence
  Description of Artificial Sequence: Synthetic oligonucleotide
uaggagaggaauugucugc

SEQ ID NO: 270123 - RNA, 19 nt, Artificial Sequence
  Description of Artificial Sequence: Synthetic oligonucleotide
ccagauuugaagaagugac

SEQ ID NO: 270124 - RNA, 19 nt, Artificial Sequence
  Description of Artificial Sequence: Synthetic oligonucleotide
agaccaugcaucguucagc

SEQ ID NO: 270125 - RNA, 19 nt, Artificial Sequence
  Description of Artificial Sequence: Synthetic oligonucleotide
aggguuuagaaacucucca

SEQ ID NO: 270126 - RNA, 19 nt, Artificial Sequence
  Description of Artificial Sequence: Synthetic oligonucleotide
agggauggaguacuuuccg

SEQ ID NO: 270127 - RNA, 19 nt, Artificial Sequence
  Description of Artificial Sequence: Synthetic oligonucleotide
uccguugacuauccgaagu

SEQ ID NO: 270128 - RNA, 19 nt, Artificial Sequence
  Description of Artificial Sequence: Synthetic oligonucleotide
gcccacaucaaauaguaag

SEQ ID NO: 270129 - RNA, 19 nt, Artificial Sequence
  Description of Artificial Sequence: Synthetic oligonucleotide
agcuuugcaccccaagaag

SEQ ID NO: 270130 - RNA, 19 nt, Artificial Sequence
  Description of Artificial Sequence: Synthetic oligonucleotide
cagauauccuguuucucgc

SEQ ID NO: 270131 - RNA, 19 nt, Artificial Sequence
  Description of Artificial Sequence: Synthetic oligonucleotide
ggaagcuacagagucaggg

SEQ ID NO: 270132 - RNA, 19 nt, Artificial Sequence
  Description of Artificial Sequence: Synthetic oligonucleotide
gaagaaagugguugguguc

SEQ ID NO: 270133 - RNA, 19 nt, Artificial Sequence
  Description of Artificial Sequence: Synthetic oligonucleotide
uggaggggacccuacaagc

SEQ ID NO: 270134 - RNA, 19 nt, Artificial Sequence
  Description of Artificial Sequence: Synthetic oligonucleotide
gauaaugggagaugguugu

SEQ ID NO: 270135 - RNA, 19 nt, Artificial Sequence
  Description of Artificial Sequence: Synthetic oligonucleotide
caguaaguuuucaaccuug

SEQ ID NO: 270136 - RNA, 19 nt, Artificial Sequence
  Description of Artificial Sequence: Synthetic oligonucleotide
uccggaugcacuaccagaa

SEQ ID NO: 270137 - RNA, 19 nt, Artificial Sequence
  Description of Artificial Sequence: Synthetic oligonucleotide
caggguuuagaaacucucc

SEQ ID NO: 270138 - RNA, 19 nt, Artificial Sequence
  Description of Artificial Sequence: Synthetic oligonucleotide
uugcccuguggccuuaucc

SEQ ID NO: 270139 - RNA, 19 nt, Artificial Sequence
  Description of Artificial Sequence: Synthetic oligonucleotide
cagaugauuggcaaacuca

SEQ ID NO: 270140 - RNA, 19 nt, Artificial Sequence
  Description of Artificial Sequence: Synthetic oligonucleotide
ugacuauccgaaguuuugc

SEQ ID NO: 270141 - RNA, 19 nt, Artificial Sequence
  Description of Artificial Sequence: Synthetic oligonucleotide
agacuguguaacgaguguc

SEQ ID NO: 270142 - RNA, 19 nt, Artificial Sequence
  Description of Artificial Sequence: Synthetic oligonucleotide
cuuauccggaugcacuacc

SEQ ID NO: 270143 - RNA, 19 nt, Artificial Sequence
  Description of Artificial Sequence: Synthetic oligonucleotide
gagguaacagucaccagac

SEQ ID NO: 270144 - RNA, 19 nt, Artificial Sequence
  Description of Artificial Sequence: Synthetic oligonucleotide
cugguagaagaucuucaag

SEQ ID NO: 270145 - RNA, 19 nt, Artificial Sequence
  Description of Artificial Sequence: Synthetic oligonucleotide
uguccagcggcuuucccca

SEQ ID NO: 270146 - RNA, 19 nt, Artificial Sequence
  Description of Artificial Sequence: Synthetic oligonucleotide
agacugacucuccuuagga

SEQ ID NO: 270147 - RNA, 19 nt, Artificial Sequence
  Description of Artificial Sequence: Synthetic oligonucleotide
gauauccuguuucucgcca

SEQ ID NO: 270148 - RNA, 19 nt, Artificial Sequence
  Description of Artificial Sequence: Synthetic oligonucleotide
uacuuuccguugacuaucc

SEQ ID NO: 270149 - RNA, 19 nt, Artificial Sequence
  Description of Artificial Sequence: Synthetic oligonucleotide
guguaggcccaggagaucg

SEQ ID NO: 270150 - RNA, 19 nt, Artificial Sequence
  Description of Artificial Sequence: Synthetic oligonucleotide
ugcuauggucccauuugug

SEQ ID NO: 270151 - RNA, 19 nt, Artificial Sequence
  Description of Artificial Sequence: Synthetic oligonucleotide
ugagaccuucggcuuuugg

SEQ ID NO: 270152 - RNA, 19 nt, Artificial Sequence
  Description of Artificial Sequence: Synthetic oligonucleotide
uggggccaaaucuaucacc

SEQ ID NO: 270153 - RNA, 19 nt, Artificial Sequence
  Description of Artificial Sequence: Synthetic oligonucleotide
augaaagacuguguaacga

SEQ ID NO: 270154 - RNA, 19 nt, Artificial Sequence
  Description of Artificial Sequence: Synthetic oligonucleotide
cuaccagaacugcacggcg

SEQ ID NO: 270155 - RNA, 19 nt, Artificial Sequence
  Description of Artificial Sequence: Synthetic oligonucleotide
uaccauucaagagguaaca

SEQ ID NO: 270156 - RNA, 19 nt, Artificial Sequence
  Description of Artificial Sequence: Synthetic oligonucleotide
gccuugauuaggcagcagg

SEQ ID NO: 270157 - RNA, 19 nt, Artificial Sequence
  Description of Artificial Sequence: Synthetic oligonucleotide
augaugaaugcaggauggc

SEQ ID NO: 270158 - RNA, 19 nt, Artificial Sequence
  Description of Artificial Sequence: Synthetic oligonucleotide
ugcacggcgguauugcuuc

SEQ ID NO: 270159 - RNA, 19 nt, Artificial Sequence
  Description of Artificial Sequence: Synthetic oligonucleotide
auucacagggauggaguac

SEQ ID NO: 270160 - RNA, 19 nt, Artificial Sequence
  Description of Artificial Sequence: Synthetic oligonucleotide
ucagaagaggggccucgag

SEQ ID NO: 270161 - RNA, 19 nt, Artificial Sequence
  Description of Artificial Sequence: Synthetic oligonucleotide
uguucuguacaugggugug

SEQ ID NO: 270162 - RNA, 19 nt, Artificial Sequence
  Description of Artificial Sequence: Synthetic oligonucleotide
agcgacauguaccauucaa

SEQ ID NO: 270163 - RNA, 19 nt, Artificial Sequence
  Description of Artificial Sequence: Synthetic oligonucleotide
ucaacuucaaugggucugu

SEQ ID NO: 270164 - RNA, 19 nt, Artificial Sequence
  Description of Artificial Sequence: Synthetic oligonucleotide
acagacugacucuccuuag

SEQ ID NO: 270165 - RNA, 19 nt, Artificial Sequence
  Description of Artificial Sequence: Synthetic oligonucleotide
ugguugcuaagcaguaagu

SEQ ID NO: 270166 - RNA, 19 nt, Artificial Sequence
  Description of Artificial Sequence: Synthetic oligonucleotide
agcuaucaccuuguugggc

SEQ ID NO: 270167 - RNA, 19 nt, Artificial Sequence
  Description of Artificial Sequence: Synthetic oligonucleotide
agccgcaucagaugguuca

SEQ ID NO: 270168 - RNA, 19 nt, Artificial Sequence
  Description of Artificial Sequence: Synthetic oligonucleotide
cagacugacucuccuuagg

SEQ ID NO: 270169 - RNA, 19 nt, Artificial Sequence
  Description of Artificial Sequence: Synthetic oligonucleotide
gaaugguauuuguccauga

SEQ ID NO: 270170 - RNA, 19 nt, Artificial Sequence
  Description of Artificial Sequence: Synthetic oligonucleotide
cuccuagcagaucugggug

SEQ ID NO: 270171 - RNA, 19 nt, Artificial Sequence
  Description of Artificial Sequence: Synthetic oligonucleotide
cacacggacaccccucucc

SEQ ID NO: 270172 - RNA, 19 nt, Artificial Sequence
  Description of Artificial Sequence: Synthetic oligonucleotide
uauccgaaguuuugcucca

SEQ ID NO: 270173 - RNA, 19 nt, Artificial Sequence
  Description of Artificial Sequence: Synthetic oligonucleotide
ucagaccaugcaucguuca

SEQ ID NO: 270174 - RNA, 19 nt, Artificial Sequence
  Description of Artificial Sequence: Synthetic oligonucleotide
uggaggcuagagcugagau

SEQ ID NO: 270175 - RNA, 19 nt, Artificial Sequence
  Description of Artificial Sequence: Synthetic oligonucleotide
uucaaugggucugugucuc

SEQ ID NO: 270176 - RNA, 19 nt, Artificial Sequence
  Description of Artificial Sequence: Synthetic oligonucleotide
ucaaaaggaugcugccgga

SEQ ID NO: 270177 - RNA, 19 nt, Artificial Sequence
  Description of Artificial Sequence: Synthetic oligonucleotide
agaugauuggcaaacucau

SEQ ID NO: 270178 - RNA, 19 nt, Artificial Sequence
  Description of Artificial Sequence: Synthetic oligonucleotide
acucagaccaugcaucguu

SEQ ID NO: 270179 - RNA, 19 nt, Artificial Sequence
  Description of Artificial Sequence: Synthetic oligonucleotide
aagaggguaccuucuggua

SEQ ID NO: 270180 - RNA, 19 nt, Artificial Sequence
  Description of Artificial Sequence: Synthetic oligonucleotide
auggaguacuuuccguuga

SEQ ID NO: 270181 - RNA, 19 nt, Artificial Sequence
  Description of Artificial Sequence: Synthetic oligonucleotide
aucuaucaccugccacacc

SEQ ID NO: 270182 - RNA, 19 nt, Artificial Sequence
  Description of Artificial Sequence: Synthetic oligonucleotide
gguacuggcauggaggcug

SEQ ID NO: 270183 - RNA, 19 nt, Artificial Sequence
  Description of Artificial Sequence: Synthetic oligonucleotide
agaucgacacccucuuccu

SEQ ID NO: 270184 - RNA, 19 nt, Artificial Sequence
  Description of Artificial Sequence: Synthetic oligonucleotide
cuaagcaguaaguuuucaa

SEQ ID NO: 270185 - RNA, 19 nt, Artificial Sequence
  Description of Artificial Sequence: Synthetic oligonucleotide
ggauaaugggagaugguug

SEQ ID NO: 270186 - RNA, 19 nt, Artificial Sequence
  Description of Artificial Sequence: Synthetic oligonucleotide
uguggcaacaaagccuccu

SEQ ID NO: 270187 - RNA, 19 nt, Artificial Sequence
  Description of Artificial Sequence: Synthetic oligonucleotide
uccccugguugcuaagcag

SEQ ID NO: 270188 - RNA, 19 nt, Artificial Sequence
  Description of Artificial Sequence: Synthetic oligonucleotide
aagaucaucuuggcauacu

SEQ ID NO: 270189 - RNA, 19 nt, Artificial Sequence
  Description of Artificial Sequence: Synthetic oligonucleotide
cagauuugaagaagugaca

SEQ ID NO: 270190 - RNA, 19 nt, Artificial Sequence
  Description of Artificial Sequence: Synthetic oligonucleotide
uggaguacuuuccguugac

SEQ ID NO: 270191 - RNA, 19 nt, Artificial Sequence
  Description of Artificial Sequence: Synthetic oligonucleotide
ucccacaguaccgugugca

SEQ ID NO: 270192 - RNA, 19 nt, Artificial Sequence
  Description of Artificial Sequence: Synthetic oligonucleotide
cauagcaaucccuggccuc

SEQ ID NO: 270193 - RNA, 19 nt, Artificial Sequence
  Description of Artificial Sequence: Synthetic oligonucleotide
uuccguugacuauccgaag

SEQ ID NO: 270194 - RNA, 19 nt, Artificial Sequence
  Description of Artificial Sequence: Synthetic oligonucleotide
gaggaauugucugcaccag

SEQ ID NO: 270195 - RNA, 19 nt, Artificial Sequence
  Description of Artificial Sequence: Synthetic oligonucleotide
gaagcuacagagucagggu

SEQ ID NO: 270196 - RNA, 19 nt, Artificial Sequence
  Description of Artificial Sequence: Synthetic oligonucleotide
ggaaggaguauaaaucaac

SEQ ID NO: 270197 - RNA, 19 nt, Artificial Sequence
  Description of Artificial Sequence: Synthetic oligonucleotide
ccuacaagccugcaagggg

SEQ ID NO: 270198 - RNA, 19 nt, Artificial Sequence
  Description of Artificial Sequence: Synthetic oligonucleotide
agcgugugaagaaaguggu

SEQ ID NO: 270199 - RNA, 19 nt, Artificial Sequence
  Description of Artificial Sequence: Synthetic oligonucleotide
aggaauugucugcaccagu

SEQ ID NO: 270200 - RNA, 19 nt, Artificial Sequence
  Description of Artificial Sequence: Synthetic oligonucleotide
cacgaauaaggucaugaaa

SEQ ID NO: 270201 - RNA, 19 nt, Artificial Sequence
  Description of Artificial Sequence: Synthetic oligonucleotide
guugucggaccacuucagc

SEQ ID NO: 270202 - RNA, 19 nt, Artificial Sequence
  Description of Artificial Sequence: Synthetic oligonucleotide
gacuguguaacgaguguca

SEQ ID NO: 270203 - RNA, 19 nt, Artificial Sequence
  Description of Artificial Sequence: Synthetic oligonucleotide
gagaccuuggcuguucaga

SEQ ID NO: 270204 - RNA, 19 nt, Artificial Sequence
  Description of Artificial Sequence: Synthetic oligonucleotide
uuggcuagggugggaaccc

SEQ ID NO: 270205 - RNA, 19 nt, Artificial Sequence
  Description of Artificial Sequence: Synthetic oligonucleotide
caucccacaguaccgugug

SEQ ID NO: 270206 - RNA, 19 nt, Artificial Sequence
  Description of Artificial Sequence: Synthetic oligonucleotide
acggcgguauugcuucuuc

SEQ ID NO: 270207 - RNA, 19 nt, Artificial Sequence
  Description of Artificial Sequence: Synthetic oligonucleotide
gcuccgaucacacugaagu

SEQ ID NO: 270208 - RNA, 19 nt, Artificial Sequence
  Description of Artificial Sequence: Synthetic oligonucleotide
guacuuuccguugacuauc

SEQ ID NO: 270209 - RNA, 19 nt, Artificial Sequence
  Description of Artificial Sequence: Synthetic oligonucleotide
ucggcucugagacuugguu

SEQ ID NO: 270210 - RNA, 19 nt, Artificial Sequence
  Description of Artificial Sequence: Synthetic oligonucleotide
auaucagaucugaggaaug

SEQ ID NO: 270211 - RNA, 19 nt, Artificial Sequence
  Description of Artificial Sequence: Synthetic oligonucleotide
aacccguaggggccgggug

SEQ ID NO: 270212 - RNA, 19 nt, Artificial Sequence
  Description of Artificial Sequence: Synthetic oligonucleotide
gaucgacacccucuuccug

SEQ ID NO: 270213 - RNA, 19 nt, Artificial Sequence
  Description of Artificial Sequence: Synthetic oligonucleotide
ucccucgccucacugggga

SEQ ID NO: 270214 - RNA, 19 nt, Artificial Sequence
  Description of Artificial Sequence: Synthetic oligonucleotide
gaagaucaucuuggcauac

SEQ ID NO: 270215 - RNA, 19 nt, Artificial Sequence
  Description of Artificial Sequence: Synthetic oligonucleotide
agcaugcccacaucaaaua

SEQ ID NO: 270216 - RNA, 19 nt, Artificial Sequence
  Description of Artificial Sequence: Synthetic oligonucleotide
uccgaaguuuugcuccauc

SEQ ID NO: 270217 - RNA, 19 nt, Artificial Sequence
  Description of Artificial Sequence: Synthetic oligonucleotide
cuucacgagcagcuccugc

SEQ ID NO: 270218 - RNA, 19 nt, Artificial Sequence
  Description of Artificial Sequence: Synthetic oligonucleotide
ggaugcacuaccagaacug

SEQ ID NO: 270219 - RNA, 19 nt, Artificial Sequence
  Description of Artificial Sequence: Synthetic oligonucleotide
cuccgaucacacugaagug

SEQ ID NO: 270220 - RNA, 19 nt, Artificial Sequence
  Description of Artificial Sequence: Synthetic oligonucleotide
gaccaugcaucguucagcu

SEQ ID NO: 270221 - RNA, 19 nt, Artificial Sequence
  Description of Artificial Sequence: Synthetic oligonucleotide
ggguugaccuuuagcaugg

SEQ ID NO: 270222 - RNA, 19 nt, Artificial Sequence
  Description of Artificial Sequence: Synthetic oligonucleotide
gacuauccgaaguuuugcu

SEQ ID NO: 270223 - RNA, 19 nt, Artificial Sequence
  Description of Artificial Sequence: Synthetic oligonucleotide
cucagaccaugcaucguuc

SEQ ID NO: 270224 - RNA, 19 nt, Artificial Sequence
  Description of Artificial Sequence: Synthetic oligonucleotide
uccuuaggagaggaauugu

SEQ ID NO: 270225 - RNA, 19 nt, Artificial Sequence
  Description of Artificial Sequence: Synthetic oligonucleotide
ucggaccacuucagcaaug

SEQ ID NO: 270226 - RNA, 19 nt, Artificial Sequence
  Description of Artificial Sequence: Synthetic oligonucleotide
gggacgacuugucugccag

SEQ ID NO: 270227 - RNA, 19 nt, Artificial Sequence
  Description of Artificial Sequence: Synthetic oligonucleotide
acacggacaccccucuccu

SEQ ID NO: 270228 - RNA, 19 nt, Artificial Sequence
  Description of Artificial Sequence: Synthetic oligonucleotide
gaaagacuguguaacgagu

SEQ ID NO: 270229 - RNA, 19 nt, Artificial Sequence
  Description of Artificial Sequence: Synthetic oligonucleotide
agaggagccucaccacuga

SEQ ID NO: 270230 - RNA, 19 nt, Artificial Sequence
  Description of Artificial Sequence: Synthetic oligonucleotide
auaguaagucuugcugccu

SEQ ID NO: 270231 - RNA, 19 nt, Artificial Sequence
  Description of Artificial Sequence: Synthetic oligonucleotide
auaaugggagaugguugug

SEQ ID NO: 270232 - RNA, 19 nt, Artificial Sequence
  Description of Artificial Sequence: Synthetic oligonucleotide
ccugcuauggucccauuug

SEQ ID NO: 270233 - RNA, 19 nt, Artificial Sequence
  Description of Artificial Sequence: Synthetic oligonucleotide
agcguggacagaagugcac

SEQ ID NO: 270234 - RNA, 19 nt, Artificial Sequence
  Description of Artificial Sequence: Synthetic oligonucleotide
accgugugcagcguggaca

SEQ ID NO: 270235 - RNA, 19 nt, Artificial Sequence
  Description of Artificial Sequence: Synthetic oligonucleotide
uccgagcuggaugacagua

SEQ ID NO: 270236 - RNA, 19 nt, Artificial Sequence
  Description of Artificial Sequence: Synthetic oligonucleotide
aacucagaccaugcaucgu

SEQ ID NO: 270237 - RNA, 19 nt, Artificial Sequence
  Description of Artificial Sequence: Synthetic oligonucleotide
ccgcaaucaggacagacug

SEQ ID NO: 270238 - RNA, 19 nt, Artificial Sequence
  Description of Artificial Sequence: Synthetic oligonucleotide
cuaucaccugccacaccug

SEQ ID NO: 270239 - RNA, 19 nt, Artificial Sequence
  Description of Artificial Sequence: Synthetic oligonucleotide
ugggaacccguaggggccg

SEQ ID NO: 270240 - RNA, 19 nt, Artificial Sequence
  Description of Artificial Sequence: Synthetic oligonucleotide
gacucuccuuaggagagga

SEQ ID NO: 270241 - RNA, 19 nt, Artificial Sequence
  Description of Artificial Sequence: Synthetic oligonucleotide
augggacgacuugucugcc

SEQ ID NO: 270242 - RNA, 19 nt, Artificial Sequence
  Description of Artificial Sequence: Synthetic oligonucleotide
ccuuaggagaggaauuguc

SEQ ID NO: 270243 - RNA, 19 nt, Artificial Sequence
  Description of Artificial Sequence: Synthetic oligonucleotide
gaggguaccuucugguacu

SEQ ID NO: 270244 - RNA, 19 nt, Artificial Sequence
  Description of Artificial Sequence: Synthetic oligonucleotide
cuggggccaaaucuaucac

SEQ ID NO: 270245 - RNA, 19 nt, Artificial Sequence
  Description of Artificial Sequence: Synthetic oligonucleotide
acucaucagagugggugug

SEQ ID NO: 270246 - RNA, 19 nt, Artificial Sequence
  Description of Artificial Sequence: Synthetic oligonucleotide
gcucccucgccucacuggg

SEQ ID NO: 270247 - RNA, 19 nt, Artificial Sequence
  Description of Artificial Sequence: Synthetic oligonucleotide
cuuuagcauggcacgaaua

SEQ ID NO: 270248 - RNA, 19 nt, Artificial Sequence
  Description of Artificial Sequence: Synthetic oligonucleotide
auggucccauuugugcauc

SEQ ID NO: 270249 - RNA, 19 nt, Artificial Sequence
  Description of Artificial Sequence: Synthetic oligonucleotide
ugggacgacuugucugcca

SEQ ID NO: 270250 - RNA, 19 nt, Artificial Sequence
  Description of Artificial Sequence: Synthetic oligonucleotide
acugcacggcgguauugcu

SEQ ID NO: 270251 - RNA, 19 nt, Artificial Sequence
  Description of Artificial Sequence: Synthetic oligonucleotide
ugcccacaucaaauaguaa

SEQ ID NO: 270252 - RNA, 19 nt, Artificial Sequence
  Description of Artificial Sequence: Synthetic oligonucleotide
ucgacacccucuuccuggu

SEQ ID NO: 270253 - RNA, 19 nt, Artificial Sequence
  Description of Artificial Sequence: Synthetic oligonucleotide
caugcaucguucagcucca

SEQ ID NO: 270254 - RNA, 19 nt, Artificial Sequence
  Description of Artificial Sequence: Synthetic oligonucleotide
accugcuauggucccauuu

SEQ ID NO: 270255 - RNA, 19 nt, Artificial Sequence
  Description of Artificial Sequence: Synthetic oligonucleotide
gaucugaggaaugcuuucu

SEQ ID NO: 270256 - RNA, 19 nt, Artificial Sequence
  Description of Artificial Sequence: Synthetic oligonucleotide
agguaacagucaccagaca

SEQ ID NO: 270257 - RNA, 19 nt, Artificial Sequence
  Description of Artificial Sequence: Synthetic oligonucleotide
gaacugcacggcgguauug

SEQ ID NO: 270258 - RNA, 19 nt, Artificial Sequence
  Description of Artificial Sequence: Synthetic oligonucleotide
ccagcgacauguaccauuc

SEQ ID NO: 270259 - RNA, 19 nt, Artificial Sequence
  Description of Artificial Sequence: Synthetic oligonucleotide
uaaugguccccugguugcu

SEQ ID NO: 270260 - RNA, 19 nt, Artificial Sequence
  Description of Artificial Sequence: Synthetic oligonucleotide
gagccucaccacugagcag

SEQ ID NO: 270261 - RNA, 19 nt, Artificial Sequence
  Description of Artificial Sequence: Synthetic oligonucleotide
gcguggacagaagugcacg

SEQ ID NO: 270262 - RNA, 19 nt, Artificial Sequence
  Description of Artificial Sequence: Synthetic oligonucleotide
uaggggccgggugacuucc

SEQ ID NO: 270263 - RNA, 19 nt, Artificial Sequence
  Description of Artificial Sequence: Synthetic oligonucleotide
ccucgugaucucuuccucc

SEQ ID NO: 270264 - RNA, 19 nt, Artificial Sequence
  Description of Artificial Sequence: Synthetic oligonucleotide
acagguguccagcggcuuu

SEQ ID NO: 270265 - RNA, 19 nt, Artificial Sequence
  Description of Artificial Sequence: Synthetic oligonucleotide
agccaucagaaaauaguuu

SEQ ID NO: 270266 - RNA, 19 nt, Artificial Sequence
  Description of Artificial Sequence: Synthetic oligonucleotide
cucuguccgcaaucaggac

SEQ ID NO: 270267 - RNA, 19 nt, Artificial Sequence
  Description of Artificial Sequence: Synthetic oligonucleotide
uggccuuauccggaugcac

SEQ ID NO: 270268 - RNA, 19 nt, Artificial Sequence
  Description of Artificial Sequence: Synthetic oligonucleotide
ggcucccucgccucacugg

SEQ ID NO: 270269 - RNA, 19 nt, Artificial Sequence
  Description of Artificial Sequence: Synthetic oligonucleotide
caggagaucgacacccucu

SEQ ID NO: 270270 - RNA, 19 nt, Artificial Sequence
  Description of Artificial Sequence: Synthetic oligonucleotide
ugccagccuugguaugucu

SEQ ID NO: 270271 - RNA, 19 nt, Artificial Sequence
  Description of Artificial Sequence: Synthetic oligonucleotide
aaugguccccugguugcua

SEQ ID NO: 270272 - RNA, 19 nt, Artificial Sequence
  Description of Artificial Sequence: Synthetic oligonucleotide
accuucggcuuuugggcaa

SEQ ID NO: 270273 - RNA, 19 nt, Artificial Sequence
  Description of Artificial Sequence: Synthetic oligonucleotide
accuuuagcauggcacgaa

SEQ ID NO: 270274 - RNA, 19 nt, Artificial Sequence
  Description of Artificial Sequence: Synthetic oligonucleotide
augcacuaccagaacugca

SEQ ID NO: 270275 - RNA, 19 nt, Artificial Sequence
  Description of Artificial Sequence: Synthetic oligonucleotide
guccgcaaucaggacagac

SEQ ID NO: 270276 - RNA, 19 nt, Artificial Sequence
  Description of Artificial Sequence: Synthetic oligonucleotide
uccugccaauccagcgugu

SEQ ID NO: 270277 - RNA, 19 nt, Artificial Sequence
  Description of Artificial Sequence: Synthetic oligonucleotide
cucccucgccucacugggg

SEQ ID NO: 270278 - RNA, 19 nt, Artificial Sequence
  Description of Artificial Sequence: Synthetic oligonucleotide
cccuacaagccugcaaggg

SEQ ID NO: 270279 - RNA, 19 nt, Artificial Sequence
  Description of Artificial Sequence: Synthetic oligonucleotide
ugccuucaauccacuccaa

SEQ ID NO: 270280 - RNA, 19 nt, Artificial Sequence
  Description of Artificial Sequence: Synthetic oligonucleotide
uccagcggcuuuccccauc

SEQ ID NO: 270281 - RNA, 19 nt, Artificial Sequence
  Description of Artificial Sequence: Synthetic oligonucleotide
gaguguaggcccaggagau

SEQ ID NO: 270282 - RNA, 19 nt, Artificial Sequence
  Description of Artificial Sequence: Synthetic oligonucleotide
ucgccucacuggggaaugg

SEQ ID NO: 270283 - RNA, 19 nt, Artificial Sequence
  Description of Artificial Sequence: Synthetic oligonucleotide
cagcguggacagaagugca

SEQ ID NO: 270284 - RNA, 19 nt, Artificial Sequence
  Description of Artificial Sequence: Synthetic oligonucleotide
gcacgaauaaggucaugaa

SEQ ID NO: 270285 - RNA, 19 nt, Artificial Sequence
  Description of Artificial Sequence: Synthetic oligonucleotide
uguugcuggaggggacccu

SEQ ID NO: 270286 - RNA, 19 nt, Artificial Sequence
  Description of Artificial Sequence: Synthetic oligonucleotide
gacuugguuuggcuagggu

SEQ ID NO: 270287 - RNA, 19 nt, Artificial Sequence
  Description of Artificial Sequence: Synthetic oligonucleotide
gacaccccucuccucucga

SEQ ID NO: 270288 - RNA, 19 nt, Artificial Sequence
  Description of Artificial Sequence: Synthetic oligonucleotide
guugacuauccgaaguuuu

SEQ ID NO: 270289 - RNA, 19 nt, Artificial Sequence
  Description of Artificial Sequence: Synthetic oligonucleotide
cucgccucacuggggaaug

SEQ ID NO: 270290 - RNA, 19 nt, Artificial Sequence
  Description of Artificial Sequence: Synthetic oligonucleotide
ccgagcuggaugacaguag

SEQ ID NO: 270291 - RNA, 19 nt, Artificial Sequence
  Description of Artificial Sequence: Synthetic oligonucleotide
cucgcuucuugggcacucc

SEQ ID NO: 270292 - RNA, 19 nt, Artificial Sequence
  Description of Artificial Sequence: Synthetic oligonucleotide
ccagcggcuuuccccaucc

SEQ ID NO: 270293 - RNA, 19 nt, Artificial Sequence
  Description of Artificial Sequence: Synthetic oligonucleotide
cucugcggugagucugcug

SEQ ID NO: 270294 - RNA, 19 nt, Artificial Sequence
  Description of Artificial Sequence: Synthetic oligonucleotide
ggauggaguacuuuccguu

SEQ ID NO: 270295 - RNA, 19 nt, Artificial Sequence
  Description of Artificial Sequence: Synthetic oligonucleotide
guaggggccgggugacuuc

SEQ ID NO: 270296 - RNA, 19 nt, Artificial Sequence
  Description of Artificial Sequence: Synthetic oligonucleotide
cuggguugaccuuuagcau

SEQ ID NO: 270297 - RNA, 19 nt, Artificial Sequence
  Description of Artificial Sequence: Synthetic oligonucleotide
ucgagcccugguucucaaa

SEQ ID NO: 270298 - RNA, 19 nt, Artificial Sequence
  Description of Artificial Sequence: Synthetic oligonucleotide
ggggccaaaucuaucaccu

SEQ ID NO: 270299 - RNA, 19 nt, Artificial Sequence
  Description of Artificial Sequence: Synthetic oligonucleotide
gggugggaacccguagggg

SEQ ID NO: 270300 - RNA, 19 nt, Artificial Sequence
  Description of Artificial Sequence: Synthetic oligonucleotide
cugcuauggucccauuugu

SEQ ID NO: 270301 - RNA, 19 nt, Artificial Sequence
  Description of Artificial Sequence: Synthetic oligonucleotide
aggguaccuucugguacug

SEQ ID NO: 270302 - RNA, 19 nt, Artificial Sequence
  Description of Artificial Sequence: Synthetic oligonucleotide
gguccccugguugcuaagc

SEQ ID NO: 270303 - RNA, 19 nt, Artificial Sequence
  Description of Artificial Sequence: Synthetic oligonucleotide
gcggcuuuccccaucccac

SEQ ID NO: 270304 - RNA, 19 nt, Artificial Sequence
  Description of Artificial Sequence: Synthetic oligonucleotide
cuccaccauugcucgcuuc

SEQ ID NO: 270305 - RNA, 19 nt, Artificial Sequence
  Description of Artificial Sequence: Synthetic oligonucleotide
cacagcuuaaugguccccu

SEQ ID NO: 270306 - RNA, 19 nt, Artificial Sequence
  Description of Artificial Sequence: Synthetic oligonucleotide
aggcuagagcugagaucac

SEQ ID NO: 270307 - RNA, 19 nt, Artificial Sequence
  Description of Artificial Sequence: Synthetic oligonucleotide
auggcacgaauaaggucau

SEQ ID NO: 270308 - RNA, 19 nt, Artificial Sequence
  Description of Artificial Sequence: Synthetic oligonucleotide
guugcuggaggggacccua

SEQ ID NO: 270309 - RNA, 19 nt, Artificial Sequence
  Description of Artificial Sequence: Synthetic oligonucleotide
gguguggaugcaccccaga

SEQ ID NO: 270310 - RNA, 19 nt, Artificial Sequence
  Description of Artificial Sequence: Synthetic oligonucleotide
caggauaaugggagauggu

SEQ ID NO: 270311 - RNA, 19 nt, Artificial Sequence
  Description of Artificial Sequence: Synthetic oligonucleotide
cagucaccagacaccaagu

SEQ ID NO: 270312 - RNA, 19 nt, Artificial Sequence
  Description of Artificial Sequence: Synthetic oligonucleotide
cggaccacuucagcaaugg

SEQ ID NO: 270313 - RNA, 19 nt, Artificial Sequence
  Description of Artificial Sequence: Synthetic oligonucleotide
cacggacaccccucuccuc

SEQ ID NO: 270314 - RNA, 19 nt, Artificial Sequence
  Description of Artificial Sequence: Synthetic oligonucleotide
gccuuauccggaugcacua

SEQ ID NO: 270315 - RNA, 19 nt, Artificial Sequence
  Description of Artificial Sequence: Synthetic oligonucleotide
ggagaucgacacccucuuc

SEQ ID NO: 270316 - RNA, 19 nt, Artificial Sequence
  Description of Artificial Sequence: Synthetic oligonucleotide
ggacccuacaagccugcaa

SEQ ID NO: 270317 - RNA, 19 nt, Artificial Sequence
  Description of Artificial Sequence: Synthetic oligonucleotide
cuggggucaccaggucagc

SEQ ID NO: 270318 - RNA, 19 nt, Artificial Sequence
  Description of Artificial Sequence: Synthetic oligonucleotide
gagccgcaucagaugguuc

SEQ ID NO: 270319 - RNA, 19 nt, Artificial Sequence
  Description of Artificial Sequence: Synthetic oligonucleotide
ggcccaggagaucgacacc

SEQ ID NO: 270320 - RNA, 19 nt, Artificial Sequence
  Description of Artificial Sequence: Synthetic oligonucleotide
gucggaccacuucagcaau

SEQ ID NO: 270321 - RNA, 19 nt, Artificial Sequence
  Description of Artificial Sequence: Synthetic oligonucleotide
ggaccacuucagcaaugga

SEQ ID NO: 270322 - RNA, 19 nt, Artificial Sequence
  Description of Artificial Sequence: Synthetic oligonucleotide
gcaguaaguuuucaaccuu

SEQ ID NO: 270323 - RNA, 19 nt, Artificial Sequence
  Description of Artificial Sequence: Synthetic oligonucleotide
ccuuauccggaugcacuac

SEQ ID NO: 270324 - RNA, 19 nt, Artificial Sequence
  Description of Artificial Sequence: Synthetic oligonucleotide
cugccagccuugguauguc

SEQ ID NO: 270325 - RNA, 19 nt, Artificial Sequence
  Description of Artificial Sequence: Synthetic oligonucleotide
ggaugcugccggaaacaca

SEQ ID NO: 270326 - RNA, 19 nt, Artificial Sequence
  Description of Artificial Sequence: Synthetic oligonucleotide
cuguguaacgagugucauu

SEQ ID NO: 270327 - RNA, 19 nt, Artificial Sequence
  Description of Artificial Sequence: Synthetic oligonucleotide
cagaacugcacggcgguau

SEQ ID NO: 270328 - RNA, 19 nt, Artificial Sequence
  Description of Artificial Sequence: Synthetic oligonucleotide
ccugccaauccagcgugug

SEQ ID NO: 270329 - RNA, 19 nt, Artificial Sequence
  Description of Artificial Sequence: Synthetic oligonucleotide
ggccuuauccggaugcacu

SEQ ID NO: 270330 - RNA, 19 nt, Artificial Sequence
  Description of Artificial Sequence: Synthetic oligonucleotide
ggaggcugauguggcaaca

SEQ ID NO: 270331 - RNA, 19 nt, Artificial Sequence
  Description of Artificial Sequence: Synthetic oligonucleotide
cugagaccuucggcuuuug

SEQ ID NO: 270332 - RNA, 19 nt, Artificial Sequence
  Description of Artificial Sequence: Synthetic oligonucleotide
cgguauugcuucuucaccu

SEQ ID NO: 270333 - RNA, 19 nt, Artificial Sequence
  Description of Artificial Sequence: Synthetic oligonucleotide
ggggacccuacaagccugc

SEQ ID NO: 270334 - RNA, 19 nt, Artificial Sequence
  Description of Artificial Sequence: Synthetic oligonucleotide
gguugaccuuuagcauggc

SEQ ID NO: 270335 - RNA, 19 nt, Artificial Sequence
  Description of Artificial Sequence: Synthetic oligonucleotide
cucgagcccugguucucaa

SEQ ID NO: 270336 - RNA, 19 nt, Artificial Sequence
  Description of Artificial Sequence: Synthetic oligonucleotide
ggguguggaugcaccccag

SEQ ID NO: 270337 - RNA, 19 nt, Artificial Sequence
  Description of Artificial Sequence: Synthetic oligonucleotide
gccggaaacacagcaggua

SEQ ID NO: 270338 - RNA, 19 nt, Artificial Sequence
  Description of Artificial Sequence: Synthetic oligonucleotide
cuugggcacuccagcugua

SEQ ID NO: 270339 - RNA, 19 nt, Artificial Sequence
  Description of Artificial Sequence: Synthetic oligonucleotide
ccggaaacacagcagguau

SEQ ID NO: 270340 - RNA, 19 nt, Artificial Sequence
  Description of Artificial Sequence: Synthetic oligonucleotide
gccagcgacauguaccauu

SEQ ID NO: 270341 - RNA, 19 nt, Artificial Sequence
  Description of Artificial Sequence: Synthetic oligonucleotide
ggccaugggacgacuuguc

SEQ ID NO: 270342 - RNA, 19 nt, Artificial Sequence
  Description of Artificial Sequence: Synthetic oligonucleotide
ugccagcgacauguaccau

SEQ ID NO: 270343 - RNA, 19 nt, Artificial Sequence
  Description of Artificial Sequence: Synthetic oligonucleotide
ccgcaucagaugguucaag

SEQ ID NO: 270344 - RNA, 19 nt, Artificial Sequence
  Description of Artificial Sequence: Synthetic oligonucleotide
gggccgggugacuuccaga

SEQ ID NO: 270345 - RNA, 19 nt, Artificial Sequence
  Description of Artificial Sequence: Synthetic oligonucleotide
cagccauggaaugguauuu

SEQ ID NO: 270346 - RNA, 19 nt, Artificial Sequence
  Description of Artificial Sequence: Synthetic oligonucleotide
cugcacggcgguauugcuu

SEQ ID NO: 270347 - RNA, 19 nt, Artificial Sequence
  Description of Artificial Sequence: Synthetic oligonucleotide
ccccugguugcuaagcagu

SEQ ID NO: 270348 - RNA, 19 nt, Artificial Sequence
  Description of Artificial Sequence: Synthetic oligonucleotide
cucggcucugagacuuggu

SEQ ID NO: 270349 - RNA, 19 nt, Artificial Sequence
  Description of Artificial Sequence: Synthetic oligonucleotide
ucucgccaauggggaaguu

SEQ ID NO: 270350 - RNA, 19 nt, Artificial Sequence
  Description of Artificial Sequence: Synthetic oligonucleotide
ugguugcccuguggccuua

SEQ ID NO: 270351 - RNA, 19 nt, Artificial Sequence
  Description of Artificial Sequence: Synthetic oligonucleotide
gcacacggacaccccucuc

SEQ ID NO: 270352 - RNA, 19 nt, Artificial Sequence
  Description of Artificial Sequence: Synthetic oligonucleotide
ggccucgagcccugguucu

SEQ ID NO: 270353 - RNA, 19 nt, Artificial Sequence
  Description of Artificial Sequence: Synthetic oligonucleotide
cccguaggggccgggugac

SEQ ID NO: 270354 - RNA, 19 nt, Artificial Sequence
  Description of Artificial Sequence: Synthetic oligonucleotide
gccgcaucagaugguucaa

SEQ ID NO: 270355 - RNA, 19 nt, Artificial Sequence
  Description of Artificial Sequence: Synthetic oligonucleotide
ccguugacuauccgaaguu

SEQ ID NO: 270356 - RNA, 19 nt, Artificial Sequence
  Description of Artificial Sequence: Synthetic oligonucleotide
gggacccuacaagccugca

SEQ ID NO: 270357 - RNA, 19 nt, Artificial Sequence
  Description of Artificial Sequence: Synthetic oligonucleotide
cgaucacacugaagugaga

SEQ ID NO: 270358 - RNA, 19 nt, Artificial Sequence
  Description of Artificial Sequence: Synthetic oligonucleotide
gguugguguccgugccgcu

SEQ ID NO: 270359 - RNA, 19 nt, Artificial Sequence
  Description of Artificial Sequence: Synthetic oligonucleotide
cccgagucacccucagagu

SEQ ID NO: 270360 - RNA, 19 nt, Artificial Sequence
  Description of Artificial Sequence: Synthetic oligonucleotide
gcggugagucugcugcaau

SEQ ID NO: 270361 - RNA, 19 nt, Artificial Sequence
  Description of Artificial Sequence: Synthetic oligonucleotide
ccucgagcccugguucuca

SEQ ID NO: 270362 - RNA, 19 nt, Artificial Sequence
  Description of Artificial Sequence: Synthetic oligonucleotide
cacagguguccagcggcuu

SEQ ID NO: 270363 - RNA, 19 nt, Artificial Sequence
  Description of Artificial Sequence: Synthetic oligonucleotide
ccuucggcuuuugggcaaa

SEQ ID NO: 270364 - RNA, 19 nt, Artificial Sequence
  Description of Artificial Sequence: Synthetic oligonucleotide
cacggcgguauugcuucuu

SEQ ID NO: 270365 - RNA, 19 nt, Artificial Sequence
  Description of Artificial Sequence: Synthetic oligonucleotide
cguugacuauccgaaguuu

SEQ ID NO: 270366 - RNA, 19 nt, Artificial Sequence
  Description of Artificial Sequence: Synthetic oligonucleotide
cagcuguagucaggauaau

SEQ ID NO: 270367 - RNA, 19 nt, Artificial Sequence
  Description of Artificial Sequence: Synthetic oligonucleotide
gcacggcgguauugcuucu

SEQ ID NO: 270368 - RNA, 19 nt, Artificial Sequence
  Description of Artificial Sequence: Synthetic oligonucleotide
cggugagucugcugcaauu

SEQ ID NO: 270369 - RNA, 19 nt, Artificial Sequence
  Description of Artificial Sequence: Synthetic oligonucleotide
cccucgccucacuggggaa

SEQ ID NO: 270370 - RNA, 19 nt, Artificial Sequence
  Description of Artificial Sequence: Synthetic oligonucleotide
ccucgccucacuggggaau

SEQ ID NO: 270371 - RNA, 19 nt, Artificial Sequence
  Description of Artificial Sequence: Synthetic oligonucleotide
gcucugcggugagucugcu

SEQ ID NO: 270372 - RNA, 19 nt, Artificial Sequence
  Description of Artificial Sequence: Synthetic oligonucleotide
ccguaggggccgggugacu

SEQ ID NO: 270373 - RNA, 19 nt, Artificial Sequence
  Description of Artificial Sequence: Synthetic oligonucleotide
aaaguaguaaggcuccauc

SEQ ID NO: 270374 - RNA, 19 nt, Artificial Sequence
  Description of Artificial Sequence: Synthetic oligonucleotide
uuaguagugugacacauca

SEQ ID NO: 270375 - RNA, 19 nt, Artificial Sequence
  Description of Artificial Sequence: Synthetic oligonucleotide
uauugaauuucaagggccg

SEQ ID NO: 270376 - RNA, 19 nt, Artificial Sequence
  Description of Artificial Sequence: Synthetic oligonucleotide
aaaggugucagcauagauc

SEQ ID NO: 270377 - RNA, 19 nt, Artificial Sequence
  Description of Artificial Sequence: Synthetic oligonucleotide
gauguuugguccuguagcg

SEQ ID NO: 270378 - RNA, 19 nt, Artificial Sequence
  Description of Artificial Sequence: Synthetic oligonucleotide
uuuguugaugcacacggug

SEQ ID NO: 270379 - RNA, 19 nt, Artificial Sequence
  Description of Artificial Sequence: Synthetic oligonucleotide
aaaaggaccaccccaucug

SEQ ID NO: 270380 - RNA, 19 nt, Artificial Sequence
  Description of Artificial Sequence: Synthetic oligonucleotide
aaugugucgaaguuuguaa

SEQ ID NO: 270381 - RNA, 19 nt, Artificial Sequence
  Description of Artificial Sequence: Synthetic oligonucleotide
uacaaaguaguaaggcucc

SEQ ID NO: 270382 - RNA, 19 nt, Artificial Sequence
  Description of Artificial Sequence: Synthetic oligonucleotide
uccacggcaaucuugauaa

SEQ ID NO: 270383 - RNA, 19 nt, Artificial Sequence
  Description of Artificial Sequence: Synthetic oligonucleotide
agauggauagcucuuguug

SEQ ID NO: 270384 - RNA, 19 nt, Artificial Sequence
  Description of Artificial Sequence: Synthetic oligonucleotide
aaguaguaaggcuccauca

SEQ ID NO: 270385 - RNA, 19 nt, Artificial Sequence
  Description of Artificial Sequence: Synthetic oligonucleotide
gggauaauugagcacaacg

SEQ ID NO: 270386 - RNA, 19 nt, Artificial Sequence
  Description of Artificial Sequence: Synthetic oligonucleotide
ugcacugcaugcuuaauca

SEQ ID NO: 270387 - RNA, 19 nt, Artificial Sequence
  Description of Artificial Sequence: Synthetic oligonucleotide
agaacgucacaacuggguc

SEQ ID NO: 270388 - RNA, 19 nt, Artificial Sequence
  Description of Artificial Sequence: Synthetic oligonucleotide
ggguuaaacgcuuucaucc

SEQ ID NO: 270389 - RNA, 19 nt, Artificial Sequence
  Description of Artificial Sequence: Synthetic oligonucleotide
ggaccgaaggcccagaugg

SEQ ID NO: 270390 - RNA, 19 nt, Artificial Sequence
  Description of Artificial Sequence: Synthetic oligonucleotide
aaggucggaguccacgccg

SEQ ID NO: 270391 - RNA, 19 nt, Artificial Sequence
  Description of Artificial Sequence: Synthetic oligonucleotide
ucgauuuuguugaugcaca

SEQ ID NO: 270392 - RNA, 19 nt, Artificial Sequence
  Description of Artificial Sequence: Synthetic oligonucleotide
ucuuauugggcguuucagc

SEQ ID NO: 270393 - RNA, 19 nt, Artificial Sequence
  Description of Artificial Sequence: Synthetic oligonucleotide
uccggaucaauucaucgca

SEQ ID NO: 270394 - RNA, 19 nt, Artificial Sequence
  Description of Artificial Sequence: Synthetic oligonucleotide
aggaucaccaggcacgauc

SEQ ID NO: 270395 - RNA, 19 nt, Artificial Sequence
  Description of Artificial Sequence: Synthetic oligonucleotide
acaaucggcugaucaacgc

SEQ ID NO: 270396 - RNA, 19 nt, Artificial Sequence
  Description of Artificial Sequence: Synthetic oligonucleotide
uuucucgagaggcucagca

SEQ ID NO: 270397 - RNA, 19 nt, Artificial Sequence
  Description of Artificial Sequence: Synthetic oligonucleotide
gaucuuauaaaggggcucc

SEQ ID NO: 270398 - RNA, 19 nt, Artificial Sequence
  Description of Artificial Sequence: Synthetic oligonucleotide
gauggaaugugcugcacac

SEQ ID NO: 270399 - RNA, 19 nt, Artificial Sequence
  Description of Artificial Sequence: Synthetic oligonucleotide
aguagauaucaccccagag

SEQ ID NO: 270400 - RNA, 19 nt, Artificial Sequence
  Description of Artificial Sequence: Synthetic oligonucleotide
ucaaugugguaccuggcga

SEQ ID NO: 270401 - RNA, 19 nt, Artificial Sequence
  Description of Artificial Sequence: Synthetic oligonucleotide
uguagcgucaggaccgaag

SEQ ID NO: 270402 - RNA, 19 nt, Artificial Sequence
  Description of Artificial Sequence: Synthetic oligonucleotide
uuaaacgcuuucauccugu

SEQ ID NO: 270403 - RNA, 19 nt, Artificial Sequence
  Description of Artificial Sequence: Synthetic oligonucleotide
gauuuuguugaugcacacg

SEQ ID NO: 270404 - RNA, 19 nt, Artificial Sequence
  Description of Artificial Sequence: Synthetic oligonucleotide
guagcgucaggaccgaagg

SEQ ID NO: 270405 - RNA, 19 nt, Artificial Sequence
  Description of Artificial Sequence: Synthetic oligonucleotide
agcacaacguccuguuugg

SEQ ID NO: 270406 - RNA, 19 nt, Artificial Sequence
  Description of Artificial Sequence: Synthetic oligonucleotide
ucaagggccggaaaaucug

SEQ ID NO: 270407 - RNA, 19 nt, Artificial Sequence
  Description of Artificial Sequence: Synthetic oligonucleotide
cuuauugggcguuucagca

SEQ ID NO: 270408 - RNA, 19 nt, Artificial Sequence
  Description of Artificial Sequence: Synthetic oligonucleotide
agggcaacgugucauccac

SEQ ID NO: 270409 - RNA, 19 nt, Artificial Sequence
  Description of Artificial Sequence: Synthetic oligonucleotide
aguaaggcuccaucagacg

SEQ ID NO: 270410 - RNA, 19 nt, Artificial Sequence
  Description of Artificial Sequence: Synthetic oligonucleotide
guaggaaugaucuggccuc

SEQ ID NO: 270411 - RNA, 19 nt, Artificial Sequence
  Description of Artificial Sequence: Synthetic oligonucleotide
agagaggucccucacgugu

SEQ ID NO: 270412 - RNA, 19 nt, Artificial Sequence
  Description of Artificial Sequence: Synthetic oligonucleotide
gucgaaguuuguaauaagc

SEQ ID NO: 270413 - RNA, 19 nt, Artificial Sequence
  Description of Artificial Sequence: Synthetic oligonucleotide
cacaacguccuguuuggcg

SEQ ID NO: 270414 - RNA, 19 nt, Artificial Sequence
  Description of Artificial Sequence: Synthetic oligonucleotide
uuagcaaacuccugguaau

SEQ ID NO: 270415 - RNA, 19 nt, Artificial Sequence
  Description of Artificial Sequence: Synthetic oligonucleotide
aaaggaccaccccaucuga

SEQ ID NO: 270416 - RNA, 19 nt, Artificial Sequence
  Description of Artificial Sequence: Synthetic oligonucleotide
ugucgaaguuuguaauaag

SEQ ID NO: 270417 - RNA, 19 nt, Artificial Sequence
  Description of Artificial Sequence: Synthetic oligonucleotide
uauugggcguuucagcaaa

SEQ ID NO: 270418 - RNA, 19 nt, Artificial Sequence
  Description of Artificial Sequence: Synthetic oligonucleotide
agggccggaaaaucugagc

SEQ ID NO: 270419 - RNA, 19 nt, Artificial Sequence
  Description of Artificial Sequence: Synthetic oligonucleotide
ucaauucaucgcagagagg

SEQ ID NO: 270420 - RNA, 19 nt, Artificial Sequence
  Description of Artificial Sequence: Synthetic oligonucleotide
acgccuucaaucagaaccc

SEQ ID NO: 270421 - RNA, 19 nt, Artificial Sequence
  Description of Artificial Sequence: Synthetic oligonucleotide
guagauaucaccccagagu

SEQ ID NO: 270422 - RNA, 19 nt, Artificial Sequence
  Description of Artificial Sequence: Synthetic oligonucleotide
cacaaucggcugaucaacg

SEQ ID NO: 270423 - RNA, 19 nt, Artificial Sequence
  Description of Artificial Sequence: Synthetic oligonucleotide
ucuuaguagugugacacau

SEQ ID NO: 270424 - RNA, 19 nt, Artificial Sequence
  Description of Artificial Sequence: Synthetic oligonucleotide
ucgggguucaguuaugguu

SEQ ID NO: 270425 - RNA, 19 nt, Artificial Sequence
  Description of Artificial Sequence: Synthetic oligonucleotide
cucgaucuuggguuuggcg

SEQ ID NO: 270426 - RNA, 19 nt, Artificial Sequence
  Description of Artificial Sequence: Synthetic oligonucleotide
ggaucaauucaucgcagag

SEQ ID NO: 270427 - RNA, 19 nt, Artificial Sequence
  Description of Artificial Sequence: Synthetic oligonucleotide
agccggucgauuuuguuga

SEQ ID NO: 270428 - RNA, 19 nt, Artificial Sequence
  Description of Artificial Sequence: Synthetic oligonucleotide
cuggaccucuacaaaguag

SEQ ID NO: 270429 - RNA, 19 nt, Artificial Sequence
  Description of Artificial Sequence: Synthetic oligonucleotide
guuucgaccacugucucac

SEQ ID NO: 270430 - RNA, 19 nt, Artificial Sequence
  Description of Artificial Sequence: Synthetic oligonucleotide
aaucggcugaucaacgccu

SEQ ID NO: 270431 - RNA, 19 nt, Artificial Sequence
  Description of Artificial Sequence: Synthetic oligonucleotide
ucacaaucggcugaucaac

SEQ ID NO: 270432 - RNA, 19 nt, Artificial Sequence
  Description of Artificial Sequence: Synthetic oligonucleotide
gaacgucacaacuggguca

SEQ ID NO: 270433 - RNA, 19 nt, Artificial Sequence
  Description of Artificial Sequence: Synthetic oligonucleotide
caucagacgaggaguggcc

SEQ ID NO: 270434 - RNA, 19 nt, Artificial Sequence
  Description of Artificial Sequence: Synthetic oligonucleotide
agggaggauguuucgacca

SEQ ID NO: 270435 - RNA, 19 nt, Artificial Sequence
  Description of Artificial Sequence: Synthetic oligonucleotide
gagggaggauguuucgacc

SEQ ID NO: 270436 - RNA, 19 nt, Artificial Sequence
  Description of Artificial Sequence: Synthetic oligonucleotide
caauucaucgcagagaggu

SEQ ID NO: 270437 - RNA, 19 nt, Artificial Sequence
  Description of Artificial Sequence: Synthetic oligonucleotide
gcgaccgagauccaaaggc

SEQ ID NO: 270438 - RNA, 19 nt, Artificial Sequence
  Description of Artificial Sequence: Synthetic oligonucleotide
gaccgagauccaaaggcgg

SEQ ID NO: 270439 - RNA, 19 nt, Artificial Sequence
  Description of Artificial Sequence: Synthetic oligonucleotide
gauguuucgaccacugucu

SEQ ID NO: 270440 - RNA, 19 nt, Artificial Sequence
  Description of Artificial Sequence: Synthetic oligonucleotide
gcuuauuaauccauugacc

SEQ ID NO: 270441 - RNA, 19 nt, Artificial Sequence
  Description of Artificial Sequence: Synthetic oligonucleotide
ugaauuucaagggccggaa

SEQ ID NO: 270442 - RNA, 19 nt, Artificial Sequence
  Description of Artificial Sequence: Synthetic oligonucleotide
cuuaguagugugacacauc

SEQ ID NO: 270443 - RNA, 19 nt, Artificial Sequence
  Description of Artificial Sequence: Synthetic oligonucleotide
uuauugggcguuucagcaa

SEQ ID NO: 270444 - RNA, 19 nt, Artificial Sequence
  Description of Artificial Sequence: Synthetic oligonucleotide
gaucacaugcucgccagac

SEQ ID NO: 270445 - RNA, 19 nt, Artificial Sequence
  Description of Artificial Sequence: Synthetic oligonucleotide
auaaaggggcuccaagaua

SEQ ID NO: 270446 - RNA, 19 nt, Artificial Sequence
  Description of Artificial Sequence: Synthetic oligonucleotide
uguuucgaccacugucuca

SEQ ID NO: 270447 - RNA, 19 nt, Artificial Sequence
  Description of Artificial Sequence: Synthetic oligonucleotide
accgagauccaaaggcggc

SEQ ID NO: 270448 - RNA, 19 nt, Artificial Sequence
  Description of Artificial Sequence: Synthetic oligonucleotide
uccaacgggcggaugacaa

SEQ ID NO: 270449 - RNA, 19 nt, Artificial Sequence
  Description of Artificial Sequence: Synthetic oligonucleotide
guacaucuuccgaagauca

SEQ ID NO: 270450 - RNA, 19 nt, Artificial Sequence
  Description of Artificial Sequence: Synthetic oligonucleotide
uugggguuaaacgcuuuca

SEQ ID NO: 270451 - RNA, 19 nt, Artificial Sequence
  Description of Artificial Sequence: Synthetic oligonucleotide
cagccggucgauuuuguug

SEQ ID NO: 270452 - RNA, 19 nt, Artificial Sequence
  Description of Artificial Sequence: Synthetic oligonucleotide
gacacaucaagggaccauc

SEQ ID NO: 270453 - RNA, 19 nt, Artificial Sequence
  Description of Artificial Sequence: Synthetic oligonucleotide
agagucgauggcugggaug

SEQ ID NO: 270454 - RNA, 19 nt, Artificial Sequence
  Description of Artificial Sequence: Synthetic oligonucleotide
ucgaccacugucucacaga

SEQ ID NO: 270455 - RNA, 19 nt, Artificial Sequence
  Description of Artificial Sequence: Synthetic oligonucleotide
uggaccacuucguucucga

SEQ ID NO: 270456 - RNA, 19 nt, Artificial Sequence
  Description of Artificial Sequence: Synthetic oligonucleotide
cuggguaugcgugcggagg

SEQ ID NO: 270457 - RNA, 19 nt, Artificial Sequence
  Description of Artificial Sequence: Synthetic oligonucleotide
aucuuaguagugugacaca

SEQ ID NO: 270458 - RNA, 19 nt, Artificial Sequence
  Description of Artificial Sequence: Synthetic oligonucleotide
guugacuggcuccacggca

SEQ ID NO: 270459 - RNA, 19 nt, Artificial Sequence
  Description of Artificial Sequence: Synthetic oligonucleotide
ucaagggaccaucgggguc

SEQ ID NO: 270460 - RNA, 19 nt, Artificial Sequence
  Description of Artificial Sequence: Synthetic oligonucleotide
cacucacaugggauaauug

SEQ ID NO: 270461 - RNA, 19 nt, Artificial Sequence
  Description of Artificial Sequence: Synthetic oligonucleotide
gaggauguuucgaccacug

SEQ ID NO: 270462 - RNA, 19 nt, Artificial Sequence
  Description of Artificial Sequence: Synthetic oligonucleotide
gaccaucggggucacaguc

SEQ ID NO: 270463 - RNA, 19 nt, Artificial Sequence
  Description of Artificial Sequence: Synthetic oligonucleotide
uggcgaccgagauccaaag

SEQ ID NO: 270464 - RNA, 19 nt, Artificial Sequence
  Description of Artificial Sequence: Synthetic oligonucleotide
gagauucgcaagccagcug

SEQ ID NO: 270465 - RNA, 19 nt, Artificial Sequence
  Description of Artificial Sequence: Synthetic oligonucleotide
uccaucagacgaggagugg

SEQ ID NO: 270466 - RNA, 19 nt, Artificial Sequence
  Description of Artificial Sequence: Synthetic oligonucleotide
ggguugacuggcuccacgg

SEQ ID NO: 270467 - RNA, 19 nt, Artificial Sequence
  Description of Artificial Sequence: Synthetic oligonucleotide
aacccaguugccagcagga

SEQ ID NO: 270468 - RNA, 19 nt, Artificial Sequence
  Description of Artificial Sequence: Synthetic oligonucleotide
uucucgagaggcucagcaa

SEQ ID NO: 270469 - RNA, 19 nt, Artificial Sequence
  Description of Artificial Sequence: Synthetic oligonucleotide
aggucagucucaaagccga

SEQ ID NO: 270470 - RNA, 19 nt, Artificial Sequence
  Description of Artificial Sequence: Synthetic oligonucleotide
acuuucucguuuugggauu

SEQ ID NO: 270471 - RNA, 19 nt, Artificial Sequence
  Description of Artificial Sequence: Synthetic oligonucleotide
gccccuugggguuaaacgc

SEQ ID NO: 270472 - RNA, 19 nt, Artificial Sequence
  Description of Artificial Sequence: Synthetic oligonucleotide
uagcgucaggaccgaaggc

SEQ ID NO: 270473 - RNA, 19 nt, Artificial Sequence
  Description of Artificial Sequence: Synthetic oligonucleotide
cacggugacugcuaaccuc

SEQ ID NO: 270474 - RNA, 19 nt, Artificial Sequence
  Description of Artificial Sequence: Synthetic oligonucleotide
cuuccuacgacggguuuug

SEQ ID NO: 270475 - RNA, 19 nt, Artificial Sequence
  Description of Artificial Sequence: Synthetic oligonucleotide
gcccacgguacauaucugg

SEQ ID NO: 270476 - RNA, 19 nt, Artificial Sequence
  Description of Artificial Sequence: Synthetic oligonucleotide
acagaacgucacaacuggg

SEQ ID NO: 270477 - RNA, 19 nt, Artificial Sequence
  Description of Artificial Sequence: Synthetic oligonucleotide
accccgauggagggguucc

SEQ ID NO: 270478 - RNA, 19 nt, Artificial Sequence
  Description of Artificial Sequence: Synthetic oligonucleotide
augcgugcggaggucaguc

SEQ ID NO: 270479 - RNA, 19 nt, Artificial Sequence
  Description of Artificial Sequence: Synthetic oligonucleotide
caaggucggaguccacgcc

SEQ ID NO: 270480 - RNA, 19 nt, Artificial Sequence
  Description of Artificial Sequence: Synthetic oligonucleotide
uggcuaggguugaacuugu

SEQ ID NO: 270481 - RNA, 19 nt, Artificial Sequence
  Description of Artificial Sequence: Synthetic oligonucleotide
gugucgaaguuuguaauaa

SEQ ID NO: 270482 - RNA, 19 nt, Artificial Sequence
  Description of Artificial Sequence: Synthetic oligonucleotide
uugggcguuucagcaaagc

SEQ ID NO: 270483 - RNA, 19 nt, Artificial Sequence
  Description of Artificial Sequence: Synthetic oligonucleotide
gauaucaccccagagucuu

SEQ ID NO: 270484 - RNA, 19 nt, Artificial Sequence
  Description of Artificial Sequence: Synthetic oligonucleotide
aggauguuucgaccacugu

SEQ ID NO: 270485 - RNA, 19 nt, Artificial Sequence
  Description of Artificial Sequence: Synthetic oligonucleotide
ggcagaguagaccacccuc

SEQ ID NO: 270486 - RNA, 19 nt, Artificial Sequence
  Description of Artificial Sequence: Synthetic oligonucleotide
cccacgguacauaucuggg

SEQ ID NO: 270487 - RNA, 19 nt, Artificial Sequence
  Description of Artificial Sequence: Synthetic oligonucleotide
uccgagggcaacgugucau

SEQ ID NO: 270488 - RNA, 19 nt, Artificial Sequence
  Description of Artificial Sequence: Synthetic oligonucleotide
acgguacauaucugggaau

SEQ ID NO: 270489 - RNA, 19 nt, Artificial Sequence
  Description of Artificial Sequence: Synthetic oligonucleotide
gcagaguagaccacccucc

SEQ ID NO: 270490 - RNA, 19 nt, Artificial Sequence
  Description of Artificial Sequence: Synthetic oligonucleotide
agaucagccggucgauuuu

SEQ ID NO: 270491 - RNA, 19 nt, Artificial Sequence
  Description of Artificial Sequence: Synthetic oligonucleotide
aggucggaguccacgccgc

SEQ ID NO: 270492 - RNA, 19 nt, Artificial Sequence
  Description of Artificial Sequence: Synthetic oligonucleotide
gaggggagccugguauagg

SEQ ID NO: 270493 - RNA, 19 nt, Artificial Sequence
  Description of Artificial Sequence: Synthetic oligonucleotide
cagaacgucacaacugggu

SEQ ID NO: 270494 - RNA, 19 nt, Artificial Sequence
  Description of Artificial Sequence: Synthetic oligonucleotide
uaaacgcuuucauccuguu

SEQ ID NO: 270495 - RNA, 19 nt, Artificial Sequence
  Description of Artificial Sequence: Synthetic oligonucleotide
ggugacugcuaaccucucc

SEQ ID NO: 270496 - RNA, 19 nt, Artificial Sequence
  Description of Artificial Sequence: Synthetic oligonucleotide
cgaaggcccagauggaacg

SEQ ID NO: 270497 - RNA, 19 nt, Artificial Sequence
  Description of Artificial Sequence: Synthetic oligonucleotide
gauucgcaagccagcugug

SEQ ID NO: 270498 - RNA, 19 nt, Artificial Sequence
  Description of Artificial Sequence: Synthetic oligonucleotide
caagggccggaaaaucuga

SEQ ID NO: 270499 - RNA, 19 nt, Artificial Sequence
  Description of Artificial Sequence: Synthetic oligonucleotide
ccaaggucggaguccacgc

SEQ ID NO: 270500 - RNA, 19 nt, Artificial Sequence
  Description of Artificial Sequence: Synthetic oligonucleotide
cacgccgccaguguaggug

SEQ ID NO: 270501 - RNA, 19 nt, Artificial Sequence
  Description of Artificial Sequence: Synthetic oligonucleotide
cuggaccacuucguucucg

SEQ ID NO: 270502 - RNA, 19 nt, Artificial Sequence
  Description of Artificial Sequence: Synthetic oligonucleotide
cgggguucaguuaugguug

SEQ ID NO: 270503 - RNA, 19 nt, Artificial Sequence
  Description of Artificial Sequence: Synthetic oligonucleotide
cgaccgagauccaaaggcg

SEQ ID NO: 270504 - RNA, 19 nt, Artificial Sequence
  Description of Artificial Sequence: Synthetic oligonucleotide
agauaucaccccagagucu

SEQ ID NO: 270505 - RNA, 19 nt, Artificial Sequence
  Description of Artificial Sequence: Synthetic oligonucleotide
aucagacgaggaguggcca

SEQ ID NO: 270506 - RNA, 19 nt, Artificial Sequence
  Description of Artificial Sequence: Synthetic oligonucleotide
accuccgagggcaacgugu

SEQ ID NO: 270507 - RNA, 19 nt, Artificial Sequence
  Description of Artificial Sequence: Synthetic oligonucleotide
gccugguauaggugcaucc

SEQ ID NO: 270508 - RNA, 19 nt, Artificial Sequence
  Description of Artificial Sequence: Synthetic oligonucleotide
ggcgaccgagauccaaagg

SEQ ID NO: 270509 - RNA, 19 nt, Artificial Sequence
  Description of Artificial Sequence: Synthetic oligonucleotide
acgccgccaguguaggugu

SEQ ID NO: 270510 - RNA, 19 nt, Artificial Sequence
  Description of Artificial Sequence: Synthetic oligonucleotide
gccaaggucggaguccacg

SEQ ID NO: 270511 - RNA, 19 nt, Artificial Sequence
  Description of Artificial Sequence: Synthetic oligonucleotide
auggccucgccaaggucgg

SEQ ID NO: 270512 - RNA, 19 nt, Artificial Sequence
  Description of Artificial Sequence: Synthetic oligonucleotide
cugagggguugacuggcuc

SEQ ID NO: 270513 - RNA, 19 nt, Artificial Sequence
  Description of Artificial Sequence: Synthetic oligonucleotide
gguuaaacgcuuucauccu

SEQ ID NO: 270514 - RNA, 19 nt, Artificial Sequence
  Description of Artificial Sequence: Synthetic oligonucleotide
agacaggccccuugggguu

SEQ ID NO: 270515 - RNA, 19 nt, Artificial Sequence
  Description of Artificial Sequence: Synthetic oligonucleotide
ggguugaacuuguaagaaa

SEQ ID NO: 270516 - RNA, 19 nt, Artificial Sequence
  Description of Artificial Sequence: Synthetic oligonucleotide
caccaaaggugucagcaua

SEQ ID NO: 270517 - RNA, 19 nt, Artificial Sequence
  Description of Artificial Sequence: Synthetic oligonucleotide
acgggcggaugacaaugcu

SEQ ID NO: 270518 - RNA, 19 nt, Artificial Sequence
  Description of Artificial Sequence: Synthetic oligonucleotide
guaccuggcgaccgagauc

SEQ ID NO: 270519 - RNA, 19 nt, Artificial Sequence
  Description of Artificial Sequence: Synthetic oligonucleotide
gcaacgugucauccacuag

SEQ ID NO: 270520 - RNA, 19 nt, Artificial Sequence
  Description of Artificial Sequence: Synthetic oligonucleotide
cuguggcuccaacgggcgg

SEQ ID NO: 270521 - RNA, 19 nt, Artificial Sequence
  Description of Artificial Sequence: Synthetic oligonucleotide
uaugcgugcggaggucagu

SEQ ID NO: 270522 - RNA, 19 nt, Artificial Sequence
  Description of Artificial Sequence: Synthetic oligonucleotide
acgacggguuuugaucaug

SEQ ID NO: 270523 - RNA, 19 nt, Artificial Sequence
  Description of Artificial Sequence: Synthetic oligonucleotide
uacgacggguuuugaucau

SEQ ID NO: 270524 - RNA, 19 nt, Artificial Sequence
  Description of Artificial Sequence: Synthetic oligonucleotide
guaugcgugcggaggucag

SEQ ID NO: 270525 - RNA, 19 nt, Artificial Sequence
  Description of Artificial Sequence: Synthetic oligonucleotide
guccacgccgccaguguag

SEQ ID NO: 270526 - RNA, 19 nt, Artificial Sequence
  Description of Artificial Sequence: Synthetic oligonucleotide
accaucggggucacaguca

SEQ ID NO: 270527 - RNA, 19 nt, Artificial Sequence
  Description of Artificial Sequence: Synthetic oligonucleotide
auugggcguuucagcaaag

SEQ ID NO: 270528 - RNA, 19 nt, Artificial Sequence
  Description of Artificial Sequence: Synthetic oligonucleotide
ggcaacgugucauccacua

SEQ ID NO: 270529 - RNA, 19 nt, Artificial Sequence
  Description of Artificial Sequence: Synthetic oligonucleotide
caacgccuucaaucagaac

SEQ ID NO: 270530 - RNA, 19 nt, Artificial Sequence
  Description of Artificial Sequence: Synthetic oligonucleotide
gugguaccuggcgaccgag

SEQ ID NO: 270531 - RNA, 19 nt, Artificial Sequence
  Description of Artificial Sequence: Synthetic oligonucleotide
ccggaucaauucaucgcag

SEQ ID NO: 270532 - RNA, 19 nt, Artificial Sequence
  Description of Artificial Sequence: Synthetic oligonucleotide
ggucgauuuuguugaugca

SEQ ID NO: 270533 - RNA, 19 nt, Artificial Sequence
  Description of Artificial Sequence: Synthetic oligonucleotide
ggugagagauggauagcuc

SEQ ID NO: 270534 - RNA, 19 nt, Artificial Sequence
  Description of Artificial Sequence: Synthetic oligonucleotide
gcauccugagucacaugcc

SEQ ID NO: 270535 - RNA, 19 nt, Artificial Sequence
  Description of Artificial Sequence: Synthetic oligonucleotide
ccucacguguuccccacug

SEQ ID NO: 270536 - RNA, 19 nt, Artificial Sequence
  Description of Artificial Sequence: Synthetic oligonucleotide
gaacuccgucaucugugcu

SEQ ID NO: 270537 - RNA, 19 nt, Artificial Sequence
  Description of Artificial Sequence: Synthetic oligonucleotide
gguaugcgugcggagguca

SEQ ID NO: 270538 - RNA, 19 nt, Artificial Sequence
  Description of Artificial Sequence: Synthetic oligonucleotide
ccgagauccaaaggcggcc

SEQ ID NO: 270539 - RNA, 19 nt, Artificial Sequence
  Description of Artificial Sequence: Synthetic oligonucleotide
acguccuguuuggcgagcu

SEQ ID NO: 270540 - RNA, 19 nt, Artificial Sequence
  Description of Artificial Sequence: Synthetic oligonucleotide
agguggaugccaagcucgu

SEQ ID NO: 270541 - RNA, 19 nt, Artificial Sequence
  Description of Artificial Sequence: Synthetic oligonucleotide
acgucacaacugggucagc

SEQ ID NO: 270542 - RNA, 19 nt, Artificial Sequence
  Description of Artificial Sequence: Synthetic oligonucleotide
uuccuacgacggguuuuga

SEQ ID NO: 270543 - RNA, 19 nt, Artificial Sequence
  Description of Artificial Sequence: Synthetic oligonucleotide
ccuggguaugcgugcggag

SEQ ID NO: 270544 - RNA, 19 nt, Artificial Sequence
  Description of Artificial Sequence: Synthetic oligonucleotide
ggaucaccaggcacgaucu

SEQ ID NO: 270545 - RNA, 19 nt, Artificial Sequence
  Description of Artificial Sequence: Synthetic oligonucleotide
aucagccggucgauuuugu

SEQ ID NO: 270546 - RNA, 19 nt, Artificial Sequence
  Description of Artificial Sequence: Synthetic oligonucleotide
gguaccuggcgaccgagau

SEQ ID NO: 270547 - RNA, 19 nt, Artificial Sequence
  Description of Artificial Sequence: Synthetic oligonucleotide
ccaaaggcggcccacggua

SEQ ID NO: 270548 - RNA, 19 nt, Artificial Sequence
  Description of Artificial Sequence: Synthetic oligonucleotide
cgguacauaucugggaauc

SEQ ID NO: 270549 - RNA, 19 nt, Artificial Sequence
  Description of Artificial Sequence: Synthetic oligonucleotide
gggcguuucagcaaagcau

SEQ ID NO: 270550 - RNA, 19 nt, Artificial Sequence
  Description of Artificial Sequence: Synthetic oligonucleotide
cagaguagaccacccuccu

SEQ ID NO: 270551 - RNA, 19 nt, Artificial Sequence
  Description of Artificial Sequence: Synthetic oligonucleotide
ggcccuggguaugcgugcg

SEQ ID NO: 270552 - RNA, 19 nt, Artificial Sequence
  Description of Artificial Sequence: Synthetic oligonucleotide
caccuccgagggcaacgug

SEQ ID NO: 270553 - RNA, 19 nt, Artificial Sequence
  Description of Artificial Sequence: Synthetic oligonucleotide
aucggcugaucaacgccuu

SEQ ID NO: 270554 - RNA, 19 nt, Artificial Sequence
  Description of Artificial Sequence: Synthetic oligonucleotide
cuccaacgggcggaugaca

SEQ ID NO: 270555 - RNA, 19 nt, Artificial Sequence
  Description of Artificial Sequence: Synthetic oligonucleotide
gaccaccccaucugagauu

SEQ ID NO: 270556 - RNA, 19 nt, Artificial Sequence
  Description of Artificial Sequence: Synthetic oligonucleotide
cgagggcaacgugucaucc

SEQ ID NO: 270557 - RNA, 19 nt, Artificial Sequence
  Description of Artificial Sequence: Synthetic oligonucleotide
cggaucaauucaucgcaga

SEQ ID NO: 270558 - RNA, 19 nt, Artificial Sequence
  Description of Artificial Sequence: Synthetic oligonucleotide
caccccgauggagggguuc

SEQ ID NO: 270559 - RNA, 19 nt, Artificial Sequence
  Description of Artificial Sequence: Synthetic oligonucleotide
auaucaccccagagucuuu

SEQ ID NO: 270560 - RNA, 19 nt, Artificial Sequence
  Description of Artificial Sequence: Synthetic oligonucleotide
ccgagggcaacgugucauc

SEQ ID NO: 270561 - RNA, 19 nt, Artificial Sequence
  Description of Artificial Sequence: Synthetic oligonucleotide
cgacggguuuugaucauga

SEQ ID NO: 270562 - RNA, 19 nt, Artificial Sequence
  Description of Artificial Sequence: Synthetic oligonucleotide
gcacaacguccuguuuggc

SEQ ID NO: 270563 - RNA, 19 nt, Artificial Sequence
  Description of Artificial Sequence: Synthetic oligonucleotide
ggaccucuacaaaguagua

SEQ ID NO: 270564 - RNA, 19 nt, Artificial Sequence
  Description of Artificial Sequence: Synthetic oligonucleotide
cacucaguacccggccaaa

SEQ ID NO: 270565 - RNA, 19 nt, Artificial Sequence
  Description of Artificial Sequence: Synthetic oligonucleotide
ccggucgauuuuguugaug

SEQ ID NO: 270566 - RNA, 19 nt, Artificial Sequence
  Description of Artificial Sequence: Synthetic oligonucleotide
ggaacacgauucacuucaa

SEQ ID NO: 270567 - RNA, 19 nt, Artificial Sequence
  Description of Artificial Sequence: Synthetic oligonucleotide
ggaccaucggggucacagu

SEQ ID NO: 270568 - RNA, 19 nt, Artificial Sequence
  Description of Artificial Sequence: Synthetic oligonucleotide
ggcccacgguacauaucug

SEQ ID NO: 270569 - RNA, 19 nt, Artificial Sequence
  Description of Artificial Sequence: Synthetic oligonucleotide
ggguaugcgugcggagguc

SEQ ID NO: 270570 - RNA, 19 nt, Artificial Sequence
  Description of Artificial Sequence: Synthetic oligonucleotide
ggcccuuccuacgacgggu

SEQ ID NO: 270571 - RNA, 19 nt, Artificial Sequence
  Description of Artificial Sequence: Synthetic oligonucleotide
gcgaaaggaucagguucuc

SEQ ID NO: 270572 - RNA, 19 nt, Artificial Sequence
  Description of Artificial Sequence: Synthetic oligonucleotide
cauugccucgggguucagu

SEQ ID NO: 270573 - RNA, 19 nt, Artificial Sequence
  Description of Artificial Sequence: Synthetic oligonucleotide
gcgcccaccuuuggagaug

SEQ ID NO: 270574 - RNA, 19 nt, Artificial Sequence
  Description of Artificial Sequence: Synthetic oligonucleotide
ggcgcccaccuuuggagau

SEQ ID NO: 270575 - RNA, 19 nt, Artificial Sequence
  Description of Artificial Sequence: Synthetic oligonucleotide
gcggcgaaaggaucagguu

SEQ ID NO: 270576 - RNA, 19 nt, Artificial Sequence
  Description of Artificial Sequence: Synthetic oligonucleotide
cggcugaucaacgccuuca

SEQ ID NO: 270577 - RNA, 19 nt, Artificial Sequence
  Description of Artificial Sequence: Synthetic oligonucleotide
cccggccaaaggcaugaaa

SEQ ID NO: 270578 - RNA, 19 nt, Artificial Sequence
  Description of Artificial Sequence: Synthetic oligonucleotide
ggaccacuucguucucgau

SEQ ID NO: 270579 - RNA, 19 nt, Artificial Sequence
  Description of Artificial Sequence: Synthetic oligonucleotide
ggguucaguuaugguugcu

SEQ ID NO: 270580 - RNA, 19 nt, Artificial Sequence
  Description of Artificial Sequence: Synthetic oligonucleotide
gcggcccacgguacauauc

SEQ ID NO: 270581 - RNA, 19 nt, Artificial Sequence
  Description of Artificial Sequence: Synthetic oligonucleotide
gggcaacgugucauccacu

SEQ ID NO: 270582 - RNA, 19 nt, Artificial Sequence
  Description of Artificial Sequence: Synthetic oligonucleotide
ggcuaggguugaacuugua

SEQ ID NO: 270583 - RNA, 19 nt, Artificial Sequence
  Description of Artificial Sequence: Synthetic oligonucleotide
ccaagaucagccggucgau

SEQ ID NO: 270584 - RNA, 19 nt, Artificial Sequence
  Description of Artificial Sequence: Synthetic oligonucleotide
ccaacgggcggaugacaau

SEQ ID NO: 270585 - RNA, 19 nt, Artificial Sequence
  Description of Artificial Sequence: Synthetic oligonucleotide
ccuugggguuaaacgcuuu

SEQ ID NO: 270586 - RNA, 19 nt, Artificial Sequence
  Description of Artificial Sequence: Synthetic oligonucleotide
gccggucgauuuuguugau

SEQ ID NO: 270587 - RNA, 19 nt, Artificial Sequence
  Description of Artificial Sequence: Synthetic oligonucleotide
cgagaggcucagcaaucau

SEQ ID NO: 270588 - RNA, 19 nt, Artificial Sequence
  Description of Artificial Sequence: Synthetic oligonucleotide
cccucacguguuccccacu

SEQ ID NO: 270589 - RNA, 19 nt, Artificial Sequence
  Description of Artificial Sequence: Synthetic oligonucleotide
cccuuccuacgacggguuu

SEQ ID NO: 270590 - RNA, 19 nt, Artificial Sequence
  Description of Artificial Sequence: Synthetic oligonucleotide
ccaccccgauggagggguu

SEQ ID NO: 270591 - RNA, 19 nt, Artificial Sequence
  Description of Artificial Sequence: Synthetic oligonucleotide
uguuaaaugagccagcugg

SEQ ID NO: 270592 - RNA, 19 nt, Artificial Sequence
  Description of Artificial Sequence: Synthetic oligonucleotide
aacaacauaccauaccucc

SEQ ID NO: 270593 - RNA, 19 nt, Artificial Sequence
  Description of Artificial Sequence: Synthetic oligonucleotide
auuacucuaagauagugac

SEQ ID NO: 270594 - RNA, 19 nt, Artificial Sequence
  Description of Artificial Sequence: Synthetic oligonucleotide
ugugcuauuggucagaagu

SEQ ID NO: 270595 - RNA, 19 nt, Artificial Sequence
  Description of Artificial Sequence: Synthetic oligonucleotide
aagauaaacgcaucagagg

SEQ ID NO: 270596 - RNA, 19 nt, Artificial Sequence
  Description of Artificial Sequence: Synthetic oligonucleotide
uuauggagaaaccacguag

SEQ ID NO: 270597 - RNA, 19 nt, Artificial Sequence
  Description of Artificial Sequence: Synthetic oligonucleotide
uuaaucuauaaaacucucg

SEQ ID NO: 270598 - RNA, 19 nt, Artificial Sequence
  Description of Artificial Sequence: Synthetic oligonucleotide
uaaucuauaaaacucucgu

SEQ ID NO: 270599 - RNA, 19 nt, Artificial Sequence
  Description of Artificial Sequence: Synthetic oligonucleotide
uuugaucuaacaauacugc

SEQ ID NO: 270600 - RNA, 19 nt, Artificial Sequence
  Description of Artificial Sequence: Synthetic oligonucleotide
uguguagcuagauaugcgg

SEQ ID NO: 270601 - RNA, 19 nt, Artificial Sequence
  Description of Artificial Sequence: Synthetic oligonucleotide
agauaaacgcaucagagga

SEQ ID NO: 270602 - RNA, 19 nt, Artificial Sequence
  Description of Artificial Sequence: Synthetic oligonucleotide
uucugcgaaacucaaauug

SEQ ID NO: 270603 - RNA, 19 nt, Artificial Sequence
  Description of Artificial Sequence: Synthetic oligonucleotide
caaacuauauagcaggccc

SEQ ID NO: 270604 - RNA, 19 nt, Artificial Sequence
  Description of Artificial Sequence: Synthetic oligonucleotide
ucugcgaaacucaaauugg

SEQ ID NO: 270605 - RNA, 19 nt, Artificial Sequence
  Description of Artificial Sequence: Synthetic oligonucleotide
ugaauaaauccuuugucca

SEQ ID NO: 270606 - RNA, 19 nt, Artificial Sequence
  Description of Artificial Sequence: Synthetic oligonucleotide
accaacgucauucugcaac

SEQ ID NO: 270607 - RNA, 19 nt, Artificial Sequence
  Description of Artificial Sequence: Synthetic oligonucleotide
ugagaguuucuuaaaacca

SEQ ID NO: 270608 - RNA, 19 nt, Artificial Sequence
  Description of Artificial Sequence: Synthetic oligonucleotide
aauauguauuacucuaaga

SEQ ID NO: 270609 - RNA, 19 nt, Artificial Sequence
  Description of Artificial Sequence: Synthetic oligonucleotide
ucgaacuuaacaaauuuau

SEQ ID NO: 270610 - RNA, 19 nt, Artificial Sequence
  Description of Artificial Sequence: Synthetic oligonucleotide
ugaacuaaccuucuuccca

SEQ ID NO: 270611 - RNA, 19 nt, Artificial Sequence
  Description of Artificial Sequence: Synthetic oligonucleotide
acuaacauacaguaagcug

SEQ ID NO: 270612 - RNA, 19 nt, Artificial Sequence
  Description of Artificial Sequence: Synthetic oligonucleotide
uguucugcgaaacucaaau

SEQ ID NO: 270613 - RNA, 19 nt, Artificial Sequence
  Description of Artificial Sequence: Synthetic oligonucleotide
uuggagaccgaccauauuc

SEQ ID NO: 270614 - RNA, 19 nt, Artificial Sequence
  Description of Artificial Sequence: Synthetic oligonucleotide
uacuccgugacaaagguuc

SEQ ID NO: 270615 - RNA, 19 nt, Artificial Sequence
  Description of Artificial Sequence: Synthetic oligonucleotide
ugacuaauugguuauccug

SEQ ID NO: 270616 - RNA, 19 nt, Artificial Sequence
  Description of Artificial Sequence: Synthetic oligonucleotide
uguccaauacuguacacac

SEQ ID NO: 270617 - RNA, 19 nt, Artificial Sequence
  Description of Artificial Sequence: Synthetic oligonucleotide
agugacuaauugguuaucc

SEQ ID NO: 270618 - RNA, 19 nt, Artificial Sequence
  Description of Artificial Sequence: Synthetic oligonucleotide
uauguauuacucuaagaua

SEQ ID NO: 270619 - RNA, 19 nt, Artificial Sequence
  Description of Artificial Sequence: Synthetic oligonucleotide
uacuuguuuauuaagucua

SEQ ID NO: 270620 - RNA, 19 nt, Artificial Sequence
  Description of Artificial Sequence: Synthetic oligonucleotide
ucuaugguuacaccgcaca

SEQ ID NO: 270621 - RNA, 19 nt, Artificial Sequence
  Description of Artificial Sequence: Synthetic oligonucleotide
gaauccucgaacuuaacaa

SEQ ID NO: 270622 - RNA, 19 nt, Artificial Sequence
  Description of Artificial Sequence: Synthetic oligonucleotide
cuagauaugcggauggcug

SEQ ID NO: 270623 - RNA, 19 nt, Artificial Sequence
  Description of Artificial Sequence: Synthetic oligonucleotide
cagguaguagguaauaaug

SEQ ID NO: 270624 - RNA, 19 nt, Artificial Sequence
  Description of Artificial Sequence: Synthetic oligonucleotide
uaggauaaguguuugcgcu

SEQ ID NO: 270625 - RNA, 19 nt, Artificial Sequence
  Description of Artificial Sequence: Synthetic oligonucleotide
acaagauaaacgcaucaga

SEQ ID NO: 270626 - RNA, 19 nt, Artificial Sequence
  Description of Artificial Sequence: Synthetic oligonucleotide
aaugccaagaauccucgaa

SEQ ID NO: 270627 - RNA, 19 nt, Artificial Sequence
  Description of Artificial Sequence: Synthetic oligonucleotide
ggugucaaaauaugcauag

SEQ ID NO: 270628 - RNA, 19 nt, Artificial Sequence
  Description of Artificial Sequence: Synthetic oligonucleotide
ugcaaccugacauuguucu

SEQ ID NO: 270629 - RNA, 19 nt, Artificial Sequence
  Description of Artificial Sequence: Synthetic oligonucleotide
uagauaugcggauggcugg

SEQ ID NO: 270630 - RNA, 19 nt, Artificial Sequence
  Description of Artificial Sequence: Synthetic oligonucleotide
gaugauaagaggggcaagc

SEQ ID NO: 270631 - RNA, 19 nt, Artificial Sequence
  Description of Artificial Sequence: Synthetic oligonucleotide
guuguacuuguuuauuaag

SEQ ID NO: 270632 - RNA, 19 nt, Artificial Sequence
  Description of Artificial Sequence: Synthetic oligonucleotide
auuaaucuauaaaacucuc

SEQ ID NO: 270633 - RNA, 19 nt, Artificial Sequence
  Description of Artificial Sequence: Synthetic oligonucleotide
acaguaagcuguaaacagc

SEQ ID NO: 270634 - RNA, 19 nt, Artificial Sequence
  Description of Artificial Sequence: Synthetic oligonucleotide
acguacacaggucauaaca

SEQ ID NO: 270635 - RNA, 19 nt, Artificial Sequence
  Description of Artificial Sequence: Synthetic oligonucleotide
uuacaccgcacauuuauac

SEQ ID NO: 270636 - RNA, 19 nt, Artificial Sequence
  Description of Artificial Sequence: Synthetic oligonucleotide
cucucuaucacacagcuaa

SEQ ID NO: 270637 - RNA, 19 nt, Artificial Sequence
  Description of Artificial Sequence: Synthetic oligonucleotide
caggccauuucaauggacg

SEQ ID NO: 270638 - RNA, 19 nt, Artificial Sequence
  Description of Artificial Sequence: Synthetic oligonucleotide
aaagcaauccccaggaaau

SEQ ID NO: 270639 - RNA, 19 nt, Artificial Sequence
  Description of Artificial Sequence: Synthetic oligonucleotide
agaauccucgaacuuaaca

SEQ ID NO: 270640 - RNA, 19 nt, Artificial Sequence
  Description of Artificial Sequence: Synthetic oligonucleotide
acuugauguacccugaaua

SEQ ID NO: 270641 - RNA, 19 nt, Artificial Sequence
  Description of Artificial Sequence: Synthetic oligonucleotide
auuugucuagguauggcgg

SEQ ID NO: 270642 - RNA, 19 nt, Artificial Sequence
  Description of Artificial Sequence: Synthetic oligonucleotide
agacauucugugcuauugg

SEQ ID NO: 270643 - RNA, 19 nt, Artificial Sequence
  Description of Artificial Sequence: Synthetic oligonucleotide
uucaagauaugagacguac

SEQ ID NO: 270644 - RNA, 19 nt, Artificial Sequence
  Description of Artificial Sequence: Synthetic oligonucleotide
uagguauauaauguaguca

SEQ ID NO: 270645 - RNA, 19 nt, Artificial Sequence
  Description of Artificial Sequence: Synthetic oligonucleotide
uaaacgcaucagaggaugg

SEQ ID NO: 270646 - RNA, 19 nt, Artificial Sequence
  Description of Artificial Sequence: Synthetic oligonucleotide
uugaucuaacaauacugcu

SEQ ID NO: 270647 - RNA, 19 nt, Artificial Sequence
  Description of Artificial Sequence: Synthetic oligonucleotide
ggaacucucuaucacacag

SEQ ID NO: 270648 - RNA, 19 nt, Artificial Sequence
  Description of Artificial Sequence: Synthetic oligonucleotide
cagaccgagaagcacaccc

SEQ ID NO: 270649 - RNA, 19 nt, Artificial Sequence
  Description of Artificial Sequence: Synthetic oligonucleotide
guaggauaaguguuugcgc

SEQ ID NO: 270650 - RNA, 19 nt, Artificial Sequence
  Description of Artificial Sequence: Synthetic oligonucleotide
uguauuacucuaagauagu

SEQ ID NO: 270651 - RNA, 19 nt, Artificial Sequence
  Description of Artificial Sequence: Synthetic oligonucleotide
cugcgaaacucaaauuggg

SEQ ID NO: 270652 - RNA, 19 nt, Artificial Sequence
  Description of Artificial Sequence: Synthetic oligonucleotide
auaaacgcaucagaggaug

SEQ ID NO: 270653 - RNA, 19 nt, Artificial Sequence
  Description of Artificial Sequence: Synthetic oligonucleotide
acgggaguuacuccgugac

SEQ ID NO: 270654 - RNA, 19 nt, Artificial Sequence
  Description of Artificial Sequence: Synthetic oligonucleotide
ucucuacacagcuuuaaau

SEQ ID NO: 270655 - RNA, 19 nt, Artificial Sequence
  Description of Artificial Sequence: Synthetic oligonucleotide
cugcuacagaaacaguugg

SEQ ID NO: 270656 - RNA, 19 nt, Artificial Sequence
  Description of Artificial Sequence: Synthetic oligonucleotide
uugaacuaaccuucuuccc

SEQ ID NO: 270657 - RNA, 19 nt, Artificial Sequence
  Description of Artificial Sequence: Synthetic oligonucleotide
aacauaccauaccuccuca

SEQ ID NO: 270658 - RNA, 19 nt, Artificial Sequence
  Description of Artificial Sequence: Synthetic oligonucleotide
gguaguagguaauaaugug

SEQ ID NO: 270659 - RNA, 19 nt, Artificial Sequence
  Description of Artificial Sequence: Synthetic oligonucleotide
gauaugagacguacacagg

SEQ ID NO: 270660 - RNA, 19 nt, Artificial Sequence
  Description of Artificial Sequence: Synthetic oligonucleotide
uuugcgcuugaugugacca

SEQ ID NO: 270661 - RNA, 19 nt, Artificial Sequence
  Description of Artificial Sequence: Synthetic oligonucleotide
gagaguuucuuaaaaccac

SEQ ID NO: 270662 - RNA, 19 nt, Artificial Sequence
  Description of Artificial Sequence: Synthetic oligonucleotide
aagauaugagacguacaca

SEQ ID NO: 270663 - RNA, 19 nt, Artificial Sequence
  Description of Artificial Sequence: Synthetic oligonucleotide
aacccuagagcuggaagag

SEQ ID NO: 270664 - RNA, 19 nt, Artificial Sequence
  Description of Artificial Sequence: Synthetic oligonucleotide
aggccauuucaauggacgg

SEQ ID NO: 270665 - RNA, 19 nt, Artificial Sequence
  Description of Artificial Sequence: Synthetic oligonucleotide
agcuacgugucucacugag

SEQ ID NO: 270666 - RNA, 19 nt, Artificial Sequence
  Description of Artificial Sequence: Synthetic oligonucleotide
acaggaacucucuaucaca

SEQ ID NO: 270667 - RNA, 19 nt, Artificial Sequence
  Description of Artificial Sequence: Synthetic oligonucleotide
uacgacuccaccauacuuu

SEQ ID NO: 270668 - RNA, 19 nt, Artificial Sequence
  Description of Artificial Sequence: Synthetic oligonucleotide
agcuugacuuuggagaccg

SEQ ID NO: 270669 - RNA, 19 nt, Artificial Sequence
  Description of Artificial Sequence: Synthetic oligonucleotide
agugaccacucaccggagc

SEQ ID NO: 270670 - RNA, 19 nt, Artificial Sequence
  Description of Artificial Sequence: Synthetic oligonucleotide
cauuaaucuauaaaacucu

SEQ ID NO: 270671 - RNA, 19 nt, Artificial Sequence
  Description of Artificial Sequence: Synthetic oligonucleotide
uggagaccgaccauauucu

SEQ ID NO: 270672 - RNA, 19 nt, Artificial Sequence
  Description of Artificial Sequence: Synthetic oligonucleotide
acguaggauaaguguuugc

SEQ ID NO: 270673 - RNA, 19 nt, Artificial Sequence
  Description of Artificial Sequence: Synthetic oligonucleotide
uuacucuaagauagugacu

SEQ ID NO: 270674 - RNA, 19 nt, Artificial Sequence
  Description of Artificial Sequence: Synthetic oligonucleotide
guauuacucuaagauagug

SEQ ID NO: 270675 - RNA, 19 nt, Artificial Sequence
  Description of Artificial Sequence: Synthetic oligonucleotide
acauaccauaccuccucac

SEQ ID NO: 270676 - RNA, 19 nt, Artificial Sequence
  Description of Artificial Sequence: Synthetic oligonucleotide
caaccugacauuguucugc

SEQ ID NO: 270677 - RNA, 19 nt, Artificial Sequence
  Description of Artificial Sequence: Synthetic oligonucleotide
uccuuaaucugcgauggcu

SEQ ID NO: 270678 - RNA, 19 nt, Artificial Sequence
  Description of Artificial Sequence: Synthetic oligonucleotide
uacaccgcacauuuauaca

SEQ ID NO: 270679 - RNA, 19 nt, Artificial Sequence
  Description of Artificial Sequence: Synthetic oligonucleotide
aagcuugacuuuggagacc

SEQ ID NO: 270680 - RNA, 19 nt, Artificial Sequence
  Description of Artificial Sequence: Synthetic oligonucleotide
gcauuaaucuauaaaacuc

SEQ ID NO: 270681 - RNA, 19 nt, Artificial Sequence
  Description of Artificial Sequence: Synthetic oligonucleotide
aaacuauauagcaggccca

SEQ ID NO: 270682 - RNA, 19 nt, Artificial Sequence
  Description of Artificial Sequence: Synthetic oligonucleotide
cacucaccggagcagaccg

SEQ ID NO: 270683 - RNA, 19 nt, Artificial Sequence
  Description of Artificial Sequence: Synthetic oligonucleotide
acagcucacggggacaucg

SEQ ID NO: 270684 - RNA, 19 nt, Artificial Sequence
  Description of Artificial Sequence: Synthetic oligonucleotide
acaccgcacauuuauacau

SEQ ID NO: 270685 - RNA, 19 nt, Artificial Sequence
  Description of Artificial Sequence: Synthetic oligonucleotide
gaguuacuccgugacaaag

SEQ ID NO: 270686 - RNA, 19 nt, Artificial Sequence
  Description of Artificial Sequence: Synthetic oligonucleotide
ugguacgacuccaccauac

SEQ ID NO: 270687 - RNA, 19 nt, Artificial Sequence
  Description of Artificial Sequence: Synthetic oligonucleotide
auuaagacauucugugcua

SEQ ID NO: 270688 - RNA, 19 nt, Artificial Sequence
  Description of Artificial Sequence: Synthetic oligonucleotide
ugaacccugaccccuuagu

SEQ ID NO: 270689 - RNA, 19 nt, Artificial Sequence
  Description of Artificial Sequence: Synthetic oligonucleotide
auuauccuuucguccuccg

SEQ ID NO: 270690 - RNA, 19 nt, Artificial Sequence
  Description of Artificial Sequence: Synthetic oligonucleotide
gaguuaggccacagaaugg

SEQ ID NO: 270691 - RNA, 19 nt, Artificial Sequence
  Description of Artificial Sequence: Synthetic oligonucleotide
cucacggggacaucgcagc

SEQ ID NO: 270692 - RNA, 19 nt, Artificial Sequence
  Description of Artificial Sequence: Synthetic oligonucleotide
uuuuaggacuugggguacg

SEQ ID NO: 270693 - RNA, 19 nt, Artificial Sequence
  Description of Artificial Sequence: Synthetic oligonucleotide
uggcuuguuaaaugagcca

SEQ ID NO: 270694 - RNA, 19 nt, Artificial Sequence
  Description of Artificial Sequence: Synthetic oligonucleotide
ugcgcaucuguacaagaua

SEQ ID NO: 270695 - RNA, 19 nt, Artificial Sequence
  Description of Artificial Sequence: Synthetic oligonucleotide
ggguacgggaguuacuccg

SEQ ID NO: 270696 - RNA, 19 nt, Artificial Sequence
  Description of Artificial Sequence: Synthetic oligonucleotide
cuugacuuuggagaccgac

SEQ ID NO: 270697 - RNA, 19 nt, Artificial Sequence
  Description of Artificial Sequence: Synthetic oligonucleotide
aauggugggagcggccgag

SEQ ID NO: 270698 - RNA, 19 nt, Artificial Sequence
  Description of Artificial Sequence: Synthetic oligonucleotide
gagaccgaccauauucugc

SEQ ID NO: 270699 - RNA, 19 nt, Artificial Sequence
  Description of Artificial Sequence: Synthetic oligonucleotide
aaacgcaucagaggaugga

SEQ ID NO: 270700 - RNA, 19 nt, Artificial Sequence
  Description of Artificial Sequence: Synthetic oligonucleotide
uuaaaugagccagcugguc

SEQ ID NO: 270701 - RNA, 19 nt, Artificial Sequence
  Description of Artificial Sequence: Synthetic oligonucleotide
acccugaccccuuaguuau

SEQ ID NO: 270702 - RNA, 19 nt, Artificial Sequence
  Description of Artificial Sequence: Synthetic oligonucleotide
gccauuucaauggacgggg

SEQ ID NO: 270703 - RNA, 19 nt, Artificial Sequence
  Description of Artificial Sequence: Synthetic oligonucleotide
aacgcaucagaggauggaa

SEQ ID NO: 270704 - RNA, 19 nt, Artificial Sequence
  Description of Artificial Sequence: Synthetic oligonucleotide
agcuagauaugcggauggc

SEQ ID NO: 270705 - RNA, 19 nt, Artificial Sequence
  Description of Artificial Sequence: Synthetic oligonucleotide
gaccccuuaguuauggaga

SEQ ID NO: 270706 - RNA, 19 nt, Artificial Sequence
  Description of Artificial Sequence: Synthetic oligonucleotide
cacguaacuucuucugcug

SEQ ID NO: 270707 - RNA, 19 nt, Artificial Sequence
  Description of Artificial Sequence: Synthetic oligonucleotide
accacccgcguccauuuuc

SEQ ID NO: 270708 - RNA, 19 nt, Artificial Sequence
  Description of Artificial Sequence: Synthetic oligonucleotide
auaaaacucucguccccga

SEQ ID NO: 270709 - RNA, 19 nt, Artificial Sequence
  Description of Artificial Sequence: Synthetic oligonucleotide
ugagacguacacaggucau

SEQ ID NO: 270710 - RNA, 19 nt, Artificial Sequence
  Description of Artificial Sequence: Synthetic oligonucleotide
uccucgaacuuaacaaauu

SEQ ID NO: 270711 - RNA, 19 nt, Artificial Sequence
  Description of Artificial Sequence: Synthetic oligonucleotide
cauaccauaccuccucaca

SEQ ID NO: 270712 - RNA, 19 nt, Artificial Sequence
  Description of Artificial Sequence: Synthetic oligonucleotide
uuucaagauaugagacgua

SEQ ID NO: 270713 - RNA, 19 nt, Artificial Sequence
  Description of Artificial Sequence: Synthetic oligonucleotide
gacaucgcagcauugcccu

SEQ ID NO: 270714 - RNA, 19 nt, Artificial Sequence
  Description of Artificial Sequence: Synthetic oligonucleotide
ggaacgucguauuugaagu

SEQ ID NO: 270715 - RNA, 19 nt, Artificial Sequence
  Description of Artificial Sequence: Synthetic oligonucleotide
uaugguuacaccgcacauu

SEQ ID NO: 270716 - RNA, 19 nt, Artificial Sequence
  Description of Artificial Sequence: Synthetic oligonucleotide
cguaggauaaguguuugcg

SEQ ID NO: 270717 - RNA, 19 nt, Artificial Sequence
  Description of Artificial Sequence: Synthetic oligonucleotide
ugagugagaccuccuuaau

SEQ ID NO: 270718 - RNA, 19 nt, Artificial Sequence
  Description of Artificial Sequence: Synthetic oligonucleotide
cacagacggcugcacaggg

SEQ ID NO: 270719 - RNA, 19 nt, Artificial Sequence
  Description of Artificial Sequence: Synthetic oligonucleotide
gaaacaguuggggugucaa

SEQ ID NO: 270720 - RNA, 19 nt, Artificial Sequence
  Description of Artificial Sequence: Synthetic oligonucleotide
aguaagcuguaaacagcuc

SEQ ID NO: 270721 - RNA, 19 nt, Artificial Sequence
  Description of Artificial Sequence: Synthetic oligonucleotide
cuguacaagauaaacgcau

SEQ ID NO: 270722 - RNA, 19 nt, Artificial Sequence
  Description of Artificial Sequence: Synthetic oligonucleotide
agcagaccgagaagcacac

SEQ ID NO: 270723 - RNA, 19 nt, Artificial Sequence
  Description of Artificial Sequence: Synthetic oligonucleotide
accccuuaguuauggagaa

SEQ ID NO: 270724 - RNA, 19 nt, Artificial Sequence
  Description of Artificial Sequence: Synthetic oligonucleotide
gaagcccuguguguguagc

SEQ ID NO: 270725 - RNA, 19 nt, Artificial Sequence
  Description of Artificial Sequence: Synthetic oligonucleotide
cugagugagaccuccuuaa

SEQ ID NO: 270726 - RNA, 19 nt, Artificial Sequence
  Description of Artificial Sequence: Synthetic oligonucleotide
uuucguccuccgcugguaa

SEQ ID NO: 270727 - RNA, 19 nt, Artificial Sequence
  Description of Artificial Sequence: Synthetic oligonucleotide
cuuuuaggacuugggguac

SEQ ID NO: 270728 - RNA, 19 nt, Artificial Sequence
  Description of Artificial Sequence: Synthetic oligonucleotide
uacgggaguuacuccguga

SEQ ID NO: 270729 - RNA, 19 nt, Artificial Sequence
  Description of Artificial Sequence: Synthetic oligonucleotide
gcuuuuaggacuuggggua

SEQ ID NO: 270730 - RNA, 19 nt, Artificial Sequence
  Description of Artificial Sequence: Synthetic oligonucleotide
gugaccucuggcauuaaga

SEQ ID NO: 270731 - RNA, 19 nt, Artificial Sequence
  Description of Artificial Sequence: Synthetic oligonucleotide
agacguacacaggucauaa

SEQ ID NO: 270732 - RNA, 19 nt, Artificial Sequence
  Description of Artificial Sequence: Synthetic oligonucleotide
gaacuaaccuucuucccau

SEQ ID NO: 270733 - RNA, 19 nt, Artificial Sequence
  Description of Artificial Sequence: Synthetic oligonucleotide
uacgugucucacugagucu

SEQ ID NO: 270734 - RNA, 19 nt, Artificial Sequence
  Description of Artificial Sequence: Synthetic oligonucleotide
guuauggagaaaccacgua

SEQ ID NO: 270735 - RNA, 19 nt, Artificial Sequence
  Description of Artificial Sequence: Synthetic oligonucleotide
aggauaaguguuugcgcuu

SEQ ID NO: 270736 - RNA, 19 nt, Artificial Sequence
  Description of Artificial Sequence: Synthetic oligonucleotide
ucucuaucacacagcuaau

SEQ ID NO: 270737 - RNA, 19 nt, Artificial Sequence
  Description of Artificial Sequence: Synthetic oligonucleotide
gacguacacaggucauaac

SEQ ID NO: 270738 - RNA, 19 nt, Artificial Sequence
  Description of Artificial Sequence: Synthetic oligonucleotide
ugucuagguauggcggucu

SEQ ID NO: 270739 - RNA, 19 nt, Artificial Sequence
  Description of Artificial Sequence: Synthetic oligonucleotide
accacguaggauaaguguu

SEQ ID NO: 270740 - RNA, 19 nt, Artificial Sequence
  Description of Artificial Sequence: Synthetic oligonucleotide
ccgaccauauucugcaaag

SEQ ID NO: 270741 - RNA, 19 nt, Artificial Sequence
  Description of Artificial Sequence: Synthetic oligonucleotide
uggaagugcagaucccauu

SEQ ID NO: 270742 - RNA, 19 nt, Artificial Sequence
  Description of Artificial Sequence: Synthetic oligonucleotide
gauaaguguuugcgcuuga

SEQ ID NO: 270743 - RNA, 19 nt, Artificial Sequence
  Description of Artificial Sequence: Synthetic oligonucleotide
caagacgguacaggccugg

SEQ ID NO: 270744 - RNA, 19 nt, Artificial Sequence
  Description of Artificial Sequence: Synthetic oligonucleotide
uuacuccgugacaaagguu

SEQ ID NO: 270745 - RNA, 19 nt, Artificial Sequence
  Description of Artificial Sequence: Synthetic oligonucleotide
uuuggagaccgaccauauu

SEQ ID NO: 270746 - RNA, 19 nt, Artificial Sequence
  Description of Artificial Sequence: Synthetic oligonucleotide
cacguaggauaaguguuug

SEQ ID NO: 270747 - RNA, 19 nt, Artificial Sequence
  Description of Artificial Sequence: Synthetic oligonucleotide
cacagucggccucauccag

SEQ ID NO: 270748 - RNA, 19 nt, Artificial Sequence
  Description of Artificial Sequence: Synthetic oligonucleotide
uugcgcuugaugugaccac

SEQ ID NO: 270749 - RNA, 19 nt, Artificial Sequence
  Description of Artificial Sequence: Synthetic oligonucleotide
gagaaaccacguaggauaa

SEQ ID NO: 270750 - RNA, 19 nt, Artificial Sequence
  Description of Artificial Sequence: Synthetic oligonucleotide
aagcuacgugucucacuga

SEQ ID NO: 270751 - RNA, 19 nt, Artificial Sequence
  Description of Artificial Sequence: Synthetic oligonucleotide
ucuagguauggcggucucu

SEQ ID NO: 270752 - RNA, 19 nt, Artificial Sequence
  Description of Artificial Sequence: Synthetic oligonucleotide
cugcaaccugacauuguuc

SEQ ID NO: 270753 - RNA, 19 nt, Artificial Sequence
  Description of Artificial Sequence: Synthetic oligonucleotide
gguguaaguggaggugugg

SEQ ID NO: 270754 - RNA, 19 nt, Artificial Sequence
  Description of Artificial Sequence: Synthetic oligonucleotide
acgucguauuugaagucag

SEQ ID NO: 270755 - RNA, 19 nt, Artificial Sequence
  Description of Artificial Sequence: Synthetic oligonucleotide
gcuucgccuaccaggaacg

SEQ ID NO: 270756 - RNA, 19 nt, Artificial Sequence
  Description of Artificial Sequence: Synthetic oligonucleotide
guguaaguggaggugugga

SEQ ID NO: 270757 - RNA, 19 nt, Artificial Sequence
  Description of Artificial Sequence: Synthetic oligonucleotide
gguuacaccgcacauuuau

SEQ ID NO: 270758 - RNA, 19 nt, Artificial Sequence
  Description of Artificial Sequence: Synthetic oligonucleotide
guguagcuagauaugcgga

SEQ ID NO: 270759 - RNA, 19 nt, Artificial Sequence
  Description of Artificial Sequence: Synthetic oligonucleotide
guacgggaguuacuccgug

SEQ ID NO: 270760 - RNA, 19 nt, Artificial Sequence
  Description of Artificial Sequence: Synthetic oligonucleotide
uaccaggaacgucguauuu

SEQ ID NO: 270761 - RNA, 19 nt, Artificial Sequence
  Description of Artificial Sequence: Synthetic oligonucleotide
agaaaccacguaggauaag

SEQ ID NO: 270762 - RNA, 19 nt, Artificial Sequence
  Description of Artificial Sequence: Synthetic oligonucleotide
acaucgcagcauugcccuc

SEQ ID NO: 270763 - RNA, 19 nt, Artificial Sequence
  Description of Artificial Sequence: Synthetic oligonucleotide
auaaguguuugcgcuugau

SEQ ID NO: 270764 - RNA, 19 nt, Artificial Sequence
  Description of Artificial Sequence: Synthetic oligonucleotide
gggaguuacuccgugacaa

SEQ ID NO: 270765 - RNA, 19 nt, Artificial Sequence
  Description of Artificial Sequence: Synthetic oligonucleotide
ggucuaugguuacaccgca

SEQ ID NO: 270766 - RNA, 19 nt, Artificial Sequence
  Description of Artificial Sequence: Synthetic oligonucleotide
ggagaccgaccauauucug

SEQ ID NO: 270767 - RNA, 19 nt, Artificial Sequence
  Description of Artificial Sequence: Synthetic oligonucleotide
gacuugauguacccugaau

SEQ ID NO: 270768 - RNA, 19 nt, Artificial Sequence
  Description of Artificial Sequence: Synthetic oligonucleotide
aucgcagcauugcccucug

SEQ ID NO: 270769 - RNA, 19 nt, Artificial Sequence
  Description of Artificial Sequence: Synthetic oligonucleotide
gauaaacgcaucagaggau

SEQ ID NO: 270770 - RNA, 19 nt, Artificial Sequence
  Description of Artificial Sequence: Synthetic oligonucleotide
ucaccggagcagaccgaga

SEQ ID NO: 270771 - RNA, 19 nt, Artificial Sequence
  Description of Artificial Sequence: Synthetic oligonucleotide
uucgccuaccaggaacguc

SEQ ID NO: 270772 - RNA, 19 nt, Artificial Sequence
  Description of Artificial Sequence: Synthetic oligonucleotide
uauggcggucucucaggua

SEQ ID NO: 270773 - RNA, 19 nt, Artificial Sequence
  Description of Artificial Sequence: Synthetic oligonucleotide
uaagaggggcaagcuugac

SEQ ID NO: 270774 - RNA, 19 nt, Artificial Sequence
  Description of Artificial Sequence: Synthetic oligonucleotide
cagcucacggggacaucgc

SEQ ID NO: 270775 - RNA, 19 nt, Artificial Sequence
  Description of Artificial Sequence: Synthetic oligonucleotide
ccugaccccuuaguuaugg

SEQ ID NO: 270776 - RNA, 19 nt, Artificial Sequence
  Description of Artificial Sequence: Synthetic oligonucleotide
ccaggaacgucguauuuga

SEQ ID NO: 270777 - RNA, 19 nt, Artificial Sequence
  Description of Artificial Sequence: Synthetic oligonucleotide
gcaaccugacauuguucug

SEQ ID NO: 270778 - RNA, 19 nt, Artificial Sequence
  Description of Artificial Sequence: Synthetic oligonucleotide
ugguuucagcaagacggua

SEQ ID NO: 270779 - RNA, 19 nt, Artificial Sequence
  Description of Artificial Sequence: Synthetic oligonucleotide
aagcuucgccuaccaggaa

SEQ ID NO: 270780 - RNA, 19 nt, Artificial Sequence
  Description of Artificial Sequence: Synthetic oligonucleotide
ugguuacaccgcacauuua

SEQ ID NO: 270781 - RNA, 19 nt, Artificial Sequence
  Description of Artificial Sequence: Synthetic oligonucleotide
cgcacauuuauacauaggu

SEQ ID NO: 270782 - RNA, 19 nt, Artificial Sequence
  Description of Artificial Sequence: Synthetic oligonucleotide
gucuaugguuacaccgcac

SEQ ID NO: 270783 - RNA, 19 nt, Artificial Sequence
  Description of Artificial Sequence: Synthetic oligonucleotide
guuacaccgcacauuuaua

SEQ ID NO: 270784 - RNA, 19 nt, Artificial Sequence
  Description of Artificial Sequence: Synthetic oligonucleotide
gcauguuuuaaccuucauu

SEQ ID NO: 270785 - RNA, 19 nt, Artificial Sequence
  Description of Artificial Sequence: Synthetic oligonucleotide
cugaagugaccucuggcau

SEQ ID NO: 270786 - RNA, 19 nt, Artificial Sequence
  Description of Artificial Sequence: Synthetic oligonucleotide
caaagcuacgugucucacu

SEQ ID NO: 270787 - RNA, 19 nt, Artificial Sequence
  Description of Artificial Sequence: Synthetic oligonucleotide
cuuaaucugcgauggcuuu

SEQ ID NO: 270788 - RNA, 19 nt, Artificial Sequence
  Description of Artificial Sequence: Synthetic oligonucleotide
accugacauuguucugcga

SEQ ID NO: 270789 - RNA, 19 nt, Artificial Sequence
  Description of Artificial Sequence: Synthetic oligonucleotide
acgcaucagaggauggaaa

SEQ ID NO: 270790 - RNA, 19 nt, Artificial Sequence
  Description of Artificial Sequence: Synthetic oligonucleotide
uggcggucucucagguagu

SEQ ID NO: 270791 - RNA, 19 nt, Artificial Sequence
  Description of Artificial Sequence: Synthetic oligonucleotide
gucuagguauggcggucuc

SEQ ID NO: 270792 - RNA, 19 nt, Artificial Sequence
  Description of Artificial Sequence: Synthetic oligonucleotide
gugucugagcuggucagaa

SEQ ID NO: 270793 - RNA, 19 nt, Artificial Sequence
  Description of Artificial Sequence: Synthetic oligonucleotide
gcgcaucuguacaagauaa

SEQ ID NO: 270794 - RNA, 19 nt, Artificial Sequence
  Description of Artificial Sequence: Synthetic oligonucleotide
acuccgugacaaagguucu

SEQ ID NO: 270795 - RNA, 19 nt, Artificial Sequence
  Description of Artificial Sequence: Synthetic oligonucleotide
guacgacuccaccauacuu

SEQ ID NO: 270796 - RNA, 19 nt, Artificial Sequence
  Description of Artificial Sequence: Synthetic oligonucleotide
ggaacaguguggaaguuau

SEQ ID NO: 270797 - RNA, 19 nt, Artificial Sequence
  Description of Artificial Sequence: Synthetic oligonucleotide
gguuuggaucuggaacagc

SEQ ID NO: 270798 - RNA, 19 nt, Artificial Sequence
  Description of Artificial Sequence: Synthetic oligonucleotide
gcucacggggacaucgcag

SEQ ID NO: 270799 - RNA, 19 nt, Artificial Sequence
  Description of Artificial Sequence: Synthetic oligonucleotide
ccagccugacuugauguac

SEQ ID NO: 270800 - RNA, 19 nt, Artificial Sequence
  Description of Artificial Sequence: Synthetic oligonucleotide
guucugcgaaacucaaauu

SEQ ID NO: 270801 - RNA, 19 nt, Artificial Sequence
  Description of Artificial Sequence: Synthetic oligonucleotide
ggaguuacuccgugacaaa

SEQ ID NO: 270802 - RNA, 19 nt, Artificial Sequence
  Description of Artificial Sequence: Synthetic oligonucleotide
gggugucaaaauaugcaua

SEQ ID NO: 270803 - RNA, 19 nt, Artificial Sequence
  Description of Artificial Sequence: Synthetic oligonucleotide
agccccgaucacagacggc

SEQ ID NO: 270804 - RNA, 19 nt, Artificial Sequence
  Description of Artificial Sequence: Synthetic oligonucleotide
gaccgaccauauucugcaa

SEQ ID NO: 270805 - RNA, 19 nt, Artificial Sequence
  Description of Artificial Sequence: Synthetic oligonucleotide
gcugguacgacuccaccau

SEQ ID NO: 270806 - RNA, 19 nt, Artificial Sequence
  Description of Artificial Sequence: Synthetic oligonucleotide
cagacccuucgcugcucug

SEQ ID NO: 270807 - RNA, 19 nt, Artificial Sequence
  Description of Artificial Sequence: Synthetic oligonucleotide
gcuagauaugcggauggcu

SEQ ID NO: 270808 - RNA, 19 nt, Artificial Sequence
  Description of Artificial Sequence: Synthetic oligonucleotide
gcaaagcuacgugucucac

SEQ ID NO: 270809 - RNA, 19 nt, Artificial Sequence
  Description of Artificial Sequence: Synthetic oligonucleotide
gguacgacuccaccauacu

SEQ ID NO: 270810 - RNA, 19 nt, Artificial Sequence
  Description of Artificial Sequence: Synthetic oligonucleotide
cuaccaggaacgucguauu

SEQ ID NO: 270811 - RNA, 19 nt, Artificial Sequence
  Description of Artificial Sequence: Synthetic oligonucleotide
caggaacgucguauuugaa

SEQ ID NO: 270812 - RNA, 19 nt, Artificial Sequence
  Description of Artificial Sequence: Synthetic oligonucleotide
cacacaaccugauccucuu

SEQ ID NO: 270813 - RNA, 19 nt, Artificial Sequence
  Description of Artificial Sequence: Synthetic oligonucleotide
ccacguaacuucuucugcu

SEQ ID NO: 270814 - RNA, 19 nt, Artificial Sequence
  Description of Artificial Sequence: Synthetic oligonucleotide
gugcgcaucuguacaagau

SEQ ID NO: 270815 - RNA, 19 nt, Artificial Sequence
  Description of Artificial Sequence: Synthetic oligonucleotide
ccuuaaucugcgauggcuu

SEQ ID NO: 270816 - RNA, 19 nt, Artificial Sequence
  Description of Artificial Sequence: Synthetic oligonucleotide
ccacccgcguccauuuuca

SEQ ID NO: 270817 - RNA, 19 nt, Artificial Sequence
  Description of Artificial Sequence: Synthetic oligonucleotide
acucaccggagcagaccga

SEQ ID NO: 270818 - RNA, 19 nt, Artificial Sequence
  Description of Artificial Sequence: Synthetic oligonucleotide
gccgagagccccgaucaca

SEQ ID NO: 270819 - RNA, 19 nt, Artificial Sequence
  Description of Artificial Sequence: Synthetic oligonucleotide
ccacggaagcuucgccuac

SEQ ID NO: 270820 - RNA, 19 nt, Artificial Sequence
  Description of Artificial Sequence: Synthetic oligonucleotide
gcaagacgguacaggccug

SEQ ID NO: 270821 - RNA, 19 nt, Artificial Sequence
  Description of Artificial Sequence: Synthetic oligonucleotide
ccccgacacugauggcugg

SEQ ID NO: 270822 - RNA, 19 nt, Artificial Sequence
  Description of Artificial Sequence: Synthetic oligonucleotide
gguacgggaguuacuccgu

SEQ ID NO: 270823 - RNA, 19 nt, Artificial Sequence
  Description of Artificial Sequence: Synthetic oligonucleotide
gcagaccgagaagcacacc

SEQ ID NO: 270824 - RNA, 19 nt, Artificial Sequence
  Description of Artificial Sequence: Synthetic oligonucleotide
cgucguauuugaagucaga

SEQ ID NO: 270825 - RNA, 19 nt, Artificial Sequence
  Description of Artificial Sequence: Synthetic oligonucleotide
ccacguaggauaaguguuu

SEQ ID NO: 270826 - RNA, 19 nt, Artificial Sequence
  Description of Artificial Sequence: Synthetic oligonucleotide
ggccgagagccccgaucac

SEQ ID NO: 270827 - RNA, 19 nt, Artificial Sequence
  Description of Artificial Sequence: Synthetic oligonucleotide
agcggccgagagccccgau

SEQ ID NO: 270828 - RNA, 19 nt, Artificial Sequence
  Description of Artificial Sequence: Synthetic oligonucleotide
cuucgccuaccaggaacgu

SEQ ID NO: 270829 - RNA, 19 nt, Artificial Sequence
  Description of Artificial Sequence: Synthetic oligonucleotide
cgggaguuacuccgugaca

SEQ ID NO: 270830 - RNA, 19 nt, Artificial Sequence
  Description of Artificial Sequence: Synthetic oligonucleotide
gccuaccaggaacgucgua

SEQ ID NO: 270831 - RNA, 19 nt, Artificial Sequence
  Description of Artificial Sequence: Synthetic oligonucleotide
ccgacacugauggcuggua

SEQ ID NO: 270832 - RNA, 19 nt, Artificial Sequence
  Description of Artificial Sequence: Synthetic oligonucleotide
ccccuuaguuauggagaaa

SEQ ID NO: 270833 - RNA, 19 nt, Artificial Sequence
  Description of Artificial Sequence: Synthetic oligonucleotide
ggcuggccuaggagguaua

SEQ ID NO: 270834 - RNA, 19 nt, Artificial Sequence
  Description of Artificial Sequence: Synthetic oligonucleotide
ccucuggcauuaagacauu

SEQ ID NO: 270835 - RNA, 19 nt, Artificial Sequence
  Description of Artificial Sequence: Synthetic oligonucleotide
agugauaauacugauaacc

SEQ ID NO: 270836 - RNA, 19 nt, Artificial Sequence
  Description of Artificial Sequence: Synthetic oligonucleotide
aguauuauacacuacacug

SEQ ID NO: 270837 - RNA, 19 nt, Artificial Sequence
  Description of Artificial Sequence: Synthetic oligonucleotide
aaaaguacgugucaguaag

SEQ ID NO: 270838 - RNA, 19 nt, Artificial Sequence
  Description of Artificial Sequence: Synthetic oligonucleotide
ucuauaaacuaaaagaaau

SEQ ID NO: 270839 - RNA, 19 nt, Artificial Sequence
  Description of Artificial Sequence: Synthetic oligonucleotide
ucaguugugagcauuaccc

SEQ ID NO: 270840 - RNA, 19 nt, Artificial Sequence
  Description of Artificial Sequence: Synthetic oligonucleotide
uguaaaacuaauacauucc

SEQ ID NO: 270841 - RNA, 19 nt, Artificial Sequence
  Description of Artificial Sequence: Synthetic oligonucleotide
gauuaaguaguuuagagaa

SEQ ID NO: 270842 - RNA, 19 nt, Artificial Sequence
  Description of Artificial Sequence: Synthetic oligonucleotide
aaaaugaccaugguguaac

SEQ ID NO: 270843 - RNA, 19 nt, Artificial Sequence
  Description of Artificial Sequence: Synthetic oligonucleotide
gauguuuguguuuaaacgc

SEQ ID NO: 270844 - RNA, 19 nt, Artificial Sequence
  Description of Artificial Sequence: Synthetic oligonucleotide
aaauaauacugauagguaa

SEQ ID NO: 270845 - RNA, 19 nt, Artificial Sequence
  Description of Artificial Sequence: Synthetic oligonucleotide
aaucuuaucaacuuuccaa

SEQ ID NO: 270846 - RNA, 19 nt, Artificial Sequence
  Description of Artificial Sequence: Synthetic oligonucleotide
uuuccaaugaaaagcgugg

SEQ ID NO: 270847 - RNA, 19 nt, Artificial Sequence
  Description of Artificial Sequence: Synthetic oligonucleotide
aauggguuauggcugggcc

SEQ ID NO: 270848 - RNA, 19 nt, Artificial Sequence
  Description of Artificial Sequence: Synthetic oligonucleotide
aucaacguaaaaugaauac

SEQ ID NO: 270849 - RNA, 19 nt, Artificial Sequence
  Description of Artificial Sequence: Synthetic oligonucleotide
uucauuaccaaguagaauu

SEQ ID NO: 270850 - RNA, 19 nt, Artificial Sequence
  Description of Artificial Sequence: Synthetic oligonucleotide
uccguaauaacuaacauuu

SEQ ID NO: 270851 - RNA, 19 nt, Artificial Sequence
  Description of Artificial Sequence: Synthetic oligonucleotide
aaaagcguggguaauauag

SEQ ID NO: 270852 - RNA, 19 nt, Artificial Sequence
  Description of Artificial Sequence: Synthetic oligonucleotide
uauuuuaggccacacacug

SEQ ID NO: 270853 - RNA, 19 nt, Artificial Sequence
  Description of Artificial Sequence: Synthetic oligonucleotide
uuaagaaugaaccaacgua

SEQ ID NO: 270854 - RNA, 19 nt, Artificial Sequence
  Description of Artificial Sequence: Synthetic oligonucleotide
ucuagaaggacuccuaggc

SEQ ID NO: 270855 - RNA, 19 nt, Artificial Sequence
  Description of Artificial Sequence: Synthetic oligonucleotide
guuauuuuaggccacacac

SEQ ID NO: 270856 - RNA, 19 nt, Artificial Sequence
  Description of Artificial Sequence: Synthetic oligonucleotide
uaagaaugaaccaacguaa

SEQ ID NO: 270857 - RNA, 19 nt, Artificial Sequence
  Description of Artificial Sequence: Synthetic oligonucleotide
aguaguuuagagaauuucc

SEQ ID NO: 270858 - RNA, 19 nt, Artificial Sequence
  Description of Artificial Sequence: Synthetic oligonucleotide
guacgugucaguaagaagg

SEQ ID NO: 270859 - RNA, 19 nt, Artificial Sequence
  Description of Artificial Sequence: Synthetic oligonucleotide
auagauccuucauaguugc

SEQ ID NO: 270860 - RNA, 19 nt, Artificial Sequence
  Description of Artificial Sequence: Synthetic oligonucleotide
ugcucuacagcccaaggcg

SEQ ID NO: 270861 - RNA, 19 nt, Artificial Sequence
  Description of Artificial Sequence: Synthetic oligonucleotide
agucaaucaacguaaaaug

SEQ ID NO: 270862 - RNA, 19 nt, Artificial Sequence
  Description of Artificial Sequence: Synthetic oligonucleotide
acuuacagcacacaggucu

SEQ ID NO: 270863 - RNA, 19 nt, Artificial Sequence
  Description of Artificial Sequence: Synthetic oligonucleotide
auaauacugauaaccaugc

SEQ ID NO: 270864 - RNA, 19 nt, Artificial Sequence
  Description of Artificial Sequence: Synthetic oligonucleotide
aacguaagagugauaauac

SEQ ID NO: 270865 - RNA, 19 nt, Artificial Sequence
  Description of Artificial Sequence: Synthetic oligonucleotide
uauagauccuucauaguug

SEQ ID NO: 270866 - RNA, 19 nt, Artificial Sequence
  Description of Artificial Sequence: Synthetic oligonucleotide
aaaucagcuaauguuguuc

SEQ ID NO: 270867 - RNA, 19 nt, Artificial Sequence
  Description of Artificial Sequence: Synthetic oligonucleotide
guaacagguagucagcacg

SEQ ID NO: 270868 - RNA, 19 nt, Artificial Sequence
  Description of Artificial Sequence: Synthetic oligonucleotide
uuguucaucaacugggucc

SEQ ID NO: 270869 - RNA, 19 nt, Artificial Sequence
  Description of Artificial Sequence: Synthetic oligonucleotide
aaaugccaauggcuuaucc

SEQ ID NO: 270870 - RNA, 19 nt, Artificial Sequence
  Description of Artificial Sequence: Synthetic oligonucleotide
cuaugagucacacagugag

SEQ ID NO: 270871 - RNA, 19 nt, Artificial Sequence
  Description of Artificial Sequence: Synthetic oligonucleotide
uaugagaugccccagugcu

SEQ ID NO: 270872 - RNA, 19 nt, Artificial Sequence
  Description of Artificial Sequence: Synthetic oligonucleotide
aauacugaagcggauuuag

SEQ ID NO: 270873 - RNA, 19 nt, Artificial Sequence
  Description of Artificial Sequence: Synthetic oligonucleotide
auaaccaugccagaugccc

SEQ ID NO: 270874 - RNA, 19 nt, Artificial Sequence
  Description of Artificial Sequence: Synthetic oligonucleotide
cauacauggauacaggaac

SEQ ID NO: 270875 - RNA, 19 nt, Artificial Sequence
  Description of Artificial Sequence: Synthetic oligonucleotide
uuucuauucugcuucaugu

SEQ ID NO: 270876 - RNA, 19 nt, Artificial Sequence
  Description of Artificial Sequence: Synthetic oligonucleotide
caacguaaaaugaauacug

SEQ ID NO: 270877 - RNA, 19 nt, Artificial Sequence
  Description of Artificial Sequence: Synthetic oligonucleotide
ugaccaugguguaacaagg

SEQ ID NO: 270878 - RNA, 19 nt, Artificial Sequence
  Description of Artificial Sequence: Synthetic oligonucleotide
aacgacaaccuuugaacuc

SEQ ID NO: 270879 - RNA, 19 nt, Artificial Sequence
  Description of Artificial Sequence: Synthetic oligonucleotide
aaauuucucccauuguaca

SEQ ID NO: 270880 - RNA, 19 nt, Artificial Sequence
  Description of Artificial Sequence: Synthetic oligonucleotide
gauucugccgacucugucg

SEQ ID NO: 270881 - RNA, 19 nt, Artificial Sequence
  Description of Artificial Sequence: Synthetic oligonucleotide
uuauccaugucugacacgc

SEQ ID NO: 270882 - RNA, 19 nt, Artificial Sequence
  Description of Artificial Sequence: Synthetic oligonucleotide
caacgcuuccuauagaucc

SEQ ID NO: 270883 - RNA, 19 nt, Artificial Sequence
  Description of Artificial Sequence: Synthetic oligonucleotide
uaaaucuuaucaacuuucc

SEQ ID NO: 270884 - RNA, 19 nt, Artificial Sequence
  Description of Artificial Sequence: Synthetic oligonucleotide
agaguguaaucgcaugugc

SEQ ID NO: 270885 - RNA, 19 nt, Artificial Sequence
  Description of Artificial Sequence: Synthetic oligonucleotide
aguuagagccuugaaauac

SEQ ID NO: 270886 - RNA, 19 nt, Artificial Sequence
  Description of Artificial Sequence: Synthetic oligonucleotide
aguguaaucgcaugugcuc

SEQ ID NO: 270887 - RNA, 19 nt, Artificial Sequence
  Description of Artificial Sequence: Synthetic oligonucleotide
uaauaacuaacauuuggaa

SEQ ID NO: 270888 - RNA, 19 nt, Artificial Sequence
  Description of Artificial Sequence: Synthetic oligonucleotide
ugcacgagaaccaauugca

SEQ ID NO: 270889 - RNA, 19 nt, Artificial Sequence
  Description of Artificial Sequence: Synthetic oligonucleotide
augcacgagaaccaauugc

SEQ ID NO: 270890 - RNA, 19 nt, Artificial Sequence
  Description of Artificial Sequence: Synthetic oligonucleotide
aaucucaaugcacgagaac

SEQ ID NO: 270891 - RNA, 19 nt, Artificial Sequence
  Description of Artificial Sequence: Synthetic oligonucleotide
ugcuaugagucacacagug

SEQ ID NO: 270892 - RNA, 19 nt, Artificial Sequence
  Description of Artificial Sequence: Synthetic oligonucleotide
aacucuagaaaacugcaua

SEQ ID NO: 270893 - RNA, 19 nt, Artificial Sequence
  Description of Artificial Sequence: Synthetic oligonucleotide
agcauuacccaguagugag

SEQ ID NO: 270894 - RNA, 19 nt, Artificial Sequence
  Description of Artificial Sequence: Synthetic oligonucleotide
cucaugaggucuuuuaccc

SEQ ID NO: 270895 - RNA, 19 nt, Artificial Sequence
  Description of Artificial Sequence: Synthetic oligonucleotide
guagcggugauucaugugc

SEQ ID NO: 270896 - RNA, 19 nt, Artificial Sequence
  Description of Artificial Sequence: Synthetic oligonucleotide
gaaccaagguaugagaugc

SEQ ID NO: 270897 - RNA, 19 nt, Artificial Sequence
  Description of Artificial Sequence: Synthetic oligonucleotide
acucuagaaaacugcauag

SEQ ID NO: 270898 - RNA, 19 nt, Artificial Sequence
  Description of Artificial Sequence: Synthetic oligonucleotide
uggucguagagucagaguc

SEQ ID NO: 270899 - RNA, 19 nt, Artificial Sequence
  Description of Artificial Sequence: Synthetic oligonucleotide
gacacaacgcuuccuauag

SEQ ID NO: 270900 - RNA, 19 nt, Artificial Sequence
  Description of Artificial Sequence: Synthetic oligonucleotide
aagcguggguaauauagag

SEQ ID NO: 270901 - RNA, 19 nt, Artificial Sequence
  Description of Artificial Sequence: Synthetic oligonucleotide
aaaucuuaucaacuuucca

SEQ ID NO: 270902 - RNA, 19 nt, Artificial Sequence
  Description of Artificial Sequence: Synthetic oligonucleotide
agcuuacauacauggauac

SEQ ID NO: 270903 - RNA, 19 nt, Artificial Sequence
  Description of Artificial Sequence: Synthetic oligonucleotide
acguaaaaugaauacugag

SEQ ID NO: 270904 - RNA, 19 nt, Artificial Sequence
  Description of Artificial Sequence: Synthetic oligonucleotide
uacugaagcggauuuagca

SEQ ID NO: 270905 - RNA, 19 nt, Artificial Sequence
  Description of Artificial Sequence: Synthetic oligonucleotide
aguagaauuuccuucuaga

SEQ ID NO: 270906 - RNA, 19 nt, Artificial Sequence
  Description of Artificial Sequence: Synthetic oligonucleotide
augaguaagaaacuucagu

SEQ ID NO: 270907 - RNA, 19 nt, Artificial Sequence
  Description of Artificial Sequence: Synthetic oligonucleotide
aauacauguuaaaugacaa

SEQ ID NO: 270908 - RNA, 19 nt, Artificial Sequence
  Description of Artificial Sequence: Synthetic oligonucleotide
uuuagcauauguuuaccaa

SEQ ID NO: 270909 - RNA, 19 nt, Artificial Sequence
  Description of Artificial Sequence: Synthetic oligonucleotide
acgagaaccaauugcaucu

SEQ ID NO: 270910 - RNA, 19 nt, Artificial Sequence
  Description of Artificial Sequence: Synthetic oligonucleotide
uauuaauacugccaggcuu

SEQ ID NO: 270911 - RNA, 19 nt, Artificial Sequence
  Description of Artificial Sequence: Synthetic oligonucleotide
uucuaauuuggcuugcuaa

SEQ ID NO: 270912 - RNA, 19 nt, Artificial Sequence
  Description of Artificial Sequence: Synthetic oligonucleotide
uucuacugcucugugaagg

SEQ ID NO: 270913 - RNA, 19 nt, Artificial Sequence
  Description of Artificial Sequence: Synthetic oligonucleotide
aucaacaaaugcuaguuau

SEQ ID NO: 270914 - RNA, 19 nt, Artificial Sequence
  Description of Artificial Sequence: Synthetic oligonucleotide
uguaguuguaaaacuaaua

SEQ ID NO: 270915 - RNA, 19 nt, Artificial Sequence
  Description of Artificial Sequence: Synthetic oligonucleotide
aaauacugagaauggcacu

SEQ ID NO: 270916 - RNA, 19 nt, Artificial Sequence
  Description of Artificial Sequence: Synthetic oligonucleotide
aaaaucacaugaguaagaa

SEQ ID NO: 270917 - RNA, 19 nt, Artificial Sequence
  Description of Artificial Sequence: Synthetic oligonucleotide
uacgugucaguaagaaggg

SEQ ID NO: 270918 - RNA, 19 nt, Artificial Sequence
  Description of Artificial Sequence: Synthetic oligonucleotide
guaauauagagcaaauuuc

SEQ ID NO: 270919 - RNA, 19 nt, Artificial Sequence
  Description of Artificial Sequence: Synthetic oligonucleotide
uuauuuuaggccacacacu

SEQ ID NO: 270920 - RNA, 19 nt, Artificial Sequence
  Description of Artificial Sequence: Synthetic oligonucleotide
uucuagaaggacuccuagg

SEQ ID NO: 270921 - RNA, 19 nt, Artificial Sequence
  Description of Artificial Sequence: Synthetic oligonucleotide
uggcgucuaacauagaggu

SEQ ID NO: 270922 - RNA, 19 nt, Artificial Sequence
  Description of Artificial Sequence: Synthetic oligonucleotide
aauaauacugauagguaaa

SEQ ID NO: 270923 - RNA, 19 nt, Artificial Sequence
  Description of Artificial Sequence: Synthetic oligonucleotide
aaugcacgagaaccaauug

SEQ ID NO: 270924 - RNA, 19 nt, Artificial Sequence
  Description of Artificial Sequence: Synthetic oligonucleotide
ugaaccaacguaagaguga

SEQ ID NO: 270925 - RNA, 19 nt, Artificial Sequence
  Description of Artificial Sequence: Synthetic oligonucleotide
aauggcuuauccaugucug

SEQ ID NO: 270926 - RNA, 19 nt, Artificial Sequence
  Description of Artificial Sequence: Synthetic oligonucleotide
guaguuuagagaauuuccc

SEQ ID NO: 270927 - RNA, 19 nt, Artificial Sequence
  Description of Artificial Sequence: Synthetic oligonucleotide
gugaguuucaaagugaaga

SEQ ID NO: 270928 - RNA, 19 nt, Artificial Sequence
  Description of Artificial Sequence: Synthetic oligonucleotide
ucuacugcucugugaaggg

SEQ ID NO: 270929 - RNA, 19 nt, Artificial Sequence
  Description of Artificial Sequence: Synthetic oligonucleotide
aaccugcuaagaaaccugc

SEQ ID NO: 270930 - RNA, 19 nt, Artificial Sequence
  Description of Artificial Sequence: Synthetic oligonucleotide
ugugcucaaucaaaugaug

SEQ ID NO: 270931 - RNA, 19 nt, Artificial Sequence
  Description of Artificial Sequence: Synthetic oligonucleotide
uccguaguuuucuuuuggg

SEQ ID NO: 270932 - RNA, 19 nt, Artificial Sequence
  Description of Artificial Sequence: Synthetic oligonucleotide
auuuagcauauguuuacca

SEQ ID NO: 270933 - RNA, 19 nt, Artificial Sequence
  Description of Artificial Sequence: Synthetic oligonucleotide
aagcggauuuagcauaugu

SEQ ID NO: 270934 - RNA, 19 nt, Artificial Sequence
  Description of Artificial Sequence: Synthetic oligonucleotide
uaaccugcuaagaaaccug

SEQ ID NO: 270935 - RNA, 19 nt, Artificial Sequence
  Description of Artificial Sequence: Synthetic oligonucleotide
agaaggguauuaauacugc

SEQ ID NO: 270936 - RNA, 19 nt, Artificial Sequence
  Description of Artificial Sequence: Synthetic oligonucleotide
ucuauucugcuucauguua

SEQ ID NO: 270937 - RNA, 19 nt, Artificial Sequence
  Description of Artificial Sequence: Synthetic oligonucleotide
uucaguugugagcauuacc

SEQ ID NO: 270938 - RNA, 19 nt, Artificial Sequence
  Description of Artificial Sequence: Synthetic oligonucleotide
aaccaauugcaucucuacu

SEQ ID NO: 270939 - RNA, 19 nt, Artificial Sequence
  Description of Artificial Sequence: Synthetic oligonucleotide
cguaaaaugaauacugagg

SEQ ID NO: 270940 - RNA, 19 nt, Artificial Sequence
  Description of Artificial Sequence: Synthetic oligonucleotide
gaguaagaaacuucaguuc

SEQ ID NO: 270941 - RNA, 19 nt, Artificial Sequence
  Description of Artificial Sequence: Synthetic oligonucleotide
cugacacgcaagcacaugg

SEQ ID NO: 270942 - RNA, 19 nt, Artificial Sequence
  Description of Artificial Sequence: Synthetic oligonucleotide
agaaugacuugauuguagu

SEQ ID NO: 270943 - RNA, 19 nt, Artificial Sequence
  Description of Artificial Sequence: Synthetic oligonucleotide
auaguugcuaccacguacg

SEQ ID NO: 270944 - RNA, 19 nt, Artificial Sequence
  Description of Artificial Sequence: Synthetic oligonucleotide
ucucaaugcacgagaacca

SEQ ID NO: 270945 - RNA, 19 nt, Artificial Sequence
  Description of Artificial Sequence: Synthetic oligonucleotide
uccuaacucuagaaaacug

SEQ ID NO: 270946 - RNA, 19 nt, Artificial Sequence
  Description of Artificial Sequence: Synthetic oligonucleotide
ucuaacauagagguccuac

SEQ ID NO: 270947 - RNA, 19 nt, Artificial Sequence
  Description of Artificial Sequence: Synthetic oligonucleotide
guugcuaccacguacgcaa

SEQ ID NO: 270948 - RNA, 19 nt, Artificial Sequence
  Description of Artificial Sequence: Synthetic oligonucleotide
uguucgucccugcagucag

SEQ ID NO: 270949 - RNA, 19 nt, Artificial Sequence
  Description of Artificial Sequence: Synthetic oligonucleotide
ucaaaucucaaugcacgag

SEQ ID NO: 270950 - RNA, 19 nt, Artificial Sequence
  Description of Artificial Sequence: Synthetic oligonucleotide
aaauaucuugucacacagg

SEQ ID NO: 270951 - RNA, 19 nt, Artificial Sequence
  Description of Artificial Sequence: Synthetic oligonucleotide
aacucaacgacaaccuuug

SEQ ID NO: 270952 - RNA, 19 nt, Artificial Sequence
  Description of Artificial Sequence: Synthetic oligonucleotide
ugauaauacugauaaccau

SEQ ID NO: 270953 - RNA, 19 nt, Artificial Sequence
  Description of Artificial Sequence: Synthetic oligonucleotide
aaauuggcacaacauguua

SEQ ID NO: 270954 - RNA, 19 nt, Artificial Sequence
  Description of Artificial Sequence: Synthetic oligonucleotide
agcuuaagaaugaaccaac

SEQ ID NO: 270955 - RNA, 19 nt, Artificial Sequence
  Description of Artificial Sequence: Synthetic oligonucleotide
gaaccaauugcaucucuac

SEQ ID NO: 270956 - RNA, 19 nt, Artificial Sequence
  Description of Artificial Sequence: Synthetic oligonucleotide
gagaaugacuugauuguag

SEQ ID NO: 270957 - RNA, 19 nt, Artificial Sequence
  Description of Artificial Sequence: Synthetic oligonucleotide
gaagacguacaguacaaaa

SEQ ID NO: 270958 - RNA, 19 nt, Artificial Sequence
  Description of Artificial Sequence: Synthetic oligonucleotide
gaaacuccuucugagcuag

SEQ ID NO: 270959 - RNA, 19 nt, Artificial Sequence
  Description of Artificial Sequence: Synthetic oligonucleotide
aaugaauacugaggaacca

SEQ ID NO: 270960 - RNA, 19 nt, Artificial Sequence
  Description of Artificial Sequence: Synthetic oligonucleotide
aacaaaugcuaguuauuuu

SEQ ID NO: 270961 - RNA, 19 nt, Artificial Sequence
  Description of Artificial Sequence: Synthetic oligonucleotide
aauuacuaggucugagguu

SEQ ID NO: 270962 - RNA, 19 nt, Artificial Sequence
  Description of Artificial Sequence: Synthetic oligonucleotide
acgcauacauuccauucuc

SEQ ID NO: 270963 - RNA, 19 nt, Artificial Sequence
  Description of Artificial Sequence: Synthetic oligonucleotide
aguacgugucaguaagaag

SEQ ID NO: 270964 - RNA, 19 nt, Artificial Sequence
  Description of Artificial Sequence: Synthetic oligonucleotide
accaagguaugagaugccc

SEQ ID NO: 270965 - RNA, 19 nt, Artificial Sequence
  Description of Artificial Sequence: Synthetic oligonucleotide
cagagcaucaugcuaugag

SEQ ID NO: 270966 - RNA, 19 nt, Artificial Sequence
  Description of Artificial Sequence: Synthetic oligonucleotide
uaagggaauggguuauggc

SEQ ID NO: 270967 - RNA, 19 nt, Artificial Sequence
  Description of Artificial Sequence: Synthetic oligonucleotide
acuaaaaguacgugucagu

SEQ ID NO: 270968 - RNA, 19 nt, Artificial Sequence
  Description of Artificial Sequence: Synthetic oligonucleotide
ugacugacuugguaacagg

SEQ ID NO: 270969 - RNA, 19 nt, Artificial Sequence
  Description of Artificial Sequence: Synthetic oligonucleotide
aacguaaaaugaauacuga

SEQ ID NO: 270970 - RNA, 19 nt, Artificial Sequence
  Description of Artificial Sequence: Synthetic oligonucleotide
uugguaacagguagucagc

SEQ ID NO: 270971 - RNA, 19 nt, Artificial Sequence
  Description of Artificial Sequence: Synthetic oligonucleotide
uugaagacguacaguacaa

SEQ ID NO: 270972 - RNA, 19 nt, Artificial Sequence
  Description of Artificial Sequence: Synthetic oligonucleotide
gaagagucggaucgguagc

SEQ ID NO: 270973 - RNA, 19 nt, Artificial Sequence
  Description of Artificial Sequence: Synthetic oligonucleotide
aauauagagcaaauuucau

SEQ ID NO: 270974 - RNA, 19 nt, Artificial Sequence
  Description of Artificial Sequence: Synthetic oligonucleotide
aacuggguccguaauaacu

SEQ ID NO: 270975 - RNA, 19 nt, Artificial Sequence
  Description of Artificial Sequence: Synthetic oligonucleotide
ucacgaacacugauucugc

SEQ ID NO: 270976 - RNA, 19 nt, Artificial Sequence
  Description of Artificial Sequence: Synthetic oligonucleotide
uccaugucugacacgcaag

SEQ ID NO: 270977 - RNA, 19 nt, Artificial Sequence
  Description of Artificial Sequence: Synthetic oligonucleotide
cugagaguaagaucccgag

SEQ ID NO: 270978 - RNA, 19 nt, Artificial Sequence
  Description of Artificial Sequence: Synthetic oligonucleotide
cacaugaguaagaaacuuc

SEQ ID NO: 270979 - RNA, 19 nt, Artificial Sequence
  Description of Artificial Sequence: Synthetic oligonucleotide
ugggccaacucuuaacaga

SEQ ID NO: 270980 - RNA, 19 nt, Artificial Sequence
  Description of Artificial Sequence: Synthetic oligonucleotide
ggaagagucggaucgguag

SEQ ID NO: 270981 - RNA, 19 nt, Artificial Sequence
  Description of Artificial Sequence: Synthetic oligonucleotide
uaagagugauaauacugau

SEQ ID NO: 270982 - RNA, 19 nt, Artificial Sequence
  Description of Artificial Sequence: Synthetic oligonucleotide
aaaaucagcuaauguuguu

SEQ ID NO: 270983 - RNA, 19 nt, Artificial Sequence
  Description of Artificial Sequence: Synthetic oligonucleotide
aaucaacguaaaaugaaua

SEQ ID NO: 270984 - RNA, 19 nt, Artificial Sequence
  Description of Artificial Sequence: Synthetic oligonucleotide
aucaaaugauguuuguguu

SEQ ID NO: 270985 - RNA, 19 nt, Artificial Sequence
  Description of Artificial Sequence: Synthetic oligonucleotide
acuugauuguaguuguaaa

SEQ ID NO: 270986 - RNA, 19 nt, Artificial Sequence
  Description of Artificial Sequence: Synthetic oligonucleotide
uggaaauggcugcaagcca

SEQ ID NO: 270987 - RNA, 19 nt, Artificial Sequence
  Description of Artificial Sequence: Synthetic oligonucleotide
ucaacaaaugcuaguuauu

SEQ ID NO: 270988 - RNA, 19 nt, Artificial Sequence
  Description of Artificial Sequence: Synthetic oligonucleotide
cuucuagaaggacuccuag

SEQ ID NO: 270989 - RNA, 19 nt, Artificial Sequence
  Description of Artificial Sequence: Synthetic oligonucleotide
aucaaaucucaaugcacga

SEQ ID NO: 270990 - RNA, 19 nt, Artificial Sequence
  Description of Artificial Sequence: Synthetic oligonucleotide
cuaagggaauggguuaugg

SEQ ID NO: 270991 - RNA, 19 nt, Artificial Sequence
  Description of Artificial Sequence: Synthetic oligonucleotide
caaaucucaaugcacgaga

SEQ ID NO: 270992 - RNA, 19 nt, Artificial Sequence
  Description of Artificial Sequence: Synthetic oligonucleotide
ucuuccgacaguugcucgc

SEQ ID NO: 270993 - RNA, 19 nt, Artificial Sequence
  Description of Artificial Sequence: Synthetic oligonucleotide
gugauaauacugauaacca

SEQ ID NO: 270994 - RNA, 19 nt, Artificial Sequence
  Description of Artificial Sequence: Synthetic oligonucleotide
aguugcucgcugcucucgc

SEQ ID NO: 270995 - RNA, 19 nt, Artificial Sequence
  Description of Artificial Sequence: Synthetic oligonucleotide
guauaaauguuaacagaac

SEQ ID NO: 270996 - RNA, 19 nt, Artificial Sequence
  Description of Artificial Sequence: Synthetic oligonucleotide
gauuguaguuguaaaacua

SEQ ID NO: 270997 - RNA, 19 nt, Artificial Sequence
  Description of Artificial Sequence: Synthetic oligonucleotide
gcgucuaacauagaggucc

SEQ ID NO: 270998 - RNA, 19 nt, Artificial Sequence
  Description of Artificial Sequence: Synthetic oligonucleotide
guacgcaaacacaaucacg

SEQ ID NO: 270999 - RNA, 19 nt, Artificial Sequence
  Description of Artificial Sequence: Synthetic oligonucleotide
agcguggguaauauagagc

SEQ ID NO: 271000 - RNA, 19 nt, Artificial Sequence
  Description of Artificial Sequence: Synthetic oligonucleotide
uuccuaacucuagaaaacu

SEQ ID NO: 271001 - RNA, 19 nt, Artificial Sequence
  Description of Artificial Sequence: Synthetic oligonucleotide
ggauuuagcauauguuuac

SEQ ID NO: 271002 - RNA, 19 nt, Artificial Sequence
  Description of Artificial Sequence: Synthetic oligonucleotide
uaaccaugccagaugccca

SEQ ID NO: 271003 - RNA, 19 nt, Artificial Sequence
  Description of Artificial Sequence: Synthetic oligonucleotide
uagugcagaaguucucaca

SEQ ID NO: 271004 - RNA, 19 nt, Artificial Sequence
  Description of Artificial Sequence: Synthetic oligonucleotide
cgaguauaaauguuaacag

SEQ ID NO: 271005 - RNA, 19 nt, Artificial Sequence
  Description of Artificial Sequence: Synthetic oligonucleotide
acuguguaauaaauaaaga

SEQ ID NO: 271006 - RNA, 19 nt, Artificial Sequence
  Description of Artificial Sequence: Synthetic oligonucleotide
gcgaguauaaauguuaaca

SEQ ID NO: 271007 - RNA, 19 nt, Artificial Sequence
  Description of Artificial Sequence: Synthetic oligonucleotide
uggguaauauagagcaaau

SEQ ID NO: 271008 - RNA, 19 nt, Artificial Sequence
  Description of Artificial Sequence: Synthetic oligonucleotide
aaggcgaguauaaauguua

SEQ ID NO: 271009 - RNA, 19 nt, Artificial Sequence
  Description of Artificial Sequence: Synthetic oligonucleotide
uggguggucguagagucag

SEQ ID NO: 271010 - RNA, 19 nt, Artificial Sequence
  Description of Artificial Sequence: Synthetic oligonucleotide
gugagcauuacccaguagu

SEQ ID NO: 271011 - RNA, 19 nt, Artificial Sequence
  Description of Artificial Sequence: Synthetic oligonucleotide
uaccacguacgcaaacaca

SEQ ID NO: 271012 - RNA, 19 nt, Artificial Sequence
  Description of Artificial Sequence: Synthetic oligonucleotide
aaagcguggguaauauaga

SEQ ID NO: 271013 - RNA, 19 nt, Artificial Sequence
  Description of Artificial Sequence: Synthetic oligonucleotide
aauucuaauuuggcuugcu

SEQ ID NO: 271014 - RNA, 19 nt, Artificial Sequence
  Description of Artificial Sequence: Synthetic oligonucleotide
cuccgcgucucuuucuucg

SEQ ID NO: 271015 - RNA, 19 nt, Artificial Sequence
  Description of Artificial Sequence: Synthetic oligonucleotide
ugaaaagcguggguaauau

SEQ ID NO: 271016 - RNA, 19 nt, Artificial Sequence
  Description of Artificial Sequence: Synthetic oligonucleotide
aaccaagguaugagaugcc

SEQ ID NO: 271017 - RNA, 19 nt, Artificial Sequence
  Description of Artificial Sequence: Synthetic oligonucleotide
ugaagcggauuuagcauau

SEQ ID NO: 271018 - RNA, 19 nt, Artificial Sequence
  Description of Artificial Sequence: Synthetic oligonucleotide
guaugagaugccccagugc

SEQ ID NO: 271019 - RNA, 19 nt, Artificial Sequence
  Description of Artificial Sequence: Synthetic oligonucleotide
ugacacgcaagcacaugga

SEQ ID NO: 271020 - RNA, 19 nt, Artificial Sequence
  Description of Artificial Sequence: Synthetic oligonucleotide
aaugaccaugguguaacaa

SEQ ID NO: 271021 - RNA, 19 nt, Artificial Sequence
  Description of Artificial Sequence: Synthetic oligonucleotide
uggguaaagggagaaugac

SEQ ID NO: 271022 - RNA, 19 nt, Artificial Sequence
  Description of Artificial Sequence: Synthetic oligonucleotide
uccuaggcuucauuugucu

SEQ ID NO: 271023 - RNA, 19 nt, Artificial Sequence
  Description of Artificial Sequence: Synthetic oligonucleotide
gaggaaccaagguaugaga

SEQ ID NO: 271024 - RNA, 19 nt, Artificial Sequence
  Description of Artificial Sequence: Synthetic oligonucleotide
cacguacgcaaacacaauc

SEQ ID NO: 271025 - RNA, 19 nt, Artificial Sequence
  Description of Artificial Sequence: Synthetic oligonucleotide
ucgcaugugcucaaucaaa

SEQ ID NO: 271026 - RNA, 19 nt, Artificial Sequence
  Description of Artificial Sequence: Synthetic oligonucleotide
gaguaagaucccgagugug

SEQ ID NO: 271027 - RNA, 19 nt, Artificial Sequence
  Description of Artificial Sequence: Synthetic oligonucleotide
uauggcugggccaacucuu

SEQ ID NO: 271028 - RNA, 19 nt, Artificial Sequence
  Description of Artificial Sequence: Synthetic oligonucleotide
ugugagcauuacccaguag

SEQ ID NO: 271029 - RNA, 19 nt, Artificial Sequence
  Description of Artificial Sequence: Synthetic oligonucleotide
acugauaaccaugccagau

SEQ ID NO: 271030 - RNA, 19 nt, Artificial Sequence
  Description of Artificial Sequence: Synthetic oligonucleotide
cacgcaagcacauggauua

SEQ ID NO: 271031 - RNA, 19 nt, Artificial Sequence
  Description of Artificial Sequence: Synthetic oligonucleotide
uaaucgcaugugcucaauc

SEQ ID NO: 271032 - RNA, 19 nt, Artificial Sequence
  Description of Artificial Sequence: Synthetic oligonucleotide
uccuucugagcuagugucu

SEQ ID NO: 271033 - RNA, 19 nt, Artificial Sequence
  Description of Artificial Sequence: Synthetic oligonucleotide
uaccaaguagaauuuccuu

SEQ ID NO: 271034 - RNA, 19 nt, Artificial Sequence
  Description of Artificial Sequence: Synthetic oligonucleotide
aggcuagcaauacauguua

SEQ ID NO: 271035 - RNA, 19 nt, Artificial Sequence
  Description of Artificial Sequence: Synthetic oligonucleotide
cuaccacguacgcaaacac

SEQ ID NO: 271036 - RNA, 19 nt, Artificial Sequence
  Description of Artificial Sequence: Synthetic oligonucleotide
aguagcggugauucaugug

SEQ ID NO: 271037 - RNA, 19 nt, Artificial Sequence
  Description of Artificial Sequence: Synthetic oligonucleotide
uuggcuugcuaagggaaug

SEQ ID NO: 271038 - RNA, 19 nt, Artificial Sequence
  Description of Artificial Sequence: Synthetic oligonucleotide
uuauugugagcuggggagu

SEQ ID NO: 271039 - RNA, 19 nt, Artificial Sequence
  Description of Artificial Sequence: Synthetic oligonucleotide
agucagcacgguuggaacu

SEQ ID NO: 271040 - RNA, 19 nt, Artificial Sequence
  Description of Artificial Sequence: Synthetic oligonucleotide
agucggaucgguagcuuac

SEQ ID NO: 271041 - RNA, 19 nt, Artificial Sequence
  Description of Artificial Sequence: Synthetic oligonucleotide
aucgcaugugcucaaucaa

SEQ ID NO: 271042 - RNA, 19 nt, Artificial Sequence
  Description of Artificial Sequence: Synthetic oligonucleotide
cccaaggcgaguauaaaug

SEQ ID NO: 271043 - RNA, 19 nt, Artificial Sequence
  Description of Artificial Sequence: Synthetic oligonucleotide
ugcucgcugcucucgcucg

SEQ ID NO: 271044 - RNA, 19 nt, Artificial Sequence
  Description of Artificial Sequence: Synthetic oligonucleotide
accacguacgcaaacacaa

SEQ ID NO: 271045 - RNA, 19 nt, Artificial Sequence
  Description of Artificial Sequence: Synthetic oligonucleotide
auuccacacucaugagguc

SEQ ID NO: 271046 - RNA, 19 nt, Artificial Sequence
  Description of Artificial Sequence: Synthetic oligonucleotide
uugcuaagggaauggguua

SEQ ID NO: 271047 - RNA, 19 nt, Artificial Sequence
  Description of Artificial Sequence: Synthetic oligonucleotide
uguaaucgcaugugcucaa

SEQ ID NO: 271048 - RNA, 19 nt, Artificial Sequence
  Description of Artificial Sequence: Synthetic oligonucleotide
gagugauaauacugauaac

SEQ ID NO: 271049 - RNA, 19 nt, Artificial Sequence
  Description of Artificial Sequence: Synthetic oligonucleotide
uggguccguaauaacuaac

SEQ ID NO: 271050 - RNA, 19 nt, Artificial Sequence
  Description of Artificial Sequence: Synthetic oligonucleotide
auggguuauggcugggcca

SEQ ID NO: 271051 - RNA, 19 nt, Artificial Sequence
  Description of Artificial Sequence: Synthetic oligonucleotide
uaguugcuaccacguacgc

SEQ ID NO: 271052 - RNA, 19 nt, Artificial Sequence
  Description of Artificial Sequence: Synthetic oligonucleotide
cuaaaaguacgugucagua

SEQ ID NO: 271053 - RNA, 19 nt, Artificial Sequence
  Description of Artificial Sequence: Synthetic oligonucleotide
acuaggucugagguucagg

SEQ ID NO: 271054 - RNA, 19 nt, Artificial Sequence
  Description of Artificial Sequence: Synthetic oligonucleotide
aaauacugaagcggauuua

SEQ ID NO: 271055 - RNA, 19 nt, Artificial Sequence
  Description of Artificial Sequence: Synthetic oligonucleotide
uggcuuauccaugucugac

SEQ ID NO: 271056 - RNA, 19 nt, Artificial Sequence
  Description of Artificial Sequence: Synthetic oligonucleotide
cauguuccuaacucuagaa

SEQ ID NO: 271057 - RNA, 19 nt, Artificial Sequence
  Description of Artificial Sequence: Synthetic oligonucleotide
cgguagcuuacauacaugg

SEQ ID NO: 271058 - RNA, 19 nt, Artificial Sequence
  Description of Artificial Sequence: Synthetic oligonucleotide
uccuuaaggcuagcaauac

SEQ ID NO: 271059 - RNA, 19 nt, Artificial Sequence
  Description of Artificial Sequence: Synthetic oligonucleotide
gguuggaacugcuuucuac

SEQ ID NO: 271060 - RNA, 19 nt, Artificial Sequence
  Description of Artificial Sequence: Synthetic oligonucleotide
ugauucugccgacucuguc

SEQ ID NO: 271061 - RNA, 19 nt, Artificial Sequence
  Description of Artificial Sequence: Synthetic oligonucleotide
ucguccucgccacaucaac

SEQ ID NO: 271062 - RNA, 19 nt, Artificial Sequence
  Description of Artificial Sequence: Synthetic oligonucleotide
aaggaagagucggaucggu

SEQ ID NO: 271063 - RNA, 19 nt, Artificial Sequence
  Description of Artificial Sequence: Synthetic oligonucleotide
acguacgcaaacacaauca

SEQ ID NO: 271064 - RNA, 19 nt, Artificial Sequence
  Description of Artificial Sequence: Synthetic oligonucleotide
uuguguuuaaacgccuuuu

SEQ ID NO: 271065 - RNA, 19 nt, Artificial Sequence
  Description of Artificial Sequence: Synthetic oligonucleotide
aaaguacgugucaguaaga

SEQ ID NO: 271066 - RNA, 19 nt, Artificial Sequence
  Description of Artificial Sequence: Synthetic oligonucleotide
uacugauaaccaugccaga

SEQ ID NO: 271067 - RNA, 19 nt, Artificial Sequence
  Description of Artificial Sequence: Synthetic oligonucleotide
gauaaccaugccagaugcc

SEQ ID NO: 271068 - RNA, 19 nt, Artificial Sequence
  Description of Artificial Sequence: Synthetic oligonucleotide
cuugcuaagggaauggguu

SEQ ID NO: 271069 - RNA, 19 nt, Artificial Sequence
  Description of Artificial Sequence: Synthetic oligonucleotide
guagugcagaaguucucac

SEQ ID NO: 271070 - RNA, 19 nt, Artificial Sequence
  Description of Artificial Sequence: Synthetic oligonucleotide
guccucgccacaucaacac

SEQ ID NO: 271071 - RNA, 19 nt, Artificial Sequence
  Description of Artificial Sequence: Synthetic oligonucleotide
ggguauuaauacugccagg

SEQ ID NO: 271072 - RNA, 19 nt, Artificial Sequence
  Description of Artificial Sequence: Synthetic oligonucleotide
gcaguuagagccuugaaau

SEQ ID NO: 271073 - RNA, 19 nt, Artificial Sequence
  Description of Artificial Sequence: Synthetic oligonucleotide
cugggccaacucuuaacag

SEQ ID NO: 271074 - RNA, 19 nt, Artificial Sequence
  Description of Artificial Sequence: Synthetic oligonucleotide
gaauggguuauggcugggc

SEQ ID NO: 271075 - RNA, 19 nt, Artificial Sequence
  Description of Artificial Sequence: Synthetic oligonucleotide
ugaggucuuuuacccgugu

SEQ ID NO: 271076 - RNA, 19 nt, Artificial Sequence
  Description of Artificial Sequence: Synthetic oligonucleotide
auuuggcuugcuaagggaa

SEQ ID NO: 271077 - RNA, 19 nt, Artificial Sequence
  Description of Artificial Sequence: Synthetic oligonucleotide
cuggguaaagggagaauga

SEQ ID NO: 271078 - RNA, 19 nt, Artificial Sequence
  Description of Artificial Sequence: Synthetic oligonucleotide
uugugagcauuacccagua

SEQ ID NO: 271079 - RNA, 19 nt, Artificial Sequence
  Description of Artificial Sequence: Synthetic oligonucleotide
cagaguguaaucgcaugug

SEQ ID NO: 271080 - RNA, 19 nt, Artificial Sequence
  Description of Artificial Sequence: Synthetic oligonucleotide
acaaucacgaacacugauu

SEQ ID NO: 271081 - RNA, 19 nt, Artificial Sequence
  Description of Artificial Sequence: Synthetic oligonucleotide
ucacacgcauacauuccau

SEQ ID NO: 271082 - RNA, 19 nt, Artificial Sequence
  Description of Artificial Sequence: Synthetic oligonucleotide
aucaacuggguccguaaua

SEQ ID NO: 271083 - RNA, 19 nt, Artificial Sequence
  Description of Artificial Sequence: Synthetic oligonucleotide
uggguuauggcugggccaa

SEQ ID NO: 271084 - RNA, 19 nt, Artificial Sequence
  Description of Artificial Sequence: Synthetic oligonucleotide
cacgguuggaacugcuuuc

SEQ ID NO: 271085 - RNA, 19 nt, Artificial Sequence
  Description of Artificial Sequence: Synthetic oligonucleotide
agagaucucugaaagucaa

SEQ ID NO: 271086 - RNA, 19 nt, Artificial Sequence
  Description of Artificial Sequence: Synthetic oligonucleotide
auuaaguaguuuagagaau

SEQ ID NO: 271087 - RNA, 19 nt, Artificial Sequence
  Description of Artificial Sequence: Synthetic oligonucleotide
ugcuaccacguacgcaaac

SEQ ID NO: 271088 - RNA, 19 nt, Artificial Sequence
  Description of Artificial Sequence: Synthetic oligonucleotide
ucugacacgcaagcacaug

SEQ ID NO: 271089 - RNA, 19 nt, Artificial Sequence
  Description of Artificial Sequence: Synthetic oligonucleotide
guacagcuuaagaaugaac

SEQ ID NO: 271090 - RNA, 19 nt, Artificial Sequence
  Description of Artificial Sequence: Synthetic oligonucleotide
guguaaucgcaugugcuca

SEQ ID NO: 271091 - RNA, 19 nt, Artificial Sequence
  Description of Artificial Sequence: Synthetic oligonucleotide
ggcaguuagagccuugaaa

SEQ ID NO: 271092 - RNA, 19 nt, Artificial Sequence
  Description of Artificial Sequence: Synthetic oligonucleotide
ggcaauucuaauuuggcuu

SEQ ID NO: 271093 - RNA, 19 nt, Artificial Sequence
  Description of Artificial Sequence: Synthetic oligonucleotide
gucagcacgguuggaacug

SEQ ID NO: 271094 - RNA, 19 nt, Artificial Sequence
  Description of Artificial Sequence: Synthetic oligonucleotide
ggcacaacauguuaaacau

SEQ ID NO: 271095 - RNA, 19 nt, Artificial Sequence
  Description of Artificial Sequence: Synthetic oligonucleotide
ccaagguaugagaugcccc

SEQ ID NO: 271096 - RNA, 19 nt, Artificial Sequence
  Description of Artificial Sequence: Synthetic oligonucleotide
caguauuauacacuacacu

SEQ ID NO: 271097 - RNA, 19 nt, Artificial Sequence
  Description of Artificial Sequence: Synthetic oligonucleotide
guuauggcugggccaacuc

SEQ ID NO: 271098 - RNA, 19 nt, Artificial Sequence
  Description of Artificial Sequence: Synthetic oligonucleotide
guauuaauacugccaggcu

SEQ ID NO: 271099 - RNA, 19 nt, Artificial Sequence
  Description of Artificial Sequence: Synthetic oligonucleotide
guaaccugcuaagaaaccu

SEQ ID NO: 271100 - RNA, 19 nt, Artificial Sequence
  Description of Artificial Sequence: Synthetic oligonucleotide
cucuagaaaacugcauaga

SEQ ID NO: 271101 - RNA, 19 nt, Artificial Sequence
  Description of Artificial Sequence: Synthetic oligonucleotide
ucggaucgguagcuuacau

SEQ ID NO: 271102 - RNA, 19 nt, Artificial Sequence
  Description of Artificial Sequence: Synthetic oligonucleotide
aguugcuaccacguacgca

SEQ ID NO: 271103 - RNA, 19 nt, Artificial Sequence
  Description of Artificial Sequence: Synthetic oligonucleotide
acaacauguuaaacauugu

SEQ ID NO: 271104 - RNA, 19 nt, Artificial Sequence
  Description of Artificial Sequence: Synthetic oligonucleotide
gagaugcccgugcacccac

SEQ ID NO: 271105 - RNA, 19 nt, Artificial Sequence
  Description of Artificial Sequence: Synthetic oligonucleotide
gguggucguagagucagag

SEQ ID NO: 271106 - RNA, 19 nt, Artificial Sequence
  Description of Artificial Sequence: Synthetic oligonucleotide
gaaaagcguggguaauaua

SEQ ID NO: 271107 - RNA, 19 nt, Artificial Sequence
  Description of Artificial Sequence: Synthetic oligonucleotide
gaguguaaucgcaugugcu

SEQ ID NO: 271108 - RNA, 19 nt, Artificial Sequence
  Description of Artificial Sequence: Synthetic oligonucleotide
acgguuggaacugcuuucu

SEQ ID NO: 271109 - RNA, 19 nt, Artificial Sequence
  Description of Artificial Sequence: Synthetic oligonucleotide
guccguaauaacuaacauu

SEQ ID NO: 271110 - RNA, 19 nt, Artificial Sequence
  Description of Artificial Sequence: Synthetic oligonucleotide
gucagaacucaacgacaac

SEQ ID NO: 271111 - RNA, 19 nt, Artificial Sequence
  Description of Artificial Sequence: Synthetic oligonucleotide
agcggauuuagcauauguu

SEQ ID NO: 271112 - RNA, 19 nt, Artificial Sequence
  Description of Artificial Sequence: Synthetic oligonucleotide
uacuaggucugagguucag

SEQ ID NO: 271113 - RNA, 19 nt, Artificial Sequence
  Description of Artificial Sequence: Synthetic oligonucleotide
gaccaugguguaacaagga

SEQ ID NO: 271114 - RNA, 19 nt, Artificial Sequence
  Description of Artificial Sequence: Synthetic oligonucleotide
caacgacaaccuuugaacu

SEQ ID NO: 271115 - RNA, 19 nt, Artificial Sequence
  Description of Artificial Sequence: Synthetic oligonucleotide
caacuggguccguaauaac

SEQ ID NO: 271116 - RNA, 19 nt, Artificial Sequence
  Description of Artificial Sequence: Synthetic oligonucleotide
gaacucaacgacaaccuuu

SEQ ID NO: 271117 - RNA, 19 nt, Artificial Sequence
  Description of Artificial Sequence: Synthetic oligonucleotide
gaaccaacguaagagugau

SEQ ID NO: 271118 - RNA, 19 nt, Artificial Sequence
  Description of Artificial Sequence: Synthetic oligonucleotide
acacaacgcuuccuauaga

SEQ ID NO: 271119 - RNA, 19 nt, Artificial Sequence
  Description of Artificial Sequence: Synthetic oligonucleotide
ucccuguaaccugcuaaga

SEQ ID NO: 271120 - RNA, 19 nt, Artificial Sequence
  Description of Artificial Sequence: Synthetic oligonucleotide
uucaucaacuggguccgua

SEQ ID NO: 271121 - RNA, 19 nt, Artificial Sequence
  Description of Artificial Sequence: Synthetic oligonucleotide
ucagugguuuugaguuuua

SEQ ID NO: 271122 - RNA, 19 nt, Artificial Sequence
  Description of Artificial Sequence: Synthetic oligonucleotide
uuacccguguguucauauu

SEQ ID NO: 271123 - RNA, 19 nt, Artificial Sequence
  Description of Artificial Sequence: Synthetic oligonucleotide
ccucgccacaucaacacug

SEQ ID NO: 271124 - RNA, 19 nt, Artificial Sequence
  Description of Artificial Sequence: Synthetic oligonucleotide
agucagugguuuugaguuu

SEQ ID NO: 271125 - RNA, 19 nt, Artificial Sequence
  Description of Artificial Sequence: Synthetic oligonucleotide
cuaccuccugacugacuug

SEQ ID NO: 271126 - RNA, 19 nt, Artificial Sequence
  Description of Artificial Sequence: Synthetic oligonucleotide
ggcgaguauaaauguuaac

SEQ ID NO: 271127 - RNA, 19 nt, Artificial Sequence
  Description of Artificial Sequence: Synthetic oligonucleotide
uucgucccugcagucagaa

SEQ ID NO: 271128 - RNA, 19 nt, Artificial Sequence
  Description of Artificial Sequence: Synthetic oligonucleotide
ugcuccgcgucucuuucuu

SEQ ID NO: 271129 - RNA, 19 nt, Artificial Sequence
  Description of Artificial Sequence: Synthetic oligonucleotide
caaugcacgagaaccaauu

SEQ ID NO: 271130 - RNA, 19 nt, Artificial Sequence
  Description of Artificial Sequence: Synthetic oligonucleotide
guuagagccuugaaauacu

SEQ ID NO: 271131 - RNA, 19 nt, Artificial Sequence
  Description of Artificial Sequence: Synthetic oligonucleotide
gggaauucuguagugcaga

SEQ ID NO: 271132 - RNA, 19 nt, Artificial Sequence
  Description of Artificial Sequence: Synthetic oligonucleotide
gaagcggauuuagcauaug

SEQ ID NO: 271133 - RNA, 19 nt, Artificial Sequence
  Description of Artificial Sequence: Synthetic oligonucleotide
ggguccguaauaacuaaca

SEQ ID NO: 271134 - RNA, 19 nt, Artificial Sequence
  Description of Artificial Sequence: Synthetic oligonucleotide
gagucggaucgguagcuua

SEQ ID NO: 271135 - RNA, 19 nt, Artificial Sequence
  Description of Artificial Sequence: Synthetic oligonucleotide
aggcgaguauaaauguuaa

SEQ ID NO: 271136 - RNA, 19 nt, Artificial Sequence
  Description of Artificial Sequence: Synthetic oligonucleotide
cacgcauacauuccauucu

SEQ ID NO: 271137 - RNA, 19 nt, Artificial Sequence
  Description of Artificial Sequence: Synthetic oligonucleotide
cuuccuauagauccuucau

SEQ ID NO: 271138 - RNA, 19 nt, Artificial Sequence
  Description of Artificial Sequence: Synthetic oligonucleotide
caguugcucgcugcucucg

SEQ ID NO: 271139 - RNA, 19 nt, Artificial Sequence
  Description of Artificial Sequence: Synthetic oligonucleotide
caacaaaugcuaguuauuu

SEQ ID NO: 271140 - RNA, 19 nt, Artificial Sequence
  Description of Artificial Sequence: Synthetic oligonucleotide
uacagcccaaggcgaguau

SEQ ID NO: 271141 - RNA, 19 nt, Artificial Sequence
  Description of Artificial Sequence: Synthetic oligonucleotide
gagaaccaauugcaucucu

SEQ ID NO: 271142 - RNA, 19 nt, Artificial Sequence
  Description of Artificial Sequence: Synthetic oligonucleotide
gcggauuuagcauauguuu

SEQ ID NO: 271143 - RNA, 19 nt, Artificial Sequence
  Description of Artificial Sequence: Synthetic oligonucleotide
gacacgcaagcacauggau

SEQ ID NO: 271144 - RNA, 19 nt, Artificial Sequence
  Description of Artificial Sequence: Synthetic oligonucleotide
ggcuugcuaagggaauggg

SEQ ID NO: 271145 - RNA, 19 nt, Artificial Sequence
  Description of Artificial Sequence: Synthetic oligonucleotide
cugaggaaccaagguauga

SEQ ID NO: 271146 - RNA, 19 nt, Artificial Sequence
  Description of Artificial Sequence: Synthetic oligonucleotide
caguuagagccuugaaaua

SEQ ID NO: 271147 - RNA, 19 nt, Artificial Sequence
  Description of Artificial Sequence: Synthetic oligonucleotide
acacgcaagcacauggauu

SEQ ID NO: 271148 - RNA, 19 nt, Artificial Sequence
  Description of Artificial Sequence: Synthetic oligonucleotide
gcuucauguuacauacaug

SEQ ID NO: 271149 - RNA, 19 nt, Artificial Sequence
  Description of Artificial Sequence: Synthetic oligonucleotide
acucaacgacaaccuuuga

SEQ ID NO: 271150 - RNA, 19 nt, Artificial Sequence
  Description of Artificial Sequence: Synthetic oligonucleotide
ccgagucagccugugaggg

SEQ ID NO: 271151 - RNA, 19 nt, Artificial Sequence
  Description of Artificial Sequence: Synthetic oligonucleotide
cacuuacagcacacagguc

SEQ ID NO: 271152 - RNA, 19 nt, Artificial Sequence
  Description of Artificial Sequence: Synthetic oligonucleotide
cuuucucucucauccgagu

SEQ ID NO: 271153 - RNA, 19 nt, Artificial Sequence
  Description of Artificial Sequence: Synthetic oligonucleotide
cucaaugcacgagaaccaa

SEQ ID NO: 271154 - RNA, 19 nt, Artificial Sequence
  Description of Artificial Sequence: Synthetic oligonucleotide
uaauacugccaggcuugaa

SEQ ID NO: 271155 - RNA, 19 nt, Artificial Sequence
  Description of Artificial Sequence: Synthetic oligonucleotide
cuggguccguaauaacuaa

SEQ ID NO: 271156 - RNA, 19 nt, Artificial Sequence
  Description of Artificial Sequence: Synthetic oligonucleotide
ccaaugaaaagcgugggua

SEQ ID NO: 271157 - RNA, 19 nt, Artificial Sequence
  Description of Artificial Sequence: Synthetic oligonucleotide
ccguaauaacuaacauuug

SEQ ID NO: 271158 - RNA, 19 nt, Artificial Sequence
  Description of Artificial Sequence: Synthetic oligonucleotide
augaggucuuuuacccgug

SEQ ID NO: 271159 - RNA, 19 nt, Artificial Sequence
  Description of Artificial Sequence: Synthetic oligonucleotide
aggcaguuagagccuugaa

SEQ ID NO: 271160 - RNA, 19 nt, Artificial Sequence
  Description of Artificial Sequence: Synthetic oligonucleotide
gcuaccacguacgcaaaca

SEQ ID NO: 271161 - RNA, 19 nt, Artificial Sequence
  Description of Artificial Sequence: Synthetic oligonucleotide
augcccgugcacccacaug

SEQ ID NO: 271162 - RNA, 19 nt, Artificial Sequence
  Description of Artificial Sequence: Synthetic oligonucleotide
acgugucaguaagaagggu

SEQ ID NO: 271163 - RNA, 19 nt, Artificial Sequence
  Description of Artificial Sequence: Synthetic oligonucleotide
gugcugagaguaagauccc

SEQ ID NO: 271164 - RNA, 19 nt, Artificial Sequence
  Description of Artificial Sequence: Synthetic oligonucleotide
cacugaaugaaggcaguua

SEQ ID NO: 271165 - RNA, 19 nt, Artificial Sequence
  Description of Artificial Sequence: Synthetic oligonucleotide
cugccaggcuugaagacgu

SEQ ID NO: 271166 - RNA, 19 nt, Artificial Sequence
  Description of Artificial Sequence: Synthetic oligonucleotide
ggucguagagucagaguca

SEQ ID NO: 271167 - RNA, 19 nt, Artificial Sequence
  Description of Artificial Sequence: Synthetic oligonucleotide
augcuaugagucacacagu

SEQ ID NO: 271168 - RNA, 19 nt, Artificial Sequence
  Description of Artificial Sequence: Synthetic oligonucleotide
acagcccaaggcgaguaua

SEQ ID NO: 271169 - RNA, 19 nt, Artificial Sequence
  Description of Artificial Sequence: Synthetic oligonucleotide
gcugcaagccaaaugccaa

SEQ ID NO: 271170 - RNA, 19 nt, Artificial Sequence
  Description of Artificial Sequence: Synthetic oligonucleotide
gguccguaauaacuaacau

SEQ ID NO: 271171 - RNA, 19 nt, Artificial Sequence
  Description of Artificial Sequence: Synthetic oligonucleotide
gcuaugagucacacaguga

SEQ ID NO: 271172 - RNA, 19 nt, Artificial Sequence
  Description of Artificial Sequence: Synthetic oligonucleotide
cgugucaguaagaagggua

SEQ ID NO: 271173 - RNA, 19 nt, Artificial Sequence
  Description of Artificial Sequence: Synthetic oligonucleotide
gguucaggcacaccguaau

SEQ ID NO: 271174 - RNA, 19 nt, Artificial Sequence
  Description of Artificial Sequence: Synthetic oligonucleotide
ucguagagucagagucauu

SEQ ID NO: 271175 - RNA, 19 nt, Artificial Sequence
  Description of Artificial Sequence: Synthetic oligonucleotide
ggguaaagggagaaugacu

SEQ ID NO: 271176 - RNA, 19 nt, Artificial Sequence
  Description of Artificial Sequence: Synthetic oligonucleotide
guggucguagagucagagu

SEQ ID NO: 271177 - RNA, 19 nt, Artificial Sequence
  Description of Artificial Sequence: Synthetic oligonucleotide
gucggaucgguagcuuaca

SEQ ID NO: 271178 - RNA, 19 nt, Artificial Sequence
  Description of Artificial Sequence: Synthetic oligonucleotide
gcuaagggaauggguuaug

SEQ ID NO: 271179 - RNA, 19 nt, Artificial Sequence
  Description of Artificial Sequence: Synthetic oligonucleotide
gcggugauucaugugcuga

SEQ ID NO: 271180 - RNA, 19 nt, Artificial Sequence
  Description of Artificial Sequence: Synthetic oligonucleotide
gcaagcacauggauuaagu

SEQ ID NO: 271181 - RNA, 19 nt, Artificial Sequence
  Description of Artificial Sequence: Synthetic oligonucleotide
cggauuuagcauauguuua

SEQ ID NO: 271182 - RNA, 19 nt, Artificial Sequence
  Description of Artificial Sequence: Synthetic oligonucleotide
gucguagagucagagucau

SEQ ID NO: 271183 - RNA, 19 nt, Artificial Sequence
  Description of Artificial Sequence: Synthetic oligonucleotide
cugucguccucgccacauc

SEQ ID NO: 271184 - RNA, 19 nt, Artificial Sequence
  Description of Artificial Sequence: Synthetic oligonucleotide
aaacuccuucugagcuagu

SEQ ID NO: 271185 - RNA, 19 nt, Artificial Sequence
  Description of Artificial Sequence: Synthetic oligonucleotide
aggaagagucggaucggua

SEQ ID NO: 271186 - RNA, 19 nt, Artificial Sequence
  Description of Artificial Sequence: Synthetic oligonucleotide
cccuguaaccugcuaagaa

SEQ ID NO: 271187 - RNA, 19 nt, Artificial Sequence
  Description of Artificial Sequence: Synthetic oligonucleotide
agagucggaucgguagcuu

SEQ ID NO: 271188 - RNA, 19 nt, Artificial Sequence
  Description of Artificial Sequence: Synthetic oligonucleotide
aaccaacguaagagugaua

SEQ ID NO: 271189 - RNA, 19 nt, Artificial Sequence
  Description of Artificial Sequence: Synthetic oligonucleotide
gaugcccgugcacccacau

SEQ ID NO: 271190 - RNA, 19 nt, Artificial Sequence
  Description of Artificial Sequence: Synthetic oligonucleotide
guccuaccuccugacugac

SEQ ID NO: 271191 - RNA, 19 nt, Artificial Sequence
  Description of Artificial Sequence: Synthetic oligonucleotide
cacacgcauacauuccauu

SEQ ID NO: 271192 - RNA, 19 nt, Artificial Sequence
  Description of Artificial Sequence: Synthetic oligonucleotide
caucaacuggguccguaau

SEQ ID NO: 271193 - RNA, 19 nt, Artificial Sequence
  Description of Artificial Sequence: Synthetic oligonucleotide
cugcaagccaaaugccaau

SEQ ID NO: 271194 - RNA, 19 nt, Artificial Sequence
  Description of Artificial Sequence: Synthetic oligonucleotide
ggcuagcaauacauguuaa

SEQ ID NO: 271195 - RNA, 19 nt, Artificial Sequence
  Description of Artificial Sequence: Synthetic oligonucleotide
gcuugcuaagggaaugggu

SEQ ID NO: 271196 - RNA, 19 nt, Artificial Sequence
  Description of Artificial Sequence: Synthetic oligonucleotide
caggucacacgcauacauu

SEQ ID NO: 271197 - RNA, 19 nt, Artificial Sequence
  Description of Artificial Sequence: Synthetic oligonucleotide
ccguaguuuucuuuugggu

SEQ ID NO: 271198 - RNA, 19 nt, Artificial Sequence
  Description of Artificial Sequence: Synthetic oligonucleotide
ggcgucuaacauagagguc

SEQ ID NO: 271199 - RNA, 19 nt, Artificial Sequence
  Description of Artificial Sequence: Synthetic oligonucleotide
ggagaugcccgugcaccca

SEQ ID NO: 271200 - RNA, 19 nt, Artificial Sequence
  Description of Artificial Sequence: Synthetic oligonucleotide
gcucgccuucugcucuucc

SEQ ID NO: 271201 - RNA, 19 nt, Artificial Sequence
  Description of Artificial Sequence: Synthetic oligonucleotide
ccugcuaagaaaccugcuu

SEQ ID NO: 271202 - RNA, 19 nt, Artificial Sequence
  Description of Artificial Sequence: Synthetic oligonucleotide
ccaauugcaucucuacuuu

SEQ ID NO: 271203 - RNA, 19 nt, Artificial Sequence
  Description of Artificial Sequence: Synthetic oligonucleotide
gcacgguuggaacugcuuu

SEQ ID NO: 271204 - RNA, 19 nt, Artificial Sequence
  Description of Artificial Sequence: Synthetic oligonucleotide
ggguaauauagagcaaauu

SEQ ID NO: 271205 - RNA, 19 nt, Artificial Sequence
  Description of Artificial Sequence: Synthetic oligonucleotide
agaugcccgugcacccaca

SEQ ID NO: 271206 - RNA, 19 nt, Artificial Sequence
  Description of Artificial Sequence: Synthetic oligonucleotide
gcagagcaucaugcuauga

SEQ ID NO: 271207 - RNA, 19 nt, Artificial Sequence
  Description of Artificial Sequence: Synthetic oligonucleotide
guucgucccugcagucaga

SEQ ID NO: 271208 - RNA, 19 nt, Artificial Sequence
  Description of Artificial Sequence: Synthetic oligonucleotide
cacauggauuaaguaguuu

SEQ ID NO: 271209 - RNA, 19 nt, Artificial Sequence
  Description of Artificial Sequence: Synthetic oligonucleotide
cgagaaccaauugcaucuc

SEQ ID NO: 271210 - RNA, 19 nt, Artificial Sequence
  Description of Artificial Sequence: Synthetic oligonucleotide
cccguguguucauauuugu

SEQ ID NO: 271211 - RNA, 19 nt, Artificial Sequence
  Description of Artificial Sequence: Synthetic oligonucleotide
gaugcccauccagcucccu

SEQ ID NO: 271212 - RNA, 19 nt, Artificial Sequence
  Description of Artificial Sequence: Synthetic oligonucleotide
ccccugugcguuuucacau

SEQ ID NO: 271213 - RNA, 19 nt, Artificial Sequence
  Description of Artificial Sequence: Synthetic oligonucleotide
cguggguaauauagagcaa

SEQ ID NO: 271214 - RNA, 19 nt, Artificial Sequence
  Description of Artificial Sequence: Synthetic oligonucleotide
ccaacguaagagugauaau

SEQ ID NO: 271215 - RNA, 19 nt, Artificial Sequence
  Description of Artificial Sequence: Synthetic oligonucleotide
guccuccacgguggaaacu

SEQ ID NO: 271216 - RNA, 19 nt, Artificial Sequence
  Description of Artificial Sequence: Synthetic oligonucleotide
ggguuauggcugggccaac

SEQ ID NO: 271217 - RNA, 19 nt, Artificial Sequence
  Description of Artificial Sequence: Synthetic oligonucleotide
ccgacaguugcucgcugcu

SEQ ID NO: 271218 - RNA, 19 nt, Artificial Sequence
  Description of Artificial Sequence: Synthetic oligonucleotide
ccacguacgcaaacacaau

SEQ ID NO: 271219 - RNA, 19 nt, Artificial Sequence
  Description of Artificial Sequence: Synthetic oligonucleotide
ggguggucguagagucaga

SEQ ID NO: 271220 - RNA, 19 nt, Artificial Sequence
  Description of Artificial Sequence: Synthetic oligonucleotide
cuccuccccugugcguuuu

SEQ ID NO: 271221 - RNA, 19 nt, Artificial Sequence
  Description of Artificial Sequence: Synthetic oligonucleotide
uguguaaggagcuacaggc

SEQ ID NO: 271222 - RNA, 19 nt, Artificial Sequence
  Description of Artificial Sequence: Synthetic oligonucleotide
cuuguugacauuugaaugg

SEQ ID NO: 271223 - RNA, 19 nt, Artificial Sequence
  Description of Artificial Sequence: Synthetic oligonucleotide
aguucggucacuugugucc

SEQ ID NO: 271224 - RNA, 19 nt, Artificial Sequence
  Description of Artificial Sequence: Synthetic oligonucleotide
cuaugugggauccugauag

SEQ ID NO: 271225 - RNA, 19 nt, Artificial Sequence
  Description of Artificial Sequence: Synthetic oligonucleotide
gacauauucaggcauguac

SEQ ID NO: 271226 - RNA, 19 nt, Artificial Sequence
  Description of Artificial Sequence: Synthetic oligonucleotide
uuaggugccauccuuuuga

SEQ ID NO: 271227 - RNA, 19 nt, Artificial Sequence
  Description of Artificial Sequence: Synthetic oligonucleotide
uuuguaguagaagaguuga

SEQ ID NO: 271228 - RNA, 19 nt, Artificial Sequence
  Description of Artificial Sequence: Synthetic oligonucleotide
auuugaaugggccugcacu

SEQ ID NO: 271229 - RNA, 19 nt, Artificial Sequence
  Description of Artificial Sequence: Synthetic oligonucleotide
ugucuuuguaguagaagag

SEQ ID NO: 271230 - RNA, 19 nt, Artificial Sequence
  Description of Artificial Sequence: Synthetic oligonucleotide
ucuaaggaugaacugcccc

SEQ ID NO: 271231 - RNA, 19 nt, Artificial Sequence
  Description of Artificial Sequence: Synthetic oligonucleotide
ccauuuaugagccaguucc

SEQ ID NO: 271232 - RNA, 19 nt, Artificial Sequence
  Description of Artificial Sequence: Synthetic oligonucleotide
aaggaagugccuuccauga

SEQ ID NO: 271233 - RNA, 19 nt, Artificial Sequence
  Description of Artificial Sequence: Synthetic oligonucleotide
ucacuugugucccuuguag

SEQ ID NO: 271234 - RNA, 19 nt, Artificial Sequence
  Description of Artificial Sequence: Synthetic oligonucleotide
augauggguaccucuaagg

SEQ ID NO: 271235 - RNA, 19 nt, Artificial Sequence
  Description of Artificial Sequence: Synthetic oligonucleotide
uguaguuggccugaggaag

SEQ ID NO: 271236 - RNA, 19 nt, Artificial Sequence
  Description of Artificial Sequence: Synthetic oligonucleotide
uaugcauccucuucccagg

SEQ ID NO: 271237 - RNA, 19 nt, Artificial Sequence
  Description of Artificial Sequence: Synthetic oligonucleotide
ggauaguccauuuaugagc

SEQ ID NO: 271238 - RNA, 19 nt, Artificial Sequence
  Description of Artificial Sequence: Synthetic oligonucleotide
ucucaccacagucaaagga

SEQ ID NO: 271239 - RNA, 19 nt, Artificial Sequence
  Description of Artificial Sequence: Synthetic oligonucleotide
gaucccuccgcccagcggg

SEQ ID NO: 271240 - RNA, 19 nt, Artificial Sequence
  Description of Artificial Sequence: Synthetic oligonucleotide
acagcuaauuccugguuuc

SEQ ID NO: 271241 - RNA, 19 nt, Artificial Sequence
  Description of Artificial Sequence: Synthetic oligonucleotide
uuuagccaacuccagaguc

SEQ ID NO: 271242 - RNA, 19 nt, Artificial Sequence
  Description of Artificial Sequence: Synthetic oligonucleotide
aggauaguccauuuaugag

SEQ ID NO: 271243 - RNA, 19 nt, Artificial Sequence
  Description of Artificial Sequence: Synthetic oligonucleotide
agaguugaucuccacguag

SEQ ID NO: 271244 - RNA, 19 nt, Artificial Sequence
  Description of Artificial Sequence: Synthetic oligonucleotide
gaggauaguccauuuauga

SEQ ID NO: 271245 - RNA, 19 nt, Artificial Sequence
  Description of Artificial Sequence: Synthetic oligonucleotide
uuagccaacuccagagucc

SEQ ID NO: 271246 - RNA, 19 nt, Artificial Sequence
  Description of Artificial Sequence: Synthetic oligonucleotide
gauaagaggcuacugcuga

SEQ ID NO: 271247 - RNA, 19 nt, Artificial Sequence
  Description of Artificial Sequence: Synthetic oligonucleotide
aguuccgcagcuuuaucuc

SEQ ID NO: 271248 - RNA, 19 nt, Artificial Sequence
  Description of Artificial Sequence: Synthetic oligonucleotide
agugcuaggaaaguggcug

SEQ ID NO: 271249 - RNA, 19 nt, Artificial Sequence
  Description of Artificial Sequence: Synthetic oligonucleotide
cacuuguuuagccaacucc

SEQ ID NO: 271250 - RNA, 19 nt, Artificial Sequence
  Description of Artificial Sequence: Synthetic oligonucleotide
gaugauggguaccucuaag

SEQ ID NO: 271251 - RNA, 19 nt, Artificial Sequence
  Description of Artificial Sequence: Synthetic oligonucleotide
cuuuaucuccagcauggcg

SEQ ID NO: 271252 - RNA, 19 nt, Artificial Sequence
  Description of Artificial Sequence: Synthetic oligonucleotide
uguaguagaagaguugauc

SEQ ID NO: 271253 - RNA, 19 nt, Artificial Sequence
  Description of Artificial Sequence: Synthetic oligonucleotide
aaguucggucacuuguguc

SEQ ID NO: 271254 - RNA, 19 nt, Artificial Sequence
  Description of Artificial Sequence: Synthetic oligonucleotide
ucagacgguccccugauga

SEQ ID NO: 271255 - RNA, 19 nt, Artificial Sequence
  Description of Artificial Sequence: Synthetic oligonucleotide
gaagugccuuccaugaugg

SEQ ID NO: 271256 - RNA, 19 nt, Artificial Sequence
  Description of Artificial Sequence: Synthetic oligonucleotide
uugacauuugaaugggccu

SEQ ID NO: 271257 - RNA, 19 nt, Artificial Sequence
  Description of Artificial Sequence: Synthetic oligonucleotide
ucaggcuccucucauacuc

SEQ ID NO: 271258 - RNA, 19 nt, Artificial Sequence
  Description of Artificial Sequence: Synthetic oligonucleotide
ucaggcauguacuuuugcu

SEQ ID NO: 271259 - RNA, 19 nt, Artificial Sequence
  Description of Artificial Sequence: Synthetic oligonucleotide
gagccuguauccuucagac

SEQ ID NO: 271260 - RNA, 19 nt, Artificial Sequence
  Description of Artificial Sequence: Synthetic oligonucleotide
ugucccuucugacaccugc

SEQ ID NO: 271261 - RNA, 19 nt, Artificial Sequence
  Description of Artificial Sequence: Synthetic oligonucleotide
aucuccacguagcacgaac

SEQ ID NO: 271262 - RNA, 19 nt, Artificial Sequence
  Description of Artificial Sequence: Synthetic oligonucleotide
agauugcucacuuguuuag

SEQ ID NO: 271263 - RNA, 19 nt, Artificial Sequence
  Description of Artificial Sequence: Synthetic oligonucleotide
cucuaagcuggcaaucugc

SEQ ID NO: 271264 - RNA, 19 nt, Artificial Sequence
  Description of Artificial Sequence: Synthetic oligonucleotide
accuggugugaucucaaac

SEQ ID NO: 271265 - RNA, 19 nt, Artificial Sequence
  Description of Artificial Sequence: Synthetic oligonucleotide
gaugacacggcggauggcc

SEQ ID NO: 271266 - RNA, 19 nt, Artificial Sequence
  Description of Artificial Sequence: Synthetic oligonucleotide
gaagagcccuucuucacug

SEQ ID NO: 271267 - RNA, 19 nt, Artificial Sequence
  Description of Artificial Sequence: Synthetic oligonucleotide
guaguagaagaguugaucu

SEQ ID NO: 271268 - RNA, 19 nt, Artificial Sequence
  Description of Artificial Sequence: Synthetic oligonucleotide
ugagccuguauccuucaga

SEQ ID NO: 271269 - RNA, 19 nt, Artificial Sequence
  Description of Artificial Sequence: Synthetic oligonucleotide
uggccgaaggauguuaggg

SEQ ID NO: 271270 - RNA, 19 nt, Artificial Sequence
  Description of Artificial Sequence: Synthetic oligonucleotide
cacgcagagaggauagucc

SEQ ID NO: 271271 - RNA, 19 nt, Artificial Sequence
  Description of Artificial Sequence: Synthetic oligonucleotide
ucauaccuggcgaaaggga

SEQ ID NO: 271272 - RNA, 19 nt, Artificial Sequence
  Description of Artificial Sequence: Synthetic oligonucleotide
ugggcuccgguuauguucc

SEQ ID NO: 271273 - RNA, 19 nt, Artificial Sequence
  Description of Artificial Sequence: Synthetic oligonucleotide
cucaaugcuuuucaggcuc

SEQ ID NO: 271274 - RNA, 19 nt, Artificial Sequence
  Description of Artificial Sequence: Synthetic oligonucleotide
ucuccacguagcacgaacc

SEQ ID NO: 271275 - RNA, 19 nt, Artificial Sequence
  Description of Artificial Sequence: Synthetic oligonucleotide
uguggccgaaggauguuag

SEQ ID NO: 271276 - RNA, 19 nt, Artificial Sequence
  Description of Artificial Sequence: Synthetic oligonucleotide
ucaagagcccacucggugu

SEQ ID NO: 271277 - RNA, 19 nt, Artificial Sequence
  Description of Artificial Sequence: Synthetic oligonucleotide
gaggcuacugcugaucuug

SEQ ID NO: 271278 - RNA, 19 nt, Artificial Sequence
  Description of Artificial Sequence: Synthetic oligonucleotide
ucgcaagucagcacugccc

SEQ ID NO: 271279 - RNA, 19 nt, Artificial Sequence
  Description of Artificial Sequence: Synthetic oligonucleotide
agccgcugcccaaagaucc

SEQ ID NO: 271280 - RNA, 19 nt, Artificial Sequence
  Description of Artificial Sequence: Synthetic oligonucleotide
agcuacaggcagaagaguc

SEQ ID NO: 271281 - RNA, 19 nt, Artificial Sequence
  Description of Artificial Sequence: Synthetic oligonucleotide
cugggaaccucuucggagc

SEQ ID NO: 271282 - RNA, 19 nt, Artificial Sequence
  Description of Artificial Sequence: Synthetic oligonucleotide
ucaaugcuuuucaggcucc

SEQ ID NO: 271283 - RNA, 19 nt, Artificial Sequence
  Description of Artificial Sequence: Synthetic oligonucleotide
uucgcaagucagcacugcc

SEQ ID NO: 271284 - RNA, 19 nt, Artificial Sequence
  Description of Artificial Sequence: Synthetic oligonucleotide
cacguagcacgaaccaucg

SEQ ID NO: 271285 - RNA, 19 nt, Artificial Sequence
  Description of Artificial Sequence: Synthetic oligonucleotide
aacaagugcuucccugggu

SEQ ID NO: 271286 - RNA, 19 nt, Artificial Sequence
  Description of Artificial Sequence: Synthetic oligonucleotide
auacucaguccucuguuga

SEQ ID NO: 271287 - RNA, 19 nt, Artificial Sequence
  Description of Artificial Sequence: Synthetic oligonucleotide
uaguagaagaguugaucuc

SEQ ID NO: 271288 - RNA, 19 nt, Artificial Sequence
  Description of Artificial Sequence: Synthetic oligonucleotide
gcuauagaccaugacaugc

SEQ ID NO: 271289 - RNA, 19 nt, Artificial Sequence
  Description of Artificial Sequence: Synthetic oligonucleotide
uguacugagccuguauccu

SEQ ID NO: 271290 - RNA, 19 nt, Artificial Sequence
  Description of Artificial Sequence: Synthetic oligonucleotide
gaguugaucuccacguagc

SEQ ID NO: 271291 - RNA, 19 nt, Artificial Sequence
  Description of Artificial Sequence: Synthetic oligonucleotide
cucauaccuggcgaaaggg

SEQ ID NO: 271292 - RNA, 19 nt, Artificial Sequence
  Description of Artificial Sequence: Synthetic oligonucleotide
ugcucacuuguuuagccaa

SEQ ID NO: 271293 - RNA, 19 nt, Artificial Sequence
  Description of Artificial Sequence: Synthetic oligonucleotide
cauacucaguccucuguug

SEQ ID NO: 271294 - RNA, 19 nt, Artificial Sequence
  Description of Artificial Sequence: Synthetic oligonucleotide
uggacuaugugggauccug

SEQ ID NO: 271295 - RNA, 19 nt, Artificial Sequence
  Description of Artificial Sequence: Synthetic oligonucleotide
uggcgaaagggaugacugg

SEQ ID NO: 271296 - RNA, 19 nt, Artificial Sequence
  Description of Artificial Sequence: Synthetic oligonucleotide
uugcucacuuguuuagcca

SEQ ID NO: 271297 - RNA, 19 nt, Artificial Sequence
  Description of Artificial Sequence: Synthetic oligonucleotide
ggaagugccuuccaugaug

SEQ ID NO: 271298 - RNA, 19 nt, Artificial Sequence
  Description of Artificial Sequence: Synthetic oligonucleotide
gguuuggagaagcauccag

SEQ ID NO: 271299 - RNA, 19 nt, Artificial Sequence
  Description of Artificial Sequence: Synthetic oligonucleotide
acgcagagaggauagucca

SEQ ID NO: 271300 - RNA, 19 nt, Artificial Sequence
  Description of Artificial Sequence: Synthetic oligonucleotide
uccuguaucuucucucgaa

SEQ ID NO: 271301 - RNA, 19 nt, Artificial Sequence
  Description of Artificial Sequence: Synthetic oligonucleotide
cucaagagcccacucggug

SEQ ID NO: 271302 - RNA, 19 nt, Artificial Sequence
  Description of Artificial Sequence: Synthetic oligonucleotide
uguuggggagaaguucuag

SEQ ID NO: 271303 - RNA, 19 nt, Artificial Sequence
  Description of Artificial Sequence: Synthetic oligonucleotide
cuacaggcagaagagucgc

SEQ ID NO: 271304 - RNA, 19 nt, Artificial Sequence
  Description of Artificial Sequence: Synthetic oligonucleotide
ucugcguccucacgugccc

SEQ ID NO: 271305 - RNA, 19 nt, Artificial Sequence
  Description of Artificial Sequence: Synthetic oligonucleotide
ccucuaaggaugaacugcc

SEQ ID NO: 271306 - RNA, 19 nt, Artificial Sequence
  Description of Artificial Sequence: Synthetic oligonucleotide
uccucauaccuggcgaaag

SEQ ID NO: 271307 - RNA, 19 nt, Artificial Sequence
  Description of Artificial Sequence: Synthetic oligonucleotide
cagaguaugcauccucuuc

SEQ ID NO: 271308 - RNA, 19 nt, Artificial Sequence
  Description of Artificial Sequence: Synthetic oligonucleotide
uggagcgagugaaguaucu

SEQ ID NO: 271309 - RNA, 19 nt, Artificial Sequence
  Description of Artificial Sequence: Synthetic oligonucleotide
agaggauaguccauuuaug

SEQ ID NO: 271310 - RNA, 19 nt, Artificial Sequence
  Description of Artificial Sequence: Synthetic oligonucleotide
agaaguucggucacuugug

SEQ ID NO: 271311 - RNA, 19 nt, Artificial Sequence
  Description of Artificial Sequence: Synthetic oligonucleotide
uuguaguagaagaguugau

SEQ ID NO: 271312 - RNA, 19 nt, Artificial Sequence
  Description of Artificial Sequence: Synthetic oligonucleotide
agaccaugacaugcuggcc

SEQ ID NO: 271313 - RNA, 19 nt, Artificial Sequence
  Description of Artificial Sequence: Synthetic oligonucleotide
agccuguauccuucagacg

SEQ ID NO: 271314 - RNA, 19 nt, Artificial Sequence
  Description of Artificial Sequence: Synthetic oligonucleotide
cucuaaggaugaacugccc

SEQ ID NO: 271315 - RNA, 19 nt, Artificial Sequence
  Description of Artificial Sequence: Synthetic oligonucleotide
ucuuggagcgagugaagua

SEQ ID NO: 271316 - RNA, 19 nt, Artificial Sequence
  Description of Artificial Sequence: Synthetic oligonucleotide
aggcauacggaagagcccu

SEQ ID NO: 271317 - RNA, 19 nt, Artificial Sequence
  Description of Artificial Sequence: Synthetic oligonucleotide
aguaucuggcagcgaaagu

SEQ ID NO: 271318 - RNA, 19 nt, Artificial Sequence
  Description of Artificial Sequence: Synthetic oligonucleotide
uccuuguggggcugucagg

SEQ ID NO: 271319 - RNA, 19 nt, Artificial Sequence
  Description of Artificial Sequence: Synthetic oligonucleotide
uacucaguccucuguugac

SEQ ID NO: 271320 - RNA, 19 nt, Artificial Sequence
  Description of Artificial Sequence: Synthetic oligonucleotide
cagauggcccugcugguag

SEQ ID NO: 271321 - RNA, 19 nt, Artificial Sequence
  Description of Artificial Sequence: Synthetic oligonucleotide
agagucgcuggcccggcag

SEQ ID NO: 271322 - RNA, 19 nt, Artificial Sequence
  Description of Artificial Sequence: Synthetic oligonucleotide
caggcauacggaagagccc

SEQ ID NO: 271323 - RNA, 19 nt, Artificial Sequence
  Description of Artificial Sequence: Synthetic oligonucleotide
guagcacgaaccaucgcug

SEQ ID NO: 271324 - RNA, 19 nt, Artificial Sequence
  Description of Artificial Sequence: Synthetic oligonucleotide
uaccuggcgaaagggauga

SEQ ID NO: 271325 - RNA, 19 nt, Artificial Sequence
  Description of Artificial Sequence: Synthetic oligonucleotide
cuuaggugccauccuuuug

SEQ ID NO: 271326 - RNA, 19 nt, Artificial Sequence
  Description of Artificial Sequence: Synthetic oligonucleotide
auaucacgcugggagcugg

SEQ ID NO: 271327 - RNA, 19 nt, Artificial Sequence
  Description of Artificial Sequence: Synthetic oligonucleotide
auaaaucccuggggcuugc

SEQ ID NO: 271328 - RNA, 19 nt, Artificial Sequence
  Description of Artificial Sequence: Synthetic oligonucleotide
cuggccaggcauacggaag

SEQ ID NO: 271329 - RNA, 19 nt, Artificial Sequence
  Description of Artificial Sequence: Synthetic oligonucleotide
ucuuucuauguggcgcuug

SEQ ID NO: 271330 - RNA, 19 nt, Artificial Sequence
  Description of Artificial Sequence: Synthetic oligonucleotide
agcuaauuccugguuucag

SEQ ID NO: 271331 - RNA, 19 nt, Artificial Sequence
  Description of Artificial Sequence: Synthetic oligonucleotide
aggcucuuucuauguggcg

SEQ ID NO: 271332 - RNA, 19 nt, Artificial Sequence
  Description of Artificial Sequence: Synthetic oligonucleotide
gaagauugcucacuuguuu

SEQ ID NO: 271333 - RNA, 19 nt, Artificial Sequence
  Description of Artificial Sequence: Synthetic oligonucleotide
aucucuaagcuggcaaucu

SEQ ID NO: 271334 - RNA, 19 nt, Artificial Sequence
  Description of Artificial Sequence: Synthetic oligonucleotide
gcuacaggcagaagagucg

SEQ ID NO: 271335 - RNA, 19 nt, Artificial Sequence
  Description of Artificial Sequence: Synthetic oligonucleotide
ucgguguguaaggagcuac

SEQ ID NO: 271336 - RNA, 19 nt, Artificial Sequence
  Description of Artificial Sequence: Synthetic oligonucleotide
acguagcacgaaccaucgc

SEQ ID NO: 271337 - RNA, 19 nt, Artificial Sequence
  Description of Artificial Sequence: Synthetic oligonucleotide
cuggauccucuaucugugg

SEQ ID NO: 271338 - RNA, 19 nt, Artificial Sequence
  Description of Artificial Sequence: Synthetic oligonucleotide
uaugugggauccugauagu

SEQ ID NO: 271339 - RNA, 19 nt, Artificial Sequence
  Description of Artificial Sequence: Synthetic oligonucleotide
uuucgcaagucagcacugc

SEQ ID NO: 271340 - RNA, 19 nt, Artificial Sequence
  Description of Artificial Sequence: Synthetic oligonucleotide
cauuugaaugggccugcac

SEQ ID NO: 271341 - RNA, 19 nt, Artificial Sequence
  Description of Artificial Sequence: Synthetic oligonucleotide
uuggagcgagugaaguauc

SEQ ID NO: 271342 - RNA, 19 nt, Artificial Sequence
  Description of Artificial Sequence: Synthetic oligonucleotide
cuucggagccccacucugc

SEQ ID NO: 271343 - RNA, 19 nt, Artificial Sequence
  Description of Artificial Sequence: Synthetic oligonucleotide
cugggcgcagcugaggaag

SEQ ID NO: 271344 - RNA, 19 nt, Artificial Sequence
  Description of Artificial Sequence: Synthetic oligonucleotide
cauggcguacuucuuccuc

SEQ ID NO: 271345 - RNA, 19 nt, Artificial Sequence
  Description of Artificial Sequence: Synthetic oligonucleotide
ggagagucucuguacugag

SEQ ID NO: 271346 - RNA, 19 nt, Artificial Sequence
  Description of Artificial Sequence: Synthetic oligonucleotide
gagagucucuguacugagc

SEQ ID NO: 271347 - RNA, 19 nt, Artificial Sequence
  Description of Artificial Sequence: Synthetic oligonucleotide
ccggaugaaguccacacac

SEQ ID NO: 271348 - RNA, 19 nt, Artificial Sequence
  Description of Artificial Sequence: Synthetic oligonucleotide
cacgaaccaucgcugcugc

SEQ ID NO: 271349 - RNA, 19 nt, Artificial Sequence
  Description of Artificial Sequence: Synthetic oligonucleotide
agcggggcccagaugacac

SEQ ID NO: 271350 - RNA, 19 nt, Artificial Sequence
  Description of Artificial Sequence: Synthetic oligonucleotide
agcacgaaccaucgcugcu

SEQ ID NO: 271351 - RNA, 19 nt, Artificial Sequence
  Description of Artificial Sequence: Synthetic oligonucleotide
ggugugaucucaaacaagu

SEQ ID NO: 271352 - RNA, 19 nt, Artificial Sequence
  Description of Artificial Sequence: Synthetic oligonucleotide
uucucucgcuccccggaac

SEQ ID NO: 271353 - RNA, 19 nt, Artificial Sequence
  Description of Artificial Sequence: Synthetic oligonucleotide
guggccgaaggauguuagg

SEQ ID NO: 271354 - RNA, 19 nt, Artificial Sequence
  Description of Artificial Sequence: Synthetic oligonucleotide
uucagacgguccccugaug

SEQ ID NO: 271355 - RNA, 19 nt, Artificial Sequence
  Description of Artificial Sequence: Synthetic oligonucleotide
ugaguccucgcucccggau

SEQ ID NO: 271356 - RNA, 19 nt, Artificial Sequence
  Description of Artificial Sequence: Synthetic oligonucleotide
ggccgaaggauguuagggc

SEQ ID NO: 271357 - RNA, 19 nt, Artificial Sequence
  Description of Artificial Sequence: Synthetic oligonucleotide
agcugggcgcagcugagga

SEQ ID NO: 271358 - RNA, 19 nt, Artificial Sequence
  Description of Artificial Sequence: Synthetic oligonucleotide
ucugaccgggaccccugcc

SEQ ID NO: 271359 - RNA, 19 nt, Artificial Sequence
  Description of Artificial Sequence: Synthetic oligonucleotide
ugacacggcggauggccug

SEQ ID NO: 271360 - RNA, 19 nt, Artificial Sequence
  Description of Artificial Sequence: Synthetic oligonucleotide
cuauagaccaugacaugcu

SEQ ID NO: 271361 - RNA, 19 nt, Artificial Sequence
  Description of Artificial Sequence: Synthetic oligonucleotide
auacggaagagcccuucuu

SEQ ID NO: 271362 - RNA, 19 nt, Artificial Sequence
  Description of Artificial Sequence: Synthetic oligonucleotide
gacagcuaauuccugguuu

SEQ ID NO: 271363 - RNA, 19 nt, Artificial Sequence
  Description of Artificial Sequence: Synthetic oligonucleotide
gguguguaaggagcuacag

SEQ ID NO: 271364 - RNA, 19 nt, Artificial Sequence
  Description of Artificial Sequence: Synthetic oligonucleotide
ggauaagaggcuacugcug

SEQ ID NO: 271365 - RNA, 19 nt, Artificial Sequence
  Description of Artificial Sequence: Synthetic oligonucleotide
ggcgaaagggaugacuggc

SEQ ID NO: 271366 - RNA, 19 nt, Artificial Sequence
  Description of Artificial Sequence: Synthetic oligonucleotide
cagacucuuggagcgagug

SEQ ID NO: 271367 - RNA, 19 nt, Artificial Sequence
  Description of Artificial Sequence: Synthetic oligonucleotide
auaccuggcgaaagggaug

SEQ ID NO: 271368 - RNA, 19 nt, Artificial Sequence
  Description of Artificial Sequence: Synthetic oligonucleotide
gugugaucucaaacaagug

SEQ ID NO: 271369 - RNA, 19 nt, Artificial Sequence
  Description of Artificial Sequence: Synthetic oligonucleotide
agacagcuaauuccugguu

SEQ ID NO: 271370 - RNA, 19 nt, Artificial Sequence
  Description of Artificial Sequence: Synthetic oligonucleotide
gaaguucggucacuugugu

SEQ ID NO: 271371 - RNA, 19 nt, Artificial Sequence
  Description of Artificial Sequence: Synthetic oligonucleotide
ucccaacagucaagcuucc

SEQ ID NO: 271372 - RNA, 19 nt, Artificial Sequence
  Description of Artificial Sequence: Synthetic oligonucleotide
ucacgugcccgcucugagu

SEQ ID NO: 271373 - RNA, 19 nt, Artificial Sequence
  Description of Artificial Sequence: Synthetic oligonucleotide
aagccgucggcagcaucuc

SEQ ID NO: 271374 - RNA, 19 nt, Artificial Sequence
  Description of Artificial Sequence: Synthetic oligonucleotide
gucuuuguaguagaagagu

SEQ ID NO: 271375 - RNA, 19 nt, Artificial Sequence
  Description of Artificial Sequence: Synthetic oligonucleotide
uggaagaaguucggucacu

SEQ ID NO: 271376 - RNA, 19 nt, Artificial Sequence
  Description of Artificial Sequence: Synthetic oligonucleotide
ggcuauagaccaugacaug

SEQ ID NO: 271377 - RNA, 19 nt, Artificial Sequence
  Description of Artificial Sequence: Synthetic oligonucleotide
gaagccgucggcagcaucu

SEQ ID NO: 271378 - RNA, 19 nt, Artificial Sequence
  Description of Artificial Sequence: Synthetic oligonucleotide
cacuugugucccuuguaga

SEQ ID NO: 271379 - RNA, 19 nt, Artificial Sequence
  Description of Artificial Sequence: Synthetic oligonucleotide
ccucauaccuggcgaaagg

SEQ ID NO: 271380 - RNA, 19 nt, Artificial Sequence
  Description of Artificial Sequence: Synthetic oligonucleotide
cucgcuccccggaaccacc

SEQ ID NO: 271381 - RNA, 19 nt, Artificial Sequence
  Description of Artificial Sequence: Synthetic oligonucleotide
aagugccuuccaugauggu

SEQ ID NO: 271382 - RNA, 19 nt, Artificial Sequence
  Description of Artificial Sequence: Synthetic oligonucleotide
agcccacucgguguguaag

SEQ ID NO: 271383 - RNA, 19 nt, Artificial Sequence
  Description of Artificial Sequence: Synthetic oligonucleotide
cauaccuggcgaaagggau

SEQ ID NO: 271384 - RNA, 19 nt, Artificial Sequence
  Description of Artificial Sequence: Synthetic oligonucleotide
guaguuggccugaggaaga

SEQ ID NO: 271385 - RNA, 19 nt, Artificial Sequence
  Description of Artificial Sequence: Synthetic oligonucleotide
gacuaugugggauccugau

SEQ ID NO: 271386 - RNA, 19 nt, Artificial Sequence
  Description of Artificial Sequence: Synthetic oligonucleotide
gugguggcccugcucuuag

SEQ ID NO: 271387 - RNA, 19 nt, Artificial Sequence
  Description of Artificial Sequence: Synthetic oligonucleotide
gccggccuugaguacaggg

SEQ ID NO: 271388 - RNA, 19 nt, Artificial Sequence
  Description of Artificial Sequence: Synthetic oligonucleotide
caguagcaggcgaucagca

SEQ ID NO: 271389 - RNA, 19 nt, Artificial Sequence
  Description of Artificial Sequence: Synthetic oligonucleotide
gcuuucgcaagucagcacu

SEQ ID NO: 271390 - RNA, 19 nt, Artificial Sequence
  Description of Artificial Sequence: Synthetic oligonucleotide
gagaagcauccagauccug

SEQ ID NO: 271391 - RNA, 19 nt, Artificial Sequence
  Description of Artificial Sequence: Synthetic oligonucleotide
augcugaaccaaggaagug

SEQ ID NO: 271392 - RNA, 19 nt, Artificial Sequence
  Description of Artificial Sequence: Synthetic oligonucleotide
gggacccauagguuuggag

SEQ ID NO: 271393 - RNA, 19 nt, Artificial Sequence
  Description of Artificial Sequence: Synthetic oligonucleotide
caagcuucccagaguggca

SEQ ID NO: 271394 - RNA, 19 nt, Artificial Sequence
  Description of Artificial Sequence: Synthetic oligonucleotide
ggaaccucuucggagcccc

SEQ ID NO: 271395 - RNA, 19 nt, Artificial Sequence
  Description of Artificial Sequence: Synthetic oligonucleotide
aggagcgccucaggguugg

SEQ ID NO: 271396 - RNA, 19 nt, Artificial Sequence
  Description of Artificial Sequence: Synthetic oligonucleotide
cuccacguagcacgaacca

SEQ ID NO: 271397 - RNA, 19 nt, Artificial Sequence
  Description of Artificial Sequence: Synthetic oligonucleotide
guguaaggagcuacaggca

SEQ ID NO: 271398 - RNA, 19 nt, Artificial Sequence
  Description of Artificial Sequence: Synthetic oligonucleotide
cauaucacgcugggagcug

SEQ ID NO: 271399 - RNA, 19 nt, Artificial Sequence
  Description of Artificial Sequence: Synthetic oligonucleotide
cugcuuucgcaagucagca

SEQ ID NO: 271400 - RNA, 19 nt, Artificial Sequence
  Description of Artificial Sequence: Synthetic oligonucleotide
cuuggagcgagugaaguau

SEQ ID NO: 271401 - RNA, 19 nt, Artificial Sequence
  Description of Artificial Sequence: Synthetic oligonucleotide
uccccggaaccaccuggug

SEQ ID NO: 271402 - RNA, 19 nt, Artificial Sequence
  Description of Artificial Sequence: Synthetic oligonucleotide
cacugaguccucgcucccg

SEQ ID NO: 271403 - RNA, 19 nt, Artificial Sequence
  Description of Artificial Sequence: Synthetic oligonucleotide
ucuggacacucaucuuguu

SEQ ID NO: 271404 - RNA, 19 nt, Artificial Sequence
  Description of Artificial Sequence: Synthetic oligonucleotide
ggccauacuuccucucaug

SEQ ID NO: 271405 - RNA, 19 nt, Artificial Sequence
  Description of Artificial Sequence: Synthetic oligonucleotide
uugggcucucugaccggga

SEQ ID NO: 271406 - RNA, 19 nt, Artificial Sequence
  Description of Artificial Sequence: Synthetic oligonucleotide
cugggacccauagguuugg

SEQ ID NO: 271407 - RNA, 19 nt, Artificial Sequence
  Description of Artificial Sequence: Synthetic oligonucleotide
gcccacucgguguguaagg

SEQ ID NO: 271408 - RNA, 19 nt, Artificial Sequence
  Description of Artificial Sequence: Synthetic oligonucleotide
aggcuacugcugaucuugg

SEQ ID NO: 271409 - RNA, 19 nt, Artificial Sequence
  Description of Artificial Sequence: Synthetic oligonucleotide
gcuaauuccugguuucagu

SEQ ID NO: 271410 - RNA, 19 nt, Artificial Sequence
  Description of Artificial Sequence: Synthetic oligonucleotide
ugggcgcagcugaggaagu

SEQ ID NO: 271411 - RNA, 19 nt, Artificial Sequence
  Description of Artificial Sequence: Synthetic oligonucleotide
agaggcuacugcugaucuu

SEQ ID NO: 271412 - RNA, 19 nt, Artificial Sequence
  Description of Artificial Sequence: Synthetic oligonucleotide
cccaaagaucccuccgccc

SEQ ID NO: 271413 - RNA, 19 nt, Artificial Sequence
  Description of Artificial Sequence: Synthetic oligonucleotide
gcgagugaaguaucuggca

SEQ ID NO: 271414 - RNA, 19 nt, Artificial Sequence
  Description of Artificial Sequence: Synthetic oligonucleotide
augaggcuauagaccauga

SEQ ID NO: 271415 - RNA, 19 nt, Artificial Sequence
  Description of Artificial Sequence: Synthetic oligonucleotide
acauuugaaugggccugca

SEQ ID NO: 271416 - RNA, 19 nt, Artificial Sequence
  Description of Artificial Sequence: Synthetic oligonucleotide
ggagcgagugaaguaucug

SEQ ID NO: 271417 - RNA, 19 nt, Artificial Sequence
  Description of Artificial Sequence: Synthetic oligonucleotide
gccgagacaucugcuuucg

SEQ ID NO: 271418 - RNA, 19 nt, Artificial Sequence
  Description of Artificial Sequence: Synthetic oligonucleotide
uggccacgcagagaggaua

SEQ ID NO: 271419 - RNA, 19 nt, Artificial Sequence
  Description of Artificial Sequence: Synthetic oligonucleotide
cagccggccuugaguacag

SEQ ID NO: 271420 - RNA, 19 nt, Artificial Sequence
  Description of Artificial Sequence: Synthetic oligonucleotide
gcacgaaccaucgcugcug

SEQ ID NO: 271421 - RNA, 19 nt, Artificial Sequence
  Description of Artificial Sequence: Synthetic oligonucleotide
uaguuggccugaggaagau

SEQ ID NO: 271422 - RNA, 19 nt, Artificial Sequence
  Description of Artificial Sequence: Synthetic oligonucleotide
agcugcuaacagaggccuc

SEQ ID NO: 271423 - RNA, 19 nt, Artificial Sequence
  Description of Artificial Sequence: Synthetic oligonucleotide
ggccacgcagagaggauag

SEQ ID NO: 271424 - RNA, 19 nt, Artificial Sequence
  Description of Artificial Sequence: Synthetic oligonucleotide
agacauauucaggcaugua

SEQ ID NO: 271425 - RNA, 19 nt, Artificial Sequence
  Description of Artificial Sequence: Synthetic oligonucleotide
uaaaucccuggggcuugcu

SEQ ID NO: 271426 - RNA, 19 nt, Artificial Sequence
  Description of Artificial Sequence: Synthetic oligonucleotide
caggagcgccucaggguug

SEQ ID NO: 271427 - RNA, 19 nt, Artificial Sequence
  Description of Artificial Sequence: Synthetic oligonucleotide
augacacggcggauggccu

SEQ ID NO: 271428 - RNA, 19 nt, Artificial Sequence
  Description of Artificial Sequence: Synthetic oligonucleotide
agagcucggcagcggugga

SEQ ID NO: 271429 - RNA, 19 nt, Artificial Sequence
  Description of Artificial Sequence: Synthetic oligonucleotide
cauacggaagagcccuucu

SEQ ID NO: 271430 - RNA, 19 nt, Artificial Sequence
  Description of Artificial Sequence: Synthetic oligonucleotide
uggugaccugugguccuca

SEQ ID NO: 271431 - RNA, 19 nt, Artificial Sequence
  Description of Artificial Sequence: Synthetic oligonucleotide
gguccccugaugaggcccg

SEQ ID NO: 271432 - RNA, 19 nt, Artificial Sequence
  Description of Artificial Sequence: Synthetic oligonucleotide
ggcugugcagcugcuaaca

SEQ ID NO: 271433 - RNA, 19 nt, Artificial Sequence
  Description of Artificial Sequence: Synthetic oligonucleotide
agggcccaguuugugggga

SEQ ID NO: 271434 - RNA, 19 nt, Artificial Sequence
  Description of Artificial Sequence: Synthetic oligonucleotide
gcggauggccugcacccag

SEQ ID NO: 271435 - RNA, 19 nt, Artificial Sequence
  Description of Artificial Sequence: Synthetic oligonucleotide
agccgucggcagcaucucu

SEQ ID NO: 271436 - RNA, 19 nt, Artificial Sequence
  Description of Artificial Sequence: Synthetic oligonucleotide
cagcuaauuccugguuuca

SEQ ID NO: 271437 - RNA, 19 nt, Artificial Sequence
  Description of Artificial Sequence: Synthetic oligonucleotide
ggccuugaguacagggccc

SEQ ID NO: 271438 - RNA, 19 nt, Artificial Sequence
  Description of Artificial Sequence: Synthetic oligonucleotide
ugggacccauagguuugga

SEQ ID NO: 271439 - RNA, 19 nt, Artificial Sequence
  Description of Artificial Sequence: Synthetic oligonucleotide
cguagcacgaaccaucgcu

SEQ ID NO: 271440 - RNA, 19 nt, Artificial Sequence
  Description of Artificial Sequence: Synthetic oligonucleotide
gagcucggcagcgguggac

SEQ ID NO: 271441 - RNA, 19 nt, Artificial Sequence
  Description of Artificial Sequence: Synthetic oligonucleotide
gacgguggccacgcagaga

SEQ ID NO: 271442 - RNA, 19 nt, Artificial Sequence
  Description of Artificial Sequence: Synthetic oligonucleotide
cugugcccuguggggaagc

SEQ ID NO: 271443 - RNA, 19 nt, Artificial Sequence
  Description of Artificial Sequence: Synthetic oligonucleotide
accuggcgaaagggaugac

SEQ ID NO: 271444 - RNA, 19 nt, Artificial Sequence
  Description of Artificial Sequence: Synthetic oligonucleotide
aucccuccgcccagcgggg

SEQ ID NO: 271445 - RNA, 19 nt, Artificial Sequence
  Description of Artificial Sequence: Synthetic oligonucleotide
ggacuaugugggauccuga

SEQ ID NO: 271446 - RNA, 19 nt, Artificial Sequence
  Description of Artificial Sequence: Synthetic oligonucleotide
cagucaagcuucccagagu

SEQ ID NO: 271447 - RNA, 19 nt, Artificial Sequence
  Description of Artificial Sequence: Synthetic oligonucleotide
cagugcuaggaaaguggcu

SEQ ID NO: 271448 - RNA, 19 nt, Artificial Sequence
  Description of Artificial Sequence: Synthetic oligonucleotide
cucuguacugagccuguau

SEQ ID NO: 271449 - RNA, 19 nt, Artificial Sequence
  Description of Artificial Sequence: Synthetic oligonucleotide
ggagagcucggcagcggug

SEQ ID NO: 271450 - RNA, 19 nt, Artificial Sequence
  Description of Artificial Sequence: Synthetic oligonucleotide
uugggaugaugaggcuaua

SEQ ID NO: 271451 - RNA, 19 nt, Artificial Sequence
  Description of Artificial Sequence: Synthetic oligonucleotide
gugaccugugguccucacu

SEQ ID NO: 271452 - RNA, 19 nt, Artificial Sequence
  Description of Artificial Sequence: Synthetic oligonucleotide
ggugaccugugguccucac

SEQ ID NO: 271453 - RNA, 19 nt, Artificial Sequence
  Description of Artificial Sequence: Synthetic oligonucleotide
cacgugcccgcucugaguu

SEQ ID NO: 271454 - RNA, 19 nt, Artificial Sequence
  Description of Artificial Sequence: Synthetic oligonucleotide
ccucuucggagccccacuc

SEQ ID NO: 271455 - RNA, 19 nt, Artificial Sequence
  Description of Artificial Sequence: Synthetic oligonucleotide
ugcugguagccuggcccaa

SEQ ID NO: 271456 - RNA, 19 nt, Artificial Sequence
  Description of Artificial Sequence: Synthetic oligonucleotide
uccccugaugaggcccgac

SEQ ID NO: 271457 - RNA, 19 nt, Artificial Sequence
  Description of Artificial Sequence: Synthetic oligonucleotide
ccaggucuggugaccugug

SEQ ID NO: 271458 - RNA, 19 nt, Artificial Sequence
  Description of Artificial Sequence: Synthetic oligonucleotide
gcauacggaagagcccuuc

SEQ ID NO: 271459 - RNA, 19 nt, Artificial Sequence
  Description of Artificial Sequence: Synthetic oligonucleotide
ggucccucaccaggguggc

SEQ ID NO: 271460 - RNA, 19 nt, Artificial Sequence
  Description of Artificial Sequence: Synthetic oligonucleotide
cacgcugggagcuggccau

SEQ ID NO: 271461 - RNA, 19 nt, Artificial Sequence
  Description of Artificial Sequence: Synthetic oligonucleotide
caccuggugugaucucaaa

SEQ ID NO: 271462 - RNA, 19 nt, Artificial Sequence
  Description of Artificial Sequence: Synthetic oligonucleotide
ggggcuugcucucaucuuu

SEQ ID NO: 271463 - RNA, 19 nt, Artificial Sequence
  Description of Artificial Sequence: Synthetic oligonucleotide
ccgacgguggccacgcaga

SEQ ID NO: 271464 - RNA, 19 nt, Artificial Sequence
  Description of Artificial Sequence: Synthetic oligonucleotide
gggagagugagcagacaua

SEQ ID NO: 271465 - RNA, 19 nt, Artificial Sequence
  Description of Artificial Sequence: Synthetic oligonucleotide
ugacaccugcugggaccca

SEQ ID NO: 271466 - RNA, 19 nt, Artificial Sequence
  Description of Artificial Sequence: Synthetic oligonucleotide
agccggccuugaguacagg

SEQ ID NO: 271467 - RNA, 19 nt, Artificial Sequence
  Description of Artificial Sequence: Synthetic oligonucleotide
ggcccaguuuguggggagc

SEQ ID NO: 271468 - RNA, 19 nt, Artificial Sequence
  Description of Artificial Sequence: Synthetic oligonucleotide
gaaccucuucggagcccca

SEQ ID NO: 271469 - RNA, 19 nt, Artificial Sequence
  Description of Artificial Sequence: Synthetic oligonucleotide
ccuggccaggcauacggaa

SEQ ID NO: 271470 - RNA, 19 nt, Artificial Sequence
  Description of Artificial Sequence: Synthetic oligonucleotide
cacggcggauggccugcac

SEQ ID NO: 271471 - RNA, 19 nt, Artificial Sequence
  Description of Artificial Sequence: Synthetic oligonucleotide
cccaacagucaagcuuccc

SEQ ID NO: 271472 - RNA, 19 nt, Artificial Sequence
  Description of Artificial Sequence: Synthetic oligonucleotide
cuguggccgaaggauguua

SEQ ID NO: 271473 - RNA, 19 nt, Artificial Sequence
  Description of Artificial Sequence: Synthetic oligonucleotide
gcucuuaggugccauccuu

SEQ ID NO: 271474 - RNA, 19 nt, Artificial Sequence
  Description of Artificial Sequence: Synthetic oligonucleotide
gcccugcagggagagugag

SEQ ID NO: 271475 - RNA, 19 nt, Artificial Sequence
  Description of Artificial Sequence: Synthetic oligonucleotide
ccgagacaucugcuuucgc

SEQ ID NO: 271476 - RNA, 19 nt, Artificial Sequence
  Description of Artificial Sequence: Synthetic oligonucleotide
gccgcugcccaaagauccc

SEQ ID NO: 271477 - RNA, 19 nt, Artificial Sequence
  Description of Artificial Sequence: Synthetic oligonucleotide
cucgguguguaaggagcua

SEQ ID NO: 271478 - RNA, 19 nt, Artificial Sequence
  Description of Artificial Sequence: Synthetic oligonucleotide
ccauaucacgcugggagcu

SEQ ID NO: 271479 - RNA, 19 nt, Artificial Sequence
  Description of Artificial Sequence: Synthetic oligonucleotide
cgcaagucagcacugcccu

SEQ ID NO: 271480 - RNA, 19 nt, Artificial Sequence
  Description of Artificial Sequence: Synthetic oligonucleotide
gcugggcgcagcugaggaa

SEQ ID NO: 271481 - RNA, 19 nt, Artificial Sequence
  Description of Artificial Sequence: Synthetic oligonucleotide
gguggacaugagccagugu

SEQ ID NO: 271482 - RNA, 19 nt, Artificial Sequence
  Description of Artificial Sequence: Synthetic oligonucleotide
cccugcugguagccuggcc

SEQ ID NO: 271483 - RNA, 19 nt, Artificial Sequence
  Description of Artificial Sequence: Synthetic oligonucleotide
cgacgguggccacgcagag

SEQ ID NO: 271484 - RNA, 19 nt, Artificial Sequence
  Description of Artificial Sequence: Synthetic oligonucleotide
cgucggcagcaucucuaag

SEQ ID NO: 271485 - RNA, 19 nt, Artificial Sequence
  Description of Artificial Sequence: Synthetic oligonucleotide
ccuggcgaaagggaugacu

SEQ ID NO: 271486 - RNA, 19 nt, Artificial Sequence
  Description of Artificial Sequence: Synthetic oligonucleotide
ccgucggcagcaucucuaa

SEQ ID NO: 271487 - RNA, 19 nt, Artificial Sequence
  Description of Artificial Sequence: Synthetic oligonucleotide
ccccggaaccaccuggugu

SEQ ID NO: 271488 - RNA, 19 nt, Artificial Sequence
  Description of Artificial Sequence: Synthetic oligonucleotide
gcugguagccuggcccaaa

SEQ ID NO: 271489 - RNA, 19 nt, Artificial Sequence
  Description of Artificial Sequence: Synthetic oligonucleotide
ccgggaccccugccggaag

SEQ ID NO: 271490 - RNA, 19 nt, Artificial Sequence
  Description of Artificial Sequence: Synthetic oligonucleotide
guggccacgcagagaggau

SEQ ID NO: 271491 - RNA, 19 nt, Artificial Sequence
  Description of Artificial Sequence: Synthetic oligonucleotide
guccccugaugaggcccga

SEQ ID NO: 271492 - RNA, 19 nt, Artificial Sequence
  Description of Artificial Sequence: Synthetic oligonucleotide
cccaguuuguggggagcca

SEQ ID NO: 271493 - RNA, 19 nt, Artificial Sequence
  Description of Artificial Sequence: Synthetic oligonucleotide
ccucacgugcccgcucuga

SEQ ID NO: 271494 - RNA, 19 nt, Artificial Sequence
  Description of Artificial Sequence: Synthetic oligonucleotide
cucuuucuauguggcgcuu

SEQ ID NO: 271495 - RNA, 19 nt, Artificial Sequence
  Description of Artificial Sequence: Synthetic oligonucleotide
ggagcgccucaggguuggc

SEQ ID NO: 271496 - RNA, 19 nt, Artificial Sequence
  Description of Artificial Sequence: Synthetic oligonucleotide
gcgguggacaugagccagu

SEQ ID NO: 271497 - RNA, 19 nt, Artificial Sequence
  Description of Artificial Sequence: Synthetic oligonucleotide
ccggaaccaccugguguga

SEQ ID NO: 271498 - RNA, 19 nt, Artificial Sequence
  Description of Artificial Sequence: Synthetic oligonucleotide
cgcuccccggaaccaccug

SEQ ID NO: 271499 - RNA, 19 nt, Artificial Sequence
  Description of Artificial Sequence: Synthetic oligonucleotide
gcucggcagcgguggacau

SEQ ID NO: 271500 - RNA, 19 nt, Artificial Sequence
  Description of Artificial Sequence: Synthetic oligonucleotide
ggcauacggaagagcccuu

SEQ ID NO: 271501 - RNA, 19 nt, Artificial Sequence
  Description of Artificial Sequence: Synthetic oligonucleotide
cccugggcuccgguuaugu

SEQ ID NO: 271502 - RNA, 19 nt, Artificial Sequence
  Description of Artificial Sequence: Synthetic oligonucleotide
ccgcugcccaaagaucccu

SEQ ID NO: 271503 - RNA, 19 nt, Artificial Sequence
  Description of Artificial Sequence: Synthetic oligonucleotide
gcucacccugguggucacu

SEQ ID NO: 271504 - RNA, 19 nt, Artificial Sequence
  Description of Artificial Sequence: Synthetic oligonucleotide
uaucuuaucgauaagauag

SEQ ID NO: 271505 - RNA, 19 nt, Artificial Sequence
  Description of Artificial Sequence: Synthetic oligonucleotide
aaugauuacagcucguuac

SEQ ID NO: 271506 - RNA, 19 nt, Artificial Sequence
  Description of Artificial Sequence: Synthetic oligonucleotide
uuaucgauaagauagauac

SEQ ID NO: 271507 - RNA, 19 nt, Artificial Sequence
  Description of Artificial Sequence: Synthetic oligonucleotide
aauucuauugccaaagacc

SEQ ID NO: 271508 - RNA, 19 nt, Artificial Sequence
  Description of Artificial Sequence: Synthetic oligonucleotide
uguguuaugagguagaaac

SEQ ID NO: 271509 - RNA, 19 nt, Artificial Sequence
  Description of Artificial Sequence: Synthetic oligonucleotide
ucuacaucaauucuuagug

SEQ ID NO: 271510 - RNA, 19 nt, Artificial Sequence
  Description of Artificial Sequence: Synthetic oligonucleotide
aaugaucuggauuauucac

SEQ ID NO: 271511 - RNA, 19 nt, Artificial Sequence
  Description of Artificial Sequence: Synthetic oligonucleotide
aauucuaugugguacagca

SEQ ID NO: 271512 - RNA, 19 nt, Artificial Sequence
  Description of Artificial Sequence: Synthetic oligonucleotide
ugcaauauaaccacacccg

SEQ ID NO: 271513 - RNA, 19 nt, Artificial Sequence
  Description of Artificial Sequence: Synthetic oligonucleotide
gaauuaagcacuugugugg

SEQ ID NO: 271514 - RNA, 19 nt, Artificial Sequence
  Description of Artificial Sequence: Synthetic oligonucleotide
aauauaaccacacccgaga

SEQ ID NO: 271515 - RNA, 19 nt, Artificial Sequence
  Description of Artificial Sequence: Synthetic oligonucleotide
auagauacauuccauuagg

SEQ ID NO: 271516 - RNA, 19 nt, Artificial Sequence
  Description of Artificial Sequence: Synthetic oligonucleotide
ugaauuaagcacuugugug

SEQ ID NO: 271517 - RNA, 19 nt, Artificial Sequence
  Description of Artificial Sequence: Synthetic oligonucleotide
uauacuaaagaauucuuaa

SEQ ID NO: 271518 - RNA, 19 nt, Artificial Sequence
  Description of Artificial Sequence: Synthetic oligonucleotide
uuagaucuaaaacuucugc

SEQ ID NO: 271519 - RNA, 19 nt, Artificial Sequence
  Description of Artificial Sequence: Synthetic oligonucleotide
ucaaaaucgugguacgugg

SEQ ID NO: 271520 - RNA, 19 nt, Artificial Sequence
  Description of Artificial Sequence: Synthetic oligonucleotide
  modified_base (5)..(5): a, c, u, g, unknown or other
aaugnaggccaacaaaagu

SEQ ID NO: 271521 - RNA, 19 nt, Artificial Sequence
  Description of Artificial Sequence: Synthetic oligonucleotide
gauagauacauuccauuag

SEQ ID NO: 271522 - RNA, 19 nt, Artificial Sequence
  Description of Artificial Sequence: Synthetic oligonucleotide
  modified_base (7)..(7): a, c, u, g, unknown or other
aaaaugnaggccaacaaaa

SEQ ID NO: 271523 - RNA, 19 nt, Artificial Sequence
  Description of Artificial Sequence: Synthetic oligonucleotide
ugauuuucaccaaacgaag

SEQ ID NO: 271524 - RNA, 19 nt, Artificial Sequence
  Description of Artificial Sequence: Synthetic oligonucleotide
auaaauugcuauuugcugu

SEQ ID NO: 271525 - RNA, 19 nt, Artificial Sequence
  Description of Artificial Sequence: Synthetic oligonucleotide
aaucgaaccacuugguuga

SEQ ID NO: 271526 - RNA, 19 nt, Artificial Sequence
  Description of Artificial Sequence: Synthetic oligonucleotide
aaaugucuaguguggacuc

SEQ ID NO: 271527 - RNA, 19 nt, Artificial Sequence
  Description of Artificial Sequence: Synthetic oligonucleotide
aauaguguuaaugucuugu

SEQ ID NO: 271528 - RNA, 19 nt, Artificial Sequence
  Description of Artificial Sequence: Synthetic oligonucleotide
aaacuauggauucuaucug

SEQ ID NO: 271529 - RNA, 19 nt, Artificial Sequence
  Description of Artificial Sequence: Synthetic oligonucleotide
auuucuacuaguugaagga

SEQ ID NO: 271530 - RNA, 19 nt, Artificial Sequence
  Description of Artificial Sequence: Synthetic oligonucleotide
auccuaagcacagacaagc

SEQ ID NO: 271531 - RNA, 19 nt, Artificial Sequence
  Description of Artificial Sequence: Synthetic oligonucleotide
  modified_base (8)..(8): a, c, u, g, unknown or other
uaaaaugnaggccaacaaa

SEQ ID NO: 271532 - RNA, 19 nt, Artificial Sequence
  Description of Artificial Sequence: Synthetic oligonucleotide
ucuaguguggacucuagca

SEQ ID NO: 271533 - RNA, 19 nt, Artificial Sequence
  Description of Artificial Sequence: Synthetic oligonucleotide
auugauaguaagcaauugu

SEQ ID NO: 271534 - RNA, 19 nt, Artificial Sequence
  Description of Artificial Sequence: Synthetic oligonucleotide
ucuuacacgauucugcuua

SEQ ID NO: 271535 - RNA, 19 nt, Artificial Sequence
  Description of Artificial Sequence: Synthetic oligonucleotide
caaucuuacacgauucugc

SEQ ID NO: 271536 - RNA, 19 nt, Artificial Sequence
  Description of Artificial Sequence: Synthetic oligonucleotide
uguucaucacguauaacca

SEQ ID NO: 271537 - RNA, 19 nt, Artificial Sequence
  Description of Artificial Sequence: Synthetic oligonucleotide
uguuaaguucaugaugugg

SEQ ID NO: 271538 - RNA, 19 nt, Artificial Sequence
  Description of Artificial Sequence: Synthetic oligonucleotide
  modified_base (10)..(10): a, c, u, g, unknown or other
gauaaaaugnaggccaaca

SEQ ID NO: 271539 - RNA, 19 nt, Artificial Sequence
  Description of Artificial Sequence: Synthetic oligonucleotide
augaauuaagcacuugugu

SEQ ID NO: 271540 - RNA, 19 nt, Artificial Sequence
  Description of Artificial Sequence: Synthetic oligonucleotide
uucaugaccggccaagaug

SEQ ID NO: 271541 - RNA, 19 nt, Artificial Sequence
  Description of Artificial Sequence: Synthetic oligonucleotide
uacaacaggugguuaaucc

SEQ ID NO: 271542 - RNA, 19 nt, Artificial Sequence
  Description of Artificial Sequence: Synthetic oligonucleotide
ucaugaccggccaagaugu

SEQ ID NO: 271543 - RNA, 19 nt, Artificial Sequence
  Description of Artificial Sequence: Synthetic oligonucleotide
aaucgugguacguggaaug

SEQ ID NO: 271544 - RNA, 19 nt, Artificial Sequence
  Description of Artificial Sequence: Synthetic oligonucleotide
aucucgaacauucggagug

SEQ ID NO: 271545 - RNA, 19 nt, Artificial Sequence
  Description of Artificial Sequence: Synthetic oligonucleotide
uugauaguaagcaauuguu

SEQ ID NO: 271546 - RNA, 19 nt, Artificial Sequence
  Description of Artificial Sequence: Synthetic oligonucleotide
cuuccguaaaggaggaucg

SEQ ID NO: 271547 - RNA, 19 nt, Artificial Sequence
  Description of Artificial Sequence: Synthetic oligonucleotide
ugcuagauuucaaucuucc

SEQ ID NO: 271548 - RNA, 19 nt, Artificial Sequence
  Description of Artificial Sequence: Synthetic oligonucleotide
uguguuaccucauuagauc

SEQ ID NO: 271549 - RNA, 19 nt, Artificial Sequence
  Description of Artificial Sequence: Synthetic oligonucleotide
aggaucgaauuuuaccugg

SEQ ID NO: 271550 - RNA, 19 nt, Artificial Sequence
  Description of Artificial Sequence: Synthetic oligonucleotide
acuugugugguucaauaug

SEQ ID NO: 271551 - RNA, 19 nt, Artificial Sequence
  Description of Artificial Sequence: Synthetic oligonucleotide
  modified_base (6)..(6): a, c, u, g, unknown or other
aaaugnaggccaacaaaag

SEQ ID NO: 271552 - RNA, 19 nt, Artificial Sequence
  Description of Artificial Sequence: Synthetic oligonucleotide
aucgauaagauagauacau

SEQ ID NO: 271553 - RNA, 19 nt, Artificial Sequence
  Description of Artificial Sequence: Synthetic oligonucleotide
auuuauggcccguguaagg

SEQ ID NO: 271554 - RNA, 19 nt, Artificial Sequence
  Description of Artificial Sequence: Synthetic oligonucleotide
acaagauuuauguccauau

SEQ ID NO: 271555 - RNA, 19 nt, Artificial Sequence
  Description of Artificial Sequence: Synthetic oligonucleotide
auucuauugccaaagaccu

SEQ ID NO: 271556 - RNA, 19 nt, Artificial Sequence
  Description of Artificial Sequence: Synthetic oligonucleotide
ugguuaauccguuuguuuc

SEQ ID NO: 271557 - RNA, 19 nt, Artificial Sequence
  Description of Artificial Sequence: Synthetic oligonucleotide
uaaccauguacaccugcgg

SEQ ID NO: 271558 - RNA, 19 nt, Artificial Sequence
  Description of Artificial Sequence: Synthetic oligonucleotide
  modified_base (3)..(3): a, c, u, g, unknown or other
ugnaggccaacaaaaguaa

SEQ ID NO: 271559 - RNA, 19 nt, Artificial Sequence
  Description of Artificial Sequence: Synthetic oligonucleotide
acaauccaagcacacgagg

SEQ ID NO: 271560 - RNA, 19 nt, Artificial Sequence
  Description of Artificial Sequence: Synthetic oligonucleotide
auaccguguuuccagaaag

SEQ ID NO: 271561 - RNA, 19 nt, Artificial Sequence
  Description of Artificial Sequence: Synthetic oligonucleotide
  modified_base (9)..(9): a, c, u, g, unknown or other
auaaaaugnaggccaacaa

SEQ ID NO: 271562 - RNA, 19 nt, Artificial Sequence
  Description of Artificial Sequence: Synthetic oligonucleotide
agaaauaccagugcacuug

SEQ ID NO: 271563 - RNA, 19 nt, Artificial Sequence
  Description of Artificial Sequence: Synthetic oligonucleotide
ucgaauuuuaccuggccaa

SEQ ID NO: 271564 - RNA, 19 nt, Artificial Sequence
  Description of Artificial Sequence: Synthetic oligonucleotide
auugguucaacccauucua

SEQ ID NO: 271565 - RNA, 19 nt, Artificial Sequence
  Description of Artificial Sequence: Synthetic oligonucleotide
agugcuaguguagacuugg

SEQ ID NO: 271566 - RNA, 19 nt, Artificial Sequence
  Description of Artificial Sequence: Synthetic oligonucleotide
uccugcuagauuucaaucu

SEQ ID NO: 271567 - RNA, 19 nt, Artificial Sequence
  Description of Artificial Sequence: Synthetic oligonucleotide
cauuccacaauaaauuaga

SEQ ID NO: 271568 - RNA, 19 nt, Artificial Sequence
  Description of Artificial Sequence: Synthetic oligonucleotide
acguauaaccauguacacc

SEQ ID NO: 271569 - RNA, 19 nt, Artificial Sequence
  Description of Artificial Sequence: Synthetic oligonucleotide
aaaugauuacagcucguua

SEQ ID NO: 271570 - RNA, 19 nt, Artificial Sequence
  Description of Artificial Sequence: Synthetic oligonucleotide
cuaguguggacucuagcag

SEQ ID NO: 271571 - RNA, 19 nt, Artificial Sequence
  Description of Artificial Sequence: Synthetic oligonucleotide
uuaugagguagaaacuaaa

SEQ ID NO: 271572 - RNA, 19 nt, Artificial Sequence
  Description of Artificial Sequence: Synthetic oligonucleotide
acacagguauuuauggccc

SEQ ID NO: 271573 - RNA, 19 nt, Artificial Sequence
  Description of Artificial Sequence: Synthetic oligonucleotide
agauagauacauuccauua

SEQ ID NO: 271574 - RNA, 19 nt, Artificial Sequence
  Description of Artificial Sequence: Synthetic oligonucleotide
aucgaauuuuaccuggcca

SEQ ID NO: 271575 - RNA, 19 nt, Artificial Sequence
  Description of Artificial Sequence: Synthetic oligonucleotide
ucuagcaugguaccgccgu

SEQ ID NO: 271576 - RNA, 19 nt, Artificial Sequence
  Description of Artificial Sequence: Synthetic oligonucleotide
uuugcaucugccuugcaua

SEQ ID NO: 271577 - RNA, 19 nt, Artificial Sequence
  Description of Artificial Sequence: Synthetic oligonucleotide
uugcauaccguguuuccag

SEQ ID NO: 271578 - RNA, 19 nt, Artificial Sequence
  Description of Artificial Sequence: Synthetic oligonucleotide
uauuuauggcccguguaag

SEQ ID NO: 271579 - RNA, 19 nt, Artificial Sequence
  Description of Artificial Sequence: Synthetic oligonucleotide
uuuuaccuggccaaaguuu

SEQ ID NO: 271580 - RNA, 19 nt, Artificial Sequence
  Description of Artificial Sequence: Synthetic oligonucleotide
aacaucucgaacauucgga

SEQ ID NO: 271581 - RNA, 19 nt, Artificial Sequence
  Description of Artificial Sequence: Synthetic oligonucleotide
uauccuaagcacagacaag

SEQ ID NO: 271582 - RNA, 19 nt, Artificial Sequence
  Description of Artificial Sequence: Synthetic oligonucleotide
aaaaucgugguacguggaa

SEQ ID NO: 271583 - RNA, 19 nt, Artificial Sequence
  Description of Artificial Sequence: Synthetic oligonucleotide
uuuggauugacagucucaa

SEQ ID NO: 271584 - RNA, 19 nt, Artificial Sequence
  Description of Artificial Sequence: Synthetic oligonucleotide
acagucucaaaucgaacca

SEQ ID NO: 271585 - RNA, 19 nt, Artificial Sequence
  Description of Artificial Sequence: Synthetic oligonucleotide
uguucuagcaugguaccgc

SEQ ID NO: 271586 - RNA, 19 nt, Artificial Sequence
  Description of Artificial Sequence: Synthetic oligonucleotide
uauugauaguaagcaauug

SEQ ID NO: 271587 - RNA, 19 nt, Artificial Sequence
  Description of Artificial Sequence: Synthetic oligonucleotide
ucuacuaguugaaggaauu

SEQ ID NO: 271588 - RNA, 19 nt, Artificial Sequence
  Description of Artificial Sequence: Synthetic oligonucleotide
caguuacuacaacaggugg

SEQ ID NO: 271589 - RNA, 19 nt, Artificial Sequence
  Description of Artificial Sequence: Synthetic oligonucleotide
uaauccguuuguuucacau

SEQ ID NO: 271590 - RNA, 19 nt, Artificial Sequence
  Description of Artificial Sequence: Synthetic oligonucleotide
aagcaauuguucaucacgu

SEQ ID NO: 271591 - RNA, 19 nt, Artificial Sequence
  Description of Artificial Sequence: Synthetic oligonucleotide
uaaugucuuguuucauugc

SEQ ID NO: 271592 - RNA, 19 nt, Artificial Sequence
  Description of Artificial Sequence: Synthetic oligonucleotide
uuuauggcccguguaagga

SEQ ID NO: 271593 - RNA, 19 nt, Artificial Sequence
  Description of Artificial Sequence: Synthetic oligonucleotide
uaugugcuuaauuaacaua

SEQ ID NO: 271594 - RNA, 19 nt, Artificial Sequence
  Description of Artificial Sequence: Synthetic oligonucleotide
agccugaaaauucucgugu

SEQ ID NO: 271595 - RNA, 19 nt, Artificial Sequence
  Description of Artificial Sequence: Synthetic oligonucleotide
uacacgauucugcuuaaau

SEQ ID NO: 271596 - RNA, 19 nt, Artificial Sequence
  Description of Artificial Sequence: Synthetic oligonucleotide
gaucgaauuuuaccuggcc

SEQ ID NO: 271597 - RNA, 19 nt, Artificial Sequence
  Description of Artificial Sequence: Synthetic oligonucleotide
aaaaugauuacagcucguu

SEQ ID NO: 271598 - RNA, 19 nt, Artificial Sequence
  Description of Artificial Sequence: Synthetic oligonucleotide
guaaaccacgacgagguag

SEQ ID NO: 271599 - RNA, 19 nt, Artificial Sequence
  Description of Artificial Sequence: Synthetic oligonucleotide
aucugauucuguaaaccac

SEQ ID NO: 271600 - RNA, 19 nt, Artificial Sequence
  Description of Artificial Sequence: Synthetic oligonucleotide
uuuucaccaaacgaaguuc

SEQ ID NO: 271601 - RNA, 19 nt, Artificial Sequence
  Description of Artificial Sequence: Synthetic oligonucleotide
uaucgauaagauagauaca

SEQ ID NO: 271602 - RNA, 19 nt, Artificial Sequence
  Description of Artificial Sequence: Synthetic oligonucleotide
agauauugauaguaagcaa

SEQ ID NO: 271603 - RNA, 19 nt, Artificial Sequence
  Description of Artificial Sequence: Synthetic oligonucleotide
gauauugauaguaagcaau

SEQ ID NO: 271604 - RNA, 19 nt, Artificial Sequence
  Description of Artificial Sequence: Synthetic oligonucleotide
uggguuaucaguuggccua

SEQ ID NO: 271605 - RNA, 19 nt, Artificial Sequence
  Description of Artificial Sequence: Synthetic oligonucleotide
uucuacuaguugaaggaau

SEQ ID NO: 271606 - RNA, 19 nt, Artificial Sequence
  Description of Artificial Sequence: Synthetic oligonucleotide
ucguuaccauuuuaaaagu

SEQ ID NO: 271607 - RNA, 19 nt, Artificial Sequence
  Description of Artificial Sequence: Synthetic oligonucleotide
aucaaaaucgugguacgug

SEQ ID NO: 271608 - RNA, 19 nt, Artificial Sequence
  Description of Artificial Sequence: Synthetic oligonucleotide
gguacguggaaugaucugg

SEQ ID NO: 271609 - RNA, 19 nt, Artificial Sequence
  Description of Artificial Sequence: Synthetic oligonucleotide
agucuaugugcuuaauuaa

SEQ ID NO: 271610 - RNA, 19 nt, Artificial Sequence
  Description of Artificial Sequence: Synthetic oligonucleotide
acauucggaguggacaugg

SEQ ID NO: 271611 - RNA, 19 nt, Artificial Sequence
  Description of Artificial Sequence: Synthetic oligonucleotide
caacccauucuaaaagaac

SEQ ID NO: 271612 - RNA, 19 nt, Artificial Sequence
  Description of Artificial Sequence: Synthetic oligonucleotide
acgagguagaauuuggauu

SEQ ID NO: 271613 - RNA, 19 nt, Artificial Sequence
  Description of Artificial Sequence: Synthetic oligonucleotide
aggaauucuaugugguaca

SEQ ID NO: 271614 - RNA, 19 nt, Artificial Sequence
  Description of Artificial Sequence: Synthetic oligonucleotide
agaccaguuacuacaacag

SEQ ID NO: 271615 - RNA, 19 nt, Artificial Sequence
  Description of Artificial Sequence: Synthetic oligonucleotide
uuaagcacuugugugguuc

SEQ ID NO: 271616 - RNA, 19 nt, Artificial Sequence
  Description of Artificial Sequence: Synthetic oligonucleotide
uuuuggccaguauuaguac

SEQ ID NO: 271617 - RNA, 19 nt, Artificial Sequence
  Description of Artificial Sequence: Synthetic oligonucleotide
uucuguauagcuccacaua

SEQ ID NO: 271618 - RNA, 19 nt, Artificial Sequence
  Description of Artificial Sequence: Synthetic oligonucleotide
aaauaugaaaguggugaua

SEQ ID NO: 271619 - RNA, 19 nt, Artificial Sequence
  Description of Artificial Sequence: Synthetic oligonucleotide
  modified_base (4)..(4): a, c, u, g, unknown or other
augnaggccaacaaaagua

SEQ ID NO: 271620 - RNA, 19 nt, Artificial Sequence
  Description of Artificial Sequence: Synthetic oligonucleotide
gagccugaaaauucucgug

SEQ ID NO: 271621 - RNA, 19 nt, Artificial Sequence
  Description of Artificial Sequence: Synthetic oligonucleotide
cuguuggguuaucaguugg

SEQ ID NO: 271622 - RNA, 19 nt, Artificial Sequence
  Description of Artificial Sequence: Synthetic oligonucleotide
uacagauaagacacuuuua

SEQ ID NO: 271623 - RNA, 19 nt, Artificial Sequence
  Description of Artificial Sequence: Synthetic oligonucleotide
cuaguguagacuuggugca

SEQ ID NO: 271624 - RNA, 19 nt, Artificial Sequence
  Description of Artificial Sequence: Synthetic oligonucleotide
uaguguggacucuagcagu

SEQ ID NO: 271625 - RNA, 19 nt, Artificial Sequence
  Description of Artificial Sequence: Synthetic oligonucleotide
uccugugauguguuaugag

SEQ ID NO: 271626 - RNA, 19 nt, Artificial Sequence
  Description of Artificial Sequence: Synthetic oligonucleotide
uguaugucuucagcaaaug

SEQ ID NO: 271627 - RNA, 19 nt, Artificial Sequence
  Description of Artificial Sequence: Synthetic oligonucleotide
uuggguuaucaguuggccu

SEQ ID NO: 271628 - RNA, 19 nt, Artificial Sequence
  Description of Artificial Sequence: Synthetic oligonucleotide
ggugacguuugucuguggg

SEQ ID NO: 271629 - RNA, 19 nt, Artificial Sequence
  Description of Artificial Sequence: Synthetic oligonucleotide
auuacagcucguuaccauu

SEQ ID NO: 271630 - RNA, 19 nt, Artificial Sequence
  Description of Artificial Sequence: Synthetic oligonucleotide
auuaguacucuaaaaucaa

SEQ ID NO: 271631 - RNA, 19 nt, Artificial Sequence
  Description of Artificial Sequence: Synthetic oligonucleotide
uuccugcuagauuucaauc

SEQ ID NO: 271632 - RNA, 19 nt, Artificial Sequence
  Description of Artificial Sequence: Synthetic oligonucleotide
aauccguuuguuucacaua

SEQ ID NO: 271633 - RNA, 19 nt, Artificial Sequence
  Description of Artificial Sequence: Synthetic oligonucleotide
cacguauaaccauguacac

SEQ ID NO: 271634 - RNA, 19 nt, Artificial Sequence
  Description of Artificial Sequence: Synthetic oligonucleotide
ugugauguguuaugaggua

SEQ ID NO: 271635 - RNA, 19 nt, Artificial Sequence
  Description of Artificial Sequence: Synthetic oligonucleotide
auucggaguggacauggca

SEQ ID NO: 271636 - RNA, 19 nt, Artificial Sequence
  Description of Artificial Sequence: Synthetic oligonucleotide
uuucuacuaguugaaggaa

SEQ ID NO: 271637 - RNA, 19 nt, Artificial Sequence
  Description of Artificial Sequence: Synthetic oligonucleotide
aaaucgugguacguggaau

SEQ ID NO: 271638 - RNA, 19 nt, Artificial Sequence
  Description of Artificial Sequence: Synthetic oligonucleotide
aguuacuacaacagguggu

SEQ ID NO: 271639 - RNA, 19 nt, Artificial Sequence
  Description of Artificial Sequence: Synthetic oligonucleotide
gucuaugugcuuaauuaac

SEQ ID NO: 271640 - RNA, 19 nt, Artificial Sequence
  Description of Artificial Sequence: Synthetic oligonucleotide
aaauugcuauuugcuguug

SEQ ID NO: 271641 - RNA, 19 nt, Artificial Sequence
  Description of Artificial Sequence: Synthetic oligonucleotide
ugauuacagcucguuacca

SEQ ID NO: 271642 - RNA, 19 nt, Artificial Sequence
  Description of Artificial Sequence: Synthetic oligonucleotide
guuggguuaucaguuggcc

SEQ ID NO: 271643 - RNA, 19 nt, Artificial Sequence
  Description of Artificial Sequence: Synthetic oligonucleotide
ugguucaacccauucuaaa

SEQ ID NO: 271644 - RNA, 19 nt, Artificial Sequence
  Description of Artificial Sequence: Synthetic oligonucleotide
guuacaugggugacguuug

SEQ ID NO: 271645 - RNA, 19 nt, Artificial Sequence
  Description of Artificial Sequence: Synthetic oligonucleotide
  modified_base (11)..(11): a, c, u, g, unknown or other
ugauaaaaugnaggccaac

SEQ ID NO: 271646 - RNA, 19 nt, Artificial Sequence
  Description of Artificial Sequence: Synthetic oligonucleotide
ucguguuaucugaaauuuc

SEQ ID NO: 271647 - RNA, 19 nt, Artificial Sequence
  Description of Artificial Sequence: Synthetic oligonucleotide
augaugugaaaugucuagu

SEQ ID NO: 271648 - RNA, 19 nt, Artificial Sequence
  Description of Artificial Sequence: Synthetic oligonucleotide
ggauugacagucucaaauc

SEQ ID NO: 271649 - RNA, 19 nt, Artificial Sequence
  Description of Artificial Sequence: Synthetic oligonucleotide
cucauuagaucuaaaacuu

SEQ ID NO: 271650 - RNA, 19 nt, Artificial Sequence
  Description of Artificial Sequence: Synthetic oligonucleotide
cccacacagguauuuaugg

SEQ ID NO: 271651 - RNA, 19 nt, Artificial Sequence
  Description of Artificial Sequence: Synthetic oligonucleotide
caauuguucaucacguaua

SEQ ID NO: 271652 - RNA, 19 nt, Artificial Sequence
  Description of Artificial Sequence: Synthetic oligonucleotide
cacagguauuuauggcccg

SEQ ID NO: 271653 - RNA, 19 nt, Artificial Sequence
  Description of Artificial Sequence: Synthetic oligonucleotide
ugaccggccaagauguaua

SEQ ID NO: 271654 - RNA, 19 nt, Artificial Sequence
  Description of Artificial Sequence: Synthetic oligonucleotide
aggauccgaacacauguaa

SEQ ID NO: 271655 - RNA, 19 nt, Artificial Sequence
  Description of Artificial Sequence: Synthetic oligonucleotide
cuuaucgauaagauagaua

SEQ ID NO: 271656 - RNA, 19 nt, Artificial Sequence
  Description of Artificial Sequence: Synthetic oligonucleotide
ucgauaagauagauacauu

SEQ ID NO: 271657 - RNA, 19 nt, Artificial Sequence
  Description of Artificial Sequence: Synthetic oligonucleotide
cugcaguguucuagcaugg

SEQ ID NO: 271658 - RNA, 19 nt, Artificial Sequence
  Description of Artificial Sequence: Synthetic oligonucleotide
accaaacgaaguuccugug

SEQ ID NO: 271659 - RNA, 19 nt, Artificial Sequence
  Description of Artificial Sequence: Synthetic oligonucleotide
uuccuuccguaaaggagga

SEQ ID NO: 271660 - RNA, 19 nt, Artificial Sequence
  Description of Artificial Sequence: Synthetic oligonucleotide
acgacgagguagaauuugg

SEQ ID NO: 271661 - RNA, 19 nt, Artificial Sequence
  Description of Artificial Sequence: Synthetic oligonucleotide
uagcuguuuucaugaccgg

SEQ ID NO: 271662 - RNA, 19 nt, Artificial Sequence
  Description of Artificial Sequence: Synthetic oligonucleotide
cuaucuuaucgauaagaua

SEQ ID NO: 271663 - RNA, 19 nt, Artificial Sequence
  Description of Artificial Sequence: Synthetic oligonucleotide
ugguacguggaaugaucug

SEQ ID NO: 271664 - RNA, 19 nt, Artificial Sequence
  Description of Artificial Sequence: Synthetic oligonucleotide
auacugcuuauauguacaa

SEQ ID NO: 271665 - RNA, 19 nt, Artificial Sequence
  Description of Artificial Sequence: Synthetic oligonucleotide
aguggccggggucauuguc

SEQ ID NO: 271666 - RNA, 19 nt, Artificial Sequence
  Description of Artificial Sequence: Synthetic oligonucleotide
agguauuuauggcccgugu

SEQ ID NO: 271667 - RNA, 19 nt, Artificial Sequence
  Description of Artificial Sequence: Synthetic oligonucleotide
aucgcuacagguaacuuuu

SEQ ID NO: 271668 - RNA, 19 nt, Artificial Sequence
  Description of Artificial Sequence: Synthetic oligonucleotide
gguuaauccguuuguuuca

SEQ ID NO: 271669 - RNA, 19 nt, Artificial Sequence
  Description of Artificial Sequence: Synthetic oligonucleotide
uuacaugggugacguuugu

SEQ ID NO: 271670 - RNA, 19 nt, Artificial Sequence
  Description of Artificial Sequence: Synthetic oligonucleotide
cuggaaucgcuacagguaa

SEQ ID NO: 271671 - RNA, 19 nt, Artificial Sequence
  Description of Artificial Sequence: Synthetic oligonucleotide
ccucauuagaucuaaaacu

SEQ ID NO: 271672 - RNA, 19 nt, Artificial Sequence
  Description of Artificial Sequence: Synthetic oligonucleotide
uccguuuguuucacauaga

SEQ ID NO: 271673 - RNA, 19 nt, Artificial Sequence
  Description of Artificial Sequence: Synthetic oligonucleotide
aguuggccuacuuuccaaa

SEQ ID NO: 271674 - RNA, 19 nt, Artificial Sequence
  Description of Artificial Sequence: Synthetic oligonucleotide
gacaacaacugcaguguuc

SEQ ID NO: 271675 - RNA, 19 nt, Artificial Sequence
  Description of Artificial Sequence: Synthetic oligonucleotide
aacauucggaguggacaug

SEQ ID NO: 271676 - RNA, 19 nt, Artificial Sequence
  Description of Artificial Sequence: Synthetic oligonucleotide
guguuaccucauuagaucu

SEQ ID NO: 271677 - RNA, 19 nt, Artificial Sequence
  Description of Artificial Sequence: Synthetic oligonucleotide
ucggaguggacauggcauc

SEQ ID NO: 271678 - RNA, 19 nt, Artificial Sequence
  Description of Artificial Sequence: Synthetic oligonucleotide
guuaugagguagaaacuaa

SEQ ID NO: 271679 - RNA, 19 nt, Artificial Sequence
  Description of Artificial Sequence: Synthetic oligonucleotide
uggaaucgcuacagguaac

SEQ ID NO: 271680 - RNA, 19 nt, Artificial Sequence
  Description of Artificial Sequence: Synthetic oligonucleotide
cauuaucuacaucaauucu

SEQ ID NO: 271681 - RNA, 19 nt, Artificial Sequence
  Description of Artificial Sequence: Synthetic oligonucleotide
aguguagacuuggugcaca

SEQ ID NO: 271682 - RNA, 19 nt, Artificial Sequence
  Description of Artificial Sequence: Synthetic oligonucleotide
aaggugaguucugaugaua

SEQ ID NO: 271683 - RNA, 19 nt, Artificial Sequence
  Description of Artificial Sequence: Synthetic oligonucleotide
accccaguugcauuugaau

SEQ ID NO: 271684 - RNA, 19 nt, Artificial Sequence
  Description of Artificial Sequence: Synthetic oligonucleotide
gcaauauaaccacacccga

SEQ ID NO: 271685 - RNA, 19 nt, Artificial Sequence
  Description of Artificial Sequence: Synthetic oligonucleotide
gacgagguagaauuuggau

SEQ ID NO: 271686 - RNA, 19 nt, Artificial Sequence
  Description of Artificial Sequence: Synthetic oligonucleotide
ugggugacguuugucugug

SEQ ID NO: 271687 - RNA, 19 nt, Artificial Sequence
  Description of Artificial Sequence: Synthetic oligonucleotide
cguauaaccauguacaccu

SEQ ID NO: 271688 - RNA, 19 nt, Artificial Sequence
  Description of Artificial Sequence: Synthetic oligonucleotide
acaucaauucuuaguguau

SEQ ID NO: 271689 - RNA, 19 nt, Artificial Sequence
  Description of Artificial Sequence: Synthetic oligonucleotide
acuacaacaggugguuaau

SEQ ID NO: 271690 - RNA, 19 nt, Artificial Sequence
  Description of Artificial Sequence: Synthetic oligonucleotide
cacgacgagguagaauuug

SEQ ID NO: 271691 - RNA, 19 nt, Artificial Sequence
  Description of Artificial Sequence: Synthetic oligonucleotide
uuaccuggccaaaguuuau

SEQ ID NO: 271692 - RNA, 19 nt, Artificial Sequence
  Description of Artificial Sequence: Synthetic oligonucleotide
cauucggaguggacauggc

SEQ ID NO: 271693 - RNA, 19 nt, Artificial Sequence
  Description of Artificial Sequence: Synthetic oligonucleotide
ucgcuacagguaacuuuug

SEQ ID NO: 271694 - RNA, 19 nt, Artificial Sequence
  Description of Artificial Sequence: Synthetic oligonucleotide
uaaccacacccgagaauau

SEQ ID NO: 271695 - RNA, 19 nt, Artificial Sequence
  Description of Artificial Sequence: Synthetic oligonucleotide
acacccgagaauauacuaa

SEQ ID NO: 271696 - RNA, 19 nt, Artificial Sequence
  Description of Artificial Sequence: Synthetic oligonucleotide
cauugguucaacccauucu

SEQ ID NO: 271697 - RNA, 19 nt, Artificial Sequence
  Description of Artificial Sequence: Synthetic oligonucleotide
cuagucugaagugccccac

SEQ ID NO: 271698 - RNA, 19 nt, Artificial Sequence
  Description of Artificial Sequence: Synthetic oligonucleotide
guguagacuuggugcacac

SEQ ID NO: 271699 - RNA, 19 nt, Artificial Sequence
  Description of Artificial Sequence: Synthetic oligonucleotide
augguaccgccguucggug

SEQ ID NO: 271700 - RNA, 19 nt, Artificial Sequence
  Description of Artificial Sequence: Synthetic oligonucleotide
caaacgaaguuccugugau

SEQ ID NO: 271701 - RNA, 19 nt, Artificial Sequence
  Description of Artificial Sequence: Synthetic oligonucleotide
  modified_base (2)..(2): a, c, u, g, unknown or other
gnaggccaacaaaaguaaa

SEQ ID NO: 271702 - RNA, 19 nt, Artificial Sequence
  Description of Artificial Sequence: Synthetic oligonucleotide
cccgagaauauacuaaaga

SEQ ID NO: 271703 - RNA, 19 nt, Artificial Sequence
  Description of Artificial Sequence: Synthetic oligonucleotide
uacguggaaugaucuggau

SEQ ID NO: 271704 - RNA, 19 nt, Artificial Sequence
  Description of Artificial Sequence: Synthetic oligonucleotide
aucuuacacgauucugcuu

SEQ ID NO: 271705 - RNA, 19 nt, Artificial Sequence
  Description of Artificial Sequence: Synthetic oligonucleotide
uaguguagacuuggugcac

SEQ ID NO: 271706 - RNA, 19 nt, Artificial Sequence
  Description of Artificial Sequence: Synthetic oligonucleotide
acagguauuuauggcccgu

SEQ ID NO: 271707 - RNA, 19 nt, Artificial Sequence
  Description of Artificial Sequence: Synthetic oligonucleotide
cauaccguguuuccagaaa

SEQ ID NO: 271708 - RNA, 19 nt, Artificial Sequence
  Description of Artificial Sequence: Synthetic oligonucleotide
aaggauccgaacacaugua

SEQ ID NO: 271709 - RNA, 19 nt, Artificial Sequence
  Description of Artificial Sequence: Synthetic oligonucleotide
gguauuuauggcccgugua

SEQ ID NO: 271710 - RNA, 19 nt, Artificial Sequence
  Description of Artificial Sequence: Synthetic oligonucleotide
aucgugguacguggaauga

SEQ ID NO: 271711 - RNA, 19 nt, Artificial Sequence
  Description of Artificial Sequence: Synthetic oligonucleotide
uuccguaaaggaggaucga

SEQ ID NO: 271712 - RNA, 19 nt, Artificial Sequence
  Description of Artificial Sequence: Synthetic oligonucleotide
guuacuacaacaggugguu

SEQ ID NO: 271713 - RNA, 19 nt, Artificial Sequence
  Description of Artificial Sequence: Synthetic oligonucleotide
cuacaucaauucuuagugu

SEQ ID NO: 271714 - RNA, 19 nt, Artificial Sequence
  Description of Artificial Sequence: Synthetic oligonucleotide
  modified_base (12)..(12): a, c, u, g, unknown or other
gugauaaaaugnaggccaa

SEQ ID NO: 271715 - RNA, 19 nt, Artificial Sequence
  Description of Artificial Sequence: Synthetic oligonucleotide
guacguggaaugaucugga

SEQ ID NO: 271716 - RNA, 19 nt, Artificial Sequence
  Description of Artificial Sequence: Synthetic oligonucleotide
ugguaccgccguucgguga

SEQ ID NO: 271717 - RNA, 19 nt, Artificial Sequence
  Description of Artificial Sequence: Synthetic oligonucleotide
ccuuccguaaaggaggauc

SEQ ID NO: 271718 - RNA, 19 nt, Artificial Sequence
  Description of Artificial Sequence: Synthetic oligonucleotide
auuaagcacuugugugguu

SEQ ID NO: 271719 - RNA, 19 nt, Artificial Sequence
  Description of Artificial Sequence: Synthetic oligonucleotide
ggagaaauaccagugcacu

SEQ ID NO: 271720 - RNA, 19 nt, Artificial Sequence
  Description of Artificial Sequence: Synthetic oligonucleotide
gcaauuguucaucacguau

SEQ ID NO: 271721 - RNA, 19 nt, Artificial Sequence
  Description of Artificial Sequence: Synthetic oligonucleotide
acaggugguuaauccguuu

SEQ ID NO: 271722 - RNA, 19 nt, Artificial Sequence
  Description of Artificial Sequence: Synthetic oligonucleotide
uagcaugguaccgccguuc

SEQ ID NO: 271723 - RNA, 19 nt, Artificial Sequence
  Description of Artificial Sequence: Synthetic oligonucleotide
cagguauuuauggcccgug

SEQ ID NO: 271724 - RNA, 19 nt, Artificial Sequence
  Description of Artificial Sequence: Synthetic oligonucleotide
ugcaguguucuagcauggu

SEQ ID NO: 271725 - RNA, 19 nt, Artificial Sequence
  Description of Artificial Sequence: Synthetic oligonucleotide
gucugaagugccccacaca

SEQ ID NO: 271726 - RNA, 19 nt, Artificial Sequence
  Description of Artificial Sequence: Synthetic oligonucleotide
cucugugcaaggagaaaua

SEQ ID NO: 271727 - RNA, 19 nt, Artificial Sequence
  Description of Artificial Sequence: Synthetic oligonucleotide
augaccggccaagauguau

SEQ ID NO: 271728 - RNA, 19 nt, Artificial Sequence
  Description of Artificial Sequence: Synthetic oligonucleotide
gcggggaacagcuguuaag

SEQ ID NO: 271729 - RNA, 19 nt, Artificial Sequence
  Description of Artificial Sequence: Synthetic oligonucleotide
ggaucgaauuuuaccuggc

SEQ ID NO: 271730 - RNA, 19 nt, Artificial Sequence
  Description of Artificial Sequence: Synthetic oligonucleotide
acguuugucugugggguau

SEQ ID NO: 271731 - RNA, 19 nt, Artificial Sequence
  Description of Artificial Sequence: Synthetic oligonucleotide
gaccggccaagauguauaa

SEQ ID NO: 271732 - RNA, 19 nt, Artificial Sequence
  Description of Artificial Sequence: Synthetic oligonucleotide
uuacacgauucugcuuaaa

SEQ ID NO: 271733 - RNA, 19 nt, Artificial Sequence
  Description of Artificial Sequence: Synthetic oligonucleotide
cuuacacgauucugcuuaa

SEQ ID NO: 271734 - RNA, 19 nt, Artificial Sequence
  Description of Artificial Sequence: Synthetic oligonucleotide
cucguguuaucugaaauuu

SEQ ID NO: 271735 - RNA, 19 nt, Artificial Sequence
  Description of Artificial Sequence: Synthetic oligonucleotide
ccaguauuaguacucuaaa

SEQ ID NO: 271736 - RNA, 19 nt, Artificial Sequence
  Description of Artificial Sequence: Synthetic oligonucleotide
aagcacuugugugguucaa

SEQ ID NO: 271737 - RNA, 19 nt, Artificial Sequence
  Description of Artificial Sequence: Synthetic oligonucleotide
ggcaucggaaagucuaugu

SEQ ID NO: 271738 - RNA, 19 nt, Artificial Sequence
  Description of Artificial Sequence: Synthetic oligonucleotide
gguuacaugggugacguuu

SEQ ID NO: 271739 - RNA, 19 nt, Artificial Sequence
  Description of Artificial Sequence: Synthetic oligonucleotide
guuuaucucugaucgcguu

SEQ ID NO: 271740 - RNA, 19 nt, Artificial Sequence
  Description of Artificial Sequence: Synthetic oligonucleotide
gugguacguggaaugaucu

SEQ ID NO: 271741 - RNA, 19 nt, Artificial Sequence
  Description of Artificial Sequence: Synthetic oligonucleotide
gcaguggccggggucauug

SEQ ID NO: 271742 - RNA, 19 nt, Artificial Sequence
  Description of Artificial Sequence: Synthetic oligonucleotide
caaaucgaaccacuugguu

SEQ ID NO: 271743 - RNA, 19 nt, Artificial Sequence
  Description of Artificial Sequence: Synthetic oligonucleotide
gacaaacuauggauucuau

SEQ ID NO: 271744 - RNA, 19 nt, Artificial Sequence
  Description of Artificial Sequence: Synthetic oligonucleotide
cgcuacagguaacuuuugc

SEQ ID NO: 271745 - RNA, 19 nt, Artificial Sequence
  Description of Artificial Sequence: Synthetic oligonucleotide
ggaaucgcuacagguaacu

SEQ ID NO: 271746 - RNA, 19 nt, Artificial Sequence
  Description of Artificial Sequence: Synthetic oligonucleotide
caucacguauaaccaugua

SEQ ID NO: 271747 - RNA, 19 nt, Artificial Sequence
  Description of Artificial Sequence: Synthetic oligonucleotide
accgccguucggugauuga

SEQ ID NO: 271748 - RNA, 19 nt, Artificial Sequence
  Description of Artificial Sequence: Synthetic oligonucleotide
caucaaaaucgugguacgu

SEQ ID NO: 271749 - RNA, 19 nt, Artificial Sequence
  Description of Artificial Sequence: Synthetic oligonucleotide
cucgaacauucggagugga

SEQ ID NO: 271750 - RNA, 19 nt, Artificial Sequence
  Description of Artificial Sequence: Synthetic oligonucleotide
guacaccugcggggaacag

SEQ ID NO: 271751 - RNA, 19 nt, Artificial Sequence
  Description of Artificial Sequence: Synthetic oligonucleotide
ccggccaagauguauaaau

SEQ ID NO: 271752 - RNA, 19 nt, Artificial Sequence
  Description of Artificial Sequence: Synthetic oligonucleotide
ggguuaucaguuggccuac

SEQ ID NO: 271753 - RNA, 19 nt, Artificial Sequence
  Description of Artificial Sequence: Synthetic oligonucleotide
cuauuugcuguuggguuau

SEQ ID NO: 271754 - RNA, 19 nt, Artificial Sequence
  Description of Artificial Sequence: Synthetic oligonucleotide
cguuuguuucacauagaaa

SEQ ID NO: 271755 - RNA, 19 nt, Artificial Sequence
  Description of Artificial Sequence: Synthetic oligonucleotide
gcauaccguguuuccagaa

SEQ ID NO: 271756 - RNA, 19 nt, Artificial Sequence
  Description of Artificial Sequence: Synthetic oligonucleotide
gaaucgcuacagguaacuu

SEQ ID NO: 271757 - RNA, 19 nt, Artificial Sequence
  Description of Artificial Sequence: Synthetic oligonucleotide
cgaaccacuugguugaagu

SEQ ID NO: 271758 - RNA, 19 nt, Artificial Sequence
  Description of Artificial Sequence: Synthetic oligonucleotide
gucucgcccucugcugacc

SEQ ID NO: 271759 - RNA, 19 nt, Artificial Sequence
  Description of Artificial Sequence: Synthetic oligonucleotide
accggccaagauguauaaa

SEQ ID NO: 271760 - RNA, 19 nt, Artificial Sequence
  Description of Artificial Sequence: Synthetic oligonucleotide
gaagugccccacacaggua

SEQ ID NO: 271761 - RNA, 19 nt, Artificial Sequence
  Description of Artificial Sequence: Synthetic oligonucleotide
uccuuccguaaaggaggau

SEQ ID NO: 271762 - RNA, 19 nt, Artificial Sequence
  Description of Artificial Sequence: Synthetic oligonucleotide
uggcccguguaaggauuuc

SEQ ID NO: 271763 - RNA, 19 nt, Artificial Sequence
  Description of Artificial Sequence: Synthetic oligonucleotide
gguaccgccguucggugau

SEQ ID NO: 271764 - RNA, 19 nt, Artificial Sequence
  Description of Artificial Sequence: Synthetic oligonucleotide
guucggugauugaaguuuu

SEQ ID NO: 271765 - RNA, 19 nt, Artificial Sequence
  Description of Artificial Sequence: Synthetic oligonucleotide
gugguucaauaugcuaaau

SEQ ID NO: 271766 - RNA, 19 nt, Artificial Sequence
  Description of Artificial Sequence: Synthetic oligonucleotide
caugaccggccaagaugua

SEQ ID NO: 271767 - RNA, 19 nt, Artificial Sequence
  Description of Artificial Sequence: Synthetic oligonucleotide
cuagcaugguaccgccguu

SEQ ID NO: 271768 - RNA, 19 nt, Artificial Sequence
  Description of Artificial Sequence: Synthetic oligonucleotide
cguucggugauugaaguuu

SEQ ID NO: 271769 - RNA, 19 nt, Artificial Sequence
  Description of Artificial Sequence: Synthetic oligonucleotide
cugcggggaacagcuguua

SEQ ID NO: 271770 - RNA, 19 nt, Artificial Sequence
  Description of Artificial Sequence: Synthetic oligonucleotide
cggggaacagcuguuaagu

SEQ ID NO: 271771 - RNA, 19 nt, Artificial Sequence
  Description of Artificial Sequence: Synthetic oligonucleotide
ggcccguguaaggauuucu

SEQ ID NO: 271772 - RNA, 19 nt, Artificial Sequence
  Description of Artificial Sequence: Synthetic oligonucleotide
ccgccguucggugauugaa

SEQ ID NO: 271773 - RNA, 19 nt, Artificial Sequence
  Description of Artificial Sequence: Synthetic oligonucleotide
cggccaagauguauaaauu

SEQ ID NO: 271774 - RNA, 19 nt, Artificial Sequence
  Description of Artificial Sequence: Synthetic oligonucleotide
guaccgccguucggugauu

SEQ ID NO: 271775 - RNA, 19 nt, Artificial Sequence
  Description of Artificial Sequence: Synthetic oligonucleotide
uaauuuaugagcuuguggg

SEQ ID NO: 271776 - RNA, 19 nt, Artificial Sequence
  Description of Artificial Sequence: Synthetic oligonucleotide
aguuguuggauuuaaaccc

SEQ ID NO: 271777 - RNA, 19 nt, Artificial Sequence
  Description of Artificial Sequence: Synthetic oligonucleotide
uuaugguaagauuugaagg

SEQ ID NO: 271778 - RNA, 19 nt, Artificial Sequence
  Description of Artificial Sequence: Synthetic oligonucleotide
aaaaugacuaacuguacag

SEQ ID NO: 271779 - RNA, 19 nt, Artificial Sequence
  Description of Artificial Sequence: Synthetic oligonucleotide
aacccuguugaucaaaagc

SEQ ID NO: 271780 - RNA, 19 nt, Artificial Sequence
  Description of Artificial Sequence: Synthetic oligonucleotide
aaugguauuagcuccuuuc

SEQ ID NO: 271781 - RNA, 19 nt, Artificial Sequence
  Description of Artificial Sequence: Synthetic oligonucleotide
uaaagguccaacaacugcg

SEQ ID NO: 271782 - RNA, 19 nt, Artificial Sequence
  Description of Artificial Sequence: Synthetic oligonucleotide
uuuaugguaagauuugaag

SEQ ID NO: 271783 - RNA, 19 nt, Artificial Sequence
  Description of Artificial Sequence: Synthetic oligonucleotide
gagacaacagguuucaggg

SEQ ID NO: 271784 - RNA, 19 nt, Artificial Sequence
  Description of Artificial Sequence: Synthetic oligonucleotide
gaaacuacuaaaugugacg

SEQ ID NO: 271785 - RNA, 19 nt, Artificial Sequence
  Description of Artificial Sequence: Synthetic oligonucleotide
ugagaaacuacuaaaugug

SEQ ID NO: 271786 - RNA, 19 nt, Artificial Sequence
  Description of Artificial Sequence: Synthetic oligonucleotide
aaacuacuaaaugugacgg

SEQ ID NO: 271787 - RNA, 19 nt, Artificial Sequence
  Description of Artificial Sequence: Synthetic oligonucleotide
uguuacuuggacuugcccg

SEQ ID NO: 271788 - RNA, 19 nt, Artificial Sequence
  Description of Artificial Sequence: Synthetic oligonucleotide
aauuuaugagcuugugggg

SEQ ID NO: 271789 - RNA, 19 nt, Artificial Sequence
  Description of Artificial Sequence: Synthetic oligonucleotide
uuuauaaugguauuagcuc

SEQ ID NO: 271790 - RNA, 19 nt, Artificial Sequence
  Description of Artificial Sequence: Synthetic oligonucleotide
auuuacaggagguugcugg

SEQ ID NO: 271791 - RNA, 19 nt, Artificial Sequence
  Description of Artificial Sequence: Synthetic oligonucleotide
ucaacuaucucuuuuggcu

SEQ ID NO: 271792 - RNA, 19 nt, Artificial Sequence
  Description of Artificial Sequence: Synthetic oligonucleotide
  modified_base (4)..(4): a, c, u, g, unknown or other
aacngaugguacuucauug

SEQ ID NO: 271793 - RNA, 19 nt, Artificial Sequence
  Description of Artificial Sequence: Synthetic oligonucleotide
uuaggaggauuauuuaugg

SEQ ID NO: 271794 - RNA, 19 nt, Artificial Sequence
  Description of Artificial Sequence: Synthetic oligonucleotide
aacacguucaauauuucac

SEQ ID NO: 271795 - RNA, 19 nt, Artificial Sequence
  Description of Artificial Sequence: Synthetic oligonucleotide
uaugguaagauuugaaggu

SEQ ID NO: 271796 - RNA, 19 nt, Artificial Sequence
  Description of Artificial Sequence: Synthetic oligonucleotide
ucuacaaaugcucacccug

SEQ ID NO: 271797 - RNA, 19 nt, Artificial Sequence
  Description of Artificial Sequence: Synthetic oligonucleotide
uuauuuaugguaagauuug

SEQ ID NO: 271798 - RNA, 19 nt, Artificial Sequence
  Description of Artificial Sequence: Synthetic oligonucleotide
ugagacaacagguuucagg

SEQ ID NO: 271799 - RNA, 19 nt, Artificial Sequence
  Description of Artificial Sequence: Synthetic oligonucleotide
cagaaucuaauuuaugagc

SEQ ID NO: 271800 - RNA, 19 nt, Artificial Sequence
  Description of Artificial Sequence: Synthetic oligonucleotide
  modified_base (3)..(3): a, c, u, g, unknown or other
acngaugguacuucauugc

SEQ ID NO: 271801 - RNA, 19 nt, Artificial Sequence
  Description of Artificial Sequence: Synthetic oligonucleotide
uuuggagcaggacugcugg

SEQ ID NO: 271802 - RNA, 19 nt, Artificial Sequence
  Description of Artificial Sequence: Synthetic oligonucleotide
uguuguuccaggauuagac

SEQ ID NO: 271803 - RNA, 19 nt, Artificial Sequence
  Description of Artificial Sequence: Synthetic oligonucleotide
ugagcuaaggaccaacggc

SEQ ID NO: 271804 - RNA, 19 nt, Artificial Sequence
  Description of Artificial Sequence: Synthetic oligonucleotide
uuauccucagaacagcccc

SEQ ID NO: 271805 - RNA, 19 nt, Artificial Sequence
  Description of Artificial Sequence: Synthetic oligonucleotide
uguuauuugggccuccuga

SEQ ID NO: 271806 - RNA, 19 nt, Artificial Sequence
  Description of Artificial Sequence: Synthetic oligonucleotide
aaugacuaacuguacagaa

SEQ ID NO: 271807 - RNA, 19 nt, Artificial Sequence
  Description of Artificial Sequence: Synthetic oligonucleotide
uguguaaagguccaacaac

SEQ ID NO: 271808 - RNA, 19 nt, Artificial Sequence
  Description of Artificial Sequence: Synthetic oligonucleotide
uuaagaaaugugaaacuaa

SEQ ID NO: 271809 - RNA, 19 nt, Artificial Sequence
  Description of Artificial Sequence: Synthetic oligonucleotide
aucauuaacugauucugag

SEQ ID NO: 271810 - RNA, 19 nt, Artificial Sequence
  Description of Artificial Sequence: Synthetic oligonucleotide
cuaaagucugugaaggggc

SEQ ID NO: 271811 - RNA, 19 nt, Artificial Sequence
  Description of Artificial Sequence: Synthetic oligonucleotide
auuauuuaugguaagauuu

SEQ ID NO: 271812 - RNA, 19 nt, Artificial Sequence
  Description of Artificial Sequence: Synthetic oligonucleotide
agugugguuacuauugagc

SEQ ID NO: 271813 - RNA, 19 nt, Artificial Sequence
  Description of Artificial Sequence: Synthetic oligonucleotide
ucagggacuaggaaaagga

SEQ ID NO: 271814 - RNA, 19 nt, Artificial Sequence
  Description of Artificial Sequence: Synthetic oligonucleotide
ugagguauguguaaagguc

SEQ ID NO: 271815 - RNA, 19 nt, Artificial Sequence
  Description of Artificial Sequence: Synthetic oligonucleotide
aagaauuaggagcgacgac

SEQ ID NO: 271816 - RNA, 19 nt, Artificial Sequence
  Description of Artificial Sequence: Synthetic oligonucleotide
aaagccccuauuuaaauuu

SEQ ID NO: 271817 - RNA, 19 nt, Artificial Sequence
  Description of Artificial Sequence: Synthetic oligonucleotide
gagaggaucguuuucgaug

SEQ ID NO: 271818 - RNA, 19 nt, Artificial Sequence
  Description of Artificial Sequence: Synthetic oligonucleotide
uuuaggcugcuuaagaaau

SEQ ID NO: 271819 - RNA, 19 nt, Artificial Sequence
  Description of Artificial Sequence: Synthetic oligonucleotide
acuaaagucugugaagggg

SEQ ID NO: 271820 - RNA, 19 nt, Artificial Sequence
  Description of Artificial Sequence: Synthetic oligonucleotide
auugaguuauuaaaaugac

SEQ ID NO: 271821 - RNA, 19 nt, Artificial Sequence
  Description of Artificial Sequence: Synthetic oligonucleotide
ugcaacaccaaaagggcug

SEQ ID NO: 271822 - RNA, 19 nt, Artificial Sequence
  Description of Artificial Sequence: Synthetic oligonucleotide
uuaagcccacuauuguugg

SEQ ID NO: 271823 - RNA, 19 nt, Artificial Sequence
  Description of Artificial Sequence: Synthetic oligonucleotide
uugaguuauuaaaaugacu

SEQ ID NO: 271824 - RNA, 19 nt, Artificial Sequence
  Description of Artificial Sequence: Synthetic oligonucleotide
ggagaaacuacuguggugg

SEQ ID NO: 271825 - RNA, 19 nt, Artificial Sequence
  Description of Artificial Sequence: Synthetic oligonucleotide
  modified_base (7)..(7): a, c, u, g, unknown or other
ugaaacngaugguacuuca

SEQ ID NO: 271826 - RNA, 19 nt, Artificial Sequence
  Description of Artificial Sequence: Synthetic oligonucleotide
gauaaagugggauuagcaa

SEQ ID NO: 271827 - RNA, 19 nt, Artificial Sequence
  Description of Artificial Sequence: Synthetic oligonucleotide
uuuacaggagguugcuggg

SEQ ID NO: 271828 - RNA, 19 nt, Artificial Sequence
  Description of Artificial Sequence: Synthetic oligonucleotide
cuauuggucaaaaggggag

SEQ ID NO: 271829 - RNA, 19 nt, Artificial Sequence
  Description of Artificial Sequence: Synthetic oligonucleotide
aggauaauagggucugggg

SEQ ID NO: 271830 - RNA, 19 nt, Artificial Sequence
  Description of Artificial Sequence: Synthetic oligonucleotide
uauuugggccuccugaaac

SEQ ID NO: 271831 - RNA, 19 nt, Artificial Sequence
  Description of Artificial Sequence: Synthetic oligonucleotide
auuguuggaaagcuuccag

SEQ ID NO: 271832 - RNA, 19 nt, Artificial Sequence
  Description of Artificial Sequence: Synthetic oligonucleotide
agaaucuaauuuaugagcu

SEQ ID NO: 271833 - RNA, 19 nt, Artificial Sequence
  Description of Artificial Sequence: Synthetic oligonucleotide
ugaucaaaagccccuauuu

SEQ ID NO: 271834 - RNA, 19 nt, Artificial Sequence
  Description of Artificial Sequence: Synthetic oligonucleotide
gacuauuggucaaaagggg

SEQ ID NO: 271835 - RNA, 19 nt, Artificial Sequence
  Description of Artificial Sequence: Synthetic oligonucleotide
guaaagguccaacaacugc

SEQ ID NO: 271836 - RNA, 19 nt, Artificial Sequence
  Description of Artificial Sequence: Synthetic oligonucleotide
cauuaggugcuacaggagc

SEQ ID NO: 271837 - RNA, 19 nt, Artificial Sequence
  Description of Artificial Sequence: Synthetic oligonucleotide
agaauuaggagcgacgacu

SEQ ID NO: 271838 - RNA, 19 nt, Artificial Sequence
  Description of Artificial Sequence: Synthetic oligonucleotide
cuggauagaagaauuagga

SEQ ID NO: 271839 - RNA, 19 nt, Artificial Sequence
  Description of Artificial Sequence: Synthetic oligonucleotide
ugguaagauuugaaggugc

SEQ ID NO: 271840 - RNA, 19 nt, Artificial Sequence
  Description of Artificial Sequence: Synthetic oligonucleotide
ugucugaggauaauagggu

SEQ ID NO: 271841 - RNA, 19 nt, Artificial Sequence
  Description of Artificial Sequence: Synthetic oligonucleotide
acuagcuucaggaagugag

SEQ ID NO: 271842 - RNA, 19 nt, Artificial Sequence
  Description of Artificial Sequence: Synthetic oligonucleotide
  modified_base (5)..(5): a, c, u, g, unknown or other
aaacngaugguacuucauu

SEQ ID NO: 271843 - RNA, 19 nt, Artificial Sequence
  Description of Artificial Sequence: Synthetic oligonucleotide
caguucgagaguuucuucg

SEQ ID NO: 271844 - RNA, 19 nt, Artificial Sequence
  Description of Artificial Sequence: Synthetic oligonucleotide
aauuaggagcgacgacugg

SEQ ID NO: 271845 - RNA, 19 nt, Artificial Sequence
  Description of Artificial Sequence: Synthetic oligonucleotide
uacuuuaggcugcuuaaga

SEQ ID NO: 271846 - RNA, 19 nt, Artificial Sequence
  Description of Artificial Sequence: Synthetic oligonucleotide
accaugauugccuuuugug

SEQ ID NO: 271847 - RNA, 19 nt, Artificial Sequence
  Description of Artificial Sequence: Synthetic oligonucleotide
uggauuuaauucuuuuacu

SEQ ID NO: 271848 - RNA, 19 nt, Artificial Sequence
  Description of Artificial Sequence: Synthetic oligonucleotide
guuacuauugagcguacac

SEQ ID NO: 271849 - RNA, 19 nt, Artificial Sequence
  Description of Artificial Sequence: Synthetic oligonucleotide
agaggaucguuuucgaugu

SEQ ID NO: 271850 - RNA, 19 nt, Artificial Sequence
  Description of Artificial Sequence: Synthetic oligonucleotide
uuuuauguuuugagguaug

SEQ ID NO: 271851 - RNA, 19 nt, Artificial Sequence
  Description of Artificial Sequence: Synthetic oligonucleotide
uguacuuuaggcugcuuaa

SEQ ID NO: 271852 - RNA, 19 nt, Artificial Sequence
  Description of Artificial Sequence: Synthetic oligonucleotide
auguccauuuuccacgcuc

SEQ ID NO: 271853 - RNA, 19 nt, Artificial Sequence
  Description of Artificial Sequence: Synthetic oligonucleotide
ucaauacauggcaacauuu

SEQ ID NO: 271854 - RNA, 19 nt, Artificial Sequence
  Description of Artificial Sequence: Synthetic oligonucleotide
guagcgugggugcugaggg

SEQ ID NO: 271855 - RNA, 19 nt, Artificial Sequence
  Description of Artificial Sequence: Synthetic oligonucleotide
uaaagugggauuagcaauu

SEQ ID NO: 271856 - RNA, 19 nt, Artificial Sequence
  Description of Artificial Sequence: Synthetic oligonucleotide
uuaggagcgacgacuggag

SEQ ID NO: 271857 - RNA, 19 nt, Artificial Sequence
  Description of Artificial Sequence: Synthetic oligonucleotide
ucauuagaagaucuacaaa

SEQ ID NO: 271858 - RNA, 19 nt, Artificial Sequence
  Description of Artificial Sequence: Synthetic oligonucleotide
aacccuuagauucucuuua

SEQ ID NO: 271859 - RNA, 19 nt, Artificial Sequence
  Description of Artificial Sequence: Synthetic oligonucleotide
aaaugacuaacuguacaga

SEQ ID NO: 271860 - RNA, 19 nt, Artificial Sequence
  Description of Artificial Sequence: Synthetic oligonucleotide
ugucuguauguuuggagca

SEQ ID NO: 271861 - RNA, 19 nt, Artificial Sequence
  Description of Artificial Sequence: Synthetic oligonucleotide
gacuaaagucugugaaggg

SEQ ID NO: 271862 - RNA, 19 nt, Artificial Sequence
  Description of Artificial Sequence: Synthetic oligonucleotide
ugggacuaaagucugugaa

SEQ ID NO: 271863 - RNA, 19 nt, Artificial Sequence
  Description of Artificial Sequence: Synthetic oligonucleotide
acuacuaaaugugacggca

SEQ ID NO: 271864 - RNA, 19 nt, Artificial Sequence
  Description of Artificial Sequence: Synthetic oligonucleotide
aagugggauuagcaauugg

SEQ ID NO: 271865 - RNA, 19 nt, Artificial Sequence
  Description of Artificial Sequence: Synthetic oligonucleotide
auugagcguacacugguug

SEQ ID NO: 271866 - RNA, 19 nt, Artificial Sequence
  Description of Artificial Sequence: Synthetic oligonucleotide
uugagcguacacugguugg

SEQ ID NO: 271867 - RNA, 19 nt, Artificial Sequence
  Description of Artificial Sequence: Synthetic oligonucleotide
cauuagaagaucuacaaau

SEQ ID NO: 271868 - RNA, 19 nt, Artificial Sequence
  Description of Artificial Sequence: Synthetic oligonucleotide
gagcuaaggaccaacggcc

SEQ ID NO: 271869 - RNA, 19 nt, Artificial Sequence
  Description of Artificial Sequence: Synthetic oligonucleotide
ugcuggauagaagaauuag

SEQ ID NO: 271870 - RNA, 19 nt, Artificial Sequence
  Description of Artificial Sequence: Synthetic oligonucleotide
auuaagcccacuauuguug

SEQ ID NO: 271871 - RNA, 19 nt, Artificial Sequence
  Description of Artificial Sequence: Synthetic oligonucleotide
uaguggaugagaccgggcu

SEQ ID NO: 271872 - RNA, 19 nt, Artificial Sequence
  Description of Artificial Sequence: Synthetic oligonucleotide
aaaugugacggcauguuau

SEQ ID NO: 271873 - RNA, 19 nt, Artificial Sequence
  Description of Artificial Sequence: Synthetic oligonucleotide
gauaauagggucuggggcu

SEQ ID NO: 271874 - RNA, 19 nt, Artificial Sequence
  Description of Artificial Sequence: Synthetic oligonucleotide
gugacggcauguuauuugg

SEQ ID NO: 271875 - RNA, 19 nt, Artificial Sequence
  Description of Artificial Sequence: Synthetic oligonucleotide
gaugagaccgggcuucgcc

SEQ ID NO: 271876 - RNA, 19 nt, Artificial Sequence
  Description of Artificial Sequence: Synthetic oligonucleotide
agaagaauuaggagcgacg

SEQ ID NO: 271877 - RNA, 19 nt, Artificial Sequence
  Description of Artificial Sequence: Synthetic oligonucleotide
uggucaaaaggggagaaac

SEQ ID NO: 271878 - RNA, 19 nt, Artificial Sequence
  Description of Artificial Sequence: Synthetic oligonucleotide
uuuagaagccuugaacuuc

SEQ ID NO: 271879 - RNA, 19 nt, Artificial Sequence
  Description of Artificial Sequence: Synthetic oligonucleotide
ggauaauagggucuggggc

SEQ ID NO: 271880 - RNA, 19 nt, Artificial Sequence
  Description of Artificial Sequence: Synthetic oligonucleotide
uuacuauugagcguacacu

SEQ ID NO: 271881 - RNA, 19 nt, Artificial Sequence
  Description of Artificial Sequence: Synthetic oligonucleotide
gaagaauuaggagcgacga

SEQ ID NO: 271882 - RNA, 19 nt, Artificial Sequence
  Description of Artificial Sequence: Synthetic oligonucleotide
uuuuagaagccuugaacuu

SEQ ID NO: 271883 - RNA, 19 nt, Artificial Sequence
  Description of Artificial Sequence: Synthetic oligonucleotide
aacugcgacggagggaggc

SEQ ID NO: 271884 - RNA, 19 nt, Artificial Sequence
  Description of Artificial Sequence: Synthetic oligonucleotide
ggacuaaagucugugaagg

SEQ ID NO: 271885 - RNA, 19 nt, Artificial Sequence
  Description of Artificial Sequence: Synthetic oligonucleotide
uauuuaugguaagauuuga

SEQ ID NO: 271886 - RNA, 19 nt, Artificial Sequence
  Description of Artificial Sequence: Synthetic oligonucleotide
uaugagacaacagguuuca

SEQ ID NO: 271887 - RNA, 19 nt, Artificial Sequence
  Description of Artificial Sequence: Synthetic oligonucleotide
uuuaggccuagaugucugg

SEQ ID NO: 271888 - RNA, 19 nt, Artificial Sequence
  Description of Artificial Sequence: Synthetic oligonucleotide
ugugcuugguugagaagcc

SEQ ID NO: 271889 - RNA, 19 nt, Artificial Sequence
  Description of Artificial Sequence: Synthetic oligonucleotide
uuguuggaaagcuuccaga

SEQ ID NO: 271890 - RNA, 19 nt, Artificial Sequence
  Description of Artificial Sequence: Synthetic oligonucleotide
gaggauuauuuaugguaag

SEQ ID NO: 271891 - RNA, 19 nt, Artificial Sequence
  Description of Artificial Sequence: Synthetic oligonucleotide
cucacccuguacuuuaggc

SEQ ID NO: 271892 - RNA, 19 nt, Artificial Sequence
  Description of Artificial Sequence: Synthetic oligonucleotide
  modified_base (2)..(2): a, c, u, g, unknown or other
cngaugguacuucauugcc

SEQ ID NO: 271893 - RNA, 19 nt, Artificial Sequence
  Description of Artificial Sequence: Synthetic oligonucleotide
aaguggcucagaugcuacg

SEQ ID NO: 271894 - RNA, 19 nt, Artificial Sequence
  Description of Artificial Sequence: Synthetic oligonucleotide
aaacuacugugguggacug

SEQ ID NO: 271895 - RNA, 19 nt, Artificial Sequence
  Description of Artificial Sequence: Synthetic oligonucleotide
ggaguuguggucucuagcc

SEQ ID NO: 271896 - RNA, 19 nt, Artificial Sequence
  Description of Artificial Sequence: Synthetic oligonucleotide
uucaauacauggcaacauu

SEQ ID NO: 271897 - RNA, 19 nt, Artificial Sequence
  Description of Artificial Sequence: Synthetic oligonucleotide
uguuuugagguauguguaa

SEQ ID NO: 271898 - RNA, 19 nt, Artificial Sequence
  Description of Artificial Sequence: Synthetic oligonucleotide
guaucaagucaucuuccag

SEQ ID NO: 271899 - RNA, 19 nt, Artificial Sequence
  Description of Artificial Sequence: Synthetic oligonucleotide
uaacuuucuuacaagccuu

SEQ ID NO: 271900 - RNA, 19 nt, Artificial Sequence
  Description of Artificial Sequence: Synthetic oligonucleotide
ugucaaugggguugcagga

SEQ ID NO: 271901 - RNA, 19 nt, Artificial Sequence
  Description of Artificial Sequence: Synthetic oligonucleotide
aaugugacggcauguuauu

SEQ ID NO: 271902 - RNA, 19 nt, Artificial Sequence
  Description of Artificial Sequence: Synthetic oligonucleotide
gaauuaggagcgacgacug

SEQ ID NO: 271903 - RNA, 19 nt, Artificial Sequence
  Description of Artificial Sequence: Synthetic oligonucleotide
cacccuguacuuuaggcug

SEQ ID NO: 271904 - RNA, 19 nt, Artificial Sequence
  Description of Artificial Sequence: Synthetic oligonucleotide
aggauuaagcccacuauug

SEQ ID NO: 271905 - RNA, 19 nt, Artificial Sequence
  Description of Artificial Sequence: Synthetic oligonucleotide
ugggguuuuacuguccagc

SEQ ID NO: 271906 - RNA, 19 nt, Artificial Sequence
  Description of Artificial Sequence: Synthetic oligonucleotide
ugagcguacacugguuggg

SEQ ID NO: 271907 - RNA, 19 nt, Artificial Sequence
  Description of Artificial Sequence: Synthetic oligonucleotide
agugggauuagcaauugga

SEQ ID NO: 271908 - RNA, 19 nt, Artificial Sequence
  Description of Artificial Sequence: Synthetic oligonucleotide
uguuggauuuaaacccugu

SEQ ID NO: 271909 - RNA, 19 nt, Artificial Sequence
  Description of Artificial Sequence: Synthetic oligonucleotide
ccuauuuaaauuuggccug

SEQ ID NO: 271910 - RNA, 19 nt, Artificial Sequence
  Description of Artificial Sequence: Synthetic oligonucleotide
augagaccgggcuucgccg

SEQ ID NO: 271911 - RNA, 19 nt, Artificial Sequence
  Description of Artificial Sequence: Synthetic oligonucleotide
uccagauaaagugggauua

SEQ ID NO: 271912 - RNA, 19 nt, Artificial Sequence
  Description of Artificial Sequence: Synthetic oligonucleotide
ugugguuacuauugagcgu

SEQ ID NO: 271913 - RNA, 19 nt, Artificial Sequence
  Description of Artificial Sequence: Synthetic oligonucleotide
gauuagcaauuggaguggg

SEQ ID NO: 271914 - RNA, 19 nt, Artificial Sequence
  Description of Artificial Sequence: Synthetic oligonucleotide
aauacauuucuaggcaguu

SEQ ID NO: 271915 - RNA, 19 nt, Artificial Sequence
  Description of Artificial Sequence: Synthetic oligonucleotide
gugggauuagcaauuggag

SEQ ID NO: 271916 - RNA, 19 nt, Artificial Sequence
  Description of Artificial Sequence: Synthetic oligonucleotide
ugggguugcaggaauuuuc

SEQ ID NO: 271917 - RNA, 19 nt, Artificial Sequence
  Description of Artificial Sequence: Synthetic oligonucleotide
aaagugggauuagcaauug

SEQ ID NO: 271918 - RNA, 19 nt, Artificial Sequence
  Description of Artificial Sequence: Synthetic oligonucleotide
uuguuggauuuaaacccug

SEQ ID NO: 271919 - RNA, 19 nt, Artificial Sequence
  Description of Artificial Sequence: Synthetic oligonucleotide
cuucgcuuggauugcacug

SEQ ID NO: 271920 - RNA, 19 nt, Artificial Sequence
  Description of Artificial Sequence: Synthetic oligonucleotide
aggauuagacuguuuucca

SEQ ID NO: 271921 - RNA, 19 nt, Artificial Sequence
  Description of Artificial Sequence: Synthetic oligonucleotide
uauuggucaaaaggggaga

SEQ ID NO: 271922 - RNA, 19 nt, Artificial Sequence
  Description of Artificial Sequence: Synthetic oligonucleotide
gggacuaggaaaaggauug

SEQ ID NO: 271923 - RNA, 19 nt, Artificial Sequence
  Description of Artificial Sequence: Synthetic oligonucleotide
acuacugugguggacugug

SEQ ID NO: 271924 - RNA, 19 nt, Artificial Sequence
  Description of Artificial Sequence: Synthetic oligonucleotide
uugaucaaaagccccuauu

SEQ ID NO: 271925 - RNA, 19 nt, Artificial Sequence
  Description of Artificial Sequence: Synthetic oligonucleotide
uugagaagccagaguaagu

SEQ ID NO: 271926 - RNA, 19 nt, Artificial Sequence
  Description of Artificial Sequence: Synthetic oligonucleotide
acuauugagcguacacugg

SEQ ID NO: 271927 - RNA, 19 nt, Artificial Sequence
  Description of Artificial Sequence: Synthetic oligonucleotide
uauuguuggaaagcuucca

SEQ ID NO: 271928 - RNA, 19 nt, Artificial Sequence
  Description of Artificial Sequence: Synthetic oligonucleotide
gauuauuuaugguaagauu

SEQ ID NO: 271929 - RNA, 19 nt, Artificial Sequence
  Description of Artificial Sequence: Synthetic oligonucleotide
aagcaggccgagaggaucg

SEQ ID NO: 271930 - RNA, 19 nt, Artificial Sequence
  Description of Artificial Sequence: Synthetic oligonucleotide
uugguugagaagccagagu

SEQ ID NO: 271931 - RNA, 19 nt, Artificial Sequence
  Description of Artificial Sequence: Synthetic oligonucleotide
ugguauuagcuccuuucaa

SEQ ID NO: 271932 - RNA, 19 nt, Artificial Sequence
  Description of Artificial Sequence: Synthetic oligonucleotide
guauguuuggagcaggacu

SEQ ID NO: 271933 - RNA, 19 nt, Artificial Sequence
  Description of Artificial Sequence: Synthetic oligonucleotide
acuauuggucaaaagggga

SEQ ID NO: 271934 - RNA, 19 nt, Artificial Sequence
  Description of Artificial Sequence: Synthetic oligonucleotide
ggaacauuaggugcuacag

SEQ ID NO: 271935 - RNA, 19 nt, Artificial Sequence
  Description of Artificial Sequence: Synthetic oligonucleotide
  modified_base (11)..(11): a, c, u, g, unknown or other
cuccugaaacngaugguac

SEQ ID NO: 271936 - RNA, 19 nt, Artificial Sequence
  Description of Artificial Sequence: Synthetic oligonucleotide
acgacuggagaggauguac

SEQ ID NO: 271937 - RNA, 19 nt, Artificial Sequence
  Description of Artificial Sequence: Synthetic oligonucleotide
cauuguacaaacccuuaga

SEQ ID NO: 271938 - RNA, 19 nt, Artificial Sequence
  Description of Artificial Sequence: Synthetic oligonucleotide
auuaggagcgacgacugga

SEQ ID NO: 271939 - RNA, 19 nt, Artificial Sequence
  Description of Artificial Sequence: Synthetic oligonucleotide
cuuaagaaaugugaaacua

SEQ ID NO: 271940 - RNA, 19 nt, Artificial Sequence
  Description of Artificial Sequence: Synthetic oligonucleotide
uuuucuucgcuuggauugc

SEQ ID NO: 271941 - RNA, 19 nt, Artificial Sequence
  Description of Artificial Sequence: Synthetic oligonucleotide
agaaacuacugugguggac

SEQ ID NO: 271942 - RNA, 19 nt, Artificial Sequence
  Description of Artificial Sequence: Synthetic oligonucleotide
augguaagauuugaaggug

SEQ ID NO: 271943 - RNA, 19 nt, Artificial Sequence
  Description of Artificial Sequence: Synthetic oligonucleotide
uccuuucaauacauggcaa

SEQ ID NO: 271944 - RNA, 19 nt, Artificial Sequence
  Description of Artificial Sequence: Synthetic oligonucleotide
ugcgacuguuacuuggacu

SEQ ID NO: 271945 - RNA, 19 nt, Artificial Sequence
  Description of Artificial Sequence: Synthetic oligonucleotide
cuugguugagaagccagag

SEQ ID NO: 271946 - RNA, 19 nt, Artificial Sequence
  Description of Artificial Sequence: Synthetic oligonucleotide
gggacuaaagucugugaag

SEQ ID NO: 271947 - RNA, 19 nt, Artificial Sequence
  Description of Artificial Sequence: Synthetic oligonucleotide
acauuuuagaagccuugaa

SEQ ID NO: 271948 - RNA, 19 nt, Artificial Sequence
  Description of Artificial Sequence: Synthetic oligonucleotide
gcuggauagaagaauuagg

SEQ ID NO: 271949 - RNA, 19 nt, Artificial Sequence
  Description of Artificial Sequence: Synthetic oligonucleotide
cuaugacugcauuugccuc

SEQ ID NO: 271950 - RNA, 19 nt, Artificial Sequence
  Description of Artificial Sequence: Synthetic oligonucleotide
auuagcccaggaguugugg

SEQ ID NO: 271951 - RNA, 19 nt, Artificial Sequence
  Description of Artificial Sequence: Synthetic oligonucleotide
uucgcuuggauugcacugc

SEQ ID NO: 271952 - RNA, 19 nt, Artificial Sequence
  Description of Artificial Sequence: Synthetic oligonucleotide
uuuaguagcgugggugcug

SEQ ID NO: 271953 - RNA, 19 nt, Artificial Sequence
  Description of Artificial Sequence: Synthetic oligonucleotide
agagacuaugacugcauuu

SEQ ID NO: 271954 - RNA, 19 nt, Artificial Sequence
  Description of Artificial Sequence: Synthetic oligonucleotide
acggagggaggcaucaggc

SEQ ID NO: 271955 - RNA, 19 nt, Artificial Sequence
  Description of Artificial Sequence: Synthetic oligonucleotide
agccuuggucagcaaaauc

SEQ ID NO: 271956 - RNA, 19 nt, Artificial Sequence
  Description of Artificial Sequence: Synthetic oligonucleotide
uugcccguuuuguuguucc

SEQ ID NO: 271957 - RNA, 19 nt, Artificial Sequence
  Description of Artificial Sequence: Synthetic oligonucleotide
gcuuggauugcacugcacc

SEQ ID NO: 271958 - RNA, 19 nt, Artificial Sequence
  Description of Artificial Sequence: Synthetic oligonucleotide
cuuggauugcacugcacca

SEQ ID NO: 271959 - RNA, 19 nt, Artificial Sequence
  Description of Artificial Sequence: Synthetic oligonucleotide
guuauccucagaacagccc

SEQ ID NO: 271960 - RNA, 19 nt, Artificial Sequence
  Description of Artificial Sequence: Synthetic oligonucleotide
guugggagagcaccgccag

SEQ ID NO: 271961 - RNA, 19 nt, Artificial Sequence
  Description of Artificial Sequence: Synthetic oligonucleotide
aaagguccaacaacugcga

SEQ ID NO: 271962 - RNA, 19 nt, Artificial Sequence
  Description of Artificial Sequence: Synthetic oligonucleotide
uauccucagaacagcccca

SEQ ID NO: 271963 - RNA, 19 nt, Artificial Sequence
  Description of Artificial Sequence: Synthetic oligonucleotide
gagagcaccgccagguaag

SEQ ID NO: 271964 - RNA, 19 nt, Artificial Sequence
  Description of Artificial Sequence: Synthetic oligonucleotide
gauggguccuguugaggug

SEQ ID NO: 271965 - RNA, 19 nt, Artificial Sequence
  Description of Artificial Sequence: Synthetic oligonucleotide
agguguucaucugaggacu

SEQ ID NO: 271966 - RNA, 19 nt, Artificial Sequence
  Description of Artificial Sequence: Synthetic oligonucleotide
ggauuagcaauuggagugg

SEQ ID NO: 271967 - RNA, 19 nt, Artificial Sequence
  Description of Artificial Sequence: Synthetic oligonucleotide
uuaguagcgugggugcuga

SEQ ID NO: 271968 - RNA, 19 nt, Artificial Sequence
  Description of Artificial Sequence: Synthetic oligonucleotide
cuuccagcuugcuuacuug

SEQ ID NO: 271969 - RNA, 19 nt, Artificial Sequence
  Description of Artificial Sequence: Synthetic oligonucleotide
ccccuauuuaaauuuggcc

SEQ ID NO: 271970 - RNA, 19 nt, Artificial Sequence
  Description of Artificial Sequence: Synthetic oligonucleotide
cugaggauaauagggucug

SEQ ID NO: 271971 - RNA, 19 nt, Artificial Sequence
  Description of Artificial Sequence: Synthetic oligonucleotide
cuagaccugcgacuguuac

SEQ ID NO: 271972 - RNA, 19 nt, Artificial Sequence
  Description of Artificial Sequence: Synthetic oligonucleotide
auuuaugguaagauuugaa

SEQ ID NO: 271973 - RNA, 19 nt, Artificial Sequence
  Description of Artificial Sequence: Synthetic oligonucleotide
cacugguugggagagcacc

SEQ ID NO: 271974 - RNA, 19 nt, Artificial Sequence
  Description of Artificial Sequence: Synthetic oligonucleotide
ugguugggagagcaccgcc

SEQ ID NO: 271975 - RNA, 19 nt, Artificial Sequence
  Description of Artificial Sequence: Synthetic oligonucleotide
guugagucuuucuggugac

SEQ ID NO: 271976 - RNA, 19 nt, Artificial Sequence
  Description of Artificial Sequence: Synthetic oligonucleotide
uccacuaggccaccugcaa

SEQ ID NO: 271977 - RNA, 19 nt, Artificial Sequence
  Description of Artificial Sequence: Synthetic oligonucleotide
agaugcuacgccaccauga

SEQ ID NO: 271978 - RNA, 19 nt, Artificial Sequence
  Description of Artificial Sequence: Synthetic oligonucleotide
agaccugcgacuguuacuu

SEQ ID NO: 271979 - RNA, 19 nt, Artificial Sequence
  Description of Artificial Sequence: Synthetic oligonucleotide
caaguggcucagaugcuac

SEQ ID NO: 271980 - RNA, 19 nt, Artificial Sequence
  Description of Artificial Sequence: Synthetic oligonucleotide
cuggacuauuggucaaaag

SEQ ID NO: 271981 - RNA, 19 nt, Artificial Sequence
  Description of Artificial Sequence: Synthetic oligonucleotide
caugauugccuuuuguggu

SEQ ID NO: 271982 - RNA, 19 nt, Artificial Sequence
  Description of Artificial Sequence: Synthetic oligonucleotide
uuuuaguagcgugggugcu

SEQ ID NO: 271983 - RNA, 19 nt, Artificial Sequence
  Description of Artificial Sequence: Synthetic oligonucleotide
guacuuuaggcugcuuaag

SEQ ID NO: 271984 - RNA, 19 nt, Artificial Sequence
  Description of Artificial Sequence: Synthetic oligonucleotide
uuaugagcuuguggggcag

SEQ ID NO: 271985 - RNA, 19 nt, Artificial Sequence
  Description of Artificial Sequence: Synthetic oligonucleotide
cuuuacacuuuaugagaca

SEQ ID NO: 271986 - RNA, 19 nt, Artificial Sequence
  Description of Artificial Sequence: Synthetic oligonucleotide
ucgccgauuggcagaggag

SEQ ID NO: 271987 - RNA, 19 nt, Artificial Sequence
  Description of Artificial Sequence: Synthetic oligonucleotide
gauuaagcccacuauuguu

SEQ ID NO: 271988 - RNA, 19 nt, Artificial Sequence
  Description of Artificial Sequence: Synthetic oligonucleotide
uauugagcguacacugguu

SEQ ID NO: 271989 - RNA, 19 nt, Artificial Sequence
  Description of Artificial Sequence: Synthetic oligonucleotide
uugggguuuuacuguccag

SEQ ID NO: 271990 - RNA, 19 nt, Artificial Sequence
  Description of Artificial Sequence: Synthetic oligonucleotide
guuacuuggacuugcccgu

SEQ ID NO: 271991 - RNA, 19 nt, Artificial Sequence
  Description of Artificial Sequence: Synthetic oligonucleotide
gugguuacuauugagcgua

SEQ ID NO: 271992 - RNA, 19 nt, Artificial Sequence
  Description of Artificial Sequence: Synthetic oligonucleotide
uagaccugcgacuguuacu

SEQ ID NO: 271993 - RNA, 19 nt, Artificial Sequence
  Description of Artificial Sequence: Synthetic oligonucleotide
agguuuggcccugucauca

SEQ ID NO: 271994 - RNA, 19 nt, Artificial Sequence
  Description of Artificial Sequence: Synthetic oligonucleotide
aggaccaacggccggccug

SEQ ID NO: 271995 - RNA, 19 nt, Artificial Sequence
  Description of Artificial Sequence: Synthetic oligonucleotide
aagccccuauuuaaauuug

SEQ ID NO: 271996 - RNA, 19 nt, Artificial Sequence
  Description of Artificial Sequence: Synthetic oligonucleotide
acgugagcuaaggaccaac

SEQ ID NO: 271997 - RNA, 19 nt, Artificial Sequence
  Description of Artificial Sequence: Synthetic oligonucleotide
aacaacugcgacggaggga

SEQ ID NO: 271998 - RNA, 19 nt, Artificial Sequence
  Description of Artificial Sequence: Synthetic oligonucleotide
auguuauuugggccuccug

SEQ ID NO: 271999 - RNA, 19 nt, Artificial Sequence
  Description of Artificial Sequence: Synthetic oligonucleotide
uaaugguauuagcuccuuu

SEQ ID NO: 272000 - RNA, 19 nt, Artificial Sequence
  Description of Artificial Sequence: Synthetic oligonucleotide
agccccuauuuaaauuugg

SEQ ID NO: 272001 - RNA, 19 nt, Artificial Sequence
  Description of Artificial Sequence: Synthetic oligonucleotide
uucuucgcuuggauugcac

SEQ ID NO: 272002 - RNA, 19 nt, Artificial Sequence
  Description of Artificial Sequence: Synthetic oligonucleotide
uccucaguucgagaguuuc

SEQ ID NO: 272003 - RNA, 19 nt, Artificial Sequence
  Description of Artificial Sequence: Synthetic oligonucleotide
uugcccuuaguggaugaga

SEQ ID NO: 272004 - RNA, 19 nt, Artificial Sequence
  Description of Artificial Sequence: Synthetic oligonucleotide
ggcacgcugagauucugag

SEQ ID NO: 272005 - RNA, 19 nt, Artificial Sequence
  Description of Artificial Sequence: Synthetic oligonucleotide
guuggcgcuguggagauga

SEQ ID NO: 272006 - RNA, 19 nt, Artificial Sequence
  Description of Artificial Sequence: Synthetic oligonucleotide
ggaggauuauuuaugguaa

SEQ ID NO: 272007 - RNA, 19 nt, Artificial Sequence
  Description of Artificial Sequence: Synthetic oligonucleotide
gaggauuaagcccacuauu

SEQ ID NO: 272008 - RNA, 19 nt, Artificial Sequence
  Description of Artificial Sequence: Synthetic oligonucleotide
auccucagaacagccccac

SEQ ID NO: 272009 - RNA, 19 nt, Artificial Sequence
  Description of Artificial Sequence: Synthetic oligonucleotide
cccuauuuaaauuuggccu

SEQ ID NO: 272010 - RNA, 19 nt, Artificial Sequence
  Description of Artificial Sequence: Synthetic oligonucleotide
uguugaucaaaagccccua

SEQ ID NO: 272011 - RNA, 19 nt, Artificial Sequence
  Description of Artificial Sequence: Synthetic oligonucleotide
ucgcuuggauugcacugca

SEQ ID NO: 272012 - RNA, 19 nt, Artificial Sequence
  Description of Artificial Sequence: Synthetic oligonucleotide
aacagguuucagggacuag

SEQ ID NO: 272013 - RNA, 19 nt, Artificial Sequence
  Description of Artificial Sequence: Synthetic oligonucleotide
ugcaaguggcucagaugcu

SEQ ID NO: 272014 - RNA, 19 nt, Artificial Sequence
  Description of Artificial Sequence: Synthetic oligonucleotide
ggggcguugagucuuucug

SEQ ID NO: 272015 - RNA, 19 nt, Artificial Sequence
  Description of Artificial Sequence: Synthetic oligonucleotide
acccuguacuuuaggcugc

SEQ ID NO: 272016 - RNA, 19 nt, Artificial Sequence
  Description of Artificial Sequence: Synthetic oligonucleotide
guuuuggacuucucaacua

SEQ ID NO: 272017 - RNA, 19 nt, Artificial Sequence
  Description of Artificial Sequence: Synthetic oligonucleotide
ugagaccgggcuucgccga

SEQ ID NO: 272018 - RNA, 19 nt, Artificial Sequence
  Description of Artificial Sequence: Synthetic oligonucleotide
gccgagaggaucguuuucg

SEQ ID NO: 272019 - RNA, 19 nt, Artificial Sequence
  Description of Artificial Sequence: Synthetic oligonucleotide
aggacuagccucaucugga

SEQ ID NO: 272020 - RNA, 19 nt, Artificial Sequence
  Description of Artificial Sequence: Synthetic oligonucleotide
ggguuuuggacuucucaac

SEQ ID NO: 272021 - RNA, 19 nt, Artificial Sequence
  Description of Artificial Sequence: Synthetic oligonucleotide
gagaaacuacuguggugga

SEQ ID NO: 272022 - RNA, 19 nt, Artificial Sequence
  Description of Artificial Sequence: Synthetic oligonucleotide
uaggagcgacgacuggaga

SEQ ID NO: 272023 - RNA, 19 nt, Artificial Sequence
  Description of Artificial Sequence: Synthetic oligonucleotide
  modified_base (8)..(8): a, c, u, g, unknown or other
cugaaacngaugguacuuc

SEQ ID NO: 272024 - RNA, 19 nt, Artificial Sequence
  Description of Artificial Sequence: Synthetic oligonucleotide
guuuugagguauguguaaa

SEQ ID NO: 272025 - RNA, 19 nt, Artificial Sequence
  Description of Artificial Sequence: Synthetic oligonucleotide
agggacuaggaaaaggauu

SEQ ID NO: 272026 - RNA, 19 nt, Artificial Sequence
  Description of Artificial Sequence: Synthetic oligonucleotide
uugccacuagcuucaggaa

SEQ ID NO: 272027 - RNA, 19 nt, Artificial Sequence
  Description of Artificial Sequence: Synthetic oligonucleotide
cccuguugaucaaaagccc

SEQ ID NO: 272028 - RNA, 19 nt, Artificial Sequence
  Description of Artificial Sequence: Synthetic oligonucleotide
uggaugagaccgggcuucg

SEQ ID NO: 272029 - RNA, 19 nt, Artificial Sequence
  Description of Artificial Sequence: Synthetic oligonucleotide
agggaacauuaggugcuac

SEQ ID NO: 272030 - RNA, 19 nt, Artificial Sequence
  Description of Artificial Sequence: Synthetic oligonucleotide
cuauugagcguacacuggu

SEQ ID NO: 272031 - RNA, 19 nt, Artificial Sequence
  Description of Artificial Sequence: Synthetic oligonucleotide
ugguuacuauugagcguac

SEQ ID NO: 272032 - RNA, 19 nt, Artificial Sequence
  Description of Artificial Sequence: Synthetic oligonucleotide
acccuuagauucucuuuau

SEQ ID NO: 272033 - RNA, 19 nt, Artificial Sequence
  Description of Artificial Sequence: Synthetic oligonucleotide
uuucuucgcuuggauugca

SEQ ID NO: 272034 - RNA, 19 nt, Artificial Sequence
  Description of Artificial Sequence: Synthetic oligonucleotide
cauuagcccaggaguugug

SEQ ID NO: 272035 - RNA, 19 nt, Artificial Sequence
  Description of Artificial Sequence: Synthetic oligonucleotide
ugggugucugaggauaaua

SEQ ID NO: 272036 - RNA, 19 nt, Artificial Sequence
  Description of Artificial Sequence: Synthetic oligonucleotide
aacuacugugguggacugu

SEQ ID NO: 272037 - RNA, 19 nt, Artificial Sequence
  Description of Artificial Sequence: Synthetic oligonucleotide
cagaugcuacgccaccaug

SEQ ID NO: 272038 - RNA, 19 nt, Artificial Sequence
  Description of Artificial Sequence: Synthetic oligonucleotide
guguucaucugaggacuag

SEQ ID NO: 272039 - RNA, 19 nt, Artificial Sequence
  Description of Artificial Sequence: Synthetic oligonucleotide
aggugcuugcccgauggcu

SEQ ID NO: 272040 - RNA, 19 nt, Artificial Sequence
  Description of Artificial Sequence: Synthetic oligonucleotide
gaugcuacgccaccaugau

SEQ ID NO: 272041 - RNA, 19 nt, Artificial Sequence
  Description of Artificial Sequence: Synthetic oligonucleotide
uuguggucucuagcccugg

SEQ ID NO: 272042 - RNA, 19 nt, Artificial Sequence
  Description of Artificial Sequence: Synthetic oligonucleotide
aaggaccaacggccggccu

SEQ ID NO: 272043 - RNA, 19 nt, Artificial Sequence
  Description of Artificial Sequence: Synthetic oligonucleotide
gggaacauuaggugcuaca

SEQ ID NO: 272044 - RNA, 19 nt, Artificial Sequence
  Description of Artificial Sequence: Synthetic oligonucleotide
cgugagcuaaggaccaacg

SEQ ID NO: 272045 - RNA, 19 nt, Artificial Sequence
  Description of Artificial Sequence: Synthetic oligonucleotide
gagcuaggcaaagaauuua

SEQ ID NO: 272046 - RNA, 19 nt, Artificial Sequence
  Description of Artificial Sequence: Synthetic oligonucleotide
cccacuacugcuauucaca

SEQ ID NO: 272047 - RNA, 19 nt, Artificial Sequence
  Description of Artificial Sequence: Synthetic oligonucleotide
ugguuggcgcuguggagau

SEQ ID NO: 272048 - RNA, 19 nt, Artificial Sequence
  Description of Artificial Sequence: Synthetic oligonucleotide
aggguugugcuugguugag

SEQ ID NO: 272049 - RNA, 19 nt, Artificial Sequence
  Description of Artificial Sequence: Synthetic oligonucleotide
ggauuaagcccacuauugu

SEQ ID NO: 272050 - RNA, 19 nt, Artificial Sequence
  Description of Artificial Sequence: Synthetic oligonucleotide
guuggauuuaaacccuguu

SEQ ID NO: 272051 - RNA, 19 nt, Artificial Sequence
  Description of Artificial Sequence: Synthetic oligonucleotide
acgcucucagaagccacag

SEQ ID NO: 272052 - RNA, 19 nt, Artificial Sequence
  Description of Artificial Sequence: Synthetic oligonucleotide
accgccagguaagaugggu

SEQ ID NO: 272053 - RNA, 19 nt, Artificial Sequence
  Description of Artificial Sequence: Synthetic oligonucleotide
uggggcuagaggucauuuu

SEQ ID NO: 272054 - RNA, 19 nt, Artificial Sequence
  Description of Artificial Sequence: Synthetic oligonucleotide
gcucugaucugcugaggug

SEQ ID NO: 272055 - RNA, 19 nt, Artificial Sequence
  Description of Artificial Sequence: Synthetic oligonucleotide
cugcgacuguuacuuggac

SEQ ID NO: 272056 - RNA, 19 nt, Artificial Sequence
  Description of Artificial Sequence: Synthetic oligonucleotide
ggggagaccaauacauuuc

SEQ ID NO: 272057 - RNA, 19 nt, Artificial Sequence
  Description of Artificial Sequence: Synthetic oligonucleotide
gccccuauuuaaauuuggc

SEQ ID NO: 272058 - RNA, 19 nt, Artificial Sequence
  Description of Artificial Sequence: Synthetic oligonucleotide
  modified_base (6)..(6): a, c, u, g, unknown or other
gaaacngaugguacuucau

SEQ ID NO: 272059 - RNA, 19 nt, Artificial Sequence
  Description of Artificial Sequence: Synthetic oligonucleotide
uuggcgcuguggagaugag

SEQ ID NO: 272060 - RNA, 19 nt, Artificial Sequence
  Description of Artificial Sequence: Synthetic oligonucleotide
gacuaacuguacagaaaua

SEQ ID NO: 272061 - RNA, 19 nt, Artificial Sequence
  Description of Artificial Sequence: Synthetic oligonucleotide
cuugcccgauggcuuucag

SEQ ID NO: 272062 - RNA, 19 nt, Artificial Sequence
  Description of Artificial Sequence: Synthetic oligonucleotide
aggccgagaggaucguuuu

SEQ ID NO: 272063 - RNA, 19 nt, Artificial Sequence
  Description of Artificial Sequence: Synthetic oligonucleotide
cuauucacacacaguacuu

SEQ ID NO: 272064 - RNA, 19 nt, Artificial Sequence
  Description of Artificial Sequence: Synthetic oligonucleotide
ggaucguuuucgaugucca

SEQ ID NO: 272065 - RNA, 19 nt, Artificial Sequence
  Description of Artificial Sequence: Synthetic oligonucleotide
cagcugaacaggaguggca

SEQ ID NO: 272066 - RNA, 19 nt, Artificial Sequence
  Description of Artificial Sequence: Synthetic oligonucleotide
gagcguacacugguuggga

SEQ ID NO: 272067 - RNA, 19 nt, Artificial Sequence
  Description of Artificial Sequence: Synthetic oligonucleotide
gaccugcgacuguuacuug

SEQ ID NO: 272068 - RNA, 19 nt, Artificial Sequence
  Description of Artificial Sequence: Synthetic oligonucleotide
gcgacuguuacuuggacuu

SEQ ID NO: 272069 - RNA, 19 nt, Artificial Sequence
  Description of Artificial Sequence: Synthetic oligonucleotide
cuacuaaaugugacggcau

SEQ ID NO: 272070 - RNA, 19 nt, Artificial Sequence
  Description of Artificial Sequence: Synthetic oligonucleotide
cagcaacauuuggaaagug

SEQ ID NO: 272071 - RNA, 19 nt, Artificial Sequence
  Description of Artificial Sequence: Synthetic oligonucleotide
gcucagaugcuacgccacc

SEQ ID NO: 272072 - RNA, 19 nt, Artificial Sequence
  Description of Artificial Sequence: Synthetic oligonucleotide
cuacuggacccuggacuag

SEQ ID NO: 272073 - RNA, 19 nt, Artificial Sequence
  Description of Artificial Sequence: Synthetic oligonucleotide
guugaucaaaagccccuau

SEQ ID NO: 272074 - RNA, 19 nt, Artificial Sequence
  Description of Artificial Sequence: Synthetic oligonucleotide
ugcgacggagggaggcauc

SEQ ID NO: 272075 - RNA, 19 nt, Artificial Sequence
  Description of Artificial Sequence: Synthetic oligonucleotide
aguugcaccuugaguugcu

SEQ ID NO: 272076 - RNA, 19 nt, Artificial Sequence
  Description of Artificial Sequence: Synthetic oligonucleotide
acugcgacggagggaggca

SEQ ID NO: 272077 - RNA, 19 nt, Artificial Sequence
  Description of Artificial Sequence: Synthetic oligonucleotide
ggagagcaccgccagguaa

SEQ ID NO: 272078 - RNA, 19 nt, Artificial Sequence
  Description of Artificial Sequence: Synthetic oligonucleotide
agguaagauggguccuguu

SEQ ID NO: 272079 - RNA, 19 nt, Artificial Sequence
  Description of Artificial Sequence: Synthetic oligonucleotide
cguacacugguugggagag

SEQ ID NO: 272080 - RNA, 19 nt, Artificial Sequence
  Description of Artificial Sequence: Synthetic oligonucleotide
uaguagcgugggugcugag

SEQ ID NO: 272081 - RNA, 19 nt, Artificial Sequence
  Description of Artificial Sequence: Synthetic oligonucleotide
gcuaggcaaagaauuuaca

SEQ ID NO: 272082 - RNA, 19 nt, Artificial Sequence
  Description of Artificial Sequence: Synthetic oligonucleotide
guaccagugugguuacuau

SEQ ID NO: 272083 - RNA, 19 nt, Artificial Sequence
  Description of Artificial Sequence: Synthetic oligonucleotide
gguaagauuugaaggugcu

SEQ ID NO: 272084 - RNA, 19 nt, Artificial Sequence
  Description of Artificial Sequence: Synthetic oligonucleotide
augcuacgccaccaugauu

SEQ ID NO: 272085 - RNA, 19 nt, Artificial Sequence
  Description of Artificial Sequence: Synthetic oligonucleotide
gcguacacugguugggaga

SEQ ID NO: 272086 - RNA, 19 nt, Artificial Sequence
  Description of Artificial Sequence: Synthetic oligonucleotide
uugggugucugaggauaau

SEQ ID NO: 272087 - RNA, 19 nt, Artificial Sequence
  Description of Artificial Sequence: Synthetic oligonucleotide
gggguuuuacuguccagcu

SEQ ID NO: 272088 - RNA, 19 nt, Artificial Sequence
  Description of Artificial Sequence: Synthetic oligonucleotide
gguucuguacugggagggc

SEQ ID NO: 272089 - RNA, 19 nt, Artificial Sequence
  Description of Artificial Sequence: Synthetic oligonucleotide
gcuucgccgauuggcagag

SEQ ID NO: 272090 - RNA, 19 nt, Artificial Sequence
  Description of Artificial Sequence: Synthetic oligonucleotide
gggcuucgccgauuggcag

SEQ ID NO: 272091 - RNA, 19 nt, Artificial Sequence
  Description of Artificial Sequence: Synthetic oligonucleotide
caccaguuauaucuuuagu

SEQ ID NO: 272092 - RNA, 19 nt, Artificial Sequence
  Description of Artificial Sequence: Synthetic oligonucleotide
guugggugucugaggauaa

SEQ ID NO: 272093 - RNA, 19 nt, Artificial Sequence
  Description of Artificial Sequence: Synthetic oligonucleotide
gccgauuggcagaggagcc

SEQ ID NO: 272094 - RNA, 19 nt, Artificial Sequence
  Description of Artificial Sequence: Synthetic oligonucleotide
cuacugugguggacuguga

SEQ ID NO: 272095 - RNA, 19 nt, Artificial Sequence
  Description of Artificial Sequence: Synthetic oligonucleotide
ggggagaaacuacuguggu

SEQ ID NO: 272096 - RNA, 19 nt, Artificial Sequence
  Description of Artificial Sequence: Synthetic oligonucleotide
uuacuuggacuugcccguu

SEQ ID NO: 272097 - RNA, 19 nt, Artificial Sequence
  Description of Artificial Sequence: Synthetic oligonucleotide
auggggcuagaggucauuu

SEQ ID NO: 272098 - RNA, 19 nt, Artificial Sequence
  Description of Artificial Sequence: Synthetic oligonucleotide
ccuuuugugguuggcgcug

SEQ ID NO: 272099 - RNA, 19 nt, Artificial Sequence
  Description of Artificial Sequence: Synthetic oligonucleotide
gagcgacgacuggagagga

SEQ ID NO: 272100 - RNA, 19 nt, Artificial Sequence
  Description of Artificial Sequence: Synthetic oligonucleotide
ggcucagaugcuacgccac

SEQ ID NO: 272101 - RNA, 19 nt, Artificial Sequence
  Description of Artificial Sequence: Synthetic oligonucleotide
ccuacuggacccuggacua

SEQ ID NO: 272102 - RNA, 19 nt, Artificial Sequence
  Description of Artificial Sequence: Synthetic oligonucleotide
gguuacuauugagcguaca

SEQ ID NO: 272103 - RNA, 19 nt, Artificial Sequence
  Description of Artificial Sequence: Synthetic oligonucleotide
ggaguggcacgugagcuaa

SEQ ID NO: 272104 - RNA, 19 nt, Artificial Sequence
  Description of Artificial Sequence: Synthetic oligonucleotide
cgccgauuggcagaggagc

SEQ ID NO: 272105 - RNA, 19 nt, Artificial Sequence
  Description of Artificial Sequence: Synthetic oligonucleotide
cagggacuaggaaaaggau

SEQ ID NO: 272106 - RNA, 19 nt, Artificial Sequence
  Description of Artificial Sequence: Synthetic oligonucleotide
ccgggcuucgccgauuggc

SEQ ID NO: 272107 - RNA, 19 nt, Artificial Sequence
  Description of Artificial Sequence: Synthetic oligonucleotide
cuuguggggcagcaaaguu

SEQ ID NO: 272108 - RNA, 19 nt, Artificial Sequence
  Description of Artificial Sequence: Synthetic oligonucleotide
gaguggcacgugagcuaag

SEQ ID NO: 272109 - RNA, 19 nt, Artificial Sequence
  Description of Artificial Sequence: Synthetic oligonucleotide
aggcacgcugagauucuga

SEQ ID NO: 272110 - RNA, 19 nt, Artificial Sequence
  Description of Artificial Sequence: Synthetic oligonucleotide
guaagauuugaaggugcuu

SEQ ID NO: 272111 - RNA, 19 nt, Artificial Sequence
  Description of Artificial Sequence: Synthetic oligonucleotide
cucaguucgagaguuucuu

SEQ ID NO: 272112 - RNA, 19 nt, Artificial Sequence
  Description of Artificial Sequence: Synthetic oligonucleotide
ccugcgacuguuacuugga

SEQ ID NO: 272113 - RNA, 19 nt, Artificial Sequence
  Description of Artificial Sequence: Synthetic oligonucleotide
ggacuaggaaaaggauuga

SEQ ID NO: 272114 - RNA, 19 nt, Artificial Sequence
  Description of Artificial Sequence: Synthetic oligonucleotide
gacgacuggagaggaugua

SEQ ID NO: 272115 - RNA, 19 nt, Artificial Sequence
  Description of Artificial Sequence: Synthetic oligonucleotide
cacuauuguuggaaagcuu

SEQ ID NO: 272116 - RNA, 19 nt, Artificial Sequence
  Description of Artificial Sequence: Synthetic oligonucleotide
  modified_base (12)..(12): a, c, u, g, unknown or other
ccuccugaaacngauggua

SEQ ID NO: 272117 - RNA, 19 nt, Artificial Sequence
  Description of Artificial Sequence: Synthetic oligonucleotide
acuagaccugcgacuguua

SEQ ID NO: 272118 - RNA, 19 nt, Artificial Sequence
  Description of Artificial Sequence: Synthetic oligonucleotide
gagggcgguuguugggugu

SEQ ID NO: 272119 - RNA, 19 nt, Artificial Sequence
  Description of Artificial Sequence: Synthetic oligonucleotide
ccagugugguuacuauuga

SEQ ID NO: 272120 - RNA, 19 nt, Artificial Sequence
  Description of Artificial Sequence: Synthetic oligonucleotide
cauguuauuugggccuccu

SEQ ID NO: 272121 - RNA, 19 nt, Artificial Sequence
  Description of Artificial Sequence: Synthetic oligonucleotide
gcauguuauuugggccucc

SEQ ID NO: 272122 - RNA, 19 nt, Artificial Sequence
  Description of Artificial Sequence: Synthetic oligonucleotide
gcaaguggcucagaugcua

SEQ ID NO: 272123 - RNA, 19 nt, Artificial Sequence
  Description of Artificial Sequence: Synthetic oligonucleotide
ggccgagaggaucguuuuc

SEQ ID NO: 272124 - RNA, 19 nt, Artificial Sequence
  Description of Artificial Sequence: Synthetic oligonucleotide
gcgguuguugggugucuga

SEQ ID NO: 272125 - RNA, 19 nt, Artificial Sequence
  Description of Artificial Sequence: Synthetic oligonucleotide
ggcgguuguugggugucug

SEQ ID NO: 272126 - RNA, 19 nt, Artificial Sequence
  Description of Artificial Sequence: Synthetic oligonucleotide
cucuuuuggcucacugcuu

SEQ ID NO: 272127 - RNA, 19 nt, Artificial Sequence
  Description of Artificial Sequence: Synthetic oligonucleotide
agcaggccgagaggaucgu

SEQ ID NO: 272128 - RNA, 19 nt, Artificial Sequence
  Description of Artificial Sequence: Synthetic oligonucleotide
cgauuggcagaggagccug

SEQ ID NO: 272129 - RNA, 19 nt, Artificial Sequence
  Description of Artificial Sequence: Synthetic oligonucleotide
ccaugggagcuaggcaaag

SEQ ID NO: 272130 - RNA, 19 nt, Artificial Sequence
  Description of Artificial Sequence: Synthetic oligonucleotide
gccuuuugugguuggcgcu

SEQ ID NO: 272131 - RNA, 19 nt, Artificial Sequence
  Description of Artificial Sequence: Synthetic oligonucleotide
ccacuauuguuggaaagcu

SEQ ID NO: 272132 - RNA, 19 nt, Artificial Sequence
  Description of Artificial Sequence: Synthetic oligonucleotide
ggagaccaauacauuucua

SEQ ID NO: 272133 - RNA, 19 nt, Artificial Sequence
  Description of Artificial Sequence: Synthetic oligonucleotide
ggacuagccucaucuggau

SEQ ID NO: 272134 - RNA, 19 nt, Artificial Sequence
  Description of Artificial Sequence: Synthetic oligonucleotide
ccgagaggaucguuuucga

SEQ ID NO: 272135 - RNA, 19 nt, Artificial Sequence
  Description of Artificial Sequence: Synthetic oligonucleotide
ggccacuguugguugucaa

SEQ ID NO: 272136 - RNA, 19 nt, Artificial Sequence
  Description of Artificial Sequence: Synthetic oligonucleotide
agguugcuggggaguugca

SEQ ID NO: 272137 - RNA, 19 nt, Artificial Sequence
  Description of Artificial Sequence: Synthetic oligonucleotide
guucugcaacaggguugug

SEQ ID NO: 272138 - RNA, 19 nt, Artificial Sequence
  Description of Artificial Sequence: Synthetic oligonucleotide
agcgacgacuggagaggau

SEQ ID NO: 272139 - RNA, 19 nt, Artificial Sequence
  Description of Artificial Sequence: Synthetic oligonucleotide
ggguugugcuugguugaga

SEQ ID NO: 272140 - RNA, 19 nt, Artificial Sequence
  Description of Artificial Sequence: Synthetic oligonucleotide
gccccacuacugcuauuca

SEQ ID NO: 272141 - RNA, 19 nt, Artificial Sequence
  Description of Artificial Sequence: Synthetic oligonucleotide
cagcaaaguuaggaggauu

SEQ ID NO: 272142 - RNA, 19 nt, Artificial Sequence
  Description of Artificial Sequence: Synthetic oligonucleotide
gccaugggagcuaggcaaa

SEQ ID NO: 272143 - RNA, 19 nt, Artificial Sequence
  Description of Artificial Sequence: Synthetic oligonucleotide
cgggcuucgccgauuggca

SEQ ID NO: 272144 - RNA, 19 nt, Artificial Sequence
  Description of Artificial Sequence: Synthetic oligonucleotide
agaccgggcuucgccgauu

SEQ ID NO: 272145 - RNA, 19 nt, Artificial Sequence
  Description of Artificial Sequence: Synthetic oligonucleotide
ccuggacuauuggucaaaa

SEQ ID NO: 272146 - RNA, 19 nt, Artificial Sequence
  Description of Artificial Sequence: Synthetic oligonucleotide
ccucaguucgagaguuucu

SEQ ID NO: 272147 - RNA, 19 nt, Artificial Sequence
  Description of Artificial Sequence: Synthetic oligonucleotide
ccagagagccuguaacuuu

SEQ ID NO: 272148 - RNA, 19 nt, Artificial Sequence
  Description of Artificial Sequence: Synthetic oligonucleotide
cacgugagcuaaggaccaa

SEQ ID NO: 272149 - RNA, 19 nt, Artificial Sequence
  Description of Artificial Sequence: Synthetic oligonucleotide
gggagggcgguuguugggu

SEQ ID NO: 272150 - RNA, 19 nt, Artificial Sequence
  Description of Artificial Sequence: Synthetic oligonucleotide
cgcuuggauugcacugcac

SEQ ID NO: 272151 - RNA, 19 nt, Artificial Sequence
  Description of Artificial Sequence: Synthetic oligonucleotide
ggaccaacggccggccugu

SEQ ID NO: 272152 - RNA, 19 nt, Artificial Sequence
  Description of Artificial Sequence: Synthetic oligonucleotide
ggacuagaccugcgacugu

SEQ ID NO: 272153 - RNA, 19 nt, Artificial Sequence
  Description of Artificial Sequence: Synthetic oligonucleotide
gcuugcccgauggcuuuca

SEQ ID NO: 272154 - RNA, 19 nt, Artificial Sequence
  Description of Artificial Sequence: Synthetic oligonucleotide
gguuggcgcuguggagaug

SEQ ID NO: 272155 - RNA, 19 nt, Artificial Sequence
  Description of Artificial Sequence: Synthetic oligonucleotide
caacggccggccugucugu

SEQ ID NO: 272156 - RNA, 19 nt, Artificial Sequence
  Description of Artificial Sequence: Synthetic oligonucleotide
cggccggccugucuguaug

SEQ ID NO: 272157 - RNA, 19 nt, Artificial Sequence
  Description of Artificial Sequence: Synthetic oligonucleotide
gggaggcaucaggccacug

SEQ ID NO: 272158 - RNA, 19 nt, Artificial Sequence
  Description of Artificial Sequence: Synthetic oligonucleotide
gaccaacggccggccuguc

SEQ ID NO: 272159 - RNA, 19 nt, Artificial Sequence
  Description of Artificial Sequence: Synthetic oligonucleotide
ggaaaaggauugaguuauu

SEQ ID NO: 272160 - RNA, 19 nt, Artificial Sequence
  Description of Artificial Sequence: Synthetic oligonucleotide
cagcaaaaucuggccaauu

SEQ ID NO: 272161 - RNA, 19 nt, Artificial Sequence
  Description of Artificial Sequence: Synthetic oligonucleotide
ggccggccugucuguaugu

SEQ ID NO: 272162 - RNA, 19 nt, Artificial Sequence
  Description of Artificial Sequence: Synthetic oligonucleotide
cugcgacggagggaggcau

SEQ ID NO: 272163 - RNA, 19 nt, Artificial Sequence
  Description of Artificial Sequence: Synthetic oligonucleotide
cauggggcuagaggucauu

SEQ ID NO: 272164 - RNA, 19 nt, Artificial Sequence
  Description of Artificial Sequence: Synthetic oligonucleotide
ccauggggcuagaggucau

SEQ ID NO: 272165 - RNA, 19 nt, Artificial Sequence
  Description of Artificial Sequence: Synthetic oligonucleotide
ccuagaugucuggguuggu

SEQ ID NO: 272166 - RNA, 19 nt, Artificial Sequence
  Description of Artificial Sequence: Synthetic oligonucleotide
gccggccugucuguauguu

SEQ ID NO: 272167 - RNA, 19 nt, Artificial Sequence
  Description of Artificial Sequence: Synthetic oligonucleotide
aguacaaagagaaugaccc

SEQ ID NO: 272168 - RNA, 19 nt, Artificial Sequence
  Description of Artificial Sequence: Synthetic oligonucleotide
ucauagaguuaaaagaugg

SEQ ID NO: 272169 - RNA, 19 nt, Artificial Sequence
  Description of Artificial Sequence: Synthetic oligonucleotide
aagaaucaaagagugaggc

SEQ ID NO: 272170 - RNA, 19 nt, Artificial Sequence
  Description of Artificial Sequence: Synthetic oligonucleotide
aauauugcauuucuccacg

SEQ ID NO: 272171 - RNA, 19 nt, Artificial Sequence
  Description of Artificial Sequence: Synthetic oligonucleotide
aaucugauucaucauagag

SEQ ID NO: 272172 - RNA, 19 nt, Artificial Sequence
  Description of Artificial Sequence: Synthetic oligonucleotide
uuaaagaggggccaguggg

SEQ ID NO: 272173 - RNA, 19 nt, Artificial Sequence
  Description of Artificial Sequence: Synthetic oligonucleotide
auugcucuaccauauaggc

SEQ ID NO: 272174 - RNA, 19 nt, Artificial Sequence
  Description of Artificial Sequence: Synthetic oligonucleotide
aaagcauuauugcucuacc

SEQ ID NO: 272175 - RNA, 19 nt, Artificial Sequence
  Description of Artificial Sequence: Synthetic oligonucleotide
acaucauaaaagcaggugg

SEQ ID NO: 272176 - RNA, 19 nt, Artificial Sequence
  Description of Artificial Sequence: Synthetic oligonucleotide
uugaggcuuacauagaagg

SEQ ID NO: 272177 - RNA, 19 nt, Artificial Sequence
  Description of Artificial Sequence: Synthetic oligonucleotide
acaaugacucauuaccucc

SEQ ID NO: 272178 - RNA, 19 nt, Artificial Sequence
  Description of Artificial Sequence: Synthetic oligonucleotide
auuacgugaagacuuuggc

SEQ ID NO: 272179 - RNA, 19 nt, Artificial Sequence
  Description of Artificial Sequence: Synthetic oligonucleotide
aacaacauccuagacaguc

SEQ ID NO: 272180 - RNA, 19 nt, Artificial Sequence
  Description of Artificial Sequence: Synthetic oligonucleotide
gacaccuagguuuaaagag

SEQ ID NO: 272181 - RNA, 19 nt, Artificial Sequence
  Description of Artificial Sequence: Synthetic oligonucleotide
agaguuaaaagauggcgac

SEQ ID NO: 272182 - RNA, 19 nt, Artificial Sequence
  Description of Artificial Sequence: Synthetic oligonucleotide
agagagagcguccuaauac

SEQ ID NO: 272183 - RNA, 19 nt, Artificial Sequence
  Description of Artificial Sequence: Synthetic oligonucleotide
ugaauuugggauuugcacc

SEQ ID NO: 272184 - RNA, 19 nt, Artificial Sequence
  Description of Artificial Sequence: Synthetic oligonucleotide
gacaucauugcauugggag

SEQ ID NO: 272185 - RNA, 19 nt, Artificial Sequence
  Description of Artificial Sequence: Synthetic oligonucleotide
aaccuaagacgacagacuc

SEQ ID NO: 272186 - RNA, 19 nt, Artificial Sequence
  Description of Artificial Sequence: Synthetic oligonucleotide
aaggcagaaacccuaagca

SEQ ID NO: 272187 - RNA, 19 nt, Artificial Sequence
  Description of Artificial Sequence: Synthetic oligonucleotide
auucguuggauauggaaac

SEQ ID NO: 272188 - RNA, 19 nt, Artificial Sequence
  Description of Artificial Sequence: Synthetic oligonucleotide
ugagcauuaaagaaagccu

SEQ ID NO: 272189 - RNA, 19 nt, Artificial Sequence
  Description of Artificial Sequence: Synthetic oligonucleotide
uacgugaagacuuuggcug

SEQ ID NO: 272190 - RNA, 19 nt, Artificial Sequence
  Description of Artificial Sequence: Synthetic oligonucleotide
aaaaguagguacuggaaau

SEQ ID NO: 272191 - RNA, 19 nt, Artificial Sequence
  Description of Artificial Sequence: Synthetic oligonucleotide
uaaagggcaagucagguaa

SEQ ID NO: 272192 - RNA, 19 nt, Artificial Sequence
  Description of Artificial Sequence: Synthetic oligonucleotide
auuacaggguauugggacc

SEQ ID NO: 272193 - RNA, 19 nt, Artificial Sequence
  Description of Artificial Sequence: Synthetic oligonucleotide
uuuauauaaucuuuggauu

SEQ ID NO: 272194 - RNA, 19 nt, Artificial Sequence
  Description of Artificial Sequence: Synthetic oligonucleotide
uuuaaagaggggccagugg

SEQ ID NO: 272195 - RNA, 19 nt, Artificial Sequence
  Description of Artificial Sequence: Synthetic oligonucleotide
ugcaccauggcauucuggg

SEQ ID NO: 272196 - RNA, 19 nt, Artificial Sequence
  Description of Artificial Sequence: Synthetic oligonucleotide
auuaugaaguuccuaucuc

SEQ ID NO: 272197 - RNA, 19 nt, Artificial Sequence
  Description of Artificial Sequence: Synthetic oligonucleotide
aauugacaauguuaaauau

SEQ ID NO: 272198 - RNA, 19 nt, Artificial Sequence
  Description of Artificial Sequence: Synthetic oligonucleotide
aaccaguuagccuagcacu

SEQ ID NO: 272199 - RNA, 19 nt, Artificial Sequence
  Description of Artificial Sequence: Synthetic oligonucleotide
aagacaccuagguuuaaag

SEQ ID NO: 272200 - RNA, 19 nt, Artificial Sequence
  Description of Artificial Sequence: Synthetic oligonucleotide
uggauacucgaccaaaagc

SEQ ID NO: 272201 - RNA, 19 nt, Artificial Sequence
  Description of Artificial Sequence: Synthetic oligonucleotide
auuuacaacaacauccuag

SEQ ID NO: 272202 - RNA, 19 nt, Artificial Sequence
  Description of Artificial Sequence: Synthetic oligonucleotide
ugauucaucauagaguuaa

SEQ ID NO: 272203 - RNA, 19 nt, Artificial Sequence
  Description of Artificial Sequence: Synthetic oligonucleotide
cauuaccucccaaugaucc

SEQ ID NO: 272204 - RNA, 19 nt, Artificial Sequence
  Description of Artificial Sequence: Synthetic oligonucleotide
ucaaagcucacuccaacug

SEQ ID NO: 272205 - RNA, 19 nt, Artificial Sequence
  Description of Artificial Sequence: Synthetic oligonucleotide
accuagauuacgugaagac

SEQ ID NO: 272206 - RNA, 19 nt, Artificial Sequence
  Description of Artificial Sequence: Synthetic oligonucleotide
caccaugccacacagaggc

SEQ ID NO: 272207 - RNA, 19 nt, Artificial Sequence
  Description of Artificial Sequence: Synthetic oligonucleotide
aacuaauuauccccucaag

SEQ ID NO: 272208 - RNA, 19 nt, Artificial Sequence
  Description of Artificial Sequence: Synthetic oligonucleotide
uuggauauggaaacugcug

SEQ ID NO: 272209 - RNA, 19 nt, Artificial Sequence
  Description of Artificial Sequence: Synthetic oligonucleotide
agcaugggaaaauuaaaug

SEQ ID NO: 272210 - RNA, 19 nt, Artificial Sequence
  Description of Artificial Sequence: Synthetic oligonucleotide
acaucauugcauugggagg

SEQ ID NO: 272211 - RNA, 19 nt, Artificial Sequence
  Description of Artificial Sequence: Synthetic oligonucleotide
guaaagugcacuuggcugc

SEQ ID NO: 272212 - RNA, 19 nt, Artificial Sequence
  Description of Artificial Sequence: Synthetic oligonucleotide
aacaacuaauuauccccuc

SEQ ID NO: 272213 - RNA, 19 nt, Artificial Sequence
  Description of Artificial Sequence: Synthetic oligonucleotide
uggcuaaucugauucauca

SEQ ID NO: 272214 - RNA, 19 nt, Artificial Sequence
  Description of Artificial Sequence: Synthetic oligonucleotide
uucugaucgggacccaugg

SEQ ID NO: 272215 - RNA, 19 nt, Artificial Sequence
  Description of Artificial Sequence: Synthetic oligonucleotide
aauggaguagggcuguuaa

SEQ ID NO: 272216 - RNA, 19 nt, Artificial Sequence
  Description of Artificial Sequence: Synthetic oligonucleotide
uuuugaggcuuacauagaa

SEQ ID NO: 272217 - RNA, 19 nt, Artificial Sequence
  Description of Artificial Sequence: Synthetic oligonucleotide
auuacuuauacuguuugcu

SEQ ID NO: 272218 - RNA, 19 nt, Artificial Sequence
  Description of Artificial Sequence: Synthetic oligonucleotide
auccuagacagucagcaag

SEQ ID NO: 272219 - RNA, 19 nt, Artificial Sequence
  Description of Artificial Sequence: Synthetic oligonucleotide
aauucguuggauauggaaa

SEQ ID NO: 272220 - RNA, 19 nt, Artificial Sequence
  Description of Artificial Sequence: Synthetic oligonucleotide
cucggucucaccaugcugg

SEQ ID NO: 272221 - RNA, 19 nt, Artificial Sequence
  Description of Artificial Sequence: Synthetic oligonucleotide
gguaagucuguccauagag

SEQ ID NO: 272222 - RNA, 19 nt, Artificial Sequence
  Description of Artificial Sequence: Synthetic oligonucleotide
acuacaccuguaaaggacc

SEQ ID NO: 272223 - RNA, 19 nt, Artificial Sequence
  Description of Artificial Sequence: Synthetic oligonucleotide
uccacgauuucuuaaguaa

SEQ ID NO: 272224 - RNA, 19 nt, Artificial Sequence
  Description of Artificial Sequence: Synthetic oligonucleotide
agagcguccuaauaccaac

SEQ ID NO: 272225 - RNA, 19 nt, Artificial Sequence
  Description of Artificial Sequence: Synthetic oligonucleotide
gauuacgugaagacuuugg

SEQ ID NO: 272226 - RNA, 19 nt, Artificial Sequence
  Description of Artificial Sequence: Synthetic oligonucleotide
gagguuaaagccuccuugc

SEQ ID NO: 272227 - RNA, 19 nt, Artificial Sequence
  Description of Artificial Sequence: Synthetic oligonucleotide
cauagaguuaaaagauggc

SEQ ID NO: 272228 - RNA, 19 nt, Artificial Sequence
  Description of Artificial Sequence: Synthetic oligonucleotide
uauauaaucuuuggauuca

SEQ ID NO: 272229 - RNA, 19 nt, Artificial Sequence
  Description of Artificial Sequence: Synthetic oligonucleotide
uccauaauucguuggauau

SEQ ID NO: 272230 - RNA, 19 nt, Artificial Sequence
  Description of Artificial Sequence: Synthetic oligonucleotide
uccuuaauaucauuugauc

SEQ ID NO: 272231 - RNA, 19 nt, Artificial Sequence
  Description of Artificial Sequence: Synthetic oligonucleotide
gagcauuaaagaaagccug

SEQ ID NO: 272232 - RNA, 19 nt, Artificial Sequence
  Description of Artificial Sequence: Synthetic oligonucleotide
uggaacacccugaugguca

SEQ ID NO: 272233 - RNA, 19 nt, Artificial Sequence
  Description of Artificial Sequence: Synthetic oligonucleotide
cuguuugcucaaaagacac

SEQ ID NO: 272234 - RNA, 19 nt, Artificial Sequence
  Description of Artificial Sequence: Synthetic oligonucleotide
ugacaaauccuugagaauu

SEQ ID NO: 272235 - RNA, 19 nt, Artificial Sequence
  Description of Artificial Sequence: Synthetic oligonucleotide
aaugucccacaucauaaaa

SEQ ID NO: 272236 - RNA, 19 nt, Artificial Sequence
  Description of Artificial Sequence: Synthetic oligonucleotide
aggcagaaacccuaagcac

SEQ ID NO: 272237 - RNA, 19 nt, Artificial Sequence
  Description of Artificial Sequence: Synthetic oligonucleotide
uuacuuauacuguuugcuc

SEQ ID NO: 272238 - RNA, 19 nt, Artificial Sequence
  Description of Artificial Sequence: Synthetic oligonucleotide
agcaguauuucugaucggg

SEQ ID NO: 272239 - RNA, 19 nt, Artificial Sequence
  Description of Artificial Sequence: Synthetic oligonucleotide
uuacgugaagacuuuggcu

SEQ ID NO: 272240 - RNA, 19 nt, Artificial Sequence
  Description of Artificial Sequence: Synthetic oligonucleotide
gaagacuuuggcuggcgag

SEQ ID NO: 272241 - RNA, 19 nt, Artificial Sequence
  Description of Artificial Sequence: Synthetic oligonucleotide
ugggaaaauuaaaugucgu

SEQ ID NO: 272242 - RNA, 19 nt, Artificial Sequence
  Description of Artificial Sequence: Synthetic oligonucleotide
uagcaugggaaaauuaaau

SEQ ID NO: 272243 - RNA, 19 nt, Artificial Sequence
  Description of Artificial Sequence: Synthetic oligonucleotide
caaggcagaaacccuaagc

SEQ ID NO: 272244 - RNA, 19 nt, Artificial Sequence
  Description of Artificial Sequence: Synthetic oligonucleotide
gagagagcguccuaauacc

SEQ ID NO: 272245 - RNA, 19 nt, Artificial Sequence
  Description of Artificial Sequence: Synthetic oligonucleotide
aagcaccuagauuacguga

SEQ ID NO: 272246 - RNA, 19 nt, Artificial Sequence
  Description of Artificial Sequence: Synthetic oligonucleotide
cacgauuucuuaaguaaag

SEQ ID NO: 272247 - RNA, 19 nt, Artificial Sequence
  Description of Artificial Sequence: Synthetic oligonucleotide
gacucauuaccucccaaug

SEQ ID NO: 272248 - RNA, 19 nt, Artificial Sequence
  Description of Artificial Sequence: Synthetic oligonucleotide
aaggccccauucuugauga

SEQ ID NO: 272249 - RNA, 19 nt, Artificial Sequence
  Description of Artificial Sequence: Synthetic oligonucleotide
aacgcugcgagcuucugau

SEQ ID NO: 272250 - RNA, 19 nt, Artificial Sequence
  Description of Artificial Sequence: Synthetic oligonucleotide
aaagauggcgacugucccu

SEQ ID NO: 272251 - RNA, 19 nt, Artificial Sequence
  Description of Artificial Sequence: Synthetic oligonucleotide
aguuccacucaaaugacag

SEQ ID NO: 272252 - RNA, 19 nt, Artificial Sequence
  Description of Artificial Sequence: Synthetic oligonucleotide
uguacuuaauccuggcgaa

SEQ ID NO: 272253 - RNA, 19 nt, Artificial Sequence
  Description of Artificial Sequence: Synthetic oligonucleotide
aaagguauguacauauuuu

SEQ ID NO: 272254 - RNA, 19 nt, Artificial Sequence
  Description of Artificial Sequence: Synthetic oligonucleotide
aaacaacuaauuauccccu

SEQ ID NO: 272255 - RNA, 19 nt, Artificial Sequence
  Description of Artificial Sequence: Synthetic oligonucleotide
ugggaugcaucccuuggag

SEQ ID NO: 272256 - RNA, 19 nt, Artificial Sequence
  Description of Artificial Sequence: Synthetic oligonucleotide
aauuauccccucaagacua

SEQ ID NO: 272257 - RNA, 19 nt, Artificial Sequence
  Description of Artificial Sequence: Synthetic oligonucleotide
aaaaccccauccaugcuag

SEQ ID NO: 272258 - RNA, 19 nt, Artificial Sequence
  Description of Artificial Sequence: Synthetic oligonucleotide
accauauaggcaaagggug

SEQ ID NO: 272259 - RNA, 19 nt, Artificial Sequence
  Description of Artificial Sequence: Synthetic oligonucleotide
ugcacauuagcaugggaaa

SEQ ID NO: 272260 - RNA, 19 nt, Artificial Sequence
  Description of Artificial Sequence: Synthetic oligonucleotide
uggcgaauggaguagggcu

SEQ ID NO: 272261 - RNA, 19 nt, Artificial Sequence
  Description of Artificial Sequence: Synthetic oligonucleotide
ucuaaggugaggugggaaa

SEQ ID NO: 272262 - RNA, 19 nt, Artificial Sequence
  Description of Artificial Sequence: Synthetic oligonucleotide
ucgggaauauugcauuucu

SEQ ID NO: 272263 - RNA, 19 nt, Artificial Sequence
  Description of Artificial Sequence: Synthetic oligonucleotide
aaaccuaagacgacagacu

SEQ ID NO: 272264 - RNA, 19 nt, Artificial Sequence
  Description of Artificial Sequence: Synthetic oligonucleotide
acaacuaauuauccccuca

SEQ ID NO: 272265 - RNA, 19 nt, Artificial Sequence
  Description of Artificial Sequence: Synthetic oligonucleotide
aaugacucauuaccuccca

SEQ ID NO: 272266 - RNA, 19 nt, Artificial Sequence
  Description of Artificial Sequence: Synthetic oligonucleotide
ugauuaugaaguuccuauc

SEQ ID NO: 272267 - RNA, 19 nt, Artificial Sequence
  Description of Artificial Sequence: Synthetic oligonucleotide
uguuugcucaaaagacacc

SEQ ID NO: 272268 - RNA, 19 nt, Artificial Sequence
  Description of Artificial Sequence: Synthetic oligonucleotide
aaaugucccacaucauaaa

SEQ ID NO: 272269 - RNA, 19 nt, Artificial Sequence
  Description of Artificial Sequence: Synthetic oligonucleotide
aaguagguacuggaaaugu

SEQ ID NO: 272270 - RNA, 19 nt, Artificial Sequence
  Description of Artificial Sequence: Synthetic oligonucleotide
cugaucgggacccaugggc

SEQ ID NO: 272271 - RNA, 19 nt, Artificial Sequence
  Description of Artificial Sequence: Synthetic oligonucleotide
uugcauuggaggacccugg

SEQ ID NO: 272272 - RNA, 19 nt, Artificial Sequence
  Description of Artificial Sequence: Synthetic oligonucleotide
acaccuagguuuaaagagg

SEQ ID NO: 272273 - RNA, 19 nt, Artificial Sequence
  Description of Artificial Sequence: Synthetic oligonucleotide
acauccuagacagucagca

SEQ ID NO: 272274 - RNA, 19 nt, Artificial Sequence
  Description of Artificial Sequence: Synthetic oligonucleotide
guauugggaccucaucagg

SEQ ID NO: 272275 - RNA, 19 nt, Artificial Sequence
  Description of Artificial Sequence: Synthetic oligonucleotide
uacuuaauccuggcgaaug

SEQ ID NO: 272276 - RNA, 19 nt, Artificial Sequence
  Description of Artificial Sequence: Synthetic oligonucleotide
agaggugauuaugaaguuc

SEQ ID NO: 272277 - RNA, 19 nt, Artificial Sequence
  Description of Artificial Sequence: Synthetic oligonucleotide
agugacacgggagagguga

SEQ ID NO: 272278 - RNA, 19 nt, Artificial Sequence
  Description of Artificial Sequence: Synthetic oligonucleotide
uuaaaagauggcgacuguc

SEQ ID NO: 272279 - RNA, 19 nt, Artificial Sequence
  Description of Artificial Sequence: Synthetic oligonucleotide
agacaccuagguuuaaaga

SEQ ID NO: 272280 - RNA, 19 nt, Artificial Sequence
  Description of Artificial Sequence: Synthetic oligonucleotide
cuguacuuaauccuggcga

SEQ ID NO: 272281 - RNA, 19 nt, Artificial Sequence
  Description of Artificial Sequence: Synthetic oligonucleotide
gcugcugugaccuacaaaa

SEQ ID NO: 272282 - RNA, 19 nt, Artificial Sequence
  Description of Artificial Sequence: Synthetic oligonucleotide
ugcauuggaggacccuggg

SEQ ID NO: 272283 - RNA, 19 nt, Artificial Sequence
  Description of Artificial Sequence: Synthetic oligonucleotide
acuagcgagaugucagcag

SEQ ID NO: 272284 - RNA, 19 nt, Artificial Sequence
  Description of Artificial Sequence: Synthetic oligonucleotide
gcgagcuucugauugaggg

SEQ ID NO: 272285 - RNA, 19 nt, Artificial Sequence
  Description of Artificial Sequence: Synthetic oligonucleotide
uucacaaguuuauuucaaa

SEQ ID NO: 272286 - RNA, 19 nt, Artificial Sequence
  Description of Artificial Sequence: Synthetic oligonucleotide
cuaauaccaacagcaacag

SEQ ID NO: 272287 - RNA, 19 nt, Artificial Sequence
  Description of Artificial Sequence: Synthetic oligonucleotide
aacauccuagacagucagc

SEQ ID NO: 272288 - RNA, 19 nt, Artificial Sequence
  Description of Artificial Sequence: Synthetic oligonucleotide
ugagaauuacaggguauug

SEQ ID NO: 272289 - RNA, 19 nt, Artificial Sequence
  Description of Artificial Sequence: Synthetic oligonucleotide
uuagccuagcacuggggug

SEQ ID NO: 272290 - RNA, 19 nt, Artificial Sequence
  Description of Artificial Sequence: Synthetic oligonucleotide
cuuguagccucacugcaug

SEQ ID NO: 272291 - RNA, 19 nt, Artificial Sequence
  Description of Artificial Sequence: Synthetic oligonucleotide
auacucgaccaaaagcugg

SEQ ID NO: 272292 - RNA, 19 nt, Artificial Sequence
  Description of Artificial Sequence: Synthetic oligonucleotide
uacucgaccaaaagcugga

SEQ ID NO: 272293 - RNA, 19 nt, Artificial Sequence
  Description of Artificial Sequence: Synthetic oligonucleotide
ugcuaggggaagcagugac

SEQ ID NO: 272294 - RNA, 19 nt, Artificial Sequence
  Description of Artificial Sequence: Synthetic oligonucleotide
accccauccaugcuagggg

SEQ ID NO: 272295 - RNA, 19 nt, Artificial Sequence
  Description of Artificial Sequence: Synthetic oligonucleotide
ugugcaccauguuguaugc

SEQ ID NO: 272296 - RNA, 19 nt, Artificial Sequence
  Description of Artificial Sequence: Synthetic oligonucleotide
agaaacauguuuccuuaau

SEQ ID NO: 272297 - RNA, 19 nt, Artificial Sequence
  Description of Artificial Sequence: Synthetic oligonucleotide
gggacuacaccuguaaagg

SEQ ID NO: 272298 - RNA, 19 nt, Artificial Sequence
  Description of Artificial Sequence: Synthetic oligonucleotide
aggaauguggcucaccauu

SEQ ID NO: 272299 - RNA, 19 nt, Artificial Sequence
  Description of Artificial Sequence: Synthetic oligonucleotide
aaaggacccucguccagug

SEQ ID NO: 272300 - RNA, 19 nt, Artificial Sequence
  Description of Artificial Sequence: Synthetic oligonucleotide
ucugaucgggacccauggg

SEQ ID NO: 272301 - RNA, 19 nt, Artificial Sequence
  Description of Artificial Sequence: Synthetic oligonucleotide
uuucugaucgggacccaug

SEQ ID NO: 272302 - RNA, 19 nt, Artificial Sequence
  Description of Artificial Sequence: Synthetic oligonucleotide
gauacucgaccaaaagcug

SEQ ID NO: 272303 - RNA, 19 nt, Artificial Sequence
  Description of Artificial Sequence: Synthetic oligonucleotide
ugcacaaggcagaaacccu

SEQ ID NO: 272304 - RNA, 19 nt, Artificial Sequence
  Description of Artificial Sequence: Synthetic oligonucleotide
uggguaagucuguccauag

SEQ ID NO: 272305 - RNA, 19 nt, Artificial Sequence
  Description of Artificial Sequence: Synthetic oligonucleotide
caaagcauuauugcucuac

SEQ ID NO: 272306 - RNA, 19 nt, Artificial Sequence
  Description of Artificial Sequence: Synthetic oligonucleotide
ucauaaaagcagguggaaa

SEQ ID NO: 272307 - RNA, 19 nt, Artificial Sequence
  Description of Artificial Sequence: Synthetic oligonucleotide
ggagguuaaagccuccuug

SEQ ID NO: 272308 - RNA, 19 nt, Artificial Sequence
  Description of Artificial Sequence: Synthetic oligonucleotide
cuaacagauuagugcagac

SEQ ID NO: 272309 - RNA, 19 nt, Artificial Sequence
  Description of Artificial Sequence: Synthetic oligonucleotide
aacccuaagcaccuagauu

SEQ ID NO: 272310 - RNA, 19 nt, Artificial Sequence
  Description of Artificial Sequence: Synthetic oligonucleotide
acaccuguaaaggacccuc

SEQ ID NO: 272311 - RNA, 19 nt, Artificial Sequence
  Description of Artificial Sequence: Synthetic oligonucleotide
agacgacagacucugggga

SEQ ID NO: 272312 - RNA, 19 nt, Artificial Sequence
  Description of Artificial Sequence: Synthetic oligonucleotide
ggaauauugcauuucucca

SEQ ID NO: 272313 - RNA, 19 nt, Artificial Sequence
  Description of Artificial Sequence: Synthetic oligonucleotide
uuaaagggcaagucaggua

SEQ ID NO: 272314 - RNA, 19 nt, Artificial Sequence
  Description of Artificial Sequence: Synthetic oligonucleotide
ugacucauuaccucccaau

SEQ ID NO: 272315 - RNA, 19 nt, Artificial Sequence
  Description of Artificial Sequence: Synthetic oligonucleotide
cuggauacucgaccaaaag

SEQ ID NO: 272316 - RNA, 19 nt, Artificial Sequence
  Description of Artificial Sequence: Synthetic oligonucleotide
uucaucucaagugccugcc

SEQ ID NO: 272317 - RNA, 19 nt, Artificial Sequence
  Description of Artificial Sequence: Synthetic oligonucleotide
aggaguacaaagagaauga

SEQ ID NO: 272318 - RNA, 19 nt, Artificial Sequence
  Description of Artificial Sequence: Synthetic oligonucleotide
uauugcauuucuccacgau

SEQ ID NO: 272319 - RNA, 19 nt, Artificial Sequence
  Description of Artificial Sequence: Synthetic oligonucleotide
gaaagauuacuuauacugu

SEQ ID NO: 272320 - RNA, 19 nt, Artificial Sequence
  Description of Artificial Sequence: Synthetic oligonucleotide
cuagauuacgugaagacuu

SEQ ID NO: 272321 - RNA, 19 nt, Artificial Sequence
  Description of Artificial Sequence: Synthetic oligonucleotide
aaacgcugcgagcuucuga

SEQ ID NO: 272322 - RNA, 19 nt, Artificial Sequence
  Description of Artificial Sequence: Synthetic oligonucleotide
cugcuuguagccucacugc

SEQ ID NO: 272323 - RNA, 19 nt, Artificial Sequence
  Description of Artificial Sequence: Synthetic oligonucleotide
gaugcaucccuuggagagg

SEQ ID NO: 272324 - RNA, 19 nt, Artificial Sequence
  Description of Artificial Sequence: Synthetic oligonucleotide
cauuccauaauucguugga

SEQ ID NO: 272325 - RNA, 19 nt, Artificial Sequence
  Description of Artificial Sequence: Synthetic oligonucleotide
ggggacuacaccuguaaag

SEQ ID NO: 272326 - RNA, 19 nt, Artificial Sequence
  Description of Artificial Sequence: Synthetic oligonucleotide
auauaggcaaagggugacg

SEQ ID NO: 272327 - RNA, 19 nt, Artificial Sequence
  Description of Artificial Sequence: Synthetic oligonucleotide
ugcuucgggguguuugucc

SEQ ID NO: 272328 - RNA, 19 nt, Artificial Sequence
  Description of Artificial Sequence: Synthetic oligonucleotide
ugacaauguuaaauauuua

SEQ ID NO: 272329 - RNA, 19 nt, Artificial Sequence
  Description of Artificial Sequence: Synthetic oligonucleotide
gucacguccccaccgaggc

SEQ ID NO: 272330 - RNA, 19 nt, Artificial Sequence
  Description of Artificial Sequence: Synthetic oligonucleotide
gucauguucaucuguccca

SEQ ID NO: 272331 - RNA, 19 nt, Artificial Sequence
  Description of Artificial Sequence: Synthetic oligonucleotide
cuggcgaggcagaaggaag

SEQ ID NO: 272332 - RNA, 19 nt, Artificial Sequence
  Description of Artificial Sequence: Synthetic oligonucleotide
uauccccucaagacuauua

SEQ ID NO: 272333 - RNA, 19 nt, Artificial Sequence
  Description of Artificial Sequence: Synthetic oligonucleotide
aaagacaccuagguuuaaa

SEQ ID NO: 272334 - RNA, 19 nt, Artificial Sequence
  Description of Artificial Sequence: Synthetic oligonucleotide
gagguugcauccucagcug

SEQ ID NO: 272335 - RNA, 19 nt, Artificial Sequence
  Description of Artificial Sequence: Synthetic oligonucleotide
aggacccucguccagugca

SEQ ID NO: 272336 - RNA, 19 nt, Artificial Sequence
  Description of Artificial Sequence: Synthetic oligonucleotide
acgauuucuuaaguaaagu

SEQ ID NO: 272337 - RNA, 19 nt, Artificial Sequence
  Description of Artificial Sequence: Synthetic oligonucleotide
accauggcauucugggaag

SEQ ID NO: 272338 - RNA, 19 nt, Artificial Sequence
  Description of Artificial Sequence: Synthetic oligonucleotide
uaauaccaacagcaacagu

SEQ ID NO: 272339 - RNA, 19 nt, Artificial Sequence
  Description of Artificial Sequence: Synthetic oligonucleotide
ugcgagcuucugauugagg

SEQ ID NO: 272340 - RNA, 19 nt, Artificial Sequence
  Description of Artificial Sequence: Synthetic oligonucleotide
guuccacucaaaugacagc

SEQ ID NO: 272341 - RNA, 19 nt, Artificial Sequence
  Description of Artificial Sequence: Synthetic oligonucleotide
uaaaggacccucguccagu

SEQ ID NO: 272342 - RNA, 19 nt, Artificial Sequence
  Description of Artificial Sequence: Synthetic oligonucleotide
uagauuacgugaagacuuu

SEQ ID NO: 272343 - RNA, 19 nt, Artificial Sequence
  Description of Artificial Sequence: Synthetic oligonucleotide
gggaaaauuaaaugucguc

SEQ ID NO: 272344 - RNA, 19 nt, Artificial Sequence
  Description of Artificial Sequence: Synthetic oligonucleotide
gacgacagacucuggggac

SEQ ID NO: 272345 - RNA, 19 nt, Artificial Sequence
  Description of Artificial Sequence: Synthetic oligonucleotide
guaaaggacccucguccag

SEQ ID NO: 272346 - RNA, 19 nt, Artificial Sequence
  Description of Artificial Sequence: Synthetic oligonucleotide
gucagcaguauuucugauc

SEQ ID NO: 272347 - RNA, 19 nt, Artificial Sequence
  Description of Artificial Sequence: Synthetic oligonucleotide
ugacgccaguacuugaaaa

SEQ ID NO: 272348 - RNA, 19 nt, Artificial Sequence
  Description of Artificial Sequence: Synthetic oligonucleotide
cacgcccucgggaauauug

SEQ ID NO: 272349 - RNA, 19 nt, Artificial Sequence
  Description of Artificial Sequence: Synthetic oligonucleotide
uuugcucaaaagacaccua

SEQ ID NO: 272350 - RNA, 19 nt, Artificial Sequence
  Description of Artificial Sequence: Synthetic oligonucleotide
accgaggcagaacaccaug

SEQ ID NO: 272351 - RNA, 19 nt, Artificial Sequence
  Description of Artificial Sequence: Synthetic oligonucleotide
agguuaaagccuccuugca

SEQ ID NO: 272352 - RNA, 19 nt, Artificial Sequence
  Description of Artificial Sequence: Synthetic oligonucleotide
ugagacccaguuccacuca

SEQ ID NO: 272353 - RNA, 19 nt, Artificial Sequence
  Description of Artificial Sequence: Synthetic oligonucleotide
caccuguaaaggacccucg

SEQ ID NO: 272354 - RNA, 19 nt, Artificial Sequence
  Description of Artificial Sequence: Synthetic oligonucleotide
guagacagugcgauucagc

SEQ ID NO: 272355 - RNA, 19 nt, Artificial Sequence
  Description of Artificial Sequence: Synthetic oligonucleotide
auauugcauuucuccacga

SEQ ID NO: 272356 - RNA, 19 nt, Artificial Sequence
  Description of Artificial Sequence: Synthetic oligonucleotide
cccucaagacuauuaaaag

SEQ ID NO: 272357 - RNA, 19 nt, Artificial Sequence
  Description of Artificial Sequence: Synthetic oligonucleotide
accaguacccacugcuaca

SEQ ID NO: 272358 - RNA, 19 nt, Artificial Sequence
  Description of Artificial Sequence: Synthetic oligonucleotide
ugcauggaguuuacagaaa

SEQ ID NO: 272359 - RNA, 19 nt, Artificial Sequence
  Description of Artificial Sequence: Synthetic oligonucleotide
auccccucaagacuauuaa

SEQ ID NO: 272360 - RNA, 19 nt, Artificial Sequence
  Description of Artificial Sequence: Synthetic oligonucleotide
ggauacucgaccaaaagcu

SEQ ID NO: 272361 - RNA, 19 nt, Artificial Sequence
  Description of Artificial Sequence: Synthetic oligonucleotide
aucuauucacagaaacgcu

SEQ ID NO: 272362 - RNA, 19 nt, Artificial Sequence
  Description of Artificial Sequence: Synthetic oligonucleotide
caguucagagagagcgucc

SEQ ID NO: 272363 - RNA, 19 nt, Artificial Sequence
  Description of Artificial Sequence: Synthetic oligonucleotide
agcagguggaaagauuacu

SEQ ID NO: 272364 - RNA, 19 nt, Artificial Sequence
  Description of Artificial Sequence: Synthetic oligonucleotide
guuaaagccuccuugcauu

SEQ ID NO: 272365 - RNA, 19 nt, Artificial Sequence
  Description of Artificial Sequence: Synthetic oligonucleotide
gcuaaucugauucaucaua

SEQ ID NO: 272366 - RNA, 19 nt, Artificial Sequence
  Description of Artificial Sequence: Synthetic oligonucleotide
aggcgagguaggcaacagg

SEQ ID NO: 272367 - RNA, 19 nt, Artificial Sequence
  Description of Artificial Sequence: Synthetic oligonucleotide
agguacuggaaauguccca

SEQ ID NO: 272368 - RNA, 19 nt, Artificial Sequence
  Description of Artificial Sequence: Synthetic oligonucleotide
ccuaagacgacagacucug

SEQ ID NO: 272369 - RNA, 19 nt, Artificial Sequence
  Description of Artificial Sequence: Synthetic oligonucleotide
gaagugacacgggagaggu

SEQ ID NO: 272370 - RNA, 19 nt, Artificial Sequence
  Description of Artificial Sequence: Synthetic oligonucleotide
aucauaaaagcagguggaa

SEQ ID NO: 272371 - RNA, 19 nt, Artificial Sequence
  Description of Artificial Sequence: Synthetic oligonucleotide
uucguuggauauggaaacu

SEQ ID NO: 272372 - RNA, 19 nt, Artificial Sequence
  Description of Artificial Sequence: Synthetic oligonucleotide
gaugccugacaaugacuca

SEQ ID NO: 272373 - RNA, 19 nt, Artificial Sequence
  Description of Artificial Sequence: Synthetic oligonucleotide
acgccaguacuugaaaaca

SEQ ID NO: 272374 - RNA, 19 nt, Artificial Sequence
  Description of Artificial Sequence: Synthetic oligonucleotide
aggcuuacauagaaggccu

SEQ ID NO: 272375 - RNA, 19 nt, Artificial Sequence
  Description of Artificial Sequence: Synthetic oligonucleotide
cauuccucacgcccucggg

SEQ ID NO: 272376 - RNA, 19 nt, Artificial Sequence
  Description of Artificial Sequence: Synthetic oligonucleotide
uccccucaagacuauuaaa

SEQ ID NO: 272377 - RNA, 19 nt, Artificial Sequence
  Description of Artificial Sequence: Synthetic oligonucleotide
caccaguacccacugcuac

SEQ ID NO: 272378 - RNA, 19 nt, Artificial Sequence
  Description of Artificial Sequence: Synthetic oligonucleotide
accuguaaaggacccucgu

SEQ ID NO: 272379 - RNA, 19 nt, Artificial Sequence
  Description of Artificial Sequence: Synthetic oligonucleotide
uagggcuguuaaccacagg

SEQ ID NO: 272380 - RNA, 19 nt, Artificial Sequence
  Description of Artificial Sequence: Synthetic oligonucleotide
cucgaccaaaagcuggauc

SEQ ID NO: 272381 - RNA, 19 nt, Artificial Sequence
  Description of Artificial Sequence: Synthetic oligonucleotide
gaaacccuaagcaccuaga

SEQ ID NO: 272382 - RNA, 19 nt, Artificial Sequence
  Description of Artificial Sequence: Synthetic oligonucleotide
ccauuccauaauucguugg

SEQ ID NO: 272383 - RNA, 19 nt, Artificial Sequence
  Description of Artificial Sequence: Synthetic oligonucleotide
uggggacuacaccuguaaa

SEQ ID NO: 272384 - RNA, 19 nt, Artificial Sequence
  Description of Artificial Sequence: Synthetic oligonucleotide
cccacuagcgagaugucag

SEQ ID NO: 272385 - RNA, 19 nt, Artificial Sequence
  Description of Artificial Sequence: Synthetic oligonucleotide
auucccgaugucuccucug

SEQ ID NO: 272386 - RNA, 19 nt, Artificial Sequence
  Description of Artificial Sequence: Synthetic oligonucleotide
ggccucuaaggugaggugg

SEQ ID NO: 272387 - RNA, 19 nt, Artificial Sequence
  Description of Artificial Sequence: Synthetic oligonucleotide
uuccucacgcccucgggaa

SEQ ID NO: 272388 - RNA, 19 nt, Artificial Sequence
  Description of Artificial Sequence: Synthetic oligonucleotide
agagucacguccccaccga

SEQ ID NO: 272389 - RNA, 19 nt, Artificial Sequence
  Description of Artificial Sequence: Synthetic oligonucleotide
uggcauugcugauccugcc

SEQ ID NO: 272390 - RNA, 19 nt, Artificial Sequence
  Description of Artificial Sequence: Synthetic oligonucleotide
caacuaauuauccccucaa

SEQ ID NO: 272391 - RNA, 19 nt, Artificial Sequence
  Description of Artificial Sequence: Synthetic oligonucleotide
ccucaagacuauuaaaaga

SEQ ID NO: 272392 - RNA, 19 nt, Artificial Sequence
  Description of Artificial Sequence: Synthetic oligonucleotide
agauuacgugaagacuuug

SEQ ID NO: 272393 - RNA, 19 nt, Artificial Sequence
  Description of Artificial Sequence: Synthetic oligonucleotide
uggagguuaaagccuccuu

SEQ ID NO: 272394 - RNA, 19 nt, Artificial Sequence
  Description of Artificial Sequence: Synthetic oligonucleotide
cuggcgaauggaguagggc

SEQ ID NO: 272395 - RNA, 19 nt, Artificial Sequence
  Description of Artificial Sequence: Synthetic oligonucleotide
uguuaaccacagggcacag

SEQ ID NO: 272396 - RNA, 19 nt, Artificial Sequence
  Description of Artificial Sequence: Synthetic oligonucleotide
augccugacaaugacucau

SEQ ID NO: 272397 - RNA, 19 nt, Artificial Sequence
  Description of Artificial Sequence: Synthetic oligonucleotide
agucacguccccaccgagg

SEQ ID NO: 272398 - RNA, 19 nt, Artificial Sequence
  Description of Artificial Sequence: Synthetic oligonucleotide
cacguccccaccgaggcag

SEQ ID NO: 272399 - RNA, 19 nt, Artificial Sequence
  Description of Artificial Sequence: Synthetic oligonucleotide
ugauccugugcagugucau

SEQ ID NO: 272400 - RNA, 19 nt, Artificial Sequence
  Description of Artificial Sequence: Synthetic oligonucleotide
uggggugcugaggaaagaa

SEQ ID NO: 272401 - RNA, 19 nt, Artificial Sequence
  Description of Artificial Sequence: Synthetic oligonucleotide
gagucacguccccaccgag

SEQ ID NO: 272402 - RNA, 19 nt, Artificial Sequence
  Description of Artificial Sequence: Synthetic oligonucleotide
acgggagaggugauuauga

SEQ ID NO: 272403 - RNA, 19 nt, Artificial Sequence
  Description of Artificial Sequence: Synthetic oligonucleotide
ucaugugcaccauguugua

SEQ ID NO: 272404 - RNA, 19 nt, Artificial Sequence
  Description of Artificial Sequence: Synthetic oligonucleotide
uuggaacacccugaugguc

SEQ ID NO: 272405 - RNA, 19 nt, Artificial Sequence
  Description of Artificial Sequence: Synthetic oligonucleotide
guuaaagggcaagucaggu

SEQ ID NO: 272406 - RNA, 19 nt, Artificial Sequence
  Description of Artificial Sequence: Synthetic oligonucleotide
agagagcguccuaauacca

SEQ ID NO: 272407 - RNA, 19 nt, Artificial Sequence
  Description of Artificial Sequence: Synthetic oligonucleotide
caaagagugaggccucuaa

SEQ ID NO: 272408 - RNA, 19 nt, Artificial Sequence
  Description of Artificial Sequence: Synthetic oligonucleotide
cuguuaaccacagggcaca

SEQ ID NO: 272409 - RNA, 19 nt, Artificial Sequence
  Description of Artificial Sequence: Synthetic oligonucleotide
ucggucucaccaugcuggc

SEQ ID NO: 272410 - RNA, 19 nt, Artificial Sequence
  Description of Artificial Sequence: Synthetic oligonucleotide
gcgauucagcuugagaccc

SEQ ID NO: 272411 - RNA, 19 nt, Artificial Sequence
  Description of Artificial Sequence: Synthetic oligonucleotide
gcucaaaagacaccuaggu

SEQ ID NO: 272412 - RNA, 19 nt, Artificial Sequence
  Description of Artificial Sequence: Synthetic oligonucleotide
gacacgggagaggugauua

SEQ ID NO: 272413 - RNA, 19 nt, Artificial Sequence
  Description of Artificial Sequence: Synthetic oligonucleotide
uagcgagaugucagcagua

SEQ ID NO: 272414 - RNA, 19 nt, Artificial Sequence
  Description of Artificial Sequence: Synthetic oligonucleotide
cagcaguauuucugaucgg

SEQ ID NO: 272415 - RNA, 19 nt, Artificial Sequence
  Description of Artificial Sequence: Synthetic oligonucleotide
acccaugggcaugccagac

SEQ ID NO: 272416 - RNA, 19 nt, Artificial Sequence
  Description of Artificial Sequence: Synthetic oligonucleotide
guagggcuguuaaccacag

SEQ ID NO: 272417 - RNA, 19 nt, Artificial Sequence
  Description of Artificial Sequence: Synthetic oligonucleotide
acacccugauggucaagcu

SEQ ID NO: 272418 - RNA, 19 nt, Artificial Sequence
  Description of Artificial Sequence: Synthetic oligonucleotide
cucuaccauauaggcaaag

SEQ ID NO: 272419 - RNA, 19 nt, Artificial Sequence
  Description of Artificial Sequence: Synthetic oligonucleotide
gggccaaccaguuagccua

SEQ ID NO: 272420 - RNA, 19 nt, Artificial Sequence
  Description of Artificial Sequence: Synthetic oligonucleotide
accuagguuuaaagagggg

SEQ ID NO: 272421 - RNA, 19 nt, Artificial Sequence
  Description of Artificial Sequence: Synthetic oligonucleotide
auccuggcgaauggaguag

SEQ ID NO: 272422 - RNA, 19 nt, Artificial Sequence
  Description of Artificial Sequence: Synthetic oligonucleotide
cuucugauugagggugcag

SEQ ID NO: 272423 - RNA, 19 nt, Artificial Sequence
  Description of Artificial Sequence: Synthetic oligonucleotide
guuguaugcugcaggcuuc

SEQ ID NO: 272424 - RNA, 19 nt, Artificial Sequence
  Description of Artificial Sequence: Synthetic oligonucleotide
ucagguagacagugcgauu

SEQ ID NO: 272425 - RNA, 19 nt, Artificial Sequence
  Description of Artificial Sequence: Synthetic oligonucleotide
cucgggaauauugcauuuc

SEQ ID NO: 272426 - RNA, 19 nt, Artificial Sequence
  Description of Artificial Sequence: Synthetic oligonucleotide
cacgggagaggugauuaug

SEQ ID NO: 272427 - RNA, 19 nt, Artificial Sequence
  Description of Artificial Sequence: Synthetic oligonucleotide
cugauacaugggugcaguc

SEQ ID NO: 272428 - RNA, 19 nt, Artificial Sequence
  Description of Artificial Sequence: Synthetic oligonucleotide
agggugacgccaguacuug

SEQ ID NO: 272429 - RNA, 19 nt, Artificial Sequence
  Description of Artificial Sequence: Synthetic oligonucleotide
cuagcgagaugucagcagu

SEQ ID NO: 272430 - RNA, 19 nt, Artificial Sequence
  Description of Artificial Sequence: Synthetic oligonucleotide
ggcgagguaggcaacagga

SEQ ID NO: 272431 - RNA, 19 nt, Artificial Sequence
  Description of Artificial Sequence: Synthetic oligonucleotide
ugccggcucugauucaaaa

SEQ ID NO: 272432 - RNA, 19 nt, Artificial Sequence
  Description of Artificial Sequence: Synthetic oligonucleotide
cuugagaauuacaggguau

SEQ ID NO: 272433 - RNA, 19 nt, Artificial Sequence
  Description of Artificial Sequence: Synthetic oligonucleotide
aggccuuuauuuacaacaa

SEQ ID NO: 272434 - RNA, 19 nt, Artificial Sequence
  Description of Artificial Sequence: Synthetic oligonucleotide
gauggcgacugucccugga

SEQ ID NO: 272435 - RNA, 19 nt, Artificial Sequence
  Description of Artificial Sequence: Synthetic oligonucleotide
acuggauacucgaccaaaa

SEQ ID NO: 272436 - RNA, 19 nt, Artificial Sequence
  Description of Artificial Sequence: Synthetic oligonucleotide
gggucauguucaucugucc

SEQ ID NO: 272437 - RNA, 19 nt, Artificial Sequence
  Description of Artificial Sequence: Synthetic oligonucleotide
ggcucaccauuccucacgc

SEQ ID NO: 272438 - RNA, 19 nt, Artificial Sequence
  Description of Artificial Sequence: Synthetic oligonucleotide
gagcguccuaauaccaaca

SEQ ID NO: 272439 - RNA, 19 nt, Artificial Sequence
  Description of Artificial Sequence: Synthetic oligonucleotide
acagaaacgcugcgagcuu

SEQ ID NO: 272440 - RNA, 19 nt, Artificial Sequence
  Description of Artificial Sequence: Synthetic oligonucleotide
gaguuaaaagauggcgacu

SEQ ID NO: 272441 - RNA, 19 nt, Artificial Sequence
  Description of Artificial Sequence: Synthetic oligonucleotide
ccccucaagacuauuaaaa

SEQ ID NO: 272442 - RNA, 19 nt, Artificial Sequence
  Description of Artificial Sequence: Synthetic oligonucleotide
ccucguccagugcacaagg

SEQ ID NO: 272443 - RNA, 19 nt, Artificial Sequence
  Description of Artificial Sequence: Synthetic oligonucleotide
ggacuacaccuguaaagga

SEQ ID NO: 272444 - RNA, 19 nt, Artificial Sequence
  Description of Artificial Sequence: Synthetic oligonucleotide
acgacagacucuggggacu

SEQ ID NO: 272445 - RNA, 19 nt, Artificial Sequence
  Description of Artificial Sequence: Synthetic oligonucleotide
accuaagacgacagacucu

SEQ ID NO: 272446 - RNA, 19 nt, Artificial Sequence
  Description of Artificial Sequence: Synthetic oligonucleotide
ggcgaauggaguagggcug

SEQ ID NO: 272447 - RNA, 19 nt, Artificial Sequence
  Description of Artificial Sequence: Synthetic oligonucleotide
ggcuguggcauucccgaug

SEQ ID NO: 272448 - RNA, 19 nt, Artificial Sequence
  Description of Artificial Sequence: Synthetic oligonucleotide
gggaaaggagcuguuucug

SEQ ID NO: 272449 - RNA, 19 nt, Artificial Sequence
  Description of Artificial Sequence: Synthetic oligonucleotide
uauuucugaucgggaccca

SEQ ID NO: 272450 - RNA, 19 nt, Artificial Sequence
  Description of Artificial Sequence: Synthetic oligonucleotide
agcgagaugucagcaguau

SEQ ID NO: 272451 - RNA, 19 nt, Artificial Sequence
  Description of Artificial Sequence: Synthetic oligonucleotide
cagaaacgcugcgagcuuc

SEQ ID NO: 272452 - RNA, 19 nt, Artificial Sequence
  Description of Artificial Sequence: Synthetic oligonucleotide
gccucuaaggugagguggg

SEQ ID NO: 272453 - RNA, 19 nt, Artificial Sequence
  Description of Artificial Sequence: Synthetic oligonucleotide
auuucugaucgggacccau

SEQ ID NO: 272454 - RNA, 19 nt, Artificial Sequence
  Description of Artificial Sequence: Synthetic oligonucleotide
gagagcguccuaauaccaa

SEQ ID NO: 272455 - RNA, 19 nt, Artificial Sequence
  Description of Artificial Sequence: Synthetic oligonucleotide
ucgggguguuuguccucgg

SEQ ID NO: 272456 - RNA, 19 nt, Artificial Sequence
  Description of Artificial Sequence: Synthetic oligonucleotide
ccauauaggcaaaggguga

SEQ ID NO: 272457 - RNA, 19 nt, Artificial Sequence
  Description of Artificial Sequence: Synthetic oligonucleotide
ggaauguggcucaccauuc

SEQ ID NO: 272458 - RNA, 19 nt, Artificial Sequence
  Description of Artificial Sequence: Synthetic oligonucleotide
cucaagugccugccggcuc

SEQ ID NO: 272459 - RNA, 19 nt, Artificial Sequence
  Description of Artificial Sequence: Synthetic oligonucleotide
ccaguuccacucaaaugac

SEQ ID NO: 272460 - RNA, 19 nt, Artificial Sequence
  Description of Artificial Sequence: Synthetic oligonucleotide
cugcgagcuucugauugag

SEQ ID NO: 272461 - RNA, 19 nt, Artificial Sequence
  Description of Artificial Sequence: Synthetic oligonucleotide
agaaacgcugcgagcuucu

SEQ ID NO: 272462 - RNA, 19 nt, Artificial Sequence
  Description of Artificial Sequence: Synthetic oligonucleotide
ccucccaaugauccugugc

SEQ ID NO: 272463 - RNA, 19 nt, Artificial Sequence
  Description of Artificial Sequence: Synthetic oligonucleotide
cuuguccuaacagauuagu

SEQ ID NO: 272464 - RNA, 19 nt, Artificial Sequence
  Description of Artificial Sequence: Synthetic oligonucleotide
gaaacgcugcgagcuucug

SEQ ID NO: 272465 - RNA, 19 nt, Artificial Sequence
  Description of Artificial Sequence: Synthetic oligonucleotide
ccuguaaaggacccucguc

SEQ ID NO: 272466 - RNA, 19 nt, Artificial Sequence
  Description of Artificial Sequence: Synthetic oligonucleotide
acaggguauugggaccuca

SEQ ID NO: 272467 - RNA, 19 nt, Artificial Sequence
  Description of Artificial Sequence: Synthetic oligonucleotide
cucaaaagacaccuagguu

SEQ ID NO: 272468 - RNA, 19 nt, Artificial Sequence
  Description of Artificial Sequence: Synthetic oligonucleotide
cauccuagacagucagcaa

SEQ ID NO: 272469 - RNA, 19 nt, Artificial Sequence
  Description of Artificial Sequence: Synthetic oligonucleotide
ggccucaucacagcagcgc

SEQ ID NO: 272470 - RNA, 19 nt, Artificial Sequence
  Description of Artificial Sequence: Synthetic oligonucleotide
gguguuuguccucggucuc

SEQ ID NO: 272471 - RNA, 19 nt, Artificial Sequence
  Description of Artificial Sequence: Synthetic oligonucleotide
ccauaauucguuggauaug

SEQ ID NO: 272472 - RNA, 19 nt, Artificial Sequence
  Description of Artificial Sequence: Synthetic oligonucleotide
gugacgccaguacuugaaa

SEQ ID NO: 272473 - RNA, 19 nt, Artificial Sequence
  Description of Artificial Sequence: Synthetic oligonucleotide
ccgaugucuccucugcuug

SEQ ID NO: 272474 - RNA, 19 nt, Artificial Sequence
  Description of Artificial Sequence: Synthetic oligonucleotide
aggugauuaugaaguuccu

SEQ ID NO: 272475 - RNA, 19 nt, Artificial Sequence
  Description of Artificial Sequence: Synthetic oligonucleotide
gaauggaguagggcuguua

SEQ ID NO: 272476 - RNA, 19 nt, Artificial Sequence
  Description of Artificial Sequence: Synthetic oligonucleotide
auacaugggugcagucuga

SEQ ID NO: 272477 - RNA, 19 nt, Artificial Sequence
  Description of Artificial Sequence: Synthetic oligonucleotide
gccaccaguaggguuuucc

SEQ ID NO: 272478 - RNA, 19 nt, Artificial Sequence
  Description of Artificial Sequence: Synthetic oligonucleotide
ccuggcgaauggaguaggg

SEQ ID NO: 272479 - RNA, 19 nt, Artificial Sequence
  Description of Artificial Sequence: Synthetic oligonucleotide
aacugcugcgguggggcuu

SEQ ID NO: 272480 - RNA, 19 nt, Artificial Sequence
  Description of Artificial Sequence: Synthetic oligonucleotide
cacuagcgagaugucagca

SEQ ID NO: 272481 - RNA, 19 nt, Artificial Sequence
  Description of Artificial Sequence: Synthetic oligonucleotide
uccucacgcccucgggaau

SEQ ID NO: 272482 - RNA, 19 nt, Artificial Sequence
  Description of Artificial Sequence: Synthetic oligonucleotide
ccacgauuucuuaaguaaa

SEQ ID NO: 272483 - RNA, 19 nt, Artificial Sequence
  Description of Artificial Sequence: Synthetic oligonucleotide
gauccugccaaaaccccau

SEQ ID NO: 272484 - RNA, 19 nt, Artificial Sequence
  Description of Artificial Sequence: Synthetic oligonucleotide
ggguuucacaaguuuauuu

SEQ ID NO: 272485 - RNA, 19 nt, Artificial Sequence
  Description of Artificial Sequence: Synthetic oligonucleotide
cuucgggguguuuguccuc

SEQ ID NO: 272486 - RNA, 19 nt, Artificial Sequence
  Description of Artificial Sequence: Synthetic oligonucleotide
auuauccccucaagacuau

SEQ ID NO: 272487 - RNA, 19 nt, Artificial Sequence
  Description of Artificial Sequence: Synthetic oligonucleotide
gggaugcaucccuuggaga

SEQ ID NO: 272488 - RNA, 19 nt, Artificial Sequence
  Description of Artificial Sequence: Synthetic oligonucleotide
uuauccccucaagacuauu

SEQ ID NO: 272489 - RNA, 19 nt, Artificial Sequence
  Description of Artificial Sequence: Synthetic oligonucleotide
gcaguauuucugaucggga

SEQ ID NO: 272490 - RNA, 19 nt, Artificial Sequence
  Description of Artificial Sequence: Synthetic oligonucleotide
cacauuagcaugggaaaau

SEQ ID NO: 272491 - RNA, 19 nt, Artificial Sequence
  Description of Artificial Sequence: Synthetic oligonucleotide
ggguaagucuguccauaga

SEQ ID NO: 272492 - RNA, 19 nt, Artificial Sequence
  Description of Artificial Sequence: Synthetic oligonucleotide
guccucggucucaccaugc

SEQ ID NO: 272493 - RNA, 19 nt, Artificial Sequence
  Description of Artificial Sequence: Synthetic oligonucleotide
cgcugcgagcuucugauug

SEQ ID NO: 272494 - RNA, 19 nt, Artificial Sequence
  Description of Artificial Sequence: Synthetic oligonucleotide
gcgagguaggcaacaggag

SEQ ID NO: 272495 - RNA, 19 nt, Artificial Sequence
  Description of Artificial Sequence: Synthetic oligonucleotide
cucuaaggugaggugggaa

SEQ ID NO: 272496 - RNA, 19 nt, Artificial Sequence
  Description of Artificial Sequence: Synthetic oligonucleotide
gcugcgagcuucugauuga

SEQ ID NO: 272497 - RNA, 19 nt, Artificial Sequence
  Description of Artificial Sequence: Synthetic oligonucleotide
cccuaagcaccuagauuac

SEQ ID NO: 272498 - RNA, 19 nt, Artificial Sequence
  Description of Artificial Sequence: Synthetic oligonucleotide
cugccuugcuggcuaaucu

SEQ ID NO: 272499 - RNA, 19 nt, Artificial Sequence
  Description of Artificial Sequence: Synthetic oligonucleotide
ggugacgccaguacuugaa

SEQ ID NO: 272500 - RNA, 19 nt, Artificial Sequence
  Description of Artificial Sequence: Synthetic oligonucleotide
gcacauuagcaugggaaaa

SEQ ID NO: 272501 - RNA, 19 nt, Artificial Sequence
  Description of Artificial Sequence: Synthetic oligonucleotide
ugcaucccuuggagaggaa

SEQ ID NO: 272502 - RNA, 19 nt, Artificial Sequence
  Description of Artificial Sequence: Synthetic oligonucleotide
ggccccauucuugaugaca

SEQ ID NO: 272503 - RNA, 19 nt, Artificial Sequence
  Description of Artificial Sequence: Synthetic oligonucleotide
ggaacacccugauggucaa

SEQ ID NO: 272504 - RNA, 19 nt, Artificial Sequence
  Description of Artificial Sequence: Synthetic oligonucleotide
cagugcgauucagcuugag

SEQ ID NO: 272505 - RNA, 19 nt, Artificial Sequence
  Description of Artificial Sequence: Synthetic oligonucleotide
ccuagauuacgugaagacu

SEQ ID NO: 272506 - RNA, 19 nt, Artificial Sequence
  Description of Artificial Sequence: Synthetic oligonucleotide
gcagaacaccaugccacac

SEQ ID NO: 272507 - RNA, 19 nt, Artificial Sequence
  Description of Artificial Sequence: Synthetic oligonucleotide
gcuucgggguguuuguccu

SEQ ID NO: 272508 - RNA, 19 nt, Artificial Sequence
  Description of Artificial Sequence: Synthetic oligonucleotide
gcaaggcauuucaaagcuc

SEQ ID NO: 272509 - RNA, 19 nt, Artificial Sequence
  Description of Artificial Sequence: Synthetic oligonucleotide
gacccucguccagugcaca

SEQ ID NO: 272510 - RNA, 19 nt, Artificial Sequence
  Description of Artificial Sequence: Synthetic oligonucleotide
cugcuucgggguguuuguc

SEQ ID NO: 272511 - RNA, 19 nt, Artificial Sequence
  Description of Artificial Sequence: Synthetic oligonucleotide
gugucccacuagcgagaug

SEQ ID NO: 272512 - RNA, 19 nt, Artificial Sequence
  Description of Artificial Sequence: Synthetic oligonucleotide
ggcuaaucugauucaucau

SEQ ID NO: 272513 - RNA, 19 nt, Artificial Sequence
  Description of Artificial Sequence: Synthetic oligonucleotide
gcuggcgaggcagaaggaa

SEQ ID NO: 272514 - RNA, 19 nt, Artificial Sequence
  Description of Artificial Sequence: Synthetic oligonucleotide
acagugcgauucagcuuga

SEQ ID NO: 272515 - RNA, 19 nt, Artificial Sequence
  Description of Artificial Sequence: Synthetic oligonucleotide
ggcgacugucccuggaggu

SEQ ID NO: 272516 - RNA, 19 nt, Artificial Sequence
  Description of Artificial Sequence: Synthetic oligonucleotide
gcaucccuuggagaggaaa

SEQ ID NO: 272517 - RNA, 19 nt, Artificial Sequence
  Description of Artificial Sequence: Synthetic oligonucleotide
aggcuuccccuggggagca

SEQ ID NO: 272518 - RNA, 19 nt, Artificial Sequence
  Description of Artificial Sequence: Synthetic oligonucleotide
caggguauugggaccucau

SEQ ID NO: 272519 - RNA, 19 nt, Artificial Sequence
  Description of Artificial Sequence: Synthetic oligonucleotide
gcugcuucgggguguuugu

SEQ ID NO: 272520 - RNA, 19 nt, Artificial Sequence
  Description of Artificial Sequence: Synthetic oligonucleotide
gcuucugauugagggugca

SEQ ID NO: 272521 - RNA, 19 nt, Artificial Sequence
  Description of Artificial Sequence: Synthetic oligonucleotide
ccaugcuaggggaagcagu

SEQ ID NO: 272522 - RNA, 19 nt, Artificial Sequence
  Description of Artificial Sequence: Synthetic oligonucleotide
guugcauccucagcugcuu

SEQ ID NO: 272523 - RNA, 19 nt, Artificial Sequence
  Description of Artificial Sequence: Synthetic oligonucleotide
ggacccucguccagugcac

SEQ ID NO: 272524 - RNA, 19 nt, Artificial Sequence
  Description of Artificial Sequence: Synthetic oligonucleotide
caacaacauccuagacagu

SEQ ID NO: 272525 - RNA, 19 nt, Artificial Sequence
  Description of Artificial Sequence: Synthetic oligonucleotide
ggccaccccuucauuucug

SEQ ID NO: 272526 - RNA, 19 nt, Artificial Sequence
  Description of Artificial Sequence: Synthetic oligonucleotide
ggugguugucccauuccau

SEQ ID NO: 272527 - RNA, 19 nt, Artificial Sequence
  Description of Artificial Sequence: Synthetic oligonucleotide
gcuuacauagaaggccuuu

SEQ ID NO: 272528 - RNA, 19 nt, Artificial Sequence
  Description of Artificial Sequence: Synthetic oligonucleotide
ccccuucauuucugaggac

SEQ ID NO: 272529 - RNA, 19 nt, Artificial Sequence
  Description of Artificial Sequence: Synthetic oligonucleotide
gcgaauggaguagggcugu

SEQ ID NO: 272530 - RNA, 19 nt, Artificial Sequence
  Description of Artificial Sequence: Synthetic oligonucleotide
cccaaugauccugugcagu

SEQ ID NO: 272531 - RNA, 19 nt, Artificial Sequence
  Description of Artificial Sequence: Synthetic oligonucleotide
gggaggcgagguaggcaac

SEQ ID NO: 272532 - RNA, 19 nt, Artificial Sequence
  Description of Artificial Sequence: Synthetic oligonucleotide
cagaaacccuaagcaccua

SEQ ID NO: 272533 - RNA, 19 nt, Artificial Sequence
  Description of Artificial Sequence: Synthetic oligonucleotide
ucacgcccucgggaauauu

SEQ ID NO: 272534 - RNA, 19 nt, Artificial Sequence
  Description of Artificial Sequence: Synthetic oligonucleotide
gcgagaugucagcaguauu

SEQ ID NO: 272535 - RNA, 19 nt, Artificial Sequence
  Description of Artificial Sequence: Synthetic oligonucleotide
cccucgggaauauugcauu

SEQ ID NO: 272536 - RNA, 19 nt, Artificial Sequence
  Description of Artificial Sequence: Synthetic oligonucleotide
cgauucagcuugagaccca

SEQ ID NO: 272537 - RNA, 19 nt, Artificial Sequence
  Description of Artificial Sequence: Synthetic oligonucleotide
ccucuaaggugagguggga

SEQ ID NO: 272538 - RNA, 19 nt, Artificial Sequence
  Description of Artificial Sequence: Synthetic oligonucleotide
ccaguacccacugcuacau

SEQ ID NO: 272539 - RNA, 19 nt, Artificial Sequence
  Description of Artificial Sequence: Synthetic oligonucleotide
gugacacgggagaggugau

SEQ ID NO: 272540 - RNA, 19 nt, Artificial Sequence
  Description of Artificial Sequence: Synthetic oligonucleotide
gcccucgggaauauugcau

SEQ ID NO: 272541 - RNA, 19 nt, Artificial Sequence
  Description of Artificial Sequence: Synthetic oligonucleotide
ccucgggaauauugcauuu

SEQ ID NO: 272542 - RNA, 19 nt, Artificial Sequence
  Description of Artificial Sequence: Synthetic oligonucleotide
gccugccggcucugauuca

SEQ ID NO: 272543 - RNA, 19 nt, Artificial Sequence
  Description of Artificial Sequence: Synthetic oligonucleotide
cucacgcccucgggaauau

SEQ ID NO: 272544 - RNA, 19 nt, Artificial Sequence
  Description of Artificial Sequence: Synthetic oligonucleotide
ggcuuacauagaaggccuu

SEQ ID NO: 272545 - RNA, 19 nt, Artificial Sequence
  Description of Artificial Sequence: Synthetic oligonucleotide
ccucacgcccucgggaaua

SEQ ID NO: 272546 - RNA, 19 nt, Artificial Sequence
  Description of Artificial Sequence: Synthetic oligonucleotide
gcgacugucccuggagguu

SEQ ID NO: 272547 - RNA, 19 nt, Artificial Sequence
  Description of Artificial Sequence: Synthetic oligonucleotide
ggcuuccccuggggagcaa

SEQ ID NO: 272548 - RNA, 19 nt, Artificial Sequence
  Description of Artificial Sequence: Synthetic oligonucleotide
gcgccaccaguaggguuuu

SEQ ID NO: 272549 - RNA, 19 nt, Artificial Sequence
  Description of Artificial Sequence: Synthetic oligonucleotide
cugcugcgguggggcuugu

SEQ ID NO: 272550 - RNA, 19 nt, Artificial Sequence
  Description of Artificial Sequence: Synthetic oligonucleotide
aaugucaagagccagagac

SEQ ID NO: 272551 - RNA, 19 nt, Artificial Sequence
  Description of Artificial Sequence: Synthetic oligonucleotide
aaaaggaacacuccuagcc

SEQ ID NO: 272552 - RNA, 19 nt, Artificial Sequence
  Description of Artificial Sequence: Synthetic oligonucleotide
augacaacaggcuugagcc

SEQ ID NO: 272553 - RNA, 19 nt, Artificial Sequence
  Description of Artificial Sequence: Synthetic oligonucleotide
aauaguguggccaucaagc

SEQ ID NO: 272554 - RNA, 19 nt, Artificial Sequence
  Description of Artificial Sequence: Synthetic oligonucleotide
ugauauucacgcuugaggg

SEQ ID NO: 272555 - RNA, 19 nt, Artificial Sequence
  Description of Artificial Sequence: Synthetic oligonucleotide
gauuaugcgaucuuccucc

SEQ ID NO: 272556 - RNA, 19 nt, Artificial Sequence
  Description of Artificial Sequence: Synthetic oligonucleotide
aaaauggcauuuuauugug

SEQ ID NO: 272557 - RNA, 19 nt, Artificial Sequence
  Description of Artificial Sequence: Synthetic oligonucleotide
gagagaauguaccaagagg

SEQ ID NO: 272558 - RNA, 19 nt, Artificial Sequence
  Description of Artificial Sequence: Synthetic oligonucleotide
uucuuaacagcauugucag

SEQ ID NO: 272559 - RNA, 19 nt, Artificial Sequence
  Description of Artificial Sequence: Synthetic oligonucleotide
ugugcgguuaggaaagugg

SEQ ID NO: 272560 - RNA, 19 nt, Artificial Sequence
  Description of Artificial Sequence: Synthetic oligonucleotide
agaaaaggaacacuccuag

SEQ ID NO: 272561 - RNA, 19 nt, Artificial Sequence
  Description of Artificial Sequence: Synthetic oligonucleotide
gauacuucuggugaagggg

SEQ ID NO: 272562 - RNA, 19 nt, Artificial Sequence
  Description of Artificial Sequence: Synthetic oligonucleotide
auuuacucaggucacacca

SEQ ID NO: 272563 - RNA, 19 nt, Artificial Sequence
  Description of Artificial Sequence: Synthetic oligonucleotide
auuguggagagaauguacc

SEQ ID NO: 272564 - RNA, 19 nt, Artificial Sequence
  Description of Artificial Sequence: Synthetic oligonucleotide
auaguguggccaucaagcc

SEQ ID NO: 272565 - RNA, 19 nt, Artificial Sequence
  Description of Artificial Sequence: Synthetic oligonucleotide
uccgacucaaucaagucca

SEQ ID NO: 272566 - RNA, 19 nt, Artificial Sequence
  Description of Artificial Sequence: Synthetic oligonucleotide
uauagugugccacuucuac

SEQ ID NO: 272567 - RNA, 19 nt, Artificial Sequence
  Description of Artificial Sequence: Synthetic oligonucleotide
ggauucaaaacccucagcc

SEQ ID NO: 272568 - RNA, 19 nt, Artificial Sequence
  Description of Artificial Sequence: Synthetic oligonucleotide
aaaacccucagccaccggu

SEQ ID NO: 272569 - RNA, 19 nt, Artificial Sequence
  Description of Artificial Sequence: Synthetic oligonucleotide
uggaauguggccccgagac

SEQ ID NO: 272570 - RNA, 19 nt, Artificial Sequence
  Description of Artificial Sequence: Synthetic oligonucleotide
ucaaauuuacucaggucac

SEQ ID NO: 272571 - RNA, 19 nt, Artificial Sequence
  Description of Artificial Sequence: Synthetic oligonucleotide
cuuaacagcauugucaguc

SEQ ID NO: 272572 - RNA, 19 nt, Artificial Sequence
  Description of Artificial Sequence: Synthetic oligonucleotide
ucuuaacagggcuucgccg

SEQ ID NO: 272573 - RNA, 19 nt, Artificial Sequence
  Description of Artificial Sequence: Synthetic oligonucleotide
cuuaacagggcuucgccgc

SEQ ID NO: 272574 - RNA, 19 nt, Artificial Sequence
  Description of Artificial Sequence: Synthetic oligonucleotide
agauuaugcgaucuuccuc

SEQ ID NO: 272575 - RNA, 19 nt, Artificial Sequence
  Description of Artificial Sequence: Synthetic oligonucleotide
agaacguagcacuuccuuc

SEQ ID NO: 272576 - RNA, 19 nt, Artificial Sequence
  Description of Artificial Sequence: Synthetic oligonucleotide
ugugccagcgcucacggca

SEQ ID NO: 272577 - RNA, 19 nt, Artificial Sequence
  Description of Artificial Sequence: Synthetic oligonucleotide
acagauuaugcgaucuucc

SEQ ID NO: 272578 - RNA, 19 nt, Artificial Sequence
  Description of Artificial Sequence: Synthetic oligonucleotide
acuaacagggcuccuuuag

SEQ ID NO: 272579 - RNA, 19 nt, Artificial Sequence
  Description of Artificial Sequence: Synthetic oligonucleotide
ugagucgguguccugguag

SEQ ID NO: 272580 - RNA, 19 nt, Artificial Sequence
  Description of Artificial Sequence: Synthetic oligonucleotide
cugaucugggguuacaaac

SEQ ID NO: 272581 - RNA, 19 nt, Artificial Sequence
  Description of Artificial Sequence: Synthetic oligonucleotide
cuucaagcggcccaggagc

SEQ ID NO: 272582 - RNA, 19 nt, Artificial Sequence
  Description of Artificial Sequence: Synthetic oligonucleotide
uucuuaacagggcuucgcc

SEQ ID NO: 272583 - RNA, 19 nt, Artificial Sequence
  Description of Artificial Sequence: Synthetic oligonucleotide
ugccguuugagcacugagg

SEQ ID NO: 272584 - RNA, 19 nt, Artificial Sequence
  Description of Artificial Sequence: Synthetic oligonucleotide
acaccaagcaucagggucc

SEQ ID NO: 272585 - RNA, 19 nt, Artificial Sequence
  Description of Artificial Sequence: Synthetic oligonucleotide
uuaacagcauugucagucc

SEQ ID NO: 272586 - RNA, 19 nt, Artificial Sequence
  Description of Artificial Sequence: Synthetic oligonucleotide
aguuccagugauucuuaac

SEQ ID NO: 272587 - RNA, 19 nt, Artificial Sequence
  Description of Artificial Sequence: Synthetic oligonucleotide
gguaguguagcucauccag

SEQ ID NO: 272588 - RNA, 19 nt, Artificial Sequence
  Description of Artificial Sequence: Synthetic oligonucleotide
aggucuggauucaaaaccc

SEQ ID NO: 272589 - RNA, 19 nt, Artificial Sequence
  Description of Artificial Sequence: Synthetic oligonucleotide
acuguuacaggaauccagg

SEQ ID NO: 272590 - RNA, 19 nt, Artificial Sequence
  Description of Artificial Sequence: Synthetic oligonucleotide
acaucccgaagcuagaccu

SEQ ID NO: 272591 - RNA, 19 nt, Artificial Sequence
  Description of Artificial Sequence: Synthetic oligonucleotide
cugggguuacaaacgaugg

SEQ ID NO: 272592 - RNA, 19 nt, Artificial Sequence
  Description of Artificial Sequence: Synthetic oligonucleotide
ucaccuucgggguugaggu

SEQ ID NO: 272593 - RNA, 19 nt, Artificial Sequence
  Description of Artificial Sequence: Synthetic oligonucleotide
uucggggugagacuguuac

SEQ ID NO: 272594 - RNA, 19 nt, Artificial Sequence
  Description of Artificial Sequence: Synthetic oligonucleotide
aacgauggauacuucuggu

SEQ ID NO: 272595 - RNA, 19 nt, Artificial Sequence
  Description of Artificial Sequence: Synthetic oligonucleotide
cuuguugucucucggcucc

SEQ ID NO: 272596 - RNA, 19 nt, Artificial Sequence
  Description of Artificial Sequence: Synthetic oligonucleotide
uggucccuuaacaaggucu

SEQ ID NO: 272597 - RNA, 19 nt, Artificial Sequence
  Description of Artificial Sequence: Synthetic oligonucleotide
agcugaucagcugaaugcc

SEQ ID NO: 272598 - RNA, 19 nt, Artificial Sequence
  Description of Artificial Sequence: Synthetic oligonucleotide
uuacaaacgauggauacuu

SEQ ID NO: 272599 - RNA, 19 nt, Artificial Sequence
  Description of Artificial Sequence: Synthetic oligonucleotide
gaacguagcacuuccuuca

SEQ ID NO: 272600 - RNA, 19 nt, Artificial Sequence
  Description of Artificial Sequence: Synthetic oligonucleotide
guggagagaauguaccaag

SEQ ID NO: 272601 - RNA, 19 nt, Artificial Sequence
  Description of Artificial Sequence: Synthetic oligonucleotide
agugaggacaucagcuucc

SEQ ID NO: 272602 - RNA, 19 nt, Artificial Sequence
  Description of Artificial Sequence: Synthetic oligonucleotide
auugugccagcgcucacgg

SEQ ID NO: 272603 - RNA, 19 nt, Artificial Sequence
  Description of Artificial Sequence: Synthetic oligonucleotide
uuucucuugcaugaagagc

SEQ ID NO: 272604 - RNA, 19 nt, Artificial Sequence
  Description of Artificial Sequence: Synthetic oligonucleotide
guagguacaggcucaagca

SEQ ID NO: 272605 - RNA, 19 nt, Artificial Sequence
  Description of Artificial Sequence: Synthetic oligonucleotide
gagaauguaccaagagggg

SEQ ID NO: 272606 - RNA, 19 nt, Artificial Sequence
  Description of Artificial Sequence: Synthetic oligonucleotide
ucuggacucgcuugggaag

SEQ ID NO: 272607 - RNA, 19 nt, Artificial Sequence
  Description of Artificial Sequence: Synthetic oligonucleotide
gagccagagacuuucggac

SEQ ID NO: 272608 - RNA, 19 nt, Artificial Sequence
  Description of Artificial Sequence: Synthetic oligonucleotide
uccucauguguccauuuga

SEQ ID NO: 272609 - RNA, 19 nt, Artificial Sequence
  Description of Artificial Sequence: Synthetic oligonucleotide
uggggaguguuguccaugg

SEQ ID NO: 272610 - RNA, 19 nt, Artificial Sequence
  Description of Artificial Sequence: Synthetic oligonucleotide
ugugccauacuuucuugac

SEQ ID NO: 272611 - RNA, 19 nt, Artificial Sequence
  Description of Artificial Sequence: Synthetic oligonucleotide
ugguccguacuucuccagg

SEQ ID NO: 272612 - RNA, 19 nt, Artificial Sequence
  Description of Artificial Sequence: Synthetic oligonucleotide
agccgauacucagucaugc

SEQ ID NO: 272613 - RNA, 19 nt, Artificial Sequence
  Description of Artificial Sequence: Synthetic oligonucleotide
gccguuugagcacugaggg

SEQ ID NO: 272614 - RNA, 19 nt, Artificial Sequence
  Description of Artificial Sequence: Synthetic oligonucleotide
acuuguugucucucggcuc

SEQ ID NO: 272615 - RNA, 19 nt, Artificial Sequence
  Description of Artificial Sequence: Synthetic oligonucleotide
gauugugccagcgcucacg

SEQ ID NO: 272616 - RNA, 19 nt, Artificial Sequence
  Description of Artificial Sequence: Synthetic oligonucleotide
uggagagaauguaccaaga

SEQ ID NO: 272617 - RNA, 19 nt, Artificial Sequence
  Description of Artificial Sequence: Synthetic oligonucleotide
gauauucacgcuugaggga

SEQ ID NO: 272618 - RNA, 19 nt, Artificial Sequence
  Description of Artificial Sequence: Synthetic oligonucleotide
agagccagagacuuucgga

SEQ ID NO: 272619 - RNA, 19 nt, Artificial Sequence
  Description of Artificial Sequence: Synthetic oligonucleotide
cacaccaagcaucaggguc

SEQ ID NO: 272620 - RNA, 19 nt, Artificial Sequence
  Description of Artificial Sequence: Synthetic oligonucleotide
ucuuaucccugugcaaggg

SEQ ID NO: 272621 - RNA, 19 nt, Artificial Sequence
  Description of Artificial Sequence: Synthetic oligonucleotide
agccucagaacguagcacu

SEQ ID NO: 272622 - RNA, 19 nt, Artificial Sequence
  Description of Artificial Sequence: Synthetic oligonucleotide
cuugaaugggguuggcgug

SEQ ID NO: 272623 - RNA, 19 nt, Artificial Sequence
  Description of Artificial Sequence: Synthetic oligonucleotide
cauucuugaaugggguugg

SEQ ID NO: 272624 - RNA, 19 nt, Artificial Sequence
  Description of Artificial Sequence: Synthetic oligonucleotide
aauguaccaagaggggaug

SEQ ID NO: 272625 - RNA, 19 nt, Artificial Sequence
  Description of Artificial Sequence: Synthetic oligonucleotide
agaauguaccaagagggga

SEQ ID NO: 272626 - RNA, 19 nt, Artificial Sequence
  Description of Artificial Sequence: Synthetic oligonucleotide
uaaguaggggucugagaug

SEQ ID NO: 272627 - RNA, 19 nt, Artificial Sequence
  Description of Artificial Sequence: Synthetic oligonucleotide
uuucuuaacagggcuucgc

SEQ ID NO: 272628 - RNA, 19 nt, Artificial Sequence
  Description of Artificial Sequence: Synthetic oligonucleotide
agguagacgggcuugcagu

SEQ ID NO: 272629 - RNA, 19 nt, Artificial Sequence
  Description of Artificial Sequence: Synthetic oligonucleotide
agaaugaggguccgagaug

SEQ ID NO: 272630 - RNA, 19 nt, Artificial Sequence
  Description of Artificial Sequence: Synthetic oligonucleotide
aggugauugugccagcgcu

SEQ ID NO: 272631 - RNA, 19 nt, Artificial Sequence
  Description of Artificial Sequence: Synthetic oligonucleotide
acgauggauacuucuggug

SEQ ID NO: 272632 - RNA, 19 nt, Artificial Sequence
  Description of Artificial Sequence: Synthetic oligonucleotide
aggcgacagggccacacgc

SEQ ID NO: 272633 - RNA, 19 nt, Artificial Sequence
  Description of Artificial Sequence: Synthetic oligonucleotide
ggagagaauguaccaagag

SEQ ID NO: 272634 - RNA, 19 nt, Artificial Sequence
  Description of Artificial Sequence: Synthetic oligonucleotide
gucuuaucccugugcaagg

SEQ ID NO: 272635 - RNA, 19 nt, Artificial Sequence
  Description of Artificial Sequence: Synthetic oligonucleotide
auagugugccacuucuacu

SEQ ID NO: 272636 - RNA, 19 nt, Artificial Sequence
  Description of Artificial Sequence: Synthetic oligonucleotide
gacaucccgaagcuagacc

SEQ ID NO: 272637 - RNA, 19 nt, Artificial Sequence
  Description of Artificial Sequence: Synthetic oligonucleotide
ugcccagcacuuuaugggc

SEQ ID NO: 272638 - RNA, 19 nt, Artificial Sequence
  Description of Artificial Sequence: Synthetic oligonucleotide
uguaccaagaggggaugag

SEQ ID NO: 272639 - RNA, 19 nt, Artificial Sequence
  Description of Artificial Sequence: Synthetic oligonucleotide
ugggguuacaaacgaugga

SEQ ID NO: 272640 - RNA, 19 nt, Artificial Sequence
  Description of Artificial Sequence: Synthetic oligonucleotide
cucuuuaguccaugguccc

SEQ ID NO: 272641 - RNA, 19 nt, Artificial Sequence
  Description of Artificial Sequence: Synthetic oligonucleotide
acgcuugagggauuccagg

SEQ ID NO: 272642 - RNA, 19 nt, Artificial Sequence
  Description of Artificial Sequence: Synthetic oligonucleotide
guggacgucagcgaggggc

SEQ ID NO: 272643 - RNA, 19 nt, Artificial Sequence
  Description of Artificial Sequence: Synthetic oligonucleotide
gaggguccgagaugugugg

SEQ ID NO: 272644 - RNA, 19 nt, Artificial Sequence
  Description of Artificial Sequence: Synthetic oligonucleotide
auauucacgcuugagggau

SEQ ID NO: 272645 - RNA, 19 nt, Artificial Sequence
  Description of Artificial Sequence: Synthetic oligonucleotide
aguguggccaucaagccga

SEQ ID NO: 272646 - RNA, 19 nt, Artificial Sequence
  Description of Artificial Sequence: Synthetic oligonucleotide
gaguggacgucagcgaggg

SEQ ID NO: 272647 - RNA, 19 nt, Artificial Sequence
  Description of Artificial Sequence: Synthetic oligonucleotide
aucucagcccagcgguugc

SEQ ID NO: 272648 - RNA, 19 nt, Artificial Sequence
  Description of Artificial Sequence: Synthetic oligonucleotide
uguggagagaauguaccaa

SEQ ID NO: 272649 - RNA, 19 nt, Artificial Sequence
  Description of Artificial Sequence: Synthetic oligonucleotide
ugacugugccuguugcugc

SEQ ID NO: 272650 - RNA, 19 nt, Artificial Sequence
  Description of Artificial Sequence: Synthetic oligonucleotide
uuaacagggcuucgccgca

SEQ ID NO: 272651 - RNA, 19 nt, Artificial Sequence
  Description of Artificial Sequence: Synthetic oligonucleotide
aaugccagccucagaacgu

SEQ ID NO: 272652 - RNA, 19 nt, Artificial Sequence
  Description of Artificial Sequence: Synthetic oligonucleotide
aggagugggugucuguucu

SEQ ID NO: 272653 - RNA, 19 nt, Artificial Sequence
  Description of Artificial Sequence: Synthetic oligonucleotide
cugaucagcugaaugccuc

SEQ ID NO: 272654 - RNA, 19 nt, Artificial Sequence
  Description of Artificial Sequence: Synthetic oligonucleotide
acuucuacugacaccugag

SEQ ID NO: 272655 - RNA, 19 nt, Artificial Sequence
  Description of Artificial Sequence: Synthetic oligonucleotide
guaggggucugagaugagg

SEQ ID NO: 272656 - RNA, 19 nt, Artificial Sequence
  Description of Artificial Sequence: Synthetic oligonucleotide
ugggacacuuguuggcaag

SEQ ID NO: 272657 - RNA, 19 nt, Artificial Sequence
  Description of Artificial Sequence: Synthetic oligonucleotide
ucccuuaacaaggucugga

SEQ ID NO: 272658 - RNA, 19 nt, Artificial Sequence
  Description of Artificial Sequence: Synthetic oligonucleotide
gauggauacuucuggugaa

SEQ ID NO: 272659 - RNA, 19 nt, Artificial Sequence
  Description of Artificial Sequence: Synthetic oligonucleotide
ggcucaagcagaaauagca

SEQ ID NO: 272660 - RNA, 19 nt, Artificial Sequence
  Description of Artificial Sequence: Synthetic oligonucleotide
uccauuugaccuugcacuu

SEQ ID NO: 272661 - RNA, 19 nt, Artificial Sequence
  Description of Artificial Sequence: Synthetic oligonucleotide
acccauuuguagggcaagc

SEQ ID NO: 272662 - RNA, 19 nt, Artificial Sequence
  Description of Artificial Sequence: Synthetic oligonucleotide
cuagccccuguaaacauga

SEQ ID NO: 272663 - RNA, 19 nt, Artificial Sequence
  Description of Artificial Sequence: Synthetic oligonucleotide
aggaaaguggcuggccagg

SEQ ID NO: 272664 - RNA, 19 nt, Artificial Sequence
  Description of Artificial Sequence: Synthetic oligonucleotide
agccccuguaaacaugaca

SEQ ID NO: 272665 - RNA, 19 nt, Artificial Sequence
  Description of Artificial Sequence: Synthetic oligonucleotide
cuuucuuaacagggcuucg

SEQ ID NO: 272666 - RNA, 19 nt, Artificial Sequence
  Description of Artificial Sequence: Synthetic oligonucleotide
ucucuggacucgcuuggga

SEQ ID NO: 272667 - RNA, 19 nt, Artificial Sequence
  Description of Artificial Sequence: Synthetic oligonucleotide
agguaucaggagguuugcc

SEQ ID NO: 272668 - RNA, 19 nt, Artificial Sequence
  Description of Artificial Sequence: Synthetic oligonucleotide
uugagggauuccagggacu

SEQ ID NO: 272669 - RNA, 19 nt, Artificial Sequence
  Description of Artificial Sequence: Synthetic oligonucleotide
ucagaacguagcacuuccu

SEQ ID NO: 272670 - RNA, 19 nt, Artificial Sequence
  Description of Artificial Sequence: Synthetic oligonucleotide
auacuucuggugaaggggu

SEQ ID NO: 272671 - RNA, 19 nt, Artificial Sequence
  Description of Artificial Sequence: Synthetic oligonucleotide
cacgccguuucuucugccg

SEQ ID NO: 272672 - RNA, 19 nt, Artificial Sequence
  Description of Artificial Sequence: Synthetic oligonucleotide
uggacgucagcgaggggcu

SEQ ID NO: 272673 - RNA, 19 nt, Artificial Sequence
  Description of Artificial Sequence: Synthetic oligonucleotide
gaaugccucaccccaccac

SEQ ID NO: 272674 - RNA, 19 nt, Artificial Sequence
  Description of Artificial Sequence: Synthetic oligonucleotide
agggauuccagggacucug

SEQ ID NO: 272675 - RNA, 19 nt, Artificial Sequence
  Description of Artificial Sequence: Synthetic oligonucleotide
gccccuucaggacagaaug

SEQ ID NO: 272676 - RNA, 19 nt, Artificial Sequence
  Description of Artificial Sequence: Synthetic oligonucleotide
guaguguagcucauccagc

SEQ ID NO: 272677 - RNA, 19 nt, Artificial Sequence
  Description of Artificial Sequence: Synthetic oligonucleotide
aacguagcacuuccuucaa

SEQ ID NO: 272678 - RNA, 19 nt, Artificial Sequence
  Description of Artificial Sequence: Synthetic oligonucleotide
uggugugccaaugccugag

SEQ ID NO: 272679 - RNA, 19 nt, Artificial Sequence
  Description of Artificial Sequence: Synthetic oligonucleotide
accgguacuggcauuguug

SEQ ID NO: 272680 - RNA, 19 nt, Artificial Sequence
  Description of Artificial Sequence: Synthetic oligonucleotide
aacuaacagggcuccuuua

SEQ ID NO: 272681 - RNA, 19 nt, Artificial Sequence
  Description of Artificial Sequence: Synthetic oligonucleotide
cucacggcacugcuugugc

SEQ ID NO: 272682 - RNA, 19 nt, Artificial Sequence
  Description of Artificial Sequence: Synthetic oligonucleotide
cacccuagccccuguaaac

SEQ ID NO: 272683 - RNA, 19 nt, Artificial Sequence
  Description of Artificial Sequence: Synthetic oligonucleotide
uauccuaaguaggggucug

SEQ ID NO: 272684 - RNA, 19 nt, Artificial Sequence
  Description of Artificial Sequence: Synthetic oligonucleotide
uagacgggcuugcagucuc

SEQ ID NO: 272685 - RNA, 19 nt, Artificial Sequence
  Description of Artificial Sequence: Synthetic oligonucleotide
acaacaggcuugagccucc

SEQ ID NO: 272686 - RNA, 19 nt, Artificial Sequence
  Description of Artificial Sequence: Synthetic oligonucleotide
gugcgguuaggaaaguggc

SEQ ID NO: 272687 - RNA, 19 nt, Artificial Sequence
  Description of Artificial Sequence: Synthetic oligonucleotide
uccaggguauccuguuugu

SEQ ID NO: 272688 - RNA, 19 nt, Artificial Sequence
  Description of Artificial Sequence: Synthetic oligonucleotide
acaggcgacagggccacac

SEQ ID NO: 272689 - RNA, 19 nt, Artificial Sequence
  Description of Artificial Sequence: Synthetic oligonucleotide
uacaaacgauggauacuuc

SEQ ID NO: 272690 - RNA, 19 nt, Artificial Sequence
  Description of Artificial Sequence: Synthetic oligonucleotide
aagcuagaccuggggacag

SEQ ID NO: 272691 - RNA, 19 nt, Artificial Sequence
  Description of Artificial Sequence: Synthetic oligonucleotide
auuaugcgaucuuccuccu

SEQ ID NO: 272692 - RNA, 19 nt, Artificial Sequence
  Description of Artificial Sequence: Synthetic oligonucleotide
ucaagccgauacucaguca

SEQ ID NO: 272693 - RNA, 19 nt, Artificial Sequence
  Description of Artificial Sequence: Synthetic oligonucleotide
guggccccgagacuucugg

SEQ ID NO: 272694 - RNA, 19 nt, Artificial Sequence
  Description of Artificial Sequence: Synthetic oligonucleotide
ucacggcacugcuugugcc

SEQ ID NO: 272695 - RNA, 19 nt, Artificial Sequence
  Description of Artificial Sequence: Synthetic oligonucleotide
agccagagacuuucggacu

SEQ ID NO: 272696 - RNA, 19 nt, Artificial Sequence
  Description of Artificial Sequence: Synthetic oligonucleotide
acacgccguuucuucugcc

SEQ ID NO: 272697 - RNA, 19 nt, Artificial Sequence
  Description of Artificial Sequence: Synthetic oligonucleotide
cuuuaugggccucacagau

SEQ ID NO: 272698 - RNA, 19 nt, Artificial Sequence
  Description of Artificial Sequence: Synthetic oligonucleotide
uucagagaggcuggacccc

SEQ ID NO: 272699 - RNA, 19 nt, Artificial Sequence
  Description of Artificial Sequence: Synthetic oligonucleotide
cagguagacgggcuugcag

SEQ ID NO: 272700 - RNA, 19 nt, Artificial Sequence
  Description of Artificial Sequence: Synthetic oligonucleotide
cuggugggaugacugugcc

SEQ ID NO: 272701 - RNA, 19 nt, Artificial Sequence
  Description of Artificial Sequence: Synthetic oligonucleotide
cucccaggucaguagguac

SEQ ID NO: 272702 - RNA, 19 nt, Artificial Sequence
  Description of Artificial Sequence: Synthetic oligonucleotide
gaaauaguguggccaucaa

SEQ ID NO: 272703 - RNA, 19 nt, Artificial Sequence
  Description of Artificial Sequence: Synthetic oligonucleotide
acacuccuagccacgcccc

SEQ ID NO: 272704 - RNA, 19 nt, Artificial Sequence
  Description of Artificial Sequence: Synthetic oligonucleotide
aggguccgagauguguggc

SEQ ID NO: 272705 - RNA, 19 nt, Artificial Sequence
  Description of Artificial Sequence: Synthetic oligonucleotide
ccaucaagccgauacucag

SEQ ID NO: 272706 - RNA, 19 nt, Artificial Sequence
  Description of Artificial Sequence: Synthetic oligonucleotide
aggggugucuuaucccugu

SEQ ID NO: 272707 - RNA, 19 nt, Artificial Sequence
  Description of Artificial Sequence: Synthetic oligonucleotide
ccgguacuggcauuguugg

SEQ ID NO: 272708 - RNA, 19 nt, Artificial Sequence
  Description of Artificial Sequence: Synthetic oligonucleotide
ugcucuucggggugagacu

SEQ ID NO: 272709 - RNA, 19 nt, Artificial Sequence
  Description of Artificial Sequence: Synthetic oligonucleotide
gggugagacuguuacagga

SEQ ID NO: 272710 - RNA, 19 nt, Artificial Sequence
  Description of Artificial Sequence: Synthetic oligonucleotide
cugccguuugagcacugag

SEQ ID NO: 272711 - RNA, 19 nt, Artificial Sequence
  Description of Artificial Sequence: Synthetic oligonucleotide
uuaguccauggucccuuaa

SEQ ID NO: 272712 - RNA, 19 nt, Artificial Sequence
  Description of Artificial Sequence: Synthetic oligonucleotide
gaaugggguuggcgugugg

SEQ ID NO: 272713 - RNA, 19 nt, Artificial Sequence
  Description of Artificial Sequence: Synthetic oligonucleotide
ucgguguccugguagugua

SEQ ID NO: 272714 - RNA, 19 nt, Artificial Sequence
  Description of Artificial Sequence: Synthetic oligonucleotide
uuaugcgaucuuccuccuc

SEQ ID NO: 272715 - RNA, 19 nt, Artificial Sequence
  Description of Artificial Sequence: Synthetic oligonucleotide
gcgguuaggaaaguggcug

SEQ ID NO: 272716 - RNA, 19 nt, Artificial Sequence
  Description of Artificial Sequence: Synthetic oligonucleotide
ccucauguguccauuugac

SEQ ID NO: 272717 - RNA, 19 nt, Artificial Sequence
  Description of Artificial Sequence: Synthetic oligonucleotide
uguguccauuugaccuugc

SEQ ID NO: 272718 - RNA, 19 nt, Artificial Sequence
  Description of Artificial Sequence: Synthetic oligonucleotide
guccgagauguguggcugg

SEQ ID NO: 272719 - RNA, 19 nt, Artificial Sequence
  Description of Artificial Sequence: Synthetic oligonucleotide
ccgauacucagucaugcug

SEQ ID NO: 272720 - RNA, 19 nt, Artificial Sequence
  Description of Artificial Sequence: Synthetic oligonucleotide
aagccgauacucagucaug

SEQ ID NO: 272721 - RNA, 19 nt, Artificial Sequence
  Description of Artificial Sequence: Synthetic oligonucleotide
uugaggugauugugccagc

SEQ ID NO: 272722 - RNA, 19 nt, Artificial Sequence
  Description of Artificial Sequence: Synthetic oligonucleotide
cguuugagcacugagggug

SEQ ID NO: 272723 - RNA, 19 nt, Artificial Sequence
  Description of Artificial Sequence: Synthetic oligonucleotide
acagcgcguccgccgagac

SEQ ID NO: 272724 - RNA, 19 nt, Artificial Sequence
  Description of Artificial Sequence: Synthetic oligonucleotide
augucaagagccagagacu

SEQ ID NO: 272725 - RNA, 19 nt, Artificial Sequence
  Description of Artificial Sequence: Synthetic oligonucleotide
uuuaguccauggucccuua

SEQ ID NO: 272726 - RNA, 19 nt, Artificial Sequence
  Description of Artificial Sequence: Synthetic oligonucleotide
caucccgaagcuagaccug

SEQ ID NO: 272727 - RNA, 19 nt, Artificial Sequence
  Description of Artificial Sequence: Synthetic oligonucleotide
ucgcuugggaagccuccug

SEQ ID NO: 272728 - RNA, 19 nt, Artificial Sequence
  Description of Artificial Sequence: Synthetic oligonucleotide
agcgaggggcucuccagcu

SEQ ID NO: 272729 - RNA, 19 nt, Artificial Sequence
  Description of Artificial Sequence: Synthetic oligonucleotide
gguguggcgcucugguggg

SEQ ID NO: 272730 - RNA, 19 nt, Artificial Sequence
  Description of Artificial Sequence: Synthetic oligonucleotide
cauuggggacaggacacac

SEQ ID NO: 272731 - RNA, 19 nt, Artificial Sequence
  Description of Artificial Sequence: Synthetic oligonucleotide
ggggugagacuguuacagg

SEQ ID NO: 272732 - RNA, 19 nt, Artificial Sequence
  Description of Artificial Sequence: Synthetic oligonucleotide
agacuguuacaggaaucca

SEQ ID NO: 272733 - RNA, 19 nt, Artificial Sequence
  Description of Artificial Sequence: Synthetic oligonucleotide
guuugccgccuccaccacc

SEQ ID NO: 272734 - RNA, 19 nt, Artificial Sequence
  Description of Artificial Sequence: Synthetic oligonucleotide
acgccguuucuucugccgu

SEQ ID NO: 272735 - RNA, 19 nt, Artificial Sequence
  Description of Artificial Sequence: Synthetic oligonucleotide
gcgacagggccacacgccg

SEQ ID NO: 272736 - RNA, 19 nt, Artificial Sequence
  Description of Artificial Sequence: Synthetic oligonucleotide
ccuauccuaaguagggguc

SEQ ID NO: 272737 - RNA, 19 nt, Artificial Sequence
  Description of Artificial Sequence: Synthetic oligonucleotide
cucggcuccaggaggucug

SEQ ID NO: 272738 - RNA, 19 nt, Artificial Sequence
  Description of Artificial Sequence: Synthetic oligonucleotide
gucuggauucaaaacccuc

SEQ ID NO: 272739 - RNA, 19 nt, Artificial Sequence
  Description of Artificial Sequence: Synthetic oligonucleotide
caagccgauacucagucau

SEQ ID NO: 272740 - RNA, 19 nt, Artificial Sequence
  Description of Artificial Sequence: Synthetic oligonucleotide
guaccaagaggggaugaga

SEQ ID NO: 272741 - RNA, 19 nt, Artificial Sequence
  Description of Artificial Sequence: Synthetic oligonucleotide
cgaagcuagaccuggggac

SEQ ID NO: 272742 - RNA, 19 nt, Artificial Sequence
  Description of Artificial Sequence: Synthetic oligonucleotide
gcacuuguugucucucggc

SEQ ID NO: 272743 - RNA, 19 nt, Artificial Sequence
  Description of Artificial Sequence: Synthetic oligonucleotide
uuguuggucugugcgguua

SEQ ID NO: 272744 - RNA, 19 nt, Artificial Sequence
  Description of Artificial Sequence: Synthetic oligonucleotide
cagauuaugcgaucuuccu

SEQ ID NO: 272745 - RNA, 19 nt, Artificial Sequence
  Description of Artificial Sequence: Synthetic oligonucleotide
ugauugugccagcgcucac

SEQ ID NO: 272746 - RNA, 19 nt, Artificial Sequence
  Description of Artificial Sequence: Synthetic oligonucleotide
uggugggaugacugugccu

SEQ ID NO: 272747 - RNA, 19 nt, Artificial Sequence
  Description of Artificial Sequence: Synthetic oligonucleotide
gugguccguacuucuccag

SEQ ID NO: 272748 - RNA, 19 nt, Artificial Sequence
  Description of Artificial Sequence: Synthetic oligonucleotide
gugugccacuucuacugac

SEQ ID NO: 272749 - RNA, 19 nt, Artificial Sequence
  Description of Artificial Sequence: Synthetic oligonucleotide
uguggccccgagacuucug

SEQ ID NO: 272750 - RNA, 19 nt, Artificial Sequence
  Description of Artificial Sequence: Synthetic oligonucleotide
ucugccguuugagcacuga

SEQ ID NO: 272751 - RNA, 19 nt, Artificial Sequence
  Description of Artificial Sequence: Synthetic oligonucleotide
gguagacgggcuugcaguc

SEQ ID NO: 272752 - RNA, 19 nt, Artificial Sequence
  Description of Artificial Sequence: Synthetic oligonucleotide
ccauacuuucuugaccagc

SEQ ID NO: 272753 - RNA, 19 nt, Artificial Sequence
  Description of Artificial Sequence: Synthetic oligonucleotide
ggaguggacgucagcgagg

SEQ ID NO: 272754 - RNA, 19 nt, Artificial Sequence
  Description of Artificial Sequence: Synthetic oligonucleotide
gguccgacucaaucaaguc

SEQ ID NO: 272755 - RNA, 19 nt, Artificial Sequence
  Description of Artificial Sequence: Synthetic oligonucleotide
cacccauuuguagggcaag

SEQ ID NO: 272756 - RNA, 19 nt, Artificial Sequence
  Description of Artificial Sequence: Synthetic oligonucleotide
gggaugacugugccuguug

SEQ ID NO: 272757 - RNA, 19 nt, Artificial Sequence
  Description of Artificial Sequence: Synthetic oligonucleotide
ggaguacuucugaucuggg

SEQ ID NO: 272758 - RNA, 19 nt, Artificial Sequence
  Description of Artificial Sequence: Synthetic oligonucleotide
caccaagcaucaggguccg

SEQ ID NO: 272759 - RNA, 19 nt, Artificial Sequence
  Description of Artificial Sequence: Synthetic oligonucleotide
ggaacacuccuagccacgc

SEQ ID NO: 272760 - RNA, 19 nt, Artificial Sequence
  Description of Artificial Sequence: Synthetic oligonucleotide
agaaacuaacagggcuccu

SEQ ID NO: 272761 - RNA, 19 nt, Artificial Sequence
  Description of Artificial Sequence: Synthetic oligonucleotide
auuguuggucugugcgguu

SEQ ID NO: 272762 - RNA, 19 nt, Artificial Sequence
  Description of Artificial Sequence: Synthetic oligonucleotide
gcucuucggggugagacug

SEQ ID NO: 272763 - RNA, 19 nt, Artificial Sequence
  Description of Artificial Sequence: Synthetic oligonucleotide
uucacgcuugagggauucc

SEQ ID NO: 272764 - RNA, 19 nt, Artificial Sequence
  Description of Artificial Sequence: Synthetic oligonucleotide
caggguccgacucaaucaa

SEQ ID NO: 272765 - RNA, 19 nt, Artificial Sequence
  Description of Artificial Sequence: Synthetic oligonucleotide
aguggacgucagcgagggg

SEQ ID NO: 272766 - RNA, 19 nt, Artificial Sequence
  Description of Artificial Sequence: Synthetic oligonucleotide
gugucuuaucccugugcaa

SEQ ID NO: 272767 - RNA, 19 nt, Artificial Sequence
  Description of Artificial Sequence: Synthetic oligonucleotide
gugacaggcgacagggcca

SEQ ID NO: 272768 - RNA, 19 nt, Artificial Sequence
  Description of Artificial Sequence: Synthetic oligonucleotide
cucacagauuaugcgaucu

SEQ ID NO: 272769 - RNA, 19 nt, Artificial Sequence
  Description of Artificial Sequence: Synthetic oligonucleotide
agugggugucuguucuguu

SEQ ID NO: 272770 - RNA, 19 nt, Artificial Sequence
  Description of Artificial Sequence: Synthetic oligonucleotide
aggacucgggcugcuccgg

SEQ ID NO: 272771 - RNA, 19 nt, Artificial Sequence
  Description of Artificial Sequence: Synthetic oligonucleotide
cgauggauacuucugguga

SEQ ID NO: 272772 - RNA, 19 nt, Artificial Sequence
  Description of Artificial Sequence: Synthetic oligonucleotide
agcuagaccuggggacagg

SEQ ID NO: 272773 - RNA, 19 nt, Artificial Sequence
  Description of Artificial Sequence: Synthetic oligonucleotide
gagucgguguccugguagu

SEQ ID NO: 272774 - RNA, 19 nt, Artificial Sequence
  Description of Artificial Sequence: Synthetic oligonucleotide
ggugugccaaugccugagc

SEQ ID NO: 272775 - RNA, 19 nt, Artificial Sequence
  Description of Artificial Sequence: Synthetic oligonucleotide
uagccccuguaaacaugac

SEQ ID NO: 272776 - RNA, 19 nt, Artificial Sequence
  Description of Artificial Sequence: Synthetic oligonucleotide
ggaaccccugguugagcag

SEQ ID NO: 272777 - RNA, 19 nt, Artificial Sequence
  Description of Artificial Sequence: Synthetic oligonucleotide
cagucuugcuguccgaacu

SEQ ID NO: 272778 - RNA, 19 nt, Artificial Sequence
  Description of Artificial Sequence: Synthetic oligonucleotide
cuacuuuccucuugauggu

SEQ ID NO: 272779 - RNA, 19 nt, Artificial Sequence
  Description of Artificial Sequence: Synthetic oligonucleotide
ggaguguuguccauggagu

SEQ ID NO: 272780 - RNA, 19 nt, Artificial Sequence
  Description of Artificial Sequence: Synthetic oligonucleotide
cuguccgaacugccucacc

SEQ ID NO: 272781 - RNA, 19 nt, Artificial Sequence
  Description of Artificial Sequence: Synthetic oligonucleotide
gaagcuagaggagcuggau

SEQ ID NO: 272782 - RNA, 19 nt, Artificial Sequence
  Description of Artificial Sequence: Synthetic oligonucleotide
ugguggaguuccagugauu

SEQ ID NO: 272783 - RNA, 19 nt, Artificial Sequence
  Description of Artificial Sequence: Synthetic oligonucleotide
caucaagccgauacucagu

SEQ ID NO: 272784 - RNA, 19 nt, Artificial Sequence
  Description of Artificial Sequence: Synthetic oligonucleotide
ucuucggggugagacuguu

SEQ ID NO: 272785 - RNA, 19 nt, Artificial Sequence
  Description of Artificial Sequence: Synthetic oligonucleotide
aggagguuugccgccucca

SEQ ID NO: 272786 - RNA, 19 nt, Artificial Sequence
  Description of Artificial Sequence: Synthetic oligonucleotide
cauuguuggucugugcggu

SEQ ID NO: 272787 - RNA, 19 nt, Artificial Sequence
  Description of Artificial Sequence: Synthetic oligonucleotide
cgguuaggaaaguggcugg

SEQ ID NO: 272788 - RNA, 19 nt, Artificial Sequence
  Description of Artificial Sequence: Synthetic oligonucleotide
uguggcgcucuggugggau

SEQ ID NO: 272789 - RNA, 19 nt, Artificial Sequence
  Description of Artificial Sequence: Synthetic oligonucleotide
ggggugugcacuucuccca

SEQ ID NO: 272790 - RNA, 19 nt, Artificial Sequence
  Description of Artificial Sequence: Synthetic oligonucleotide
agagaagggcaggguuuug

SEQ ID NO: 272791 - RNA, 19 nt, Artificial Sequence
  Description of Artificial Sequence: Synthetic oligonucleotide
cagagacuuucggacuuuc

SEQ ID NO: 272792 - RNA, 19 nt, Artificial Sequence
  Description of Artificial Sequence: Synthetic oligonucleotide
auccuaaguaggggucuga

SEQ ID NO: 272793 - RNA, 19 nt, Artificial Sequence
  Description of Artificial Sequence: Synthetic oligonucleotide
cucacagcgcguccgccga

SEQ ID NO: 272794 - RNA, 19 nt, Artificial Sequence
  Description of Artificial Sequence: Synthetic oligonucleotide
cauagggaaaauggcauuu

SEQ ID NO: 272795 - RNA, 19 nt, Artificial Sequence
  Description of Artificial Sequence: Synthetic oligonucleotide
ggagguuugccgccuccac

SEQ ID NO: 272796 - RNA, 19 nt, Artificial Sequence
  Description of Artificial Sequence: Synthetic oligonucleotide
ccuagccccuguaaacaug

SEQ ID NO: 272797 - RNA, 19 nt, Artificial Sequence
  Description of Artificial Sequence: Synthetic oligonucleotide
cuauccuaaguaggggucu

SEQ ID NO: 272798 - RNA, 19 nt, Artificial Sequence
  Description of Artificial Sequence: Synthetic oligonucleotide
gccccgagacuucugggug

SEQ ID NO: 272799 - RNA, 19 nt, Artificial Sequence
  Description of Artificial Sequence: Synthetic oligonucleotide
ggugagacuguuacaggaa

SEQ ID NO: 272800 - RNA, 19 nt, Artificial Sequence
  Description of Artificial Sequence: Synthetic oligonucleotide
aggguccgacucaaucaag

SEQ ID NO: 272801 - RNA, 19 nt, Artificial Sequence
  Description of Artificial Sequence: Synthetic oligonucleotide
cguguggggaguguugucc

SEQ ID NO: 272802 - RNA, 19 nt, Artificial Sequence
  Description of Artificial Sequence: Synthetic oligonucleotide
ggagugggugucuguucug

SEQ ID NO: 272803 - RNA, 19 nt, Artificial Sequence
  Description of Artificial Sequence: Synthetic oligonucleotide
uuggcguguggggaguguu

SEQ ID NO: 272804 - RNA, 19 nt, Artificial Sequence
  Description of Artificial Sequence: Synthetic oligonucleotide
caccuucgggguugaggug

SEQ ID NO: 272805 - RNA, 19 nt, Artificial Sequence
  Description of Artificial Sequence: Synthetic oligonucleotide
ggugauugugccagcgcuc

SEQ ID NO: 272806 - RNA, 19 nt, Artificial Sequence
  Description of Artificial Sequence: Synthetic oligonucleotide
ccgggcuuucucuugcaug

SEQ ID NO: 272807 - RNA, 19 nt, Artificial Sequence
  Description of Artificial Sequence: Synthetic oligonucleotide
ccacaaugucaagagccag

SEQ ID NO: 272808 - RNA, 19 nt, Artificial Sequence
  Description of Artificial Sequence: Synthetic oligonucleotide
gagugggugucuguucugu

SEQ ID NO: 272809 - RNA, 19 nt, Artificial Sequence
  Description of Artificial Sequence: Synthetic oligonucleotide
caguagguacaggcucaag

SEQ ID NO: 272810 - RNA, 19 nt, Artificial Sequence
  Description of Artificial Sequence: Synthetic oligonucleotide
ccuaaguaggggucugaga

SEQ ID NO: 272811 - RNA, 19 nt, Artificial Sequence
  Description of Artificial Sequence: Synthetic oligonucleotide
gccaccgguacuggcauug

SEQ ID NO: 272812 - RNA, 19 nt, Artificial Sequence
  Description of Artificial Sequence: Synthetic oligonucleotide
guggcgcucuggugggaug

SEQ ID NO: 272813 - RNA, 19 nt, Artificial Sequence
  Description of Artificial Sequence: Synthetic oligonucleotide
ggacaucccgaagcuagac

SEQ ID NO: 272814 - RNA, 19 nt, Artificial Sequence
  Description of Artificial Sequence: Synthetic oligonucleotide
augccagccucagaacgua

SEQ ID NO: 272815 - RNA, 19 nt, Artificial Sequence
  Description of Artificial Sequence: Synthetic oligonucleotide
ccgaagcuagaccugggga

SEQ ID NO: 272816 - RNA, 19 nt, Artificial Sequence
  Description of Artificial Sequence: Synthetic oligonucleotide
ccucacagauuaugcgauc

SEQ ID NO: 272817 - RNA, 19 nt, Artificial Sequence
  Description of Artificial Sequence: Synthetic oligonucleotide
cguagcacuuccuucaagu

SEQ ID NO: 272818 - RNA, 19 nt, Artificial Sequence
  Description of Artificial Sequence: Synthetic oligonucleotide
ugccagcgcucacggcacu

SEQ ID NO: 272819 - RNA, 19 nt, Artificial Sequence
  Description of Artificial Sequence: Synthetic oligonucleotide
ggggugucuuaucccugug

SEQ ID NO: 272820 - RNA, 19 nt, Artificial Sequence
  Description of Artificial Sequence: Synthetic oligonucleotide
ccauuugaccuugcacuug

SEQ ID NO: 272821 - RNA, 19 nt, Artificial Sequence
  Description of Artificial Sequence: Synthetic oligonucleotide
gugccagcgcucacggcac

SEQ ID NO: 272822 - RNA, 19 nt, Artificial Sequence
  Description of Artificial Sequence: Synthetic oligonucleotide
ggacaucagcuucccaucu

SEQ ID NO: 272823 - RNA, 19 nt, Artificial Sequence
  Description of Artificial Sequence: Synthetic oligonucleotide
cuuuaguccauggucccuu

SEQ ID NO: 272824 - RNA, 19 nt, Artificial Sequence
  Description of Artificial Sequence: Synthetic oligonucleotide
gugcaaggguguggugacc

SEQ ID NO: 272825 - RNA, 19 nt, Artificial Sequence
  Description of Artificial Sequence: Synthetic oligonucleotide
gcugaaugccucaccccac

SEQ ID NO: 272826 - RNA, 19 nt, Artificial Sequence
  Description of Artificial Sequence: Synthetic oligonucleotide
ggguauccuguuuguucca

SEQ ID NO: 272827 - RNA, 19 nt, Artificial Sequence
  Description of Artificial Sequence: Synthetic oligonucleotide
cucacgcccgcuggccgag

SEQ ID NO: 272828 - RNA, 19 nt, Artificial Sequence
  Description of Artificial Sequence: Synthetic oligonucleotide
gucgguguccugguagugu

SEQ ID NO: 272829 - RNA, 19 nt, Artificial Sequence
  Description of Artificial Sequence: Synthetic oligonucleotide
ggcuucgccgcagcccagg

SEQ ID NO: 272830 - RNA, 19 nt, Artificial Sequence
  Description of Artificial Sequence: Synthetic oligonucleotide
ccgacucaaucaaguccag

SEQ ID NO: 272831 - RNA, 19 nt, Artificial Sequence
  Description of Artificial Sequence: Synthetic oligonucleotide
cugaguagucugaggggau

SEQ ID NO: 272832 - RNA, 19 nt, Artificial Sequence
  Description of Artificial Sequence: Synthetic oligonucleotide
gacgucagcgaggggcucu

SEQ ID NO: 272833 - RNA, 19 nt, Artificial Sequence
  Description of Artificial Sequence: Synthetic oligonucleotide
ggccgagccccggagcggg

SEQ ID NO: 272834 - RNA, 19 nt, Artificial Sequence
  Description of Artificial Sequence: Synthetic oligonucleotide
gcacuuuaugggccucaca

SEQ ID NO: 272835 - RNA, 19 nt, Artificial Sequence
  Description of Artificial Sequence: Synthetic oligonucleotide
cccuauccuaaguaggggu

SEQ ID NO: 272836 - RNA, 19 nt, Artificial Sequence
  Description of Artificial Sequence: Synthetic oligonucleotide
gguuugccgccuccaccac

SEQ ID NO: 272837 - RNA, 19 nt, Artificial Sequence
  Description of Artificial Sequence: Synthetic oligonucleotide
accccacagcagguaucag

SEQ ID NO: 272838 - RNA, 19 nt, Artificial Sequence
  Description of Artificial Sequence: Synthetic oligonucleotide
guagacgggcuugcagucu

SEQ ID NO: 272839 - RNA, 19 nt, Artificial Sequence
  Description of Artificial Sequence: Synthetic oligonucleotide
ggguccgacucaaucaagu

SEQ ID NO: 272840 - RNA, 19 nt, Artificial Sequence
  Description of Artificial Sequence: Synthetic oligonucleotide
cguccgccgagacaucccc

SEQ ID NO: 272841 - RNA, 19 nt, Artificial Sequence
  Description of Artificial Sequence: Synthetic oligonucleotide
gcauagggaaaauggcauu

SEQ ID NO: 272842 - RNA, 19 nt, Artificial Sequence
  Description of Artificial Sequence: Synthetic oligonucleotide
cuucggggugagacuguua

SEQ ID NO: 272843 - RNA, 19 nt, Artificial Sequence
  Description of Artificial Sequence: Synthetic oligonucleotide
gagggauuccagggacucu

SEQ ID NO: 272844 - RNA, 19 nt, Artificial Sequence
  Description of Artificial Sequence: Synthetic oligonucleotide
ggccccgagacuucugggu

SEQ ID NO: 272845 - RNA, 19 nt, Artificial Sequence
  Description of Artificial Sequence: Synthetic oligonucleotide
gcgguugcccagcacuuua

SEQ ID NO: 272846 - RNA, 19 nt, Artificial Sequence
  Description of Artificial Sequence: Synthetic oligonucleotide
gggacaucccgaagcuaga

SEQ ID NO: 272847 - RNA, 19 nt, Artificial Sequence
  Description of Artificial Sequence: Synthetic oligonucleotide
guacaggcucaagcagaaa

SEQ ID NO: 272848 - RNA, 19 nt, Artificial Sequence
  Description of Artificial Sequence: Synthetic oligonucleotide
gcauuggggacaggacaca

SEQ ID NO: 272849 - RNA, 19 nt, Artificial Sequence
  Description of Artificial Sequence: Synthetic oligonucleotide
ccagcgcucacggcacugc

SEQ ID NO: 272850 - RNA, 19 nt, Artificial Sequence
  Description of Artificial Sequence: Synthetic oligonucleotide
gcgguccuuguccucaagu

SEQ ID NO: 272851 - RNA, 19 nt, Artificial Sequence
  Description of Artificial Sequence: Synthetic oligonucleotide
cucccggcccaggcggcgc

SEQ ID NO: 272852 - RNA, 19 nt, Artificial Sequence
  Description of Artificial Sequence: Synthetic oligonucleotide
gccagagacuuucggacuu

SEQ ID NO: 272853 - RNA, 19 nt, Artificial Sequence
  Description of Artificial Sequence: Synthetic oligonucleotide
gccgauacucagucaugcu

SEQ ID NO: 272854 - RNA, 19 nt, Artificial Sequence
  Description of Artificial Sequence: Synthetic oligonucleotide
ccacccuagccccuguaaa

SEQ ID NO: 272855 - RNA, 19 nt, Artificial Sequence
  Description of Artificial Sequence: Synthetic oligonucleotide
cacagcgcguccgccgaga

SEQ ID NO: 272856 - RNA, 19 nt, Artificial Sequence
  Description of Artificial Sequence: Synthetic oligonucleotide
caaucucagcccagcgguu

SEQ ID NO: 272857 - RNA, 19 nt, Artificial Sequence
  Description of Artificial Sequence: Synthetic oligonucleotide
agagggcgccaggggccag

SEQ ID NO: 272858 - RNA, 19 nt, Artificial Sequence
  Description of Artificial Sequence: Synthetic oligonucleotide
ucacgcccgcuggccgagc

SEQ ID NO: 272859 - RNA, 19 nt, Artificial Sequence
  Description of Artificial Sequence: Synthetic oligonucleotide
ggcguguggggaguguugu

SEQ ID NO: 272860 - RNA, 19 nt, Artificial Sequence
  Description of Artificial Sequence: Synthetic oligonucleotide
cucgcuugggaagccuccu

SEQ ID NO: 272861 - RNA, 19 nt, Artificial Sequence
  Description of Artificial Sequence: Synthetic oligonucleotide
ccgagauguguggcugggc

SEQ ID NO: 272862 - RNA, 19 nt, Artificial Sequence
  Description of Artificial Sequence: Synthetic oligonucleotide
cagcgcguccgccgagaca

SEQ ID NO: 272863 - RNA, 19 nt, Artificial Sequence
  Description of Artificial Sequence: Synthetic oligonucleotide
gcguguggggaguguuguc

SEQ ID NO: 272864 - RNA, 19 nt, Artificial Sequence
  Description of Artificial Sequence: Synthetic oligonucleotide
guuggcguguggggagugu

SEQ ID NO: 272865 - RNA, 19 nt, Artificial Sequence
  Description of Artificial Sequence: Synthetic oligonucleotide
gcccucacgcccgcuggcc

SEQ ID NO: 272866 - RNA, 19 nt, Artificial Sequence
  Description of Artificial Sequence: Synthetic oligonucleotide
gccagcgcucacggcacug

SEQ ID NO: 272867 - RNA, 19 nt, Artificial Sequence
  Description of Artificial Sequence: Synthetic oligonucleotide
gcguccgccgagacauccc

SEQ ID NO: 272868 - RNA, 19 nt, Artificial Sequence
  Description of Artificial Sequence: Synthetic oligonucleotide
cgcguccgccgagacaucc

SEQ ID NO: 272869 - RNA, 19 nt, Artificial Sequence
  Description of Artificial Sequence: Synthetic oligonucleotide
ggccggggucaggacucgg

SEQ ID NO: 272870 - RNA, 19 nt, Artificial Sequence
  Description of Artificial Sequence: Synthetic oligonucleotide
cagcgcucacggcacugcu

SEQ ID NO: 272871 - RNA, 19 nt, Artificial Sequence
  Description of Artificial Sequence: Synthetic oligonucleotide
ggcgcucuggugggaugac

SEQ ID NO: 272872 - RNA, 19 nt, Artificial Sequence
  Description of Artificial Sequence: Synthetic oligonucleotide
caccacccuagccccugua

SEQ ID NO: 272873 - RNA, 19 nt, Artificial Sequence
  Description of Artificial Sequence: Synthetic oligonucleotide
caucaggguccgacucaau

SEQ ID NO: 272874 - RNA, 19 nt, Artificial Sequence
  Description of Artificial Sequence: Synthetic oligonucleotide
caccgguacuggcauuguu

SEQ ID NO: 272875 - RNA, 19 nt, Artificial Sequence
  Description of Artificial Sequence: Synthetic oligonucleotide
ccguuugagcacugagggu

SEQ ID NO: 272876 - RNA, 19 nt, Artificial Sequence
  Description of Artificial Sequence: Synthetic oligonucleotide
ggacgucagcgaggggcuc

SEQ ID NO: 272877 - RNA, 19 nt, Artificial Sequence
  Description of Artificial Sequence: Synthetic oligonucleotide
gccaggccagaugggagcu

SEQ ID NO: 272878 - RNA, 19 nt, Artificial Sequence
  Description of Artificial Sequence: Synthetic oligonucleotide
ccgagccccggagcgggag

SEQ ID NO: 272879 - RNA, 19 nt, Artificial Sequence
  Description of Artificial Sequence: Synthetic oligonucleotide
cccuagccccuguaaacau

SEQ ID NO: 272880 - RNA, 19 nt, Artificial Sequence
  Description of Artificial Sequence: Synthetic oligonucleotide
gggcuucgccgcagcccag

SEQ ID NO: 272881 - RNA, 19 nt, Artificial Sequence
  Description of Artificial Sequence: Synthetic oligonucleotide
gccucagaacguagcacuu

SEQ ID NO: 272882 - RNA, 19 nt, Artificial Sequence
  Description of Artificial Sequence: Synthetic oligonucleotide
ccuucgggguugaggugau

SEQ ID NO: 272883 - RNA, 19 nt, Artificial Sequence
  Description of Artificial Sequence: Synthetic oligonucleotide
gggccacacgccguuucuu

SEQ ID NO: 272884 - RNA, 19 nt, Artificial Sequence
  Description of Artificial Sequence: Synthetic oligonucleotide
cgacagggccacacgccgu

SEQ ID NO: 272885 - RNA, 19 nt, Artificial Sequence
  Description of Artificial Sequence: Synthetic oligonucleotide
cuucgggguugaggugauu

SEQ ID NO: 272886 - RNA, 19 nt, Artificial Sequence
  Description of Artificial Sequence: Synthetic oligonucleotide
gccgagccccggagcggga

SEQ ID NO: 272887 - RNA, 19 nt, Artificial Sequence
  Description of Artificial Sequence: Synthetic oligonucleotide
ccaccgguacuggcauugu

SEQ ID NO: 272888 - RNA, 19 nt, Artificial Sequence
  Description of Artificial Sequence: Synthetic oligonucleotide
cgccguuucuucugccguu

SEQ ID NO: 272889 - RNA, 19 nt, Artificial Sequence
  Description of Artificial Sequence: Synthetic oligonucleotide
gcgcguccgccgagacauc

SEQ ID NO: 272890 - RNA, 19 nt, Artificial Sequence
  Description of Artificial Sequence: Synthetic oligonucleotide
cgcucacggcacugcuugu

SEQ ID NO: 272891 - RNA, 19 nt, Artificial Sequence
  Description of Artificial Sequence: Synthetic oligonucleotide
aauuacaaggguuagcuuc

SEQ ID NO: 272892 - RNA, 19 nt, Artificial Sequence
  Description of Artificial Sequence: Synthetic oligonucleotide
aauaccuuggcccacauag

SEQ ID NO: 272893 - RNA, 19 nt, Artificial Sequence
  Description of Artificial Sequence: Synthetic oligonucleotide
uuuuauaggcacuuuaugg

SEQ ID NO: 272894 - RNA, 19 nt, Artificial Sequence
  Description of Artificial Sequence: Synthetic oligonucleotide
aaucauuuaacaaaguagg

SEQ ID NO: 272895 - RNA, 19 nt, Artificial Sequence
  Description of Artificial Sequence: Synthetic oligonucleotide
aaccaauuaggcuucaggc

SEQ ID NO: 272896 - RNA, 19 nt, Artificial Sequence
  Description of Artificial Sequence: Synthetic oligonucleotide
ucuuuuaugucucagauaa

SEQ ID NO: 272897 - RNA, 19 nt, Artificial Sequence
  Description of Artificial Sequence: Synthetic oligonucleotide
uuuacaaccuuuauaauca

SEQ ID NO: 272898 - RNA, 19 nt, Artificial Sequence
  Description of Artificial Sequence: Synthetic oligonucleotide
ucuaugaucaucaaaccag

SEQ ID NO: 272899 - RNA, 19 nt, Artificial Sequence
  Description of Artificial Sequence: Synthetic oligonucleotide
uccaucauaauuuugguag

SEQ ID NO: 272900 - RNA, 19 nt, Artificial Sequence
  Description of Artificial Sequence: Synthetic oligonucleotide
uuaagugccauauuuaagc

SEQ ID NO: 272901 - RNA, 19 nt, Artificial Sequence
  Description of Artificial Sequence: Synthetic oligonucleotide
uauuaaauuacgaaguuuc

SEQ ID NO: 272902 - RNA, 19 nt, Artificial Sequence
  Description of Artificial Sequence: Synthetic oligonucleotide
uuuacaagcgcuuugcucc

SEQ ID NO: 272903 - RNA, 19 nt, Artificial Sequence
  Description of Artificial Sequence: Synthetic oligonucleotide
uauuuaagcaacaauauua

SEQ ID NO: 272904 - RNA, 19 nt, Artificial Sequence
  Description of Artificial Sequence: Synthetic oligonucleotide
aauuccaucauaauuuugg

SEQ ID NO: 272905 - RNA, 19 nt, Artificial Sequence
  Description of Artificial Sequence: Synthetic oligonucleotide
ugaugugccaccaaguagg

SEQ ID NO: 272906 - RNA, 19 nt, Artificial Sequence
  Description of Artificial Sequence: Synthetic oligonucleotide
uuaaacuuugguuaagugc

SEQ ID NO: 272907 - RNA, 19 nt, Artificial Sequence
  Description of Artificial Sequence: Synthetic oligonucleotide
aaaagucaugauuugaugu

SEQ ID NO: 272908 - RNA, 19 nt, Artificial Sequence
  Description of Artificial Sequence: Synthetic oligonucleotide
ugacaauccaauaaggggc

SEQ ID NO: 272909 - RNA, 19 nt, Artificial Sequence
  Description of Artificial Sequence: Synthetic oligonucleotide
uuuaguucuaccaauucca

SEQ ID NO: 272910 - RNA, 19 nt, Artificial Sequence
  Description of Artificial Sequence: Synthetic oligonucleotide
uuauaaauccuaauggacu

SEQ ID NO: 272911 - RNA, 19 nt, Artificial Sequence
  Description of Artificial Sequence: Synthetic oligonucleotide
uaaauuacgaaguuucuga

SEQ ID NO: 272912 - RNA, 19 nt, Artificial Sequence
  Description of Artificial Sequence: Synthetic oligonucleotide
gaagucaauaccuuggccc

SEQ ID NO: 272913 - RNA, 19 nt, Artificial Sequence
  Description of Artificial Sequence: Synthetic oligonucleotide
augacaauccaauaagggg

SEQ ID NO: 272914 - RNA, 19 nt, Artificial Sequence
  Description of Artificial Sequence: Synthetic oligonucleotide
uuuuguaaaacuaucuguc

SEQ ID NO: 272915 - RNA, 19 nt, Artificial Sequence
  Description of Artificial Sequence: Synthetic oligonucleotide
uccaauaaggggcugacag

SEQ ID NO: 272916 - RNA, 19 nt, Artificial Sequence
  Description of Artificial Sequence: Synthetic oligonucleotide
uuuaaguacauuuuacaac

SEQ ID NO: 272917 - RNA, 19 nt, Artificial Sequence
  Description of Artificial Sequence: Synthetic oligonucleotide
aaugaagucaauaccuugg

SEQ ID NO: 272918 - RNA, 19 nt, Artificial Sequence
  Description of Artificial Sequence: Synthetic oligonucleotide
cacuuauaaauccuaaugg

SEQ ID NO: 272919 - RNA, 19 nt, Artificial Sequence
  Description of Artificial Sequence: Synthetic oligonucleotide
aaugaaaccugaauguagg

SEQ ID NO: 272920 - RNA, 19 nt, Artificial Sequence
  Description of Artificial Sequence: Synthetic oligonucleotide
aaacaauuccaacuuuuag

SEQ ID NO: 272921 - RNA, 19 nt, Artificial Sequence
  Description of Artificial Sequence: Synthetic oligonucleotide
uuuauaggcacuuuaugga

SEQ ID NO: 272922 - RNA, 19 nt, Artificial Sequence
  Description of Artificial Sequence: Synthetic oligonucleotide
aaugcaaucacaguucuga

SEQ ID NO: 272923 - RNA, 19 nt, Artificial Sequence
  Description of Artificial Sequence: Synthetic oligonucleotide
cauaacauuuucaaaaguc

SEQ ID NO: 272924 - RNA, 19 nt, Artificial Sequence
  Description of Artificial Sequence: Synthetic oligonucleotide
uuauuagugaaugaaguca

SEQ ID NO: 272925 - RNA, 19 nt, Artificial Sequence
  Description of Artificial Sequence: Synthetic oligonucleotide
ucagauaaugcaauuauua

SEQ ID NO: 272926 - RNA, 19 nt, Artificial Sequence
  Description of Artificial Sequence: Synthetic oligonucleotide
cuuauaaauccuaauggac

SEQ ID NO: 272927 - RNA, 19 nt, Artificial Sequence
  Description of Artificial Sequence: Synthetic oligonucleotide
uaguaauaggcguacgugg

SEQ ID NO: 272928 - RNA, 19 nt, Artificial Sequence
  Description of Artificial Sequence: Synthetic oligonucleotide
accaauuaggcuucaggcc

SEQ ID NO: 272929 - RNA, 19 nt, Artificial Sequence
  Description of Artificial Sequence: Synthetic oligonucleotide
acuagggauaugaugaucc

SEQ ID NO: 272930 - RNA, 19 nt, Artificial Sequence
  Description of Artificial Sequence: Synthetic oligonucleotide
uuuaugucucagauaaugc

SEQ ID NO: 272931 - RNA, 19 nt, Artificial Sequence
  Description of Artificial Sequence: Synthetic oligonucleotide
gaugacaauccaauaaggg

SEQ ID NO: 272932 - RNA, 19 nt, Artificial Sequence
  Description of Artificial Sequence: Synthetic oligonucleotide
aacuaucugucaugugucc

SEQ ID NO: 272933 - RNA, 19 nt, Artificial Sequence
  Description of Artificial Sequence: Synthetic oligonucleotide
cuuaguauaaugaguggag

SEQ ID NO: 272934 - RNA, 19 nt, Artificial Sequence
  Description of Artificial Sequence: Synthetic oligonucleotide
ugcaauuauuaaauuacga

SEQ ID NO: 272935 - RNA, 19 nt, Artificial Sequence
  Description of Artificial Sequence: Synthetic oligonucleotide
ugaucaucaaaccagcuua

SEQ ID NO: 272936 - RNA, 19 nt, Artificial Sequence
  Description of Artificial Sequence: Synthetic oligonucleotide
ucauguuuggccaaauacu

SEQ ID NO: 272937 - RNA, 19 nt, Artificial Sequence
  Description of Artificial Sequence: Synthetic oligonucleotide
uguaaaacuaucugucaug

SEQ ID NO: 272938 - RNA, 19 nt, Artificial Sequence
  Description of Artificial Sequence: Synthetic oligonucleotide
uugauuaagucauguuugg

SEQ ID NO: 272939 - RNA, 19 nt, Artificial Sequence
  Description of Artificial Sequence: Synthetic oligonucleotide
auuuaaguacauuuuacaa

SEQ ID NO: 272940 - RNA, 19 nt, Artificial Sequence
  Description of Artificial Sequence: Synthetic oligonucleotide
uccaaaugcaaucacaguu

SEQ ID NO: 272941 - RNA, 19 nt, Artificial Sequence
  Description of Artificial Sequence: Synthetic oligonucleotide
aacauuagcggcaucacug

SEQ ID NO: 272942 - RNA, 19 nt, Artificial Sequence
  Description of Artificial Sequence: Synthetic oligonucleotide
gauuugaugugccaccaag

SEQ ID NO: 272943 - RNA, 19 nt, Artificial Sequence
  Description of Artificial Sequence: Synthetic oligonucleotide
acuaugagcacaccagcac

SEQ ID NO: 272944 - RNA, 19 nt, Artificial Sequence
  Description of Artificial Sequence: Synthetic oligonucleotide
auaccaacauaacauuuuc

SEQ ID NO: 272945 - RNA, 19 nt, Artificial Sequence
  Description of Artificial Sequence: Synthetic oligonucleotide
ugucauguguccaaacacc

SEQ ID NO: 272946 - RNA, 19 nt, Artificial Sequence
  Description of Artificial Sequence: Synthetic oligonucleotide
uuuaaacuuugguuaagug

SEQ ID NO: 272947 - RNA, 19 nt, Artificial Sequence
  Description of Artificial Sequence: Synthetic oligonucleotide
acaaggguuagcuuccaac

SEQ ID NO: 272948 - RNA, 19 nt, Artificial Sequence
  Description of Artificial Sequence: Synthetic oligonucleotide
aaccuuuauaaucauuuaa

SEQ ID NO: 272949 - RNA, 19 nt, Artificial Sequence
  Description of Artificial Sequence: Synthetic oligonucleotide
cuaauuuuguuuauuuguc

SEQ ID NO: 272950 - RNA, 19 nt, Artificial Sequence
  Description of Artificial Sequence: Synthetic oligonucleotide
uuaaauuacgaaguuucug

SEQ ID NO: 272951 - RNA, 19 nt, Artificial Sequence
  Description of Artificial Sequence: Synthetic oligonucleotide
uaaugcaauuauuaaauua

SEQ ID NO: 272952 - RNA, 19 nt, Artificial Sequence
  Description of Artificial Sequence: Synthetic oligonucleotide
ucugaagacugucaucuug

SEQ ID NO: 272953 - RNA, 19 nt, Artificial Sequence
  Description of Artificial Sequence: Synthetic oligonucleotide
uguaguaauaggcguacgu

SEQ ID NO: 272954 - RNA, 19 nt, Artificial Sequence
  Description of Artificial Sequence: Synthetic oligonucleotide
guagacaucaucugugagc

SEQ ID NO: 272955 - RNA, 19 nt, Artificial Sequence
  Description of Artificial Sequence: Synthetic oligonucleotide
auuacaaggguuagcuucc

SEQ ID NO: 272956 - RNA, 19 nt, Artificial Sequence
  Description of Artificial Sequence: Synthetic oligonucleotide
cauguuuggccaaauacug

SEQ ID NO: 272957 - RNA, 19 nt, Artificial Sequence
  Description of Artificial Sequence: Synthetic oligonucleotide
uuuguuuuguccuccaaau

SEQ ID NO: 272958 - RNA, 19 nt, Artificial Sequence
  Description of Artificial Sequence: Synthetic oligonucleotide
ucucagauaaugcaauuau

SEQ ID NO: 272959 - RNA, 19 nt, Artificial Sequence
  Description of Artificial Sequence: Synthetic oligonucleotide
uaguauaaugaguggagca

SEQ ID NO: 272960 - RNA, 19 nt, Artificial Sequence
  Description of Artificial Sequence: Synthetic oligonucleotide
aaacuaucugucauguguc

SEQ ID NO: 272961 - RNA, 19 nt, Artificial Sequence
  Description of Artificial Sequence: Synthetic oligonucleotide
ugcauagcgaaacauccca

SEQ ID NO: 272962 - RNA, 19 nt, Artificial Sequence
  Description of Artificial Sequence: Synthetic oligonucleotide
gacaucaucugugagccgg

SEQ ID NO: 272963 - RNA, 19 nt, Artificial Sequence
  Description of Artificial Sequence: Synthetic oligonucleotide
accaucaacaguguucacc

SEQ ID NO: 272964 - RNA, 19 nt, Artificial Sequence
  Description of Artificial Sequence: Synthetic oligonucleotide
cuuauuagugaaugaaguc

SEQ ID NO: 272965 - RNA, 19 nt, Artificial Sequence
  Description of Artificial Sequence: Synthetic oligonucleotide
uugguuaagugccauauuu

SEQ ID NO: 272966 - RNA, 19 nt, Artificial Sequence
  Description of Artificial Sequence: Synthetic oligonucleotide
cagaugacaauccaauaag

SEQ ID NO: 272967 - RNA, 19 nt, Artificial Sequence
  Description of Artificial Sequence: Synthetic oligonucleotide
uugaugugccaccaaguag

SEQ ID NO: 272968 - RNA, 19 nt, Artificial Sequence
  Description of Artificial Sequence: Synthetic oligonucleotide
aguaauaggcguacguggc

SEQ ID NO: 272969 - RNA, 19 nt, Artificial Sequence
  Description of Artificial Sequence: Synthetic oligonucleotide
caaggguuagcuuccaacc

SEQ ID NO: 272970 - RNA, 19 nt, Artificial Sequence
  Description of Artificial Sequence: Synthetic oligonucleotide
aaauauaccaacgguuggu

SEQ ID NO: 272971 - RNA, 19 nt, Artificial Sequence
  Description of Artificial Sequence: Synthetic oligonucleotide
caugauuugaugugccacc

SEQ ID NO: 272972 - RNA, 19 nt, Artificial Sequence
  Description of Artificial Sequence: Synthetic oligonucleotide
ucaucugugagccgggugu

SEQ ID NO: 272973 - RNA, 19 nt, Artificial Sequence
  Description of Artificial Sequence: Synthetic oligonucleotide
gaaaccugaauguaggcaa

SEQ ID NO: 272974 - RNA, 19 nt, Artificial Sequence
  Description of Artificial Sequence: Synthetic oligonucleotide
ugaugaaauuaccaucaac

SEQ ID NO: 272975 - RNA, 19 nt, Artificial Sequence
  Description of Artificial Sequence: Synthetic oligonucleotide
uuguaaaacuaucugucau

SEQ ID NO: 272976 - RNA, 19 nt, Artificial Sequence
  Description of Artificial Sequence: Synthetic oligonucleotide
agcgaaacaucccaaauau

SEQ ID NO: 272977 - RNA, 19 nt, Artificial Sequence
  Description of Artificial Sequence: Synthetic oligonucleotide
uauaccaacgguugguuuc

SEQ ID NO: 272978 - RNA, 19 nt, Artificial Sequence
  Description of Artificial Sequence: Synthetic oligonucleotide
uccugauucauuauagcau

SEQ ID NO: 272979 - RNA, 19 nt, Artificial Sequence
  Description of Artificial Sequence: Synthetic oligonucleotide
aaauuacgaaguuucugaa

SEQ ID NO: 272980 - RNA, 19 nt, Artificial Sequence
  Description of Artificial Sequence: Synthetic oligonucleotide
aauccaauaaggggcugac

SEQ ID NO: 272981 - RNA, 19 nt, Artificial Sequence
  Description of Artificial Sequence: Synthetic oligonucleotide
ugaagucccauggagaaca

SEQ ID NO: 272982 - RNA, 19 nt, Artificial Sequence
  Description of Artificial Sequence: Synthetic oligonucleotide
uuaguauaaugaguggagc

SEQ ID NO: 272983 - RNA, 19 nt, Artificial Sequence
  Description of Artificial Sequence: Synthetic oligonucleotide
agcacaccagcaccaaucc

SEQ ID NO: 272984 - RNA, 19 nt, Artificial Sequence
  Description of Artificial Sequence: Synthetic oligonucleotide
uaaugaguggagcaaucac

SEQ ID NO: 272985 - RNA, 19 nt, Artificial Sequence
  Description of Artificial Sequence: Synthetic oligonucleotide
aggguuagcuuccaaccac

SEQ ID NO: 272986 - RNA, 19 nt, Artificial Sequence
  Description of Artificial Sequence: Synthetic oligonucleotide
uucugucuaauuuuguuua

SEQ ID NO: 272987 - RNA, 19 nt, Artificial Sequence
  Description of Artificial Sequence: Synthetic oligonucleotide
ugucgugcacgucaaacca

SEQ ID NO: 272988 - RNA, 19 nt, Artificial Sequence
  Description of Artificial Sequence: Synthetic oligonucleotide
uccccguguaguaauaggc

SEQ ID NO: 272989 - RNA, 19 nt, Artificial Sequence
  Description of Artificial Sequence: Synthetic oligonucleotide
uuuuaaacuuugguuaagu

SEQ ID NO: 272990 - RNA, 19 nt, Artificial Sequence
  Description of Artificial Sequence: Synthetic oligonucleotide
uuugaugugccaccaagua

SEQ ID NO: 272991 - RNA, 19 nt, Artificial Sequence
  Description of Artificial Sequence: Synthetic oligonucleotide
aguuccuuauuagugaaug

SEQ ID NO: 272992 - RNA, 19 nt, Artificial Sequence
  Description of Artificial Sequence: Synthetic oligonucleotide
uuauaggcacuuuauggaa

SEQ ID NO: 272993 - RNA, 19 nt, Artificial Sequence
  Description of Artificial Sequence: Synthetic oligonucleotide
caaccaauuaggcuucagg

SEQ ID NO: 272994 - RNA, 19 nt, Artificial Sequence
  Description of Artificial Sequence: Synthetic oligonucleotide
uaccaauuccaucauaauu

SEQ ID NO: 272995 - RNA, 19 nt, Artificial Sequence
  Description of Artificial Sequence: Synthetic oligonucleotide
uaugagcacaccagcacca

SEQ ID NO: 272996 - RNA, 19 nt, Artificial Sequence
  Description of Artificial Sequence: Synthetic oligonucleotide
caaaagucaugauuugaug

SEQ ID NO: 272997 - RNA, 19 nt, Artificial Sequence
  Description of Artificial Sequence: Synthetic oligonucleotide
ugucuaauuuuguuuauuu

SEQ ID NO: 272998 - RNA, 19 nt, Artificial Sequence
  Description of Artificial Sequence: Synthetic oligonucleotide
aacgguugguuucuuuucu

SEQ ID NO: 272999 - RNA, 19 nt, Artificial Sequence
  Description of Artificial Sequence: Synthetic oligonucleotide
acauuuuacaaccuuuaua

SEQ ID NO: 273000 - RNA, 19 nt, Artificial Sequence
  Description of Artificial Sequence: Synthetic oligonucleotide
aaugcgccagugcuauuuc

SEQ ID NO: 273001 - RNA, 19 nt, Artificial Sequence
  Description of Artificial Sequence: Synthetic oligonucleotide
aauaccaacauaacauuuu

SEQ ID NO: 273002 - RNA, 19 nt, Artificial Sequence
  Description of Artificial Sequence: Synthetic oligonucleotide
aaggguuagcuuccaacca

SEQ ID NO: 273003 - RNA, 19 nt, Artificial Sequence
  Description of Artificial Sequence: Synthetic oligonucleotide
cuuuauggaauauuuaagu

SEQ ID NO: 273004 - RNA, 19 nt, Artificial Sequence
  Description of Artificial Sequence: Synthetic oligonucleotide
gucaaaccagccuaucucc

SEQ ID NO: 273005 - RNA, 19 nt, Artificial Sequence
  Description of Artificial Sequence: Synthetic oligonucleotide
ugcacgucaaaccagccua

SEQ ID NO: 273006 - RNA, 19 nt, Artificial Sequence
  Description of Artificial Sequence: Synthetic oligonucleotide
ucuuucagagcuugaccag

SEQ ID NO: 273007 - RNA, 19 nt, Artificial Sequence
  Description of Artificial Sequence: Synthetic oligonucleotide
agugaagucccauggagaa

SEQ ID NO: 273008 - RNA, 19 nt, Artificial Sequence
  Description of Artificial Sequence: Synthetic oligonucleotide
agaugacaauccaauaagg

SEQ ID NO: 273009 - RNA, 19 nt, Artificial Sequence
  Description of Artificial Sequence: Synthetic oligonucleotide
cacuuuauggaauauuuaa

SEQ ID NO: 273010 - RNA, 19 nt, Artificial Sequence
  Description of Artificial Sequence: Synthetic oligonucleotide
cuuccaaccacuuauaaau

SEQ ID NO: 273011 - RNA, 19 nt, Artificial Sequence
  Description of Artificial Sequence: Synthetic oligonucleotide
augcaauuauuaaauuacg

SEQ ID NO: 273012 - RNA, 19 nt, Artificial Sequence
  Description of Artificial Sequence: Synthetic oligonucleotide
ugccgcuuaguauaaugag

SEQ ID NO: 273013 - RNA, 19 nt, Artificial Sequence
  Description of Artificial Sequence: Synthetic oligonucleotide
ucacuacaaguaaaagugu

SEQ ID NO: 273014 - RNA, 19 nt, Artificial Sequence
  Description of Artificial Sequence: Synthetic oligonucleotide
ucccauggagaacagcagc

SEQ ID NO: 273015 - RNA, 19 nt, Artificial Sequence
  Description of Artificial Sequence: Synthetic oligonucleotide
uccaacuuuuaguucuacc

SEQ ID NO: 273016 - RNA, 19 nt, Artificial Sequence
  Description of Artificial Sequence: Synthetic oligonucleotide
gacaacagcugaaaauacc

SEQ ID NO: 273017 - RNA, 19 nt, Artificial Sequence
  Description of Artificial Sequence: Synthetic oligonucleotide
cgaaacaucccaaauauac

SEQ ID NO: 273018 - RNA, 19 nt, Artificial Sequence
  Description of Artificial Sequence: Synthetic oligonucleotide
acugucgugcacgucaaac

SEQ ID NO: 273019 - RNA, 19 nt, Artificial Sequence
  Description of Artificial Sequence: Synthetic oligonucleotide
uuauuaaauuacgaaguuu

SEQ ID NO: 273020 - RNA, 19 nt, Artificial Sequence
  Description of Artificial Sequence: Synthetic oligonucleotide
agucaugauuugaugugcc

SEQ ID NO: 273021 - RNA, 19 nt, Artificial Sequence
  Description of Artificial Sequence: Synthetic oligonucleotide
uuugcauaugccugaaguu

SEQ ID NO: 273022 - RNA, 19 nt, Artificial Sequence
  Description of Artificial Sequence: Synthetic oligonucleotide
aaucacaguucugauggcu

SEQ ID NO: 273023 - RNA, 19 nt, Artificial Sequence
  Description of Artificial Sequence: Synthetic oligonucleotide
aaaccugaauguaggcaac

SEQ ID NO: 273024 - RNA, 19 nt, Artificial Sequence
  Description of Artificial Sequence: Synthetic oligonucleotide
uccagacugccgcugauga

SEQ ID NO: 273025 - RNA, 19 nt, Artificial Sequence
  Description of Artificial Sequence: Synthetic oligonucleotide
ucuccugauucauuauagc

SEQ ID NO: 273026 - RNA, 19 nt, Artificial Sequence
  Description of Artificial Sequence: Synthetic oligonucleotide
auuccaucauaauuuuggu

SEQ ID NO: 273027 - RNA, 19 nt, Artificial Sequence
  Description of Artificial Sequence: Synthetic oligonucleotide
ccaggcaccaaaaugaaac

SEQ ID NO: 273028 - RNA, 19 nt, Artificial Sequence
  Description of Artificial Sequence: Synthetic oligonucleotide
guaguaauaggcguacgug

SEQ ID NO: 273029 - RNA, 19 nt, Artificial Sequence
  Description of Artificial Sequence: Synthetic oligonucleotide
ugucgagccaaucugcaua

SEQ ID NO: 273030 - RNA, 19 nt, Artificial Sequence
  Description of Artificial Sequence: Synthetic oligonucleotide
agcaaaugagcuggcauuc

SEQ ID NO: 273031 - RNA, 19 nt, Artificial Sequence
  Description of Artificial Sequence: Synthetic oligonucleotide
uuagugaaugaagucaaua

SEQ ID NO: 273032 - RNA, 19 nt, Artificial Sequence
  Description of Artificial Sequence: Synthetic oligonucleotide
uauaggcacuuuauggaau

SEQ ID NO: 273033 - RNA, 19 nt, Artificial Sequence
  Description of Artificial Sequence: Synthetic oligonucleotide
aaccagcuuauauccuguc

SEQ ID NO: 273034 - RNA, 19 nt, Artificial Sequence
  Description of Artificial Sequence: Synthetic oligonucleotide
gaguggagcaaucacuaca

SEQ ID NO: 273035 - RNA, 19 nt, Artificial Sequence
  Description of Artificial Sequence: Synthetic oligonucleotide
uagcgaaacaucccaaaua

SEQ ID NO: 273036 - RNA, 19 nt, Artificial Sequence
  Description of Artificial Sequence: Synthetic oligonucleotide
agcuugucgagccaaucug

SEQ ID NO: 273037 - RNA, 19 nt, Artificial Sequence
  Description of Artificial Sequence: Synthetic oligonucleotide
guuuacaagcgcuuugcuc

SEQ ID NO: 273038 - RNA, 19 nt, Artificial Sequence
  Description of Artificial Sequence: Synthetic oligonucleotide
uuguccuccaaaugcaauc

SEQ ID NO: 273039 - RNA, 19 nt, Artificial Sequence
  Description of Artificial Sequence: Synthetic oligonucleotide
ugauuaagucauguuuggc

SEQ ID NO: 273040 - RNA, 19 nt, Artificial Sequence
  Description of Artificial Sequence: Synthetic oligonucleotide
aguauaaugaguggagcaa

SEQ ID NO: 273041 - RNA, 19 nt, Artificial Sequence
  Description of Artificial Sequence: Synthetic oligonucleotide
uuucagagcuugaccagac

SEQ ID NO: 273042 - RNA, 19 nt, Artificial Sequence
  Description of Artificial Sequence: Synthetic oligonucleotide
uuaguucuaccaauuccau

SEQ ID NO: 273043 - RNA, 19 nt, Artificial Sequence
  Description of Artificial Sequence: Synthetic oligonucleotide
ucgugcacgucaaaccagc

SEQ ID NO: 273044 - RNA, 19 nt, Artificial Sequence
  Description of Artificial Sequence: Synthetic oligonucleotide
aauuaccaucaacaguguu

SEQ ID NO: 273045 - RNA, 19 nt, Artificial Sequence
  Description of Artificial Sequence: Synthetic oligonucleotide
cuccugauucauuauagca

SEQ ID NO: 273046 - RNA, 19 nt, Artificial Sequence
  Description of Artificial Sequence: Synthetic oligonucleotide
aaauuacaaggguuagcuu

SEQ ID NO: 273047 - RNA, 19 nt, Artificial Sequence
  Description of Artificial Sequence: Synthetic oligonucleotide
guuucuuuuaugucucaga

SEQ ID NO: 273048 - RNA, 19 nt, Artificial Sequence
  Description of Artificial Sequence: Synthetic oligonucleotide
caugccgcuuaguauaaug

SEQ ID NO: 273049 - RNA, 19 nt, Artificial Sequence
  Description of Artificial Sequence: Synthetic oligonucleotide
uuguugauuucacuuugau

SEQ ID NO: 273050 - RNA, 19 nt, Artificial Sequence
  Description of Artificial Sequence: Synthetic oligonucleotide
auagcgaaacaucccaaau

SEQ ID NO: 273051 - RNA, 19 nt, Artificial Sequence
  Description of Artificial Sequence: Synthetic oligonucleotide
ucaaguucuuuguuuuguc

SEQ ID NO: 273052 - RNA, 19 nt, Artificial Sequence
  Description of Artificial Sequence: Synthetic oligonucleotide
aacuaugagcacaccagca

SEQ ID NO: 273053 - RNA, 19 nt, Artificial Sequence
  Description of Artificial Sequence: Synthetic oligonucleotide
uucugauggcugcuaagac

SEQ ID NO: 273054 - RNA, 19 nt, Artificial Sequence
  Description of Artificial Sequence: Synthetic oligonucleotide
uaugccugaaguuccuuau

SEQ ID NO: 273055 - RNA, 19 nt, Artificial Sequence
  Description of Artificial Sequence: Synthetic oligonucleotide
ugguuaagugccauauuua

SEQ ID NO: 273056 - RNA, 19 nt, Artificial Sequence
  Description of Artificial Sequence: Synthetic oligonucleotide
ccacuuauaaauccuaaug

SEQ ID NO: 273057 - RNA, 19 nt, Artificial Sequence
  Description of Artificial Sequence: Synthetic oligonucleotide
agagcuugaccagacaaca

SEQ ID NO: 273058 - RNA, 19 nt, Artificial Sequence
  Description of Artificial Sequence: Synthetic oligonucleotide
agucccauggagaacagca

SEQ ID NO: 273059 - RNA, 19 nt, Artificial Sequence
  Description of Artificial Sequence: Synthetic oligonucleotide
aauauaccaacgguugguu

SEQ ID NO: 273060 - RNA, 19 nt, Artificial Sequence
  Description of Artificial Sequence: Synthetic oligonucleotide
uuuuguccuccaaaugcaa

SEQ ID NO: 273061 - RNA, 19 nt, Artificial Sequence
  Description of Artificial Sequence: Synthetic oligonucleotide
uacgaaguuucugaagacu

SEQ ID NO: 273062 - RNA, 19 nt, Artificial Sequence
  Description of Artificial Sequence: Synthetic oligonucleotide
acgaaguuucugaagacug

SEQ ID NO: 273063 - RNA, 19 nt, Artificial Sequence
  Description of Artificial Sequence: Synthetic oligonucleotide
gaaguuccuuauuagugaa

SEQ ID NO: 273064 - RNA, 19 nt, Artificial Sequence
  Description of Artificial Sequence: Synthetic oligonucleotide
aguucugauggcugcuaag

SEQ ID NO: 273065 - RNA, 19 nt, Artificial Sequence
  Description of Artificial Sequence: Synthetic oligonucleotide
caaaguaggguugaaauua

SEQ ID NO: 273066 - RNA, 19 nt, Artificial Sequence
  Description of Artificial Sequence: Synthetic oligonucleotide
ucaaaccagccuaucuccu

SEQ ID NO: 273067 - RNA, 19 nt, Artificial Sequence
  Description of Artificial Sequence: Synthetic oligonucleotide
aucuccugauucauuauag

SEQ ID NO: 273068 - RNA, 19 nt, Artificial Sequence
  Description of Artificial Sequence: Synthetic oligonucleotide
uccccaacugucgugcacg

SEQ ID NO: 273069 - RNA, 19 nt, Artificial Sequence
  Description of Artificial Sequence: Synthetic oligonucleotide
ugccugaaguuccuuauua

SEQ ID NO: 273070 - RNA, 19 nt, Artificial Sequence
  Description of Artificial Sequence: Synthetic oligonucleotide
guaauaggcguacguggcc

SEQ ID NO: 273071 - RNA, 19 nt, Artificial Sequence
  Description of Artificial Sequence: Synthetic oligonucleotide
aagugaagucccauggaga

SEQ ID NO: 273072 - RNA, 19 nt, Artificial Sequence
  Description of Artificial Sequence: Synthetic oligonucleotide
caggcaccaaaaugaaacc

SEQ ID NO: 273073 - RNA, 19 nt, Artificial Sequence
  Description of Artificial Sequence: Synthetic oligonucleotide
auccccguguaguaauagg

SEQ ID NO: 273074 - RNA, 19 nt, Artificial Sequence
  Description of Artificial Sequence: Synthetic oligonucleotide
uuagcggcaucacuggcua

SEQ ID NO: 273075 - RNA, 19 nt, Artificial Sequence
  Description of Artificial Sequence: Synthetic oligonucleotide
uguccuccaaaugcaauca

SEQ ID NO: 273076 - RNA, 19 nt, Artificial Sequence
  Description of Artificial Sequence: Synthetic oligonucleotide
ccugauucauuauagcaug

SEQ ID NO: 273077 - RNA, 19 nt, Artificial Sequence
  Description of Artificial Sequence: Synthetic oligonucleotide
aauccccguguaguaauag

SEQ ID NO: 273078 - RNA, 19 nt, Artificial Sequence
  Description of Artificial Sequence: Synthetic oligonucleotide
agcaucaagagaggaagug

SEQ ID NO: 273079 - RNA, 19 nt, Artificial Sequence
  Description of Artificial Sequence: Synthetic oligonucleotide
aagucccauggagaacagc

SEQ ID NO: 273080 - RNA, 19 nt, Artificial Sequence
  Description of Artificial Sequence: Synthetic oligonucleotide
accacuuauaaauccuaau

SEQ ID NO: 273081 - RNA, 19 nt, Artificial Sequence
  Description of Artificial Sequence: Synthetic oligonucleotide
gucgagccaaucugcauag

SEQ ID NO: 273082 - RNA, 19 nt, Artificial Sequence
  Description of Artificial Sequence: Synthetic oligonucleotide
aguaggguugaaauuaaaa

SEQ ID NO: 273083 - RNA, 19 nt, Artificial Sequence
  Description of Artificial Sequence: Synthetic oligonucleotide
cuuccaaccaauuaggcuu

SEQ ID NO: 273084 - RNA, 19 nt, Artificial Sequence
  Description of Artificial Sequence: Synthetic oligonucleotide
uuccaucauaauuuuggua

SEQ ID NO: 273085 - RNA, 19 nt, Artificial Sequence
  Description of Artificial Sequence: Synthetic oligonucleotide
ugauucauuauagcaugaa

SEQ ID NO: 273086 - RNA, 19 nt, Artificial Sequence
  Description of Artificial Sequence: Synthetic oligonucleotide
uuccaaccacuuauaaauc

SEQ ID NO: 273087 - RNA, 19 nt, Artificial Sequence
  Description of Artificial Sequence: Synthetic oligonucleotide
aucauaauuuugguagaca

SEQ ID NO: 273088 - RNA, 19 nt, Artificial Sequence
  Description of Artificial Sequence: Synthetic oligonucleotide
ucuccaucaugccgcuuag

SEQ ID NO: 273089 - RNA, 19 nt, Artificial Sequence
  Description of Artificial Sequence: Synthetic oligonucleotide
caucaugccgcuuaguaua

SEQ ID NO: 273090 - RNA, 19 nt, Artificial Sequence
  Description of Artificial Sequence: Synthetic oligonucleotide
aaguuucugaagacuguca

SEQ ID NO: 273091 - RNA, 19 nt, Artificial Sequence
  Description of Artificial Sequence: Synthetic oligonucleotide
caucaagagaggaagugaa

SEQ ID NO: 273092 - RNA, 19 nt, Artificial Sequence
  Description of Artificial Sequence: Synthetic oligonucleotide
auaggcacuuuauggaaua

SEQ ID NO: 273093 - RNA, 19 nt, Artificial Sequence
  Description of Artificial Sequence: Synthetic oligonucleotide
caauuccaucauaauuuug

SEQ ID NO: 273094 - RNA, 19 nt, Artificial Sequence
  Description of Artificial Sequence: Synthetic oligonucleotide
cagagcuugaccagacaac

SEQ ID NO: 273095 - RNA, 19 nt, Artificial Sequence
  Description of Artificial Sequence: Synthetic oligonucleotide
aguuuacaagcgcuuugcu

SEQ ID NO: 273096 - RNA, 19 nt, Artificial Sequence
  Description of Artificial Sequence: Synthetic oligonucleotide
uaacaaaguaggguugaaa

SEQ ID NO: 273097 - RNA, 19 nt, Artificial Sequence
  Description of Artificial Sequence: Synthetic oligonucleotide
acgucaaaccagccuaucu

SEQ ID NO: 273098 - RNA, 19 nt, Artificial Sequence
  Description of Artificial Sequence: Synthetic oligonucleotide
ggcaucacuggcuagccug

SEQ ID NO: 273099 - RNA, 19 nt, Artificial Sequence
  Description of Artificial Sequence: Synthetic oligonucleotide
ccgcuuaguauaaugagug

SEQ ID NO: 273100 - RNA, 19 nt, Artificial Sequence
  Description of Artificial Sequence: Synthetic oligonucleotide
accagcuuauauccugucu

SEQ ID NO: 273101 - RNA, 19 nt, Artificial Sequence
  Description of Artificial Sequence: Synthetic oligonucleotide
agcaccaauccccguguag

SEQ ID NO: 273102 - RNA, 19 nt, Artificial Sequence
  Description of Artificial Sequence: Synthetic oligonucleotide
ucugucuaauuuuguuuau

SEQ ID NO: 273103 - RNA, 19 nt, Artificial Sequence
  Description of Artificial Sequence: Synthetic oligonucleotide
gguuaagugccauauuuaa

SEQ ID NO: 273104 - RNA, 19 nt, Artificial Sequence
  Description of Artificial Sequence: Synthetic oligonucleotide
uuccaaccaauuaggcuuc

SEQ ID NO: 273105 - RNA, 19 nt, Artificial Sequence
  Description of Artificial Sequence: Synthetic oligonucleotide
uuugguuaagugccauauu

SEQ ID NO: 273106 - RNA, 19 nt, Artificial Sequence
  Description of Artificial Sequence: Synthetic oligonucleotide
uucccaggaccauguacag

SEQ ID NO: 273107 - RNA, 19 nt, Artificial Sequence
  Description of Artificial Sequence: Synthetic oligonucleotide
agcugaaaauaccaacaua

SEQ ID NO: 273108 - RNA, 19 nt, Artificial Sequence
  Description of Artificial Sequence: Synthetic oligonucleotide
aggccucuggugcuguaac

SEQ ID NO: 273109 - RNA, 19 nt, Artificial Sequence
  Description of Artificial Sequence: Synthetic oligonucleotide
gagcaaucacuacaaguaa

SEQ ID NO: 273110 - RNA, 19 nt, Artificial Sequence
  Description of Artificial Sequence: Synthetic oligonucleotide
uuacaagcgcuuugcucca

SEQ ID NO: 273111 - RNA, 19 nt, Artificial Sequence
  Description of Artificial Sequence: Synthetic oligonucleotide
auaccuuggcccacauagc

SEQ ID NO: 273112 - RNA, 19 nt, Artificial Sequence
  Description of Artificial Sequence: Synthetic oligonucleotide
auuugaugugccaccaagu

SEQ ID NO: 273113 - RNA, 19 nt, Artificial Sequence
  Description of Artificial Sequence: Synthetic oligonucleotide
guaggcaacuaugagcaca

SEQ ID NO: 273114 - RNA, 19 nt, Artificial Sequence
  Description of Artificial Sequence: Synthetic oligonucleotide
uaauuuugguagacaucau

SEQ ID NO: 273115 - RNA, 19 nt, Artificial Sequence
  Description of Artificial Sequence: Synthetic oligonucleotide
gacaacacuuucaucucca

SEQ ID NO: 273116 - RNA, 19 nt, Artificial Sequence
  Description of Artificial Sequence: Synthetic oligonucleotide
uucagagcuugaccagaca

SEQ ID NO: 273117 - RNA, 19 nt, Artificial Sequence
  Description of Artificial Sequence: Synthetic oligonucleotide
aaccacuuauaaauccuaa

SEQ ID NO: 273118 - RNA, 19 nt, Artificial Sequence
  Description of Artificial Sequence: Synthetic oligonucleotide
guaaaacuaucugucaugu

SEQ ID NO: 273119 - RNA, 19 nt, Artificial Sequence
  Description of Artificial Sequence: Synthetic oligonucleotide
gcugccaggcaccaaaaug

SEQ ID NO: 273120 - RNA, 19 nt, Artificial Sequence
  Description of Artificial Sequence: Synthetic oligonucleotide
aauaggcguacguggccau

SEQ ID NO: 273121 - RNA, 19 nt, Artificial Sequence
  Description of Artificial Sequence: Synthetic oligonucleotide
aguggagcaaucacuacaa

SEQ ID NO: 273122 - RNA, 19 nt, Artificial Sequence
  Description of Artificial Sequence: Synthetic oligonucleotide
ugaguggagcaaucacuac

SEQ ID NO: 273123 - RNA, 19 nt, Artificial Sequence
  Description of Artificial Sequence: Synthetic oligonucleotide
uguguccaaacaccagcau

SEQ ID NO: 273124 - RNA, 19 nt, Artificial Sequence
  Description of Artificial Sequence: Synthetic oligonucleotide
gguagacaucaucugugag

SEQ ID NO: 273125 - RNA, 19 nt, Artificial Sequence
  Description of Artificial Sequence: Synthetic oligonucleotide
caacgguugguuucuuuuc

SEQ ID NO: 273126 - RNA, 19 nt, Artificial Sequence
  Description of Artificial Sequence: Synthetic oligonucleotide
guguugagcuccccaacug

SEQ ID NO: 273127 - RNA, 19 nt, Artificial Sequence
  Description of Artificial Sequence: Synthetic oligonucleotide
ugauuugaugugccaccaa

SEQ ID NO: 273128 - RNA, 19 nt, Artificial Sequence
  Description of Artificial Sequence: Synthetic oligonucleotide
augauuugaugugccacca

SEQ ID NO: 273129 - RNA, 19 nt, Artificial Sequence
  Description of Artificial Sequence: Synthetic oligonucleotide
aaacuuugguuaagugcca

SEQ ID NO: 273130 - RNA, 19 nt, Artificial Sequence
  Description of Artificial Sequence: Synthetic oligonucleotide
acuaucugucaugugucca

SEQ ID NO: 273131 - RNA, 19 nt, Artificial Sequence
  Description of Artificial Sequence: Synthetic oligonucleotide
uuaacaaaguaggguugaa

SEQ ID NO: 273132 - RNA, 19 nt, Artificial Sequence
  Description of Artificial Sequence: Synthetic oligonucleotide
ugcgccagugcuauuucua

SEQ ID NO: 273133 - RNA, 19 nt, Artificial Sequence
  Description of Artificial Sequence: Synthetic oligonucleotide
auauaccaacgguugguuu

SEQ ID NO: 273134 - RNA, 19 nt, Artificial Sequence
  Description of Artificial Sequence: Synthetic oligonucleotide
aacuuugguuaagugccau

SEQ ID NO: 273135 - RNA, 19 nt, Artificial Sequence
  Description of Artificial Sequence: Synthetic oligonucleotide
ccagcuuauauccugucuc

SEQ ID NO: 273136 - RNA, 19 nt, Artificial Sequence
  Description of Artificial Sequence: Synthetic oligonucleotide
gcuuaguauaaugagugga

SEQ ID NO: 273137 - RNA, 19 nt, Artificial Sequence
  Description of Artificial Sequence: Synthetic oligonucleotide
agacuucuagcucuuucuu

SEQ ID NO: 273138 - RNA, 19 nt, Artificial Sequence
  Description of Artificial Sequence: Synthetic oligonucleotide
cauagcgaaacaucccaaa

SEQ ID NO: 273139 - RNA, 19 nt, Artificial Sequence
  Description of Artificial Sequence: Synthetic oligonucleotide
cuggaccauggagaaauag

SEQ ID NO: 273140 - RNA, 19 nt, Artificial Sequence
  Description of Artificial Sequence: Synthetic oligonucleotide
cuugucgagccaaucugca

SEQ ID NO: 273141 - RNA, 19 nt, Artificial Sequence
  Description of Artificial Sequence: Synthetic oligonucleotide
agucaauaccuuggcccac

SEQ ID NO: 273142 - RNA, 19 nt, Artificial Sequence
  Description of Artificial Sequence: Synthetic oligonucleotide
agcagaugacaauccaaua

SEQ ID NO: 273143 - RNA, 19 nt, Artificial Sequence
  Description of Artificial Sequence: Synthetic oligonucleotide
gucaugauuugaugugcca

SEQ ID NO: 273144 - RNA, 19 nt, Artificial Sequence
  Description of Artificial Sequence: Synthetic oligonucleotide
caaucacaguucugauggc

SEQ ID NO: 273145 - RNA, 19 nt, Artificial Sequence
  Description of Artificial Sequence: Synthetic oligonucleotide
acuuuuaguucuaccaauu

SEQ ID NO: 273146 - RNA, 19 nt, Artificial Sequence
  Description of Artificial Sequence: Synthetic oligonucleotide
uaagucauguuuggccaaa

SEQ ID NO: 273147 - RNA, 19 nt, Artificial Sequence
  Description of Artificial Sequence: Synthetic oligonucleotide
uggcugcuaagacuucuuc

SEQ ID NO: 273148 - RNA, 19 nt, Artificial Sequence
  Description of Artificial Sequence: Synthetic oligonucleotide
gaugugccaccaaguaggc

SEQ ID NO: 273149 - RNA, 19 nt, Artificial Sequence
  Description of Artificial Sequence: Synthetic oligonucleotide
agcaaucacuacaaguaaa

SEQ ID NO: 273150 - RNA, 19 nt, Artificial Sequence
  Description of Artificial Sequence: Synthetic oligonucleotide
augaguggagcaaucacua

SEQ ID NO: 273151 - RNA, 19 nt, Artificial Sequence
  Description of Artificial Sequence: Synthetic oligonucleotide
aucacuggcuagccuggug

SEQ ID NO: 273152 - RNA, 19 nt, Artificial Sequence
  Description of Artificial Sequence: Synthetic oligonucleotide
gcugaugacuucuguguug

SEQ ID NO: 273153 - RNA, 19 nt, Artificial Sequence
  Description of Artificial Sequence: Synthetic oligonucleotide
auaccaacgguugguuucu

SEQ ID NO: 273154 - RNA, 19 nt, Artificial Sequence
  Description of Artificial Sequence: Synthetic oligonucleotide
ccauguacagcuugucgag

SEQ ID NO: 273155 - RNA, 19 nt, Artificial Sequence
  Description of Artificial Sequence: Synthetic oligonucleotide
agacaucaucugugagccg

SEQ ID NO: 273156 - RNA, 19 nt, Artificial Sequence
  Description of Artificial Sequence: Synthetic oligonucleotide
cugauucauuauagcauga

SEQ ID NO: 273157 - RNA, 19 nt, Artificial Sequence
  Description of Artificial Sequence: Synthetic oligonucleotide
cagcuuauauccugucuca

SEQ ID NO: 273158 - RNA, 19 nt, Artificial Sequence
  Description of Artificial Sequence: Synthetic oligonucleotide
agaguucccaggaccaugu

SEQ ID NO: 273159 - RNA, 19 nt, Artificial Sequence
  Description of Artificial Sequence: Synthetic oligonucleotide
augccgcuuaguauaauga

SEQ ID NO: 273160 - RNA, 19 nt, Artificial Sequence
  Description of Artificial Sequence: Synthetic oligonucleotide
ucaucuccaucaugccgcu

SEQ ID NO: 273161 - RNA, 19 nt, Artificial Sequence
  Description of Artificial Sequence: Synthetic oligonucleotide
agucauguuuggccaaaua

SEQ ID NO: 273162 - RNA, 19 nt, Artificial Sequence
  Description of Artificial Sequence: Synthetic oligonucleotide
ccaauaaggggcugacagc

SEQ ID NO: 273163 - RNA, 19 nt, Artificial Sequence
  Description of Artificial Sequence: Synthetic oligonucleotide
ccccguguaguaauaggcg

SEQ ID NO: 273164 - RNA, 19 nt, Artificial Sequence
  Description of Artificial Sequence: Synthetic oligonucleotide
guguaguaauaggcguacg

SEQ ID NO: 273165 - RNA, 19 nt, Artificial Sequence
  Description of Artificial Sequence: Synthetic oligonucleotide
augcaaucacaguucugau

SEQ ID NO: 273166 - RNA, 19 nt, Artificial Sequence
  Description of Artificial Sequence: Synthetic oligonucleotide
aaauccuaauggacugaaa

SEQ ID NO: 273167 - RNA, 19 nt, Artificial Sequence
  Description of Artificial Sequence: Synthetic oligonucleotide
ucaauaccuuggcccacau

SEQ ID NO: 273168 - RNA, 19 nt, Artificial Sequence
  Description of Artificial Sequence: Synthetic oligonucleotide
uuccaugauccugaugaua

SEQ ID NO: 273169 - RNA, 19 nt, Artificial Sequence
  Description of Artificial Sequence: Synthetic oligonucleotide
gacaauccaauaaggggcu

SEQ ID NO: 273170 - RNA, 19 nt, Artificial Sequence
  Description of Artificial Sequence: Synthetic oligonucleotide
uugucgagccaaucugcau

SEQ ID NO: 273171 - RNA, 19 nt, Artificial Sequence
  Description of Artificial Sequence: Synthetic oligonucleotide
caaucugcauagcgaaaca

SEQ ID NO: 273172 - RNA, 19 nt, Artificial Sequence
  Description of Artificial Sequence: Synthetic oligonucleotide
ccuuauuagugaaugaagu

SEQ ID NO: 273173 - RNA, 19 nt, Artificial Sequence
  Description of Artificial Sequence: Synthetic oligonucleotide
aaccagccuaucuccugau

SEQ ID NO: 273174 - RNA, 19 nt, Artificial Sequence
  Description of Artificial Sequence: Synthetic oligonucleotide
ccaacugucgugcacguca

SEQ ID NO: 273175 - RNA, 19 nt, Artificial Sequence
  Description of Artificial Sequence: Synthetic oligonucleotide
guacguggccaugucuucc

SEQ ID NO: 273176 - RNA, 19 nt, Artificial Sequence
  Description of Artificial Sequence: Synthetic oligonucleotide
uaggcguacguggccaugu

SEQ ID NO: 273177 - RNA, 19 nt, Artificial Sequence
  Description of Artificial Sequence: Synthetic oligonucleotide
aaguaggguugaaauuaaa

SEQ ID NO: 273178 - RNA, 19 nt, Artificial Sequence
  Description of Artificial Sequence: Synthetic oligonucleotide
caaccacuuauaaauccua

SEQ ID NO: 273179 - RNA, 19 nt, Artificial Sequence
  Description of Artificial Sequence: Synthetic oligonucleotide
uacagcuugucgagccaau

SEQ ID NO: 273180 - RNA, 19 nt, Artificial Sequence
  Description of Artificial Sequence: Synthetic oligonucleotide
agacugucaucuugaugaa

SEQ ID NO: 273181 - RNA, 19 nt, Artificial Sequence
  Description of Artificial Sequence: Synthetic oligonucleotide
gucgugcacgucaaaccag

SEQ ID NO: 273182 - RNA, 19 nt, Artificial Sequence
  Description of Artificial Sequence: Synthetic oligonucleotide
gaagucccauggagaacag

SEQ ID NO: 273183 - RNA, 19 nt, Artificial Sequence
  Description of Artificial Sequence: Synthetic oligonucleotide
uuacaaggguuagcuucca

SEQ ID NO: 273184 - RNA, 19 nt, Artificial Sequence
  Description of Artificial Sequence: Synthetic oligonucleotide
agaggaagugaagucccau

SEQ ID NO: 273185 - RNA, 19 nt, Artificial Sequence
  Description of Artificial Sequence: Synthetic oligonucleotide
acuggcuagccuggugguc

SEQ ID NO: 273186 - RNA, 19 nt, Artificial Sequence
  Description of Artificial Sequence: Synthetic oligonucleotide
auggaauauuuaaguacau

SEQ ID NO: 273187 - RNA, 19 nt, Artificial Sequence
  Description of Artificial Sequence: Synthetic oligonucleotide
auuagugaaugaagucaau

SEQ ID NO: 273188 - RNA, 19 nt, Artificial Sequence
  Description of Artificial Sequence: Synthetic oligonucleotide
cagaguucccaggaccaug

SEQ ID NO: 273189 - RNA, 19 nt, Artificial Sequence
  Description of Artificial Sequence: Synthetic oligonucleotide
ggugaggauccuuucaagu

SEQ ID NO: 273190 - RNA, 19 nt, Artificial Sequence
  Description of Artificial Sequence: Synthetic oligonucleotide
aggcguacguggccauguc

SEQ ID NO: 273191 - RNA, 19 nt, Artificial Sequence
  Description of Artificial Sequence: Synthetic oligonucleotide
cacuacaaguaaaaguguu

SEQ ID NO: 273192 - RNA, 19 nt, Artificial Sequence
  Description of Artificial Sequence: Synthetic oligonucleotide
gugaggauccuuucaaguu

SEQ ID NO: 273193 - RNA, 19 nt, Artificial Sequence
  Description of Artificial Sequence: Synthetic oligonucleotide
gcuuccaaccacuuauaaa

SEQ ID NO: 273194 - RNA, 19 nt, Artificial Sequence
  Description of Artificial Sequence: Synthetic oligonucleotide
ccaaauacugguuucugcu

SEQ ID NO: 273195 - RNA, 19 nt, Artificial Sequence
  Description of Artificial Sequence: Synthetic oligonucleotide
augcgccagugcuauuucu

SEQ ID NO: 273196 - RNA, 19 nt, Artificial Sequence
  Description of Artificial Sequence: Synthetic oligonucleotide
uucugaagacugucaucuu

SEQ ID NO: 273197 - RNA, 19 nt, Artificial Sequence
  Description of Artificial Sequence: Synthetic oligonucleotide
ccuaucuccugauucauua

SEQ ID NO: 273198 - RNA, 19 nt, Artificial Sequence
  Description of Artificial Sequence: Synthetic oligonucleotide
gcuugucgagccaaucugc

SEQ ID NO: 273199 - RNA, 19 nt, Artificial Sequence
  Description of Artificial Sequence: Synthetic oligonucleotide
aggcaacuaugagcacacc

SEQ ID NO: 273200 - RNA, 19 nt, Artificial Sequence
  Description of Artificial Sequence: Synthetic oligonucleotide
acaauccaauaaggggcug

SEQ ID NO: 273201 - RNA, 19 nt, Artificial Sequence
  Description of Artificial Sequence: Synthetic oligonucleotide
acgguugguuucuuuucuu

SEQ ID NO: 273202 - RNA, 19 nt, Artificial Sequence
  Description of Artificial Sequence: Synthetic oligonucleotide
aacugucgugcacgucaaa

SEQ ID NO: 273203 - RNA, 19 nt, Artificial Sequence
  Description of Artificial Sequence: Synthetic oligonucleotide
gagcuggcauucccagcug

SEQ ID NO: 273204 - RNA, 19 nt, Artificial Sequence
  Description of Artificial Sequence: Synthetic oligonucleotide
cgucaaaccagccuaucuc

SEQ ID NO: 273205 - RNA, 19 nt, Artificial Sequence
  Description of Artificial Sequence: Synthetic oligonucleotide
cgcuuaguauaaugagugg

SEQ ID NO: 273206 - RNA, 19 nt, Artificial Sequence
  Description of Artificial Sequence: Synthetic oligonucleotide
aggagcaaaugagcuggca

SEQ ID NO: 273207 - RNA, 19 nt, Artificial Sequence
  Description of Artificial Sequence: Synthetic oligonucleotide
gucaauaccuuggcccaca

SEQ ID NO: 273208 - RNA, 19 nt, Artificial Sequence
  Description of Artificial Sequence: Synthetic oligonucleotide
cucagauaaugcaauuauu

SEQ ID NO: 273209 - RNA, 19 nt, Artificial Sequence
  Description of Artificial Sequence: Synthetic oligonucleotide
gagaggaagugaaguccca

SEQ ID NO: 273210 - RNA, 19 nt, Artificial Sequence
  Description of Artificial Sequence: Synthetic oligonucleotide
accaauccccguguaguaa

SEQ ID NO: 273211 - RNA, 19 nt, Artificial Sequence
  Description of Artificial Sequence: Synthetic oligonucleotide
accgaagacaacagcugaa

SEQ ID NO: 273212 - RNA, 19 nt, Artificial Sequence
  Description of Artificial Sequence: Synthetic oligonucleotide
gcaucacuggcuagccugg

SEQ ID NO: 273213 - RNA, 19 nt, Artificial Sequence
  Description of Artificial Sequence: Synthetic oligonucleotide
cuccccaacugucgugcac

SEQ ID NO: 273214 - RNA, 19 nt, Artificial Sequence
  Description of Artificial Sequence: Synthetic oligonucleotide
accaacgguugguuucuuu

SEQ ID NO: 273215 - RNA, 19 nt, Artificial Sequence
  Description of Artificial Sequence: Synthetic oligonucleotide
gugaagucccauggagaac

SEQ ID NO: 273216 - RNA, 19 nt, Artificial Sequence
  Description of Artificial Sequence: Synthetic oligonucleotide
ccaucauaauuuugguaga

SEQ ID NO: 273217 - RNA, 19 nt, Artificial Sequence
  Description of Artificial Sequence: Synthetic oligonucleotide
accugaauguaggcaacua

SEQ ID NO: 273218 - RNA, 19 nt, Artificial Sequence
  Description of Artificial Sequence: Synthetic oligonucleotide
uaccaucaacaguguucac

SEQ ID NO: 273219 - RNA, 19 nt, Artificial Sequence
  Description of Artificial Sequence: Synthetic oligonucleotide
uccaaccaauuaggcuuca

SEQ ID NO: 273220 - RNA, 19 nt, Artificial Sequence
  Description of Artificial Sequence: Synthetic oligonucleotide
agccuaucuccugauucau

SEQ ID NO: 273221 - RNA, 19 nt, Artificial Sequence
  Description of Artificial Sequence: Synthetic oligonucleotide
ggccaaauacugguuucug

SEQ ID NO: 273222 - RNA, 19 nt, Artificial Sequence
  Description of Artificial Sequence: Synthetic oligonucleotide
cagcugaaaauaccaacau

SEQ ID NO: 273223 - RNA, 19 nt, Artificial Sequence
  Description of Artificial Sequence: Synthetic oligonucleotide
gucaaugcgccagugcuau

SEQ ID NO: 273224 - RNA, 19 nt, Artificial Sequence
  Description of Artificial Sequence: Synthetic oligonucleotide
aucaugccgcuuaguauaa

SEQ ID NO: 273225 - RNA, 19 nt, Artificial Sequence
  Description of Artificial Sequence: Synthetic oligonucleotide
gugcacgucaaaccagccu

SEQ ID NO: 273226 - RNA, 19 nt, Artificial Sequence
  Description of Artificial Sequence: Synthetic oligonucleotide
acaguucugauggcugcua

SEQ ID NO: 273227 - RNA, 19 nt, Artificial Sequence
  Description of Artificial Sequence: Synthetic oligonucleotide
ucgagccaaucugcauagc

SEQ ID NO: 273228 - RNA, 19 nt, Artificial Sequence
  Description of Artificial Sequence: Synthetic oligonucleotide
cugccgcugaugacuucug

SEQ ID NO: 273229 - RNA, 19 nt, Artificial Sequence
  Description of Artificial Sequence: Synthetic oligonucleotide
ggguguugagcuccccaac

SEQ ID NO: 273230 - RNA, 19 nt, Artificial Sequence
  Description of Artificial Sequence: Synthetic oligonucleotide
cagcuugucgagccaaucu

SEQ ID NO: 273231 - RNA, 19 nt, Artificial Sequence
  Description of Artificial Sequence: Synthetic oligonucleotide
cguguaguaauaggcguac

SEQ ID NO: 273232 - RNA, 19 nt, Artificial Sequence
  Description of Artificial Sequence: Synthetic oligonucleotide
caacugucgugcacgucaa

SEQ ID NO: 273233 - RNA, 19 nt, Artificial Sequence
  Description of Artificial Sequence: Synthetic oligonucleotide
accagccuaucuccugauu

SEQ ID NO: 273234 - RNA, 19 nt, Artificial Sequence
  Description of Artificial Sequence: Synthetic oligonucleotide
ccaaccacuuauaaauccu

SEQ ID NO: 273235 - RNA, 19 nt, Artificial Sequence
  Description of Artificial Sequence: Synthetic oligonucleotide
cacgucaaaccagccuauc

SEQ ID NO: 273236 - RNA, 19 nt, Artificial Sequence
  Description of Artificial Sequence: Synthetic oligonucleotide
ccaugauccugaugauaug

SEQ ID NO: 273237 - RNA, 19 nt, Artificial Sequence
  Description of Artificial Sequence: Synthetic oligonucleotide
caguucugauggcugcuaa

SEQ ID NO: 273238 - RNA, 19 nt, Artificial Sequence
  Description of Artificial Sequence: Synthetic oligonucleotide
caccaauccccguguagua

SEQ ID NO: 273239 - RNA, 19 nt, Artificial Sequence
  Description of Artificial Sequence: Synthetic oligonucleotide
ggcugacagccaaaauuac

SEQ ID NO: 273240 - RNA, 19 nt, Artificial Sequence
  Description of Artificial Sequence: Synthetic oligonucleotide
ucaugccgcuuaguauaau

SEQ ID NO: 273241 - RNA, 19 nt, Artificial Sequence
  Description of Artificial Sequence: Synthetic oligonucleotide
caauccccguguaguaaua

SEQ ID NO: 273242 - RNA, 19 nt, Artificial Sequence
  Description of Artificial Sequence: Synthetic oligonucleotide
augucaggucgggugggau

SEQ ID NO: 273243 - RNA, 19 nt, Artificial Sequence
  Description of Artificial Sequence: Synthetic oligonucleotide
gcacuuuauggaauauuua

SEQ ID NO: 273244 - RNA, 19 nt, Artificial Sequence
  Description of Artificial Sequence: Synthetic oligonucleotide
ucaaugcgccagugcuauu

SEQ ID NO: 273245 - RNA, 19 nt, Artificial Sequence
  Description of Artificial Sequence: Synthetic oligonucleotide
gccgcuuaguauaaugagu

SEQ ID NO: 273246 - RNA, 19 nt, Artificial Sequence
  Description of Artificial Sequence: Synthetic oligonucleotide
gccuggaccauggagaaau

SEQ ID NO: 273247 - RNA, 19 nt, Artificial Sequence
  Description of Artificial Sequence: Synthetic oligonucleotide
agacugccgcugaugacuu

SEQ ID NO: 273248 - RNA, 19 nt, Artificial Sequence
  Description of Artificial Sequence: Synthetic oligonucleotide
gacuucuguguuguugauu

SEQ ID NO: 273249 - RNA, 19 nt, Artificial Sequence
  Description of Artificial Sequence: Synthetic oligonucleotide
caaugcgccagugcuauuu

SEQ ID NO: 273250 - RNA, 19 nt, Artificial Sequence
  Description of Artificial Sequence: Synthetic oligonucleotide
gcaccaauccccguguagu

SEQ ID NO: 273251 - RNA, 19 nt, Artificial Sequence
  Description of Artificial Sequence: Synthetic oligonucleotide
cgugcacgucaaaccagcc

SEQ ID NO: 273252 - RNA, 19 nt, Artificial Sequence
  Description of Artificial Sequence: Synthetic oligonucleotide
ccagacugccgcugaugac

SEQ ID NO: 273253 - RNA, 19 nt, Artificial Sequence
  Description of Artificial Sequence: Synthetic oligonucleotide
cugucuaauuuuguuuauu

SEQ ID NO: 273254 - RNA, 19 nt, Artificial Sequence
  Description of Artificial Sequence: Synthetic oligonucleotide
gaguucccaggaccaugua

SEQ ID NO: 273255 - RNA, 19 nt, Artificial Sequence
  Description of Artificial Sequence: Synthetic oligonucleotide
gcggcaucacuggcuagcc

SEQ ID NO: 273256 - RNA, 19 nt, Artificial Sequence
  Description of Artificial Sequence: Synthetic oligonucleotide
ccgcugaugacuucugugu

SEQ ID NO: 273257 - RNA, 19 nt, Artificial Sequence
  Description of Artificial Sequence: Synthetic oligonucleotide
gcauagcgaaacaucccaa

SEQ ID NO: 273258 - RNA, 19 nt, Artificial Sequence
  Description of Artificial Sequence: Synthetic oligonucleotide
cccguguaguaauaggcgu

SEQ ID NO: 273259 - RNA, 19 nt, Artificial Sequence
  Description of Artificial Sequence: Synthetic oligonucleotide
ccguguaguaauaggcgua

SEQ ID NO: 273260 - RNA, 19 nt, Artificial Sequence
  Description of Artificial Sequence: Synthetic oligonucleotide
ccugaauguaggcaacuau

SEQ ID NO: 273261 - RNA, 19 nt, Artificial Sequence
  Description of Artificial Sequence: Synthetic oligonucleotide
cguacguggccaugucuuc

SEQ ID NO: 273262 - RNA, 19 nt, Artificial Sequence
  Description of Artificial Sequence: Synthetic oligonucleotide
gcuuuugcauaugccugaa

SEQ ID NO: 273263 - RNA, 19 nt, Artificial Sequence
  Description of Artificial Sequence: Synthetic oligonucleotide
gucgggugggauaguugaa

SEQ ID NO: 273264 - RNA, 19 nt, Artificial Sequence
  Description of Artificial Sequence: Synthetic oligonucleotide
ggucaaugcgccagugcua

SEQ ID NO: 273265 - RNA, 19 nt, Artificial Sequence
  Description of Artificial Sequence: Synthetic oligonucleotide
ccaacgguugguuucuuuu

SEQ ID NO: 273266 - RNA, 19 nt, Artificial Sequence
  Description of Artificial Sequence: Synthetic oligonucleotide
ggguuagcuuccaaccacu

SEQ ID NO: 273267 - RNA, 19 nt, Artificial Sequence
  Description of Artificial Sequence: Synthetic oligonucleotide
ggcguacguggccaugucu

SEQ ID NO: 273268 - RNA, 19 nt, Artificial Sequence
  Description of Artificial Sequence: Synthetic oligonucleotide
ccaucaugccgcuuaguau

SEQ ID NO: 273269 - RNA, 19 nt, Artificial Sequence
  Description of Artificial Sequence: Synthetic oligonucleotide
uaccaacgguugguuucuu

SEQ ID NO: 273270 - RNA, 19 nt, Artificial Sequence
  Description of Artificial Sequence: Synthetic oligonucleotide
gcgaaacaucccaaauaua

SEQ ID NO: 273271 - RNA, 19 nt, Artificial Sequence
  Description of Artificial Sequence: Synthetic oligonucleotide
cgaaguuucugaagacugu

SEQ ID NO: 273272 - RNA, 19 nt, Artificial Sequence
  Description of Artificial Sequence: Synthetic oligonucleotide
ccaauccccguguaguaau

SEQ ID NO: 273273 - RNA, 19 nt, Artificial Sequence
  Description of Artificial Sequence: Synthetic oligonucleotide
gcgccagugcuauuucuau

SEQ ID NO: 273274 - RNA, 19 nt, Artificial Sequence
  Description of Artificial Sequence: Synthetic oligonucleotide
ccggguguugagcucccca

SEQ ID NO: 273275 - RNA, 19 nt, Artificial Sequence
  Description of Artificial Sequence: Synthetic oligonucleotide
gccaggcaccaaaaugaaa

SEQ ID NO: 273276 - RNA, 19 nt, Artificial Sequence
  Description of Artificial Sequence: Synthetic oligonucleotide
gcguacguggccaugucuu

SEQ ID NO: 273277 - RNA, 19 nt, Artificial Sequence
  Description of Artificial Sequence: Synthetic oligonucleotide
gcuccccaacugucgugca

SEQ ID NO: 273278 - RNA, 19 nt, Artificial Sequence
  Description of Artificial Sequence: Synthetic oligonucleotide
cagcaccaauccccgugua

SEQ ID NO: 273279 - RNA, 19 nt, Artificial Sequence
  Description of Artificial Sequence: Synthetic oligonucleotide
ccagcaccaauccccgugu

SEQ ID NO: 273280 - RNA, 19 nt, Artificial Sequence
  Description of Artificial Sequence: Synthetic oligonucleotide
gguuagcuuccaaccacuu

SEQ ID NO: 273281 - RNA, 19 nt, Artificial Sequence
  Description of Artificial Sequence: Synthetic oligonucleotide
caucugugagccggguguu

SEQ ID NO: 273282 - RNA, 19 nt, Artificial Sequence
  Description of Artificial Sequence: Synthetic oligonucleotide
cccaacugucgugcacguc

SEQ ID NO: 273283 - RNA, 19 nt, Artificial Sequence
  Description of Artificial Sequence: Synthetic oligonucleotide
gcacgucaaaccagccuau

SEQ ID NO: 273284 - RNA, 19 nt, Artificial Sequence
  Description of Artificial Sequence: Synthetic oligonucleotide
cgcuuggugaggauccuuu

SEQ ID NO: 273285 - RNA, 19 nt, Artificial Sequence
  Description of Artificial Sequence: Synthetic oligonucleotide
gccuaucuccugauucauu

SEQ ID NO: 273286 - RNA, 19 nt, Artificial Sequence
  Description of Artificial Sequence: Synthetic oligonucleotide
ccccaacugucgugcacgu

SEQ ID NO: 273287 - RNA, 19 nt, Artificial Sequence
  Description of Artificial Sequence: Synthetic oligonucleotide
cgcugaugacuucuguguu

SEQ ID NO: 273288 - RNA, 19 nt, Artificial Sequence
  Description of Artificial Sequence: Synthetic oligonucleotide
cggcaucacuggcuagccu

SEQ ID NO: 273289 - RNA, 19 nt, Artificial Sequence
  Description of Artificial Sequence: Synthetic oligonucleotide
uuaauguucagcaagacgu

SEQ ID NO: 273290 - RNA, 19 nt, Artificial Sequence
  Description of Artificial Sequence: Synthetic oligonucleotide
aaacauucuaaccacacuc

SEQ ID NO: 273291 - RNA, 19 nt, Artificial Sequence
  Description of Artificial Sequence: Synthetic oligonucleotide
aaaugaagugaccaucucc

SEQ ID NO: 273292 - RNA, 19 nt, Artificial Sequence
  Description of Artificial Sequence: Synthetic oligonucleotide
aaaguuauuuaagauaaac

SEQ ID NO: 273293 - RNA, 19 nt, Artificial Sequence
  Description of Artificial Sequence: Synthetic oligonucleotide
auucuaaccacacucaugg

SEQ ID NO: 273294 - RNA, 19 nt, Artificial Sequence
  Description of Artificial Sequence: Synthetic oligonucleotide
uuuggaaugagacaugucu

SEQ ID NO: 273295 - RNA, 19 nt, Artificial Sequence
  Description of Artificial Sequence: Synthetic oligonucleotide
agaacaaccagcuugacgu

SEQ ID NO: 273296 - RNA, 19 nt, Artificial Sequence
  Description of Artificial Sequence: Synthetic oligonucleotide
aauaauaauguacccucuc

SEQ ID NO: 273297 - RNA, 19 nt, Artificial Sequence
  Description of Artificial Sequence: Synthetic oligonucleotide
aaaucuaucaacugcuuga

SEQ ID NO: 273298 - RNA, 19 nt, Artificial Sequence
  Description of Artificial Sequence: Synthetic oligonucleotide
acacuuaauauuuaguaag

SEQ ID NO: 273299 - RNA, 19 nt, Artificial Sequence
  Description of Artificial Sequence: Synthetic oligonucleotide
aaaagaucuaaacaaugga

SEQ ID NO: 273300 - RNA, 19 nt, Artificial Sequence
  Description of Artificial Sequence: Synthetic oligonucleotide
uuaggcaauuaaaacaucc

SEQ ID NO: 273301 - RNA, 19 nt, Artificial Sequence
  Description of Artificial Sequence: Synthetic oligonucleotide
gaaaagaucuaaacaaugg

SEQ ID NO: 273302 - RNA, 19 nt, Artificial Sequence
  Description of Artificial Sequence: Synthetic oligonucleotide
ucauuauuaaacugggaag

SEQ ID NO: 273303 - RNA, 19 nt, Artificial Sequence
  Description of Artificial Sequence: Synthetic oligonucleotide
aacaauggauauuaaauaa

SEQ ID NO: 273304 - RNA, 19 nt, Artificial Sequence
  Description of Artificial Sequence: Synthetic oligonucleotide
acuaguaauugacaaguac

SEQ ID NO: 273305 - RNA, 19 nt, Artificial Sequence
  Description of Artificial Sequence: Synthetic oligonucleotide
ugugcgauggcgcagcucg

SEQ ID NO: 273306 - RNA, 19 nt, Artificial Sequence
  Description of Artificial Sequence: Synthetic oligonucleotide
aaauacuaguaauugacaa

SEQ ID NO: 273307 - RNA, 19 nt, Artificial Sequence
  Description of Artificial Sequence: Synthetic oligonucleotide
uuggagaucauuuuacugc

SEQ ID NO: 273308 - RNA, 19 nt, Artificial Sequence
  Description of Artificial Sequence: Synthetic oligonucleotide
aacauucugguguaauaac

SEQ ID NO: 273309 - RNA, 19 nt, Artificial Sequence
  Description of Artificial Sequence: Synthetic oligonucleotide
cauuacacuacuaacaguc

SEQ ID NO: 273310 - RNA, 19 nt, Artificial Sequence
  Description of Artificial Sequence: Synthetic oligonucleotide
uuuucuagccacauuucgg

SEQ ID NO: 273311 - RNA, 19 nt, Artificial Sequence
  Description of Artificial Sequence: Synthetic oligonucleotide
uccauuacacuacuaacag

SEQ ID NO: 273312 - RNA, 19 nt, Artificial Sequence
  Description of Artificial Sequence: Synthetic oligonucleotide
ugugcaauaggcuauuuac

SEQ ID NO: 273313 - RNA, 19 nt, Artificial Sequence
  Description of Artificial Sequence: Synthetic oligonucleotide
uacucugccccauacaugg

SEQ ID NO: 273314 - RNA, 19 nt, Artificial Sequence
  Description of Artificial Sequence: Synthetic oligonucleotide
aaggcaaaaugguugucac

SEQ ID NO: 273315 - RNA, 19 nt, Artificial Sequence
  Description of Artificial Sequence: Synthetic oligonucleotide
uugaaaagcagaacaacca

SEQ ID NO: 273316 - RNA, 19 nt, Artificial Sequence
  Description of Artificial Sequence: Synthetic oligonucleotide
uuucccaugaaccuuacaa

SEQ ID NO: 273317 - RNA, 19 nt, Artificial Sequence
  Description of Artificial Sequence: Synthetic oligonucleotide
acaagauagaacaaaacag

SEQ ID NO: 273318 - RNA, 19 nt, Artificial Sequence
  Description of Artificial Sequence: Synthetic oligonucleotide
uacaaguaaugccaaaccc

SEQ ID NO: 273319 - RNA, 19 nt, Artificial Sequence
  Description of Artificial Sequence: Synthetic oligonucleotide
aaugaugcgcccucggguc

SEQ ID NO: 273320 - RNA, 19 nt, Artificial Sequence
  Description of Artificial Sequence: Synthetic oligonucleotide
aauuccacaguaaauacca

SEQ ID NO: 273321 - RNA, 19 nt, Artificial Sequence
  Description of Artificial Sequence: Synthetic oligonucleotide
acguugaugcuuucgaccc

SEQ ID NO: 273322 - RNA, 19 nt, Artificial Sequence
  Description of Artificial Sequence: Synthetic oligonucleotide
aaucuuuggaucguacugg

SEQ ID NO: 273323 - RNA, 19 nt, Artificial Sequence
  Description of Artificial Sequence: Synthetic oligonucleotide
ucuaucaacugcuugaaau

SEQ ID NO: 273324 - RNA, 19 nt, Artificial Sequence
  Description of Artificial Sequence: Synthetic oligonucleotide
uucauuagggguuugucug

SEQ ID NO: 273325 - RNA, 19 nt, Artificial Sequence
  Description of Artificial Sequence: Synthetic oligonucleotide
agacccuacuucuagggcc

SEQ ID NO: 273326 - RNA, 19 nt, Artificial Sequence
  Description of Artificial Sequence: Synthetic oligonucleotide
aauuaggcaauuaaaacau

SEQ ID NO: 273327 - RNA, 19 nt, Artificial Sequence
  Description of Artificial Sequence: Synthetic oligonucleotide
uucugauuuggaaugagac

SEQ ID NO: 273328 - RNA, 19 nt, Artificial Sequence
  Description of Artificial Sequence: Synthetic oligonucleotide
uaauguacccucucuaaag

SEQ ID NO: 273329 - RNA, 19 nt, Artificial Sequence
  Description of Artificial Sequence: Synthetic oligonucleotide
aaagggaucagaauguuga

SEQ ID NO: 273330 - RNA, 19 nt, Artificial Sequence
  Description of Artificial Sequence: Synthetic oligonucleotide
uugaaagcgcauaaaggag

SEQ ID NO: 273331 - RNA, 19 nt, Artificial Sequence
  Description of Artificial Sequence: Synthetic oligonucleotide
uaaauacuaguaauugaca

SEQ ID NO: 273332 - RNA, 19 nt, Artificial Sequence
  Description of Artificial Sequence: Synthetic oligonucleotide
gaaauagaucugcugaccc

SEQ ID NO: 273333 - RNA, 19 nt, Artificial Sequence
  Description of Artificial Sequence: Synthetic oligonucleotide
cuuaauguucagcaagacg

SEQ ID NO: 273334 - RNA, 19 nt, Artificial Sequence
  Description of Artificial Sequence: Synthetic oligonucleotide
uuaagauaaacaagauaga

SEQ ID NO: 273335 - RNA, 19 nt, Artificial Sequence
  Description of Artificial Sequence: Synthetic oligonucleotide
aaaaugaagugaccaucuc

SEQ ID NO: 273336 - RNA, 19 nt, Artificial Sequence
  Description of Artificial Sequence: Synthetic oligonucleotide
cuugaaagcgcauaaagga

SEQ ID NO: 273337 - RNA, 19 nt, Artificial Sequence
  Description of Artificial Sequence: Synthetic oligonucleotide
aagacccuacuucuagggc

SEQ ID NO: 273338 - RNA, 19 nt, Artificial Sequence
  Description of Artificial Sequence: Synthetic oligonucleotide
aaacccauaguuucuccag

SEQ ID NO: 273339 - RNA, 19 nt, Artificial Sequence
  Description of Artificial Sequence: Synthetic oligonucleotide
gaguauaaguauuucccag

SEQ ID NO: 273340 - RNA, 19 nt, Artificial Sequence
  Description of Artificial Sequence: Synthetic oligonucleotide
ugguaaacauaaauacuag

SEQ ID NO: 273341 - RNA, 19 nt, Artificial Sequence
  Description of Artificial Sequence: Synthetic oligonucleotide
uguguaagaaaaccacuug

SEQ ID NO: 273342 - RNA, 19 nt, Artificial Sequence
  Description of Artificial Sequence: Synthetic oligonucleotide
cuacuuaauguucagcaag

SEQ ID NO: 273343 - RNA, 19 nt, Artificial Sequence
  Description of Artificial Sequence: Synthetic oligonucleotide
uugucaaccuaaauaauaa

SEQ ID NO: 273344 - RNA, 19 nt, Artificial Sequence
  Description of Artificial Sequence: Synthetic oligonucleotide
aauguacccucucuaaaga

SEQ ID NO: 273345 - RNA, 19 nt, Artificial Sequence
  Description of Artificial Sequence: Synthetic oligonucleotide
cucauuaggacgauuuccc

SEQ ID NO: 273346 - RNA, 19 nt, Artificial Sequence
  Description of Artificial Sequence: Synthetic oligonucleotide
aagauagaacaaaacagug

SEQ ID NO: 273347 - RNA, 19 nt, Artificial Sequence
  Description of Artificial Sequence: Synthetic oligonucleotide
auugacaaguacucaaaug

SEQ ID NO: 273348 - RNA, 19 nt, Artificial Sequence
  Description of Artificial Sequence: Synthetic oligonucleotide
uaguaauugacaaguacuc

SEQ ID NO: 273349 - RNA, 19 nt, Artificial Sequence
  Description of Artificial Sequence: Synthetic oligonucleotide
uuauacaggagcagcaggu

SEQ ID NO: 273350 - RNA, 19 nt, Artificial Sequence
  Description of Artificial Sequence: Synthetic oligonucleotide
uggcaaaucuaucaacugc

SEQ ID NO: 273351 - RNA, 19 nt, Artificial Sequence
  Description of Artificial Sequence: Synthetic oligonucleotide
ucgauaaucccucaucagu

SEQ ID NO: 273352 - RNA, 19 nt, Artificial Sequence
  Description of Artificial Sequence: Synthetic oligonucleotide
aaauaagcagaucuccaau

SEQ ID NO: 273353 - RNA, 19 nt, Artificial Sequence
  Description of Artificial Sequence: Synthetic oligonucleotide
uauacucugccccauacau

SEQ ID NO: 273354 - RNA, 19 nt, Artificial Sequence
  Description of Artificial Sequence: Synthetic oligonucleotide
aaaggcaaacaucgaucac

SEQ ID NO: 273355 - RNA, 19 nt, Artificial Sequence
  Description of Artificial Sequence: Synthetic oligonucleotide
ugaguauaaguauuuccca

SEQ ID NO: 273356 - RNA, 19 nt, Artificial Sequence
  Description of Artificial Sequence: Synthetic oligonucleotide
aagucaaugaugcgcccuc

SEQ ID NO: 273357 - RNA, 19 nt, Artificial Sequence
  Description of Artificial Sequence: Synthetic oligonucleotide
agcaagacguguucaaagg

SEQ ID NO: 273358 - RNA, 19 nt, Artificial Sequence
  Description of Artificial Sequence: Synthetic oligonucleotide
agcucggcgaucuugcggc

SEQ ID NO: 273359 - RNA, 19 nt, Artificial Sequence
  Description of Artificial Sequence: Synthetic oligonucleotide
uacaaacaugucaaaacgu

SEQ ID NO: 273360 - RNA, 19 nt, Artificial Sequence
  Description of Artificial Sequence: Synthetic oligonucleotide
agaguaaagacucauuauu

SEQ ID NO: 273361 - RNA, 19 nt, Artificial Sequence
  Description of Artificial Sequence: Synthetic oligonucleotide
ucugauuuggaaugagaca

SEQ ID NO: 273362 - RNA, 19 nt, Artificial Sequence
  Description of Artificial Sequence: Synthetic oligonucleotide
ugcaauaggcuauuuacaa

SEQ ID NO: 273363 - RNA, 19 nt, Artificial Sequence
  Description of Artificial Sequence: Synthetic oligonucleotide
uuacuuuuguccccaaaac

SEQ ID NO: 273364 - RNA, 19 nt, Artificial Sequence
  Description of Artificial Sequence: Synthetic oligonucleotide
ucguacuggcuaaagauga

SEQ ID NO: 273365 - RNA, 19 nt, Artificial Sequence
  Description of Artificial Sequence: Synthetic oligonucleotide
uaugcuucuuauacaggag

SEQ ID NO: 273366 - RNA, 19 nt, Artificial Sequence
  Description of Artificial Sequence: Synthetic oligonucleotide
aucuuuggaucguacuggc

SEQ ID NO: 273367 - RNA, 19 nt, Artificial Sequence
  Description of Artificial Sequence: Synthetic oligonucleotide
aguauaaguauuucccagu

SEQ ID NO: 273368 - RNA, 19 nt, Artificial Sequence
  Description of Artificial Sequence: Synthetic oligonucleotide
auagccauacuggaucucc

SEQ ID NO: 273369 - RNA, 19 nt, Artificial Sequence
  Description of Artificial Sequence: Synthetic oligonucleotide
cauuaggacgauuucccgg

SEQ ID NO: 273370 - RNA, 19 nt, Artificial Sequence
  Description of Artificial Sequence: Synthetic oligonucleotide
gaagaguaaagacucauua

SEQ ID NO: 273371 - RNA, 19 nt, Artificial Sequence
  Description of Artificial Sequence: Synthetic oligonucleotide
uggacaaccuuguuaaaga

SEQ ID NO: 273372 - RNA, 19 nt, Artificial Sequence
  Description of Artificial Sequence: Synthetic oligonucleotide
ucaaugaugcgcccucggg

SEQ ID NO: 273373 - RNA, 19 nt, Artificial Sequence
  Description of Artificial Sequence: Synthetic oligonucleotide
aagcgcauaaaggagggag

SEQ ID NO: 273374 - RNA, 19 nt, Artificial Sequence
  Description of Artificial Sequence: Synthetic oligonucleotide
uugggauccagauuggggu

SEQ ID NO: 273375 - RNA, 19 nt, Artificial Sequence
  Description of Artificial Sequence: Synthetic oligonucleotide
cucauuauuaaacugggaa

SEQ ID NO: 273376 - RNA, 19 nt, Artificial Sequence
  Description of Artificial Sequence: Synthetic oligonucleotide
aacgucuucaacccagccu

SEQ ID NO: 273377 - RNA, 19 nt, Artificial Sequence
  Description of Artificial Sequence: Synthetic oligonucleotide
ucuaaccacacucauggua

SEQ ID NO: 273378 - RNA, 19 nt, Artificial Sequence
  Description of Artificial Sequence: Synthetic oligonucleotide
uggacccauacguugaugc

SEQ ID NO: 273379 - RNA, 19 nt, Artificial Sequence
  Description of Artificial Sequence: Synthetic oligonucleotide
ugacccaacacuguguuug

SEQ ID NO: 273380 - RNA, 19 nt, Artificial Sequence
  Description of Artificial Sequence: Synthetic oligonucleotide
auuaggacgauuucccggu

SEQ ID NO: 273381 - RNA, 19 nt, Artificial Sequence
  Description of Artificial Sequence: Synthetic oligonucleotide
ucauuaggacgauuucccg

SEQ ID NO: 273382 - RNA, 19 nt, Artificial Sequence
  Description of Artificial Sequence: Synthetic oligonucleotide
uaauugacaaguacucaaa

SEQ ID NO: 273383 - RNA, 19 nt, Artificial Sequence
  Description of Artificial Sequence: Synthetic oligonucleotide
aauaccaggucaacaucac

SEQ ID NO: 273384 - RNA, 19 nt, Artificial Sequence
  Description of Artificial Sequence: Synthetic oligonucleotide
uuauggaucucugugcuac

SEQ ID NO: 273385 - RNA, 19 nt, Artificial Sequence
  Description of Artificial Sequence: Synthetic oligonucleotide
cauacaugggguucacacg

SEQ ID NO: 273386 - RNA, 19 nt, Artificial Sequence
  Description of Artificial Sequence: Synthetic oligonucleotide
aagaucuaaacaauggaua

SEQ ID NO: 273387 - RNA, 19 nt, Artificial Sequence
  Description of Artificial Sequence: Synthetic oligonucleotide
aagagaacagagccuaaau

SEQ ID NO: 273388 - RNA, 19 nt, Artificial Sequence
  Description of Artificial Sequence: Synthetic oligonucleotide
caaucuuuggaucguacug

SEQ ID NO: 273389 - RNA, 19 nt, Artificial Sequence
  Description of Artificial Sequence: Synthetic oligonucleotide
auacguugaugcuuucgac

SEQ ID NO: 273390 - RNA, 19 nt, Artificial Sequence
  Description of Artificial Sequence: Synthetic oligonucleotide
uuuagcuugcauccauuac

SEQ ID NO: 273391 - RNA, 19 nt, Artificial Sequence
  Description of Artificial Sequence: Synthetic oligonucleotide
uccugaacgucuucaaccc

SEQ ID NO: 273392 - RNA, 19 nt, Artificial Sequence
  Description of Artificial Sequence: Synthetic oligonucleotide
gauauacucugccccauac

SEQ ID NO: 273393 - RNA, 19 nt, Artificial Sequence
  Description of Artificial Sequence: Synthetic oligonucleotide
guaauugacaaguacucaa

SEQ ID NO: 273394 - RNA, 19 nt, Artificial Sequence
  Description of Artificial Sequence: Synthetic oligonucleotide
cuggcuaaagaugauuggg

SEQ ID NO: 273395 - RNA, 19 nt, Artificial Sequence
  Description of Artificial Sequence: Synthetic oligonucleotide
auuuaguaagaugggaaug

SEQ ID NO: 273396 - RNA, 19 nt, Artificial Sequence
  Description of Artificial Sequence: Synthetic oligonucleotide
gaauuccacaguaaauacc

SEQ ID NO: 273397 - RNA, 19 nt, Artificial Sequence
  Description of Artificial Sequence: Synthetic oligonucleotide
gaauuagacaggaaugaca

SEQ ID NO: 273398 - RNA, 19 nt, Artificial Sequence
  Description of Artificial Sequence: Synthetic oligonucleotide
uuguuaaagagguccacau

SEQ ID NO: 273399 - RNA, 19 nt, Artificial Sequence
  Description of Artificial Sequence: Synthetic oligonucleotide
uuuuguccccaaaacacau

SEQ ID NO: 273400 - RNA, 19 nt, Artificial Sequence
  Description of Artificial Sequence: Synthetic oligonucleotide
cuugacucgauaaucccuc

SEQ ID NO: 273401 - RNA, 19 nt, Artificial Sequence
  Description of Artificial Sequence: Synthetic oligonucleotide
acgacgauagccauacugg

SEQ ID NO: 273402 - RNA, 19 nt, Artificial Sequence
  Description of Artificial Sequence: Synthetic oligonucleotide
cauuuuauacuguuuggga

SEQ ID NO: 273403 - RNA, 19 nt, Artificial Sequence
  Description of Artificial Sequence: Synthetic oligonucleotide
uugggaaauagaucugcug

SEQ ID NO: 273404 - RNA, 19 nt, Artificial Sequence
  Description of Artificial Sequence: Synthetic oligonucleotide
gaguguucacguuuucugc

SEQ ID NO: 273405 - RNA, 19 nt, Artificial Sequence
  Description of Artificial Sequence: Synthetic oligonucleotide
augguaaacauaaauacua

SEQ ID NO: 273406 - RNA, 19 nt, Artificial Sequence
  Description of Artificial Sequence: Synthetic oligonucleotide
aucuaaacaauggauauua

SEQ ID NO: 273407 - RNA, 19 nt, Artificial Sequence
  Description of Artificial Sequence: Synthetic oligonucleotide
acgacuccaaccuccuggc

SEQ ID NO: 273408 - RNA, 19 nt, Artificial Sequence
  Description of Artificial Sequence: Synthetic oligonucleotide
aaauacaaguaaugccaaa

SEQ ID NO: 273409 - RNA, 19 nt, Artificial Sequence
  Description of Artificial Sequence: Synthetic oligonucleotide
cuaguaauugacaaguacu

SEQ ID NO: 273410 - RNA, 19 nt, Artificial Sequence
  Description of Artificial Sequence: Synthetic oligonucleotide
aaauaauaauguacccucu

SEQ ID NO: 273411 - RNA, 19 nt, Artificial Sequence
  Description of Artificial Sequence: Synthetic oligonucleotide
uacuugacucgauaauccc

SEQ ID NO: 273412 - RNA, 19 nt, Artificial Sequence
  Description of Artificial Sequence: Synthetic oligonucleotide
cugaacgucuucaacccag

SEQ ID NO: 273413 - RNA, 19 nt, Artificial Sequence
  Description of Artificial Sequence: Synthetic oligonucleotide
augaaccuuacaaacaugu

SEQ ID NO: 273414 - RNA, 19 nt, Artificial Sequence
  Description of Artificial Sequence: Synthetic oligonucleotide
gguuugucuguuuagcuug

SEQ ID NO: 273415 - RNA, 19 nt, Artificial Sequence
  Description of Artificial Sequence: Synthetic oligonucleotide
acguuuucugccauagggc

SEQ ID NO: 273416 - RNA, 19 nt, Artificial Sequence
  Description of Artificial Sequence: Synthetic oligonucleotide
aguaaauaccaggucaaca

SEQ ID NO: 273417 - RNA, 19 nt, Artificial Sequence
  Description of Artificial Sequence: Synthetic oligonucleotide
acaaguaaugccaaaccca

SEQ ID NO: 273418 - RNA, 19 nt, Artificial Sequence
  Description of Artificial Sequence: Synthetic oligonucleotide
ugacguucugauuuggaau

SEQ ID NO: 273419 - RNA, 19 nt, Artificial Sequence
  Description of Artificial Sequence: Synthetic oligonucleotide
uaggacgauuucccggugg

SEQ ID NO: 273420 - RNA, 19 nt, Artificial Sequence
  Description of Artificial Sequence: Synthetic oligonucleotide
cucaugguaaacauaaaua

SEQ ID NO: 273421 - RNA, 19 nt, Artificial Sequence
  Description of Artificial Sequence: Synthetic oligonucleotide
ucaaaacguccagacaaag

SEQ ID NO: 273422 - RNA, 19 nt, Artificial Sequence
  Description of Artificial Sequence: Synthetic oligonucleotide
cagaacaaccagcuugacg

SEQ ID NO: 273423 - RNA, 19 nt, Artificial Sequence
  Description of Artificial Sequence: Synthetic oligonucleotide
gaucuugcggcugagcaug

SEQ ID NO: 273424 - RNA, 19 nt, Artificial Sequence
  Description of Artificial Sequence: Synthetic oligonucleotide
ggcacauuugaucugugag

SEQ ID NO: 273425 - RNA, 19 nt, Artificial Sequence
  Description of Artificial Sequence: Synthetic oligonucleotide
ugauuuggaaugagacaug

SEQ ID NO: 273426 - RNA, 19 nt, Artificial Sequence
  Description of Artificial Sequence: Synthetic oligonucleotide
uugacguucugauuuggaa

SEQ ID NO: 273427 - RNA, 19 nt, Artificial Sequence
  Description of Artificial Sequence: Synthetic oligonucleotide
auaaucccucaucaguuca

SEQ ID NO: 273428 - RNA, 19 nt, Artificial Sequence
  Description of Artificial Sequence: Synthetic oligonucleotide
cacgacgauagccauacug

SEQ ID NO: 273429 - RNA, 19 nt, Artificial Sequence
  Description of Artificial Sequence: Synthetic oligonucleotide
cuaaccacacucaugguaa

SEQ ID NO: 273430 - RNA, 19 nt, Artificial Sequence
  Description of Artificial Sequence: Synthetic oligonucleotide
uacuguuugggauccagau

SEQ ID NO: 273431 - RNA, 19 nt, Artificial Sequence
  Description of Artificial Sequence: Synthetic oligonucleotide
aagcucaaucuuaaaggag

SEQ ID NO: 273432 - RNA, 19 nt, Artificial Sequence
  Description of Artificial Sequence: Synthetic oligonucleotide
aucccucaucaguucaacc

SEQ ID NO: 273433 - RNA, 19 nt, Artificial Sequence
  Description of Artificial Sequence: Synthetic oligonucleotide
cuggauugugcgauggcgc

SEQ ID NO: 273434 - RNA, 19 nt, Artificial Sequence
  Description of Artificial Sequence: Synthetic oligonucleotide
auaauguacccucucuaaa

SEQ ID NO: 273435 - RNA, 19 nt, Artificial Sequence
  Description of Artificial Sequence: Synthetic oligonucleotide
cauucuaaccacacucaug

SEQ ID NO: 273436 - RNA, 19 nt, Artificial Sequence
  Description of Artificial Sequence: Synthetic oligonucleotide
aggaaaucuuuggagauca

SEQ ID NO: 273437 - RNA, 19 nt, Artificial Sequence
  Description of Artificial Sequence: Synthetic oligonucleotide
gauaaucccucaucaguuc

SEQ ID NO: 273438 - RNA, 19 nt, Artificial Sequence
  Description of Artificial Sequence: Synthetic oligonucleotide
aauguucagcaagacgugu

SEQ ID NO: 273439 - RNA, 19 nt, Artificial Sequence
  Description of Artificial Sequence: Synthetic oligonucleotide
uauaaguauuucccaguua

SEQ ID NO: 273440 - RNA, 19 nt, Artificial Sequence
  Description of Artificial Sequence: Synthetic oligonucleotide
auccauuacacuacuaaca

SEQ ID NO: 273441 - RNA, 19 nt, Artificial Sequence
  Description of Artificial Sequence: Synthetic oligonucleotide
ggcuugaaagcgcauaaag

SEQ ID NO: 273442 - RNA, 19 nt, Artificial Sequence
  Description of Artificial Sequence: Synthetic oligonucleotide
ugcucgacaccgcuguaag

SEQ ID NO: 273443 - RNA, 19 nt, Artificial Sequence
  Description of Artificial Sequence: Synthetic oligonucleotide
aacccauaguuucuccaga

SEQ ID NO: 273444 - RNA, 19 nt, Artificial Sequence
  Description of Artificial Sequence: Synthetic oligonucleotide
caugucagcuuuaggguac

SEQ ID NO: 273445 - RNA, 19 nt, Artificial Sequence
  Description of Artificial Sequence: Synthetic oligonucleotide
gaucguacuggcuaaagau

SEQ ID NO: 273446 - RNA, 19 nt, Artificial Sequence
  Description of Artificial Sequence: Synthetic oligonucleotide
uucccaugaaccuuacaaa

SEQ ID NO: 273447 - RNA, 19 nt, Artificial Sequence
  Description of Artificial Sequence: Synthetic oligonucleotide
cagcaagacguguucaaag

SEQ ID NO: 273448 - RNA, 19 nt, Artificial Sequence
  Description of Artificial Sequence: Synthetic oligonucleotide
augaagugaccaucuccac

SEQ ID NO: 273449 - RNA, 19 nt, Artificial Sequence
  Description of Artificial Sequence: Synthetic oligonucleotide
agggaauuagacaggaaug

SEQ ID NO: 273450 - RNA, 19 nt, Artificial Sequence
  Description of Artificial Sequence: Synthetic oligonucleotide
aguaauugacaaguacuca

SEQ ID NO: 273451 - RNA, 19 nt, Artificial Sequence
  Description of Artificial Sequence: Synthetic oligonucleotide
guuuaggccaaggaauugc

SEQ ID NO: 273452 - RNA, 19 nt, Artificial Sequence
  Description of Artificial Sequence: Synthetic oligonucleotide
gacgauuucccgguggagc

SEQ ID NO: 273453 - RNA, 19 nt, Artificial Sequence
  Description of Artificial Sequence: Synthetic oligonucleotide
ucuaaacaauggauauuaa

SEQ ID NO: 273454 - RNA, 19 nt, Artificial Sequence
  Description of Artificial Sequence: Synthetic oligonucleotide
uuuggaucguacuggcuaa

SEQ ID NO: 273455 - RNA, 19 nt, Artificial Sequence
  Description of Artificial Sequence: Synthetic oligonucleotide
ucaaucuuggagccaggaa

SEQ ID NO: 273456 - RNA, 19 nt, Artificial Sequence
  Description of Artificial Sequence: Synthetic oligonucleotide
ugugcugaguccaucccuc

SEQ ID NO: 273457 - RNA, 19 nt, Artificial Sequence
  Description of Artificial Sequence: Synthetic oligonucleotide
uauauccuuguauggacuu

SEQ ID NO: 273458 - RNA, 19 nt, Artificial Sequence
  Description of Artificial Sequence: Synthetic oligonucleotide
uuagggguuugucuguuua

SEQ ID NO: 273459 - RNA, 19 nt, Artificial Sequence
  Description of Artificial Sequence: Synthetic oligonucleotide
ugggcucaaucuuggagcc

SEQ ID NO: 273460 - RNA, 19 nt, Artificial Sequence
  Description of Artificial Sequence: Synthetic oligonucleotide
gcuugaaagcgcauaaagg

SEQ ID NO: 273461 - RNA, 19 nt, Artificial Sequence
  Description of Artificial Sequence: Synthetic oligonucleotide
ugcaugacuaugucaucca

SEQ ID NO: 273462 - RNA, 19 nt, Artificial Sequence
  Description of Artificial Sequence: Synthetic oligonucleotide
cucgauaaucccucaucag

SEQ ID NO: 273463 - RNA, 19 nt, Artificial Sequence
  Description of Artificial Sequence: Synthetic oligonucleotide
caagacguguucaaaggca

SEQ ID NO: 273464 - RNA, 19 nt, Artificial Sequence
  Description of Artificial Sequence: Synthetic oligonucleotide
cauacguugaugcuuucga

SEQ ID NO: 273465 - RNA, 19 nt, Artificial Sequence
  Description of Artificial Sequence: Synthetic oligonucleotide
aaacugggaagacccuacu

SEQ ID NO: 273466 - RNA, 19 nt, Artificial Sequence
  Description of Artificial Sequence: Synthetic oligonucleotide
acaaauaagcagaucucca

SEQ ID NO: 273467 - RNA, 19 nt, Artificial Sequence
  Description of Artificial Sequence: Synthetic oligonucleotide
uguguuugcucgacaccgc

SEQ ID NO: 273468 - RNA, 19 nt, Artificial Sequence
  Description of Artificial Sequence: Synthetic oligonucleotide
cuaaauaauaauguacccu

SEQ ID NO: 273469 - RNA, 19 nt, Artificial Sequence
  Description of Artificial Sequence: Synthetic oligonucleotide
cacacgacgauagccauac

SEQ ID NO: 273470 - RNA, 19 nt, Artificial Sequence
  Description of Artificial Sequence: Synthetic oligonucleotide
uggauugugcgauggcgca

SEQ ID NO: 273471 - RNA, 19 nt, Artificial Sequence
  Description of Artificial Sequence: Synthetic oligonucleotide
aacguccagacaaagggau

SEQ ID NO: 273472 - RNA, 19 nt, Artificial Sequence
  Description of Artificial Sequence: Synthetic oligonucleotide
gggaacaagcuucuucagg

SEQ ID NO: 273473 - RNA, 19 nt, Artificial Sequence
  Description of Artificial Sequence: Synthetic oligonucleotide
acauucugguguaauaaca

SEQ ID NO: 273474 - RNA, 19 nt, Artificial Sequence
  Description of Artificial Sequence: Synthetic oligonucleotide
gugaguugaaaacaaacau

SEQ ID NO: 273475 - RNA, 19 nt, Artificial Sequence
  Description of Artificial Sequence: Synthetic oligonucleotide
cccuuuaugcuucuuauac

SEQ ID NO: 273476 - RNA, 19 nt, Artificial Sequence
  Description of Artificial Sequence: Synthetic oligonucleotide
acaauggauauuaaauaaa

SEQ ID NO: 273477 - RNA, 19 nt, Artificial Sequence
  Description of Artificial Sequence: Synthetic oligonucleotide
ucauuagggguuugucugu

SEQ ID NO: 273478 - RNA, 19 nt, Artificial Sequence
  Description of Artificial Sequence: Synthetic oligonucleotide
aaguccuuuguggacuuca

SEQ ID NO: 273479 - RNA, 19 nt, Artificial Sequence
  Description of Artificial Sequence: Synthetic oligonucleotide
caaauaagcagaucuccaa

SEQ ID NO: 273480 - RNA, 19 nt, Artificial Sequence
  Description of Artificial Sequence: Synthetic oligonucleotide
acgauuucccgguggagcu

SEQ ID NO: 273481 - RNA, 19 nt, Artificial Sequence
  Description of Artificial Sequence: Synthetic oligonucleotide
ucaaauuauuaaggcacau

SEQ ID NO: 273482 - RNA, 19 nt, Artificial Sequence
  Description of Artificial Sequence: Synthetic oligonucleotide
agcuggauugugcgauggc

SEQ ID NO: 273483 - RNA, 19 nt, Artificial Sequence
  Description of Artificial Sequence: Synthetic oligonucleotide
acaaguacucaaauggaaa

SEQ ID NO: 273484 - RNA, 19 nt, Artificial Sequence
  Description of Artificial Sequence: Synthetic oligonucleotide
ucccgguggagcuggauug

SEQ ID NO: 273485 - RNA, 19 nt, Artificial Sequence
  Description of Artificial Sequence: Synthetic oligonucleotide
caauaggcuauuuacaaau

SEQ ID NO: 273486 - RNA, 19 nt, Artificial Sequence
  Description of Artificial Sequence: Synthetic oligonucleotide
cagauuggggucacagaag

SEQ ID NO: 273487 - RNA, 19 nt, Artificial Sequence
  Description of Artificial Sequence: Synthetic oligonucleotide
auuaggcaauuaaaacauc

SEQ ID NO: 273488 - RNA, 19 nt, Artificial Sequence
  Description of Artificial Sequence: Synthetic oligonucleotide
aagggaucagaauguugau

SEQ ID NO: 273489 - RNA, 19 nt, Artificial Sequence
  Description of Artificial Sequence: Synthetic oligonucleotide
gauugugcgauggcgcagc

SEQ ID NO: 273490 - RNA, 19 nt, Artificial Sequence
  Description of Artificial Sequence: Synthetic oligonucleotide
guaaaggcaaaaugguugu

SEQ ID NO: 273491 - RNA, 19 nt, Artificial Sequence
  Description of Artificial Sequence: Synthetic oligonucleotide
uguuuaggccaaggaauug

SEQ ID NO: 273492 - RNA, 19 nt, Artificial Sequence
  Description of Artificial Sequence: Synthetic oligonucleotide
ccucucuaaagaaaaggag

SEQ ID NO: 273493 - RNA, 19 nt, Artificial Sequence
  Description of Artificial Sequence: Synthetic oligonucleotide
gaacagagccuaaauuuuc

SEQ ID NO: 273494 - RNA, 19 nt, Artificial Sequence
  Description of Artificial Sequence: Synthetic oligonucleotide
caccuucccacuauaaaca

SEQ ID NO: 273495 - RNA, 19 nt, Artificial Sequence
  Description of Artificial Sequence: Synthetic oligonucleotide
ccacuauaaacaaucuuug

SEQ ID NO: 273496 - RNA, 19 nt, Artificial Sequence
  Description of Artificial Sequence: Synthetic oligonucleotide
gucaaugaugcgcccucgg

SEQ ID NO: 273497 - RNA, 19 nt, Artificial Sequence
  Description of Artificial Sequence: Synthetic oligonucleotide
ugcucauuaggacgauuuc

SEQ ID NO: 273498 - RNA, 19 nt, Artificial Sequence
  Description of Artificial Sequence: Synthetic oligonucleotide
agaauccugguugauucug

SEQ ID NO: 273499 - RNA, 19 nt, Artificial Sequence
  Description of Artificial Sequence: Synthetic oligonucleotide
aggguacuugacucgauaa

SEQ ID NO: 273500 - RNA, 19 nt, Artificial Sequence
  Description of Artificial Sequence: Synthetic oligonucleotide
uacuaguaauugacaagua

SEQ ID NO: 273501 - RNA, 19 nt, Artificial Sequence
  Description of Artificial Sequence: Synthetic oligonucleotide
gcaccuucccacuauaaac

SEQ ID NO: 273502 - RNA, 19 nt, Artificial Sequence
  Description of Artificial Sequence: Synthetic oligonucleotide
uuugaucugugaguugaaa

SEQ ID NO: 273503 - RNA, 19 nt, Artificial Sequence
  Description of Artificial Sequence: Synthetic oligonucleotide
ccacauuucggccaacugc

SEQ ID NO: 273504 - RNA, 19 nt, Artificial Sequence
  Description of Artificial Sequence: Synthetic oligonucleotide
agcgcauaaaggagggagg

SEQ ID NO: 273505 - RNA, 19 nt, Artificial Sequence
  Description of Artificial Sequence: Synthetic oligonucleotide
gcaaacaucgaucacauuu

SEQ ID NO: 273506 - RNA, 19 nt, Artificial Sequence
  Description of Artificial Sequence: Synthetic oligonucleotide
aaaacccuccagacacagg

SEQ ID NO: 273507 - RNA, 19 nt, Artificial Sequence
  Description of Artificial Sequence: Synthetic oligonucleotide
caaccuaaauaauaaugua

SEQ ID NO: 273508 - RNA, 19 nt, Artificial Sequence
  Description of Artificial Sequence: Synthetic oligonucleotide
aauaggcuauuuacaaaua

SEQ ID NO: 273509 - RNA, 19 nt, Artificial Sequence
  Description of Artificial Sequence: Synthetic oligonucleotide
guucacacgacgauagcca

SEQ ID NO: 273510 - RNA, 19 nt, Artificial Sequence
  Description of Artificial Sequence: Synthetic oligonucleotide
uguuuagcuugcauccauu

SEQ ID NO: 273511 - RNA, 19 nt, Artificial Sequence
  Description of Artificial Sequence: Synthetic oligonucleotide
ucuguuuagcuugcaucca

SEQ ID NO: 273512 - RNA, 19 nt, Artificial Sequence
  Description of Artificial Sequence: Synthetic oligonucleotide
ugcugacccaacacugugu

SEQ ID NO: 273513 - RNA, 19 nt, Artificial Sequence
  Description of Artificial Sequence: Synthetic oligonucleotide
ggaaauagaucugcugacc

SEQ ID NO: 273514 - RNA, 19 nt, Artificial Sequence
  Description of Artificial Sequence: Synthetic oligonucleotide
cugaguccaucccucuccg

SEQ ID NO: 273515 - RNA, 19 nt, Artificial Sequence
  Description of Artificial Sequence: Synthetic oligonucleotide
accccaagcacauuuuaua

SEQ ID NO: 273516 - RNA, 19 nt, Artificial Sequence
  Description of Artificial Sequence: Synthetic oligonucleotide
agcuugacguucugauuug

SEQ ID NO: 273517 - RNA, 19 nt, Artificial Sequence
  Description of Artificial Sequence: Synthetic oligonucleotide
gcaagacguguucaaaggc

SEQ ID NO: 273518 - RNA, 19 nt, Artificial Sequence
  Description of Artificial Sequence: Synthetic oligonucleotide
auuuggaaugagacauguc

SEQ ID NO: 273519 - RNA, 19 nt, Artificial Sequence
  Description of Artificial Sequence: Synthetic oligonucleotide
caaacccauaguuucucca

SEQ ID NO: 273520 - RNA, 19 nt, Artificial Sequence
  Description of Artificial Sequence: Synthetic oligonucleotide
ugaccaucuccacccacaa

SEQ ID NO: 273521 - RNA, 19 nt, Artificial Sequence
  Description of Artificial Sequence: Synthetic oligonucleotide
uuaguaagaugggaaugua

SEQ ID NO: 273522 - RNA, 19 nt, Artificial Sequence
  Description of Artificial Sequence: Synthetic oligonucleotide
acuugacucgauaaucccu

SEQ ID NO: 273523 - RNA, 19 nt, Artificial Sequence
  Description of Artificial Sequence: Synthetic oligonucleotide
uucacacgacgauagccau

SEQ ID NO: 273524 - RNA, 19 nt, Artificial Sequence
  Description of Artificial Sequence: Synthetic oligonucleotide
aggacgauuucccggugga

SEQ ID NO: 273525 - RNA, 19 nt, Artificial Sequence
  Description of Artificial Sequence: Synthetic oligonucleotide
uuaggacgauuucccggug

SEQ ID NO: 273526 - RNA, 19 nt, Artificial Sequence
  Description of Artificial Sequence: Synthetic oligonucleotide
auuacacuacuaacaguca

SEQ ID NO: 273527 - RNA, 19 nt, Artificial Sequence
  Description of Artificial Sequence: Synthetic oligonucleotide
uggaucguacuggcuaaag

SEQ ID NO: 273528 - RNA, 19 nt, Artificial Sequence
  Description of Artificial Sequence: Synthetic oligonucleotide
auguacccucucuaaagaa

SEQ ID NO: 273529 - RNA, 19 nt, Artificial Sequence
  Description of Artificial Sequence: Synthetic oligonucleotide
gcucauuaggacgauuucc

SEQ ID NO: 273530 - RNA, 19 nt, Artificial Sequence
  Description of Artificial Sequence: Synthetic oligonucleotide
ggugcuacuuaauguucag

SEQ ID NO: 273531 - RNA, 19 nt, Artificial Sequence
  Description of Artificial Sequence: Synthetic oligonucleotide
gcuggauugugcgauggcg

SEQ ID NO: 273532 - RNA, 19 nt, Artificial Sequence
  Description of Artificial Sequence: Synthetic oligonucleotide
uugacucgauaaucccuca

SEQ ID NO: 273533 - RNA, 19 nt, Artificial Sequence
  Description of Artificial Sequence: Synthetic oligonucleotide
cacauuucggccaacugcu

SEQ ID NO: 273534 - RNA, 19 nt, Artificial Sequence
  Description of Artificial Sequence: Synthetic oligonucleotide
gccauuaccaccacuuuug

SEQ ID NO: 273535 - RNA, 19 nt, Artificial Sequence
  Description of Artificial Sequence: Synthetic oligonucleotide
agccauuaccaccacuuuu

SEQ ID NO: 273536 - RNA, 19 nt, Artificial Sequence
  Description of Artificial Sequence: Synthetic oligonucleotide
augugcaauaggcuauuua

SEQ ID NO: 273537 - RNA, 19 nt, Artificial Sequence
  Description of Artificial Sequence: Synthetic oligonucleotide
ucggcgaucuugcggcuga

SEQ ID NO: 273538 - RNA, 19 nt, Artificial Sequence
  Description of Artificial Sequence: Synthetic oligonucleotide
gaagagaacagagccuaaa

SEQ ID NO: 273539 - RNA, 19 nt, Artificial Sequence
  Description of Artificial Sequence: Synthetic oligonucleotide
cauuuuacuuuugucccca

SEQ ID NO: 273540 - RNA, 19 nt, Artificial Sequence
  Description of Artificial Sequence: Synthetic oligonucleotide
uagccauacuggaucuccu

SEQ ID NO: 273541 - RNA, 19 nt, Artificial Sequence
  Description of Artificial Sequence: Synthetic oligonucleotide
uggauguggacgacuccaa

SEQ ID NO: 273542 - RNA, 19 nt, Artificial Sequence
  Description of Artificial Sequence: Synthetic oligonucleotide
aggcacauuugaucuguga

SEQ ID NO: 273543 - RNA, 19 nt, Artificial Sequence
  Description of Artificial Sequence: Synthetic oligonucleotide
caugggguucacacgacga

SEQ ID NO: 273544 - RNA, 19 nt, Artificial Sequence
  Description of Artificial Sequence: Synthetic oligonucleotide
caaguaaugccaaacccau

SEQ ID NO: 273545 - RNA, 19 nt, Artificial Sequence
  Description of Artificial Sequence: Synthetic oligonucleotide
uauggaucucugugcuacu

SEQ ID NO: 273546 - RNA, 19 nt, Artificial Sequence
  Description of Artificial Sequence: Synthetic oligonucleotide
cagggaauuagacaggaau

SEQ ID NO: 273547 - RNA, 19 nt, Artificial Sequence
  Description of Artificial Sequence: Synthetic oligonucleotide
auagaucugcugacccaac

SEQ ID NO: 273548 - RNA, 19 nt, Artificial Sequence
  Description of Artificial Sequence: Synthetic oligonucleotide
acgucuguuuaggccaagg

SEQ ID NO: 273549 - RNA, 19 nt, Artificial Sequence
  Description of Artificial Sequence: Synthetic oligonucleotide
cucgacaccgcuguaagaa

SEQ ID NO: 273550 - RNA, 19 nt, Artificial Sequence
  Description of Artificial Sequence: Synthetic oligonucleotide
gugcaauaggcuauuuaca

SEQ ID NO: 273551 - RNA, 19 nt, Artificial Sequence
  Description of Artificial Sequence: Synthetic oligonucleotide
cugcugacccaacacugug

SEQ ID NO: 273552 - RNA, 19 nt, Artificial Sequence
  Description of Artificial Sequence: Synthetic oligonucleotide
guucugauuuggaaugaga

SEQ ID NO: 273553 - RNA, 19 nt, Artificial Sequence
  Description of Artificial Sequence: Synthetic oligonucleotide
uucuaaccacacucauggu

SEQ ID NO: 273554 - RNA, 19 nt, Artificial Sequence
  Description of Artificial Sequence: Synthetic oligonucleotide
augggguucacacgacgau

SEQ ID NO: 273555 - RNA, 19 nt, Artificial Sequence
  Description of Artificial Sequence: Synthetic oligonucleotide
aggugcuacuuaauguuca

SEQ ID NO: 273556 - RNA, 19 nt, Artificial Sequence
  Description of Artificial Sequence: Synthetic oligonucleotide
gugcuacuguacuugcuca

SEQ ID NO: 273557 - RNA, 19 nt, Artificial Sequence
  Description of Artificial Sequence: Synthetic oligonucleotide
guauaaguauuucccaguu

SEQ ID NO: 273558 - RNA, 19 nt, Artificial Sequence
  Description of Artificial Sequence: Synthetic oligonucleotide
ccgguuuucugaguaaagg

SEQ ID NO: 273559 - RNA, 19 nt, Artificial Sequence
  Description of Artificial Sequence: Synthetic oligonucleotide
uucggccaacugcugugug

SEQ ID NO: 273560 - RNA, 19 nt, Artificial Sequence
  Description of Artificial Sequence: Synthetic oligonucleotide
uaaaggcaaaaugguuguc

SEQ ID NO: 273561 - RNA, 19 nt, Artificial Sequence
  Description of Artificial Sequence: Synthetic oligonucleotide
guggggacuucuuaggagu

SEQ ID NO: 273562 - RNA, 19 nt, Artificial Sequence
  Description of Artificial Sequence: Synthetic oligonucleotide
gcgcauaaaggagggaggg

SEQ ID NO: 273563 - RNA, 19 nt, Artificial Sequence
  Description of Artificial Sequence: Synthetic oligonucleotide
ugcugaguccaucccucuc

SEQ ID NO: 273564 - RNA, 19 nt, Artificial Sequence
  Description of Artificial Sequence: Synthetic oligonucleotide
caaacaucgaucacauuuu

SEQ ID NO: 273565 - RNA, 19 nt, Artificial Sequence
  Description of Artificial Sequence: Synthetic oligonucleotide
gccauacuggaucuccuug

SEQ ID NO: 273566 - RNA, 19 nt, Artificial Sequence
  Description of Artificial Sequence: Synthetic oligonucleotide
ugcauccauuacacuacua

SEQ ID NO: 273567 - RNA, 19 nt, Artificial Sequence
  Description of Artificial Sequence: Synthetic oligonucleotide
ucacacgacgauagccaua

SEQ ID NO: 273568 - RNA, 19 nt, Artificial Sequence
  Description of Artificial Sequence: Synthetic oligonucleotide
ucgacaccgcuguaagaau

SEQ ID NO: 273569 - RNA, 19 nt, Artificial Sequence
  Description of Artificial Sequence: Synthetic oligonucleotide
ggaucguacuggcuaaaga

SEQ ID NO: 273570 - RNA, 19 nt, Artificial Sequence
  Description of Artificial Sequence: Synthetic oligonucleotide
gacccuacuucuagggcca

SEQ ID NO: 273571 - RNA, 19 nt, Artificial Sequence
  Description of Artificial Sequence: Synthetic oligonucleotide
aguccuuuguggacuucag

SEQ ID NO: 273572 - RNA, 19 nt, Artificial Sequence
  Description of Artificial Sequence: Synthetic oligonucleotide
aaugugcaauaggcuauuu

SEQ ID NO: 273573 - RNA, 19 nt, Artificial Sequence
  Description of Artificial Sequence: Synthetic oligonucleotide
cuacuguacuugcucauua

SEQ ID NO: 273574 - RNA, 19 nt, Artificial Sequence
  Description of Artificial Sequence: Synthetic oligonucleotide
ugggguucacacgacgaua

SEQ ID NO: 273575 - RNA, 19 nt, Artificial Sequence
  Description of Artificial Sequence: Synthetic oligonucleotide
acacuguguuugcucgaca

SEQ ID NO: 273576 - RNA, 19 nt, Artificial Sequence
  Description of Artificial Sequence: Synthetic oligonucleotide
ggcaaaucuaucaacugcu

SEQ ID NO: 273577 - RNA, 19 nt, Artificial Sequence
  Description of Artificial Sequence: Synthetic oligonucleotide
acguccagacaaagggauc

SEQ ID NO: 273578 - RNA, 19 nt, Artificial Sequence
  Description of Artificial Sequence: Synthetic oligonucleotide
uugcucgacaccgcuguaa

SEQ ID NO: 273579 - RNA, 19 nt, Artificial Sequence
  Description of Artificial Sequence: Synthetic oligonucleotide
cccacuauaaacaaucuuu

SEQ ID NO: 273580 - RNA, 19 nt, Artificial Sequence
  Description of Artificial Sequence: Synthetic oligonucleotide
gcaauaggcuauuuacaaa

SEQ ID NO: 273581 - RNA, 19 nt, Artificial Sequence
  Description of Artificial Sequence: Synthetic oligonucleotide
aaggcacauuugaucugug

SEQ ID NO: 273582 - RNA, 19 nt, Artificial Sequence
  Description of Artificial Sequence: Synthetic oligonucleotide
cugcuguguggacccauac

SEQ ID NO: 273583 - RNA, 19 nt, Artificial Sequence
  Description of Artificial Sequence: Synthetic oligonucleotide
agccauacuggaucuccuu

SEQ ID NO: 273584 - RNA, 19 nt, Artificial Sequence
  Description of Artificial Sequence: Synthetic oligonucleotide
ugccccauacaugggguuc

SEQ ID NO: 273585 - RNA, 19 nt, Artificial Sequence
  Description of Artificial Sequence: Synthetic oligonucleotide
gaucuaaacaauggauauu

SEQ ID NO: 273586 - RNA, 19 nt, Artificial Sequence
  Description of Artificial Sequence: Synthetic oligonucleotide
cuagccacauuucggccaa

SEQ ID NO: 273587 - RNA, 19 nt, Artificial Sequence
  Description of Artificial Sequence: Synthetic oligonucleotide
caaugaugcgcccucgggu

SEQ ID NO: 273588 - RNA, 19 nt, Artificial Sequence
  Description of Artificial Sequence: Synthetic oligonucleotide
uuugcucgacaccgcugua

SEQ ID NO: 273589 - RNA, 19 nt, Artificial Sequence
  Description of Artificial Sequence: Synthetic oligonucleotide
acguucugauuuggaauga

SEQ ID NO: 273590 - RNA, 19 nt, Artificial Sequence
  Description of Artificial Sequence: Synthetic oligonucleotide
auugugcgauggcgcagcu

SEQ ID NO: 273591 - RNA, 19 nt, Artificial Sequence
  Description of Artificial Sequence: Synthetic oligonucleotide
cucaaucuuggagccagga

SEQ ID NO: 273592 - RNA, 19 nt, Artificial Sequence
  Description of Artificial Sequence: Synthetic oligonucleotide
ccauacguugaugcuuucg

SEQ ID NO: 273593 - RNA, 19 nt, Artificial Sequence
  Description of Artificial Sequence: Synthetic oligonucleotide
cccaugaaccuuacaaaca

SEQ ID NO: 273594 - RNA, 19 nt, Artificial Sequence
  Description of Artificial Sequence: Synthetic oligonucleotide
cuuccuuauggaucucugu

SEQ ID NO: 273595 - RNA, 19 nt, Artificial Sequence
  Description of Artificial Sequence: Synthetic oligonucleotide
aucaacugcuugaaaucua

SEQ ID NO: 273596 - RNA, 19 nt, Artificial Sequence
  Description of Artificial Sequence: Synthetic oligonucleotide
acccauacguugaugcuuu

SEQ ID NO: 273597 - RNA, 19 nt, Artificial Sequence
  Description of Artificial Sequence: Synthetic oligonucleotide
uugaugcuuucgaccccaa

SEQ ID NO: 273598 - RNA, 19 nt, Artificial Sequence
  Description of Artificial Sequence: Synthetic oligonucleotide
gcuuucgaccccaagcaca

SEQ ID NO: 273599 - RNA, 19 nt, Artificial Sequence
  Description of Artificial Sequence: Synthetic oligonucleotide
cuuucgaccccaagcacau

SEQ ID NO: 273600 - RNA, 19 nt, Artificial Sequence
  Description of Artificial Sequence: Synthetic oligonucleotide
agccgguuuucugaguaaa

SEQ ID NO: 273601 - RNA, 19 nt, Artificial Sequence
  Description of Artificial Sequence: Synthetic oligonucleotide
gcuugacguucugauuugg

SEQ ID NO: 273602 - RNA, 19 nt, Artificial Sequence
  Description of Artificial Sequence: Synthetic oligonucleotide
cuguuuaggccaaggaauu

SEQ ID NO: 273603 - RNA, 19 nt, Artificial Sequence
  Description of Artificial Sequence: Synthetic oligonucleotide
cccacaacacaggaugaag

SEQ ID NO: 273604 - RNA, 19 nt, Artificial Sequence
  Description of Artificial Sequence: Synthetic oligonucleotide
auuugaucugugaguugaa

SEQ ID NO: 273605 - RNA, 19 nt, Artificial Sequence
  Description of Artificial Sequence: Synthetic oligonucleotide
cauuaccaccacuuuugcu

SEQ ID NO: 273606 - RNA, 19 nt, Artificial Sequence
  Description of Artificial Sequence: Synthetic oligonucleotide
ggcaccuucccacuauaaa

SEQ ID NO: 273607 - RNA, 19 nt, Artificial Sequence
  Description of Artificial Sequence: Synthetic oligonucleotide
uuggaucguacuggcuaaa

SEQ ID NO: 273608 - RNA, 19 nt, Artificial Sequence
  Description of Artificial Sequence: Synthetic oligonucleotide
guuaggcaggugcuacuua

SEQ ID NO: 273609 - RNA, 19 nt, Artificial Sequence
  Description of Artificial Sequence: Synthetic oligonucleotide
gcaugucagcuuuagggua

SEQ ID NO: 273610 - RNA, 19 nt, Artificial Sequence
  Description of Artificial Sequence: Synthetic oligonucleotide
gcggcugagcauguaacug

SEQ ID NO: 273611 - RNA, 19 nt, Artificial Sequence
  Description of Artificial Sequence: Synthetic oligonucleotide
ggauugugcgauggcgcag

SEQ ID NO: 273612 - RNA, 19 nt, Artificial Sequence
  Description of Artificial Sequence: Synthetic oligonucleotide
ggcugaguauaaguauuuc

SEQ ID NO: 273613 - RNA, 19 nt, Artificial Sequence
  Description of Artificial Sequence: Synthetic oligonucleotide
cuagggccagagcucuuga

SEQ ID NO: 273614 - RNA, 19 nt, Artificial Sequence
  Description of Artificial Sequence: Synthetic oligonucleotide
gacccauacguugaugcuu

SEQ ID NO: 273615 - RNA, 19 nt, Artificial Sequence
  Description of Artificial Sequence: Synthetic oligonucleotide
gccgguuuucugaguaaag

SEQ ID NO: 273616 - RNA, 19 nt, Artificial Sequence
  Description of Artificial Sequence: Synthetic oligonucleotide
guucacguuuucugccaua

SEQ ID NO: 273617 - RNA, 19 nt, Artificial Sequence
  Description of Artificial Sequence: Synthetic oligonucleotide
gcaugacuaugucauccaa

SEQ ID NO: 273618 - RNA, 19 nt, Artificial Sequence
  Description of Artificial Sequence: Synthetic oligonucleotide
caccacuuuugcuguaacu

SEQ ID NO: 273619 - RNA, 19 nt, Artificial Sequence
  Description of Artificial Sequence: Synthetic oligonucleotide
gucuucaacccagccugga

SEQ ID NO: 273620 - RNA, 19 nt, Artificial Sequence
  Description of Artificial Sequence: Synthetic oligonucleotide
gaccccaagcacauuuuau

SEQ ID NO: 273621 - RNA, 19 nt, Artificial Sequence
  Description of Artificial Sequence: Synthetic oligonucleotide
cugugcugaguccaucccu

SEQ ID NO: 273622 - RNA, 19 nt, Artificial Sequence
  Description of Artificial Sequence: Synthetic oligonucleotide
ggacgauuucccgguggag

SEQ ID NO: 273623 - RNA, 19 nt, Artificial Sequence
  Description of Artificial Sequence: Synthetic oligonucleotide
cucgcuggugggcuugaaa

SEQ ID NO: 273624 - RNA, 19 nt, Artificial Sequence
  Description of Artificial Sequence: Synthetic oligonucleotide
ggguuugucuguuuagcuu

SEQ ID NO: 273625 - RNA, 19 nt, Artificial Sequence
  Description of Artificial Sequence: Synthetic oligonucleotide
gaugcgcccucgggucuug

SEQ ID NO: 273626 - RNA, 19 nt, Artificial Sequence
  Description of Artificial Sequence: Synthetic oligonucleotide
acacgacgauagccauacu

SEQ ID NO: 273627 - RNA, 19 nt, Artificial Sequence
  Description of Artificial Sequence: Synthetic oligonucleotide
cguucugauuuggaaugag

SEQ ID NO: 273628 - RNA, 19 nt, Artificial Sequence
  Description of Artificial Sequence: Synthetic oligonucleotide
gugcgauggcgcagcucgg

SEQ ID NO: 273629 - RNA, 19 nt, Artificial Sequence
  Description of Artificial Sequence: Synthetic oligonucleotide
gcucaaucuuggagccagg

SEQ ID NO: 273630 - RNA, 19 nt, Artificial Sequence
  Description of Artificial Sequence: Synthetic oligonucleotide
cguccagacaaagggauca

SEQ ID NO: 273631 - RNA, 19 nt, Artificial Sequence
  Description of Artificial Sequence: Synthetic oligonucleotide
cguugaugcuuucgacccc

SEQ ID NO: 273632 - RNA, 19 nt, Artificial Sequence
  Description of Artificial Sequence: Synthetic oligonucleotide
ggacccauacguugaugcu

SEQ ID NO: 273633 - RNA, 19 nt, Artificial Sequence
  Description of Artificial Sequence: Synthetic oligonucleotide
cacgucuguuuaggccaag

SEQ ID NO: 273634 - RNA, 19 nt, Artificial Sequence
  Description of Artificial Sequence: Synthetic oligonucleotide
ccaccacuuuugcuguaac

SEQ ID NO: 273635 - RNA, 19 nt, Artificial Sequence
  Description of Artificial Sequence: Synthetic oligonucleotide
acccuacuucuagggccag

SEQ ID NO: 273636 - RNA, 19 nt, Artificial Sequence
  Description of Artificial Sequence: Synthetic oligonucleotide
ccgcuguaagaauuccaca

SEQ ID NO: 273637 - RNA, 19 nt, Artificial Sequence
  Description of Artificial Sequence: Synthetic oligonucleotide
gcucgacaccgcuguaaga

SEQ ID NO: 273638 - RNA, 19 nt, Artificial Sequence
  Description of Artificial Sequence: Synthetic oligonucleotide
cgauaaucccucaucaguu

SEQ ID NO: 273639 - RNA, 19 nt, Artificial Sequence
  Description of Artificial Sequence: Synthetic oligonucleotide
gcgcauccagcuccucaug

SEQ ID NO: 273640 - RNA, 19 nt, Artificial Sequence
  Description of Artificial Sequence: Synthetic oligonucleotide
ccugaacgucuucaaccca

SEQ ID NO: 273641 - RNA, 19 nt, Artificial Sequence
  Description of Artificial Sequence: Synthetic oligonucleotide
augcgcccucgggucuugg

SEQ ID NO: 273642 - RNA, 19 nt, Artificial Sequence
  Description of Artificial Sequence: Synthetic oligonucleotide
caggguuaggcaggugcua

SEQ ID NO: 273643 - RNA, 19 nt, Artificial Sequence
  Description of Artificial Sequence: Synthetic oligonucleotide
uagccacauuucggccaac

SEQ ID NO: 273644 - RNA, 19 nt, Artificial Sequence
  Description of Artificial Sequence: Synthetic oligonucleotide
auuucccgguggagcugga

SEQ ID NO: 273645 - RNA, 19 nt, Artificial Sequence
  Description of Artificial Sequence: Synthetic oligonucleotide
cgauagccauacuggaucu

SEQ ID NO: 273646 - RNA, 19 nt, Artificial Sequence
  Description of Artificial Sequence: Synthetic oligonucleotide
cugacccaacacuguguuu

SEQ ID NO: 273647 - RNA, 19 nt, Artificial Sequence
  Description of Artificial Sequence: Synthetic oligonucleotide
gcuacuguacuugcucauu

SEQ ID NO: 273648 - RNA, 19 nt, Artificial Sequence
  Description of Artificial Sequence: Synthetic oligonucleotide
gggcaccuucccacuauaa

SEQ ID NO: 273649 - RNA, 19 nt, Artificial Sequence
  Description of Artificial Sequence: Synthetic oligonucleotide
cugccccauacaugggguu

SEQ ID NO: 273650 - RNA, 19 nt, Artificial Sequence
  Description of Artificial Sequence: Synthetic oligonucleotide
gggcucaaucuuggagcca

SEQ ID NO: 273651 - RNA, 19 nt, Artificial Sequence
  Description of Artificial Sequence: Synthetic oligonucleotide
ccacgucuguuuaggccaa

SEQ ID NO: 273652 - RNA, 19 nt, Artificial Sequence
  Description of Artificial Sequence: Synthetic oligonucleotide
cgauuucccgguggagcug

SEQ ID NO: 273653 - RNA, 19 nt, Artificial Sequence
  Description of Artificial Sequence: Synthetic oligonucleotide
cccagaauccugguugauu

SEQ ID NO: 273654 - RNA, 19 nt, Artificial Sequence
  Description of Artificial Sequence: Synthetic oligonucleotide
ggugggcuugaaagcgcau

SEQ ID NO: 273655 - RNA, 19 nt, Artificial Sequence
  Description of Artificial Sequence: Synthetic oligonucleotide
ccggggaggcuggccauca

SEQ ID NO: 273656 - RNA, 19 nt, Artificial Sequence
  Description of Artificial Sequence: Synthetic oligonucleotide
gcccucgggucuuggcauu

SEQ ID NO: 273657 - RNA, 19 nt, Artificial Sequence
  Description of Artificial Sequence: Synthetic oligonucleotide
cggcgaucuugcggcugag

SEQ ID NO: 273658 - RNA, 19 nt, Artificial Sequence
  Description of Artificial Sequence: Synthetic oligonucleotide
cccgguggagcuggauugu

SEQ ID NO: 273659 - RNA, 19 nt, Artificial Sequence
  Description of Artificial Sequence: Synthetic oligonucleotide
acaaaguuccgauagcugc

SEQ ID NO: 273660 - RNA, 19 nt, Artificial Sequence
  Description of Artificial Sequence: Synthetic oligonucleotide
ucaacagcgucucauagcg

SEQ ID NO: 273661 - RNA, 19 nt, Artificial Sequence
  Description of Artificial Sequence: Synthetic oligonucleotide
uauguuucgaacuuagccc

SEQ ID NO: 273662 - RNA, 19 nt, Artificial Sequence
  Description of Artificial Sequence: Synthetic oligonucleotide
uguaauaugcaaauaucug

SEQ ID NO: 273663 - RNA, 19 nt, Artificial Sequence
  Description of Artificial Sequence: Synthetic oligonucleotide
uuuauagcuagcuacugga

SEQ ID NO: 273664 - RNA, 19 nt, Artificial Sequence
  Description of Artificial Sequence: Synthetic oligonucleotide
guauguuucgaacuuagcc

SEQ ID NO: 273665 - RNA, 19 nt, Artificial Sequence
  Description of Artificial Sequence: Synthetic oligonucleotide
gauuucgucauagagaaac

SEQ ID NO: 273666 - RNA, 19 nt, Artificial Sequence
  Description of Artificial Sequence: Synthetic oligonucleotide
uacgauugauuucuaagag

SEQ ID NO: 273667 - RNA, 19 nt, Artificial Sequence
  Description of Artificial Sequence: Synthetic oligonucleotide
aaguuaagcuuuuggauca

SEQ ID NO: 273668 - RNA, 19 nt, Artificial Sequence
  Description of Artificial Sequence: Synthetic oligonucleotide
uucacuuucaaaucgccca

SEQ ID NO: 273669 - RNA, 19 nt, Artificial Sequence
  Description of Artificial Sequence: Synthetic oligonucleotide
aacauagauucaccucugc

SEQ ID NO: 273670 - RNA, 19 nt, Artificial Sequence
  Description of Artificial Sequence: Synthetic oligonucleotide
cauacgauugauuucuaag

SEQ ID NO: 273671 - RNA, 19 nt, Artificial Sequence
  Description of Artificial Sequence: Synthetic oligonucleotide
uuaguugguauuaugcuuc

SEQ ID NO: 273672 - RNA, 19 nt, Artificial Sequence
  Description of Artificial Sequence: Synthetic oligonucleotide
uaaaguuaagcuuuuggau

SEQ ID NO: 273673 - RNA, 19 nt, Artificial Sequence
  Description of Artificial Sequence: Synthetic oligonucleotide
cuuggauccaugcaaauac

SEQ ID NO: 273674 - RNA, 19 nt, Artificial Sequence
  Description of Artificial Sequence: Synthetic oligonucleotide
cauuauagcaguaguuggg

SEQ ID NO: 273675 - RNA, 19 nt, Artificial Sequence
  Description of Artificial Sequence: Synthetic oligonucleotide
acuguaaacucgugugucc

SEQ ID NO: 273676 - RNA, 19 nt, Artificial Sequence
  Description of Artificial Sequence: Synthetic oligonucleotide
ugcgauugcaauuugcugu

SEQ ID NO: 273677 - RNA, 19 nt, Artificial Sequence
  Description of Artificial Sequence: Synthetic oligonucleotide
accauguaaagcugugugc

SEQ ID NO: 273678 - RNA, 19 nt, Artificial Sequence
  Description of Artificial Sequence: Synthetic oligonucleotide
ugugucauacgauugauuu

SEQ ID NO: 273679 - RNA, 19 nt, Artificial Sequence
  Description of Artificial Sequence: Synthetic oligonucleotide
aacucucggaaccacagcu

SEQ ID NO: 273680 - RNA, 19 nt, Artificial Sequence
  Description of Artificial Sequence: Synthetic oligonucleotide
auacgauugauuucuaaga

SEQ ID NO: 273681 - RNA, 19 nt, Artificial Sequence
  Description of Artificial Sequence: Synthetic oligonucleotide
uucauuuuggcaucaacuc

SEQ ID NO: 273682 - RNA, 19 nt, Artificial Sequence
  Description of Artificial Sequence: Synthetic oligonucleotide
auaugcaaauaucuggucu

SEQ ID NO: 273683 - RNA, 19 nt, Artificial Sequence
  Description of Artificial Sequence: Synthetic oligonucleotide
uugucaagaagcaaacuuc

SEQ ID NO: 273684 - RNA, 19 nt, Artificial Sequence
  Description of Artificial Sequence: Synthetic oligonucleotide
acgauugauuucuaagagg

SEQ ID NO: 273685 - RNA, 19 nt, Artificial Sequence
  Description of Artificial Sequence: Synthetic oligonucleotide
guccgaacaaaccuguugg

SEQ ID NO: 273686 - RNA, 19 nt, Artificial Sequence
  Description of Artificial Sequence: Synthetic oligonucleotide
guaggcuagguucaaagcc

SEQ ID NO: 273687 - RNA, 19 nt, Artificial Sequence
  Description of Artificial Sequence: Synthetic oligonucleotide
aggaugaccucaaacaugg

SEQ ID NO: 273688 - RNA, 19 nt, Artificial Sequence
  Description of Artificial Sequence: Synthetic oligonucleotide
auagcuagcuacuggaaca

SEQ ID NO: 273689 - RNA, 19 nt, Artificial Sequence
  Description of Artificial Sequence: Synthetic oligonucleotide
uguguaaucaggcgauuga

SEQ ID NO: 273690 - RNA, 19 nt, Artificial Sequence
  Description of Artificial Sequence: Synthetic oligonucleotide
uuugcauucggaucguaac

SEQ ID NO: 273691 - RNA, 19 nt, Artificial Sequence
  Description of Artificial Sequence: Synthetic oligonucleotide
aaugguaauacuguccgaa

SEQ ID NO: 273692 - RNA, 19 nt, Artificial Sequence
  Description of Artificial Sequence: Synthetic oligonucleotide
ugucccuacaggaaugcag

SEQ ID NO: 273693 - RNA, 19 nt, Artificial Sequence
  Description of Artificial Sequence: Synthetic oligonucleotide
ucgucauagagaaacugcu

SEQ ID NO: 273694 - RNA, 19 nt, Artificial Sequence
  Description of Artificial Sequence: Synthetic oligonucleotide
auguccaauauggugggcc

SEQ ID NO: 273695 - RNA, 19 nt, Artificial Sequence
  Description of Artificial Sequence: Synthetic oligonucleotide
ugcauucggaucguaaccg

SEQ ID NO: 273696 - RNA, 19 nt, Artificial Sequence
  Description of Artificial Sequence: Synthetic oligonucleotide
auacuguccgaacaaaccu

SEQ ID NO: 273697 - RNA, 19 nt, Artificial Sequence
  Description of Artificial Sequence: Synthetic oligonucleotide
ucaaaucgcccaauggcca

SEQ ID NO: 273698 - RNA, 19 nt, Artificial Sequence
  Description of Artificial Sequence: Synthetic oligonucleotide
uugcauucggaucguaacc

SEQ ID NO: 273699 - RNA, 19 nt, Artificial Sequence
  Description of Artificial Sequence: Synthetic oligonucleotide
gagagccguacucaugucg

SEQ ID NO: 273700 - RNA, 19 nt, Artificial Sequence
  Description of Artificial Sequence: Synthetic oligonucleotide
aucaguuacuguauguuuc

SEQ ID NO: 273701 - RNA, 19 nt, Artificial Sequence
  Description of Artificial Sequence: Synthetic oligonucleotide
auguuucgaacuuagcccu

SEQ ID NO: 273702 - RNA, 19 nt, Artificial Sequence
  Description of Artificial Sequence: Synthetic oligonucleotide
augguaauacuguccgaac

SEQ ID NO: 273703 - RNA, 19 nt, Artificial Sequence
  Description of Artificial Sequence: Synthetic oligonucleotide
ugaaacuugcggauccucu

SEQ ID NO: 273704 - RNA, 19 nt, Artificial Sequence
  Description of Artificial Sequence: Synthetic oligonucleotide
gaagcagcguacauguucc

SEQ ID NO: 273705 - RNA, 19 nt, Artificial Sequence
  Description of Artificial Sequence: Synthetic oligonucleotide
uagaggacguacuccauca

SEQ ID NO: 273706 - RNA, 19 nt, Artificial Sequence
  Description of Artificial Sequence: Synthetic oligonucleotide
aacucgugugucccuacag

SEQ ID NO: 273707 - RNA, 19 nt, Artificial Sequence
  Description of Artificial Sequence: Synthetic oligonucleotide
aaauacugggguugugcgu

SEQ ID NO: 273708 - RNA, 19 nt, Artificial Sequence
  Description of Artificial Sequence: Synthetic oligonucleotide
agcaaaucgccucugcugu

SEQ ID NO: 273709 - RNA, 19 nt, Artificial Sequence
  Description of Artificial Sequence: Synthetic oligonucleotide
ucuugcgauugcaauuugc

SEQ ID NO: 273710 - RNA, 19 nt, Artificial Sequence
  Description of Artificial Sequence: Synthetic oligonucleotide
uguauguuucgaacuuagc

SEQ ID NO: 273711 - RNA, 19 nt, Artificial Sequence
  Description of Artificial Sequence: Synthetic oligonucleotide
uguugaaucuggucagcgc

SEQ ID NO: 273712 - RNA, 19 nt, Artificial Sequence
  Description of Artificial Sequence: Synthetic oligonucleotide
uuaagaccauaauuggcaa

SEQ ID NO: 273713 - RNA, 19 nt, Artificial Sequence
  Description of Artificial Sequence: Synthetic oligonucleotide
aaggcgcagacacauugug

SEQ ID NO: 273714 - RNA, 19 nt, Artificial Sequence
  Description of Artificial Sequence: Synthetic oligonucleotide
cuugugugucauacgauug

SEQ ID NO: 273715 - RNA, 19 nt, Artificial Sequence
  Description of Artificial Sequence: Synthetic oligonucleotide
ucaagugaguguagaagaa

SEQ ID NO: 273716 - RNA, 19 nt, Artificial Sequence
  Description of Artificial Sequence: Synthetic oligonucleotide
uaaaugcuggaguaggcua

SEQ ID NO: 273717 - RNA, 19 nt, Artificial Sequence
  Description of Artificial Sequence: Synthetic oligonucleotide
ugcauggcacuccauaguc

SEQ ID NO: 273718 - RNA, 19 nt, Artificial Sequence
  Description of Artificial Sequence: Synthetic oligonucleotide
uguccaauauggugggccc

SEQ ID NO: 273719 - RNA, 19 nt, Artificial Sequence
  Description of Artificial Sequence: Synthetic oligonucleotide
uaaauccccuucucuugcg

SEQ ID NO: 273720 - RNA, 19 nt, Artificial Sequence
  Description of Artificial Sequence: Synthetic oligonucleotide
ugguauuaugcuucuuaca

SEQ ID NO: 273721 - RNA, 19 nt, Artificial Sequence
  Description of Artificial Sequence: Synthetic oligonucleotide
aaaugguaauacuguccga

SEQ ID NO: 273722 - RNA, 19 nt, Artificial Sequence
  Description of Artificial Sequence: Synthetic oligonucleotide
cucgaggcaagauauucug

SEQ ID NO: 273723 - RNA, 19 nt, Artificial Sequence
  Description of Artificial Sequence: Synthetic oligonucleotide
ucgacuacugaugucaaau

SEQ ID NO: 273724 - RNA, 19 nt, Artificial Sequence
  Description of Artificial Sequence: Synthetic oligonucleotide
auagacaucucgaugggga

SEQ ID NO: 273725 - RNA, 19 nt, Artificial Sequence
  Description of Artificial Sequence: Synthetic oligonucleotide
acucaugucggggaaggcg

SEQ ID NO: 273726 - RNA, 19 nt, Artificial Sequence
  Description of Artificial Sequence: Synthetic oligonucleotide
augcaaauaucuggucugc

SEQ ID NO: 273727 - RNA, 19 nt, Artificial Sequence
  Description of Artificial Sequence: Synthetic oligonucleotide
gcauauacaauuuuagucu

SEQ ID NO: 273728 - RNA, 19 nt, Artificial Sequence
  Description of Artificial Sequence: Synthetic oligonucleotide
uugcgauugcaauuugcug

SEQ ID NO: 273729 - RNA, 19 nt, Artificial Sequence
  Description of Artificial Sequence: Synthetic oligonucleotide
agagacuuguacauggcug

SEQ ID NO: 273730 - RNA, 19 nt, Artificial Sequence
  Description of Artificial Sequence: Synthetic oligonucleotide
gguagcagaaauccaacac

SEQ ID NO: 273731 - RNA, 19 nt, Artificial Sequence
  Description of Artificial Sequence: Synthetic oligonucleotide
ucugccucgauuucgucau

SEQ ID NO: 273732 - RNA, 19 nt, Artificial Sequence
  Description of Artificial Sequence: Synthetic oligonucleotide
agcuacuggaacauucaac

SEQ ID NO: 273733 - RNA, 19 nt, Artificial Sequence
  Description of Artificial Sequence: Synthetic oligonucleotide
ccauuauagcaguaguugg

SEQ ID NO: 273734 - RNA, 19 nt, Artificial Sequence
  Description of Artificial Sequence: Synthetic oligonucleotide
uguuccacagguguacucu

SEQ ID NO: 273735 - RNA, 19 nt, Artificial Sequence
  Description of Artificial Sequence: Synthetic oligonucleotide
uucggaucguaaccguuug

SEQ ID NO: 273736 - RNA, 19 nt, Artificial Sequence
  Description of Artificial Sequence: Synthetic oligonucleotide
ugcguuaggcuguuugucu

SEQ ID NO: 273737 - RNA, 19 nt, Artificial Sequence
  Description of Artificial Sequence: Synthetic oligonucleotide
cacgcuguguaaucaggcg

SEQ ID NO: 273738 - RNA, 19 nt, Artificial Sequence
  Description of Artificial Sequence: Synthetic oligonucleotide
auuuuauagcuagcuacug

SEQ ID NO: 273739 - RNA, 19 nt, Artificial Sequence
  Description of Artificial Sequence: Synthetic oligonucleotide
uacugaugucaaaucuuca

SEQ ID NO: 273740 - RNA, 19 nt, Artificial Sequence
  Description of Artificial Sequence: Synthetic oligonucleotide
cauugaaggguucgugccc

SEQ ID NO: 273741 - RNA, 19 nt, Artificial Sequence
  Description of Artificial Sequence: Synthetic oligonucleotide
ugagcgcugucauuguaca

SEQ ID NO: 273742 - RNA, 19 nt, Artificial Sequence
  Description of Artificial Sequence: Synthetic oligonucleotide
ugugcguuaggcuguuugu

SEQ ID NO: 273743 - RNA, 19 nt, Artificial Sequence
  Description of Artificial Sequence: Synthetic oligonucleotide
guggauagguggcuggaag

SEQ ID NO: 273744 - RNA, 19 nt, Artificial Sequence
  Description of Artificial Sequence: Synthetic oligonucleotide
ucacuuucaaaucgcccaa

SEQ ID NO: 273745 - RNA, 19 nt, Artificial Sequence
  Description of Artificial Sequence: Synthetic oligonucleotide
agcucgacuacugauguca

SEQ ID NO: 273746 - RNA, 19 nt, Artificial Sequence
  Description of Artificial Sequence: Synthetic oligonucleotide
ucuuucacguggacucgag

SEQ ID NO: 273747 - RNA, 19 nt, Artificial Sequence
  Description of Artificial Sequence: Synthetic oligonucleotide
acacgcuguguaaucaggc

SEQ ID NO: 273748 - RNA, 19 nt, Artificial Sequence
  Description of Artificial Sequence: Synthetic oligonucleotide
agagccguacucaugucgg

SEQ ID NO: 273749 - RNA, 19 nt, Artificial Sequence
  Description of Artificial Sequence: Synthetic oligonucleotide
gacaagaugcaguggggca

SEQ ID NO: 273750 - RNA, 19 nt, Artificial Sequence
  Description of Artificial Sequence: Synthetic oligonucleotide
agaacucucggaaccacag

SEQ ID NO: 273751 - RNA, 19 nt, Artificial Sequence
  Description of Artificial Sequence: Synthetic oligonucleotide
augguagcagaaauccaac

SEQ ID NO: 273752 - RNA, 19 nt, Artificial Sequence
  Description of Artificial Sequence: Synthetic oligonucleotide
gacacgcuguguaaucagg

SEQ ID NO: 273753 - RNA, 19 nt, Artificial Sequence
  Description of Artificial Sequence: Synthetic oligonucleotide
ucauacgauugauuucuaa

SEQ ID NO: 273754 - RNA, 19 nt, Artificial Sequence
  Description of Artificial Sequence: Synthetic oligonucleotide
uaaggacugguggauaggu

SEQ ID NO: 273755 - RNA, 19 nt, Artificial Sequence
  Description of Artificial Sequence: Synthetic oligonucleotide
aacuugcggauccucucca

SEQ ID NO: 273756 - RNA, 19 nt, Artificial Sequence
  Description of Artificial Sequence: Synthetic oligonucleotide
agacacgcuguguaaucag

SEQ ID NO: 273757 - RNA, 19 nt, Artificial Sequence
  Description of Artificial Sequence: Synthetic oligonucleotide
uucucuugcgauugcaauu

SEQ ID NO: 273758 - RNA, 19 nt, Artificial Sequence
  Description of Artificial Sequence: Synthetic oligonucleotide
aaacucgugugucccuaca

SEQ ID NO: 273759 - RNA, 19 nt, Artificial Sequence
  Description of Artificial Sequence: Synthetic oligonucleotide
uaaggcgcagacacauugu

SEQ ID NO: 273760 - RNA, 19 nt, Artificial Sequence
  Description of Artificial Sequence: Synthetic oligonucleotide
uuucgaacuuagcccucag

SEQ ID NO: 273761 - RNA, 19 nt, Artificial Sequence
  Description of Artificial Sequence: Synthetic oligonucleotide
cuguaaacucguguguccc

SEQ ID NO: 273762 - RNA, 19 nt, Artificial Sequence
  Description of Artificial Sequence: Synthetic oligonucleotide
uguaaacucgugugucccu

SEQ ID NO: 273763 - RNA, 19 nt, Artificial Sequence
  Description of Artificial Sequence: Synthetic oligonucleotide
cagcguacauguuccacag

SEQ ID NO: 273764 - RNA, 19 nt, Artificial Sequence
  Description of Artificial Sequence: Synthetic oligonucleotide
acgcuguguaaucaggcga

SEQ ID NO: 273765 - RNA, 19 nt, Artificial Sequence
  Description of Artificial Sequence: Synthetic oligonucleotide
acgugucucugcuucaaca

SEQ ID NO: 273766 - RNA, 19 nt, Artificial Sequence
  Description of Artificial Sequence: Synthetic oligonucleotide
caaaucgcccaauggccag

SEQ ID NO: 273767 - RNA, 19 nt, Artificial Sequence
  Description of Artificial Sequence: Synthetic oligonucleotide
gugaguguagaagaaugac

SEQ ID NO: 273768 - RNA, 19 nt, Artificial Sequence
  Description of Artificial Sequence: Synthetic oligonucleotide
acguacuccaucauugaug

SEQ ID NO: 273769 - RNA, 19 nt, Artificial Sequence
  Description of Artificial Sequence: Synthetic oligonucleotide
cuaagaggccaucuagcuc

SEQ ID NO: 273770 - RNA, 19 nt, Artificial Sequence
  Description of Artificial Sequence: Synthetic oligonucleotide
ucucuugcgauugcaauuu

SEQ ID NO: 273771 - RNA, 19 nt, Artificial Sequence
  Description of Artificial Sequence: Synthetic oligonucleotide
ccauaaccuuguaauaugc

SEQ ID NO: 273772 - RNA, 19 nt, Artificial Sequence
  Description of Artificial Sequence: Synthetic oligonucleotide
cauagacaucucgaugggg

SEQ ID NO: 273773 - RNA, 19 nt, Artificial Sequence
  Description of Artificial Sequence: Synthetic oligonucleotide
auauggugggccccucaag

SEQ ID NO: 273774 - RNA, 19 nt, Artificial Sequence
  Description of Artificial Sequence: Synthetic oligonucleotide
gggguugugcguuaggcug

SEQ ID NO: 273775 - RNA, 19 nt, Artificial Sequence
  Description of Artificial Sequence: Synthetic oligonucleotide
agcgcugucauuguacaga

SEQ ID NO: 273776 - RNA, 19 nt, Artificial Sequence
  Description of Artificial Sequence: Synthetic oligonucleotide
gcuaaggacugguggauag

SEQ ID NO: 273777 - RNA, 19 nt, Artificial Sequence
  Description of Artificial Sequence: Synthetic oligonucleotide
gacaauuaucauacagcca

SEQ ID NO: 273778 - RNA, 19 nt, Artificial Sequence
  Description of Artificial Sequence: Synthetic oligonucleotide
ugcaaauaucuggucugcc

SEQ ID NO: 273779 - RNA, 19 nt, Artificial Sequence
  Description of Artificial Sequence: Synthetic oligonucleotide
aauaccuguuaagaccaua

SEQ ID NO: 273780 - RNA, 19 nt, Artificial Sequence
  Description of Artificial Sequence: Synthetic oligonucleotide
agcagcguacauguuccac

SEQ ID NO: 273781 - RNA, 19 nt, Artificial Sequence
  Description of Artificial Sequence: Synthetic oligonucleotide
aggguucgugcccugucuc

SEQ ID NO: 273782 - RNA, 19 nt, Artificial Sequence
  Description of Artificial Sequence: Synthetic oligonucleotide
uaccuguuaagaccauaau

SEQ ID NO: 273783 - RNA, 19 nt, Artificial Sequence
  Description of Artificial Sequence: Synthetic oligonucleotide
uagcuacuggaacauucaa

SEQ ID NO: 273784 - RNA, 19 nt, Artificial Sequence
  Description of Artificial Sequence: Synthetic oligonucleotide
guagaggacguacuccauc

SEQ ID NO: 273785 - RNA, 19 nt, Artificial Sequence
  Description of Artificial Sequence: Synthetic oligonucleotide
caaaucgccucugcugucc

SEQ ID NO: 273786 - RNA, 19 nt, Artificial Sequence
  Description of Artificial Sequence: Synthetic oligonucleotide
uccgaacaaaccuguuggu

SEQ ID NO: 273787 - RNA, 19 nt, Artificial Sequence
  Description of Artificial Sequence: Synthetic oligonucleotide
cucuagcauaguucucacc

SEQ ID NO: 273788 - RNA, 19 nt, Artificial Sequence
  Description of Artificial Sequence: Synthetic oligonucleotide
cuaaggacugguggauagg

SEQ ID NO: 273789 - RNA, 19 nt, Artificial Sequence
  Description of Artificial Sequence: Synthetic oligonucleotide
ucagcgcauagugagcgcu

SEQ ID NO: 273790 - RNA, 19 nt, Artificial Sequence
  Description of Artificial Sequence: Synthetic oligonucleotide
ggucagcgcauagugagcg

SEQ ID NO: 273791 - RNA, 19 nt, Artificial Sequence
  Description of Artificial Sequence: Synthetic oligonucleotide
aagaugcaguggggcauac

SEQ ID NO: 273792 - RNA, 19 nt, Artificial Sequence
  Description of Artificial Sequence: Synthetic oligonucleotide
acuacugaugucaaaucuu

SEQ ID NO: 273793 - RNA, 19 nt, Artificial Sequence
  Description of Artificial Sequence: Synthetic oligonucleotide
gucaguaaauccccuucuc

SEQ ID NO: 273794 - RNA, 19 nt, Artificial Sequence
  Description of Artificial Sequence: Synthetic oligonucleotide
uaaacucgugugucccuac

SEQ ID NO: 273795 - RNA, 19 nt, Artificial Sequence
  Description of Artificial Sequence: Synthetic oligonucleotide
aggccaucuagcucgacua

SEQ ID NO: 273796 - RNA, 19 nt, Artificial Sequence
  Description of Artificial Sequence: Synthetic oligonucleotide
caacaauuggcaaccaggu

SEQ ID NO: 273797 - RNA, 19 nt, Artificial Sequence
  Description of Artificial Sequence: Synthetic oligonucleotide
cuguguaaucaggcgauug

SEQ ID NO: 273798 - RNA, 19 nt, Artificial Sequence
  Description of Artificial Sequence: Synthetic oligonucleotide
uguuucgaacuuagcccuc

SEQ ID NO: 273799 - RNA, 19 nt, Artificial Sequence
  Description of Artificial Sequence: Synthetic oligonucleotide
caaagccgcuccuugguca

SEQ ID NO: 273800 - RNA, 19 nt, Artificial Sequence
  Description of Artificial Sequence: Synthetic oligonucleotide
aucucgauggggaacugga

SEQ ID NO: 273801 - RNA, 19 nt, Artificial Sequence
  Description of Artificial Sequence: Synthetic oligonucleotide
gacuuguacauggcugcug

SEQ ID NO: 273802 - RNA, 19 nt, Artificial Sequence
  Description of Artificial Sequence: Synthetic oligonucleotide
ggaguagaggacguacucc

SEQ ID NO: 273803 - RNA, 19 nt, Artificial Sequence
  Description of Artificial Sequence: Synthetic oligonucleotide
gcgauugcaauuugcugug

SEQ ID NO: 273804 - RNA, 19 nt, Artificial Sequence
  Description of Artificial Sequence: Synthetic oligonucleotide
ucggaucguaaccguuugu

SEQ ID NO: 273805 - RNA, 19 nt, Artificial Sequence
  Description of Artificial Sequence: Synthetic oligonucleotide
aaaucgcccaauggccagu

SEQ ID NO: 273806 - RNA, 19 nt, Artificial Sequence
  Description of Artificial Sequence: Synthetic oligonucleotide
gggacucuagcauaguucu

SEQ ID NO: 273807 - RNA, 19 nt, Artificial Sequence
  Description of Artificial Sequence: Synthetic oligonucleotide
acucgaggcaagauauucu

SEQ ID NO: 273808 - RNA, 19 nt, Artificial Sequence
  Description of Artificial Sequence: Synthetic oligonucleotide
accuggaagugaggaggcc

SEQ ID NO: 273809 - RNA, 19 nt, Artificial Sequence
  Description of Artificial Sequence: Synthetic oligonucleotide
ucgccaaagcacugcucca

SEQ ID NO: 273810 - RNA, 19 nt, Artificial Sequence
  Description of Artificial Sequence: Synthetic oligonucleotide
uggaaccauuauagcagua

SEQ ID NO: 273811 - RNA, 19 nt, Artificial Sequence
  Description of Artificial Sequence: Synthetic oligonucleotide
gacaucucgauggggaacu

SEQ ID NO: 273812 - RNA, 19 nt, Artificial Sequence
  Description of Artificial Sequence: Synthetic oligonucleotide
aguuccgauagcugccaua

SEQ ID NO: 273813 - RNA, 19 nt, Artificial Sequence
  Description of Artificial Sequence: Synthetic oligonucleotide
uagcuagcuacuggaacau

SEQ ID NO: 273814 - RNA, 19 nt, Artificial Sequence
  Description of Artificial Sequence: Synthetic oligonucleotide
gcuagcuacuggaacauuc

SEQ ID NO: 273815 - RNA, 19 nt, Artificial Sequence
  Description of Artificial Sequence: Synthetic oligonucleotide
cuagcucgacuacugaugu

SEQ ID NO: 273816 - RNA, 19 nt, Artificial Sequence
  Description of Artificial Sequence: Synthetic oligonucleotide
gguggauuguggcucccug

SEQ ID NO: 273817 - RNA, 19 nt, Artificial Sequence
  Description of Artificial Sequence: Synthetic oligonucleotide
agcccaucgccaaagcacu

SEQ ID NO: 273818 - RNA, 19 nt, Artificial Sequence
  Description of Artificial Sequence: Synthetic oligonucleotide
auucggaucguaaccguuu

SEQ ID NO: 273819 - RNA, 19 nt, Artificial Sequence
  Description of Artificial Sequence: Synthetic oligonucleotide
guuucgaacuuagcccuca

SEQ ID NO: 273820 - RNA, 19 nt, Artificial Sequence
  Description of Artificial Sequence: Synthetic oligonucleotide
cauggauagcccacagcaa

SEQ ID NO: 273821 - RNA, 19 nt, Artificial Sequence
  Description of Artificial Sequence: Synthetic oligonucleotide
ggcgcagacacauuguggu

SEQ ID NO: 273822 - RNA, 19 nt, Artificial Sequence
  Description of Artificial Sequence: Synthetic oligonucleotide
cacgugcaugaccccauug

SEQ ID NO: 273823 - RNA, 19 nt, Artificial Sequence
  Description of Artificial Sequence: Synthetic oligonucleotide
agaggacguacuccaucau

SEQ ID NO: 273824 - RNA, 19 nt, Artificial Sequence
  Description of Artificial Sequence: Synthetic oligonucleotide
caucgccaaagcacugcuc

SEQ ID NO: 273825 - RNA, 19 nt, Artificial Sequence
  Description of Artificial Sequence: Synthetic oligonucleotide
gucagcgcauagugagcgc

SEQ ID NO: 273826 - RNA, 19 nt, Artificial Sequence
  Description of Artificial Sequence: Synthetic oligonucleotide
uugaugccucuuuggucuc

SEQ ID NO: 273827 - RNA, 19 nt, Artificial Sequence
  Description of Artificial Sequence: Synthetic oligonucleotide
gacguacuccaucauugau

SEQ ID NO: 273828 - RNA, 19 nt, Artificial Sequence
  Description of Artificial Sequence: Synthetic oligonucleotide
aagcacugcuccacuguaa

SEQ ID NO: 273829 - RNA, 19 nt, Artificial Sequence
  Description of Artificial Sequence: Synthetic oligonucleotide
cagcgcauagugagcgcug

SEQ ID NO: 273830 - RNA, 19 nt, Artificial Sequence
  Description of Artificial Sequence: Synthetic oligonucleotide
gugcguuaggcuguuuguc

SEQ ID NO: 273831 - RNA, 19 nt, Artificial Sequence
  Description of Artificial Sequence: Synthetic oligonucleotide
guacuccaucauugaugcc

SEQ ID NO: 273832 - RNA, 19 nt, Artificial Sequence
  Description of Artificial Sequence: Synthetic oligonucleotide
agaccauaauuggcaacaa

SEQ ID NO: 273833 - RNA, 19 nt, Artificial Sequence
  Description of Artificial Sequence: Synthetic oligonucleotide
accguuugucaagaagcaa

SEQ ID NO: 273834 - RNA, 19 nt, Artificial Sequence
  Description of Artificial Sequence: Synthetic oligonucleotide
cgaacuuagcccucagcug

SEQ ID NO: 273835 - RNA, 19 nt, Artificial Sequence
  Description of Artificial Sequence: Synthetic oligonucleotide
guaaacucgugugucccua

SEQ ID NO: 273836 - RNA, 19 nt, Artificial Sequence
  Description of Artificial Sequence: Synthetic oligonucleotide
agcgcauagugagcgcugu

SEQ ID NO: 273837 - RNA, 19 nt, Artificial Sequence
  Description of Artificial Sequence: Synthetic oligonucleotide
uagcucgacuacugauguc

SEQ ID NO: 273838 - RNA, 19 nt, Artificial Sequence
  Description of Artificial Sequence: Synthetic oligonucleotide
ccgaacaaaccuguuggug

SEQ ID NO: 273839 - RNA, 19 nt, Artificial Sequence
  Description of Artificial Sequence: Synthetic oligonucleotide
ggguucgugcccugucucc

SEQ ID NO: 273840 - RNA, 19 nt, Artificial Sequence
  Description of Artificial Sequence: Synthetic oligonucleotide
ggucaguaaauccccuucu

SEQ ID NO: 273841 - RNA, 19 nt, Artificial Sequence
  Description of Artificial Sequence: Synthetic oligonucleotide
agcuugugugucauacgau

SEQ ID NO: 273842 - RNA, 19 nt, Artificial Sequence
  Description of Artificial Sequence: Synthetic oligonucleotide
aggcuacuucucaagguuu

SEQ ID NO: 273843 - RNA, 19 nt, Artificial Sequence
  Description of Artificial Sequence: Synthetic oligonucleotide
ccagaaagguccggauccg

SEQ ID NO: 273844 - RNA, 19 nt, Artificial Sequence
  Description of Artificial Sequence: Synthetic oligonucleotide
cucgacuacugaugucaaa

SEQ ID NO: 273845 - RNA, 19 nt, Artificial Sequence
  Description of Artificial Sequence: Synthetic oligonucleotide
cugucuagugugagguacu

SEQ ID NO: 273846 - RNA, 19 nt, Artificial Sequence
  Description of Artificial Sequence: Synthetic oligonucleotide
acaucucgauggggaacug

SEQ ID NO: 273847 - RNA, 19 nt, Artificial Sequence
  Description of Artificial Sequence: Synthetic oligonucleotide
ggccaucuagcucgacuac

SEQ ID NO: 273848 - RNA, 19 nt, Artificial Sequence
  Description of Artificial Sequence: Synthetic oligonucleotide
caguggagcccaucgccaa

SEQ ID NO: 273849 - RNA, 19 nt, Artificial Sequence
  Description of Artificial Sequence: Synthetic oligonucleotide
gccuuucaaucagugggac

SEQ ID NO: 273850 - RNA, 19 nt, Artificial Sequence
  Description of Artificial Sequence: Synthetic oligonucleotide
acguggacucgaggcaaga

SEQ ID NO: 273851 - RNA, 19 nt, Artificial Sequence
  Description of Artificial Sequence: Synthetic oligonucleotide
cauucggaucguaaccguu

SEQ ID NO: 273852 - RNA, 19 nt, Artificial Sequence
  Description of Artificial Sequence: Synthetic oligonucleotide
cggaucguaaccguuuguc

SEQ ID NO: 273853 - RNA, 19 nt, Artificial Sequence
  Description of Artificial Sequence: Synthetic oligonucleotide
gcaaaucgccucugcuguc

SEQ ID NO: 273854 - RNA, 19 nt, Artificial Sequence
  Description of Artificial Sequence: Synthetic oligonucleotide
gcgauugaggucaauggau

SEQ ID NO: 273855 - RNA, 19 nt, Artificial Sequence
  Description of Artificial Sequence: Synthetic oligonucleotide
cauagugagcgcugucauu

SEQ ID NO: 273856 - RNA, 19 nt, Artificial Sequence
  Description of Artificial Sequence: Synthetic oligonucleotide
cccaauggccaguucuaga

SEQ ID NO: 273857 - RNA, 19 nt, Artificial Sequence
  Description of Artificial Sequence: Synthetic oligonucleotide
gucauacgauugauuucua

SEQ ID NO: 273858 - RNA, 19 nt, Artificial Sequence
  Description of Artificial Sequence: Synthetic oligonucleotide
gcauucggaucguaaccgu

SEQ ID NO: 273859 - RNA, 19 nt, Artificial Sequence
  Description of Artificial Sequence: Synthetic oligonucleotide
gguggauagguggcuggaa

SEQ ID NO: 273860 - RNA, 19 nt, Artificial Sequence
  Description of Artificial Sequence: Synthetic oligonucleotide
gccaguuuguaaacaaauu

SEQ ID NO: 273861 - RNA, 19 nt, Artificial Sequence
  Description of Artificial Sequence: Synthetic oligonucleotide
ggaguaggcuagguucaaa

SEQ ID NO: 273862 - RNA, 19 nt, Artificial Sequence
  Description of Artificial Sequence: Synthetic oligonucleotide
gcgcugucauuguacagau

SEQ ID NO: 273863 - RNA, 19 nt, Artificial Sequence
  Description of Artificial Sequence: Synthetic oligonucleotide
gcucgaugagcaggcagaa

SEQ ID NO: 273864 - RNA, 19 nt, Artificial Sequence
  Description of Artificial Sequence: Synthetic oligonucleotide
cgugucaggaugaccucaa

SEQ ID NO: 273865 - RNA, 19 nt, Artificial Sequence
  Description of Artificial Sequence: Synthetic oligonucleotide
gcgcauagugagcgcuguc

SEQ ID NO: 273866 - RNA, 19 nt, Artificial Sequence
  Description of Artificial Sequence: Synthetic oligonucleotide
cacuuucaaaucgcccaau

SEQ ID NO: 273867 - RNA, 19 nt, Artificial Sequence
  Description of Artificial Sequence: Synthetic oligonucleotide
ggguugugcguuaggcugu

SEQ ID NO: 273868 - RNA, 19 nt, Artificial Sequence
  Description of Artificial Sequence: Synthetic oligonucleotide
gcucgacuacugaugucaa

SEQ ID NO: 273869 - RNA, 19 nt, Artificial Sequence
  Description of Artificial Sequence: Synthetic oligonucleotide
ccccuucucuugcgauugc

SEQ ID NO: 273870 - RNA, 19 nt, Artificial Sequence
  Description of Artificial Sequence: Synthetic oligonucleotide
ggauuguggcucccugauu

SEQ ID NO: 273871 - RNA, 19 nt, Artificial Sequence
  Description of Artificial Sequence: Synthetic oligonucleotide
ccguacucaugucggggaa

SEQ ID NO: 273872 - RNA, 19 nt, Artificial Sequence
  Description of Artificial Sequence: Synthetic oligonucleotide
ccccuuaaguagguucaga

SEQ ID NO: 273873 - RNA, 19 nt, Artificial Sequence
  Description of Artificial Sequence: Synthetic oligonucleotide
cgcuguguaaucaggcgau

SEQ ID NO: 273874 - RNA, 19 nt, Artificial Sequence
  Description of Artificial Sequence: Synthetic oligonucleotide
gcgucucauagcgguuaga

SEQ ID NO: 273875 - RNA, 19 nt, Artificial Sequence
  Description of Artificial Sequence: Synthetic oligonucleotide
gcgcagacacauugugguu

SEQ ID NO: 273876 - RNA, 19 nt, Artificial Sequence
  Description of Artificial Sequence: Synthetic oligonucleotide
gcuguguaaucaggcgauu

SEQ ID NO: 273877 - RNA, 19 nt, Artificial Sequence
  Description of Artificial Sequence: Synthetic oligonucleotide
gguugugcguuaggcuguu

SEQ ID NO: 273878 - RNA, 19 nt, Artificial Sequence
  Description of Artificial Sequence: Synthetic oligonucleotide
ggacucgaggcaagauauu

SEQ ID NO: 273879 - RNA, 19 nt, Artificial Sequence
  Description of Artificial Sequence: Synthetic oligonucleotide
guugugcguuaggcuguuu

SEQ ID NO: 273880 - RNA, 19 nt, Artificial Sequence
  Description of Artificial Sequence: Synthetic oligonucleotide
cguggacucgaggcaagau

SEQ ID NO: 273881 - RNA, 19 nt, Artificial Sequence
  Description of Artificial Sequence: Synthetic oligonucleotide
ccccgccagaugggaucau

SEQ ID NO: 273882 - RNA, 19 nt, Artificial Sequence
  Description of Artificial Sequence: Synthetic oligonucleotide
aaugaguaagaucuuuacc

SEQ ID NO: 273883 - RNA, 19 nt, Artificial Sequence
  Description of Artificial Sequence: Synthetic oligonucleotide
aaaauauucauccgauacg

SEQ ID NO: 273884 - RNA, 19 nt, Artificial Sequence
  Description of Artificial Sequence: Synthetic oligonucleotide
aauagagauauuuaacaug

SEQ ID NO: 273885 - RNA, 19 nt, Artificial Sequence
  Description of Artificial Sequence: Synthetic oligonucleotide
uccgauacgaaucuuaucc

SEQ ID NO: 273886 - RNA, 19 nt, Artificial Sequence
  Description of Artificial Sequence: Synthetic oligonucleotide
acaacuuagauuuuggaug

SEQ ID NO: 273887 - RNA, 19 nt, Artificial Sequence
  Description of Artificial Sequence: Synthetic oligonucleotide
aauauuaaauaccuuuggu

SEQ ID NO: 273888 - RNA, 19 nt, Artificial Sequence
  Description of Artificial Sequence: Synthetic oligonucleotide
uucacaauccaacugugcg

SEQ ID NO: 273889 - RNA, 19 nt, Artificial Sequence
  Description of Artificial Sequence: Synthetic oligonucleotide
aaucauacuugucagauau

SEQ ID NO: 273890 - RNA, 19 nt, Artificial Sequence
  Description of Artificial Sequence: Synthetic oligonucleotide
uuuaauucaaauagucacc

SEQ ID NO: 273891 - RNA, 19 nt, Artificial Sequence
  Description of Artificial Sequence: Synthetic oligonucleotide
uauuaagcauuuuacaagc

SEQ ID NO: 273892 - RNA, 19 nt, Artificial Sequence
  Description of Artificial Sequence: Synthetic oligonucleotide
aacagguauagucaagagg

SEQ ID NO: 273893 - RNA, 19 nt, Artificial Sequence
  Description of Artificial Sequence: Synthetic oligonucleotide
ugaccuaucaauucuauug

SEQ ID NO: 273894 - RNA, 19 nt, Artificial Sequence
  Description of Artificial Sequence: Synthetic oligonucleotide
aauaguugaucucaugugu

SEQ ID NO: 273895 - RNA, 19 nt, Artificial Sequence
  Description of Artificial Sequence: Synthetic oligonucleotide
uaaagaaacgcuuugccca

SEQ ID NO: 273896 - RNA, 19 nt, Artificial Sequence
  Description of Artificial Sequence: Synthetic oligonucleotide
uuuucguaacuuuacgugg

SEQ ID NO: 273897 - RNA, 19 nt, Artificial Sequence
  Description of Artificial Sequence: Synthetic oligonucleotide
augaguaagaucuuuacca

SEQ ID NO: 273898 - RNA, 19 nt, Artificial Sequence
  Description of Artificial Sequence: Synthetic oligonucleotide
ugugacaacucucucaugc

SEQ ID NO: 273899 - RNA, 19 nt, Artificial Sequence
  Description of Artificial Sequence: Synthetic oligonucleotide
aaauaggauguguccauac

SEQ ID NO: 273900 - RNA, 19 nt, Artificial Sequence
  Description of Artificial Sequence: Synthetic oligonucleotide
aacuaaucuccacaccagc

SEQ ID NO: 273901 - RNA, 19 nt, Artificial Sequence
  Description of Artificial Sequence: Synthetic oligonucleotide
aagugaacuccuuaaauga

SEQ ID NO: 273902 - RNA, 19 nt, Artificial Sequence
  Description of Artificial Sequence: Synthetic oligonucleotide
agauauuuaacaugauuag

SEQ ID NO: 273903 - RNA, 19 nt, Artificial Sequence
  Description of Artificial Sequence: Synthetic oligonucleotide
acauacaccauuuagacuu

SEQ ID NO: 273904 - RNA, 19 nt, Artificial Sequence
  Description of Artificial Sequence: Synthetic oligonucleotide
auacuugucagauauccuc

SEQ ID NO: 273905 - RNA, 19 nt, Artificial Sequence
  Description of Artificial Sequence: Synthetic oligonucleotide
aguauuaagcauuuuacaa

SEQ ID NO: 273906 - RNA, 19 nt, Artificial Sequence
  Description of Artificial Sequence: Synthetic oligonucleotide
aaagaaacgcuuugcccac

SEQ ID NO: 273907 - RNA, 19 nt, Artificial Sequence
  Description of Artificial Sequence: Synthetic oligonucleotide
aaauauucauccgauacga

SEQ ID NO: 273908 - RNA, 19 nt, Artificial Sequence
  Description of Artificial Sequence: Synthetic oligonucleotide
uuaaccaggagacaaccug

SEQ ID NO: 273909 - RNA, 19 nt, Artificial Sequence
  Description of Artificial Sequence: Synthetic oligonucleotide
uuagauuuuggauggagac

SEQ ID NO: 273910 - RNA, 19 nt, Artificial Sequence
  Description of Artificial Sequence: Synthetic oligonucleotide
aacacuuuuaaauccugcu

SEQ ID NO: 273911 - RNA, 19 nt, Artificial Sequence
  Description of Artificial Sequence: Synthetic oligonucleotide
cauuuagacuuguauaugc

SEQ ID NO: 273912 - RNA, 19 nt, Artificial Sequence
  Description of Artificial Sequence: Synthetic oligonucleotide
uuucguaacuuuacguggg

SEQ ID NO: 273913 - RNA, 19 nt, Artificial Sequence
  Description of Artificial Sequence: Synthetic oligonucleotide
uaaguguggggaaacuucg

SEQ ID NO: 273914 - RNA, 19 nt, Artificial Sequence
  Description of Artificial Sequence: Synthetic oligonucleotide
aaauccaagucuuucuaca

SEQ ID NO: 273915 - RNA, 19 nt, Artificial Sequence
  Description of Artificial Sequence: Synthetic oligonucleotide
uccacaacgcuuaaccagg

SEQ ID NO: 273916 - RNA, 19 nt, Artificial Sequence
  Description of Artificial Sequence: Synthetic oligonucleotide
uuaagcauuuuacaagcga

SEQ ID NO: 273917 - RNA, 19 nt, Artificial Sequence
  Description of Artificial Sequence: Synthetic oligonucleotide
uguacaaguguauggagca

SEQ ID NO: 273918 - RNA, 19 nt, Artificial Sequence
  Description of Artificial Sequence: Synthetic oligonucleotide
uauucauccgauacgaauc

SEQ ID NO: 273919 - RNA, 19 nt, Artificial Sequence
  Description of Artificial Sequence: Synthetic oligonucleotide
ucuaaguaccgaaucagcu

SEQ ID NO: 273920 - RNA, 19 nt, Artificial Sequence
  Description of Artificial Sequence: Synthetic oligonucleotide
aacuuuacgugggacacac

SEQ ID NO: 273921 - RNA, 19 nt, Artificial Sequence
  Description of Artificial Sequence: Synthetic oligonucleotide
ugugaguguauacacauau

SEQ ID NO: 273922 - RNA, 19 nt, Artificial Sequence
  Description of Artificial Sequence: Synthetic oligonucleotide
uuucaguugccaaagagua

SEQ ID NO: 273923 - RNA, 19 nt, Artificial Sequence
  Description of Artificial Sequence: Synthetic oligonucleotide
uuuuggauggagacaauga

SEQ ID NO: 273924 - RNA, 19 nt, Artificial Sequence
  Description of Artificial Sequence: Synthetic oligonucleotide
uuuauuugaugauucaaua

SEQ ID NO: 273925 - RNA, 19 nt, Artificial Sequence
  Description of Artificial Sequence: Synthetic oligonucleotide
agaaucgcaggguaguuuc

SEQ ID NO: 273926 - RNA, 19 nt, Artificial Sequence
  Description of Artificial Sequence: Synthetic oligonucleotide
gauucaggaugccaguggg

SEQ ID NO: 273927 - RNA, 19 nt, Artificial Sequence
  Description of Artificial Sequence: Synthetic oligonucleotide
uaugcaaucccuugacucc

SEQ ID NO: 273928 - RNA, 19 nt, Artificial Sequence
  Description of Artificial Sequence: Synthetic oligonucleotide
uuauugagcaggucuagug

SEQ ID NO: 273929 - RNA, 19 nt, Artificial Sequence
  Description of Artificial Sequence: Synthetic oligonucleotide
aagacaacuaaugacuccu

SEQ ID NO: 273930 - RNA, 19 nt, Artificial Sequence
  Description of Artificial Sequence: Synthetic oligonucleotide
gaugacucuaaacucuagc

SEQ ID NO: 273931 - RNA, 19 nt, Artificial Sequence
  Description of Artificial Sequence: Synthetic oligonucleotide
uuacaagcgauguauuaug

SEQ ID NO: 273932 - RNA, 19 nt, Artificial Sequence
  Description of Artificial Sequence: Synthetic oligonucleotide
aacuucgggcuguggaugc

SEQ ID NO: 273933 - RNA, 19 nt, Artificial Sequence
  Description of Artificial Sequence: Synthetic oligonucleotide
uuuguagcucuaagaauag

SEQ ID NO: 273934 - RNA, 19 nt, Artificial Sequence
  Description of Artificial Sequence: Synthetic oligonucleotide
uauugagcaggucuaguga

SEQ ID NO: 273935 - RNA, 19 nt, Artificial Sequence
  Description of Artificial Sequence: Synthetic oligonucleotide
caaauagucaccacauaac

SEQ ID NO: 273936 - RNA, 19 nt, Artificial Sequence
  Description of Artificial Sequence: Synthetic oligonucleotide
accauuuagacuuguauau

SEQ ID NO: 273937 - RNA, 19 nt, Artificial Sequence
  Description of Artificial Sequence: Synthetic oligonucleotide
uaaaugauauaccucugua

SEQ ID NO: 273938 - RNA, 19 nt, Artificial Sequence
  Description of Artificial Sequence: Synthetic oligonucleotide
caagcgauguauuaugcug

SEQ ID NO: 273939 - RNA, 19 nt, Artificial Sequence
  Description of Artificial Sequence: Synthetic oligonucleotide
cuuuacgugggacacacug

SEQ ID NO: 273940 - RNA, 19 nt, Artificial Sequence
  Description of Artificial Sequence: Synthetic oligonucleotide
ucuauugacuuccccauuc

SEQ ID NO: 273941 - RNA, 19 nt, Artificial Sequence
  Description of Artificial Sequence: Synthetic oligonucleotide
ucuuauccugauuugauuu

SEQ ID NO: 273942 - RNA, 19 nt, Artificial Sequence
  Description of Artificial Sequence: Synthetic oligonucleotide
uguauuuguacaaguguau

SEQ ID NO: 273943 - RNA, 19 nt, Artificial Sequence
  Description of Artificial Sequence: Synthetic oligonucleotide
uaagaauagaaguggguau

SEQ ID NO: 273944 - RNA, 19 nt, Artificial Sequence
  Description of Artificial Sequence: Synthetic oligonucleotide
uucuaaguaccgaaucagc

SEQ ID NO: 273945 - RNA, 19 nt, Artificial Sequence
  Description of Artificial Sequence: Synthetic oligonucleotide
aacauacaccauuuagacu

SEQ ID NO: 273946 - RNA, 19 nt, Artificial Sequence
  Description of Artificial Sequence: Synthetic oligonucleotide
uggaaaauauucauccgau

SEQ ID NO: 273947 - RNA, 19 nt, Artificial Sequence
  Description of Artificial Sequence: Synthetic oligonucleotide
auaagugaacuccuuaaau

SEQ ID NO: 273948 - RNA, 19 nt, Artificial Sequence
  Description of Artificial Sequence: Synthetic oligonucleotide
aaaaugguaucuguccucu

SEQ ID NO: 273949 - RNA, 19 nt, Artificial Sequence
  Description of Artificial Sequence: Synthetic oligonucleotide
ugaguaagaucuuuaccac

SEQ ID NO: 273950 - RNA, 19 nt, Artificial Sequence
  Description of Artificial Sequence: Synthetic oligonucleotide
auauucauccgauacgaau

SEQ ID NO: 273951 - RNA, 19 nt, Artificial Sequence
  Description of Artificial Sequence: Synthetic oligonucleotide
acgaaucuuauccugauuu

SEQ ID NO: 273952 - RNA, 19 nt, Artificial Sequence
  Description of Artificial Sequence: Synthetic oligonucleotide
uucuagaacauacaccauu

SEQ ID NO: 273953 - RNA, 19 nt, Artificial Sequence
  Description of Artificial Sequence: Synthetic oligonucleotide
uguggaugcucccauuagc

SEQ ID NO: 273954 - RNA, 19 nt, Artificial Sequence
  Description of Artificial Sequence: Synthetic oligonucleotide
acaacgcuuaaccaggaga

SEQ ID NO: 273955 - RNA, 19 nt, Artificial Sequence
  Description of Artificial Sequence: Synthetic oligonucleotide
ucuagugacaaagcugaag

SEQ ID NO: 273956 - RNA, 19 nt, Artificial Sequence
  Description of Artificial Sequence: Synthetic oligonucleotide
ugcaguguagcacuguguc

SEQ ID NO: 273957 - RNA, 19 nt, Artificial Sequence
  Description of Artificial Sequence: Synthetic oligonucleotide
uggaacacuuuuaaauccu

SEQ ID NO: 273958 - RNA, 19 nt, Artificial Sequence
  Description of Artificial Sequence: Synthetic oligonucleotide
aaugguaucuguccucuuu

SEQ ID NO: 273959 - RNA, 19 nt, Artificial Sequence
  Description of Artificial Sequence: Synthetic oligonucleotide
uauuaugcugauuuucuuu

SEQ ID NO: 273960 - RNA, 19 nt, Artificial Sequence
  Description of Artificial Sequence: Synthetic oligonucleotide
caugauuagaaaagccaac

SEQ ID NO: 273961 - RNA, 19 nt, Artificial Sequence
  Description of Artificial Sequence: Synthetic oligonucleotide
auagucaagaggaaaauau

SEQ ID NO: 273962 - RNA, 19 nt, Artificial Sequence
  Description of Artificial Sequence: Synthetic oligonucleotide
aguuccgaggaguacagcu

SEQ ID NO: 273963 - RNA, 19 nt, Artificial Sequence
  Description of Artificial Sequence: Synthetic oligonucleotide
uuacgugggacacacugac

SEQ ID NO: 273964 - RNA, 19 nt, Artificial Sequence
  Description of Artificial Sequence: Synthetic oligonucleotide
accuaucaauucuauugac

SEQ ID NO: 273965 - RNA, 19 nt, Artificial Sequence
  Description of Artificial Sequence: Synthetic oligonucleotide
agaacauacaccauuuaga

SEQ ID NO: 273966 - RNA, 19 nt, Artificial Sequence
  Description of Artificial Sequence: Synthetic oligonucleotide
ucuuucuacauuguucaca

SEQ ID NO: 273967 - RNA, 19 nt, Artificial Sequence
  Description of Artificial Sequence: Synthetic oligonucleotide
ucgaucagguucuaaguac

SEQ ID NO: 273968 - RNA, 19 nt, Artificial Sequence
  Description of Artificial Sequence: Synthetic oligonucleotide
caaugaguaagaucuuuac

SEQ ID NO: 273969 - RNA, 19 nt, Artificial Sequence
  Description of Artificial Sequence: Synthetic oligonucleotide
auaaccuaggcacaguauu

SEQ ID NO: 273970 - RNA, 19 nt, Artificial Sequence
  Description of Artificial Sequence: Synthetic oligonucleotide
guugaaagcaaacaacuua

SEQ ID NO: 273971 - RNA, 19 nt, Artificial Sequence
  Description of Artificial Sequence: Synthetic oligonucleotide
cuaaguaccgaaucagcuc

SEQ ID NO: 273972 - RNA, 19 nt, Artificial Sequence
  Description of Artificial Sequence: Synthetic oligonucleotide
acuuuuaaauccugcugug

SEQ ID NO: 273973 - RNA, 19 nt, Artificial Sequence
  Description of Artificial Sequence: Synthetic oligonucleotide
uuuaccacaguugaccgaa

SEQ ID NO: 273974 - RNA, 19 nt, Artificial Sequence
  Description of Artificial Sequence: Synthetic oligonucleotide
uuuacgugggacacacuga

SEQ ID NO: 273975 - RNA, 19 nt, Artificial Sequence
  Description of Artificial Sequence: Synthetic oligonucleotide
auaggauguguccauacaa

SEQ ID NO: 273976 - RNA, 19 nt, Artificial Sequence
  Description of Artificial Sequence: Synthetic oligonucleotide
uuuaaauccugcuguggaa

SEQ ID NO: 273977 - RNA, 19 nt, Artificial Sequence
  Description of Artificial Sequence: Synthetic oligonucleotide
cuccacaacgcuuaaccag

SEQ ID NO: 273978 - RNA, 19 nt, Artificial Sequence
  Description of Artificial Sequence: Synthetic oligonucleotide
uccuuaaaugauauaccuc

SEQ ID NO: 273979 - RNA, 19 nt, Artificial Sequence
  Description of Artificial Sequence: Synthetic oligonucleotide
uauaucaucuuuguuccuc

SEQ ID NO: 273980 - RNA, 19 nt, Artificial Sequence
  Description of Artificial Sequence: Synthetic oligonucleotide
cuaaugacuccucuuggug

SEQ ID NO: 273981 - RNA, 19 nt, Artificial Sequence
  Description of Artificial Sequence: Synthetic oligonucleotide
aaguccaucugccaucgau

SEQ ID NO: 273982 - RNA, 19 nt, Artificial Sequence
  Description of Artificial Sequence: Synthetic oligonucleotide
uguguccauacaaugcagu

SEQ ID NO: 273983 - RNA, 19 nt, Artificial Sequence
  Description of Artificial Sequence: Synthetic oligonucleotide
gauugugcuuccuccaaac

SEQ ID NO: 273984 - RNA, 19 nt, Artificial Sequence
  Description of Artificial Sequence: Synthetic oligonucleotide
guagcucuaagaauagaag

SEQ ID NO: 273985 - RNA, 19 nt, Artificial Sequence
  Description of Artificial Sequence: Synthetic oligonucleotide
uccgguguuuccuuuacac

SEQ ID NO: 273986 - RNA, 19 nt, Artificial Sequence
  Description of Artificial Sequence: Synthetic oligonucleotide
caagacaacuaaugacucc

SEQ ID NO: 273987 - RNA, 19 nt, Artificial Sequence
  Description of Artificial Sequence: Synthetic oligonucleotide
gagaaguuacuaagugugg

SEQ ID NO: 273988 - RNA, 19 nt, Artificial Sequence
  Description of Artificial Sequence: Synthetic oligonucleotide
uccacauaaucccauccaa

SEQ ID NO: 273989 - RNA, 19 nt, Artificial Sequence
  Description of Artificial Sequence: Synthetic oligonucleotide
accgaagcaucugauggcc

SEQ ID NO: 273990 - RNA, 19 nt, Artificial Sequence
  Description of Artificial Sequence: Synthetic oligonucleotide
acuaaugacuccucuuggu

SEQ ID NO: 273991 - RNA, 19 nt, Artificial Sequence
  Description of Artificial Sequence: Synthetic oligonucleotide
auaguugaucucauguguc

SEQ ID NO: 273992 - RNA, 19 nt, Artificial Sequence
  Description of Artificial Sequence: Synthetic oligonucleotide
gagcagaguuuauagguac

SEQ ID NO: 273993 - RNA, 19 nt, Artificial Sequence
  Description of Artificial Sequence: Synthetic oligonucleotide
aguuacuaaguguggaaaa

SEQ ID NO: 273994 - RNA, 19 nt, Artificial Sequence
  Description of Artificial Sequence: Synthetic oligonucleotide
ccaaagaguacaaaauaag

SEQ ID NO: 273995 - RNA, 19 nt, Artificial Sequence
  Description of Artificial Sequence: Synthetic oligonucleotide
acaccauuuagacuuguau

SEQ ID NO: 273996 - RNA, 19 nt, Artificial Sequence
  Description of Artificial Sequence: Synthetic oligonucleotide
ugcaacuaaucuccacacc

SEQ ID NO: 273997 - RNA, 19 nt, Artificial Sequence
  Description of Artificial Sequence: Synthetic oligonucleotide
aaguuacuaaguguggaaa

SEQ ID NO: 273998 - RNA, 19 nt, Artificial Sequence
  Description of Artificial Sequence: Synthetic oligonucleotide
cauuagcagauacugugac

SEQ ID NO: 273999 - RNA, 19 nt, Artificial Sequence
  Description of Artificial Sequence: Synthetic oligonucleotide
uagucaagaggaaaauaua

SEQ ID NO: 274000 - RNA, 19 nt, Artificial Sequence
  Description of Artificial Sequence: Synthetic oligonucleotide
aaaggucagcuggauccgc

SEQ ID NO: 274001 - RNA, 19 nt, Artificial Sequence
  Description of Artificial Sequence: Synthetic oligonucleotide
uagcugcuaucuaaaagcu

SEQ ID NO: 274002 - RNA, 19 nt, Artificial Sequence
  Description of Artificial Sequence: Synthetic oligonucleotide
cuuagauuuuggauggaga

SEQ ID NO: 274003 - RNA, 19 nt, Artificial Sequence
  Description of Artificial Sequence: Synthetic oligonucleotide
auuaagcauuuuacaagcg

SEQ ID NO: 274004 - RNA, 19 nt, Artificial Sequence
  Description of Artificial Sequence: Synthetic oligonucleotide
caacuaaucuccacaccag

SEQ ID NO: 274005 - RNA, 19 nt, Artificial Sequence
  Description of Artificial Sequence: Synthetic oligonucleotide
agucccgguucucaggccg

SEQ ID NO: 274006 - RNA, 19 nt, Artificial Sequence
  Description of Artificial Sequence: Synthetic oligonucleotide
guaacuuuacgugggacac

SEQ ID NO: 274007 - RNA, 19 nt, Artificial Sequence
  Description of Artificial Sequence: Synthetic oligonucleotide
gacaacucucucaugcugc

SEQ ID NO: 274008 - RNA, 19 nt, Artificial Sequence
  Description of Artificial Sequence: Synthetic oligonucleotide
ucauccgauacgaaucuua

SEQ ID NO: 274009 - RNA, 19 nt, Artificial Sequence
  Description of Artificial Sequence: Synthetic oligonucleotide
gaaguuacuaaguguggaa

SEQ ID NO: 274010 - RNA, 19 nt, Artificial Sequence
  Description of Artificial Sequence: Synthetic oligonucleotide
gauacgaaucuuauccuga

SEQ ID NO: 274011 - RNA, 19 nt, Artificial Sequence
  Description of Artificial Sequence: Synthetic oligonucleotide
aacgcuuugcccacaaccu

SEQ ID NO: 274012 - RNA, 19 nt, Artificial Sequence
  Description of Artificial Sequence: Synthetic oligonucleotide
auuagcagauacugugaca

SEQ ID NO: 274013 - RNA, 19 nt, Artificial Sequence
  Description of Artificial Sequence: Synthetic oligonucleotide
auucaaauagucaccacau

SEQ ID NO: 274014 - RNA, 19 nt, Artificial Sequence
  Description of Artificial Sequence: Synthetic oligonucleotide
agaaguuccgaggaguaca

SEQ ID NO: 274015 - RNA, 19 nt, Artificial Sequence
  Description of Artificial Sequence: Synthetic oligonucleotide
uuacuaaguguggaaaauc

SEQ ID NO: 274016 - RNA, 19 nt, Artificial Sequence
  Description of Artificial Sequence: Synthetic oligonucleotide
agaaguuacuaagugugga

SEQ ID NO: 274017 - RNA, 19 nt, Artificial Sequence
  Description of Artificial Sequence: Synthetic oligonucleotide
uccucuggcuauaacaauu

SEQ ID NO: 274018 - RNA, 19 nt, Artificial Sequence
  Description of Artificial Sequence: Synthetic oligonucleotide
uauaacaauucugcuuaga

SEQ ID NO: 274019 - RNA, 19 nt, Artificial Sequence
  Description of Artificial Sequence: Synthetic oligonucleotide
uccgcauguuuucaucagc

SEQ ID NO: 274020 - RNA, 19 nt, Artificial Sequence
  Description of Artificial Sequence: Synthetic oligonucleotide
acaagcgauguauuaugcu

SEQ ID NO: 274021 - RNA, 19 nt, Artificial Sequence
  Description of Artificial Sequence: Synthetic oligonucleotide
uaaccuaggcacaguauua

SEQ ID NO: 274022 - RNA, 19 nt, Artificial Sequence
  Description of Artificial Sequence: Synthetic oligonucleotide
gaguaagaucuuuaccaca

SEQ ID NO: 274023 - RNA, 19 nt, Artificial Sequence
  Description of Artificial Sequence: Synthetic oligonucleotide
gauccgcauguuuucauca

SEQ ID NO: 274024 - RNA, 19 nt, Artificial Sequence
  Description of Artificial Sequence: Synthetic oligonucleotide
uucccguauggacacugag

SEQ ID NO: 274025 - RNA, 19 nt, Artificial Sequence
  Description of Artificial Sequence: Synthetic oligonucleotide
cuauugacuuccccauucc

SEQ ID NO: 274026 - RNA, 19 nt, Artificial Sequence
  Description of Artificial Sequence: Synthetic oligonucleotide
acaugauuagaaaagccaa

SEQ ID NO: 274027 - RNA, 19 nt, Artificial Sequence
  Description of Artificial Sequence: Synthetic oligonucleotide
ucccguauggacacugaga

SEQ ID NO: 274028 - RNA, 19 nt, Artificial Sequence
  Description of Artificial Sequence: Synthetic oligonucleotide
gcaacuaaucuccacacca

SEQ ID NO: 274029 - RNA, 19 nt, Artificial Sequence
  Description of Artificial Sequence: Synthetic oligonucleotide
gucgcucuguuccaggaag

SEQ ID NO: 274030 - RNA, 19 nt, Artificial Sequence
  Description of Artificial Sequence: Synthetic oligonucleotide
gaaggcugcgcugcggugg

SEQ ID NO: 274031 - RNA, 19 nt, Artificial Sequence
  Description of Artificial Sequence: Synthetic oligonucleotide
agaguacaaaauaagugaa

SEQ ID NO: 274032 - RNA, 19 nt, Artificial Sequence
  Description of Artificial Sequence: Synthetic oligonucleotide
cugcaacuaaucuccacac

SEQ ID NO: 274033 - RNA, 19 nt, Artificial Sequence
  Description of Artificial Sequence: Synthetic oligonucleotide
gcuguagagucuuaccucc

SEQ ID NO: 274034 - RNA, 19 nt, Artificial Sequence
  Description of Artificial Sequence: Synthetic oligonucleotide
caguguagcacugugucug

SEQ ID NO: 274035 - RNA, 19 nt, Artificial Sequence
  Description of Artificial Sequence: Synthetic oligonucleotide
ucccauaaagaaacgcuuu

SEQ ID NO: 274036 - RNA, 19 nt, Artificial Sequence
  Description of Artificial Sequence: Synthetic oligonucleotide
ugugaccuaucaauucuau

SEQ ID NO: 274037 - RNA, 19 nt, Artificial Sequence
  Description of Artificial Sequence: Synthetic oligonucleotide
uccaaaccaugacuguacu

SEQ ID NO: 274038 - RNA, 19 nt, Artificial Sequence
  Description of Artificial Sequence: Synthetic oligonucleotide
acaacuaaugacuccucuu

SEQ ID NO: 274039 - RNA, 19 nt, Artificial Sequence
  Description of Artificial Sequence: Synthetic oligonucleotide
ugcaauuauggaggcaaca

SEQ ID NO: 274040 - RNA, 19 nt, Artificial Sequence
  Description of Artificial Sequence: Synthetic oligonucleotide
gaccgaagcaucugauggc

SEQ ID NO: 274041 - RNA, 19 nt, Artificial Sequence
  Description of Artificial Sequence: Synthetic oligonucleotide
auccgauacgaaucuuauc

SEQ ID NO: 274042 - RNA, 19 nt, Artificial Sequence
  Description of Artificial Sequence: Synthetic oligonucleotide
ucgcucuguuccaggaagg

SEQ ID NO: 274043 - RNA, 19 nt, Artificial Sequence
  Description of Artificial Sequence: Synthetic oligonucleotide
ggaugcagaauccaggcuc

SEQ ID NO: 274044 - RNA, 19 nt, Artificial Sequence
  Description of Artificial Sequence: Synthetic oligonucleotide
ucucugugaccuaucaauu

SEQ ID NO: 274045 - RNA, 19 nt, Artificial Sequence
  Description of Artificial Sequence: Synthetic oligonucleotide
acaucagugagagacuuau

SEQ ID NO: 274046 - RNA, 19 nt, Artificial Sequence
  Description of Artificial Sequence: Synthetic oligonucleotide
uucguaacuuuacguggga

SEQ ID NO: 274047 - RNA, 19 nt, Artificial Sequence
  Description of Artificial Sequence: Synthetic oligonucleotide
gaaguuccgaggaguacag

SEQ ID NO: 274048 - RNA, 19 nt, Artificial Sequence
  Description of Artificial Sequence: Synthetic oligonucleotide
cccauuagcagauacugug

SEQ ID NO: 274049 - RNA, 19 nt, Artificial Sequence
  Description of Artificial Sequence: Synthetic oligonucleotide
uuucuuguguugacaucac

SEQ ID NO: 274050 - RNA, 19 nt, Artificial Sequence
  Description of Artificial Sequence: Synthetic oligonucleotide
aaugucucugugaccuauc

SEQ ID NO: 274051 - RNA, 19 nt, Artificial Sequence
  Description of Artificial Sequence: Synthetic oligonucleotide
aucgcaggguaguuuccac

SEQ ID NO: 274052 - RNA, 19 nt, Artificial Sequence
  Description of Artificial Sequence: Synthetic oligonucleotide
ccuaggcacaguauuaagc

SEQ ID NO: 274053 - RNA, 19 nt, Artificial Sequence
  Description of Artificial Sequence: Synthetic oligonucleotide
aucgaucagguucuaagua

SEQ ID NO: 274054 - RNA, 19 nt, Artificial Sequence
  Description of Artificial Sequence: Synthetic oligonucleotide
ugauaauaauccaguuguu

SEQ ID NO: 274055 - RNA, 19 nt, Artificial Sequence
  Description of Artificial Sequence: Synthetic oligonucleotide
uggggaagcggcgacuccg

SEQ ID NO: 274056 - RNA, 19 nt, Artificial Sequence
  Description of Artificial Sequence: Synthetic oligonucleotide
gaggcaacaggcacaauuc

SEQ ID NO: 274057 - RNA, 19 nt, Artificial Sequence
  Description of Artificial Sequence: Synthetic oligonucleotide
guguggggaaacuucgggc

SEQ ID NO: 274058 - RNA, 19 nt, Artificial Sequence
  Description of Artificial Sequence: Synthetic oligonucleotide
ggagcauuuggcugacugg

SEQ ID NO: 274059 - RNA, 19 nt, Artificial Sequence
  Description of Artificial Sequence: Synthetic oligonucleotide
uuacccacagaaaguguua

SEQ ID NO: 274060 - RNA, 19 nt, Artificial Sequence
  Description of Artificial Sequence: Synthetic oligonucleotide
ggucuagugacaaagcuga

SEQ ID NO: 274061 - RNA, 19 nt, Artificial Sequence
  Description of Artificial Sequence: Synthetic oligonucleotide
ugauugugcuuccuccaaa

SEQ ID NO: 274062 - RNA, 19 nt, Artificial Sequence
  Description of Artificial Sequence: Synthetic oligonucleotide
cacaguugaccgaagcauc

SEQ ID NO: 274063 - RNA, 19 nt, Artificial Sequence
  Description of Artificial Sequence: Synthetic oligonucleotide
uggcuauaacaauucugcu

SEQ ID NO: 274064 - RNA, 19 nt, Artificial Sequence
  Description of Artificial Sequence: Synthetic oligonucleotide
ucuggcagcggagaaucgc

SEQ ID NO: 274065 - RNA, 19 nt, Artificial Sequence
  Description of Artificial Sequence: Synthetic oligonucleotide
aaguuccgaggaguacagc

SEQ ID NO: 274066 - RNA, 19 nt, Artificial Sequence
  Description of Artificial Sequence: Synthetic oligonucleotide
auacgaaucuuauccugau

SEQ ID NO: 274067 - RNA, 19 nt, Artificial Sequence
  Description of Artificial Sequence: Synthetic oligonucleotide
ucccauuagcagauacugu

SEQ ID NO: 274068 - RNA, 19 nt, Artificial Sequence
  Description of Artificial Sequence: Synthetic oligonucleotide
aggucuagugacaaagcug

SEQ ID NO: 274069 - RNA, 19 nt, Artificial Sequence
  Description of Artificial Sequence: Synthetic oligonucleotide
acuaaucuccacaccagca

SEQ ID NO: 274070 - RNA, 19 nt, Artificial Sequence
  Description of Artificial Sequence: Synthetic oligonucleotide
ccuuaaaugauauaccucu

SEQ ID NO: 274071 - RNA, 19 nt, Artificial Sequence
  Description of Artificial Sequence: Synthetic oligonucleotide
aaguggguauugauaauaa

SEQ ID NO: 274072 - RNA, 19 nt, Artificial Sequence
  Description of Artificial Sequence: Synthetic oligonucleotide
aaccuggccagaaaauggu

SEQ ID NO: 274073 - RNA, 19 nt, Artificial Sequence
  Description of Artificial Sequence: Synthetic oligonucleotide
aucuuauccugauuugauu

SEQ ID NO: 274074 - RNA, 19 nt, Artificial Sequence
  Description of Artificial Sequence: Synthetic oligonucleotide
uucuccgagcuccacuccu

SEQ ID NO: 274075 - RNA, 19 nt, Artificial Sequence
  Description of Artificial Sequence: Synthetic oligonucleotide
cuccuuaaaugauauaccu

SEQ ID NO: 274076 - RNA, 19 nt, Artificial Sequence
  Description of Artificial Sequence: Synthetic oligonucleotide
acucgcggcggucacuggg

SEQ ID NO: 274077 - RNA, 19 nt, Artificial Sequence
  Description of Artificial Sequence: Synthetic oligonucleotide
ugacuuguggcaucacaau

SEQ ID NO: 274078 - RNA, 19 nt, Artificial Sequence
  Description of Artificial Sequence: Synthetic oligonucleotide
uggaugcagaauccaggcu

SEQ ID NO: 274079 - RNA, 19 nt, Artificial Sequence
  Description of Artificial Sequence: Synthetic oligonucleotide
acuaaguguggaaaaucca

SEQ ID NO: 274080 - RNA, 19 nt, Artificial Sequence
  Description of Artificial Sequence: Synthetic oligonucleotide
agacuuguauaugcaaaca

SEQ ID NO: 274081 - RNA, 19 nt, Artificial Sequence
  Description of Artificial Sequence: Synthetic oligonucleotide
aguggguauugauaauaau

SEQ ID NO: 274082 - RNA, 19 nt, Artificial Sequence
  Description of Artificial Sequence: Synthetic oligonucleotide
cuggccagaaaaugguauc

SEQ ID NO: 274083 - RNA, 19 nt, Artificial Sequence
  Description of Artificial Sequence: Synthetic oligonucleotide
ggagacaaugaguaagauc

SEQ ID NO: 274084 - RNA, 19 nt, Artificial Sequence
  Description of Artificial Sequence: Synthetic oligonucleotide
cacuugcccauaucaagac

SEQ ID NO: 274085 - RNA, 19 nt, Artificial Sequence
  Description of Artificial Sequence: Synthetic oligonucleotide
ucaccucagagggaaggag

SEQ ID NO: 274086 - RNA, 19 nt, Artificial Sequence
  Description of Artificial Sequence: Synthetic oligonucleotide
caccauuuagacuuguaua

SEQ ID NO: 274087 - RNA, 19 nt, Artificial Sequence
  Description of Artificial Sequence: Synthetic oligonucleotide
cauuuuacaagcgauguau

SEQ ID NO: 274088 - RNA, 19 nt, Artificial Sequence
  Description of Artificial Sequence: Synthetic oligonucleotide
uggccagaaaaugguaucu

SEQ ID NO: 274089 - RNA, 19 nt, Artificial Sequence
  Description of Artificial Sequence: Synthetic oligonucleotide
gcaaacaacuuagauuuug

SEQ ID NO: 274090 - RNA, 19 nt, Artificial Sequence
  Description of Artificial Sequence: Synthetic oligonucleotide
ugagcaggucuagugacaa

SEQ ID NO: 274091 - RNA, 19 nt, Artificial Sequence
  Description of Artificial Sequence: Synthetic oligonucleotide
gguauagucaagaggaaaa

SEQ ID NO: 274092 - RNA, 19 nt, Artificial Sequence
  Description of Artificial Sequence: Synthetic oligonucleotide
gacuuguggcaucacaaua

SEQ ID NO: 274093 - RNA, 19 nt, Artificial Sequence
  Description of Artificial Sequence: Synthetic oligonucleotide
gcuguugaaagcaaacaac

SEQ ID NO: 274094 - RNA, 19 nt, Artificial Sequence
  Description of Artificial Sequence: Synthetic oligonucleotide
aauauucauccgauacgaa

SEQ ID NO: 274095 - RNA, 19 nt, Artificial Sequence
  Description of Artificial Sequence: Synthetic oligonucleotide
ugcccauaucaagacaacu

SEQ ID NO: 274096 - RNA, 19 nt, Artificial Sequence
  Description of Artificial Sequence: Synthetic oligonucleotide
cccuccacaacgcuuaacc

SEQ ID NO: 274097 - RNA, 19 nt, Artificial Sequence
  Description of Artificial Sequence: Synthetic oligonucleotide
cacuguauuucuuggguaa

SEQ ID NO: 274098 - RNA, 19 nt, Artificial Sequence
  Description of Artificial Sequence: Synthetic oligonucleotide
ggcagaugucagcaggagg

SEQ ID NO: 274099 - RNA, 19 nt, Artificial Sequence
  Description of Artificial Sequence: Synthetic oligonucleotide
ugcuaucuaaaagcugagu

SEQ ID NO: 274100 - RNA, 19 nt, Artificial Sequence
  Description of Artificial Sequence: Synthetic oligonucleotide
uugcccauaucaagacaac

SEQ ID NO: 274101 - RNA, 19 nt, Artificial Sequence
  Description of Artificial Sequence: Synthetic oligonucleotide
agugagagacuuaugcaau

SEQ ID NO: 274102 - RNA, 19 nt, Artificial Sequence
  Description of Artificial Sequence: Synthetic oligonucleotide
ucacauuccucaugguguu

SEQ ID NO: 274103 - RNA, 19 nt, Artificial Sequence
  Description of Artificial Sequence: Synthetic oligonucleotide
aacgcuuaaccaggagaca

SEQ ID NO: 274104 - RNA, 19 nt, Artificial Sequence
  Description of Artificial Sequence: Synthetic oligonucleotide
uuagcucuucccguaugga

SEQ ID NO: 274105 - RNA, 19 nt, Artificial Sequence
  Description of Artificial Sequence: Synthetic oligonucleotide
guccaucugccaucgauca

SEQ ID NO: 274106 - RNA, 19 nt, Artificial Sequence
  Description of Artificial Sequence: Synthetic oligonucleotide
ucgcuggagagcugcaacu

SEQ ID NO: 274107 - RNA, 19 nt, Artificial Sequence
  Description of Artificial Sequence: Synthetic oligonucleotide
ucgcaggguaguuuccaca

SEQ ID NO: 274108 - RNA, 19 nt, Artificial Sequence
  Description of Artificial Sequence: Synthetic oligonucleotide
gacaacuaaugacuccucu

SEQ ID NO: 274109 - RNA, 19 nt, Artificial Sequence
  Description of Artificial Sequence: Synthetic oligonucleotide
cuguggaugcucccauuag

SEQ ID NO: 274110 - RNA, 19 nt, Artificial Sequence
  Description of Artificial Sequence: Synthetic oligonucleotide
gcuuuccuggcacaguccc

SEQ ID NO: 274111 - RNA, 19 nt, Artificial Sequence
  Description of Artificial Sequence: Synthetic oligonucleotide
caggguaguuuccacauaa

SEQ ID NO: 274112 - RNA, 19 nt, Artificial Sequence
  Description of Artificial Sequence: Synthetic oligonucleotide
ccaucugccaucgaucagg

SEQ ID NO: 274113 - RNA, 19 nt, Artificial Sequence
  Description of Artificial Sequence: Synthetic oligonucleotide
aauucccuccacaacgcuu

SEQ ID NO: 274114 - RNA, 19 nt, Artificial Sequence
  Description of Artificial Sequence: Synthetic oligonucleotide
agccaacagguauagucaa

SEQ ID NO: 274115 - RNA, 19 nt, Artificial Sequence
  Description of Artificial Sequence: Synthetic oligonucleotide
gaaacuucgggcuguggau

SEQ ID NO: 274116 - RNA, 19 nt, Artificial Sequence
  Description of Artificial Sequence: Synthetic oligonucleotide
uacgaaucuuauccugauu

SEQ ID NO: 274117 - RNA, 19 nt, Artificial Sequence
  Description of Artificial Sequence: Synthetic oligonucleotide
guauuucuuggguaagugu

SEQ ID NO: 274118 - RNA, 19 nt, Artificial Sequence
  Description of Artificial Sequence: Synthetic oligonucleotide
auaauccaguuguuaucaa

SEQ ID NO: 274119 - RNA, 19 nt, Artificial Sequence
  Description of Artificial Sequence: Synthetic oligonucleotide
acgcuuugcccacaaccug

SEQ ID NO: 274120 - RNA, 19 nt, Artificial Sequence
  Description of Artificial Sequence: Synthetic oligonucleotide
ucguaacuuuacgugggac

SEQ ID NO: 274121 - RNA, 19 nt, Artificial Sequence
  Description of Artificial Sequence: Synthetic oligonucleotide
ugaaggacuugugguuuca

SEQ ID NO: 274122 - RNA, 19 nt, Artificial Sequence
  Description of Artificial Sequence: Synthetic oligonucleotide
uuguagcucuaagaauaga

SEQ ID NO: 274123 - RNA, 19 nt, Artificial Sequence
  Description of Artificial Sequence: Synthetic oligonucleotide
acgcuuaaccaggagacaa

SEQ ID NO: 274124 - RNA, 19 nt, Artificial Sequence
  Description of Artificial Sequence: Synthetic oligonucleotide
cucgcggcggucacugggg

SEQ ID NO: 274125 - RNA, 19 nt, Artificial Sequence
  Description of Artificial Sequence: Synthetic oligonucleotide
gacaucacuugcccauauc

SEQ ID NO: 274126 - RNA, 19 nt, Artificial Sequence
  Description of Artificial Sequence: Synthetic oligonucleotide
ucacucgcggcggucacug

SEQ ID NO: 274127 - RNA, 19 nt, Artificial Sequence
  Description of Artificial Sequence: Synthetic oligonucleotide
ggcaucacaauacuguagu

SEQ ID NO: 274128 - RNA, 19 nt, Artificial Sequence
  Description of Artificial Sequence: Synthetic oligonucleotide
agcauuuggcugacugggg

SEQ ID NO: 274129 - RNA, 19 nt, Artificial Sequence
  Description of Artificial Sequence: Synthetic oligonucleotide
gagaaguuccgaggaguac

SEQ ID NO: 274130 - RNA, 19 nt, Artificial Sequence
  Description of Artificial Sequence: Synthetic oligonucleotide
gcuaucuaaaagcugaguu

SEQ ID NO: 274131 - RNA, 19 nt, Artificial Sequence
  Description of Artificial Sequence: Synthetic oligonucleotide
cagcauagcugcuaucuaa

SEQ ID NO: 274132 - RNA, 19 nt, Artificial Sequence
  Description of Artificial Sequence: Synthetic oligonucleotide
gaaucgcaggguaguuucc

SEQ ID NO: 274133 - RNA, 19 nt, Artificial Sequence
  Description of Artificial Sequence: Synthetic oligonucleotide
cccauaaagaaacgcuuug

SEQ ID NO: 274134 - RNA, 19 nt, Artificial Sequence
  Description of Artificial Sequence: Synthetic oligonucleotide
ccgaggaggagcauuuggc

SEQ ID NO: 274135 - RNA, 19 nt, Artificial Sequence
  Description of Artificial Sequence: Synthetic oligonucleotide
uggauccgcauguuuucau

SEQ ID NO: 274136 - RNA, 19 nt, Artificial Sequence
  Description of Artificial Sequence: Synthetic oligonucleotide
agcauagcugcuaucuaaa

SEQ ID NO: 274137 - RNA, 19 nt, Artificial Sequence
  Description of Artificial Sequence: Synthetic oligonucleotide
gccgaggaggagcauuugg

SEQ ID NO: 274138 - RNA, 19 nt, Artificial Sequence
  Description of Artificial Sequence: Synthetic oligonucleotide
cauuuaccucauagcagca

SEQ ID NO: 274139 - RNA, 19 nt, Artificial Sequence
  Description of Artificial Sequence: Synthetic oligonucleotide
ugaucucaugugucauaaa

SEQ ID NO: 274140 - RNA, 19 nt, Artificial Sequence
  Description of Artificial Sequence: Synthetic oligonucleotide
auucccuccacaacgcuua

SEQ ID NO: 274141 - RNA, 19 nt, Artificial Sequence
  Description of Artificial Sequence: Synthetic oligonucleotide
agcugcuaucuaaaagcug

SEQ ID NO: 274142 - RNA, 19 nt, Artificial Sequence
  Description of Artificial Sequence: Synthetic oligonucleotide
uggggaaacuucgggcugu

SEQ ID NO: 274143 - RNA, 19 nt, Artificial Sequence
  Description of Artificial Sequence: Synthetic oligonucleotide
cuggcagcggagaaucgca

SEQ ID NO: 274144 - RNA, 19 nt, Artificial Sequence
  Description of Artificial Sequence: Synthetic oligonucleotide
ggaugcaguuauccuccgg

SEQ ID NO: 274145 - RNA, 19 nt, Artificial Sequence
  Description of Artificial Sequence: Synthetic oligonucleotide
caucgaucagguucuaagu

SEQ ID NO: 274146 - RNA, 19 nt, Artificial Sequence
  Description of Artificial Sequence: Synthetic oligonucleotide
cccacaaccugccauggug

SEQ ID NO: 274147 - RNA, 19 nt, Artificial Sequence
  Description of Artificial Sequence: Synthetic oligonucleotide
aucaccucagagggaagga

SEQ ID NO: 274148 - RNA, 19 nt, Artificial Sequence
  Description of Artificial Sequence: Synthetic oligonucleotide
aguggucgcucuguuccag

SEQ ID NO: 274149 - RNA, 19 nt, Artificial Sequence
  Description of Artificial Sequence: Synthetic oligonucleotide
gaggucugcuuuccuggca

SEQ ID NO: 274150 - RNA, 19 nt, Artificial Sequence
  Description of Artificial Sequence: Synthetic oligonucleotide
gcaucacaauacuguagug

SEQ ID NO: 274151 - RNA, 19 nt, Artificial Sequence
  Description of Artificial Sequence: Synthetic oligonucleotide
uauccuccgguguuuccuu

SEQ ID NO: 274152 - RNA, 19 nt, Artificial Sequence
  Description of Artificial Sequence: Synthetic oligonucleotide
cucaggccggccagggcag

SEQ ID NO: 274153 - RNA, 19 nt, Artificial Sequence
  Description of Artificial Sequence: Synthetic oligonucleotide
cgauacgaaucuuauccug

SEQ ID NO: 274154 - RNA, 19 nt, Artificial Sequence
  Description of Artificial Sequence: Synthetic oligonucleotide
ggauccgcauguuuucauc

SEQ ID NO: 274155 - RNA, 19 nt, Artificial Sequence
  Description of Artificial Sequence: Synthetic oligonucleotide
caaaauaagugaacuccuu

SEQ ID NO: 274156 - RNA, 19 nt, Artificial Sequence
  Description of Artificial Sequence: Synthetic oligonucleotide
ggcuauaacaauucugcuu

SEQ ID NO: 274157 - RNA, 19 nt, Artificial Sequence
  Description of Artificial Sequence: Synthetic oligonucleotide
cuagaacauacaccauuua

SEQ ID NO: 274158 - RNA, 19 nt, Artificial Sequence
  Description of Artificial Sequence: Synthetic oligonucleotide
cccguauggacacugagaa

SEQ ID NO: 274159 - RNA, 19 nt, Artificial Sequence
  Description of Artificial Sequence: Synthetic oligonucleotide
caggucuagugacaaagcu

SEQ ID NO: 274160 - RNA, 19 nt, Artificial Sequence
  Description of Artificial Sequence: Synthetic oligonucleotide
gaacuccuuaaaugauaua

SEQ ID NO: 274161 - RNA, 19 nt, Artificial Sequence
  Description of Artificial Sequence: Synthetic oligonucleotide
cgaaucuuauccugauuug

SEQ ID NO: 274162 - RNA, 19 nt, Artificial Sequence
  Description of Artificial Sequence: Synthetic oligonucleotide
cuuaugcaaucccuugacu

SEQ ID NO: 274163 - RNA, 19 nt, Artificial Sequence
  Description of Artificial Sequence: Synthetic oligonucleotide
ccauuuagacuuguauaug

SEQ ID NO: 274164 - RNA, 19 nt, Artificial Sequence
  Description of Artificial Sequence: Synthetic oligonucleotide
auacaccauuuagacuugu

SEQ ID NO: 274165 - RNA, 19 nt, Artificial Sequence
  Description of Artificial Sequence: Synthetic oligonucleotide
cguaacuuuacgugggaca

SEQ ID NO: 274166 - RNA, 19 nt, Artificial Sequence
  Description of Artificial Sequence: Synthetic oligonucleotide
gcugcgcugcgguggagcg

SEQ ID NO: 274167 - RNA, 19 nt, Artificial Sequence
  Description of Artificial Sequence: Synthetic oligonucleotide
cugugaccuaucaauucua

SEQ ID NO: 274168 - RNA, 19 nt, Artificial Sequence
  Description of Artificial Sequence: Synthetic oligonucleotide
cugugacaacucucucaug

SEQ ID NO: 274169 - RNA, 19 nt, Artificial Sequence
  Description of Artificial Sequence: Synthetic oligonucleotide
cauccgauacgaaucuuau

SEQ ID NO: 274170 - RNA, 19 nt, Artificial Sequence
  Description of Artificial Sequence: Synthetic oligonucleotide
ccauuagcagauacuguga

SEQ ID NO: 274171 - RNA, 19 nt, Artificial Sequence
  Description of Artificial Sequence: Synthetic oligonucleotide
cugccaucgaucagguucu

SEQ ID NO: 274172 - RNA, 19 nt, Artificial Sequence
  Description of Artificial Sequence: Synthetic oligonucleotide
ccuaucaauucuauugacu

SEQ ID NO: 274173 - RNA, 19 nt, Artificial Sequence
  Description of Artificial Sequence: Synthetic oligonucleotide
ccgaaucagcucuuccaag

SEQ ID NO: 274174 - RNA, 19 nt, Artificial Sequence
  Description of Artificial Sequence: Synthetic oligonucleotide
gggauucaggaugccagug

SEQ ID NO: 274175 - RNA, 19 nt, Artificial Sequence
  Description of Artificial Sequence: Synthetic oligonucleotide
cucuagcaccauacaagaa

SEQ ID NO: 274176 - RNA, 19 nt, Artificial Sequence
  Description of Artificial Sequence: Synthetic oligonucleotide
cguauggacacugagaagu

SEQ ID NO: 274177 - RNA, 19 nt, Artificial Sequence
  Description of Artificial Sequence: Synthetic oligonucleotide
acaauccaacugugcguuu

SEQ ID NO: 274178 - RNA, 19 nt, Artificial Sequence
  Description of Artificial Sequence: Synthetic oligonucleotide
cuucccguauggacacuga

SEQ ID NO: 274179 - RNA, 19 nt, Artificial Sequence
  Description of Artificial Sequence: Synthetic oligonucleotide
gaaggccacuccucugugu

SEQ ID NO: 274180 - RNA, 19 nt, Artificial Sequence
  Description of Artificial Sequence: Synthetic oligonucleotide
auacaucaccucagaggga

SEQ ID NO: 274181 - RNA, 19 nt, Artificial Sequence
  Description of Artificial Sequence: Synthetic oligonucleotide
uggagcgccuggccggcuc

SEQ ID NO: 274182 - RNA, 19 nt, Artificial Sequence
  Description of Artificial Sequence: Synthetic oligonucleotide
uucauccgauacgaaucuu

SEQ ID NO: 274183 - RNA, 19 nt, Artificial Sequence
  Description of Artificial Sequence: Synthetic oligonucleotide
uucccuccacaacgcuuaa

SEQ ID NO: 274184 - RNA, 19 nt, Artificial Sequence
  Description of Artificial Sequence: Synthetic oligonucleotide
gcccauaucaagacaacua

SEQ ID NO: 274185 - RNA, 19 nt, Artificial Sequence
  Description of Artificial Sequence: Synthetic oligonucleotide
gucccgguucucaggccgg

SEQ ID NO: 274186 - RNA, 19 nt, Artificial Sequence
  Description of Artificial Sequence: Synthetic oligonucleotide
gguucucaggccggccagg

SEQ ID NO: 274187 - RNA, 19 nt, Artificial Sequence
  Description of Artificial Sequence: Synthetic oligonucleotide
guggcuuguacaggcuguc

SEQ ID NO: 274188 - RNA, 19 nt, Artificial Sequence
  Description of Artificial Sequence: Synthetic oligonucleotide
ccacauaaucccauccaaa

SEQ ID NO: 274189 - RNA, 19 nt, Artificial Sequence
  Description of Artificial Sequence: Synthetic oligonucleotide
acucagcccgagucccggu

SEQ ID NO: 274190 - RNA, 19 nt, Artificial Sequence
  Description of Artificial Sequence: Synthetic oligonucleotide
aggguaguuuccacauaau

SEQ ID NO: 274191 - RNA, 19 nt, Artificial Sequence
  Description of Artificial Sequence: Synthetic oligonucleotide
cagguucuaaguaccgaau

SEQ ID NO: 274192 - RNA, 19 nt, Artificial Sequence
  Description of Artificial Sequence: Synthetic oligonucleotide
ccguauggacacugagaag

SEQ ID NO: 274193 - RNA, 19 nt, Artificial Sequence
  Description of Artificial Sequence: Synthetic oligonucleotide
ucuuuccuaucagcacauu

SEQ ID NO: 274194 - RNA, 19 nt, Artificial Sequence
  Description of Artificial Sequence: Synthetic oligonucleotide
gcggagaaucgcaggguag

SEQ ID NO: 274195 - RNA, 19 nt, Artificial Sequence
  Description of Artificial Sequence: Synthetic oligonucleotide
uccgagcuccacuccuauu

SEQ ID NO: 274196 - RNA, 19 nt, Artificial Sequence
  Description of Artificial Sequence: Synthetic oligonucleotide
ccgaagcaucugauggccc

SEQ ID NO: 274197 - RNA, 19 nt, Artificial Sequence
  Description of Artificial Sequence: Synthetic oligonucleotide
gagcaggucuagugacaaa

SEQ ID NO: 274198 - RNA, 19 nt, Artificial Sequence
  Description of Artificial Sequence: Synthetic oligonucleotide
ucccuccacaacgcuuaac

SEQ ID NO: 274199 - RNA, 19 nt, Artificial Sequence
  Description of Artificial Sequence: Synthetic oligonucleotide
augguggcuuguacaggcu

SEQ ID NO: 274200 - RNA, 19 nt, Artificial Sequence
  Description of Artificial Sequence: Synthetic oligonucleotide
gagaaucgcaggguaguuu

SEQ ID NO: 274201 - RNA, 19 nt, Artificial Sequence
  Description of Artificial Sequence: Synthetic oligonucleotide
ucccgguucucaggccggc

SEQ ID NO: 274202 - RNA, 19 nt, Artificial Sequence
  Description of Artificial Sequence: Synthetic oligonucleotide
agcaaacaacuuagauuuu

SEQ ID NO: 274203 - RNA, 19 nt, Artificial Sequence
  Description of Artificial Sequence: Synthetic oligonucleotide
ccuccacaacgcuuaacca

SEQ ID NO: 274204 - RNA, 19 nt, Artificial Sequence
  Description of Artificial Sequence: Synthetic oligonucleotide
caaucccuugacuccaauu

SEQ ID NO: 274205 - RNA, 19 nt, Artificial Sequence
  Description of Artificial Sequence: Synthetic oligonucleotide
cacucgcggcggucacugg

SEQ ID NO: 274206 - RNA, 19 nt, Artificial Sequence
  Description of Artificial Sequence: Synthetic oligonucleotide
ccgagcuccacuccuauua

SEQ ID NO: 274207 - RNA, 19 nt, Artificial Sequence
  Description of Artificial Sequence: Synthetic oligonucleotide
ccgguguuuccuuuacaca

SEQ ID NO: 274208 - RNA, 19 nt, Artificial Sequence
  Description of Artificial Sequence: Synthetic oligonucleotide
cuguagagucuuaccuccu

SEQ ID NO: 274209 - RNA, 19 nt, Artificial Sequence
  Description of Artificial Sequence: Synthetic oligonucleotide
cucaacuggaggaccucau

SEQ ID NO: 274210 - RNA, 19 nt, Artificial Sequence
  Description of Artificial Sequence: Synthetic oligonucleotide
cagcugcaacuaaucucca

SEQ ID NO: 274211 - RNA, 19 nt, Artificial Sequence
  Description of Artificial Sequence: Synthetic oligonucleotide
acuuuacgugggacacacu

SEQ ID NO: 274212 - RNA, 19 nt, Artificial Sequence
  Description of Artificial Sequence: Synthetic oligonucleotide
caauucccuccacaacgcu

SEQ ID NO: 274213 - RNA, 19 nt, Artificial Sequence
  Description of Artificial Sequence: Synthetic oligonucleotide
cugugcguuuucaccauuu

SEQ ID NO: 274214 - RNA, 19 nt, Artificial Sequence
  Description of Artificial Sequence: Synthetic oligonucleotide
ccauaucaagacaacuaau

SEQ ID NO: 274215 - RNA, 19 nt, Artificial Sequence
  Description of Artificial Sequence: Synthetic oligonucleotide
cgagcuccacuccuauuac

SEQ ID NO: 274216 - RNA, 19 nt, Artificial Sequence
  Description of Artificial Sequence: Synthetic oligonucleotide
ggucgcucuguuccaggaa

SEQ ID NO: 274217 - RNA, 19 nt, Artificial Sequence
  Description of Artificial Sequence: Synthetic oligonucleotide
ggggauucaggaugccagu

SEQ ID NO: 274218 - RNA, 19 nt, Artificial Sequence
  Description of Artificial Sequence: Synthetic oligonucleotide
cugcgcugcgguggagcgc

SEQ ID NO: 274219 - RNA, 19 nt, Artificial Sequence
  Description of Artificial Sequence: Synthetic oligonucleotide
ggucucaacuggaggaccu

SEQ ID NO: 274220 - RNA, 19 nt, Artificial Sequence
  Description of Artificial Sequence: Synthetic oligonucleotide
ccuggccagaaaaugguau

SEQ ID NO: 274221 - RNA, 19 nt, Artificial Sequence
  Description of Artificial Sequence: Synthetic oligonucleotide
ccgauacgaaucuuauccu

SEQ ID NO: 274222 - RNA, 19 nt, Artificial Sequence
  Description of Artificial Sequence: Synthetic oligonucleotide
ggcucacucgcggcgguca

SEQ ID NO: 274223 - RNA, 19 nt, Artificial Sequence
  Description of Artificial Sequence: Synthetic oligonucleotide
gagcgccuggccggcucug

SEQ ID NO: 274224 - RNA, 19 nt, Artificial Sequence
  Description of Artificial Sequence: Synthetic oligonucleotide
gcucacucgcggcggucac

SEQ ID NO: 274225 - RNA, 19 nt, Artificial Sequence
  Description of Artificial Sequence: Synthetic oligonucleotide
ccgguucucaggccggcca

SEQ ID NO: 274226 - RNA, 19 nt, Artificial Sequence
  Description of Artificial Sequence: Synthetic oligonucleotide
uggaggcaacaggcacaau

SEQ ID NO: 274227 - RNA, 19 nt, Artificial Sequence
  Description of Artificial Sequence: Synthetic oligonucleotide
ggccgaggaggagcauuug

SEQ ID NO: 274228 - RNA, 19 nt, Artificial Sequence
  Description of Artificial Sequence: Synthetic oligonucleotide
cuccgagcuccacuccuau

SEQ ID NO: 274229 - RNA, 19 nt, Artificial Sequence
  Description of Artificial Sequence: Synthetic oligonucleotide
ggccggcucuggcagcgga

SEQ ID NO: 274230 - RNA, 19 nt, Artificial Sequence
  Description of Artificial Sequence: Synthetic oligonucleotide
caguuauccuccgguguuu

SEQ ID NO: 274231 - RNA, 19 nt, Artificial Sequence
  Description of Artificial Sequence: Synthetic oligonucleotide
cccuagcaucacaauaaau

SEQ ID NO: 274232 - RNA, 19 nt, Artificial Sequence
  Description of Artificial Sequence: Synthetic oligonucleotide
ggagaaucgcaggguaguu

SEQ ID NO: 274233 - RNA, 19 nt, Artificial Sequence
  Description of Artificial Sequence: Synthetic oligonucleotide
cucagcccgagucccgguu

SEQ ID NO: 274234 - RNA, 19 nt, Artificial Sequence
  Description of Artificial Sequence: Synthetic oligonucleotide
gccaucgaucagguucuaa

SEQ ID NO: 274235 - RNA, 19 nt, Artificial Sequence
  Description of Artificial Sequence: Synthetic oligonucleotide
cccgguucucaggccggcc

SEQ ID NO: 274236 - RNA, 19 nt, Artificial Sequence
  Description of Artificial Sequence: Synthetic oligonucleotide
gcaaucccuugacuccaau

SEQ ID NO: 274237 - RNA, 19 nt, Artificial Sequence
  Description of Artificial Sequence: Synthetic oligonucleotide
cucacucgcggcggucacu

SEQ ID NO: 274238 - RNA, 19 nt, Artificial Sequence
  Description of Artificial Sequence: Synthetic oligonucleotide
cggagaaucgcaggguagu

SEQ ID NO: 274239 - RNA, 19 nt, Artificial Sequence
  Description of Artificial Sequence: Synthetic oligonucleotide
gcccacaaccugccauggu

SEQ ID NO: 274240 - RNA, 19 nt, Artificial Sequence
  Description of Artificial Sequence: Synthetic oligonucleotide
cucuucccguauggacacu

SEQ ID NO: 274241 - RNA, 19 nt, Artificial Sequence
  Description of Artificial Sequence: Synthetic oligonucleotide
caggccggccagggcagau

SEQ ID NO: 274242 - RNA, 19 nt, Artificial Sequence
  Description of Artificial Sequence: Synthetic oligonucleotide
cggcgacuccgaggcucag

SEQ ID NO: 274243 - RNA, 19 nt, Artificial Sequence
  Description of Artificial Sequence: Synthetic oligonucleotide
ggacuccguucugcuccuu

SEQ ID NO: 274244 - RNA, 19 nt, Artificial Sequence
  Description of Artificial Sequence: Synthetic oligonucleotide
aauaaggcgggucacgacc

SEQ ID NO: 274245 - RNA, 19 nt, Artificial Sequence
  Description of Artificial Sequence: Synthetic oligonucleotide
gauacuucgguuaaaggcg

SEQ ID NO: 274246 - RNA, 19 nt, Artificial Sequence
  Description of Artificial Sequence: Synthetic oligonucleotide
agacgugccacccacaagg

SEQ ID NO: 274247 - RNA, 19 nt, Artificial Sequence
  Description of Artificial Sequence: Synthetic oligonucleotide
uuuguggacacgcauggcc

SEQ ID NO: 274248 - RNA, 19 nt, Artificial Sequence
  Description of Artificial Sequence: Synthetic oligonucleotide
aauggacgggcgcagguac

SEQ ID NO: 274249 - RNA, 19 nt, Artificial Sequence
  Description of Artificial Sequence: Synthetic oligonucleotide
ucuugaaugcuaucuagug

SEQ ID NO: 274250 - RNA, 19 nt, Artificial Sequence
  Description of Artificial Sequence: Synthetic oligonucleotide
cuuauccugaaagacacgg

SEQ ID NO: 274251 - RNA, 19 nt, Artificial Sequence
  Description of Artificial Sequence: Synthetic oligonucleotide
ugcuaucuagugcugaagc

SEQ ID NO: 274252 - RNA, 19 nt, Artificial Sequence
  Description of Artificial Sequence: Synthetic oligonucleotide
agguacucgcaauaugagc

SEQ ID NO: 274253 - RNA, 19 nt, Artificial Sequence
  Description of Artificial Sequence: Synthetic oligonucleotide
aauaugagcuggauuugac

SEQ ID NO: 274254 - RNA, 19 nt, Artificial Sequence
  Description of Artificial Sequence: Synthetic oligonucleotide
ugcgaguauaucugcacgg

SEQ ID NO: 274255 - RNA, 19 nt, Artificial Sequence
  Description of Artificial Sequence: Synthetic oligonucleotide
aaccgauagacgugccacc

SEQ ID NO: 274256 - RNA, 19 nt, Artificial Sequence
  Description of Artificial Sequence: Synthetic oligonucleotide
gauaugugagguccaauac

SEQ ID NO: 274257 - RNA, 19 nt, Artificial Sequence
  Description of Artificial Sequence: Synthetic oligonucleotide
ugauguggccuaaagugcc

SEQ ID NO: 274258 - RNA, 19 nt, Artificial Sequence
  Description of Artificial Sequence: Synthetic oligonucleotide
ugcguugguacacaugcag

SEQ ID NO: 274259 - RNA, 19 nt, Artificial Sequence
  Description of Artificial Sequence: Synthetic oligonucleotide
gaauaagagugugagcucc

SEQ ID NO: 274260 - RNA, 19 nt, Artificial Sequence
  Description of Artificial Sequence: Synthetic oligonucleotide
uguuuaguacggcuggcgc

SEQ ID NO: 274261 - RNA, 19 nt, Artificial Sequence
  Description of Artificial Sequence: Synthetic oligonucleotide
ugaaagacacgguggauac

SEQ ID NO: 274262 - RNA, 19 nt, Artificial Sequence
  Description of Artificial Sequence: Synthetic oligonucleotide
agaugaauaaggcggguca

SEQ ID NO: 274263 - RNA, 19 nt, Artificial Sequence
  Description of Artificial Sequence: Synthetic oligonucleotide
uagaccgccgaucugugag

SEQ ID NO: 274264 - RNA, 19 nt, Artificial Sequence
  Description of Artificial Sequence: Synthetic oligonucleotide
ucucgaacagcgcagcugu

SEQ ID NO: 274265 - RNA, 19 nt, Artificial Sequence
  Description of Artificial Sequence: Synthetic oligonucleotide
ucuggcgcgacgaagggga

SEQ ID NO: 274266 - RNA, 19 nt, Artificial Sequence
  Description of Artificial Sequence: Synthetic oligonucleotide
uagguaacauaguuaguca

SEQ ID NO: 274267 - RNA, 19 nt, Artificial Sequence
  Description of Artificial Sequence: Synthetic oligonucleotide
ucagagacguagcuuguug

SEQ ID NO: 274268 - RNA, 19 nt, Artificial Sequence
  Description of Artificial Sequence: Synthetic oligonucleotide
  modified_base (2)..(2): a, c, u, g, unknown or other
gngcgaaugagugucacug

SEQ ID NO: 274269 - RNA, 19 nt, Artificial Sequence
  Description of Artificial Sequence: Synthetic oligonucleotide
ucguuguuuaguacggcug

SEQ ID NO: 274270 - RNA, 19 nt, Artificial Sequence
  Description of Artificial Sequence: Synthetic oligonucleotide
uucagcaccccaauaugug

SEQ ID NO: 274271 - RNA, 19 nt, Artificial Sequence
  Description of Artificial Sequence: Synthetic oligonucleotide
ucguagaagucagauuugg

SEQ ID NO: 274272 - RNA, 19 nt, Artificial Sequence
  Description of Artificial Sequence: Synthetic oligonucleotide
aguagaugaauaaggcggg

SEQ ID NO: 274273 - RNA, 19 nt, Artificial Sequence
  Description of Artificial Sequence: Synthetic oligonucleotide
cuccgugucucgaacagcg

SEQ ID NO: 274274 - RNA, 19 nt, Artificial Sequence
  Description of Artificial Sequence: Synthetic oligonucleotide
augcgaguauaucugcacg

SEQ ID NO: 274275 - RNA, 19 nt, Artificial Sequence
  Description of Artificial Sequence: Synthetic oligonucleotide
uggcuucccacgucgaugg

SEQ ID NO: 274276 - RNA, 19 nt, Artificial Sequence
  Description of Artificial Sequence: Synthetic oligonucleotide
aaagacacgguggauacuu

SEQ ID NO: 274277 - RNA, 19 nt, Artificial Sequence
  Description of Artificial Sequence: Synthetic oligonucleotide
cagaguaaaggccaucaug

SEQ ID NO: 274278 - RNA, 19 nt, Artificial Sequence
  Description of Artificial Sequence: Synthetic oligonucleotide
aaaggcggagccaguaaac

SEQ ID NO: 274279 - RNA, 19 nt, Artificial Sequence
  Description of Artificial Sequence: Synthetic oligonucleotide
uccuucgggucgcacagcg

SEQ ID NO: 274280 - RNA, 19 nt, Artificial Sequence
  Description of Artificial Sequence: Synthetic oligonucleotide
agacacgguggauacuucg

SEQ ID NO: 274281 - RNA, 19 nt, Artificial Sequence
  Description of Artificial Sequence: Synthetic oligonucleotide
ucaauccgggacacgaucu

SEQ ID NO: 274282 - RNA, 19 nt, Artificial Sequence
  Description of Artificial Sequence: Synthetic oligonucleotide
uuuaguacggcuggcgcug

SEQ ID NO: 274283 - RNA, 19 nt, Artificial Sequence
  Description of Artificial Sequence: Synthetic oligonucleotide
cagucaagcaauccgacuc

SEQ ID NO: 274284 - RNA, 19 nt, Artificial Sequence
  Description of Artificial Sequence: Synthetic oligonucleotide
cauaccgccacagggagcc

SEQ ID NO: 274285 - RNA, 19 nt, Artificial Sequence
  Description of Artificial Sequence: Synthetic oligonucleotide
cagagacguagcuuguugg

SEQ ID NO: 274286 - RNA, 19 nt, Artificial Sequence
  Description of Artificial Sequence: Synthetic oligonucleotide
uuguuuaguacggcuggcg

SEQ ID NO: 274287 - RNA, 19 nt, Artificial Sequence
  Description of Artificial Sequence: Synthetic oligonucleotide
acgucgauggcaaugacug

SEQ ID NO: 274288 - RNA, 19 nt, Artificial Sequence
  Description of Artificial Sequence: Synthetic oligonucleotide
ggauuugacaaccuccagc

SEQ ID NO: 274289 - RNA, 19 nt, Artificial Sequence
  Description of Artificial Sequence: Synthetic oligonucleotide
agcaccccaauaugugagc

SEQ ID NO: 274290 - RNA, 19 nt, Artificial Sequence
  Description of Artificial Sequence: Synthetic oligonucleotide
uccgcuggcagguuguuga

SEQ ID NO: 274291 - RNA, 19 nt, Artificial Sequence
  Description of Artificial Sequence: Synthetic oligonucleotide
uguucaguagagagggguc

SEQ ID NO: 274292 - RNA, 19 nt, Artificial Sequence
  Description of Artificial Sequence: Synthetic oligonucleotide
uccagcuagaccgacggug

SEQ ID NO: 274293 - RNA, 19 nt, Artificial Sequence
  Description of Artificial Sequence: Synthetic oligonucleotide
auaagagugugagcucccc

SEQ ID NO: 274294 - RNA, 19 nt, Artificial Sequence
  Description of Artificial Sequence: Synthetic oligonucleotide
cuugcagccaccgugugug

SEQ ID NO: 274295 - RNA, 19 nt, Artificial Sequence
  Description of Artificial Sequence: Synthetic oligonucleotide
ugcacggcggcucucauua

SEQ ID NO: 274296 - RNA, 19 nt, Artificial Sequence
  Description of Artificial Sequence: Synthetic oligonucleotide
uaaggucuguagaccgccg

SEQ ID NO: 274297 - RNA, 19 nt, Artificial Sequence
  Description of Artificial Sequence: Synthetic oligonucleotide
accguccaugagcaggugc

SEQ ID NO: 274298 - RNA, 19 nt, Artificial Sequence
  Description of Artificial Sequence: Synthetic oligonucleotide
ugcacgcaugaucucguag

SEQ ID NO: 274299 - RNA, 19 nt, Artificial Sequence
  Description of Artificial Sequence: Synthetic oligonucleotide
guaccgacguuugaugugg

SEQ ID NO: 274300 - RNA, 19 nt, Artificial Sequence
  Description of Artificial Sequence: Synthetic oligonucleotide
accgauagacgugccaccc

SEQ ID NO: 274301 - RNA, 19 nt, Artificial Sequence
  Description of Artificial Sequence: Synthetic oligonucleotide
gagacguagcuuguugggg

SEQ ID NO: 274302 - RNA, 19 nt, Artificial Sequence
  Description of Artificial Sequence: Synthetic oligonucleotide
agagcgucaugcuggcacg

SEQ ID NO: 274303 - RNA, 19 nt, Artificial Sequence
  Description of Artificial Sequence: Synthetic oligonucleotide
cuaucuagugcugaagcuc

SEQ ID NO: 274304 - RNA, 19 nt, Artificial Sequence
  Description of Artificial Sequence: Synthetic oligonucleotide
uccuuggcgggcuaugaug

SEQ ID NO: 274305 - RNA, 19 nt, Artificial Sequence
  Description of Artificial Sequence: Synthetic oligonucleotide
agguaacauaguuagucaa

SEQ ID NO: 274306 - RNA, 19 nt, Artificial Sequence
  Description of Artificial Sequence: Synthetic oligonucleotide
uuaaaggcggagccaguaa

SEQ ID NO: 274307 - RNA, 19 nt, Artificial Sequence
  Description of Artificial Sequence: Synthetic oligonucleotide
gaaccgauagacgugccac

SEQ ID NO: 274308 - RNA, 19 nt, Artificial Sequence
  Description of Artificial Sequence: Synthetic oligonucleotide
gcaggaauaagagugugag

SEQ ID NO: 274309 - RNA, 19 nt, Artificial Sequence
  Description of Artificial Sequence: Synthetic oligonucleotide
uacucgcaauaugagcugg

SEQ ID NO: 274310 - RNA, 19 nt, Artificial Sequence
  Description of Artificial Sequence: Synthetic oligonucleotide
augcaguuuagcugggcug

SEQ ID NO: 274311 - RNA, 19 nt, Artificial Sequence
  Description of Artificial Sequence: Synthetic oligonucleotide
gaaagcgucgcugccgaag

SEQ ID NO: 274312 - RNA, 19 nt, Artificial Sequence
  Description of Artificial Sequence: Synthetic oligonucleotide
aaggucuguagaccgccga

SEQ ID NO: 274313 - RNA, 19 nt, Artificial Sequence
  Description of Artificial Sequence: Synthetic oligonucleotide
acgaccuguggguaccgac

SEQ ID NO: 274314 - RNA, 19 nt, Artificial Sequence
  Description of Artificial Sequence: Synthetic oligonucleotide
uucccauauugguagccca

SEQ ID NO: 274315 - RNA, 19 nt, Artificial Sequence
  Description of Artificial Sequence: Synthetic oligonucleotide
ucaugcguugguacacaug

SEQ ID NO: 274316 - RNA, 19 nt, Artificial Sequence
  Description of Artificial Sequence: Synthetic oligonucleotide
ucaauggacgggcgcaggu

SEQ ID NO: 274317 - RNA, 19 nt, Artificial Sequence
  Description of Artificial Sequence: Synthetic oligonucleotide
cagguacucgcaauaugag

SEQ ID NO: 274318 - RNA, 19 nt, Artificial Sequence
  Description of Artificial Sequence: Synthetic oligonucleotide
uggguaccgacguuugaug

SEQ ID NO: 274319 - RNA, 19 nt, Artificial Sequence
  Description of Artificial Sequence: Synthetic oligonucleotide
agaccgccgaucugugagc

SEQ ID NO: 274320 - RNA, 19 nt, Artificial Sequence
  Description of Artificial Sequence: Synthetic oligonucleotide
gggcucguuguuuaguacg

SEQ ID NO: 274321 - RNA, 19 nt, Artificial Sequence
  Description of Artificial Sequence: Synthetic oligonucleotide
ucgacugguaccccugccu

SEQ ID NO: 274322 - RNA, 19 nt, Artificial Sequence
  Description of Artificial Sequence: Synthetic oligonucleotide
gaugaauaaggcgggucac

SEQ ID NO: 274323 - RNA, 19 nt, Artificial Sequence
  Description of Artificial Sequence: Synthetic oligonucleotide
acgaagugcaggcucacau

SEQ ID NO: 274324 - RNA, 19 nt, Artificial Sequence
  Description of Artificial Sequence: Synthetic oligonucleotide
gugcccauccuucgggucg

SEQ ID NO: 274325 - RNA, 19 nt, Artificial Sequence
  Description of Artificial Sequence: Synthetic oligonucleotide
uggcgggcuaugauggugc

SEQ ID NO: 274326 - RNA, 19 nt, Artificial Sequence
  Description of Artificial Sequence: Synthetic oligonucleotide
gguuggucaguuccgagug

SEQ ID NO: 274327 - RNA, 19 nt, Artificial Sequence
  Description of Artificial Sequence: Synthetic oligonucleotide
cuccggcccacucacaacc

SEQ ID NO: 274328 - RNA, 19 nt, Artificial Sequence
  Description of Artificial Sequence: Synthetic oligonucleotide
uauaucugcacggcggcuc

SEQ ID NO: 274329 - RNA, 19 nt, Artificial Sequence
  Description of Artificial Sequence: Synthetic oligonucleotide
uguagaccgccgaucugug

SEQ ID NO: 274330 - RNA, 19 nt, Artificial Sequence
  Description of Artificial Sequence: Synthetic oligonucleotide
auagacgugccacccacaa

SEQ ID NO: 274331 - RNA, 19 nt, Artificial Sequence
  Description of Artificial Sequence: Synthetic oligonucleotide
cagcaccccaauaugugag

SEQ ID NO: 274332 - RNA, 19 nt, Artificial Sequence
  Description of Artificial Sequence: Synthetic oligonucleotide
uggccuaaagugccccucc

SEQ ID NO: 274333 - RNA, 19 nt, Artificial Sequence
  Description of Artificial Sequence: Synthetic oligonucleotide
aaucaugcguugguacaca

SEQ ID NO: 274334 - RNA, 19 nt, Artificial Sequence
  Description of Artificial Sequence: Synthetic oligonucleotide
guacucgcaauaugagcug

SEQ ID NO: 274335 - RNA, 19 nt, Artificial Sequence
  Description of Artificial Sequence: Synthetic oligonucleotide
cucguagaagucagauuug

SEQ ID NO: 274336 - RNA, 19 nt, Artificial Sequence
  Description of Artificial Sequence: Synthetic oligonucleotide
ggaaugcgaguauaucugc

SEQ ID NO: 274337 - RNA, 19 nt, Artificial Sequence
  Description of Artificial Sequence: Synthetic oligonucleotide
uagacgugccacccacaag

SEQ ID NO: 274338 - RNA, 19 nt, Artificial Sequence
  Description of Artificial Sequence: Synthetic oligonucleotide
  modified_base (3)..(3): a, c, u, g, unknown or other
ugngcgaaugagugucacu

SEQ ID NO: 274339 - RNA, 19 nt, Artificial Sequence
  Description of Artificial Sequence: Synthetic oligonucleotide
cucaauccgggacacgauc

SEQ ID NO: 274340 - RNA, 19 nt, Artificial Sequence
  Description of Artificial Sequence: Synthetic oligonucleotide
caaucaugcguugguacac

SEQ ID NO: 274341 - RNA, 19 nt, Artificial Sequence
  Description of Artificial Sequence: Synthetic oligonucleotide
cagggguucagccguuucc

SEQ ID NO: 274342 - RNA, 19 nt, Artificial Sequence
  Description of Artificial Sequence: Synthetic oligonucleotide
gggaaugcgaguauaucug

SEQ ID NO: 274343 - RNA, 19 nt, Artificial Sequence
  Description of Artificial Sequence: Synthetic oligonucleotide
agggccccaaugaaggaac

SEQ ID NO: 274344 - RNA, 19 nt, Artificial Sequence
  Description of Artificial Sequence: Synthetic oligonucleotide
ugcacgccuggagaaaacc

SEQ ID NO: 274345 - RNA, 19 nt, Artificial Sequence
  Description of Artificial Sequence: Synthetic oligonucleotide
uccaucuggcgcgacgaag

SEQ ID NO: 274346 - RNA, 19 nt, Artificial Sequence
  Description of Artificial Sequence: Synthetic oligonucleotide
ggcuaagcgggagaagucg

SEQ ID NO: 274347 - RNA, 19 nt, Artificial Sequence
  Description of Artificial Sequence: Synthetic oligonucleotide
gaaugcgaguauaucugca

SEQ ID NO: 274348 - RNA, 19 nt, Artificial Sequence
  Description of Artificial Sequence: Synthetic oligonucleotide
ugccgaagcacggacuucu

SEQ ID NO: 274349 - RNA, 19 nt, Artificial Sequence
  Description of Artificial Sequence: Synthetic oligonucleotide
auaucugcacggcggcucu

SEQ ID NO: 274350 - RNA, 19 nt, Artificial Sequence
  Description of Artificial Sequence: Synthetic oligonucleotide
cuucaccacggguccagcc

SEQ ID NO: 274351 - RNA, 19 nt, Artificial Sequence
  Description of Artificial Sequence: Synthetic oligonucleotide
accgacgguggguuccugg

SEQ ID NO: 274352 - RNA, 19 nt, Artificial Sequence
  Description of Artificial Sequence: Synthetic oligonucleotide
ggauaugugagguccaaua

SEQ ID NO: 274353 - RNA, 19 nt, Artificial Sequence
  Description of Artificial Sequence: Synthetic oligonucleotide
gauguggccuaaagugccc

SEQ ID NO: 274354 - RNA, 19 nt, Artificial Sequence
  Description of Artificial Sequence: Synthetic oligonucleotide
cugcagauugccuagaauu

SEQ ID NO: 274355 - RNA, 19 nt, Artificial Sequence
  Description of Artificial Sequence: Synthetic oligonucleotide
uaguuagucaaaggucauc

SEQ ID NO: 274356 - RNA, 19 nt, Artificial Sequence
  Description of Artificial Sequence: Synthetic oligonucleotide
augcuaucuagugcugaag

SEQ ID NO: 274357 - RNA, 19 nt, Artificial Sequence
  Description of Artificial Sequence: Synthetic oligonucleotide
acgcacauaccgccacagg

SEQ ID NO: 274358 - RNA, 19 nt, Artificial Sequence
  Description of Artificial Sequence: Synthetic oligonucleotide
ugucaaucaugcguuggua

SEQ ID NO: 274359 - RNA, 19 nt, Artificial Sequence
  Description of Artificial Sequence: Synthetic oligonucleotide
  modified_base (8)..(8): a, c, u, g, unknown or other
aggcgugngcgaaugagug

SEQ ID NO: 274360 - RNA, 19 nt, Artificial Sequence
  Description of Artificial Sequence: Synthetic oligonucleotide
ccagcuagaccgacggugg

SEQ ID NO: 274361 - RNA, 19 nt, Artificial Sequence
  Description of Artificial Sequence: Synthetic oligonucleotide
aaaguccaucuggcgcgac

SEQ ID NO: 274362 - RNA, 19 nt, Artificial Sequence
  Description of Artificial Sequence: Synthetic oligonucleotide
ggcgauguccgcuggcagg

SEQ ID NO: 274363 - RNA, 19 nt, Artificial Sequence
  Description of Artificial Sequence: Synthetic oligonucleotide
acgccuggagaaaaccuuc

SEQ ID NO: 274364 - RNA, 19 nt, Artificial Sequence
  Description of Artificial Sequence: Synthetic oligonucleotide
cguuguuuaguacggcugg

SEQ ID NO: 274365 - RNA, 19 nt, Artificial Sequence
  Description of Artificial Sequence: Synthetic oligonucleotide
caucuggcgcgacgaaggg

SEQ ID NO: 274366 - RNA, 19 nt, Artificial Sequence
  Description of Artificial Sequence: Synthetic oligonucleotide
cacuccaccgugcgcgugg

SEQ ID NO: 274367 - RNA, 19 nt, Artificial Sequence
  Description of Artificial Sequence: Synthetic oligonucleotide
ucugcacgccuggagaaaa

SEQ ID NO: 274368 - RNA, 19 nt, Artificial Sequence
  Description of Artificial Sequence: Synthetic oligonucleotide
acggcggcucucauuaagg

SEQ ID NO: 274369 - RNA, 19 nt, Artificial Sequence
  Description of Artificial Sequence: Synthetic oligonucleotide
cagccguuuccacagcaac

SEQ ID NO: 274370 - RNA, 19 nt, Artificial Sequence
  Description of Artificial Sequence: Synthetic oligonucleotide
acgauccuugcagccaccg

SEQ ID NO: 274371 - RNA, 19 nt, Artificial Sequence
  Description of Artificial Sequence: Synthetic oligonucleotide
ucccacgucgauggcaaug

SEQ ID NO: 274372 - RNA, 19 nt, Artificial Sequence
  Description of Artificial Sequence: Synthetic oligonucleotide
uggcaugauguagcaagac

SEQ ID NO: 274373 - RNA, 19 nt, Artificial Sequence
  Description of Artificial Sequence: Synthetic oligonucleotide
gacgggcgcagguacucgc

SEQ ID NO: 274374 - RNA, 19 nt, Artificial Sequence
  Description of Artificial Sequence: Synthetic oligonucleotide
guuuaguacggcuggcgcu

SEQ ID NO: 274375 - RNA, 19 nt, Artificial Sequence
  Description of Artificial Sequence: Synthetic oligonucleotide
agucaauggacgggcgcag

SEQ ID NO: 274376 - RNA, 19 nt, Artificial Sequence
  Description of Artificial Sequence: Synthetic oligonucleotide
cacggcggcucucauuaag

SEQ ID NO: 274377 - RNA, 19 nt, Artificial Sequence
  Description of Artificial Sequence: Synthetic oligonucleotide
ggcgcugcguuccucugcg

SEQ ID NO: 274378 - RNA, 19 nt, Artificial Sequence
  Description of Artificial Sequence: Synthetic oligonucleotide
aucaugcguugguacacau

SEQ ID NO: 274379 - RNA, 19 nt, Artificial Sequence
  Description of Artificial Sequence: Synthetic oligonucleotide
gucacgaccuguggguacc

SEQ ID NO: 274380 - RNA, 19 nt, Artificial Sequence
  Description of Artificial Sequence: Synthetic oligonucleotide
aucuggcgcgacgaagggg

SEQ ID NO: 274381 - RNA, 19 nt, Artificial Sequence
  Description of Artificial Sequence: Synthetic oligonucleotide
aggucuguagaccgccgau

SEQ ID NO: 274382 - RNA, 19 nt, Artificial Sequence
  Description of Artificial Sequence: Synthetic oligonucleotide
gggagaagucgcugugccg

SEQ ID NO: 274383 - RNA, 19 nt, Artificial Sequence
  Description of Artificial Sequence: Synthetic oligonucleotide
cucgcagcgugaagaugag

SEQ ID NO: 274384 - RNA, 19 nt, Artificial Sequence
  Description of Artificial Sequence: Synthetic oligonucleotide
gucuguagaccgccgaucu

SEQ ID NO: 274385 - RNA, 19 nt, Artificial Sequence
  Description of Artificial Sequence: Synthetic oligonucleotide
uaccgacguuugauguggc

SEQ ID NO: 274386 - RNA, 19 nt, Artificial Sequence
  Description of Artificial Sequence: Synthetic oligonucleotide
gcgacgaaggggacgaucc

SEQ ID NO: 274387 - RNA, 19 nt, Artificial Sequence
  Description of Artificial Sequence: Synthetic oligonucleotide
cacaguauagcagcaggaa

SEQ ID NO: 274388 - RNA, 19 nt, Artificial Sequence
  Description of Artificial Sequence: Synthetic oligonucleotide
caauccgggacacgaucuc

SEQ ID NO: 274389 - RNA, 19 nt, Artificial Sequence
  Description of Artificial Sequence: Synthetic oligonucleotide
gucaauggacgggcgcagg

SEQ ID NO: 274390 - RNA, 19 nt, Artificial Sequence
  Description of Artificial Sequence: Synthetic oligonucleotide
guuaaaggcggagccagua

SEQ ID NO: 274391 - RNA, 19 nt, Artificial Sequence
  Description of Artificial Sequence: Synthetic oligonucleotide
cucguuguuuaguacggcu

SEQ ID NO: 274392 - RNA, 19 nt, Artificial Sequence
  Description of Artificial Sequence: Synthetic oligonucleotide
aggaaccgauagacgugcc

SEQ ID NO: 274393 - RNA, 19 nt, Artificial Sequence
  Description of Artificial Sequence: Synthetic oligonucleotide
ggacagauugcuggcuggg

SEQ ID NO: 274394 - RNA, 19 nt, Artificial Sequence
  Description of Artificial Sequence: Synthetic oligonucleotide
caugcaguuuagcugggcu

SEQ ID NO: 274395 - RNA, 19 nt, Artificial Sequence
  Description of Artificial Sequence: Synthetic oligonucleotide
gucgacugguaccccugcc

SEQ ID NO: 274396 - RNA, 19 nt, Artificial Sequence
  Description of Artificial Sequence: Synthetic oligonucleotide
gcucgcagcgugaagauga

SEQ ID NO: 274397 - RNA, 19 nt, Artificial Sequence
  Description of Artificial Sequence: Synthetic oligonucleotide
cagcuagaccgacgguggg

SEQ ID NO: 274398 - RNA, 19 nt, Artificial Sequence
  Description of Artificial Sequence: Synthetic oligonucleotide
  modified_base (4)..(4): a, c, u, g, unknown or other
gugngcgaaugagugucac

SEQ ID NO: 274399 - RNA, 19 nt, Artificial Sequence
  Description of Artificial Sequence: Synthetic oligonucleotide
guagccugagagcgucaug

SEQ ID NO: 274400 - RNA, 19 nt, Artificial Sequence
  Description of Artificial Sequence: Synthetic oligonucleotide
cgaguauaucugcacggcg

SEQ ID NO: 274401 - RNA, 19 nt, Artificial Sequence
  Description of Artificial Sequence: Synthetic oligonucleotide
ggacgauccuugcagccac

SEQ ID NO: 274402 - RNA, 19 nt, Artificial Sequence
  Description of Artificial Sequence: Synthetic oligonucleotide
uggcgcgacgaaggggacg

SEQ ID NO: 274403 - RNA, 19 nt, Artificial Sequence
  Description of Artificial Sequence: Synthetic oligonucleotide
ucacgaccuguggguaccg

SEQ ID NO: 274404 - RNA, 19 nt, Artificial Sequence
  Description of Artificial Sequence: Synthetic oligonucleotide
cagguagccugagagcguc

SEQ ID NO: 274405 - RNA, 19 nt, Artificial Sequence
  Description of Artificial Sequence: Synthetic oligonucleotide
gggcgugucacaguauagc

SEQ ID NO: 274406 - RNA, 19 nt, Artificial Sequence
  Description of Artificial Sequence: Synthetic oligonucleotide
uuaguacggcuggcgcugc

SEQ ID NO: 274407 - RNA, 19 nt, Artificial Sequence
  Description of Artificial Sequence: Synthetic oligonucleotide
ggcaugauguagcaagacu

SEQ ID NO: 274408 - RNA, 19 nt, Artificial Sequence
  Description of Artificial Sequence: Synthetic oligonucleotide
gauagacgugccacccaca

SEQ ID NO: 274409 - RNA, 19 nt, Artificial Sequence
  Description of Artificial Sequence: Synthetic oligonucleotide
agcuagaccgacggugggu

SEQ ID NO: 274410 - RNA, 19 nt, Artificial Sequence
  Description of Artificial Sequence: Synthetic oligonucleotide
gcuggguuggucaguuccg

SEQ ID NO: 274411 - RNA, 19 nt, Artificial Sequence
  Description of Artificial Sequence: Synthetic oligonucleotide
ucugcguacagggccccaa

SEQ ID NO: 274412 - RNA, 19 nt, Artificial Sequence
  Description of Artificial Sequence: Synthetic oligonucleotide
ggaaccgauagacgugcca

SEQ ID NO: 274413 - RNA, 19 nt, Artificial Sequence
  Description of Artificial Sequence: Synthetic oligonucleotide
agggcgugucacaguauag

SEQ ID NO: 274414 - RNA, 19 nt, Artificial Sequence
  Description of Artificial Sequence: Synthetic oligonucleotide
gcgaguauaucugcacggc

SEQ ID NO: 274415 - RNA, 19 nt, Artificial Sequence
  Description of Artificial Sequence: Synthetic oligonucleotide
  modified_base (6)..(6): a, c, u, g, unknown or other
gcgugngcgaaugaguguc

SEQ ID NO: 274416 - RNA, 19 nt, Artificial Sequence
  Description of Artificial Sequence: Synthetic oligonucleotide
gcuaagcgggagaagucgc

SEQ ID NO: 274417 - RNA, 19 nt, Artificial Sequence
  Description of Artificial Sequence: Synthetic oligonucleotide
agcgugaagaugagggguu

SEQ ID NO: 274418 - RNA, 19 nt, Artificial Sequence
  Description of Artificial Sequence: Synthetic oligonucleotide
cugcacgccuggagaaaac

SEQ ID NO: 274419 - RNA, 19 nt, Artificial Sequence
  Description of Artificial Sequence: Synthetic oligonucleotide
augacuguuuuggcuccca

SEQ ID NO: 274420 - RNA, 19 nt, Artificial Sequence
  Description of Artificial Sequence: Synthetic oligonucleotide
cgugucucgaacagcgcag

SEQ ID NO: 274421 - RNA, 19 nt, Artificial Sequence
  Description of Artificial Sequence: Synthetic oligonucleotide
gcuaucuagugcugaagcu

SEQ ID NO: 274422 - RNA, 19 nt, Artificial Sequence
  Description of Artificial Sequence: Synthetic oligonucleotide
gagagggguccucaauccu

SEQ ID NO: 274423 - RNA, 19 nt, Artificial Sequence
  Description of Artificial Sequence: Synthetic oligonucleotide
cuagaccgacgguggguuc

SEQ ID NO: 274424 - RNA, 19 nt, Artificial Sequence
  Description of Artificial Sequence: Synthetic oligonucleotide
ccccaauaugugagcagcc

SEQ ID NO: 274425 - RNA, 19 nt, Artificial Sequence
  Description of Artificial Sequence: Synthetic oligonucleotide
cacgucgauggcaaugacu

SEQ ID NO: 274426 - RNA, 19 nt, Artificial Sequence
  Description of Artificial Sequence: Synthetic oligonucleotide
gcggcucucauuaaggucu

SEQ ID NO: 274427 - RNA, 19 nt, Artificial Sequence
  Description of Artificial Sequence: Synthetic oligonucleotide
ggguuccccggugagcacg

SEQ ID NO: 274428 - RNA, 19 nt, Artificial Sequence
  Description of Artificial Sequence: Synthetic oligonucleotide
acucgcaauaugagcugga

SEQ ID NO: 274429 - RNA, 19 nt, Artificial Sequence
  Description of Artificial Sequence: Synthetic oligonucleotide
gagcgucaugcuggcacgc

SEQ ID NO: 274430 - RNA, 19 nt, Artificial Sequence
  Description of Artificial Sequence: Synthetic oligonucleotide
guagaccgccgaucuguga

SEQ ID NO: 274431 - RNA, 19 nt, Artificial Sequence
  Description of Artificial Sequence: Synthetic oligonucleotide
ggucacgaccuguggguac

SEQ ID NO: 274432 - RNA, 19 nt, Artificial Sequence
  Description of Artificial Sequence: Synthetic oligonucleotide
ucugcacggcggcucucau

SEQ ID NO: 274433 - RNA, 19 nt, Artificial Sequence
  Description of Artificial Sequence: Synthetic oligonucleotide
accgugugugcugcgcuca

SEQ ID NO: 274434 - RNA, 19 nt, Artificial Sequence
  Description of Artificial Sequence: Synthetic oligonucleotide
gacgauccuugcagccacc

SEQ ID NO: 274435 - RNA, 19 nt, Artificial Sequence
  Description of Artificial Sequence: Synthetic oligonucleotide
cugcgggcgauguccgcug

SEQ ID NO: 274436 - RNA, 19 nt, Artificial Sequence
  Description of Artificial Sequence: Synthetic oligonucleotide
caccgugugugcugcgcuc

SEQ ID NO: 274437 - RNA, 19 nt, Artificial Sequence
  Description of Artificial Sequence: Synthetic oligonucleotide
acuccaccgugcgcguggg

SEQ ID NO: 274438 - RNA, 19 nt, Artificial Sequence
  Description of Artificial Sequence: Synthetic oligonucleotide
caaggucgacugguacccc

SEQ ID NO: 274439 - RNA, 19 nt, Artificial Sequence
  Description of Artificial Sequence: Synthetic oligonucleotide
cgauagacgugccacccac

SEQ ID NO: 274440 - RNA, 19 nt, Artificial Sequence
  Description of Artificial Sequence: Synthetic oligonucleotide
cgaucugugagcauuuucu

SEQ ID NO: 274441 - RNA, 19 nt, Artificial Sequence
  Description of Artificial Sequence: Synthetic oligonucleotide
  modified_base (9)..(9): a, c, u, g, unknown or other
caggcgugngcgaaugagu

SEQ ID NO: 274442 - RNA, 19 nt, Artificial Sequence
  Description of Artificial Sequence: Synthetic oligonucleotide
uggugccggcuuuggcaug

SEQ ID NO: 274443 - RNA, 19 nt, Artificial Sequence
  Description of Artificial Sequence: Synthetic oligonucleotide
ggguuagguaacauaguua

SEQ ID NO: 274444 - RNA, 19 nt, Artificial Sequence
  Description of Artificial Sequence: Synthetic oligonucleotide
caucauagaucuggucgaa

SEQ ID NO: 274445 - RNA, 19 nt, Artificial Sequence
  Description of Artificial Sequence: Synthetic oligonucleotide
auguccgcuggcagguugu

SEQ ID NO: 274446 - RNA, 19 nt, Artificial Sequence
  Description of Artificial Sequence: Synthetic oligonucleotide
gcaguuuagcugggcugcg

SEQ ID NO: 274447 - RNA, 19 nt, Artificial Sequence
  Description of Artificial Sequence: Synthetic oligonucleotide
cgguuaaaggcggagccag

SEQ ID NO: 274448 - RNA, 19 nt, Artificial Sequence
  Description of Artificial Sequence: Synthetic oligonucleotide
aggcacgcacggcaguguu

SEQ ID NO: 274449 - RNA, 19 nt, Artificial Sequence
  Description of Artificial Sequence: Synthetic oligonucleotide
gccccaaugaaggaaccga

SEQ ID NO: 274450 - RNA, 19 nt, Artificial Sequence
  Description of Artificial Sequence: Synthetic oligonucleotide
gcgaaugagugucacuggu

SEQ ID NO: 274451 - RNA, 19 nt, Artificial Sequence
  Description of Artificial Sequence: Synthetic oligonucleotide
gguuccccggugagcacgg

SEQ ID NO: 274452 - RNA, 19 nt, Artificial Sequence
  Description of Artificial Sequence: Synthetic oligonucleotide
guagaugaauaaggcgggu

SEQ ID NO: 274453 - RNA, 19 nt, Artificial Sequence
  Description of Artificial Sequence: Synthetic oligonucleotide
ggucuguagaccgccgauc

SEQ ID NO: 274454 - RNA, 19 nt, Artificial Sequence
  Description of Artificial Sequence: Synthetic oligonucleotide
gaaagacacgguggauacu

SEQ ID NO: 274455 - RNA, 19 nt, Artificial Sequence
  Description of Artificial Sequence: Synthetic oligonucleotide
augcguugguacacaugca

SEQ ID NO: 274456 - RNA, 19 nt, Artificial Sequence
  Description of Artificial Sequence: Synthetic oligonucleotide
guagcaagacucugcuguu

SEQ ID NO: 274457 - RNA, 19 nt, Artificial Sequence
  Description of Artificial Sequence: Synthetic oligonucleotide
cagcgugaagaugaggggu

SEQ ID NO: 274458 - RNA, 19 nt, Artificial Sequence
  Description of Artificial Sequence: Synthetic oligonucleotide
ggguaccgacguuugaugu

SEQ ID NO: 274459 - RNA, 19 nt, Artificial Sequence
  Description of Artificial Sequence: Synthetic oligonucleotide
ccgaucugugagcauuuuc

SEQ ID NO: 274460 - RNA, 19 nt, Artificial Sequence
  Description of Artificial Sequence: Synthetic oligonucleotide
guggguaccgacguuugau

SEQ ID NO: 274461 - RNA, 19 nt, Artificial Sequence
  Description of Artificial Sequence: Synthetic oligonucleotide
caucagagacguagcuugu

SEQ ID NO: 274462 - RNA, 19 nt, Artificial Sequence
  Description of Artificial Sequence: Synthetic oligonucleotide
ggcgcgacgaaggggacga

SEQ ID NO: 274463 - RNA, 19 nt, Artificial Sequence
  Description of Artificial Sequence: Synthetic oligonucleotide
aggcgggucacgaccugug

SEQ ID NO: 274464 - RNA, 19 nt, Artificial Sequence
  Description of Artificial Sequence: Synthetic oligonucleotide
gcucguuguuuaguacggc

SEQ ID NO: 274465 - RNA, 19 nt, Artificial Sequence
  Description of Artificial Sequence: Synthetic oligonucleotide
cacgccuggagaaaaccuu

SEQ ID NO: 274466 - RNA, 19 nt, Artificial Sequence
  Description of Artificial Sequence: Synthetic oligonucleotide
agaccgacgguggguuccu

SEQ ID NO: 274467 - RNA, 19 nt, Artificial Sequence
  Description of Artificial Sequence: Synthetic oligonucleotide
ggggaccaauggcuugcag

SEQ ID NO: 274468 - RNA, 19 nt, Artificial Sequence
  Description of Artificial Sequence: Synthetic oligonucleotide
gugccggucugcacgccug

SEQ ID NO: 274469 - RNA, 19 nt, Artificial Sequence
  Description of Artificial Sequence: Synthetic oligonucleotide
cuggcgcgacgaaggggac

SEQ ID NO: 274470 - RNA, 19 nt, Artificial Sequence
  Description of Artificial Sequence: Synthetic oligonucleotide
ccggaauucuugaaugcua

SEQ ID NO: 274471 - RNA, 19 nt, Artificial Sequence
  Description of Artificial Sequence: Synthetic oligonucleotide
ggcgggcuaugauggugcc

SEQ ID NO: 274472 - RNA, 19 nt, Artificial Sequence
  Description of Artificial Sequence: Synthetic oligonucleotide
cguagaagucagauuugga

SEQ ID NO: 274473 - RNA, 19 nt, Artificial Sequence
  Description of Artificial Sequence: Synthetic oligonucleotide
  modified_base (7)..(7): a, c, u, g, unknown or other
ggcgugngcgaaugagugu

SEQ ID NO: 274474 - RNA, 19 nt, Artificial Sequence
  Description of Artificial Sequence: Synthetic oligonucleotide
caaaggggugacaguuuau

SEQ ID NO: 274475 - RNA, 19 nt, Artificial Sequence
  Description of Artificial Sequence: Synthetic oligonucleotide
ggugccggcuuuggcauga

SEQ ID NO: 274476 - RNA, 19 nt, Artificial Sequence
  Description of Artificial Sequence: Synthetic oligonucleotide
accgccgaucugugagcau

SEQ ID NO: 274477 - RNA, 19 nt, Artificial Sequence
  Description of Artificial Sequence: Synthetic oligonucleotide
gcgggcuaugauggugccg

SEQ ID NO: 274478 - RNA, 19 nt, Artificial Sequence
  Description of Artificial Sequence: Synthetic oligonucleotide
cugccgaagcacggacuuc

SEQ ID NO: 274479 - RNA, 19 nt, Artificial Sequence
  Description of Artificial Sequence: Synthetic oligonucleotide
gacgugccacccacaaggu

SEQ ID NO: 274480 - RNA, 19 nt, Artificial Sequence
  Description of Artificial Sequence: Synthetic oligonucleotide
caauccgacuccuccccau

SEQ ID NO: 274481 - RNA, 19 nt, Artificial Sequence
  Description of Artificial Sequence: Synthetic oligonucleotide
cgucgcugccgaagcacgg

SEQ ID NO: 274482 - RNA, 19 nt, Artificial Sequence
  Description of Artificial Sequence: Synthetic oligonucleotide
guccaucuggcgcgacgaa

SEQ ID NO: 274483 - RNA, 19 nt, Artificial Sequence
  Description of Artificial Sequence: Synthetic oligonucleotide
ggcucgcagcgugaagaug

SEQ ID NO: 274484 - RNA, 19 nt, Artificial Sequence
  Description of Artificial Sequence: Synthetic oligonucleotide
gccaccgugugugcugcgc

SEQ ID NO: 274485 - RNA, 19 nt, Artificial Sequence
  Description of Artificial Sequence: Synthetic oligonucleotide
uguccgcuggcagguuguu

SEQ ID NO: 274486 - RNA, 19 nt, Artificial Sequence
  Description of Artificial Sequence: Synthetic oligonucleotide
gcuacugagcuggggucuc

SEQ ID NO: 274487 - RNA, 19 nt, Artificial Sequence
  Description of Artificial Sequence: Synthetic oligonucleotide
gcacgcacggcaguguucu

SEQ ID NO: 274488 - RNA, 19 nt, Artificial Sequence
  Description of Artificial Sequence: Synthetic oligonucleotide
gugcacgcaugaucucgua

SEQ ID NO: 274489 - RNA, 19 nt, Artificial Sequence
  Description of Artificial Sequence: Synthetic oligonucleotide
cggcgugagaagaggcggc

SEQ ID NO: 274490 - RNA, 19 nt, Artificial Sequence
  Description of Artificial Sequence: Synthetic oligonucleotide
agguagccugagagcguca

SEQ ID NO: 274491 - RNA, 19 nt, Artificial Sequence
  Description of Artificial Sequence: Synthetic oligonucleotide
cuuggcgggcuaugauggu

SEQ ID NO: 274492 - RNA, 19 nt, Artificial Sequence
  Description of Artificial Sequence: Synthetic oligonucleotide
gcagauugccuagaauuuu

SEQ ID NO: 274493 - RNA, 19 nt, Artificial Sequence
  Description of Artificial Sequence: Synthetic oligonucleotide
cugugccggucugcacgcc

SEQ ID NO: 274494 - RNA, 19 nt, Artificial Sequence
  Description of Artificial Sequence: Synthetic oligonucleotide
cacgcacggcaguguucuc

SEQ ID NO: 274495 - RNA, 19 nt, Artificial Sequence
  Description of Artificial Sequence: Synthetic oligonucleotide
gcgugaagaugagggguuc

SEQ ID NO: 274496 - RNA, 19 nt, Artificial Sequence
  Description of Artificial Sequence: Synthetic oligonucleotide
cgggcucguuguuuaguac

SEQ ID NO: 274497 - RNA, 19 nt, Artificial Sequence
  Description of Artificial Sequence: Synthetic oligonucleotide
ccagggguucagccguuuc

SEQ ID NO: 274498 - RNA, 19 nt, Artificial Sequence
  Description of Artificial Sequence: Synthetic oligonucleotide
gaccgacgguggguuccug

SEQ ID NO: 274499 - RNA, 19 nt, Artificial Sequence
  Description of Artificial Sequence: Synthetic oligonucleotide
gcccacucacaaccugguc

SEQ ID NO: 274500 - RNA, 19 nt, Artificial Sequence
  Description of Artificial Sequence: Synthetic oligonucleotide
guacggcuggcgcugcguu

SEQ ID NO: 274501 - RNA, 19 nt, Artificial Sequence
  Description of Artificial Sequence: Synthetic oligonucleotide
cacgcauggccgaggcagu

SEQ ID NO: 274502 - RNA, 19 nt, Artificial Sequence
  Description of Artificial Sequence: Synthetic oligonucleotide
cgacguuugauguggccua

SEQ ID NO: 274503 - RNA, 19 nt, Artificial Sequence
  Description of Artificial Sequence: Synthetic oligonucleotide
ggcacgcacggcaguguuc

SEQ ID NO: 274504 - RNA, 19 nt, Artificial Sequence
  Description of Artificial Sequence: Synthetic oligonucleotide
ccgauagacgugccaccca

SEQ ID NO: 274505 - RNA, 19 nt, Artificial Sequence
  Description of Artificial Sequence: Synthetic oligonucleotide
guuccccggugagcacggc

SEQ ID NO: 274506 - RNA, 19 nt, Artificial Sequence
  Description of Artificial Sequence: Synthetic oligonucleotide
  modified_base (5)..(5): a, c, u, g, unknown or other
cgugngcgaaugaguguca

SEQ ID NO: 274507 - RNA, 19 nt, Artificial Sequence
  Description of Artificial Sequence: Synthetic oligonucleotide
ccgggcucguuguuuagua

SEQ ID NO: 274508 - RNA, 19 nt, Artificial Sequence
  Description of Artificial Sequence: Synthetic oligonucleotide
auaccgccacagggagcca

SEQ ID NO: 274509 - RNA, 19 nt, Artificial Sequence
  Description of Artificial Sequence: Synthetic oligonucleotide
gguagccugagagcgucau

SEQ ID NO: 274510 - RNA, 19 nt, Artificial Sequence
  Description of Artificial Sequence: Synthetic oligonucleotide
gcuagaccgacgguggguu

SEQ ID NO: 274511 - RNA, 19 nt, Artificial Sequence
  Description of Artificial Sequence: Synthetic oligonucleotide
gguuaaaggcggagccagu

SEQ ID NO: 274512 - RNA, 19 nt, Artificial Sequence
  Description of Artificial Sequence: Synthetic oligonucleotide
gcgcgugggaccugggccu

SEQ ID NO: 274513 - RNA, 19 nt, Artificial Sequence
  Description of Artificial Sequence: Synthetic oligonucleotide
ccccaaugaaggaaccgau

SEQ ID NO: 274514 - RNA, 19 nt, Artificial Sequence
  Description of Artificial Sequence: Synthetic oligonucleotide
ccucugcguacagggcccc

SEQ ID NO: 274515 - RNA, 19 nt, Artificial Sequence
  Description of Artificial Sequence: Synthetic oligonucleotide
cucugcguacagggcccca

SEQ ID NO: 274516 - RNA, 19 nt, Artificial Sequence
  Description of Artificial Sequence: Synthetic oligonucleotide
cuccagcuagaccgacggu

SEQ ID NO: 274517 - RNA, 19 nt, Artificial Sequence
  Description of Artificial Sequence: Synthetic oligonucleotide
gggucacgaccugugggua

SEQ ID NO: 274518 - RNA, 19 nt, Artificial Sequence
  Description of Artificial Sequence: Synthetic oligonucleotide
caccgugcgcgugggaccu

SEQ ID NO: 274519 - RNA, 19 nt, Artificial Sequence
  Description of Artificial Sequence: Synthetic oligonucleotide
  modified_base (13)..(13): a, c, u, g, unknown or other
cucccaggcgugngcgaau

SEQ ID NO: 274520 - RNA, 19 nt, Artificial Sequence
  Description of Artificial Sequence: Synthetic oligonucleotide
cgggcuaagcgggagaagu

SEQ ID NO: 274521 - RNA, 19 nt, Artificial Sequence
  Description of Artificial Sequence: Synthetic oligonucleotide
accgugcgcgugggaccug

SEQ ID NO: 274522 - RNA, 19 nt, Artificial Sequence
  Description of Artificial Sequence: Synthetic oligonucleotide
ccgacgguggguuccuggu

SEQ ID NO: 274523 - RNA, 19 nt, Artificial Sequence
  Description of Artificial Sequence: Synthetic oligonucleotide
gaggagcguggggaccaau

SEQ ID NO: 274524 - RNA, 19 nt, Artificial Sequence
  Description of Artificial Sequence: Synthetic oligonucleotide
gcucaauccgggacacgau

SEQ ID NO: 274525 - RNA, 19 nt, Artificial Sequence
  Description of Artificial Sequence: Synthetic oligonucleotide
agugccccuccgggagcuu

SEQ ID NO: 274526 - RNA, 19 nt, Artificial Sequence
  Description of Artificial Sequence: Synthetic oligonucleotide
ccaccgugugugcugcgcu

SEQ ID NO: 274527 - RNA, 19 nt, Artificial Sequence
  Description of Artificial Sequence: Synthetic oligonucleotide
cgcugcguuccucugcgua

SEQ ID NO: 274528 - RNA, 19 nt, Artificial Sequence
  Description of Artificial Sequence: Synthetic oligonucleotide
ccacuccaccgugcgcgug

SEQ ID NO: 274529 - RNA, 19 nt, Artificial Sequence
  Description of Artificial Sequence: Synthetic oligonucleotide
gcacggcggcucucauuaa

SEQ ID NO: 274530 - RNA, 19 nt, Artificial Sequence
  Description of Artificial Sequence: Synthetic oligonucleotide
ccuggcuucccacgucgau

SEQ ID NO: 274531 - RNA, 19 nt, Artificial Sequence
  Description of Artificial Sequence: Synthetic oligonucleotide
ccgccgaucugugagcauu

SEQ ID NO: 274532 - RNA, 19 nt, Artificial Sequence
  Description of Artificial Sequence: Synthetic oligonucleotide
ggcccauucccgggcucgu

SEQ ID NO: 274533 - RNA, 19 nt, Artificial Sequence
  Description of Artificial Sequence: Synthetic oligonucleotide
ccagggcgugucacaguau

SEQ ID NO: 274534 - RNA, 19 nt, Artificial Sequence
  Description of Artificial Sequence: Synthetic oligonucleotide
gccgaucugugagcauuuu

SEQ ID NO: 274535 - RNA, 19 nt, Artificial Sequence
  Description of Artificial Sequence: Synthetic oligonucleotide
cccgggcucguuguuuagu

SEQ ID NO: 274536 - RNA, 19 nt, Artificial Sequence
  Description of Artificial Sequence: Synthetic oligonucleotide
cgccgaucugugagcauuu

SEQ ID NO: 274537 - RNA, 19 nt, Artificial Sequence
  Description of Artificial Sequence: Synthetic oligonucleotide
gcggggcagcgcaggugua

SEQ ID NO: 274538 - RNA, 19 nt, Artificial Sequence
  Description of Artificial Sequence: Synthetic oligonucleotide
gcgcgacgaaggggacgau

SEQ ID NO: 274539 - RNA, 19 nt, Artificial Sequence
  Description of Artificial Sequence: Synthetic oligonucleotide
  modified_base (1)..(1): a, c, u, g, unknown or other
ngcgaaugagugucacugg

SEQ ID NO: 274540 - RNA, 19 nt, Artificial Sequence
  Description of Artificial Sequence: Synthetic oligonucleotide
aauauugggguacagauac

SEQ ID NO: 274541 - RNA, 19 nt, Artificial Sequence
  Description of Artificial Sequence: Synthetic oligonucleotide
cauucuaucaauaucaggg

SEQ ID NO: 274542 - RNA, 19 nt, Artificial Sequence
  Description of Artificial Sequence: Synthetic oligonucleotide
ucuaauuagagaaauagcu

SEQ ID NO: 274543 - RNA, 19 nt, Artificial Sequence
  Description of Artificial Sequence: Synthetic oligonucleotide
aacacucgcauucaagucc

SEQ ID NO: 274544 - RNA, 19 nt, Artificial Sequence
  Description of Artificial Sequence: Synthetic oligonucleotide
aaauucgugauuauacugc

SEQ ID NO: 274545 - RNA, 19 nt, Artificial Sequence
  Description of Artificial Sequence: Synthetic oligonucleotide
aauaagaggacccucauua

SEQ ID NO: 274546 - RNA, 19 nt, Artificial Sequence
  Description of Artificial Sequence: Synthetic oligonucleotide
aaaauguugaacuuccgga

SEQ ID NO: 274547 - RNA, 19 nt, Artificial Sequence
  Description of Artificial Sequence: Synthetic oligonucleotide
aauaucagggcccacuauc

SEQ ID NO: 274548 - RNA, 19 nt, Artificial Sequence
  Description of Artificial Sequence: Synthetic oligonucleotide
aaagcggcuauauugauca

SEQ ID NO: 274549 - RNA, 19 nt, Artificial Sequence
  Description of Artificial Sequence: Synthetic oligonucleotide
uucggugacaauaagagga

SEQ ID NO: 274550 - RNA, 19 nt, Artificial Sequence
  Description of Artificial Sequence: Synthetic oligonucleotide
uuuacagugaacuguaccc

SEQ ID NO: 274551 - RNA, 19 nt, Artificial Sequence
  Description of Artificial Sequence: Synthetic oligonucleotide
auaugugaauuucuguucc

SEQ ID NO: 274552 - RNA, 19 nt, Artificial Sequence
  Description of Artificial Sequence: Synthetic oligonucleotide
aaguucguaccacugagac

SEQ ID NO: 274553 - RNA, 19 nt, Artificial Sequence
  Description of Artificial Sequence: Synthetic oligonucleotide
aauucgugauuauacugcg

SEQ ID NO: 274554 - RNA, 19 nt, Artificial Sequence
  Description of Artificial Sequence: Synthetic oligonucleotide
uguaauuucgaauaauauc

SEQ ID NO: 274555 - RNA, 19 nt, Artificial Sequence
  Description of Artificial Sequence: Synthetic oligonucleotide
acuagauguuacuauauuc

SEQ ID NO: 274556 - RNA, 19 nt, Artificial Sequence
  Description of Artificial Sequence: Synthetic oligonucleotide
auucuaucaauaucagggc

SEQ ID NO: 274557 - RNA, 19 nt, Artificial Sequence
  Description of Artificial Sequence: Synthetic oligonucleotide
uuauugucaagcauuagaa

SEQ ID NO: 274558 - RNA, 19 nt, Artificial Sequence
  Description of Artificial Sequence: Synthetic oligonucleotide
ucuaucaauaucagggccc

SEQ ID NO: 274559 - RNA, 19 nt, Artificial Sequence
  Description of Artificial Sequence: Synthetic oligonucleotide
uuuccuuauguuaugcugc

SEQ ID NO: 274560 - RNA, 19 nt, Artificial Sequence
  Description of Artificial Sequence: Synthetic oligonucleotide
caguuauagaugaucaugg

SEQ ID NO: 274561 - RNA, 19 nt, Artificial Sequence
  Description of Artificial Sequence: Synthetic oligonucleotide
auagcuacuugcuaucaac

SEQ ID NO: 274562 - RNA, 19 nt, Artificial Sequence
  Description of Artificial Sequence: Synthetic oligonucleotide
auggugucgauccaaggcc

SEQ ID NO: 274563 - RNA, 19 nt, Artificial Sequence
  Description of Artificial Sequence: Synthetic oligonucleotide
gaaauucgugauuauacug

SEQ ID NO: 274564 - RNA, 19 nt, Artificial Sequence
  Description of Artificial Sequence: Synthetic oligonucleotide
acuaacucaucauuaauca

SEQ ID NO: 274565 - RNA, 19 nt, Artificial Sequence
  Description of Artificial Sequence: Synthetic oligonucleotide
ucaguaagaugcaugaagu

SEQ ID NO: 274566 - RNA, 19 nt, Artificial Sequence
  Description of Artificial Sequence: Synthetic oligonucleotide
aaggaaucaucguuggcag

SEQ ID NO: 274567 - RNA, 19 nt, Artificial Sequence
  Description of Artificial Sequence: Synthetic oligonucleotide
aaacacucgcauucaaguc

SEQ ID NO: 274568 - RNA, 19 nt, Artificial Sequence
  Description of Artificial Sequence: Synthetic oligonucleotide
uguaauaggguccgguuca

SEQ ID NO: 274569 - RNA, 19 nt, Artificial Sequence
  Description of Artificial Sequence: Synthetic oligonucleotide
caucauucuaucaauauca

SEQ ID NO: 274570 - RNA, 19 nt, Artificial Sequence
  Description of Artificial Sequence: Synthetic oligonucleotide
uuucgaauaauaucuggga

SEQ ID NO: 274571 - RNA, 19 nt, Artificial Sequence
  Description of Artificial Sequence: Synthetic oligonucleotide
uucgugauuauacugcgcu

SEQ ID NO: 274572 - RNA, 19 nt, Artificial Sequence
  Description of Artificial Sequence: Synthetic oligonucleotide
ucaaauuauaauucagcuc

SEQ ID NO: 274573 - RNA, 19 nt, Artificial Sequence
  Description of Artificial Sequence: Synthetic oligonucleotide
ucucuuagggucaucaagu

SEQ ID NO: 274574 - RNA, 19 nt, Artificial Sequence
  Description of Artificial Sequence: Synthetic oligonucleotide
aaauguugaacuuccggaa

SEQ ID NO: 274575 - RNA, 19 nt, Artificial Sequence
  Description of Artificial Sequence: Synthetic oligonucleotide
uucuaucaauaucagggcc

SEQ ID NO: 274576 - RNA, 19 nt, Artificial Sequence
  Description of Artificial Sequence: Synthetic oligonucleotide
auccaguucucuuaggguc

SEQ ID NO: 274577 - RNA, 19 nt, Artificial Sequence
  Description of Artificial Sequence: Synthetic oligonucleotide
ucaauuaccaagccuggcu

SEQ ID NO: 274578 - RNA, 19 nt, Artificial Sequence
  Description of Artificial Sequence: Synthetic oligonucleotide
gauggugucgauccaaggc

SEQ ID NO: 274579 - RNA, 19 nt, Artificial Sequence
  Description of Artificial Sequence: Synthetic oligonucleotide
auguguagcaguugggcac

SEQ ID NO: 274580 - RNA, 19 nt, Artificial Sequence
  Description of Artificial Sequence: Synthetic oligonucleotide
guaggguucaaccgcaugg

SEQ ID NO: 274581 - RNA, 19 nt, Artificial Sequence
  Description of Artificial Sequence: Synthetic oligonucleotide
gagaaauucgugauuauac

SEQ ID NO: 274582 - RNA, 19 nt, Artificial Sequence
  Description of Artificial Sequence: Synthetic oligonucleotide
guaauuucgaauaauaucu

SEQ ID NO: 274583 - RNA, 19 nt, Artificial Sequence
  Description of Artificial Sequence: Synthetic oligonucleotide
ucauucuaucaauaucagg

SEQ ID NO: 274584 - RNA, 19 nt, Artificial Sequence
  Description of Artificial Sequence: Synthetic oligonucleotide
auaagugacuuuccguuuc

SEQ ID NO: 274585 - RNA, 19 nt, Artificial Sequence
  Description of Artificial Sequence: Synthetic oligonucleotide
uggugaaccagcuuugcag

SEQ ID NO: 274586 - RNA, 19 nt, Artificial Sequence
  Description of Artificial Sequence: Synthetic oligonucleotide
aauaggguccgguucauau

SEQ ID NO: 274587 - RNA, 19 nt, Artificial Sequence
  Description of Artificial Sequence: Synthetic oligonucleotide
caucuuuaucaaaugagac

SEQ ID NO: 274588 - RNA, 19 nt, Artificial Sequence
  Description of Artificial Sequence: Synthetic oligonucleotide
uucguguaggguucaaccg

SEQ ID NO: 274589 - RNA, 19 nt, Artificial Sequence
  Description of Artificial Sequence: Synthetic oligonucleotide
uguuacuauauuccucacc

SEQ ID NO: 274590 - RNA, 19 nt, Artificial Sequence
  Description of Artificial Sequence: Synthetic oligonucleotide
ugauacacccaucauucca

SEQ ID NO: 274591 - RNA, 19 nt, Artificial Sequence
  Description of Artificial Sequence: Synthetic oligonucleotide
auuauaauucagcucuugu

SEQ ID NO: 274592 - RNA, 19 nt, Artificial Sequence
  Description of Artificial Sequence: Synthetic oligonucleotide
uaauuucgaauaauaucug

SEQ ID NO: 274593 - RNA, 19 nt, Artificial Sequence
  Description of Artificial Sequence: Synthetic oligonucleotide
ucgaauaauaucugggaaa

SEQ ID NO: 274594 - RNA, 19 nt, Artificial Sequence
  Description of Artificial Sequence: Synthetic oligonucleotide
ucaucauucuaucaauauc

SEQ ID NO: 274595 - RNA, 19 nt, Artificial Sequence
  Description of Artificial Sequence: Synthetic oligonucleotide
acucucacugaaccuaagc

SEQ ID NO: 274596 - RNA, 19 nt, Artificial Sequence
  Description of Artificial Sequence: Synthetic oligonucleotide
auaucugggaaaguaacag

SEQ ID NO: 274597 - RNA, 19 nt, Artificial Sequence
  Description of Artificial Sequence: Synthetic oligonucleotide
uuguaauuucgaauaauau

SEQ ID NO: 274598 - RNA, 19 nt, Artificial Sequence
  Description of Artificial Sequence: Synthetic oligonucleotide
uuugugagcagugaugugu

SEQ ID NO: 274599 - RNA, 19 nt, Artificial Sequence
  Description of Artificial Sequence: Synthetic oligonucleotide
uucgaauaauaucugggaa

SEQ ID NO: 274600 - RNA, 19 nt, Artificial Sequence
  Description of Artificial Sequence: Synthetic oligonucleotide
agaaauucgugauuauacu

SEQ ID NO: 274601 - RNA, 19 nt, Artificial Sequence
  Description of Artificial Sequence: Synthetic oligonucleotide
ucccuagaaauacagcaug

SEQ ID NO: 274602 - RNA, 19 nt, Artificial Sequence
  Description of Artificial Sequence: Synthetic oligonucleotide
uguuguaccacaguauaga

SEQ ID NO: 274603 - RNA, 19 nt, Artificial Sequence
  Description of Artificial Sequence: Synthetic oligonucleotide
acccacgugaaugugaugg

SEQ ID NO: 274604 - RNA, 19 nt, Artificial Sequence
  Description of Artificial Sequence: Synthetic oligonucleotide
guuacuauauuccucaccu

SEQ ID NO: 274605 - RNA, 19 nt, Artificial Sequence
  Description of Artificial Sequence: Synthetic oligonucleotide
gucauucuuugccacaccg

SEQ ID NO: 274606 - RNA, 19 nt, Artificial Sequence
  Description of Artificial Sequence: Synthetic oligonucleotide
uaaagcccaugauacaccc

SEQ ID NO: 274607 - RNA, 19 nt, Artificial Sequence
  Description of Artificial Sequence: Synthetic oligonucleotide
aucguuggcagcgugcucc

SEQ ID NO: 274608 - RNA, 19 nt, Artificial Sequence
  Description of Artificial Sequence: Synthetic oligonucleotide
uuugugaacgauuuccuuu

SEQ ID NO: 274609 - RNA, 19 nt, Artificial Sequence
  Description of Artificial Sequence: Synthetic oligonucleotide
acggaauaaggccaucagg

SEQ ID NO: 274610 - RNA, 19 nt, Artificial Sequence
  Description of Artificial Sequence: Synthetic oligonucleotide
ucauuaguucuguugccag

SEQ ID NO: 274611 - RNA, 19 nt, Artificial Sequence
  Description of Artificial Sequence: Synthetic oligonucleotide
aauaaggccaucagggcca

SEQ ID NO: 274612 - RNA, 19 nt, Artificial Sequence
  Description of Artificial Sequence: Synthetic oligonucleotide
uguucugcgagguuuugca

SEQ ID NO: 274613 - RNA, 19 nt, Artificial Sequence
  Description of Artificial Sequence: Synthetic oligonucleotide
cacuaacucaucauuaauc

SEQ ID NO: 274614 - RNA, 19 nt, Artificial Sequence
  Description of Artificial Sequence: Synthetic oligonucleotide
acagaaucuauuuugcaua

SEQ ID NO: 274615 - RNA, 19 nt, Artificial Sequence
  Description of Artificial Sequence: Synthetic oligonucleotide
uucauaugugaauuucugu

SEQ ID NO: 274616 - RNA, 19 nt, Artificial Sequence
  Description of Artificial Sequence: Synthetic oligonucleotide
aaugagcucugaaugagcu

SEQ ID NO: 274617 - RNA, 19 nt, Artificial Sequence
  Description of Artificial Sequence: Synthetic oligonucleotide
ugcacugagaccucucuug

SEQ ID NO: 274618 - RNA, 19 nt, Artificial Sequence
  Description of Artificial Sequence: Synthetic oligonucleotide
aaaagcggcuauauugauc

SEQ ID NO: 274619 - RNA, 19 nt, Artificial Sequence
  Description of Artificial Sequence: Synthetic oligonucleotide
aauugcaggugucgaaacu

SEQ ID NO: 274620 - RNA, 19 nt, Artificial Sequence
  Description of Artificial Sequence: Synthetic oligonucleotide
ucaaagcuaagagagugga

SEQ ID NO: 274621 - RNA, 19 nt, Artificial Sequence
  Description of Artificial Sequence: Synthetic oligonucleotide
ucguguaggguucaaccgc

SEQ ID NO: 274622 - RNA, 19 nt, Artificial Sequence
  Description of Artificial Sequence: Synthetic oligonucleotide
aaacggaugguggcaaagg

SEQ ID NO: 274623 - RNA, 19 nt, Artificial Sequence
  Description of Artificial Sequence: Synthetic oligonucleotide
acgugaaugugauggcccc

SEQ ID NO: 274624 - RNA, 19 nt, Artificial Sequence
  Description of Artificial Sequence: Synthetic oligonucleotide
ggaaaguaacagcugaaag

SEQ ID NO: 274625 - RNA, 19 nt, Artificial Sequence
  Description of Artificial Sequence: Synthetic oligonucleotide
gguacgaucugauaacacc

SEQ ID NO: 274626 - RNA, 19 nt, Artificial Sequence
  Description of Artificial Sequence: Synthetic oligonucleotide
cuuucaauugcaggugucg

SEQ ID NO: 274627 - RNA, 19 nt, Artificial Sequence
  Description of Artificial Sequence: Synthetic oligonucleotide
uauugaucauccagcugag

SEQ ID NO: 274628 - RNA, 19 nt, Artificial Sequence
  Description of Artificial Sequence: Synthetic oligonucleotide
auaucagggcccacuaucc

SEQ ID NO: 274629 - RNA, 19 nt, Artificial Sequence
  Description of Artificial Sequence: Synthetic oligonucleotide
uaagaggacccucauuagu

SEQ ID NO: 274630 - RNA, 19 nt, Artificial Sequence
  Description of Artificial Sequence: Synthetic oligonucleotide
auugcaggugucgaaacuc

SEQ ID NO: 274631 - RNA, 19 nt, Artificial Sequence
  Description of Artificial Sequence: Synthetic oligonucleotide
agaguaacagguuucuaau

SEQ ID NO: 274632 - RNA, 19 nt, Artificial Sequence
  Description of Artificial Sequence: Synthetic oligonucleotide
aacucagucuugauguauc

SEQ ID NO: 274633 - RNA, 19 nt, Artificial Sequence
  Description of Artificial Sequence: Synthetic oligonucleotide
cuuguccacggaauaaggc

SEQ ID NO: 274634 - RNA, 19 nt, Artificial Sequence
  Description of Artificial Sequence: Synthetic oligonucleotide
cauggaaacggaugguggc

SEQ ID NO: 274635 - RNA, 19 nt, Artificial Sequence
  Description of Artificial Sequence: Synthetic oligonucleotide
cucaaagcuaagagagugg

SEQ ID NO: 274636 - RNA, 19 nt, Artificial Sequence
  Description of Artificial Sequence: Synthetic oligonucleotide
caaagguacgaucugauaa

SEQ ID NO: 274637 - RNA, 19 nt, Artificial Sequence
  Description of Artificial Sequence: Synthetic oligonucleotide
ugaacgauuuccuuucuuu

SEQ ID NO: 274638 - RNA, 19 nt, Artificial Sequence
  Description of Artificial Sequence: Synthetic oligonucleotide
uucccgggaacucucacug

SEQ ID NO: 274639 - RNA, 19 nt, Artificial Sequence
  Description of Artificial Sequence: Synthetic oligonucleotide
uuuccaugggaaaacuguc

SEQ ID NO: 274640 - RNA, 19 nt, Artificial Sequence
  Description of Artificial Sequence: Synthetic oligonucleotide
ugcauaagugacuuuccgu

SEQ ID NO: 274641 - RNA, 19 nt, Artificial Sequence
  Description of Artificial Sequence: Synthetic oligonucleotide
ucucuuauuuugugaacga

SEQ ID NO: 274642 - RNA, 19 nt, Artificial Sequence
  Description of Artificial Sequence: Synthetic oligonucleotide
aaguuauccugaagauugc

SEQ ID NO: 274643 - RNA, 19 nt, Artificial Sequence
  Description of Artificial Sequence: Synthetic oligonucleotide
uugugaacgauuuccuuuc

SEQ ID NO: 274644 - RNA, 19 nt, Artificial Sequence
  Description of Artificial Sequence: Synthetic oligonucleotide
uaaaucuucuagcgucuug

SEQ ID NO: 274645 - RNA, 19 nt, Artificial Sequence
  Description of Artificial Sequence: Synthetic oligonucleotide
aacggaugguggcaaagga

SEQ ID NO: 274646 - RNA, 19 nt, Artificial Sequence
  Description of Artificial Sequence: Synthetic oligonucleotide
uuauacugcgcucaucauu

SEQ ID NO: 274647 - RNA, 19 nt, Artificial Sequence
  Description of Artificial Sequence: Synthetic oligonucleotide
uuuaagcugcugacggacc

SEQ ID NO: 274648 - RNA, 19 nt, Artificial Sequence
  Description of Artificial Sequence: Synthetic oligonucleotide
aauagcuacuugcuaucaa

SEQ ID NO: 274649 - RNA, 19 nt, Artificial Sequence
  Description of Artificial Sequence: Synthetic oligonucleotide
uguaccccagucuucaaaa

SEQ ID NO: 274650 - RNA, 19 nt, Artificial Sequence
  Description of Artificial Sequence: Synthetic oligonucleotide
accuaagcaggaauguccc

SEQ ID NO: 274651 - RNA, 19 nt, Artificial Sequence
  Description of Artificial Sequence: Synthetic oligonucleotide
uaucagggcccacuauccg

SEQ ID NO: 274652 - RNA, 19 nt, Artificial Sequence
  Description of Artificial Sequence: Synthetic oligonucleotide
uucgcuuccacuccacuaa

SEQ ID NO: 274653 - RNA, 19 nt, Artificial Sequence
  Description of Artificial Sequence: Synthetic oligonucleotide
uguguuguucuuucuugca

SEQ ID NO: 274654 - RNA, 19 nt, Artificial Sequence
  Description of Artificial Sequence: Synthetic oligonucleotide
auaauucagcucuuguaau

SEQ ID NO: 274655 - RNA, 19 nt, Artificial Sequence
  Description of Artificial Sequence: Synthetic oligonucleotide
uguugaacuuccggaaucc

SEQ ID NO: 274656 - RNA, 19 nt, Artificial Sequence
  Description of Artificial Sequence: Synthetic oligonucleotide
agauguuacuauauuccuc

SEQ ID NO: 274657 - RNA, 19 nt, Artificial Sequence
  Description of Artificial Sequence: Synthetic oligonucleotide
ggaaucaucguuggcagcg

SEQ ID NO: 274658 - RNA, 19 nt, Artificial Sequence
  Description of Artificial Sequence: Synthetic oligonucleotide
cacuuuguaauuucgaaua

SEQ ID NO: 274659 - RNA, 19 nt, Artificial Sequence
  Description of Artificial Sequence: Synthetic oligonucleotide
agaaaagcggcuauauuga

SEQ ID NO: 274660 - RNA, 19 nt, Artificial Sequence
  Description of Artificial Sequence: Synthetic oligonucleotide
auugcguuuugcuuuuccu

SEQ ID NO: 274661 - RNA, 19 nt, Artificial Sequence
  Description of Artificial Sequence: Synthetic oligonucleotide
cuuauguuaugcugcaaca

SEQ ID NO: 274662 - RNA, 19 nt, Artificial Sequence
  Description of Artificial Sequence: Synthetic oligonucleotide
uccacuaacucaucauuaa

SEQ ID NO: 274663 - RNA, 19 nt, Artificial Sequence
  Description of Artificial Sequence: Synthetic oligonucleotide
gauugcguuuugcuuuucc

SEQ ID NO: 274664 - RNA, 19 nt, Artificial Sequence
  Description of Artificial Sequence: Synthetic oligonucleotide
auuaguucuguugccagca

SEQ ID NO: 274665 - RNA, 19 nt, Artificial Sequence
  Description of Artificial Sequence: Synthetic oligonucleotide
aguuauccugaagauugcg

SEQ ID NO: 274666 - RNA, 19 nt, Artificial Sequence
  Description of Artificial Sequence: Synthetic oligonucleotide
uucugcgagguuuugcacu

SEQ ID NO: 274667 - RNA, 19 nt, Artificial Sequence
  Description of Artificial Sequence: Synthetic oligonucleotide
uacagugaacuguacccca

SEQ ID NO: 274668 - RNA, 19 nt, Artificial Sequence
  Description of Artificial Sequence: Synthetic oligonucleotide
uggaaguuauccugaagau

SEQ ID NO: 274669 - RNA, 19 nt, Artificial Sequence
  Description of Artificial Sequence: Synthetic oligonucleotide
uagcgucuugauuucaugu

SEQ ID NO: 274670 - RNA, 19 nt, Artificial Sequence
  Description of Artificial Sequence: Synthetic oligonucleotide
ugggaaaacugucaucaua

SEQ ID NO: 274671 - RNA, 19 nt, Artificial Sequence
  Description of Artificial Sequence: Synthetic oligonucleotide
cauuaguucuguugccagc

SEQ ID NO: 274672 - RNA, 19 nt, Artificial Sequence
  Description of Artificial Sequence: Synthetic oligonucleotide
cacagcauuuacuagaugu

SEQ ID NO: 274673 - RNA, 19 nt, Artificial Sequence
  Description of Artificial Sequence: Synthetic oligonucleotide
uucccuagaaauacagcau

SEQ ID NO: 274674 - RNA, 19 nt, Artificial Sequence
  Description of Artificial Sequence: Synthetic oligonucleotide
caaggcacgcguugggugg

SEQ ID NO: 274675 - RNA, 19 nt, Artificial Sequence
  Description of Artificial Sequence: Synthetic oligonucleotide
uuauguuaugcugcaacaa

SEQ ID NO: 274676 - RNA, 19 nt, Artificial Sequence
  Description of Artificial Sequence: Synthetic oligonucleotide
acccucauuaguucuguug

SEQ ID NO: 274677 - RNA, 19 nt, Artificial Sequence
  Description of Artificial Sequence: Synthetic oligonucleotide
aguucuaggauggugucga

SEQ ID NO: 274678 - RNA, 19 nt, Artificial Sequence
  Description of Artificial Sequence: Synthetic oligonucleotide
gaaugugauggccccuucc

SEQ ID NO: 274679 - RNA, 19 nt, Artificial Sequence
  Description of Artificial Sequence: Synthetic oligonucleotide
acacucgcauucaaguccc

SEQ ID NO: 274680 - RNA, 19 nt, Artificial Sequence
  Description of Artificial Sequence: Synthetic oligonucleotide
aaguaacagcugaaaguuc

SEQ ID NO: 274681 - RNA, 19 nt, Artificial Sequence
  Description of Artificial Sequence: Synthetic oligonucleotide
uggacuucagacacagaaa

SEQ ID NO: 274682 - RNA, 19 nt, Artificial Sequence
  Description of Artificial Sequence: Synthetic oligonucleotide
auguuacuauauuccucac

SEQ ID NO: 274683 - RNA, 19 nt, Artificial Sequence
  Description of Artificial Sequence: Synthetic oligonucleotide
gauaacaccugcuuguuuu

SEQ ID NO: 274684 - RNA, 19 nt, Artificial Sequence
  Description of Artificial Sequence: Synthetic oligonucleotide
ucggugacaauaagaggac

SEQ ID NO: 274685 - RNA, 19 nt, Artificial Sequence
  Description of Artificial Sequence: Synthetic oligonucleotide
aaucaucguuggcagcgug

SEQ ID NO: 274686 - RNA, 19 nt, Artificial Sequence
  Description of Artificial Sequence: Synthetic oligonucleotide
gacaauaagaggacccuca

SEQ ID NO: 274687 - RNA, 19 nt, Artificial Sequence
  Description of Artificial Sequence: Synthetic oligonucleotide
uacuagauguuacuauauu

SEQ ID NO: 274688 - RNA, 19 nt, Artificial Sequence
  Description of Artificial Sequence: Synthetic oligonucleotide
acaugacuuggauccacag

SEQ ID NO: 274689 - RNA, 19 nt, Artificial Sequence
  Description of Artificial Sequence: Synthetic oligonucleotide
uuucaauugcaggugucga

SEQ ID NO: 274690 - RNA, 19 nt, Artificial Sequence
  Description of Artificial Sequence: Synthetic oligonucleotide
acuuuguaauuucgaauaa

SEQ ID NO: 274691 - RNA, 19 nt, Artificial Sequence
  Description of Artificial Sequence: Synthetic oligonucleotide
uggagaucaccacgacagg

SEQ ID NO: 274692 - RNA, 19 nt, Artificial Sequence
  Description of Artificial Sequence: Synthetic oligonucleotide
uccguugguggacucuucc

SEQ ID NO: 274693 - RNA, 19 nt, Artificial Sequence
  Description of Artificial Sequence: Synthetic oligonucleotide
uucaauugcaggugucgaa

SEQ ID NO: 274694 - RNA, 19 nt, Artificial Sequence
  Description of Artificial Sequence: Synthetic oligonucleotide
caucuguacgggauccucc

SEQ ID NO: 274695 - RNA, 19 nt, Artificial Sequence
  Description of Artificial Sequence: Synthetic oligonucleotide
ucucguucacaucuuuauc

SEQ ID NO: 274696 - RNA, 19 nt, Artificial Sequence
  Description of Artificial Sequence: Synthetic oligonucleotide
ugcaacaaauguguuguuc

SEQ ID NO: 274697 - RNA, 19 nt, Artificial Sequence
  Description of Artificial Sequence: Synthetic oligonucleotide
gaaacggaugguggcaaag

SEQ ID NO: 274698 - RNA, 19 nt, Artificial Sequence
  Description of Artificial Sequence: Synthetic oligonucleotide
uccggaauccuuucacugu

SEQ ID NO: 274699 - RNA, 19 nt, Artificial Sequence
  Description of Artificial Sequence: Synthetic oligonucleotide
ugggcacugacuacacagc

SEQ ID NO: 274700 - RNA, 19 nt, Artificial Sequence
  Description of Artificial Sequence: Synthetic oligonucleotide
cagaguaacagguuucuaa

SEQ ID NO: 274701 - RNA, 19 nt, Artificial Sequence
  Description of Artificial Sequence: Synthetic oligonucleotide
aagaggacccucauuaguu

SEQ ID NO: 274702 - RNA, 19 nt, Artificial Sequence
  Description of Artificial Sequence: Synthetic oligonucleotide
cguuccaccacaaaugagc

SEQ ID NO: 274703 - RNA, 19 nt, Artificial Sequence
  Description of Artificial Sequence: Synthetic oligonucleotide
ggugacaauaagaggaccc

SEQ ID NO: 274704 - RNA, 19 nt, Artificial Sequence
  Description of Artificial Sequence: Synthetic oligonucleotide
ggugaaccagcuuugcagc

SEQ ID NO: 274705 - RNA, 19 nt, Artificial Sequence
  Description of Artificial Sequence: Synthetic oligonucleotide
cuaucaacagggugcaaca

SEQ ID NO: 274706 - RNA, 19 nt, Artificial Sequence
  Description of Artificial Sequence: Synthetic oligonucleotide
uuggcauacagggcugccg

SEQ ID NO: 274707 - RNA, 19 nt, Artificial Sequence
  Description of Artificial Sequence: Synthetic oligonucleotide
aagaggacaaagguacgau

SEQ ID NO: 274708 - RNA, 19 nt, Artificial Sequence
  Description of Artificial Sequence: Synthetic oligonucleotide
gaguucuaggauggugucg

SEQ ID NO: 274709 - RNA, 19 nt, Artificial Sequence
  Description of Artificial Sequence: Synthetic oligonucleotide
uggugucgauccaaggcca

SEQ ID NO: 274710 - RNA, 19 nt, Artificial Sequence
  Description of Artificial Sequence: Synthetic oligonucleotide
aagugacuuuccguuucac

SEQ ID NO: 274711 - RNA, 19 nt, Artificial Sequence
  Description of Artificial Sequence: Synthetic oligonucleotide
auucgugauuauacugcgc

SEQ ID NO: 274712 - RNA, 19 nt, Artificial Sequence
  Description of Artificial Sequence: Synthetic oligonucleotide
uuugugugugugcccaaaa

SEQ ID NO: 274713 - RNA, 19 nt, Artificial Sequence
  Description of Artificial Sequence: Synthetic oligonucleotide
aacuuccggaauccuuuca

SEQ ID NO: 274714 - RNA, 19 nt, Artificial Sequence
  Description of Artificial Sequence: Synthetic oligonucleotide
auuuugugaacgauuuccu

SEQ ID NO: 274715 - RNA, 19 nt, Artificial Sequence
  Description of Artificial Sequence: Synthetic oligonucleotide
uuccuuacagaaccuuguc

SEQ ID NO: 274716 - RNA, 19 nt, Artificial Sequence
  Description of Artificial Sequence: Synthetic oligonucleotide
caauggugaaccagcuuug

SEQ ID NO: 274717 - RNA, 19 nt, Artificial Sequence
  Description of Artificial Sequence: Synthetic oligonucleotide
agcggcuauauugaucauc

SEQ ID NO: 274718 - RNA, 19 nt, Artificial Sequence
  Description of Artificial Sequence: Synthetic oligonucleotide
aucaacagggugcaacaaa

SEQ ID NO: 274719 - RNA, 19 nt, Artificial Sequence
  Description of Artificial Sequence: Synthetic oligonucleotide
cagagcacgcucucgcucc

SEQ ID NO: 274720 - RNA, 19 nt, Artificial Sequence
  Description of Artificial Sequence: Synthetic oligonucleotide
guugguggacucuuccaug

SEQ ID NO: 274721 - RNA, 19 nt, Artificial Sequence
  Description of Artificial Sequence: Synthetic oligonucleotide
uccguuucaccuucaguaa

SEQ ID NO: 274722 - RNA, 19 nt, Artificial Sequence
  Description of Artificial Sequence: Synthetic oligonucleotide
uugaacuuccggaauccuu

SEQ ID NO: 274723 - RNA, 19 nt, Artificial Sequence
  Description of Artificial Sequence: Synthetic oligonucleotide
uccgggacaucucaucaaa

SEQ ID NO: 274724 - RNA, 19 nt, Artificial Sequence
  Description of Artificial Sequence: Synthetic oligonucleotide
ugaggaugaguuggcauac

SEQ ID NO: 274725 - RNA, 19 nt, Artificial Sequence
  Description of Artificial Sequence: Synthetic oligonucleotide
agcuaagagaguggaguuc

SEQ ID NO: 274726 - RNA, 19 nt, Artificial Sequence
  Description of Artificial Sequence: Synthetic oligonucleotide
augugaaggaacaguagca

SEQ ID NO: 274727 - RNA, 19 nt, Artificial Sequence
  Description of Artificial Sequence: Synthetic oligonucleotide
gucauggaaacggauggug

SEQ ID NO: 274728 - RNA, 19 nt, Artificial Sequence
  Description of Artificial Sequence: Synthetic oligonucleotide
cacggaauaaggccaucag

SEQ ID NO: 274729 - RNA, 19 nt, Artificial Sequence
  Description of Artificial Sequence: Synthetic oligonucleotide
caguaagaugcaugaaguc

SEQ ID NO: 274730 - RNA, 19 nt, Artificial Sequence
  Description of Artificial Sequence: Synthetic oligonucleotide
caccacgacaggcagggag

SEQ ID NO: 274731 - RNA, 19 nt, Artificial Sequence
  Description of Artificial Sequence: Synthetic oligonucleotide
gauaccuuggguggaucug

SEQ ID NO: 274732 - RNA, 19 nt, Artificial Sequence
  Description of Artificial Sequence: Synthetic oligonucleotide
cccucauuaguucuguugc

SEQ ID NO: 274733 - RNA, 19 nt, Artificial Sequence
  Description of Artificial Sequence: Synthetic oligonucleotide
aucuguacgggauccuccu

SEQ ID NO: 274734 - RNA, 19 nt, Artificial Sequence
  Description of Artificial Sequence: Synthetic oligonucleotide
uuggucauucuuugccaca

SEQ ID NO: 274735 - RNA, 19 nt, Artificial Sequence
  Description of Artificial Sequence: Synthetic oligonucleotide
cauguuguaccacaguaua

SEQ ID NO: 274736 - RNA, 19 nt, Artificial Sequence
  Description of Artificial Sequence: Synthetic oligonucleotide
uugugagcagugaugugua

SEQ ID NO: 274737 - RNA, 19 nt, Artificial Sequence
  Description of Artificial Sequence: Synthetic oligonucleotide
cuagcgucuugauuucaug

SEQ ID NO: 274738 - RNA, 19 nt, Artificial Sequence
  Description of Artificial Sequence: Synthetic oligonucleotide
ccuuauguuaugcugcaac

SEQ ID NO: 274739 - RNA, 19 nt, Artificial Sequence
  Description of Artificial Sequence: Synthetic oligonucleotide
ugcugaaguucguaccacu

SEQ ID NO: 274740 - RNA, 19 nt, Artificial Sequence
  Description of Artificial Sequence: Synthetic oligonucleotide
aagucauauucaucuugua

SEQ ID NO: 274741 - RNA, 19 nt, Artificial Sequence
  Description of Artificial Sequence: Synthetic oligonucleotide
aguucguaccacugagaca

SEQ ID NO: 274742 - RNA, 19 nt, Artificial Sequence
  Description of Artificial Sequence: Synthetic oligonucleotide
ugugaacgauuuccuuucu

SEQ ID NO: 274743 - RNA, 19 nt, Artificial Sequence
  Description of Artificial Sequence: Synthetic oligonucleotide
uaagagaguggaguucuuc

SEQ ID NO: 274744 - RNA, 19 nt, Artificial Sequence
  Description of Artificial Sequence: Synthetic oligonucleotide
caucacuuuguaauuucga

SEQ ID NO: 274745 - RNA, 19 nt, Artificial Sequence
  Description of Artificial Sequence: Synthetic oligonucleotide
guaagaugcaugaaguccu

SEQ ID NO: 274746 - RNA, 19 nt, Artificial Sequence
  Description of Artificial Sequence: Synthetic oligonucleotide
uguacgggauccuccugga

SEQ ID NO: 274747 - RNA, 19 nt, Artificial Sequence
  Description of Artificial Sequence: Synthetic oligonucleotide
gcugauaaagcccaugaua

SEQ ID NO: 274748 - RNA, 19 nt, Artificial Sequence
  Description of Artificial Sequence: Synthetic oligonucleotide
accuuguccacggaauaag

SEQ ID NO: 274749 - RNA, 19 nt, Artificial Sequence
  Description of Artificial Sequence: Synthetic oligonucleotide
ccuuacagaaccuugucca

SEQ ID NO: 274750 - RNA, 19 nt, Artificial Sequence
  Description of Artificial Sequence: Synthetic oligonucleotide
uugcuaucaacagggugca

SEQ ID NO: 274751 - RNA, 19 nt, Artificial Sequence
  Description of Artificial Sequence: Synthetic oligonucleotide
auguuguaccacaguauag

SEQ ID NO: 274752 - RNA, 19 nt, Artificial Sequence
  Description of Artificial Sequence: Synthetic oligonucleotide
ucgcauucaagucccgaua

SEQ ID NO: 274753 - RNA, 19 nt, Artificial Sequence
  Description of Artificial Sequence: Synthetic oligonucleotide
gcggcuauauugaucaucc

SEQ ID NO: 274754 - RNA, 19 nt, Artificial Sequence
  Description of Artificial Sequence: Synthetic oligonucleotide
ugacggaccugcugcagac

SEQ ID NO: 274755 - RNA, 19 nt, Artificial Sequence
  Description of Artificial Sequence: Synthetic oligonucleotide
agguacgaucugauaacac

SEQ ID NO: 274756 - RNA, 19 nt, Artificial Sequence
  Description of Artificial Sequence: Synthetic oligonucleotide
ggaugaguuggcauacagg

SEQ ID NO: 274757 - RNA, 19 nt, Artificial Sequence
  Description of Artificial Sequence: Synthetic oligonucleotide
agaaucuauuuugcauaag

SEQ ID NO: 274758 - RNA, 19 nt, Artificial Sequence
  Description of Artificial Sequence: Synthetic oligonucleotide
cuauccgggacaucucauc

SEQ ID NO: 274759 - RNA, 19 nt, Artificial Sequence
  Description of Artificial Sequence: Synthetic oligonucleotide
uaggguucaaccgcaugga

SEQ ID NO: 274760 - RNA, 19 nt, Artificial Sequence
  Description of Artificial Sequence: Synthetic oligonucleotide
ugcgagguuuugcacuuaa

SEQ ID NO: 274761 - RNA, 19 nt, Artificial Sequence
  Description of Artificial Sequence: Synthetic oligonucleotide
cgagguuuugcacuuaaag

SEQ ID NO: 274762 - RNA, 19 nt, Artificial Sequence
  Description of Artificial Sequence: Synthetic oligonucleotide
auuauacugcgcucaucau

SEQ ID NO: 274763 - RNA, 19 nt, Artificial Sequence
  Description of Artificial Sequence: Synthetic oligonucleotide
caagucccgauaccuuggg

SEQ ID NO: 274764 - RNA, 19 nt, Artificial Sequence
  Description of Artificial Sequence: Synthetic oligonucleotide
gcacaacugggucucaaag

SEQ ID NO: 274765 - RNA, 19 nt, Artificial Sequence
  Description of Artificial Sequence: Synthetic oligonucleotide
cgaauaauaucugggaaag

SEQ ID NO: 274766 - RNA, 19 nt, Artificial Sequence
  Description of Artificial Sequence: Synthetic oligonucleotide
aaauuauaauucagcucuu

SEQ ID NO: 274767 - RNA, 19 nt, Artificial Sequence
  Description of Artificial Sequence: Synthetic oligonucleotide
gguucaaccgcauggaagu

SEQ ID NO: 274768 - RNA, 19 nt, Artificial Sequence
  Description of Artificial Sequence: Synthetic oligonucleotide
cagaaucuauuuugcauaa

SEQ ID NO: 274769 - RNA, 19 nt, Artificial Sequence
  Description of Artificial Sequence: Synthetic oligonucleotide
agauacuucaggggauucu

SEQ ID NO: 274770 - RNA, 19 nt, Artificial Sequence
  Description of Artificial Sequence: Synthetic oligonucleotide
uaagaugcaugaaguccuu

SEQ ID NO: 274771 - RNA, 19 nt, Artificial Sequence
  Description of Artificial Sequence: Synthetic oligonucleotide
ucgugauuauacugcgcuc

SEQ ID NO: 274772 - RNA, 19 nt, Artificial Sequence
  Description of Artificial Sequence: Synthetic oligonucleotide
cagggugcaacaaaugugu

SEQ ID NO: 274773 - RNA, 19 nt, Artificial Sequence
  Description of Artificial Sequence: Synthetic oligonucleotide
ucgaaacucggcugccaga

SEQ ID NO: 274774 - RNA, 19 nt, Artificial Sequence
  Description of Artificial Sequence: Synthetic oligonucleotide
agaccucucuuggugacug

SEQ ID NO: 274775 - RNA, 19 nt, Artificial Sequence
  Description of Artificial Sequence: Synthetic oligonucleotide
agguucgccuccauucugg

SEQ ID NO: 274776 - RNA, 19 nt, Artificial Sequence
  Description of Artificial Sequence: Synthetic oligonucleotide
cacagaaucuauuuugcau

SEQ ID NO: 274777 - RNA, 19 nt, Artificial Sequence
  Description of Artificial Sequence: Synthetic oligonucleotide
cuuguaaaucuucuagcgu

SEQ ID NO: 274778 - RNA, 19 nt, Artificial Sequence
  Description of Artificial Sequence: Synthetic oligonucleotide
gcuaucaacagggugcaac

SEQ ID NO: 274779 - RNA, 19 nt, Artificial Sequence
  Description of Artificial Sequence: Synthetic oligonucleotide
uuaguucuguugccagcau

SEQ ID NO: 274780 - RNA, 19 nt, Artificial Sequence
  Description of Artificial Sequence: Synthetic oligonucleotide
cuggucaaggcacgcguug

SEQ ID NO: 274781 - RNA, 19 nt, Artificial Sequence
  Description of Artificial Sequence: Synthetic oligonucleotide
gcaacaaauguguuguucu

SEQ ID NO: 274782 - RNA, 19 nt, Artificial Sequence
  Description of Artificial Sequence: Synthetic oligonucleotide
gucaauuaccaagccuggc

SEQ ID NO: 274783 - RNA, 19 nt, Artificial Sequence
  Description of Artificial Sequence: Synthetic oligonucleotide
auucuuugccacaccguug

SEQ ID NO: 274784 - RNA, 19 nt, Artificial Sequence
  Description of Artificial Sequence: Synthetic oligonucleotide
auacacccaucauuccaga

SEQ ID NO: 274785 - RNA, 19 nt, Artificial Sequence
  Description of Artificial Sequence: Synthetic oligonucleotide
ggucaauuaccaagccugg

SEQ ID NO: 274786 - RNA, 19 nt, Artificial Sequence
  Description of Artificial Sequence: Synthetic oligonucleotide
guacgaucugauaacaccu

SEQ ID NO: 274787 - RNA, 19 nt, Artificial Sequence
  Description of Artificial Sequence: Synthetic oligonucleotide
agucucaacuuuacaguga

SEQ ID NO: 274788 - RNA, 19 nt, Artificial Sequence
  Description of Artificial Sequence: Synthetic oligonucleotide
gucgauccaaggccagaag

SEQ ID NO: 274789 - RNA, 19 nt, Artificial Sequence
  Description of Artificial Sequence: Synthetic oligonucleotide
gaaguucguaccacugaga

SEQ ID NO: 274790 - RNA, 19 nt, Artificial Sequence
  Description of Artificial Sequence: Synthetic oligonucleotide
agggcccacuauccgggac

SEQ ID NO: 274791 - RNA, 19 nt, Artificial Sequence
  Description of Artificial Sequence: Synthetic oligonucleotide
caauauugggguacagaua

SEQ ID NO: 274792 - RNA, 19 nt, Artificial Sequence
  Description of Artificial Sequence: Synthetic oligonucleotide
cauggaagucagguucgcc

SEQ ID NO: 274793 - RNA, 19 nt, Artificial Sequence
  Description of Artificial Sequence: Synthetic oligonucleotide
gagaguggaguucuucggu

SEQ ID NO: 274794 - RNA, 19 nt, Artificial Sequence
  Description of Artificial Sequence: Synthetic oligonucleotide
uaggauggugucgauccaa

SEQ ID NO: 274795 - RNA, 19 nt, Artificial Sequence
  Description of Artificial Sequence: Synthetic oligonucleotide
acaccguuggcuucacuuu

SEQ ID NO: 274796 - RNA, 19 nt, Artificial Sequence
  Description of Artificial Sequence: Synthetic oligonucleotide
cugggaucgcuccacccac

SEQ ID NO: 274797 - RNA, 19 nt, Artificial Sequence
  Description of Artificial Sequence: Synthetic oligonucleotide
aacucucacugaaccuaag

SEQ ID NO: 274798 - RNA, 19 nt, Artificial Sequence
  Description of Artificial Sequence: Synthetic oligonucleotide
gaccucggagagcugggac

SEQ ID NO: 274799 - RNA, 19 nt, Artificial Sequence
  Description of Artificial Sequence: Synthetic oligonucleotide
acugcgcucaucauucuau

SEQ ID NO: 274800 - RNA, 19 nt, Artificial Sequence
  Description of Artificial Sequence: Synthetic oligonucleotide
ugauuauacugcgcucauc

SEQ ID NO: 274801 - RNA, 19 nt, Artificial Sequence
  Description of Artificial Sequence: Synthetic oligonucleotide
uacugcgcucaucauucua

SEQ ID NO: 274802 - RNA, 19 nt, Artificial Sequence
  Description of Artificial Sequence: Synthetic oligonucleotide
guucugcgagguuuugcac

SEQ ID NO: 274803 - RNA, 19 nt, Artificial Sequence
  Description of Artificial Sequence: Synthetic oligonucleotide
ggaagaggacaaagguacg

SEQ ID NO: 274804 - RNA, 19 nt, Artificial Sequence
  Description of Artificial Sequence: Synthetic oligonucleotide
ugggccagguacugucuga

SEQ ID NO: 274805 - RNA, 19 nt, Artificial Sequence
  Description of Artificial Sequence: Synthetic oligonucleotide
cacuuaaagucauauucau

SEQ ID NO: 274806 - RNA, 19 nt, Artificial Sequence
  Description of Artificial Sequence: Synthetic oligonucleotide
aggggauucucuggaauau

SEQ ID NO: 274807 - RNA, 19 nt, Artificial Sequence
  Description of Artificial Sequence: Synthetic oligonucleotide
uuaccaagccuggcuggca

SEQ ID NO: 274808 - RNA, 19 nt, Artificial Sequence
  Description of Artificial Sequence: Synthetic oligonucleotide
ccucauuaguucuguugcc

SEQ ID NO: 274809 - RNA, 19 nt, Artificial Sequence
  Description of Artificial Sequence: Synthetic oligonucleotide
cacaugacuuggauccaca

SEQ ID NO: 274810 - RNA, 19 nt, Artificial Sequence
  Description of Artificial Sequence: Synthetic oligonucleotide
uuggcagcgugcucccagu

SEQ ID NO: 274811 - RNA, 19 nt, Artificial Sequence
  Description of Artificial Sequence: Synthetic oligonucleotide
ccgcauggaagucagguuc

SEQ ID NO: 274812 - RNA, 19 nt, Artificial Sequence
  Description of Artificial Sequence: Synthetic oligonucleotide
ucguuggcagcgugcuccc

SEQ ID NO: 274813 - RNA, 19 nt, Artificial Sequence
  Description of Artificial Sequence: Synthetic oligonucleotide
gaaaagcggcuauauugau

SEQ ID NO: 274814 - RNA, 19 nt, Artificial Sequence
  Description of Artificial Sequence: Synthetic oligonucleotide
agggaaucacagaugggaa

SEQ ID NO: 274815 - RNA, 19 nt, Artificial Sequence
  Description of Artificial Sequence: Synthetic oligonucleotide
ccuagaaauacagcaugug

SEQ ID NO: 274816 - RNA, 19 nt, Artificial Sequence
  Description of Artificial Sequence: Synthetic oligonucleotide
accgcauggaagucagguu

SEQ ID NO: 274817 - RNA, 19 nt, Artificial Sequence
  Description of Artificial Sequence: Synthetic oligonucleotide
ggagguggucucaagguca

SEQ ID NO: 274818 - RNA, 19 nt, Artificial Sequence
  Description of Artificial Sequence: Synthetic oligonucleotide
gccuggcuggcacaacugg

SEQ ID NO: 274819 - RNA, 19 nt, Artificial Sequence
  Description of Artificial Sequence: Synthetic oligonucleotide
gguacugucugauuuccau

SEQ ID NO: 274820 - RNA, 19 nt, Artificial Sequence
  Description of Artificial Sequence: Synthetic oligonucleotide
gggaaucacagaugggaaa

SEQ ID NO: 274821 - RNA, 19 nt, Artificial Sequence
  Description of Artificial Sequence: Synthetic oligonucleotide
caggggauucucuggaaua

SEQ ID NO: 274822 - RNA, 19 nt, Artificial Sequence
  Description of Artificial Sequence: Synthetic oligonucleotide
acucgcauucaagucccga

SEQ ID NO: 274823 - RNA, 19 nt, Artificial Sequence
  Description of Artificial Sequence: Synthetic oligonucleotide
ccggaauccuuucacugug

SEQ ID NO: 274824 - RNA, 19 nt, Artificial Sequence
  Description of Artificial Sequence: Synthetic oligonucleotide
cagcuuugcagcuggucaa

SEQ ID NO: 274825 - RNA, 19 nt, Artificial Sequence
  Description of Artificial Sequence: Synthetic oligonucleotide
uuccguugguggacucuuc

SEQ ID NO: 274826 - RNA, 19 nt, Artificial Sequence
  Description of Artificial Sequence: Synthetic oligonucleotide
aagcggcuauauugaucau

SEQ ID NO: 274827 - RNA, 19 nt, Artificial Sequence
  Description of Artificial Sequence: Synthetic oligonucleotide
caggugucgaaacucggcu

SEQ ID NO: 274828 - RNA, 19 nt, Artificial Sequence
  Description of Artificial Sequence: Synthetic oligonucleotide
caaccgcauggaagucagg

SEQ ID NO: 274829 - RNA, 19 nt, Artificial Sequence
  Description of Artificial Sequence: Synthetic oligonucleotide
gcgcucaucauucuaucaa

SEQ ID NO: 274830 - RNA, 19 nt, Artificial Sequence
  Description of Artificial Sequence: Synthetic oligonucleotide
aaggcacgcguuggguggu

SEQ ID NO: 274831 - RNA, 19 nt, Artificial Sequence
  Description of Artificial Sequence: Synthetic oligonucleotide
ucccgggaacucucacuga

SEQ ID NO: 274832 - RNA, 19 nt, Artificial Sequence
  Description of Artificial Sequence: Synthetic oligonucleotide
ggaacaguagcaggaggga

SEQ ID NO: 274833 - RNA, 19 nt, Artificial Sequence
  Description of Artificial Sequence: Synthetic oligonucleotide
auauugggguacagauacu

SEQ ID NO: 274834 - RNA, 19 nt, Artificial Sequence
  Description of Artificial Sequence: Synthetic oligonucleotide
cuuccggaauccuuucacu

SEQ ID NO: 274835 - RNA, 19 nt, Artificial Sequence
  Description of Artificial Sequence: Synthetic oligonucleotide
agauugcguuuugcuuuuc

SEQ ID NO: 274836 - RNA, 19 nt, Artificial Sequence
  Description of Artificial Sequence: Synthetic oligonucleotide
cauaagugacuuuccguuu

SEQ ID NO: 274837 - RNA, 19 nt, Artificial Sequence
  Description of Artificial Sequence: Synthetic oligonucleotide
cuaugcacaugacuuggau

SEQ ID NO: 274838 - RNA, 19 nt, Artificial Sequence
  Description of Artificial Sequence: Synthetic oligonucleotide
ucccgauaccuugggugga

SEQ ID NO: 274839 - RNA, 19 nt, Artificial Sequence
  Description of Artificial Sequence: Synthetic oligonucleotide
acuauccgggacaucucau

SEQ ID NO: 274840 - RNA, 19 nt, Artificial Sequence
  Description of Artificial Sequence: Synthetic oligonucleotide
cacgcguuggguggucccc

SEQ ID NO: 274841 - RNA, 19 nt, Artificial Sequence
  Description of Artificial Sequence: Synthetic oligonucleotide
gauggccccuucccgggaa

SEQ ID NO: 274842 - RNA, 19 nt, Artificial Sequence
  Description of Artificial Sequence: Synthetic oligonucleotide
gugucgaaacucggcugcc

SEQ ID NO: 274843 - RNA, 19 nt, Artificial Sequence
  Description of Artificial Sequence: Synthetic oligonucleotide
uaauaggguccgguucaua

SEQ ID NO: 274844 - RNA, 19 nt, Artificial Sequence
  Description of Artificial Sequence: Synthetic oligonucleotide
guucgccuccauucuggga

SEQ ID NO: 274845 - RNA, 19 nt, Artificial Sequence
  Description of Artificial Sequence: Synthetic oligonucleotide
ggguccgguucauauguga

SEQ ID NO: 274846 - RNA, 19 nt, Artificial Sequence
  Description of Artificial Sequence: Synthetic oligonucleotide
gugagcucgauggcauuca

SEQ ID NO: 274847 - RNA, 19 nt, Artificial Sequence
  Description of Artificial Sequence: Synthetic oligonucleotide
gacuuccguugguggacuc

SEQ ID NO: 274848 - RNA, 19 nt, Artificial Sequence
  Description of Artificial Sequence: Synthetic oligonucleotide
cucgcauucaagucccgau

SEQ ID NO: 274849 - RNA, 19 nt, Artificial Sequence
  Description of Artificial Sequence: Synthetic oligonucleotide
cccacgugaaugugauggc

SEQ ID NO: 274850 - RNA, 19 nt, Artificial Sequence
  Description of Artificial Sequence: Synthetic oligonucleotide
gaggaugaguuggcauaca

SEQ ID NO: 274851 - RNA, 19 nt, Artificial Sequence
  Description of Artificial Sequence: Synthetic oligonucleotide
gcaguugggcacugacuac

SEQ ID NO: 274852 - RNA, 19 nt, Artificial Sequence
  Description of Artificial Sequence: Synthetic oligonucleotide
ggcauggucuuugucaaua

SEQ ID NO: 274853 - RNA, 19 nt, Artificial Sequence
  Description of Artificial Sequence: Synthetic oligonucleotide
gugauuauacugcgcucau

SEQ ID NO: 274854 - RNA, 19 nt, Artificial Sequence
  Description of Artificial Sequence: Synthetic oligonucleotide
cugccguuccaccacaaau

SEQ ID NO: 274855 - RNA, 19 nt, Artificial Sequence
  Description of Artificial Sequence: Synthetic oligonucleotide
guucaaccgcauggaaguc

SEQ ID NO: 274856 - RNA, 19 nt, Artificial Sequence
  Description of Artificial Sequence: Synthetic oligonucleotide
cgaaacucggcugccagac

SEQ ID NO: 274857 - RNA, 19 nt, Artificial Sequence
  Description of Artificial Sequence: Synthetic oligonucleotide
cgugauuauacugcgcuca

SEQ ID NO: 274858 - RNA, 19 nt, Artificial Sequence
  Description of Artificial Sequence: Synthetic oligonucleotide
ggugucgauccaaggccag

SEQ ID NO: 274859 - RNA, 19 nt, Artificial Sequence
  Description of Artificial Sequence: Synthetic oligonucleotide
gccuggaguaauacuuccc

SEQ ID NO: 274860 - RNA, 19 nt, Artificial Sequence
  Description of Artificial Sequence: Synthetic oligonucleotide
gcagagcacgcucucgcuc

SEQ ID NO: 274861 - RNA, 19 nt, Artificial Sequence
  Description of Artificial Sequence: Synthetic oligonucleotide
cagcgugcucccagucuug

SEQ ID NO: 274862 - RNA, 19 nt, Artificial Sequence
  Description of Artificial Sequence: Synthetic oligonucleotide
caacugggucucaaagcua

SEQ ID NO: 274863 - RNA, 19 nt, Artificial Sequence
  Description of Artificial Sequence: Synthetic oligonucleotide
agcgugcucccagucuugu

SEQ ID NO: 274864 - RNA, 19 nt, Artificial Sequence
  Description of Artificial Sequence: Synthetic oligonucleotide
agguacugucugauuucca

SEQ ID NO: 274865 - RNA, 19 nt, Artificial Sequence
  Description of Artificial Sequence: Synthetic oligonucleotide
agcgugcacacgguggguu

SEQ ID NO: 274866 - RNA, 19 nt, Artificial Sequence
  Description of Artificial Sequence: Synthetic oligonucleotide
gaccucucuuggugacuga

SEQ ID NO: 274867 - RNA, 19 nt, Artificial Sequence
  Description of Artificial Sequence: Synthetic oligonucleotide
uccacggaauaaggccauc

SEQ ID NO: 274868 - RNA, 19 nt, Artificial Sequence
  Description of Artificial Sequence: Synthetic oligonucleotide
cugcaacaauggugaacca

SEQ ID NO: 274869 - RNA, 19 nt, Artificial Sequence
  Description of Artificial Sequence: Synthetic oligonucleotide
ccguuccaccacaaaugag

SEQ ID NO: 274870 - RNA, 19 nt, Artificial Sequence
  Description of Artificial Sequence: Synthetic oligonucleotide
cucuuauuuugugaacgau

SEQ ID NO: 274871 - RNA, 19 nt, Artificial Sequence
  Description of Artificial Sequence: Synthetic oligonucleotide
cacccacgugaaugugaug

SEQ ID NO: 274872 - RNA, 19 nt, Artificial Sequence
  Description of Artificial Sequence: Synthetic oligonucleotide
guugaacuuccggaauccu

SEQ ID NO: 274873 - RNA, 19 nt, Artificial Sequence
  Description of Artificial Sequence: Synthetic oligonucleotide
cauuaggacccagaaguuu

SEQ ID NO: 274874 - RNA, 19 nt, Artificial Sequence
  Description of Artificial Sequence: Synthetic oligonucleotide
cucuuagggucaucaaguu

SEQ ID NO: 274875 - RNA, 19 nt, Artificial Sequence
  Description of Artificial Sequence: Synthetic oligonucleotide
gggaacucucacugaaccu

SEQ ID NO: 274876 - RNA, 19 nt, Artificial Sequence
  Description of Artificial Sequence: Synthetic oligonucleotide
ccgggacaucucaucaaac

SEQ ID NO: 274877 - RNA, 19 nt, Artificial Sequence
  Description of Artificial Sequence: Synthetic oligonucleotide
ggaucgcuccacccacgug

SEQ ID NO: 274878 - RNA, 19 nt, Artificial Sequence
  Description of Artificial Sequence: Synthetic oligonucleotide
gugucgauccaaggccaga

SEQ ID NO: 274879 - RNA, 19 nt, Artificial Sequence
  Description of Artificial Sequence: Synthetic oligonucleotide
cacugaaccuaagcaggaa

SEQ ID NO: 274880 - RNA, 19 nt, Artificial Sequence
  Description of Artificial Sequence: Synthetic oligonucleotide
guacgggauccuccuggaa

SEQ ID NO: 274881 - RNA, 19 nt, Artificial Sequence
  Description of Artificial Sequence: Synthetic oligonucleotide
cgguucauaugugaauuuc

SEQ ID NO: 274882 - RNA, 19 nt, Artificial Sequence
  Description of Artificial Sequence: Synthetic oligonucleotide
aucgcuccacccacgugaa

SEQ ID NO: 274883 - RNA, 19 nt, Artificial Sequence
  Description of Artificial Sequence: Synthetic oligonucleotide
uggccccuucccgggaacu

SEQ ID NO: 274884 - RNA, 19 nt, Artificial Sequence
  Description of Artificial Sequence: Synthetic oligonucleotide
cccacuauccgggacaucu

SEQ ID NO: 274885 - RNA, 19 nt, Artificial Sequence
  Description of Artificial Sequence: Synthetic oligonucleotide
cguguaggguucaaccgca

SEQ ID NO: 274886 - RNA, 19 nt, Artificial Sequence
  Description of Artificial Sequence: Synthetic oligonucleotide
gucaaggcacgcguugggu

SEQ ID NO: 274887 - RNA, 19 nt, Artificial Sequence
  Description of Artificial Sequence: Synthetic oligonucleotide
agggugcaacaaauguguu

SEQ ID NO: 274888 - RNA, 19 nt, Artificial Sequence
  Description of Artificial Sequence: Synthetic oligonucleotide
gcacgcguugggugguccc

SEQ ID NO: 274889 - RNA, 19 nt, Artificial Sequence
  Description of Artificial Sequence: Synthetic oligonucleotide
caacucagucuugauguau

SEQ ID NO: 274890 - RNA, 19 nt, Artificial Sequence
  Description of Artificial Sequence: Synthetic oligonucleotide
cacgacaggcagggaggug

SEQ ID NO: 274891 - RNA, 19 nt, Artificial Sequence
  Description of Artificial Sequence: Synthetic oligonucleotide
gguggucucaaggucaauu

SEQ ID NO: 274892 - RNA, 19 nt, Artificial Sequence
  Description of Artificial Sequence: Synthetic oligonucleotide
cccuagaaauacagcaugu

SEQ ID NO: 274893 - RNA, 19 nt, Artificial Sequence
  Description of Artificial Sequence: Synthetic oligonucleotide
guaaaucuucuagcgucuu

SEQ ID NO: 274894 - RNA, 19 nt, Artificial Sequence
  Description of Artificial Sequence: Synthetic oligonucleotide
ucgcuccacccacgugaau

SEQ ID NO: 274895 - RNA, 19 nt, Artificial Sequence
  Description of Artificial Sequence: Synthetic oligonucleotide
cggugacaauaagaggacc

SEQ ID NO: 274896 - RNA, 19 nt, Artificial Sequence
  Description of Artificial Sequence: Synthetic oligonucleotide
aggcacgcguugggugguc

SEQ ID NO: 274897 - RNA, 19 nt, Artificial Sequence
  Description of Artificial Sequence: Synthetic oligonucleotide
ccacggaauaaggccauca

SEQ ID NO: 274898 - RNA, 19 nt, Artificial Sequence
  Description of Artificial Sequence: Synthetic oligonucleotide
acgguggguucaggaagaa

SEQ ID NO: 274899 - RNA, 19 nt, Artificial Sequence
  Description of Artificial Sequence: Synthetic oligonucleotide
cccgggaacucucacugaa

SEQ ID NO: 274900 - RNA, 19 nt, Artificial Sequence
  Description of Artificial Sequence: Synthetic oligonucleotide
ccguugguggacucuucca

SEQ ID NO: 274901 - RNA, 19 nt, Artificial Sequence
  Description of Artificial Sequence: Synthetic oligonucleotide
guaauaggguccgguucau

SEQ ID NO: 274902 - RNA, 19 nt, Artificial Sequence
  Description of Artificial Sequence: Synthetic oligonucleotide
cuaagagaguggaguucuu

SEQ ID NO: 274903 - RNA, 19 nt, Artificial Sequence
  Description of Artificial Sequence: Synthetic oligonucleotide
cgggacaucucaucaaacu

SEQ ID NO: 274904 - RNA, 19 nt, Artificial Sequence
  Description of Artificial Sequence: Synthetic oligonucleotide
ccucggagagcugggacca

SEQ ID NO: 274905 - RNA, 19 nt, Artificial Sequence
  Description of Artificial Sequence: Synthetic oligonucleotide
ggcacgcguuggguggucc

SEQ ID NO: 274906 - RNA, 19 nt, Artificial Sequence
  Description of Artificial Sequence: Synthetic oligonucleotide
gacccucauuaguucuguu

SEQ ID NO: 274907 - RNA, 19 nt, Artificial Sequence
  Description of Artificial Sequence: Synthetic oligonucleotide
gcagcgugcucccagucuu

SEQ ID NO: 274908 - RNA, 19 nt, Artificial Sequence
  Description of Artificial Sequence: Synthetic oligonucleotide
gggaucgcuccacccacgu

SEQ ID NO: 274909 - RNA, 19 nt, Artificial Sequence
  Description of Artificial Sequence: Synthetic oligonucleotide
gacggaccugcugcagacu

SEQ ID NO: 274910 - RNA, 19 nt, Artificial Sequence
  Description of Artificial Sequence: Synthetic oligonucleotide
gugcaacaaauguguuguu

SEQ ID NO: 274911 - RNA, 19 nt, Artificial Sequence
  Description of Artificial Sequence: Synthetic oligonucleotide
guccacggaauaaggccau

SEQ ID NO: 274912 - RNA, 19 nt, Artificial Sequence
  Description of Artificial Sequence: Synthetic oligonucleotide
ccacccacgugaaugugau

SEQ ID NO: 274913 - RNA, 19 nt, Artificial Sequence
  Description of Artificial Sequence: Synthetic oligonucleotide
gcgagguuuugcacuuaaa

SEQ ID NO: 274914 - RNA, 19 nt, Artificial Sequence
  Description of Artificial Sequence: Synthetic oligonucleotide
cgauaccuuggguggaucu

SEQ ID NO: 274915 - RNA, 19 nt, Artificial Sequence
  Description of Artificial Sequence: Synthetic oligonucleotide
cgcucaucauucuaucaau

SEQ ID NO: 274916 - RNA, 19 nt, Artificial Sequence
  Description of Artificial Sequence: Synthetic oligonucleotide
ccgauaccuuggguggauc

SEQ ID NO: 274917 - RNA, 19 nt, Artificial Sequence
  Description of Artificial Sequence: Synthetic oligonucleotide
ggccccuucccgggaacuc

SEQ ID NO: 274918 - RNA, 19 nt, Artificial Sequence
  Description of Artificial Sequence: Synthetic oligonucleotide
cccaugauacacccaucau

SEQ ID NO: 274919 - RNA, 19 nt, Artificial Sequence
  Description of Artificial Sequence: Synthetic oligonucleotide
ggcauacagggcugccguu

SEQ ID NO: 274920 - RNA, 19 nt, Artificial Sequence
  Description of Artificial Sequence: Synthetic oligonucleotide
cugcgagguuuugcacuua

SEQ ID NO: 274921 - RNA, 19 nt, Artificial Sequence
  Description of Artificial Sequence: Synthetic oligonucleotide
gcuggucaaggcacgcguu

SEQ ID NO: 274922 - RNA, 19 nt, Artificial Sequence
  Description of Artificial Sequence: Synthetic oligonucleotide
cagcgugcacacggugggu

SEQ ID NO: 274923 - RNA, 19 nt, Artificial Sequence
  Description of Artificial Sequence: Synthetic oligonucleotide
cgcuuccacuccacuaacu

SEQ ID NO: 274924 - RNA, 19 nt, Artificial Sequence
  Description of Artificial Sequence: Synthetic oligonucleotide
cccgauaccuuggguggau

SEQ ID NO: 274925 - RNA, 19 nt, Artificial Sequence
  Description of Artificial Sequence: Synthetic oligonucleotide
ugggaaauaacuuuaaucc

SEQ ID NO: 274926 - RNA, 19 nt, Artificial Sequence
  Description of Artificial Sequence: Synthetic oligonucleotide
uucacuaaaaguaaaauau

SEQ ID NO: 274927 - RNA, 19 nt, Artificial Sequence
  Description of Artificial Sequence: Synthetic oligonucleotide
aaaucggacacucagaccu

SEQ ID NO: 274928 - RNA, 19 nt, Artificial Sequence
  Description of Artificial Sequence: Synthetic oligonucleotide
aaaucucuacuccagugcc

SEQ ID NO: 274929 - RNA, 19 nt, Artificial Sequence
  Description of Artificial Sequence: Synthetic oligonucleotide
ucuauuguaaagaaacacc

SEQ ID NO: 274930 - RNA, 19 nt, Artificial Sequence
  Description of Artificial Sequence: Synthetic oligonucleotide
aaagucguagaauucguuc

SEQ ID NO: 274931 - RNA, 19 nt, Artificial Sequence
  Description of Artificial Sequence: Synthetic oligonucleotide
aauaacuaagacuucucug

SEQ ID NO: 274932 - RNA, 19 nt, Artificial Sequence
  Description of Artificial Sequence: Synthetic oligonucleotide
uggucuauuguaaagaaac

SEQ ID NO: 274933 - RNA, 19 nt, Artificial Sequence
  Description of Artificial Sequence: Synthetic oligonucleotide
gaaggauagaaacugcccg

SEQ ID NO: 274934 - RNA, 19 nt, Artificial Sequence
  Description of Artificial Sequence: Synthetic oligonucleotide
aaacgcuucguaaacaucg

SEQ ID NO: 274935 - RNA, 19 nt, Artificial Sequence
  Description of Artificial Sequence: Synthetic oligonucleotide
aacguggaacaccaugucc

SEQ ID NO: 274936 - RNA, 19 nt, Artificial Sequence
  Description of Artificial Sequence: Synthetic oligonucleotide
aaauaacuaagacuucucu

SEQ ID NO: 274937 - RNA, 19 nt, Artificial Sequence
  Description of Artificial Sequence: Synthetic oligonucleotide
uucaucucgucuacgaggg

SEQ ID NO: 274938 - RNA, 19 nt, Artificial Sequence
  Description of Artificial Sequence: Synthetic oligonucleotide
gaaaugguggugucaaagg

SEQ ID NO: 274939 - RNA, 19 nt, Artificial Sequence
  Description of Artificial Sequence: Synthetic oligonucleotide
cuugggauugguaaucugg

SEQ ID NO: 274940 - RNA, 19 nt, Artificial Sequence
  Description of Artificial Sequence: Synthetic oligonucleotide
cauaaagucguagaauucg

SEQ ID NO: 274941 - RNA, 19 nt, Artificial Sequence
  Description of Artificial Sequence: Synthetic oligonucleotide
aaggcaagcguuaggaggc

SEQ ID NO: 274942 - RNA, 19 nt, Artificial Sequence
  Description of Artificial Sequence: Synthetic oligonucleotide
cacucgagaguuuaggucg

SEQ ID NO: 274943 - RNA, 19 nt, Artificial Sequence
  Description of Artificial Sequence: Synthetic oligonucleotide
uucauaaagucguagaauu

SEQ ID NO: 274944 - RNA, 19 nt, Artificial Sequence
  Description of Artificial Sequence: Synthetic oligonucleotide
agaaggaccagaucugggg

SEQ ID NO: 274945 - RNA, 19 nt, Artificial Sequence
  Description of Artificial Sequence: Synthetic oligonucleotide
gaaaucucuacuccagugc

SEQ ID NO: 274946 - RNA, 19 nt, Artificial Sequence
  Description of Artificial Sequence: Synthetic oligonucleotide
ugcacuugcaucauccgcc

SEQ ID NO: 274947 - RNA, 19 nt, Artificial Sequence
  Description of Artificial Sequence: Synthetic oligonucleotide
aacacccugacaguggacg

SEQ ID NO: 274948 - RNA, 19 nt, Artificial Sequence
  Description of Artificial Sequence: Synthetic oligonucleotide
aaacacucgagaguuuagg

SEQ ID NO: 274949 - RNA, 19 nt, Artificial Sequence
  Description of Artificial Sequence: Synthetic oligonucleotide
uauuguaaagaaacacccu

SEQ ID NO: 274950 - RNA, 19 nt, Artificial Sequence
  Description of Artificial Sequence: Synthetic oligonucleotide
uacuccagugcccauagca

SEQ ID NO: 274951 - RNA, 19 nt, Artificial Sequence
  Description of Artificial Sequence: Synthetic oligonucleotide
caaaauacuggcucaguug

SEQ ID NO: 274952 - RNA, 19 nt, Artificial Sequence
  Description of Artificial Sequence: Synthetic oligonucleotide
uuuuaacugugguuguugc

SEQ ID NO: 274953 - RNA, 19 nt, Artificial Sequence
  Description of Artificial Sequence: Synthetic oligonucleotide
uucucugauacaauuccca

SEQ ID NO: 274954 - RNA, 19 nt, Artificial Sequence
  Description of Artificial Sequence: Synthetic oligonucleotide
uggaacaccauguccgagg

SEQ ID NO: 274955 - RNA, 19 nt, Artificial Sequence
  Description of Artificial Sequence: Synthetic oligonucleotide
aaaacacccugacagugga

SEQ ID NO: 274956 - RNA, 19 nt, Artificial Sequence
  Description of Artificial Sequence: Synthetic oligonucleotide
uaggucgugggaaauaacu

SEQ ID NO: 274957 - RNA, 19 nt, Artificial Sequence
  Description of Artificial Sequence: Synthetic oligonucleotide
aaggauagaaacugcccga

SEQ ID NO: 274958 - RNA, 19 nt, Artificial Sequence
  Description of Artificial Sequence: Synthetic oligonucleotide
guaaaagccgugguaaagg

SEQ ID NO: 274959 - RNA, 19 nt, Artificial Sequence
  Description of Artificial Sequence: Synthetic oligonucleotide
aggguuaucgcgcucacug

SEQ ID NO: 274960 - RNA, 19 nt, Artificial Sequence
  Description of Artificial Sequence: Synthetic oligonucleotide
uuaacugugguuguugcac

SEQ ID NO: 274961 - RNA, 19 nt, Artificial Sequence
  Description of Artificial Sequence: Synthetic oligonucleotide
aacacucgagaguuuaggu

SEQ ID NO: 274962 - RNA, 19 nt, Artificial Sequence
  Description of Artificial Sequence: Synthetic oligonucleotide
aaacaucguccuuuguuug

SEQ ID NO: 274963 - RNA, 19 nt, Artificial Sequence
  Description of Artificial Sequence: Synthetic oligonucleotide
ucguagaauucguucaaag

SEQ ID NO: 274964 - RNA, 19 nt, Artificial Sequence
  Description of Artificial Sequence: Synthetic oligonucleotide
guagaauucguucaaaggu

SEQ ID NO: 274965 - RNA, 19 nt, Artificial Sequence
  Description of Artificial Sequence: Synthetic oligonucleotide
uuuguacggagacuggaac

SEQ ID NO: 274966 - RNA, 19 nt, Artificial Sequence
  Description of Artificial Sequence: Synthetic oligonucleotide
aucgucaugaccucgcuga

SEQ ID NO: 274967 - RNA, 19 nt, Artificial Sequence
  Description of Artificial Sequence: Synthetic oligonucleotide
acacucgagaguuuagguc

SEQ ID NO: 274968 - RNA, 19 nt, Artificial Sequence
  Description of Artificial Sequence: Synthetic oligonucleotide
uaaacaucguccuuuguuu

SEQ ID NO: 274969 - RNA, 19 nt, Artificial Sequence
  Description of Artificial Sequence: Synthetic oligonucleotide
uucucauuuuaacuguggu

SEQ ID NO: 274970 - RNA, 19 nt, Artificial Sequence
  Description of Artificial Sequence: Synthetic oligonucleotide
ucguccuuuguuuguacgg

SEQ ID NO: 274971 - RNA, 19 nt, Artificial Sequence
  Description of Artificial Sequence: Synthetic oligonucleotide
ucuacuccagugcccauag

SEQ ID NO: 274972 - RNA, 19 nt, Artificial Sequence
  Description of Artificial Sequence: Synthetic oligonucleotide
agcguuaggaggcuccugg

SEQ ID NO: 274973 - RNA, 19 nt, Artificial Sequence
  Description of Artificial Sequence: Synthetic oligonucleotide
uucauaaacuucccacucu

SEQ ID NO: 274974 - RNA, 19 nt, Artificial Sequence
  Description of Artificial Sequence: Synthetic oligonucleotide
ucuuaaggauggagggugg

SEQ ID NO: 274975 - RNA, 19 nt, Artificial Sequence
  Description of Artificial Sequence: Synthetic oligonucleotide
cauagcacgagucaaacaa

SEQ ID NO: 274976 - RNA, 19 nt, Artificial Sequence
  Description of Artificial Sequence: Synthetic oligonucleotide
uguacggagacuggaacag

SEQ ID NO: 274977 - RNA, 19 nt, Artificial Sequence
  Description of Artificial Sequence: Synthetic oligonucleotide
uagaauucguucaaagguu

SEQ ID NO: 274978 - RNA, 19 nt, Artificial Sequence
  Description of Artificial Sequence: Synthetic oligonucleotide
cauaucagcaaaucggaca

SEQ ID NO: 274979 - RNA, 19 nt, Artificial Sequence
  Description of Artificial Sequence: Synthetic oligonucleotide
aagaaacacccugugcagg

SEQ ID NO: 274980 - RNA, 19 nt, Artificial Sequence
  Description of Artificial Sequence: Synthetic oligonucleotide
uuguaauccauuucacuaa

SEQ ID NO: 274981 - RNA, 19 nt, Artificial Sequence
  Description of Artificial Sequence: Synthetic oligonucleotide
cacgagucaaacaaauaac

SEQ ID NO: 274982 - RNA, 19 nt, Artificial Sequence
  Description of Artificial Sequence: Synthetic oligonucleotide
auauucuacuucuagcuuu

SEQ ID NO: 274983 - RNA, 19 nt, Artificial Sequence
  Description of Artificial Sequence: Synthetic oligonucleotide
uguaauccauuucacuaaa

SEQ ID NO: 274984 - RNA, 19 nt, Artificial Sequence
  Description of Artificial Sequence: Synthetic oligonucleotide
aagggaacggguguuagca

SEQ ID NO: 274985 - RNA, 19 nt, Artificial Sequence
  Description of Artificial Sequence: Synthetic oligonucleotide
gaaaacacccugacagugg

SEQ ID NO: 274986 - RNA, 19 nt, Artificial Sequence
  Description of Artificial Sequence: Synthetic oligonucleotide
ucaauucucuuuuccgggc

SEQ ID NO: 274987 - RNA, 19 nt, Artificial Sequence
  Description of Artificial Sequence: Synthetic oligonucleotide
gaaacugcccgaguuggcg

SEQ ID NO: 274988 - RNA, 19 nt, Artificial Sequence
  Description of Artificial Sequence: Synthetic oligonucleotide
gaguuggcggcccauacgc

SEQ ID NO: 274989 - RNA, 19 nt, Artificial Sequence
  Description of Artificial Sequence: Synthetic oligonucleotide
ucauaaagucguagaauuc

SEQ ID NO: 274990 - RNA, 19 nt, Artificial Sequence
  Description of Artificial Sequence: Synthetic oligonucleotide
caaaacccacuuuacggcc

SEQ ID NO: 274991 - RNA, 19 nt, Artificial Sequence
  Description of Artificial Sequence: Synthetic oligonucleotide
aaucucuacuccagugccc

SEQ ID NO: 274992 - RNA, 19 nt, Artificial Sequence
  Description of Artificial Sequence: Synthetic oligonucleotide
ucugugggguucauaaacu

SEQ ID NO: 274993 - RNA, 19 nt, Artificial Sequence
  Description of Artificial Sequence: Synthetic oligonucleotide
acuggguuaaacuccauuu

SEQ ID NO: 274994 - RNA, 19 nt, Artificial Sequence
  Description of Artificial Sequence: Synthetic oligonucleotide
uucaacaugcugagcauuc

SEQ ID NO: 274995 - RNA, 19 nt, Artificial Sequence
  Description of Artificial Sequence: Synthetic oligonucleotide
uuccuaaguuuaaccagag

SEQ ID NO: 274996 - RNA, 19 nt, Artificial Sequence
  Description of Artificial Sequence: Synthetic oligonucleotide
acuuuacggccauacaucu

SEQ ID NO: 274997 - RNA, 19 nt, Artificial Sequence
  Description of Artificial Sequence: Synthetic oligonucleotide
ugauuuacuucuucauuaa

SEQ ID NO: 274998 - RNA, 19 nt, Artificial Sequence
  Description of Artificial Sequence: Synthetic oligonucleotide
uauucuacuucuagcuuuc

SEQ ID NO: 274999 - RNA, 19 nt, Artificial Sequence
  Description of Artificial Sequence: Synthetic oligonucleotide
gucuauuguaaagaaacac

SEQ ID NO: 275000 - RNA, 19 nt, Artificial Sequence
  Description of Artificial Sequence: Synthetic oligonucleotide
acguggaacaccauguccg

SEQ ID NO: 275001 - RNA, 19 nt, Artificial Sequence
  Description of Artificial Sequence: Synthetic oligonucleotide
aacuccauuucauccaauu

SEQ ID NO: 275002 - RNA, 19 nt, Artificial Sequence
  Description of Artificial Sequence: Synthetic oligonucleotide
caaauaacuaagacuucuc

SEQ ID NO: 275003 - RNA, 19 nt, Artificial Sequence
  Description of Artificial Sequence: Synthetic oligonucleotide
ucgagcuuggucugugggg

SEQ ID NO: 275004 - RNA, 19 nt, Artificial Sequence
  Description of Artificial Sequence: Synthetic oligonucleotide
ugggauugguaaucugggg

SEQ ID NO: 275005 - RNA, 19 nt, Artificial Sequence
  Description of Artificial Sequence: Synthetic oligonucleotide
uuguacggagacuggaaca

SEQ ID NO: 275006 - RNA, 19 nt, Artificial Sequence
  Description of Artificial Sequence: Synthetic oligonucleotide
uagccaucgucuucgcugg

SEQ ID NO: 275007 - RNA, 19 nt, Artificial Sequence
  Description of Artificial Sequence: Synthetic oligonucleotide
cugaccugccauucgaagc

SEQ ID NO: 275008 - RNA, 19 nt, Artificial Sequence
  Description of Artificial Sequence: Synthetic oligonucleotide
gagacuggaacagaaggac

SEQ ID NO: 275009 - RNA, 19 nt, Artificial Sequence
  Description of Artificial Sequence: Synthetic oligonucleotide
ugacauuguaauccauuuc

SEQ ID NO: 275010 - RNA, 19 nt, Artificial Sequence
  Description of Artificial Sequence: Synthetic oligonucleotide
cagcaaaucggacacucag

SEQ ID NO: 275011 - RNA, 19 nt, Artificial Sequence
  Description of Artificial Sequence: Synthetic oligonucleotide
cacuuuacggccauacauc

SEQ ID NO: 275012 - RNA, 19 nt, Artificial Sequence
  Description of Artificial Sequence: Synthetic oligonucleotide
ucccauguugacaauuuau

SEQ ID NO: 275013 - RNA, 19 nt, Artificial Sequence
  Description of Artificial Sequence: Synthetic oligonucleotide
guucauaaacuucccacuc

SEQ ID NO: 275014 - RNA, 19 nt, Artificial Sequence
  Description of Artificial Sequence: Synthetic oligonucleotide
ggagcggaaggauagaaac

SEQ ID NO: 275015 - RNA, 19 nt, Artificial Sequence
  Description of Artificial Sequence: Synthetic oligonucleotide
guuggaaggagcgugcggc

SEQ ID NO: 275016 - RNA, 19 nt, Artificial Sequence
  Description of Artificial Sequence: Synthetic oligonucleotide
uacgcagagguuuucuuaa

SEQ ID NO: 275017 - RNA, 19 nt, Artificial Sequence
  Description of Artificial Sequence: Synthetic oligonucleotide
uuuaggucgugggaaauaa

SEQ ID NO: 275018 - RNA, 19 nt, Artificial Sequence
  Description of Artificial Sequence: Synthetic oligonucleotide
acgagucaaacaaauaacu

SEQ ID NO: 275019 - RNA, 19 nt, Artificial Sequence
  Description of Artificial Sequence: Synthetic oligonucleotide
gguacuggacacgucaucg

SEQ ID NO: 275020 - RNA, 19 nt, Artificial Sequence
  Description of Artificial Sequence: Synthetic oligonucleotide
caaaaccgcagguucggcc

SEQ ID NO: 275021 - RNA, 19 nt, Artificial Sequence
  Description of Artificial Sequence: Synthetic oligonucleotide
agauguuggaaggagcgug

SEQ ID NO: 275022 - RNA, 19 nt, Artificial Sequence
  Description of Artificial Sequence: Synthetic oligonucleotide
gcugaaugagacugggugg

SEQ ID NO: 275023 - RNA, 19 nt, Artificial Sequence
  Description of Artificial Sequence: Synthetic oligonucleotide
caucauccgccuucggucg

SEQ ID NO: 275024 - RNA, 19 nt, Artificial Sequence
  Description of Artificial Sequence: Synthetic oligonucleotide
uucguaaacaucguccuuu

SEQ ID NO: 275025 - RNA, 19 nt, Artificial Sequence
  Description of Artificial Sequence: Synthetic oligonucleotide
uacggagacuggaacagaa

SEQ ID NO: 275026 - RNA, 19 nt, Artificial Sequence
  Description of Artificial Sequence: Synthetic oligonucleotide
ucguaaacaucguccuuug

SEQ ID NO: 275027 - RNA, 19 nt, Artificial Sequence
  Description of Artificial Sequence: Synthetic oligonucleotide
ucaaacacucgagaguuua

SEQ ID NO: 275028 - RNA, 19 nt, Artificial Sequence
  Description of Artificial Sequence: Synthetic oligonucleotide
ugcgaaguggcagcagacg

SEQ ID NO: 275029 - RNA, 19 nt, Artificial Sequence
  Description of Artificial Sequence: Synthetic oligonucleotide
ucggauuccuggcauucca

SEQ ID NO: 275030 - RNA, 19 nt, Artificial Sequence
  Description of Artificial Sequence: Synthetic oligonucleotide
uccagugcccauagcacga

SEQ ID NO: 275031 - RNA, 19 nt, Artificial Sequence
  Description of Artificial Sequence: Synthetic oligonucleotide
ggguucauaaacuucccac

SEQ ID NO: 275032 - RNA, 19 nt, Artificial Sequence
  Description of Artificial Sequence: Synthetic oligonucleotide
caaaucggacacucagacc

SEQ ID NO: 275033 - RNA, 19 nt, Artificial Sequence
  Description of Artificial Sequence: Synthetic oligonucleotide
agaguuuaggucgugggaa

SEQ ID NO: 275034 - RNA, 19 nt, Artificial Sequence
  Description of Artificial Sequence: Synthetic oligonucleotide
ucccgacgcacucucagug

SEQ ID NO: 275035 - RNA, 19 nt, Artificial Sequence
  Description of Artificial Sequence: Synthetic oligonucleotide
uggacguugcucuuccuaa

SEQ ID NO: 275036 - RNA, 19 nt, Artificial Sequence
  Description of Artificial Sequence: Synthetic oligonucleotide
uggagguaaaagccguggu

SEQ ID NO: 275037 - RNA, 19 nt, Artificial Sequence
  Description of Artificial Sequence: Synthetic oligonucleotide
ucgagaguuuaggucgugg

SEQ ID NO: 275038 - RNA, 19 nt, Artificial Sequence
  Description of Artificial Sequence: Synthetic oligonucleotide
uaaagucguagaauucguu

SEQ ID NO: 275039 - RNA, 19 nt, Artificial Sequence
  Description of Artificial Sequence: Synthetic oligonucleotide
uuucgagcuuggucugugg

SEQ ID NO: 275040 - RNA, 19 nt, Artificial Sequence
  Description of Artificial Sequence: Synthetic oligonucleotide
cacgucaucgucaugaccu

SEQ ID NO: 275041 - RNA, 19 nt, Artificial Sequence
  Description of Artificial Sequence: Synthetic oligonucleotide
agacuucucugauacaauu

SEQ ID NO: 275042 - RNA, 19 nt, Artificial Sequence
  Description of Artificial Sequence: Synthetic oligonucleotide
cguagaauucguucaaagg

SEQ ID NO: 275043 - RNA, 19 nt, Artificial Sequence
  Description of Artificial Sequence: Synthetic oligonucleotide
uuauucucccgacgcacuc

SEQ ID NO: 275044 - RNA, 19 nt, Artificial Sequence
  Description of Artificial Sequence: Synthetic oligonucleotide
caaacacucgagaguuuag

SEQ ID NO: 275045 - RNA, 19 nt, Artificial Sequence
  Description of Artificial Sequence: Synthetic oligonucleotide
cuggagguaaaagccgugg

SEQ ID NO: 275046 - RNA, 19 nt, Artificial Sequence
  Description of Artificial Sequence: Synthetic oligonucleotide
agggugggcgcaucaugcc

SEQ ID NO: 275047 - RNA, 19 nt, Artificial Sequence
  Description of Artificial Sequence: Synthetic oligonucleotide
auucgaagcaucauggcuu

SEQ ID NO: 275048 - RNA, 19 nt, Artificial Sequence
  Description of Artificial Sequence: Synthetic oligonucleotide
uuucgaugguggcugcacu

SEQ ID NO: 275049 - RNA, 19 nt, Artificial Sequence
  Description of Artificial Sequence: Synthetic oligonucleotide
gaaugagacuggguggggc

SEQ ID NO: 275050 - RNA, 19 nt, Artificial Sequence
  Description of Artificial Sequence: Synthetic oligonucleotide
aggauagaaacugcccgag

SEQ ID NO: 275051 - RNA, 19 nt, Artificial Sequence
  Description of Artificial Sequence: Synthetic oligonucleotide
acccacuuuacggccauac

SEQ ID NO: 275052 - RNA, 19 nt, Artificial Sequence
  Description of Artificial Sequence: Synthetic oligonucleotide
gggaaauaacuuuaaucca

SEQ ID NO: 275053 - RNA, 19 nt, Artificial Sequence
  Description of Artificial Sequence: Synthetic oligonucleotide
aacggguguuagcagcagu

SEQ ID NO: 275054 - RNA, 19 nt, Artificial Sequence
  Description of Artificial Sequence: Synthetic oligonucleotide
uugguaaucuggggcuugg

SEQ ID NO: 275055 - RNA, 19 nt, Artificial Sequence
  Description of Artificial Sequence: Synthetic oligonucleotide
gcaaacguggaacaccaug

SEQ ID NO: 275056 - RNA, 19 nt, Artificial Sequence
  Description of Artificial Sequence: Synthetic oligonucleotide
auaaagucguagaauucgu

SEQ ID NO: 275057 - RNA, 19 nt, Artificial Sequence
  Description of Artificial Sequence: Synthetic oligonucleotide
uucgcugguacuggacacg

SEQ ID NO: 275058 - RNA, 19 nt, Artificial Sequence
  Description of Artificial Sequence: Synthetic oligonucleotide
gaucuagagcaaaacccac

SEQ ID NO: 275059 - RNA, 19 nt, Artificial Sequence
  Description of Artificial Sequence: Synthetic oligonucleotide
uuaaggauggaggguggcu

SEQ ID NO: 275060 - RNA, 19 nt, Artificial Sequence
  Description of Artificial Sequence: Synthetic oligonucleotide
uuaucgcgcucacuguccu

SEQ ID NO: 275061 - RNA, 19 nt, Artificial Sequence
  Description of Artificial Sequence: Synthetic oligonucleotide
gcacgagucaaacaaauaa

SEQ ID NO: 275062 - RNA, 19 nt, Artificial Sequence
  Description of Artificial Sequence: Synthetic oligonucleotide
gguuaaacuccauuucauc

SEQ ID NO: 275063 - RNA, 19 nt, Artificial Sequence
  Description of Artificial Sequence: Synthetic oligonucleotide
uuaggucgugggaaauaac

SEQ ID NO: 275064 - RNA, 19 nt, Artificial Sequence
  Description of Artificial Sequence: Synthetic oligonucleotide
gacuucucugauacaauuc

SEQ ID NO: 275065 - RNA, 19 nt, Artificial Sequence
  Description of Artificial Sequence: Synthetic oligonucleotide
agggauuuccugaccugcc

SEQ ID NO: 275066 - RNA, 19 nt, Artificial Sequence
  Description of Artificial Sequence: Synthetic oligonucleotide
gagcgugcggcaugucugg

SEQ ID NO: 275067 - RNA, 19 nt, Artificial Sequence
  Description of Artificial Sequence: Synthetic oligonucleotide
acgcuucguaaacaucguc

SEQ ID NO: 275068 - RNA, 19 nt, Artificial Sequence
  Description of Artificial Sequence: Synthetic oligonucleotide
cucacggugcccaaacuca

SEQ ID NO: 275069 - RNA, 19 nt, Artificial Sequence
  Description of Artificial Sequence: Synthetic oligonucleotide
guccuggagguaaaagccg

SEQ ID NO: 275070 - RNA, 19 nt, Artificial Sequence
  Description of Artificial Sequence: Synthetic oligonucleotide
ucgugggaaauaacuuuaa

SEQ ID NO: 275071 - RNA, 19 nt, Artificial Sequence
  Description of Artificial Sequence: Synthetic oligonucleotide
caaacguggaacaccaugu

SEQ ID NO: 275072 - RNA, 19 nt, Artificial Sequence
  Description of Artificial Sequence: Synthetic oligonucleotide
ggaaggauagaaacugccc

SEQ ID NO: 275073 - RNA, 19 nt, Artificial Sequence
  Description of Artificial Sequence: Synthetic oligonucleotide
cuucgcugguacuggacac

SEQ ID NO: 275074 - RNA, 19 nt, Artificial Sequence
  Description of Artificial Sequence: Synthetic oligonucleotide
aucgucuucgcugguacug

SEQ ID NO: 275075 - RNA, 19 nt, Artificial Sequence
  Description of Artificial Sequence: Synthetic oligonucleotide
ggauaaucuguuuggaucu

SEQ ID NO: 275076 - RNA, 19 nt, Artificial Sequence
  Description of Artificial Sequence: Synthetic oligonucleotide
gucgcugaaugagacuggg

SEQ ID NO: 275077 - RNA, 19 nt, Artificial Sequence
  Description of Artificial Sequence: Synthetic oligonucleotide
aucauccgccuucggucgc

SEQ ID NO: 275078 - RNA, 19 nt, Artificial Sequence
  Description of Artificial Sequence: Synthetic oligonucleotide
ucaucucgucuacgagggg

SEQ ID NO: 275079 - RNA, 19 nt, Artificial Sequence
  Description of Artificial Sequence: Synthetic oligonucleotide
guuaucgcgcucacugucc

SEQ ID NO: 275080 - RNA, 19 nt, Artificial Sequence
  Description of Artificial Sequence: Synthetic oligonucleotide
cuuccguccuggucuauug

SEQ ID NO: 275081 - RNA, 19 nt, Artificial Sequence
  Description of Artificial Sequence: Synthetic oligonucleotide
acucaacaccccuggguug

SEQ ID NO: 275082 - RNA, 19 nt, Artificial Sequence
  Description of Artificial Sequence: Synthetic oligonucleotide
ucgucaugaccucgcugag

SEQ ID NO: 275083 - RNA, 19 nt, Artificial Sequence
  Description of Artificial Sequence: Synthetic oligonucleotide
cuuaaggauggaggguggc

SEQ ID NO: 275084 - RNA, 19 nt, Artificial Sequence
  Description of Artificial Sequence: Synthetic oligonucleotide
uucggcccaucauucguug

SEQ ID NO: 275085 - RNA, 19 nt, Artificial Sequence
  Description of Artificial Sequence: Synthetic oligonucleotide
uguccgaggagcggaagga

SEQ ID NO: 275086 - RNA, 19 nt, Artificial Sequence
  Description of Artificial Sequence: Synthetic oligonucleotide
agcaugagaggcugucaca

SEQ ID NO: 275087 - RNA, 19 nt, Artificial Sequence
  Description of Artificial Sequence: Synthetic oligonucleotide
gguggucucaggaauggag

SEQ ID NO: 275088 - RNA, 19 nt, Artificial Sequence
  Description of Artificial Sequence: Synthetic oligonucleotide
cuuuacggccauacaucug

SEQ ID NO: 275089 - RNA, 19 nt, Artificial Sequence
  Description of Artificial Sequence: Synthetic oligonucleotide
ugcucuuccuaaguuuaac

SEQ ID NO: 275090 - RNA, 19 nt, Artificial Sequence
  Description of Artificial Sequence: Synthetic oligonucleotide
cuguaucugggaaggagga

SEQ ID NO: 275091 - RNA, 19 nt, Artificial Sequence
  Description of Artificial Sequence: Synthetic oligonucleotide
aaacacccugacaguggac

SEQ ID NO: 275092 - RNA, 19 nt, Artificial Sequence
  Description of Artificial Sequence: Synthetic oligonucleotide
ccucugaccuucuuugggg

SEQ ID NO: 275093 - RNA, 19 nt, Artificial Sequence
  Description of Artificial Sequence: Synthetic oligonucleotide
aguugagcccucuucuguu

SEQ ID NO: 275094 - RNA, 19 nt, Artificial Sequence
  Description of Artificial Sequence: Synthetic oligonucleotide
cauuguaauccauuucacu

SEQ ID NO: 275095 - RNA, 19 nt, Artificial Sequence
  Description of Artificial Sequence: Synthetic oligonucleotide
uuacggccauacaucugca

SEQ ID NO: 275096 - RNA, 19 nt, Artificial Sequence
  Description of Artificial Sequence: Synthetic oligonucleotide
ggauguugaucuccguccc

SEQ ID NO: 275097 - RNA, 19 nt, Artificial Sequence
  Description of Artificial Sequence: Synthetic oligonucleotide
aagccugaggcagcaugag

SEQ ID NO: 275098 - RNA, 19 nt, Artificial Sequence
  Description of Artificial Sequence: Synthetic oligonucleotide
gaauucguucaaagguuuc

SEQ ID NO: 275099 - RNA, 19 nt, Artificial Sequence
  Description of Artificial Sequence: Synthetic oligonucleotide
gcaugagaggcugucacag

SEQ ID NO: 275100 - RNA, 19 nt, Artificial Sequence
  Description of Artificial Sequence: Synthetic oligonucleotide
cgcuucguaaacaucgucc

SEQ ID NO: 275101 - RNA, 19 nt, Artificial Sequence
  Description of Artificial Sequence: Synthetic oligonucleotide
agggaacggguguuagcag

SEQ ID NO: 275102 - RNA, 19 nt, Artificial Sequence
  Description of Artificial Sequence: Synthetic oligonucleotide
accucgcugagcaaguucu

SEQ ID NO: 275103 - RNA, 19 nt, Artificial Sequence
  Description of Artificial Sequence: Synthetic oligonucleotide
cagacgcgccgucagagug

SEQ ID NO: 275104 - RNA, 19 nt, Artificial Sequence
  Description of Artificial Sequence: Synthetic oligonucleotide
aacgcuucguaaacaucgu

SEQ ID NO: 275105 - RNA, 19 nt, Artificial Sequence
  Description of Artificial Sequence: Synthetic oligonucleotide
ggugggaagagcccaggug

SEQ ID NO: 275106 - RNA, 19 nt, Artificial Sequence
  Description of Artificial Sequence: Synthetic oligonucleotide
auugguaaucuggggcuug

SEQ ID NO: 275107 - RNA, 19 nt, Artificial Sequence
  Description of Artificial Sequence: Synthetic oligonucleotide
cggauaaucuguuuggauc

SEQ ID NO: 275108 - RNA, 19 nt, Artificial Sequence
  Description of Artificial Sequence: Synthetic oligonucleotide
ucuccgucccauguugaca

SEQ ID NO: 275109 - RNA, 19 nt, Artificial Sequence
  Description of Artificial Sequence: Synthetic oligonucleotide
agaauucguucaaagguuu

SEQ ID NO: 275110 - RNA, 19 nt, Artificial Sequence
  Description of Artificial Sequence: Synthetic oligonucleotide
aggccguaaggguggggcg

SEQ ID NO: 275111 - RNA, 19 nt, Artificial Sequence
  Description of Artificial Sequence: Synthetic oligonucleotide
gcaucaaaauacuggcuca

SEQ ID NO: 275112 - RNA, 19 nt, Artificial Sequence
  Description of Artificial Sequence: Synthetic oligonucleotide
agcagacgcgccgucagag

SEQ ID NO: 275113 - RNA, 19 nt, Artificial Sequence
  Description of Artificial Sequence: Synthetic oligonucleotide
ggaagaaaggggcugaaau

SEQ ID NO: 275114 - RNA, 19 nt, Artificial Sequence
  Description of Artificial Sequence: Synthetic oligonucleotide
ucaaaaccgcagguucggc

SEQ ID NO: 275115 - RNA, 19 nt, Artificial Sequence
  Description of Artificial Sequence: Synthetic oligonucleotide
acgcagagguuuucuuaag

SEQ ID NO: 275116 - RNA, 19 nt, Artificial Sequence
  Description of Artificial Sequence: Synthetic oligonucleotide
caagggugggcgcaucaug

SEQ ID NO: 275117 - RNA, 19 nt, Artificial Sequence
  Description of Artificial Sequence: Synthetic oligonucleotide
acggguguuagcagcagug

SEQ ID NO: 275118 - RNA, 19 nt, Artificial Sequence
  Description of Artificial Sequence: Synthetic oligonucleotide
gcgaaguggcagcagacgc

SEQ ID NO: 275119 - RNA, 19 nt, Artificial Sequence
  Description of Artificial Sequence: Synthetic oligonucleotide
uguuagcagcagugcuucc

SEQ ID NO: 275120 - RNA, 19 nt, Artificial Sequence
  Description of Artificial Sequence: Synthetic oligonucleotide
aaucggacacucagaccug

SEQ ID NO: 275121 - RNA, 19 nt, Artificial Sequence
  Description of Artificial Sequence: Synthetic oligonucleotide
uauucucccgacgcacucu

SEQ ID NO: 275122 - RNA, 19 nt, Artificial Sequence
  Description of Artificial Sequence: Synthetic oligonucleotide
ugucaucgugcuuguccug

SEQ ID NO: 275123 - RNA, 19 nt, Artificial Sequence
  Description of Artificial Sequence: Synthetic oligonucleotide
ucacggugcccaaacucau

SEQ ID NO: 275124 - RNA, 19 nt, Artificial Sequence
  Description of Artificial Sequence: Synthetic oligonucleotide
acaccauguccgaggagcg

SEQ ID NO: 275125 - RNA, 19 nt, Artificial Sequence
  Description of Artificial Sequence: Synthetic oligonucleotide
ucaggguuaucgcgcucac

SEQ ID NO: 275126 - RNA, 19 nt, Artificial Sequence
  Description of Artificial Sequence: Synthetic oligonucleotide
agcaaaucggacacucaga

SEQ ID NO: 275127 - RNA, 19 nt, Artificial Sequence
  Description of Artificial Sequence: Synthetic oligonucleotide
gacgcgccgucagaguggg

SEQ ID NO: 275128 - RNA, 19 nt, Artificial Sequence
  Description of Artificial Sequence: Synthetic oligonucleotide
cugcgaaguggcagcagac

SEQ ID NO: 275129 - RNA, 19 nt, Artificial Sequence
  Description of Artificial Sequence: Synthetic oligonucleotide
ggcauaucagcaaaucgga

SEQ ID NO: 275130 - RNA, 19 nt, Artificial Sequence
  Description of Artificial Sequence: Synthetic oligonucleotide
cucaggguagccaucgucu

SEQ ID NO: 275131 - RNA, 19 nt, Artificial Sequence
  Description of Artificial Sequence: Synthetic oligonucleotide
gguuaucgcgcucacuguc

SEQ ID NO: 275132 - RNA, 19 nt, Artificial Sequence
  Description of Artificial Sequence: Synthetic oligonucleotide
acacccugacaguggacgu

SEQ ID NO: 275133 - RNA, 19 nt, Artificial Sequence
  Description of Artificial Sequence: Synthetic oligonucleotide
ucgcugaaugagacugggu

SEQ ID NO: 275134 - RNA, 19 nt, Artificial Sequence
  Description of Artificial Sequence: Synthetic oligonucleotide
cuuucgagcuuggucugug

SEQ ID NO: 275135 - RNA, 19 nt, Artificial Sequence
  Description of Artificial Sequence: Synthetic oligonucleotide
ggauugguaaucuggggcu

SEQ ID NO: 275136 - RNA, 19 nt, Artificial Sequence
  Description of Artificial Sequence: Synthetic oligonucleotide
uccgccuucggucgcugaa

SEQ ID NO: 275137 - RNA, 19 nt, Artificial Sequence
  Description of Artificial Sequence: Synthetic oligonucleotide
ccgaggagcggaaggauag

SEQ ID NO: 275138 - RNA, 19 nt, Artificial Sequence
  Description of Artificial Sequence: Synthetic oligonucleotide
cguucaaagguuuccccgc

SEQ ID NO: 275139 - RNA, 19 nt, Artificial Sequence
  Description of Artificial Sequence: Synthetic oligonucleotide
acguugcucuuccuaaguu

SEQ ID NO: 275140 - RNA, 19 nt, Artificial Sequence
  Description of Artificial Sequence: Synthetic oligonucleotide
caucucuuucauaaacgcu

SEQ ID NO: 275141 - RNA, 19 nt, Artificial Sequence
  Description of Artificial Sequence: Synthetic oligonucleotide
guuuguacggagacuggaa

SEQ ID NO: 275142 - RNA, 19 nt, Artificial Sequence
  Description of Artificial Sequence: Synthetic oligonucleotide
ggaacaccauguccgagga

SEQ ID NO: 275143 - RNA, 19 nt, Artificial Sequence
  Description of Artificial Sequence: Synthetic oligonucleotide
ccccuuauucucccgacgc

SEQ ID NO: 275144 - RNA, 19 nt, Artificial Sequence
  Description of Artificial Sequence: Synthetic oligonucleotide
uccucacggugcccaaacu

SEQ ID NO: 275145 - RNA, 19 nt, Artificial Sequence
  Description of Artificial Sequence: Synthetic oligonucleotide
ucggucgcugaaugagacu

SEQ ID NO: 275146 - RNA, 19 nt, Artificial Sequence
  Description of Artificial Sequence: Synthetic oligonucleotide
gaccugacuucuucuccuc

SEQ ID NO: 275147 - RNA, 19 nt, Artificial Sequence
  Description of Artificial Sequence: Synthetic oligonucleotide
ggacguugcucuuccuaag

SEQ ID NO: 275148 - RNA, 19 nt, Artificial Sequence
  Description of Artificial Sequence: Synthetic oligonucleotide
accaagggugggcgcauca

SEQ ID NO: 275149 - RNA, 19 nt, Artificial Sequence
  Description of Artificial Sequence: Synthetic oligonucleotide
auagcacgagucaaacaaa

SEQ ID NO: 275150 - RNA, 19 nt, Artificial Sequence
  Description of Artificial Sequence: Synthetic oligonucleotide
gaacggguguuagcagcag

SEQ ID NO: 275151 - RNA, 19 nt, Artificial Sequence
  Description of Artificial Sequence: Synthetic oligonucleotide
gacguugcucuuccuaagu

SEQ ID NO: 275152 - RNA, 19 nt, Artificial Sequence
  Description of Artificial Sequence: Synthetic oligonucleotide
gucgugggaaauaacuuua

SEQ ID NO: 275153 - RNA, 19 nt, Artificial Sequence
  Description of Artificial Sequence: Synthetic oligonucleotide
ggucuauuguaaagaaaca

SEQ ID NO: 275154 - RNA, 19 nt, Artificial Sequence
  Description of Artificial Sequence: Synthetic oligonucleotide
ucgcugguacuggacacgu

SEQ ID NO: 275155 - RNA, 19 nt, Artificial Sequence
  Description of Artificial Sequence: Synthetic oligonucleotide
aagcguuaggaggcuccug

SEQ ID NO: 275156 - RNA, 19 nt, Artificial Sequence
  Description of Artificial Sequence: Synthetic oligonucleotide
agacgcgccgucagagugg

SEQ ID NO: 275157 - RNA, 19 nt, Artificial Sequence
  Description of Artificial Sequence: Synthetic oligonucleotide
acugcccgaguuggcggcc

SEQ ID NO: 275158 - RNA, 19 nt, Artificial Sequence
  Description of Artificial Sequence: Synthetic oligonucleotide
gaauguccuggaucaagau

SEQ ID NO: 275159 - RNA, 19 nt, Artificial Sequence
  Description of Artificial Sequence: Synthetic oligonucleotide
gggaaucccagcaaggcaa

SEQ ID NO: 275160 - RNA, 19 nt, Artificial Sequence
  Description of Artificial Sequence: Synthetic oligonucleotide
cucggauuccuggcauucc

SEQ ID NO: 275161 - RNA, 19 nt, Artificial Sequence
  Description of Artificial Sequence: Synthetic oligonucleotide
ucgcucucugcaucagauc

SEQ ID NO: 275162 - RNA, 19 nt, Artificial Sequence
  Description of Artificial Sequence: Synthetic oligonucleotide
gaggagcggaaggauagaa

SEQ ID NO: 275163 - RNA, 19 nt, Artificial Sequence
  Description of Artificial Sequence: Synthetic oligonucleotide
gaggccuguagguggccca

SEQ ID NO: 275164 - RNA, 19 nt, Artificial Sequence
  Description of Artificial Sequence: Synthetic oligonucleotide
gcuucguaaacaucguccu

SEQ ID NO: 275165 - RNA, 19 nt, Artificial Sequence
  Description of Artificial Sequence: Synthetic oligonucleotide
ggagcgugcggcaugucug

SEQ ID NO: 275166 - RNA, 19 nt, Artificial Sequence
  Description of Artificial Sequence: Synthetic oligonucleotide
gcgacugcuuuucugcuuc

SEQ ID NO: 275167 - RNA, 19 nt, Artificial Sequence
  Description of Artificial Sequence: Synthetic oligonucleotide
ggcacaaaccgugugaccu

SEQ ID NO: 275168 - RNA, 19 nt, Artificial Sequence
  Description of Artificial Sequence: Synthetic oligonucleotide
cuuauucucccgacgcacu

SEQ ID NO: 275169 - RNA, 19 nt, Artificial Sequence
  Description of Artificial Sequence: Synthetic oligonucleotide
guggaacaccauguccgag

SEQ ID NO: 275170 - RNA, 19 nt, Artificial Sequence
  Description of Artificial Sequence: Synthetic oligonucleotide
aggucgugggaaauaacuu

SEQ ID NO: 275171 - RNA, 19 nt, Artificial Sequence
  Description of Artificial Sequence: Synthetic oligonucleotide
ggugggcgcaucaugccag

SEQ ID NO: 275172 - RNA, 19 nt, Artificial Sequence
  Description of Artificial Sequence: Synthetic oligonucleotide
acgcacucucagugcagug

SEQ ID NO: 275173 - RNA, 19 nt, Artificial Sequence
  Description of Artificial Sequence: Synthetic oligonucleotide
guggacguugcucuuccua

SEQ ID NO: 275174 - RNA, 19 nt, Artificial Sequence
  Description of Artificial Sequence: Synthetic oligonucleotide
gcaagcguuaggaggcucc

SEQ ID NO: 275175 - RNA, 19 nt, Artificial Sequence
  Description of Artificial Sequence: Synthetic oligonucleotide
gcugcgaaguggcagcaga

SEQ ID NO: 275176 - RNA, 19 nt, Artificial Sequence
  Description of Artificial Sequence: Synthetic oligonucleotide
agcgugcggcaugucuggc

SEQ ID NO: 275177 - RNA, 19 nt, Artificial Sequence
  Description of Artificial Sequence: Synthetic oligonucleotide
cacggugcccaaacucauc

SEQ ID NO: 275178 - RNA, 19 nt, Artificial Sequence
  Description of Artificial Sequence: Synthetic oligonucleotide
guuuaggucgugggaaaua

SEQ ID NO: 275179 - RNA, 19 nt, Artificial Sequence
  Description of Artificial Sequence: Synthetic oligonucleotide
ggaaucccagcaaggcaag

SEQ ID NO: 275180 - RNA, 19 nt, Artificial Sequence
  Description of Artificial Sequence: Synthetic oligonucleotide
gggguucauaaacuuccca

SEQ ID NO: 275181 - RNA, 19 nt, Artificial Sequence
  Description of Artificial Sequence: Synthetic oligonucleotide
gacgaggaggagggauacc

SEQ ID NO: 275182 - RNA, 19 nt, Artificial Sequence
  Description of Artificial Sequence: Synthetic oligonucleotide
gggauuuccugaccugcca

SEQ ID NO: 275183 - RNA, 19 nt, Artificial Sequence
  Description of Artificial Sequence: Synthetic oligonucleotide
aaaggcccucggauuccug

SEQ ID NO: 275184 - RNA, 19 nt, Artificial Sequence
  Description of Artificial Sequence: Synthetic oligonucleotide
acucgagaguuuaggucgu

SEQ ID NO: 275185 - RNA, 19 nt, Artificial Sequence
  Description of Artificial Sequence: Synthetic oligonucleotide
gcgguccuggcaugggagg

SEQ ID NO: 275186 - RNA, 19 nt, Artificial Sequence
  Description of Artificial Sequence: Synthetic oligonucleotide
cuacuccagugcccauagc

SEQ ID NO: 275187 - RNA, 19 nt, Artificial Sequence
  Description of Artificial Sequence: Synthetic oligonucleotide
ggccguaaggguggggcgg

SEQ ID NO: 275188 - RNA, 19 nt, Artificial Sequence
  Description of Artificial Sequence: Synthetic oligonucleotide
gugcucucaacagaagccu

SEQ ID NO: 275189 - RNA, 19 nt, Artificial Sequence
  Description of Artificial Sequence: Synthetic oligonucleotide
aagccgugguaaaggcccu

SEQ ID NO: 275190 - RNA, 19 nt, Artificial Sequence
  Description of Artificial Sequence: Synthetic oligonucleotide
ucauccgccuucggucgcu
